United States Patent Application Publication US 2006/0003322 A1 - sequence listing, part 26

SEQ ID NO: 1104585 - RNA, 21 nt, Human
uuaaaccuaaauuagaagcuu

SEQ ID NO: 1104586 - RNA, 18 nt, Human
uuaguggagacgggguuu

SEQ ID NO: 1104587 - RNA, 22 nt, Human
uuaguggagacgggguuucacc

SEQ ID NO: 1104588 - RNA, 24 nt, Human
uuaguggagacgggguuucaccau

SEQ ID NO: 1104589 - RNA, 21 nt, Human
uucaagcgauucuccugccuc

SEQ ID NO: 1104590 - RNA, 23 nt, Human
uucaagcgauucuccugccucag

SEQ ID NO: 1104591 - RNA, 24 nt, Human
uucaagcgauucuccugccucagc

SEQ ID NO: 1104592 - RNA, 25 nt, Human
uugauggugguuguaguuuuguuuc

SEQ ID NO: 1104593 - RNA, 18 nt, Human
uugcuucaggaugcuagg

SEQ ID NO: 1104594 - RNA, 22 nt, Human
uuucaaguugggaagccauggg

SEQ ID NO: 1104595 - RNA, 21 nt, Human
uuucaccauguuggacaggcu

SEQ ID NO: 1104596 - RNA, 24 nt, Human
uuucacucugucacccgggcugga

SEQ ID NO: 1104597 - RNA, 19 nt, Human
uuucucaccucucccugga

SEQ ID NO: 1104598 - RNA, 19 nt, Human
uuugcccugcuucccagac

SEQ ID NO: 1104599 - RNA, 24 nt, Human
uuuuuaguggagacgggguuucac

SEQ ID NO: 1104600 - RNA, 20 nt, Human
uuuuuguguuuuuaguggag

SEQ ID NO: 1104601 - RNA, 18 nt, Human
cccagaaagaaaguaaca

SEQ ID NO: 1104602 - RNA, 18 nt, Human
ggacagauacauaaugcc

SEQ ID NO: 1104603 - RNA, 19 nt, Human
ggacagauacauaaugccu

SEQ ID NO: 1104604 - RNA, 20 nt, Human
ugcccagaaagaaaguaaca

SEQ ID NO: 1104605 - RNA, 21 nt, Human
ugcccagaaagaaaguaacag

SEQ ID NO: 1104606 - RNA, 20 nt, Human
uggacagauacauaaugccu

SEQ ID NO: 1104607 - RNA, 22 nt, Human
agcagcgaguaauuucagggca

SEQ ID NO: 1104608 - RNA, 18 nt, Human
augaaucuuguguucacc

SEQ ID NO: 1104609 - RNA, 24 nt, Human
auggugaugaaaauaaaaugaauc

SEQ ID NO: 1104610 - RNA, 19 nt, Human
caacaacaggauacguccc

SEQ ID NO: 1104611 - RNA, 22 nt, Human
ccucaccccguuuaguuccgga

SEQ ID NO: 1104612 - RNA, 24 nt, Human
cguuagagauaaccgaaugugacc

SEQ ID NO: 1104613 - RNA, 22 nt, Human
gaguaauuucagggcaagccca

SEQ ID NO: 1104614 - RNA, 25 nt, Human
uaaaaaccugaugaaaagugguuaa

SEQ ID NO: 1104615 - RNA, 20 nt, Human
uaauggguguuagcuccauc

SEQ ID NO: 1104616 - RNA, 23 nt, Human
ugacccagagaacucaacaacag

SEQ ID NO: 1104617 - RNA, 18 nt, Human
uuaguuccggaggcggcg

SEQ ID NO: 1104618 - RNA, 21 nt, Human
uuguguucaccguuguauucc

SEQ ID NO: 1104619 - RNA, 24 nt, Human
acugcaccagugaauccugagcag

SEQ ID NO: 1104620 - RNA, 20 nt, Human
aguucaguagguggaccugu

SEQ ID NO: 1104621 - RNA, 27 nt, Human
ccugagcagguucuagucgaccucggu

SEQ ID NO: 1104622 - RNA, 23 nt, Human
cucuggugcaguuaaagccuuau

SEQ ID NO: 1104623 - RNA, 23 nt, Human
uccgcagguacagagcucacaua

SEQ ID NO: 1104624 - RNA, 19 nt, Human
uuggguguaacuuucagac

SEQ ID NO: 1104625 - RNA, 26 nt, Human
uuuguacauaaauaguuguuuacaug

SEQ ID NO: 1104626 - RNA, 19 nt, Human
aaacaagccuaaguugaau

SEQ ID NO: 1104627 - RNA, 22 nt, Human
aaacacgcaugaaugauaccau

SEQ ID NO: 1104628 - RNA, 18 nt, Human
aaauaugaaggcuaaacc

SEQ ID NO: 1104629 - RNA, 18 nt, Human
aaaugcuagaaguuauau

SEQ ID NO: 1104630 - RNA, 19 nt, Human
aacaacagccacugacuug

SEQ ID NO: 1104631 - RNA, 18 nt, Human
aacacgguaaacagcauu

SEQ ID NO: 1104632 - RNA, 19 nt, Human
aacugaauauuccuaaccu

SEQ ID NO: 1104633 - RNA, 20 nt, Human
aagcagucgggggaggucaa

SEQ ID NO: 1104634 - RNA, 22 nt, Human
aagcuggacuuucaacaacaac

SEQ ID NO: 1104635 - RNA, 21 nt, Human
aaguuuauuuagaaaguucug

SEQ ID NO: 1104636 - RNA, 22 nt, Human
aauauaccucaaaaaagcugga

SEQ ID NO: 1104637 - RNA, 19 nt, Human
accauggcaugaaaaugcu

SEQ ID NO: 1104638 - RNA, 18 nt, Human
agaaaaucaaauacauca

SEQ ID NO: 1104639 - RNA, 22 nt, Human
agaaacacagaaaucuaaaagc

SEQ ID NO: 1104640 - RNA, 21 nt, Human
agaacaacagccacugacuug

SEQ ID NO: 1104641 - RNA, 21 nt, Human
agaauaauuuaaagccugaaa

SEQ ID NO: 1104642 - RNA, 21 nt, Human
agauagaacuucuaacagccc

SEQ ID NO: 1104643 - RNA, 19 nt, Human
agauaucacagucuuaaaa

SEQ ID NO: 1104644 - RNA, 21 nt, Human
agcaagacagaacaacagcca

SEQ ID NO: 1104645 - RNA, 19 nt, Human
agcuggacuuucaacaaca

SEQ ID NO: 1104646 - RNA, 21 nt, Human
agcuugccuuuugcucuccca

SEQ ID NO: 1104647 - RNA, 25 nt, Human
aggaaaaguagaaaagcugucagac

SEQ ID NO: 1104648 - RNA, 20 nt, Human
caagacagaacaacagccac

SEQ ID NO: 1104649 - RNA, 22 nt, Human
cacaaagcuacuucguggacac

SEQ ID NO: 1104650 - RNA, 19 nt, Human
caccauaaaguuaggcaac

SEQ ID NO: 1104651 - RNA, 24 nt, Human
cacgaacaugcacgauaccauggu

SEQ ID NO: 1104652 - RNA, 22 nt, Human
cacugcuauauguaaggcggac

SEQ ID NO: 1104653 - RNA, 20 nt, Human
cagcaagacagaacaacagc

SEQ ID NO: 1104654 - RNA, 21 nt, Human
cagccuuggacuucuguuucu

SEQ ID NO: 1104655 - RNA, 24 nt, Human
caggaagaacauuaccuucagaaa

SEQ ID NO: 1104656 - RNA, 18 nt, Human
caguacugcaaaccagcc

SEQ ID NO: 1104657 - RNA, 22 nt, Human
ccaaaacacgguaaacagcauu

SEQ ID NO: 1104658 - RNA, 20 nt, Human
ccuucuauaaaccuacagaa

SEQ ID NO: 1104659 - RNA, 21 nt, Human
ccuuuugcucucccauaccac

SEQ ID NO: 1104660 - RNA, 23 nt, Human
cggugccgggcuacguaugugua

SEQ ID NO: 1104661 - RNA, 20 nt, Human
cguuacguuugaccaaaaca

SEQ ID NO: 1104662 - RNA, 19 nt, Human
cugcgaucacaaagcuacu

SEQ ID NO: 1104663 - RNA, 19 nt, Human
cuggagucaaauguuuugg

SEQ ID NO: 1104664 - RNA, 24 nt, Human
cuuaaaguucuacugaaugucaaa

SEQ ID NO: 1104665 - RNA, 20 nt, Human
cuugaaaacaggaagaacau

SEQ ID NO: 1104666 - RNA, 21 nt, Human
cuuuuuggcaagaagcacuag

SEQ ID NO: 1104667 - RNA, 19 nt, Human
gaaaaguagaaaagcuguc

SEQ ID NO: 1104668 - RNA, 21 nt, Human
gaaaaugcuagaaguuauaug

SEQ ID NO: 1104669 - RNA, 21 nt, Human
gaaacacagaaaucuaaaagc

SEQ ID NO: 1104670 - RNA, 20 nt, Human
gaaacuuggugauuucugcu

SEQ ID NO: 1104671 - RNA, 24 nt, Human
gaacuauucaaacacgcaugaaug

SEQ ID NO: 1104672 - RNA, 18 nt, Human
gaacugaauauuccuaac

SEQ ID NO: 1104673 - RNA, 22 nt, Human
gaacugaauauuccuaaccuca

SEQ ID NO: 1104674 - RNA, 22 nt, Human
gaguacacagucagcuauacag

SEQ ID NO: 1104675 - RNA, 18 nt, Human
gaguucacuaugaaugua

SEQ ID NO: 1104676 - RNA, 24 nt, Human
ggacuugaauagaagccauggugg

SEQ ID NO: 1104677 - RNA, 20 nt, Human
gggaagaaaacugcaaaugc

SEQ ID NO: 1104678 - RNA, 18 nt, Human
gguaaacagcauuagcuu

SEQ ID NO: 1104679 - RNA, 23 nt, Human
guaucagacagcaagacagaaca

SEQ ID NO: 1104680 - RNA, 20 nt, Human
gugaacucuucaucagcauc

SEQ ID NO: 1104681 - RNA, 25 nt, Human
guucacuaaauuucaucucucucuu

SEQ ID NO: 1104682 - RNA, 26 nt, Human
uaaaagcaaaacagcuguuguguaua

SEQ ID NO: 1104683 - RNA, 24 nt, Human
uaaaccuucuauaaaccuacagaa

SEQ ID NO: 1104684 - RNA, 22 nt, Human
uaacuggacuugaauagaagcc

SEQ ID NO: 1104685 - RNA, 19 nt, Human
uaacuugagcccucacugg

SEQ ID NO: 1104686 - RNA, 19 nt, Human
uacaaguauuuaaggacac

SEQ ID NO: 1104687 - RNA, 20 nt, Human
uaccauggcaugaaaaugcu

SEQ ID NO: 1104688 - RNA, 24 nt, Human
uaccauggcaugaaaaugcuagaa

SEQ ID NO: 1104689 - RNA, 23 nt, Human
uacugugcacauauuccgauauu

SEQ ID NO: 1104690 - RNA, 24 nt, Human
uauauggauacaaugauaguggaa

SEQ ID NO: 1104691 - RNA, 20 nt, Human
uaucagacagcaagacagaa

SEQ ID NO: 1104692 - RNA, 21 nt, Human
uaugagcaccuuuucaauucu

SEQ ID NO: 1104693 - RNA, 22 nt, Human
uauguaaggcggacagaagaua

SEQ ID NO: 1104694 - RNA, 21 nt, Human
ucaaaaaagcuggacuuucaa

SEQ ID NO: 1104695 - RNA, 19 nt, Human
ucagacagcaagacagaac

SEQ ID NO: 1104696 - RNA, 19 nt, Human
ucaugauacagguguaaga

SEQ ID NO: 1104697 - RNA, 21 nt, Human
ucccauaccaccugugaacuc

SEQ ID NO: 1104698 - RNA, 20 nt, Human
ucgccagccuuggacuucug

SEQ ID NO: 1104699 - RNA, 20 nt, Human
ucuauaaaccuacagaaugc

SEQ ID NO: 1104700 - RNA, 26 nt, Human
ugaaaagccccacucucguaucagac

SEQ ID NO: 1104701 - RNA, 20 nt, Human
ugaacucuucaucagcauca

SEQ ID NO: 1104702 - RNA, 21 nt, Human
ugaccaaaacacgguaaacag

SEQ ID NO: 1104703 - RNA, 24 nt, Human
ugagaaaagucagguaugucaaga

SEQ ID NO: 1104704 - RNA, 20 nt, Human
ugauacagguguaagacucc

SEQ ID NO: 1104705 - RNA, 20 nt, Human
ugauaccaugauaccacgaa

SEQ ID NO: 1104706 - RNA, 19 nt, Human
ugccuagucugaggucagc

SEQ ID NO: 1104707 - RNA, 26 nt, Human
ugccuuuugcucucccauaccaccug

SEQ ID NO: 1104708 - RNA, 18 nt, Human
uggacuuucaacaacaac

SEQ ID NO: 1104709 - RNA, 20 nt, Human
uggagucaaauguuuuggcc

SEQ ID NO: 1104710 - RNA, 19 nt, Human
ugggugauccauaacgacc

SEQ ID NO: 1104711 - RNA, 23 nt, Human
uguauacaagcaauuaaaauaug

SEQ ID NO: 1104712 - RNA, 24 nt, Human
uuacaaaauaggaggucaccauaa

SEQ ID NO: 1104713 - RNA, 20 nt, Human
uuagaaaguucuguuaccaa

SEQ ID NO: 1104714 - RNA, 23 nt, Human
uuagcuugccuuuugcucuccca

SEQ ID NO: 1104715 - RNA, 20 nt, Human
uuaguucacugaaaagcccc

SEQ ID NO: 1104716 - RNA, 22 nt, Human
uucauugccucaaaauauaguc

SEQ ID NO: 1104717 - RNA, 19 nt, Human
uugcaucacggugccgggc

SEQ ID NO: 1104718 - RNA, 24 nt, Human
uuuaaggacaccuuugauacuugg

SEQ ID NO: 1104719 - RNA, 25 nt, Human
uuuuuaguugcugcuauggccagaa

SEQ ID NO: 1104720 - RNA, 21 nt, Human
agaccgcggggcagaugggac

SEQ ID NO: 1104721 - RNA, 21 nt, Human
aggcaggcacacaggagaagg

SEQ ID NO: 1104722 - RNA, 23 nt, Human
agggggcugaggguggagaggcc

SEQ ID NO: 1104723 - RNA, 21 nt, Human
cagaugggaccgcugccuccc

SEQ ID NO: 1104724 - RNA, 23 nt, Human
caggcacacaggagaagggcugg

SEQ ID NO: 1104725 - RNA, 23 nt, Human
ccgcugccucccugccuccuggg

SEQ ID NO: 1104726 - RNA, 18 nt, Human
gaagcauggggaagggac

SEQ ID NO: 1104727 - RNA, 21 nt, Human
gaagcauggggaagggacuga

SEQ ID NO: 1104728 - RNA, 19 nt, Human
gaccgcugccucccugccu

SEQ ID NO: 1104729 - RNA, 18 nt, Human
gcagaugggaccgcugcc

SEQ ID NO: 1104730 - RNA, 24 nt, Human
guggcggcggcaggaggcaggcac

SEQ ID NO: 1104731 - RNA, 21 nt, Human
ugaagcagggggcugagggug

SEQ ID NO: 1104732 - RNA, 23 nt, Human
aaacauggcguucccauaccccc

SEQ ID NO: 1104733 - RNA, 18 nt, Human
aagccaaccccaagacua

SEQ ID NO: 1104734 - RNA, 19 nt, Human
aagccagacugcccaggcu

SEQ ID NO: 1104735 - RNA, 22 nt, Human
aagcuccaggcuugggccucac

SEQ ID NO: 1104736 - RNA, 24 nt, Human
aaggcccagcugacacccuccaca

SEQ ID NO: 1104737 - RNA, 22 nt, Human
aaggggcagcagcagagcuggg

SEQ ID NO: 1104738 - RNA, 20 nt, Human
aaguggcagcuugcggugcc

SEQ ID NO: 1104739 - RNA, 20 nt, Human
aaguugcccacaugcccgcc

SEQ ID NO: 1104740 - RNA, 21 nt, Human
acaaaaccccaggacccuggc

SEQ ID NO: 1104741 - RNA, 18 nt, Human
acagguaggggcucuggg

SEQ ID NO: 1104742 - RNA, 21 nt, Human
acauggcguucccauaccccc

SEQ ID NO: 1104743 - RNA, 19 nt, Human
acccucaucccagccccau

SEQ ID NO: 1104744 - RNA, 20 nt, Human
acuuggguugggggcccuuc

SEQ ID NO: 1104745 - RNA, 19 nt, Human
agacccucuccuucccacu

SEQ ID NO: 1104746 - RNA, 20 nt, Human
agaccuguuuuguccccaag

SEQ ID NO: 1104747 - RNA, 22 nt, Human
agcccaccgugucccagaccaa

SEQ ID NO: 1104748 - RNA, 22 nt, Human
aggagaccuuagccuagagucc

SEQ ID NO: 1104749 - RNA, 21 nt, Human
aggcaggcucugcccaggggg

SEQ ID NO: 1104750 - RNA, 19 nt, Human
aggcagggccucuguggcu

SEQ ID NO: 1104751 - RNA, 20 nt, Human
aggcagggccucuguggcuu

SEQ ID NO: 1104752 - RNA, 18 nt, Human
aggcaggggucugcaccc

SEQ ID NO: 1104753 - RNA, 21 nt, Human
aggcagugagggcucagguga

SEQ ID NO: 1104754 - RNA, 18 nt, Human
agggguguccuaaagugc

SEQ ID NO: 1104755 - RNA, 22 nt, Human
agguacauaggagccaaagaca

SEQ ID NO: 1104756 - RNA, 22 nt, Human
agucaggugggcacaggucaga

SEQ ID NO: 1104757 - RNA, 24 nt, Human
auauucaucuaucugucccacacg

SEQ ID NO: 1104758 - RNA, 18 nt, Human
auggcguucccauacccc

SEQ ID NO: 1104759 - RNA, 21 nt, Human
caaaggcccagcugacacccu

SEQ ID NO: 1104760 - RNA, 19 nt, Human
caagccaaccccaagacua

SEQ ID NO: 1104761 - RNA, 20 nt, Human
caagccaaccccaagacuac

SEQ ID NO: 1104762 - RNA, 27 nt, Human
caaggugggcagcaucccaggaggccc

SEQ ID NO: 1104763 - RNA, 20 nt, Human
cacccugucagccaccuugu

SEQ ID NO: 1104764 - RNA, 24 nt, Human
caccucacucccucagcucuugcc

SEQ ID NO: 1104765 - RNA, 23 nt, Human
caccuggguaagcuccaggcuug

SEQ ID NO: 1104766 - RNA, 23 nt, Human
cacuggccacccucgcaucccag

SEQ ID NO: 1104767 - RNA, 23 nt, Human
cacuuccacuuuacagguagggg

SEQ ID NO: 1104768 - RNA, 18 nt, Human
cacuuuguucaucuguga

SEQ ID NO: 1104769 - RNA, 19 nt, Human
cagcacaaaaccccaggac

SEQ ID NO: 1104770 - RNA, 22 nt, Human
cagcacaaaaccccaggacccu

SEQ ID NO: 1104771 - RNA, 18 nt, Human
cagcagagcuggggccuc

SEQ ID NO: 1104772 - RNA, 23 nt, Human
cagcagaguugcauucaucuccc

SEQ ID NO: 1104773 - RNA, 22 nt, Human
cagcagcagagcuggggccucg

SEQ ID NO: 1104774 - RNA, 23 nt, Human
cagccacugggccacaaguuccu

SEQ ID NO: 1104775 - RNA, 21 nt, Human
cagcccccugcacugagggag

SEQ ID NO: 1104776 - RNA, 22 nt, Human
cagccuguuucaccucauccug

SEQ ID NO: 1104777 - RNA, 19 nt, Human
cagcucaccugaccuccag

SEQ ID NO: 1104778 - RNA, 23 nt, Human
cagcugcaccaagccaaccccaa

SEQ ID NO: 1104779 - RNA, 18 nt, Human
cagggcaggcacugcggc

SEQ ID NO: 1104780 - RNA, 26 nt, Human
cagggccucuguggcuuaccucggcc

SEQ ID NO: 1104781 - RNA, 23 nt, Human
caggggugauaagggaaggggca

SEQ ID NO: 1104782 - RNA, 20 nt, Human
caggguuccucacccaggca

SEQ ID NO: 1104783 - RNA, 21 nt, Human
cagguacauaggagccaaaga

SEQ ID NO: 1104784 - RNA, 20 nt, Human
caguaggcagacgaagagug

SEQ ID NO: 1104785 - RNA, 22 nt, Human
cagugguugagacuguggacac

SEQ ID NO: 1104786 - RNA, 26 nt, Human
caucucgccagaccuggguccgagca

SEQ ID NO: 1104787 - RNA, 22 nt, Human
ccaagacuacuugucuccaccc

SEQ ID NO: 1104788 - RNA, 21 nt, Human
ccaagcccaccgugucccaga

SEQ ID NO: 1104789 - RNA, 25 nt, Human
ccagaccaaacauggcguucccaua

SEQ ID NO: 1104790 - RNA, 24 nt, Human
ccagaggcuggggguccucaggca

SEQ ID NO: 1104791 - RNA, 24 nt, Human
ccaggaaggggucccucaagucuc

SEQ ID NO: 1104792 - RNA, 24 nt, Human
ccaucacagcaugcucccagcugu

SEQ ID NO: 1104793 - RNA, 18 nt, Human
cccaccgugucccagacc

SEQ ID NO: 1104794 - RNA, 21 nt, Human
cccaccgugucccagaccaaa

SEQ ID NO: 1104795 - RNA, 21 nt, Human
cccaggcuuaacuccaccuuc

SEQ ID NO: 1104796 - RNA, 22 nt, Human
cccauacccccggccucaccuc

SEQ ID NO: 1104797 - RNA, 22 nt, Human
ccccaaaggucucugacccucc

SEQ ID NO: 1104798 - RNA, 19 nt, Human
ccccaagacuacuugucuc

SEQ ID NO: 1104799 - RNA, 21 nt, Human
ccccaagacuacuugucucca

SEQ ID NO: 1104800 - RNA, 19 nt, Human
ccccaggacccuggcucug

SEQ ID NO: 1104801 - RNA, 22 nt, Human
cccccggccucaccucagagac

SEQ ID NO: 1104802 - RNA, 21 nt, Human
ccccgcaccccccagcugcac

SEQ ID NO: 1104803 - RNA, 22 nt, Human
ccccgcaccccccagcugcacc

SEQ ID NO: 1104804 - RNA, 24 nt, Human
ccccgcaccccccagcugcaccaa

SEQ ID NO: 1104805 - RNA, 21 nt, Human
ccccgcaccuggguaagcucc

SEQ ID NO: 1104806 - RNA, 26 nt, Human
ccccggccucaccucagagacacucc

SEQ ID NO: 1104807 - RNA, 20 nt, Human
ccccucuccauucuuuucca

SEQ ID NO: 1104808 - RNA, 21 nt, Human
ccccugcacugagggagcaag

SEQ ID NO: 1104809 - RNA, 22 nt, Human
cccgccagccagggccuaaagc

SEQ ID NO: 1104810 - RNA, 22 nt, Human
cccuccggaggggccuggcugc

SEQ ID NO: 1104811 - RNA, 18 nt, Human
cccucuccauucuuuucc

SEQ ID NO: 1104812 - RNA, 18 nt, Human
cccucuccuucccacucu

SEQ ID NO: 1104813 - RNA, 19 nt, Human
cccucuccuucccacucug

SEQ ID NO: 1104814 - RNA, 21 nt, Human
cccuugugaccaucugggcug

SEQ ID NO: 1104815 - RNA, 22 nt, Human
ccgcaccccccagcugcaccaa

SEQ ID NO: 1104816 - RNA, 21 nt, Human
ccuaaagugccucccccugua

SEQ ID NO: 1104817 - RNA, 19 nt, Human
ccuaagggguguccuaaag

SEQ ID NO: 1104818 - RNA, 21 nt, Human
ccugcccagcacaaaacccca

SEQ ID NO: 1104819 - RNA, 21 nt, Human
ccugggccccaaggcagaccc

SEQ ID NO: 1104820 - RNA, 24 nt, Human
ccugggccccaaggcagacccagg

SEQ ID NO: 1104821 - RNA, 22 nt, Human
cgagcagccuuuuugacucucc

SEQ ID NO: 1104822 - RNA, 22 nt, Human
cucccucagcucuugccagcuu

SEQ ID NO: 1104823 - RNA, 18 nt, Human
cucuccuagacagcucac

SEQ ID NO: 1104824 - RNA, 23 nt, Human
cucugcacgccuggggcagggac

SEQ ID NO: 1104825 - RNA, 21 nt, Human
cucugcccaggggguuggugu

SEQ ID NO: 1104826 - RNA, 24 nt, Human
cugaaauaaaggauugaaaacggu

SEQ ID NO: 1104827 - RNA, 23 nt, Human
cugcaucugugccucccagcccc

SEQ ID NO: 1104828 - RNA, 24 nt, Human
cugcaucugugccucccagccccc

SEQ ID NO: 1104829 - RNA, 22 nt, Human
cugggccccaaggcagacccag

SEQ ID NO: 1104830 - RNA, 24 nt, Human
cuggggcagggacuuuugaguuua

SEQ ID NO: 1104831 - RNA, 25 nt, Human
cuguagccaucccaagcccaccgug

SEQ ID NO: 1104832 - RNA, 22 nt, Human
cuguauucccccucccagggca

SEQ ID NO: 1104833 - RNA, 23 nt, Human
cuuaccucggccccucuccugac

SEQ ID NO: 1104834 - RNA, 18 nt, Human
cuucaguaggcagacgaa

SEQ ID NO: 1104835 - RNA, 24 nt, Human
gaaaacgguuccuguucagacuga

SEQ ID NO: 1104836 - RNA, 24 nt, Human
gagaacacuuuguaaacuugcuga

SEQ ID NO: 1104837 - RNA, 18 nt, Human
gagacccucuccuuccca

SEQ ID NO: 1104838 - RNA, 21 nt, Human
gagaggcuccagccacugggc

SEQ ID NO: 1104839 - RNA, 19 nt, Human
gagcaagggauccugcagc

SEQ ID NO: 1104840 - RNA, 18 nt, Human
gagcaggccacagaacgc

SEQ ID NO: 1104841 - RNA, 19 nt, Human
gaggcuggggguccucagg

SEQ ID NO: 1104842 - RNA, 20 nt, Human
gaguucacagggugucaggg

SEQ ID NO: 1104843 - RNA, 24 nt, Human
gauccugcagcugcguaugcccag

SEQ ID NO: 1104844 - RNA, 21 nt, Human
gcaccccccagcugcaccaag

SEQ ID NO: 1104845 - RNA, 20 nt, Human
gcagccugggccccaaggca

SEQ ID NO: 1104846 - RNA, 21 nt, Human
gcccacaugcccgccagccag

SEQ ID NO: 1104847 - RNA, 22 nt, Human
gcccaccgugucccagaccaaa

SEQ ID NO: 1104848 - RNA, 23 nt, Human
gccccuaacucaucuugaggccc

SEQ ID NO: 1104849 - RNA, 20 nt, Human
gcccuaagugaggguuucug

SEQ ID NO: 1104850 - RNA, 21 nt, Human
gcuccagccacugggccacaa

SEQ ID NO: 1104851 - RNA, 18 nt, Human
gcuguacaccaucacagc

SEQ ID NO: 1104852 - RNA, 18 nt, Human
gcuuguuccugggcuaga

SEQ ID NO: 1104853 - RNA, 20 nt, Human
ggaaggggcagcagcagagc

SEQ ID NO: 1104854 - RNA, 18 nt, Human
ggcagcagcagagcuggg

SEQ ID NO: 1104855 - RNA, 22 nt, Human
ggcagcuugcggugccuuuagg

SEQ ID NO: 1104856 - RNA, 22 nt, Human
ggccaugaggcccuaagugagg

SEQ ID NO: 1104857 - RNA, 20 nt, Human
ggccucuguggcuuaccucg

SEQ ID NO: 1104858 - RNA, 20 nt, Human
ggccugggggucggagaggg

SEQ ID NO: 1104859 - RNA, 22 nt, Human
ggccuguuugggucccuggagg

SEQ ID NO: 1104860 - RNA, 19 nt, Human
gggcagcagcagagcuggg

SEQ ID NO: 1104861 - RNA, 21 nt, Human
gggcagcagcagagcuggggc

SEQ ID NO: 1104862 - RNA, 22 nt, Human
gggcagcagcagagcuggggcc

SEQ ID NO: 1104863 - RNA, 24 nt, Human
gggcucaggugagaggcuccagcc

SEQ ID NO: 1104864 - RNA, 20 nt, Human
gggcuuguuccugggcuaga

SEQ ID NO: 1104865 - RNA, 21 nt, Human
gggggugucaggcccagacug

SEQ ID NO: 1104866 - RNA, 20 nt, Human
ggucugcacccucacucagg

SEQ ID NO: 1104867 - RNA, 22 nt, Human
gugcagccugggccccaaggca

SEQ ID NO: 1104868 - RNA, 23 nt, Human
gugcagccugggccccaaggcag

SEQ ID NO: 1104869 - RNA, 23 nt, Human
guggcuuaccucggccccucucc

SEQ ID NO: 1104870 - RNA, 22 nt, Human
gugucauuguccccucuccauu

SEQ ID NO: 1104871 - RNA, 22 nt, Human
gugugcgcguggaucagggcag

SEQ ID NO: 1104872 - RNA, 19 nt, Human
guguuggggcaaaggggcu

SEQ ID NO: 1104873 - RNA, 19 nt, Human
uaagggaaggggcagcagc

SEQ ID NO: 1104874 - RNA, 21 nt, Human
uaaguccccaguucuccuggc

SEQ ID NO: 1104875 - RNA, 24 nt, Human
uaaguccccaguucuccuggcucu

SEQ ID NO: 1104876 - RNA, 21 nt, Human
uaccaagacaggcagggccuc

SEQ ID NO: 1104877 - RNA, 22 nt, Human
uaccccaggaaggggucccuca

SEQ ID NO: 1104878 - RNA, 23 nt, Human
uaguggcuucaaaggcccagcug

SEQ ID NO: 1104879 - RNA, 21 nt, Human
uaucugucccacacgugugcg

SEQ ID NO: 1104880 - RNA, 23 nt, Human
ucacagcaugcucccagcugugu

SEQ ID NO: 1104881 - RNA, 22 nt, Human
ucacuggccacccucgcauccc

SEQ ID NO: 1104882 - RNA, 19 nt, Human
ucaggaugguugcgcaguc

SEQ ID NO: 1104883 - RNA, 19 nt, Human
ucagggcaggcacugcggc

SEQ ID NO: 1104884 - RNA, 19 nt, Human
uccacauggcagcccgagc

SEQ ID NO: 1104885 - RNA, 21 nt, Human
uccacccucaucccagcccca

SEQ ID NO: 1104886 - RNA, 25 nt, Human
ucccaagcccaccgugucccagacc

SEQ ID NO: 1104887 - RNA, 23 nt, Human
ucccacucugucccucuccuaga

SEQ ID NO: 1104888 - RNA, 22 nt, Human
ucccauaagacugagcccucuc

SEQ ID NO: 1104889 - RNA, 23 nt, Human
ucccauacccccggccucaccuc

SEQ ID NO: 1104890 - RNA, 22 nt, Human
uccccgcaccccccagcugcac

SEQ ID NO: 1104891 - RNA, 23 nt, Human
uccccucuccauucuuuuccaca

SEQ ID NO: 1104892 - RNA, 18 nt, Human
ucccucagcucuugccag

SEQ ID NO: 1104893 - RNA, 20 nt, Human
ucccucagcucuugccagcu

SEQ ID NO: 1104894 - RNA, 22 nt, Human
ucccucagcucuugccagcuuc

SEQ ID NO: 1104895 - RNA, 23 nt, Human
ucccucagcucuugccagcuucu

SEQ ID NO: 1104896 - RNA, 24 nt, Human
ucccugaugaucacaggcaggggu

SEQ ID NO: 1104897 - RNA, 21 nt, Human
uccggaggggccuggcugcca

SEQ ID NO: 1104898 - RNA, 20 nt, Human
uccucaggcagugagggcuc

SEQ ID NO: 1104899 - RNA, 20 nt, Human
uccugcagcugcguaugccc

SEQ ID NO: 1104900 - RNA, 22 nt, Human
uccugggccagccagaggaccc

SEQ ID NO: 1104901 - RNA, 19 nt, Human
uccuucccacucugucccu

SEQ ID NO: 1104902 - RNA, 18 nt, Human
uccuuggggucugucacu

SEQ ID NO: 1104903 - RNA, 21 nt, Human
uccuuggggucugucacuggc

SEQ ID NO: 1104904 - RNA, 20 nt, Human
uccuuuggcaagaaagccga

SEQ ID NO: 1104905 - RNA, 21 nt, Human
ucuacauuugcuugugagaga

SEQ ID NO: 1104906 - RNA, 19 nt, Human
ucuccacccucaucccagc

SEQ ID NO: 1104907 - RNA, 21 nt, Human
ucuccacccucaucccagccc

SEQ ID NO: 1104908 - RNA, 18 nt, Human
ucucccagcuggcauccc

SEQ ID NO: 1104909 - RNA, 24 nt, Human
ucuccuagacagcucaccugaccu

SEQ ID NO: 1104910 - RNA, 21 nt, Human
ucuccuggcucuccuuucuga

SEQ ID NO: 1104911 - RNA, 22 nt, Human
ucucugacacuuggguuggggg

SEQ ID NO: 1104912 - RNA, 21 nt, Human
ucuguauuuucuaagucccca

SEQ ID NO: 1104913 - RNA, 27 nt, Human
ucugucccucuccuagacagcucaccu

SEQ ID NO: 1104914 - RNA, 22 nt, Human
ucuugccagcuucucugacacu

SEQ ID NO: 1104915 - RNA, 23 nt, Human
ugaaaacgguuccuguucagacu

SEQ ID NO: 1104916 - RNA, 23 nt, Human
ugacacccuccacagccuaaggg

SEQ ID NO: 1104917 - RNA, 21 nt, Human
ugacccucccauccccgcacc

SEQ ID NO: 1104918 - RNA, 19 nt, Human
ugaccuccagcuuccaucu

SEQ ID NO: 1104919 - RNA, 20 nt, Human
ugaccuccagcuuccaucuc

SEQ ID NO: 1104920 - RNA, 18 nt, Human
ugagaacaagguggcggg

SEQ ID NO: 1104921 - RNA, 19 nt, Human
ugagaacaagguggcgggu

SEQ ID NO: 1104922 - RNA, 22 nt, Human
ugagcccucucauggggguuuu

SEQ ID NO: 1104923 - RNA, 24 nt, Human
ugaggccagaggcuggggguccuc

SEQ ID NO: 1104924 - RNA, 18 nt, Human
ugaggcggcaugcaggcg

SEQ ID NO: 1104925 - RNA, 20 nt, Human
ugaguucacagggugucagg

SEQ ID NO: 1104926 - RNA, 24 nt, Human
ugccucccccuguauucccccucc

SEQ ID NO: 1104927 - RNA, 20 nt, Human
ugccuggcugguggccauuc

SEQ ID NO: 1104928 - RNA, 20 nt, Human
ugcugaacaguagccagguu

SEQ ID NO: 1104929 - RNA, 22 nt, Human
ugcugagccugcaucugugccu

SEQ ID NO: 1104930 - RNA, 26 nt, Human
uggaggcauuucccauaagacugagc

SEQ ID NO: 1104931 - RNA, 22 nt, Human
uggaucagggcaggcacugcgg

SEQ ID NO: 1104932 - RNA, 20 nt, Human
uggcaaagggugggaaauga

SEQ ID NO: 1104933 - RNA, 23 nt, Human
uggcaagaaagccgagucgagac

SEQ ID NO: 1104934 - RNA, 21 nt, Human
ugggccccaaggcagacccag

SEQ ID NO: 1104935 - RNA, 22 nt, Human
ugggccccaaggcagacccagg

SEQ ID NO: 1104936 - RNA, 18 nt, Human
ugggcuggcagggaggcu

SEQ ID NO: 1104937 - RNA, 24 nt, Human
ugggggcccuuccaggaggaaacc

SEQ ID NO: 1104938 - RNA, 19 nt, Human
ugggugccccacacagggc

SEQ ID NO: 1104939 - RNA, 22 nt, Human
ugggugccccacacagggcucu

SEQ ID NO: 1104940 - RNA, 21 nt, Human
uguaaacuugcugaacaguag

SEQ ID NO: 1104941 - RNA, 18 nt, Human
ugucccagaccaaacaug

SEQ ID NO: 1104942 - RNA, 21 nt, Human
uguccccaaggcuggcuggca

SEQ ID NO: 1104943 - RNA, 22 nt, Human
uguccccucuccauucuuuucc

SEQ ID NO: 1104944 - RNA, 19 nt, Human
uguguuggggcaaaggggc

SEQ ID NO: 1104945 - RNA, 21 nt, Human
uguuccugggcuagaucugug

SEQ ID NO: 1104946 - RNA, 24 nt, Human
uuagccuagaguccuuggggucug

SEQ ID NO: 1104947 - RNA, 25 nt, Human
uuggaggcauuucccauaagacuga

SEQ ID NO: 1104948 - RNA, 22 nt, Human
uuucuggaucuguggucaggau

SEQ ID NO: 1104949 - RNA, 18 nt, Human
uuuguaaacuugcugaac

SEQ ID NO: 1104950 - RNA, 21 nt, Human
uuuguaaacuugcugaacagu

SEQ ID NO: 1104951 - RNA, 24 nt, Human
uuuguaaacuugcugaacaguagc

SEQ ID NO: 1104952 - RNA, 21 nt, Human
aaaaagacuggcucggagggu

SEQ ID NO: 1104953 - RNA, 24 nt, Human
aaaaagacuggcucggaggguccu

SEQ ID NO: 1104954 - RNA, 23 nt, Human
aagaagaaaguagaaauacauga

SEQ ID NO: 1104955 - RNA, 19 nt, Human
acggagucucgcugauggc

SEQ ID NO: 1104956 - RNA, 19 nt, Human
agaaaaagacuggcucgga

SEQ ID NO: 1104957 - RNA, 27 nt, Human
agaaaaagacuggcucggaggguccua

SEQ ID NO: 1104958 - RNA, 22 nt, Human
cagaaaaagacuggcucggagg

SEQ ID NO: 1104959 - RNA, 22 nt, Human
ccaccagcaucucuguggccac

SEQ ID NO: 1104960 - RNA, 18 nt, Human
cuacgcccacggagucuc

SEQ ID NO: 1104961 - RNA, 21 nt, Human
gauggcuagcacagcagucug

SEQ ID NO: 1104962 - RNA, 19 nt, Human
uccagaaaaagacuggcuc

SEQ ID NO: 1104963 - RNA, 24 nt, Human
uccagaaaaagacuggcucggagg

SEQ ID NO: 1104964 - RNA, 22 nt, Human
uccauauucugucuuccagaca

SEQ ID NO: 1104965 - RNA, 27 nt, Human
ucucuguggccacaaacuugauugcuc

SEQ ID NO: 1104966 - RNA, 18 nt, Human
uugauugcucuuccucca

SEQ ID NO: 1104967 - RNA, 23 nt, Human
aaaaaaaaaagaaaagaaaagaa

SEQ ID NO: 1104968 - RNA, 25 nt, Human
aaaaaaagaaaagaaaagaaaagaa

SEQ ID NO: 1104969 - RNA, 18 nt, Human
aaaaaagcccgccucgag

SEQ ID NO: 1104970 - RNA, 23 nt, Human
aaaaagcccgccucgaguagggc

SEQ ID NO: 1104971 - RNA, 21 nt, Human
aaacaggaacagggacccuac

SEQ ID NO: 1104972 - RNA, 21 nt, Human
aaacaggaacagggacccuac

SEQ ID NO: 1104973 - RNA, 23 nt, Human
aaacaggaacagggacccuacaa

SEQ ID NO: 1104974 - RNA, 23 nt, Human
aaaccaaacaaacagcagucagg

SEQ ID NO: 1104975 - RNA, 24 nt, Human
aaaccaaacaaacagcagucagga

SEQ ID NO: 1104976 - RNA, 18 nt, Human
aaaguaaacaggggaguc

SEQ ID NO: 1104977 - RNA, 20 nt, Human
aacauggagaagccccgucu

SEQ ID NO: 1104978 - RNA, 21 nt, Human
aacauggagaagccccgucuc

SEQ ID NO: 1104979 - RNA, 23 nt, Human
aaccaaacaaacagcagucagga

SEQ ID NO: 1104980 - RNA, 20 nt, Human
aagcccgccuuggccuggcg

SEQ ID NO: 1104981 - RNA, 18 nt, Human
aagccuccggaaugaacu

SEQ ID NO: 1104982 - RNA, 20 nt, Human
aaguacccauggcaaaccaa

SEQ ID NO: 1104983 - RNA, 24 nt, Human
aaucgcuugaacccgggaggcaga

SEQ ID NO: 1104984 - RNA, 19 nt, Human
acaagagugaaacuccauc

SEQ ID NO: 1104985 - RNA, 20 nt, Human
acaagagugaaacuccaucu

SEQ ID NO: 1104986 - RNA, 21 nt, Human
acaagagugaaacuccaucuc

SEQ ID NO: 1104987 - RNA, 24 nt, Human
acagcgaaagcacacagcagacgc

SEQ ID NO: 1104988 - RNA, 23 nt, Human
accccacgggccacagcuggagg

SEQ ID NO: 1104989 - RNA, 23 nt, Human
acccgggaggcuacccuggaagc

SEQ ID NO: 1104990 - RNA, 21 nt, Human
acugcuccauuucaauccuca

SEQ ID NO: 1104991 - RNA, 23 nt, Human
agaaaaaaaaagcccgccucgag

SEQ ID NO: 1104992 - RNA, 19 nt, Human
agaaaagaaaagaaaagaa

SEQ ID NO: 1104993 - RNA, 22 nt, Human
agaaucgcuugaacccgggagg

SEQ ID NO: 1104994 - RNA, 24 nt, Human
agacgccggggccagcauggaacu

SEQ ID NO: 1104995 - RNA, 24 nt, Human
agacguugcagugagcugagauug

SEQ ID NO: 1104996 - RNA, 27 nt, Human
agccuggguuuugcugucuaccuuggu

SEQ ID NO: 1104997 - RNA, 19 nt, Human
agccuuuggcuccauggca

SEQ ID NO: 1104998 - RNA, 20 nt, Human
aggagcuggaaggcugaccc

SEQ ID NO: 1104999 - RNA, 22 nt, Human
aggaggcccagccuucaccugc

SEQ ID NO: 1105000 - RNA, 20 nt, Human
aggcagacguugcagugagc

SEQ ID NO: 1105001 - RNA, 24 nt, Human
aggcagacguugcagugagcugag

SEQ ID NO: 1105002 - RNA, 24 nt, Human
aggcaggagaaucgcuugaacccg

SEQ ID NO: 1105003 - RNA, 18 nt, Human
aggcagguggaucacuug

SEQ ID NO: 1105004 - RNA, 26 nt, Human
aggcagguggaucacuugaggucagg

SEQ ID NO: 1105005 - RNA, 23 nt, Human
aggcccagccuucaccugcugcu

SEQ ID NO: 1105006 - RNA, 20 nt, Human
aggccgaggcaggagaaucg

SEQ ID NO: 1105007 - RNA, 24 nt, Human
aggccgaggcaggagaaucgcuug

SEQ ID NO: 1105008 - RNA, 21 nt, Human
aggccgaggcagguggaucac

SEQ ID NO: 1105009 - RNA, 22 nt, Human
agguggaucacuugaggucagg

SEQ ID NO: 1105010 - RNA, 22 nt, Human
agucucagcaauaccggcuuuc

SEQ ID NO: 1105011 - RNA, 24 nt, Human
aguggcacaugccuguaaucccag

SEQ ID NO: 1105012 - RNA, 23 nt, Human
aguggcucaugccuguaauccca

SEQ ID NO: 1105013 - RNA, 24 nt, Human
aguggcucaugccuguaaucccag

SEQ ID NO: 1105014 - RNA, 20 nt, Human
auugcaccauugcacuccag

SEQ ID NO: 1105015 - RNA, 19 nt, Human
caaaccaaacaaacagcag

SEQ ID NO: 1105016 - RNA, 24 nt, Human
caacauggagaagccccgucucua

SEQ ID NO: 1105017 - RNA, 20 nt, Human
caaggccauccaaaacaugg

SEQ ID NO: 1105018 - RNA, 22 nt, Human
caauccucagcguaucaagaca

SEQ ID NO: 1105019 - RNA, 23 nt, Human
cacaaacagcuacagucgcagcc

SEQ ID NO: 1105020 - RNA, 24 nt, Human
caccauugcacuccagcgugggca

SEQ ID NO: 1105021 - RNA, 24 nt, Human
cacuccagcgugggcaacaagagu

SEQ ID NO: 1105022 - RNA, 24 nt, Human
cacugcuccauuucaauccucagc

SEQ ID NO: 1105023 - RNA, 20 nt, Human
cagcaauaccggcuuucagc

SEQ ID NO: 1105024 - RNA, 21 nt, Human
cagcagucaggaacuggguaa

SEQ ID NO: 1105025 - RNA, 24 nt, Human
cagcauuucgggaggccgaggcag

SEQ ID NO: 1105026 - RNA, 25 nt, Human
cagcauuucgggaggccgaggcagg

SEQ ID NO: 1105027 - RNA, 24 nt, Human
cagccugaccaacauggagaagcc

SEQ ID NO: 1105028 - RNA, 19 nt, Human
cagcgcccugugaggugcc

SEQ ID NO: 1105029 - RNA, 24 nt, Human
cagcuaaucaggaggccgaggcag

SEQ ID NO: 1105030 - RNA, 24 nt, Human
caggaggcccagccuucaccugcc

SEQ ID NO: 1105031 - RNA, 23 nt, Human
caggcaaaaaucgugagauuaga

SEQ ID NO: 1105032 - RNA, 21 nt, Human
cagggcaucugcgucuggucc

SEQ ID NO: 1105033 - RNA, 20 nt, Human
cauggcaaaccaaacaaaca

SEQ ID NO: 1105034 - RNA, 18 nt, Human
cauugcacuccagcgugg

SEQ ID NO: 1105035 - RNA, 19 nt, Human
cauugcacuccagcguggg

SEQ ID NO: 1105036 - RNA, 21 nt, Human
cauugcacuccagcgugggca

SEQ ID NO: 1105037 - RNA, 24 nt, Human
cauugcacuccagcgugggcaaca

SEQ ID NO: 1105038 - RNA, 23 nt, Human
ccacacugugacuggugcaggca

SEQ ID NO: 1105039 - RNA, 20 nt, Human
ccagaaguacccauggcaaa

SEQ ID NO: 1105040 - RNA, 23 nt, Human
ccauccaaaacauggcaaagcua

SEQ ID NO: 1105041 - RNA, 21 nt, Human
ccauggcaaaccaaacaaaca

SEQ ID NO: 1105042 - RNA, 20 nt, Human
ccauugcacuccagcguggg

SEQ ID NO: 1105043 - RNA, 21 nt, Human
ccauugcacuccagcgugggc

SEQ ID NO: 1105044 - RNA, 24 nt, Human
ccauugcacuccagcgugggcaac

SEQ ID NO: 1105045 - RNA, 25 nt, Human
ccauugcacuccagcgugggcaaca

SEQ ID NO: 1105046 - RNA, 23 nt, Human
cccauggcaaaccaaacaaacag

SEQ ID NO: 1105047 - RNA, 23 nt, Human
ccccgucucuacuaaaaauacaa

SEQ ID NO: 1105048 - RNA, 20 nt, Human
cccgccccaguuugaccucu

SEQ ID NO: 1105049 - RNA, 18 nt, Human
ccuacaacuggcaugagg

SEQ ID NO: 1105050 - RNA, 24 nt, Human
ccucaguccuaccacacugacucc

SEQ ID NO: 1105051 - RNA, 18 nt, Human
ccuccggaaugaacuucc

SEQ ID NO: 1105052 - RNA, 19 nt, Human
ccucugcaguacauaaggg

SEQ ID NO: 1105053 - RNA, 23 nt, Human
ccugaccaacauggagaagcccc

SEQ ID NO: 1105054 - RNA, 24 nt, Human
ccugaccaacauggagaagccccg

SEQ ID NO: 1105055 - RNA, 23 nt, Human
ccuggaagccuccggaaugaacu

SEQ ID NO: 1105056 - RNA, 20 nt, Human
ccuguaaucccagcauuucg

SEQ ID NO: 1105057 - RNA, 20 nt, Human
ccuguaaucccagcauuucg

SEQ ID NO: 1105058 - RNA, 21 nt, Human
ccuguaaucccagcuaaucag

SEQ ID NO: 1105059 - RNA, 24 nt, Human
cgaggcaggagaaucgcuugaacc

SEQ ID NO: 1105060 - RNA, 24 nt, Human
cgaggcagguggaucacuugaggu

SEQ ID NO: 1105061 - RNA, 26 nt, Human
cgaggcagguggaucacuugagguca

SEQ ID NO: 1105062 - RNA, 25 nt, Human
cgcccugcagcaggaggcugggacu

SEQ ID NO: 1105063 - RNA, 24 nt, Human
cgggaggcagacguugcagugagc

SEQ ID NO: 1105064 - RNA, 18 nt, Human
cgugcuuguagacacaca

SEQ ID NO: 1105065 - RNA, 25 nt, Human
cucaguccuaccacacugacuccca

SEQ ID NO: 1105066 - RNA, 23 nt, Human
cucaugccuguaaucccagcauu

SEQ ID NO: 1105067 - RNA, 24 nt, Human
cucaugccuguaaucccagcauuu

SEQ ID NO: 1105068 - RNA, 19 nt, Human
cuccaucucaaaaaaaaaa

SEQ ID NO: 1105069 - RNA, 18 nt, Human
cucuacugacggcagagc

SEQ ID NO: 1105070 - RNA, 19 nt, Human
cugaaggucucuccagccg

SEQ ID NO: 1105071 - RNA, 18 nt, Human
cugacccuggagucucag

SEQ ID NO: 1105072 - RNA, 21 nt, Human
cugcauccgucccucaggcac

SEQ ID NO: 1105073 - RNA, 18 nt, Human
cuggagguuugccagccg

SEQ ID NO: 1105074 - RNA, 23 nt, Human
cuggguaaagguuggcugcagca

SEQ ID NO: 1105075 - RNA, 18 nt, Human
cuuggccuggcgcagugg

SEQ ID NO: 1105076 - RNA, 19 nt, Human
cuuucagaaugcuggccua

SEQ ID NO: 1105077 - RNA, 18 nt, Human
cuuucagcaggaggccca

SEQ ID NO: 1105078 - RNA, 20 nt, Human
gaaagcacacagcagacgcc

SEQ ID NO: 1105079 - RNA, 23 nt, Human
gaacuggguaaagguuggcugca

SEQ ID NO: 1105080 - RNA, 21 nt, Human
gagaagccccgucucuacuaa

SEQ ID NO: 1105081 - RNA, 23 nt, Human
gagauuagaccacaaucuguugu

SEQ ID NO: 1105082 - RNA, 21 nt, Human
gagcaaaccccacgggccaca

SEQ ID NO: 1105083 - RNA, 19 nt, Human
gaggaggagcuggaaggcu

SEQ ID NO: 1105084 - RNA, 23 nt, Human
gaggcagguggaucacuugaggu

SEQ ID NO: 1105085 - RNA, 22 nt, Human
gaucacuugaggucaggaguuc

SEQ ID NO: 1105086 - RNA, 24 nt, Human
gaucacuugaggucaggaguucca

SEQ ID NO: 1105087 - RNA, 25 nt, Human
gaucacuugaggucaggaguuccag

SEQ ID NO: 1105088 - RNA, 20 nt, Human
gcaaaccaaacaaacagcag

SEQ ID NO: 1105089 - RNA, 20 nt, Human
gccagggcaucugcgucugg

SEQ ID NO: 1105090 - RNA, 26 nt, Human
gcccaggccaccauggagcaaacccc

SEQ ID NO: 1105091 - RNA, 20 nt, Human
gccggguaguggcacaugcc

SEQ ID NO: 1105092 - RNA, 20 nt, Human
gccuacugaaggucucucca

SEQ ID NO: 1105093 - RNA, 19 nt, Human
gccuggcgcaguggcucau

SEQ ID NO: 1105094 - RNA, 20 nt, Human
gcuccauuucaauccucagc

SEQ ID NO: 1105095 - RNA, 18 nt, Human
gcuucacaucacccugga

SEQ ID NO: 1105096 - RNA, 20 nt, Human
ggagcuggaaggcugacccu

SEQ ID NO: 1105097 - RNA, 22 nt, Human
ggaucacuugaggucaggaguu

SEQ ID NO: 1105098 - RNA, 19 nt, Human
ggcagagcgcccugcagca

SEQ ID NO: 1105099 - RNA, 27 nt, Human
ggccgaggcaggagaaucgcuugaacc

SEQ ID NO: 1105100 - RNA, 23 nt, Human
ggcgcaguggcucaugccuguaa

SEQ ID NO: 1105101 - RNA, 23 nt, Human
gggaggccgaggcagguggauca

SEQ ID NO: 1105102 - RNA, 22 nt, Human
gggcuccacucuuuccaggccc

SEQ ID NO: 1105103 - RNA, 25 nt, Human
ggggaccgcggggacagaggaggau

SEQ ID NO: 1105104 - RNA, 22 nt, Human
ggguaguggcacaugccuguaa

SEQ ID NO: 1105105 - RNA, 22 nt, Human
gucucauuuaaauauccucuca

SEQ ID NO: 1105106 - RNA, 21 nt, Human
guggaucacuugaggucagga

SEQ ID NO: 1105107 - RNA, 19 nt, Human
guugcagugagcugagauu

SEQ ID NO: 1105108 - RNA, 19 nt, Human
uaaaaauacaaaauuggcc

SEQ ID NO: 1105109 - RNA, 24 nt, Human
uaaauauccucucaucuggcaguc

SEQ ID NO: 1105110 - RNA, 19 nt, Human
uaaucccagcuaaucagga

SEQ ID NO: 1105111 - RNA, 18 nt, Human
uacauaagggucuguggg

SEQ ID NO: 1105112 - RNA, 21 nt, Human
uaccacacugacucccacaua

SEQ ID NO: 1105113 - RNA, 19 nt, Human
uaccggcuuucagcaggag

SEQ ID NO: 1105114 - RNA, 24 nt, Human
uaguggcacaugccuguaauccca

SEQ ID NO: 1105115 - RNA, 23 nt, Human
uauacacacagcgaaagcacaca

SEQ ID NO: 1105116 - RNA, 25 nt, Human
uauacacacagcgaaagcacacagc

SEQ ID NO: 1105117 - RNA, 23 nt, Human
uauguauacacuuaggaaauccc

SEQ ID NO: 1105118 - RNA, 19 nt, Human
ucaaaguaaacaggggagu

SEQ ID NO: 1105119 - RNA, 19 nt, Human
ucaagacauuguguacaga

SEQ ID NO: 1105120 - RNA, 20 nt, Human
ucaggaacuggguaaagguu

SEQ ID NO: 1105121 - RNA, 21 nt, Human
ucaucuggcagucacugaaga

SEQ ID NO: 1105122 - RNA, 19 nt, Human
ucauggcugguacagccug

SEQ ID NO: 1105123 - RNA, 23 nt, Human
uccaacagacacaaauaaagccc

SEQ ID NO: 1105124 - RNA, 18 nt, Human
uccaucucaaaaaaaaaa

SEQ ID NO: 1105125 - RNA, 23 nt, Human
uccaucucaaaaaaaaaagaaaa

SEQ ID NO: 1105126 - RNA, 23 nt, Human
ucccucaggcacgcccucagucc

SEQ ID NO: 1105127 - RNA, 26 nt, Human
ucccucaggcacgcccucaguccuac

SEQ ID NO: 1105128 - RNA, 30 nt, Human
ucccuuccuuggccaaacaggaacagggac

SEQ ID NO: 1105129 - RNA, 18 nt, Human
ucgcuugaacccgggagg

SEQ ID NO: 1105130 - RNA, 20 nt, Human
ucucuacuaaaaauacaaaa

SEQ ID NO: 1105131 - RNA, 26 nt, Human
ucucucucaggcaaaaaucgugagau

SEQ ID NO: 1105132 - RNA, 19 nt, Human
ucucucugccccugcaucc

SEQ ID NO: 1105133 - RNA, 23 nt, Human
ugacagucaucuuugcaaucccg

SEQ ID NO: 1105134 - RNA, 22 nt, Human
ugacgcgugugagaaacccgcc

SEQ ID NO: 1105135 - RNA, 22 nt, Human
ugagauuagaccacaaucuguu

SEQ ID NO: 1105136 - RNA, 23 nt, Human
ugagauuagaccacaaucuguug

SEQ ID NO: 1105137 - RNA, 24 nt, Human
ugagauugcaccauugcacuccag

SEQ ID NO: 1105138 - RNA, 22 nt, Human
ugaggagaguugcacgggccag

SEQ ID NO: 1105139 - RNA, 26 nt, Human
ugaggagaguugcacgggggacgucc

SEQ ID NO: 1105140 - RNA, 23 nt, Human
ugaggcaggaucacugcuccauu

SEQ ID NO: 1105141 - RNA, 25 nt, Human
ugcacuccagcgugggcaacaagag

SEQ ID NO: 1105142 - RNA, 21 nt, Human
ugcagcaggaggcugggacag

SEQ ID NO: 1105143 - RNA, 21 nt, Human
ugcaggcauuacaagaaagug

SEQ ID NO: 1105144 - RNA, 22 nt, Human
ugccagccggcaacuuggggcu

SEQ ID NO: 1105145 - RNA, 24 nt, Human
ugccaggagguccccagaaguacc

SEQ ID NO: 1105146 - RNA, 24 nt, Human
ugccuguaaucccagcauuucggg

SEQ ID NO: 1105147 - RNA, 24 nt, Human
ugccuguaaucccagcuaaucagg

SEQ ID NO: 1105148 - RNA, 23 nt, Human
ugcugcucucucugccccugcau

SEQ ID NO: 1105149 - RNA, 20 nt, Human
ugcuuguagacacacacccc

SEQ ID NO: 1105150 - RNA, 24 nt, Human
uggaucacuugaggucaggaguuc

SEQ ID NO: 1105151 - RNA, 27 nt, Human
uggaucacuugaggucaggaguuccag

SEQ ID NO: 1105152 - RNA, 19 nt, Human
uggcaaaccaaacaaacag

SEQ ID NO: 1105153 - RNA, 24 nt, Human
uggcaaaccaaacaaacagcaguc

SEQ ID NO: 1105154 - RNA, 21 nt, Human
uggcacaugccuguaauccca

SEQ ID NO: 1105155 - RNA, 22 nt, Human
uggcacaugccuguaaucccag

SEQ ID NO: 1105156 - RNA, 21 nt, Human
uggcccaggccaccauggagc

SEQ ID NO: 1105157 - RNA, 24 nt, Human
uggcccaggccaccauggagcaag

SEQ ID NO: 1105158 - RNA, 22 nt, Human
uggccggguaguggcacaugcc

SEQ ID NO: 1105159 - RNA, 24 nt, Human
uggccuggcgcaguggcucaugcc

SEQ ID NO: 1105160 - RNA, 18 nt, Human
uggcgcaguggcucaugc

SEQ ID NO: 1105161 - RNA, 24 nt, Human
uggcucaugccuguaaucccagca

SEQ ID NO: 1105162 - RNA, 19 nt, Human
uggcugcagcacaaacagc

SEQ ID NO: 1105163 - RNA, 24 nt, Human
uggcuggcuucacaucacccugga

SEQ ID NO: 1105164 - RNA, 22 nt, Human
uggguaaagguuggcugcagca

SEQ ID NO: 1105165 - RNA, 23 nt, Human
uguauacacacagcgaaagcaca

SEQ ID NO: 1105166 - RNA, 25 nt, Human
uguauacacacagcgaaagcacaca

SEQ ID NO: 1105167 - RNA, 20 nt, Human
ugucccugugaaagcaggau

SEQ ID NO: 1105168 - RNA, 22 nt, Human
ugugaaagcaggauccaggcug

SEQ ID NO: 1105169 - RNA, 19 nt, Human
uugcagugagcugagauug

SEQ ID NO: 1105170 - RNA, 20 nt, Human
uugcagugagcugagauugc

SEQ ID NO: 1105171 - RNA, 22 nt, Human
uugcagugagcugagauugcac

SEQ ID NO: 1105172 - RNA, 24 nt, Human
aagcccuuauguaacagaaggggu

SEQ ID NO: 1105173 - RNA, 24 nt, Human
aagcggggaccggacgaggcccua

SEQ ID NO: 1105174 - RNA, 24 nt, Human
aagcucucaggcaugcacagccac

SEQ ID NO: 1105175 - RNA, 22 nt, Human
aaugugcuggucgccuccaacu

SEQ ID NO: 1105176 - RNA, 19 nt, Human
accaagaucccauuuccug

SEQ ID NO: 1105177 - RNA, 21 nt, Human
accaagccuguggaggaugcc

SEQ ID NO: 1105178 - RNA, 22 nt, Human
acuucaauuuccccucuuguua

SEQ ID NO: 1105179 - RNA, 26 nt, Human
agaaaauauuucuuagaaaaucuuua

SEQ ID NO: 1105180 - RNA, 24 nt, Human
agaaauaauagagaaccaggacca

SEQ ID NO: 1105181 - RNA, 26 nt, Human
agaaccaggaccaacaugagguguuu

SEQ ID NO: 1105182 - RNA, 21 nt, Human
agaagggguuauuuguaagaa

SEQ ID NO: 1105183 - RNA, 22 nt, Human
agacagaaaguagauuaauggg

SEQ ID NO: 1105184 - RNA, 21 nt, Human
agacgacugggcaccccaggc

SEQ ID NO: 1105185 - RNA, 19 nt, Human
agagacagaaaguagauua

SEQ ID NO: 1105186 - RNA, 23 nt, Human
agagaggccgggugcuggccagg

SEQ ID NO: 1105187 - RNA, 22 nt, Human
agcacaggagcagccacaguga

SEQ ID NO: 1105188 - RNA, 25 nt, Human
agcugcuuugcccgugagcagguga

SEQ ID NO: 1105189 - RNA, 20 nt, Human
aggaaggcauugggagaaac

SEQ ID NO: 1105190 - RNA, 25 nt, Human
aggaaggcauugggagaaacggacu

SEQ ID NO: 1105191 - RNA, 21 nt, Human
aggaguucugagacuagucag

SEQ ID NO: 1105192 - RNA, 23 nt, Human
aggcaagugcacagauuggaccu

SEQ ID NO: 1105193 - RNA, 24 nt, Human
aggcaagugcacagauuggaccug

SEQ ID NO: 1105194 - RNA, 21 nt, Human
aggcgucuggccaggcuggua

SEQ ID NO: 1105195 - RNA, 20 nt, Human
agggaggugugggcagaggg

SEQ ID NO: 1105196 - RNA, 23 nt, Human
aggggaccauggcggcucacagc

SEQ ID NO: 1105197 - RNA, 20 nt, Human
agguagugcgcccagggcag

SEQ ID NO: 1105198 - RNA, 20 nt, Human
aucugucuggugcuucccuu

SEQ ID NO: 1105199 - RNA, 19 nt, Human
aucuugagcuguucugugc

SEQ ID NO: 1105200 - RNA, 22 nt, Human
caaaaugcacagggaacgagcg

SEQ ID NO: 1105201 - RNA, 24 nt, Human
caaaaugcacagggaacgagcgug

SEQ ID NO: 1105202 - RNA, 23 nt, Human
caagccuguggaggaugccacaa

SEQ ID NO: 1105203 - RNA, 22 nt, Human
cacagauuggaccuggcuacac

SEQ ID NO: 1105204 - RNA, 20 nt, Human
cacaucuguggaaauaaaau

SEQ ID NO: 1105205 - RNA, 23 nt, Human
caccauaggguucccuuuucccc

SEQ ID NO: 1105206 - RNA, 26 nt, Human
caccaugaagacgacugggcacccca

SEQ ID NO: 1105207 - RNA, 18 nt, Human
cacccuuggauaagcggg

SEQ ID NO: 1105208 - RNA, 19 nt, Human
cagagugcaguuggacagg

SEQ ID NO: 1105209 - RNA, 21 nt, Human
caggagcagccacagugaccc

SEQ ID NO: 1105210 - RNA, 19 nt, Human
caggcuccauccgagagaa

SEQ ID NO: 1105211 - RNA, 22 nt, Human
cagugcacacagguccuggggc

SEQ ID NO: 1105212 - RNA, 22 nt, Human
caugcuguagaccaagccugug

SEQ ID NO: 1105213 - RNA, 19 nt, Human
caugcuguuuaauuauggg

SEQ ID NO: 1105214 - RNA, 21 nt, Human
cauggcguuuggccugggcaa

SEQ ID NO: 1105215 - RNA, 23 nt, Human
ccacaaggagacaggucuugggg

SEQ ID NO: 1105216 - RNA, 18 nt, Human
ccacccagagugacuucc

SEQ ID NO: 1105217 - RNA, 19 nt, Human
ccagaggcaagugcacaga

SEQ ID NO: 1105218 - RNA, 19 nt, Human
ccagggcaggaaaauccac

SEQ ID NO: 1105219 - RNA, 23 nt, Human
ccaggggaccauggcggcucaca

SEQ ID NO: 1105220 - RNA, 24 nt, Human
ccccacccagagugacuucccaaa

SEQ ID NO: 1105221 - RNA, 21 nt, Human
ccccgcugcccgugggcggca

SEQ ID NO: 1105222 - RNA, 22 nt, Human
ccccuaaacuggagcucagccu

SEQ ID NO: 1105223 - RNA, 20 nt, Human
cccgugggcggcagcuucua

SEQ ID NO: 1105224 - RNA, 24 nt, Human
cccgugggcggcagcuucuagucc

SEQ ID NO: 1105225 - RNA, 18 nt, Human
cccuccuuccuuccuucc

SEQ ID NO: 1105226 - RNA, 19 nt, Human
cccuccuuccuuccuuccu

SEQ ID NO: 1105227 - RNA, 20 nt, Human
cccuccuuccuuccuuccuc

SEQ ID NO: 1105228 - RNA, 22 nt, Human
cccucuccauggugaccuaaaa

SEQ ID NO: 1105229 - RNA, 24 nt, Human
ccucggagggcucauggcuuugcc

SEQ ID NO: 1105230 - RNA, 18 nt, Human
ccugaggaugcaugcugu

SEQ ID NO: 1105231 - RNA, 21 nt, Human
ccuggcuacacuugaguccac

SEQ ID NO: 1105232 - RNA, 23 nt, Human
ccuguggaggaugccacaaggag

SEQ ID NO: 1105233 - RNA, 20 nt, Human
ccuguugcugcgcugcugug

SEQ ID NO: 1105234 - RNA, 24 nt, Human
ccuuccggcuucuucccuccuucc

SEQ ID NO: 1105235 - RNA, 18 nt, Human
ccuuccuguuucucuccc

SEQ ID NO: 1105236 - RNA, 23 nt, Human
ccuugccugcagccuuccccagc

SEQ ID NO: 1105237 - RNA, 23 nt, Human
cgacgagggacgccacaggagga

SEQ ID NO: 1105238 - RNA, 25 nt, Human
cgccagagagucaggauaguuuuaa

SEQ ID NO: 1105239 - RNA, 19 nt, Human
cuaaagcuacugaguugua

SEQ ID NO: 1105240 - RNA, 21 nt, Human
cucaggcccuggccucuggcc

SEQ ID NO: 1105241 - RNA, 18 nt, Human
cucgcagccacucaucuc

SEQ ID NO: 1105242 - RNA, 21 nt, Human
cugggucagggccaggaauag

SEQ ID NO: 1105243 - RNA, 25 nt, Human
cuguggcgcccccugcuggcugccc

SEQ ID NO: 1105244 - RNA, 23 nt, Human
cuguucugugcuggggaucgugg

SEQ ID NO: 1105245 - RNA, 21 nt, Human
cuucagcaguucccacccuuc

SEQ ID NO: 1105246 - RNA, 23 nt, Human
cuuggagggagggcagugggcac

SEQ ID NO: 1105247 - RNA, 21 nt, Human
cuuugcccagauuucuucccc

SEQ ID NO: 1105248 - RNA, 18 nt, Human
gaccauggcggcucacag

SEQ ID NO: 1105249 - RNA, 24 nt, Human
gacgugguguguccugaugccguc

SEQ ID NO: 1105250 - RNA, 20 nt, Human
gaugccggcaaccgggugcc

SEQ ID NO: 1105251 - RNA, 20 nt, Human
gccacagugacccgcaaggu

SEQ ID NO: 1105252 - RNA, 20 nt, Human
gcgcccccugcuggcugccc

SEQ ID NO: 1105253 - RNA, 20 nt, Human
gcgcugugucuguugcucag

SEQ ID NO: 1105254 - RNA, 18 nt, Human
gcgucuggccaggcuggu

SEQ ID NO: 1105255 - RNA, 19 nt, Human
gcucugaauccccucucca

SEQ ID NO: 1105256 - RNA, 22 nt, Human
ggacucggaacgaugcaaggca

SEQ ID NO: 1105257 - RNA, 23 nt, Human
ggacucggaacgaugcaaggcag

SEQ ID NO: 1105258 - RNA, 18 nt, Human
ggacuuggagggagggca

SEQ ID NO: 1105259 - RNA, 24 nt, Human
ggacuuggagggagggcagugggc

SEQ ID NO: 1105260 - RNA, 26 nt, Human
ggagacgugcucucccuuccggcuuc

SEQ ID NO: 1105261 - RNA, 21 nt, Human
ggaggacuuggagggagggca

SEQ ID NO: 1105262 - RNA, 21 nt, Human
ggaggacuuggagggagggca

SEQ ID NO: 1105263 - RNA, 22 nt, Human
ggaggacuuggagggagggcag

SEQ ID NO: 1105264 - RNA, 26 nt, Human
ggaggacuuggagggagggcaguggg

SEQ ID NO: 1105265 - RNA, 21 nt, Human
ggaggugugggcagagggcgu

SEQ ID NO: 1105266 - RNA, 22 nt, Human
ggcaagugcacagauuggaccu

SEQ ID NO: 1105267 - RNA, 24 nt, Human
ggccauggcguuuggccugggcaa

SEQ ID NO: 1105268 - RNA, 21 nt, Human
gggaccauggcggcucacagc

SEQ ID NO: 1105269 - RNA, 24 nt, Human
gggcaggcaccaucaccuacuuca

SEQ ID NO: 1105270 - RNA, 19 nt, Human
gggcagugggcacgguaga

SEQ ID NO: 1105271 - RNA, 21 nt, Human
gggcugaggagaggaaggcau

SEQ ID NO: 1105272 - RNA, 19 nt, Human
ggggagggauggggccugg

SEQ ID NO: 1105273 - RNA, 22 nt, Human
gguguggggcugaggagaggaa

SEQ ID NO: 1105274 - RNA, 18 nt, Human
gugggccggugaugccgg

SEQ ID NO: 1105275 - RNA, 22 nt, Human
uaagccuggaagaauccccuga

SEQ ID NO: 1105276 - RNA, 18 nt, Human
uaauagaagagugaguua

SEQ ID NO: 1105277 - RNA, 23 nt, Human
uaccuccaccccggugcaagcuc

SEQ ID NO: 1105278 - RNA, 23 nt, Human
uagaaaaucuuuaguuugaaaac

SEQ ID NO: 1105279 - RNA, 21 nt, Human
uagacggugaucuugagcugu

SEQ ID NO: 1105280 - RNA, 22 nt, Human
uagggaggugugggcagagggc

SEQ ID NO: 1105281 - RNA, 21 nt, Human
ucaucagaaugugcuggucgc

SEQ ID NO: 1105282 - RNA, 18 nt, Human
uccacagagacagaaagu

SEQ ID NO: 1105283 - RNA, 19 nt, Human
uccacagagacagaaagua

SEQ ID NO: 1105284 - RNA, 23 nt, Human
uccacagagacagaaaguagauu

SEQ ID NO: 1105285 - RNA, 18 nt, Human
uccacugaguccagaaac

SEQ ID NO: 1105286 - RNA, 27 nt, Human
uccacugaguccagaaacagcggaccg

SEQ ID NO: 1105287 - RNA, 24 nt, Human
uccagggcaggaaaauccacagag

SEQ ID NO: 1105288 - RNA, 19 nt, Human
ucccaaaaggcagcacuac

SEQ ID NO: 1105289 - RNA, 25 nt, Human
ucccuuguugagcgcucgcaggaau

SEQ ID NO: 1105290 - RNA, 24 nt, Human
uccggcuucuucccuccuuccuuc

SEQ ID NO: 1105291 - RNA, 18 nt, Human
uccugaggcgaccccagc

SEQ ID NO: 1105292 - RNA, 22 nt, Human
ucguugguugaggcugccccuc

SEQ ID NO: 1105293 - RNA, 20 nt, Human
ucuccaaaugcccaugaguu

SEQ ID NO: 1105294 - RNA, 23 nt, Human
ucuggaaaagauaaaacugccaa

SEQ ID NO: 1105295 - RNA, 22 nt, Human
ucuggugcuucccuuguugagc

SEQ ID NO: 1105296 - RNA, 19 nt, Human
ucuguuccggagacuuccc

SEQ ID NO: 1105297 - RNA, 22 nt, Human
ugaaaucaaguguggcggaugc

SEQ ID NO: 1105298 - RNA, 20 nt, Human
ugaccggagcgugaaggcga

SEQ ID NO: 1105299 - RNA, 21 nt, Human
ugacucgcagccacucaucuc

SEQ ID NO: 1105300 - RNA, 20 nt, Human
ugaggagaggaaggcauugg

SEQ ID NO: 1105301 - RNA, 19 nt, Human
ugaggugcagagaggccgg

SEQ ID NO: 1105302 - RNA, 21 nt, Human
ugccuguugcugcgcugcugu

SEQ ID NO: 1105303 - RNA, 18 nt, Human
ugcuggggaucguggcca

SEQ ID NO: 1105304 - RNA, 24 nt, Human
ugcuguagaccaagccuguggagg

SEQ ID NO: 1105305 - RNA, 18 nt, Human
ugcuguggcgcccccugc

SEQ ID NO: 1105306 - RNA, 21 nt, Human
uggaaaccuuuggaagaggca

SEQ ID NO: 1105307 - RNA, 20 nt, Human
uggaagaggcaccuucagca

SEQ ID NO: 1105308 - RNA, 18 nt, Human
uggcacacgcccugcagg

SEQ ID NO: 1105309 - RNA, 20 nt, Human
uggcagauggggguagacgg

SEQ ID NO: 1105310 - RNA, 22 nt, Human
uggcauguguuuugacccagug

SEQ ID NO: 1105311 - RNA, 27 nt, Human
uggccaggcugguagggaggugugggc

SEQ ID NO: 1105312 - RNA, 19 nt, Human
uggccucuggcacacgccc

SEQ ID NO: 1105313 - RNA, 20 nt, Human
uggccucuggcacacgcccu

SEQ ID NO: 1105314 - RNA, 23 nt, Human
ugggcaauucaccaggggaccau

SEQ ID NO: 1105315 - RNA, 24 nt, Human
ugucuguugcucaggcccuggccu

SEQ ID NO: 1105316 - RNA, 21 nt, Human
uguucugugcuggggaucgug

SEQ ID NO: 1105317 - RNA, 18 nt, Human
uucagggauuuuuuuaau

SEQ ID NO: 1105318 - RNA, 27 nt, Human
uuccagaaaacacuucuuuccuggugg

SEQ ID NO: 1105319 - RNA, 24 nt, Human
uuccuguuucucucccuuccccag

SEQ ID NO: 1105320 - RNA, 23 nt, Human
uucuguuccggagacuucccagg

SEQ ID NO: 1105321 - RNA, 22 nt, Human
uugcugcgcugcuguggcgccc

SEQ ID NO: 1105322 - RNA, 22 nt, Human
uuguacacuuuaaaaugguuaa

SEQ ID NO: 1105323 - RNA, 25 nt, Human
uuugacccagugguguaguucuucc

SEQ ID NO: 1105324 - RNA, 18 nt, Human
aaaaaaaggcugggccca

SEQ ID NO: 1105325 - RNA, 19 nt, Human
aaaaaaaggcugggcccac

SEQ ID NO: 1105326 - RNA, 25 nt, Human
aaacaagaugaagauacaaaaaugg

SEQ ID NO: 1105327 - RNA, 24 nt, Human
aaacacuggaagcacgagauagcc

SEQ ID NO: 1105328 - RNA, 23 nt, Human
aagaaaaggugaaaaagagggac

SEQ ID NO: 1105329 - RNA, 18 nt, Human
aagaagcuaacugauagu

SEQ ID NO: 1105330 - RNA, 21 nt, Human
aagugcugcagccucuaagcc

SEQ ID NO: 1105331 - RNA, 18 nt, Human
acacacccacucccccuc

SEQ ID NO: 1105332 - RNA, 23 nt, Human
acacccacucccccucaccccca

SEQ ID NO: 1105333 - RNA, 19 nt, Human
accacaguacguuucagca

SEQ ID NO: 1105334 - RNA, 20 nt, Human
acccacucccccucaccccc

SEQ ID NO: 1105335 - RNA, 18 nt, Human
acccagauaacugaaaaa

SEQ ID NO: 1105336 - RNA, 23 nt, Human
agauagccgacguggaccaggac

SEQ ID NO: 1105337 - RNA, 25 nt, Human
aggaaguaauucagcacagcagaac

SEQ ID NO: 1105338 - RNA, 22 nt, Human
agggcggauguccaaagaugcu

SEQ ID NO: 1105339 - RNA, 24 nt, Human
aggucuggcuggcgagcagcagaa

SEQ ID NO: 1105340 - RNA, 22 nt, Human
agugcaaucuucaguuaugccu

SEQ ID NO: 1105341 - RNA, 21 nt, Human
augcacacgauacaaaaaaaa

SEQ ID NO: 1105342 - RNA, 20 nt, Human
caacagaacaaaagcagcgu

SEQ ID NO: 1105343 - RNA, 21 nt, Human
caagaaaaggugaaaaagaua

SEQ ID NO: 1105344 - RNA, 25 nt, Human
caagaaaaggugaaaaagauacaca

SEQ ID NO: 1105345 - RNA, 23 nt, Human
cacacaaaggcgcgcgcagccaa

SEQ ID NO: 1105346 - RNA, 21 nt, Human
cacacccguuuuaagaggaaa

SEQ ID NO: 1105347 - RNA, 23 nt, Human
cacacgauacaaaaaaaaaggcc

SEQ ID NO: 1105348 - RNA, 25 nt, Human
cacacgauacaaaaaaaaaggcugg

SEQ ID NO: 1105349 - RNA, 21 nt, Human
cacaguacguuucagcagggu

SEQ ID NO: 1105350 - RNA, 20 nt, Human
cagaagggagccggcuguua

SEQ ID NO: 1105351 - RNA, 24 nt, Human
cagcacagcagaacacgcuacccc

SEQ ID NO: 1105352 - RNA, 20 nt, Human
cagcagaacacgcuaccccu

SEQ ID NO: 1105353 - RNA, 20 nt, Human
cagcagaagggagccggcug

SEQ ID NO: 1105354 - RNA, 24 nt, Human
cauuucaaggagaucgcauccagc

SEQ ID NO: 1105355 - RNA, 21 nt, Human
ccaaggcaaaaggaauccacu

SEQ ID NO: 1105356 - RNA, 23 nt, Human
cccauggcuaggcuggccugaga

SEQ ID NO: 1105357 - RNA, 20 nt, Human
ccccccucuuucuuccucac

SEQ ID NO: 1105358 - RNA, 27 nt, Human
ccccccucuuucuuccucacacaccca

SEQ ID NO: 1105359 - RNA, 22 nt, Human
cccccucuuucuuccucacaca

SEQ ID NO: 1105360 - RNA, 19 nt, Human
ccuacauccuacacuacua

SEQ ID NO: 1105361 - RNA, 19 nt, Human
ccucacacacccacucccc

SEQ ID NO: 1105362 - RNA, 23 nt, Human
ccucacacacccacucccccuca

SEQ ID NO: 1105363 - RNA, 21 nt, Human
ccucgcgcggcggcggcggcg

SEQ ID NO: 1105364 - RNA, 21 nt, Human
cgccacacaaaggcgcgcgca

SEQ ID NO: 1105365 - RNA, 21 nt, Human
cgcggcggcggcggcggcggu

SEQ ID NO: 1105366 - RNA, 24 nt, Human
cggaagggcaacagaacaaaagca

SEQ ID NO: 1105367 - RNA, 25 nt, Human
cgucaugcacacgauacaaaaaaaa

SEQ ID NO: 1105368 - RNA, 26 nt, Human
cucacacacccacucccccucacccc

SEQ ID NO: 1105369 - RNA, 28 nt, Human
cucacacacccacucccccucaccccca

SEQ ID NO: 1105370 - RNA, 19 nt, Human
cucuuucuuuucagauugc

SEQ ID NO: 1105371 - RNA, 26 nt, Human
cuuuucuuuucuuuuuucucuuucuu

SEQ ID NO: 1105372 - RNA, 20 nt, Human
gagcagcagaagggagccgg

SEQ ID NO: 1105373 - RNA, 19 nt, Human
gagcggagcgcagcgcggc

SEQ ID NO: 1105374 - RNA, 22 nt, Human
gcaaugccuuccucagauggag

SEQ ID NO: 1105375 - RNA, 22 nt, Human
gcacagcagaacacgcuacccc

SEQ ID NO: 1105376 - RNA, 24 nt, Human
gccauggcucccacuuaagccagg

SEQ ID NO: 1105377 - RNA, 19 nt, Human
gcggcggcggcggcggcgg

SEQ ID NO: 1105378 - RNA, 24 nt, Human
gcggcggcggcggcggcgguggcg

SEQ ID NO: 1105379 - RNA, 20 nt, Human
gcggcggcggcggcgguggc

SEQ ID NO: 1105380 - RNA, 21 nt, Human
gcggcggcgguggcggggagg

SEQ ID NO: 1105381 - RNA, 20 nt, Human
ggagcgcagcgcggcgcggc

SEQ ID NO: 1105382 - RNA, 20 nt, Human
ggcaaacucucuaauaguuu

SEQ ID NO: 1105383 - RNA, 19 nt, Human
ggcggcggcggcggcggug

SEQ ID NO: 1105384 - RNA, 20 nt, Human
ggcggcggcggcggcggugg

SEQ ID NO: 1105385 - RNA, 23 nt, Human
ggcggcggcggcggcgguggcgg

SEQ ID NO: 1105386 - RNA, 20 nt, Human
ggcuacacgaccacaguacg

SEQ ID NO: 1105387 - RNA, 23 nt, Human
gggccagggcggauguccaaaga

SEQ ID NO: 1105388 - RNA, 20 nt, Human
ggguggcauuucaaggagaa

SEQ ID NO: 1105389 - RNA, 19 nt, Human
gugaaaaagauacacaacc

SEQ ID NO: 1105390 - RNA, 19 nt, Human
uaagacgcuauggccaugg

SEQ ID NO: 1105391 - RNA, 22 nt, Human
uaagaggaaaugccaaguaaua

SEQ ID NO: 1105392 - RNA, 21 nt, Human
uaauacauauguuuaacauuu

SEQ ID NO: 1105393 - RNA, 23 nt, Human
uacaaaaaaaaaggcugggccca

SEQ ID NO: 1105394 - RNA, 19 nt, Human
uacaagaagauugugguuu

SEQ ID NO: 1105395 - RNA, 23 nt, Human
uagcaaugccuuccucagaugga

SEQ ID NO: 1105396 - RNA, 21 nt, Human
ucacaauacagcuaaaugcgg

SEQ ID NO: 1105397 - RNA, 25 nt, Human
ucacacacccacucccccucacccc

SEQ ID NO: 1105398 - RNA, 20 nt, Human
ucccacuuaagccagggacc

SEQ ID NO: 1105399 - RNA, 24 nt, Human
ucgcgcggcggcggcggcggcuuu

SEQ ID NO: 1105400 - RNA, 20 nt, Human
ucugcgaaauuuuacccaca

SEQ ID NO: 1105401 - RNA, 25 nt, Human
ucuucaguuaugccugggugcugcc

SEQ ID NO: 1105402 - RNA, 18 nt, Human
ugagauaggggauacugc

SEQ ID NO: 1105403 - RNA, 23 nt, Human
ugcagccucuaagccaaggcaaa

SEQ ID NO: 1105404 - RNA, 19 nt, Human
ugccaaguaauaagagaua

SEQ ID NO: 1105405 - RNA, 18 nt, Human
ugcggaggcagaaggguc

SEQ ID NO: 1105406 - RNA, 18 nt, Human
uggaagcacgagauagcc

SEQ ID NO: 1105407 - RNA, 18 nt, Human
ugggauucuuuuuucuuu

SEQ ID NO: 1105408 - RNA, 18 nt, Human
uguuuuguuucaguuuuc

SEQ ID NO: 1105409 - RNA, 19 nt, Human
uuaaauagcaaugccuucc

SEQ ID NO: 1105410 - RNA, 21 nt, Human
uuaaauagcaaugccuuccuc

SEQ ID NO: 1105411 - RNA, 24 nt, Human
uugcugggauucuuuuuucuuuuc

SEQ ID NO: 1105412 - RNA, 22 nt, Human
uuuaacauuuuuugccuccaac

SEQ ID NO: 1105413 - RNA, 20 nt, Human
uuucgcacagagccaaacac

SEQ ID NO: 1105414 - RNA, 22 nt, Human
uuucuuuucagauugccaaaug

SEQ ID NO: 1105415 - RNA, 23 nt, Human
aaaagaccagagaggccaaccuu

SEQ ID NO: 1105416 - RNA, 19 nt, Human
aaacaaaaaagaccagaga

SEQ ID NO: 1105417 - RNA, 19 nt, Human
aaacaaacaaaaaagacca

SEQ ID NO: 1105418 - RNA, 18 nt, Human
aaagaccagagaggccaa

SEQ ID NO: 1105419 - RNA, 23 nt, Human
aaagggaagcugcaggccaccaa

SEQ ID NO: 1105420 - RNA, 20 nt, Human
aacauggcagaaggcuuccu

SEQ ID NO: 1105421 - RNA, 21 nt, Human
aagcacugcucugcuuccucc

SEQ ID NO: 1105422 - RNA, 20 nt, Human
aagcuagccacagugagggc

SEQ ID NO: 1105423 - RNA, 24 nt, Human
aagcugaggugggaggaucacuug

SEQ ID NO: 1105424 - RNA, 18 nt, Human
acaaccagcucccacgua

SEQ ID NO: 1105425 - RNA, 23 nt, Human
acagagggagacucugucucaaa

SEQ ID NO: 1105426 - RNA, 24 nt, Human
accaagacccugccaggucccuaa

SEQ ID NO: 1105427 - RNA, 20 nt, Human
accacaaacucccggagggc

SEQ ID NO: 1105428 - RNA, 18 nt, Human
accacccucuagccuggg

SEQ ID NO: 1105429 - RNA, 18 nt, Human
accacccucuagccuggg

SEQ ID NO: 1105430 - RNA, 24 nt, Human
accacccucuagccugggugacag

SEQ ID NO: 1105431 - RNA, 23 nt, Human
acccaggugucgaggcugcagug

SEQ ID NO: 1105432 - RNA, 25 nt, Human
acuagcuccccggcaccuggcacca

SEQ ID NO: 1105433 - RNA, 22 nt, Human
acucugucucaaacaaacaaac

SEQ ID NO: 1105434 - RNA, 20 nt, Human
agaaucacuacucaaggaca

SEQ ID NO: 1105435 - RNA, 22 nt, Human
agauagaaauugagggccguuc

SEQ ID NO: 1105436 - RNA, 20 nt, Human
agccacaggcaccuggcucc

SEQ ID NO: 1105437 - RNA, 18 nt, Human
agccauauuuauaucacc

SEQ ID NO: 1105438 - RNA, 24 nt, Human
agccugggugacagagggagacuc

SEQ ID NO: 1105439 - RNA, 20 nt, Human
agggaaguggcgggggauug

SEQ ID NO: 1105440 - RNA, 18 nt, Human
aggugggaggaucacuug

SEQ ID NO: 1105441 - RNA, 23 nt, Human
aggugggaggaucacuugaaccc

SEQ ID NO: 1105442 - RNA, 23 nt, Human
aggugucgaggcugcagugagcc

SEQ ID NO: 1105443 - RNA, 18 nt, Human
agucugcacugcauggug

SEQ ID NO: 1105444 - RNA, 24 nt, Human
aucaccacccucuagccuggguga

SEQ ID NO: 1105445 - RNA, 20 nt, Human
auggcacgugccuguggucc

SEQ ID NO: 1105446 - RNA, 23 nt, Human
augguggcguggugacagggcug

SEQ ID NO: 1105447 - RNA, 21 nt, Human
caaaaaagaccagagaggcca

SEQ ID NO: 1105448 - RNA, 22 nt, Human
caaaaaagaccagagaggccaa

SEQ ID NO: 1105449 - RNA, 18 nt, Human
caaacaaacaaaaaagac

SEQ ID NO: 1105450 - RNA, 26 nt, Human
caaacaaacaaacaaaaaagaccaga

SEQ ID NO: 1105451 - RNA, 23 nt, Human
cacaacaugagcacucaauaaau

SEQ ID NO: 1105452 - RNA, 21 nt, Human
cacaccagaccacaaacuccc

SEQ ID NO: 1105453 - RNA, 20 nt, Human
caccacccucuagccugggu

SEQ ID NO: 1105454 - RNA, 23 nt, Human
caccacccucuagccugggugac

SEQ ID NO: 1105455 - RNA, 25 nt, Human
caccagcugccccauaaagugaucu

SEQ ID NO: 1105456 - RNA, 19 nt, Human
caccaugccuggcacaaca

SEQ ID NO: 1105457 - RNA, 19 nt, Human
cagaaagggaagcugcagg

SEQ ID NO: 1105458 - RNA, 20 nt, Human
caggccaccaagacccugcc

SEQ ID NO: 1105459 - RNA, 22 nt, Human
cagggggcaccagcugccccau

SEQ ID NO: 1105460 - RNA, 19 nt, Human
ccagcacucuacucugccu

SEQ ID NO: 1105461 - RNA, 19 nt, Human
cccagauaacugucccuga

SEQ ID NO: 1105462 - RNA, 23 nt, Human
ccccagggggcaccagcugcccc

SEQ ID NO: 1105463 - RNA, 22 nt, Human
ccccauaaagugaucuugagca

SEQ ID NO: 1105464 - RNA, 24 nt, Human
ccccggcaccuggcaccaugccug

SEQ ID NO: 1105465 - RNA, 20 nt, Human
ccccuccuccaccucuccca

SEQ ID NO: 1105466 - RNA, 18 nt, Human
cccuccuccaccucuccc

SEQ ID NO: 1105467 - RNA, 23 nt, Human
ccugccaggucccuaaauuguau

SEQ ID NO: 1105468 - RNA, 23 nt, Human
ccuggcuccagggcaaaagguuc

SEQ ID NO: 1105469 - RNA, 22 nt, Human
ccugggugacagagggagacuc

SEQ ID NO: 1105470 - RNA, 24 nt, Human
cucaaacaaacaaacaaaaaagac

SEQ ID NO: 1105471 - RNA, 19 nt, Human
cucccaugcugacuccagc

SEQ ID NO: 1105472 - RNA, 23 nt, Human
cugagucauuuacuuguuuuugc

SEQ ID NO: 1105473 - RNA, 23 nt, Human
cugucucaaacaaacaaacaaaa

SEQ ID NO: 1105474 - RNA, 21 nt, Human
cuuugugcuuggcuaagcacu

SEQ ID NO: 1105475 - RNA, 22 nt, Human
gaagccacucccaggcacagcc

SEQ ID NO: 1105476 - RNA, 23 nt, Human
gaaggcuuccagagucaacacca

SEQ ID NO: 1105477 - RNA, 24 nt, Human
gacagagggagacucugucucaaa

SEQ ID NO: 1105478 - RNA, 20 nt, Human
gagugugggagccccagggg

SEQ ID NO: 1105479 - RNA, 23 nt, Human
gaucacuugaacccaggugucga

SEQ ID NO: 1105480 - RNA, 22 nt, Human
gcacagccacaggcaccuggcu

SEQ ID NO: 1105481 - RNA, 22 nt, Human
gcagagugugggagccccaggg

SEQ ID NO: 1105482 - RNA, 20 nt, Human
gccaccaagacccugccagg

SEQ ID NO: 1105483 - RNA, 19 nt, Human
gccccagggggcaccagcu

SEQ ID NO: 1105484 - RNA, 25 nt, Human
gccugggcugaagccacucccaggc

SEQ ID NO: 1105485 - RNA, 26 nt, Human
gcuuauugagauacaguguugucguc

SEQ ID NO: 1105486 - RNA, 25 nt, Human
ggaggaacauggcagaaggcuucca

SEQ ID NO: 1105487 - RNA, 21 nt, Human
ggcgggggauugguuccaaac

SEQ ID NO: 1105488 - RNA, 27 nt, Human
gggaaguggcgggggauugguuccaaa

SEQ ID NO: 1105489 - RNA, 23 nt, Human
ggguuuagcacaaaggaagacau

SEQ ID NO: 1105490 - RNA, 21 nt, Human
ggugacagggcuguggaggaa

SEQ ID NO: 1105491 - RNA, 24 nt, Human
gugcagagugugggagccccaggg

SEQ ID NO: 1105492 - RNA, 22 nt, Human
uaagcacugcucugcuuccucc

SEQ ID NO: 1105493 - RNA, 22 nt, Human
uagccacagugagggccagacg

SEQ ID NO: 1105494 - RNA, 21 nt, Human
uagccugggugacagagggag

SEQ ID NO: 1105495 - RNA, 19 nt, Human
uagugggcagagcugccgc

SEQ ID NO: 1105496 - RNA, 21 nt, Human
uaucugagaaguaucugcugc

SEQ ID NO: 1105497 - RNA, 22 nt, Human
uaucugagaaguaucugcugcu

SEQ ID NO: 1105498 - RNA, 22 nt, Human
ucaaggacagccacacacaagc

SEQ ID NO: 1105499 - RNA, 24 nt, Human
ucaccacccucuagccugggugac

SEQ ID NO: 1105500 - RNA, 22 nt, Human
ucagaaucacuacucaaggaca

SEQ ID NO: 1105501 - RNA, 25 nt, Human
ucccugcucucagcaaagucaaggg

SEQ ID NO: 1105502 - RNA, 20 nt, Human
ucuagccugggugacagagg

SEQ ID NO: 1105503 - RNA, 20 nt, Human
ucugcuuccucccugcucuc

SEQ ID NO: 1105504 - RNA, 21 nt, Human
ucuguccuggcuuuacuuggg

SEQ ID NO: 1105505 - RNA, 18 nt, Human
ugaagaagaguuauggcu

SEQ ID NO: 1105506 - RNA, 23 nt, Human
ugacagauacaaaguacccugau

SEQ ID NO: 1105507 - RNA, 24 nt, Human
ugagggccagacgucccacuggag

SEQ ID NO: 1105508 - RNA, 18 nt, Human
ugaggugggaggaucacu

SEQ ID NO: 1105509 - RNA, 19 nt, Human
ugaggugggaggaucacuu

SEQ ID NO: 1105510 - RNA, 20 nt, Human
ugaggugggaggaucacuug

SEQ ID NO: 1105511 - RNA, 18 nt, Human
ugauaguguucagcacaa

SEQ ID NO: 1105512 - RNA, 23 nt, Human
ugcaugguggcguggugacaggg

SEQ ID NO: 1105513 - RNA, 22 nt, Human
ugccucugaccuugagccaccu

SEQ ID NO: 1105514 - RNA, 24 nt, Human
ugccugugguccuagcuacuuggg

SEQ ID NO: 1105515 - RNA, 23 nt, Human
ugcucugcuuccucccugcucuc

SEQ ID NO: 1105516 - RNA, 24 nt, Human
ugcucugcuuccucccugcucuca

SEQ ID NO: 1105517 - RNA, 18 nt, Human
uggcacaacaugagcacu

SEQ ID NO: 1105518 - RNA, 24 nt, Human
uggcacgugccugugguccuagcu

SEQ ID NO: 1105519 - RNA, 22 nt, Human
uggcagaaggcuuccagaguca

SEQ ID NO: 1105520 - RNA, 21 nt, Human
uggcaggagcugccacuuggg

SEQ ID NO: 1105521 - RNA, 20 nt, Human
uggcguggugacagggcugu

SEQ ID NO: 1105522 - RNA, 19 nt, Human
ugggaagcugaggugggag

SEQ ID NO: 1105523 - RNA, 24 nt, Human
ugggaagcugaggugggaggauca

SEQ ID NO: 1105524 - RNA, 24 nt, Human
ugggaggaucacuugaacccaggu

SEQ ID NO: 1105525 - RNA, 24 nt, Human
ugggcugaagccacucccaggcac

SEQ ID NO: 1105526 - RNA, 21 nt, Human
uggggagggaaguggcggggg

SEQ ID NO: 1105527 - RNA, 18 nt, Human
ugggugacagagggagac

SEQ ID NO: 1105528 - RNA, 20 nt, Human
uguaugugcagaguguggga

SEQ ID NO: 1105529 - RNA, 18 nt, Human
uguuuuugcugccuuuca

SEQ ID NO: 1105530 - RNA, 23 nt, Human
uuaacgucuguauacacacacac

SEQ ID NO: 1105531 - RNA, 24 nt, Human
uucaaacacagugacagauacaaa

SEQ ID NO: 1105532 - RNA, 25 nt, Human
uugggaagcugaggugggaggauca

SEQ ID NO: 1105533 - RNA, 21 nt, Human
uuguaugugcagaguguggga

SEQ ID NO: 1105534 - RNA, 23 nt, Human
uuuuaagaaaauacauagacaaa

SEQ ID NO: 1105535 - RNA, 24 nt, Human
aagaaaauuuguauuauuuuaauu

SEQ ID NO: 1105536 - RNA, 18 nt, Human
uguacagaaaacucaaca

SEQ ID NO: 1105537 - RNA, 24 nt, Human
aaaaaaaaaaaaaagggcgcagaa

SEQ ID NO: 1105538 - RNA, 25 nt, Human
aaaaaaaaaaaaaagggcgcagaaa

SEQ ID NO: 1105539 - RNA, 19 nt, Human
aaagcacuuucuuugaaac

SEQ ID NO: 1105540 - RNA, 22 nt, Human
aacaguacaaauacaacaaagu

SEQ ID NO: 1105541 - RNA, 19 nt, Human
aacuuaugcugcuuuccuc

SEQ ID NO: 1105542 - RNA, 18 nt, Human
aagcaggggaaggagggg

SEQ ID NO: 1105543 - RNA, 23 nt, Human
acaccacggaggaacugggaaac

SEQ ID NO: 1105544 - RNA, 23 nt, Human
accaaaaaaaaaaaauuguacaa

SEQ ID NO: 1105545 - RNA, 18 nt, Human
accccaacacaaccuggc

SEQ ID NO: 1105546 - RNA, 19 nt, Human
accuggaugauagaaucca

SEQ ID NO: 1105547 - RNA, 23 nt, Human
acuacaccacaauaaccauguag

SEQ ID NO: 1105548 - RNA, 21 nt, Human
acugaagacgacaggaauuuu

SEQ ID NO: 1105549 - RNA, 19 nt, Human
acugagugcaaagguucug

SEQ ID NO: 1105550 - RNA, 21 nt, Human
agaaaacuaagaaccuacuca

SEQ ID NO: 1105551 - RNA, 19 nt, Human
agacacauguagaaaucag

SEQ ID NO: 1105552 - RNA, 20 nt, Human
agacuggaguuucuuccgac

SEQ ID NO: 1105553 - RNA, 21 nt, Human
agaguuccuguucuaggacuc

SEQ ID NO: 1105554 - RNA, 23 nt, Human
agaguuccuguucuaggacucuu

SEQ ID NO: 1105555 - RNA, 27 nt, Human
agauguaaacauucagaauacugaccc

SEQ ID NO: 1105556 - RNA, 19 nt, Human
auaaagcaccauauguacc

SEQ ID NO: 1105557 - RNA, 23 nt, Human
aucucaucagccucaauuguacc

SEQ ID NO: 1105558 - RNA, 18 nt, Human
auucagaauacugaccaa

SEQ ID NO: 1105559 - RNA, 27 nt, Human
caaagacaccacugauaaggaugccac

SEQ ID NO: 1105560 - RNA, 24 nt, Human
caauaaccauguaguaaauaauau

SEQ ID NO: 1105561 - RNA, 21 nt, Human
cacacuacaccacaauaacca

SEQ ID NO: 1105562 - RNA, 19 nt, Human
caccacaauaaccauguag

SEQ ID NO: 1105563 - RNA, 20 nt, Human
caccauauguaccagcuugu

SEQ ID NO: 1105564 - RNA, 18 nt, Human
caccucaggcauaugcau

SEQ ID NO: 1105565 - RNA, 27 nt, Human
cagacacauguagaaaucagaaaacua

SEQ ID NO: 1105566 - RNA, 27 nt, Human
cagcaguacaagaaaauuauggcaacc

SEQ ID NO: 1105567 - RNA, 24 nt, Human
caguaaucaggauaaugcacaugc

SEQ ID NO: 1105568 - RNA, 20 nt, Human
cauaucuuauaggaggagga

SEQ ID NO: 1105569 - RNA, 21 nt, Human
cauaucuuauaggaggaggaa

SEQ ID NO: 1105570 - RNA, 27 nt, Human
caucccagaaacacauaccaucccaaa

SEQ ID NO: 1105571 - RNA, 29 nt, Human
ccaaaaaaaaaaaauuguacaaacgaacu

SEQ ID NO: 1105572 - RNA, 23 nt, Human
ccagaaacacauaccaucccaaa

SEQ ID NO: 1105573 - RNA, 20 nt, Human
ccgcugugcugggccucacc

SEQ ID NO: 1105574 - RNA, 25 nt, Human
cuaacauuugcacacuacaccacaa

SEQ ID NO: 1105575 - RNA, 26 nt, Human
cuauaaaauaucugacccacauuuua

SEQ ID NO: 1105576 - RNA, 21 nt, Human
cucugcaugcucaggggguca

SEQ ID NO: 1105577 - RNA, 18 nt, Human
cucuucuuccuuucccuu

SEQ ID NO: 1105578 - RNA, 20 nt, Human
cugguauagcagugaaugaa

SEQ ID NO: 1105579 - RNA, 20 nt, Human
gaauuuggaaggaguuggca

SEQ ID NO: 1105580 - RNA, 21 nt, Human
gacucugggcucugcaugcuc

SEQ ID NO: 1105581 - RNA, 20 nt, Human
gaucuucgaaaucaggauga

SEQ ID NO: 1105582 - RNA, 18 nt, Human
ggaaggaggggaauacag

SEQ ID NO: 1105583 - RNA, 23 nt, Human
ggcuucagcuucuaaaaccuggg

SEQ ID NO: 1105584 - RNA, 24 nt, Human
gggccuucgcccccaaucuguguu

SEQ ID NO: 1105585 - RNA, 20 nt, Human
guucagggccuucgccccca

SEQ ID NO: 1105586 - RNA, 18 nt, Human
uaccucacauacugagug

SEQ ID NO: 1105587 - RNA, 23 nt, Human
uagcagugaaugaauuuggaagg

SEQ ID NO: 1105588 - RNA, 23 nt, Human
uauacaccucaggcauaugcaua

SEQ ID NO: 1105589 - RNA, 25 nt, Human
uauagcaaccaggcucaaccucaua

SEQ ID NO: 1105590 - RNA, 24 nt, Human
uauguaccagcuuguuuuugugua

SEQ ID NO: 1105591 - RNA, 22 nt, Human
uaugugaaaaaucaaaacauac

SEQ ID NO: 1105592 - RNA, 19 nt, Human
ucacauuuugcuguuacac

SEQ ID NO: 1105593 - RNA, 24 nt, Human
ucagaaaacuaagaaccuacucag

SEQ ID NO: 1105594 - RNA, 19 nt, Human
ucagccucaauuguaccuc

SEQ ID NO: 1105595 - RNA, 23 nt, Human
ucagggccuucgcccccaaucug

SEQ ID NO: 1105596 - RNA, 24 nt, Human
ugagaacacuaggaauuugaacug

SEQ ID NO: 1105597 - RNA, 21 nt, Human
ugauauaaaaugucuauguag

SEQ ID NO: 1105598 - RNA, 23 nt, Human
ugaugugaugguuuucaauuugc

SEQ ID NO: 1105599 - RNA, 19 nt, Human
uggaguuucuuccgacacc

SEQ ID NO: 1105600 - RNA, 24 nt, Human
uggauuuuguguguauauauauau

SEQ ID NO: 1105601 - RNA, 24 nt, Human
uggcaaccaaguaaagcacuuucu

SEQ ID NO: 1105602 - RNA, 24 nt, Human
uggcaggcagugaagagaaaacua

SEQ ID NO: 1105603 - RNA, 19 nt, Human
ugguauagcagugaaugaa

SEQ ID NO: 1105604 - RNA, 18 nt, Human
uguaccagcuuguuuuug

SEQ ID NO: 1105605 - RNA, 23 nt, Human
uguagacaguaucugacacuggu

SEQ ID NO: 1105606 - RNA, 21 nt, Human
uuaaauggcuaaugucaaaca

SEQ ID NO: 1105607 - RNA, 22 nt, Human
uuaaauggcuaaugucaaacag

SEQ ID NO: 1105608 - RNA, 23 nt, Human
uucacauuuugcuguuacacugu

SEQ ID NO: 1105609 - RNA, 23 nt, Human
uuguguguauauauauauuaaau

SEQ ID NO: 1105610 - RNA, 23 nt, Human
uuugcacauagcagacacaugua

SEQ ID NO: 1105611 - RNA, 20 nt, Human
auucagauccugaaggcgaa

SEQ ID NO: 1105612 - RNA, 22 nt, Human
acccuugagaccaucagaugca

SEQ ID NO: 1105613 - RNA, 21 nt, Human
caaaucagcaagacucacuuc

SEQ ID NO: 1105614 - RNA, 21 nt, Human
caccauggugcuggucagaga

SEQ ID NO: 1105615 - RNA, 21 nt, Human
cacuauuugaagucugaacuu

SEQ ID NO: 1105616 - RNA, 22 nt, Human
cagcaagacucacuucaaacac

SEQ ID NO: 1105617 - RNA, 20 nt, Human
cuggugaugagcgucuuucc

SEQ ID NO: 1105618 - RNA, 18 nt, Human
gccauggaaguuaggcag

SEQ ID NO: 1105619 - RNA, 20 nt, Human
gccauggaaguuaggcaguu

SEQ ID NO: 1105620 - RNA, 21 nt, Human
ggucagagagccaaaagggca

SEQ ID NO: 1105621 - RNA, 19 nt, Human
uagaaaauggaucaaccac

SEQ ID NO: 1105622 - RNA, 24 nt, Human
uagaaaauggaucaaccacuuucu

SEQ ID NO: 1105623 - RNA, 22 nt, Human
ucccuggguccuggugaugagc

SEQ ID NO: 1105624 - RNA, 22 nt, Human
ucuucuuggcucccuuuuugcc

SEQ ID NO: 1105625 - RNA, 19 nt, Human
ugaauuuucuaaacgcaac

SEQ ID NO: 1105626 - RNA, 23 nt, Human
uucguaaggugcuuguucuugcc

SEQ ID NO: 1105627 - RNA, 24 nt, Human
uucuucuuggcucccuuuuugccg

SEQ ID NO: 1105628 - RNA, 19 nt, Human
uuugguucccuggguccug

SEQ ID NO: 1105629 - RNA, 25 nt, Human
aaaaacaaaaacaaaaguacuggag

SEQ ID NO: 1105630 - RNA, 23 nt, Human
aaaacaaaaacaaaaguacugga

SEQ ID NO: 1105631 - RNA, 22 nt, Human
aaacaaaaguacuggagguuuc

SEQ ID NO: 1105632 - RNA, 20 nt, Human
acuuugucuucccuuuccau

SEQ ID NO: 1105633 - RNA, 19 nt, Human
agcagaauuguccauugug

SEQ ID NO: 1105634 - RNA, 18 nt, Human
agcccgagaauguggagu

SEQ ID NO: 1105635 - RNA, 24 nt, Human
aggaaacaccaagaagcccgagaa

SEQ ID NO: 1105636 - RNA, 22 nt, Human
aguacuggagguuucaaaggaa

SEQ ID NO: 1105637 - RNA, 21 nt, Human
caaaaacaaaaguacuggagg

SEQ ID NO: 1105638 - RNA, 22 nt, Human
caaaggccgagaucacugggua

SEQ ID NO: 1105639 - RNA, 23 nt, Human
cacuuugucuucccuuuccauga

SEQ ID NO: 1105640 - RNA, 20 nt, Human
ccccaugagguugccucucu

SEQ ID NO: 1105641 - RNA, 20 nt, Human
ccugcaaaggccgagaucac

SEQ ID NO: 1105642 - RNA, 22 nt, Human
cugcaaaggccgagaucacugg

SEQ ID NO: 1105643 - RNA, 26 nt, Human
cuuuacaaucacagguacaaauugcu

SEQ ID NO: 1105644 - RNA, 22 nt, Human
ggaguccuggguccaguuugcc

SEQ ID NO: 1105645 - RNA, 21 nt, Human
uacaaucacagguacaaauug

SEQ ID NO: 1105646 - RNA, 20 nt, Human
uauagaggaaacaccaagaa

SEQ ID NO: 1105647 - RNA, 23 nt, Human
uccaaaaaacaaaaacaaaagua

SEQ ID NO: 1105648 - RNA, 24 nt, Human
uccaaaaaacaaaaacaaaaguac

SEQ ID NO: 1105649 - RNA, 18 nt, Human
uccuggguccaguuugcc

SEQ ID NO: 1105650 - RNA, 19 nt, Human
uccuggucuccugcaaagg

SEQ ID NO: 1105651 - RNA, 21 nt, Human
ucucuggugacauccuggucu

SEQ ID NO: 1105652 - RNA, 19 nt, Human
ugaccuggaugguuugucu

SEQ ID NO: 1105653 - RNA, 22 nt, Human
ugaccuggaugguuugucuguu

SEQ ID NO: 1105654 - RNA, 19 nt, Human
ugcacuuugucuucccuuu

SEQ ID NO: 1105655 - RNA, 19 nt, Human
ugcucaaaucgauaauuuc

SEQ ID NO: 1105656 - RNA, 22 nt, Human
uuccaaaaaacaaaaacaaaag

SEQ ID NO: 1105657 - RNA, 23 nt, Human
uuccaaaaaacaaaaacaaaagu

SEQ ID NO: 1105658 - RNA, 19 nt, Human
uucucuggugacauccugg

SEQ ID NO: 1105659 - RNA, 19 nt, Human
uuugccauucccccaccau

SEQ ID NO: 1105660 - RNA, 21 nt, Human
aucccugucccucccaacccc

SEQ ID NO: 1105661 - RNA, 20 nt, Human
auuuaucccugucccuccca

SEQ ID NO: 1105662 - RNA, 21 nt, Human
ccacugugaccucauuggagu

SEQ ID NO: 1105663 - RNA, 19 nt, Human
cccucccaacccccaggcu

SEQ ID NO: 1105664 - RNA, 20 nt, Human
ccucagagcuccagccacug

SEQ ID NO: 1105665 - RNA, 19 nt, Human
ccuccuggcucagggagcc

SEQ ID NO: 1105666 - RNA, 24 nt, Human
ccuccuggcucagggagccugggc

SEQ ID NO: 1105667 - RNA, 21 nt, Human
cugucccucccaacccccagg

SEQ ID NO: 1105668 - RNA, 22 nt, Human
gaccucauuggaguuggggugg

SEQ ID NO: 1105669 - RNA, 18 nt, Human
gccugggccccucagagc

SEQ ID NO: 1105670 - RNA, 20 nt, Human
gccugggccccucagagcuc

SEQ ID NO: 1105671 - RNA, 23 nt, Human
gggagccugggccccucagagcu

SEQ ID NO: 1105672 - RNA, 18 nt, Human
ucagagcuccagccacug

SEQ ID NO: 1105673 - RNA, 21 nt, Human
ucccaacccccaggcucccaa

SEQ ID NO: 1105674 - RNA, 24 nt, Human
ucccaacccccaggcucccaaguu

SEQ ID NO: 1105675 - RNA, 22 nt, Human
ucccucccaacccccaggcucc

SEQ ID NO: 1105676 - RNA, 18 nt, Human
ugaccucauuggaguugg

SEQ ID NO: 1105677 - RNA, 27 nt, Human
ugccuuuauuuaucccugucccuccca

SEQ ID NO: 1105678 - RNA, 20 nt, Human
ugggccccucagagcuccag

SEQ ID NO: 1105679 - RNA, 19 nt, Human
uuaucccugucccucccaa

SEQ ID NO: 1105680 - RNA, 19 nt, Human
uucccuggaacuauccuga

SEQ ID NO: 1105681 - RNA, 19 nt, Human
aucagcuuaguucaucccu

SEQ ID NO: 1105682 - RNA, 22 nt, Human
cacagcacuugccaucuucuac

SEQ ID NO: 1105683 - RNA, 23 nt, Human
cagaaaucuuuucuuugaagucc

SEQ ID NO: 1105684 - RNA, 18 nt, Human
cccugaacccucaauacc

SEQ ID NO: 1105685 - RNA, 20 nt, Human
cucaauaccuaauauagggc

SEQ ID NO: 1105686 - RNA, 24 nt, Human
uacagccuagagagcaggaaccag

SEQ ID NO: 1105687 - RNA, 18 nt, Human
ucaauaccuaauauaggg

SEQ ID NO: 1105688 - RNA, 23 nt, Human
ucuacagccuagagagcaggaac

SEQ ID NO: 1105689 - RNA, 18 nt, Human
uuaguucaucccugaacc

SEQ ID NO: 1105690 - RNA, 18 nt, Human
uuuuuagaacuuacuaga

SEQ ID NO: 1105691 - RNA, 18 nt, Human
aacagcauggggugcaaa

SEQ ID NO: 1105692 - RNA, 21 nt, Human
aacccuuuguuggaaugcuuu

SEQ ID NO: 1105693 - RNA, 22 nt, Human
aacccuuuguuggaaugcuuuc

SEQ ID NO: 1105694 - RNA, 24 nt, Human
aucuucugccacugccauagcuac

SEQ ID NO: 1105695 - RNA, 28 nt, Human
caacagcauggggugcaaaaaaaaaaaa

SEQ ID NO: 1105696 - RNA, 21 nt, Human
cagggugaagagagacuuuaa

SEQ ID NO: 1105697 - RNA, 24 nt, Human
ccggucacuucucuggcucuccuc

SEQ ID NO: 1105698 - RNA, 20 nt, Human
ccugcuaagcuuuguuuccu

SEQ ID NO: 1105699 - RNA, 21 nt, Human
cggcguccaagggcagaaagg

SEQ ID NO: 1105700 - RNA, 18 nt, Human
cugcuaagcuuuguuucc

SEQ ID NO: 1105701 - RNA, 21 nt, Human
cuuuccacagaacagaaacua

SEQ ID NO: 1105702 - RNA, 20 nt, Human
gaagagagacuuuaacgaug

SEQ ID NO: 1105703 - RNA, 18 nt, Human
gccggucacuucucuggc

SEQ ID NO: 1105704 - RNA, 30 nt, Human
guuguauccuguagcuugccggucacuucc

SEQ ID NO: 1105705 - RNA, 18 nt, Human
uacugcugcugcuggaac

SEQ ID NO: 1105706 - RNA, 18 nt, Human
ucccuucauggguccaca

SEQ ID NO: 1105707 - RNA, 20 nt, Human
ucucuggcucuccucuccug

SEQ ID NO: 1105708 - RNA, 21 nt, Human
ucugccacugccauagcuacu

SEQ ID NO: 1105709 - RNA, 25 nt, Human
ugcaaaguauuggccuccaccgcca

SEQ ID NO: 1105710 - RNA, 20 nt, Human
uggggugcaaaaaaaaaaaa

SEQ ID NO: 1105711 - RNA, 22 nt, Human
uucaaaauuuccucccuucaug

SEQ ID NO: 1105712 - RNA, 25 nt, Human
uucaaaauuuccucccuucaugggu

SEQ ID NO: 1105713 - RNA, 25 nt, Human
uucaaaauuuccucccuucaugggu

SEQ ID NO: 1105714 - RNA, 19 nt, Human
aagagagacuuuaacgaug

SEQ ID NO: 1105715 - RNA, 24 nt, Human
aucuucugccacugccacagcuac

SEQ ID NO: 1105716 - RNA, 18 nt, Human
caucauaggggccagagc

SEQ ID NO: 1105717 - RNA, 19 nt, Human
ccacagcuacugcugcuac

SEQ ID NO: 1105718 - RNA, 20 nt, Human
cccuggcacuucucuggcuc

SEQ ID NO: 1105719 - RNA, 24 nt, Human
cucuccugcuaagcuuuguuuccu

SEQ ID NO: 1105720 - RNA, 18 nt, Human
cugcuaagcuuuguuucc

SEQ ID NO: 1105721 - RNA, 23 nt, Human
cuggcacuucucuggcucuccuc

SEQ ID NO: 1105722 - RNA, 20 nt, Human
gccaccuugguuucaugguu

SEQ ID NO: 1105723 - RNA, 21 nt, Human
gcuucuucggcggcguccaug

SEQ ID NO: 1105724 - RNA, 22 nt, Human
uaaaucuucugccacugccaca

SEQ ID NO: 1105725 - RNA, 20 nt, Human
ucucuggcucuccucuccug

SEQ ID NO: 1105726 - RNA, 19 nt, Human
ugccacagcuacugcugcu

SEQ ID NO: 1105727 - RNA, 23 nt, Human
ugccacagcuacugcugcuacug

SEQ ID NO: 1105728 - RNA, 19 nt, Human
uguuguaaccuguagcuuc

SEQ ID NO: 1105729 - RNA, 19 nt, Human
uucccuggcacuucucugg

SEQ ID NO: 1105730 - RNA, 21 nt, Human
aucaucugagccuggaguuug

SEQ ID NO: 1105731 - RNA, 23 nt, Human
caucaucugagccuggaguuugg

SEQ ID NO: 1105732 - RNA, 22 nt, Human
ucuuccauuguuauuguucugu

SEQ ID NO: 1105733 - RNA, 21 nt, Human
uuggcaggaugauagcuuugu

SEQ ID NO: 1105734 - RNA, 27 nt, Human
uuugugauaauguucccaauuucuucc

SEQ ID NO: 1105735 - RNA, 27 nt, Human
uuuuuaaccugugacaucaucugagcc

SEQ ID NO: 1105736 - RNA, 19 nt, Human
agcgcgcaucugccuaaaa

SEQ ID NO: 1105737 - RNA, 19 nt, Human
aucugccuaaaacgcugcc

SEQ ID NO: 1105738 - RNA, 26 nt, Human
caauccaacugcaacaaccaauagag

SEQ ID NO: 1105739 - RNA, 21 nt, Human
caauccugaagauucauuaac

SEQ ID NO: 1105740 - RNA, 25 nt, Human
ccugcagcgcgcaucugccuaaaac

SEQ ID NO: 1105741 - RNA, 21 nt, Human
cuaaaacgcugccgccgccgu

SEQ ID NO: 1105742 - RNA, 22 nt, Human
gccuaaaacgcugccgccgccg

SEQ ID NO: 1105743 - RNA, 24 nt, Human
ggaccacggguucagaugcugcca

SEQ ID NO: 1105744 - RNA, 24 nt, Human
gugaaggaaaugguucaauuucug

SEQ ID NO: 1105745 - RNA, 21 nt, Human
uccaugcagcuuucaucuaag

SEQ ID NO: 1105746 - RNA, 22 nt, Human
uccugaagauucauuaacaaag

SEQ ID NO: 1105747 - RNA, 19 nt, Human
ugaaaagggaggauguugg

SEQ ID NO: 1105748 - RNA, 25 nt, Human
uggaccacggguucagaugcugcca

SEQ ID NO: 1105749 - RNA, 18 nt, Human
uuaagcagaucucagcaa

SEQ ID NO: 1105750 - RNA, 25 nt, Human
aaaauucuuauacacagaaguguua

SEQ ID NO: 1105751 - RNA, 26 nt, Human
aaacacaauguggugacacugaaaau

SEQ ID NO: 1105752 - RNA, 21 nt, Human
aaaccugaaacacugcacaga

SEQ ID NO: 1105753 - RNA, 21 nt, Human
aaacuacggccgggcgcggug

SEQ ID NO: 1105754 - RNA, 19 nt, Human
aacauggugaaaccccauc

SEQ ID NO: 1105755 - RNA, 20 nt, Human
aacauggugaaaccccaucu

SEQ ID NO: 1105756 - RNA, 21 nt, Human
aacauggugaaaccccaucuc

SEQ ID NO: 1105757 - RNA, 21 nt, Human
aacauggugaaaccccaucuc

SEQ ID NO: 1105758 - RNA, 21 nt, Human
aagcaauuuccacaugugccc

SEQ ID NO: 1105759 - RNA, 24 nt, Human
aaucgcuugaacccgggagaugga

SEQ ID NO: 1105760 - RNA, 24 nt, Human
accccaucucuacuaaaaauacaa

SEQ ID NO: 1105761 - RNA, 24 nt, Human
acuaacauggugaaaccccaucuc

SEQ ID NO: 1105762 - RNA, 24 nt, Human
acuguauuccagccugggcaacag

SEQ ID NO: 1105763 - RNA, 25 nt, Human
acuguauuccagccugggcaacagg

SEQ ID NO: 1105764 - RNA, 22 nt, Human
agaaucgcuugaacccgggaga

SEQ ID NO: 1105765 - RNA, 21 nt, Human
agaguaccaguaaggauccag

SEQ ID NO: 1105766 - RNA, 24 nt, Human
agauggagauugcagugagccagg

SEQ ID NO: 1105767 - RNA, 22 nt, Human
agccugggcaacagggugagac

SEQ ID NO: 1105768 - RNA, 24 nt, Human
aggcaggagaaucgcuugaacccg

SEQ ID NO: 1105769 - RNA, 21 nt, Human
aggcgggggcgggcggaucac

SEQ ID NO: 1105770 - RNA, 20 nt, Human
aggcugaggcaggagaaucg

SEQ ID NO: 1105771 - RNA, 24 nt, Human
aggcugaggcaggagaaucgcuug

SEQ ID NO: 1105772 - RNA, 20 nt, Human
agggucuguuggaaaugcag

SEQ ID NO: 1105773 - RNA, 27 nt, Human
auacugaagacuuccauccucaggcca

SEQ ID NO: 1105774 - RNA, 22 nt, Human
augaaauuaauucuuugccuga

SEQ ID NO: 1105775 - RNA, 18 nt, Human
augugcccuguguacaga

SEQ ID NO: 1105776 - RNA, 23 nt, Human
auuuccacaugugcccuguguac

SEQ ID NO: 1105777 - RNA, 20 nt, Human
caagagaaauacugaagaua

SEQ ID NO: 1105778 - RNA, 25 nt, Human
caaugaauauugacagauaaucacc

SEQ ID NO: 1105779 - RNA, 20 nt, Human
caauuuaacuuccccucaag

SEQ ID NO: 1105780 - RNA, 19 nt, Human
cacccuucuucauacaagg

SEQ ID NO: 1105781 - RNA, 24 nt, Human
cacgccuguaaucccagcacuuug

SEQ ID NO: 1105782 - RNA, 19 nt, Human
cacuguauuccagccuggg

SEQ ID NO: 1105783 - RNA, 22 nt, Human
cacuguauuccagccugggcaa

SEQ ID NO: 1105784 - RNA, 23 nt, Human
cacuguauuccagccugggcaac

SEQ ID NO: 1105785 - RNA, 24 nt, Human
cacuguauuccagccugggcaaca

SEQ ID NO: 1105786 - RNA, 23 nt, Human
cagaauucucucauuuucuaaag

SEQ ID NO: 1105787 - RNA, 24 nt, Human
cagcacuuugggaggcgggggcgg

SEQ ID NO: 1105788 - RNA, 22 nt, Human
cagcaggaaacacaauguggug

SEQ ID NO: 1105789 - RNA, 20 nt, Human
cagccugggcaacaggguga

SEQ ID NO: 1105790 - RNA, 24 nt, Human
cagcuacuugagaggcugaggcag

SEQ ID NO: 1105791 - RNA, 24 nt, Human
cagcuucugaagcccuggaauccc

SEQ ID NO: 1105792 - RNA, 22 nt, Human
caggaucagugcaaccuauacu

SEQ ID NO: 1105793 - RNA, 21 nt, Human
caggccaaaaggucaggauca

SEQ ID NO: 1105794 - RNA, 19 nt, Human
caguaaggauccagugaaa

SEQ ID NO: 1105795 - RNA, 21 nt, Human
caucaaacaaggauggaauaa

SEQ ID NO: 1105796 - RNA, 20 nt, Human
caugugcccuguguacagaa

SEQ ID NO: 1105797 - RNA, 23 nt, Human
ccaaccaucagugaaaacuacag

SEQ ID NO: 1105798 - RNA, 20 nt, Human
ccacuguauuccagccuggg

SEQ ID NO: 1105799 - RNA, 21 nt, Human
ccacuguauuccagccugggc

SEQ ID NO: 1105800 - RNA, 22 nt, Human
ccacuguauuccagccugggca

SEQ ID NO: 1105801 - RNA, 23 nt, Human
ccacuguauuccagccugggcaa

SEQ ID NO: 1105802 - RNA, 24 nt, Human
ccacuguauuccagccugggcaac

SEQ ID NO: 1105803 - RNA, 19 nt, Human
ccaggaucuucggguuucc

SEQ ID NO: 1105804 - RNA, 21 nt, Human
cccaauuguccucagggucug

SEQ ID NO: 1105805 - RNA, 20 nt, Human
cccagcacuuugggaggcgg

SEQ ID NO: 1105806 - RNA, 22 nt, Human
cccucaaguauuccauacuuga

SEQ ID NO: 1105807 - RNA, 25 nt, Human
ccgggaaggagaagaaaugcggaca

SEQ ID NO: 1105808 - RNA, 22 nt, Human
ccucagggucuguuggaaaugc

SEQ ID NO: 1105809 - RNA, 19 nt, Human
ccucauaaacucuaaagca

SEQ ID NO: 1105810 - RNA, 22 nt, Human
ccugacuaacauggugaaaccc

SEQ ID NO: 1105811 - RNA, 24 nt, Human
ccugacuaacauggugaaacccca

SEQ ID NO: 1105812 - RNA, 22 nt, Human
ccuguaaucccagcacuuuggg

SEQ ID NO: 1105813 - RNA, 24 nt, Human
cgagaccauccugacuaacauggu

SEQ ID NO: 1105814 - RNA, 20 nt, Human
cuaaagcaagugaaauuauc

SEQ ID NO: 1105815 - RNA, 22 nt, Human
cucacgccuguaaucccagcac

SEQ ID NO: 1105816 - RNA, 24 nt, Human
cucacgccuguaaucccagcacuu

SEQ ID NO: 1105817 - RNA, 24 nt, Human
cugaagacuuccauccucaggcca

SEQ ID NO: 1105818 - RNA, 20 nt, Human
cugaagcccuggaaucccag

SEQ ID NO: 1105819 - RNA, 23 nt, Human
cuguuacuaagaugacacuuaau

SEQ ID NO: 1105820 - RNA, 19 nt, Human
cuucaccccucucauaacu

SEQ ID NO: 1105821 - RNA, 21 nt, Human
cuucggguuuccuccugcuuc

SEQ ID NO: 1105822 - RNA, 21 nt, Human
gaaaaaauucuuauacacaga

SEQ ID NO: 1105823 - RNA, 23 nt, Human
gacuuccauccucaggccaaaag

SEQ ID NO: 1105824 - RNA, 23 nt, Human
gagauugcagugagccaggaucg

SEQ ID NO: 1105825 - RNA, 19 nt, Human
gaggcgggggcgggcggau

SEQ ID NO: 1105826 - RNA, 22 nt, Human
gaggguguguuauuccuugcuu

SEQ ID NO: 1105827 - RNA, 24 nt, Human
gaucacaaggucaggaaaucgaga

SEQ ID NO: 1105828 - RNA, 24 nt, Human
gcaggaugugaaagaaagugccag

SEQ ID NO: 1105829 - RNA, 19 nt, Human
gccacuguauuccagccug

SEQ ID NO: 1105830 - RNA, 22 nt, Human
gccacuguauuccagccugggc

SEQ ID NO: 1105831 - RNA, 24 nt, Human
gccacuguauuccagccugggcaa

SEQ ID NO: 1105832 - RNA, 18 nt, Human
ggagauugcagugagcca

SEQ ID NO: 1105833 - RNA, 19 nt, Human
ggagauugcagugagccag

SEQ ID NO: 1105834 - RNA, 24 nt, Human
ggagauugcagugagccaggaucg

SEQ ID NO: 1105835 - RNA, 31 nt, Human
ggaggcgggggcgggcggaucacaaggucaa

SEQ ID NO: 1105836 - RNA, 18 nt, Human
ggaguaaaguuguacaga

SEQ ID NO: 1105837 - RNA, 22 nt, Human
ggaucacaaggucaggaaaucg

SEQ ID NO: 1105838 - RNA, 23 nt, Human
ggcgcgguggcucacgccuguaa

SEQ ID NO: 1105839 - RNA, 21 nt, Human
ggcggaucacaaggucaggaa

SEQ ID NO: 1105840 - RNA, 23 nt, Human
ggcgggcggaucacaaggucagg

SEQ ID NO: 1105841 - RNA, 18 nt, Human
ggcgugguugcgggcgcc

SEQ ID NO: 1105842 - RNA, 22 nt, Human
ggcgugguugcgggcgccugua

SEQ ID NO: 1105843 - RNA, 23 nt, Human
gguggcucacgccuguaauccca

SEQ ID NO: 1105844 - RNA, 24 nt, Human
gguggcucacgccuguaaucccag

SEQ ID NO: 1105845 - RNA, 24 nt, Human
gguugcgggcgccuguagucccag

SEQ ID NO: 1105846 - RNA, 24 nt, Human
guauuccagccugggcaacagggu

SEQ ID NO: 1105847 - RNA, 23 nt, Human
guggcucacgccuguaaucccag

SEQ ID NO: 1105848 - RNA, 20 nt, Human
uaaaaaccugaaacacugca

SEQ ID NO: 1105849 - RNA, 24 nt, Human
uaaaaaccugaaacacugcacaga

SEQ ID NO: 1105850 - RNA, 23 nt, Human
uaaauugaaaccaauuuuauuua

SEQ ID NO: 1105851 - RNA, 22 nt, Human
uaacauggugaaaccccaucuc

SEQ ID NO: 1105852 - RNA, 24 nt, Human
uaacauggugaaaccccaucucua

SEQ ID NO: 1105853 - RNA, 19 nt, Human
uaaucaaucaauaagcaau

SEQ ID NO: 1105854 - RNA, 24 nt, Human
uacggccgggcgcgguggcucacg

SEQ ID NO: 1105855 - RNA, 18 nt, Human
uacuuuguaaacaaauga

SEQ ID NO: 1105856 - RNA, 26 nt, Human
uagcagaggguguguuauuccuugcu

SEQ ID NO: 1105857 - RNA, 21 nt, Human
uagccaaucagaauucucuca

SEQ ID NO: 1105858 - RNA, 19 nt, Human
uauaugccuugcucaaaau

SEQ ID NO: 1105859 - RNA, 23 nt, Human
uauuccagccugggcaacagggu

SEQ ID NO: 1105860 - RNA, 24 nt, Human
uauuccagccugggcaacagggug

SEQ ID NO: 1105861 - RNA, 27 nt, Human
ucaaaaauauucagcgcauucuuccca

SEQ ID NO: 1105862 - RNA, 25 nt, Human
ucaaacaaggauggaauaaacaaga

SEQ ID NO: 1105863 - RNA, 20 nt, Human
ucaacagaugggagccacuu

SEQ ID NO: 1105864 - RNA, 24 nt, Human
ucacaaggucaggaaaucgagacc

SEQ ID NO: 1105865 - RNA, 24 nt, Human
ucagaauucucucauuuucuaaag

SEQ ID NO: 1105866 - RNA, 19 nt, Human
ucagugaugauuaaugcau

SEQ ID NO: 1105867 - RNA, 21 nt, Human
ucauacaagagaaauacugaa

SEQ ID NO: 1105868 - RNA, 23 nt, Human
uccagccugggcaacagggugag

SEQ ID NO: 1105869 - RNA, 24 nt, Human
uccagccugggcaacagggugaga

SEQ ID NO: 1105870 - RNA, 18 nt, Human
uccugcuuccacucuuaa

SEQ ID NO: 1105871 - RNA, 21 nt, Human
uccuuuuugcucccucuccac

SEQ ID NO: 1105872 - RNA, 23 nt, Human
uccuuuuugcucccucuccacug

SEQ ID NO: 1105873 - RNA, 21 nt, Human
ucgcuugaacccgggagaugg

SEQ ID NO: 1105874 - RNA, 22 nt, Human
ucucuacuaaaaauacaaaaaa

SEQ ID NO: 1105875 - RNA, 19 nt, Human
ugaaacagccaaccaucag

SEQ ID NO: 1105876 - RNA, 19 nt, Human
ugaaaccccaucucuacua

SEQ ID NO: 1105877 - RNA, 24 nt, Human
ugacuaacauggugaaaccccauc

SEQ ID NO: 1105878 - RNA, 19 nt, Human
ugagaggcugaggcaggag

SEQ ID NO: 1105879 - RNA, 20 nt, Human
ugagaggcugaggcaggaga

SEQ ID NO: 1105880 - RNA, 22 nt, Human
ugagccaggaucgugccacugu

SEQ ID NO: 1105881 - RNA, 20 nt, Human
ugaggcaggagaaucgcuug

SEQ ID NO: 1105882 - RNA, 24 nt, Human
ugaggcaggagaaucgcuugaacc

SEQ ID NO: 1105883 - RNA, 25 nt, Human
ugaggcaggagaaucgcuugaaccc

SEQ ID NO: 1105884 - RNA, 20 nt, Human
ugauguagacuugauucagc

SEQ ID NO: 1105885 - RNA, 21 nt, Human
ugauguagacuugauucagca

SEQ ID NO: 1105886 - RNA, 22 nt, Human
uggcucacgccuguaaucccag

SEQ ID NO: 1105887 - RNA, 24 nt, Human
uggcucacgccuguaaucccagca

SEQ ID NO: 1105888 - RNA, 18 nt, Human
uggcuggcagaguacgcu

SEQ ID NO: 1105889 - RNA, 22 nt, Human
ugggagccacuuauggccucau

SEQ ID NO: 1105890 - RNA, 24 nt, Human
ugggaggcgggggcgggcggauca

SEQ ID NO: 1105891 - RNA, 19 nt, Human
ugggcaacagggugagaca

SEQ ID NO: 1105892 - RNA, 23 nt, Human
ugguucuguuacuaagaugacac

SEQ ID NO: 1105893 - RNA, 24 nt, Human
ugguugcgggcgccuguaguccca

SEQ ID NO: 1105894 - RNA, 24 nt, Human
uguagacuugauucagcaggaaac

SEQ ID NO: 1105895 - RNA, 24 nt, Human
uguuugccacuuggcuggcagagu

SEQ ID NO: 1105896 - RNA, 18 nt, Human
uuagccgggcgugguugc

SEQ ID NO: 1105897 - RNA, 24 nt, Human
uuagccgggcgugguugcgggcgc

SEQ ID NO: 1105898 - RNA, 23 nt, Human
uuaggccaguguucuguggaugu

SEQ ID NO: 1105899 - RNA, 21 nt, Human
uuauggccucauaaacucuaa

SEQ ID NO: 1105900 - RNA, 18 nt, Human
uucuucauacaagagaaa

SEQ ID NO: 1105901 - RNA, 25 nt, Human
uugagaggcugaggcaggagaaucg

SEQ ID NO: 1105902 - RNA, 22 nt, Human
uugcagugagccaggaucgugc

SEQ ID NO: 1105903 - RNA, 24 nt, Human
uuuaagcuuuauuugacaaaguag

SEQ ID NO: 1105904 - RNA, 19 nt, Human
aaaagaccaaagagacaag

SEQ ID NO: 1105905 - RNA, 21 nt, Human
aaaagaccaaagagacaagcc

SEQ ID NO: 1105906 - RNA, 19 nt, Human
aaaauaaaagaccaaagag

SEQ ID NO: 1105907 - RNA, 23 nt, Human
aacaauagagccaaaauaaaaga

SEQ ID NO: 1105908 - RNA, 22 nt, Human
aacucaaaaacaugcauagaug

SEQ ID NO: 1105909 - RNA, 27 nt, Human
aaucugugaacaugccaggccccccuc

SEQ ID NO: 1105910 - RNA, 23 nt, Human
agaggagaauguuuuauacugga

SEQ ID NO: 1105911 - RNA, 25 nt, Human
aggcauuuagacaccauuaauuaua

SEQ ID NO: 1105912 - RNA, 28 nt, Human
aguuuugaucccuuucaaaggaauaauu

SEQ ID NO: 1105913 - RNA, 22 nt, Human
caaaagcaaaagugccucaauc

SEQ ID NO: 1105914 - RNA, 22 nt, Human
caaaagugccucaauccauuga

SEQ ID NO: 1105915 - RNA, 20 nt, Human
caagagggucccugagcugu

SEQ ID NO: 1105916 - RNA, 20 nt, Human
ccaaaauaaaagaccaaaga

SEQ ID NO: 1105917 - RNA, 23 nt, Human
cccaacaauagagccaaaauaaa

SEQ ID NO: 1105918 - RNA, 18 nt, Human
cccggcccuucacucucc

SEQ ID NO: 1105919 - RNA, 25 nt, Human
cccggcccuucacucucccggggcc

SEQ ID NO: 1105920 - RNA, 20 nt, Human
cccggggcgccuuguccucc

SEQ ID NO: 1105921 - RNA, 18 nt, Human
ccgcgcgcucccgccgcc

SEQ ID NO: 1105922 - RNA, 24 nt, Human
ccgcgcgcucccgccgcccggccc

SEQ ID NO: 1105923 - RNA, 21 nt, Human
ccggggcgccuuguccucccc

SEQ ID NO: 1105924 - RNA, 24 nt, Human
ccuuguccuccccggcccuucacu

SEQ ID NO: 1105925 - RNA, 18 nt, Human
cgcccggcccggcagcag

SEQ ID NO: 1105926 - RNA, 24 nt, Human
cgccuuguccuccccggcccuuca

SEQ ID NO: 1105927 - RNA, 24 nt, Human
cggccuccgacgccgcgcgcuccc

SEQ ID NO: 1105928 - RNA, 21 nt, Human
cucccggggcucucggcguuc

SEQ ID NO: 1105929 - RNA, 21 nt, Human
cugacugaggcauuuagacac

SEQ ID NO: 1105930 - RNA, 18 nt, Human
cugguauuuuaaccuacc

SEQ ID NO: 1105931 - RNA, 25 nt, Human
cuucgugcacagagcguagcucuuc

SEQ ID NO: 1105932 - RNA, 22 nt, Human
gaaauagauucccaacaauaga

SEQ ID NO: 1105933 - RNA, 20 nt, Human
gaacaaaugcacagucuguc

SEQ ID NO: 1105934 - RNA, 22 nt, Human
gaacaaaugcacagucugucuu

SEQ ID NO: 1105935 - RNA, 18 nt, Human
gaauuuccaacacugcuu

SEQ ID NO: 1105936 - RNA, 23 nt, Human
gccuuguccuccccggcccuuca

SEQ ID NO: 1105937 - RNA, 21 nt, Human
gcuuaguacugagaacccugu

SEQ ID NO: 1105938 - RNA, 21 nt, Human
ggagaauguuuuauacuggaa

SEQ ID NO: 1105939 - RNA, 23 nt, Human
gggcaagagggucccugagcugu

SEQ ID NO: 1105940 - RNA, 21 nt, Human
uaacacaaaagcaaaagugcc

SEQ ID NO: 1105941 - RNA, 23 nt, Human
uaacacaaaagcaaaagugccuc

SEQ ID NO: 1105942 - RNA, 22 nt, Human
uaacugacagguccaaguuagc

SEQ ID NO: 1105943 - RNA, 24 nt, Human
uacuaagugcuaauaacagucuuu

SEQ ID NO: 1105944 - RNA, 23 nt, Human
uagcauuguugaaaaugaguuuc

SEQ ID NO: 1105945 - RNA, 21 nt, Human
ucaagauuccacagcauguua

SEQ ID NO: 1105946 - RNA, 22 nt, Human
uccaacacugcuugaaaugcaa

SEQ ID NO: 1105947 - RNA, 19 nt, Human
uccaaggaccucaaaguca

SEQ ID NO: 1105948 - RNA, 21 nt, Human
uccaaggaccucaaagucauu

SEQ ID NO: 1105949 - RNA, 18 nt, Human
ucccugagcuguuugguu

SEQ ID NO: 1105950 - RNA, 20 nt, Human
uccgcagaggggcggccucc

SEQ ID NO: 1105951 - RNA, 20 nt, Human
ugaaggggcaagaggguccc

SEQ ID NO: 1105952 - RNA, 18 nt, Human
ugaauagcacauaaugga

SEQ ID NO: 1105953 - RNA, 20 nt, Human
ugacauacauauguagguaa

SEQ ID NO: 1105954 - RNA, 21 nt, Human
ugacauacauauguagguaaa

SEQ ID NO: 1105955 - RNA, 19 nt, Human
ugagaaguccauggugaag

SEQ ID NO: 1105956 - RNA, 23 nt, Human
ugcaguuaggcacugacugaggc

SEQ ID NO: 1105957 - RNA, 26 nt, Human
ugggcauucugggcaucuuuuuuuuu

SEQ ID NO: 1105958 - RNA, 20 nt, Human
ugucagggacccacaggaug

SEQ ID NO: 1105959 - RNA, 18 nt, Human
uuagcauuguugaaaaug

SEQ ID NO: 1105960 - RNA, 20 nt, Human
uuuauaaguuucugaauuuc

SEQ ID NO: 1105961 - RNA, 23 nt, Human
uuucucgugguuuauaaguuucu

SEQ ID NO: 1105962 - RNA, 26 nt, Human
uccgucgccucuugagaaucagcaaa

SEQ ID NO: 1105963 - RNA, 21 nt, Human
aaaggaagacaggcugcaacc

SEQ ID NO: 1105964 - RNA, 21 nt, Human
aagaggcccuagcuuucaucc

SEQ ID NO: 1105965 - RNA, 18 nt, Human
accugcuggccgagcuuc

SEQ ID NO: 1105966 - RNA, 19 nt, Human
acucacagccguucuccuc

SEQ ID NO: 1105967 - RNA, 23 nt, Human
agaggcccuagcuuucaucccug

SEQ ID NO: 1105968 - RNA, 24 nt, Human
aggaagacaggcugcaaccacagg

SEQ ID NO: 1105969 - RNA, 19 nt, Human
aggagaaaaagaaggacag

SEQ ID NO: 1105970 - RNA, 19 nt, Human
aggggcugggagggaggga

SEQ ID NO: 1105971 - RNA, 18 nt, Human
auaguuguuucuucuaag

SEQ ID NO: 1105972 - RNA, 33 nt, Human
auauaauaauaauuaagagaaaaaaauaagaag

SEQ ID NO: 1105973 - RNA, 21 nt, Human
cacaggaaaauggcaggaaaa

SEQ ID NO: 1105974 - RNA, 18 nt, Human
caggaggccuggcggagg

SEQ ID NO: 1105975 - RNA, 19 nt, Human
cgcaacauuucugaaauga

SEQ ID NO: 1105976 - RNA, 18 nt, Human
gagggagaggagaaaaag

SEQ ID NO: 1105977 - RNA, 24 nt, Human
gcucguccagaacucuaggcuguc

SEQ ID NO: 1105978 - RNA, 21 nt, Human
ggaagacaggcugcaaccaca

SEQ ID NO: 1105979 - RNA, 20 nt, Human
ggccuuggugcacucacagg

SEQ ID NO: 1105980 - RNA, 20 nt, Human
gggagaggagaaaaagaagg

SEQ ID NO: 1105981 - RNA, 19 nt, Human
ggggcugggagggagggag

SEQ ID NO: 1105982 - RNA, 19 nt, Human
guauauacauaucuacacc

SEQ ID NO: 1105983 - RNA, 26 nt, Human
uaccaaacacgcucguccagaacucu

SEQ ID NO: 1105984 - RNA, 22 nt, Human
uagcuugauaguuguuucuucu

SEQ ID NO: 1105985 - RNA, 18 nt, Human
uagucggcuuccgugccc

SEQ ID NO: 1105986 - RNA, 21 nt, Human
uauaaaacucagagaguaaaa

SEQ ID NO: 1105987 - RNA, 23 nt, Human
uauacauaucuacaccugugucu

SEQ ID NO: 1105988 - RNA, 20 nt, Human
ucaaacacuccuugcuguuc

SEQ ID NO: 1105989 - RNA, 20 nt, Human
uccagaacucuaggcugucu

SEQ ID NO: 1105990 - RNA, 20 nt, Human
uccaggaggccuggcggagg

SEQ ID NO: 1105991 - RNA, 18 nt, Human
ucuguguggcagaucacc

SEQ ID NO: 1105992 - RNA, 24 nt, Human
ucuucuaaguuuaacucagaaaua

SEQ ID NO: 1105993 - RNA, 18 nt, Human
ugaugagaguauaagugg

SEQ ID NO: 1105994 - RNA, 23 nt, Human
ugcacccagggacccccgucugc

SEQ ID NO: 1105995 - RNA, 23 nt, Human
uggacggaguucaaagcagaaac

SEQ ID NO: 1105996 - RNA, 18 nt, Human
uggcauucaagugcauca

SEQ ID NO: 1105997 - RNA, 22 nt, Human
ugucuuuucuuuugguaaagca

SEQ ID NO: 1105998 - RNA, 21 nt, Human
uguggcagaucaccuggacgu

SEQ ID NO: 1105999 - RNA, 20 nt, Human
uucaccugcuggccgagcuc

SEQ ID NO: 1106000 - RNA, 22 nt, Human
uuguauauacauaucuacaccu

SEQ ID NO: 1106001 - RNA, 19 nt, Human
aauucugcugugaaucugu

SEQ ID NO: 1106002 - RNA, 24 nt, Human
accauuauauacugccugucuuug

SEQ ID NO: 1106003 - RNA, 25 nt, Human
augaaagaagacauucuuugaaugu

SEQ ID NO: 1106004 - RNA, 22 nt, Human
auuuucucucuucuuuucuugg

SEQ ID NO: 1106005 - RNA, 18 nt, Human
gacuuuuugacaucagug

SEQ ID NO: 1106006 - RNA, 24 nt, Human
gugaaaggauugguaucauuucuu

SEQ ID NO: 1106007 - RNA, 26 nt, Human
gugaacuuagauugucuguuugugcu

SEQ ID NO: 1106008 - RNA, 24 nt, Human
guguucauaguacccuugaauaac

SEQ ID NO: 1106009 - RNA, 19 nt, Human
uagaauucugcugugaauc

SEQ ID NO: 1106010 - RNA, 19 nt, Human
uauccaacucuucuagguu

SEQ ID NO: 1106011 - RNA, 21 nt, Human
uauguuuuguauuuguuguug

SEQ ID NO: 1106012 - RNA, 27 nt, Human
ucaguggugucaguuguaauauccccu

SEQ ID NO: 1106013 - RNA, 24 nt, Human
ucccagaggucuugauagguugug

SEQ ID NO: 1106014 - RNA, 25 nt, Human
ucuuuuagcuacuguugcuuuaaag

SEQ ID NO: 1106015 - RNA, 21 nt, Human
ugaaagaagacauucuuugaa

SEQ ID NO: 1106016 - RNA, 22 nt, Human
ugaaaggauugguaucauuucu

SEQ ID NO: 1106017 - RNA, 20 nt, Human
ugucucauaugagaauagcu

SEQ ID NO: 1106018 - RNA, 25 nt, Human
uguuguuguucuugugucaauuuca

SEQ ID NO: 1106019 - RNA, 23 nt, Human
uuaccauuucaaucuugcugcuu

SEQ ID NO: 1106020 - RNA, 21 nt, Human
uuccugcuucucugguucccu

SEQ ID NO: 1106021 - RNA, 21 nt, Human
uuggcuuguuccugcuucucu

SEQ ID NO: 1106022 - RNA, 23 nt, Human
uuguuuugucucauaugagaaua

SEQ ID NO: 1106023 - RNA, 18 nt, Human
uuuggauuuucucucuuc

SEQ ID NO: 1106024 - RNA, 23 nt, Human
uuugugcucuuucagacuuuuug

SEQ ID NO: 1106025 - RNA, 27 nt, Human
aaaaagauacacaaaucauaagccccu

SEQ ID NO: 1106026 - RNA, 18 nt, Human
aaaacccaggaaagaagc

SEQ ID NO: 1106027 - RNA, 18 nt, Human
aaacaaugcugccacuca

SEQ ID NO: 1106028 - RNA, 24 nt, Human
aaacccgccccccacccggaccac

SEQ ID NO: 1106029 - RNA, 20 nt, Human
aaagaagccuuuugucccuu

SEQ ID NO: 1106030 - RNA, 20 nt, Human
aaaggaaccagcgcugcugu

SEQ ID NO: 1106031 - RNA, 19 nt, Human
aaaggagaaugcuggaagg

SEQ ID NO: 1106032 - RNA, 18 nt, Human
aacaccaaaacccaggaa

SEQ ID NO: 1106033 - RNA, 24 nt, Human
aaccaaaaacaaaaagauacacaa

SEQ ID NO: 1106034 - RNA, 23 nt, Human
aaccacccgugguggacacucga

SEQ ID NO: 1106035 - RNA, 21 nt, Human
aacccgccccccacccggacc

SEQ ID NO: 1106036 - RNA, 20 nt, Human
aaccugcccccccucaccac

SEQ ID NO: 1106037 - RNA, 18 nt, Human
aagaagugggaaggucaa

SEQ ID NO: 1106038 - RNA, 24 nt, Human
aagaggagaagggccccuuccuca

SEQ ID NO: 1106039 - RNA, 23 nt, Human
aagcagcacagccccagauagcg

SEQ ID NO: 1106040 - RNA, 23 nt, Human
acaacacggaggcagcagaacac

SEQ ID NO: 1106041 - RNA, 24 nt, Human
acacacagcuugccaagaaagcac

SEQ ID NO: 1106042 - RNA, 21 nt, Human
acaccauccauguuuccuuuu

SEQ ID NO: 1106043 - RNA, 22 nt, Human
acagccccagauagcgccccca

SEQ ID NO: 1106044 - RNA, 18 nt, Human
acaggggacaccuccuuc

SEQ ID NO: 1106045 - RNA, 18 nt, Human
accaaaacccaggaaaga

SEQ ID NO: 1106046 - RNA, 22 nt, Human
accaccccuaaccugccccccc

SEQ ID NO: 1106047 - RNA, 20 nt, Human
acccgccccccacccggacc

SEQ ID NO: 1106048 - RNA, 18 nt, Human
acccggaccacaagcagc

SEQ ID NO: 1106049 - RNA, 19 nt, Human
acccggaccacaagcagca

SEQ ID NO: 1106050 - RNA, 21 nt, Human
accuggcucagaugccagcag

SEQ ID NO: 1106051 - RNA, 19 nt, Human
accuugaguccaggaagag

SEQ ID NO: 1106052 - RNA, 22 nt, Human
accuugaguccaggaagaggag

SEQ ID NO: 1106053 - RNA, 26 nt, Human
acggaggcagcagaacaccaacagaa

SEQ ID NO: 1106054 - RNA, 20 nt, Human
acugcacccaaccaaccccc

SEQ ID NO: 1106055 - RNA, 19 nt, Human
agaauuauuucauauuucu

SEQ ID NO: 1106056 - RNA, 25 nt, Human
agaggagaagggccccuuccucaga

SEQ ID NO: 1106057 - RNA, 26 nt, Human
agcaaaagugaucccaaccacaccac

SEQ ID NO: 1106058 - RNA, 26 nt, Human
agcagaacaccaacagaagaguccca

SEQ ID NO: 1106059 - RNA, 26 nt, Human
agcagcacagccccagauagcgcccc

SEQ ID NO: 1106060 - RNA, 21 nt, Human
agccaacauagacacauucuc

SEQ ID NO: 1106061 - RNA, 19 nt, Human
agccuggcuuggagcagcu

SEQ ID NO: 1106062 - RNA, 22 nt, Human
agcgcugcugucacccuccaug

SEQ ID NO: 1106063 - RNA, 25 nt, Human
agugcagccuccccccauaccaccc

SEQ ID NO: 1106064 - RNA, 22 nt, Human
aucccaggcugggccaggcccc

SEQ ID NO: 1106065 - RNA, 22 nt, Human
caaaccacccgugguggacacu

SEQ ID NO: 1106066 - RNA, 18 nt, Human
caaagggugcccagaggc

SEQ ID NO: 1106067 - RNA, 19 nt, Human
caacauagacacauucucc

SEQ ID NO: 1106068 - RNA, 19 nt, Human
caaccaaaaacaaaaagau

SEQ ID NO: 1106069 - RNA, 25 nt, Human
caagaaagcacccuuuaucuuacau

SEQ ID NO: 1106070 - RNA, 24 nt, Human
caagcuagcaagaaaacacagccc

SEQ ID NO: 1106071 - RNA, 21 nt, Human
cacaaaucauaagccccuaaa

SEQ ID NO: 1106072 - RNA, 21 nt, Human
cacaacacacccagagacugc

SEQ ID NO: 1106073 - RNA, 19 nt, Human
cacaacaccaaaacccagg

SEQ ID NO: 1106074 - RNA, 19 nt, Human
cacaacaccaaaacccagg

SEQ ID NO: 1106075 - RNA, 22 nt, Human
cacaacaccaaaacccaggaaa

SEQ ID NO: 1106076 - RNA, 22 nt, Human
cacaaccaaaaacaaaaagaua

SEQ ID NO: 1106077 - RNA, 23 nt, Human
cacaaccaaaaacaaaaagauac

SEQ ID NO: 1106078 - RNA, 23 nt, Human
cacaagcagcacagccccagaua

SEQ ID NO: 1106079 - RNA, 22 nt, Human
cacacagcuugccaagaaagca

SEQ ID NO: 1106080 - RNA, 24 nt, Human
cacaccacgcaaacuagccaggaa

SEQ ID NO: 1106081 - RNA, 22 nt, Human
cacagcagccacccuccugaga

SEQ ID NO: 1106082 - RNA, 22 nt, Human
cacagcccagguaagcucaucu

SEQ ID NO: 1106083 - RNA, 23 nt, Human
cacagguacccuccuaccgcucc

SEQ ID NO: 1106084 - RNA, 21 nt, Human
caccacugucauggccaccuc

SEQ ID NO: 1106085 - RNA, 20 nt, Human
cacccaaccaaccccccgag

SEQ ID NO: 1106086 - RNA, 19 nt, Human
caccccuaaccugcccccc

SEQ ID NO: 1106087 - RNA, 25 nt, Human
caccccuaaccugcccccccucacc

SEQ ID NO: 1106088 - RNA, 19 nt, Human
cacccggaccacaagcagc

SEQ ID NO: 1106089 - RNA, 18 nt, Human
cacccuccaugcaccugc

SEQ ID NO: 1106090 - RNA, 27 nt, Human
cacccucuagaaccuugaguccaggaa

SEQ ID NO: 1106091 - RNA, 19 nt, Human
cagaacaccaacagaagag

SEQ ID NO: 1106092 - RNA, 18 nt, Human
cagaacagaaucugcuac

SEQ ID NO: 1106093 - RNA, 22 nt, Human
cagacaaugccagaaaaaccua

SEQ ID NO: 1106094 - RNA, 21 nt, Human
cagcagaacaccaacagaaga

SEQ ID NO: 1106095 - RNA, 24 nt, Human
cagcagaaggagggcacccuccaa

SEQ ID NO: 1106096 - RNA, 20 nt, Human
cagcagugcagccucccccc

SEQ ID NO: 1106097 - RNA, 21 nt, Human
cagccacccuccugagagguu

SEQ ID NO: 1106098 - RNA, 23 nt, Human
cagcccagguaagcucaucucuu

SEQ ID NO: 1106099 - RNA, 19 nt, Human
cagccccagauagcgcccc

SEQ ID NO: 1106100 - RNA, 23 nt, Human
cagccuccccccauaccaccccu

SEQ ID NO: 1106101 - RNA, 23 nt, Human
cagcuugccaagaaagcacccuu

SEQ ID NO: 1106102 - RNA, 23 nt, Human
caggaggaugccucuuugaugau

SEQ ID NO: 1106103 - RNA, 19 nt, Human
caggccccaaagcccuccu

SEQ ID NO: 1106104 - RNA, 23 nt, Human
caggggaccugccacagcagcca

SEQ ID NO: 1106105 - RNA, 19 nt, Human
cagguacccuccuaccgcu

SEQ ID NO: 1106106 - RNA, 21 nt, Human
cagguacccuccuaccgcucc

SEQ ID NO: 1106107 - RNA, 24 nt, Human
cagugcagccuccccccauaccac

SEQ ID NO: 1106108 - RNA, 24 nt, Human
cauauucaggcuccaaccuccagc

SEQ ID NO: 1106109 - RNA, 20 nt, Human
cauuuagaauagaauuguuc

SEQ ID NO: 1106110 - RNA, 24 nt, Human
ccaacacacagcuugccaagaaag

SEQ ID NO: 1106111 - RNA, 18 nt, Human
ccaaccaaccccccgacc

SEQ ID NO: 1106112 - RNA, 20 nt, Human
ccaaccaaccccccgacccc

SEQ ID NO: 1106113 - RNA, 18 nt, Human
ccaaccacaccacgcaaa

SEQ ID NO: 1106114 - RNA, 22 nt, Human
ccacaacacacccagagacugc

SEQ ID NO: 1106115 - RNA, 20 nt, Human
ccacaacccaucccugccac

SEQ ID NO: 1106116 - RNA, 19 nt, Human
ccacagcagccacccuccu

SEQ ID NO: 1106117 - RNA, 20 nt, Human
ccagagacaacacggaggca

SEQ ID NO: 1106118 - RNA, 22 nt, Human
ccaucaaacccgccccccaccc

SEQ ID NO: 1106119 - RNA, 19 nt, Human
cccaaagcccuccuacucc

SEQ ID NO: 1106120 - RNA, 21 nt, Human
cccaaagcccuccuacucccc

SEQ ID NO: 1106121 - RNA, 23 nt, Human
cccaaccaaccccccgaccccac

SEQ ID NO: 1106122 - RNA, 18 nt, Human
cccacaacacacccagag

SEQ ID NO: 1106123 - RNA, 18 nt, Human
cccacaacaccaaaaccc

SEQ ID NO: 1106124 - RNA, 24 nt, Human
cccagauugugcccacaacacacc

SEQ ID NO: 1106125 - RNA, 18 nt, Human
cccauaccaccccuaacc

SEQ ID NO: 1106126 - RNA, 21 nt, Human
ccccaaagcccuccuacuccc

SEQ ID NO: 1106127 - RNA, 19 nt, Human
ccccagauagcgcccccaa

SEQ ID NO: 1106128 - RNA, 22 nt, Human
ccccagauagcgcccccaaucu

SEQ ID NO: 1106129 - RNA, 24 nt, Human
ccccagauagcgcccccaaucugc

SEQ ID NO: 1106130 - RNA, 28 nt, Human
ccccauaccaccccuaaccugccccccc

SEQ ID NO: 1106131 - RNA, 20 nt, Human
ccccaucaaacccgcccccc

SEQ ID NO: 1106132 - RNA, 25 nt, Human
cccccccucaccacaagcuuagccc

SEQ ID NO: 1106133 - RNA, 27 nt, Human
ccccccucaccacaagcuuagccccca

SEQ ID NO: 1106134 - RNA, 21 nt, Human
cccccuuccuggccccuagac

SEQ ID NO: 1106135 - RNA, 23 nt, Human
ccccuaaauucuguuaagaacaa

SEQ ID NO: 1106136 - RNA, 22 nt, Human
ccccuaaccugcccccccucac

SEQ ID NO: 1106137 - RNA, 23 nt, Human
ccccuaaccugcccccccucacc

SEQ ID NO: 1106138 - RNA, 23 nt, Human
ccccuagacuugcugcugcugcc

SEQ ID NO: 1106139 - RNA, 22 nt, Human
ccccuguggccuaagguuccac

SEQ ID NO: 1106140 - RNA, 22 nt, Human
cccggaccacaagcagcacagc

SEQ ID NO: 1106141 - RNA, 23 nt, Human
cccuccaacacacagcuugccaa

SEQ ID NO: 1106142 - RNA, 21 nt, Human
cccuccaugcaccugcccacc

SEQ ID NO: 1106143 - RNA, 20 nt, Human
cccuccuacucccccuuccu

SEQ ID NO: 1106144 - RNA, 22 nt, Human
cccuuccucagaggccaccagu

SEQ ID NO: 1106145 - RNA, 19 nt, Human
cccuuuaucuuacaugggg

SEQ ID NO: 1106146 - RNA, 18 nt, Human
cccuuuucccccacuagg

SEQ ID NO: 1106147 - RNA, 22 nt, Human
ccuaaccugcccccccucacca

SEQ ID NO: 1106148 - RNA, 18 nt, Human
ccucaagcuagcaagaaa

SEQ ID NO: 1106149 - RNA, 19 nt, Human
ccucaagcuagcaagaaaa

SEQ ID NO: 1106150 - RNA, 23 nt, Human
ccucaccacaagcuuagccccca

SEQ ID NO: 1106151 - RNA, 22 nt, Human
ccucagaggccaccacugucau

SEQ ID NO: 1106152 - RNA, 21 nt, Human
ccuccaaggcuccuaccacuu

SEQ ID NO: 1106153 - RNA, 25 nt, Human
ccuccaaggcuccuaccacuuggcc

SEQ ID NO: 1106154 - RNA, 26 nt, Human
ccuccaaggcuccuaccacuuggccu

SEQ ID NO: 1106155 - RNA, 24 nt, Human
ccuccaugcaccugcccacccucc

SEQ ID NO: 1106156 - RNA, 25 nt, Human
ccuccuacucccccuuccuggcccc

SEQ ID NO: 1106157 - RNA, 21 nt, Human
ccuccugagagguucccuuuc

SEQ ID NO: 1106158 - RNA, 23 nt, Human
ccugccacggguguugcagcacc

SEQ ID NO: 1106159 - RNA, 19 nt, Human
ccugucacaggcagugaac

SEQ ID NO: 1106160 - RNA, 19 nt, Human
ccugugguacagaaccagc

SEQ ID NO: 1106161 - RNA, 19 nt, Human
ccuucacacaucugagagu

SEQ ID NO: 1106162 - RNA, 25 nt, Human
cggaggcagcagaacaccaacagaa

SEQ ID NO: 1106163 - RNA, 18 nt, Human
cucagaugccagcagaag

SEQ ID NO: 1106164 - RNA, 19 nt, Human
cuccaaagacugcaggaga

SEQ ID NO: 1106165 - RNA, 18 nt, Human
cuccagaacugaagaaau

SEQ ID NO: 1106166 - RNA, 19 nt, Human
cuccccccauaccaccccu

SEQ ID NO: 1106167 - RNA, 28 nt, Human
cuccccccauaccaccccuaaccugccc

SEQ ID NO: 1106168 - RNA, 18 nt, Human
cucccccuuccuggcccc

SEQ ID NO: 1106169 - RNA, 23 nt, Human
cucgauaguguccacaacccauc

SEQ ID NO: 1106170 - RNA, 21 nt, Human
cugaaaggagaaugcuggaag

SEQ ID NO: 1106171 - RNA, 21 nt, Human
cugacgccaaaggaaccagcg

SEQ ID NO: 1106172 - RNA, 20 nt, Human
cugcccccccucaccacaag

SEQ ID NO: 1106173 - RNA, 27 nt, Human
cuggcagcagcagugcagccucccccu

SEQ ID NO: 1106174 - RNA, 24 nt, Human
cuggccccuagacuugcugcugcu

SEQ ID NO: 1106175 - RNA, 20 nt, Human
cugggcagacaaugccagaa

SEQ ID NO: 1106176 - RNA, 24 nt, Human
cugucauggccaccuccacaaccu

SEQ ID NO: 1106177 - RNA, 18 nt, Human
gaacucccuccaacacac

SEQ ID NO: 1106178 - RNA, 19 nt, Human
gaagggggaggacuccucc

SEQ ID NO: 1106179 - RNA, 24 nt, Human
gaggccaccacugucauggccacc

SEQ ID NO: 1106180 - RNA, 20 nt, Human
gcagcagaacaccaacagaa

SEQ ID NO: 1106181 - RNA, 22 nt, Human
gcagugcagccuccccccauac

SEQ ID NO: 1106182 - RNA, 18 nt, Human
gcccacaacacacccaga

SEQ ID NO: 1106183 - RNA, 22 nt, Human
gccccaaagcccuccuacuccc

SEQ ID NO: 1106184 - RNA, 21 nt, Human
gccccaucaaacccgcccccc

SEQ ID NO: 1106185 - RNA, 21 nt, Human
gcccuccuacucccccuuccu

SEQ ID NO: 1106186 - RNA, 22 nt, Human
gcuccaaccuccagcucaccac

SEQ ID NO: 1106187 - RNA, 18 nt, Human
ggagggcacccuccaaag

SEQ ID NO: 1106188 - RNA, 18 nt, Human
ggcaggugggcugaagaa

SEQ ID NO: 1106189 - RNA, 23 nt, Human
ggccccaaagcccuccuacuccc

SEQ ID NO: 1106190 - RNA, 19 nt, Human
ggccuaagguuccacuuuc

SEQ ID NO: 1106191 - RNA, 20 nt, Human
gggugcgaaggcccugcagu

SEQ ID NO: 1106192 - RNA, 22 nt, Human
guacuggucuaagccuccccuc

SEQ ID NO: 1106193 - RNA, 24 nt, Human
gugcccacaacacacccagagacu

SEQ ID NO: 1106194 - RNA, 18 nt, Human
guggcccaaagggugccc

SEQ ID NO: 1106195 - RNA, 20 nt, Human
uaaaagaagaaugacuaaau

SEQ ID NO: 1106196 - RNA, 24 nt, Human
uaaccugcccccccucaccacaag

SEQ ID NO: 1106197 - RNA, 26 nt, Human
uaacucaacuggaaaaggagacaaaa

SEQ ID NO: 1106198 - RNA, 20 nt, Human
uaagaacaaaacaaugcugc

SEQ ID NO: 1106199 - RNA, 27 nt, Human
uaagaacaccauccauguugucguaga

SEQ ID NO: 1106200 - RNA, 18 nt, Human
uaagaugacugucuaagg

SEQ ID NO: 1106201 - RNA, 18 nt, Human
uaagcagccaacauagac

SEQ ID NO: 1106202 - RNA, 24 nt, Human
uaagcagccaacauagacacauuc

SEQ ID NO: 1106203 - RNA, 21 nt, Human
uacagaaccagcagcuucuua

SEQ ID NO: 1106204 - RNA, 20 nt, Human
uacccugauagcacccccaa

SEQ ID NO: 1106205 - RNA, 20 nt, Human
uagggugccugagaggcaug

SEQ ID NO: 1106206 - RNA, 20 nt, Human
uaucucacugaaaggagaau

SEQ ID NO: 1106207 - RNA, 24 nt, Human
ucaacuggaaaaggagacaaaauc

SEQ ID NO: 1106208 - RNA, 23 nt, Human
ucaccacaagcuuagcccccaga

SEQ ID NO: 1106209 - RNA, 22 nt, Human
ucauggccaccuccacaaccug

SEQ ID NO: 1106210 - RNA, 24 nt, Human
ucauggccaccuccacaaccugcu

SEQ ID NO: 1106211 - RNA, 19 nt, Human
uccaacacgagcagaaguu

SEQ ID NO: 1106212 - RNA, 18 nt, Human
uccaaggcuccuaccacu

SEQ ID NO: 1106213 - RNA, 22 nt, Human
uccaggaagaggagaagggccc

SEQ ID NO: 1106214 - RNA, 23 nt, Human
uccaggaagaggagaagggcccc

SEQ ID NO: 1106215 - RNA, 25 nt, Human
uccaucaccauggcugccacaacca

SEQ ID NO: 1106216 - RNA, 27 nt, Human
uccaucaccauggcugccacaaccaua

SEQ ID NO: 1106217 - RNA, 20 nt, Human
uccaugcaccugcccacccu

SEQ ID NO: 1106218 - RNA, 21 nt, Human
ucccacaacaccaaaacccag

SEQ ID NO: 1106219 - RNA, 22 nt, Human
ucccacaacaccaaaacccagg

SEQ ID NO: 1106220 - RNA, 23 nt, Human
ucccacaacaccaaaacccagga

SEQ ID NO: 1106221 - RNA, 21 nt, Human
uccccaggugacaccauggga

SEQ ID NO: 1106222 - RNA, 19 nt, Human
uccccccauaccaccccua

SEQ ID NO: 1106223 - RNA, 21 nt, Human
ucccuccaacacacagcuugc

SEQ ID NO: 1106224 - RNA, 19 nt, Human
ucccuuuucccccacuagg

SEQ ID NO: 1106225 - RNA, 21 nt, Human
uccuccuugcccuggcugcac

SEQ ID NO: 1106226 - RNA, 19 nt, Human
uccuggccccuagacuugc

SEQ ID NO: 1106227 - RNA, 26 nt, Human
ucuaaauuuaaaagaagaaugacuaa

SEQ ID NO: 1106228 - RNA, 24 nt, Human
ucugcgcuccaacacgagcagaag

SEQ ID NO: 1106229 - RNA, 21 nt, Human
ugaaaggagaaugcuggaagg

SEQ ID NO: 1106230 - RNA, 18 nt, Human
ugaacucccuccaacaca

SEQ ID NO: 1106231 - RNA, 18 nt, Human
ugacaccaugggcaggug

SEQ ID NO: 1106232 - RNA, 19 nt, Human
ugagagguucccuuucuuc

SEQ ID NO: 1106233 - RNA, 25 nt, Human
ugcaccuccaccaucacugaggccu

SEQ ID NO: 1106234 - RNA, 20 nt, Human
ugcaccugcccacccuccaa

SEQ ID NO: 1106235 - RNA, 22 nt, Human
ugccaccauuagcacugacgcc

SEQ ID NO: 1106236 - RNA, 22 nt, Human
ugcccacccuccaaggcuccua

SEQ ID NO: 1106237 - RNA, 22 nt, Human
ugcuaacaauaagcagccaaca

SEQ ID NO: 1106238 - RNA, 18 nt, Human
ugcugcugcugccaccau

SEQ ID NO: 1106239 - RNA, 19 nt, Human
uggaaggugcuaguaagau

SEQ ID NO: 1106240 - RNA, 20 nt, Human
uggaaggugcuaguaagaug

SEQ ID NO: 1106241 - RNA, 24 nt, Human
uggccaccuccacaaccugcugcu

SEQ ID NO: 1106242 - RNA, 22 nt, Human
uggccuccacagguacccuccu

SEQ ID NO: 1106243 - RNA, 18 nt, Human
uggcucagaugccagcag

SEQ ID NO: 1106244 - RNA, 19 nt, Human
ugggcagacaaugccagaa

SEQ ID NO: 1106245 - RNA, 22 nt, Human
ugguacagaaccagcagcuucu

SEQ ID NO: 1106246 - RNA, 24 nt, Human
uguccacaacccaucccugccacg

SEQ ID NO: 1106247 - RNA, 21 nt, Human
ugucuaaggacuccagaacug

SEQ ID NO: 1106248 - RNA, 24 nt, Human
ugucuaaggacuccagaacugaag

SEQ ID NO: 1106249 - RNA, 24 nt, Human
ugugcccacaacacacccagagag

SEQ ID NO: 1106250 - RNA, 18 nt, Human
uguucacccucuagaacc

SEQ ID NO: 1106251 - RNA, 19 nt, Human
uguucagaaauuugcuaac

SEQ ID NO: 1106252 - RNA, 24 nt, Human
uuaucacaaccaaaaacaaaaaga

SEQ ID NO: 1106253 - RNA, 18 nt, Human
uuccuggccauagaagcc

SEQ ID NO: 1106254 - RNA, 22 nt, Human
uuccuggccauagaagcccucc

SEQ ID NO: 1106255 - RNA, 19 nt, Human
uuguucacccucuagaacc

SEQ ID NO: 1106256 - RNA, 22 nt, Human
uuuuguggcaaugcaugucacu

SEQ ID NO: 1106257 - RNA, 25 nt, Human
uuuuucagaauuauuucauauuucu

SEQ ID NO: 1106258 - RNA, 24 nt, Human
aaacuaaauuugcugugacuauga

SEQ ID NO: 1106259 - RNA, 23 nt, Human
aauguggaaaaaaaguggaugau

SEQ ID NO: 1106260 - RNA, 19 nt, Human
agagccauuaaaggcugag

SEQ ID NO: 1106261 - RNA, 20 nt, Human
agccauuaaaggcugagcuc

SEQ ID NO: 1106262 - RNA, 21 nt, Human
agccauuaaaggcugagcucu

SEQ ID NO: 1106263 - RNA, 21 nt, Human
augaugccagagaacaaguac

SEQ ID NO: 1106264 - RNA, 25 nt, Human
caaacuaaauuugcugugacuauga

SEQ ID NO: 1106265 - RNA, 18 nt, Human
uaaaaagagccauuaaag

SEQ ID NO: 1106266 - RNA, 19 nt, Human
uacaaucaacagagcuauc

SEQ ID NO: 1106267 - RNA, 22 nt, Human
uaccuguuuauucucaaaucca

SEQ ID NO: 1106268 - RNA, 21 nt, Human
uauaucaagcagcaugaugcc

SEQ ID NO: 1106269 - RNA, 24 nt, Human
ucagugaaaaaaaaauucuaagaa

SEQ ID NO: 1106270 - RNA, 23 nt, Human
ucuaagaaauacauauaaaggag

SEQ ID NO: 1106271 - RNA, 19 nt, Human
ugaaaaaaaaauucuaaga

SEQ ID NO: 1106272 - RNA, 24 nt, Human
ugaaaaaaaaauucuaagaaauac

SEQ ID NO: 1106273 - RNA, 18 nt, Human
ugacuaugaaauuccaga

SEQ ID NO: 1106274 - RNA, 21 nt, Human
ugccagagaacaaguacuuaa

SEQ ID NO: 1106275 - RNA, 24 nt, Human
ugcccgauaagcagcuagaaacaa

SEQ ID NO: 1106276 - RNA, 21 nt, Human
uuagcuccaacuccuuucuca

SEQ ID NO: 1106277 - RNA, 26 nt, Human
uucagugaaaaaaaaauucuaagaaa

SEQ ID NO: 1106278 - RNA, 22 nt, Human
aaaacagauaagaacuggggca

SEQ ID NO: 1106279 - RNA, 18 nt, Human
aaaaggcagaaugaaacg

SEQ ID NO: 1106280 - RNA, 21 nt, Human
aacacaacuuauaacauugga

SEQ ID NO: 1106281 - RNA, 25 nt, Human
acgcaggcacacacacaccagugcu

SEQ ID NO: 1106282 - RNA, 21 nt, Human
acguaccauauacauguagac

SEQ ID NO: 1106283 - RNA, 18 nt, Human
agacccagaagccugaaa

SEQ ID NO: 1106284 - RNA, 21 nt, Human
agacgacaaaugaaaacuguc

SEQ ID NO: 1106285 - RNA, 21 nt, Human
agacuuggagacccagaagcc

SEQ ID NO: 1106286 - RNA, 21 nt, Human
agcggagccgcccgccugagg

SEQ ID NO: 1106287 - RNA, 18 nt, Human
augaaacguaccauauac

SEQ ID NO: 1106288 - RNA, 21 nt, Human
caauaucaccuccugaagcuu

SEQ ID NO: 1106289 - RNA, 22 nt, Human
cacacaccagugcucacagcca

SEQ ID NO: 1106290 - RNA, 24 nt, Human
cacaucaauaucaccuccugaagc

SEQ ID NO: 1106291 - RNA, 21 nt, Human
cacgcaggcacacacacacca

SEQ ID NO: 1106292 - RNA, 25 nt, Human
caucaauaucaccuccugaagcuuu

SEQ ID NO: 1106293 - RNA, 23 nt, Human
cccgccuaccgagccugcccacc

SEQ ID NO: 1106294 - RNA, 21 nt, Human
ccgccgaccgcggcccucucu

SEQ ID NO: 1106295 - RNA, 29 nt, Human
ccgccugagggagcccuccgggagugagg

SEQ ID NO: 1106296 - RNA, 23 nt, Human
ccuaccgagccugcccaccaccc

SEQ ID NO: 1106297 - RNA, 21 nt, Human
cggcggcuagcagggacgaag

SEQ ID NO: 1106298 - RNA, 23 nt, Human
cucaaauuaaggcaucaugcagc

SEQ ID NO: 1106299 - RNA, 20 nt, Human
cuccgggagugagcgcacgc

SEQ ID NO: 1106300 - RNA, 24 nt, Human
cuccugaagcuuuuuacccaguuu

SEQ ID NO: 1106301 - RNA, 18 nt, Human
cuggaccaaaugguauac

SEQ ID NO: 1106302 - RNA, 22 nt, Human
gaaagugguucuugaccgacuu

SEQ ID NO: 1106303 - RNA, 19 nt, Human
gaacuggggcaauggaggc

SEQ ID NO: 1106304 - RNA, 25 nt, Human
gcaaaacagauaagaacuggggcaa

SEQ ID NO: 1106305 - RNA, 26 nt, Human
gcacgcaggcacacacacaccagugc

SEQ ID NO: 1106306 - RNA, 25 nt, Human
uacccaguuucacgguugguauuuc

SEQ ID NO: 1106307 - RNA, 20 nt, Human
uaccgagccugcccaccacc

SEQ ID NO: 1106308 - RNA, 26 nt, Human
uagcagggacgaagcucaacuucaug

SEQ ID NO: 1106309 - RNA, 22 nt, Human
ucaaaguauccuucucucuaaa

SEQ ID NO: 1106310 - RNA, 26 nt, Human
ucucuaaaaagccacaaauuacguuc

SEQ ID NO: 1106311 - RNA, 18 nt, Human
ucuuguuuauuuggcuuu

SEQ ID NO: 1106312 - RNA, 18 nt, Human
ugaaacguaccauauaca

SEQ ID NO: 1106313 - RNA, 20 nt, Human
ugagcgcacgcaaccgugca

SEQ ID NO: 1106314 - RNA, 19 nt, Human
ugcacgcaggcacacacac

SEQ ID NO: 1106315 - RNA, 20 nt, Human
ugcacgcaggcacacacaca

SEQ ID NO: 1106316 - RNA, 26 nt, Human
ugcacgcaggcacacacacaccagug

SEQ ID NO: 1106317 - RNA, 21 nt, Human
ugcagucagauuccuccgccc

SEQ ID NO: 1106318 - RNA, 21 nt, Human
ugcaucuuguuuauuuggcuu

SEQ ID NO: 1106319 - RNA, 20 nt, Human
uggaaugccucguuuggaua

SEQ ID NO: 1106320 - RNA, 24 nt, Human
uggaccaaaugguauacgugucuu

SEQ ID NO: 1106321 - RNA, 21 nt, Human
uggagacccagaagccugaaa

SEQ ID NO: 1106322 - RNA, 23 nt, Human
ugucuuucaucaauauaaacaug

SEQ ID NO: 1106323 - RNA, 21 nt, Human
uucuuugaaguaaguauuggg

SEQ ID NO: 1106324 - RNA, 20 nt, Human
aaggaccacaggagcuaagg

SEQ ID NO: 1106325 - RNA, 24 nt, Human
aagugauccaccugccucggccuc

SEQ ID NO: 1106326 - RNA, 20 nt, Human
aaguugcugggacuauaggc

SEQ ID NO: 1106327 - RNA, 23 nt, Human
aaguugcugggacuauaggcacg

SEQ ID NO: 1106328 - RNA, 33 nt, Human
acacacacacacacacacagacguaugcacagu

SEQ ID NO: 1106329 - RNA, 21 nt, Human
acagaguuuuaccauguuagc

SEQ ID NO: 1106330 - RNA, 25 nt, Human
acaguaaaugaauugagacccagaa

SEQ ID NO: 1106331 - RNA, 21 nt, Human
acaguggggugaucucagcuc

SEQ ID NO: 1106332 - RNA, 23 nt, Human
accauguuagcuaggcuggucuc

SEQ ID NO: 1106333 - RNA, 24 nt, Human
accauguuagcuaggcuggucucg

SEQ ID NO: 1106334 - RNA, 19 nt, Human
acccagagaagugaagaga

SEQ ID NO: 1106335 - RNA, 20 nt, Human
acccugagguguaaauaggg

SEQ ID NO: 1106336 - RNA, 22 nt, Human
acccugagguguaaauagggaa

SEQ ID NO: 1106337 - RNA, 19 nt, Human
acuaauuuacauucccacc

SEQ ID NO: 1106338 - RNA, 22 nt, Human
aggcacgugccagcacgcccag

SEQ ID NO: 1106339 - RNA, 18 nt, Human
aggucucccggcuucagc

SEQ ID NO: 1106340 - RNA, 24 nt, Human
agucucucuguugcccaggcugga

SEQ ID NO: 1106341 - RNA, 24 nt, Human
aguggggugaucucagcucacugc

SEQ ID NO: 1106342 - RNA, 23 nt, Human
auagugcugcaguaaacauggga

SEQ ID NO: 1106343 - RNA, 24 nt, Human
auuuuuguauuuuuaguagagaca

SEQ ID NO: 1106344 - RNA, 21 nt, Human
caagacugggccuccaggccc

SEQ ID NO: 1106345 - RNA, 22 nt, Human
caagcaauacuucugccucagc

SEQ ID NO: 1106346 - RNA, 23 nt, Human
caaggaccacaggagcuaaggug

SEQ ID NO: 1106347 - RNA, 22 nt, Human
caagugauccaccugccucggc

SEQ ID NO: 1106348 - RNA, 24 nt, Human
cacacacacacacacagacguaug

SEQ ID NO: 1106349 - RNA, 20 nt, Human
caccugccucggccucccag

SEQ ID NO: 1106350 - RNA, 23 nt, Human
cacgcccagccuauuuuuaguuu

SEQ ID NO: 1106351 - RNA, 21 nt, Human
cacgcccugagaggcugcagg

SEQ ID NO: 1106352 - RNA, 21 nt, Human
cacugcaaccucugccuccug

SEQ ID NO: 1106353 - RNA, 23 nt, Human
cacugcaaccucugccuccuggg

SEQ ID NO: 1106354 - RNA, 24 nt, Human
cagaguuuuaccauguuagcuagg

SEQ ID NO: 1106355 - RNA, 24 nt, Human
cagcacgcccagcuaauuuuugua

SEQ ID NO: 1106356 - RNA, 20 nt, Human
cagcagugggauuacuggau

SEQ ID NO: 1106357 - RNA, 20 nt, Human
cauuuucuucauucauucgu

SEQ ID NO: 1106358 - RNA, 20 nt, Human
ccaccacgcccagccuauuu

SEQ ID NO: 1106359 - RNA, 20 nt, Human
ccagcacgcccagcuaauuu

SEQ ID NO: 1106360 - RNA, 23 nt, Human
ccagggugcugggauuacaggca

SEQ ID NO: 1106361 - RNA, 24 nt, Human
ccagggugcugggauuacaggcau

SEQ ID NO: 1106362 - RNA, 24 nt, Human
cccaaguugcugggacuauaggca

SEQ ID NO: 1106363 - RNA, 24 nt, Human
cccagggugcugggauuacaggca

SEQ ID NO: 1106364 - RNA, 23 nt, Human
ccuaagccccaaggaccacagga

SEQ ID NO: 1106365 - RNA, 19 nt, Human
ccucugccuccuggguuca

SEQ ID NO: 1106366 - RNA, 21 nt, Human
ccucuugccagcuuaccuggg

SEQ ID NO: 1106367 - RNA, 20 nt, Human
ccucuuucuccacuuucuca

SEQ ID NO: 1106368 - RNA, 21 nt, Human
ccugaccucaagugauccacc

SEQ ID NO: 1106369 - RNA, 23 nt, Human
ccugaccucaagugauccaccug

SEQ ID NO: 1106370 - RNA, 23 nt, Human
ccugaccucaagugauccaccug

SEQ ID NO: 1106371 - RNA, 21 nt, Human
ccuggguucaagcaauacuuc

SEQ ID NO: 1106372 - RNA, 21 nt, Human
ccuugagagaggggagccugg

SEQ ID NO: 1106373 - RNA, 23 nt, Human
cuauuucuuuuuuuuucuuugga

SEQ ID NO: 1106374 - RNA, 21 nt, Human
cucaagugauccaccugccuc

SEQ ID NO: 1106375 - RNA, 21 nt, Human
cucacacacacacacacacac

SEQ ID NO: 1106376 - RNA, 31 nt, Human
cucacacacacacacacacacagacguaugg

SEQ ID NO: 1106377 - RNA, 24 nt, Human
cucacugcaaccucugccuccugg

SEQ ID NO: 1106378 - RNA, 20 nt, Human
cuccggccagaccuccccuc

SEQ ID NO: 1106379 - RNA, 22 nt, Human
cucucucucucucucucacaca

SEQ ID NO: 1106380 - RNA, 19 nt, Human
cucucuguugcccaggcug

SEQ ID NO: 1106381 - RNA, 22 nt, Human
cucucuguugcccaggcuggag

SEQ ID NO: 1106382 - RNA, 23 nt, Human
cugcaaccucugccuccuggguu

SEQ ID NO: 1106383 - RNA, 24 nt, Human
cugcaaccucugccuccuggguuc

SEQ ID NO: 1106384 - RNA, 19 nt, Human
cugccucagccucccaagu

SEQ ID NO: 1106385 - RNA, 24 nt, Human
cuggaaguuucacgcucaagcuaa

SEQ ID NO: 1106386 - RNA, 19 nt, Human
cuguacuguucuccauagu

SEQ ID NO: 1106387 - RNA, 21 nt, Human
cuguggcccuuuccucuugcc

SEQ ID NO: 1106388 - RNA, 19 nt, Human
cuuuacgcacggacucucc

SEQ ID NO: 1106389 - RNA, 24 nt, Human
gaccucaagugauccaccugccuc

SEQ ID NO: 1106390 - RNA, 21 nt, Human
gagacagaguuuuaccauguu

SEQ ID NO: 1106391 - RNA, 22 nt, Human
gagaggggagccugguuuccaa

SEQ ID NO: 1106392 - RNA, 22 nt, Human
gaggacaagacugggccuccag

SEQ ID NO: 1106393 - RNA, 18 nt, Human
gauuacaggcaugagcca

SEQ ID NO: 1106394 - RNA, 21 nt, Human
gauuacaggcaugagccacca

SEQ ID NO: 1106395 - RNA, 22 nt, Human
gauuacaggcaugagccaccac

SEQ ID NO: 1106396 - RNA, 22 nt, Human
gcaaccucugccuccuggguuc

SEQ ID NO: 1106397 - RNA, 22 nt, Human
gcccagcuaauuuuuguauuuu

SEQ ID NO: 1106398 - RNA, 20 nt, Human
gccuguggcccuuuccucuu

SEQ ID NO: 1106399 - RNA, 23 nt, Human
gcugcuuuacgcacggacucucc

SEQ ID NO: 1106400 - RNA, 23 nt, Human
gcuggucucgaacuccugaccuc

SEQ ID NO: 1106401 - RNA, 19 nt, Human
ggacuauaggcacgugcca

SEQ ID NO: 1106402 - RNA, 19 nt, Human
ggauuacaggcaugagcca

SEQ ID NO: 1106403 - RNA, 20 nt, Human
ggauuccucuuucuccacuu

SEQ ID NO: 1106404 - RNA, 21 nt, Human
ggcccuuuccucuugccagcu

SEQ ID NO: 1106405 - RNA, 24 nt, Human
ggcuggucucgaacuccugaccuc

SEQ ID NO: 1106406 - RNA, 19 nt, Human
ggucucgaacuccugaccu

SEQ ID NO: 1106407 - RNA, 20 nt, Human
ggugacagaggaggacaaga

SEQ ID NO: 1106408 - RNA, 23 nt, Human
guacucucucucucucucucuca

SEQ ID NO: 1106409 - RNA, 23 nt, Human
gucucucuguugcccaggcugga

SEQ ID NO: 1106410 - RNA, 24 nt, Human
gucucucuguugcccaggcuggag

SEQ ID NO: 1106411 - RNA, 24 nt, Human
gugauccaccugccucggccuccc

SEQ ID NO: 1106412 - RNA, 21 nt, Human
gugcugggauuacaggcauga

SEQ ID NO: 1106413 - RNA, 22 nt, Human
uaagccccaaggaccacaggag

SEQ ID NO: 1106414 - RNA, 26 nt, Human
uaagccccaaggaccacaggagcuaa

SEQ ID NO: 1106415 - RNA, 25 nt, Human
uaaggugaucaacaaauucaccccc

SEQ ID NO: 1106416 - RNA, 24 nt, Human
uaauuuuuguauuuuuaguagaga

SEQ ID NO: 1106417 - RNA, 24 nt, Human
uacaggcaugagccaccacgccca

SEQ ID NO: 1106418 - RNA, 21 nt, Human
uaccauguuagcuaggcuggu

SEQ ID NO: 1106419 - RNA, 24 nt, Human
uaccauguuagcuaggcuggucuc

SEQ ID NO: 1106420 - RNA, 22 nt, Human
uaccuugagagaggggagccug

SEQ ID NO: 1106421 - RNA, 22 nt, Human
uagagacagaguuuuaccaugu

SEQ ID NO: 1106422 - RNA, 24 nt, Human
uagcuaggcuggucucgaacuccu

SEQ ID NO: 1106423 - RNA, 24 nt, Human
uaguagagacagaguuuuaccaug

SEQ ID NO: 1106424 - RNA, 24 nt, Human
uauugcaaauagugcugcaguaaa

SEQ ID NO: 1106425 - RNA, 21 nt, Human
ucaagugauccaccugccucg

SEQ ID NO: 1106426 - RNA, 21 nt, Human
ucacacacacacacacacaca

SEQ ID NO: 1106427 - RNA, 31 nt, Human
ucacacacacacacacacacagacguaugca

SEQ ID NO: 1106428 - RNA, 24 nt, Human
ucacugcaaccucugccuccuggg

SEQ ID NO: 1106429 - RNA, 25 nt, Human
ucacugcaaccucugccuccugggu

SEQ ID NO: 1106430 - RNA, 27 nt, Human
ucacugcaaccucugccuccuggguuc

SEQ ID NO: 1106431 - RNA, 19 nt, Human
ucauuguguguucauuuuc

SEQ ID NO: 1106432 - RNA, 18 nt, Human
uccacacagcaagucggu

SEQ ID NO: 1106433 - RNA, 22 nt, Human
uccaccugccucggccucccag

SEQ ID NO: 1106434 - RNA, 24 nt, Human
uccaggcccuguaaacaguuuccu

SEQ ID NO: 1106435 - RNA, 24 nt, Human
uccauaguggcuauacuaauuuac

SEQ ID NO: 1106436 - RNA, 24 nt, Human
ucccaaguugcugggacuauaggc

SEQ ID NO: 1106437 - RNA, 24 nt, Human
ucccagggugcugggauuacaggc

SEQ ID NO: 1106438 - RNA, 21 nt, Human
ucccuaagccccaaggaccac

SEQ ID NO: 1106439 - RNA, 21 nt, Human
uccuggguucaagcaauacuu

SEQ ID NO: 1106440 - RNA, 24 nt, Human
uccuggguucaagcaauacuucug

SEQ ID NO: 1106441 - RNA, 21 nt, Human
ucggccucccagggugcuggg

SEQ ID NO: 1106442 - RNA, 21 nt, Human
ucucacacacacacacacaca

SEQ ID NO: 1106443 - RNA, 24 nt, Human
ucuccauaguggcuauacuaauuu

SEQ ID NO: 1106444 - RNA, 21 nt, Human
ucucgaacuccugaccucaag

SEQ ID NO: 1106445 - RNA, 27 nt, Human
ucucucacacacacacacacacacaga

SEQ ID NO: 1106446 - RNA, 21 nt, Human
ucucucuguugcccaggcugg

SEQ ID NO: 1106447 - RNA, 22 nt, Human
ucucucuguugcccaggcugga

SEQ ID NO: 1106448 - RNA, 23 nt, Human
ucucucuguugcccaggcuggag

SEQ ID NO: 1106449 - RNA, 18 nt, Human
ucucuguugcccaggcug

SEQ ID NO: 1106450 - RNA, 18 nt, Human
ucucuguugcccaggcug

SEQ ID NO: 1106451 - RNA, 25 nt, Human
ucucuguugcccaggcuggaggaca

SEQ ID NO: 1106452 - RNA, 18 nt, Human
ucugccucagccucccaa

SEQ ID NO: 1106453 - RNA, 18 nt, Human
ucuguugcccaggcugga

SEQ ID NO: 1106454 - RNA, 24 nt, Human
ucuuggcuauugcaaauagugcug

SEQ ID NO: 1106455 - RNA, 24 nt, Human
ugaccucaagugauccaccugccu

SEQ ID NO: 1106456 - RNA, 18 nt, Human
ugagagaggggagccugg

SEQ ID NO: 1106457 - RNA, 23 nt, Human
ugagagaggggagccugguuucc

SEQ ID NO: 1106458 - RNA, 19 nt, Human
ugccucagccucccaaguu

SEQ ID NO: 1106459 - RNA, 24 nt, Human
ugccucagccucccaaguugcugg

SEQ ID NO: 1106460 - RNA, 21 nt, Human
ugccucggccucccagggugc

SEQ ID NO: 1106461 - RNA, 24 nt, Human
ugccucggccucccagggugcugg

SEQ ID NO: 1106462 - RNA, 20 nt, Human
ugcugcaguaaacauggggg

SEQ ID NO: 1106463 - RNA, 23 nt, Human
uggcccuuuccucuugccagcuu

SEQ ID NO: 1106464 - RNA, 21 nt, Human
ugggacuauaggcacgugcca

SEQ ID NO: 1106465 - RNA, 18 nt, Human
ugggauuacaggcaugag

SEQ ID NO: 1106466 - RNA, 19 nt, Human
ugggauuacaggcaugagc

SEQ ID NO: 1106467 - RNA, 22 nt, Human
ugggauuacaggcaugagccac

SEQ ID NO: 1106468 - RNA, 23 nt, Human
ugggauuacaggcaugagccacc

SEQ ID NO: 1106469 - RNA, 24 nt, Human
ugggauuacaggcaugagccacca

SEQ ID NO: 1106470 - RNA, 24 nt, Human
ugggauuacaggcaugagccacca

SEQ ID NO: 1106471 - RNA, 24 nt, Human
ugggccuccaggcccuguaaacag

SEQ ID NO: 1106472 - RNA, 27 nt, Human
ugggccuccaggcccuguaaacaguuu

SEQ ID NO: 1106473 - RNA, 24 nt, Human
uggggugaucucagcucacugcaa

SEQ ID NO: 1106474 - RNA, 23 nt, Human
uggguucaagcaauacuucugcc

SEQ ID NO: 1106475 - RNA, 24 nt, Human
uuaguagagacagaguuuuaccau

SEQ ID NO: 1106476 - RNA, 19 nt, Human
uuccccuagccuguggccc

SEQ ID NO: 1106477 - RNA, 21 nt, Human
uuuuuaguagagacagaguuu

SEQ ID NO: 1106478 - RNA, 20 nt, Human
uuuuuguauuuuuaguagag

SEQ ID NO: 1106479 - RNA, 24 nt, Human
aagcacagcagagaagcaaccagc

SEQ ID NO: 1106480 - RNA, 23 nt, Human
agacuuuaacauuguuguaguca

SEQ ID NO: 1106481 - RNA, 20 nt, Human
cacagcagagaagcaaccag

SEQ ID NO: 1106482 - RNA, 22 nt, Human
cuguaggucuccuguugccugg

SEQ ID NO: 1106483 - RNA, 19 nt, Human
gcuggaagggaguaggucc

SEQ ID NO: 1106484 - RNA, 24 nt, Human
ggguagguguugaugaagcuguag

SEQ ID NO: 1106485 - RNA, 25 nt, Human
uaggucuccuguugccuggggaaag

SEQ ID NO: 1106486 - RNA, 23 nt, Human
ucuccuguugccuggggaaaguc

SEQ ID NO: 1106487 - RNA, 21 nt, Human
ugauucggcuggaagggagua

SEQ ID NO: 1106488 - RNA, 25 nt, Human
uggaagggaguaggucccgccaaau

SEQ ID NO: 1106489 - RNA, 28 nt, Human
uguacaauagggaauucuagauaagcac

SEQ ID NO: 1106490 - RNA, 24 nt, Human
aauacuuagugauagccacaagug

SEQ ID NO: 1106491 - RNA, 21 nt, Human
gacagucugaaaaggcugccc

SEQ ID NO: 1106492 - RNA, 23 nt, Human
uaagaaaaugaaccgugccacag

SEQ ID NO: 1106493 - RNA, 18 nt, Human
ucuuaacccaaaguuaca

SEQ ID NO: 1106494 - RNA, 19 nt, Human
uucuaggcagagccuaagg

SEQ ID NO: 1106495 - RNA, 21 nt, Human
aaaaacaaaaaaggaaaucug

SEQ ID NO: 1106496 - RNA, 24 nt, Human
aaaaacaaaaacaaaaacaaaaac

SEQ ID NO: 1106497 - RNA, 18 nt, Human
aaaaaggaaaucugaaga

SEQ ID NO: 1106498 - RNA, 22 nt, Human
aaaacaaaaacaaaaacaaaaa

SEQ ID NO: 1106499 - RNA, 25 nt, Human
aaaacaaaaacaaaaacaaaccaga

SEQ ID NO: 1106500 - RNA, 18 nt, Human
aaaauuugaaguccuccc

SEQ ID NO: 1106501 - RNA, 25 nt, Human
aaacaaaaacaaaaacaaaaacaaa

SEQ ID NO: 1106502 - RNA, 26 nt, Human
aaacaaaaacaaaaacaaaaacaaac

SEQ ID NO: 1106503 - RNA, 25 nt, Human
aaacaaaaacaaaaacaaaccagaa

SEQ ID NO: 1106504 - RNA, 20 nt, Human
aaacaagcacgaaagcucac

SEQ ID NO: 1106505 - RNA, 23 nt, Human
aaagaaccccaaccaagugcgcc

SEQ ID NO: 1106506 - RNA, 23 nt, Human
aacaaaaacaaaaacaaaccaga

SEQ ID NO: 1106507 - RNA, 18 nt, Human
aacaaaaacaaaccagaa

SEQ ID NO: 1106508 - RNA, 24 nt, Human
aacaaaaacaaaccagaauuggcu

SEQ ID NO: 1106509 - RNA, 18 nt, Human
aaccugaaaggcuggugc

SEQ ID NO: 1106510 - RNA, 23 nt, Human
aaggaaaucugaagaauaugaua

SEQ ID NO: 1106511 - RNA, 26 nt, Human
acaaaacauuccccauuucuuuaaaa

SEQ ID NO: 1106512 - RNA, 23 nt, Human
acacuuuaagucugguaagaaac

SEQ ID NO: 1106513 - RNA, 22 nt, Human
acugcaaaaacaaaaaaggaaa

SEQ ID NO: 1106514 - RNA, 18 nt, Human
acugcacugcagccuagg

SEQ ID NO: 1106515 - RNA, 24 nt, Human
acugcacugcagccuaggggacag

SEQ ID NO: 1106516 - RNA, 21 nt, Human
acugcagccuaggggacagag

SEQ ID NO: 1106517 - RNA, 24 nt, Human
agagagcaagacuccaucucaaaa

SEQ ID NO: 1106518 - RNA, 21 nt, Human
aggaaaucugaagaauaugau

SEQ ID NO: 1106519 - RNA, 27 nt, Human
agggcacucuaaaauuuaaccugaaaa

SEQ ID NO: 1106520 - RNA, 21 nt, Human
agguggucaaaggaaaaggga

SEQ ID NO: 1106521 - RNA, 18 nt, Human
agugacaugaucuugguu

SEQ ID NO: 1106522 - RNA, 20 nt, Human
aucgcgccacugcacugcag

SEQ ID NO: 1106523 - RNA, 19 nt, Human
aucugaauggaccuccccu

SEQ ID NO: 1106524 - RNA, 21 nt, Human
caaacaagcacgaaagcucac

SEQ ID NO: 1106525 - RNA, 21 nt, Human
caaacaagcacgaaagcucac

SEQ ID NO: 1106526 - RNA, 18 nt, Human
caaagaaccccaaccaag

SEQ ID NO: 1106527 - RNA, 22 nt, Human
caacuuaaagaccacacuaaua

SEQ ID NO: 1106528 - RNA, 20 nt, Human
caaucaggaaggacuaacac

SEQ ID NO: 1106529 - RNA, 18 nt, Human
cacaguggaguaagcugg

SEQ ID NO: 1106530 - RNA, 19 nt, Human
caccagagccucucaccac

SEQ ID NO: 1106531 - RNA, 26 nt, Human
caccagagccucucaccacacagcag

SEQ ID NO: 1106532 - RNA, 24 nt, Human
cacugcacugcagccuaggggaca

SEQ ID NO: 1106533 - RNA, 24 nt, Human
cagcagggaguuccugaaagggga

SEQ ID NO: 1106534 - RNA, 21 nt, Human
caggcuggaaugcaaucagug

SEQ ID NO: 1106535 - RNA, 27 nt, Human
caucucaaaaaacaaaaacaaaaacaa

SEQ ID NO: 1106536 - RNA, 18 nt, Human
ccaaagaaccccaaccaa

SEQ ID NO: 1106537 - RNA, 20 nt, Human
ccacaucaggcaaggcaaag

SEQ ID NO: 1106538 - RNA, 19 nt, Human
ccaccaaauuaguucacau

SEQ ID NO: 1106539 - RNA, 20 nt, Human
ccacugcacugcagccuagg

SEQ ID NO: 1106540 - RNA, 24 nt, Human
ccacugcacugcagccuaggggac

SEQ ID NO: 1106541 - RNA, 20 nt, Human
ccaucucaaaaaacaaaaac

SEQ ID NO: 1106542 - RNA, 26 nt, Human
ccaucucaaaaaacaaaaacaaaaac

SEQ ID NO: 1106543 - RNA, 18 nt, Human
ccaugaugagcagugggg

SEQ ID NO: 1106544 - RNA, 20 nt, Human
cccaaagaaccccaaccaag

SEQ ID NO: 1106545 - RNA, 19 nt, Human
cccaaccaagugcgccaca

SEQ ID NO: 1106546 - RNA, 22 nt, Human
cccacaaccaucugaauggacc

SEQ ID NO: 1106547 - RNA, 22 nt, Human
cccuguuucuccuuuuuaaacc

SEQ ID NO: 1106548 - RNA, 22 nt, Human
cccuucggccagggcacucuaa

SEQ ID NO: 1106549 - RNA, 19 nt, Human
ccuagaaacugagaaccac

SEQ ID NO: 1106550 - RNA, 22 nt, Human
ccugugggacugggucccuaga

SEQ ID NO: 1106551 - RNA, 26 nt, Human
cuaacacuugcaaagcgauuucuuua

SEQ ID NO: 1106552 - RNA, 21 nt, Human
cuagcucugucacccaggcug

SEQ ID NO: 1106553 - RNA, 23 nt, Human
cucaaaaaacaaaaacaaaaaca

SEQ ID NO: 1106554 - RNA, 19 nt, Human
cuccagcaugaacaugagg

SEQ ID NO: 1106555 - RNA, 23 nt, Human
cucugucacccaggcuggaaugc

SEQ ID NO: 1106556 - RNA, 20 nt, Human
cucuuccaugcaaggccacc

SEQ ID NO: 1106557 - RNA, 23 nt, Human
cugaaccacaaauuuaaauaaca

SEQ ID NO: 1106558 - RNA, 26 nt, Human
cugaagccagcuacuuagaggcucau

SEQ ID NO: 1106559 - RNA, 19 nt, Human
cugcacugcagccuagggg

SEQ ID NO: 1106560 - RNA, 21 nt, Human
cuggccaugaugagcaguggg

SEQ ID NO: 1106561 - RNA, 18 nt, Human
cuguuacaauuucugguu

SEQ ID NO: 1106562 - RNA, 21 nt, Human
cuuccaaaccaauaaagaguu

SEQ ID NO: 1106563 - RNA, 19 nt, Human
gaaguccucccacaaccau

SEQ ID NO: 1106564 - RNA, 20 nt, Human
gaaguccucccacaaccauc

SEQ ID NO: 1106565 - RNA, 24 nt, Human
gauucaaucaaauguuuuuaaugu

SEQ ID NO: 1106566 - RNA, 24 nt, Human
gcaaggcaaagaaacuucaucuuu

SEQ ID NO: 1106567 - RNA, 22 nt, Human
gcacucuaaaauuuaaccugaa

SEQ ID NO: 1106568 - RNA, 21 nt, Human
gccaccagagccucucaccac

SEQ ID NO: 1106569 - RNA, 19 nt, Human
gccaugaugagcagugggg

SEQ ID NO: 1106570 - RNA, 19 nt, Human
gcccugacuggaaggugag

SEQ ID NO: 1106571 - RNA, 21 nt, Human
ggaaggacuaacacuugcaaa

SEQ ID NO: 1106572 - RNA, 21 nt, Human
ggcagagguggguauguuucu

SEQ ID NO: 1106573 - RNA, 20 nt, Human
gggcagagguggguauguuu

SEQ ID NO: 1106574 - RNA, 19 nt, Human
ggguauacuuuacuacuuc

SEQ ID NO: 1106575 - RNA, 23 nt, Human
uaacacaauaucgcugaaccaca

SEQ ID NO: 1106576 - RNA, 22 nt, Human
uacagaugccagcugagcccug

SEQ ID NO: 1106577 - RNA, 25 nt, Human
uacccuccagcaugaacaugaacac

SEQ ID NO: 1106578 - RNA, 23 nt, Human
uagcuuuacccaaagaaccccaa

SEQ ID NO: 1106579 - RNA, 24 nt, Human
uagguggucaaaggaaaagggagg

SEQ ID NO: 1106580 - RNA, 19 nt, Human
uagguuugcaaauauggua

SEQ ID NO: 1106581 - RNA, 22 nt, Human
ucaaaaaacaaaaacaaaaaca

SEQ ID NO: 1106582 - RNA, 20 nt, Human
ucacccaggcuggaaugcaa

SEQ ID NO: 1106583 - RNA, 20 nt, Human
ucagaggaugguuuaccauc

SEQ ID NO: 1106584 - RNA, 21 nt, Human
ucaugcaaucgcgccacugca

SEQ ID NO: 1106585 - RNA, 20 nt, Human
uccacaugaagaauguaagc

SEQ ID NO: 1106586 - RNA, 24 nt, Human
ucccuagaaacaccccuuggccau

SEQ ID NO: 1106587 - RNA, 19 nt, Human
ucuagcucugucacccagg

SEQ ID NO: 1106588 - RNA, 23 nt, Human
ucuagcucugucacccaggcugg

SEQ ID NO: 1106589 - RNA, 24 nt, Human
ucuagcucugucacccaggcugga

SEQ ID NO: 1106590 - RNA, 22 nt, Human
ucucaaaaaacaaaaacaaaaa

SEQ ID NO: 1106591 - RNA, 24 nt, Human
ucuccaggcugacacuggccacau

SEQ ID NO: 1106592 - RNA, 24 nt, Human
ucugucacccaggcuggaaugcaa

SEQ ID NO: 1106593 - RNA, 22 nt, Human
ugaaaucagugguuaacacaau

SEQ ID NO: 1106594 - RNA, 23 nt, Human
ugaagccagcuacuuagaggcuc

SEQ ID NO: 1106595 - RNA, 25 nt, Human
ugaagccagcuacuuagaggcuccu

SEQ ID NO: 1106596 - RNA, 21 nt, Human
ugacuggaaggugaggagggc

SEQ ID NO: 1106597 - RNA, 23 nt, Human
ugauugagaccugucucagauac

SEQ ID NO: 1106598 - RNA, 22 nt, Human
ugcaaaaacaaaaaaggaaauc

SEQ ID NO: 1106599 - RNA, 20 nt, Human
ugcaaagcgauuucuuuaaa

SEQ ID NO: 1106600 - RNA, 21 nt, Human
ugcaaagcgauuucuuuaaag

SEQ ID NO: 1106601 - RNA, 18 nt, Human
ugcagccuaggggacaga

SEQ ID NO: 1106602 - RNA, 21 nt, Human
ugcccugacuggaaggugagg

SEQ ID NO: 1106603 - RNA, 19 nt, Human
ugccucagaggauaugagg

SEQ ID NO: 1106604 - RNA, 20 nt, Human
uggaaggugaggagggcaga

SEQ ID NO: 1106605 - RNA, 28 nt, Human
uggaaugcaaucagugacaugaucuugg

SEQ ID NO: 1106606 - RNA, 27 nt, Human
uggcugagaaggaacagaguuagauac

SEQ ID NO: 1106607 - RNA, 22 nt, Human
ugucacccaggcuggaaugcaa

SEQ ID NO: 1106608 - RNA, 23 nt, Human
uguuacaaaacauuccccauuuc

SEQ ID NO: 1106609 - RNA, 20 nt, Human
uuacccaaagaaccccaacc

SEQ ID NO: 1106610 - RNA, 20 nt, Human
uucauuauuacccaacugcu

SEQ ID NO: 1106611 - RNA, 21 nt, Human
uugaugccacaucaggcaagg

SEQ ID NO: 1106612 - RNA, 24 nt, Human
uuucuacucugaaaucagugguua

SEQ ID NO: 1106613 - RNA, 24 nt, Human
uuugaaguccucccacaaccaucu

SEQ ID NO: 1106614 - RNA, 22 nt, Human
aaaaaggaccauuuccugagga

SEQ ID NO: 1106615 - RNA, 21 nt, Human
aaagcaaagaagucgggaacc

SEQ ID NO: 1106616 - RNA, 19 nt, Human
aagaagucgggaaccacuu

SEQ ID NO: 1106617 - RNA, 21 nt, Human
aagaauugaauguaagcguuu

SEQ ID NO: 1106618 - RNA, 26 nt, Human
aauaacaaaaucaaauuugggaggga

SEQ ID NO: 1106619 - RNA, 23 nt, Human
acauuuuuuuuuuucccccaagg

SEQ ID NO: 1106620 - RNA, 19 nt, Human
acugagcagguuagauaca

SEQ ID NO: 1106621 - RNA, 23 nt, Human
acuuugaaaaauaaucugguggg

SEQ ID NO: 1106622 - RNA, 25 nt, Human
agaaaaaaaaaggaccauuuccuga

SEQ ID NO: 1106623 - RNA, 22 nt, Human
agaccaaauucucccaaagcaa

SEQ ID NO: 1106624 - RNA, 23 nt, Human
agcgcuucccuccuggggcccgu

SEQ ID NO: 1106625 - RNA, 20 nt, Human
aggaaagagaacauuuccau

SEQ ID NO: 1106626 - RNA, 26 nt, Human
aggaaagagaacauuuccauuucaca

SEQ ID NO: 1106627 - RNA, 19 nt, Human
aggaggagaaggagagacc

SEQ ID NO: 1106628 - RNA, 19 nt, Human
agggaagaggaggaggagg

SEQ ID NO: 1106629 - RNA, 19 nt, Human
aucaaauuugggagggaau

SEQ ID NO: 1106630 - RNA, 19 nt, Human
augggacauaccguaccuc

SEQ ID NO: 1106631 - RNA, 23 nt, Human
caaauucucccaaagcaaagaag

SEQ ID NO: 1106632 - RNA, 23 nt, Human
cacuuucaaaacugauuuuaaaa

SEQ ID NO: 1106633 - RNA, 19 nt, Human
cagcgcaacggugacagcg

SEQ ID NO: 1106634 - RNA, 19 nt, Human
cagguuagauacaccgaaa

SEQ ID NO: 1106635 - RNA, 21 nt, Human
cauaagaccaaauucucccaa

SEQ ID NO: 1106636 - RNA, 22 nt, Human
caucaggaaugaauuuaguucc

SEQ ID NO: 1106637 - RNA, 24 nt, Human
cccaaagcaaagaagucgggaacc

SEQ ID NO: 1106638 - RNA, 18 nt, Human
ccucuaaggagaagcaaa

SEQ ID NO: 1106639 - RNA, 23 nt, Human
cggugacagcggcagcagucuuc

SEQ ID NO: 1106640 - RNA, 18 nt, Human
cguuuucccucuuagcca

SEQ ID NO: 1106641 - RNA, 24 nt, Human
cugugguuucccuuuccaaaaccu

SEQ ID NO: 1106642 - RNA, 23 nt, Human
cuucaaaacacaucuguguucac

SEQ ID NO: 1106643 - RNA, 25 nt, Human
cuuucugucuauguaaguuuucaac

SEQ ID NO: 1106644 - RNA, 20 nt, Human
gaucaagcugaagacauacu

SEQ ID NO: 1106645 - RNA, 21 nt, Human
gcacacuuuucucuuuccugu

SEQ ID NO: 1106646 - RNA, 21 nt, Human
ggaauucccccaaauguccau

SEQ ID NO: 1106647 - RNA, 21 nt, Human
ggcacuaaagguuaagaggga

SEQ ID NO: 1106648 - RNA, 25 nt, Human
ggcacuaaagguuaagagggaagcc

SEQ ID NO: 1106649 - RNA, 18 nt, Human
gggaagaggaggaggagg

SEQ ID NO: 1106650 - RNA, 18 nt, Human
gggaauucccccaaaugu

SEQ ID NO: 1106651 - RNA, 19 nt, Human
ggggcccguguuuuguggu

SEQ ID NO: 1106652 - RNA, 23 nt, Human
ggugauuuauagaaaaaaaaagg

SEQ ID NO: 1106653 - RNA, 25 nt, Human
gguuggugauuuauagaaaaaaaaa

SEQ ID NO: 1106654 - RNA, 19 nt, Human
gugcuacuucuucaaaaca

SEQ ID NO: 1106655 - RNA, 19 nt, Human
uaaguuuucaacauuaauu

SEQ ID NO: 1106656 - RNA, 27 nt, Human
uaaguuuucaacauuaauuugcugcuu

SEQ ID NO: 1106657 - RNA, 20 nt, Human
uaaucucugugguuucccuu

SEQ ID NO: 1106658 - RNA, 22 nt, Human
uagcacauuuuuuuuuuucccc

SEQ ID NO: 1106659 - RNA, 21 nt, Human
uagcuucuaguucgaacgccu

SEQ ID NO: 1106660 - RNA, 24 nt, Human
uaguugguuggugauuuauagaaa

SEQ ID NO: 1106661 - RNA, 20 nt, Human
uauagaaaaaaaaaggacca

SEQ ID NO: 1106662 - RNA, 23 nt, Human
ucaaaacacaucuguguucacgg

SEQ ID NO: 1106663 - RNA, 19 nt, Human
ucagaggaaagagaacauu

SEQ ID NO: 1106664 - RNA, 22 nt, Human
ucauuccaccagaacacgugga

SEQ ID NO: 1106665 - RNA, 19 nt, Human
uccaccagaacacguggag

SEQ ID NO: 1106666 - RNA, 23 nt, Human
uccaccagaacacguggagagaa

SEQ ID NO: 1106667 - RNA, 18 nt, Human
ucccaaagcaaagaaguc

SEQ ID NO: 1106668 - RNA, 26 nt, Human
ucucccaaagcaaagaagucgggaac

SEQ ID NO: 1106669 - RNA, 18 nt, Human
ucucugugguuucccuuu

SEQ ID NO: 1106670 - RNA, 23 nt, Human
ucuggaacgagaccauccaugac

SEQ ID NO: 1106671 - RNA, 24 nt, Human
ucuucaaaacacaucuguguucac

SEQ ID NO: 1106672 - RNA, 21 nt, Human
ugaguggcugcuauucuguuu

SEQ ID NO: 1106673 - RNA, 19 nt, Human
uggaacaauaacaucugga

SEQ ID NO: 1106674 - RNA, 21 nt, Human
ugggagggaauucccccaaau

SEQ ID NO: 1106675 - RNA, 24 nt, Human
uggugauuuauagaaaaaaaaagg

SEQ ID NO: 1106676 - RNA, 19 nt, Human
uguccauuuagauaguugg

SEQ ID NO: 1106677 - RNA, 23 nt, Human
uucccuggaacaauaacaucugg

SEQ ID NO: 1106678 - RNA, 24 nt, Human
uugccgugugccuagacagcgcuu

SEQ ID NO: 1106679 - RNA, 19 nt, Human
aaaaagcuuuucuggagaa

SEQ ID NO: 1106680 - RNA, 26 nt, Human
aaacaaaaauaagguagauuuucugg

SEQ ID NO: 1106681 - RNA, 24 nt, Human
aaacaaccuugcagcuuugcagau

SEQ ID NO: 1106682 - RNA, 23 nt, Human
aaagcagaggagccgcauaaaug

SEQ ID NO: 1106683 - RNA, 23 nt, Human
aaaguccccaccaucagccauau

SEQ ID NO: 1106684 - RNA, 20 nt, Human
aagaaugcauuaagccggag

SEQ ID NO: 1106685 - RNA, 20 nt, Human
aagcagaggagccgcauaaa

SEQ ID NO: 1106686 - RNA, 20 nt, Human
aagcaugcauggagugccag

SEQ ID NO: 1106687 - RNA, 18 nt, Human
aaguaauuaugaaaggaa

SEQ ID NO: 1106688 - RNA, 25 nt, Human
aagugcuggaaacaaccuugcagcu

SEQ ID NO: 1106689 - RNA, 21 nt, Human
acaacaaaaagcuuuucugga

SEQ ID NO: 1106690 - RNA, 18 nt, Human
acagccaggucucucaga

SEQ ID NO: 1106691 - RNA, 21 nt, Human
acagcugggcuggguucuggu

SEQ ID NO: 1106692 - RNA, 19 nt, Human
accacaggagccacaugcc

SEQ ID NO: 1106693 - RNA, 20 nt, Human
agaaaaacacagauuaugaa

SEQ ID NO: 1106694 - RNA, 23 nt, Human
agaaaacaaaugaaguuagggac

SEQ ID NO: 1106695 - RNA, 23 nt, Human
agaaaagcuaaaguaauuaugaa

SEQ ID NO: 1106696 - RNA, 21 nt, Human
agaaaucacaguugaagguaa

SEQ ID NO: 1106697 - RNA, 20 nt, Human
agaaggcaauauauaauuau

SEQ ID NO: 1106698 - RNA, 21 nt, Human
agagacgugucuccacagccc

SEQ ID NO: 1106699 - RNA, 18 nt, Human
agagggagaaaucacagu

SEQ ID NO: 1106700 - RNA, 22 nt, Human
agcaaaaggcagccaggucucg

SEQ ID NO: 1106701 - RNA, 18 nt, Human
agcaaagaaauagccgcc

SEQ ID NO: 1106702 - RNA, 19 nt, Human
agcagcggugcuccagcag

SEQ ID NO: 1106703 - RNA, 19 nt, Human
aggaaacaguaaagucccc

SEQ ID NO: 1106704 - RNA, 23 nt, Human
aggaggccacagaggaagggggu

SEQ ID NO: 1106705 - RNA, 19 nt, Human
aggauggaaccagaagacu

SEQ ID NO: 1106706 - RNA, 21 nt, Human
aggcaggauuuagagaaagcc

SEQ ID NO: 1106707 - RNA, 21 nt, Human
aggggccaagggugagaacag

SEQ ID NO: 1106708 - RNA, 20 nt, Human
agugcuggaaacaaccuugc

SEQ ID NO: 1106709 - RNA, 20 nt, Human
augaaacacuggccaggccg

SEQ ID NO: 1106710 - RNA, 21 nt, Human
auggaaacaaaaauaagguag

SEQ ID NO: 1106711 - RNA, 19 nt, Human
caaaagggacaaaugaaac

SEQ ID NO: 1106712 - RNA, 24 nt, Human
caaagugcuggaaacaaccuugca

SEQ ID NO: 1106713 - RNA, 18 nt, Human
caacccaagcgucaacaa

SEQ ID NO: 1106714 - RNA, 22 nt, Human
caaggagcuuccgguuucagcg

SEQ ID NO: 1106715 - RNA, 22 nt, Human
cacagaggaaggggguuguguu

SEQ ID NO: 1106716 - RNA, 19 nt, Human
caccacaggagccacaugc

SEQ ID NO: 1106717 - RNA, 23 nt, Human
caccacaggagccacaugccacc

SEQ ID NO: 1106718 - RNA, 21 nt, Human
cagaggagccgcauaaaugca

SEQ ID NO: 1106719 - RNA, 20 nt, Human
cagaucaggccuagcagcgg

SEQ ID NO: 1106720 - RNA, 19 nt, Human
cagcaaaaggcagccaggu

SEQ ID NO: 1106721 - RNA, 19 nt, Human
cagcacuuuuaaaaauaau

SEQ ID NO: 1106722 - RNA, 20 nt, Human
caggccuagaaaacaaauga

SEQ ID NO: 1106723 - RNA, 19 nt, Human
cauuuuauauagcuguucu

SEQ ID NO: 1106724 - RNA, 19 nt, Human
ccaggucuuggggauggaa

SEQ ID NO: 1106725 - RNA, 20 nt, Human
cccaaagugcuggaaacaac

SEQ ID NO: 1106726 - RNA, 20 nt, Human
cccaagcgucaacaaguucu

SEQ ID NO: 1106727 - RNA, 20 nt, Human
ccccucuucugaugugacca

SEQ ID NO: 1106728 - RNA, 24 nt, Human
ccccuugccaagcaccacaggagc

SEQ ID NO: 1106729 - RNA, 22 nt, Human
ccuucgagaugaagaaaaugga

SEQ ID NO: 1106730 - RNA, 18 nt, Human
cgcugcaggaaucagggg

SEQ ID NO: 1106731 - RNA, 22 nt, Human
cggugcuccagcaggagggaaa

SEQ ID NO: 1106732 - RNA, 20 nt, Human
cucaccccgacccuaucccc

SEQ ID NO: 1106733 - RNA, 24 nt, Human
cucaccccgacccuauccccuggc

SEQ ID NO: 1106734 - RNA, 23 nt, Human
cugggugcacacuugggccccuc

SEQ ID NO: 1106735 - RNA, 22 nt, Human
cuggugugaaagcuguagacau

SEQ ID NO: 1106736 - RNA, 23 nt, Human
cuuccgguuucagcggcaaaagg

SEQ ID NO: 1106737 - RNA, 24 nt, Human
cuuggagcaaagaaauagccgccu

SEQ ID NO: 1106738 - RNA, 22 nt, Human
gacaaaugaaacacuggccagg

SEQ ID NO: 1106739 - RNA, 24 nt, Human
gagccgcauaaaugcaaucacuua

SEQ ID NO: 1106740 - RNA, 23 nt, Human
gauucauucacuguuaggaaugg

SEQ ID NO: 1106741 - RNA, 21 nt, Human
gcugcuggggcgucuuucggc

SEQ ID NO: 1106742 - RNA, 22 nt, Human
ggagguaucccaacucggagag

SEQ ID NO: 1106743 - RNA, 18 nt, Human
ggcagcacuucuuucuuu

SEQ ID NO: 1106744 - RNA, 27 nt, Human
gggaacagagaggagagaccgguaccc

SEQ ID NO: 1106745 - RNA, 19 nt, Human
gggaagggaacagagagga

SEQ ID NO: 1106746 - RNA, 22 nt, Human
gggaggugaauggggaagggaa

SEQ ID NO: 1106747 - RNA, 19 nt, Human
ggggauggaaauccaaggg

SEQ ID NO: 1106748 - RNA, 25 nt, Human
gggguuguguuucccacacaacagg

SEQ ID NO: 1106749 - RNA, 22 nt, Human
ggugugaaagcuguagacauau

SEQ ID NO: 1106750 - RNA, 26 nt, Human
guaaaacaacaacaaaaagcuuuucu

SEQ ID NO: 1106751 - RNA, 22 nt, Human
guaggacaggcaggauuuagag

SEQ ID NO: 1106752 - RNA, 20 nt, Human
gucauuuuauauagcuguuc

SEQ ID NO: 1106753 - RNA, 19 nt, Human
guucuggaggcugggaguu

SEQ ID NO: 1106754 - RNA, 22 nt, Human
guuguguuucccacacaacagg

SEQ ID NO: 1106755 - RNA, 23 nt, Human
guuguguuucccacacaacagga

SEQ ID NO: 1106756 - RNA, 23 nt, Human
guuuggccagcaaaaggcagcca

SEQ ID NO: 1106757 - RNA, 20 nt, Human
guuuugaugacuuggagaaa

SEQ ID NO: 1106758 - RNA, 25 nt, Human
uaaacacagggaguaccaggucuug

SEQ ID NO: 1106759 - RNA, 21 nt, Human
uaaaguaauuaugaaaggaac

SEQ ID NO: 1106760 - RNA, 24 nt, Human
uaaaguaauuaugaaaggaacuag

SEQ ID NO: 1106761 - RNA, 21 nt, Human
uaaaguccccaccaucagcca

SEQ ID NO: 1106762 - RNA, 21 nt, Human
uaagccggagaaaaacacaga

SEQ ID NO: 1106763 - RNA, 18 nt, Human
uacccacggagcaugggg

SEQ ID NO: 1106764 - RNA, 26 nt, Human
uagaaaacaaaugaaguuagggacau

SEQ ID NO: 1106765 - RNA, 22 nt, Human
uagcuguucuuuuauaguggaa

SEQ ID NO: 1106766 - RNA, 24 nt, Human
uagggguuucuucucaccccgacc

SEQ ID NO: 1106767 - RNA, 20 nt, Human
uaguacaugcugggugcaca

SEQ ID NO: 1106768 - RNA, 20 nt, Human
ucacuguggcagcacuucuu

SEQ ID NO: 1106769 - RNA, 23 nt, Human
uccacgaaguaaaacaacaacaa

SEQ ID NO: 1106770 - RNA, 25 nt, Human
ucccaaagugcuggaaacaaccucg

SEQ ID NO: 1106771 - RNA, 19 nt, Human
uccccuggcagcaagacuc

SEQ ID NO: 1106772 - RNA, 25 nt, Human
ucgagaugaagaaaauggaaacaac

SEQ ID NO: 1106773 - RNA, 19 nt, Human
ucucucagaguucuggagg

SEQ ID NO: 1106774 - RNA, 23 nt, Human
ucucucagaguucuggaggcugg

SEQ ID NO: 1106775 - RNA, 19 nt, Human
ucugacaucacuggaaaug

SEQ ID NO: 1106776 - RNA, 21 nt, Human
ucuugggaggaaggcuauugu

SEQ ID NO: 1106777 - RNA, 20 nt, Human
ucuuguagcuuuugucucuu

SEQ ID NO: 1106778 - RNA, 21 nt, Human
ucuuucggcugcggcccugcc

SEQ ID NO: 1106779 - RNA, 20 nt, Human
ugaaaggaacuagaaggauu

SEQ ID NO: 1106780 - RNA, 26 nt, Human
ugaauggggaagggaacagagaggag

SEQ ID NO: 1106781 - RNA, 25 nt, Human
ugacuuggagaaagauaguggaacu

SEQ ID NO: 1106782 - RNA, 22 nt, Human
ugagaacagccaggucucucag

SEQ ID NO: 1106783 - RNA, 21 nt, Human
ugagaagaggggcagccuggu

SEQ ID NO: 1106784 - RNA, 22 nt, Human
ugagaagaggggcagccuggug

SEQ ID NO: 1106785 - RNA, 20 nt, Human
ugaggaaucuugaugccagu

SEQ ID NO: 1106786 - RNA, 18 nt, Human
ugcaguuggugagauggg

SEQ ID NO: 1106787 - RNA, 18 nt, Human
ugcaguuggugagauggg

SEQ ID NO: 1106788 - RNA, 22 nt, Human
ugcuuguuguaucuucuucuca

SEQ ID NO: 1106789 - RNA, 23 nt, Human
uggaaaugugugugugcugcugg

SEQ ID NO: 1106790 - RNA, 23 nt, Human
uggaacuaauucucacuugaaug

SEQ ID NO: 1106791 - RNA, 22 nt, Human
uggaagagagcaauuaguaaug

SEQ ID NO: 1106792 - RNA, 18 nt, Human
uggccagcaaaaggcagc

SEQ ID NO: 1106793 - RNA, 20 nt, Human
ugucucuugaaauaaugauc

SEQ ID NO: 1106794 - RNA, 21 nt, Human
ugugaugcuagugaugacaca

SEQ ID NO: 1106795 - RNA, 23 nt, Human
ugugucacuacuggauaucuggc

SEQ ID NO: 1106796 - RNA, 22 nt, Human
uuaaugcugguuugugucccug

SEQ ID NO: 1106797 - RNA, 20 nt, Human
uuagcggucuauucaaaacc

SEQ ID NO: 1106798 - RNA, 18 nt, Human
uucauucacuguuaggaa

SEQ ID NO: 1106799 - RNA, 25 nt, Human
uucauucacuguuaggaauggaauc

SEQ ID NO: 1106800 - RNA, 25 nt, Human
uucgagaugaagaaaauggaaacaa

SEQ ID NO: 1106801 - RNA, 19 nt, Human
uugaaggaugcuaaccaua

SEQ ID NO: 1106802 - RNA, 18 nt, Human
uugccaagcaccacagga

SEQ ID NO: 1106803 - RNA, 23 nt, Human
uugcugcuggggcgucuuucggc

SEQ ID NO: 1106804 - RNA, 19 nt, Human
uuggagcaaagaaauagcc

SEQ ID NO: 1106805 - RNA, 18 nt, Human
uuucuuggagcaaagaaa

SEQ ID NO: 1106806 - RNA, 21 nt, Human
uuugcagaucaggccuagcag

SEQ ID NO: 1106807 - RNA, 26 nt, Human
uuugcagggaggugaauggggaaggg

SEQ ID NO: 1106808 - RNA, 23 nt, Human
uuugcaguuggugagaugggccc

SEQ ID NO: 1106809 - RNA, 24 nt, Human
aaagagaagagugacaugaucuga

SEQ ID NO: 1106810 - RNA, 23 nt, Human
aaguguuauaagcacagcaaacu

SEQ ID NO: 1106811 - RNA, 20 nt, Human
accacuggcucugaucacac

SEQ ID NO: 1106812 - RNA, 21 nt, Human
acccagcgccccacugcacag

SEQ ID NO: 1106813 - RNA, 20 nt, Human
accccgcgggcaccgcggcc

SEQ ID NO: 1106814 - RNA, 19 nt, Human
acggcugcaucucuggcuc

SEQ ID NO: 1106815 - RNA, 20 nt, Human
acuugcacaaauacaggaag

SEQ ID NO: 1106816 - RNA, 21 nt, Human
agagaagagugacaugaucug

SEQ ID NO: 1106817 - RNA, 18 nt, Human
agaguuucccagccaaga

SEQ ID NO: 1106818 - RNA, 21 nt, Human
agcacagaggacacuggcccg

SEQ ID NO: 1106819 - RNA, 28 nt, Human
agcagcaccucucggggggccuccggcu

SEQ ID NO: 1106820 - RNA, 26 nt, Human
agcggcggcggcggccgguacgcggg

SEQ ID NO: 1106821 - RNA, 20 nt, Human
aggaaguucuggcccaaaac

SEQ ID NO: 1106822 - RNA, 25 nt, Human
aggccagaccacaagguuuugaagg

SEQ ID NO: 1106823 - RNA, 20 nt, Human
aggccaugaaaucuccacug

SEQ ID NO: 1106824 - RNA, 22 nt, Human
aggcuuggagguugugcaaacc

SEQ ID NO: 1106825 - RNA, 19 nt, Human
agggaggccaacagaggcc

SEQ ID NO: 1106826 - RNA, 18 nt, Human
cacagcaagcccugccug

SEQ ID NO: 1106827 - RNA, 20 nt, Human
caccagguggcgagcaaggc

SEQ ID NO: 1106828 - RNA, 23 nt, Human
caccgccagcacccagcgcccca

SEQ ID NO: 1106829 - RNA, 24 nt, Human
cacugcacagcacggaguaauuuc

SEQ ID NO: 1106830 - RNA, 18 nt, Human
cagcagcacagaggacac

SEQ ID NO: 1106831 - RNA, 23 nt, Human
cagcagcacagaggacacuggcc

SEQ ID NO: 1106832 - RNA, 22 nt, Human
cagccaagaagucacaucuccu

SEQ ID NO: 1106833 - RNA, 22 nt, Human
caggcccuggcugcugcuggag

SEQ ID NO: 1106834 - RNA, 18 nt, Human
caggcgacucccgccucc

SEQ ID NO: 1106835 - RNA, 23 nt, Human
caggggccucccuucccgggccc

SEQ ID NO: 1106836 - RNA, 21 nt, Human
cauaugggaaaaagaaguguu

SEQ ID NO: 1106837 - RNA, 18 nt, Human
cauggccaagcucccucu

SEQ ID NO: 1106838 - RNA, 22 nt, Human
ccaacagaggccagaccacaag

SEQ ID NO: 1106839 - RNA, 25 nt, Human
ccacuuucaggguccaacccucagu

SEQ ID NO: 1106840 - RNA, 18 nt, Human
ccccggggggcagguccg

SEQ ID NO: 1106841 - RNA, 20 nt, Human
ccccggggggcagguccgcc

SEQ ID NO: 1106842 - RNA, 19 nt, Human
ccgcugagccggggguggg

SEQ ID NO: 1106843 - RNA, 22 nt, Human
ccuccagugccaccucugccuc

SEQ ID NO: 1106844 - RNA, 18 nt, Human
ccuccuggagccaggggc

SEQ ID NO: 1106845 - RNA, 22 nt, Human
ccucugccucccccaaccgugu

SEQ ID NO: 1106846 - RNA, 23 nt, Human
ccuggagccaggggccucccuuc

SEQ ID NO: 1106847 - RNA, 21 nt, Human
ccuuaguuuagagagagaguc

SEQ ID NO: 1106848 - RNA, 23 nt, Human
ccuucaacugagcacuguggggc

SEQ ID NO: 1106849 - RNA, 18 nt, Human
cgccagcacccagcgccc

SEQ ID NO: 1106850 - RNA, 19 nt, Human
cgccgggccacgagcagcg

SEQ ID NO: 1106851 - RNA, 20 nt, Human
cgccgggccacgagcagcgg

SEQ ID NO: 1106852 - RNA, 22 nt, Human
cgccgggccacgagcagcggaa

SEQ ID NO: 1106853 - RNA, 23 nt, Human
cgcgaccccgcgggcaccgcggc

SEQ ID NO: 1106854 - RNA, 21 nt, Human
cgguccgaccgcgggcagcag

SEQ ID NO: 1106855 - RNA, 22 nt, Human
cuagcucagagcaacacagcaa

SEQ ID NO: 1106856 - RNA, 23 nt, Human
cuccagugccaccucugccuccc

SEQ ID NO: 1106857 - RNA, 23 nt, Human
cuccuggagccaggggccucccu

SEQ ID NO: 1106858 - RNA, 18 nt, Human
cugccucccccaaccgug

SEQ ID NO: 1106859 - RNA, 18 nt, Human
cugccucccccaaccgug

SEQ ID NO: 1106860 - RNA, 21 nt, Human
cugccucccccaaccgugucu

SEQ ID NO: 1106861 - RNA, 22 nt, Human
cuggcccaaaacgcccugugca

SEQ ID NO: 1106862 - RNA, 25 nt, Human
gacucccgccuccuggagccagggg

SEQ ID NO: 1106863 - RNA, 24 nt, Human
gagcagcgagcggcggcggcggcc

SEQ ID NO: 1106864 - RNA, 21 nt, Human
gagcggcggcggcggccggua

SEQ ID NO: 1106865 - RNA, 20 nt, Human
gaggggaggucagggaggcc

SEQ ID NO: 1106866 - RNA, 18 nt, Human
gcaacacagcaagcccug

SEQ ID NO: 1106867 - RNA, 18 nt, Human
gcagagaaagaauuggga

SEQ ID NO: 1106868 - RNA, 18 nt, Human
gcaggcccuggcugcugc

SEQ ID NO: 1106869 - RNA, 18 nt, Human
gcaggcgacucccgccuc

SEQ ID NO: 1106870 - RNA, 20 nt, Human
gcaggcgacucccgccuccu

SEQ ID NO: 1106871 - RNA, 21 nt, Human
gccacacaagaaauuacauau

SEQ ID NO: 1106872 - RNA, 25 nt, Human
gccucccccaaccgugucucugcca

SEQ ID NO: 1106873 - RNA, 19 nt, Human
gcggcggcggcggccggua

SEQ ID NO: 1106874 - RNA, 25 nt, Human
gcguggcccgguccgaccgcgggca

SEQ ID NO: 1106875 - RNA, 18 nt, Human
gcugcagaggcuuggagg

SEQ ID NO: 1106876 - RNA, 18 nt, Human
ggaccuuuucagagaaca

SEQ ID NO: 1106877 - RNA, 25 nt, Human
ggaugccuucggggagacccuggaa

SEQ ID NO: 1106878 - RNA, 21 nt, Human
ggaugggguguggccuacagg

SEQ ID NO: 1106879 - RNA, 23 nt, Human
ggccaugaaaucuccacuggggu

SEQ ID NO: 1106880 - RNA, 18 nt, Human
ggggaccuuuucagagaa

SEQ ID NO: 1106881 - RNA, 21 nt, Human
gggggcagagaaagaauuggg

SEQ ID NO: 1106882 - RNA, 19 nt, Human
ggggucugugcuugguagg

SEQ ID NO: 1106883 - RNA, 18 nt, Human
ggguucgccgccaggcag

SEQ ID NO: 1106884 - RNA, 20 nt, Human
ggugauggggacgccgcuga

SEQ ID NO: 1106885 - RNA, 22 nt, Human
guggcgagcaaggcaggugaug

SEQ ID NO: 1106886 - RNA, 19 nt, Human
uaaagagaagagugacaug

SEQ ID NO: 1106887 - RNA, 20 nt, Human
uaaagagaagagugacauga

SEQ ID NO: 1106888 - RNA, 19 nt, Human
uacuggaguccgggggcag

SEQ ID NO: 1106889 - RNA, 23 nt, Human
uagacuugagaaaugaaugacau

SEQ ID NO: 1106890 - RNA, 20 nt, Human
uaggaaguucuggcccaaaa

SEQ ID NO: 1106891 - RNA, 23 nt, Human
uaugcaucuucuuuucugagggg

SEQ ID NO: 1106892 - RNA, 20 nt, Human
ucaggaacggcaaauucaag

SEQ ID NO: 1106893 - RNA, 21 nt, Human
uccacuggggucacacuaugc

SEQ ID NO: 1106894 - RNA, 19 nt, Human
ucccaagucagcacggcug

SEQ ID NO: 1106895 - RNA, 20 nt, Human
ucccccaaccgugucucugc

SEQ ID NO: 1106896 - RNA, 24 nt, Human
ucccccaaccgugucucugccacc

SEQ ID NO: 1106897 - RNA, 18 nt, Human
ucccgggcccaggaugcc

SEQ ID NO: 1106898 - RNA, 19 nt, Human
ucccgggcccaggaugccc

SEQ ID NO: 1106899 - RNA, 21 nt, Human
ucccucucuagcucagagcaa

SEQ ID NO: 1106900 - RNA, 18 nt, Human
ucucuggcucucugaagc

SEQ ID NO: 1106901 - RNA, 21 nt, Human
ucugcagcaagagagggagac

SEQ ID NO: 1106902 - RNA, 22 nt, Human
ucugcugcagaggcuuggaggu

SEQ ID NO: 1106903 - RNA, 21 nt, Human
ugaaauaggaaguucuggccc

SEQ ID NO: 1106904 - RNA, 19 nt, Human
ugaaggucacgacgaugag

SEQ ID NO: 1106905 - RNA, 23 nt, Human
ugagaaaugaaugacauauggga

SEQ ID NO: 1106906 - RNA, 18 nt, Human
ugagggggugaccacggg

SEQ ID NO: 1106907 - RNA, 19 nt, Human
ugagggggugaccacgggg

SEQ ID NO: 1106908 - RNA, 21 nt, Human
ugagggugaucuggucaccgc

SEQ ID NO: 1106909 - RNA, 25 nt, Human
ugaucuggucaccgccagcacccag

SEQ ID NO: 1106910 - RNA, 22 nt, Human
ugcugcagaggcuuggagguug

SEQ ID NO: 1106911 - RNA, 20 nt, Human
uggagguugugcaaaccaca

SEQ ID NO: 1106912 - RNA, 22 nt, Human
uggccaagcucccucucuagcu

SEQ ID NO: 1106913 - RNA, 22 nt, Human
uggcccaaaacgcccugugcag

SEQ ID NO: 1106914 - RNA, 19 nt, Human
uggcccgguccgaccgcgg

SEQ ID NO: 1106915 - RNA, 21 nt, Human
uggcccgguccgaccgcgggc

SEQ ID NO: 1106916 - RNA, 24 nt, Human
uggcugagagacagacugugauac

SEQ ID NO: 1106917 - RNA, 19 nt, Human
ugggacuuaacccaagacu

SEQ ID NO: 1106918 - RNA, 21 nt, Human
ugggagcuggauggggugugg

SEQ ID NO: 1106919 - RNA, 22 nt, Human
ugggaggggaggucagggaggc

SEQ ID NO: 1106920 - RNA, 22 nt, Human
uggggccccggggggcaggucc

SEQ ID NO: 1106921 - RNA, 20 nt, Human
ugggggacaaccagaggccu

SEQ ID NO: 1106922 - RNA, 21 nt, Human
ugguaacugcuacucuuagac

SEQ ID NO: 1106923 - RNA, 19 nt, Human
ugucucugccaccagcgga

SEQ ID NO: 1106924 - RNA, 18 nt, Human
ugugauacuggaguccgg

SEQ ID NO: 1106925 - RNA, 20 nt, Human
uguggaguuuccgcccaucu

SEQ ID NO: 1106926 - RNA, 25 nt, Human
uucuucugcagcaagagagggagac

SEQ ID NO: 1106927 - RNA, 18 nt, Human
uugagcagcgagcggcgg

SEQ ID NO: 1106928 - RNA, 24 nt, Human
uugccugcugugugugaggcucug

SEQ ID NO: 1106929 - RNA, 23 nt, Human
agggcugagaucacucugggccg

SEQ ID NO: 1106930 - RNA, 25 nt, Human
aggggaggauggaagauguuucuug

SEQ ID NO: 1106931 - RNA, 20 nt, Human
caggaaaacccuccugggug

SEQ ID NO: 1106932 - RNA, 20 nt, Human
caggugccugacccuccaag

SEQ ID NO: 1106933 - RNA, 18 nt, Human
ccuccgagauccuucggg

SEQ ID NO: 1106934 - RNA, 21 nt, Human
cucugggccccaggaaaaccc

SEQ ID NO: 1106935 - RNA, 20 nt, Human
gauggaagauguuucuuggg

SEQ ID NO: 1106936 - RNA, 23 nt, Human
uagcaacuucgccuccgagaucc

SEQ ID NO: 1106937 - RNA, 24 nt, Human
uccugggugacugcaaucucaggu

SEQ ID NO: 1106938 - RNA, 23 nt, Human
ucuucuagcaacuucgccuccga

SEQ ID NO: 1106939 - RNA, 22 nt, Human
ugggccccaggaaaacccuccu

SEQ ID NO: 1106940 - RNA, 19 nt, Human
uggggagaggggaggaugg

SEQ ID NO: 1106941 - RNA, 22 nt, Human
ugugguuuuggggagaggggag

SEQ ID NO: 1106942 - RNA, 24 nt, Human
aaacauggaauuucauuaaaucug

SEQ ID NO: 1106943 - RNA, 19 nt, Human
aagugugaaguccugaucc

SEQ ID NO: 1106944 - RNA, 21 nt, Human
acaggcgcccaccaccaugcc

SEQ ID NO: 1106945 - RNA, 24 nt, Human
accguguuggccaggauggucucg

SEQ ID NO: 1106946 - RNA, 20 nt, Human
accuggaugcuacacauccc

SEQ ID NO: 1106947 - RNA, 18 nt, Human
acgggguuucaccguguu

SEQ ID NO: 1106948 - RNA, 23 nt, Human
acgggguuucaccguguuggcca

SEQ ID NO: 1106949 - RNA, 24 nt, Human
acgggguuucaccguguuggccag

SEQ ID NO: 1106950 - RNA, 20 nt, Human
acugcaagcuccgccucccg

SEQ ID NO: 1106951 - RNA, 18 nt, Human
acuugauccauccuuuga

SEQ ID NO: 1106952 - RNA, 20 nt, Human
aguagagacgggguuucacc

SEQ ID NO: 1106953 - RNA, 18 nt, Human
aguagcugggacuacagg

SEQ ID NO: 1106954 - RNA, 21 nt, Human
agugcaguggcacgaucucag

SEQ ID NO: 1106955 - RNA, 23 nt, Human
agugcaguggcacgaucucagcu

SEQ ID NO: 1106956 - RNA, 24 nt, Human
agugcaguggcacgaucucagcuc

SEQ ID NO: 1106957 - RNA, 20 nt, Human
augggcucuggagccaaccu

SEQ ID NO: 1106958 - RNA, 21 nt, Human
auucuccugccucagccuccc

SEQ ID NO: 1106959 - RNA, 19 nt, Human
caaaugcucguucuuaaug

SEQ ID NO: 1106960 - RNA, 22 nt, Human
caacaaacauggaauuucauua

SEQ ID NO: 1106961 - RNA, 21 nt, Human
cacaucccagcucugccccuc

SEQ ID NO: 1106962 - RNA, 18 nt, Human
caccguguuggccaggau

SEQ ID NO: 1106963 - RNA, 21 nt, Human
caccguguuggccaggauggu

SEQ ID NO: 1106964 - RNA, 24 nt, Human
caccguguuggccaggauggucuc

SEQ ID NO: 1106965 - RNA, 22 nt, Human
cacgccauucuccugccucagc

SEQ ID NO: 1106966 - RNA, 21 nt, Human
cagaguccccugcccccaccc

SEQ ID NO: 1106967 - RNA, 18 nt, Human
cagcucacugcaagcucc

SEQ ID NO: 1106968 - RNA, 26 nt, Human
ccacccccaaaaccaguacuugaucc

SEQ ID NO: 1106969 - RNA, 23 nt, Human
ccagaguccccugcccccacccc

SEQ ID NO: 1106970 - RNA, 24 nt, Human
ccagaguccccugcccccaccccc

SEQ ID NO: 1106971 - RNA, 18 nt, Human
ccagcucugccccucgcu

SEQ ID NO: 1106972 - RNA, 21 nt, Human
cccacccccaaaaccaguacu

SEQ ID NO: 1106973 - RNA, 19 nt, Human
cccagaguccccugccccc

SEQ ID NO: 1106974 - RNA, 18 nt, Human
cccagcucugccccucgc

SEQ ID NO: 1106975 - RNA, 23 nt, Human
ccccaaaaccaguacuugaucca

SEQ ID NO: 1106976 - RNA, 23 nt, Human
cccccaaaaccaguacuugaucc

SEQ ID NO: 1106977 - RNA, 22 nt, Human
cccccacccccaaaaccaguac

SEQ ID NO: 1106978 - RNA, 24 nt, Human
ccccugcccccacccccaaaacca

SEQ ID NO: 1106979 - RNA, 25 nt, Human
ccccugcccccacccccaaaacccc

SEQ ID NO: 1106980 - RNA, 23 nt, Human
cccgaguagcugggacuacaggc

SEQ ID NO: 1106981 - RNA, 24 nt, Human
cccgaguagcugggacuacaggcg

SEQ ID NO: 1106982 - RNA, 19 nt, Human
ccucgugaucccccccccu

SEQ ID NO: 1106983 - RNA, 18 nt, Human
ccugauccagacucaccu

SEQ ID NO: 1106984 - RNA, 23 nt, Human
ccugccucagccucccgaguagc

SEQ ID NO: 1106985 - RNA, 19 nt, Human
cgccucccggguucacgcc

SEQ ID NO: 1106986 - RNA, 26 nt, Human
cgcucugucgcccaggcucuggagug

SEQ ID NO: 1106987 - RNA, 24 nt, Human
cgggguuucaccguguuggccagg

SEQ ID NO: 1106988 - RNA, 18 nt, Human
cgugcacacuauuuacca

SEQ ID NO: 1106989 - RNA, 26 nt, Human
cuacacaucccagcucugccccucgc

SEQ ID NO: 1106990 - RNA, 24 nt, Human
cucagccucccgaguagcugggac

SEQ ID NO: 1106991 - RNA, 21 nt, Human
cucccggguucacgccauucu

SEQ ID NO: 1106992 - RNA, 18 nt, Human
cuccugaccucgugaucc

SEQ ID NO: 1106993 - RNA, 27 nt, Human
cucgugaucccccccccucggccuccc

SEQ ID NO: 1106994 - RNA, 20 nt, Human
cugcccccacccccaaaacc

SEQ ID NO: 1106995 - RNA, 23 nt, Human
cugcccccacccccaaaaccagu

SEQ ID NO: 1106996 - RNA, 23 nt, Human
cugccucagccucccgaguagcu

SEQ ID NO: 1106997 - RNA, 18 nt, Human
cuuaaagagaccuuuccc

SEQ ID NO: 1106998 - RNA, 24 nt, Human
gacuacaggcgcccaccaccaugc

SEQ ID NO: 1106999 - RNA, 24 nt, Human
gagacgggguuucaccguguuggc

SEQ ID NO: 1107000 - RNA, 20 nt, Human
gaguagcugggacuacaggc

SEQ ID NO: 1107001 - RNA, 25 nt, Human
gaguagcugggacuacaggcgccca

SEQ ID NO: 1107002 - RNA, 21 nt, Human
gcacacuauuuaccacaaagg

SEQ ID NO: 1107003 - RNA, 18 nt, Human
gcccccacccccaaaacc

SEQ ID NO: 1107004 - RNA, 25 nt, Human
gccucccggguucacgccauucucc

SEQ ID NO: 1107005 - RNA, 23 nt, Human
gccuggcuaauuuuuuguauuuu

SEQ ID NO: 1107006 - RNA, 21 nt, Human
gcucugucgcccaggcucugg

SEQ ID NO: 1107007 - RNA, 18 nt, Human
ggcgauuggcacaaaggu

SEQ ID NO: 1107008 - RNA, 23 nt, Human
gggguuucaccguguuggccagg

SEQ ID NO: 1107009 - RNA, 20 nt, Human
ggucucgaucuccugaccuc

SEQ ID NO: 1107010 - RNA, 23 nt, Human
guagagacgggguuucaccgugu

SEQ ID NO: 1107011 - RNA, 26 nt, Human
gugaucccccccccucggccucccaa

SEQ ID NO: 1107012 - RNA, 22 nt, Human
uaaagagaccuuucccuguacu

SEQ ID NO: 1107013 - RNA, 23 nt, Human
uaauagaucucgccuuguggcuc

SEQ ID NO: 1107014 - RNA, 24 nt, Human
uaauuuuuuguauuuuuaguagag

SEQ ID NO: 1107015 - RNA, 25 nt, Human
uaauuuuuuguauuuuuaguagaga

SEQ ID NO: 1107016 - RNA, 22 nt, Human
uaccuggaugcuacacauccca

SEQ ID NO: 1107017 - RNA, 21 nt, Human
uaguagagacgggguuucacc

SEQ ID NO: 1107018 - RNA, 24 nt, Human
uaguagagacgggguuucaccgug

SEQ ID NO: 1107019 - RNA, 26 nt, Human
uaguagagacgggguuucaccguguu

SEQ ID NO: 1107020 - RNA, 26 nt, Human
uaguagagacgggguuucaccguugg

SEQ ID NO: 1107021 - RNA, 21 nt, Human
ucaagcauuagaaugguggcu

SEQ ID NO: 1107022 - RNA, 24 nt, Human
ucaccguguuggccaggauggucu

SEQ ID NO: 1107023 - RNA, 18 nt, Human
ucacugcaagcuccgccu

SEQ ID NO: 1107024 - RNA, 19 nt, Human
ucacugcaagcuccgccuc

SEQ ID NO: 1107025 - RNA, 24 nt, Human
ucacugcaagcuccgccucccggg

SEQ ID NO: 1107026 - RNA, 19 nt, Human
ucagaaaacauacugccca

SEQ ID NO: 1107027 - RNA, 23 nt, Human
ucagccucccgaguagcugggac

SEQ ID NO: 1107028 - RNA, 20 nt, Human
uccccugcccccacccccaa

SEQ ID NO: 1107029 - RNA, 24 nt, Human
ucccgaguagcugggacuacaggc

SEQ ID NO: 1107030 - RNA, 21 nt, Human
ucccggguucacgccauucuc

SEQ ID NO: 1107031 - RNA, 24 nt, Human
ucccggguucacgccauucuccug

SEQ ID NO: 1107032 - RNA, 19 nt, Human
uccguuaucaagugugaag

SEQ ID NO: 1107033 - RNA, 22 nt, Human
ucuccagcagcacaaugggaau

SEQ ID NO: 1107034 - RNA, 24 nt, Human
ucuccugccucagccucccgagua

SEQ ID NO: 1107035 - RNA, 18 nt, Human
ucucgcucugucgcccag

SEQ ID NO: 1107036 - RNA, 18 nt, Human
ucucgcucugucgcccag

SEQ ID NO: 1107037 - RNA, 19 nt, Human
ucucgcucugucgcccagg

SEQ ID NO: 1107038 - RNA, 25 nt, Human
ucucgcucugucgcccaggcucugg

SEQ ID NO: 1107039 - RNA, 26 nt, Human
ucucgcucugucgcccaggcucugga

SEQ ID NO: 1107040 - RNA, 26 nt, Human
ucugucgcccaggcucuggagugcag

SEQ ID NO: 1107041 - RNA, 28 nt, Human
ugacagcagugcacagcagcuggcagag

SEQ ID NO: 1107042 - RNA, 19 nt, Human
ugaccucgugauccccccc

SEQ ID NO: 1107043 - RNA, 22 nt, Human
ugagauggagucucgcucuguc

SEQ ID NO: 1107044 - RNA, 18 nt, Human
ugaucagaaaacauacug

SEQ ID NO: 1107045 - RNA, 21 nt, Human
ugaucccccccccucggccuc

SEQ ID NO: 1107046 - RNA, 21 nt, Human
ugcccccacccccaaaaccag

SEQ ID NO: 1107047 - RNA, 25 nt, Human
ugcccccacccccaaaaccaguacu

SEQ ID NO: 1107048 - RNA, 24 nt, Human
ugccucagccucccgaguagcugg

SEQ ID NO: 1107049 - RNA, 21 nt, Human
ugccuuaauuucuccagcagc

SEQ ID NO: 1107050 - RNA, 24 nt, Human
uggagucucgcucugucgcccagg

SEQ ID NO: 1107051 - RNA, 23 nt, Human
uggagugcaguggcacgaucuca

SEQ ID NO: 1107052 - RNA, 24 nt, Human
uggagugcaguggcacgaucucag

SEQ ID NO: 1107053 - RNA, 21 nt, Human
uggaugcuacacaucccagcu

SEQ ID NO: 1107054 - RNA, 24 nt, Human
uggcacgaucucagcucacugcaa

SEQ ID NO: 1107055 - RNA, 20 nt, Human
uggcagagaauucuggcacg

SEQ ID NO: 1107056 - RNA, 24 nt, Human
uggccaggauggucucgaucuccu

SEQ ID NO: 1107057 - RNA, 21 nt, Human
ugggacuacaggcgcccacca

SEQ ID NO: 1107058 - RNA, 24 nt, Human
ugggacuacaggcgcccaccacca

SEQ ID NO: 1107059 - RNA, 25 nt, Human
ugggacuacaggcgcccaccaccau

SEQ ID NO: 1107060 - RNA, 21 nt, Human
uguauuuuuaguagagacggg

SEQ ID NO: 1107061 - RNA, 19 nt, Human
uguuguggcgauuggcaca

SEQ ID NO: 1107062 - RNA, 18 nt, Human
uuaguagagacgggguuu

SEQ ID NO: 1107063 - RNA, 22 nt, Human
uuaguagagacgggguuucacc

SEQ ID NO: 1107064 - RNA, 24 nt, Human
uuaguagagacgggguuucaccgu

SEQ ID NO: 1107065 - RNA, 25 nt, Human
uucaacaaacauggaauuucauuaa

SEQ ID NO: 1107066 - RNA, 19 nt, Human
uuucaccguguuggccagg

SEQ ID NO: 1107067 - RNA, 24 nt, Human
uuuuuaguagagacgggguuucac

SEQ ID NO: 1107068 - RNA, 21 nt, Human
uuuuuguauuuuuaguagaga

SEQ ID NO: 1107069 - RNA, 24 nt, Human
uuuuuuguauuuuuaguagagacg

SEQ ID NO: 1107070 - RNA, 22 nt, Human
acugcaagcaggaacagauugc

SEQ ID NO: 1107071 - RNA, 25 nt, Human
acugcaguaccaucgaaagaacauc

SEQ ID NO: 1107072 - RNA, 24 nt, Human
agcucgcccaggcugggccuccag

SEQ ID NO: 1107073 - RNA, 18 nt, Human
agggagcaggggcugggg

SEQ ID NO: 1107074 - RNA, 19 nt, Human
agggagggagcaggggcug

SEQ ID NO: 1107075 - RNA, 24 nt, Human
aguguccauccuccccucucugac

SEQ ID NO: 1107076 - RNA, 19 nt, Human
auccugcuuccccuagucu

SEQ ID NO: 1107077 - RNA, 22 nt, Human
auccugcuuccccuagucucug

SEQ ID NO: 1107078 - RNA, 24 nt, Human
caacucugucuccgcccgcggggg

SEQ ID NO: 1107079 - RNA, 24 nt, Human
cacccucugagucuccauccuccc

SEQ ID NO: 1107080 - RNA, 23 nt, Human
cagcagcucgcccaggcugggcc

SEQ ID NO: 1107081 - RNA, 19 nt, Human
cagggcucgaucagcucgg

SEQ ID NO: 1107082 - RNA, 21 nt, Human
ccauccuccccucucugacuc

SEQ ID NO: 1107083 - RNA, 18 nt, Human
ccaucuuccacccucuga

SEQ ID NO: 1107084 - RNA, 21 nt, Human
ccaucuuccccucucugacuc

SEQ ID NO: 1107085 - RNA, 20 nt, Human
ccccacagucgcuaugcuuc

SEQ ID NO: 1107086 - RNA, 21 nt, Human
ccccuagucucugccucaucu

SEQ ID NO: 1107087 - RNA, 22 nt, Human
cccgaguguccauccuccccuc

SEQ ID NO: 1107088 - RNA, 22 nt, Human
cccugcugucuuccccugucug

SEQ ID NO: 1107089 - RNA, 18 nt, Human
ccgcaacaccaugucccu

SEQ ID NO: 1107090 - RNA, 20 nt, Human
ccuccccucucugacucucc

SEQ ID NO: 1107091 - RNA, 19 nt, Human
ccucgggccuggccagcag

SEQ ID NO: 1107092 - RNA, 24 nt, Human
ccucugagucuccauccuccccuc

SEQ ID NO: 1107093 - RNA, 21 nt, Human
ccugcaacucugucuccgccc

SEQ ID NO: 1107094 - RNA, 20 nt, Human
cgaggacugcaagcaggaac

SEQ ID NO: 1107095 - RNA, 23 nt, Human
cgcccaggcugggccuccagggc

SEQ ID NO: 1107096 - RNA, 24 nt, Human
cgcccaggcugggccuccagggcu

SEQ ID NO: 1107097 - RNA, 22 nt, Human
cucauggucuuugagccuuucu

SEQ ID NO: 1107098 - RNA, 19 nt, Human
cuccgcccgcgggggcggg

SEQ ID NO: 1107099 - RNA, 20 nt, Human
cucggcaucccgcggcgccc

SEQ ID NO: 1107100 - RNA, 23 nt, Human
cucuccauccucccgagugucca

SEQ ID NO: 1107101 - RNA, 25 nt, Human
cucucucuggguuuccauccucuuu

SEQ ID NO: 1107102 - RNA, 24 nt, Human
cugagucuccauccucccccucuc

SEQ ID NO: 1107103 - RNA, 19 nt, Human
cugcugucuuccccugucu

SEQ ID NO: 1107104 - RNA, 22 nt, Human
cuuccccugucugugucucucu

SEQ ID NO: 1107105 - RNA, 19 nt, Human
cuuccucucucucugaguc

SEQ ID NO: 1107106 - RNA, 18 nt, Human
cuuugagucuccaucuuc

SEQ ID NO: 1107107 - RNA, 18 nt, Human
gaccagucgcuauccugc

SEQ ID NO: 1107108 - RNA, 20 nt, Human
gccucaucucuguccuccuc

SEQ ID NO: 1107109 - RNA, 21 nt, Human
gccucgggccuggccagcagc

SEQ ID NO: 1107110 - RNA, 22 nt, Human
gcugucuuccccugucuguguc

SEQ ID NO: 1107111 - RNA, 19 nt, Human
ggaaauaggauagggaagg

SEQ ID NO: 1107112 - RNA, 19 nt, Human
gggcugggggaggcagcuc

SEQ ID NO: 1107113 - RNA, 20 nt, Human
ggucuuugagccuuucuccu

SEQ ID NO: 1107114 - RNA, 19 nt, Human
uaccaucgaaagaacaucc

SEQ ID NO: 1107115 - RNA, 28 nt, Human
uauccugcuuccccuagucucugccuca

SEQ ID NO: 1107116 - RNA, 18 nt, Human
uccaucuuuccgagucuc

SEQ ID NO: 1107117 - RNA, 22 nt, Human
ucccaagucucuauccucccug

SEQ ID NO: 1107118 - RNA, 23 nt, Human
ucccaagucuguauccuccccuc

SEQ ID NO: 1107119 - RNA, 21 nt, Human
uccccgcaacaccaugucccu

SEQ ID NO: 1107120 - RNA, 21 nt, Human
uccccucucugacucuccaua

SEQ ID NO: 1107121 - RNA, 23 nt, Human
ucccuaagucucuguuguucucc

SEQ ID NO: 1107122 - RNA, 25 nt, Human
uccucccugagucucugcccccgac

SEQ ID NO: 1107123 - RNA, 19 nt, Human
uccugagucuccaucuuuc

SEQ ID NO: 1107124 - RNA, 20 nt, Human
ucgcccaggcugggccucca

SEQ ID NO: 1107125 - RNA, 20 nt, Human
ucuccaaccucuccugacuc

SEQ ID NO: 1107126 - RNA, 28 nt, Human
ucuccaucuuccucucucuccucugaag

SEQ ID NO: 1107127 - RNA, 25 nt, Human
ucuccaucuuccucucucucugagu

SEQ ID NO: 1107128 - RNA, 21 nt, Human
ucuccaucuuuccgagucucc

SEQ ID NO: 1107129 - RNA, 23 nt, Human
ucucuauucccucuccagucucc

SEQ ID NO: 1107130 - RNA, 24 nt, Human
ucucucuggguuuccauccucuuu

SEQ ID NO: 1107131 - RNA, 18 nt, Human
ucucugacucuccauacu

SEQ ID NO: 1107132 - RNA, 24 nt, Human
ucucugacucuccauccuccccuc

SEQ ID NO: 1107133 - RNA, 21 nt, Human
ucucugacucuuugccccaca

SEQ ID NO: 1107134 - RNA, 21 nt, Human
ucucugagucuccauccuccc

SEQ ID NO: 1107135 - RNA, 21 nt, Human
ucucugagucuccaucuuccc

SEQ ID NO: 1107136 - RNA, 20 nt, Human
ucucugccucaucucugucc

SEQ ID NO: 1107137 - RNA, 23 nt, Human
ucucugccucaucucuguccucc

SEQ ID NO: 1107138 - RNA, 18 nt, Human
ucuggguuuccauccucc

SEQ ID NO: 1107139 - RNA, 21 nt, Human
ucuuccucucucucugagucu

SEQ ID NO: 1107140 - RNA, 18 nt, Human
ugacucuccauccucccc

SEQ ID NO: 1107141 - RNA, 18 nt, Human
ugacucuccauccucccc

SEQ ID NO: 1107142 - RNA, 19 nt, Human
ugagggagggagcaggggc

SEQ ID NO: 1107143 - RNA, 20 nt, Human
uggaaauaggauagggaagg

SEQ ID NO: 1107144 - RNA, 20 nt, Human
uggaaauaggauagggaagg

SEQ ID NO: 1107145 - RNA, 22 nt, Human
uguccuccucucucuggguuuc

SEQ ID NO: 1107146 - RNA, 21 nt, Human
uuccacccucugagucuccau

SEQ ID NO: 1107147 - RNA, 21 nt, Human
uuccugagucccucccaaguc

SEQ ID NO: 1107148 - RNA, 23 nt, Human
uucuaugagucuccauccuccug

SEQ ID NO: 1107149 - RNA, 20 nt, Human
uucuguuucugagucucugc

SEQ ID NO: 1107150 - RNA, 20 nt, Human
uugcugggcgucagagccuc

SEQ ID NO: 1107151 - RNA, 24 nt, Human
uugcugggcgucagagccucgggc

SEQ ID NO: 1107152 - RNA, 20 nt, Human
uuucaggauggaaauaggau

SEQ ID NO: 1107153 - RNA, 22 nt, Human
uuuccauccucuuugagucucc

SEQ ID NO: 1107154 - RNA, 20 nt, Human
ccagaacauuuauugcauga

SEQ ID NO: 1107155 - RNA, 20 nt, Human
uggcuucugcggccaagacc

SEQ ID NO: 1107156 - RNA, 19 nt, Human
uuaaaaccagaacauuuau

SEQ ID NO: 1107157 - RNA, 23 nt, Human
aaaacaccaaaacacuuuaagca

SEQ ID NO: 1107158 - RNA, 22 nt, Human
aaaacacuuuaagcaaaaacuc

SEQ ID NO: 1107159 - RNA, 23 nt, Human
aaacaccaaaacacuuuaagcaa

SEQ ID NO: 1107160 - RNA, 22 nt, Human
aacugcagaaaaacaaaguuuc

SEQ ID NO: 1107161 - RNA, 24 nt, Human
acaccaacauuuccucuauaaucu

SEQ ID NO: 1107162 - RNA, 25 nt, Human
accacaaaguagauuuacaaauaac

SEQ ID NO: 1107163 - RNA, 24 nt, Human
caacugcagaaaaacaaaguuucu

SEQ ID NO: 1107164 - RNA, 21 nt, Human
cagaaaaacaaaguuucuuug

SEQ ID NO: 1107165 - RNA, 21 nt, Human
cccgcgugcccggagagccag

SEQ ID NO: 1107166 - RNA, 19 nt, Human
cuccauaacauccagaagg

SEQ ID NO: 1107167 - RNA, 19 nt, Human
cuccugauccccuuuuggu

SEQ ID NO: 1107168 - RNA, 18 nt, Human
cugacuuccuuucuuucc

SEQ ID NO: 1107169 - RNA, 19 nt, Human
cugcaugccgcccuccucc

SEQ ID NO: 1107170 - RNA, 23 nt, Human
cuggauuaaaaaauccguucaca

SEQ ID NO: 1107171 - RNA, 21 nt, Human
cuuccgaguugcuuccuugca

SEQ ID NO: 1107172 - RNA, 22 nt, Human
ggcugggcccgcuggcugggug

SEQ ID NO: 1107173 - RNA, 22 nt, Human
ggugccgggucuacaggaaaaa

SEQ ID NO: 1107174 - RNA, 25 nt, Human
guugcugaagggguaucauuucuug

SEQ ID NO: 1107175 - RNA, 23 nt, Human
guuuucacaagagccuucuccau

SEQ ID NO: 1107176 - RNA, 25 nt, Human
uaaaacaccaaaacacuuuaagcaa

SEQ ID NO: 1107177 - RNA, 23 nt, Human
uaagaagacacuguuuacaucag

SEQ ID NO: 1107178 - RNA, 19 nt, Human
uccgcgcagucgggugccg

SEQ ID NO: 1107179 - RNA, 18 nt, Human
ucgggugccgggucuaca

SEQ ID NO: 1107180 - RNA, 19 nt, Human
ucuuugugauccaaacaca

SEQ ID NO: 1107181 - RNA, 18 nt, Human
ugaaagugaaucgagugg

SEQ ID NO: 1107182 - RNA, 19 nt, Human
ugaaagugaaucgaguggc

SEQ ID NO: 1107183 - RNA, 22 nt, Human
ugacuuccuuucuuuccucuuc

SEQ ID NO: 1107184 - RNA, 21 nt, Human
ugcaaaaauuaaagaguacaa

SEQ ID NO: 1107185 - RNA, 19 nt, Human
ugcccggagagccaggcaa

SEQ ID NO: 1107186 - RNA, 20 nt, Human
ugcccggagagccaggcaac

SEQ ID NO: 1107187 - RNA, 19 nt, Human
uggcugggugaaacggcgg

SEQ ID NO: 1107188 - RNA, 25 nt, Human
uguaaaacaccaaaacacuuuaagc

SEQ ID NO: 1107189 - RNA, 22 nt, Human
uguacagaucguagcccgcgug

SEQ ID NO: 1107190 - RNA, 21 nt, Human
uucaucugugauaccagcucc

SEQ ID NO: 1107191 - RNA, 23 nt, Human
uuuaaaugaucucuucuuugauc

SEQ ID NO: 1107192 - RNA, 25 nt, Human
uuuucuguucuuggcauaaauuuua

SEQ ID NO: 1107193 - RNA, 24 nt, Human
aaacaggcugggaaaacuggcuca

SEQ ID NO: 1107194 - RNA, 24 nt, Human
aaacuggcucacaucucuuggcca

SEQ ID NO: 1107195 - RNA, 24 nt, Human
aaguuuuuguauuuuuaguagaga

SEQ ID NO: 1107196 - RNA, 22 nt, Human
aauaauaauaaacaggcuggga

SEQ ID NO: 1107197 - RNA, 24 nt, Human
aaucgcuugaacccaggaggcgga

SEQ ID NO: 1107198 - RNA, 24 nt, Human
aaugugcugggauuacaggcguga

SEQ ID NO: 1107199 - RNA, 25 nt, Human
acacucaucacacuugugacauuuc

SEQ ID NO: 1107200 - RNA, 23 nt, Human
acaggugcccaccaccaugcccg

SEQ ID NO: 1107201 - RNA, 24 nt, Human
accauugcacucuagccugggcag

SEQ ID NO: 1107202 - RNA, 18 nt, Human
acgagguuucaccguguu

SEQ ID NO: 1107203 - RNA, 20 nt, Human
acgagguuucaccguguuag

SEQ ID NO: 1107204 - RNA, 24 nt, Human
acucugucgcccagccuggagugc

SEQ ID NO: 1107205 - RNA, 18 nt, Human
acugaagacuuugugaca

SEQ ID NO: 1107206 - RNA, 18 nt, Human
aggaguauguguuucagg

SEQ ID NO: 1107207 - RNA, 23 nt, Human
aggcagaggaaucgcuugaaccc

SEQ ID NO: 1107208 - RNA, 24 nt, Human
aggcggagguugcugugagucaag

SEQ ID NO: 1107209 - RNA, 18 nt, Human
agugaccucggacugaag

SEQ ID NO: 1107210 - RNA, 20 nt, Human
agugcaguggcacgaucucg

SEQ ID NO: 1107211 - RNA, 23 nt, Human
agugcaguggcacgaucucggcu

SEQ ID NO: 1107212 - RNA, 24 nt, Human
agugcaguggcacgaucucggcuc

SEQ ID NO: 1107213 - RNA, 18 nt, Human
auaggaugaagcuugacu

SEQ ID NO: 1107214 - RNA, 19 nt, Human
aucugccugccuuggccuc

SEQ ID NO: 1107215 - RNA, 24 nt, Human
auugcacucuagccugggcagcaa

SEQ ID NO: 1107216 - RNA, 25 nt, Human
auugcacucuagccugggcagcaag

SEQ ID NO: 1107217 - RNA, 30 nt, Human
auuguccagccucagcccccugaguagcuu

SEQ ID NO: 1107218 - RNA, 24 nt, Human
caaugugcugggauuacaggcgug

SEQ ID NO: 1107219 - RNA, 24 nt, Human
caccauugcacucuagccugggca

SEQ ID NO: 1107220 - RNA, 24 nt, Human
caccguguuagccaggacggucuc

SEQ ID NO: 1107221 - RNA, 21 nt, Human
cacuaaaggcuuugccacacu

SEQ ID NO: 1107222 - RNA, 18 nt, Human
cacucugucgcccagccu

SEQ ID NO: 1107223 - RNA, 24 nt, Human
cacucugucgcccagccuggagug

SEQ ID NO: 1107224 - RNA, 18 nt, Human
cagccucagcccccugag

SEQ ID NO: 1107225 - RNA, 25 nt, Human
cagccucagcccccugaguagcuga

SEQ ID NO: 1107226 - RNA, 19 nt, Human
caggugcccaccaccaugc

SEQ ID NO: 1107227 - RNA, 21 nt, Human
caggugcccaccaccaugccc

SEQ ID NO: 1107228 - RNA, 23 nt, Human
caucucaaaaaauaauaauaaac

SEQ ID NO: 1107229 - RNA, 20 nt, Human
cauuauggauucuccaauga

SEQ ID NO: 1107230 - RNA, 18 nt, Human
cauugcacucuagccugg

SEQ ID NO: 1107231 - RNA, 19 nt, Human
cauugcacucuagccuggg

SEQ ID NO: 1107232 - RNA, 23 nt, Human
cauugcacucuagccugggcagc

SEQ ID NO: 1107233 - RNA, 24 nt, Human
cauugcacucuagccugggcagca

SEQ ID NO: 1107234 - RNA, 22 nt, Human
ccaaugugcugggauuacaggc

SEQ ID NO: 1107235 - RNA, 24 nt, Human
ccaaugugcugggauuacaggcgu

SEQ ID NO: 1107236 - RNA, 21 nt, Human
ccauugcacucuagccugggc

SEQ ID NO: 1107237 - RNA, 23 nt, Human
ccauugcacucuagccugggcag

SEQ ID NO: 1107238 - RNA, 24 nt, Human
ccauugcacucuagccugggcagc

SEQ ID NO: 1107239 - RNA, 25 nt, Human
ccauugcacucuagccugggcagca

SEQ ID NO: 1107240 - RNA, 23 nt, Human
cccagccuggagugcaguggcac

SEQ ID NO: 1107241 - RNA, 22 nt, Human
ccugaguagcugagacuacagg

SEQ ID NO: 1107242 - RNA, 21 nt, Human
ccugcaagcaccgccuccugg

SEQ ID NO: 1107243 - RNA, 22 nt, Human
ccugccuuggccucccaaagug

SEQ ID NO: 1107244 - RNA, 24 nt, Human
cgagguuucaccguguuagccagg

SEQ ID NO: 1107245 - RNA, 19 nt, Human
cgccuccuggguucacacc

SEQ ID NO: 1107246 - RNA, 18 nt, Human
cggcucccugcaagcacc

SEQ ID NO: 1107247 - RNA, 23 nt, Human
cucaagugaccuaugugccuugg

SEQ ID NO: 1107248 - RNA, 24 nt, Human
cuccugacuuuguuaucugccugc

SEQ ID NO: 1107249 - RNA, 21 nt, Human
cugaagaccuugccacacuga

SEQ ID NO: 1107250 - RNA, 20 nt, Human
cugaagacuuugugacaauc

SEQ ID NO: 1107251 - RNA, 18 nt, Human
cugaguagcugagacuac

SEQ ID NO: 1107252 - RNA, 20 nt, Human
cugccugccuuggccuccca

SEQ ID NO: 1107253 - RNA, 23 nt, Human
cugccuuggccucccaaagugcu

SEQ ID NO: 1107254 - RNA, 22 nt, Human
cuggucacuaaaggcuuugcca

SEQ ID NO: 1107255 - RNA, 21 nt, Human
cuugaccucaagugaccuaug

SEQ ID NO: 1107256 - RNA, 20 nt, Human
cuugacugaagaccuugcca

SEQ ID NO: 1107257 - RNA, 19 nt, Human
cuuguaagguuucucucca

SEQ ID NO: 1107258 - RNA, 20 nt, Human
gacggucucaaucuccugac

SEQ ID NO: 1107259 - RNA, 21 nt, Human
gacuacaggugcccaccacca

SEQ ID NO: 1107260 - RNA, 19 nt, Human
gagguugcugugagucaag

SEQ ID NO: 1107261 - RNA, 19 nt, Human
gauuacaggcgugauccac

SEQ ID NO: 1107262 - RNA, 23 nt, Human
gauuacaggcgugauccacugca

SEQ ID NO: 1107263 - RNA, 19 nt, Human
gcaagagcaacacuccauc

SEQ ID NO: 1107264 - RNA, 20 nt, Human
gccucagcccccugaguagc

SEQ ID NO: 1107265 - RNA, 22 nt, Human
gccuuggccucccaaagugcug

SEQ ID NO: 1107266 - RNA, 24 nt, Human
ggagguugcugugagucaagaucg

SEQ ID NO: 1107267 - RNA, 19 nt, Human
gggcagcaagagcaacacu

SEQ ID NO: 1107268 - RNA, 19 nt, Human
guagcugagacuacaggug

SEQ ID NO: 1107269 - RNA, 24 nt, Human
gugcugaggcagaggaaucgcuug

SEQ ID NO: 1107270 - RNA, 21 nt, Human
gugcugggauuacaggcguga

SEQ ID NO: 1107271 - RNA, 24 nt, Human
guuuuuguauuuuuaguagagacg

SEQ ID NO: 1107272 - RNA, 24 nt, Human
uaagucaacacaaacucaagucaa

SEQ ID NO: 1107273 - RNA, 24 nt, Human
uaaguuuuuguauuuuuaguagag

SEQ ID NO: 1107274 - RNA, 26 nt, Human
uagcguuacugaagacuuugugacaa

SEQ ID NO: 1107275 - RNA, 21 nt, Human
uaguagagacgagguuucacc

SEQ ID NO: 1107276 - RNA, 24 nt, Human
uaguagagacgagguuucaccgug

SEQ ID NO: 1107277 - RNA, 26 nt, Human
uaguagagacgagguuucaccguguu

SEQ ID NO: 1107278 - RNA, 24 nt, Human
ucaccguguuagccaggacggucu

SEQ ID NO: 1107279 - RNA, 18 nt, Human
ucagcccccugaguagcu

SEQ ID NO: 1107280 - RNA, 24 nt, Human
ucccaaugugcugggauuacaggc

SEQ ID NO: 1107281 - RNA, 24 nt, Human
ucccugcaagcaccgccuccuggg

SEQ ID NO: 1107282 - RNA, 24 nt, Human
ucgcccagccuggagugcaguggc

SEQ ID NO: 1107283 - RNA, 24 nt, Human
ucgcuugaacccaggaggcggagg

SEQ ID NO: 1107284 - RNA, 19 nt, Human
ucggaagaucucucuucau

SEQ ID NO: 1107285 - RNA, 24 nt, Human
ucucacucugucgcccagccugga

SEQ ID NO: 1107286 - RNA, 19 nt, Human
ucugauguucugcaaggag

SEQ ID NO: 1107287 - RNA, 20 nt, Human
ucugauguucugcaaggagu

SEQ ID NO: 1107288 - RNA, 24 nt, Human
ucugucgcccagccuggagugcag

SEQ ID NO: 1107289 - RNA, 20 nt, Human
ugacuggucacuaaaggcuu

SEQ ID NO: 1107290 - RNA, 21 nt, Human
ugagacuacaggugcccacca

SEQ ID NO: 1107291 - RNA, 24 nt, Human
ugagacuacaggugcccaccacca

SEQ ID NO: 1107292 - RNA, 24 nt, Human
ugaggcagaggaaucgcuugaacc

SEQ ID NO: 1107293 - RNA, 25 nt, Human
ugaggcagaggaaucgcuugaaccc

SEQ ID NO: 1107294 - RNA, 23 nt, Human
ugagucaagaucgcaccauugca

SEQ ID NO: 1107295 - RNA, 25 nt, Human
ugcacucuagccugggcagcaagag

SEQ ID NO: 1107296 - RNA, 25 nt, Human
ugcccggcuaaguuuuuguauuuuu

SEQ ID NO: 1107297 - RNA, 22 nt, Human
ugccuuggccucccaaugugcu

SEQ ID NO: 1107298 - RNA, 24 nt, Human
ugcugggauuacaggcgugaucca

SEQ ID NO: 1107299 - RNA, 23 nt, Human
uggagugcaguggcacgaucucg

SEQ ID NO: 1107300 - RNA, 24 nt, Human
uggagugcaguggcacgaucucgg

SEQ ID NO: 1107301 - RNA, 18 nt, Human
ugggauuacaggcgugau

SEQ ID NO: 1107302 - RNA, 21 nt, Human
ugggauuacaggcgugaucca

SEQ ID NO: 1107303 - RNA, 22 nt, Human
ugggauuacaggcgugauccac

SEQ ID NO: 1107304 - RNA, 22 nt, Human
ugggauuacaggcgugauccac

SEQ ID NO: 1107305 - RNA, 24 nt, Human
ugggauuacaggcgugauccacug

SEQ ID NO: 1107306 - RNA, 26 nt, Human
uguccagccucagcccccugaguagc

SEQ ID NO: 1107307 - RNA, 19 nt, Human
uguuucaaacucuugaccu

SEQ ID NO: 1107308 - RNA, 21 nt, Human
uguuucaaacucuugaccuca

SEQ ID NO: 1107309 - RNA, 23 nt, Human
uuacacuuguaagguuucucucc

SEQ ID NO: 1107310 - RNA, 21 nt, Human
uuacugaagacuuugugacaa

SEQ ID NO: 1107311 - RNA, 22 nt, Human
uuaguagagacgagguuucacc

SEQ ID NO: 1107312 - RNA, 24 nt, Human
uuaguagagacgagguuucaccgu

SEQ ID NO: 1107313 - RNA, 24 nt, Human
uugaacccaggaggcggagguugc

SEQ ID NO: 1107314 - RNA, 18 nt, Human
uuggccucccaaagugcu

SEQ ID NO: 1107315 - RNA, 22 nt, Human
uuucaccguguuagccaggacg

SEQ ID NO: 1107316 - RNA, 19 nt, Human
uuuguaagauuucucucca

SEQ ID NO: 1107317 - RNA, 19 nt, Human
uuuguaagguuucucucca

SEQ ID NO: 1107318 - RNA, 19 nt, Human
uuuguaagguuucucucca

SEQ ID NO: 1107319 - RNA, 24 nt, Human
uuuuuaguagagacgagguuucac

SEQ ID NO: 1107320 - RNA, 21 nt, Human
uuuuuguauuuuuaguagaga

SEQ ID NO: 1107321 - RNA, 23 nt, Human
aaagguggagugagauccaggca

SEQ ID NO: 1107322 - RNA, 24 nt, Human
aaaguguugggauuacaggcguga

SEQ ID NO: 1107323 - RNA, 24 nt, Human
aagaguuggagacccugaaaagcu

SEQ ID NO: 1107324 - RNA, 20 nt, Human
aaggccagguguagccagug

SEQ ID NO: 1107325 - RNA, 22 nt, Human
aaguagcugggauuacaggcau

SEQ ID NO: 1107326 - RNA, 24 nt, Human
aaguagcugggauuacaggcaugc

SEQ ID NO: 1107327 - RNA, 21 nt, Human
aaguguugggauuacaggcgu

SEQ ID NO: 1107328 - RNA, 26 nt, Human
aaguguugggauuacaggcgugagcc

SEQ ID NO: 1107329 - RNA, 24 nt, Human
aauuuuguauuuuuaguagagacg

SEQ ID NO: 1107330 - RNA, 19 nt, Human
acaaccucugccucccggg

SEQ ID NO: 1107331 - RNA, 19 nt, Human
acagaggaaugcagccaca

SEQ ID NO: 1107332 - RNA, 18 nt, Human
accuugguaaccucuggc

SEQ ID NO: 1107333 - RNA, 18 nt, Human
acgggguuucuccauguu

SEQ ID NO: 1107334 - RNA, 20 nt, Human
acgggguuucuccauguugg

SEQ ID NO: 1107335 - RNA, 24 nt, Human
acgggguuucuccauguuggucag

SEQ ID NO: 1107336 - RNA, 21 nt, Human
agagaaguauacaugcuucuu

SEQ ID NO: 1107337 - RNA, 22 nt, Human
agccacaaggccagguguagcc

SEQ ID NO: 1107338 - RNA, 24 nt, Human
agcgauucuccugccucagccucc

SEQ ID NO: 1107339 - RNA, 23 nt, Human
aggaaugcagccacaaggccagg

SEQ ID NO: 1107340 - RNA, 24 nt, Human
aggugaucugccugccucagccuc

SEQ ID NO: 1107341 - RNA, 21 nt, Human
aguaagcauguguugggaacu

SEQ ID NO: 1107342 - RNA, 24 nt, Human
aguguccuucagggcauggacaac

SEQ ID NO: 1107343 - RNA, 30 nt, Human
aucccuccucagagguguucuuccugucag

SEQ ID NO: 1107344 - RNA, 20 nt, Human
augcagccacaaggccaggu

SEQ ID NO: 1107345 - RNA, 18 nt, Human
augcgccaccacgcccag

SEQ ID NO: 1107346 - RNA, 23 nt, Human
auucaugaaggggucaugcaggg

SEQ ID NO: 1107347 - RNA, 24 nt, Human
caaaguguugggauuacaggcgug

SEQ ID NO: 1107348 - RNA, 20 nt, Human
caacacaaccucugccuccc

SEQ ID NO: 1107349 - RNA, 22 nt, Human
caagcgauucuccugccucagc

SEQ ID NO: 1107350 - RNA, 27 nt, Human
caagcgauucuccugccucagccuccc

SEQ ID NO: 1107351 - RNA, 20 nt, Human
cacaaccucugccucccggg

SEQ ID NO: 1107352 - RNA, 23 nt, Human
cacaaccucugccucccggguuc

SEQ ID NO: 1107353 - RNA, 22 nt, Human
caggugaucugccugccucagc

SEQ ID NO: 1107354 - RNA, 21 nt, Human
caugcgccaccacgcccagcu

SEQ ID NO: 1107355 - RNA, 22 nt, Human
ccaaaguguugggauuacaggc

SEQ ID NO: 1107356 - RNA, 22 nt, Human
ccaaaguguugggauuacaggc

SEQ ID NO: 1107357 - RNA, 24 nt, Human
ccaaaguguugggauuacaggcgu

SEQ ID NO: 1107358 - RNA, 23 nt, Human
ccaaguagcugggauuacaggca

SEQ ID NO: 1107359 - RNA, 24 nt, Human
ccaaguagcugggauuacaggcau

SEQ ID NO: 1107360 - RNA, 20 nt, Human
ccaccacgcccagcuaauuu

SEQ ID NO: 1107361 - RNA, 19 nt, Human
ccauguuggucaggcuggu

SEQ ID NO: 1107362 - RNA, 22 nt, Human
ccauguuggucaggcuggucuc

SEQ ID NO: 1107363 - RNA, 23 nt, Human
ccauguuggucaggcuggucucg

SEQ ID NO: 1107364 - RNA, 23 nt, Human
cccaaguagcugggauuacaggc

SEQ ID NO: 1107365 - RNA, 24 nt, Human
cccaaguagcugggauuacaggca

SEQ ID NO: 1107366 - RNA, 21 nt, Human
cccgaccucaggugaucugcc

SEQ ID NO: 1107367 - RNA, 23 nt, Human
cccgaccucaggugaucugccug

SEQ ID NO: 1107368 - RNA, 20 nt, Human
cccggguucaagcgauucuc

SEQ ID NO: 1107369 - RNA, 23 nt, Human
cccggguucaagcgauucuccug

SEQ ID NO: 1107370 - RNA, 24 nt, Human
ccucccggguucaagcgauucucc

SEQ ID NO: 1107371 - RNA, 20 nt, Human
ccucucguugcccaggcugg

SEQ ID NO: 1107372 - RNA, 21 nt, Human
ccucucguugcccaggcugga

SEQ ID NO: 1107373 - RNA, 23 nt, Human
ccucucguugcccaggcuggagu

SEQ ID NO: 1107374 - RNA, 24 nt, Human
ccucucguugcccaggcuggagug

SEQ ID NO: 1107375 - RNA, 18 nt, Human
ccugaaaagcuuugggca

SEQ ID NO: 1107376 - RNA, 24 nt, Human
ccugccucagccucccaaaguguu

SEQ ID NO: 1107377 - RNA, 18 nt, Human
cgaccucaggugaucugc

SEQ ID NO: 1107378 - RNA, 20 nt, Human
cgaccucaggugaucugccu

SEQ ID NO: 1107379 - RNA, 24 nt, Human
cgaccucaggugaucugccugccu

SEQ ID NO: 1107380 - RNA, 22 nt, Human
cgcucccgaccucaggugaucu

SEQ ID NO: 1107381 - RNA, 22 nt, Human
cguugcccaggcuggaguggaa

SEQ ID NO: 1107382 - RNA, 24 nt, Human
cucaacacaaccucugccucccgg

SEQ ID NO: 1107383 - RNA, 24 nt, Human
cucagccucccaaguagcugggau

SEQ ID NO: 1107384 - RNA, 23 nt, Human
cucaggugaucugccugccucag

SEQ ID NO: 1107385 - RNA, 26 nt, Human
cucccgaccucaggugaucugccugc

SEQ ID NO: 1107386 - RNA, 18 nt, Human
cucucguugcccaggcug

SEQ ID NO: 1107387 - RNA, 19 nt, Human
cucucguugcccaggcugg

SEQ ID NO: 1107388 - RNA, 20 nt, Human
cucucguugcccaggcugga

SEQ ID NO: 1107389 - RNA, 22 nt, Human
cucucuugcucucugucaggga

SEQ ID NO: 1107390 - RNA, 24 nt, Human
cugccucagccucccaaaguguug

SEQ ID NO: 1107391 - RNA, 23 nt, Human
cugccucagccucccaaguagcu

SEQ ID NO: 1107392 - RNA, 23 nt, Human
gaccucaggugaucugccugccu

SEQ ID NO: 1107393 - RNA, 24 nt, Human
gaccucaggugaucugccugccuc

SEQ ID NO: 1107394 - RNA, 23 nt, Human
gagacgggguuucuccauguugg

SEQ ID NO: 1107395 - RNA, 24 nt, Human
gagacgggguuucuccauguuggu

SEQ ID NO: 1107396 - RNA, 18 nt, Human
gauuacaggcaugcgcca

SEQ ID NO: 1107397 - RNA, 18 nt, Human
gauuacaggcgugagcca

SEQ ID NO: 1107398 - RNA, 21 nt, Human
gauuacaggcgugagccacca

SEQ ID NO: 1107399 - RNA, 22 nt, Human
gauuacaggcgugagccaccac

SEQ ID NO: 1107400 - RNA, 19 nt, Human
gcccaggcuggaguggaau

SEQ ID NO: 1107401 - RNA, 20 nt, Human
gccucagccucccaaguagc

SEQ ID NO: 1107402 - RNA, 24 nt, Human
gcgauucuccugccucagccuccc

SEQ ID NO: 1107403 - RNA, 23 nt, Human
gcuggucucgcgcucccgaccuc

SEQ ID NO: 1107404 - RNA, 22 nt, Human
ggaacagaggaaugcagccaca

SEQ ID NO: 1107405 - RNA, 22 nt, Human
ggacuggggaaucccuccucag

SEQ ID NO: 1107406 - RNA, 19 nt, Human
ggauuacaggcaugcgcca

SEQ ID NO: 1107407 - RNA, 19 nt, Human
ggauuacaggcgugagcca

SEQ ID NO: 1107408 - RNA, 22 nt, Human
gggaaucccuccucagaggugu

SEQ ID NO: 1107409 - RNA, 19 nt, Human
gggcauggacaacagguuu

SEQ ID NO: 1107410 - RNA, 23 nt, Human
gggguuucuccauguuggucagg

SEQ ID NO: 1107411 - RNA, 22 nt, Human
ggguuucuccauguuggucagg

SEQ ID NO: 1107412 - RNA, 24 nt, Human
ggugaucugccugccucagccucc

SEQ ID NO: 1107413 - RNA, 23 nt, Human
guagagacgggguuucuccaugu

SEQ ID NO: 1107414 - RNA, 18 nt, Human
guagcugggauuacaggc

SEQ ID NO: 1107415 - RNA, 18 nt, Human
gugaucugccugccucag

SEQ ID NO: 1107416 - RNA, 24 nt, Human
gugaucugccugccucagccuccc

SEQ ID NO: 1107417 - RNA, 26 nt, Human
guggagugagauccaggcaggggacu

SEQ ID NO: 1107418 - RNA, 23 nt, Human
guugcagaaucuuuggacgaggu

SEQ ID NO: 1107419 - RNA, 19 nt, Human
uaaaaaauaaaaucuccac

SEQ ID NO: 1107420 - RNA, 25 nt, Human
uaaaaaauaaaaucuccacacaggu

SEQ ID NO: 1107421 - RNA, 24 nt, Human
uaaagauuccuuucccaggggcuu

SEQ ID NO: 1107422 - RNA, 21 nt, Human
uaacaguauucccccucaaga

SEQ ID NO: 1107423 - RNA, 24 nt, Human
uacaggcaugcgccaccacgccca

SEQ ID NO: 1107424 - RNA, 22 nt, Human
uacaggcgugagccaccacacc

SEQ ID NO: 1107425 - RNA, 23 nt, Human
uacaggcgugagccaccacaccu

SEQ ID NO: 1107426 - RNA, 22 nt, Human
uaggugcugggaccuccaagga

SEQ ID NO: 1107427 - RNA, 24 nt, Human
uaguagagacgggguuucuccaug

SEQ ID NO: 1107428 - RNA, 23 nt, Human
uauucccccucaagaguuggaga

SEQ ID NO: 1107429 - RNA, 24 nt, Human
ucaacacaaccucugccucccggg

SEQ ID NO: 1107430 - RNA, 19 nt, Human
ucaagaguuggagacccug

SEQ ID NO: 1107431 - RNA, 24 nt, Human
ucaagaguuggagacccugaaaag

SEQ ID NO: 1107432 - RNA, 22 nt, Human
ucacaguguccuucagggcaug

SEQ ID NO: 1107433 - RNA, 20 nt, Human
ucagccucccaaguagcugg

SEQ ID NO: 1107434 - RNA, 25 nt, Human
ucagggucucccucucuugcucucu

SEQ ID NO: 1107435 - RNA, 22 nt, Human
ucaggugaucugccugccucag

SEQ ID NO: 1107436 - RNA, 18 nt, Human
uccaggcaggggacuugg

SEQ ID NO: 1107437 - RNA, 24 nt, Human
ucccaaaguguugggauuacaggc

SEQ ID NO: 1107438 - RNA, 24 nt, Human
ucccaaguagcugggauuacaggc

SEQ ID NO: 1107439 - RNA, 23 nt, Human
ucccaggggcuuccuugccugcu

SEQ ID NO: 1107440 - RNA, 24 nt, Human
uccccucucguugcccaggcugga

SEQ ID NO: 1107441 - RNA, 21 nt, Human
ucccggguucaagcgauucuc

SEQ ID NO: 1107442 - RNA, 24 nt, Human
ucccggguucaagcgauucuccug

SEQ ID NO: 1107443 - RNA, 24 nt, Human
ucccuucuggaacagaggaaugca

SEQ ID NO: 1107444 - RNA, 23 nt, Human
ucucccucucuugcucucuguca

SEQ ID NO: 1107445 - RNA, 26 nt, Human
ucuccugccucagccucccaaguagc

SEQ ID NO: 1107446 - RNA, 19 nt, Human
ucugucagggaaggagccc

SEQ ID NO: 1107447 - RNA, 24 nt, Human
ucuuugcccacuggcauccaaggg

SEQ ID NO: 1107448 - RNA, 23 nt, Human
ugaaagguggagugagauccagg

SEQ ID NO: 1107449 - RNA, 25 nt, Human
ugcagccacaaggccagguguagcc

SEQ ID NO: 1107450 - RNA, 19 nt, Human
ugcccaggcuggaguggaa

SEQ ID NO: 1107451 - RNA, 21 nt, Human
ugcccaggcuggaguggaaug

SEQ ID NO: 1107452 - RNA, 24 nt, Human
ugcccaggcuggaguggaauggca

SEQ ID NO: 1107453 - RNA, 24 nt, Human
ugccucagccucccaaaguguugg

SEQ ID NO: 1107454 - RNA, 24 nt, Human
ugccucagccucccaaguagcugg

SEQ ID NO: 1107455 - RNA, 24 nt, Human
uggaagagacauauuuaauuagug

SEQ ID NO: 1107456 - RNA, 19 nt, Human
uggaguggaauggcacgau

SEQ ID NO: 1107457 - RNA, 24 nt, Human
uggaguggaauggcacgaucuugg

SEQ ID NO: 1107458 - RNA, 19 nt, Human
uggcugggccuugauaagu

SEQ ID NO: 1107459 - RNA, 20 nt, Human
ugggacgaagaagucaucag

SEQ ID NO: 1107460 - RNA, 18 nt, Human
ugggauuacaggcaugcg

SEQ ID NO: 1107461 - RNA, 21 nt, Human
ugggauuacaggcaugcgcca

SEQ ID NO: 1107462 - RNA, 22 nt, Human
ugggauuacaggcaugcgccac

SEQ ID NO: 1107463 - RNA, 24 nt, Human
ugggauuacaggcaugcgccacca

SEQ ID NO: 1107464 - RNA, 18 nt, Human
ugggauuacaggcgugag

SEQ ID NO: 1107465 - RNA, 19 nt, Human
ugggauuacaggcgugagc

SEQ ID NO: 1107466 - RNA, 22 nt, Human
ugggauuacaggcgugagccac

SEQ ID NO: 1107467 - RNA, 23 nt, Human
ugggauuacaggcgugagccacc

SEQ ID NO: 1107468 - RNA, 24 nt, Human
ugggauuacaggcgugagccacca

SEQ ID NO: 1107469 - RNA, 21 nt, Human
uggucaggcuggucucgcgcu

SEQ ID NO: 1107470 - RNA, 19 nt, Human
uggucucgcgcucccgacc

SEQ ID NO: 1107471 - RNA, 27 nt, Human
ugguuaaaaaauaaaaucuccacacag

SEQ ID NO: 1107472 - RNA, 21 nt, Human
uguauuuuuaguagagacggg

SEQ ID NO: 1107473 - RNA, 18 nt, Human
ugucacaguguccuucag

SEQ ID NO: 1107474 - RNA, 20 nt, Human
ugucacaguguccuucaggg

SEQ ID NO: 1107475 - RNA, 18 nt, Human
uuaguagagacgggguuu

SEQ ID NO: 1107476 - RNA, 24 nt, Human
uuaguagagacgggguuucuccau

SEQ ID NO: 1107477 - RNA, 21 nt, Human
uucaagcgauucuccugccuc

SEQ ID NO: 1107478 - RNA, 23 nt, Human
uucaagcgauucuccugccucag

SEQ ID NO: 1107479 - RNA, 24 nt, Human
uucaagcgauucuccugccucagc

SEQ ID NO: 1107480 - RNA, 25 nt, Human
uucuaaagauuccuuucccaggggc

SEQ ID NO: 1107481 - RNA, 23 nt, Human
uuguauuuuuaguagagacgggg

SEQ ID NO: 1107482 - RNA, 21 nt, Human
uuucuccauguuggucaggcu

SEQ ID NO: 1107483 - RNA, 19 nt, Human
uuuuguauuuuuaguagag

SEQ ID NO: 1107484 - RNA, 20 nt, Human
uuuuguauuuuuaguagaga

SEQ ID NO: 1107485 - RNA, 22 nt, Human
uuuuuaguagagacgggguuuc

SEQ ID NO: 1107486 - RNA, 20 nt, Human
aaaccaaggccaggagucaa

SEQ ID NO: 1107487 - RNA, 27 nt, Human
aaacugguuuugcucuuaaggccuuca

SEQ ID NO: 1107488 - RNA, 22 nt, Human
aaagaaacaggagggaccugag

SEQ ID NO: 1107489 - RNA, 23 nt, Human
aaagugcugggauuacaggugug

SEQ ID NO: 1107490 - RNA, 24 nt, Human
aaagugcugggauuacaggugugg

SEQ ID NO: 1107491 - RNA, 25 nt, Human
aaagugcugggauuacagguguggg

SEQ ID NO: 1107492 - RNA, 19 nt, Human
aaggagcacggaccucgga

SEQ ID NO: 1107493 - RNA, 19 nt, Human
aaggccaggagucaagucc

SEQ ID NO: 1107494 - RNA, 25 nt, Human
aaguaauccucccaccuuggccucc

SEQ ID NO: 1107495 - RNA, 18 nt, Human
aagugcugggauuacagg

SEQ ID NO: 1107496 - RNA, 19 nt, Human
aagugcugggauuacaggu

SEQ ID NO: 1107497 - RNA, 18 nt, Human
accacagcauccccccag

SEQ ID NO: 1107498 - RNA, 21 nt, Human
acccuguccccuccacuucca

SEQ ID NO: 1107499 - RNA, 21 nt, Human
accuccgucucuugaguagcu

SEQ ID NO: 1107500 - RNA, 21 nt, Human
acucaggccggaguuggcacu

SEQ ID NO: 1107501 - RNA, 21 nt, Human
acugaggaacuggugggugga

SEQ ID NO: 1107502 - RNA, 19 nt, Human
acugcaguccagcuucugg

SEQ ID NO: 1107503 - RNA, 24 nt, Human
acugguuuugcucuuaaggccuuc

SEQ ID NO: 1107504 - RNA, 19 nt, Human
agagaaaagaaacaggagg

SEQ ID NO: 1107505 - RNA, 25 nt, Human
agcacauaaccccaaauagugccuu

SEQ ID NO: 1107506 - RNA, 24 nt, Human
aggaagcuuaccuugccucacuga

SEQ ID NO: 1107507 - RNA, 21 nt, Human
aggagcacggaccucggagcc

SEQ ID NO: 1107508 - RNA, 23 nt, Human
aggagcacggaccucggagccca

SEQ ID NO: 1107509 - RNA, 21 nt, Human
aggcuggucucaaacuccugg

SEQ ID NO: 1107510 - RNA, 19 nt, Human
aggcuugggucaggccugg

SEQ ID NO: 1107511 - RNA, 22 nt, Human
aggucuugcuauguugccuagg

SEQ ID NO: 1107512 - RNA, 26 nt, Human
aguggugccguggacugcaguccagc

SEQ ID NO: 1107513 - RNA, 18 nt, Human
auaccucacugcaaccuc

SEQ ID NO: 1107514 - RNA, 24 nt, Human
caaagugcugggauuacaggugug

SEQ ID NO: 1107515 - RNA, 27 nt, Human
caaguaauccucccaccuuggccuccc

SEQ ID NO: 1107516 - RNA, 27 nt, Human
caaguaauccucccaccuuggccuccc

SEQ ID NO: 1107517 - RNA, 19 nt, Human
caauguggccauuauucca

SEQ ID NO: 1107518 - RNA, 19 nt, Human
cacacccuguccccuccac

SEQ ID NO: 1107519 - RNA, 22 nt, Human
cacacgccaccacaccuggcua

SEQ ID NO: 1107520 - RNA, 22 nt, Human
cacaggcacacgccaccacacc

SEQ ID NO: 1107521 - RNA, 23 nt, Human
caccuccgucucuugaguagcug

SEQ ID NO: 1107522 - RNA, 24 nt, Human
cagagaaaagaaacaggagggacc

SEQ ID NO: 1107523 - RNA, 23 nt, Human
caggaaaccaaggccaggaguca

SEQ ID NO: 1107524 - RNA, 19 nt, Human
cagggacacagggcccagu

SEQ ID NO: 1107525 - RNA, 19 nt, Human
cauguugugugcccucagg

SEQ ID NO: 1107526 - RNA, 21 nt, Human
ccaaagugcugggauuacagg

SEQ ID NO: 1107527 - RNA, 21 nt, Human
ccaaagugcugggauuacagg

SEQ ID NO: 1107528 - RNA, 24 nt, Human
ccaaagugcugggauuacaggugu

SEQ ID NO: 1107529 - RNA, 22 nt, Human
ccacaccuggcuaauuuuucua

SEQ ID NO: 1107530 - RNA, 23 nt, Human
ccagaggagccucaaugcccucc

SEQ ID NO: 1107531 - RNA, 20 nt, Human
ccagcacccaugaccucuac

SEQ ID NO: 1107532 - RNA, 23 nt, Human
ccagguggaccccagcucacacc

SEQ ID NO: 1107533 - RNA, 25 nt, Human
ccaucucugcuucacacacugggga

SEQ ID NO: 1107534 - RNA, 22 nt, Human
cccagcacccaugaccucuacc

SEQ ID NO: 1107535 - RNA, 24 nt, Human
cccagcacccaugaccucuaccuc

SEQ ID NO: 1107536 - RNA, 22 nt, Human
cccagcucacacccuguccccu

SEQ ID NO: 1107537 - RNA, 23 nt, Human
cccaggcuggagugcaauggcau

SEQ ID NO: 1107538 - RNA, 18 nt, Human
cccuugucacccaggcug

SEQ ID NO: 1107539 - RNA, 23 nt, Human
cccuugucacccaggcuggagug

SEQ ID NO: 1107540 - RNA, 24 nt, Human
ccucacugcaaccucuaauuccug

SEQ ID NO: 1107541 - RNA, 26 nt, Human
ccucccaccuuggccucccaaagugc

SEQ ID NO: 1107542 - RNA, 20 nt, Human
ccuggucucaaguaauccuc

SEQ ID NO: 1107543 - RNA, 21 nt, Human
cgaaggccagcacauaacccc

SEQ ID NO: 1107544 - RNA, 19 nt, Human
cuauacgacaugcacauga

SEQ ID NO: 1107545 - RNA, 24 nt, Human
cucaaguaauccucccaccuuggc

SEQ ID NO: 1107546 - RNA, 21 nt, Human
cucacacccuguccccuccac

SEQ ID NO: 1107547 - RNA, 24 nt, Human
cucacugcaaccucuaauuccugg

SEQ ID NO: 1107548 - RNA, 24 nt, Human
cucuugaguagcugggaccacagg

SEQ ID NO: 1107549 - RNA, 23 nt, Human
cugcaaccucuaauuccuggacu

SEQ ID NO: 1107550 - RNA, 23 nt, Human
cugcgagccuguuuccccaucug

SEQ ID NO: 1107551 - RNA, 18 nt, Human
cuggaugggagaggggga

SEQ ID NO: 1107552 - RNA, 19 nt, Human
cugggauuacagguguggg

SEQ ID NO: 1107553 - RNA, 23 nt, Human
cuggggacacagggacacaggga

SEQ ID NO: 1107554 - RNA, 24 nt, Human
cuucccuugucacccaggcuggag

SEQ ID NO: 1107555 - RNA, 24 nt, Human
cuugucacccaggcuggagugcaa

SEQ ID NO: 1107556 - RNA, 19 nt, Human
gacacagggacacagggac

SEQ ID NO: 1107557 - RNA, 21 nt, Human
gacaugcacaugaaucccuac

SEQ ID NO: 1107558 - RNA, 21 nt, Human
gaccucuaccucaaggccagg

SEQ ID NO: 1107559 - RNA, 20 nt, Human
gagcacggaccucggagccc

SEQ ID NO: 1107560 - RNA, 24 nt, Human
gaguagcugggaccacaggcacac

SEQ ID NO: 1107561 - RNA, 22 nt, Human
gaguccaggaaaccaaggccag

SEQ ID NO: 1107562 - RNA, 18 nt, Human
gaucauaccucacugcaa

SEQ ID NO: 1107563 - RNA, 21 nt, Human
gauuacaggugugggucacca

SEQ ID NO: 1107564 - RNA, 24 nt, Human
gauuacaggugugggucaccaugc

SEQ ID NO: 1107565 - RNA, 25 nt, Human
gcaagucccaaauccauaagguagg

SEQ ID NO: 1107566 - RNA, 18 nt, Human
gcccucaggaagcuuacc

SEQ ID NO: 1107567 - RNA, 23 nt, Human
gccuaggcuggucucaaacuccu

SEQ ID NO: 1107568 - RNA, 24 nt, Human
gccucaaugcccuccacaucagcu

SEQ ID NO: 1107569 - RNA, 23 nt, Human
gccuuagaaggucuuccccucca

SEQ ID NO: 1107570 - RNA, 18 nt, Human
gcgggagaccagggaugu

SEQ ID NO: 1107571 - RNA, 22 nt, Human
gcucacacccuguccccuccac

SEQ ID NO: 1107572 - RNA, 19 nt, Human
gcuggagugcaauggcaug

SEQ ID NO: 1107573 - RNA, 22 nt, Human
gcuggucucaaacuccuggucu

SEQ ID NO: 1107574 - RNA, 21 nt, Human
ggaccugagagguggcccggc

SEQ ID NO: 1107575 - RNA, 20 nt, Human
ggagcuugcccaggaggcgg

SEQ ID NO: 1107576 - RNA, 19 nt, Human
ggagggaccugagaggugg

SEQ ID NO: 1107577 - RNA, 24 nt, Human
ggcuggucucaaacuccuggucuc

SEQ ID NO: 1107578 - RNA, 18 nt, Human
ggguuugaauccagcagc

SEQ ID NO: 1107579 - RNA, 23 nt, Human
ggugaugagagcgcccccucaga

SEQ ID NO: 1107580 - RNA, 20 nt, Human
gugacauccacaucuauaaa

SEQ ID NO: 1107581 - RNA, 22 nt, Human
uaaaaagcagguuccugaccug

SEQ ID NO: 1107582 - RNA, 22 nt, Human
uaaagaugaggucuugcuaugu

SEQ ID NO: 1107583 - RNA, 23 nt, Human
uaaguaccugacugaggaacugg

SEQ ID NO: 1107584 - RNA, 19 nt, Human
uaccucaaggccaggcuug

SEQ ID NO: 1107585 - RNA, 24 nt, Human
uaccucacugcaaccucuaauucc

SEQ ID NO: 1107586 - RNA, 22 nt, Human
uauacauauggcauauguauac

SEQ ID NO: 1107587 - RNA, 24 nt, Human
uauguugccuaggcuggucucaaa

SEQ ID NO: 1107588 - RNA, 18 nt, Human
uauuccagccaccucagg

SEQ ID NO: 1107589 - RNA, 24 nt, Human
ucaaguaauccucccaccuuggcc

SEQ ID NO: 1107590 - RNA, 18 nt, Human
ucacccaggcuggagugc

SEQ ID NO: 1107591 - RNA, 23 nt, Human
ucacugcaaccucuaauuccugg

SEQ ID NO: 1107592 - RNA, 31 nt, Human
ucacugcaaccucuaauuccuggacucgggg

SEQ ID NO: 1107593 - RNA, 18 nt, Human
ucagaguuggacaaguga

SEQ ID NO: 1107594 - RNA, 22 nt, Human
ucagauuccuuaucuauacgac

SEQ ID NO: 1107595 - RNA, 23 nt, Human
ucccaaagugcugggauuacagg

SEQ ID NO: 1107596 - RNA, 22 nt, Human
uccccaucuguagagugggggu

SEQ ID NO: 1107597 - RNA, 23 nt, Human
ucccuugucacccaggcuggagu

SEQ ID NO: 1107598 - RNA, 21 nt, Human
ucguuuacuuaaagucagcug

SEQ ID NO: 1107599 - RNA, 24 nt, Human
ucuucccuugucacccaggcugga

SEQ ID NO: 1107600 - RNA, 24 nt, Human
ucuugaguagcugggaccacaggc

SEQ ID NO: 1107601 - RNA, 19 nt, Human
ucuugcuauguugccuagg

SEQ ID NO: 1107602 - RNA, 23 nt, Human
ucuugcuauguugccuaggcugg

SEQ ID NO: 1107603 - RNA, 24 nt, Human
ucuugcuauguugccuaggcuggu

SEQ ID NO: 1107604 - RNA, 24 nt, Human
ugagagguggcccggcugguuccc

SEQ ID NO: 1107605 - RNA, 24 nt, Human
ugaggucuugcuauguugccuagg

SEQ ID NO: 1107606 - RNA, 18 nt, Human
ugcaaccucuaauuccug

SEQ ID NO: 1107607 - RNA, 24 nt, Human
ugcagagaaaagaaacaggaggga

SEQ ID NO: 1107608 - RNA, 24 nt, Human
ugcauacauauucucauuuauucc

SEQ ID NO: 1107609 - RNA, 20 nt, Human
ugccguggacugcaguccag

SEQ ID NO: 1107610 - RNA, 24 nt, Human
ugcuauguugccuaggcuggucuc

SEQ ID NO: 1107611 - RNA, 24 nt, Human
ugcugggauuacagguguggguca

SEQ ID NO: 1107612 - RNA, 18 nt, Human
uggaaacucaggccggag

SEQ ID NO: 1107613 - RNA, 21 nt, Human
uggagcccugaguggggagcu

SEQ ID NO: 1107614 - RNA, 21 nt, Human
uggagcccugaguggggagcu

SEQ ID NO: 1107615 - RNA, 19 nt, Human
uggagugcaauggcaugau

SEQ ID NO: 1107616 - RNA, 19 nt, Human
uggagugcaauggcaugau

SEQ ID NO: 1107617 - RNA, 21 nt, Human
uggagugcaauggcaugauca

SEQ ID NO: 1107618 - RNA, 19 nt, Human
uggcacuguaauccugagg

SEQ ID NO: 1107619 - RNA, 21 nt, Human
ugggaccacaggcacacgcca

SEQ ID NO: 1107620 - RNA, 24 nt, Human
ugggaccacaggcacacgccacca

SEQ ID NO: 1107621 - RNA, 18 nt, Human
ugggagagggggauggug

SEQ ID NO: 1107622 - RNA, 21 nt, Human
ugggagagggggaugguggug

SEQ ID NO: 1107623 - RNA, 18 nt, Human
ugggauuacagguguggg

SEQ ID NO: 1107624 - RNA, 22 nt, Human
ugggauuacaggugugggucac

SEQ ID NO: 1107625 - RNA, 23 nt, Human
ugggauuacaggugugggucacc

SEQ ID NO: 1107626 - RNA, 24 nt, Human
ugggauuacaggugugggucacca

SEQ ID NO: 1107627 - RNA, 25 nt, Human
ugggauuacaggugugggucaccau

SEQ ID NO: 1107628 - RNA, 23 nt, Human
uggggagcuugcccaggaggcgg

SEQ ID NO: 1107629 - RNA, 20 nt, Human
uggguuugaauccagcagcu

SEQ ID NO: 1107630 - RNA, 18 nt, Human
ugguaccacagcaucccc

SEQ ID NO: 1107631 - RNA, 18 nt, Human
ugguggguggaguggugc

SEQ ID NO: 1107632 - RNA, 24 nt, Human
uguaaagaugaggucuugcuaugu

SEQ ID NO: 1107633 - RNA, 24 nt, Human
uguaauccugaggcagaguuuuuu

SEQ ID NO: 1107634 - RNA, 20 nt, Human
ugucacccaggcuggagugc

SEQ ID NO: 1107635 - RNA, 19 nt, Human
ugugggucaccaugcccua

SEQ ID NO: 1107636 - RNA, 25 nt, Human
ugugggucaccaugcccuacccuau

SEQ ID NO: 1107637 - RNA, 24 nt, Human
uguguacauauuagcuaacauuug

SEQ ID NO: 1107638 - RNA, 24 nt, Human
uguuauacauauggcauauguaua

SEQ ID NO: 1107639 - RNA, 25 nt, Human
uuggcacuguaauccugaggcagag

SEQ ID NO: 1107640 - RNA, 18 nt, Human
uuggccucccaaagugcu

SEQ ID NO: 1107641 - RNA, 18 nt, Human
uugggcaggugccugaac

SEQ ID NO: 1107642 - RNA, 24 nt, Human
uuguaaagaugaggucuugcuaug

SEQ ID NO: 1107643 - RNA, 22 nt, Human
aaucaucucaaaggauguuuga

SEQ ID NO: 1107644 - RNA, 19 nt, Human
acccugucugggcucugca

SEQ ID NO: 1107645 - RNA, 19 nt, Human
aggguccucucugguucuc

SEQ ID NO: 1107646 - RNA, 26 nt, Human
cacaccaaaaauuuuuuaaaaaucau

SEQ ID NO: 1107647 - RNA, 20 nt, Human
caucuucucaaagucaggag

SEQ ID NO: 1107648 - RNA, 22 nt, Human
ccaggguccucucugguucucc

SEQ ID NO: 1107649 - RNA, 20 nt, Human
ccccaggaggagguggagcu

SEQ ID NO: 1107650 - RNA, 22 nt, Human
cgccgcacugacugcggcugcg

SEQ ID NO: 1107651 - RNA, 22 nt, Human
cuagcacaauuccuuaacauga

SEQ ID NO: 1107652 - RNA, 20 nt, Human
cucaaaggauguuugaaagg

SEQ ID NO: 1107653 - RNA, 21 nt, Human
cucucugguucuccaggcaca

SEQ ID NO: 1107654 - RNA, 24 nt, Human
gaaauaaaguaugugaaaacucac

SEQ ID NO: 1107655 - RNA, 21 nt, Human
gacccugucugggcucugcag

SEQ ID NO: 1107656 - RNA, 21 nt, Human
gauuuuuaacuagcacaauuc

SEQ ID NO: 1107657 - RNA, 21 nt, Human
gcagagcuggcgccgcacuga

SEQ ID NO: 1107658 - RNA, 24 nt, Human
gguggagcuucugagacaagcuuc

SEQ ID NO: 1107659 - RNA, 18 nt, Human
uaaaacaacagccaccau

SEQ ID NO: 1107660 - RNA, 23 nt, Human
uaacaugacauagggcaucuauu

SEQ ID NO: 1107661 - RNA, 23 nt, Human
ucaacaccuauuccugauuuuua

SEQ ID NO: 1107662 - RNA, 21 nt, Human
ucagaaccugaggaccucccc

SEQ ID NO: 1107663 - RNA, 20 nt, Human
ucauuucauggaaauaaagu

SEQ ID NO: 1107664 - RNA, 18 nt, Human
ucuuaaugauuaauuagc

SEQ ID NO: 1107665 - RNA, 20 nt, Human
ugguauacaaaauaauguuu

SEQ ID NO: 1107666 - RNA, 20 nt, Human
ugucugggcucugcagagcu

SEQ ID NO: 1107667 - RNA, 25 nt, Human
uuaaugauuaauuagcacuuuucuu

SEQ ID NO: 1107668 - RNA, 20 nt, Human
uuuaaaacaacagccaccau

SEQ ID NO: 1107669 - RNA, 23 nt, Human
aaacagggauagauagaggggac

SEQ ID NO: 1107670 - RNA, 18 nt, Human
aaacuaaaaucucuaaac

SEQ ID NO: 1107671 - RNA, 18 nt, Human
aacauucugaauacaaaa

SEQ ID NO: 1107672 - RNA, 20 nt, Human
aacauucugaauacaaaacc

SEQ ID NO: 1107673 - RNA, 21 nt, Human
aacugggcccaagagcccagc

SEQ ID NO: 1107674 - RNA, 20 nt, Human
aacuucaugacccugcuccc

SEQ ID NO: 1107675 - RNA, 20 nt, Human
aagaaaaaacuucaugaccc

SEQ ID NO: 1107676 - RNA, 21 nt, Human
aagaaaaaaucuugaaaagaa

SEQ ID NO: 1107677 - RNA, 25 nt, Human
acaagcagaccuggugugggugggu

SEQ ID NO: 1107678 - RNA, 23 nt, Human
acaucauucuggacuaacaguuu

SEQ ID NO: 1107679 - RNA, 27 nt, Human
accuggugugggugggugccugugugu

SEQ ID NO: 1107680 - RNA, 25 nt, Human
acuuuaaaaaaucuggaacaauaga

SEQ ID NO: 1107681 - RNA, 19 nt, Human
agaaacaagcagaccuggu

SEQ ID NO: 1107682 - RNA, 26 nt, Human
agacaagacagacugaacugggccca

SEQ ID NO: 1107683 - RNA, 19 nt, Human
agggauagauagaggaugg

SEQ ID NO: 1107684 - RNA, 23 nt, Human
auucugaauacaaaacccuugau

SEQ ID NO: 1107685 - RNA, 20 nt, Human
caaagggguuggucuccccc

SEQ ID NO: 1107686 - RNA, 23 nt, Human
caagcagaccugguguggguggg

SEQ ID NO: 1107687 - RNA, 20 nt, Human
cagaccuggugugggugggu

SEQ ID NO: 1107688 - RNA, 21 nt, Human
cagcauccaaccuuucccaga

SEQ ID NO: 1107689 - RNA, 20 nt, Human
cccugcuccccgggcuccuc

SEQ ID NO: 1107690 - RNA, 22 nt, Human
ccuagggagaaaacuagagaau

SEQ ID NO: 1107691 - RNA, 22 nt, Human
cgucaaugcccccuucccaucc

SEQ ID NO: 1107692 - RNA, 19 nt, Human
cuccccgggcuccucucca

SEQ ID NO: 1107693 - RNA, 24 nt, Human
cugggcccaagagcccagcacugg

SEQ ID NO: 1107694 - RNA, 19 nt, Human
cuucaugacccugcucccc

SEQ ID NO: 1107695 - RNA, 19 nt, Human
gaacugggcccaagagccc

SEQ ID NO: 1107696 - RNA, 23 nt, Human
gaagaaaaaacuucaugacccug

SEQ ID NO: 1107697 - RNA, 18 nt, Human
gacagacugaacugggcc

SEQ ID NO: 1107698 - RNA, 24 nt, Human
gacugaacugggcccaagagccca

SEQ ID NO: 1107699 - RNA, 20 nt, Human
gaggagggauagaaggggau

SEQ ID NO: 1107700 - RNA, 22 nt, Human
gaggauggggaaaggggagaaa

SEQ ID NO: 1107701 - RNA, 24 nt, Human
gauagauagaggauggggaaaggg

SEQ ID NO: 1107702 - RNA, 18 nt, Human
gcuugccuggccuccugg

SEQ ID NO: 1107703 - RNA, 20 nt, Human
gggaaaggggagaaaagguu

SEQ ID NO: 1107704 - RNA, 18 nt, Human
guuuuauuucuccucuuu

SEQ ID NO: 1107705 - RNA, 20 nt, Human
uaaaauugaagcaaaagugc

SEQ ID NO: 1107706 - RNA, 21 nt, Human
uaaaauugaagcaaaagugcc

SEQ ID NO: 1107707 - RNA, 23 nt, Human
uaaacacaccaauguccuauucc

SEQ ID NO: 1107708 - RNA, 22 nt, Human
uaagaaaaaaucuugaaaagaa

SEQ ID NO: 1107709 - RNA, 18 nt, Human
uagaaggggauguaaggc

SEQ ID NO: 1107710 - RNA, 22 nt, Human
uagaaggggauguaaggcagca

SEQ ID NO: 1107711 - RNA, 21 nt, Human
ucacugaagaaaaaacuucau

SEQ ID NO: 1107712 - RNA, 18 nt, Human
ucccuacaugugagaaac

SEQ ID NO: 1107713 - RNA, 21 nt, Human
ucucuaaacacaccaaugucc

SEQ ID NO: 1107714 - RNA, 19 nt, Human
ugagaaacaagcagaccug

SEQ ID NO: 1107715 - RNA, 23 nt, Human
ugagacaagacagacugaacugg

SEQ ID NO: 1107716 - RNA, 23 nt, Human
uggaacaauagaaacuguacaga

SEQ ID NO: 1107717 - RNA, 18 nt, Human
ugggugccugugugugug

SEQ ID NO: 1107718 - RNA, 19 nt, Human
uucaaaagacacaaagggg

SEQ ID NO: 1107719 - RNA, 23 nt, Human
uugauuuguuccugggaaacagg

SEQ ID NO: 1107720 - RNA, 23 nt, Human
uugcacaacauucugaauacaaa

SEQ ID NO: 1107721 - RNA, 22 nt, Human
uuggucucccccccucucccua

SEQ ID NO: 1107722 - RNA, 19 nt, Human
uuguauuccuccuucacug

SEQ ID NO: 1107723 - RNA, 20 nt, Human
uuuguuuuguuuuuaaacua

SEQ ID NO: 1107724 - RNA, 23 nt, Human
caagccacgcccacaggcucagg

SEQ ID NO: 1107725 - RNA, 25 nt, Human
cccacaggcucagucucccagcacc

SEQ ID NO: 1107726 - RNA, 19 nt, Human
cccagcacccccauaguuu

SEQ ID NO: 1107727 - RNA, 18 nt, Human
ggauacaggucuggcauu

SEQ ID NO: 1107728 - RNA, 20 nt, Human
uacaguccagcaucuguccc

SEQ ID NO: 1107729 - RNA, 22 nt, Human
uacaguccagcaucuguccucu

SEQ ID NO: 1107730 - RNA, 23 nt, Human
uagaugaaaggaaauacuuagcu

SEQ ID NO: 1107731 - RNA, 21 nt, Human
uaucugaggaaucaagaaguu

SEQ ID NO: 1107732 - RNA, 25 nt, Human
ucucccagcacccccauaguuucuc

SEQ ID NO: 1107733 - RNA, 20 nt, Human
ugccucagccggcaccucug

SEQ ID NO: 1107734 - RNA, 18 nt, Human
uuaucaguauuuuauccc

SEQ ID NO: 1107735 - RNA, 20 nt, Human
uuccauaagguucucuggga

SEQ ID NO: 1107736 - RNA, 22 nt, Human
acggggcugcagagccgccucu

SEQ ID NO: 1107737 - RNA, 21 nt, Human
caccuucuagguucagucacc

SEQ ID NO: 1107738 - RNA, 23 nt, Human
ccucugggcaccgaggacgauuc

SEQ ID NO: 1107739 - RNA, 24 nt, Human
gcagagccgccucugggcaccgag

SEQ ID NO: 1107740 - RNA, 22 nt, Human
uacuuggggaagcacggcccgg

SEQ ID NO: 1107741 - RNA, 21 nt, Human
ucagucaccgcgguccccccc

SEQ ID NO: 1107742 - RNA, 19 nt, Human
cacugucugucuucucuac

SEQ ID NO: 1107743 - RNA, 21 nt, Human
cagcagcuucuucuuggcaca

SEQ ID NO: 1107744 - RNA, 21 nt, Human
cuacagcagcuucuucuuggc

SEQ ID NO: 1107745 - RNA, 19 nt, Human
cuucuuggcacaauccuga

SEQ ID NO: 1107746 - RNA, 18 nt, Human
ucuacagcagcuucuucu

SEQ ID NO: 1107747 - RNA, 20 nt, Human
uguggggaaugugggaaaug

SEQ ID NO: 1107748 - RNA, 33 nt, Human
aaaacaaaaggcacuacaaaaaaccccaaaagg

SEQ ID NO: 1107749 - RNA, 21 nt, Human
aaaacgaccaccaccaggagg

SEQ ID NO: 1107750 - RNA, 22 nt, Human
aaacaaaaaaaaaaaauagaaa

SEQ ID NO: 1107751 - RNA, 20 nt, Human
aaacagaaauagaaaaugaa

SEQ ID NO: 1107752 - RNA, 21 nt, Human
aaacagaaauagaaaaugaac

SEQ ID NO: 1107753 - RNA, 23 nt, Human
aaacagaaauagaaaaugaacaa

SEQ ID NO: 1107754 - RNA, 21 nt, Human
aaagaacuacaacucaacaac

SEQ ID NO: 1107755 - RNA, 20 nt, Human
aacaaaaagcaaauaguccc

SEQ ID NO: 1107756 - RNA, 19 nt, Human
aacacggugaaaccccguc

SEQ ID NO: 1107757 - RNA, 20 nt, Human
aacacggugaaaccccgucu

SEQ ID NO: 1107758 - RNA, 21 nt, Human
aacacggugaaaccccgucuc

SEQ ID NO: 1107759 - RNA, 25 nt, Human
aacccacagacagaaagaggaaagc

SEQ ID NO: 1107760 - RNA, 24 nt, Human
aaccccaaaaacagaaauagaaaa

SEQ ID NO: 1107761 - RNA, 18 nt, Human
aagcacaugaaaagaucc

SEQ ID NO: 1107762 - RNA, 22 nt, Human
aaggcacuacaaaaaaccccaa

SEQ ID NO: 1107763 - RNA, 20 nt, Human
aaggcaggcagaucacaagg

SEQ ID NO: 1107764 - RNA, 18 nt, Human
aaugacaagaaaaaauga

SEQ ID NO: 1107765 - RNA, 24 nt, Human
aauggcaugaaccugggaggcgga

SEQ ID NO: 1107766 - RNA, 24 nt, Human
acagaacccacagacagaaagagu

SEQ ID NO: 1107767 - RNA, 24 nt, Human
acagagcaagacucugucucaaaa

SEQ ID NO: 1107768 - RNA, 18 nt, Human
acagcacugcacuccagc

SEQ ID NO: 1107769 - RNA, 20 nt, Human
accaaaacgaccaccaccag

SEQ ID NO: 1107770 - RNA, 21 nt, Human
accacacagaaccaaaacgac

SEQ ID NO: 1107771 - RNA, 24 nt, Human
accccaaaaacagaaauagaaaau

SEQ ID NO: 1107772 - RNA, 24 nt, Human
accccgucucuacuaaaaauacaa

SEQ ID NO: 1107773 - RNA, 23 nt, Human
accuguagucccagcuacucggg

SEQ ID NO: 1107774 - RNA, 18 nt, Human
acugcaauccauggaugc

SEQ ID NO: 1107775 - RNA, 21 nt, Human
acugcacuccagccuggguga

SEQ ID NO: 1107776 - RNA, 24 nt, Human
acugcacuccagccugggugacag

SEQ ID NO: 1107777 - RNA, 26 nt, Human
acugcacuccagccugggugacagag

SEQ ID NO: 1107778 - RNA, 18 nt, Human
agagcaagacucugucuc

SEQ ID NO: 1107779 - RNA, 19 nt, Human
agaggccaaggcaggcagu

SEQ ID NO: 1107780 - RNA, 19 nt, Human
agauagcugcuauccaaaa

SEQ ID NO: 1107781 - RNA, 18 nt, Human
agccauaggccgaaguug

SEQ ID NO: 1107782 - RNA, 24 nt, Human
agccugggugacagagcaagacuc

SEQ ID NO: 1107783 - RNA, 21 nt, Human
agcgaaaaagcaaccuaugga

SEQ ID NO: 1107784 - RNA, 22 nt, Human
agcgacaaaggcaagacaagga

SEQ ID NO: 1107785 - RNA, 26 nt, Human
aggcaaaagguggaaguaggggaccc

SEQ ID NO: 1107786 - RNA, 24 nt, Human
aggcagaucacaaggucaggagau

SEQ ID NO: 1107787 - RNA, 21 nt, Human
aggcaggagaauggcaugaac

SEQ ID NO: 1107788 - RNA, 22 nt, Human
aggcaggagaauggcaugaacc

SEQ ID NO: 1107789 - RNA, 24 nt, Human
aggcaggagaauggcaugaaccug

SEQ ID NO: 1107790 - RNA, 24 nt, Human
aggcaggcagaucacaaggucagg

SEQ ID NO: 1107791 - RNA, 26 nt, Human
aggcaggcagaucacaaggucaggag

SEQ ID NO: 1107792 - RNA, 23 nt, Human
aggccaaggcaggcagaucacaa

SEQ ID NO: 1107793 - RNA, 18 nt, Human
aggccuccgccagcccag

SEQ ID NO: 1107794 - RNA, 24 nt, Human
aggcgcgguggcucacgcccguaa

SEQ ID NO: 1107795 - RNA, 24 nt, Human
aggcggagcuugcagugagccaag

SEQ ID NO: 1107796 - RNA, 24 nt, Human
aggcgugguggcaggcaccuguag

SEQ ID NO: 1107797 - RNA, 18 nt, Human
aguacagaugcaacuacc

SEQ ID NO: 1107798 - RNA, 25 nt, Human
agucccauuaaaaauggaaaaaaaa

SEQ ID NO: 1107799 - RNA, 20 nt, Human
auaaugacaagaaaaaaugu

SEQ ID NO: 1107800 - RNA, 23 nt, Human
auagaauauuauuucaccuaaaa

SEQ ID NO: 1107801 - RNA, 20 nt, Human
aucacaaggucaggagaucc

SEQ ID NO: 1107802 - RNA, 24 nt, Human
aucacagcacugcacuccagccug

SEQ ID NO: 1107803 - RNA, 25 nt, Human
caaaaagcaaauagucccauuaaaa

SEQ ID NO: 1107804 - RNA, 19 nt, Human
caaaacaaaaggcacuaca

SEQ ID NO: 1107805 - RNA, 23 nt, Human
caaaacaaaaggcacuacaaaaa

SEQ ID NO: 1107806 - RNA, 26 nt, Human
caacaacaaaaagcaaauagucccau

SEQ ID NO: 1107807 - RNA, 23 nt, Human
caacaagauagcugcuauccaaa

SEQ ID NO: 1107808 - RNA, 21 nt, Human
caacaguacaucaaaacuuaa

SEQ ID NO: 1107809 - RNA, 20 nt, Human
caacucaacaacaaaaagca

SEQ ID NO: 1107810 - RNA, 21 nt, Human
caacucaacaacaaaaagcaa

SEQ ID NO: 1107811 - RNA, 19 nt, Human
caagauagcugcuauccaa

SEQ ID NO: 1107812 - RNA, 22 nt, Human
caagauagcugcuauccaaaac

SEQ ID NO: 1107813 - RNA, 26 nt, Human
caaggcaggcagaucacaaggucagg

SEQ ID NO: 1107814 - RNA, 25 nt, Human
cacacagaaccaaaacgaccaccac

SEQ ID NO: 1107815 - RNA, 22 nt, Human
cacagacagaaagagucaacag

SEQ ID NO: 1107816 - RNA, 24 nt, Human
caccaggaggacggcggaaguccc

SEQ ID NO: 1107817 - RNA, 23 nt, Human
caccucacauccaacaagauagc

SEQ ID NO: 1107818 - RNA, 23 nt, Human
caccuguagucccagcuacucgg

SEQ ID NO: 1107819 - RNA, 24 nt, Human
caccuguagucccagcuacucggg

SEQ ID NO: 1107820 - RNA, 24 nt, Human
cacgcccguaaucccagcacuuug

SEQ ID NO: 1107821 - RNA, 22 nt, Human
cacuccagccugggugacagag

SEQ ID NO: 1107822 - RNA, 19 nt, Human
cacugcacuccagccuggg

SEQ ID NO: 1107823 - RNA, 19 nt, Human
cacugcacuccagccuggg

SEQ ID NO: 1107824 - RNA, 19 nt, Human
cacugcacuccagccuggg

SEQ ID NO: 1107825 - RNA, 19 nt, Human
cacugcacuccagccuggg

SEQ ID NO: 1107826 - RNA, 20 nt, Human
cacugcacuccagccugggu

SEQ ID NO: 1107827 - RNA, 22 nt, Human
cacugcacuccagccuggguga

SEQ ID NO: 1107828 - RNA, 23 nt, Human
cacugcacuccagccugggugac

SEQ ID NO: 1107829 - RNA, 24 nt, Human
cacugcacuccagccugggugaca

SEQ ID NO: 1107830 - RNA, 24 nt, Human
cacugcacuccagccugggugaca

SEQ ID NO: 1107831 - RNA, 24 nt, Human
cagaaccaaaacgaccaccaccag

SEQ ID NO: 1107832 - RNA, 25 nt, Human
cagagcaagacucugucucaaaaac

SEQ ID NO: 1107833 - RNA, 24 nt, Human
cagcacuuugagaggccaaggcag

SEQ ID NO: 1107834 - RNA, 25 nt, Human
cagcacuuugagaggccaaggcagg

SEQ ID NO: 1107835 - RNA, 22 nt, Human
caggcagaucacaaggucagga

SEQ ID NO: 1107836 - RNA, 20 nt, Human
caggcagaucacaaggucau

SEQ ID NO: 1107837 - RNA, 22 nt, Human
cauaggccgaaguuggugaaac

SEQ ID NO: 1107838 - RNA, 21 nt, Human
caugaaccugggaggcggagc

SEQ ID NO: 1107839 - RNA, 23 nt, Human
cauuauacaacaugggugaaccg

SEQ ID NO: 1107840 - RNA, 19 nt, Human
ccaaaacaaaaggcacuac

SEQ ID NO: 1107841 - RNA, 24 nt, Human
ccacacagaaccaaaacgaccacc

SEQ ID NO: 1107842 - RNA, 21 nt, Human
cccaaaaacagaaauagaaaa

SEQ ID NO: 1107843 - RNA, 26 nt, Human
cccaaaaacagaaauagaaaaugaac

SEQ ID NO: 1107844 - RNA, 24 nt, Human
cccacagacagaaagagucaacag

SEQ ID NO: 1107845 - RNA, 19 nt, Human
ccgcuucucgcgcuuuucc

SEQ ID NO: 1107846 - RNA, 24 nt, Human
ccuggccaggcgcgguggcucacg

SEQ ID NO: 1107847 - RNA, 23 nt, Human
ccuggcuaacacggugaaacccc

SEQ ID NO: 1107848 - RNA, 24 nt, Human
ccuggcuaacacggugaaaccccg

SEQ ID NO: 1107849 - RNA, 22 nt, Human
ccugggugacagagcaagacuc

SEQ ID NO: 1107850 - RNA, 21 nt, Human
ccuguagucccagcuacucgg

SEQ ID NO: 1107851 - RNA, 22 nt, Human
cgaaaaagcaaccuauggacug

SEQ ID NO: 1107852 - RNA, 24 nt, Human
cguuccgucacuucggugacguca

SEQ ID NO: 1107853 - RNA, 22 nt, Human
cucacgcccguaaucccagcac

SEQ ID NO: 1107854 - RNA, 24 nt, Human
cucacgcccguaaucccagcacuu

SEQ ID NO: 1107855 - RNA, 18 nt, Human
cucgcgcuuuuccguucc

SEQ ID NO: 1107856 - RNA, 18 nt, Human
cuggcuaacacggugaaa

SEQ ID NO: 1107857 - RNA, 21 nt, Human
cugucucaaaaacaaacaaaa

SEQ ID NO: 1107858 - RNA, 23 nt, Human
gaaaaagcaaccuauggacuggg

SEQ ID NO: 1107859 - RNA, 20 nt, Human
gaaacaccacacagaaccaa

SEQ ID NO: 1107860 - RNA, 22 nt, Human
gaaacaccacacagaaccaaaa

SEQ ID NO: 1107861 - RNA, 19 nt, Human
gaacuacaacucaacaaca

SEQ ID NO: 1107862 - RNA, 18 nt, Human
gacaagaaaaaaugucug

SEQ ID NO: 1107863 - RNA, 24 nt, Human
gacagagcaagacucugucucaaa

SEQ ID NO: 1107864 - RNA, 21 nt, Human
gaccauccuggcuaacacggu

SEQ ID NO: 1107865 - RNA, 18 nt, Human
gagcuugcagugagccaa

SEQ ID NO: 1107866 - RNA, 22 nt, Human
gagcuugcagugagccaagauc

SEQ ID NO: 1107867 - RNA, 19 nt, Human
gaucacugcaauccaugga

SEQ ID NO: 1107868 - RNA, 24 nt, Human
gcacuccagccugggugacagagc

SEQ ID NO: 1107869 - RNA, 18 nt, Human
gcacugcacuccagccug

SEQ ID NO: 1107870 - RNA, 21 nt, Human
gcacugcacuccagccugggu

SEQ ID NO: 1107871 - RNA, 24 nt, Human
gcacugcacuccagccugggugac

SEQ ID NO: 1107872 - RNA, 24 nt, Human
gcuaacacggugaaaccccgucuc

SEQ ID NO: 1107873 - RNA, 20 nt, Human
ggagcuugcagugagccaag

SEQ ID NO: 1107874 - RNA, 24 nt, Human
ggagcuugcagugagccaagauca

SEQ ID NO: 1107875 - RNA, 19 nt, Human
ggcaccuguagucccagcu

SEQ ID NO: 1107876 - RNA, 24 nt, Human
gguggcucacgcccguaaucccag

SEQ ID NO: 1107877 - RNA, 19 nt, Human
guacagaugcaacuacccu

SEQ ID NO: 1107878 - RNA, 21 nt, Human
gugaaacaccacacagaacca

SEQ ID NO: 1107879 - RNA, 21 nt, Human
uaaaauggcacagguacuaug

SEQ ID NO: 1107880 - RNA, 21 nt, Human
uaaaauuucaucaaaggacac

SEQ ID NO: 1107881 - RNA, 22 nt, Human
uaacacggugaaaccccgucuc

SEQ ID NO: 1107882 - RNA, 24 nt, Human
uaacacggugaaaccccgucucua

SEQ ID NO: 1107883 - RNA, 20 nt, Human
uaacagaugaauggauaaau

SEQ ID NO: 1107884 - RNA, 19 nt, Human
uaaguaccauagaguauag

SEQ ID NO: 1107885 - RNA, 21 nt, Human
uacaaaaaaccccaaaaacag

SEQ ID NO: 1107886 - RNA, 25 nt, Human
uacaaaaaaccccaaaaacagaaau

SEQ ID NO: 1107887 - RNA, 24 nt, Human
uacaacucaacaacaaaaagcaaa

SEQ ID NO: 1107888 - RNA, 25 nt, Human
uacacaaaugccuaacaagcacaug

SEQ ID NO: 1107889 - RNA, 23 nt, Human
uacagaugcaacuacccuuuuug

SEQ ID NO: 1107890 - RNA, 20 nt, Human
uacuauauaguuuagggaau

SEQ ID NO: 1107891 - RNA, 19 nt, Human
uacuuuugauccaugguug

SEQ ID NO: 1107892 - RNA, 22 nt, Human
uagcccaaguauccacuaacag

SEQ ID NO: 1107893 - RNA, 23 nt, Human
uaguugagacauuucuggggaag

SEQ ID NO: 1107894 - RNA, 18 nt, Human
ucaacagagcgaaaaagc

SEQ ID NO: 1107895 - RNA, 18 nt, Human
ucacaaggucaggagauc

SEQ ID NO: 1107896 - RNA, 24 nt, Human
ucacaaggucaggagaucaggacc

SEQ ID NO: 1107897 - RNA, 19 nt, Human
ucacauccaacaagauagc

SEQ ID NO: 1107898 - RNA, 18 nt, Human
ucaccuaaaaaggaagga

SEQ ID NO: 1107899 - RNA, 23 nt, Human
ucacucccgccucuccguggugg

SEQ ID NO: 1107900 - RNA, 19 nt, Human
ucacugcaauccauggaug

SEQ ID NO: 1107901 - RNA, 20 nt, Human
ucacugcaauccauggaugc

SEQ ID NO: 1107902 - RNA, 24 nt, Human
ucaucuucauagcagcauuauuuc

SEQ ID NO: 1107903 - RNA, 25 nt, Human
uccaacaagauagcugcuauccaaa

SEQ ID NO: 1107904 - RNA, 23 nt, Human
uccacuaacagaugaauggauaa

SEQ ID NO: 1107905 - RNA, 24 nt, Human
uccagccugggugacagagcaaga

SEQ ID NO: 1107906 - RNA, 21 nt, Human
ucgauccaugaauacagaacc

SEQ ID NO: 1107907 - RNA, 21 nt, Human
ucucaaaagauaaauacugua

SEQ ID NO: 1107908 - RNA, 22 nt, Human
ucucuacuaaaaauacaaaaaa

SEQ ID NO: 1107909 - RNA, 22 nt, Human
ugaaagacacuauagauuccac

SEQ ID NO: 1107910 - RNA, 22 nt, Human
ugaaaguagaaucuugaauaga

SEQ ID NO: 1107911 - RNA, 23 nt, Human
ugaauggauaaauaaauguggua

SEQ ID NO: 1107912 - RNA, 24 nt, Human
ugagaggccaaggcaggcagauca

SEQ ID NO: 1107913 - RNA, 24 nt, Human
ugaggcaggagaauggcaugaacc

SEQ ID NO: 1107914 - RNA, 25 nt, Human
ugaggcaggagaauggcaugaaccu

SEQ ID NO: 1107915 - RNA, 20 nt, Human
ugccuaacaagcacaugaaa

SEQ ID NO: 1107916 - RNA, 21 nt, Human
uggaaaaaaaagacuugaaua

SEQ ID NO: 1107917 - RNA, 19 nt, Human
uggauaaauaaauguggua

SEQ ID NO: 1107918 - RNA, 22 nt, Human
uggcaggcaccuguagucccag

SEQ ID NO: 1107919 - RNA, 24 nt, Human
uggccaggcgcgguggcucacgcc

SEQ ID NO: 1107920 - RNA, 22 nt, Human
uggcucacgcccguaaucccag

SEQ ID NO: 1107921 - RNA, 24 nt, Human
uggcucacgcccguaaucccagca

SEQ ID NO: 1107922 - RNA, 29 nt, Human
ugggaggcggagcuugcagugacaacggu

SEQ ID NO: 1107923 - RNA, 24 nt, Human
ugggaggcggagcuugcagugagc

SEQ ID NO: 1107924 - RNA, 22 nt, Human
ugguaagaggaaaaauguucug

SEQ ID NO: 1107925 - RNA, 24 nt, Human
ugguggcaggcaccuguaguccca

SEQ ID NO: 1107926 - RNA, 22 nt, Human
ugugcacugcuggugggaauga

SEQ ID NO: 1107927 - RNA, 20 nt, Human
uugcagugagccaagaucac

SEQ ID NO: 1107928 - RNA, 23 nt, Human
uuuagggaauaaugacaagaaaa

SEQ ID NO: 1107929 - RNA, 24 nt, Human
uuugguaaggaguuaauauccaga

SEQ ID NO: 1107930 - RNA, 25 nt, Human
uuuuccguuccgucacuucggugac

SEQ ID NO: 1107931 - RNA, 18 nt, Human
aagacuuuucugugagag

SEQ ID NO: 1107932 - RNA, 20 nt, Human
acuuuucugugagagggaag

SEQ ID NO: 1107933 - RNA, 21 nt, Human
gagaagaagaaauaagcauuu

SEQ ID NO: 1107934 - RNA, 19 nt, Human
uuugggcuuuuuucuuuuu

SEQ ID NO: 1107935 - RNA, 24 nt, Human
aaaguguugggauuacaggcguga

SEQ ID NO: 1107936 - RNA, 21 nt, Human
aaguguugggauuacaggcgu

SEQ ID NO: 1107937 - RNA, 26 nt, Human
aaguguugggauuacaggcgugagcc

SEQ ID NO: 1107938 - RNA, 23 nt, Human
acggaguuucgcuuguugcacag

SEQ ID NO: 1107939 - RNA, 20 nt, Human
acgggguuucuccauguugg

SEQ ID NO: 1107940 - RNA, 21 nt, Human
acgggguuucuccauguuggu

SEQ ID NO: 1107941 - RNA, 20 nt, Human
agccaccgcacccagccuau

SEQ ID NO: 1107942 - RNA, 24 nt, Human
aggagggucugggggacuguggga

SEQ ID NO: 1107943 - RNA, 24 nt, Human
aggugaucugcucgccucggccuc

SEQ ID NO: 1107944 - RNA, 22 nt, Human
aguagagacgggguuucuccau

SEQ ID NO: 1107945 - RNA, 20 nt, Human
aguagcugggauuacaggca

SEQ ID NO: 1107946 - RNA, 23 nt, Human
aguagcugggauuacaggcaugu

SEQ ID NO: 1107947 - RNA, 23 nt, Human
aguagcugggauuacaggcaugu

SEQ ID NO: 1107948 - RNA, 23 nt, Human
agugcaauggugcgaucuuggcu

SEQ ID NO: 1107949 - RNA, 24 nt, Human
agugcaauggugcgaucuuggcuc

SEQ ID NO: 1107950 - RNA, 24 nt, Human
caaaguguugggauuacaggcgug

SEQ ID NO: 1107951 - RNA, 23 nt, Human
caaccuccaccuccuggguucaa

SEQ ID NO: 1107952 - RNA, 22 nt, Human
caagccauucuccugccucagc

SEQ ID NO: 1107953 - RNA, 21 nt, Human
caccgcacccagccuaucuca

SEQ ID NO: 1107954 - RNA, 18 nt, Human
cagcaaccuccaccuccu

SEQ ID NO: 1107955 - RNA, 22 nt, Human
ccaaaguguugggauuacaggc

SEQ ID NO: 1107956 - RNA, 22 nt, Human
ccaaaguguugggauuacaggc

SEQ ID NO: 1107957 - RNA, 24 nt, Human
ccaaaguguugggauuacaggcgu

SEQ ID NO: 1107958 - RNA, 20 nt, Human
ccaccacacccggcuaauuu

SEQ ID NO: 1107959 - RNA, 21 nt, Human
ccauguuggucaugcuggucu

SEQ ID NO: 1107960 - RNA, 22 nt, Human
ccccgccgcucccgcugcgccg

SEQ ID NO: 1107961 - RNA, 24 nt, Human
ccggaccucaggugaucugcucgc

SEQ ID NO: 1107962 - RNA, 19 nt, Human
ccggaguagcugggauuac

SEQ ID NO: 1107963 - RNA, 23 nt, Human
ccggaguagcugggauuacaggc

SEQ ID NO: 1107964 - RNA, 24 nt, Human
ccggaguagcugggauuacaggca

SEQ ID NO: 1107965 - RNA, 19 nt, Human
ccuccaccuccuggguuca

SEQ ID NO: 1107966 - RNA, 24 nt, Human
ccugccucagcuuccggaguagcu

SEQ ID NO: 1107967 - RNA, 23 nt, Human
ccuggguucaagccauucuccug

SEQ ID NO: 1107968 - RNA, 24 nt, Human
cgccucggccucccaaaguguugg

SEQ ID NO: 1107969 - RNA, 22 nt, Human
cgcuucgccccacugcgaucag

SEQ ID NO: 1107970 - RNA, 24 nt, Human
cggaguagcugggauuacaggcau

SEQ ID NO: 1107971 - RNA, 29 nt, Human
cggcuaauuuuguauuuuuaguagagacg

SEQ ID NO: 1107972 - RNA, 19 nt, Human
cgggguuucuccauguugg

SEQ ID NO: 1107973 - RNA, 26 nt, Human
cucacagcaaccuccaccuccugggu

SEQ ID NO: 1107974 - RNA, 23 nt, Human
cucagcuuccggaguagcuggga

SEQ ID NO: 1107975 - RNA, 23 nt, Human
gaccucaggugaucugcucgccu

SEQ ID NO: 1107976 - RNA, 24 nt, Human
gaccucaggugaucugcucgccuc

SEQ ID NO: 1107977 - RNA, 23 nt, Human
gagacgggguuucuccauguugg

SEQ ID NO: 1107978 - RNA, 24 nt, Human
gagacgggguuucuccauguuggu

SEQ ID NO: 1107979 - RNA, 22 nt, Human
gaguagcugggauuacaggcau

SEQ ID NO: 1107980 - RNA, 21 nt, Human
gaucuuggcucacagcaaccu

SEQ ID NO: 1107981 - RNA, 18 nt, Human
gauuacaggcaugugcca

SEQ ID NO: 1107982 - RNA, 18 nt, Human
gauuacaggcgugagcca

SEQ ID NO: 1107983 - RNA, 22 nt, Human
gauuacaggcgugagccaccgc

SEQ ID NO: 1107984 - RNA, 23 nt, Human
gauuacaggcgugagccaccgca

SEQ ID NO: 1107985 - RNA, 22 nt, Human
gcaaccuccaccuccuggguuc

SEQ ID NO: 1107986 - RNA, 23 nt, Human
gcggcuccggccccgcuucgccc

SEQ ID NO: 1107987 - RNA, 30 nt, Human
gcuggagugcaauggugcgaucuuggcucc

SEQ ID NO: 1107988 - RNA, 24 nt, Human
ggaccucaggugaucugcucgccu

SEQ ID NO: 1107989 - RNA, 19 nt, Human
ggauuacaggcaugugcca

SEQ ID NO: 1107990 - RNA, 26 nt, Human
ggcuaauuuuguauuuuuaguagaga

SEQ ID NO: 1107991 - RNA, 21 nt, Human
ggggucuggcgaggcucgggg

SEQ ID NO: 1107992 - RNA, 19 nt, Human
ggguugggggacuguggca

SEQ ID NO: 1107993 - RNA, 23 nt, Human
guagagacgggguuucuccaugu

SEQ ID NO: 1107994 - RNA, 18 nt, Human
guagcugggauuacaggc

SEQ ID NO: 1107995 - RNA, 20 nt, Human
guagcugggauuacaggcau

SEQ ID NO: 1107996 - RNA, 23 nt, Human
uacaggcaugugccaccacaccc

SEQ ID NO: 1107997 - RNA, 24 nt, Human
uacaggcgugagccaccgcaccca

SEQ ID NO: 1107998 - RNA, 24 nt, Human
uaguagagacgggguuucuccaug

SEQ ID NO: 1107999 - RNA, 22 nt, Human
ucaagguuugagggagguggug

SEQ ID NO: 1108000 - RNA, 24 nt, Human
ucacagcaaccuccaccuccuggg

SEQ ID NO: 1108001 - RNA, 27 nt, Human
ucacagcaaccuccaccuccuggguuc

SEQ ID NO: 1108002 - RNA, 24 nt, Human
uccauguuggucaugcuggucuug

SEQ ID NO: 1108003 - RNA, 24 nt, Human
ucccaaaguguugggauuacaggc

SEQ ID NO: 1108004 - RNA, 24 nt, Human
uccggaguagcugggauuacaggc

SEQ ID NO: 1108005 - RNA, 21 nt, Human
uccuggguucaagccauucuc

SEQ ID NO: 1108006 - RNA, 24 nt, Human
uccuggguucaagccauucuccug

SEQ ID NO: 1108007 - RNA, 24 nt, Human
ucgccucggccucccaaaguguug

SEQ ID NO: 1108008 - RNA, 20 nt, Human
ucgcuuguugcacaggcugg

SEQ ID NO: 1108009 - RNA, 21 nt, Human
ucgcuuguugcacaggcugga

SEQ ID NO: 1108010 - RNA, 21 nt, Human
ucgggggcuucguggaguagc

SEQ ID NO: 1108011 - RNA, 18 nt, Human
ucugggggacugugggau

SEQ ID NO: 1108012 - RNA, 20 nt, Human
ucuguggaaguucugguggg

SEQ ID NO: 1108013 - RNA, 24 nt, Human
ugcacaggcuggagugcaauggug

SEQ ID NO: 1108014 - RNA, 24 nt, Human
ugccucagcuuccggaguagcugg

SEQ ID NO: 1108015 - RNA, 19 nt, Human
ugcgccgggcgucugggac

SEQ ID NO: 1108016 - RNA, 20 nt, Human
uggaggguugggggacugug

SEQ ID NO: 1108017 - RNA, 23 nt, Human
uggagugcaauggugcgaucuug

SEQ ID NO: 1108018 - RNA, 24 nt, Human
uggagugcaauggugcgaucuugg

SEQ ID NO: 1108019 - RNA, 18 nt, Human
ugggauuacaggcaugug

SEQ ID NO: 1108020 - RNA, 21 nt, Human
ugggauuacaggcaugugcca

SEQ ID NO: 1108021 - RNA, 22 nt, Human
ugggauuacaggcaugugccac

SEQ ID NO: 1108022 - RNA, 24 nt, Human
ugggauuacaggcaugugccacca

SEQ ID NO: 1108023 - RNA, 18 nt, Human
ugggauuacaggcgugag

SEQ ID NO: 1108024 - RNA, 19 nt, Human
ugggauuacaggcgugagc

SEQ ID NO: 1108025 - RNA, 21 nt, Human
ugggauuacaggcgugagcca

SEQ ID NO: 1108026 - RNA, 22 nt, Human
ugggauuacaggcgugagccac

SEQ ID NO: 1108027 - RNA, 23 nt, Human
ugggauuacaggcgugagccacc

SEQ ID NO: 1108028 - RNA, 24 nt, Human
ugggauuacaggcgugagccaccg

SEQ ID NO: 1108029 - RNA, 21 nt, Human
uggucaugcuggucuugaaau

SEQ ID NO: 1108030 - RNA, 21 nt, Human
uguggaggguugggggacugu

SEQ ID NO: 1108031 - RNA, 18 nt, Human
uuaguagagacgggguuu

SEQ ID NO: 1108032 - RNA, 22 nt, Human
uuaguagagacgggguuucucc

SEQ ID NO: 1108033 - RNA, 24 nt, Human
uuaguagagacgggguuucuccau

SEQ ID NO: 1108034 - RNA, 21 nt, Human
uucaagccauucuccugccuc

SEQ ID NO: 1108035 - RNA, 18 nt, Human
uugcacaggcuggagugc

SEQ ID NO: 1108036 - RNA, 23 nt, Human
uuguauuuuuaguagagacgggg

SEQ ID NO: 1108037 - RNA, 23 nt, Human
uuguugcacaggcuggagugcaa

SEQ ID NO: 1108038 - RNA, 23 nt, Human
uuucgcuuguugcacaggcugga

SEQ ID NO: 1108039 - RNA, 19 nt, Human
uuuuguauuuuuaguagag

SEQ ID NO: 1108040 - RNA, 20 nt, Human
uuuuguauuuuuaguagaga

SEQ ID NO: 1108041 - RNA, 22 nt, Human
uuuuuaguagagacgggguuuc

SEQ ID NO: 1108042 - RNA, 25 nt, Human
uuuuuuuuuuuugagacggaguuuc

SEQ ID NO: 1108043 - RNA, 22 nt, Human
uuuuuuuuuuuuuugagacgga

SEQ ID NO: 1108044 - RNA, 27 nt, Human
uuuuuuuuuuuuuuuuuuuuuuugggg

SEQ ID NO: 1108045 - RNA, 20 nt, Human
aaggagguaugaauuacgac

SEQ ID NO: 1108046 - RNA, 18 nt, Human
cacgcucacagugugugu

SEQ ID NO: 1108047 - RNA, 18 nt, Human
cccagcccucccaaaggc

SEQ ID NO: 1108048 - RNA, 21 nt, Human
ccuccacgauucugggguaag

SEQ ID NO: 1108049 - RNA, 24 nt, Human
cgacugaagcccuuaccacaugcc

SEQ ID NO: 1108050 - RNA, 24 nt, Human
cucucugcuuauguaguuuuugau

SEQ ID NO: 1108051 - RNA, 23 nt, Human
cugggguaagaaccugugucagg

SEQ ID NO: 1108052 - RNA, 21 nt, Human
gaagcccuuaccacaugccuu

SEQ ID NO: 1108053 - RNA, 19 nt, Human
gacugaagcccuuaccaca

SEQ ID NO: 1108054 - RNA, 21 nt, Human
gccucucuccuguguggacuc

SEQ ID NO: 1108055 - RNA, 18 nt, Human
gcuuuccuccacgauucu

SEQ ID NO: 1108056 - RNA, 23 nt, Human
uaacuaaagcacuuuccacacac

SEQ ID NO: 1108057 - RNA, 20 nt, Human
uauagggccucucuccugug

SEQ ID NO: 1108058 - RNA, 22 nt, Human
ucccaaaggcugaguuagccuc

SEQ ID NO: 1108059 - RNA, 24 nt, Human
ucgauggcagcgucccugucuuuu

SEQ ID NO: 1108060 - RNA, 23 nt, Human
ucucugaugggcaaggagguaug

SEQ ID NO: 1108061 - RNA, 22 nt, Human
ucucuuugauguaagugaaaau

SEQ ID NO: 1108062 - RNA, 22 nt, Human
ucugaagagacuugccugcuca

SEQ ID NO: 1108063 - RNA, 22 nt, Human
ucugggguaagaaccuguguca

SEQ ID NO: 1108064 - RNA, 24 nt, Human
ucuuuugcucccccagcccuccca

SEQ ID NO: 1108065 - RNA, 20 nt, Human
ugacugaagucuuuaccaca

SEQ ID NO: 1108066 - RNA, 23 nt, Human
ugacugaagucuuuaccacacuc

SEQ ID NO: 1108067 - RNA, 23 nt, Human
ugaguuagccucuaucaucugga

SEQ ID NO: 1108068 - RNA, 20 nt, Human
ugcacucucugaugggcaag

SEQ ID NO: 1108069 - RNA, 25 nt, Human
ugcuacauaguuuucauuuucagaa

SEQ ID NO: 1108070 - RNA, 19 nt, Human
uggcauuugcuacauaguu

SEQ ID NO: 1108071 - RNA, 21 nt, Human
ugucuuuugcucccccagccc

SEQ ID NO: 1108072 - RNA, 19 nt, Human
uguggcuucuguuuuccuc

SEQ ID NO: 1108073 - RNA, 24 nt, Human
uguguacugugucucaucuauaug

SEQ ID NO: 1108074 - RNA, 23 nt, Human
uguguggacucugagaugaacac

SEQ ID NO: 1108075 - RNA, 22 nt, Human
uugcucccccagcccucccaaa

SEQ ID NO: 1108076 - RNA, 23 nt, Human
uuugcauuuauaugguuuuucuc

SEQ ID NO: 1108077 - RNA, 19 nt, Human
gcccugugucuggguccug

SEQ ID NO: 1108078 - RNA, 21 nt, Human
ugugaaagagucugggugcuu

SEQ ID NO: 1108079 - RNA, 20 nt, Human
aaauaaaaacaaaguuucag

SEQ ID NO: 1108080 - RNA, 24 nt, Human
aucugcucuuuaauguuuuccuau

SEQ ID NO: 1108081 - RNA, 22 nt, Human
caucugcucuuuaauguuuucc

SEQ ID NO: 1108082 - RNA, 21 nt, Human
ucugcucuuuaauguuuuccu

SEQ ID NO: 1108083 - RNA, 24 nt, Human
ugcaucugcucuuuaauguuuucc

SEQ ID NO: 1108084 - RNA, 21 nt, Human
uucagucucuucacaagaagu

SEQ ID NO: 1108085 - RNA, 23 nt, Human
aaaagaaaaacagagucuacaaa

SEQ ID NO: 1108086 - RNA, 20 nt, Human
aaacagagucuacaaaucuu

SEQ ID NO: 1108087 - RNA, 18 nt, Human
aaagugcugggauuacaa

SEQ ID NO: 1108088 - RNA, 18 nt, Human
aaagugcugggauuacaa

SEQ ID NO: 1108089 - RNA, 24 nt, Human
aaagugcugggauuacaaacguga

SEQ ID NO: 1108090 - RNA, 24 nt, Human
aaagugcugggauuacaagcguga

SEQ ID NO: 1108091 - RNA, 21 nt, Human
aacaggcggacaucugucaaa

SEQ ID NO: 1108092 - RNA, 24 nt, Human
aaccugacccuggaagacaguggg

SEQ ID NO: 1108093 - RNA, 19 nt, Human
aacugcugacuuagcauaa

SEQ ID NO: 1108094 - RNA, 21 nt, Human
aagaaaaacagagucuacaaa

SEQ ID NO: 1108095 - RNA, 24 nt, Human
aaguaggugggacuacaggcaugu

SEQ ID NO: 1108096 - RNA, 19 nt, Human
aagugcugggauuacaaac

SEQ ID NO: 1108097 - RNA, 26 nt, Human
aagugcugggauuacaaacgugagcc

SEQ ID NO: 1108098 - RNA, 19 nt, Human
aagugcugggauuacaagc

SEQ ID NO: 1108099 - RNA, 19 nt, Human
aagugcugggauuacaagc

SEQ ID NO: 1108100 - RNA, 26 nt, Human
aagugcugggauuacaagcgugagcc

SEQ ID NO: 1108101 - RNA, 20 nt, Human
aauuuuuccaggaaauggcg

SEQ ID NO: 1108102 - RNA, 18 nt, Human
acaaacgugagccaccgc

SEQ ID NO: 1108103 - RNA, 23 nt, Human
acagcuguuggccuugcagcugu

SEQ ID NO: 1108104 - RNA, 18 nt, Human
acaggcgcccuccaccac

SEQ ID NO: 1108105 - RNA, 24 nt, Human
accaugcuggccaggcuggucucg

SEQ ID NO: 1108106 - RNA, 18 nt, Human
accauguuggccaggcug

SEQ ID NO: 1108107 - RNA, 20 nt, Human
acccaguuaauuuuucuauu

SEQ ID NO: 1108108 - RNA, 24 nt, Human
acccaguuaauuuuucuauuuuua

SEQ ID NO: 1108109 - RNA, 19 nt, Human
acgggguuucaccaugcug

SEQ ID NO: 1108110 - RNA, 20 nt, Human
acgggguuucaccaugcugg

SEQ ID NO: 1108111 - RNA, 24 nt, Human
acgggguuucaccaugcuggccag

SEQ ID NO: 1108112 - RNA, 18 nt, Human
acgguguuucaccauguu

SEQ ID NO: 1108113 - RNA, 24 nt, Human
acgguguuucaccauguuggccag

SEQ ID NO: 1108114 - RNA, 21 nt, Human
acgugagccaccgcgccuggc

SEQ ID NO: 1108115 - RNA, 27 nt, Human
acucuaucgcccaggcuggagugcaau

SEQ ID NO: 1108116 - RNA, 19 nt, Human
acuggagugcaguggcgca

SEQ ID NO: 1108117 - RNA, 21 nt, Human
acuuguggcuuugcacagcug

SEQ ID NO: 1108118 - RNA, 22 nt, Human
agccaccacgcccagccaggaa

SEQ ID NO: 1108119 - RNA, 21 nt, Human
agguucaagugauucaagcca

SEQ ID NO: 1108120 - RNA, 22 nt, Human
aguagagacgggguuucaccau

SEQ ID NO: 1108121 - RNA, 18 nt, Human
aguagcugggauuauagg

SEQ ID NO: 1108122 - RNA, 24 nt, Human
agugcaauggagcaaucucggcuc

SEQ ID NO: 1108123 - RNA, 20 nt, Human
agugcaguggcgcaaucucg

SEQ ID NO: 1108124 - RNA, 24 nt, Human
agugcaguggcgcaaucucggcuc

SEQ ID NO: 1108125 - RNA, 24 nt, Human
agugcugggauuacaaacgugagc

SEQ ID NO: 1108126 - RNA, 24 nt, Human
agugcugggauuacaagcgugagc

SEQ ID NO: 1108127 - RNA, 21 nt, Human
auucuccugccucagccuccc

SEQ ID NO: 1108128 - RNA, 24 nt, Human
auuuuucuauuuuuaguggagacg

SEQ ID NO: 1108129 - RNA, 21 nt, Human
caaaagaaaaacagagucuac

SEQ ID NO: 1108130 - RNA, 23 nt, Human
caaaagaaaaacagagucuacaa

SEQ ID NO: 1108131 - RNA, 22 nt, Human
caaacaauucuccugccucagc

SEQ ID NO: 1108132 - RNA, 27 nt, Human
caaacaauucuccugccucagccuccc

SEQ ID NO: 1108133 - RNA, 24 nt, Human
caaagugcugggauuacaaacgug

SEQ ID NO: 1108134 - RNA, 24 nt, Human
caaagugcugggauuacaagcgug

SEQ ID NO: 1108135 - RNA, 19 nt, Human
caagccauucuugugccuc

SEQ ID NO: 1108136 - RNA, 22 nt, Human
caagcgauccuccugucucagc

SEQ ID NO: 1108137 - RNA, 27 nt, Human
caagcgauccuccugucucagcuuccu

SEQ ID NO: 1108138 - RNA, 24 nt, Human
cacaccaccacaccuggcgaauuu

SEQ ID NO: 1108139 - RNA, 18 nt, Human
cacagcuguuggccuugc

SEQ ID NO: 1108140 - RNA, 21 nt, Human
caccaugcuggccaggcuggu

SEQ ID NO: 1108141 - RNA, 24 nt, Human
caccaugcuggccaggcuggucuc

SEQ ID NO: 1108142 - RNA, 27 nt, Human
caccaugcuggccaggcuggucucgaa

SEQ ID NO: 1108143 - RNA, 21 nt, Human
caccauguuggccaggcuggu

SEQ ID NO: 1108144 - RNA, 24 nt, Human
caccauguuggccaggcuggucuc

SEQ ID NO: 1108145 - RNA, 27 nt, Human
caccauguuggccaggcuggucucaaa

SEQ ID NO: 1108146 - RNA, 24 nt, Human
caccucagcuucccaaagugcugg

SEQ ID NO: 1108147 - RNA, 24 nt, Human
cacucuaucgcccaggcuggagug

SEQ ID NO: 1108148 - RNA, 21 nt, Human
cacugcaaccuccgccuccug

SEQ ID NO: 1108149 - RNA, 23 nt, Human
cacugcaaccuccgccuccuggg

SEQ ID NO: 1108150 - RNA, 18 nt, Human
cagaagcaaaacaaaagc

SEQ ID NO: 1108151 - RNA, 19 nt, Human
cagaagcaaaacaaaagca

SEQ ID NO: 1108152 - RNA, 21 nt, Human
cagaagcaaaacaaaagcagu

SEQ ID NO: 1108153 - RNA, 21 nt, Human
caggcgcccuccaccacaccc

SEQ ID NO: 1108154 - RNA, 24 nt, Human
caugcuggccaggcuggucucgaa

SEQ ID NO: 1108155 - RNA, 24 nt, Human
cauguuggccaggcuggucucaaa

SEQ ID NO: 1108156 - RNA, 21 nt, Human
cauuguaaccucugccuccca

SEQ ID NO: 1108157 - RNA, 22 nt, Human
ccaaagugcugggauuacaaac

SEQ ID NO: 1108158 - RNA, 24 nt, Human
ccaaagugcugggauuacaaacgu

SEQ ID NO: 1108159 - RNA, 22 nt, Human
ccaaagugcugggauuacaagc

SEQ ID NO: 1108160 - RNA, 24 nt, Human
ccaaagugcugggauuacaagcgu

SEQ ID NO: 1108161 - RNA, 21 nt, Human
ccaaccugacccuggaagaca

SEQ ID NO: 1108162 - RNA, 20 nt, Human
ccaccacacccggcuaauuu

SEQ ID NO: 1108163 - RNA, 19 nt, Human
ccaccgcgccuggccuucc

SEQ ID NO: 1108164 - RNA, 24 nt, Human
cccaaguaggugggacuacaggca

SEQ ID NO: 1108165 - RNA, 23 nt, Human
cccaggcuggagugcaauggagc

SEQ ID NO: 1108166 - RNA, 24 nt, Human
ccgccuccuggguucaagcgaucc

SEQ ID NO: 1108167 - RNA, 21 nt, Human
ccucccagguucaagugauuc

SEQ ID NO: 1108168 - RNA, 19 nt, Human
ccuccgccuccuggguuca

SEQ ID NO: 1108169 - RNA, 24 nt, Human
ccuccuggguucaagcgauccucc

SEQ ID NO: 1108170 - RNA, 24 nt, Human
ccuccugucucagcuuccugauua

SEQ ID NO: 1108171 - RNA, 19 nt, Human
ccugaccucaagugauccg

SEQ ID NO: 1108172 - RNA, 24 nt, Human
ccugaccucaagugauccgcccac

SEQ ID NO: 1108173 - RNA, 23 nt, Human
ccugaguagcugggauuauaggc

SEQ ID NO: 1108174 - RNA, 24 nt, Human
ccugaguagcugggauuauaggcg

SEQ ID NO: 1108175 - RNA, 23 nt, Human
ccugauuagcugggauuacaggc

SEQ ID NO: 1108176 - RNA, 23 nt, Human
ccugauuagcugggauuacaggc

SEQ ID NO: 1108177 - RNA, 23 nt, Human
ccugcggauggccaaccugaccc

SEQ ID NO: 1108178 - RNA, 23 nt, Human
ccuggccuuccuugcucuucuug

SEQ ID NO: 1108179 - RNA, 26 nt, Human
ccuggcgaauuuuuuuuuuuuuuuuu

SEQ ID NO: 1108180 - RNA, 20 nt, Human
ccuggguucaagcgauccuc

SEQ ID NO: 1108181 - RNA, 23 nt, Human
ccuggguucaagcgauccuccug

SEQ ID NO: 1108182 - RNA, 27 nt, Human
ccuugcucuucuugcuccaaauccugg

SEQ ID NO: 1108183 - RNA, 24 nt, Human
cgcacaccaccacaccuggcgaau

SEQ ID NO: 1108184 - RNA, 24 nt, Human
cgcccagacuggagugcaguggcg

SEQ ID NO: 1108185 - RNA, 25 nt, Human
cgcccaggcuggagugcaauggagc

SEQ ID NO: 1108186 - RNA, 18 nt, Human
cgcccuccaccacaccca

SEQ ID NO: 1108187 - RNA, 24 nt, Human
cgccuccuggguucaagcgauccu

SEQ ID NO: 1108188 - RNA, 22 nt, Human
cgccugccaggucaaacaauuc

SEQ ID NO: 1108189 - RNA, 19 nt, Human
cgccuuuacuucggagcuc

SEQ ID NO: 1108190 - RNA, 21 nt, Human
cgggcgccuuuacuucggagc

SEQ ID NO: 1108191 - RNA, 24 nt, Human
cgggcgccuuuacuucggagcucc

SEQ ID NO: 1108192 - RNA, 24 nt, Human
cgggguuucaccaugcuggccagg

SEQ ID NO: 1108193 - RNA, 24 nt, Human
cgguguuucaccauguuggccagg

SEQ ID NO: 1108194 - RNA, 22 nt, Human
cuacgccugcggauggccaacc

SEQ ID NO: 1108195 - RNA, 24 nt, Human
cucaagugauccgcccaccucagc

SEQ ID NO: 1108196 - RNA, 20 nt, Human
cucacucuaucgcccaggcc

SEQ ID NO: 1108197 - RNA, 24 nt, Human
cucacugcaaccuccgccuccugg

SEQ ID NO: 1108198 - RNA, 19 nt, Human
cucauuguaaccucugccu

SEQ ID NO: 1108199 - RNA, 25 nt, Human
cucauuguaaccucugccucccagg

SEQ ID NO: 1108200 - RNA, 18 nt, Human
cucccagguucaagugau

SEQ ID NO: 1108201 - RNA, 24 nt, Human
cuccugaccucgugauccgcccgc

SEQ ID NO: 1108202 - RNA, 20 nt, Human
cucugucgcccagacuggag

SEQ ID NO: 1108203 - RNA, 21 nt, Human
cugauuagcugggauuacagg

SEQ ID NO: 1108204 - RNA, 23 nt, Human
cugcaaccuccgccuccuggguu

SEQ ID NO: 1108205 - RNA, 24 nt, Human
cugcaaccuccgccuccuggguuc

SEQ ID NO: 1108206 - RNA, 23 nt, Human
cugcaaccuccgccugccagguc

SEQ ID NO: 1108207 - RNA, 18 nt, Human
cuguuggccuugcagcug

SEQ ID NO: 1108208 - RNA, 23 nt, Human
cuucuugcuccaaauccugggaa

SEQ ID NO: 1108209 - RNA, 20 nt, Human
cuuugcacagcuguuggccu

SEQ ID NO: 1108210 - RNA, 21 nt, Human
cuuuuguauuuuuaguagaga

SEQ ID NO: 1108211 - RNA, 19 nt, Human
gaagcaaaacaaaagcagu

SEQ ID NO: 1108212 - RNA, 18 nt, Human
gaauuuuuuuuuuuuuuu

SEQ ID NO: 1108213 - RNA, 22 nt, Human
gacccuggaagacagugggguu

SEQ ID NO: 1108214 - RNA, 24 nt, Human
gaccucaagugauccgcccaccuc

SEQ ID NO: 1108215 - RNA, 22 nt, Human
gaccucgugauccgcccgccuc

SEQ ID NO: 1108216 - RNA, 22 nt, Human
gaccucgugauccgcccgccuc

SEQ ID NO: 1108217 - RNA, 24 nt, Human
gaccucgugauccgcccgccucgg

SEQ ID NO: 1108218 - RNA, 24 nt, Human
gagacgggguuucaccaugcuggc

SEQ ID NO: 1108219 - RNA, 25 nt, Human
gaguagcugggauuauaggcgcaca

SEQ ID NO: 1108220 - RNA, 18 nt, Human
gauuacaaacgugagcca

SEQ ID NO: 1108221 - RNA, 18 nt, Human
gauuacaagcgugagcca

SEQ ID NO: 1108222 - RNA, 21 nt, Human
gcaaccuccgccugccagguc

SEQ ID NO: 1108223 - RNA, 23 nt, Human
gcacaccaccacaccuggcgaau

SEQ ID NO: 1108224 - RNA, 19 nt, Human
gcccaggcuggagugcaau

SEQ ID NO: 1108225 - RNA, 23 nt, Human
gccucggccucccaaagugcugg

SEQ ID NO: 1108226 - RNA, 21 nt, Human
gcggauggccaaccugacccu

SEQ ID NO: 1108227 - RNA, 25 nt, Human
gcucugucgcccagacuggagugca

SEQ ID NO: 1108228 - RNA, 20 nt, Human
gcucuucuugcuccaaaucc

SEQ ID NO: 1108229 - RNA, 23 nt, Human
gcuggucucaaacuccugaccuc

SEQ ID NO: 1108230 - RNA, 23 nt, Human
gcuggucucgaacuccugaccuc

SEQ ID NO: 1108231 - RNA, 19 nt, Human
ggacuacaggcaugugcca

SEQ ID NO: 1108232 - RNA, 19 nt, Human
ggauuacaagcgugagcca

SEQ ID NO: 1108233 - RNA, 19 nt, Human
ggcuggagugcaauggagc

SEQ ID NO: 1108234 - RNA, 24 nt, Human
ggcuggucucaaacuccugaccuc

SEQ ID NO: 1108235 - RNA, 24 nt, Human
ggcuggucucgaacuccugaccuc

SEQ ID NO: 1108236 - RNA, 18 nt, Human
ggcuuugcacagcuguug

SEQ ID NO: 1108237 - RNA, 23 nt, Human
gggguuucaccaugcuggccagg

SEQ ID NO: 1108238 - RNA, 19 nt, Human
ggucucgaacuccugaccu

SEQ ID NO: 1108239 - RNA, 23 nt, Human
gguguuucaccauguuggccagg

SEQ ID NO: 1108240 - RNA, 18 nt, Human
guagcugggauuauaggc

SEQ ID NO: 1108241 - RNA, 24 nt, Human
gugauccgcccaccucagcuuccc

SEQ ID NO: 1108242 - RNA, 24 nt, Human
gugauccgcccgccucggccuccc

SEQ ID NO: 1108243 - RNA, 22 nt, Human
gugccucugccuccugaguagc

SEQ ID NO: 1108244 - RNA, 23 nt, Human
gugccucugccuccugaguagcu

SEQ ID NO: 1108245 - RNA, 28 nt, Human
uaauuuucuuuuguauuuuuaguagaga

SEQ ID NO: 1108246 - RNA, 23 nt, Human
uaauuuuucuauuuuuaguggag

SEQ ID NO: 1108247 - RNA, 24 nt, Human
uaauuuuucuauuuuuaguggaga

SEQ ID NO: 1108248 - RNA, 22 nt, Human
uacaaacgugagccaccgcgcc

SEQ ID NO: 1108249 - RNA, 24 nt, Human
uacaagcgugagccaccacgccca

SEQ ID NO: 1108250 - RNA, 21 nt, Human
uacagaagcaaaacaaaagca

SEQ ID NO: 1108251 - RNA, 22 nt, Human
uacagaagcaaaacaaaagcag

SEQ ID NO: 1108252 - RNA, 23 nt, Human
uacaggcaugugccaccacaccc

SEQ ID NO: 1108253 - RNA, 22 nt, Human
uaggcaaacuuacagaagcaaa

SEQ ID NO: 1108254 - RNA, 21 nt, Human
uaggcgcacaccaccacaccu

SEQ ID NO: 1108255 - RNA, 24 nt, Human
uaguagagacgggguuucaccaug

SEQ ID NO: 1108256 - RNA, 26 nt, Human
uaguagagacgggguuucaccaugcu

SEQ ID NO: 1108257 - RNA, 24 nt, Human
uaguggagacgguguuucaccaug

SEQ ID NO: 1108258 - RNA, 19 nt, Human
uaucgcccaggcuggagug

SEQ ID NO: 1108259 - RNA, 20 nt, Human
uaucgcccaggcuggagugc

SEQ ID NO: 1108260 - RNA, 24 nt, Human
ucacucuaucgcccaggcuggagu

SEQ ID NO: 1108261 - RNA, 18 nt, Human
ucacugcaaccuccgccu

SEQ ID NO: 1108262 - RNA, 18 nt, Human
ucacugcaaccuccgccu

SEQ ID NO: 1108263 - RNA, 23 nt, Human
ucacugcaaccuccgccuccugg

SEQ ID NO: 1108264 - RNA, 24 nt, Human
ucacugcaaccuccgccuccuggg

SEQ ID NO: 1108265 - RNA, 25 nt, Human
ucacugcaaccuccgccuccugggu

SEQ ID NO: 1108266 - RNA, 27 nt, Human
ucacugcaaccuccgccuccuggguuc

SEQ ID NO: 1108267 - RNA, 19 nt, Human
ucacugcaaccuccgccug

SEQ ID NO: 1108268 - RNA, 24 nt, Human
ucacugcaaccuccgccugccagg

SEQ ID NO: 1108269 - RNA, 27 nt, Human
ucacugcaaccuccgccugccagguca

SEQ ID NO: 1108270 - RNA, 19 nt, Human
ucauuguaaccucugccuc

SEQ ID NO: 1108271 - RNA, 24 nt, Human
ucauuguaaccucugccucccagg

SEQ ID NO: 1108272 - RNA, 25 nt, Human
ucauuguaaccucugccucccaggu

SEQ ID NO: 1108273 - RNA, 18 nt, Human
ucccaaagugcugggauu

SEQ ID NO: 1108274 - RNA, 18 nt, Human
ucccaaagugcugggauu

SEQ ID NO: 1108275 - RNA, 24 nt, Human
ucccaaagugcugggauuacaaac

SEQ ID NO: 1108276 - RNA, 24 nt, Human
ucccaaagugcugggauuacaagc

SEQ ID NO: 1108277 - RNA, 24 nt, Human
ucccaaguaggugggacuacaggc

SEQ ID NO: 1108278 - RNA, 19 nt, Human
ucccagguucaagugauuc

SEQ ID NO: 1108279 - RNA, 22 nt, Human
ucccagguucaagugauucaag

SEQ ID NO: 1108280 - RNA, 21 nt, Human
uccgcccaccucagcuuccca

SEQ ID NO: 1108281 - RNA, 24 nt, Human
uccugaguagcugggauuauaggc

SEQ ID NO: 1108282 - RNA, 24 nt, Human
uccugauuagcugggauuacaggc

SEQ ID NO: 1108283 - RNA, 21 nt, Human
uccuggguucaagcgauccuc

SEQ ID NO: 1108284 - RNA, 24 nt, Human
uccuggguucaagcgauccuccug

SEQ ID NO: 1108285 - RNA, 24 nt, Human
ucgcccagacuggagugcaguggc

SEQ ID NO: 1108286 - RNA, 18 nt, Human
ucgcccaggcuggagugc

SEQ ID NO: 1108287 - RNA, 18 nt, Human
ucggccucccaaagugcu

SEQ ID NO: 1108288 - RNA, 24 nt, Human
ucuaucgcccaggcuggagugcaa

SEQ ID NO: 1108289 - RNA, 22 nt, Human
ucucacucuaucgcccaggcug

SEQ ID NO: 1108290 - RNA, 23 nt, Human
ucucacucuaucgcccaggcugg

SEQ ID NO: 1108291 - RNA, 24 nt, Human
ucucacucuaucgcccaggcugga

SEQ ID NO: 1108292 - RNA, 26 nt, Human
ucucacucuaucgcccaggcuggagu

SEQ ID NO: 1108293 - RNA, 27 nt, Human
ucucacucuaucgcccaggcuggagug

SEQ ID NO: 1108294 - RNA, 19 nt, Human
ucuccugccucagccuccc

SEQ ID NO: 1108295 - RNA, 19 nt, Human
ucucgaacuccugaccucg

SEQ ID NO: 1108296 - RNA, 22 nt, Human
ucucgcucugucgcccagacug

SEQ ID NO: 1108297 - RNA, 24 nt, Human
ucucgcucugucgcccagacugga

SEQ ID NO: 1108298 - RNA, 26 nt, Human
ucucgcucugucgcccagacuggagu

SEQ ID NO: 1108299 - RNA, 27 nt, Human
ucucgcucugucgcccagacuggagug

SEQ ID NO: 1108300 - RNA, 21 nt, Human
ucuucuugcuccaaauccugg

SEQ ID NO: 1108301 - RNA, 21 nt, Human
ucuuuuguauuuuuaguagag

SEQ ID NO: 1108302 - RNA, 23 nt, Human
ucuuuuguauuuuuaguagagac

SEQ ID NO: 1108303 - RNA, 24 nt, Human
ucuuuuguauuuuuaguagagacg

SEQ ID NO: 1108304 - RNA, 18 nt, Human
ugaacaaagacugagugu

SEQ ID NO: 1108305 - RNA, 21 nt, Human
ugaccauugaacaaagacuga

SEQ ID NO: 1108306 - RNA, 18 nt, Human
ugaccucaagugauccgc

SEQ ID NO: 1108307 - RNA, 18 nt, Human
ugagacagagucucgcuc

SEQ ID NO: 1108308 - RNA, 22 nt, Human
ugagacagagucucgcucuguc

SEQ ID NO: 1108309 - RNA, 21 nt, Human
ugagucucacucuaucgccca

SEQ ID NO: 1108310 - RNA, 23 nt, Human
ugauccgcccaccucagcuuccc

SEQ ID NO: 1108311 - RNA, 23 nt, Human
ugcaauggagcaaucucggcuca

SEQ ID NO: 1108312 - RNA, 22 nt, Human
ugcaguggcgcaaucucggcuc

SEQ ID NO: 1108313 - RNA, 23 nt, Human
ugcaguggcgcaaucucggcuca

SEQ ID NO: 1108314 - RNA, 23 nt, Human
ugccaggucaaacaauucuccug

SEQ ID NO: 1108315 - RNA, 24 nt, Human
ugccucagccucccaaguaggugg

SEQ ID NO: 1108316 - RNA, 24 nt, Human
ugccucugccuccugaguagcugg

SEQ ID NO: 1108317 - RNA, 18 nt, Human
ugcuccaaauccugggaa

SEQ ID NO: 1108318 - RNA, 20 nt, Human
ugcugcuggacgagcguccg

SEQ ID NO: 1108319 - RNA, 18 nt, Human
ugcuggccaggcuggucu

SEQ ID NO: 1108320 - RNA, 24 nt, Human
ugcugggauuacaaacgugagcca

SEQ ID NO: 1108321 - RNA, 26 nt, Human
ugcugggauuacaagcgugagccacc

SEQ ID NO: 1108322 - RNA, 23 nt, Human
uggagugcaauggagcaaucucg

SEQ ID NO: 1108323 - RNA, 24 nt, Human
uggagugcaauggagcaaucucgg

SEQ ID NO: 1108324 - RNA, 23 nt, Human
uggagugcaguggcgcaaucucg

SEQ ID NO: 1108325 - RNA, 24 nt, Human
uggagugcaguggcgcaaucucgg

SEQ ID NO: 1108326 - RNA, 23 nt, Human
uggcaaacagucauauuuaaugg

SEQ ID NO: 1108327 - RNA, 24 nt, Human
uggccaggcuggucucaaacuccu

SEQ ID NO: 1108328 - RNA, 24 nt, Human
uggccaggcuggucucgaacuccu

SEQ ID NO: 1108329 - RNA, 24 nt, Human
uggcgaauuuuuuuuuuuuuuuuu

SEQ ID NO: 1108330 - RNA, 18 nt, Human
ugggacuacaggcaugug

SEQ ID NO: 1108331 - RNA, 21 nt, Human
ugggacuacaggcaugugcca

SEQ ID NO: 1108332 - RNA, 22 nt, Human
ugggacuacaggcaugugccac

SEQ ID NO: 1108333 - RNA, 24 nt, Human
ugggacuacaggcaugugccacca

SEQ ID NO: 1108334 - RNA, 21 nt, Human
ugggauuacaaacgugagcca

SEQ ID NO: 1108335 - RNA, 22 nt, Human
ugggauuacaaacgugagccac

SEQ ID NO: 1108336 - RNA, 23 nt, Human
ugggauuacaaacgugagccacc

SEQ ID NO: 1108337 - RNA, 24 nt, Human
ugggauuacaaacgugagccaccg

SEQ ID NO: 1108338 - RNA, 18 nt, Human
ugggauuacaagcgugag

SEQ ID NO: 1108339 - RNA, 19 nt, Human
ugggauuacaagcgugagc

SEQ ID NO: 1108340 - RNA, 22 nt, Human
ugggauuacaagcgugagccac

SEQ ID NO: 1108341 - RNA, 23 nt, Human
ugggauuacaagcgugagccacc

SEQ ID NO: 1108342 - RNA, 24 nt, Human
ugggauuacaagcgugagccacca

SEQ ID NO: 1108343 - RNA, 22 nt, Human
ugggauuacaggcgcccuccac

SEQ ID NO: 1108344 - RNA, 24 nt, Human
ugggauuacaggcgcccuccacca

SEQ ID NO: 1108345 - RNA, 21 nt, Human
ugggauuauaggcgcacacca

SEQ ID NO: 1108346 - RNA, 24 nt, Human
ugggauuauaggcgcacaccacca

SEQ ID NO: 1108347 - RNA, 23 nt, Human
uggguucaagcgauccuccuguc

SEQ ID NO: 1108348 - RNA, 24 nt, Human
uggguucaagcgauccuccugucu

SEQ ID NO: 1108349 - RNA, 23 nt, Human
uguaaccucugccucccagguuc

SEQ ID NO: 1108350 - RNA, 21 nt, Human
uguauuuuuaguagagacggg

SEQ ID NO: 1108351 - RNA, 21 nt, Human
ugucgcccagacuggagugca

SEQ ID NO: 1108352 - RNA, 24 nt, Human
ugucucagcuuccugauuagcugg

SEQ ID NO: 1108353 - RNA, 22 nt, Human
uguggcuuugcacagcuguugg

SEQ ID NO: 1108354 - RNA, 22 nt, Human
uuagauguacaccggcucagug

SEQ ID NO: 1108355 - RNA, 18 nt, Human
uuaguagagacgggguuu

SEQ ID NO: 1108356 - RNA, 22 nt, Human
uuaguagagacgggguuucacc

SEQ ID NO: 1108357 - RNA, 24 nt, Human
uuaguagagacgggguuucaccau

SEQ ID NO: 1108358 - RNA, 24 nt, Human
uuaguggagacgguguuucaccau

SEQ ID NO: 1108359 - RNA, 24 nt, Human
uucaagccauucuugugccucugc

SEQ ID NO: 1108360 - RNA, 24 nt, Human
uuguaaccucugccucccagguuc

SEQ ID NO: 1108361 - RNA, 23 nt, Human
uuguauuuuuaguagagacgggg

SEQ ID NO: 1108362 - RNA, 21 nt, Human
uuucaccaugcuggccaggcu

SEQ ID NO: 1108363 - RNA, 24 nt, Human
uuucaccauguuggccaggcuggu

SEQ ID NO: 1108364 - RNA, 25 nt, Human
uuucuauuuuuaguggagacggugu

SEQ ID NO: 1108365 - RNA, 19 nt, Human
uuugcacagcuguuggccu

SEQ ID NO: 1108366 - RNA, 24 nt, Human
uuuuuaguagagacgggguuucac

SEQ ID NO: 1108367 - RNA, 24 nt, Human
uuuuuaguggagacgguguuucac

SEQ ID NO: 1108368 - RNA, 25 nt, Human
uuuuuuuuuucugagacagagucuc

SEQ ID NO: 1108369 - RNA, 27 nt, Human
uuuuuuuuuuuuugaggcugagucuca

SEQ ID NO: 1108370 - RNA, 18 nt, Human
uuuuuuuuuuuuuuuuug

SEQ ID NO: 1108371 - RNA, 23 nt, Human
uuuuuuuuuuuuuuuuuuugagg

SEQ ID NO: 1108372 - RNA, 18 nt, Human
aggaaagagaaagugacu

SEQ ID NO: 1108373 - RNA, 19 nt, Human
acccgaaagcccagcaccg

SEQ ID NO: 1108374 - RNA, 20 nt, Human
cccgaaagcccagcaccgug

SEQ ID NO: 1108375 - RNA, 22 nt, Human
cuucucaugggagagcuggaga

SEQ ID NO: 1108376 - RNA, 18 nt, Human
gaacccgaaagcccagca

SEQ ID NO: 1108377 - RNA, 19 nt, Human
gugaacccgaaagcccagc

SEQ ID NO: 1108378 - RNA, 21 nt, Human
uauccugugcucuuuauuugg

SEQ ID NO: 1108379 - RNA, 18 nt, Human
ucauauccugugcucuuu

SEQ ID NO: 1108380 - RNA, 18 nt, Human
ucccugaaagcagaagag

SEQ ID NO: 1108381 - RNA, 19 nt, Human
aaaaaagagagagagaaga

SEQ ID NO: 1108382 - RNA, 18 nt, Human
aaguggcucugaggaaac

SEQ ID NO: 1108383 - RNA, 19 nt, Human
acacgguggagucgccagg

SEQ ID NO: 1108384 - RNA, 20 nt, Human
agaaagacccgaacacggug

SEQ ID NO: 1108385 - RNA, 21 nt, Human
aggaaacaggcgccagcgacc

SEQ ID NO: 1108386 - RNA, 22 nt, Human
agguuuuuccacauucuucaca

SEQ ID NO: 1108387 - RNA, 19 nt, Human
aucaaaaaaaaaaaaagag

SEQ ID NO: 1108388 - RNA, 21 nt, Human
auugauaguguuacuuucucc

SEQ ID NO: 1108389 - RNA, 20 nt, Human
caaucgaacgcgaacggcaa

SEQ ID NO: 1108390 - RNA, 23 nt, Human
cacaaaggaaaaaguggcucuga

SEQ ID NO: 1108391 - RNA, 22 nt, Human
cagacaacacaaaggaaaaagu

SEQ ID NO: 1108392 - RNA, 21 nt, Human
cagagugagacucaucaaaaa

SEQ ID NO: 1108393 - RNA, 20 nt, Human
cagucgccaggcuggagugc

SEQ ID NO: 1108394 - RNA, 20 nt, Human
caugaaggcagauuggguuc

SEQ ID NO: 1108395 - RNA, 18 nt, Human
ccacauucuucacaucca

SEQ ID NO: 1108396 - RNA, 22 nt, Human
cgaccagacaacacaaaggaaa

SEQ ID NO: 1108397 - RNA, 24 nt, Human
cgcgaacggcaaaauucuuuuccc

SEQ ID NO: 1108398 - RNA, 18 nt, Human
cggcaaaauucuuuuccc

SEQ ID NO: 1108399 - RNA, 19 nt, Human
cucaucaaaaaaaaaaaaa

SEQ ID NO: 1108400 - RNA, 24 nt, Human
cucgcucagucgccaggcuggagu

SEQ ID NO: 1108401 - RNA, 19 nt, Human
cucugaggaaacaggcgcc

SEQ ID NO: 1108402 - RNA, 21 nt, Human
gaacggcaaaauucuuuuccc

SEQ ID NO: 1108403 - RNA, 20 nt, Human
gagucucgcucagucgccag

SEQ ID NO: 1108404 - RNA, 22 nt, Human
gcaaaauucuuuucccucaaag

SEQ ID NO: 1108405 - RNA, 18 nt, Human
gcaaagguuuuuccacau

SEQ ID NO: 1108406 - RNA, 19 nt, Human
gcuacaggaucuuggggac

SEQ ID NO: 1108407 - RNA, 21 nt, Human
gggcuacaggaucuuggggac

SEQ ID NO: 1108408 - RNA, 20 nt, Human
gucuuuucuucaugaaggca

SEQ ID NO: 1108409 - RNA, 21 nt, Human
guuacuuucuccugugaauuu

SEQ ID NO: 1108410 - RNA, 19 nt, Human
uacaggguuucucuacagu

SEQ ID NO: 1108411 - RNA, 21 nt, Human
uagaaagacccgaacacggug

SEQ ID NO: 1108412 - RNA, 21 nt, Human
uaucuagaaagauucaacugu

SEQ ID NO: 1108413 - RNA, 21 nt, Human
ucaacuguucaggcuuucuca

SEQ ID NO: 1108414 - RNA, 19 nt, Human
ucacauccacagggcuucu

SEQ ID NO: 1108415 - RNA, 23 nt, Human
ucagucgccaggcuggagugcag

SEQ ID NO: 1108416 - RNA, 20 nt, Human
ucaucaaaaaaaaaaaaaga

SEQ ID NO: 1108417 - RNA, 23 nt, Human
ucaucaaaaaaaaaaaaagagag

SEQ ID NO: 1108418 - RNA, 23 nt, Human
ucucgcucagucgccaggcugga

SEQ ID NO: 1108419 - RNA, 19 nt, Human
ucugccucugucuuuucuu

SEQ ID NO: 1108420 - RNA, 19 nt, Human
ugaaggcagauuggguucc

SEQ ID NO: 1108421 - RNA, 19 nt, Human
ugaaggcagauuggguucc

SEQ ID NO: 1108422 - RNA, 23 nt, Human
ugaggaaacagcaaagguuuuuc

SEQ ID NO: 1108423 - RNA, 21 nt, Human
ugcagagugagacucaucaaa

SEQ ID NO: 1108424 - RNA, 21 nt, Human
uggagucgccagguccguggg

SEQ ID NO: 1108425 - RNA, 21 nt, Human
uguacauaucuagaaagauuc

SEQ ID NO: 1108426 - RNA, 24 nt, Human
uuaggcuugaggaaacagcaaagg

SEQ ID NO: 1108427 - RNA, 18 nt, Human
uuccuagaaagacccgaa

SEQ ID NO: 1108428 - RNA, 18 nt, Human
cagagaacgaggcugaag

SEQ ID NO: 1108429 - RNA, 19 nt, Human
cccgacacgccgcgaucca

SEQ ID NO: 1108430 - RNA, 20 nt, Human
cccgacacgccgcgauccac

SEQ ID NO: 1108431 - RNA, 23 nt, Human
cgaauggcagagaugcucuuccu

SEQ ID NO: 1108432 - RNA, 20 nt, Human
cgcgauccacagaucagcuc

SEQ ID NO: 1108433 - RNA, 19 nt, Human
aaccccagcuucaggaauc

SEQ ID NO: 1108434 - RNA, 21 nt, Human
acccagagccccacccccacc

SEQ ID NO: 1108435 - RNA, 23 nt, Human
acccagagccccacccccacccc

SEQ ID NO: 1108436 - RNA, 24 nt, Human
acccagagccccacccccaccccc

SEQ ID NO: 1108437 - RNA, 28 nt, Human
acccccacccccagccugcuuuugccac

SEQ ID NO: 1108438 - RNA, 21 nt, Human
aggaaucuucugacccagagc

SEQ ID NO: 1108439 - RNA, 22 nt, Human
aggcugcacccuggggagggag

SEQ ID NO: 1108440 - RNA, 21 nt, Human
cacccccagccugcuuuugcc

SEQ ID NO: 1108441 - RNA, 21 nt, Human
cacccuggggagggaguccca

SEQ ID NO: 1108442 - RNA, 18 nt, Human
cacugccccccuccaccc

SEQ ID NO: 1108443 - RNA, 21 nt, Human
cagagccccacccccaccccc

SEQ ID NO: 1108444 - RNA, 21 nt, Human
ccaccaccaaccccagcuuca

SEQ ID NO: 1108445 - RNA, 21 nt, Human
ccagggccugaaccuugaggc

SEQ ID NO: 1108446 - RNA, 21 nt, Human
cccagagccccacccccaccc

SEQ ID NO: 1108447 - RNA, 20 nt, Human
ccccacccccacccccagcc

SEQ ID NO: 1108448 - RNA, 24 nt, Human
ccccagccugcuuuugccaccaaa

SEQ ID NO: 1108449 - RNA, 18 nt, Human
ccccccuccacccaccac

SEQ ID NO: 1108450 - RNA, 23 nt, Human
ccccccuccacccaccaccaacc

SEQ ID NO: 1108451 - RNA, 24 nt, Human
ccccccuccacccaccaccaaccc

SEQ ID NO: 1108452 - RNA, 24 nt, Human
cccuccacccaccaccaaccccag

SEQ ID NO: 1108453 - RNA, 19 nt, Human
ccuccacccaccaccaacc

SEQ ID NO: 1108454 - RNA, 20 nt, Human
ccuccugucccauuucugcc

SEQ ID NO: 1108455 - RNA, 23 nt, Human
cuccacccaccaccaaccccagc

SEQ ID NO: 1108456 - RNA, 23 nt, Human
cugcacccuggggagggaguccc

SEQ ID NO: 1108457 - RNA, 18 nt, Human
cugccuaggcugugucgu

SEQ ID NO: 1108458 - RNA, 18 nt, Human
gacccagagccccacccc

SEQ ID NO: 1108459 - RNA, 19 nt, Human
gagccccacccccaccccc

SEQ ID NO: 1108460 - RNA, 26 nt, Human
ggccugaaccuugaggccucgagggc

SEQ ID NO: 1108461 - RNA, 21 nt, Human
gggccugaaccuugaggccuc

SEQ ID NO: 1108462 - RNA, 19 nt, Human
uccacccaccaccaacccc

SEQ ID NO: 1108463 - RNA, 24 nt, Human
uccacccaccaccaaccccagcuu

SEQ ID NO: 1108464 - RNA, 19 nt, Human
ucgagggcucuuuggggcc

SEQ ID NO: 1108465 - RNA, 19 nt, Human
ugacccagagccccacccc

SEQ ID NO: 1108466 - RNA, 20 nt, Human
ugacccagagccccaccccc

SEQ ID NO: 1108467 - RNA, 25 nt, Human
ugacccagagccccacccccacccc

SEQ ID NO: 1108468 - RNA, 21 nt, Human
ugacccagcacugccccccuc

SEQ ID NO: 1108469 - RNA, 23 nt, Human
ugccaccaaaaacugccccaggg

SEQ ID NO: 1108470 - RNA, 24 nt, Human
ugccuaggcugugucguccagcuc

SEQ ID NO: 1108471 - RNA, 20 nt, Human
ugucucaggcugcacccugg

SEQ ID NO: 1108472 - RNA, 23 nt, Human
ugucucaggcugcacccugggga

SEQ ID NO: 1108473 - RNA, 21 nt, Human
uugucucaggcugcacccugg

SEQ ID NO: 1108474 - RNA, 23 nt, Human
aggauccuuucucccaaaccaag

SEQ ID NO: 1108475 - RNA, 22 nt, Human
cccauuuuaggauccuuucucc

SEQ ID NO: 1108476 - RNA, 22 nt, Human
cucuggauguaacacggaccuc

SEQ ID NO: 1108477 - RNA, 21 nt, Human
uaaaaugaaucaacaugggca

SEQ ID NO: 1108478 - RNA, 21 nt, Human
uagagaguagggcuugguguc

SEQ ID NO: 1108479 - RNA, 22 nt, Human
aaagggaccgaaagcccaagac

SEQ ID NO: 1108480 - RNA, 23 nt, Human
aagggaccgaaagcccaagacug

SEQ ID NO: 1108481 - RNA, 22 nt, Human
agaguuccuccugcugacccca

SEQ ID NO: 1108482 - RNA, 25 nt, Human
agaguuccuccugcugaccccacuc

SEQ ID NO: 1108483 - RNA, 26 nt, Human
agggaccgaaagcccaagacugagcu

SEQ ID NO: 1108484 - RNA, 22 nt, Human
gaugggcauuaaaagaaaggga

SEQ ID NO: 1108485 - RNA, 20 nt, Human
gggaagggaaaagugugaca

SEQ ID NO: 1108486 - RNA, 18 nt, Human
gggcauuaaaagaaaggg

SEQ ID NO: 1108487 - RNA, 20 nt, Human
guagaguuccuccugcugac

SEQ ID NO: 1108488 - RNA, 24 nt, Human
ugggcauuaaaagaaagggaccga

SEQ ID NO: 1108489 - RNA, 19 nt, Human
uguagaguuccuccugcug

SEQ ID NO: 1108490 - RNA, 22 nt, Human
aaacugacgccccucuucccug

SEQ ID NO: 1108491 - RNA, 23 nt, Human
aaagacacagacuggcaaagaca

SEQ ID NO: 1108492 - RNA, 19 nt, Human
aacggguggagcaggccca

SEQ ID NO: 1108493 - RNA, 18 nt, Human
aagcaaaggucuaguagc

SEQ ID NO: 1108494 - RNA, 22 nt, Human
aagcauggcgcggggaggaggg

SEQ ID NO: 1108495 - RNA, 25 nt, Human
aaugaaguacaauugcaaauuuagc

SEQ ID NO: 1108496 - RNA, 23 nt, Human
acagcagaaggcaaagacacaga

SEQ ID NO: 1108497 - RNA, 21 nt, Human
acagugccaggacagccccac

SEQ ID NO: 1108498 - RNA, 25 nt, Human
acagugccaggacagccccaccucc

SEQ ID NO: 1108499 - RNA, 20 nt, Human
acccgccucaucuccuggcc

SEQ ID NO: 1108500 - RNA, 21 nt, Human
acugcagagacccccgccccc

SEQ ID NO: 1108501 - RNA, 19 nt, Human
agagggcagugacccggga

SEQ ID NO: 1108502 - RNA, 24 nt, Human
agaggugggcccagauugacgacu

SEQ ID NO: 1108503 - RNA, 21 nt, Human
agaugggagcccaggggcagu

SEQ ID NO: 1108504 - RNA, 22 nt, Human
agccuuggcugggacccugcca

SEQ ID NO: 1108505 - RNA, 19 nt, Human
aggcaggggagaggugggc

SEQ ID NO: 1108506 - RNA, 21 nt, Human
agggaauggggaaaggggagc

SEQ ID NO: 1108507 - RNA, 18 nt, Human
agggcagggcuugagcug

SEQ ID NO: 1108508 - RNA, 21 nt, Human
agggggugcggccuggggggu

SEQ ID NO: 1108509 - RNA, 22 nt, Human
auugcaaauuuagccucugacu

SEQ ID NO: 1108510 - RNA, 23 nt, Human
caaaaaccagcagcgccuugcaa

SEQ ID NO: 1108511 - RNA, 23 nt, Human
caaagacacagacuggcaaagac

SEQ ID NO: 1108512 - RNA, 21 nt, Human
caaaggucuaguagccugaaa

SEQ ID NO: 1108513 - RNA, 24 nt, Human
caagcccacgccaccccaagcauc

SEQ ID NO: 1108514 - RNA, 18 nt, Human
caccccagagggcagggc

SEQ ID NO: 1108515 - RNA, 24 nt, Human
cagaaggcaaagacacagacuggc

SEQ ID NO: 1108516 - RNA, 23 nt, Human
cagacgccuuccgcggaugcccc

SEQ ID NO: 1108517 - RNA, 23 nt, Human
cagcgucucugguuacgccuccc

SEQ ID NO: 1108518 - RNA, 18 nt, Human
cagcuccugggucuuccc

SEQ ID NO: 1108519 - RNA, 18 nt, Human
cagcuggaaucaaccgau

SEQ ID NO: 1108520 - RNA, 19 nt, Human
caggugggcagucucaggc

SEQ ID NO: 1108521 - RNA, 24 nt, Human
cauccacucaggugggcagucuca

SEQ ID NO: 1108522 - RNA, 20 nt, Human
caucgcacagugccaggaca

SEQ ID NO: 1108523 - RNA, 23 nt, Human
caucgcacagugccaggacagcc

SEQ ID NO: 1108524 - RNA, 28 nt, Human
ccacuaaucccagcgucucugguuacgc

SEQ ID NO: 1108525 - RNA, 24 nt, Human
ccagcgucucugguuacgccuccc

SEQ ID NO: 1108526 - RNA, 20 nt, Human
ccaggacucuucugaaacgu

SEQ ID NO: 1108527 - RNA, 18 nt, Human
cccaagcaucccaggacu

SEQ ID NO: 1108528 - RNA, 24 nt, Human
cccacagacacauugacucaggcc

SEQ ID NO: 1108529 - RNA, 25 nt, Human
cccacagacacauugacucaggccc

SEQ ID NO: 1108530 - RNA, 19 nt, Human
cccacgccaccccaagcau

SEQ ID NO: 1108531 - RNA, 22 nt, Human
cccaggacuccgggcuaccaga

SEQ ID NO: 1108532 - RNA, 23 nt, Human
cccaggacucuucugaaacgugg

SEQ ID NO: 1108533 - RNA, 18 nt, Human
ccccagcaucccggcggc

SEQ ID NO: 1108534 - RNA, 19 nt, Human
cccccgcccccgaccccgc

SEQ ID NO: 1108535 - RNA, 22 nt, Human
ccccgccaccccagagggcagg

SEQ ID NO: 1108536 - RNA, 19 nt, Human
ccccucuucccugcuuccu

SEQ ID NO: 1108537 - RNA, 24 nt, Human
ccccugggugagucuggguuuccg

SEQ ID NO: 1108538 - RNA, 20 nt, Human
cccgcccccgaccccgcuua

SEQ ID NO: 1108539 - RNA, 22 nt, Human
cccggcggcgcaggcgcagagg

SEQ ID NO: 1108540 - RNA, 24 nt, Human
cccucuucccugcuuccuuccucc

SEQ ID NO: 1108541 - RNA, 25 nt, Human
ccggcagauggguacacccccuucu

SEQ ID NO: 1108542 - RNA, 21 nt, Human
ccggggugggguuggacaggc

SEQ ID NO: 1108543 - RNA, 23 nt, Human
ccucccagcuccugggucuuccc

SEQ ID NO: 1108544 - RNA, 18 nt, Human
ccucccggcuucucuccc

SEQ ID NO: 1108545 - RNA, 19 nt, Human
ccucgccccuggcagcugg

SEQ ID NO: 1108546 - RNA, 24 nt, Human
ccucuagacugaagagaugggagc

SEQ ID NO: 1108547 - RNA, 22 nt, Human
cgagccagagaaaacugacgcc

SEQ ID NO: 1108548 - RNA, 22 nt, Human
cgccccuggcagcuggagacgc

SEQ ID NO: 1108549 - RNA, 18 nt, Human
cgcggaguggaccccggc

SEQ ID NO: 1108550 - RNA, 25 nt, Human
cggcaguacucccgugccucccagc

SEQ ID NO: 1108551 - RNA, 24 nt, Human
cggccuggggggugggguggucag

SEQ ID NO: 1108552 - RNA, 21 nt, Human
cggggacccgccucaucuccu

SEQ ID NO: 1108553 - RNA, 19 nt, Human
cuaggucuguaggugcugg

SEQ ID NO: 1108554 - RNA, 23 nt, Human
cucaggcccugcucccacugcug

SEQ ID NO: 1108555 - RNA, 18 nt, Human
cuccccagcaucccggcc

SEQ ID NO: 1108556 - RNA, 25 nt, Human
cucggccugcagccuucucugcugc

SEQ ID NO: 1108557 - RNA, 18 nt, Human
cucugugccauagagccc

SEQ ID NO: 1108558 - RNA, 21 nt, Human
cugcaggcugcugacaguggg

SEQ ID NO: 1108559 - RNA, 19 nt, Human
cuggaaucaaccgauggag

SEQ ID NO: 1108560 - RNA, 23 nt, Human
cuggaccuacagcagaaggcaaa

SEQ ID NO: 1108561 - RNA, 22 nt, Human
cuucccccgccaccccagaggg

SEQ ID NO: 1108562 - RNA, 23 nt, Human
cuucccugcuuccuuccuccagg

SEQ ID NO: 1108563 - RNA, 25 nt, Human
cuucccugcuuccuuccuccaggga

SEQ ID NO: 1108564 - RNA, 19 nt, Human
gacacauugacucaggccc

SEQ ID NO: 1108565 - RNA, 19 nt, Human
gacgccccucuucccugcu

SEQ ID NO: 1108566 - RNA, 18 nt, Human
gacuugcacggguuccuu

SEQ ID NO: 1108567 - RNA, 19 nt, Human
gagggcagggcuugagcug

SEQ ID NO: 1108568 - RNA, 20 nt, Human
gcaggcugcugacagugggu

SEQ ID NO: 1108569 - RNA, 19 nt, Human
gcagggcuugaggcagggg

SEQ ID NO: 1108570 - RNA, 18 nt, Human
gccaccccaagcauccca

SEQ ID NO: 1108571 - RNA, 21 nt, Human
gccccucuagccucgccccug

SEQ ID NO: 1108572 - RNA, 24 nt, Human
gccccuggcagcuggagacgcuuc

SEQ ID NO: 1108573 - RNA, 18 nt, Human
gcccugcucccacugcug

SEQ ID NO: 1108574 - RNA, 23 nt, Human
gcccuggacugcagagacccccg

SEQ ID NO: 1108575 - RNA, 18 nt, Human
gccuuccgcggaugcccc

SEQ ID NO: 1108576 - RNA, 22 nt, Human
gcgccuugcaagcccacgccac

SEQ ID NO: 1108577 - RNA, 20 nt, Human
gcggccucagucggccuucc

SEQ ID NO: 1108578 - RNA, 18 nt, Human
gcucccacugcugugcuc

SEQ ID NO: 1108579 - RNA, 21 nt, Human
gcugggacccugccacaucca

SEQ ID NO: 1108580 - RNA, 21 nt, Human
gcuugagcugggggcagggcu

SEQ ID NO: 1108581 - RNA, 21 nt, Human
ggaggggugggagggucggga

SEQ ID NO: 1108582 - RNA, 23 nt, Human
ggagguugggagccacuuucagg

SEQ ID NO: 1108583 - RNA, 25 nt, Human
ggaguagggggugcggccugggggg

SEQ ID NO: 1108584 - RNA, 18 nt, Human
ggcaggcuugcgucggga

SEQ ID NO: 1108585 - RNA, 19 nt, Human
ggccuacaucgcacagugc

SEQ ID NO: 1108586 - RNA, 19 nt, Human
ggccugggggguggggugg

SEQ ID NO: 1108587 - RNA, 20 nt, Human
ggcgcggggaggaggggugg

SEQ ID NO: 1108588 - RNA, 21 nt, Human
ggcggccucagucggccuucc

SEQ ID NO: 1108589 - RNA, 21 nt, Human
ggcggggagacugggugggga

SEQ ID NO: 1108590 - RNA, 23 nt, Human
ggcuugaggcaggggagaggugg

SEQ ID NO: 1108591 - RNA, 22 nt, Human
gggagggucgggagggacugcg

SEQ ID NO: 1108592 - RNA, 24 nt, Human
gggaggguguugaauaaaagggaa

SEQ ID NO: 1108593 - RNA, 21 nt, Human
gggcagggcuugagcuggggg

SEQ ID NO: 1108594 - RNA, 21 nt, Human
gggcagggcuugaggcagggg

SEQ ID NO: 1108595 - RNA, 22 nt, Human
gggcagggcuugaggcagggga

SEQ ID NO: 1108596 - RNA, 21 nt, Human
ggggaggaggggugggagggu

SEQ ID NO: 1108597 - RNA, 20 nt, Human
ggggcggggagacugggugg

SEQ ID NO: 1108598 - RNA, 20 nt, Human
ggggggugggguggucaggc

SEQ ID NO: 1108599 - RNA, 22 nt, Human
ggggugggagggucgggaggga

SEQ ID NO: 1108600 - RNA, 18 nt, Human
gggguuggacaggcgggc

SEQ ID NO: 1108601 - RNA, 20 nt, Human
ggugggagggucgggaggga

SEQ ID NO: 1108602 - RNA, 20 nt, Human
guagacaucacacacaugca

SEQ ID NO: 1108603 - RNA, 24 nt, Human
gucccgcagcgccccucuagccuc

SEQ ID NO: 1108604 - RNA, 21 nt, Human
gugcccacucccggaccccac

SEQ ID NO: 1108605 - RNA, 22 nt, Human
guggaccccggcugcggccccu

SEQ ID NO: 1108606 - RNA, 21 nt, Human
uaaauccccggcaaaaaccag

SEQ ID NO: 1108607 - RNA, 19 nt, Human
uacgcguaggcgaagggag

SEQ ID NO: 1108608 - RNA, 24 nt, Human
uacucccgugccucccagcuccug

SEQ ID NO: 1108609 - RNA, 19 nt, Human
uacuuccugucuugccuua

SEQ ID NO: 1108610 - RNA, 18 nt, Human
uagagcccccauaacuuc

SEQ ID NO: 1108611 - RNA, 23 nt, Human
uagccucugacuugcaccauccu

SEQ ID NO: 1108612 - RNA, 25 nt, Human
uaggcccuggacugcagagaccccc

SEQ ID NO: 1108613 - RNA, 19 nt, Human
uaggugcccacucccggac

SEQ ID NO: 1108614 - RNA, 19 nt, Human
uauccagguucagggguca

SEQ ID NO: 1108615 - RNA, 20 nt, Human
ucacacacaugcauccacuc

SEQ ID NO: 1108616 - RNA, 19 nt, Human
ucagcccuggcucuagguc

SEQ ID NO: 1108617 - RNA, 22 nt, Human
ucaggugggcagucucaggccc

SEQ ID NO: 1108618 - RNA, 22 nt, Human
ucccaggacuccgggcuaccag

SEQ ID NO: 1108619 - RNA, 21 nt, Human
uccccagcaucccggcggcgc

SEQ ID NO: 1108620 - RNA, 27 nt, Human
ucccggaccccacgguuugcgggcccc

SEQ ID NO: 1108621 - RNA, 22 nt, Human
ucccggagucccagugaugcuc

SEQ ID NO: 1108622 - RNA, 22 nt, Human
ucuagacugaagagaugggagc

SEQ ID NO: 1108623 - RNA, 19 nt, Human
ucuaguagccugaaaaaac

SEQ ID NO: 1108624 - RNA, 20 nt, Human
ucugcugcugcggaagguuc

SEQ ID NO: 1108625 - RNA, 19 nt, Human
ugaaaaaacuuggagaaaa

SEQ ID NO: 1108626 - RNA, 19 nt, Human
ugaagagaugggagcccag

SEQ ID NO: 1108627 - RNA, 20 nt, Human
ugacaguggguaccaggucg

SEQ ID NO: 1108628 - RNA, 22 nt, Human
ugacccgggaggaagucaccag

SEQ ID NO: 1108629 - RNA, 19 nt, Human
ugacucaggcccuuggaac

SEQ ID NO: 1108630 - RNA, 24 nt, Human
ugacuugcaccauccuguauccag

SEQ ID NO: 1108631 - RNA, 19 nt, Human
ugagcugggggcagggcuu

SEQ ID NO: 1108632 - RNA, 22 nt, Human
ugaggcaggggagaggugggcc

SEQ ID NO: 1108633 - RNA, 24 nt, Human
ugaggcaggggagaggugggcccc

SEQ ID NO: 1108634 - RNA, 21 nt, Human
ugcaagcaaacuguggaacaa

SEQ ID NO: 1108635 - RNA, 21 nt, Human
ugccauagagcccccauaacu

SEQ ID NO: 1108636 - RNA, 25 nt, Human
ugccauagagcccccauaacuucac

SEQ ID NO: 1108637 - RNA, 22 nt, Human
ugcccacucccggaccccacgg

SEQ ID NO: 1108638 - RNA, 21 nt, Human
ugcccuguggggaccugccug

SEQ ID NO: 1108639 - RNA, 19 nt, Human
ugccugcaggcugcugaca

SEQ ID NO: 1108640 - RNA, 19 nt, Human
ugcuccaucccuuaguccc

SEQ ID NO: 1108641 - RNA, 26 nt, Human
uggacagcauagauauugguuaaaga

SEQ ID NO: 1108642 - RNA, 22 nt, Human
uggcaaagacacagcuuguauc

SEQ ID NO: 1108643 - RNA, 21 nt, Human
uggcagcuggagacgcuuccc

SEQ ID NO: 1108644 - RNA, 21 nt, Human
uggcuggaggggagggcggac

SEQ ID NO: 1108645 - RNA, 21 nt, Human
ugggaagcgaugcagauaugg

SEQ ID NO: 1108646 - RNA, 25 nt, Human
ugggagcccaggggcagugcaccga

SEQ ID NO: 1108647 - RNA, 21 nt, Human
ugggcagucucaggcccugcu

SEQ ID NO: 1108648 - RNA, 18 nt, Human
ugggggcggggagacugg

SEQ ID NO: 1108649 - RNA, 19 nt, Human
ugggguggucaggcuugau

SEQ ID NO: 1108650 - RNA, 22 nt, Human
uggguacacccccuuuucccca

SEQ ID NO: 1108651 - RNA, 23 nt, Human
ugugcaagcaaacuguggaacaa

SEQ ID NO: 1108652 - RNA, 20 nt, Human
ugugucguuuucauuuuuaa

SEQ ID NO: 1108653 - RNA, 22 nt, Human
uuaaggcgcggccacacucagc

SEQ ID NO: 1108654 - RNA, 21 nt, Human
uuagccucgcagggguguccc

SEQ ID NO: 1108655 - RNA, 21 nt, Human
uucccugcuuccuuccuccag

SEQ ID NO: 1108656 - RNA, 22 nt, Human
aauaaccuuuguaucucucuca

SEQ ID NO: 1108657 - RNA, 25 nt, Human
accuuuuucccucagcuucucacug

SEQ ID NO: 1108658 - RNA, 22 nt, Human
agaggaaggagcagcagcaggg

SEQ ID NO: 1108659 - RNA, 23 nt, Human
agaggaaggagcagcagcagggu

SEQ ID NO: 1108660 - RNA, 18 nt, Human
agcagggugggacugggg

SEQ ID NO: 1108661 - RNA, 22 nt, Human
aggcgcuccugagcacagucca

SEQ ID NO: 1108662 - RNA, 21 nt, Human
agggagaaaagcgccgcggug

SEQ ID NO: 1108663 - RNA, 21 nt, Human
aguagcagaauuaaaaccaga

SEQ ID NO: 1108664 - RNA, 19 nt, Human
auaaauaucagccagugcu

SEQ ID NO: 1108665 - RNA, 21 nt, Human
augcaccaguaguagcagaau

SEQ ID NO: 1108666 - RNA, 18 nt, Human
caccaguaguagcagaau

SEQ ID NO: 1108667 - RNA, 25 nt, Human
caccaguaguagcagaauuaaaacc

SEQ ID NO: 1108668 - RNA, 22 nt, Human
cacuccgguuccuccuuccucc

SEQ ID NO: 1108669 - RNA, 26 nt, Human
cacuccgguuccuccuuccuccacuc

SEQ ID NO: 1108670 - RNA, 22 nt, Human
cagaauuaaaaccagaagcaac

SEQ ID NO: 1108671 - RNA, 19 nt, Human
cagacuaccacucagcuaa

SEQ ID NO: 1108672 - RNA, 18 nt, Human
cagcagcagggugggacu

SEQ ID NO: 1108673 - RNA, 20 nt, Human
cagcagcagggugggacugg

SEQ ID NO: 1108674 - RNA, 23 nt, Human
cagcagcagggugggacuggggc

SEQ ID NO: 1108675 - RNA, 19 nt, Human
cagcucagcucguuccucu

SEQ ID NO: 1108676 - RNA, 24 nt, Human
cagcucguuccucugugcauccca

SEQ ID NO: 1108677 - RNA, 18 nt, Human
cagggugggacuggggca

SEQ ID NO: 1108678 - RNA, 22 nt, Human
caucaguacccaguuccccaaa

SEQ ID NO: 1108679 - RNA, 22 nt, Human
caugcaccaguaguagcagaau

SEQ ID NO: 1108680 - RNA, 18 nt, Human
ccucugccuguucccagg

SEQ ID NO: 1108681 - RNA, 18 nt, Human
ccucugccuguucccagg

SEQ ID NO: 1108682 - RNA, 20 nt, Human
cgauauaaauaucagccagu

SEQ ID NO: 1108683 - RNA, 22 nt, Human
cugcagaaccuggaucuugcgc

SEQ ID NO: 1108684 - RNA, 18 nt, Human
cugcaucaucugccuggu

SEQ ID NO: 1108685 - RNA, 22 nt, Human
gaaaagcgccgcgguggcaccg

SEQ ID NO: 1108686 - RNA, 18 nt, Human
gacuccucucugguuuag

SEQ ID NO: 1108687 - RNA, 19 nt, Human
gagcagcagcaggguggga

SEQ ID NO: 1108688 - RNA, 25 nt, Human
gaguuccaucuucuuccuccucugg

SEQ ID NO: 1108689 - RNA, 24 nt, Human
gcaguggccaggcgcuccugagca

SEQ ID NO: 1108690 - RNA, 19 nt, Human
gccaugcugcccacccagc

SEQ ID NO: 1108691 - RNA, 28 nt, Human
ggagcagcagcagggugggacuggggca

SEQ ID NO: 1108692 - RNA, 24 nt, Human
ggaggugcucagcucacuccucug

SEQ ID NO: 1108693 - RNA, 21 nt, Human
gggcaggcuggccucaggcag

SEQ ID NO: 1108694 - RNA, 18 nt, Human
ggucagcuucgggcaggc

SEQ ID NO: 1108695 - RNA, 18 nt, Human
gguuccuccuuccuccac

SEQ ID NO: 1108696 - RNA, 23 nt, Human
uacccaguuccccaaaagucugu

SEQ ID NO: 1108697 - RNA, 23 nt, Human
uaguaaaaucuuguucauaaaag

SEQ ID NO: 1108698 - RNA, 24 nt, Human
uagugaugucuucuaguaaaaucu

SEQ ID NO: 1108699 - RNA, 20 nt, Human
ucaaccagcuggauccuacc

SEQ ID NO: 1108700 - RNA, 24 nt, Human
ucaauaaccuuuguaucucucuca

SEQ ID NO: 1108701 - RNA, 18 nt, Human
ucacacuccgguuccucc

SEQ ID NO: 1108702 - RNA, 19 nt, Human
ucacuggaggugcucagcu

SEQ ID NO: 1108703 - RNA, 23 nt, Human
ucagcagcuuuucccgcuucuuc

SEQ ID NO: 1108704 - RNA, 24 nt, Human
ucagcagcuuuucccgcuucuucc

SEQ ID NO: 1108705 - RNA, 19 nt, Human
ucccaggcccaccuuuuuc

SEQ ID NO: 1108706 - RNA, 20 nt, Human
ucccucagcuucucacugga

SEQ ID NO: 1108707 - RNA, 18 nt, Human
uccgguuccuccuuccuc

SEQ ID NO: 1108708 - RNA, 24 nt, Human
ucuucauacuucccaucugccuca

SEQ ID NO: 1108709 - RNA, 19 nt, Human
ugaguuggauuuccuggag

SEQ ID NO: 1108710 - RNA, 22 nt, Human
ugaugucuucuaguaaaaucuu

SEQ ID NO: 1108711 - RNA, 18 nt, Human
ugccucaucugcaaugug

SEQ ID NO: 1108712 - RNA, 23 nt, Human
ugccucgaugguggugaucccag

SEQ ID NO: 1108713 - RNA, 21 nt, Human
ugguggugaucccagccaugc

SEQ ID NO: 1108714 - RNA, 23 nt, Human
uuaaaaccagaagcaacuccugu

SEQ ID NO: 1108715 - RNA, 24 nt, Human
uucagccucugccuguucccaggc

SEQ ID NO: 1108716 - RNA, 22 nt, Human
uuucccgcuucuuccagcuuuu

SEQ ID NO: 1108717 - RNA, 19 nt, Human
aaccuggcccagggagcga

SEQ ID NO: 1108718 - RNA, 21 nt, Human
acaacgggaagaccaccggaa

SEQ ID NO: 1108719 - RNA, 21 nt, Human
accccaaaguuuaggucucca

SEQ ID NO: 1108720 - RNA, 23 nt, Human
agccaaacucccugcucuaaacc

SEQ ID NO: 1108721 - RNA, 25 nt, Human
agccaaacucccugcucuaaaccug

SEQ ID NO: 1108722 - RNA, 21 nt, Human
agucugggggaggggggcuga

SEQ ID NO: 1108723 - RNA, 24 nt, Human
caaacucccugcucuaaaccuggc

SEQ ID NO: 1108724 - RNA, 19 nt, Human
caaaguuuaggucuccacc

SEQ ID NO: 1108725 - RNA, 20 nt, Human
cacaacgggaagaccaccgg

SEQ ID NO: 1108726 - RNA, 20 nt, Human
cacagccccugccuccaagg

SEQ ID NO: 1108727 - RNA, 19 nt, Human
cagcaccagccaaacuccc

SEQ ID NO: 1108728 - RNA, 19 nt, Human
caggcccagcaccagccaa

SEQ ID NO: 1108729 - RNA, 24 nt, Human
caggcccagcaccagccaaacucc

SEQ ID NO: 1108730 - RNA, 19 nt, Human
ccaaacucccugcucuaaa

SEQ ID NO: 1108731 - RNA, 20 nt, Human
ccacagccccugccuccaag

SEQ ID NO: 1108732 - RNA, 25 nt, Human
cccagcaccagccaaacucccugcu

SEQ ID NO: 1108733 - RNA, 22 nt, Human
ccccaaaguuuaggucuccacc

SEQ ID NO: 1108734 - RNA, 20 nt, Human
cccugcucuaaaccuggccc

SEQ ID NO: 1108735 - RNA, 21 nt, Human
ccuccaagggucuguuagucu

SEQ ID NO: 1108736 - RNA, 20 nt, Human
cggcccccuggcucaggccc

SEQ ID NO: 1108737 - RNA, 27 nt, Human
cucccugcucuaaaccuggcccaggga

SEQ ID NO: 1108738 - RNA, 22 nt, Human
gagcgauggccggggguguggg

SEQ ID NO: 1108739 - RNA, 22 nt, Human
gccccugccuccaagggucugu

SEQ ID NO: 1108740 - RNA, 19 nt, Human
gcucaggcccagcaccagc

SEQ ID NO: 1108741 - RNA, 20 nt, Human
gcucuaaaccuggcccaggg

SEQ ID NO: 1108742 - RNA, 21 nt, Human
ggcccccuggcucaggcccag

SEQ ID NO: 1108743 - RNA, 20 nt, Human
ggcuugggucugggcacugg

SEQ ID NO: 1108744 - RNA, 19 nt, Human
ggggcugaaggcagcugga

SEQ ID NO: 1108745 - RNA, 22 nt, Human
gggggaggggggcugaaggcag

SEQ ID NO: 1108746 - RNA, 19 nt, Human
guggggggcuugggucugg

SEQ ID NO: 1108747 - RNA, 20 nt, Human
uccacagccccugccuccaa

SEQ ID NO: 1108748 - RNA, 21 nt, Human
ucugggggaggggggcugaag

SEQ ID NO: 1108749 - RNA, 18 nt, Human
ugcucccacaacgggaag

SEQ ID NO: 1108750 - RNA, 25 nt, Human
ugucccggcccccuggcucaggccc

SEQ ID NO: 1108751 - RNA, 21 nt, Human
aaagaaccuggcuccgggggc

SEQ ID NO: 1108752 - RNA, 23 nt, Human
aggcacaguggaaagaaccuggc

SEQ ID NO: 1108753 - RNA, 23 nt, Human
ccgacucugggccucugggcgcg

SEQ ID NO: 1108754 - RNA, 20 nt, Human
ccgcugcgcccgccgccgcc

SEQ ID NO: 1108755 - RNA, 24 nt, Human
ccgcugcgcccgccgccgccgccg

SEQ ID NO: 1108756 - RNA, 20 nt, Human
ccuggcuccgggggcucagg

SEQ ID NO: 1108757 - RNA, 22 nt, Human
cgacucugggccucugggcgcg

SEQ ID NO: 1108758 - RNA, 19 nt, Human
cggaaggcagcagggcaca

SEQ ID NO: 1108759 - RNA, 22 nt, Human
cuccgggggcucagggaccagc

SEQ ID NO: 1108760 - RNA, 22 nt, Human
cugcaggcaaaaggcuucccca

SEQ ID NO: 1108761 - RNA, 20 nt, Human
cugcgcccgccgccgccgcc

SEQ ID NO: 1108762 - RNA, 20 nt, Human
gcgcagaaccugcaggcaaa

SEQ ID NO: 1108763 - RNA, 23 nt, Human
ugaggagcggcggaagggcuugg

SEQ ID NO: 1108764 - RNA, 24 nt, Human
uggcuccgggggcucagggaccag

SEQ ID NO: 1108765 - RNA, 19 nt, Human
ugggccucugggcgcgcag

SEQ ID NO: 1108766 - RNA, 22 nt, Human
ugggugaagcccuugccgcaga

SEQ ID NO: 1108767 - RNA, 26 nt, Human
aaaaagaacaggaaagcagacaugac

SEQ ID NO: 1108768 - RNA, 21 nt, Human
aaaaaugaaacgggaguggga

SEQ ID NO: 1108769 - RNA, 18 nt, Human
aaaagaacaggaaagcag

SEQ ID NO: 1108770 - RNA, 29 nt, Human
aaaagaacaggaaagcagacagugggcac

SEQ ID NO: 1108771 - RNA, 24 nt, Human
aaagcaagaggaucacuugaagcc

SEQ ID NO: 1108772 - RNA, 25 nt, Human
aaagcaagaggaucacuugaagcca

SEQ ID NO: 1108773 - RNA, 21 nt, Human
aacauggugaagcccugucuc

SEQ ID NO: 1108774 - RNA, 18 nt, Human
aaccaagaaaaagaacag

SEQ ID NO: 1108775 - RNA, 19 nt, Human
aacccccuucuucugcucu

SEQ ID NO: 1108776 - RNA, 23 nt, Human
aagaauugcuugaacccgggaag

SEQ ID NO: 1108777 - RNA, 24 nt, Human
aagcaagaggaucacuugaagcca

SEQ ID NO: 1108778 - RNA, 20 nt, Human
aagcagacaugacaauagau

SEQ ID NO: 1108779 - RNA, 21 nt, Human
aagccaggaguuugagaccag

SEQ ID NO: 1108780 - RNA, 23 nt, Human
aagccagucaugauggcuugugc

SEQ ID NO: 1108781 - RNA, 20 nt, Human
aaggucaggaguuugagacc

SEQ ID NO: 1108782 - RNA, 24 nt, Human
aaucacuugaaccugggaggugga

SEQ ID NO: 1108783 - RNA, 18 nt, Human
aauugcuugaacccggga

SEQ ID NO: 1108784 - RNA, 20 nt, Human
acaaccaagaaaaagaacag

SEQ ID NO: 1108785 - RNA, 24 nt, Human
acagagcgagacuccaucucaaaa

SEQ ID NO: 1108786 - RNA, 20 nt, Human
acagaggaagacuccgucuc

SEQ ID NO: 1108787 - RNA, 23 nt, Human
acagaggaagacuccgucucaaa

SEQ ID NO: 1108788 - RNA, 24 nt, Human
acagaggaagacuccgucucaaaa

SEQ ID NO: 1108789 - RNA, 22 nt, Human
accugcuuugucccaaaccccc

SEQ ID NO: 1108790 - RNA, 20 nt, Human
accuguaaucgcagcuccuc

SEQ ID NO: 1108791 - RNA, 18 nt, Human
acgccuguaaucccagca

SEQ ID NO: 1108792 - RNA, 24 nt, Human
acuccacuacagccugggugacag

SEQ ID NO: 1108793 - RNA, 24 nt, Human
acuccgucucuacuaaaaauacaa

SEQ ID NO: 1108794 - RNA, 24 nt, Human
agaccagccaauauggugaaacuc

SEQ ID NO: 1108795 - RNA, 24 nt, Human
agagauugccguaagcugagaucg

SEQ ID NO: 1108796 - RNA, 23 nt, Human
agaucacuugaggucaugaguuc

SEQ ID NO: 1108797 - RNA, 20 nt, Human
agcagagauugccguaagcu

SEQ ID NO: 1108798 - RNA, 23 nt, Human
agcauuuuggaggccgagguggg

SEQ ID NO: 1108799 - RNA, 21 nt, Human
agccaggugugguggugcaug

SEQ ID NO: 1108800 - RNA, 24 nt, Human
agccugggcgacagaggaagacuc

SEQ ID NO: 1108801 - RNA, 24 nt, Human
agccugggugacagagcgagacuc

SEQ ID NO: 1108802 - RNA, 21 nt, Human
agcuggguaauguagugagac

SEQ ID NO: 1108803 - RNA, 23 nt, Human
agcuggguaauguagugagaccc

SEQ ID NO: 1108804 - RNA, 20 nt, Human
aggaguuugagaccagccug

SEQ ID NO: 1108805 - RNA, 24 nt, Human
aggaucacuugaagccaggaguuu

SEQ ID NO: 1108806 - RNA, 24 nt, Human
aggaucgcuugaggccaggagcuc

SEQ ID NO: 1108807 - RNA, 24 nt, Human
aggcagaagaauugcuugaacccg

SEQ ID NO: 1108808 - RNA, 22 nt, Human
aggcaggagaaucacuugaacc

SEQ ID NO: 1108809 - RNA, 24 nt, Human
aggcaggagaaucacuugaaccug

SEQ ID NO: 1108810 - RNA, 21 nt, Human
aggccgaggugggcggauuau

SEQ ID NO: 1108811 - RNA, 24 nt, Human
aggcugagaugagaggaucgcuug

SEQ ID NO: 1108812 - RNA, 24 nt, Human
aggcugaggcagaagaauugcuug

SEQ ID NO: 1108813 - RNA, 24 nt, Human
aggcugaggcaggagaaucacuug

SEQ ID NO: 1108814 - RNA, 24 nt, Human
agggauaguggcuuacgccuguaa

SEQ ID NO: 1108815 - RNA, 22 nt, Human
aggugagcagaucacuugaggg

SEQ ID NO: 1108816 - RNA, 24 nt, Human
agguggagguugcagugagccaag

SEQ ID NO: 1108817 - RNA, 24 nt, Human
aggugggcggauuauaaggucagg

SEQ ID NO: 1108818 - RNA, 23 nt, Human
agucagguguggugguaggcgcc

SEQ ID NO: 1108819 - RNA, 24 nt, Human
agucaugauggcuugugccuguaa

SEQ ID NO: 1108820 - RNA, 23 nt, Human
aguggcucaugccuauaauccca

SEQ ID NO: 1108821 - RNA, 24 nt, Human
aguggcuguaaucccagcacuuug

SEQ ID NO: 1108822 - RNA, 24 nt, Human
aguggcuuacgccuguaaucccag

SEQ ID NO: 1108823 - RNA, 23 nt, Human
auaaggucaggaguuugagacca

SEQ ID NO: 1108824 - RNA, 22 nt, Human
aucccagcacuuugggaggcca

SEQ ID NO: 1108825 - RNA, 24 nt, Human
aucgcgccauugcacuccagccug

SEQ ID NO: 1108826 - RNA, 23 nt, Human
auggcuugugccuguaauccaag

SEQ ID NO: 1108827 - RNA, 20 nt, Human
auggugaaacuccgucucua

SEQ ID NO: 1108828 - RNA, 24 nt, Human
auugcacuccagccugggcgacag

SEQ ID NO: 1108829 - RNA, 21 nt, Human
caacacuuugggaggccaaag

SEQ ID NO: 1108830 - RNA, 24 nt, Human
caacauggugaagcccugucucua

SEQ ID NO: 1108831 - RNA, 24 nt, Human
caagaggaucacuugaagccagga

SEQ ID NO: 1108832 - RNA, 24 nt, Human
caaggugagcagaucacuugaggu

SEQ ID NO: 1108833 - RNA, 26 nt, Human
caaggugagcagaucacuugagguca

SEQ ID NO: 1108834 - RNA, 24 nt, Human
caauauggugaaacuccgucucua

SEQ ID NO: 1108835 - RNA, 23 nt, Human
cacuacagccugggugacagagc

SEQ ID NO: 1108836 - RNA, 24 nt, Human
cacuacagccugggugacagagcg

SEQ ID NO: 1108837 - RNA, 24 nt, Human
cacugcaaacaacucaaauaucua

SEQ ID NO: 1108838 - RNA, 21 nt, Human
cacuugaaccugggaggugga

SEQ ID NO: 1108839 - RNA, 21 nt, Human
cacuugaagccaggaguuuga

SEQ ID NO: 1108840 - RNA, 20 nt, Human
cagcacuuugggaggccaag

SEQ ID NO: 1108841 - RNA, 23 nt, Human
cagcacuuugggaggccaaggug

SEQ ID NO: 1108842 - RNA, 22 nt, Human
cagccugggcgacagaggaaga

SEQ ID NO: 1108843 - RNA, 19 nt, Human
cagccuucccaggucccac

SEQ ID NO: 1108844 - RNA, 24 nt, Human
cagcuacucgggaggcugaggcag

SEQ ID NO: 1108845 - RNA, 24 nt, Human
cagcuccucaggaggcugaggcag

SEQ ID NO: 1108846 - RNA, 24 nt, Human
caggaggcugaggcaggagaauca

SEQ ID NO: 1108847 - RNA, 18 nt, Human
cagugcuugugggguuug

SEQ ID NO: 1108848 - RNA, 21 nt, Human
cauaauaauaaugaaaagaaa

SEQ ID NO: 1108849 - RNA, 21 nt, Human
caucguaugcagugcuugugg

SEQ ID NO: 1108850 - RNA, 24 nt, Human
caugccuauaaucccaacacuuug

SEQ ID NO: 1108851 - RNA, 19 nt, Human
cauugcacuccagccuggg

SEQ ID NO: 1108852 - RNA, 21 nt, Human
cauugcacuccagccugggcg

SEQ ID NO: 1108853 - RNA, 22 nt, Human
cauugcacuccagccugggcga

SEQ ID NO: 1108854 - RNA, 24 nt, Human
cauugcacuccagccugggcgaca

SEQ ID NO: 1108855 - RNA, 27 nt, Human
cauugcacuccagccugggcgacagag

SEQ ID NO: 1108856 - RNA, 19 nt, Human
ccaacacuuugggaggcca

SEQ ID NO: 1108857 - RNA, 26 nt, Human
ccaagaaaaagaacaggaaagcagac

SEQ ID NO: 1108858 - RNA, 24 nt, Human
ccacuccacuacagccugggugac

SEQ ID NO: 1108859 - RNA, 24 nt, Human
ccagcauuuuggaggccgaggugg

SEQ ID NO: 1108860 - RNA, 22 nt, Human
ccagccaauauggugaaacucc

SEQ ID NO: 1108861 - RNA, 27 nt, Human
ccagugguugaucuugaaguuucuuuc

SEQ ID NO: 1108862 - RNA, 20 nt, Human
ccauugcacuccagccuggg

SEQ ID NO: 1108863 - RNA, 21 nt, Human
ccauugcacuccagccugggc

SEQ ID NO: 1108864 - RNA, 22 nt, Human
ccauugcacuccagccugggcg

SEQ ID NO: 1108865 - RNA, 23 nt, Human
ccauugcacuccagccugggcga

SEQ ID NO: 1108866 - RNA, 23 nt, Human
ccauugcacuccagccugggcga

SEQ ID NO: 1108867 - RNA, 24 nt, Human
ccauugcacuccagccugggcgac

SEQ ID NO: 1108868 - RNA, 23 nt, Human
ccccgggaaccugcugguccgcc

SEQ ID NO: 1108869 - RNA, 24 nt, Human
cccuggguuuuagcagccuuccca

SEQ ID NO: 1108870 - RNA, 22 nt, Human
ccuauaaucccaacacuuuggg

SEQ ID NO: 1108871 - RNA, 22 nt, Human
ccuauaaucccaacacuuuggg

SEQ ID NO: 1108872 - RNA, 21 nt, Human
ccucaucccuuuccugcccaa

SEQ ID NO: 1108873 - RNA, 22 nt, Human
ccugcuuugucccaaacccccg

SEQ ID NO: 1108874 - RNA, 21 nt, Human
ccugggagguggagguugcag

SEQ ID NO: 1108875 - RNA, 22 nt, Human
ccugggugacagagcgagacuc

SEQ ID NO: 1108876 - RNA, 21 nt, Human
ccuguaauccaagcuacucag

SEQ ID NO: 1108877 - RNA, 22 nt, Human
ccuguaauccaagcuacucagg

SEQ ID NO: 1108878 - RNA, 21 nt, Human
ccuguagucccagcuacucgg

SEQ ID NO: 1108879 - RNA, 24 nt, Human
ccuuaaaaaugaaacgggaguggg

SEQ ID NO: 1108880 - RNA, 23 nt, Human
ccuugccaacauggugaagcccu

SEQ ID NO: 1108881 - RNA, 24 nt, Human
ccuugccaacauggugaagcccug

SEQ ID NO: 1108882 - RNA, 23 nt, Human
cgagaccagcuggguaauguagu

SEQ ID NO: 1108883 - RNA, 24 nt, Human
cgagacuugccuugccaacauggu

SEQ ID NO: 1108884 - RNA, 22 nt, Human
cgaggugggcggauuauaaggu

SEQ ID NO: 1108885 - RNA, 24 nt, Human
cgaggugggcggauuauaagguca

SEQ ID NO: 1108886 - RNA, 21 nt, Human
cggauuauaaggucaggaguu

SEQ ID NO: 1108887 - RNA, 27 nt, Human
cgggaggcugaggcagaagaauugcuu

SEQ ID NO: 1108888 - RNA, 24 nt, Human
cucaaauaucuaucagcaguaaga

SEQ ID NO: 1108889 - RNA, 21 nt, Human
cucacagauacaauguugcgu

SEQ ID NO: 1108890 - RNA, 18 nt, Human
cucaggaggcugagauga

SEQ ID NO: 1108891 - RNA, 21 nt, Human
cucaucguaugcagugcuugu

SEQ ID NO: 1108892 - RNA, 24 nt, Human
cucaugccuauaaucccaacacuu

SEQ ID NO: 1108893 - RNA, 19 nt, Human
cucccuggguuuuagcagc

SEQ ID NO: 1108894 - RNA, 19 nt, Human
cuguagucccagcuacucg

SEQ ID NO: 1108895 - RNA, 18 nt, Human
cuguucaucccacuggag

SEQ ID NO: 1108896 - RNA, 21 nt, Human
cuuacgccuguaaucccagca

SEQ ID NO: 1108897 - RNA, 21 nt, Human
cuucccaggucccaccgaaca

SEQ ID NO: 1108898 - RNA, 31 nt, Human
cuucccaggucccaccgaacacgaggaacaa

SEQ ID NO: 1108899 - RNA, 21 nt, Human
cuugaaccugggagguggagg

SEQ ID NO: 1108900 - RNA, 21 nt, Human
cuugaaguuucuuuccuacuc

SEQ ID NO: 1108901 - RNA, 20 nt, Human
cuuuaccauauucauuaaaa

SEQ ID NO: 1108902 - RNA, 19 nt, Human
gaagacuccgucucaaaaa

SEQ ID NO: 1108903 - RNA, 23 nt, Human
gagaaucacuugaaccugggagg

SEQ ID NO: 1108904 - RNA, 23 nt, Human
gagaucgcgccauugcacuccag

SEQ ID NO: 1108905 - RNA, 24 nt, Human
gagaugagaggaucgcuugaggcc

SEQ ID NO: 1108906 - RNA, 18 nt, Human
gagguugcagugagccaa

SEQ ID NO: 1108907 - RNA, 19 nt, Human
gagguugcagugagccaag

SEQ ID NO: 1108908 - RNA, 24 nt, Human
gaucacuugaagccaggaguuuga

SEQ ID NO: 1108909 - RNA, 18 nt, Human
gaucacuugaggucauga

SEQ ID NO: 1108910 - RNA, 24 nt, Human
gaucacuugaggucaugaguucga

SEQ ID NO: 1108911 - RNA, 18 nt, Human
gaucgcuugaggccagga

SEQ ID NO: 1108912 - RNA, 24 nt, Human
gaucgcuugaggccaggagcucga

SEQ ID NO: 1108913 - RNA, 24 nt, Human
gcaggacccuaucucuacaaaaac

SEQ ID NO: 1108914 - RNA, 23 nt, Human
gcaggagaaucacuugaaccugg

SEQ ID NO: 1108915 - RNA, 24 nt, Human
gccaacauggugaagcccugucuc

SEQ ID NO: 1108916 - RNA, 24 nt, Human
gccaauauggugaaacuccgucuc

SEQ ID NO: 1108917 - RNA, 22 nt, Human
gccauugcacuccagccugggc

SEQ ID NO: 1108918 - RNA, 24 nt, Human
gccauugcacuccagccugggcga

SEQ ID NO: 1108919 - RNA, 23 nt, Human
gccuugccaacauggugaagccc

SEQ ID NO: 1108920 - RNA, 18 nt, Human
gcgcagcucggcgugagg

SEQ ID NO: 1108921 - RNA, 23 nt, Human
gcggauuauaaggucaggaguuu

SEQ ID NO: 1108922 - RNA, 20 nt, Human
gcuggaugcaguggcucaug

SEQ ID NO: 1108923 - RNA, 18 nt, Human
ggaaagcagacaugacaa

SEQ ID NO: 1108924 - RNA, 19 nt, Human
ggaacccccuucuucugcu

SEQ ID NO: 1108925 - RNA, 20 nt, Human
ggagguugcagugagccaag

SEQ ID NO: 1108926 - RNA, 20 nt, Human
ggagguugcagugagccaag

SEQ ID NO: 1108927 - RNA, 24 nt, Human
ggagguugcagugagccaagguca

SEQ ID NO: 1108928 - RNA, 22 nt, Human
ggaucacuugaagccaggaguu

SEQ ID NO: 1108929 - RNA, 23 nt, Human
ggaucacuugaagccaggaguuu

SEQ ID NO: 1108930 - RNA, 24 nt, Human
ggaugcaguggcucaugccuauaa

SEQ ID NO: 1108931 - RNA, 20 nt, Human
ggauuauaaggucaggaguu

SEQ ID NO: 1108932 - RNA, 23 nt, Human
ggauuauaaggucaggaguuuga

SEQ ID NO: 1108933 - RNA, 24 nt, Human
ggauuauuauacaaccaagaaaaa

SEQ ID NO: 1108934 - RNA, 21 nt, Human
ggcaaaacuaaucuaugauga

SEQ ID NO: 1108935 - RNA, 23 nt, Human
ggcggauuauaaggucaggaguu

SEQ ID NO: 1108936 - RNA, 22 nt, Human
ggugcaguggcuguaaucccag

SEQ ID NO: 1108937 - RNA, 21 nt, Human
gugaaacuccgucucuacuaa

SEQ ID NO: 1108938 - RNA, 21 nt, Human
gugaagcccugucucuacuaa

SEQ ID NO: 1108939 - RNA, 20 nt, Human
guucgagacuugccuugcca

SEQ ID NO: 1108940 - RNA, 22 nt, Human
uaagcugagaucgcgccauugc

SEQ ID NO: 1108941 - RNA, 23 nt, Human
uacacaaaguucagggguaggca

SEQ ID NO: 1108942 - RNA, 24 nt, Human
uacagccugggugacagagcgaga

SEQ ID NO: 1108943 - RNA, 24 nt, Human
uaccuguaaucgcagcuccucagg

SEQ ID NO: 1108944 - RNA, 24 nt, Human
uacgccuguaaucccagcauuuug

SEQ ID NO: 1108945 - RNA, 18 nt, Human
uagcagccuucccagguc

SEQ ID NO: 1108946 - RNA, 22 nt, Human
uaggcaaaacuaaucuaugaug

SEQ ID NO: 1108947 - RNA, 21 nt, Human
uaggcgccugccuguaguccc

SEQ ID NO: 1108948 - RNA, 21 nt, Human
uagucagguguggugguaggc

SEQ ID NO: 1108949 - RNA, 24 nt, Human
uaguggcuuacgccuguaauccca

SEQ ID NO: 1108950 - RNA, 25 nt, Human
uauuauacaaccaagaaaaagaaca

SEQ ID NO: 1108951 - RNA, 19 nt, Human
ucacuugaaccugggaggu

SEQ ID NO: 1108952 - RNA, 24 nt, Human
ucacuugaaccugggagguggagg

SEQ ID NO: 1108953 - RNA, 19 nt, Human
ucacuugaagccaggaguu

SEQ ID NO: 1108954 - RNA, 24 nt, Human
ucauuuaaaaaaaaaaaaaaaaaa

SEQ ID NO: 1108955 - RNA, 19 nt, Human
uccagccugggcgacagag

SEQ ID NO: 1108956 - RNA, 23 nt, Human
ucccccuuaaaaaugaaacggga

SEQ ID NO: 1108957 - RNA, 25 nt, Human
ucccccuuaaaaaugaaacgggagu

SEQ ID NO: 1108958 - RNA, 18 nt, Human
uccccgggaaccugcugg

SEQ ID NO: 1108959 - RNA, 21 nt, Human
ucccucaucccuuuccugccc

SEQ ID NO: 1108960 - RNA, 19 nt, Human
ucccuggguuuuagcagcc

SEQ ID NO: 1108961 - RNA, 23 nt, Human
ucccuggguuuuagcagccuucc

SEQ ID NO: 1108962 - RNA, 22 nt, Human
uccgucucaaaaagaaaaaaaa

SEQ ID NO: 1108963 - RNA, 22 nt, Human
uccgucucaaaaagaaaaaaaa

SEQ ID NO: 1108964 - RNA, 23 nt, Human
ucgcgccauugcacuccagccug

SEQ ID NO: 1108965 - RNA, 23 nt, Human
ucgggaggcugaggcagaagaau

SEQ ID NO: 1108966 - RNA, 19 nt, Human
ucucaaaaagaaaaaaaag

SEQ ID NO: 1108967 - RNA, 24 nt, Human
ucuccagcuccaacuuuucucauc

SEQ ID NO: 1108968 - RNA, 23 nt, Human
ucucuacuaaaaauacaaaaauu

SEQ ID NO: 1108969 - RNA, 21 nt, Human
ucucuacuaaaaauauaaaaa

SEQ ID NO: 1108970 - RNA, 28 nt, Human
ugaaaagaaaugaugcuggaugcagugg

SEQ ID NO: 1108971 - RNA, 24 nt, Human
ugaaccugggagguggagguugca

SEQ ID NO: 1108972 - RNA, 18 nt, Human
ugacuccccuaucagcga

SEQ ID NO: 1108973 - RNA, 18 nt, Human
ugagaaagagcauuuggg

SEQ ID NO: 1108974 - RNA, 24 nt, Human
ugagaggaucgcuugaggccagga

SEQ ID NO: 1108975 - RNA, 26 nt, Human
ugagaugagaggaucgcuugaggcca

SEQ ID NO: 1108976 - RNA, 18 nt, Human
ugagcagaucacuugagg

SEQ ID NO: 1108977 - RNA, 24 nt, Human
ugagcagaucacuugaggucauga

SEQ ID NO: 1108978 - RNA, 24 nt, Human
ugaggcagaagaauugcuugaacc

SEQ ID NO: 1108979 - RNA, 25 nt, Human
ugaggcagaagaauugcuugaaccc

SEQ ID NO: 1108980 - RNA, 20 nt, Human
ugaggcaggagaaucacuug

SEQ ID NO: 1108981 - RNA, 24 nt, Human
ugaggcaggagaaucacuugaacc

SEQ ID NO: 1108982 - RNA, 25 nt, Human
ugaggcaggagaaucacuugaaccu

SEQ ID NO: 1108983 - RNA, 23 nt, Human
ugaggccaggagcucgagaccag

SEQ ID NO: 1108984 - RNA, 22 nt, Human
ugauggcuugugccuguaaucc

SEQ ID NO: 1108985 - RNA, 22 nt, Human
ugcacuccagccugggcgacag

SEQ ID NO: 1108986 - RNA, 24 nt, Human
ugcacuccagccugggcgacagag

SEQ ID NO: 1108987 - RNA, 20 nt, Human
ugcagugcuugugggguuug

SEQ ID NO: 1108988 - RNA, 22 nt, Human
ugcaguggcuguaaucccagca

SEQ ID NO: 1108989 - RNA, 23 nt, Human
ugccaacauggugaagcccuguc

SEQ ID NO: 1108990 - RNA, 25 nt, Human
ugcccaagcuguggucccagcugac

SEQ ID NO: 1108991 - RNA, 23 nt, Human
ugccuauaaucccaacacuuugg

SEQ ID NO: 1108992 - RNA, 24 nt, Human
ugccuguaauccaagcuacucagg

SEQ ID NO: 1108993 - RNA, 23 nt, Human
ugccuguagucccagcuacucgg

SEQ ID NO: 1108994 - RNA, 24 nt, Human
ugccuguagucccagcuacucggg

SEQ ID NO: 1108995 - RNA, 19 nt, Human
ugcgcagcucggcgugagg

SEQ ID NO: 1108996 - RNA, 27 nt, Human
uggaaugaaaugccucccucaccugcu

SEQ ID NO: 1108997 - RNA, 26 nt, Human
uggagaggagggucuggaugggaccc

SEQ ID NO: 1108998 - RNA, 21 nt, Human
uggcucaugccuauaauccca

SEQ ID NO: 1108999 - RNA, 23 nt, Human
uggcuguaaucccagcacuuugg

SEQ ID NO: 1109000 - RNA, 24 nt, Human
uggcuguaaucccagcacuuuggg

SEQ ID NO: 1109001 - RNA, 22 nt, Human
uggcuuacgccuguaaucccag

SEQ ID NO: 1109002 - RNA, 24 nt, Human
uggcuuacgccuguaaucccagca

SEQ ID NO: 1109003 - RNA, 19 nt, Human
uggcuugugccuguaaucc

SEQ ID NO: 1109004 - RNA, 20 nt, Human
uggcuugugccuguaaucca

SEQ ID NO: 1109005 - RNA, 24 nt, Human
ugggaggccaaagcaagaggauca

SEQ ID NO: 1109006 - RNA, 24 nt, Human
ugggaggccaaggugagcagauca

SEQ ID NO: 1109007 - RNA, 18 nt, Human
ugggagguggagguugca

SEQ ID NO: 1109008 - RNA, 29 nt, Human
ugggagguggagguugcagugacaacggu

SEQ ID NO: 1109009 - RNA, 24 nt, Human
ugggagguggagguugcagugagc

SEQ ID NO: 1109010 - RNA, 22 nt, Human
ugggcggauuauaaggucagga

SEQ ID NO: 1109011 - RNA, 20 nt, Human
uggggugugcgcagcucggc

SEQ ID NO: 1109012 - RNA, 25 nt, Human
ugguaggcgccugccuguaguccca

SEQ ID NO: 1109013 - RNA, 18 nt, Human
uggugcaugucuguaguc

SEQ ID NO: 1109014 - RNA, 24 nt, Human
ugguggugcaugucuguaguccca

SEQ ID NO: 1109015 - RNA, 22 nt, Human
ugucuguagucccagcuacucg

SEQ ID NO: 1109016 - RNA, 19 nt, Human
uguggugguaggcgccugc

SEQ ID NO: 1109017 - RNA, 20 nt, Human
uuaaaaaaaaaaaaaaaaaa

SEQ ID NO: 1109018 - RNA, 21 nt, Human
uuacgccuguaaucccagcau

SEQ ID NO: 1109019 - RNA, 21 nt, Human
uuagcagccuucccagguccc

SEQ ID NO: 1109020 - RNA, 21 nt, Human
uuagccaggugugguggugca

SEQ ID NO: 1109021 - RNA, 24 nt, Human
uuauaaggucaggaguuugagacc

SEQ ID NO: 1109022 - RNA, 18 nt, Human
uucacugcccagcacggc

SEQ ID NO: 1109023 - RNA, 22 nt, Human
uucuccagcuccaacuuuucuc

SEQ ID NO: 1109024 - RNA, 19 nt, Human
uucuggucugcauggugga

SEQ ID NO: 1109025 - RNA, 24 nt, Human
uugaaccugggagguggagguugc

SEQ ID NO: 1109026 - RNA, 22 nt, Human
uugaagccaggaguuugagacc

SEQ ID NO: 1109027 - RNA, 20 nt, Human
uugcagugagccaaggucac

SEQ ID NO: 1109028 - RNA, 21 nt, Human
uugcuugaacccgggaagcag

SEQ ID NO: 1109029 - RNA, 22 nt, Human
uuggaggauacugacugagaaa

SEQ ID NO: 1109030 - RNA, 24 nt, Human
uuggaggauacugacugagaaaga

SEQ ID NO: 1109031 - RNA, 19 nt, Human
aaguagcugggacuacagg

SEQ ID NO: 1109032 - RNA, 22 nt, Human
aaguagcugggacuacaggggc

SEQ ID NO: 1109033 - RNA, 26 nt, Human
aaguagcugggacuacaggggcauac

SEQ ID NO: 1109034 - RNA, 18 nt, Human
aagugcugggauuacagg

SEQ ID NO: 1109035 - RNA, 19 nt, Human
aagugcugggauuacaggc

SEQ ID NO: 1109036 - RNA, 19 nt, Human
aagugcugggauuacaggc

SEQ ID NO: 1109037 - RNA, 23 nt, Human
aagugcugggauuacaggcguga

SEQ ID NO: 1109038 - RNA, 26 nt, Human
aagugcugggauuacaggcgugagcc

SEQ ID NO: 1109039 - RNA, 18 nt, Human
agagaacucaaugcuuuu

SEQ ID NO: 1109040 - RNA, 23 nt, Human
agaguaucucuccagugaguccu

SEQ ID NO: 1109041 - RNA, 25 nt, Human
aggcuggagugcaguggcgcgaucu

SEQ ID NO: 1109042 - RNA, 21 nt, Human
aggcuggggugcagugcaucu

SEQ ID NO: 1109043 - RNA, 24 nt, Human
aggguuucuguccaguguaaguuu

SEQ ID NO: 1109044 - RNA, 21 nt, Human
aguagcugggauuacaggcau

SEQ ID NO: 1109045 - RNA, 23 nt, Human
aguagcugggauuacaggcaugu

SEQ ID NO: 1109046 - RNA, 24 nt, Human
agugauuauccugccucagccucc

SEQ ID NO: 1109047 - RNA, 23 nt, Human
agugcaguggcgcgaucuuggcu

SEQ ID NO: 1109048 - RNA, 24 nt, Human
agugcaguggcgcgaucuuggcuc

SEQ ID NO: 1109049 - RNA, 18 nt, Human
agugcugggauuacaggc

SEQ ID NO: 1109050 - RNA, 21 nt, Human
auagaguaucucuccagugag

SEQ ID NO: 1109051 - RNA, 24 nt, Human
caaauuccugaggucaagcaauuu

SEQ ID NO: 1109052 - RNA, 23 nt, Human
caacccccaccccuugggcucaa

SEQ ID NO: 1109053 - RNA, 24 nt, Human
caacccccaccccuugggcucaag

SEQ ID NO: 1109054 - RNA, 22 nt, Human
caaggaccugagagaacucaau

SEQ ID NO: 1109055 - RNA, 22 nt, Human
caagugauuauccugccucagc

SEQ ID NO: 1109056 - RNA, 24 nt, Human
caccauuuugcccaggcaggccuc

SEQ ID NO: 1109057 - RNA, 21 nt, Human
caccgcaaccuccgccucccg

SEQ ID NO: 1109058 - RNA, 24 nt, Human
caccucagccucccaaguagcugg

SEQ ID NO: 1109059 - RNA, 20 nt, Human
cagccuccugaguagcuggg

SEQ ID NO: 1109060 - RNA, 21 nt, Human
cagggggugguagaaccacgc

SEQ ID NO: 1109061 - RNA, 19 nt, Human
caggguccucccucugccu

SEQ ID NO: 1109062 - RNA, 22 nt, Human
caggguccucccucugccuccc

SEQ ID NO: 1109063 - RNA, 24 nt, Human
cagggucuggcucugucgcccagg

SEQ ID NO: 1109064 - RNA, 19 nt, Human
cagugaguccuuuuauguc

SEQ ID NO: 1109065 - RNA, 19 nt, Human
caguggcgcgaucuuggcu

SEQ ID NO: 1109066 - RNA, 22 nt, Human
cauaccaccacaccugcuacuu

SEQ ID NO: 1109067 - RNA, 24 nt, Human
ccaaguagcugggacuacaggggc

SEQ ID NO: 1109068 - RNA, 21 nt, Human
ccacaccugcuacuuuuucua

SEQ ID NO: 1109069 - RNA, 23 nt, Human
ccaggguccucccucugccuccc

SEQ ID NO: 1109070 - RNA, 21 nt, Human
ccagugaguccuuuuaugucu

SEQ ID NO: 1109071 - RNA, 23 nt, Human
cccaaguagcugggacuacaggg

SEQ ID NO: 1109072 - RNA, 23 nt, Human
cccaccucagccucccaaguagc

SEQ ID NO: 1109073 - RNA, 22 nt, Human
cccaggcuggagugcaguggcg

SEQ ID NO: 1109074 - RNA, 23 nt, Human
cccggauucaagugauuauccuc

SEQ ID NO: 1109075 - RNA, 23 nt, Human
cccggauucaagugauuauccug

SEQ ID NO: 1109076 - RNA, 23 nt, Human
cccuaagugcugggauuacaggc

SEQ ID NO: 1109077 - RNA, 25 nt, Human
cccuugggcucaagagaucuuccca

SEQ ID NO: 1109078 - RNA, 23 nt, Human
ccgcaaccuccgccucccggauu

SEQ ID NO: 1109079 - RNA, 24 nt, Human
ccgcaaccuccgccucccggauuc

SEQ ID NO: 1109080 - RNA, 22 nt, Human
ccuaagugcugggauuacaggc

SEQ ID NO: 1109081 - RNA, 24 nt, Human
ccuaagugcugggauuacaggcgu

SEQ ID NO: 1109082 - RNA, 22 nt, Human
ccucccgcugccagugcggguc

SEQ ID NO: 1109083 - RNA, 23 nt, Human
ccugaguagcugggauuacaggc

SEQ ID NO: 1109084 - RNA, 24 nt, Human
ccugaguagcugggauuacaggca

SEQ ID NO: 1109085 - RNA, 23 nt, Human
ccugccucagccuccugaguagc

SEQ ID NO: 1109086 - RNA, 24 nt, Human
ccugccucagccuccugaguagcu

SEQ ID NO: 1109087 - RNA, 21 nt, Human
cuaagugcugggauuacaggc

SEQ ID NO: 1109088 - RNA, 24 nt, Human
cuaagugcugggauuacaggcgug

SEQ ID NO: 1109089 - RNA, 18 nt, Human
cuacaggggcauaccacc

SEQ ID NO: 1109090 - RNA, 19 nt, Human
cucaagagaucuucccacc

SEQ ID NO: 1109091 - RNA, 24 nt, Human
cucaagagaucuucccaccucagc

SEQ ID NO: 1109092 - RNA, 24 nt, Human
cucaccgcaaccuccgccucccgg

SEQ ID NO: 1109093 - RNA, 22 nt, Human
cucacugcaacccccaccccuu

SEQ ID NO: 1109094 - RNA, 24 nt, Human
cucacugcaacccccaccccuugg

SEQ ID NO: 1109095 - RNA, 24 nt, Human
cucagccucccaaguagcugggac

SEQ ID NO: 1109096 - RNA, 24 nt, Human
cucagccuccugaguagcugggau

SEQ ID NO: 1109097 - RNA, 23 nt, Human
cuccagugugagauauuucauga

SEQ ID NO: 1109098 - RNA, 23 nt, Human
cugaguagcugggauuacaggca

SEQ ID NO: 1109099 - RNA, 24 nt, Human
cugaguagcugggauuacaggcau

SEQ ID NO: 1109100 - RNA, 24 nt, Human
cugcccaggcuggagugcaguggc

SEQ ID NO: 1109101 - RNA, 19 nt, Human
cugugaguuguuuuauguu

SEQ ID NO: 1109102 - RNA, 23 nt, Human
cuucccaccucagccucccaagu

SEQ ID NO: 1109103 - RNA, 26 nt, Human
cuucccaccucagccucccaaguagc

SEQ ID NO: 1109104 - RNA, 24 nt, Human
cuugcugcccaggcuggagugcag

SEQ ID NO: 1109105 - RNA, 31 nt, Human
cuuuuuuuuuuuuuuugagacagggucuggg

SEQ ID NO: 1109106 - RNA, 21 nt, Human
gaaaggaauaaaaauuaugaa

SEQ ID NO: 1109107 - RNA, 18 nt, Human
gacugaggcuacacagac

SEQ ID NO: 1109108 - RNA, 20 nt, Human
gagacagggucuggcucugu

SEQ ID NO: 1109109 - RNA, 22 nt, Human
gaguagcugggauuacaggcau

SEQ ID NO: 1109110 - RNA, 25 nt, Human
gaguagcugggauuacaggcaugug

SEQ ID NO: 1109111 - RNA, 18 nt, Human
gauuacaggcaugugcca

SEQ ID NO: 1109112 - RNA, 18 nt, Human
gauuacaggcgugagcca

SEQ ID NO: 1109113 - RNA, 21 nt, Human
gauuacaggcgugagccacug

SEQ ID NO: 1109114 - RNA, 24 nt, Human
gauuacaggcgugagccacugugc

SEQ ID NO: 1109115 - RNA, 19 nt, Human
gcccaggcuggagugcagu

SEQ ID NO: 1109116 - RNA, 23 nt, Human
gcccaggcuggggugcagugcau

SEQ ID NO: 1109117 - RNA, 25 nt, Human
gcucugucgcccaggcuggggugca

SEQ ID NO: 1109118 - RNA, 20 nt, Human
gcucuugcugcccaggcugg

SEQ ID NO: 1109119 - RNA, 21 nt, Human
gcucuugcugcccaggcugga

SEQ ID NO: 1109120 - RNA, 24 nt, Human
gcucuugcugcccaggcuggagug

SEQ ID NO: 1109121 - RNA, 18 nt, Human
gcugagcgcaggggcgug

SEQ ID NO: 1109122 - RNA, 19 nt, Human
gcuggagugcaguggcgcg

SEQ ID NO: 1109123 - RNA, 19 nt, Human
ggauuacaggcaugugcca

SEQ ID NO: 1109124 - RNA, 24 nt, Human
ggcucugucgcccaggcuggggug

SEQ ID NO: 1109125 - RNA, 19 nt, Human
ggugcagugcaucuuggcu

SEQ ID NO: 1109126 - RNA, 18 nt, Human
guagcugggauuacaggc

SEQ ID NO: 1109127 - RNA, 20 nt, Human
guagcugggauuacaggcau

SEQ ID NO: 1109128 - RNA, 22 nt, Human
guccucccucugccucccgcug

SEQ ID NO: 1109129 - RNA, 24 nt, Human
gugauuauccugccucagccuccu

SEQ ID NO: 1109130 - RNA, 24 nt, Human
uaagugcugggauuacaggcguga

SEQ ID NO: 1109131 - RNA, 23 nt, Human
uacaggcaugugccaucacaucc

SEQ ID NO: 1109132 - RNA, 23 nt, Human
uacaggcgugagccacugugccc

SEQ ID NO: 1109133 - RNA, 24 nt, Human
uacaggcgugagccacugugccca

SEQ ID NO: 1109134 - RNA, 22 nt, Human
uacaggggcauaccaccacacc

SEQ ID NO: 1109135 - RNA, 20 nt, Human
uacuuuuuuuuuuuuuuuga

SEQ ID NO: 1109136 - RNA, 20 nt, Human
uagagacaugguuucaccau

SEQ ID NO: 1109137 - RNA, 18 nt, Human
uaugcaaggaccugagag

SEQ ID NO: 1109138 - RNA, 22 nt, Human
ucaccauuuugcccaggcaggc

SEQ ID NO: 1109139 - RNA, 18 nt, Human
ucaccgcaaccuccgccu

SEQ ID NO: 1109140 - RNA, 23 nt, Human
ucaccgcaaccuccgccucccgg

SEQ ID NO: 1109141 - RNA, 27 nt, Human
ucaccgcaaccuccgccucccggauuc

SEQ ID NO: 1109142 - RNA, 21 nt, Human
ucacugcaacccccaccccuu

SEQ ID NO: 1109143 - RNA, 23 nt, Human
ucacugcaacccccaccccuugg

SEQ ID NO: 1109144 - RNA, 24 nt, Human
ucacugcaacccccaccccuuggg

SEQ ID NO: 1109145 - RNA, 18 nt, Human
ucagccucccaaguagcu

SEQ ID NO: 1109146 - RNA, 20 nt, Human
ucagccuccugaguagcugg

SEQ ID NO: 1109147 - RNA, 18 nt, Human
ucauguacuuuuuuuuuu

SEQ ID NO: 1109148 - RNA, 25 nt, Human
ucccaaguagcugggacuacagggg

SEQ ID NO: 1109149 - RNA, 21 nt, Human
ucccggauucaagugauuauc

SEQ ID NO: 1109150 - RNA, 24 nt, Human
ucccggauucaagugauuauccug

SEQ ID NO: 1109151 - RNA, 19 nt, Human
uccgggauguuccaggguc

SEQ ID NO: 1109152 - RNA, 21 nt, Human
uccugaggucaagcaauuugc

SEQ ID NO: 1109153 - RNA, 24 nt, Human
uccugaguagcugggauuacaggc

SEQ ID NO: 1109154 - RNA, 23 nt, Human
ucgcccaggcuggggugcagugc

SEQ ID NO: 1109155 - RNA, 27 nt, Human
ucgcccaggcuggggugcagugcaucu

SEQ ID NO: 1109156 - RNA, 19 nt, Human
ucuggcucugucgcccagg

SEQ ID NO: 1109157 - RNA, 23 nt, Human
ucuggcucugucgcccaggcugg

SEQ ID NO: 1109158 - RNA, 24 nt, Human
ucuggcucugucgcccaggcuggg

SEQ ID NO: 1109159 - RNA, 27 nt, Human
ucuggcucugucgcccaggcuggggug

SEQ ID NO: 1109160 - RNA, 22 nt, Human
ugaaaggaauaaaaauuaugaa

SEQ ID NO: 1109161 - RNA, 22 nt, Human
ugaaaggcuuucccacauuuac

SEQ ID NO: 1109162 - RNA, 19 nt, Human
ugaauccuuucauguacuu

SEQ ID NO: 1109163 - RNA, 22 nt, Human
ugagacagggucuggcucuguc

SEQ ID NO: 1109164 - RNA, 23 nt, Human
ugagacagggucuggcucugucg

SEQ ID NO: 1109165 - RNA, 25 nt, Human
ugcaacccccaccccuugggcucaa

SEQ ID NO: 1109166 - RNA, 22 nt, Human
ugcaguggcgcgaucuuggcuc

SEQ ID NO: 1109167 - RNA, 18 nt, Human
ugcccaggcuggagugca

SEQ ID NO: 1109168 - RNA, 21 nt, Human
ugcccaggcuggagugcagug

SEQ ID NO: 1109169 - RNA, 22 nt, Human
ugcccaggcuggagugcagugg

SEQ ID NO: 1109170 - RNA, 24 nt, Human
ugccucagccuccugaguagcugg

SEQ ID NO: 1109171 - RNA, 24 nt, Human
ugcucuugcugcccaggcuggagu

SEQ ID NO: 1109172 - RNA, 24 nt, Human
ugcugggauuacaggcgugagcca

SEQ ID NO: 1109173 - RNA, 23 nt, Human
uggagugcaguggcgcgaucuug

SEQ ID NO: 1109174 - RNA, 24 nt, Human
uggagugcaguggcgcgaucuugg

SEQ ID NO: 1109175 - RNA, 24 nt, Human
uggcucugucgcccaggcuggggu

SEQ ID NO: 1109176 - RNA, 21 nt, Human
ugggacuacaggggcauacca

SEQ ID NO: 1109177 - RNA, 24 nt, Human
ugggacuacaggggcauaccacca

SEQ ID NO: 1109178 - RNA, 18 nt, Human
ugggauuacaggcaugug

SEQ ID NO: 1109179 - RNA, 19 nt, Human
ugggauuacaggcaugugc

SEQ ID NO: 1109180 - RNA, 21 nt, Human
ugggauuacaggcaugugcca

SEQ ID NO: 1109181 - RNA, 21 nt, Human
ugggauuacaggcaugugcca

SEQ ID NO: 1109182 - RNA, 22 nt, Human
ugggauuacaggcaugugccau

SEQ ID NO: 1109183 - RNA, 24 nt, Human
ugggauuacaggcaugugccauca

SEQ ID NO: 1109184 - RNA, 31 nt, Human
ugggauuacaggcaugugccaucacauccgg

SEQ ID NO: 1109185 - RNA, 18 nt, Human
ugggauuacaggcgugag

SEQ ID NO: 1109186 - RNA, 21 nt, Human
ugggauuacaggcgugagcca

SEQ ID NO: 1109187 - RNA, 22 nt, Human
ugggauuacaggcgugagccac

SEQ ID NO: 1109188 - RNA, 22 nt, Human
ugggauuacaggcgugagccac

SEQ ID NO: 1109189 - RNA, 22 nt, Human
ugggauuacaggcgugagccac

SEQ ID NO: 1109190 - RNA, 24 nt, Human
ugggauuacaggcgugagccacug

SEQ ID NO: 1109191 - RNA, 26 nt, Human
ugggauuacaggcgugagccacugug

SEQ ID NO: 1109192 - RNA, 22 nt, Human
ugggcucaagagaucuucccac

SEQ ID NO: 1109193 - RNA, 24 nt, Human
ugggcucaagagaucuucccaccu

SEQ ID NO: 1109194 - RNA, 19 nt, Human
uggggugcagugcaucuug

SEQ ID NO: 1109195 - RNA, 18 nt, Human
uguaugcccagggggugg

SEQ ID NO: 1109196 - RNA, 23 nt, Human
uguccaguguaaguuuauucaug

SEQ ID NO: 1109197 - RNA, 21 nt, Human
ugucgcccaggcuggggugca

SEQ ID NO: 1109198 - RNA, 21 nt, Human
uucaagugauuauccugccuc

SEQ ID NO: 1109199 - RNA, 23 nt, Human
uucaagugauuauccugccucag

SEQ ID NO: 1109200 - RNA, 24 nt, Human
uucaugauaucaaagggaacugga

SEQ ID NO: 1109201 - RNA, 19 nt, Human
uuccaggguccucccucug

SEQ ID NO: 1109202 - RNA, 23 nt, Human
uucccaccucagccucccaagua

SEQ ID NO: 1109203 - RNA, 25 nt, Human
uugagacagggucuggcucugucgc

SEQ ID NO: 1109204 - RNA, 18 nt, Human
uugcccaggcaggccuca

SEQ ID NO: 1109205 - RNA, 23 nt, Human
uugcucuugcugcccaggcugga

SEQ ID NO: 1109206 - RNA, 19 nt, Human
uuuauagaguaucucucca

SEQ ID NO: 1109207 - RNA, 21 nt, Human
uuugcccacccuaagugcugg

SEQ ID NO: 1109208 - RNA, 24 nt, Human
uuugcucuugcugcccaggcugga

SEQ ID NO: 1109209 - RNA, 24 nt, Human
uuuguagagacaugguuucaccau

SEQ ID NO: 1109210 - RNA, 23 nt, Human
uuuugcucuugcugcccaggcug

SEQ ID NO: 1109211 - RNA, 24 nt, Human
uuuugcucuugcugcccaggcugg

SEQ ID NO: 1109212 - RNA, 24 nt, Human
uuuuuuguagagacaugguuucac

SEQ ID NO: 1109213 - RNA, 23 nt, Human
uuuuuuuuugagacagggucugg

SEQ ID NO: 1109214 - RNA, 19 nt, Human
uuuuuuuuuuugugugugu

SEQ ID NO: 1109215 - RNA, 23 nt, Human
uuuuuuuuuuugugugugugaca

SEQ ID NO: 1109216 - RNA, 23 nt, Human
uuuuuuuuuuuugagacaggguc

SEQ ID NO: 1109217 - RNA, 24 nt, Human
uuuuuuuuuuuuuuugagacaggg

SEQ ID NO: 1109218 - RNA, 19 nt, Human
uuuuuuuuuuuuuuugugu

SEQ ID NO: 1109219 - RNA, 23 nt, Human
aaaaagaucuauguccccacauu

SEQ ID NO: 1109220 - RNA, 23 nt, Human
aagagugaaacucugucucaaaa

SEQ ID NO: 1109221 - RNA, 24 nt, Human
aaucgcuugaacccaggaggcaga

SEQ ID NO: 1109222 - RNA, 20 nt, Human
acaagagugaaacucugucu

SEQ ID NO: 1109223 - RNA, 21 nt, Human
acaagagugaaacucugucuc

SEQ ID NO: 1109224 - RNA, 19 nt, Human
accauggugaaacuccauc

SEQ ID NO: 1109225 - RNA, 20 nt, Human
accauggugaaacuccaucu

SEQ ID NO: 1109226 - RNA, 21 nt, Human
accauggugaaacuccaucuc

SEQ ID NO: 1109227 - RNA, 24 nt, Human
accugaggucaggaguucaagacc

SEQ ID NO: 1109228 - RNA, 21 nt, Human
accugcucguggcgccccagc

SEQ ID NO: 1109229 - RNA, 18 nt, Human
acuuuggaggcugaggca

SEQ ID NO: 1109230 - RNA, 22 nt, Human
agagguugcugugagcugagau

SEQ ID NO: 1109231 - RNA, 24 nt, Human
agagguugcugugagcugagauug

SEQ ID NO: 1109232 - RNA, 28 nt, Human
agagguugcugugagcugagauugugcc

SEQ ID NO: 1109233 - RNA, 23 nt, Human
agcaggcugagcagccccuggcu

SEQ ID NO: 1109234 - RNA, 20 nt, Human
agccgucgcugcugcgccuc

SEQ ID NO: 1109235 - RNA, 22 nt, Human
agccugaccaccauggugaaac

SEQ ID NO: 1109236 - RNA, 23 nt, Human
agcugggugugguggcgcaugcc

SEQ ID NO: 1109237 - RNA, 20 nt, Human
aggcagagguugcugugagc

SEQ ID NO: 1109238 - RNA, 23 nt, Human
aggcaggagaaucgcuugaaccc

SEQ ID NO: 1109239 - RNA, 24 nt, Human
aggcaggagaaucgcuugaaccca

SEQ ID NO: 1109240 - RNA, 21 nt, Human
aggccaaggcgggcgggugga

SEQ ID NO: 1109241 - RNA, 25 nt, Human
aggccaaggcgggcggguggaucac

SEQ ID NO: 1109242 - RNA, 26 nt, Human
aggcgggcggguggaucaccugaggu

SEQ ID NO: 1109243 - RNA, 20 nt, Human
aggcugaggcaggagaaucg

SEQ ID NO: 1109244 - RNA, 24 nt, Human
aggcugaggcaggagaaucgcuug

SEQ ID NO: 1109245 - RNA, 20 nt, Human
auggcucacgccuggaaucc

SEQ ID NO: 1109246 - RNA, 25 nt, Human
auugcacuccagacuggacaacaag

SEQ ID NO: 1109247 - RNA, 24 nt, Human
auugugccauugcacuccagacug

SEQ ID NO: 1109248 - RNA, 18 nt, Human
caccauggugaaacucca

SEQ ID NO: 1109249 - RNA, 23 nt, Human
caccugaggucaggaguucaaga

SEQ ID NO: 1109250 - RNA, 24 nt, Human
cacgccuggaauccuagcacuuug

SEQ ID NO: 1109251 - RNA, 24 nt, Human
cacuccagacuggacaacaagagu

SEQ ID NO: 1109252 - RNA, 20 nt, Human
cagccccuggcucaccuccu

SEQ ID NO: 1109253 - RNA, 25 nt, Human
caugccuguaaucccagcuacuuug

SEQ ID NO: 1109254 - RNA, 18 nt, Human
cauggugaaacuccaucu

SEQ ID NO: 1109255 - RNA, 19 nt, Human
cauugcacuccagacugga

SEQ ID NO: 1109256 - RNA, 20 nt, Human
cauugcacuccagacuggac

SEQ ID NO: 1109257 - RNA, 22 nt, Human
cauugcacuccagacuggacaa

SEQ ID NO: 1109258 - RNA, 24 nt, Human
cauugcacuccagacuggacaaca

SEQ ID NO: 1109259 - RNA, 18 nt, Human
ccauugcacuccagacug

SEQ ID NO: 1109260 - RNA, 19 nt, Human
ccauugcacuccagacugg

SEQ ID NO: 1109261 - RNA, 21 nt, Human
ccauugcacuccagacuggac

SEQ ID NO: 1109262 - RNA, 24 nt, Human
ccugaccaccauggugaaacucca

SEQ ID NO: 1109263 - RNA, 18 nt, Human
ccuguaaucccagcuacu

SEQ ID NO: 1109264 - RNA, 22 nt, Human
ccuguaaucccagcuacuuugg

SEQ ID NO: 1109265 - RNA, 20 nt, Human
cgcagcugcuucucggcacc

SEQ ID NO: 1109266 - RNA, 21 nt, Human
cggcagaugcccgcugggugc

SEQ ID NO: 1109267 - RNA, 25 nt, Human
cgggcggguggaucaccugagguca

SEQ ID NO: 1109268 - RNA, 24 nt, Human
cggguggaucaccugaggucagga

SEQ ID NO: 1109269 - RNA, 20 nt, Human
cgucuugcguuuccagcagc

SEQ ID NO: 1109270 - RNA, 18 nt, Human
cucaaaaaaaaaaaaaaa

SEQ ID NO: 1109271 - RNA, 24 nt, Human
cucaaaaaaaaaaaaaaaaagauc

SEQ ID NO: 1109272 - RNA, 24 nt, Human
cucacgccuggaauccuagcacuu

SEQ ID NO: 1109273 - RNA, 23 nt, Human
cucguggcgccccagcagccguc

SEQ ID NO: 1109274 - RNA, 19 nt, Human
cucugucucaaaaaaaaaa

SEQ ID NO: 1109275 - RNA, 21 nt, Human
cugcugcgccuccgcgcgguu

SEQ ID NO: 1109276 - RNA, 23 nt, Human
cugcugcgccuccgcgcgguugg

SEQ ID NO: 1109277 - RNA, 28 nt, Human
cugucucaaaaaaaaaaaaaaaaagauc

SEQ ID NO: 1109278 - RNA, 18 nt, Human
cugugagcugagauugug

SEQ ID NO: 1109279 - RNA, 20 nt, Human
gaccaccauggugaaacucc

SEQ ID NO: 1109280 - RNA, 23 nt, Human
gagaaucgcuugaacccaggagg

SEQ ID NO: 1109281 - RNA, 23 nt, Human
gagauugugccauugcacuccag

SEQ ID NO: 1109282 - RNA, 21 nt, Human
gaucaccugaggucaggaguu

SEQ ID NO: 1109283 - RNA, 23 nt, Human
gaucaccugaggucaggaguuca

SEQ ID NO: 1109284 - RNA, 24 nt, Human
gaucaccugaggucaggaguucaa

SEQ ID NO: 1109285 - RNA, 22 nt, Human
gcagccccuggcucaccuccuc

SEQ ID NO: 1109286 - RNA, 22 nt, Human
gcaggagaaucgcuugaaccca

SEQ ID NO: 1109287 - RNA, 30 nt, Human
gccuggaauccuagcacuuugggaggccaa

SEQ ID NO: 1109288 - RNA, 20 nt, Human
gccuguaaucccagcuacuu

SEQ ID NO: 1109289 - RNA, 22 nt, Human
ggaggccaaggcgggcgggugg

SEQ ID NO: 1109290 - RNA, 21 nt, Human
ggcggguggaucaccugaggu

SEQ ID NO: 1109291 - RNA, 22 nt, Human
gggcacgauggcucacgccugg

SEQ ID NO: 1109292 - RNA, 24 nt, Human
gguggcgcaugccuguaaucccag

SEQ ID NO: 1109293 - RNA, 19 nt, Human
ggugugguggcgcaugccu

SEQ ID NO: 1109294 - RNA, 23 nt, Human
ggugugguggcgcaugccuguaa

SEQ ID NO: 1109295 - RNA, 24 nt, Human
uagcacuuugggaggccaaggcgg

SEQ ID NO: 1109296 - RNA, 23 nt, Human
ucaccugaggucaggaguucaag

SEQ ID NO: 1109297 - RNA, 19 nt, Human
uccgcgcgguuggcgccca

SEQ ID NO: 1109298 - RNA, 24 nt, Human
ucuagcugggcacgauggcucacg

SEQ ID NO: 1109299 - RNA, 21 nt, Human
ucucuaccaaauacaaaaaau

SEQ ID NO: 1109300 - RNA, 23 nt, Human
ucugucucaaaaaaaaaaaaaaa

SEQ ID NO: 1109301 - RNA, 25 nt, Human
ucugucucaaaaaaaaaaaaaaaaa

SEQ ID NO: 1109302 - RNA, 19 nt, Human
ucuugcguuuccagcagcc

SEQ ID NO: 1109303 - RNA, 20 nt, Human
ugaggcaggagaaucgcuug

SEQ ID NO: 1109304 - RNA, 24 nt, Human
ugaggcaggagaaucgcuugaacc

SEQ ID NO: 1109305 - RNA, 25 nt, Human
ugaggcaggagaaucgcuugaaccc

SEQ ID NO: 1109306 - RNA, 25 nt, Human
ugcacuccagacuggacaacaagag

SEQ ID NO: 1109307 - RNA, 19 nt, Human
ugccuguaaucccagcuac

SEQ ID NO: 1109308 - RNA, 24 nt, Human
ugccuguaaucccagcuacuuugg

SEQ ID NO: 1109309 - RNA, 21 nt, Human
ugcucguggcgccccagcagc

SEQ ID NO: 1109310 - RNA, 24 nt, Human
uggaucaccugaggucaggaguuc

SEQ ID NO: 1109311 - RNA, 26 nt, Human
uggaucaccugaggucaggaguucaa

SEQ ID NO: 1109312 - RNA, 21 nt, Human
uggcgcaugccuguaauccca

SEQ ID NO: 1109313 - RNA, 22 nt, Human
uggcgcaugccuguaaucccag

SEQ ID NO: 1109314 - RNA, 21 nt, Human
uggcgcccagcaggcugagca

SEQ ID NO: 1109315 - RNA, 24 nt, Human
uggcucacgccuggaauccuagca

SEQ ID NO: 1109316 - RNA, 28 nt, Human
ugggaggccaaggcgggcggguggauca

SEQ ID NO: 1109317 - RNA, 18 nt, Human
ugggugugguggcgcaug

SEQ ID NO: 1109318 - RNA, 24 nt, Human
ugguggcgcaugccuguaauccca

SEQ ID NO: 1109319 - RNA, 18 nt, Human
uuagcugggugugguggc

SEQ ID NO: 1109320 - RNA, 19 nt, Human
uuagcugggugugguggcg

SEQ ID NO: 1109321 - RNA, 24 nt, Human
uuagcugggugugguggcgcaugc

SEQ ID NO: 1109322 - RNA, 19 nt, Human
uucauuugaaauggaucug

SEQ ID NO: 1109323 - RNA, 19 nt, Human
uugcugugagcugagauug

SEQ ID NO: 1109324 - RNA, 23 nt, Human
uuggaggcugaggcaggagaauc

SEQ ID NO: 1109325 - RNA, 23 nt, Human
uugugccauugcacuccagacug

SEQ ID NO: 1109326 - RNA, 21 nt, Human
aacccuuuguuggaaugcuuu

SEQ ID NO: 1109327 - RNA, 22 nt, Human
aacccuuuguuggaaugcuuuc

SEQ ID NO: 1109328 - RNA, 20 nt, Human
agcauggggugcaaaaagaa

SEQ ID NO: 1109329 - RNA, 19 nt, Human
caacagcauggggugcaaa

SEQ ID NO: 1109330 - RNA, 22 nt, Human
cagcauggggugcaaaaagaaa

SEQ ID NO: 1109331 - RNA, 21 nt, Human
cagggugaagagagacuuuaa

SEQ ID NO: 1109332 - RNA, 21 nt, Human
cuuuccacagaacagaaacua

SEQ ID NO: 1109333 - RNA, 20 nt, Human
gaagagagacuuuaacgaug

SEQ ID NO: 1109334 - RNA, 24 nt, Human
guuuuuugcccauacacaugaguc

SEQ ID NO: 1109335 - RNA, 20 nt, Human
ucucuggcucuccucuccug

SEQ ID NO: 1109336 - RNA, 22 nt, Human
aaaaaaagaaagggaaacagag

SEQ ID NO: 1109337 - RNA, 18 nt, Human
aaaaaagaaagggaaaca

SEQ ID NO: 1109338 - RNA, 23 nt, Human
aaaaaagaaagggaaacagagag

SEQ ID NO: 1109339 - RNA, 21 nt, Human
aaagaaagggaaacagagagu

SEQ ID NO: 1109340 - RNA, 21 nt, Human
aaagggaaacagagagugggg

SEQ ID NO: 1109341 - RNA, 25 nt, Human
acaaaaaaagaaagggaaacagaga

SEQ ID NO: 1109342 - RNA, 21 nt, Human
acggcuccggagugcagcauc

SEQ ID NO: 1109343 - RNA, 22 nt, Human
aggagcccuggagagaggggac

SEQ ID NO: 1109344 - RNA, 22 nt, Human
aggggacaaaaaaagaaaggga

SEQ ID NO: 1109345 - RNA, 22 nt, Human
caaacuagccacacugccgagc

SEQ ID NO: 1109346 - RNA, 20 nt, Human
cacaaacuagccacacugcc

SEQ ID NO: 1109347 - RNA, 21 nt, Human
cacagguaggaggucaccagg

SEQ ID NO: 1109348 - RNA, 21 nt, Human
caccagguaggacaccaccgg

SEQ ID NO: 1109349 - RNA, 23 nt, Human
cacccuggcugggcaccaggggc

SEQ ID NO: 1109350 - RNA, 18 nt, Human
cagcgucugaguuccgcu

SEQ ID NO: 1109351 - RNA, 23 nt, Human
caggagcccuggagagaggggac

SEQ ID NO: 1109352 - RNA, 26 nt, Human
ccacacaaacuagccacacugccgag

SEQ ID NO: 1109353 - RNA, 21 nt, Human
ccaccuggggacaagggugga

SEQ ID NO: 1109354 - RNA, 24 nt, Human
ccgccgcgcauucaagggcugccc

SEQ ID NO: 1109355 - RNA, 25 nt, Human
ccgccgcgcauucaagggcugcccu

SEQ ID NO: 1109356 - RNA, 19 nt, Human
ccucgcugcgcccugcugc

SEQ ID NO: 1109357 - RNA, 21 nt, Human
cugaagagaaaucaggagccc

SEQ ID NO: 1109358 - RNA, 22 nt, Human
cugcccucugcuucacaugccc

SEQ ID NO: 1109359 - RNA, 18 nt, Human
gagagagagacaucccac

SEQ ID NO: 1109360 - RNA, 25 nt, Human
gagcugaggccggaacuccgggaaa

SEQ ID NO: 1109361 - RNA, 22 nt, Human
gaggggcccguucugcagaagg

SEQ ID NO: 1109362 - RNA, 18 nt, Human
gcugggcaccaggggcag

SEQ ID NO: 1109363 - RNA, 18 nt, Human
ggaaacagagaguggggg

SEQ ID NO: 1109364 - RNA, 19 nt, Human
ggaaagaaguuccaugcag

SEQ ID NO: 1109365 - RNA, 18 nt, Human
ggacaaaaaaagaaaggg

SEQ ID NO: 1109366 - RNA, 22 nt, Human
ggcccggggugcgcucggaguc

SEQ ID NO: 1109367 - RNA, 20 nt, Human
guggcggggaagccagaaaa

SEQ ID NO: 1109368 - RNA, 23 nt, Human
guuuggauguccgccucgcugcg

SEQ ID NO: 1109369 - RNA, 24 nt, Human
uaacugaaaagagcgucaggcuga

SEQ ID NO: 1109370 - RNA, 23 nt, Human
uaggacaccaccggacuugggug

SEQ ID NO: 1109371 - RNA, 20 nt, Human
uccaccuggggacaaggguu

SEQ ID NO: 1109372 - RNA, 23 nt, Human
ugaaaagagcgucaggcugaaga

SEQ ID NO: 1109373 - RNA, 26 nt, Human
ugcagcaucaagucgcuggcgucccc

SEQ ID NO: 1109374 - RNA, 19 nt, Human
ugcugcacggcccacccgc

SEQ ID NO: 1109375 - RNA, 24 nt, Human
ugcuucacaugcccacugggcuua

SEQ ID NO: 1109376 - RNA, 20 nt, Human
uggcugggcaccaggggcag

SEQ ID NO: 1109377 - RNA, 18 nt, Human
ugggcggugcugugucca

SEQ ID NO: 1109378 - RNA, 20 nt, Human
uggggacaaggguggacauc

SEQ ID NO: 1109379 - RNA, 21 nt, Human
ugggggagagagagacauccc

SEQ ID NO: 1109380 - RNA, 22 nt, Human
ugggggagagagagacauccca

SEQ ID NO: 1109381 - RNA, 22 nt, Human
uguccgccucgcugcgcccugc

SEQ ID NO: 1109382 - RNA, 23 nt, Human
aggaccaagaccaaggccuggga

SEQ ID NO: 1109383 - RNA, 23 nt, Human
agggcacgauggaggugaaggug

SEQ ID NO: 1109384 - RNA, 21 nt, Human
auggaggugaaggugucuaca

SEQ ID NO: 1109385 - RNA, 25 nt, Human
caagaccaaggccugggacaacugg

SEQ ID NO: 1109386 - RNA, 22 nt, Human
caggcccugggucccaaaggcc

SEQ ID NO: 1109387 - RNA, 27 nt, Human
cccaggaccaagaccaaggccugggac

SEQ ID NO: 1109388 - RNA, 22 nt, Human
ccugggucccaaaggccgagag

SEQ ID NO: 1109389 - RNA, 19 nt, Human
gaggugaaggugucuacag

SEQ ID NO: 1109390 - RNA, 19 nt, Human
gcccugggucccaaaggcc

SEQ ID NO: 1109391 - RNA, 18 nt, Human
ggcccaggaccaagacca

SEQ ID NO: 1109392 - RNA, 19 nt, Human
uggcaggcccuggguccca

SEQ ID NO: 1109393 - RNA, 23 nt, Human
uggcaggcccugggucccaaagg

SEQ ID NO: 1109394 - RNA, 21 nt, Human
uuguacgcguguacuccggcc

SEQ ID NO: 1109395 - RNA, 19 nt, Human
uuuguacgcguguacuccg

SEQ ID NO: 1109396 - RNA, 21 nt, Human
uuuguacgcguguacuccggc

SEQ ID NO: 1109397 - RNA, 24 nt, Human
acaccacugcacuccagcguaggc

SEQ ID NO: 1109398 - RNA, 25 nt, Human
acugcacuccagcguaggacaacgg

SEQ ID NO: 1109399 - RNA, 26 nt, Human
acugcacuccagcguaggacaucggg

SEQ ID NO: 1109400 - RNA, 21 nt, Human
agaaauggaaaggagaagaga

SEQ ID NO: 1109401 - RNA, 22 nt, Human
agccccuuccuguguccccucc

SEQ ID NO: 1109402 - RNA, 23 nt, Human
aggcaggaaaaucgcuugagucc

SEQ ID NO: 1109403 - RNA, 24 nt, Human
aggcaggaaaaucgcuugagucca

SEQ ID NO: 1109404 - RNA, 22 nt, Human
aggccuccugguccucuuccag

SEQ ID NO: 1109405 - RNA, 21 nt, Human
agguugaggcaggaaaaucgc

SEQ ID NO: 1109406 - RNA, 24 nt, Human
agguugaggcaggaaaaucgcuug

SEQ ID NO: 1109407 - RNA, 20 nt, Human
aguuccuggcacauaagggc

SEQ ID NO: 1109408 - RNA, 20 nt, Human
aucacaccacugcacuccag

SEQ ID NO: 1109409 - RNA, 20 nt, Human
caaaacaagacccuccucac

SEQ ID NO: 1109410 - RNA, 26 nt, Human
caccacugcacuccagcguaggcgac

SEQ ID NO: 1109411 - RNA, 19 nt, Human
cacugcacuccagcguagg

SEQ ID NO: 1109412 - RNA, 20 nt, Human
cacugcacuccagcguaggc

SEQ ID NO: 1109413 - RNA, 22 nt, Human
cacugcacuccagcguaggcga

SEQ ID NO: 1109414 - RNA, 23 nt, Human
cacugcacuccagcguaggcgac

SEQ ID NO: 1109415 - RNA, 20 nt, Human
ccacugcacuccagcguagg

SEQ ID NO: 1109416 - RNA, 20 nt, Human
ccacugcacuccagcguagg

SEQ ID NO: 1109417 - RNA, 21 nt, Human
ccacugcacuccagcguaggc

SEQ ID NO: 1109418 - RNA, 24 nt, Human
ccacugcacuccagcguaggcgac

SEQ ID NO: 1109419 - RNA, 25 nt, Human
ccacugcacuccagcguaggcgaca

SEQ ID NO: 1109420 - RNA, 22 nt, Human
ccaggaaguugaggcugcagug

SEQ ID NO: 1109421 - RNA, 21 nt, Human
ccguggccaccaccucccauc

SEQ ID NO: 1109422 - RNA, 22 nt, Human
ccucacaauucaugcaagugcc

SEQ ID NO: 1109423 - RNA, 25 nt, Human
ccucacaggcguggcugaggggugg

SEQ ID NO: 1109424 - RNA, 20 nt, Human
ccuguguccccuccagggcc

SEQ ID NO: 1109425 - RNA, 20 nt, Human
cgaccuggccgccaucuugg

SEQ ID NO: 1109426 - RNA, 18 nt, Human
cuuccuguguccccucca

SEQ ID NO: 1109427 - RNA, 18 nt, Human
cuugggagguugaggcag

SEQ ID NO: 1109428 - RNA, 19 nt, Human
gaccuggccgccaucuugg

SEQ ID NO: 1109429 - RNA, 23 nt, Human
gagaggccguggccaccaccucc

SEQ ID NO: 1109430 - RNA, 19 nt, Human
gagcaggcgaccuggccgc

SEQ ID NO: 1109431 - RNA, 19 nt, Human
gcaccacaucuccauugcu

SEQ ID NO: 1109432 - RNA, 21 nt, Human
gcaggcagccccuuccugugu

SEQ ID NO: 1109433 - RNA, 22 nt, Human
gcccgcgcaacggccgggcacc

SEQ ID NO: 1109434 - RNA, 20 nt, Human
gcugugaucacaccacugca

SEQ ID NO: 1109435 - RNA, 18 nt, Human
ggagaagagagcgcgggc

SEQ ID NO: 1109436 - RNA, 22 nt, Human
ggccgggcacccggcgguucag

SEQ ID NO: 1109437 - RNA, 19 nt, Human
uacgucaucagcccgcgca

SEQ ID NO: 1109438 - RNA, 21 nt, Human
ucagcccgcgcaacggccggg

SEQ ID NO: 1109439 - RNA, 21 nt, Human
uccguacgucaucagcccgcg

SEQ ID NO: 1109440 - RNA, 23 nt, Human
uccguacgucaucagcccgcggu

SEQ ID NO: 1109441 - RNA, 24 nt, Human
ucgcuugaguccaggaaguugagg

SEQ ID NO: 1109442 - RNA, 20 nt, Human
ugaggcaggaaaaucgcuug

SEQ ID NO: 1109443 - RNA, 24 nt, Human
ugaggcaggaaaaucgcuugaguc

SEQ ID NO: 1109444 - RNA, 25 nt, Human
ugaggcaggaaaaucgcuugagucc

SEQ ID NO: 1109445 - RNA, 23 nt, Human
ugaggcugcagugagcugugauc

SEQ ID NO: 1109446 - RNA, 21 nt, Human
ugggagagggcaacgccggca

SEQ ID NO: 1109447 - RNA, 19 nt, Human
ugggaggcccgagcaggcg

SEQ ID NO: 1109448 - RNA, 22 nt, Human
ugggagguugaggcaggaaaau

SEQ ID NO: 1109449 - RNA, 23 nt, Human
ugggagguugaggcaggaaaauc

SEQ ID NO: 1109450 - RNA, 20 nt, Human
uguccauggggaucuggggu

SEQ ID NO: 1109451 - RNA, 18 nt, Human
uugaagggucauagguca

SEQ ID NO: 1109452 - RNA, 25 nt, Human
caccuguccccccuuuucgccccca

SEQ ID NO: 1109453 - RNA, 22 nt, Human
cagccuccucccccaccugucc

SEQ ID NO: 1109454 - RNA, 26 nt, Human
cagccuccucccccaccugucccccc

SEQ ID NO: 1109455 - RNA, 23 nt, Human
ccacuccccgcucuucucgaucu

SEQ ID NO: 1109456 - RNA, 18 nt, Human
ccccaccuguccccccuu

SEQ ID NO: 1109457 - RNA, 19 nt, Human
ccccaccuguccccccuuu

SEQ ID NO: 1109458 - RNA, 21 nt, Human
ccccaccuguccccccuuuuc

SEQ ID NO: 1109459 - RNA, 21 nt, Human
ccccacuccccgcucuucucg

SEQ ID NO: 1109460 - RNA, 18 nt, Human
ccccccuuuucgccccca

SEQ ID NO: 1109461 - RNA, 25 nt, Human
ccccgcucuucucgaucuucuuucu

SEQ ID NO: 1109462 - RNA, 20 nt, Human
cccucgggcuuuccccagcc

SEQ ID NO: 1109463 - RNA, 22 nt, Human
ccucccucccucucuuccuccc

SEQ ID NO: 1109464 - RNA, 25 nt, Human
cugcgucuucagcaccaaugucgac

SEQ ID NO: 1109465 - RNA, 24 nt, Human
cugcgucuucagcaccaaugucgg

SEQ ID NO: 1109466 - RNA, 19 nt, Human
cuguccccccuuuucgccc

SEQ ID NO: 1109467 - RNA, 20 nt, Human
cuguccccccuuuucgcccc

SEQ ID NO: 1109468 - RNA, 18 nt, Human
cuucuuucuggccgaccc

SEQ ID NO: 1109469 - RNA, 19 nt, Human
cuuuucgcccccacucccc

SEQ ID NO: 1109470 - RNA, 24 nt, Human
gaaggcgagauccagcucuccacu

SEQ ID NO: 1109471 - RNA, 22 nt, Human
gcaccaaugucgggagaggcca

SEQ ID NO: 1109472 - RNA, 21 nt, Human
gcgucuucagcaccaaugucg

SEQ ID NO: 1109473 - RNA, 20 nt, Human
gcuuuccccagccuccuccc

SEQ ID NO: 1109474 - RNA, 21 nt, Human
gcuuuccccagccuccucccc

SEQ ID NO: 1109475 - RNA, 23 nt, Human
ggagaggccacggggccacacug

SEQ ID NO: 1109476 - RNA, 22 nt, Human
uccccagccuccucccccaccu

SEQ ID NO: 1109477 - RNA, 24 nt, Human
uccccagccuccucccccaccugu

SEQ ID NO: 1109478 - RNA, 21 nt, Human
ucccccaccuguccccccuuu

SEQ ID NO: 1109479 - RNA, 23 nt, Human
ucccucgggcuuuccccagccuc

SEQ ID NO: 1109480 - RNA, 21 nt, Human
ugucgggagaggccacggggc

SEQ ID NO: 1109481 - RNA, 21 nt, Human
uuuccccagccuccuccccca

SEQ ID NO: 1109482 - RNA, 19 nt, Human
aaaggaggggguugagcuc

SEQ ID NO: 1109483 - RNA, 21 nt, Human
aaaggaggggguugagcucug

SEQ ID NO: 1109484 - RNA, 19 nt, Human
agaaaggaggggguugagc

SEQ ID NO: 1109485 - RNA, 21 nt, Human
agaacccaaccuguaccucuc

SEQ ID NO: 1109486 - RNA, 24 nt, Human
cagagacagcaaugguaggcagag

SEQ ID NO: 1109487 - RNA, 18 nt, Human
ccacugggagaaaggagg

SEQ ID NO: 1109488 - RNA, 19 nt, Human
gagaacccaaccuguaccu

SEQ ID NO: 1109489 - RNA, 18 nt, Human
ggaaaccuuuucuccgcu

SEQ ID NO: 1109490 - RNA, 21 nt, Human
ggaggggguugagcucuggaa

SEQ ID NO: 1109491 - RNA, 22 nt, Human
gguaggcagagaacccaaccug

SEQ ID NO: 1109492 - RNA, 23 nt, Human
uagggaaaccuuuucuccgcuug

SEQ ID NO: 1109493 - RNA, 21 nt, Human
ugggagaaaggaggggguuga

SEQ ID NO: 1109494 - RNA, 20 nt, Human
acauuggaaaaaccacuuua

SEQ ID NO: 1109495 - RNA, 19 nt, Human
agaucuagucuccacuccu

SEQ ID NO: 1109496 - RNA, 22 nt, Human
agguguguacauuggaaaaacc

SEQ ID NO: 1109497 - RNA, 23 nt, Human
cacauauuaccuuagccuauguu

SEQ ID NO: 1109498 - RNA, 20 nt, Human
caggcaauagugccugggcc

SEQ ID NO: 1109499 - RNA, 22 nt, Human
ccuggcgcugagagcccaggaa

SEQ ID NO: 1109500 - RNA, 24 nt, Human
ccuggcgcugagagcccaggaacu

SEQ ID NO: 1109501 - RNA, 22 nt, Human
cgcugagagcccaggaacucca

SEQ ID NO: 1109502 - RNA, 22 nt, Human
cucuacugguacacauauuacc

SEQ ID NO: 1109503 - RNA, 24 nt, Human
cuggcgcugagagcccaggaacuc

SEQ ID NO: 1109504 - RNA, 21 nt, Human
gagcccaggaacuccaggcaa

SEQ ID NO: 1109505 - RNA, 20 nt, Human
gcccaggaacuccaggcaag

SEQ ID NO: 1109506 - RNA, 18 nt, Human
gggcugggucugguucga

SEQ ID NO: 1109507 - RNA, 22 nt, Human
gggcugggucugguucgagggc

SEQ ID NO: 1109508 - RNA, 18 nt, Human
uagucuccacuccugagu

SEQ ID NO: 1109509 - RNA, 18 nt, Human
uccuggcgcugagagccc

SEQ ID NO: 1109510 - RNA, 21 nt, Human
ugccugggcuacagggcuggg

SEQ ID NO: 1109511 - RNA, 22 nt, Human
uuagugaaaguugauuuucuuu

SEQ ID NO: 1109512 - RNA, 21 nt, Human
uuccucaggcuucucuacugg

SEQ ID NO: 1109513 - RNA, 18 nt, Human
uuguaaauuccucaggcu

SEQ ID NO: 1109514 - RNA, 24 nt, Human
acugccaauccauaaugaccacga

SEQ ID NO: 1109515 - RNA, 18 nt, Human
gaccacgacuccuguuug

SEQ ID NO: 1109516 - RNA, 18 nt, Human
gguguuggcuguuguggc

SEQ ID NO: 1109517 - RNA, 24 nt, Human
guuggcuguuguggcugcccuucu

SEQ ID NO: 1109518 - RNA, 24 nt, Human
uaaugaccacgacuccuguuuggu

SEQ ID NO: 1109519 - RNA, 22 nt, Human
uggcuguuguggcugcccuucu

SEQ ID NO: 1109520 - RNA, 21 nt, Human
uguuggcuguuguggcugccc

SEQ ID NO: 1109521 - RNA, 24 nt, Human
uguuggcuguuguggcugcccuuc

SEQ ID NO: 1109522 - RNA, 24 nt, Human
acacuacauuaaaaauuaccuagu

SEQ ID NO: 1109523 - RNA, 22 nt, Human
acuacauuaaaaauuaccuagu

SEQ ID NO: 1109524 - RNA, 20 nt, Human
cacacgugugccugugugug

SEQ ID NO: 1109525 - RNA, 21 nt, Human
cacgugucuguuugccugugg

SEQ ID NO: 1109526 - RNA, 20 nt, Human
cagcuucgaggcuaccaccu

SEQ ID NO: 1109527 - RNA, 20 nt, Human
ccggagcuggcgcgggggag

SEQ ID NO: 1109528 - RNA, 25 nt, Human
cugugugugcgucucugcacguguc

SEQ ID NO: 1109529 - RNA, 21 nt, Human
cuucgaggcuaccaccugccc

SEQ ID NO: 1109530 - RNA, 20 nt, Human
cuugagucccgguuccuucg

SEQ ID NO: 1109531 - RNA, 23 nt, Human
cuuggagggcucggugccggagg

SEQ ID NO: 1109532 - RNA, 22 nt, Human
gacgugugugugcgcgcgugug

SEQ ID NO: 1109533 - RNA, 23 nt, Human
gacgugugugugcgcgcgugugu

SEQ ID NO: 1109534 - RNA, 22 nt, Human
gagccggagcuggcgcggggga

SEQ ID NO: 1109535 - RNA, 22 nt, Human
gaugcagccucccagcuucgag

SEQ ID NO: 1109536 - RNA, 19 nt, Human
gccugugugugcgucucug

SEQ ID NO: 1109537 - RNA, 21 nt, Human
gggccucgggcuacuggaucc

SEQ ID NO: 1109538 - RNA, 19 nt, Human
gggugugcgcgcacgucuc

SEQ ID NO: 1109539 - RNA, 18 nt, Human
ggugccggaggcuacucu

SEQ ID NO: 1109540 - RNA, 19 nt, Human
gucaggagcccgggucugg

SEQ ID NO: 1109541 - RNA, 20 nt, Human
gugugugugcgcgcguguga

SEQ ID NO: 1109542 - RNA, 19 nt, Human
uaggaggaggcuugagaug

SEQ ID NO: 1109543 - RNA, 23 nt, Human
ucagggucucuuaaggacccucc

SEQ ID NO: 1109544 - RNA, 22 nt, Human
ucuguguuugcaucucugugug

SEQ ID NO: 1109545 - RNA, 20 nt, Human
ugacauuaauuacacuacau

SEQ ID NO: 1109546 - RNA, 22 nt, Human
ugccuguggugcacacgcgugg

SEQ ID NO: 1109547 - RNA, 20 nt, Human
ugccugugugcacacgugug

SEQ ID NO: 1109548 - RNA, 19 nt, Human
ugcgcgcacgucuccgugu

SEQ ID NO: 1109549 - RNA, 20 nt, Human
ugcgcgcgugugucucucuu

SEQ ID NO: 1109550 - RNA, 18 nt, Human
uggagggcucggugccgg

SEQ ID NO: 1109551 - RNA, 20 nt, Human
uggagggcucggugccggag

SEQ ID NO: 1109552 - RNA, 19 nt, Human
uggcucaggcggaacccga

SEQ ID NO: 1109553 - RNA, 18 nt, Human
ugggcggggaccccaagg

SEQ ID NO: 1109554 - RNA, 22 nt, Human
uggugcacacgcgugucugugu

SEQ ID NO: 1109555 - RNA, 23 nt, Human
uggugcacacgcgugucugugug

SEQ ID NO: 1109556 - RNA, 24 nt, Human
ugucuguguuugcaucucugugug

SEQ ID NO: 1109557 - RNA, 20 nt, Human
ugugcacacgugugccugug

SEQ ID NO: 1109558 - RNA, 18 nt, Human
ugugcacacgugugucug

SEQ ID NO: 1109559 - RNA, 22 nt, Human
ugugcacacgugugucugugug

SEQ ID NO: 1109560 - RNA, 19 nt, Human
ugugcgcacgugucugcgu

SEQ ID NO: 1109561 - RNA, 26 nt, Human
ugugcgcacgugucugcgugcgcgug

SEQ ID NO: 1109562 - RNA, 22 nt, Human
ugugcgcgcgucagugugugca

SEQ ID NO: 1109563 - RNA, 24 nt, Human
ugugugcacacgugugccugugug

SEQ ID NO: 1109564 - RNA, 27 nt, Human
ugugugcacacgugugccugugugugc

SEQ ID NO: 1109565 - RNA, 25 nt, Human
ugugugcacacgugugucugugugc

SEQ ID NO: 1109566 - RNA, 22 nt, Human
ugugugcacgcgugugucugug

SEQ ID NO: 1109567 - RNA, 25 nt, Human
ugugugcacgcgugugucuguguuu

SEQ ID NO: 1109568 - RNA, 24 nt, Human
ugugugcgcgcgugugucucucug

SEQ ID NO: 1109569 - RNA, 22 nt, Human
uguuugcaucucugugugugca

SEQ ID NO: 1109570 - RNA, 27 nt, Human
uuuaauuuucuuugggugugaguuuuc

SEQ ID NO: 1109571 - RNA, 23 nt, Human
aaaaaaaaaaaaaaaaaaaagag

SEQ ID NO: 1109572 - RNA, 26 nt, Human
aaaaaaaagagaaacuaggaagagaa

SEQ ID NO: 1109573 - RNA, 23 nt, Human
aaaaaaagagaaacuaggaagag

SEQ ID NO: 1109574 - RNA, 24 nt, Human
aaaaaagagaaacuaggaagagaa

SEQ ID NO: 1109575 - RNA, 24 nt, Human
aauggcaugcaccuguagucccag

SEQ ID NO: 1109576 - RNA, 24 nt, Human
aggaucacuugagcccaggaguuu

SEQ ID NO: 1109577 - RNA, 18 nt, Human
aggcaggaggaucacuug

SEQ ID NO: 1109578 - RNA, 23 nt, Human
aggcaggaggaucacuugagccc

SEQ ID NO: 1109579 - RNA, 24 nt, Human
aggcaggaggaucacuugagccca

SEQ ID NO: 1109580 - RNA, 24 nt, Human
aggcugaggcaggaggaucacuug

SEQ ID NO: 1109581 - RNA, 20 nt, Human
aucacuugagcccaggaguu

SEQ ID NO: 1109582 - RNA, 24 nt, Human
aucacuugagcccaggaguuugag

SEQ ID NO: 1109583 - RNA, 24 nt, Human
cacaccacuggucauuugcaccug

SEQ ID NO: 1109584 - RNA, 22 nt, Human
caccugggugagagaauuagac

SEQ ID NO: 1109585 - RNA, 24 nt, Human
caccuguagucccagguacucagg

SEQ ID NO: 1109586 - RNA, 24 nt, Human
caggaggcugaggcaggaggauca

SEQ ID NO: 1109587 - RNA, 24 nt, Human
cagguacucaggaggcugaggcag

SEQ ID NO: 1109588 - RNA, 21 nt, Human
ccuguagucccagguacucag

SEQ ID NO: 1109589 - RNA, 22 nt, Human
ccugucugaaaaaaaaaaaaaa

SEQ ID NO: 1109590 - RNA, 18 nt, Human
gagcccaggaguuugagg

SEQ ID NO: 1109591 - RNA, 24 nt, Human
gaucacuugagcccaggaguuuga

SEQ ID NO: 1109592 - RNA, 24 nt, Human
gcccaggaguuugaggcugcagug

SEQ ID NO: 1109593 - RNA, 21 nt, Human
gcugcagugagcuaugagcua

SEQ ID NO: 1109594 - RNA, 20 nt, Human
ggacauaacuccuucuuuuu

SEQ ID NO: 1109595 - RNA, 22 nt, Human
ggaucacuugagcccaggaguu

SEQ ID NO: 1109596 - RNA, 23 nt, Human
gucugaaaaaaaaaaaaaaaaaa

SEQ ID NO: 1109597 - RNA, 23 nt, Human
uaaaaaauaaaaaaauuagccug

SEQ ID NO: 1109598 - RNA, 23 nt, Human
uaugagcuaugaucacaccacug

SEQ ID NO: 1109599 - RNA, 20 nt, Human
ugaggcaggaggaucacuug

SEQ ID NO: 1109600 - RNA, 24 nt, Human
ugaggcaggaggaucacuugagcc

SEQ ID NO: 1109601 - RNA, 25 nt, Human
ugaggcaggaggaucacuugagccc

SEQ ID NO: 1109602 - RNA, 18 nt, Human
aaggccucuccagggccc

SEQ ID NO: 1109603 - RNA, 19 nt, Human
agagacagggaugcuggcu

SEQ ID NO: 1109604 - RNA, 19 nt, Human
agggcagugaggccaggug

SEQ ID NO: 1109605 - RNA, 18 nt, Human
ccccagagacagggaugc

SEQ ID NO: 1109606 - RNA, 24 nt, Human
ccucuccagggccccagagacagg

SEQ ID NO: 1109607 - RNA, 22 nt, Human
cuccagggccccagagacagga

SEQ ID NO: 1109608 - RNA, 22 nt, Human
gccucuccagggccccagagac

SEQ ID NO: 1109609 - RNA, 20 nt, Human
uaauuaccagugucuguaau

SEQ ID NO: 1109610 - RNA, 24 nt, Human
uugaaggccucuccagggccccag

SEQ ID NO: 1109611 - RNA, 26 nt, Human
uuuauaggagaugcucggccucuuug

SEQ ID NO: 1109612 - RNA, 18 nt, Human
agagucuggcuuguggau

SEQ ID NO: 1109613 - RNA, 21 nt, Human
aguggaggccaagagucuggc

SEQ ID NO: 1109614 - RNA, 24 nt, Human
ggcuuuugcccagcauaacaacuc

SEQ ID NO: 1109615 - RNA, 20 nt, Human
uggcuuguggaugggcaugg

SEQ ID NO: 1109616 - RNA, 22 nt, Human
aaagucccagccagaccagguu

SEQ ID NO: 1109617 - RNA, 18 nt, Human
aaccacucauaagcauuu

SEQ ID NO: 1109618 - RNA, 24 nt, Human
aaccucuaauuuaaaaaauaaucu

SEQ ID NO: 1109619 - RNA, 27 nt, Human
acagagcauauuuaaaaagacucaaag

SEQ ID NO: 1109620 - RNA, 23 nt, Human
acagauuuagaaauggaaagucc

SEQ ID NO: 1109621 - RNA, 20 nt, Human
acaucuggcaaugggccucu

SEQ ID NO: 1109622 - RNA, 24 nt, Human
accuagugauaaaccucuaauuua

SEQ ID NO: 1109623 - RNA, 18 nt, Human
acugagucugaaccacuc

SEQ ID NO: 1109624 - RNA, 19 nt, Human
agcaucacaguuguguaca

SEQ ID NO: 1109625 - RNA, 23 nt, Human
aggagauauaccuagugauaaac

SEQ ID NO: 1109626 - RNA, 19 nt, Human
auggcccagccuccgcgug

SEQ ID NO: 1109627 - RNA, 19 nt, Human
caagaaaggagaaacggcg

SEQ ID NO: 1109628 - RNA, 23 nt, Human
caaugaaauaucauuccauacaa

SEQ ID NO: 1109629 - RNA, 22 nt, Human
cacaaaaaauacauaucaacag

SEQ ID NO: 1109630 - RNA, 18 nt, Human
cacacuucacaaaaaaua

SEQ ID NO: 1109631 - RNA, 18 nt, Human
cagguucugauaauucuc

SEQ ID NO: 1109632 - RNA, 18 nt, Human
caguauagauuuccacau

SEQ ID NO: 1109633 - RNA, 19 nt, Human
cauaagcauuuucuaugcu

SEQ ID NO: 1109634 - RNA, 22 nt, Human
caucacaguuguguacaaaucu

SEQ ID NO: 1109635 - RNA, 23 nt, Human
caucacaguuguguacaaaucuc

SEQ ID NO: 1109636 - RNA, 21 nt, Human
ccaagaaaggagaaacggcga

SEQ ID NO: 1109637 - RNA, 19 nt, Human
ccagccagaccagguucug

SEQ ID NO: 1109638 - RNA, 19 nt, Human
ccagugugaauucucucau

SEQ ID NO: 1109639 - RNA, 19 nt, Human
cccuggagcccgccgaccu

SEQ ID NO: 1109640 - RNA, 25 nt, Human
cgccgaccugaagcagcggccgcac

SEQ ID NO: 1109641 - RNA, 23 nt, Human
cucucucccguguggauucuuug

SEQ ID NO: 1109642 - RNA, 26 nt, Human
cugcccaagaaaggagaaacggcgag

SEQ ID NO: 1109643 - RNA, 22 nt, Human
cuggagcugagacauggcuaac

SEQ ID NO: 1109644 - RNA, 18 nt, Human
gcacugcgcuggaaccgu

SEQ ID NO: 1109645 - RNA, 18 nt, Human
gccauguuggugugcugc

SEQ ID NO: 1109646 - RNA, 19 nt, Human
ggggagggauagcauuagg

SEQ ID NO: 1109647 - RNA, 21 nt, Human
gucucucucccguguggauuc

SEQ ID NO: 1109648 - RNA, 18 nt, Human
guggcgcugggaaaaaua

SEQ ID NO: 1109649 - RNA, 24 nt, Human
uaaaaagacucaaaguacaaagua

SEQ ID NO: 1109650 - RNA, 22 nt, Human
uaacagagcauauuuaaaaaga

SEQ ID NO: 1109651 - RNA, 19 nt, Human
uaagguuucucaccagugu

SEQ ID NO: 1109652 - RNA, 21 nt, Human
uaaguuuuaggguaccaugug

SEQ ID NO: 1109653 - RNA, 22 nt, Human
uaaucucugcaccuggcacauc

SEQ ID NO: 1109654 - RNA, 20 nt, Human
uaccuagugauaaaccucua

SEQ ID NO: 1109655 - RNA, 24 nt, Human
uaccuagugauaaaccucuaauuu

SEQ ID NO: 1109656 - RNA, 21 nt, Human
uaggagauauaccuagugaua

SEQ ID NO: 1109657 - RNA, 21 nt, Human
ucaaaguacaaaguacuggug

SEQ ID NO: 1109658 - RNA, 22 nt, Human
ucaacacacacuucacaaaaaa

SEQ ID NO: 1109659 - RNA, 20 nt, Human
uccaaggcaguuuccuuuuc

SEQ ID NO: 1109660 - RNA, 18 nt, Human
ucccuggagcccgccgac

SEQ ID NO: 1109661 - RNA, 18 nt, Human
uccuuggagaagucaaug

SEQ ID NO: 1109662 - RNA, 22 nt, Human
ucuaugcugcguccucucaguc

SEQ ID NO: 1109663 - RNA, 26 nt, Human
ucuaugcugcguccucucagucugga

SEQ ID NO: 1109664 - RNA, 24 nt, Human
ucucucugagcaggguucaggaau

SEQ ID NO: 1109665 - RNA, 18 nt, Human
ucucuuauggagaguaag

SEQ ID NO: 1109666 - RNA, 23 nt, Human
ucugaaccacucauaagcauuuu

SEQ ID NO: 1109667 - RNA, 27 nt, Human
ucuggagcugagacauggccggggucc

SEQ ID NO: 1109668 - RNA, 18 nt, Human
ugaaauaucauuccauac

SEQ ID NO: 1109669 - RNA, 19 nt, Human
ugaaaucacagauuuagaa

SEQ ID NO: 1109670 - RNA, 20 nt, Human
ugaaccacucauaagcauuu

SEQ ID NO: 1109671 - RNA, 23 nt, Human
ugagucugaaccacucauaagca

SEQ ID NO: 1109672 - RNA, 21 nt, Human
ugcagguuuguuacauaugua

SEQ ID NO: 1109673 - RNA, 19 nt, Human
ugccauguuggugugcugc

SEQ ID NO: 1109674 - RNA, 18 nt, Human
uggaaugucacucauccc

SEQ ID NO: 1109675 - RNA, 18 nt, Human
uguuacauauguauacau

SEQ ID NO: 1109676 - RNA, 19 nt, Human
uguuacauauguauacaug

SEQ ID NO: 1109677 - RNA, 22 nt, Human
uguuggugugcugcaccauuaa

SEQ ID NO: 1109678 - RNA, 24 nt, Human
uucacaaaaaauacauaucaacag

SEQ ID NO: 1109679 - RNA, 18 nt, Human
uuuaauacauucguuaca

SEQ ID NO: 1109680 - RNA, 21 nt, Human
uuuauagggucucucucccgu

SEQ ID NO: 1109681 - RNA, 25 nt, Human
aaauggaagugcaaagauuggaacc

SEQ ID NO: 1109682 - RNA, 23 nt, Human
aaccaugggaugccacugaggga

SEQ ID NO: 1109683 - RNA, 21 nt, Human
aacuuuggaagguaaccugga

SEQ ID NO: 1109684 - RNA, 21 nt, Human
aagcacaaacugcugccccca

SEQ ID NO: 1109685 - RNA, 20 nt, Human
aaucauggcugagaugauug

SEQ ID NO: 1109686 - RNA, 22 nt, Human
acaaagcacaaacugcugcccc

SEQ ID NO: 1109687 - RNA, 22 nt, Human
accuccuucggcgcgguccuug

SEQ ID NO: 1109688 - RNA, 18 nt, Human
acuccuucagcuccucug

SEQ ID NO: 1109689 - RNA, 19 nt, Human
caagguguuagaggcuagg

SEQ ID NO: 1109690 - RNA, 19 nt, Human
caccuccuucggcgcgguc

SEQ ID NO: 1109691 - RNA, 24 nt, Human
caccuccuucggcgcgguccuugg

SEQ ID NO: 1109692 - RNA, 27 nt, Human
cagugggcaccuccuucggcgcggucc

SEQ ID NO: 1109693 - RNA, 23 nt, Human
ccugagaaagucgagcgccuccu

SEQ ID NO: 1109694 - RNA, 18 nt, Human
cgcgguccuuggaggccg

SEQ ID NO: 1109695 - RNA, 20 nt, Human
cuuuaugcuaggcacgcugc

SEQ ID NO: 1109696 - RNA, 18 nt, Human
gaaauggaagugcaaaga

SEQ ID NO: 1109697 - RNA, 21 nt, Human
gacaauggugaguacaaggag

SEQ ID NO: 1109698 - RNA, 21 nt, Human
gcccccaaauuagagggcagg

SEQ ID NO: 1109699 - RNA, 23 nt, Human
gggcaggaaauggaagugcaaag

SEQ ID NO: 1109700 - RNA, 24 nt, Human
guuuuuaggcuauuuugaagaaug

SEQ ID NO: 1109701 - RNA, 24 nt, Human
uagaaacuuuggaagguaaccugg

SEQ ID NO: 1109702 - RNA, 23 nt, Human
uaugcuaggcacgcugcugagca

SEQ ID NO: 1109703 - RNA, 27 nt, Human
uauuucauucuucuauuaacuucugag

SEQ ID NO: 1109704 - RNA, 23 nt, Human
ucaaauauauuaaugugcauugg

SEQ ID NO: 1109705 - RNA, 24 nt, Human
ucccacacuauaaauaagacugaa

SEQ ID NO: 1109706 - RNA, 24 nt, Human
uccuucggcgcgguccuuggaggc

SEQ ID NO: 1109707 - RNA, 18 nt, Human
ucuauuaacuucugaggu

SEQ ID NO: 1109708 - RNA, 19 nt, Human
ugagaugauuggcuuucua

SEQ ID NO: 1109709 - RNA, 23 nt, Human
uggcuuucuauguauaguauggu

SEQ ID NO: 1109710 - RNA, 21 nt, Human
ugggagagggacaguauccug

SEQ ID NO: 1109711 - RNA, 21 nt, Human
uugauccuggaauauguaucu

SEQ ID NO: 1109712 - RNA, 24 nt, Human
uuuuaaaaauacaaauuugguugc

SEQ ID NO: 1109713 - RNA, 23 nt, Human
aagcccaccagaccuagaggaga

SEQ ID NO: 1109714 - RNA, 23 nt, Human
aaugguggacgcugcgggagaaa

SEQ ID NO: 1109715 - RNA, 18 nt, Human
acccacccaccugggcgg

SEQ ID NO: 1109716 - RNA, 19 nt, Human
agaauaucucgcgaauugg

SEQ ID NO: 1109717 - RNA, 18 nt, Human
aggaaccggagaucggga

SEQ ID NO: 1109718 - RNA, 24 nt, Human
aggagacccccgccgcacggcucc

SEQ ID NO: 1109719 - RNA, 18 nt, Human
aggcaucacccacugaaa

SEQ ID NO: 1109720 - RNA, 19 nt, Human
agugcggggaucugcggua

SEQ ID NO: 1109721 - RNA, 20 nt, Human
aucucugccccgguggccuc

SEQ ID NO: 1109722 - RNA, 21 nt, Human
augcggcgggaccaggggggu

SEQ ID NO: 1109723 - RNA, 19 nt, Human
augguggacgcugcgggag

SEQ ID NO: 1109724 - RNA, 19 nt, Human
caccagaccuagaggagac

SEQ ID NO: 1109725 - RNA, 21 nt, Human
caccugggcgggcugcuuggg

SEQ ID NO: 1109726 - RNA, 19 nt, Human
cacgccaacuccccccccg

SEQ ID NO: 1109727 - RNA, 23 nt, Human
cagcugggcccucccugccggcu

SEQ ID NO: 1109728 - RNA, 19 nt, Human
ccacugagugccuccuggg

SEQ ID NO: 1109729 - RNA, 20 nt, Human
cccaccagaccuagaggaga

SEQ ID NO: 1109730 - RNA, 22 nt, Human
cccccgccgcacggcuccccag

SEQ ID NO: 1109731 - RNA, 18 nt, Human
ccccgccgcacggcuccc

SEQ ID NO: 1109732 - RNA, 20 nt, Human
cccgggcagccugacggccc

SEQ ID NO: 1109733 - RNA, 21 nt, Human
cccugcuaggugggggcugcu

SEQ ID NO: 1109734 - RNA, 22 nt, Human
ccgcccugccgucuccugcugc

SEQ ID NO: 1109735 - RNA, 22 nt, Human
ccgcuggcgaguugggaguggg

SEQ ID NO: 1109736 - RNA, 26 nt, Human
ccggaaacaacgguggggcgaccgag

SEQ ID NO: 1109737 - RNA, 20 nt, Human
ccucccuggcgggguggaga

SEQ ID NO: 1109738 - RNA, 18 nt, Human
ccucucggcauguuuugg

SEQ ID NO: 1109739 - RNA, 20 nt, Human
ccuuggaggaucugaggcug

SEQ ID NO: 1109740 - RNA, 19 nt, Human
cgaccagggcagaauucgg

SEQ ID NO: 1109741 - RNA, 22 nt, Human
cgccgcacggcuccccagggca

SEQ ID NO: 1109742 - RNA, 22 nt, Human
cgggaaggugugggaugcggcg

SEQ ID NO: 1109743 - RNA, 23 nt, Human
cggggaucugcgguaccgggggg

SEQ ID NO: 1109744 - RNA, 18 nt, Human
cuaggugggggcugcugg

SEQ ID NO: 1109745 - RNA, 21 nt, Human
cuccugcugcugcugacuugc

SEQ ID NO: 1109746 - RNA, 20 nt, Human
cucugagccuguuacuccuc

SEQ ID NO: 1109747 - RNA, 23 nt, Human
cugagccuucucugagccuguua

SEQ ID NO: 1109748 - RNA, 18 nt, Human
cugaggcuuucugcugcc

SEQ ID NO: 1109749 - RNA, 19 nt, Human
cugcugccugcccugcagc

SEQ ID NO: 1109750 - RNA, 23 nt, Human
cuggggagguagagguggggucc

SEQ ID NO: 1109751 - RNA, 18 nt, Human
cuggggggcacagggcag

SEQ ID NO: 1109752 - RNA, 19 nt, Human
gaagagggccaucucugcc

SEQ ID NO: 1109753 - RNA, 23 nt, Human
gaggaucugaggcuggcucaggg

SEQ ID NO: 1109754 - RNA, 20 nt, Human
gaggugcagauggguggggg

SEQ ID NO: 1109755 - RNA, 21 nt, Human
gcccuguggccgcccugccgu

SEQ ID NO: 1109756 - RNA, 19 nt, Human
gccuuggaggaucugaggc

SEQ ID NO: 1109757 - RNA, 23 nt, Human
gcugcuggguuccacagcugggc

SEQ ID NO: 1109758 - RNA, 20 nt, Human
ggaaacaacgguggggcgac

SEQ ID NO: 1109759 - RNA, 20 nt, Human
ggaacugcgggucugggaua

SEQ ID NO: 1109760 - RNA, 19 nt, Human
ggcgacgggggaauaggga

SEQ ID NO: 1109761 - RNA, 24 nt, Human
ggcuccccagggcacgccaacucc

SEQ ID NO: 1109762 - RNA, 20 nt, Human
gggaaugggauacuugggaa

SEQ ID NO: 1109763 - RNA, 22 nt, Human
gggaaugguggacgcugcggga

SEQ ID NO: 1109764 - RNA, 18 nt, Human
gggagcucuggggggccg

SEQ ID NO: 1109765 - RNA, 19 nt, Human
gggcacccggcacacggga

SEQ ID NO: 1109766 - RNA, 21 nt, Human
ggggaauagggaacuagugcg

SEQ ID NO: 1109767 - RNA, 27 nt, Human
ggggaauagggaacuagugcggggaaa

SEQ ID NO: 1109768 - RNA, 19 nt, Human
ggggccgagugcguggggc

SEQ ID NO: 1109769 - RNA, 27 nt, Human
ggggcggggaugccgggcgacggggga

SEQ ID NO: 1109770 - RNA, 21 nt, Human
gggucccuggcagcaacugcc

SEQ ID NO: 1109771 - RNA, 22 nt, Human
gguaucguggcgacugugccgg

SEQ ID NO: 1109772 - RNA, 21 nt, Human
ggugcagauggguggggggca

SEQ ID NO: 1109773 - RNA, 20 nt, Human
gugcguggggccucugcggg

SEQ ID NO: 1109774 - RNA, 19 nt, Human
uaaagcccaccagaccuag

SEQ ID NO: 1109775 - RNA, 22 nt, Human
ucacuuggagagaucuggggag

SEQ ID NO: 1109776 - RNA, 24 nt, Human
ucaggggugguccuggcugcucug

SEQ ID NO: 1109777 - RNA, 23 nt, Human
ucagugaccacugagugccuccu

SEQ ID NO: 1109778 - RNA, 18 nt, Human
ucccuggcagcaacugcc

SEQ ID NO: 1109779 - RNA, 23 nt, Human
ucggcugagaccgcagaguccca

SEQ ID NO: 1109780 - RNA, 22 nt, Human
ucuccugcugcugcugacuugc

SEQ ID NO: 1109781 - RNA, 22 nt, Human
ucucugagccuguuacuccucu

SEQ ID NO: 1109782 - RNA, 20 nt, Human
ucuggggagguagagguggg

SEQ ID NO: 1109783 - RNA, 19 nt, Human
ucuggggggcacagggcag

SEQ ID NO: 1109784 - RNA, 21 nt, Human
ugacaaaggcugaggcuuucu

SEQ ID NO: 1109785 - RNA, 23 nt, Human
ugacuugcaggucuguguuucug

SEQ ID NO: 1109786 - RNA, 19 nt, Human
ugaggcuggcucagggucc

SEQ ID NO: 1109787 - RNA, 19 nt, Human
ugcacagccuuggaggauc

SEQ ID NO: 1109788 - RNA, 24 nt, Human
ugcccugggagcucuggggggcac

SEQ ID NO: 1109789 - RNA, 18 nt, Human
ugccuccuggguguagga

SEQ ID NO: 1109790 - RNA, 18 nt, Human
ugcuaggugggggcugcu

SEQ ID NO: 1109791 - RNA, 20 nt, Human
ugcucagugaccacugagug

SEQ ID NO: 1109792 - RNA, 18 nt, Human
ugcugcacagccuuggag

SEQ ID NO: 1109793 - RNA, 20 nt, Human
ugcugccugcccugcagcug

SEQ ID NO: 1109794 - RNA, 21 nt, Human
ugcuugggcaagguucagggg

SEQ ID NO: 1109795 - RNA, 24 nt, Human
ugcuugggcaagguucaggggugg

SEQ ID NO: 1109796 - RNA, 23 nt, Human
uggcgaguugggagugggcaggc

SEQ ID NO: 1109797 - RNA, 23 nt, Human
uggcucagggucccuggcagcaa

SEQ ID NO: 1109798 - RNA, 21 nt, Human
ugggagugggcaggcgagucg

SEQ ID NO: 1109799 - RNA, 23 nt, Human
ugggcaggcgagucguaaauugg

SEQ ID NO: 1109800 - RNA, 21 nt, Human
uggggcaggcccuggagcccc

SEQ ID NO: 1109801 - RNA, 22 nt, Human
ugggucucccugugaccccaau

SEQ ID NO: 1109802 - RNA, 19 nt, Human
uguaggaagagggccaucu

SEQ ID NO: 1109803 - RNA, 18 nt, Human
uucugcugccugcccugc

SEQ ID NO: 1109804 - RNA, 20 nt, Human
uucugcugccugcccugcag

SEQ ID NO: 1109805 - RNA, 18 nt, Human
uuggaggaucugaggcug

SEQ ID NO: 1109806 - RNA, 21 nt, Human
uuucugcugccugcccugcag

SEQ ID NO: 1109807 - RNA, 23 nt, Human
accuccgcgcccgccucucgcug

SEQ ID NO: 1109808 - RNA, 23 nt, Human
agaaagcgcagcaggcgcagucc

SEQ ID NO: 1109809 - RNA, 21 nt, Human
agcaggcgcaguccggcaccg

SEQ ID NO: 1109810 - RNA, 20 nt, Human
aggcacaggaggcggguggc

SEQ ID NO: 1109811 - RNA, 21 nt, Human
aggcgccccgcgacgccgccc

SEQ ID NO: 1109812 - RNA, 20 nt, Human
auaggagauggggggcuugg

SEQ ID NO: 1109813 - RNA, 21 nt, Human
auggaggaccccccgcccccg

SEQ ID NO: 1109814 - RNA, 30 nt, Human
caccuccauaccccagagccagcagguccu

SEQ ID NO: 1109815 - RNA, 20 nt, Human
cagcagagagcggaggcaca

SEQ ID NO: 1109816 - RNA, 22 nt, Human
ccaaggaaagccuuaaacggac

SEQ ID NO: 1109817 - RNA, 19 nt, Human
ccagcagagagcggaggca

SEQ ID NO: 1109818 - RNA, 21 nt, Human
ccccccgcccccgaccaccag

SEQ ID NO: 1109819 - RNA, 19 nt, Human
cccccgaccaccagucccc

SEQ ID NO: 1109820 - RNA, 22 nt, Human
cccgcgacgccgcccccgggac

SEQ ID NO: 1109821 - RNA, 21 nt, Human
cccgggacaccuccauacccc

SEQ ID NO: 1109822 - RNA, 24 nt, Human
cccgggacaccuccauaccccaga

SEQ ID NO: 1109823 - RNA, 20 nt, Human
cccuccacuaccccuucacc

SEQ ID NO: 1109824 - RNA, 22 nt, Human
cccugaagucugggcaugaggc

SEQ ID NO: 1109825 - RNA, 25 nt, Human
ccgaagcgcagccgcgccauccccg

SEQ ID NO: 1109826 - RNA, 23 nt, Human
ccgccagccgcacgcacagcccc

SEQ ID NO: 1109827 - RNA, 20 nt, Human
ccgcgcccgccucucgcugc

SEQ ID NO: 1109828 - RNA, 23 nt, Human
ccgcggcccccucccacgcuucc

SEQ ID NO: 1109829 - RNA, 28 nt, Human
ccuccgcgcccgccucucgcugcugcuc

SEQ ID NO: 1109830 - RNA, 23 nt, Human
cgcagcaggcgcaguccggcacc

SEQ ID NO: 1109831 - RNA, 24 nt, Human
cgccagcuccgccgccagccgcac

SEQ ID NO: 1109832 - RNA, 18 nt, Human
cggaggcacaggaggcgg

SEQ ID NO: 1109833 - RNA, 21 nt, Human
cucagcaccuccgcgcccgcc

SEQ ID NO: 1109834 - RNA, 23 nt, Human
cucauggaggaccccccgccccc

SEQ ID NO: 1109835 - RNA, 21 nt, Human
cugccgcagaaaguccuccuc

SEQ ID NO: 1109836 - RNA, 26 nt, Human
gaagcgcagccgcgccauccccgccg

SEQ ID NO: 1109837 - RNA, 21 nt, Human
gaccccccgcccccgaccacc

SEQ ID NO: 1109838 - RNA, 20 nt, Human
gagcggaggcacaggaggcg

SEQ ID NO: 1109839 - RNA, 22 nt, Human
gccggcucccuccacuaccccu

SEQ ID NO: 1109840 - RNA, 21 nt, Human
ggcauuuggggacucaggaau

SEQ ID NO: 1109841 - RNA, 22 nt, Human
uaccaaggaaagccuuaaacgg

SEQ ID NO: 1109842 - RNA, 27 nt, Human
uaccaaggaaagccuuaaacggacucc

SEQ ID NO: 1109843 - RNA, 21 nt, Human
uaccccagagccagcaggucc

SEQ ID NO: 1109844 - RNA, 18 nt, Human
uaggagauggggggcuug

SEQ ID NO: 1109845 - RNA, 23 nt, Human
ucaccaagggguggccuaggacu

SEQ ID NO: 1109846 - RNA, 22 nt, Human
ucaggaauaggagauggggggc

SEQ ID NO: 1109847 - RNA, 24 nt, Human
uccacuaccccuucaccaaggggu

SEQ ID NO: 1109848 - RNA, 22 nt, Human
ucccuccacuaccccuucacca

SEQ ID NO: 1109849 - RNA, 22 nt, Human
ucccuccacuaccccuucacca

SEQ ID NO: 1109850 - RNA, 19 nt, Human
uccugggccaccgcggccc

SEQ ID NO: 1109851 - RNA, 19 nt, Human
uccugggccaccgcggccc

SEQ ID NO: 1109852 - RNA, 18 nt, Human
ucucuggagaacaugguu

SEQ ID NO: 1109853 - RNA, 24 nt, Human
ugaggcgccccgcgacgccgcccc

SEQ ID NO: 1109854 - RNA, 19 nt, Human
uggagaacaugguucuugg

SEQ ID NO: 1109855 - RNA, 18 nt, Human
uuaaacggacuccccaga

SEQ ID NO: 1109856 - RNA, 20 nt, Human
aaaagaaaaaguaaaugacu

SEQ ID NO: 1109857 - RNA, 21 nt, Human
augguauaucaaaagaaaaag

SEQ ID NO: 1109858 - RNA, 23 nt, Human
augguauaucaaaagaaaaagua

SEQ ID NO: 1109859 - RNA, 19 nt, Human
cuccacaugaauaagcagg

SEQ ID NO: 1109860 - RNA, 22 nt, Human
cuccacaugaauaagcagggac

SEQ ID NO: 1109861 - RNA, 19 nt, Human
gauuacagaacaugugcca

SEQ ID NO: 1109862 - RNA, 22 nt, Human
gcagggcuggugucucagggcg

SEQ ID NO: 1109863 - RNA, 23 nt, Human
gggcguugggcaggagcagaggc

SEQ ID NO: 1109864 - RNA, 18 nt, Human
uaaagcagggcugguguc

SEQ ID NO: 1109865 - RNA, 24 nt, Human
uacagaacaugugccagacacugc

SEQ ID NO: 1109866 - RNA, 29 nt, Human
ucucagggcguugggcaggagcagaggcu

SEQ ID NO: 1109867 - RNA, 18 nt, Human
uggauuacagaacaugug

SEQ ID NO: 1109868 - RNA, 21 nt, Human
ugggcaggagcagaggcaggu

SEQ ID NO: 1109869 - RNA, 20 nt, Human
ugucucagggcguugggcag

SEQ ID NO: 1109870 - RNA, 18 nt, Human
aaagcuacugcugguguc

SEQ ID NO: 1109871 - RNA, 22 nt, Human
aacuuuuugucacagguggcau

SEQ ID NO: 1109872 - RNA, 19 nt, Human
aagaagucccuaaacccuu

SEQ ID NO: 1109873 - RNA, 25 nt, Human
acaccagagggaacagggaucugaa

SEQ ID NO: 1109874 - RNA, 18 nt, Human
acagaaaugaaaggaaug

SEQ ID NO: 1109875 - RNA, 22 nt, Human
acagggcuggagagauccacgc

SEQ ID NO: 1109876 - RNA, 21 nt, Human
acccagauuugucuaccuugg

SEQ ID NO: 1109877 - RNA, 21 nt, Human
acucuugccagguucuguggg

SEQ ID NO: 1109878 - RNA, 19 nt, Human
acugcaguugaccacacag

SEQ ID NO: 1109879 - RNA, 25 nt, Human
acugcaguuuauugauaauaccacu

SEQ ID NO: 1109880 - RNA, 28 nt, Human
acugcaguuuauugauaauuugcgugca

SEQ ID NO: 1109881 - RNA, 23 nt, Human
agcaaaauccucuguggcugccc

SEQ ID NO: 1109882 - RNA, 21 nt, Human
agccucuucaaugucuguggu

SEQ ID NO: 1109883 - RNA, 23 nt, Human
aggaaugguagagaagaugaggc

SEQ ID NO: 1109884 - RNA, 18 nt, Human
agggaucccuguuggcuc

SEQ ID NO: 1109885 - RNA, 20 nt, Human
agguaguugaaaccacagaa

SEQ ID NO: 1109886 - RNA, 25 nt, Human
auacaaaaaaaggguacagaaauga

SEQ ID NO: 1109887 - RNA, 18 nt, Human
aucugggacuuccacggu

SEQ ID NO: 1109888 - RNA, 20 nt, Human
auggcccccagggaucccuc

SEQ ID NO: 1109889 - RNA, 20 nt, Human
auuugaugucugccuucccc

SEQ ID NO: 1109890 - RNA, 18 nt, Human
caaaagaccaaauuuccu

SEQ ID NO: 1109891 - RNA, 18 nt, Human
caagaagucccuaaaccc

SEQ ID NO: 1109892 - RNA, 19 nt, Human
cacacuuuggaaaaugauc

SEQ ID NO: 1109893 - RNA, 20 nt, Human
cagcuuucaagcccauuccu

SEQ ID NO: 1109894 - RNA, 21 nt, Human
cagguaguugaaaccacagaa

SEQ ID NO: 1109895 - RNA, 22 nt, Human
cauacacuugacagaggccgug

SEQ ID NO: 1109896 - RNA, 21 nt, Human
cauucaccggggucagggcca

SEQ ID NO: 1109897 - RNA, 21 nt, Human
ccacagugcuucuuuggucaa

SEQ ID NO: 1109898 - RNA, 23 nt, Human
ccccugaaacuuuuugucacagg

SEQ ID NO: 1109899 - RNA, 22 nt, Human
ccuccacagcuuucaagcccau

SEQ ID NO: 1109900 - RNA, 21 nt, Human
ccucuuuuggaggauaaggau

SEQ ID NO: 1109901 - RNA, 22 nt, Human
ccuggaaggcccucagggaaac

SEQ ID NO: 1109902 - RNA, 25 nt, Human
ccuucccuaccccacacuuuggaaa

SEQ ID NO: 1109903 - RNA, 21 nt, Human
cgcccauucaagcaaugguca

SEQ ID NO: 1109904 - RNA, 26 nt, Human
cgcccauucaagcaaugguccacaca

SEQ ID NO: 1109905 - RNA, 19 nt, Human
cgcccuuggccugagggua

SEQ ID NO: 1109906 - RNA, 25 nt, Human
cuaugcuggaaacagggcuggagag

SEQ ID NO: 1109907 - RNA, 18 nt, Human
cugccucuucuaugaucc

SEQ ID NO: 1109908 - RNA, 19 nt, Human
cugcuccccagcaagugca

SEQ ID NO: 1109909 - RNA, 23 nt, Human
cugucuagucuuuccuuagucac

SEQ ID NO: 1109910 - RNA, 21 nt, Human
cuugcuccuuuacuugugucu

SEQ ID NO: 1109911 - RNA, 22 nt, Human
cuuuggaaaaugauccaccucc

SEQ ID NO: 1109912 - RNA, 22 nt, Human
gaaacaguauuuguacccagau

SEQ ID NO: 1109913 - RNA, 20 nt, Human
gaaggcauagugagggaaug

SEQ ID NO: 1109914 - RNA, 20 nt, Human
gagcuuguacagggauuuuc

SEQ ID NO: 1109915 - RNA, 22 nt, Human
gaugaaauacaagaagucccua

SEQ ID NO: 1109916 - RNA, 22 nt, Human
gccugcaugagugugacaucac

SEQ ID NO: 1109917 - RNA, 23 nt, Human
gcuccugauggccauccccaacu

SEQ ID NO: 1109918 - RNA, 20 nt, Human
ggaaaaugauccaccuccac

SEQ ID NO: 1109919 - RNA, 22 nt, Human
ggauaacaucauacacuugaca

SEQ ID NO: 1109920 - RNA, 22 nt, Human
ggaucuucagagacugcaguuu

SEQ ID NO: 1109921 - RNA, 23 nt, Human
ggcagugaaggcauagugaggga

SEQ ID NO: 1109922 - RNA, 28 nt, Human
ggcuggagagauccacgcuugggguuua

SEQ ID NO: 1109923 - RNA, 23 nt, Human
gggcaauuucuaugcuggaaaca

SEQ ID NO: 1109924 - RNA, 21 nt, Human
gggucagggccagcuggaaga

SEQ ID NO: 1109925 - RNA, 22 nt, Human
gucacaccagagggaacaggga

SEQ ID NO: 1109926 - RNA, 19 nt, Human
gugugaggauacagugagg

SEQ ID NO: 1109927 - RNA, 18 nt, Human
guuccugcuccguugcag

SEQ ID NO: 1109928 - RNA, 19 nt, Human
guuccugcuccguugcagc

SEQ ID NO: 1109929 - RNA, 24 nt, Human
uacagaaaugaaaggaaugguaga

SEQ ID NO: 1109930 - RNA, 22 nt, Human
uaccccagucuuccuaugcugu

SEQ ID NO: 1109931 - RNA, 20 nt, Human
uaggagauuccuaaagucaa

SEQ ID NO: 1109932 - RNA, 24 nt, Human
uauuucuggaauuuuucuuuugau

SEQ ID NO: 1109933 - RNA, 23 nt, Human
ucacaccagagggaacagggauc

SEQ ID NO: 1109934 - RNA, 22 nt, Human
ucacagguggcauugauggcuc

SEQ ID NO: 1109935 - RNA, 18 nt, Human
ucaguccggaucugggac

SEQ ID NO: 1109936 - RNA, 22 nt, Human
uccaaguauaaucguccccgac

SEQ ID NO: 1109937 - RNA, 21 nt, Human
uccacacagguuccuaccaca

SEQ ID NO: 1109938 - RNA, 19 nt, Human
uccccaacucagugauccg

SEQ ID NO: 1109939 - RNA, 20 nt, Human
uccccgacaugagguuccug

SEQ ID NO: 1109940 - RNA, 21 nt, Human
ucccuccagcucagcugguuc

SEQ ID NO: 1109941 - RNA, 20 nt, Human
ucccugaauggcccccaggg

SEQ ID NO: 1109942 - RNA, 23 nt, Human
ucccugaauggcccccagggauc

SEQ ID NO: 1109943 - RNA, 25 nt, Human
ucccugaauggcccccagggauccc

SEQ ID NO: 1109944 - RNA, 18 nt, Human
ucccuguuggcucugugu

SEQ ID NO: 1109945 - RNA, 19 nt, Human
uccuaaagucaagcugucu

SEQ ID NO: 1109946 - RNA, 22 nt, Human
ucuccugguuaucacuuggccu

SEQ ID NO: 1109947 - RNA, 22 nt, Human
ucugccuuccccugaaacuuuu

SEQ ID NO: 1109948 - RNA, 19 nt, Human
ucuggaauuuuucuuuuga

SEQ ID NO: 1109949 - RNA, 21 nt, Human
ucuguggcugcccccuaaaac

SEQ ID NO: 1109950 - RNA, 24 nt, Human
ucugugugaggauacagugagggu

SEQ ID NO: 1109951 - RNA, 18 nt, Human
ugaauuguuuauuucugg

SEQ ID NO: 1109952 - RNA, 22 nt, Human
ugacagaggccgugcuucaggu

SEQ ID NO: 1109953 - RNA, 22 nt, Human
ugauccagaagcugaguugcug

SEQ ID NO: 1109954 - RNA, 18 nt, Human
ugauccgugcucgcccuu

SEQ ID NO: 1109955 - RNA, 25 nt, Human
ugaugucugccuuccccugaaacuu

SEQ ID NO: 1109956 - RNA, 24 nt, Human
ugauucaaaagaccaaauuuccuc

SEQ ID NO: 1109957 - RNA, 18 nt, Human
ugccaguaaucgaaguga

SEQ ID NO: 1109958 - RNA, 22 nt, Human
ugcgcuucuugucuccaguaac

SEQ ID NO: 1109959 - RNA, 24 nt, Human
ugcucuguuccuauggcacggaua

SEQ ID NO: 1109960 - RNA, 18 nt, Human
uggaagaagugaaguuca

SEQ ID NO: 1109961 - RNA, 19 nt, Human
uggaagaagugaaguucac

SEQ ID NO: 1109962 - RNA, 18 nt, Human
uggagagagacaaaaugc

SEQ ID NO: 1109963 - RNA, 21 nt, Human
ugggggcugugguuaccuggu

SEQ ID NO: 1109964 - RNA, 21 nt, Human
ugucauuucuccaccagcugc

SEQ ID NO: 1109965 - RNA, 21 nt, Human
uguggugacaugcgccugagg

SEQ ID NO: 1109966 - RNA, 23 nt, Human
uuagucacaccagagggaacagg

SEQ ID NO: 1109967 - RNA, 20 nt, Human
uuaugggaacuugcugcggc

SEQ ID NO: 1109968 - RNA, 18 nt, Human
uucaaaagaccaaauuuc

SEQ ID NO: 1109969 - RNA, 19 nt, Human
uucaaaagaccaaauuucc

SEQ ID NO: 1109970 - RNA, 18 nt, Human
uucuaugauccagaagcu

SEQ ID NO: 1109971 - RNA, 22 nt, Human
uucuugucuccaguaacagggg

SEQ ID NO: 1109972 - RNA, 24 nt, Human
uugcuccugauggccauccccaac

SEQ ID NO: 1109973 - RNA, 22 nt, Human
uugcugcucucugguacccugg

SEQ ID NO: 1109974 - RNA, 21 nt, Human
uuggaaaaugauccaccucca

SEQ ID NO: 1109975 - RNA, 27 nt, Human
uuuauagccucuucaaugucugugguu

SEQ ID NO: 1109976 - RNA, 20 nt, Human
uggaagauggcaguuccggc

SEQ ID NO: 1109977 - RNA, 22 nt, Human
aaaaagagagagagaaagaaaa

SEQ ID NO: 1109978 - RNA, 21 nt, Human
aaagagagagagaaagaaaac

SEQ ID NO: 1109979 - RNA, 24 nt, Human
aaagugcugggauuacaggcguga

SEQ ID NO: 1109980 - RNA, 20 nt, Human
aaauaaauaauaaagaaaaa

SEQ ID NO: 1109981 - RNA, 21 nt, Human
aaauuuaaaaaaagauucuaa

SEQ ID NO: 1109982 - RNA, 19 nt, Human
aagugcugggauuacaggc

SEQ ID NO: 1109983 - RNA, 19 nt, Human
aagugcugggauuacaggc

SEQ ID NO: 1109984 - RNA, 24 nt, Human
aaucaccugaaccugcgaggcaga

SEQ ID NO: 1109985 - RNA, 19 nt, Human
aauguugaaaaagagagag

SEQ ID NO: 1109986 - RNA, 24 nt, Human
acagagcaauacccuaucucaaaa

SEQ ID NO: 1109987 - RNA, 24 nt, Human
acagagugagacuccaucucaaaa

SEQ ID NO: 1109988 - RNA, 24 nt, Human
accacugcauucuagccuggguga

SEQ ID NO: 1109989 - RNA, 24 nt, Human
accauguuggccaggcuggucuug

SEQ ID NO: 1109990 - RNA, 24 nt, Human
accccgucucuaguaaaaauacaa

SEQ ID NO: 1109991 - RNA, 24 nt, Human
accgcacuccagccugggugacag

SEQ ID NO: 1109992 - RNA, 26 nt, Human
accgcacuccagccugggugacagag

SEQ ID NO: 1109993 - RNA, 24 nt, Human
acuccagccugggugacagaguga

SEQ ID NO: 1109994 - RNA, 24 nt, Human
acugcauucuagccugggugacag

SEQ ID NO: 1109995 - RNA, 26 nt, Human
acugcauucuagccugggugacagag

SEQ ID NO: 1109996 - RNA, 22 nt, Human
acuuuuuucuuuuuuuuuuuga

SEQ ID NO: 1109997 - RNA, 19 nt, Human
agaaaaaaaagaaaaggaa

SEQ ID NO: 1109998 - RNA, 24 nt, Human
agaaaaaacucacuugauuauaaa

SEQ ID NO: 1109999 - RNA, 21 nt, Human
agaaagaaaacaaggaaacgu

SEQ ID NO: 1110000 - RNA, 24 nt, Human
agacaggcagaucacaaggucagg

SEQ ID NO: 1110001 - RNA, 22 nt, Human
agagguuguagugagccaagau

SEQ ID NO: 1110002 - RNA, 24 nt, Human
agagguuguagugagccaagauug

SEQ ID NO: 1110003 - RNA, 23 nt, Human
agaucacaaggucaggaguucga

SEQ ID NO: 1110004 - RNA, 19 nt, Human
agcacuuugggaggcugag

SEQ ID NO: 1110005 - RNA, 24 nt, Human
agccugggugacagagugagacuc

SEQ ID NO: 1110006 - RNA, 18 nt, Human
agccuggucaauaugcug

SEQ ID NO: 1110007 - RNA, 20 nt, Human
agccuggucaauaugcugaa

SEQ ID NO: 1110008 - RNA, 24 nt, Human
agccuggucaauaugcugaaaccc

SEQ ID NO: 1110009 - RNA, 21 nt, Human
aggaggccgacggggcuaggc

SEQ ID NO: 1110010 - RNA, 24 nt, Human
aggaucgcuugagcccaggaguuc

SEQ ID NO: 1110011 - RNA, 24 nt, Human
aggcagagguuguagugagccaag

SEQ ID NO: 1110012 - RNA, 24 nt, Human
aggcagaucacaaggucaggaguu

SEQ ID NO: 1110013 - RNA, 24 nt, Human
aggcaggauacucacuugagccca

SEQ ID NO: 1110014 - RNA, 21 nt, Human
aggcgugacgcccggcuaacc

SEQ ID NO: 1110015 - RNA, 19 nt, Human
aggcugcagugacccaugu

SEQ ID NO: 1110016 - RNA, 25 nt, Human
aggcuggagugcaguggugggaucu

SEQ ID NO: 1110017 - RNA, 23 nt, Human
aggguuccaccauguuggccagg

SEQ ID NO: 1110018 - RNA, 18 nt, Human
agguauauuuggaugcaa

SEQ ID NO: 1110019 - RNA, 19 nt, Human
agguugaggcugcagugac

SEQ ID NO: 1110020 - RNA, 23 nt, Human
aguagcugagauuacaggugugu

SEQ ID NO: 1110021 - RNA, 19 nt, Human
agugcaguggugggaucuc

SEQ ID NO: 1110022 - RNA, 21 nt, Human
agugcaguggugggaucucag

SEQ ID NO: 1110023 - RNA, 23 nt, Human
agugcaguggugggaucucagcu

SEQ ID NO: 1110024 - RNA, 18 nt, Human
agugcugggauuacaggc

SEQ ID NO: 1110025 - RNA, 24 nt, Human
aguggcucacgccuguaaucccag

SEQ ID NO: 1110026 - RNA, 24 nt, Human
aguggugggaucucagcucacugc

SEQ ID NO: 1110027 - RNA, 24 nt, Human
auaggguuccaccauguuggccag

SEQ ID NO: 1110028 - RNA, 21 nt, Human
aucacaaggucaggaguucga

SEQ ID NO: 1110029 - RNA, 22 nt, Human
aucgcccuaugcccugcaaaaa

SEQ ID NO: 1110030 - RNA, 24 nt, Human
auugcgccaccgcacuccagccug

SEQ ID NO: 1110031 - RNA, 24 nt, Human
auuuuuguauuuuuaguagagaua

SEQ ID NO: 1110032 - RNA, 25 nt, Human
caaaacaauccucaacccuacuaga

SEQ ID NO: 1110033 - RNA, 24 nt, Human
caaagugcugggauuacaggcgug

SEQ ID NO: 1110034 - RNA, 23 nt, Human
caaauuuccacauguaaguuaua

SEQ ID NO: 1110035 - RNA, 22 nt, Human
caacaaagugagacccugucuc

SEQ ID NO: 1110036 - RNA, 23 nt, Human
caacaagaaaaaaaagaaaagga

SEQ ID NO: 1110037 - RNA, 22 nt, Human
caagaaaaaaaagaaaaggaaa

SEQ ID NO: 1110038 - RNA, 22 nt, Human
caagugauucuugugccucagc

SEQ ID NO: 1110039 - RNA, 28 nt, Human
caagugauucuugugccucagccuccug

SEQ ID NO: 1110040 - RNA, 22 nt, Human
caauaugcugaaaccccgucuc

SEQ ID NO: 1110041 - RNA, 24 nt, Human
caauaugcugaaaccccgucucua

SEQ ID NO: 1110042 - RNA, 19 nt, Human
cacaguuuagguuaaagau

SEQ ID NO: 1110043 - RNA, 24 nt, Human
caccaugcccggcuaauuuuugua

SEQ ID NO: 1110044 - RNA, 21 nt, Human
caccauguuggccaggcuggu

SEQ ID NO: 1110045 - RNA, 23 nt, Human
caccauguuggccaggcuggucu

SEQ ID NO: 1110046 - RNA, 24 nt, Human
caccauguuggccaggcuggucuu

SEQ ID NO: 1110047 - RNA, 27 nt, Human
caccauguuggccaggcuggucuugaa

SEQ ID NO: 1110048 - RNA, 24 nt, Human
caccgcacuccagccugggugaca

SEQ ID NO: 1110049 - RNA, 23 nt, Human
caccuauagucccagcuacuugg

SEQ ID NO: 1110050 - RNA, 24 nt, Human
caccuauagucccagcuacuuggg

SEQ ID NO: 1110051 - RNA, 24 nt, Human
cacgccuguaaucccagcacuuug

SEQ ID NO: 1110052 - RNA, 22 nt, Human
cacuccagccugggugacagag

SEQ ID NO: 1110053 - RNA, 22 nt, Human
cacuccagccugggugacagag

SEQ ID NO: 1110054 - RNA, 24 nt, Human
cacuccagccugggugacagagug

SEQ ID NO: 1110055 - RNA, 19 nt, Human
cacugcauucuagccuggg

SEQ ID NO: 1110056 - RNA, 19 nt, Human
cacugcauucuagccuggg

SEQ ID NO: 1110057 - RNA, 22 nt, Human
cacugcauucuagccuggguga

SEQ ID NO: 1110058 - RNA, 24 nt, Human
cacugcauucuagccugggugaca

SEQ ID NO: 1110059 - RNA, 18 nt, Human
cagcacuuugggaggcug

SEQ ID NO: 1110060 - RNA, 24 nt, Human
cagcacuuugggaggcugagacag

SEQ ID NO: 1110061 - RNA, 20 nt, Human
cagccuccugaguagcugag

SEQ ID NO: 1110062 - RNA, 21 nt, Human
caggaguucgagaccagcaug

SEQ ID NO: 1110063 - RNA, 22 nt, Human
caggcagaucacaaggucagga

SEQ ID NO: 1110064 - RNA, 20 nt, Human
caugggcaacaaagugagac

SEQ ID NO: 1110065 - RNA, 24 nt, Human
cauguuggccaggcuggucuugaa

SEQ ID NO: 1110066 - RNA, 23 nt, Human
cauucuagccugggugacagagc

SEQ ID NO: 1110067 - RNA, 22 nt, Human
cauuuagaccccaugauuuaaa

SEQ ID NO: 1110068 - RNA, 20 nt, Human
ccaaagugcugggauuacag

SEQ ID NO: 1110069 - RNA, 22 nt, Human
ccaaagugcugggauuacaggc

SEQ ID NO: 1110070 - RNA, 22 nt, Human
ccaaagugcugggauuacaggc

SEQ ID NO: 1110071 - RNA, 24 nt, Human
ccaaagugcugggauuacaggcgu

SEQ ID NO: 1110072 - RNA, 21 nt, Human
ccaacaagaaaaaaaagaaaa

SEQ ID NO: 1110073 - RNA, 20 nt, Human
ccaccgcacuccagccuggg

SEQ ID NO: 1110074 - RNA, 20 nt, Human
ccaccgcacuccagccuggg

SEQ ID NO: 1110075 - RNA, 21 nt, Human
ccaccgcacuccagccugggu

SEQ ID NO: 1110076 - RNA, 24 nt, Human
ccaccgcacuccagccugggugac

SEQ ID NO: 1110077 - RNA, 20 nt, Human
ccacugcauucuagccuggg

SEQ ID NO: 1110078 - RNA, 20 nt, Human
ccacugcauucuagccuggg

SEQ ID NO: 1110079 - RNA, 20 nt, Human
ccacugcauucuagccuggg

SEQ ID NO: 1110080 - RNA, 21 nt, Human
ccacugcauucuagccugggu

SEQ ID NO: 1110081 - RNA, 21 nt, Human
ccacugcauucuagccugggu

SEQ ID NO: 1110082 - RNA, 24 nt, Human
ccacugcauucuagccugggugac

SEQ ID NO: 1110083 - RNA, 22 nt, Human
ccaggagguugaggcugcagug

SEQ ID NO: 1110084 - RNA, 25 nt, Human
ccaggaguucgagaccagcaugggc

SEQ ID NO: 1110085 - RNA, 20 nt, Human
cccaugauuuaaagcagugg

SEQ ID NO: 1110086 - RNA, 20 nt, Human
cccgaguucaagugauucuu

SEQ ID NO: 1110087 - RNA, 24 nt, Human
ccgccucgaccucccaaagugcug

SEQ ID NO: 1110088 - RNA, 21 nt, Human
ccuauagucccagcuacuugg

SEQ ID NO: 1110089 - RNA, 19 nt, Human
ccugaaaaucugauuaaaa

SEQ ID NO: 1110090 - RNA, 22 nt, Human
ccugacuucaagugaucugccc

SEQ ID NO: 1110091 - RNA, 19 nt, Human
ccugaguagcugagauuac

SEQ ID NO: 1110092 - RNA, 22 nt, Human
ccugaguagcugagauuacagg

SEQ ID NO: 1110093 - RNA, 22 nt, Human
ccugaguagcugagauuacagg

SEQ ID NO: 1110094 - RNA, 22 nt, Human
ccugggugacagagugagacuc

SEQ ID NO: 1110095 - RNA, 23 nt, Human
ccuggucaauaugcugaaacccc

SEQ ID NO: 1110096 - RNA, 24 nt, Human
ccuggucaauaugcugaaaccccg

SEQ ID NO: 1110097 - RNA, 24 nt, Human
cgcaccuauagucccagcuacuug

SEQ ID NO: 1110098 - RNA, 26 nt, Human
cgccaccgcacuccagccugggugac

SEQ ID NO: 1110099 - RNA, 23 nt, Human
cgccuguaaucccagcacuuugg

SEQ ID NO: 1110100 - RNA, 24 nt, Human
cgccuguaaucccagcacuuuggg

SEQ ID NO: 1110101 - RNA, 19 nt, Human
cgggaggggaaggaggccg

SEQ ID NO: 1110102 - RNA, 21 nt, Human
cuauagucccagcuacuuggg

SEQ ID NO: 1110103 - RNA, 22 nt, Human
cucacgccuguaaucccagcac

SEQ ID NO: 1110104 - RNA, 24 nt, Human
cucacgccuguaaucccagcacuu

SEQ ID NO: 1110105 - RNA, 23 nt, Human
cucacugcaaccucuuccucccg

SEQ ID NO: 1110106 - RNA, 24 nt, Human
cucacugcaaccucuuccucccga

SEQ ID NO: 1110107 - RNA, 19 nt, Human
cucccgaguucaagugauu

SEQ ID NO: 1110108 - RNA, 26 nt, Human
cuccugacuucaagugaucugcccgc

SEQ ID NO: 1110109 - RNA, 20 nt, Human
cucuguugcccaggcuggag

SEQ ID NO: 1110110 - RNA, 18 nt, Human
cugaguagcugagauuac

SEQ ID NO: 1110111 - RNA, 21 nt, Human
cugaguagcugagauuacagg

SEQ ID NO: 1110112 - RNA, 24 nt, Human
cugaguagcugagauuacaggugu

SEQ ID NO: 1110113 - RNA, 23 nt, Human
cugcaaccucuuccucccgaguu

SEQ ID NO: 1110114 - RNA, 24 nt, Human
cugcaaccucuuccucccgaguuc

SEQ ID NO: 1110115 - RNA, 24 nt, Human
cuguuguagccaacaagaaaaaaa

SEQ ID NO: 1110116 - RNA, 23 nt, Human
cuugagcccaggagguugaggcu

SEQ ID NO: 1110117 - RNA, 25 nt, Human
cuugugccucagccuccugaguagc

SEQ ID NO: 1110118 - RNA, 23 nt, Human
cuuuauggcaaaacuguguugcc

SEQ ID NO: 1110119 - RNA, 22 nt, Human
gaacaugcugaggacccucugu

SEQ ID NO: 1110120 - RNA, 24 nt, Human
gacagagugagacuccaucucaaa

SEQ ID NO: 1110121 - RNA, 23 nt, Human
gacgcaguggcucacgccuguaa

SEQ ID NO: 1110122 - RNA, 24 nt, Human
gacuucaagugaucugcccgccuc

SEQ ID NO: 1110123 - RNA, 22 nt, Human
gagaaagaaaacaaggaaacgu

SEQ ID NO: 1110124 - RNA, 18 nt, Human
gagcaauacccuaucuca

SEQ ID NO: 1110125 - RNA, 19 nt, Human
gaguagcugagauuacagg

SEQ ID NO: 1110126 - RNA, 20 nt, Human
gaguagcugagauuacaggu

SEQ ID NO: 1110127 - RNA, 20 nt, Human
gagucacagaccacccccuc

SEQ ID NO: 1110128 - RNA, 21 nt, Human
gaucacaaggucaggaguucg

SEQ ID NO: 1110129 - RNA, 24 nt, Human
gaucacaaggucaggaguucgaga

SEQ ID NO: 1110130 - RNA, 24 nt, Human
gaucgcuugagcccaggaguucga

SEQ ID NO: 1110131 - RNA, 18 nt, Human
gauuacaggcgugacgcc

SEQ ID NO: 1110132 - RNA, 24 nt, Human
gauuacaggugugugucaccaugc

SEQ ID NO: 1110133 - RNA, 21 nt, Human
gauucuugugccucagccucc

SEQ ID NO: 1110134 - RNA, 22 nt, Human
gcaaccucuuccucccgaguuc

SEQ ID NO: 1110135 - RNA, 24 nt, Human
gcacuccagccugggugacagagu

SEQ ID NO: 1110136 - RNA, 24 nt, Human
gcauucuagccugggugacagagc

SEQ ID NO: 1110137 - RNA, 19 nt, Human
gccaccgcacuccagccug

SEQ ID NO: 1110138 - RNA, 24 nt, Human
gccaccgcacuccagccuggguga

SEQ ID NO: 1110139 - RNA, 19 nt, Human
gcccaggcuggagugcagu

SEQ ID NO: 1110140 - RNA, 22 nt, Human
gcccggcuaauuuuuguauuuu

SEQ ID NO: 1110141 - RNA, 23 nt, Human
gccucgaccucccaaagugcugg

SEQ ID NO: 1110142 - RNA, 21 nt, Human
gcgcgccgcggguacaaggag

SEQ ID NO: 1110143 - RNA, 21 nt, Human
gcucacugcaaccucuuccuc

SEQ ID NO: 1110144 - RNA, 20 nt, Human
gcucuguugcccaggcugga

SEQ ID NO: 1110145 - RNA, 25 nt, Human
gcucuguugcccaggcuggagugca

SEQ ID NO: 1110146 - RNA, 19 nt, Human
ggaaggaggccgacggggc

SEQ ID NO: 1110147 - RNA, 21 nt, Human
ggaggcugagacaggcagauc

SEQ ID NO: 1110148 - RNA, 20 nt, Human
ggauacucacuugagcccag

SEQ ID NO: 1110149 - RNA, 23 nt, Human
ggaucgcuugagcccaggaguuc

SEQ ID NO: 1110150 - RNA, 22 nt, Human
ggcaguaggaucgcuugagccc

SEQ ID NO: 1110151 - RNA, 24 nt, Human
ggcuggucuugaacuccugacuuc

SEQ ID NO: 1110152 - RNA, 24 nt, Human
gggaacggggccgcgccacgggcc

SEQ ID NO: 1110153 - RNA, 24 nt, Human
gggaggggaaggaggccgacgggg

SEQ ID NO: 1110154 - RNA, 21 nt, Human
ggguuccaccauguuggccag

SEQ ID NO: 1110155 - RNA, 22 nt, Human
ggguuccaccauguuggccagg

SEQ ID NO: 1110156 - RNA, 24 nt, Human
gguggcacgcaccuauagucccag

SEQ ID NO: 1110157 - RNA, 19 nt, Human
guagcugagauuacaggug

SEQ ID NO: 1110158 - RNA, 21 nt, Human
gucacagaccacccccucaac

SEQ ID NO: 1110159 - RNA, 24 nt, Human
gugaucugcccgccucgaccuccc

SEQ ID NO: 1110160 - RNA, 24 nt, Human
gugauucuugugccucagccuccu

SEQ ID NO: 1110161 - RNA, 22 nt, Human
gugccucagccuccugaguagc

SEQ ID NO: 1110162 - RNA, 24 nt, Human
guuugugcauauauauauauauau

SEQ ID NO: 1110163 - RNA, 18 nt, Human
uaaaauguaagguauauu

SEQ ID NO: 1110164 - RNA, 20 nt, Human
uaagccagaagaaucaccug

SEQ ID NO: 1110165 - RNA, 24 nt, Human
uaagccagaagaaucaccugaacc

SEQ ID NO: 1110166 - RNA, 21 nt, Human
uaaguuaaugaaaaagaaaaa

SEQ ID NO: 1110167 - RNA, 23 nt, Human
uaauaaacacaaaaguuauuuca

SEQ ID NO: 1110168 - RNA, 24 nt, Human
uaauuuuuguauuuuuaguagaga

SEQ ID NO: 1110169 - RNA, 22 nt, Human
uacucaugaccuacugcacuaa

SEQ ID NO: 1110170 - RNA, 22 nt, Human
uagagauaggguuccaccaugu

SEQ ID NO: 1110171 - RNA, 22 nt, Human
uagccaacaagaaaaaaaagaa

SEQ ID NO: 1110172 - RNA, 20 nt, Human
uagcugggugugguggcacg

SEQ ID NO: 1110173 - RNA, 24 nt, Human
uaguagagauaggguuccaccaug

SEQ ID NO: 1110174 - RNA, 26 nt, Human
uaguagagauaggguuccaccauguu

SEQ ID NO: 1110175 - RNA, 23 nt, Human
uauugcucuguugcccaggcugg

SEQ ID NO: 1110176 - RNA, 24 nt, Human
uauugcucuguugcccaggcugga

SEQ ID NO: 1110177 - RNA, 22 nt, Human
ucacaaggucaggaguucgaga

SEQ ID NO: 1110178 - RNA, 24 nt, Human
ucacaaggucaggaguucgagauc

SEQ ID NO: 1110179 - RNA, 22 nt, Human
ucacugcaaccucuuccucccg

SEQ ID NO: 1110180 - RNA, 24 nt, Human
ucacugcaaccucuuccucccgag

SEQ ID NO: 1110181 - RNA, 23 nt, Human
uccagccugggugacagagugag

SEQ ID NO: 1110182 - RNA, 24 nt, Human
uccagccugggugacagagugaga

SEQ ID NO: 1110183 - RNA, 24 nt, Human
ucccaaagugcugggauuacaggc

SEQ ID NO: 1110184 - RNA, 22 nt, Human
ucccagugacacaggaagcuua

SEQ ID NO: 1110185 - RNA, 21 nt, Human
ucccgaguucaagugauucuu

SEQ ID NO: 1110186 - RNA, 22 nt, Human
ucccgaguucaagugauucuug

SEQ ID NO: 1110187 - RNA, 19 nt, Human
ucccuggaaacauauggcu

SEQ ID NO: 1110188 - RNA, 24 nt, Human
ucccuggaaacauauggcuucccc

SEQ ID NO: 1110189 - RNA, 24 nt, Human
uccugaguagcugagauuacaggu

SEQ ID NO: 1110190 - RNA, 20 nt, Human
ucgcuugagcccaggaguuc

SEQ ID NO: 1110191 - RNA, 21 nt, Human
ucgcuugagcccaggaguucg

SEQ ID NO: 1110192 - RNA, 18 nt, Human
ucuagccugggugacaga

SEQ ID NO: 1110193 - RNA, 19 nt, Human
ucuagccugggugacagag

SEQ ID NO: 1110194 - RNA, 19 nt, Human
ucucaaaaauaaauaaaua

SEQ ID NO: 1110195 - RNA, 23 nt, Human
ucuccaaaucacuccugcggccu

SEQ ID NO: 1110196 - RNA, 24 nt, Human
ucuggcuggacgcaguggcucacg

SEQ ID NO: 1110197 - RNA, 18 nt, Human
ucuguugcccaggcugga

SEQ ID NO: 1110198 - RNA, 24 nt, Human
ucuguugcccaggcuggagugcag

SEQ ID NO: 1110199 - RNA, 21 nt, Human
ucuugaacuccugacuucaag

SEQ ID NO: 1110200 - RNA, 25 nt, Human
ucuuuauggcaaaacuguguugccu

SEQ ID NO: 1110201 - RNA, 19 nt, Human
ugaaaaagaaaaaacucac

SEQ ID NO: 1110202 - RNA, 23 nt, Human
ugaaaaagagagagagaaagaaa

SEQ ID NO: 1110203 - RNA, 21 nt, Human
ugacacaggaagcuuaggcag

SEQ ID NO: 1110204 - RNA, 18 nt, Human
ugacuucaagugaucugc

SEQ ID NO: 1110205 - RNA, 21 nt, Human
ugacuucaagugaucugcccg

SEQ ID NO: 1110206 - RNA, 24 nt, Human
ugacuucaagugaucugcccgccu

SEQ ID NO: 1110207 - RNA, 26 nt, Human
ugagacaggcagaucacaaggucagg

SEQ ID NO: 1110208 - RNA, 18 nt, Human
ugagauuacaggugugug

SEQ ID NO: 1110209 - RNA, 20 nt, Human
ugagauuacagguguguguc

SEQ ID NO: 1110210 - RNA, 22 nt, Human
ugagauuacaggugugugucac

SEQ ID NO: 1110211 - RNA, 24 nt, Human
ugagauuacaggugugugucacca

SEQ ID NO: 1110212 - RNA, 25 nt, Human
ugagauuacaggugugugucaccau

SEQ ID NO: 1110213 - RNA, 22 nt, Human
ugagccaagauugcgccaccgc

SEQ ID NO: 1110214 - RNA, 22 nt, Human
ugagcccaggagguugaggcug

SEQ ID NO: 1110215 - RNA, 23 nt, Human
ugagcccaggaguucgagaccag

SEQ ID NO: 1110216 - RNA, 22 nt, Human
ugagguggugcaugccuggggu

SEQ ID NO: 1110217 - RNA, 22 nt, Human
ugauaaagaguauugcucuguu

SEQ ID NO: 1110218 - RNA, 20 nt, Human
ugauucuugugccucagccu

SEQ ID NO: 1110219 - RNA, 22 nt, Human
ugcaguggugggaucucagcuc

SEQ ID NO: 1110220 - RNA, 19 nt, Human
ugcauauauauauauauau

SEQ ID NO: 1110221 - RNA, 18 nt, Human
ugcccaggcuggagugca

SEQ ID NO: 1110222 - RNA, 21 nt, Human
ugcccaggcuggagugcagug

SEQ ID NO: 1110223 - RNA, 24 nt, Human
ugcccaggcuggagugcaguggug

SEQ ID NO: 1110224 - RNA, 21 nt, Human
ugcccgccucgaccucccaaa

SEQ ID NO: 1110225 - RNA, 24 nt, Human
ugcccggcuaauuuuuguauuuuu

SEQ ID NO: 1110226 - RNA, 22 nt, Human
ugccucagccuccugaguagcu

SEQ ID NO: 1110227 - RNA, 24 nt, Human
ugccucagccuccugaguagcuga

SEQ ID NO: 1110228 - RNA, 21 nt, Human
ugccuggggucccagugacac

SEQ ID NO: 1110229 - RNA, 24 nt, Human
ugcgaggcagagguuguagugagc

SEQ ID NO: 1110230 - RNA, 20 nt, Human
ugcugggauuacaggcguga

SEQ ID NO: 1110231 - RNA, 20 nt, Human
uggagugcaguggugggauc

SEQ ID NO: 1110232 - RNA, 23 nt, Human
uggagugcaguggugggaucuca

SEQ ID NO: 1110233 - RNA, 24 nt, Human
uggagugcaguggugggaucucag

SEQ ID NO: 1110234 - RNA, 22 nt, Human
uggcacgcaccuauagucccag

SEQ ID NO: 1110235 - RNA, 24 nt, Human
uggccaggcuggucuugaacuccu

SEQ ID NO: 1110236 - RNA, 22 nt, Human
uggcucacgccuguaaucccag

SEQ ID NO: 1110237 - RNA, 24 nt, Human
uggcucacgccuguaaucccagca

SEQ ID NO: 1110238 - RNA, 22 nt, Human
uggcuggacgcaguggcucacg

SEQ ID NO: 1110239 - RNA, 24 nt, Human
ugggaggcuaagccagaagaauca

SEQ ID NO: 1110240 - RNA, 24 nt, Human
ugggaggcugagacaggcagauca

SEQ ID NO: 1110241 - RNA, 18 nt, Human
ugggauuacaggcgugac

SEQ ID NO: 1110242 - RNA, 19 nt, Human
ugggauuacaggcgugacg

SEQ ID NO: 1110243 - RNA, 22 nt, Human
ugggauuacaggcgugacgccc

SEQ ID NO: 1110244 - RNA, 23 nt, Human
ugggauuacaggcgugacgcccg

SEQ ID NO: 1110245 - RNA, 24 nt, Human
ugggauuacaggcgugacgcccgg

SEQ ID NO: 1110246 - RNA, 24 nt, Human
ugggcaacaaagugagacccuguc

SEQ ID NO: 1110247 - RNA, 18 nt, Human
ugggcugggugcuauggc

SEQ ID NO: 1110248 - RNA, 22 nt, Human
uggggucccagugacacaggaa

SEQ ID NO: 1110249 - RNA, 18 nt, Human
uggugcaugccugggguc

SEQ ID NO: 1110250 - RNA, 24 nt, Human
uggugggaucucagcucacugcaa

SEQ ID NO: 1110251 - RNA, 18 nt, Human
ugugcauauauauauaua

SEQ ID NO: 1110252 - RNA, 20 nt, Human
ugugcauauauauauauaua

SEQ ID NO: 1110253 - RNA, 20 nt, Human
ugugcauauauauauauaua

SEQ ID NO: 1110254 - RNA, 18 nt, Human
uuagcugggugugguggc

SEQ ID NO: 1110255 - RNA, 20 nt, Human
uuagcugggugugguggcac

SEQ ID NO: 1110256 - RNA, 22 nt, Human
uuagcugggugugguggcacgc

SEQ ID NO: 1110257 - RNA, 24 nt, Human
uuagcuuggugagguggugcaugc

SEQ ID NO: 1110258 - RNA, 24 nt, Human
uuaguagagauaggguuccaccau

SEQ ID NO: 1110259 - RNA, 23 nt, Human
uucaagugauucuugugccucag

SEQ ID NO: 1110260 - RNA, 21 nt, Human
uuccaccauguuggccaggcu

SEQ ID NO: 1110261 - RNA, 21 nt, Human
uucugggcugggugcuauggc

SEQ ID NO: 1110262 - RNA, 23 nt, Human
uucugggcugggugcuauggcuc

SEQ ID NO: 1110263 - RNA, 22 nt, Human
uugagcccaggaguucgagacc

SEQ ID NO: 1110264 - RNA, 23 nt, Human
uugauuauaaaaauucugggcug

SEQ ID NO: 1110265 - RNA, 24 nt, Human
uugcccaggcuggagugcaguggu

SEQ ID NO: 1110266 - RNA, 22 nt, Human
uugcucuguugcccaggcugga

SEQ ID NO: 1110267 - RNA, 24 nt, Human
uugcucuguugcccaggcuggagu

SEQ ID NO: 1110268 - RNA, 25 nt, Human
uugggaggcuaagccagaagaauca

SEQ ID NO: 1110269 - RNA, 25 nt, Human
uugggaggcugagacaggcagauca

SEQ ID NO: 1110270 - RNA, 22 nt, Human
uuguagugagccaagauugcgc

SEQ ID NO: 1110271 - RNA, 24 nt, Human
uuugcaccacugcauucuagccug

SEQ ID NO: 1110272 - RNA, 19 nt, Human
uuugugcauauauauauau

SEQ ID NO: 1110273 - RNA, 20 nt, Human
uuugugcauauauauauaua

SEQ ID NO: 1110274 - RNA, 19 nt, Human
uuuuuaguagagauagggu

SEQ ID NO: 1110275 - RNA, 20 nt, Human
uuuuuguauuuuuaguagag

SEQ ID NO: 1110276 - RNA, 25 nt, Human
uuuuuucuuuuuuuuuuugauaaag

SEQ ID NO: 1110277 - RNA, 26 nt, Human
uuuuuuuuuuugauaaagaguauugc

SEQ ID NO: 1110278 - RNA, 22 nt, Human
aaaaaacccccaaaacgaaaug

SEQ ID NO: 1110279 - RNA, 25 nt, Human
aaaaaauccucuuacuuaauccaac

SEQ ID NO: 1110280 - RNA, 22 nt, Human
aaaaacaaaacaaaacaaaaac

SEQ ID NO: 1110281 - RNA, 22 nt, Human
aaaaacaaaauccaccccuaca

SEQ ID NO: 1110282 - RNA, 20 nt, Human
aaaacaaaacaaaacaaaaa

SEQ ID NO: 1110283 - RNA, 18 nt, Human
aaacaaaaaacccccaaa

SEQ ID NO: 1110284 - RNA, 23 nt, Human
aaacaaaacaaaaacaaaaucca

SEQ ID NO: 1110285 - RNA, 23 nt, Human
aaacaaaacaaaacaaaaacaaa

SEQ ID NO: 1110286 - RNA, 23 nt, Human
aaagcuagugagaauuuugcggc

SEQ ID NO: 1110287 - RNA, 23 nt, Human
aaagucuugacuucggagugcag

SEQ ID NO: 1110288 - RNA, 19 nt, Human
aacaaaaaacccccaaaac

SEQ ID NO: 1110289 - RNA, 25 nt, Human
aacaaaacaaaaacaaaauccaccc

SEQ ID NO: 1110290 - RNA, 18 nt, Human
aagcggcagagcuacaac

SEQ ID NO: 1110291 - RNA, 18 nt, Human
aaguguggaaacugaggc

SEQ ID NO: 1110292 - RNA, 22 nt, Human
aauuacucucugaauuacccac

SEQ ID NO: 1110293 - RNA, 20 nt, Human
acaaaaacaaaauccacccc

SEQ ID NO: 1110294 - RNA, 22 nt, Human
acaaaacaaaacaaaaacaaaa

SEQ ID NO: 1110295 - RNA, 19 nt, Human
acccuggcuccaaauccag

SEQ ID NO: 1110296 - RNA, 23 nt, Human
acuaucacuaagauuaaaugaaa

SEQ ID NO: 1110297 - RNA, 21 nt, Human
acugaaauuaaaaacaaaaca

SEQ ID NO: 1110298 - RNA, 23 nt, Human
agauauuuuucuaguuugaaagu

SEQ ID NO: 1110299 - RNA, 19 nt, Human
aguugacuaaaaagacuug

SEQ ID NO: 1110300 - RNA, 24 nt, Human
aucaagaccaacguccuaauuuua

SEQ ID NO: 1110301 - RNA, 20 nt, Human
augccuuuguaauauuucaa

SEQ ID NO: 1110302 - RNA, 22 nt, Human
caaaaacaaaauccaccccuac

SEQ ID NO: 1110303 - RNA, 24 nt, Human
caaaacaaaaacaaaauccacccc

SEQ ID NO: 1110304 - RNA, 22 nt, Human
caaaauccaccccuacacccac

SEQ ID NO: 1110305 - RNA, 24 nt, Human
caaaauccaccccuacacccacaa

SEQ ID NO: 1110306 - RNA, 24 nt, Human
caaacaaaaaacccccaaaacgaa

SEQ ID NO: 1110307 - RNA, 19 nt, Human
caacaauuaacuaaaucuu

SEQ ID NO: 1110308 - RNA, 26 nt, Human
caagaccaacguccuaauuuuacuaa

SEQ ID NO: 1110309 - RNA, 21 nt, Human
cacccacaacuaucacuaaga

SEQ ID NO: 1110310 - RNA, 22 nt, Human
cacccacaacuaucacuaagau

SEQ ID NO: 1110311 - RNA, 28 nt, Human
caccucugcagcaacccuccuaauacaa

SEQ ID NO: 1110312 - RNA, 22 nt, Human
caccugauugaucucuggcugu

SEQ ID NO: 1110313 - RNA, 20 nt, Human
cacugacguagaaaauauaa

SEQ ID NO: 1110314 - RNA, 23 nt, Human
cagaaacaaacaaaaaaccccca

SEQ ID NO: 1110315 - RNA, 19 nt, Human
ccacuaguagaaucaaagc

SEQ ID NO: 1110316 - RNA, 21 nt, Human
cccuacacccacaacuaucac

SEQ ID NO: 1110317 - RNA, 19 nt, Human
cccuggcuccaaauccagc

SEQ ID NO: 1110318 - RNA, 20 nt, Human
ccuacacccacaacuaucac

SEQ ID NO: 1110319 - RNA, 19 nt, Human
cuagcgccugggaaguuuc

SEQ ID NO: 1110320 - RNA, 20 nt, Human
cuggaauauacaacuauuuc

SEQ ID NO: 1110321 - RNA, 20 nt, Human
cuucugguucuaguuuuugg

SEQ ID NO: 1110322 - RNA, 22 nt, Human
gaaacaaacaaaaaacccccaa

SEQ ID NO: 1110323 - RNA, 23 nt, Human
gaaacaaacaaaaaacccccaaa

SEQ ID NO: 1110324 - RNA, 19 nt, Human
gaauaucugguacaucugg

SEQ ID NO: 1110325 - RNA, 20 nt, Human
gaccaagucacaagcggcag

SEQ ID NO: 1110326 - RNA, 21 nt, Human
gagcuacaaccuggacccugg

SEQ ID NO: 1110327 - RNA, 18 nt, Human
gaguucauccaucauucc

SEQ ID NO: 1110328 - RNA, 26 nt, Human
gaucauagaauucucucaacucggag

SEQ ID NO: 1110329 - RNA, 18 nt, Human
gcauagaagaccaaugac

SEQ ID NO: 1110330 - RNA, 22 nt, Human
gcuuuuuucccuuuuaauaugc

SEQ ID NO: 1110331 - RNA, 21 nt, Human
ggcaaacuccuuuaacaauau

SEQ ID NO: 1110332 - RNA, 26 nt, Human
gguauuuuccuuucuucaaccuucag

SEQ ID NO: 1110333 - RNA, 23 nt, Human
uaaaaacaaaacaaaacaaaaac

SEQ ID NO: 1110334 - RNA, 25 nt, Human
uaaaaacaaaacaaaacaaaaacaa

SEQ ID NO: 1110335 - RNA, 19 nt, Human
uagauucagaaacaaacaa

SEQ ID NO: 1110336 - RNA, 21 nt, Human
uagauucagaaacaaacaaaa

SEQ ID NO: 1110337 - RNA, 21 nt, Human
uagcauagaagaccaaugaca

SEQ ID NO: 1110338 - RNA, 20 nt, Human
uagcaugauuguauuuuugu

SEQ ID NO: 1110339 - RNA, 20 nt, Human
uaucaaaugacaguugacua

SEQ ID NO: 1110340 - RNA, 27 nt, Human
uaucacuaagauuaaaugaaaaaaaga

SEQ ID NO: 1110341 - RNA, 18 nt, Human
uaucuggaucauagaauu

SEQ ID NO: 1110342 - RNA, 26 nt, Human
ucagaaacaaacaaaaaacccccaaa

SEQ ID NO: 1110343 - RNA, 18 nt, Human
ucaucucaucuuuggccu

SEQ ID NO: 1110344 - RNA, 23 nt, Human
ucauucaaaucuugucuccuggg

SEQ ID NO: 1110345 - RNA, 18 nt, Human
uccaccccuacacccaca

SEQ ID NO: 1110346 - RNA, 22 nt, Human
ucuaguuuuuggaagagaugua

SEQ ID NO: 1110347 - RNA, 21 nt, Human
ugaaaucugugaacucaauga

SEQ ID NO: 1110348 - RNA, 23 nt, Human
ugaaauuaaaaacaaaacaaaac

SEQ ID NO: 1110349 - RNA, 24 nt, Human
ugaacuaaauaaacauagcuacug

SEQ ID NO: 1110350 - RNA, 23 nt, Human
ugaacucaaugaauauuagauau

SEQ ID NO: 1110351 - RNA, 18 nt, Human
ugaccaagucacaagcgg

SEQ ID NO: 1110352 - RNA, 23 nt, Human
ugaccaagucacaagcggcagag

SEQ ID NO: 1110353 - RNA, 19 nt, Human
ugcugaauuaacuaacugc

SEQ ID NO: 1110354 - RNA, 20 nt, Human
uggcuccaaauccagccccc

SEQ ID NO: 1110355 - RNA, 21 nt, Human
uguaauauuucaaugaucuau

SEQ ID NO: 1110356 - RNA, 19 nt, Human
uguguuugagaccuaucac

SEQ ID NO: 1110357 - RNA, 19 nt, Human
uucagaaacaaacaaaaaa

SEQ ID NO: 1110358 - RNA, 22 nt, Human
uucagaaacaaacaaaaaaccc

SEQ ID NO: 1110359 - RNA, 25 nt, Human
uucggagugcaggcuaguacaugcu

SEQ ID NO: 1110360 - RNA, 19 nt, Human
uugacuaaaaagacuugau

SEQ ID NO: 1110361 - RNA, 18 nt, Human
uuggucaucucaucuuug

SEQ ID NO: 1110362 - RNA, 21 nt, Human
uuugauaaccaauagaauacc

SEQ ID NO: 1110363 - RNA, 23 nt, Human
uuuguaauauuucaaugaucuau

SEQ ID NO: 1110364 - RNA, 19 nt, Human
cagaggccuccgagaggcc

SEQ ID NO: 1110365 - RNA, 19 nt, Human
ccucaauuuccuugacuga

SEQ ID NO: 1110366 - RNA, 20 nt, Human
ccuccgagaggccaaggcuu

SEQ ID NO: 1110367 - RNA, 24 nt, Human
cugaccagaggggcugaccugaga

SEQ ID NO: 1110368 - RNA, 20 nt, Human
cugggggcugagggggugau

SEQ ID NO: 1110369 - RNA, 20 nt, Human
ggccuccgguggggucccag

SEQ ID NO: 1110370 - RNA, 19 nt, Human
ggggugaugguccuggccu

SEQ ID NO: 1110371 - RNA, 24 nt, Human
gucccagaggccuccgagaggcca

SEQ ID NO: 1110372 - RNA, 19 nt, Human
ucugggggcugagggggug

SEQ ID NO: 1110373 - RNA, 23 nt, Human
ugaccugagaggccuccuggucu

SEQ ID NO: 1110374 - RNA, 20 nt, Human
ugagggggugaugguccugg

SEQ ID NO: 1110375 - RNA, 19 nt, Human
ugcugguuccaggaaaagg

SEQ ID NO: 1110376 - RNA, 21 nt, Human
uggccuccgguggggucccuc

SEQ ID NO: 1110377 - RNA, 19 nt, Human
uugacugaccagaggggcu

SEQ ID NO: 1110378 - RNA, 23 nt, Human
aggggaagggguugaggagggau

SEQ ID NO: 1110379 - RNA, 20 nt, Human
gaagagucgaucaguguccc

SEQ ID NO: 1110380 - RNA, 18 nt, Human
ggggaagggguugaggag

SEQ ID NO: 1110381 - RNA, 24 nt, Human
ggugcuguuuuaaugaccaagugu

SEQ ID NO: 1110382 - RNA, 24 nt, Human
guguagaaauccaccugcagcugu

SEQ ID NO: 1110383 - RNA, 28 nt, Human
uccaccugcagcugugguuccgaguacg

SEQ ID NO: 1110384 - RNA, 20 nt, Human
aaaacacaauaacugcaaug

SEQ ID NO: 1110385 - RNA, 20 nt, Human
gccacaaaccuucaguuugu

SEQ ID NO: 1110386 - RNA, 24 nt, Human
uacauugugaacaugacaacuacc

SEQ ID NO: 1110387 - RNA, 23 nt, Human
uaccaaaaugugacauaaagaca

SEQ ID NO: 1110388 - RNA, 27 nt, Human
uauaaaacacaauaacugcaaugcaca

SEQ ID NO: 1110389 - RNA, 19 nt, Human
uauuucauagggaguacau

SEQ ID NO: 1110390 - RNA, 22 nt, Human
ucccaaagcaauuacaauagca

SEQ ID NO: 1110391 - RNA, 19 nt, Human
ucuugcucaccacaggguu

SEQ ID NO: 1110392 - RNA, 18 nt, Human
ugacauaaagacaugaaa

SEQ ID NO: 1110393 - RNA, 23 nt, Human
ugcacaauucagcgagguaugcc

SEQ ID NO: 1110394 - RNA, 21 nt, Human
aaccaggccuaagggauugcu

SEQ ID NO: 1110395 - RNA, 23 nt, Human
aagcagcuccgcgggaggagggc

SEQ ID NO: 1110396 - RNA, 26 nt, Human
acacacacaccccaauuuccuggcaa

SEQ ID NO: 1110397 - RNA, 21 nt, Human
acacaugcacgcacacacaca

SEQ ID NO: 1110398 - RNA, 20 nt, Human
acagccaguagagccagagc

SEQ ID NO: 1110399 - RNA, 18 nt, Human
accccaauuuccuggcau

SEQ ID NO: 1110400 - RNA, 22 nt, Human
agaccccugucauccccuaccc

SEQ ID NO: 1110401 - RNA, 20 nt, Human
agagcccuuccccaaagccc

SEQ ID NO: 1110402 - RNA, 23 nt, Human
agcaggugacuuccacaccuccc

SEQ ID NO: 1110403 - RNA, 18 nt, Human
aggcaggggugggacggg

SEQ ID NO: 1110404 - RNA, 19 nt, Human
aggcaggggugggacgggg

SEQ ID NO: 1110405 - RNA, 18 nt, Human
agggaaccaggccuaagg

SEQ ID NO: 1110406 - RNA, 19 nt, Human
agguggguggcgcagcccu

SEQ ID NO: 1110407 - RNA, 25 nt, Human
aucuuccugccuguucccuccgcug

SEQ ID NO: 1110408 - RNA, 19 nt, Human
auggagaugacagugggug

SEQ ID NO: 1110409 - RNA, 20 nt, Human
auggagaugacagugggugg

SEQ ID NO: 1110410 - RNA, 31 nt, Human
auguguguaagugcacacaugcacgcacaca

SEQ ID NO: 1110411 - RNA, 19 nt, Human
auuggccucagccaauuac

SEQ ID NO: 1110412 - RNA, 18 nt, Human
caaaacacggacaggcgc

SEQ ID NO: 1110413 - RNA, 19 nt, Human
caagagcacuaaggccccg

SEQ ID NO: 1110414 - RNA, 20 nt, Human
caaguguuuuaccaacaaac

SEQ ID NO: 1110415 - RNA, 26 nt, Human
cacaacccugcaccuguuguaauccc

SEQ ID NO: 1110416 - RNA, 22 nt, Human
cacacaugcacgcacacacaca

SEQ ID NO: 1110417 - RNA, 21 nt, Human
cacagaccccugucauccccu

SEQ ID NO: 1110418 - RNA, 27 nt, Human
cacaugcacgcacacacacacacaccc

SEQ ID NO: 1110419 - RNA, 27 nt, Human
cacaugcacgcacacacacacacaccc

SEQ ID NO: 1110420 - RNA, 26 nt, Human
caccagugacaaguguuuuaccaaca

SEQ ID NO: 1110421 - RNA, 20 nt, Human
caccucugccccgccccgcc

SEQ ID NO: 1110422 - RNA, 20 nt, Human
cagccccuuuccccgcccug

SEQ ID NO: 1110423 - RNA, 22 nt, Human
cagcccuaccuagaagcagcuc

SEQ ID NO: 1110424 - RNA, 23 nt, Human
caggaagugaaugaauaggugug

SEQ ID NO: 1110425 - RNA, 25 nt, Human
caguagagccagagcccuuccccaa

SEQ ID NO: 1110426 - RNA, 18 nt, Human
caucugggugucccgggg

SEQ ID NO: 1110427 - RNA, 22 nt, Human
ccacaccucccuggcucacacc

SEQ ID NO: 1110428 - RNA, 20 nt, Human
ccacugucuucccgcuggag

SEQ ID NO: 1110429 - RNA, 19 nt, Human
ccaggugguagaaggcaau

SEQ ID NO: 1110430 - RNA, 21 nt, Human
ccaggugguagaaggcaaugc

SEQ ID NO: 1110431 - RNA, 24 nt, Human
ccagugacaaguguuuuaccaaca

SEQ ID NO: 1110432 - RNA, 18 nt, Human
cccaggugguagaaggca

SEQ ID NO: 1110433 - RNA, 22 nt, Human
ccccgcccugggcccagcccuc

SEQ ID NO: 1110434 - RNA, 20 nt, Human
ccccuggauuggccucagcc

SEQ ID NO: 1110435 - RNA, 22 nt, Human
cccgagucugggacccagcccc

SEQ ID NO: 1110436 - RNA, 23 nt, Human
cccgcggccggcacucucagagc

SEQ ID NO: 1110437 - RNA, 21 nt, Human
cccgucacacuucucauccuc

SEQ ID NO: 1110438 - RNA, 21 nt, Human
cccuccagccacagaccccug

SEQ ID NO: 1110439 - RNA, 18 nt, Human
cccugaucuuccugccug

SEQ ID NO: 1110440 - RNA, 26 nt, Human
cccugggcccagcccucaccucugcc

SEQ ID NO: 1110441 - RNA, 24 nt, Human
ccgagucugggacccagccccacu

SEQ ID NO: 1110442 - RNA, 22 nt, Human
ccgcuggaggcugcaacgauuc

SEQ ID NO: 1110443 - RNA, 21 nt, Human
ccggcaaccaggggcgccaau

SEQ ID NO: 1110444 - RNA, 24 nt, Human
ccuccgcugcagccccuuuccccg

SEQ ID NO: 1110445 - RNA, 22 nt, Human
ccugcaucccagcucccuccag

SEQ ID NO: 1110446 - RNA, 21 nt, Human
ccugcuggcacccccagaacc

SEQ ID NO: 1110447 - RNA, 23 nt, Human
ccugcuggcacccccagaaccca

SEQ ID NO: 1110448 - RNA, 21 nt, Human
cgcacaccucugugcgccugu

SEQ ID NO: 1110449 - RNA, 18 nt, Human
cgccacugggcgauccac

SEQ ID NO: 1110450 - RNA, 19 nt, Human
cgggggaaguuacauggug

SEQ ID NO: 1110451 - RNA, 21 nt, Human
cucaccucugccccgccccgc

SEQ ID NO: 1110452 - RNA, 18 nt, Human
cucagagccugcuggcac

SEQ ID NO: 1110453 - RNA, 21 nt, Human
cucagagccugcuggcacccc

SEQ ID NO: 1110454 - RNA, 23 nt, Human
cucugugcgccuguauuugcggc

SEQ ID NO: 1110455 - RNA, 22 nt, Human
cugaauacccgacccaaagacc

SEQ ID NO: 1110456 - RNA, 21 nt, Human
cugaguguugugucugcccuc

SEQ ID NO: 1110457 - RNA, 18 nt, Human
cugcagguagcgcagcgc

SEQ ID NO: 1110458 - RNA, 21 nt, Human
cugcccugaucuuccugccug

SEQ ID NO: 1110459 - RNA, 21 nt, Human
cugcuggcacccccagaaccc

SEQ ID NO: 1110460 - RNA, 21 nt, Human
cuguucccuccgcugcagccc

SEQ ID NO: 1110461 - RNA, 22 nt, Human
cuguucccuccgcugcagcccc

SEQ ID NO: 1110462 - RNA, 19 nt, Human
cuuccacaccucccuggcu

SEQ ID NO: 1110463 - RNA, 27 nt, Human
gagcaggugaauaggagauaucagaug

SEQ ID NO: 1110464 - RNA, 26 nt, Human
gagccgaggcuccaggcggcagggaa

SEQ ID NO: 1110465 - RNA, 19 nt, Human
gagccugcuggcaccccca

SEQ ID NO: 1110466 - RNA, 24 nt, Human
gcccugcugcuucuccaguaccuu

SEQ ID NO: 1110467 - RNA, 30 nt, Human
ggccaggggguggaaagaaugacucagggg

SEQ ID NO: 1110468 - RNA, 23 nt, Human
gggcgagggccgggaccucgaga

SEQ ID NO: 1110469 - RNA, 20 nt, Human
gucacacuucucauccucca

SEQ ID NO: 1110470 - RNA, 21 nt, Human
gugaauaggagauaucagaug

SEQ ID NO: 1110471 - RNA, 21 nt, Human
gugcgguaggcagggguggga

SEQ ID NO: 1110472 - RNA, 20 nt, Human
gugggcagggcaucaucugg

SEQ ID NO: 1110473 - RNA, 21 nt, Human
uaacaggaaaacuaaucucgu

SEQ ID NO: 1110474 - RNA, 23 nt, Human
uaccuagaagcagcuccgcggga

SEQ ID NO: 1110475 - RNA, 22 nt, Human
uagaagcagcuccgcgggagga

SEQ ID NO: 1110476 - RNA, 21 nt, Human
uaggagauaucagauguggca

SEQ ID NO: 1110477 - RNA, 21 nt, Human
ucacagcggagccaucgcaca

SEQ ID NO: 1110478 - RNA, 22 nt, Human
ucaccuguggguucccggcugc

SEQ ID NO: 1110479 - RNA, 19 nt, Human
ucagccaauuacaucccga

SEQ ID NO: 1110480 - RNA, 20 nt, Human
ucagccaauuacaucccgag

SEQ ID NO: 1110481 - RNA, 18 nt, Human
uccccagucacagcggag

SEQ ID NO: 1110482 - RNA, 22 nt, Human
ucccggcugcgggccuccugca

SEQ ID NO: 1110483 - RNA, 20 nt, Human
ucccggggcagcaggugacu

SEQ ID NO: 1110484 - RNA, 20 nt, Human
ucccuccagccacagacccc

SEQ ID NO: 1110485 - RNA, 18 nt, Human
ucccuccgcugcagcccc

SEQ ID NO: 1110486 - RNA, 22 nt, Human
ucccuccgcugcagccccuuuc

SEQ ID NO: 1110487 - RNA, 19 nt, Human
ucccucuuccuucuucauu

SEQ ID NO: 1110488 - RNA, 19 nt, Human
ucccuggcucacaccccau

SEQ ID NO: 1110489 - RNA, 23 nt, Human
uccgaaguauccagcagcucgcu

SEQ ID NO: 1110490 - RNA, 20 nt, Human
ugaaugaauaggugugcgug

SEQ ID NO: 1110491 - RNA, 23 nt, Human
ugacaguggguggauagggaagu

SEQ ID NO: 1110492 - RNA, 19 nt, Human
ugacucaggggaagcgagg

SEQ ID NO: 1110493 - RNA, 26 nt, Human
ugcacacaugcacgcacacacacaca

SEQ ID NO: 1110494 - RNA, 21 nt, Human
ugccaggaaugccucuucgca

SEQ ID NO: 1110495 - RNA, 22 nt, Human
ugcgaggagccgaggcuccagg

SEQ ID NO: 1110496 - RNA, 18 nt, Human
uggaaagaaugacucagg

SEQ ID NO: 1110497 - RNA, 21 nt, Human
uggaggaaugagugugugcgg

SEQ ID NO: 1110498 - RNA, 23 nt, Human
ugggacccagccccacugucuuc

SEQ ID NO: 1110499 - RNA, 21 nt, Human
ugggugucccggggcagcagg

SEQ ID NO: 1110500 - RNA, 20 nt, Human
uggugcaggaagugaaugaa

SEQ ID NO: 1110501 - RNA, 25 nt, Human
uggugcaggaagugaaugaauaggu

SEQ ID NO: 1110502 - RNA, 31 nt, Human
uguaagugcacacaugcacgcacacacacag

SEQ ID NO: 1110503 - RNA, 18 nt, Human
uguagggaguagguggga

SEQ ID NO: 1110504 - RNA, 25 nt, Human
uguguaagugcacacaugcacgcag

SEQ ID NO: 1110505 - RNA, 23 nt, Human
uucccggcugcgggccuccugca

SEQ ID NO: 1110506 - RNA, 19 nt, Human
uuccuggcaucguccaccu

SEQ ID NO: 1110507 - RNA, 23 nt, Human
uucuccaguaccuugagacagua

SEQ ID NO: 1110508 - RNA, 20 nt, Human
uugcggcacccucugccagg

SEQ ID NO: 1110509 - RNA, 22 nt, Human
uuuccuggcaucguccacccga

SEQ ID NO: 1110510 - RNA, 21 nt, Human
acagggcugggaacacggggu

SEQ ID NO: 1110511 - RNA, 22 nt, Human
acccugaaggccuucugaccuc

SEQ ID NO: 1110512 - RNA, 22 nt, Human
agcaggcaggcgccgagcggcu

SEQ ID NO: 1110513 - RNA, 19 nt, Human
aggcagacaucccgcccuc

SEQ ID NO: 1110514 - RNA, 20 nt, Human
agggagcgaggaagggucag

SEQ ID NO: 1110515 - RNA, 23 nt, Human
aggugucgguggccgcgggcgcc

SEQ ID NO: 1110516 - RNA, 24 nt, Human
agugagggacagggcugggaacac

SEQ ID NO: 1110517 - RNA, 25 nt, Human
auggaacuggaggcagacauccccu

SEQ ID NO: 1110518 - RNA, 19 nt, Human
cacucccccagccccgggg

SEQ ID NO: 1110519 - RNA, 20 nt, Human
cagccgcagcguggcaggug

SEQ ID NO: 1110520 - RNA, 18 nt, Human
cagcugccguucccaucc

SEQ ID NO: 1110521 - RNA, 21 nt, Human
cagcugccguucccaucccgg

SEQ ID NO: 1110522 - RNA, 21 nt, Human
caucccggggacccugaaggc

SEQ ID NO: 1110523 - RNA, 24 nt, Human
ccccgagggaugcuggccccggag

SEQ ID NO: 1110524 - RNA, 20 nt, Human
ccccgggccuccucggaccc

SEQ ID NO: 1110525 - RNA, 22 nt, Human
cccgcaaaacccgcacgcaacg

SEQ ID NO: 1110526 - RNA, 24 nt, Human
cccgcaaaacccgcacgcaacgug

SEQ ID NO: 1110527 - RNA, 22 nt, Human
cccggagccagaauccuggggc

SEQ ID NO: 1110528 - RNA, 19 nt, Human
cccugaaggccuucugacc

SEQ ID NO: 1110529 - RNA, 24 nt, Human
ccgcugggcucagugagggacagg

SEQ ID NO: 1110530 - RNA, 18 nt, Human
ccggggccgcagcccggg

SEQ ID NO: 1110531 - RNA, 21 nt, Human
ccucaggcucuggacggcccu

SEQ ID NO: 1110532 - RNA, 22 nt, Human
ccuccuccgggucuccccgggc

SEQ ID NO: 1110533 - RNA, 22 nt, Human
ccucgaguuucacggagagaag

SEQ ID NO: 1110534 - RNA, 21 nt, Human
cgagcggcugcuggcagaggc

SEQ ID NO: 1110535 - RNA, 19 nt, Human
cgcacugggaagaaggugu

SEQ ID NO: 1110536 - RNA, 20 nt, Human
cgccugagcagcugccguuc

SEQ ID NO: 1110537 - RNA, 22 nt, Human
cggcgcaucugccgccugagca

SEQ ID NO: 1110538 - RNA, 20 nt, Human
cguggcagguguuggggccg

SEQ ID NO: 1110539 - RNA, 21 nt, Human
cucccccagccccggggcucc

SEQ ID NO: 1110540 - RNA, 27 nt, Human
cuccgggucuccccgggccuccucgga

SEQ ID NO: 1110541 - RNA, 25 nt, Human
cuccucgaguuucacggagagaagc

SEQ ID NO: 1110542 - RNA, 21 nt, Human
cuccuuguauggaacuggagg

SEQ ID NO: 1110543 - RNA, 21 nt, Human
cucuggacggcccuggggccc

SEQ ID NO: 1110544 - RNA, 25 nt, Human
cugaaggccuucugaccuccuccgg

SEQ ID NO: 1110545 - RNA, 20 nt, Human
gaccaugcggccagcacucc

SEQ ID NO: 1110546 - RNA, 19 nt, Human
ggacccggggccgcagccc

SEQ ID NO: 1110547 - RNA, 20 nt, Human
ggcagccgcagcguggcagg

SEQ ID NO: 1110548 - RNA, 23 nt, Human
gggaagaaggugucgguggccgc

SEQ ID NO: 1110549 - RNA, 20 nt, Human
gggcucagugagggacaggg

SEQ ID NO: 1110550 - RNA, 19 nt, Human
ggggugcucugaggcuuug

SEQ ID NO: 1110551 - RNA, 18 nt, Human
gugccgccagccccgugg

SEQ ID NO: 1110552 - RNA, 21 nt, Human
guggcagguguuggggccgcu

SEQ ID NO: 1110553 - RNA, 22 nt, Human
ucagugagggacagggcuggga

SEQ ID NO: 1110554 - RNA, 22 nt, Human
ucugaccuccuccgggucuccc

SEQ ID NO: 1110555 - RNA, 23 nt, Human
ugaggcuuugggguucccgcugg

SEQ ID NO: 1110556 - RNA, 22 nt, Human
uggaacuggaggcagacauccc

SEQ ID NO: 1110557 - RNA, 20 nt, Human
uggccccggagccagaaucc

SEQ ID NO: 1110558 - RNA, 18 nt, Human
uggggcccggcugccggg

SEQ ID NO: 1110559 - RNA, 18 nt, Human
ugggggccuguaugugca

SEQ ID NO: 1110560 - RNA, 24 nt, Human
uguauggaacuggaggcagacauc

SEQ ID NO: 1110561 - RNA, 22 nt, Human
ugugaccagguguccggcagcc

SEQ ID NO: 1110562 - RNA, 18 nt, Human
uguuggggccgcuucuga

SEQ ID NO: 1110563 - RNA, 21 nt, Human
uuacuggggugcucugaggcu

SEQ ID NO: 1110564 - RNA, 21 nt, Human
uuugggguucccgcugggcuc

SEQ ID NO: 1110565 - RNA, 21 nt, Human
aaaguggcagaugaccucauc

SEQ ID NO: 1110566 - RNA, 19 nt, Human
aaguagcucuggagguagg

SEQ ID NO: 1110567 - RNA, 18 nt, Human
cagaugaccucaucuucc

SEQ ID NO: 1110568 - RNA, 22 nt, Human
gaccucaucuuccacuguccac

SEQ ID NO: 1110569 - RNA, 23 nt, Human
ggagguaggcugaguaggcugcg

SEQ ID NO: 1110570 - RNA, 23 nt, Human
ggguccagggguguuccccaggu

SEQ ID NO: 1110571 - RNA, 20 nt, Human
ugggguccuggccgaugccu

SEQ ID NO: 1110572 - RNA, 22 nt, Human
ugggguccuggccgaugccugg

SEQ ID NO: 1110573 - RNA, 18 nt, Human
uguccacagggcacaggg

SEQ ID NO: 1110574 - RNA, 23 nt, Human
acugccccccgccuucugcacgc

SEQ ID NO: 1110575 - RNA, 23 nt, Human
aggcauguuccacacugcccccc

SEQ ID NO: 1110576 - RNA, 26 nt, Human
auucaauaaauauuuauuauaauuaa

SEQ ID NO: 1110577 - RNA, 21 nt, Human
cagcagaagcuggagguggug

SEQ ID NO: 1110578 - RNA, 24 nt, Human
cagccuccggcagcagaagcugga

SEQ ID NO: 1110579 - RNA, 27 nt, Human
ccacacugccccccgccuucugcacgg

SEQ ID NO: 1110580 - RNA, 22 nt, Human
ccccccgccuucugcacgccca

SEQ ID NO: 1110581 - RNA, 21 nt, Human
cgcccaguguccccuacccau

SEQ ID NO: 1110582 - RNA, 18 nt, Human
cggcagcagaagcuggag

SEQ ID NO: 1110583 - RNA, 19 nt, Human
cugggggcuggggcuucug

SEQ ID NO: 1110584 - RNA, 21 nt, Human
gccacuggguccugggguccc

SEQ ID NO: 1110585 - RNA, 23 nt, Human
gggggcuggggcuucugcggagu

SEQ ID NO: 1110586 - RNA, 18 nt, Human
ggguccugggguccuggg

SEQ ID NO: 1110587 - RNA, 23 nt, Human
ggguccugggguccugggggcug

SEQ ID NO: 1110588 - RNA, 18 nt, Human
gguccugggguccugggg

SEQ ID NO: 1110589 - RNA, 19 nt, Human
uccggggcugccggcugcg

SEQ ID NO: 1110590 - RNA, 24 nt, Human
uccugggguccugggggcuggggc

SEQ ID NO: 1110591 - RNA, 25 nt, Human
uccugggguccugggggcuggggcu

SEQ ID NO: 1110592 - RNA, 27 nt, Human
uccugggguccugggggcuggggcuuu

SEQ ID NO: 1110593 - RNA, 24 nt, Human
uggguccugggguccugggggcug

SEQ ID NO: 1110594 - RNA, 18 nt, Human
aagcaggggagcaaagag

SEQ ID NO: 1110595 - RNA, 22 nt, Human
aagcuuaggggcagcccuuugg

SEQ ID NO: 1110596 - RNA, 22 nt, Human
aaggggacagugagccaaggga

SEQ ID NO: 1110597 - RNA, 19 nt, Human
aaucccuugcccugcccuc

SEQ ID NO: 1110598 - RNA, 18 nt, Human
acccagguggggcacugg

SEQ ID NO: 1110599 - RNA, 22 nt, Human
agaauaaauuccuacaagugga

SEQ ID NO: 1110600 - RNA, 23 nt, Human
agaauugcaaccaggccgaagga

SEQ ID NO: 1110601 - RNA, 20 nt, Human
agagagccuguuugcccaca

SEQ ID NO: 1110602 - RNA, 21 nt, Human
agccagcgcugucaaaccaca

SEQ ID NO: 1110603 - RNA, 23 nt, Human
agcgccuccuuaaaucuugcacc

SEQ ID NO: 1110604 - RNA, 22 nt, Human
aggaguuuccuuccuaaagcuu

SEQ ID NO: 1110605 - RNA, 21 nt, Human
agggaagaggggacugggggc

SEQ ID NO: 1110606 - RNA, 19 nt, Human
agggaccucaggaccuggg

SEQ ID NO: 1110607 - RNA, 23 nt, Human
aguuuccuuccuaaagcuuaggg

SEQ ID NO: 1110608 - RNA, 23 nt, Human
aucccuugcccugcccucugcca

SEQ ID NO: 1110609 - RNA, 24 nt, Human
caaccaggccgaaggagggagggc

SEQ ID NO: 1110610 - RNA, 24 nt, Human
cacaggcaccagcggguuuccggc

SEQ ID NO: 1110611 - RNA, 19 nt, Human
caccaacagccucacccua

SEQ ID NO: 1110612 - RNA, 25 nt, Human
caccaacagccucacccuaguccua

SEQ ID NO: 1110613 - RNA, 26 nt, Human
caccauaaacccagguggggcacugg

SEQ ID NO: 1110614 - RNA, 20 nt, Human
cacccuaguccuagcccugc

SEQ ID NO: 1110615 - RNA, 19 nt, Human
caggggagcaaagaguucc

SEQ ID NO: 1110616 - RNA, 20 nt, Human
ccaaagcaggggagcaaaga

SEQ ID NO: 1110617 - RNA, 18 nt, Human
ccacaauccucaucaacc

SEQ ID NO: 1110618 - RNA, 27 nt, Human
ccaggacuaggaaaaggacggugagga

SEQ ID NO: 1110619 - RNA, 21 nt, Human
cccacaauccucaucaaccca

SEQ ID NO: 1110620 - RNA, 23 nt, Human
cccacgauaguagcagacuuuuu

SEQ ID NO: 1110621 - RNA, 18 nt, Human
cccuugcccugcccucug

SEQ ID NO: 1110622 - RNA, 18 nt, Human
ccggagcccaggacuagg

SEQ ID NO: 1110623 - RNA, 25 nt, Human
ccucgggcuucugagcucgagccca

SEQ ID NO: 1110624 - RNA, 23 nt, Human
ccuggacuucuuaaacuuaaggg

SEQ ID NO: 1110625 - RNA, 22 nt, Human
ccuugcccugcccucugccagc

SEQ ID NO: 1110626 - RNA, 21 nt, Human
ccuuggggaggagggaccuca

SEQ ID NO: 1110627 - RNA, 23 nt, Human
cggaacuccuaagucaacagcau

SEQ ID NO: 1110628 - RNA, 18 nt, Human
cggagcccaggacuagga

SEQ ID NO: 1110629 - RNA, 20 nt, Human
cuaaagguuccugccuuccu

SEQ ID NO: 1110630 - RNA, 24 nt, Human
cucacuuuauuugccacaggcacc

SEQ ID NO: 1110631 - RNA, 24 nt, Human
cuccuuaaaucuugcaccaacagc

SEQ ID NO: 1110632 - RNA, 19 nt, Human
cucuuacuggcuagggcug

SEQ ID NO: 1110633 - RNA, 27 nt, Human
cugaccccugagcucauauuucuggga

SEQ ID NO: 1110634 - RNA, 21 nt, Human
gaacccggagcccaggacuag

SEQ ID NO: 1110635 - RNA, 19 nt, Human
gaagaggggacugggggcc

SEQ ID NO: 1110636 - RNA, 22 nt, Human
gaggaaggagcaucugggugcu

SEQ ID NO: 1110637 - RNA, 24 nt, Human
gaggcacucgcucucaggguccug

SEQ ID NO: 1110638 - RNA, 23 nt, Human
gcuagggcuggcggcagaagggg

SEQ ID NO: 1110639 - RNA, 20 nt, Human
gcuggaauucugagggcagg

SEQ ID NO: 1110640 - RNA, 19 nt, Human
gcuuaggggcagcccuuug

SEQ ID NO: 1110641 - RNA, 20 nt, Human
ggacagugagccaagggagg

SEQ ID NO: 1110642 - RNA, 24 nt, Human
ggcagaaggggacagugagccaag

SEQ ID NO: 1110643 - RNA, 18 nt, Human
ggccuggacuucuuaaac

SEQ ID NO: 1110644 - RNA, 19 nt, Human
ggcuucugagcucgagccc

SEQ ID NO: 1110645 - RNA, 20 nt, Human
gggaagaggggacugggggc

SEQ ID NO: 1110646 - RNA, 22 nt, Human
gggcaccauaaacccagguggg

SEQ ID NO: 1110647 - RNA, 18 nt, Human
gggcacuggggcaagagg

SEQ ID NO: 1110648 - RNA, 18 nt, Human
gggcagggcugagaagga

SEQ ID NO: 1110649 - RNA, 19 nt, Human
ggggacugggggccuggga

SEQ ID NO: 1110650 - RNA, 21 nt, Human
gugcuggguccccaagagggu

SEQ ID NO: 1110651 - RNA, 22 nt, Human
guguggggagaagcagagccag

SEQ ID NO: 1110652 - RNA, 21 nt, Human
uaaauuccuacaaguggaaga

SEQ ID NO: 1110653 - RNA, 20 nt, Human
uaagggaagaggggacuggg

SEQ ID NO: 1110654 - RNA, 23 nt, Human
uaccgucauauggccaaagugga

SEQ ID NO: 1110655 - RNA, 19 nt, Human
uagaacccggagcccagga

SEQ ID NO: 1110656 - RNA, 20 nt, Human
uagaauaaauuccuacaagu

SEQ ID NO: 1110657 - RNA, 19 nt, Human
uagggcuggcggcagaagg

SEQ ID NO: 1110658 - RNA, 21 nt, Human
uauggccaaaguggagacacc

SEQ ID NO: 1110659 - RNA, 19 nt, Human
uccaugguuugagaucucc

SEQ ID NO: 1110660 - RNA, 26 nt, Human
uccaugguuugagaucuccccaaagc

SEQ ID NO: 1110661 - RNA, 24 nt, Human
ucccuugcccugcccucugccagc

SEQ ID NO: 1110662 - RNA, 23 nt, Human
uccuuggggaggagggaccucag

SEQ ID NO: 1110663 - RNA, 28 nt, Human
ucugaccccugagcucauauuucuggga

SEQ ID NO: 1110664 - RNA, 22 nt, Human
ugaggacccuggagugcaacau

SEQ ID NO: 1110665 - RNA, 24 nt, Human
ugauuaggggcuggaauucugagg

SEQ ID NO: 1110666 - RNA, 19 nt, Human
ugcaggguccgcaccugug

SEQ ID NO: 1110667 - RNA, 18 nt, Human
ugccauguaagugugugg

SEQ ID NO: 1110668 - RNA, 23 nt, Human
ugccucacacugggaagucuaaa

SEQ ID NO: 1110669 - RNA, 19 nt, Human
uggaagaggcgagcucaua

SEQ ID NO: 1110670 - RNA, 19 nt, Human
uggcggcagaaggggacag

SEQ ID NO: 1110671 - RNA, 20 nt, Human
uggggagaagcagagccagc

SEQ ID NO: 1110672 - RNA, 24 nt, Human
uggggaggagggaccucaggaccu

SEQ ID NO: 1110673 - RNA, 19 nt, Human
uggggcacuggggcaagag

SEQ ID NO: 1110674 - RNA, 20 nt, Human
uggguuucugaccccugagc

SEQ ID NO: 1110675 - RNA, 24 nt, Human
uggguuucugaccccugagcucau

SEQ ID NO: 1110676 - RNA, 21 nt, Human
uguguggggagaagcagagcc

SEQ ID NO: 1110677 - RNA, 18 nt, Human
uuccucgggcuucugagc

SEQ ID NO: 1110678 - RNA, 21 nt, Human
uuugaggaaggagcaucuggg

SEQ ID NO: 1110679 - RNA, 22 nt, Human
cuucaagacuggcgugcccucu

SEQ ID NO: 1110680 - RNA, 21 nt, Human
ggcgugcccucugggggagga

SEQ ID NO: 1110681 - RNA, 21 nt, Human
uggcgugcccucugggggagg

SEQ ID NO: 1110682 - RNA, 23 nt, Human
aaccaggaaaaggcagaggcuca

SEQ ID NO: 1110683 - RNA, 20 nt, Human
aagcgggggucucuguacgc

SEQ ID NO: 1110684 - RNA, 19 nt, Human
acccccuccaacucccccc

SEQ ID NO: 1110685 - RNA, 21 nt, Human
acccccuccaacucccccccu

SEQ ID NO: 1110686 - RNA, 20 nt, Human
acuaccaggcacccccucca

SEQ ID NO: 1110687 - RNA, 23 nt, Human
agagaggcagggguccgcgcugg

SEQ ID NO: 1110688 - RNA, 23 nt, Human
agcgccccuggcuacccccaccu

SEQ ID NO: 1110689 - RNA, 25 nt, Human
aggagcaagugguggccauagaggg

SEQ ID NO: 1110690 - RNA, 23 nt, Human
aggcagggguccgcgcuggcuuc

SEQ ID NO: 1110691 - RNA, 19 nt, Human
agggaacgaugggcugggg

SEQ ID NO: 1110692 - RNA, 21 nt, Human
caccgcgcugacugcuggggc

SEQ ID NO: 1110693 - RNA, 19 nt, Human
cagaaccagggaacgaugg

SEQ ID NO: 1110694 - RNA, 18 nt, Human
cagcaaagcgggggucuc

SEQ ID NO: 1110695 - RNA, 22 nt, Human
cagccagccccccccccagucu

SEQ ID NO: 1110696 - RNA, 18 nt, Human
ccacccugcgugaguggc

SEQ ID NO: 1110697 - RNA, 24 nt, Human
cccccuccaacucccccccuacaa

SEQ ID NO: 1110698 - RNA, 22 nt, Human
cccuccaacucccccccuacaa

SEQ ID NO: 1110699 - RNA, 23 nt, Human
ccgcugacggggaguggggcggc

SEQ ID NO: 1110700 - RNA, 19 nt, Human
ccggccuagguccuggcua

SEQ ID NO: 1110701 - RNA, 18 nt, Human
ccggcugccgcugacggg

SEQ ID NO: 1110702 - RNA, 18 nt, Human
ccucccugacagccagcc

SEQ ID NO: 1110703 - RNA, 24 nt, Human
ccuccgaagacuuucuggggcaga

SEQ ID NO: 1110704 - RNA, 21 nt, Human
cugacugcuggggcugggggc

SEQ ID NO: 1110705 - RNA, 23 nt, Human
cuggcuucuuccaccagggcugg

SEQ ID NO: 1110706 - RNA, 20 nt, Human
cuggggcagagaggcagggg

SEQ ID NO: 1110707 - RNA, 21 nt, Human
cuggggcugggggcugggggc

SEQ ID NO: 1110708 - RNA, 21 nt, Human
gaagugagucugaggucagga

SEQ ID NO: 1110709 - RNA, 19 nt, Human
gacugcuggggcugggggc

SEQ ID NO: 1110710 - RNA, 22 nt, Human
gagaggcagggguccgcgcugg

SEQ ID NO: 1110711 - RNA, 26 nt, Human
gaggagcaagugguggccauagaggg

SEQ ID NO: 1110712 - RNA, 19 nt, Human
gcagcaaagcgggggucuc

SEQ ID NO: 1110713 - RNA, 21 nt, Human
gccagccccccccccagucuc

SEQ ID NO: 1110714 - RNA, 20 nt, Human
gccauagagggccccccaga

SEQ ID NO: 1110715 - RNA, 19 nt, Human
ggcgcuucgcaaaaccagg

SEQ ID NO: 1110716 - RNA, 22 nt, Human
ggcggccucccugacagccagc

SEQ ID NO: 1110717 - RNA, 24 nt, Human
gggcauguggcgcccgcgucuggg

SEQ ID NO: 1110718 - RNA, 18 nt, Human
gggcugggggcgcagauc

SEQ ID NO: 1110719 - RNA, 20 nt, Human
ggggagcucggugcugaugu

SEQ ID NO: 1110720 - RNA, 21 nt, Human
gugacuaccaggcacccccuc

SEQ ID NO: 1110721 - RNA, 20 nt, Human
guggaagugagucugagguc

SEQ ID NO: 1110722 - RNA, 21 nt, Human
uaagacuccccuccgccaacc

SEQ ID NO: 1110723 - RNA, 23 nt, Human
uacgcaauuaugcaggggccgcu

SEQ ID NO: 1110724 - RNA, 21 nt, Human
uagagggccccccagaggcuu

SEQ ID NO: 1110725 - RNA, 21 nt, Human
uauggaagucaguaccugccc

SEQ ID NO: 1110726 - RNA, 26 nt, Human
ucacuggagacagcgccccuggcuac

SEQ ID NO: 1110727 - RNA, 24 nt, Human
ucccugacagccagcccccccccc

SEQ ID NO: 1110728 - RNA, 19 nt, Human
ucuccagauggcggcggcu

SEQ ID NO: 1110729 - RNA, 19 nt, Human
ucugaggucaggagugggg

SEQ ID NO: 1110730 - RNA, 19 nt, Human
ucugaggucaggagugggg

SEQ ID NO: 1110731 - RNA, 22 nt, Human
ugaacacggcgcuucgcaaaac

SEQ ID NO: 1110732 - RNA, 22 nt, Human
ugaaugaacacggcgcuucgca

SEQ ID NO: 1110733 - RNA, 22 nt, Human
ugacagccagccccccccccag

SEQ ID NO: 1110734 - RNA, 24 nt, Human
ugacuaccaggcacccccuccaac

SEQ ID NO: 1110735 - RNA, 18 nt, Human
ugacugcuggggcugggg

SEQ ID NO: 1110736 - RNA, 20 nt, Human
ugacugcuggggcugggggc

SEQ ID NO: 1110737 - RNA, 18 nt, Human
ugagcccaugaggggucc

SEQ ID NO: 1110738 - RNA, 20 nt, Human
ugcgugaguggcugacgcag

SEQ ID NO: 1110739 - RNA, 23 nt, Human
ugcuggggcugggggcugggggc

SEQ ID NO: 1110740 - RNA, 23 nt, Human
ugcuggggcugggggcugggggc

SEQ ID NO: 1110741 - RNA, 21 nt, Human
uggggccgggauuucccuggg

SEQ ID NO: 1110742 - RNA, 22 nt, Human
ugggggcugggggcgcagauca

SEQ ID NO: 1110743 - RNA, 22 nt, Human
ugucucucuccuuuaauaacca

SEQ ID NO: 1110744 - RNA, 22 nt, Human
uugagcccaugaggggucccag

SEQ ID NO: 1110745 - RNA, 19 nt, Human
uugcucccaggcugggcau

SEQ ID NO: 1110746 - RNA, 22 nt, Human
ccgccuucggccccggcgaccc

SEQ ID NO: 1110747 - RNA, 24 nt, Human
cgacuucggcucccgcucugacuc

SEQ ID NO: 1110748 - RNA, 22 nt, Human
cucugccgccuucggccccggc

SEQ ID NO: 1110749 - RNA, 20 nt, Human
cugccgccuucggccccggc

SEQ ID NO: 1110750 - RNA, 23 nt, Human
ugcuccgacuucggcucccgcuc

SEQ ID NO: 1110751 - RNA, 18 nt, Human
aagcagcaggaggagcug

SEQ ID NO: 1110752 - RNA, 19 nt, Human
aggagaagcgcgcacggcg

SEQ ID NO: 1110753 - RNA, 22 nt, Human
cagcagagccugcaggagcggc

SEQ ID NO: 1110754 - RNA, 20 nt, Human
cagcaggaggagcugaugaa

SEQ ID NO: 1110755 - RNA, 21 nt, Human
cgcaagaagcgggagaagaug

SEQ ID NO: 1110756 - RNA, 22 nt, Human
cggaagcagcaggaggagcuga

SEQ ID NO: 1110757 - RNA, 20 nt, Human
cggcggcuggccaagaagga

SEQ ID NO: 1110758 - RNA, 20 nt, Human
cgggaggagcggaagcagca

SEQ ID NO: 1110759 - RNA, 19 nt, Human
cugcaggagcggcugcggc

SEQ ID NO: 1110760 - RNA, 19 nt, Human
cugcgggaggagcggaagc

SEQ ID NO: 1110761 - RNA, 18 nt, Human
gagcgcaagaagcgggag

SEQ ID NO: 1110762 - RNA, 20 nt, Human
gagcggcugcggcugcggga

SEQ ID NO: 1110763 - RNA, 19 nt, Human
gcugcccugagccagcagc

SEQ ID NO: 1110764 - RNA, 25 nt, Human
ggaagcagcaggaggagccgguacc

SEQ ID NO: 1110765 - RNA, 24 nt, Human
ggagaagaugggcuggggugagga

SEQ ID NO: 1110766 - RNA, 18 nt, Human
ugggcuggggugaggagu

SEQ ID NO: 1110767 - RNA, 24 nt, Human
ugggcuggggugaggaguacaugg

SEQ ID NO: 1110768 - RNA, 24 nt, Human
ugggcuggggugaggaguacaugg

SEQ ID NO: 1110769 - RNA, 23 nt, Human
auaaaucuucacauuggacaaag

SEQ ID NO: 1110770 - RNA, 22 nt, Human
caaaggacaucuaaaaacaaag

SEQ ID NO: 1110771 - RNA, 24 nt, Human
caacgguaaucaaaacaauaugaa

SEQ ID NO: 1110772 - RNA, 21 nt, Human
cucaacaauuucucacuucau

SEQ ID NO: 1110773 - RNA, 24 nt, Human
gacaucuaaaaacaaacuguaucc

SEQ ID NO: 1110774 - RNA, 24 nt, Human
uaaaaacaaacuguauccuucuca

SEQ ID NO: 1110775 - RNA, 25 nt, Human
uaaaaacaaacuguauccuucucaa

SEQ ID NO: 1110776 - RNA, 21 nt, Human
ugaauaaaucuucacauugga

SEQ ID NO: 1110777 - RNA, 23 nt, Human
agaaacauuccucauugcacccc

SEQ ID NO: 1110778 - RNA, 24 nt, Human
agaaacauuccucauugcaccccc

SEQ ID NO: 1110779 - RNA, 20 nt, Human
cauugcaccccccucccugc

SEQ ID NO: 1110780 - RNA, 22 nt, Human
ccucauugcaccccccucccug

SEQ ID NO: 1110781 - RNA, 24 nt, Human
cggacggcagagcggcaugcgucg

SEQ ID NO: 1110782 - RNA, 19 nt, Human
cggcaugcgucgugucuuu

SEQ ID NO: 1110783 - RNA, 23 nt, Human
ugcuggcgcagguggccuuucug

SEQ ID NO: 1110784 - RNA, 18 nt, Human
uugcaccccccucccugc

SEQ ID NO: 1110785 - RNA, 20 nt, Human
uugcaccccccucccugccc

SEQ ID NO: 1110786 - RNA, 21 nt, Human
acugcaaacugcugaccgugg

SEQ ID NO: 1110787 - RNA, 23 nt, Human
agccgcuacaaguccuccggcuu

SEQ ID NO: 1110788 - RNA, 19 nt, Human
agugcccaggacggcccca

SEQ ID NO: 1110789 - RNA, 23 nt, Human
ccaccccggagaacggcgcgccc

SEQ ID NO: 1110790 - RNA, 22 nt, Human
cccaggacggccccaccccgga

SEQ ID NO: 1110791 - RNA, 22 nt, Human
ccuccaaccuguccgaguucau

SEQ ID NO: 1110792 - RNA, 20 nt, Human
ccuucgccauugagggugag

SEQ ID NO: 1110793 - RNA, 18 nt, Human
cggcuucaucgaccugcu

SEQ ID NO: 1110794 - RNA, 20 nt, Human
cuccacgacaagugguacaa

SEQ ID NO: 1110795 - RNA, 22 nt, Human
cuccuggacuacgaggucucca

SEQ ID NO: 1110796 - RNA, 18 nt, Human
cugaccgugggaaagccc

SEQ ID NO: 1110797 - RNA, 18 nt, Human
cugggcgaggcggggcgc

SEQ ID NO: 1110798 - RNA, 24 nt, Human
cuucaucgaccugcuccacgacaa

SEQ ID NO: 1110799 - RNA, 20 nt, Human
uccuccggcuucaucgaccu

SEQ ID NO: 1110800 - RNA, 21 nt, Human
ucucuggggaccuccuccaac

SEQ ID NO: 1110801 - RNA, 23 nt, Human
uucaucgaccugcuccacgacaa

SEQ ID NO: 1110802 - RNA, 19 nt, Human
aaugcaaaagcacaauugg

SEQ ID NO: 1110803 - RNA, 26 nt, Human
aaugcaaaagcacaauuggggaaaaa

SEQ ID NO: 1110804 - RNA, 21 nt, Human
accccagcugccccccgugcc

SEQ ID NO: 1110805 - RNA, 21 nt, Human
acccuuaacaacgaccccagc

SEQ ID NO: 1110806 - RNA, 24 nt, Human
agaaaggaaauucaacuguacaga

SEQ ID NO: 1110807 - RNA, 22 nt, Human
agcaggcgcuucccccggcgcg

SEQ ID NO: 1110808 - RNA, 20 nt, Human
agccgccuuucucccaacau

SEQ ID NO: 1110809 - RNA, 21 nt, Human
augauaagagaaaggaaauuc

SEQ ID NO: 1110810 - RNA, 23 nt, Human
cagacacggacagaguccaggug

SEQ ID NO: 1110811 - RNA, 25 nt, Human
cagagauaggcagcaggcgcuuccc

SEQ ID NO: 1110812 - RNA, 27 nt, Human
cagcaggcgcuucccccggcgcggggc

SEQ ID NO: 1110813 - RNA, 22 nt, Human
cagggcgagacaggcugggccc

SEQ ID NO: 1110814 - RNA, 19 nt, Human
caucucagagcagggggag

SEQ ID NO: 1110815 - RNA, 18 nt, Human
ccaggcgugggacggggg

SEQ ID NO: 1110816 - RNA, 21 nt, Human
ccccggcgcggggcccaggcg

SEQ ID NO: 1110817 - RNA, 24 nt, Human
ccccgugccccgugcccacccucc

SEQ ID NO: 1110818 - RNA, 21 nt, Human
cccucccgccuuucuggacag

SEQ ID NO: 1110819 - RNA, 19 nt, Human
cccuuaacaacgaccccag

SEQ ID NO: 1110820 - RNA, 18 nt, Human
ccgugcccacccucccgc

SEQ ID NO: 1110821 - RNA, 19 nt, Human
ccgugcccacccucccgcc

SEQ ID NO: 1110822 - RNA, 22 nt, Human
cgugccccgugcccacccuccc

SEQ ID NO: 1110823 - RNA, 20 nt, Human
gaccugagguagacagagau

SEQ ID NO: 1110824 - RNA, 20 nt, Human
gcagccaggccccacggucc

SEQ ID NO: 1110825 - RNA, 21 nt, Human
uacaggccacccugccgcggc

SEQ ID NO: 1110826 - RNA, 22 nt, Human
uaccugaauguucugcgaaaac

SEQ ID NO: 1110827 - RNA, 22 nt, Human
uagacagagauaggcagcaggc

SEQ ID NO: 1110828 - RNA, 21 nt, Human
uaggcagcaggcgcuuccccc

SEQ ID NO: 1110829 - RNA, 20 nt, Human
uccagaagccgccuuucucc

SEQ ID NO: 1110830 - RNA, 24 nt, Human
ucccgggagaggagcccuggaggc

SEQ ID NO: 1110831 - RNA, 23 nt, Human
ucuggacagccacuuacgggucc

SEQ ID NO: 1110832 - RNA, 20 nt, Human
ugccaaggaaaaaaaugcaa

SEQ ID NO: 1110833 - RNA, 30 nt, Human
ugccaaggaaaaaaaugcaaaagcacaauu

SEQ ID NO: 1110834 - RNA, 21 nt, Human
uuccagaagccgccuuucucc

SEQ ID NO: 1110835 - RNA, 21 nt, Human
uuguuacaggccacccugccg

SEQ ID NO: 1110836 - RNA, 22 nt, Human
uuuuuuuuuuccuccuauuacc

SEQ ID NO: 1110837 - RNA, 20 nt, Human
aacuggcuguuucacuucuu

SEQ ID NO: 1110838 - RNA, 26 nt, Human
aacuggcuguuucacuucuuuguggu

SEQ ID NO: 1110839 - RNA, 22 nt, Human
aagcguuuuagacuuuugaccc

SEQ ID NO: 1110840 - RNA, 24 nt, Human
aagcguuuuagacuuuugacccag

SEQ ID NO: 1110841 - RNA, 23 nt, Human
agcagaggagggggucacaaggu

SEQ ID NO: 1110842 - RNA, 26 nt, Human
augguggacaagucauaaugguggga

SEQ ID NO: 1110843 - RNA, 21 nt, Human
ccugcaggccaccuggacgga

SEQ ID NO: 1110844 - RNA, 22 nt, Human
gaaaaaauuuuagaggauaggg

SEQ ID NO: 1110845 - RNA, 23 nt, Human
ggucacagggguuacaauggcua

SEQ ID NO: 1110846 - RNA, 18 nt, Human
gguggagagaugauggga

SEQ ID NO: 1110847 - RNA, 21 nt, Human
ucacaaggugcaugguggaga

SEQ ID NO: 1110848 - RNA, 18 nt, Human
ugggcaaggaucugaugg

SEQ ID NO: 1110849 - RNA, 24 nt, Human
ugucacaggguugauugaucaguu

SEQ ID NO: 1110850 - RNA, 25 nt, Human
ugugaccagggacugcguggacacc

SEQ ID NO: 1110851 - RNA, 24 nt, Human
uuaaggcaggaacuggcuguuuca

SEQ ID NO: 1110852 - RNA, 24 nt, Human
uucagcucacaggccugacauuuu

SEQ ID NO: 1110853 - RNA, 21 nt, Human
uuggggcagggcaggaacaag

SEQ ID NO: 1110854 - RNA, 22 nt, Human
aagccagagaggggcugggggc

SEQ ID NO: 1110855 - RNA, 19 nt, Human
aaggcuggagguuaugccu

SEQ ID NO: 1110856 - RNA, 22 nt, Human
acacagccucauccaauucucc

SEQ ID NO: 1110857 - RNA, 22 nt, Human
acacugaaagcaaucugaaagc

SEQ ID NO: 1110858 - RNA, 19 nt, Human
acagagccugcgggaaggc

SEQ ID NO: 1110859 - RNA, 23 nt, Human
acagccggauccugcgacgcgcc

SEQ ID NO: 1110860 - RNA, 19 nt, Human
acccugagagugauuuggg

SEQ ID NO: 1110861 - RNA, 21 nt, Human
acugccacgggccagcugggg

SEQ ID NO: 1110862 - RNA, 19 nt, Human
agaagccacuguacccuga

SEQ ID NO: 1110863 - RNA, 25 nt, Human
agacacugaaagcaaucugaaagcc

SEQ ID NO: 1110864 - RNA, 21 nt, Human
agacuacauuagaagccacug

SEQ ID NO: 1110865 - RNA, 18 nt, Human
agagccaugagugccucc

SEQ ID NO: 1110866 - RNA, 21 nt, Human
agccagagaggggcugggggc

SEQ ID NO: 1110867 - RNA, 20 nt, Human
agcugguaggcggaggccca

SEQ ID NO: 1110868 - RNA, 22 nt, Human
aggcagagugccugggacugcg

SEQ ID NO: 1110869 - RNA, 20 nt, Human
aggcagagugccugggacuu

SEQ ID NO: 1110870 - RNA, 21 nt, Human
aggcccaagacacugccccgg

SEQ ID NO: 1110871 - RNA, 20 nt, Human
agggguggcagggaaccacu

SEQ ID NO: 1110872 - RNA, 23 nt, Human
augccacuagcauggcugggagc

SEQ ID NO: 1110873 - RNA, 23 nt, Human
augcggcugccugggacucaggg

SEQ ID NO: 1110874 - RNA, 23 nt, Human
auggcuuacagccacaccccuga

SEQ ID NO: 1110875 - RNA, 24 nt, Human
caaagggccaccugccucuaagac

SEQ ID NO: 1110876 - RNA, 21 nt, Human
caacugggcucacccgacuca

SEQ ID NO: 1110877 - RNA, 20 nt, Human
cacagaaccagggggacaac

SEQ ID NO: 1110878 - RNA, 24 nt, Human
cacagccggauccugcgacgcgcc

SEQ ID NO: 1110879 - RNA, 21 nt, Human
cacagguaugacaggugcgag

SEQ ID NO: 1110880 - RNA, 23 nt, Human
caccaaccacaccagcguccgcg

SEQ ID NO: 1110881 - RNA, 18 nt, Human
caccacacgggugggcug

SEQ ID NO: 1110882 - RNA, 23 nt, Human
caccaugggccccuuggagcagc

SEQ ID NO: 1110883 - RNA, 23 nt, Human
cacccuccgaacucccggggcca

SEQ ID NO: 1110884 - RNA, 19 nt, Human
caccucccuuggggaagag

SEQ ID NO: 1110885 - RNA, 27 nt, Human
cacuagaggcccccaucaaccggaggg

SEQ ID NO: 1110886 - RNA, 22 nt, Human
cacugaaagcaaucugaaagcc

SEQ ID NO: 1110887 - RNA, 21 nt, Human
cacuggguugcaccagugacc

SEQ ID NO: 1110888 - RNA, 18 nt, Human
cagagugccugggacugc

SEQ ID NO: 1110889 - RNA, 25 nt, Human
caggacgcagcaccccuggcuggcu

SEQ ID NO: 1110890 - RNA, 23 nt, Human
caugaccccggcccggcugccca

SEQ ID NO: 1110891 - RNA, 19 nt, Human
ccaaguagcuuggaugacc

SEQ ID NO: 1110892 - RNA, 18 nt, Human
ccacagguaugacaggug

SEQ ID NO: 1110893 - RNA, 20 nt, Human
ccacagguaugacaggugcg

SEQ ID NO: 1110894 - RNA, 22 nt, Human
cccacagacacugaaagcaauc

SEQ ID NO: 1110895 - RNA, 26 nt, Human
cccagagagccaugagugccucccac

SEQ ID NO: 1110896 - RNA, 26 nt, Human
cccauccugcccacagacacugaaag

SEQ ID NO: 1110897 - RNA, 23 nt, Human
cccauggcgucccagcggcugcu

SEQ ID NO: 1110898 - RNA, 22 nt, Human
ccccagauggcauuauccuagc

SEQ ID NO: 1110899 - RNA, 23 nt, Human
ccccagugcggaugacgggccuu

SEQ ID NO: 1110900 - RNA, 19 nt, Human
cccggggcccucagugccc

SEQ ID NO: 1110901 - RNA, 23 nt, Human
cccucagugcccuggcccaugcc

SEQ ID NO: 1110902 - RNA, 19 nt, Human
cccugagacccacugggga

SEQ ID NO: 1110903 - RNA, 25 nt, Human
cccuggcccaugcccugcaccacac

SEQ ID NO: 1110904 - RNA, 28 nt, Human
ccuaacccuggccacagaacuuucuagc

SEQ ID NO: 1110905 - RNA, 22 nt, Human
ccuagcuuggcuugguccccug

SEQ ID NO: 1110906 - RNA, 22 nt, Human
ccuaugaucauggcccccaucu

SEQ ID NO: 1110907 - RNA, 24 nt, Human
ccucccacgaaguccccacugcag

SEQ ID NO: 1110908 - RNA, 18 nt, Human
ccuccugccgcaccacga

SEQ ID NO: 1110909 - RNA, 23 nt, Human
ccugcaccacacgggugggcugu

SEQ ID NO: 1110910 - RNA, 23 nt, Human
ccugccgucuccacggugacucc

SEQ ID NO: 1110911 - RNA, 25 nt, Human
ccuggcccaugcccugguccccugg

SEQ ID NO: 1110912 - RNA, 19 nt, Human
ccuggcucugccauccugg

SEQ ID NO: 1110913 - RNA, 21 nt, Human
ccugguuaaaaagggguggca

SEQ ID NO: 1110914 - RNA, 19 nt, Human
cgcugccauuugcugcugc

SEQ ID NO: 1110915 - RNA, 22 nt, Human
cggaaucacaucucucugcugg

SEQ ID NO: 1110916 - RNA, 22 nt, Human
cggaggcccaagacacugcccc

SEQ ID NO: 1110917 - RNA, 19 nt, Human
cggcugcccagcuccaccc

SEQ ID NO: 1110918 - RNA, 24 nt, Human
cgggguggagcaucugccagugcc

SEQ ID NO: 1110919 - RNA, 28 nt, Human
cucacuacugaaccugggaagguuuucc

SEQ ID NO: 1110920 - RNA, 21 nt, Human
cucacugugccacuagcugcc

SEQ ID NO: 1110921 - RNA, 22 nt, Human
cucccacgaaguccccacugca

SEQ ID NO: 1110922 - RNA, 22 nt, Human
cugaagccagagaggggcuggg

SEQ ID NO: 1110923 - RNA, 18 nt, Human
cugcagagggccuguggg

SEQ ID NO: 1110924 - RNA, 21 nt, Human
cuggaaccagcuucggucaga

SEQ ID NO: 1110925 - RNA, 25 nt, Human
cuggagcccacuagcaucaccacgc

SEQ ID NO: 1110926 - RNA, 18 nt, Human
cuggucccaagagcgccu

SEQ ID NO: 1110927 - RNA, 20 nt, Human
cuugauccugacacuuggaa

SEQ ID NO: 1110928 - RNA, 24 nt, Human
cuugguccccugugaccccagaug

SEQ ID NO: 1110929 - RNA, 20 nt, Human
gaccuggagccagacuggug

SEQ ID NO: 1110930 - RNA, 19 nt, Human
gagcccacuagcaucacca

SEQ ID NO: 1110931 - RNA, 18 nt, Human
gagcucagggaguggcag

SEQ ID NO: 1110932 - RNA, 19 nt, Human
gaucauggcccccaucagc

SEQ ID NO: 1110933 - RNA, 19 nt, Human
gauccacuugauccugaca

SEQ ID NO: 1110934 - RNA, 24 nt, Human
gcaggacuggaagcagcgaugguc

SEQ ID NO: 1110935 - RNA, 23 nt, Human
gccacacuagaggcccccaucau

SEQ ID NO: 1110936 - RNA, 18 nt, Human
gcucauucuacuggcuac

SEQ ID NO: 1110937 - RNA, 19 nt, Human
gcucccaugcgcgguucca

SEQ ID NO: 1110938 - RNA, 19 nt, Human
ggaccgccugggaggcacc

SEQ ID NO: 1110939 - RNA, 19 nt, Human
ggcacagaaccagggggac

SEQ ID NO: 1110940 - RNA, 19 nt, Human
ggccugugggugggguuug

SEQ ID NO: 1110941 - RNA, 21 nt, Human
ggcuuacagccacaccccuga

SEQ ID NO: 1110942 - RNA, 24 nt, Human
gggccccuuggagcagcucugagc

SEQ ID NO: 1110943 - RNA, 21 nt, Human
gggcccuggaguauaguggag

SEQ ID NO: 1110944 - RNA, 23 nt, Human
gggcucccgauccuggagcucag

SEQ ID NO: 1110945 - RNA, 21 nt, Human
gggggccaucccugugguucc

SEQ ID NO: 1110946 - RNA, 18 nt, Human
gucaaagggccaccugcc

SEQ ID NO: 1110947 - RNA, 21 nt, Human
guccccugagacccacugggg

SEQ ID NO: 1110948 - RNA, 20 nt, Human
gugccgggcuuggucccggc

SEQ ID NO: 1110949 - RNA, 20 nt, Human
guggagcaucugccagugcc

SEQ ID NO: 1110950 - RNA, 25 nt, Human
guggcagggaaccacuuggggaaga

SEQ ID NO: 1110951 - RNA, 19 nt, Human
guuaaaaagggguggcagg

SEQ ID NO: 1110952 - RNA, 22 nt, Human
uacagccacaccccugaacaga

SEQ ID NO: 1110953 - RNA, 21 nt, Human
uaccucugcagagggccugug

SEQ ID NO: 1110954 - RNA, 21 nt, Human
uauccuagcaucuuggcucaa

SEQ ID NO: 1110955 - RNA, 24 nt, Human
uccacggugacuccugguuaaaaa

SEQ ID NO: 1110956 - RNA, 23 nt, Human
uccaugcuguucagggaaagauu

SEQ ID NO: 1110957 - RNA, 24 nt, Human
ucccacgaaguccccacugcaggg

SEQ ID NO: 1110958 - RNA, 28 nt, Human
ucccagaggacuggaguacauccacuuc

SEQ ID NO: 1110959 - RNA, 19 nt, Human
ucccagcggcugcucggag

SEQ ID NO: 1110960 - RNA, 21 nt, Human
ucccugaccucugaagaagac

SEQ ID NO: 1110961 - RNA, 19 nt, Human
uccugccgcaccacgacca

SEQ ID NO: 1110962 - RNA, 23 nt, Human
uccugguuaaaaagggguggcag

SEQ ID NO: 1110963 - RNA, 21 nt, Human
ucuaaagguccuugaugggug

SEQ ID NO: 1110964 - RNA, 21 nt, Human
ucuccuagcuuggcuuggucc

SEQ ID NO: 1110965 - RNA, 18 nt, Human
ucugggagcugcuggggu

SEQ ID NO: 1110966 - RNA, 23 nt, Human
ucuucgcugccauuugcugcugc

SEQ ID NO: 1110967 - RNA, 18 nt, Human
ugaaagccucaguacugc

SEQ ID NO: 1110968 - RNA, 21 nt, Human
ugaaccugggagcaaguuugg

SEQ ID NO: 1110969 - RNA, 19 nt, Human
ugaagccagagaggggcug

SEQ ID NO: 1110970 - RNA, 20 nt, Human
ugaagccagagaggggcugg

SEQ ID NO: 1110971 - RNA, 21 nt, Human
ugacaggugcgagggcuggag

SEQ ID NO: 1110972 - RNA, 23 nt, Human
ugacauugacuuuggcccaugcc

SEQ ID NO: 1110973 - RNA, 19 nt, Human
ugacauugacuuuggcccc

SEQ ID NO: 1110974 - RNA, 27 nt, Human
ugaccccagauggcauuauccuagcau

SEQ ID NO: 1110975 - RNA, 23 nt, Human
ugaccccggcccggcugcccagc

SEQ ID NO: 1110976 - RNA, 18 nt, Human
ugacgugagugacagacc

SEQ ID NO: 1110977 - RNA, 23 nt, Human
ugagacuacauuagaagccacug

SEQ ID NO: 1110978 - RNA, 19 nt, Human
ugagcuggccgaggggucu

SEQ ID NO: 1110979 - RNA, 21 nt, Human
ugagucacggccagucuguug

SEQ ID NO: 1110980 - RNA, 22 nt, Human
ugagugccucccacgaaguccc

SEQ ID NO: 1110981 - RNA, 22 nt, Human
ugagugccucccacgaaguccc

SEQ ID NO: 1110982 - RNA, 21 nt, Human
ugauaaacugagggggacuua

SEQ ID NO: 1110983 - RNA, 18 nt, Human
ugcaccagugacccuggc

SEQ ID NO: 1110984 - RNA, 22 nt, Human
ugcagagggccugugggugggg

SEQ ID NO: 1110985 - RNA, 18 nt, Human
ugccacuagcugccgggg

SEQ ID NO: 1110986 - RNA, 21 nt, Human
ugccaggccaaugcaugugcc

SEQ ID NO: 1110987 - RNA, 22 nt, Human
ugcccagcuccacccacgugac

SEQ ID NO: 1110988 - RNA, 20 nt, Human
ugccccggggcccucagugc

SEQ ID NO: 1110989 - RNA, 18 nt, Human
ugccucagaagggugcca

SEQ ID NO: 1110990 - RNA, 22 nt, Human
ugccucagaagggugccagcag

SEQ ID NO: 1110991 - RNA, 23 nt, Human
ugccucagaagggugccagcagu

SEQ ID NO: 1110992 - RNA, 18 nt, Human
ugccugggacucagggca

SEQ ID NO: 1110993 - RNA, 19 nt, Human
ugccugggacucagggcag

SEQ ID NO: 1110994 - RNA, 22 nt, Human
ugccugggacucagggcagcca

SEQ ID NO: 1110995 - RNA, 18 nt, Human
uggagcagcuaagcuagc

SEQ ID NO: 1110996 - RNA, 23 nt, Human
uggagcccgggggaaggcuggag

SEQ ID NO: 1110997 - RNA, 24 nt, Human
uggcuggcucccaugcgcgguucc

SEQ ID NO: 1110998 - RNA, 20 nt, Human
uggcuuacagccacaccccu

SEQ ID NO: 1110999 - RNA, 18 nt, Human
uggcuugguccccuguga

SEQ ID NO: 1111000 - RNA, 22 nt, Human
ugggaccauggaugccucagaa

SEQ ID NO: 1111001 - RNA, 20 nt, Human
ugggagccacccaacuggac

SEQ ID NO: 1111002 - RNA, 19 nt, Human
ugggaugcaagggaagcca

SEQ ID NO: 1111003 - RNA, 21 nt, Human
uggggaacauagcaucagcca

SEQ ID NO: 1111004 - RNA, 20 nt, Human
ugggugggguuugcaccacu

SEQ ID NO: 1111005 - RNA, 21 nt, Human
uggugaccuuggucugaggcc

SEQ ID NO: 1111006 - RNA, 23 nt, Human
uguaagggccuaacccuggccac

SEQ ID NO: 1111007 - RNA, 19 nt, Human
uguagccgcgccaggcaga

SEQ ID NO: 1111008 - RNA, 21 nt, Human
ugucccaggacgcagcacccc

SEQ ID NO: 1111009 - RNA, 21 nt, Human
uguccuggcucugccauccug

SEQ ID NO: 1111010 - RNA, 23 nt, Human
uugcugcugccucaucugcuggc

SEQ ID NO: 1111011 - RNA, 24 nt, Human
uuggagcagcuaagcuagcggagg

SEQ ID NO: 1111012 - RNA, 19 nt, Human
uuggccaccugacauugac

SEQ ID NO: 1111013 - RNA, 22 nt, Human
uuggggacagcuucugucugga

SEQ ID NO: 1111014 - RNA, 20 nt, Human
uuggugaccuuggucugagg

SEQ ID NO: 1111015 - RNA, 22 nt, Human
uuucucagacagggaccuauga

SEQ ID NO: 1111016 - RNA, 23 nt, Human
uuugcugcugccucaucugcugg

SEQ ID NO: 1111017 - RNA, 21 nt, Human
auuuuauuuugcauacaugga

SEQ ID NO: 1111018 - RNA, 21 nt, Human
uacauggauguccucggagac

SEQ ID NO: 1111019 - RNA, 28 nt, Human
uugcauacauggauguccucggagacug

SEQ ID NO: 1111020 - RNA, 21 nt, Human
uuuugcauacauggauguccu

SEQ ID NO: 1111021 - RNA, 24 nt, Human
aaauauuggugaggcuggugagcc

SEQ ID NO: 1111022 - RNA, 19 nt, Human
accccagugccggggcagc

SEQ ID NO: 1111023 - RNA, 19 nt, Human
acugcuuaccacuggggca

SEQ ID NO: 1111024 - RNA, 24 nt, Human
auauuggugaggcuggugagccug

SEQ ID NO: 1111025 - RNA, 22 nt, Human
cacugcuuaccacuggggcagc

SEQ ID NO: 1111026 - RNA, 19 nt, Human
ccggggcagcaaaguggag

SEQ ID NO: 1111027 - RNA, 19 nt, Human
cuggugagccugcccuucu

SEQ ID NO: 1111028 - RNA, 18 nt, Human
gagccugcccuucuugcc

SEQ ID NO: 1111029 - RNA, 19 nt, Human
uaccagugcgcccccgagg

SEQ ID NO: 1111030 - RNA, 21 nt, Human
ugccggggcagcaaaguggag

SEQ ID NO: 1111031 - RNA, 23 nt, Human
aaaacaaagcucggggcagggga

SEQ ID NO: 1111032 - RNA, 22 nt, Human
aaccccuuccuccuuuucacug

SEQ ID NO: 1111033 - RNA, 24 nt, Human
acagcaacaauugucuuccuggug

SEQ ID NO: 1111034 - RNA, 23 nt, Human
accagcuccccacacuuuguuuc

SEQ ID NO: 1111035 - RNA, 22 nt, Human
accccacacccccacucacacc

SEQ ID NO: 1111036 - RNA, 20 nt, Human
acccccacucacacccacaa

SEQ ID NO: 1111037 - RNA, 21 nt, Human
acucugaguucuggaaagggg

SEQ ID NO: 1111038 - RNA, 25 nt, Human
agaagucagagacggcuucugagcu

SEQ ID NO: 1111039 - RNA, 22 nt, Human
agcccccggagggccugcccaa

SEQ ID NO: 1111040 - RNA, 20 nt, Human
agggaggugggaaagcgagg

SEQ ID NO: 1111041 - RNA, 21 nt, Human
caaaaacaaagcucggggcag

SEQ ID NO: 1111042 - RNA, 20 nt, Human
caaaagucaccaccagccgc

SEQ ID NO: 1111043 - RNA, 19 nt, Human
cacacccccacucacaccc

SEQ ID NO: 1111044 - RNA, 19 nt, Human
cacccacaaccagcucccc

SEQ ID NO: 1111045 - RNA, 23 nt, Human
cacccccacucacacccacaacc

SEQ ID NO: 1111046 - RNA, 20 nt, Human
cacucacacccacaaccagc

SEQ ID NO: 1111047 - RNA, 21 nt, Human
cacugggcccagccuggaccc

SEQ ID NO: 1111048 - RNA, 18 nt, Human
cagacaccuggggagggg

SEQ ID NO: 1111049 - RNA, 24 nt, Human
cagccgcuggguggagggcggcac

SEQ ID NO: 1111050 - RNA, 19 nt, Human
cagccuggaccccacaccc

SEQ ID NO: 1111051 - RNA, 24 nt, Human
cauuuuuaauucagcccccggagg

SEQ ID NO: 1111052 - RNA, 21 nt, Human
ccaaaaacaaagcucggggca

SEQ ID NO: 1111053 - RNA, 24 nt, Human
ccacacagcaacaauugucuuccu

SEQ ID NO: 1111054 - RNA, 21 nt, Human
ccagccuggaccccacacccc

SEQ ID NO: 1111055 - RNA, 20 nt, Human
cccacacccccacucacacc

SEQ ID NO: 1111056 - RNA, 27 nt, Human
cccacacccccacucacacccacaacc

SEQ ID NO: 1111057 - RNA, 20 nt, Human
cccacucacacccacaacca

SEQ ID NO: 1111058 - RNA, 26 nt, Human
cccagagucaccgcaaacuccauucc

SEQ ID NO: 1111059 - RNA, 23 nt, Human
ccccacacccccacucacaccca

SEQ ID NO: 1111060 - RNA, 27 nt, Human
ccccacacccccacucacacccacaac

SEQ ID NO: 1111061 - RNA, 18 nt, Human
cccccgcaugggaacccc

SEQ ID NO: 1111062 - RNA, 23 nt, Human
ccccggagggccugcccaacgcc

SEQ ID NO: 1111063 - RNA, 19 nt, Human
ccccuuccuccuuuucacu

SEQ ID NO: 1111064 - RNA, 19 nt, Human
cccucagccccagagccuc

SEQ ID NO: 1111065 - RNA, 21 nt, Human
cgccagaacucccaaggguag

SEQ ID NO: 1111066 - RNA, 18 nt, Human
cucccccgcaugggaacc

SEQ ID NO: 1111067 - RNA, 20 nt, Human
cucccccgcaugggaacccc

SEQ ID NO: 1111068 - RNA, 19 nt, Human
cugagcuccaaacaggcag

SEQ ID NO: 1111069 - RNA, 19 nt, Human
cuggaccccacacccccac

SEQ ID NO: 1111070 - RNA, 25 nt, Human
cuggaccccacacccccacucacac

SEQ ID NO: 1111071 - RNA, 24 nt, Human
cuuugugccaaacgccagaacucc

SEQ ID NO: 1111072 - RNA, 19 nt, Human
cuuuucacugggcccagcc

SEQ ID NO: 1111073 - RNA, 26 nt, Human
gaccccacacccccacucacacccac

SEQ ID NO: 1111074 - RNA, 20 nt, Human
ggaggggcaaaacuuccugg

SEQ ID NO: 1111075 - RNA, 24 nt, Human
gggaaaggggacccagacaccugg

SEQ ID NO: 1111076 - RNA, 21 nt, Human
gggucaaaggagucuggaggg

SEQ ID NO: 1111077 - RNA, 19 nt, Human
uaaauaaccccaaaaacaa

SEQ ID NO: 1111078 - RNA, 20 nt, Human
uaaauaaccccaaaaacaaa

SEQ ID NO: 1111079 - RNA, 19 nt, Human
uagaagauugaaaucaggg

SEQ ID NO: 1111080 - RNA, 21 nt, Human
uagaagauugaaaucaggguc

SEQ ID NO: 1111081 - RNA, 21 nt, Human
ucaaaauacgcacgagaaguc

SEQ ID NO: 1111082 - RNA, 19 nt, Human
ucaaugguaaagucgcccu

SEQ ID NO: 1111083 - RNA, 19 nt, Human
ucacugggcccagccugga

SEQ ID NO: 1111084 - RNA, 18 nt, Human
uccacaaaagucaccacc

SEQ ID NO: 1111085 - RNA, 18 nt, Human
uccauuccauaccacaca

SEQ ID NO: 1111086 - RNA, 19 nt, Human
uccccugggugcuggcccc

SEQ ID NO: 1111087 - RNA, 25 nt, Human
ugaguucuggaaaggggcgggaaag

SEQ ID NO: 1111088 - RNA, 23 nt, Human
ugccaaacgccagaacucccaag

SEQ ID NO: 1111089 - RNA, 18 nt, Human
ugguaaagucgcccuggu

SEQ ID NO: 1111090 - RNA, 23 nt, Human
uuaauucagcccccggagggccu

SEQ ID NO: 1111091 - RNA, 24 nt, Human
uuccauaccacacagcaacaauug

SEQ ID NO: 1111092 - RNA, 24 nt, Human
uuccccucagccccagagccuccc

SEQ ID NO: 1111093 - RNA, 24 nt, Human
uugucuuccugguguuucuaccau

SEQ ID NO: 1111094 - RNA, 21 nt, Human
aaaguacagcuggggcucaag

SEQ ID NO: 1111095 - RNA, 21 nt, Human
aacccaccaucuucuacccca

SEQ ID NO: 1111096 - RNA, 22 nt, Human
aagaaugucugcaacucaggcg

SEQ ID NO: 1111097 - RNA, 21 nt, Human
aagaggcccaaccccucaucc

SEQ ID NO: 1111098 - RNA, 26 nt, Human
aaguacagcuggggcucaagagacac

SEQ ID NO: 1111099 - RNA, 18 nt, Human
acagccuccaggaggggc

SEQ ID NO: 1111100 - RNA, 20 nt, Human
acccccucuucucccacccc

SEQ ID NO: 1111101 - RNA, 23 nt, Human
acccccucuucucccacccccag

SEQ ID NO: 1111102 - RNA, 20 nt, Human
acccugacccugccugccuu

SEQ ID NO: 1111103 - RNA, 18 nt, Human
accgggccucugcaucuc

SEQ ID NO: 1111104 - RNA, 21 nt, Human
agaaagaaacccaguagucac

SEQ ID NO: 1111105 - RNA, 24 nt, Human
agaaggaaaaucaaaaccccagaa

SEQ ID NO: 1111106 - RNA, 26 nt, Human
agaauaaacaaaccgcacuccgggcg

SEQ ID NO: 1111107 - RNA, 22 nt, Human
agcaaggaccccuucgaccucc

SEQ ID NO: 1111108 - RNA, 24 nt, Human
aggcaaggaggaaucuggacugug

SEQ ID NO: 1111109 - RNA, 23 nt, Human
aggcagaggggggcacauugggg

SEQ ID NO: 1111110 - RNA, 24 nt, Human
aggcagaggggggcacauuggggc

SEQ ID NO: 1111111 - RNA, 25 nt, Human
aggggggcacauuggggccuggggg

SEQ ID NO: 1111112 - RNA, 22 nt, Human
aggucagaggggaugguuagga

SEQ ID NO: 1111113 - RNA, 27 nt, Human
aggucuggaaacaugggcggggguggg

SEQ ID NO: 1111114 - RNA, 18 nt, Human
aguaaucugcugucugug

SEQ ID NO: 1111115 - RNA, 19 nt, Human
agugucuucuggugagugg

SEQ ID NO: 1111116 - RNA, 18 nt, Human
auagaauaugcccagugc

SEQ ID NO: 1111117 - RNA, 21 nt, Human
auccagaacagcucaccuccu

SEQ ID NO: 1111118 - RNA, 19 nt, Human
auccuguugccuccaggcc

SEQ ID NO: 1111119 - RNA, 23 nt, Human
augaacccaccaucuucuacccc

SEQ ID NO: 1111120 - RNA, 23 nt, Human
augggcgggggugggcccgcggu

SEQ ID NO: 1111121 - RNA, 19 nt, Human
caaaggccgcgcccgcccu

SEQ ID NO: 1111122 - RNA, 21 nt, Human
caagaggcccaaccccucauc

SEQ ID NO: 1111123 - RNA, 20 nt, Human
caagcugcuguccauccccc

SEQ ID NO: 1111124 - RNA, 20 nt, Human
cagagugccugucaggcggu

SEQ ID NO: 1111125 - RNA, 21 nt, Human
cagcggggaaacugaggcccc

SEQ ID NO: 1111126 - RNA, 23 nt, Human
cagugcccagcccacaugcccuc

SEQ ID NO: 1111127 - RNA, 19 nt, Human
cauccagaacagcucaccu

SEQ ID NO: 1111128 - RNA, 20 nt, Human
caucccagcaggugccacag

SEQ ID NO: 1111129 - RNA, 23 nt, Human
ccaaaggagaaggaaaaucaaaa

SEQ ID NO: 1111130 - RNA, 18 nt, Human
ccacccugacccugccug

SEQ ID NO: 1111131 - RNA, 26 nt, Human
ccacugaggucagcgcuggguggcaa

SEQ ID NO: 1111132 - RNA, 21 nt, Human
ccagaagccccucagucccag

SEQ ID NO: 1111133 - RNA, 21 nt, Human
ccagcccacaugcccucugcc

SEQ ID NO: 1111134 - RNA, 19 nt, Human
ccaggcagaggggggcaca

SEQ ID NO: 1111135 - RNA, 24 nt, Human
cccagaaagaaacccaguagucac

SEQ ID NO: 1111136 - RNA, 19 nt, Human
cccagcccacaugcccucu

SEQ ID NO: 1111137 - RNA, 20 nt, Human
cccaggugcagcucauuaac

SEQ ID NO: 1111138 - RNA, 21 nt, Human
ccccaagaggcccaaccccuc

SEQ ID NO: 1111139 - RNA, 23 nt, Human
ccccaagaggcccaaccccucau

SEQ ID NO: 1111140 - RNA, 20 nt, Human
ccccaggugaccccaggucu

SEQ ID NO: 1111141 - RNA, 22 nt, Human
ccccucauccagaacagcucac

SEQ ID NO: 1111142 - RNA, 18 nt, Human
ccccucgugagccuggac

SEQ ID NO: 1111143 - RNA, 18 nt, Human
ccccugugccccagcucc

SEQ ID NO: 1111144 - RNA, 20 nt, Human
ccccugugccccagcuccug

SEQ ID NO: 1111145 - RNA, 23 nt, Human
ccccugugccccagcuccugguc

SEQ ID NO: 1111146 - RNA, 22 nt, Human
cccuccguggggguggcuggac

SEQ ID NO: 1111147 - RNA, 19 nt, Human
cccugggccacccugaccc

SEQ ID NO: 1111148 - RNA, 19 nt, Human
cccugggccacccugaccc

SEQ ID NO: 1111149 - RNA, 24 nt, Human
cccuuccugagcuaccugcccacu

SEQ ID NO: 1111150 - RNA, 19 nt, Human
ccgguguggcugggaucgc

SEQ ID NO: 1111151 - RNA, 22 nt, Human
ccuacuccacagccuccaggag

SEQ ID NO: 1111152 - RNA, 22 nt, Human
ccuaggacagagaggguggcuc

SEQ ID NO: 1111153 - RNA, 21 nt, Human
ccucaaucuccccagcuugga

SEQ ID NO: 1111154 - RNA, 22 nt, Human
ccuccaccccagugcccagccc

SEQ ID NO: 1111155 - RNA, 21 nt, Human
ccuccaggcccaagccccauc

SEQ ID NO: 1111156 - RNA, 21 nt, Human
ccuccuguccuauccuguugc

SEQ ID NO: 1111157 - RNA, 22 nt, Human
ccuccuguccuauccuguugcc

SEQ ID NO: 1111158 - RNA, 21 nt, Human
ccucuccaggcaaggaggaau

SEQ ID NO: 1111159 - RNA, 21 nt, Human
ccugcacccgcgcgcuggcca

SEQ ID NO: 1111160 - RNA, 21 nt, Human
ccuggcgcucaguggccaacu

SEQ ID NO: 1111161 - RNA, 21 nt, Human
ccuguugccuccaggcccaag

SEQ ID NO: 1111162 - RNA, 23 nt, Human
cggagaauaaacaaaccgcacuc

SEQ ID NO: 1111163 - RNA, 22 nt, Human
cguggagccgggcgaggucggg

SEQ ID NO: 1111164 - RNA, 18 nt, Human
cuagucugaggguggugg

SEQ ID NO: 1111165 - RNA, 21 nt, Human
cuccccuacuccacagccucc

SEQ ID NO: 1111166 - RNA, 24 nt, Human
cuccccuacuccacagccuccagg

SEQ ID NO: 1111167 - RNA, 19 nt, Human
cucugcccaccccuggccc

SEQ ID NO: 1111168 - RNA, 21 nt, Human
cugaaagccccuugucugucc

SEQ ID NO: 1111169 - RNA, 23 nt, Human
cugaaagccccuugucuguccag

SEQ ID NO: 1111170 - RNA, 20 nt, Human
cugcaggcucagccuaggac

SEQ ID NO: 1111171 - RNA, 19 nt, Human
cuggcccaguugccugggc

SEQ ID NO: 1111172 - RNA, 19 nt, Human
cugggcagacgugagcuca

SEQ ID NO: 1111173 - RNA, 21 nt, Human
cugggcccgguguggcuggga

SEQ ID NO: 1111174 - RNA, 23 nt, Human
cuguccaucccccucgugagccu

SEQ ID NO: 1111175 - RNA, 18 nt, Human
cuucuaccccacacgcuc

SEQ ID NO: 1111176 - RNA, 24 nt, Human
gaacccaccaucuucuaccccaca

SEQ ID NO: 1111177 - RNA, 20 nt, Human
gaagauggacauccccuucc

SEQ ID NO: 1111178 - RNA, 24 nt, Human
gacggaacaaacagccgcuggcca

SEQ ID NO: 1111179 - RNA, 18 nt, Human
gagccuggacauccccuc

SEQ ID NO: 1111180 - RNA, 22 nt, Human
gaggucgggggccccugcaccc

SEQ ID NO: 1111181 - RNA, 20 nt, Human
gagucugacccccucuucuc

SEQ ID NO: 1111182 - RNA, 18 nt, Human
gaucgaggcugccacccc

SEQ ID NO: 1111183 - RNA, 25 nt, Human
gcacugaaagccccuugucugucca

SEQ ID NO: 1111184 - RNA, 21 nt, Human
gccccaagaggcccaaccccu

SEQ ID NO: 1111185 - RNA, 23 nt, Human
gcccugggccacccugacccugc

SEQ ID NO: 1111186 - RNA, 19 nt, Human
gccggacccuccguggggg

SEQ ID NO: 1111187 - RNA, 20 nt, Human
gcuggguggcaagcaagggg

SEQ ID NO: 1111188 - RNA, 20 nt, Human
gcuggugguggaugccguac

SEQ ID NO: 1111189 - RNA, 22 nt, Human
ggaaaaucaaaaccccagaaag

SEQ ID NO: 1111190 - RNA, 24 nt, Human
ggaaacaugggcgggggugggccc

SEQ ID NO: 1111191 - RNA, 20 nt, Human
ggaagcagaggacggugcug

SEQ ID NO: 1111192 - RNA, 19 nt, Human
ggacggugcuggucgugug

SEQ ID NO: 1111193 - RNA, 18 nt, Human
ggagaauaaacaaaccgc

SEQ ID NO: 1111194 - RNA, 22 nt, Human
ggagccgggcgaggucgggggc

SEQ ID NO: 1111195 - RNA, 19 nt, Human
ggaggauacuugaaagggg

SEQ ID NO: 1111196 - RNA, 23 nt, Human
ggcagagccugagaccgggccuc

SEQ ID NO: 1111197 - RNA, 21 nt, Human
ggcgggggugggcccgcggug

SEQ ID NO: 1111198 - RNA, 21 nt, Human
gggaggauacuugaaagggga

SEQ ID NO: 1111199 - RNA, 18 nt, Human
gggcacauuggggccugg

SEQ ID NO: 1111200 - RNA, 18 nt, Human
gggcaguggggcuggucu

SEQ ID NO: 1111201 - RNA, 20 nt, Human
gggccacccugacccugccu

SEQ ID NO: 1111202 - RNA, 20 nt, Human
gggccccugcacccgcgcgc

SEQ ID NO: 1111203 - RNA, 18 nt, Human
gggccucugcaucuccag

SEQ ID NO: 1111204 - RNA, 22 nt, Human
gggcgggggugggcccgcggug

SEQ ID NO: 1111205 - RNA, 22 nt, Human
gguggcuagggucagagaagga

SEQ ID NO: 1111206 - RNA, 23 nt, Human
ggugguggaugccguacugggcc

SEQ ID NO: 1111207 - RNA, 22 nt, Human
guacugggccccggcguggagc

SEQ ID NO: 1111208 - RNA, 19 nt, Human
guggaggccccugugcccc

SEQ ID NO: 1111209 - RNA, 22 nt, Human
guggcugggaucgcaggcaugu

SEQ ID NO: 1111210 - RNA, 18 nt, Human
guggggcuggucugugcc

SEQ ID NO: 1111211 - RNA, 19 nt, Human
guggggcuggucugugccc

SEQ ID NO: 1111212 - RNA, 23 nt, Human
guuuguauuuccaaaugaaauag

SEQ ID NO: 1111213 - RNA, 23 nt, Human
uaccaccaggcguucccguugcc

SEQ ID NO: 1111214 - RNA, 18 nt, Human
uagaauaugcccagugcu

SEQ ID NO: 1111215 - RNA, 26 nt, Human
uagaucccgggugaggcgcccaaagg

SEQ ID NO: 1111216 - RNA, 18 nt, Human
uagggucagagaaggauu

SEQ ID NO: 1111217 - RNA, 18 nt, Human
uagucugagggugguggc

SEQ ID NO: 1111218 - RNA, 18 nt, Human
uaugggcuggugguggau

SEQ ID NO: 1111219 - RNA, 20 nt, Human
uccaggcccaagccccaucc

SEQ ID NO: 1111220 - RNA, 23 nt, Human
ucccacccccaggaguaugaacc

SEQ ID NO: 1111221 - RNA, 22 nt, Human
uccccagcuuggauggacccac

SEQ ID NO: 1111222 - RNA, 20 nt, Human
uccccuacuccgggccucag

SEQ ID NO: 1111223 - RNA, 20 nt, Human
uccccuggcucucgggaucc

SEQ ID NO: 1111224 - RNA, 20 nt, Human
uccucuccaggcaaggagga

SEQ ID NO: 1111225 - RNA, 19 nt, Human
uccuguugccuccaggccc

SEQ ID NO: 1111226 - RNA, 22 nt, Human
ucuccagcggggaaacugaggc

SEQ ID NO: 1111227 - RNA, 22 nt, Human
ucucccggaagcagaggacggu

SEQ ID NO: 1111228 - RNA, 21 nt, Human
ucugcugucugugugguugga

SEQ ID NO: 1111229 - RNA, 21 nt, Human
ucugugcccggcaccugcggg

SEQ ID NO: 1111230 - RNA, 22 nt, Human
ucuucuggugaguggccccaga

SEQ ID NO: 1111231 - RNA, 20 nt, Human
ucuugggucuugggcucugg

SEQ ID NO: 1111232 - RNA, 19 nt, Human
ugaaaggggaguaaucugc

SEQ ID NO: 1111233 - RNA, 19 nt, Human
ugaaccucaaucuccccag

SEQ ID NO: 1111234 - RNA, 23 nt, Human
ugacccccucuucucccaccccc

SEQ ID NO: 1111235 - RNA, 20 nt, Human
ugacccugccugccuucccc

SEQ ID NO: 1111236 - RNA, 20 nt, Human
ugagaaagguggaagaaugu

SEQ ID NO: 1111237 - RNA, 21 nt, Human
ugaggccccaagaggcccaac

SEQ ID NO: 1111238 - RNA, 19 nt, Human
ugagggaggauccaguguc

SEQ ID NO: 1111239 - RNA, 22 nt, Human
ugcaacucaggcggagaauaaa

SEQ ID NO: 1111240 - RNA, 30 nt, Human
ugccccagcuccuggucgccccugccuguu

SEQ ID NO: 1111241 - RNA, 23 nt, Human
ugcccucugcccaccccuggccc

SEQ ID NO: 1111242 - RNA, 18 nt, Human
ugccugggcagacgugag

SEQ ID NO: 1111243 - RNA, 19 nt, Human
ugcgagaagauggacaucc

SEQ ID NO: 1111244 - RNA, 19 nt, Human
ugcuugucccaggcagggu

SEQ ID NO: 1111245 - RNA, 27 nt, Human
uggacauccccuuccugaggucaccga

SEQ ID NO: 1111246 - RNA, 22 nt, Human
uggacuccgggggauguccccu

SEQ ID NO: 1111247 - RNA, 20 nt, Human
uggaggccccugugccccag

SEQ ID NO: 1111248 - RNA, 20 nt, Human
uggaggccccugugccccag

SEQ ID NO: 1111249 - RNA, 18 nt, Human
uggcaagcaagggggaca

SEQ ID NO: 1111250 - RNA, 21 nt, Human
uggcccggagcagaacggggc

SEQ ID NO: 1111251 - RNA, 22 nt, Human
uggcccggagcagaacggggca

SEQ ID NO: 1111252 - RNA, 22 nt, Human
uggcucugucaggucagagggg

SEQ ID NO: 1111253 - RNA, 20 nt, Human
ugggaucgcaggcauguuca

SEQ ID NO: 1111254 - RNA, 23 nt, Human
ugggaucgcaggcauguucaugg

SEQ ID NO: 1111255 - RNA, 18 nt, Human
uggggaagaucgaggcug

SEQ ID NO: 1111256 - RNA, 20 nt, Human
uggggaggauacuugaaagg

SEQ ID NO: 1111257 - RNA, 22 nt, Human
uggggcucaagagacacccaga

SEQ ID NO: 1111258 - RNA, 18 nt, Human
uggggcuggucugugccc

SEQ ID NO: 1111259 - RNA, 19 nt, Human
ugggucuugggcucugggc

SEQ ID NO: 1111260 - RNA, 18 nt, Human
uggguggcaagcaagggg

SEQ ID NO: 1111261 - RNA, 19 nt, Human
uguccagaagccccucagu

SEQ ID NO: 1111262 - RNA, 24 nt, Human
ugucccaggcagggucuggugcug

SEQ ID NO: 1111263 - RNA, 21 nt, Human
uuccccuacuccgggccucag

SEQ ID NO: 1111264 - RNA, 18 nt, Human
uugccuccaggcccaagc

SEQ ID NO: 1111265 - RNA, 21 nt, Human
uugccuccaggcccaagcccc

SEQ ID NO: 1111266 - RNA, 20 nt, Human
aggcaggaaagaguuauggu

SEQ ID NO: 1111267 - RNA, 22 nt, Human
aggcaggaaagaguuaugguag

SEQ ID NO: 1111268 - RNA, 20 nt, Human
uggaaaauguuuuauuggag

SEQ ID NO: 1111269 - RNA, 25 nt, Human
uuccugaggcaggaaagaguuaugg

SEQ ID NO: 1111270 - RNA, 26 nt, Human
acgccaaagccuggaaccugccugac

SEQ ID NO: 1111271 - RNA, 20 nt, Human
acuccagugccaacugcuuc

SEQ ID NO: 1111272 - RNA, 22 nt, Human
agaguugcuggagccuccaccu

SEQ ID NO: 1111273 - RNA, 18 nt, Human
agcaggaggcaggccagg

SEQ ID NO: 1111274 - RNA, 19 nt, Human
agcaggaggcaggccaggg

SEQ ID NO: 1111275 - RNA, 18 nt, Human
agccuccccacugcccag

SEQ ID NO: 1111276 - RNA, 21 nt, Human
agcucccugaguguugguccc

SEQ ID NO: 1111277 - RNA, 24 nt, Human
aguugcuggagccuccaccugagc

SEQ ID NO: 1111278 - RNA, 18 nt, Human
auggccuuucccaccccu

SEQ ID NO: 1111279 - RNA, 19 nt, Human
cacugaaccauagccaggc

SEQ ID NO: 1111280 - RNA, 28 nt, Human
caggaggcaggccaggggccccuucuuu

SEQ ID NO: 1111281 - RNA, 26 nt, Human
ccaagggccuccccaauauuuguccc

SEQ ID NO: 1111282 - RNA, 21 nt, Human
ccaauggccuuucccaccccu

SEQ ID NO: 1111283 - RNA, 19 nt, Human
ccaccagggucuccuccuu

SEQ ID NO: 1111284 - RNA, 18 nt, Human
ccacugcugcccgacugu

SEQ ID NO: 1111285 - RNA, 19 nt, Human
cccagcccccucucucucc

SEQ ID NO: 1111286 - RNA, 20 nt, Human
cccaggccauguccaagggc

SEQ ID NO: 1111287 - RNA, 24 nt, Human
cccccagaguugcuggagccucca

SEQ ID NO: 1111288 - RNA, 19 nt, Human
ccccuccggccucuuugcc

SEQ ID NO: 1111289 - RNA, 27 nt, Human
ccccuccggccucuuugccaauggccu

SEQ ID NO: 1111290 - RNA, 20 nt, Human
ccccuggaacuucaucucug

SEQ ID NO: 1111291 - RNA, 21 nt, Human
cccuccauugccuccuugacc

SEQ ID NO: 1111292 - RNA, 19 nt, Human
cccuuggccaagggccuca

SEQ ID NO: 1111293 - RNA, 19 nt, Human
ccuccaccugagccagaug

SEQ ID NO: 1111294 - RNA, 18 nt, Human
ccuccuugccgcccuugc

SEQ ID NO: 1111295 - RNA, 24 nt, Human
ccucugggucugcagccuucucuc

SEQ ID NO: 1111296 - RNA, 21 nt, Human
ccuguccucccucccucuggg

SEQ ID NO: 1111297 - RNA, 24 nt, Human
ccuguccucccucccucugggucu

SEQ ID NO: 1111298 - RNA, 20 nt, Human
ccuucucucuccuguccuca

SEQ ID NO: 1111299 - RNA, 21 nt, Human
cuccggccucuuugccaaugg

SEQ ID NO: 1111300 - RNA, 24 nt, Human
cuccuuccgacucccuguccuccc

SEQ ID NO: 1111301 - RNA, 22 nt, Human
cuccuugccgcccuugcucugc

SEQ ID NO: 1111302 - RNA, 19 nt, Human
cucucacugaaccauagcc

SEQ ID NO: 1111303 - RNA, 21 nt, Human
cucugcgucucugugcccucc

SEQ ID NO: 1111304 - RNA, 18 nt, Human
cugaaccauagccaggcu

SEQ ID NO: 1111305 - RNA, 20 nt, Human
cuggagccuccaccugagcc

SEQ ID NO: 1111306 - RNA, 21 nt, Human
cuggagccuccaccugagcca

SEQ ID NO: 1111307 - RNA, 18 nt, Human
cuugcucugcgucucugu

SEQ ID NO: 1111308 - RNA, 18 nt, Human
gcagagggccagcaggag

SEQ ID NO: 1111309 - RNA, 18 nt, Human
gcccccucucucuccaga

SEQ ID NO: 1111310 - RNA, 21 nt, Human
gcccuccucuguccuccuccu

SEQ ID NO: 1111311 - RNA, 18 nt, Human
gccuccaccugagccaga

SEQ ID NO: 1111312 - RNA, 19 nt, Human
ggccagcaggaggcaggcc

SEQ ID NO: 1111313 - RNA, 18 nt, Human
gucuccuccuugccgccc

SEQ ID NO: 1111314 - RNA, 18 nt, Human
uagagccagcugccccuc

SEQ ID NO: 1111315 - RNA, 21 nt, Human
uccagagugucuuccucccac

SEQ ID NO: 1111316 - RNA, 19 nt, Human
ucccaggccauguccaagg

SEQ ID NO: 1111317 - RNA, 21 nt, Human
ucccaggccauguccaagggc

SEQ ID NO: 1111318 - RNA, 19 nt, Human
ucccagugcuuuccucucc

SEQ ID NO: 1111319 - RNA, 24 nt, Human
ucccccagaguugcuggagccucc

SEQ ID NO: 1111320 - RNA, 20 nt, Human
ucccucugggucugcagccu

SEQ ID NO: 1111321 - RNA, 18 nt, Human
ucccuguccucccucccu

SEQ ID NO: 1111322 - RNA, 23 nt, Human
uccucuguccuccuccuuccgac

SEQ ID NO: 1111323 - RNA, 18 nt, Human
uccuuccgacucccuguc

SEQ ID NO: 1111324 - RNA, 19 nt, Human
uccuugaccccagggagcu

SEQ ID NO: 1111325 - RNA, 20 nt, Human
uccuugaccccagggagcuc

SEQ ID NO: 1111326 - RNA, 23 nt, Human
uccuugaccccagggagcucccu

SEQ ID NO: 1111327 - RNA, 19 nt, Human
ucuccgcucugcagggggc

SEQ ID NO: 1111328 - RNA, 20 nt, Human
ucugcagccuucucucuccu

SEQ ID NO: 1111329 - RNA, 24 nt, Human
ucuguccuccuccuuccgacuccc

SEQ ID NO: 1111330 - RNA, 25 nt, Human
uggaaccugccugacuccagugcca

SEQ ID NO: 1111331 - RNA, 25 nt, Human
uggagccuccaccugagccagaugg

SEQ ID NO: 1111332 - RNA, 26 nt, Human
uggagccuccaccugagccagauggu

SEQ ID NO: 1111333 - RNA, 22 nt, Human
uggcccuccauugccuccuuga

SEQ ID NO: 1111334 - RNA, 22 nt, Human
ugggccacagcucccugagugu

SEQ ID NO: 1111335 - RNA, 24 nt, Human
ugggucugcagccuucucucuccu

SEQ ID NO: 1111336 - RNA, 20 nt, Human
uucauucugguugcuggcuc

SEQ ID NO: 1111337 - RNA, 22 nt, Human
uugcugccacugccacugcugc

SEQ ID NO: 1111338 - RNA, 23 nt, Human
uugguggcccuccauugccuccu

SEQ ID NO: 1111339 - RNA, 18 nt, Human
uuugccaauggccuuucc

SEQ ID NO: 1111340 - RNA, 22 nt, Human
aaaaaaaaaagaagcuggggag

SEQ ID NO: 1111341 - RNA, 24 nt, Human
aaaaaaaaaagaagcuggggagag

SEQ ID NO: 1111342 - RNA, 19 nt, Human
aaaaaaagagccucacugg

SEQ ID NO: 1111343 - RNA, 20 nt, Human
aaaauaaaggcggagauggc

SEQ ID NO: 1111344 - RNA, 19 nt, Human
aacacagugaaacaccguc

SEQ ID NO: 1111345 - RNA, 20 nt, Human
aacacagugaaacaccgucu

SEQ ID NO: 1111346 - RNA, 21 nt, Human
aacacagugaaacaccgucuc

SEQ ID NO: 1111347 - RNA, 18 nt, Human
aaccagaaaggagaucuu

SEQ ID NO: 1111348 - RNA, 21 nt, Human
aaccagaaaggagaucuuguu

SEQ ID NO: 1111349 - RNA, 18 nt, Human
aagcuugcagugagccga

SEQ ID NO: 1111350 - RNA, 20 nt, Human
aagugcuucaaggagggagg

SEQ ID NO: 1111351 - RNA, 24 nt, Human
aaucgcuugaacccgggaggugga

SEQ ID NO: 1111352 - RNA, 18 nt, Human
aauuagccgaccguggug

SEQ ID NO: 1111353 - RNA, 19 nt, Human
acaagggugaaacuccauc

SEQ ID NO: 1111354 - RNA, 20 nt, Human
acaagggugaaacuccaucu

SEQ ID NO: 1111355 - RNA, 19 nt, Human
acacagugaaacaccgucu

SEQ ID NO: 1111356 - RNA, 24 nt, Human
acaccgucucuacuaaaaauacaa

SEQ ID NO: 1111357 - RNA, 23 nt, Human
acagagcuagacuccauccaaaa

SEQ ID NO: 1111358 - RNA, 24 nt, Human
acagccgagcugccacuaccuggc

SEQ ID NO: 1111359 - RNA, 22 nt, Human
accuggaaggcuggcggcgagg

SEQ ID NO: 1111360 - RNA, 19 nt, Human
acuacagccugggcaacaa

SEQ ID NO: 1111361 - RNA, 25 nt, Human
acuacagccugggcaacaaggguga

SEQ ID NO: 1111362 - RNA, 24 nt, Human
acuauggcacuccagccuggguga

SEQ ID NO: 1111363 - RNA, 20 nt, Human
agaacccgugggagcugggg

SEQ ID NO: 1111364 - RNA, 20 nt, Human
agacagaagucaaagacagc

SEQ ID NO: 1111365 - RNA, 18 nt, Human
agagagugggaccucggg

SEQ ID NO: 1111366 - RNA, 21 nt, Human
agaggacacugagggaaaagg

SEQ ID NO: 1111367 - RNA, 23 nt, Human
agauaaccaguaacuguaugaaa

SEQ ID NO: 1111368 - RNA, 20 nt, Human
agcacgguggcucacgccug

SEQ ID NO: 1111369 - RNA, 24 nt, Human
agcacuuugggaggccgaggcggg

SEQ ID NO: 1111370 - RNA, 18 nt, Human
agccgaccgugguggcgg

SEQ ID NO: 1111371 - RNA, 18 nt, Human
agccgagcugccacuacc

SEQ ID NO: 1111372 - RNA, 25 nt, Human
agccugggcaacaagggugaaacuc

SEQ ID NO: 1111373 - RNA, 24 nt, Human
agccugggugacagagcuagacuc

SEQ ID NO: 1111374 - RNA, 19 nt, Human
agcggcaaaggacagagcc

SEQ ID NO: 1111375 - RNA, 23 nt, Human
agcugaggcaggagaaucgcuug

SEQ ID NO: 1111376 - RNA, 22 nt, Human
aggaagggguggggggcagggc

SEQ ID NO: 1111377 - RNA, 24 nt, Human
aggcaggagaaucgcuugaacccg

SEQ ID NO: 1111378 - RNA, 24 nt, Human
aggcaggagaauggcgugaacccg

SEQ ID NO: 1111379 - RNA, 21 nt, Human
aggcaggcuccaggggaagga

SEQ ID NO: 1111380 - RNA, 21 nt, Human
aggccgaggcggguggaucac

SEQ ID NO: 1111381 - RNA, 18 nt, Human
aggccucugguggaccag

SEQ ID NO: 1111382 - RNA, 21 nt, Human
aggcgaagcuugcagugagcc

SEQ ID NO: 1111383 - RNA, 24 nt, Human
aggcgaagcuugcagugagccgag

SEQ ID NO: 1111384 - RNA, 24 nt, Human
aggcggguggaucacgaggucagg

SEQ ID NO: 1111385 - RNA, 18 nt, Human
aggcugaggcaggagaau

SEQ ID NO: 1111386 - RNA, 23 nt, Human
agggaagccgggggcgcgagggu

SEQ ID NO: 1111387 - RNA, 27 nt, Human
agggcagagccauggggcagcggagga

SEQ ID NO: 1111388 - RNA, 20 nt, Human
agggguggggggcagggcag

SEQ ID NO: 1111389 - RNA, 20 nt, Human
aggucccuggccagcugcag

SEQ ID NO: 1111390 - RNA, 21 nt, Human
agguggagguugccgugagcc

SEQ ID NO: 1111391 - RNA, 24 nt, Human
agguggagguugccgugagccgag

SEQ ID NO: 1111392 - RNA, 18 nt, Human
aguuggggagggggggcc

SEQ ID NO: 1111393 - RNA, 24 nt, Human
aucacacuauggcacuccagccug

SEQ ID NO: 1111394 - RNA, 20 nt, Human
augcugggcuagugacuagg

SEQ ID NO: 1111395 - RNA, 23 nt, Human
auggagggggagugaccuugguu

SEQ ID NO: 1111396 - RNA, 24 nt, Human
auggcacuccagccugggugacag

SEQ ID NO: 1111397 - RNA, 26 nt, Human
auguagccucuaaagcaagugucaga

SEQ ID NO: 1111398 - RNA, 19 nt, Human
augucuuuuaaacccuugg

SEQ ID NO: 1111399 - RNA, 24 nt, Human
auuguacuacagccugggcaacaa

SEQ ID NO: 1111400 - RNA, 20 nt, Human
auuuccuuaaauuggcauga

SEQ ID NO: 1111401 - RNA, 21 nt, Human
caacacucugaugacccuagu

SEQ ID NO: 1111402 - RNA, 24 nt, Human
caagaccauccuggcuaacacagu

SEQ ID NO: 1111403 - RNA, 22 nt, Human
caagcaauucucuugccucagc

SEQ ID NO: 1111404 - RNA, 18 nt, Human
caagggauacccaaggcc

SEQ ID NO: 1111405 - RNA, 22 nt, Human
caccugcagcacgggaucgucc

SEQ ID NO: 1111406 - RNA, 23 nt, Human
caccuguagucccagcuacucgg

SEQ ID NO: 1111407 - RNA, 24 nt, Human
caccuguagucccagcuacucggg

SEQ ID NO: 1111408 - RNA, 24 nt, Human
cacgccugcaaucccagcacuuug

SEQ ID NO: 1111409 - RNA, 20 nt, Human
cacuccagccugggugacag

SEQ ID NO: 1111410 - RNA, 22 nt, Human
cacuccagccugggugacagag

SEQ ID NO: 1111411 - RNA, 21 nt, Human
cacuggagcaggagaggucug

SEQ ID NO: 1111412 - RNA, 24 nt, Human
cagcacuuugggaggccgaggcgg

SEQ ID NO: 1111413 - RNA, 18 nt, Human
cagcagcagggcggccug

SEQ ID NO: 1111414 - RNA, 19 nt, Human
cagcagcagggcggccugg

SEQ ID NO: 1111415 - RNA, 19 nt, Human
cagcgggcgggggcggggc

SEQ ID NO: 1111416 - RNA, 20 nt, Human
cagcgggcgggggcggggcc

SEQ ID NO: 1111417 - RNA, 25 nt, Human
cagcgggcgggggcggggccagggc

SEQ ID NO: 1111418 - RNA, 24 nt, Human
cagcuacucgggaggcugaggcag

SEQ ID NO: 1111419 - RNA, 24 nt, Human
cagcuggggaugcgaggguggagg

SEQ ID NO: 1111420 - RNA, 23 nt, Human
caggacaccccugagcugagggc

SEQ ID NO: 1111421 - RNA, 23 nt, Human
caggcccugggggacagcugggg

SEQ ID NO: 1111422 - RNA, 22 nt, Human
caggcugucagggaacagccga

SEQ ID NO: 1111423 - RNA, 19 nt, Human
cagggaacagccgagcugc

SEQ ID NO: 1111424 - RNA, 23 nt, Human
caggucuucagccugguccaaca

SEQ ID NO: 1111425 - RNA, 24 nt, Human
cauccaacacucugaugacccuag

SEQ ID NO: 1111426 - RNA, 19 nt, Human
cauuguacuacagccuggg

SEQ ID NO: 1111427 - RNA, 22 nt, Human
cauuguacuacagccugggcaa

SEQ ID NO: 1111428 - RNA, 24 nt, Human
cauuguacuacagccugggcaaca

SEQ ID NO: 1111429 - RNA, 18 nt, Human
ccacugcaaccucugccu

SEQ ID NO: 1111430 - RNA, 18 nt, Human
ccacugcaaccucugccu

SEQ ID NO: 1111431 - RNA, 22 nt, Human
ccacugcaaccucugccuucug

SEQ ID NO: 1111432 - RNA, 24 nt, Human
ccacugcaaccucugccuucugag

SEQ ID NO: 1111433 - RNA, 18 nt, Human
ccagccuuggguggaggg

SEQ ID NO: 1111434 - RNA, 24 nt, Human
ccaggcugucagggaacagccgag

SEQ ID NO: 1111435 - RNA, 20 nt, Human
ccauuguacuacagccuggg

SEQ ID NO: 1111436 - RNA, 21 nt, Human
ccauuguacuacagccugggc

SEQ ID NO: 1111437 - RNA, 24 nt, Human
ccauuguacuacagccugggcaac

SEQ ID NO: 1111438 - RNA, 24 nt, Human
ccauuugagccagggcuccugagu

SEQ ID NO: 1111439 - RNA, 23 nt, Human
cccaaggcccagacuguggggcc

SEQ ID NO: 1111440 - RNA, 23 nt, Human
cccaagggauacccaaggcccag

SEQ ID NO: 1111441 - RNA, 21 nt, Human
cccaggucuucagccuggucc

SEQ ID NO: 1111442 - RNA, 19 nt, Human
ccccaaggaagauauaacc

SEQ ID NO: 1111443 - RNA, 18 nt, Human
ccccaagggauacccaag

SEQ ID NO: 1111444 - RNA, 21 nt, Human
ccccugagcugagggccaggu

SEQ ID NO: 1111445 - RNA, 26 nt, Human
ccccugagcugagggccaggucccug

SEQ ID NO: 1111446 - RNA, 19 nt, Human
cccuccgcgcuuccggccg

SEQ ID NO: 1111447 - RNA, 19 nt, Human
cccugggggacagcugggg

SEQ ID NO: 1111448 - RNA, 20 nt, Human
ccgggguggaggcugggggu

SEQ ID NO: 1111449 - RNA, 18 nt, Human
ccuccgagacuugggccc

SEQ ID NO: 1111450 - RNA, 22 nt, Human
ccugcaaucccagcacuuuggg

SEQ ID NO: 1111451 - RNA, 26 nt, Human
ccugcagcacgggaucguccuggaac

SEQ ID NO: 1111452 - RNA, 19 nt, Human
ccugcucagcuggagagag

SEQ ID NO: 1111453 - RNA, 22 nt, Human
ccugggugacagagcuagacuc

SEQ ID NO: 1111454 - RNA, 21 nt, Human
ccuguagucccagcuacucgg

SEQ ID NO: 1111455 - RNA, 24 nt, Human
ccuucugaguucaagcaauucucu

SEQ ID NO: 1111456 - RNA, 18 nt, Human
ccuuggggaccuaggggg

SEQ ID NO: 1111457 - RNA, 22 nt, Human
ccuuggguagaaauggugauga

SEQ ID NO: 1111458 - RNA, 23 nt, Human
cgauaaucgggcauccgcuuccc

SEQ ID NO: 1111459 - RNA, 23 nt, Human
cgccugcaaucccagcacuuugg

SEQ ID NO: 1111460 - RNA, 19 nt, Human
cggaggauggggggcauuu

SEQ ID NO: 1111461 - RNA, 22 nt, Human
cggcaaaggacagagccgaaga

SEQ ID NO: 1111462 - RNA, 24 nt, Human
cgggagguggagguugccgugagc

SEQ ID NO: 1111463 - RNA, 21 nt, Human
cgggcaccuguagucccagcu

SEQ ID NO: 1111464 - RNA, 18 nt, Human
cgggguggaggcuggggg

SEQ ID NO: 1111465 - RNA, 21 nt, Human
cuauggcacuccagccugggu

SEQ ID NO: 1111466 - RNA, 24 nt, Human
cuauggcacuccagccugggugac

SEQ ID NO: 1111467 - RNA, 19 nt, Human
cucacagauaaccaguaac

SEQ ID NO: 1111468 - RNA, 22 nt, Human
cucacgccugcaaucccagcac

SEQ ID NO: 1111469 - RNA, 24 nt, Human
cucacgccugcaaucccagcacuu

SEQ ID NO: 1111470 - RNA, 18 nt, Human
cuccauccaaaaaaaaaa

SEQ ID NO: 1111471 - RNA, 23 nt, Human
cuccauccaaaaaaaaaaaaaaa

SEQ ID NO: 1111472 - RNA, 21 nt, Human
cuccuccgagacuugggcccc

SEQ ID NO: 1111473 - RNA, 19 nt, Human
cucggccuuggcccgacac

SEQ ID NO: 1111474 - RNA, 24 nt, Human
cugcaaccucugccuucugaguuc

SEQ ID NO: 1111475 - RNA, 20 nt, Human
cugcagccugcagcagcagg

SEQ ID NO: 1111476 - RNA, 27 nt, Human
cugccuucugaguucaagcaauucuuu

SEQ ID NO: 1111477 - RNA, 20 nt, Human
cuggcuaacacagugaaaca

SEQ ID NO: 1111478 - RNA, 19 nt, Human
cuguaugaaaaaaaaaaaa

SEQ ID NO: 1111479 - RNA, 19 nt, Human
cuugcagugagccgagauc

SEQ ID NO: 1111480 - RNA, 23 nt, Human
cuugccucagccucccgaguagc

SEQ ID NO: 1111481 - RNA, 20 nt, Human
gaacagccccaagggauacc

SEQ ID NO: 1111482 - RNA, 20 nt, Human
gaacccgggaggcgaagcuu

SEQ ID NO: 1111483 - RNA, 19 nt, Human
gaagggaaagacagaaguc

SEQ ID NO: 1111484 - RNA, 24 nt, Human
gaauagagacgggguuuagaguca

SEQ ID NO: 1111485 - RNA, 21 nt, Human
gaccaggcugggccacacugc

SEQ ID NO: 1111486 - RNA, 20 nt, Human
gaccgugguggcgggcaccu

SEQ ID NO: 1111487 - RNA, 20 nt, Human
gaccgugguggcgggcaccu

SEQ ID NO: 1111488 - RNA, 18 nt, Human
gacucagcucugcccuau

SEQ ID NO: 1111489 - RNA, 20 nt, Human
gacucagcucugcccuaugg

SEQ ID NO: 1111490 - RNA, 23 nt, Human
gagaaucgcuugaacccgggagg

SEQ ID NO: 1111491 - RNA, 18 nt, Human
gagagagagagaaagaga

SEQ ID NO: 1111492 - RNA, 20 nt, Human
gagaggguggaggguccuca

SEQ ID NO: 1111493 - RNA, 19 nt, Human
gagcugggguggaggccgg

SEQ ID NO: 1111494 - RNA, 21 nt, Human
gagcugggguggaggccgggg

SEQ ID NO: 1111495 - RNA, 23 nt, Human
gaggcggguggaucacgagguca

SEQ ID NO: 1111496 - RNA, 22 nt, Human
gaggguagagcccagaugugcu

SEQ ID NO: 1111497 - RNA, 21 nt, Human
gauaaucgggcauccgcuucc

SEQ ID NO: 1111498 - RNA, 23 nt, Human
gaucugagacagagagagagggu

SEQ ID NO: 1111499 - RNA, 22 nt, Human
gcaaccucugccuucugaguuc

SEQ ID NO: 1111500 - RNA, 19 nt, Human
gcacuccagccugggugac

SEQ ID NO: 1111501 - RNA, 23 nt, Human
gcacuccagccugggugacagag

SEQ ID NO: 1111502 - RNA, 24 nt, Human
gcacuccagccugggugacagagc

SEQ ID NO: 1111503 - RNA, 28 nt, Human
gccauggcccugggucaugccggcgccg

SEQ ID NO: 1111504 - RNA, 24 nt, Human
gccauuguacuacagccugggcaa

SEQ ID NO: 1111505 - RNA, 19 nt, Human
gcccagcacgguggcucac

SEQ ID NO: 1111506 - RNA, 22 nt, Human
gcccagcacgguggcucacgcc

SEQ ID NO: 1111507 - RNA, 19 nt, Human
gcccaggacaccccugagc

SEQ ID NO: 1111508 - RNA, 20 nt, Human
gcgggcaccuguagucccag

SEQ ID NO: 1111509 - RNA, 20 nt, Human
gcgggggcggggccagggcc

SEQ ID NO: 1111510 - RNA, 21 nt, Human
gcguguccuccaggcugucag

SEQ ID NO: 1111511 - RNA, 22 nt, Human
gcugaggcaggagaauggcgug

SEQ ID NO: 1111512 - RNA, 22 nt, Human
gcugcgugggaggaacagcccc

SEQ ID NO: 1111513 - RNA, 18 nt, Human
ggaaagacagaagucaaa

SEQ ID NO: 1111514 - RNA, 21 nt, Human
ggaggccaggggagcuggggu

SEQ ID NO: 1111515 - RNA, 21 nt, Human
ggaggcuggaggugcaggggu

SEQ ID NO: 1111516 - RNA, 23 nt, Human
ggagguugccgugagccgagauc

SEQ ID NO: 1111517 - RNA, 24 nt, Human
ggagguugccgugagccgagauca

SEQ ID NO: 1111518 - RNA, 19 nt, Human
ggcaccuguagucccagcu

SEQ ID NO: 1111519 - RNA, 20 nt, Human
ggcagggcagagccaugggg

SEQ ID NO: 1111520 - RNA, 21 nt, Human
ggcucacgccugcaaucccag

SEQ ID NO: 1111521 - RNA, 18 nt, Human
ggcuggaggugcaggggu

SEQ ID NO: 1111522 - RNA, 22 nt, Human
gggagccgggguggaggcuggg

SEQ ID NO: 1111523 - RNA, 19 nt, Human
gggagcugggggcccaaaa

SEQ ID NO: 1111524 - RNA, 23 nt, Human
gggagcugggguggaggccgggg

SEQ ID NO: 1111525 - RNA, 22 nt, Human
gggcacagcugcuugggucagg

SEQ ID NO: 1111526 - RNA, 21 nt, Human
gggcagcggaggauggggggc

SEQ ID NO: 1111527 - RNA, 24 nt, Human
gggcgggggcggggccagggccuc

SEQ ID NO: 1111528 - RNA, 22 nt, Human
ggggagaggcacgccuaggggg

SEQ ID NO: 1111529 - RNA, 22 nt, Human
ggggagggggggcccagcacgg

SEQ ID NO: 1111530 - RNA, 25 nt, Human
ggggcggggccagggccuccggaga

SEQ ID NO: 1111531 - RNA, 20 nt, Human
gggguggggggcagggcaga

SEQ ID NO: 1111532 - RNA, 21 nt, Human
ggguggggggcagggcagagc

SEQ ID NO: 1111533 - RNA, 21 nt, Human
ggucagcagcgggcgggggcg

SEQ ID NO: 1111534 - RNA, 21 nt, Human
ggucaggaagggguggggggc

SEQ ID NO: 1111535 - RNA, 21 nt, Human
gguggaagggaaagacagaag

SEQ ID NO: 1111536 - RNA, 22 nt, Human
gguggaggcuggaggugcaggg

SEQ ID NO: 1111537 - RNA, 21 nt, Human
gguggaggcugggggugcaag

SEQ ID NO: 1111538 - RNA, 20 nt, Human
gguggagguugccgugagcc

SEQ ID NO: 1111539 - RNA, 21 nt, Human
gguggaucacgaggucaggag

SEQ ID NO: 1111540 - RNA, 24 nt, Human
gguggcgggcaccuguagucccag

SEQ ID NO: 1111541 - RNA, 24 nt, Human
gguggcucacgccugcaaucccag

SEQ ID NO: 1111542 - RNA, 18 nt, Human
gucagggaugggcaggcc

SEQ ID NO: 1111543 - RNA, 23 nt, Human
guggagggcaguccuuuggucca

SEQ ID NO: 1111544 - RNA, 24 nt, Human
uaaccagaaaggagaucuuguuuc

SEQ ID NO: 1111545 - RNA, 21 nt, Human
uaagcuagacaagagcaccua

SEQ ID NO: 1111546 - RNA, 22 nt, Human
uaaggugggucccagucuugcc

SEQ ID NO: 1111547 - RNA, 24 nt, Human
uacaauucaaagucuucuggccuc

SEQ ID NO: 1111548 - RNA, 25 nt, Human
uacuacagccugggcaacaagggug

SEQ ID NO: 1111549 - RNA, 18 nt, Human
uagccugaccaucaucca

SEQ ID NO: 1111550 - RNA, 24 nt, Human
uaugaaaaaaaaaaaaagagccuc

SEQ ID NO: 1111551 - RNA, 24 nt, Human
uaugaaaaaaaaaaaaagagccuu

SEQ ID NO: 1111552 - RNA, 23 nt, Human
uauggcacuccagccugggugac

SEQ ID NO: 1111553 - RNA, 24 nt, Human
uauggcacuccagccugggugaca

SEQ ID NO: 1111554 - RNA, 25 nt, Human
uauggcacuccagccugggugacag

SEQ ID NO: 1111555 - RNA, 18 nt, Human
ucaaagacagcucuaagg

SEQ ID NO: 1111556 - RNA, 23 nt, Human
ucacacuauggcacuccagccug

SEQ ID NO: 1111557 - RNA, 18 nt, Human
ucacgaggucaggagacc

SEQ ID NO: 1111558 - RNA, 24 nt, Human
ucacgaggucaggagaccaagacc

SEQ ID NO: 1111559 - RNA, 23 nt, Human
ucagccucccgaguagcugaggc

SEQ ID NO: 1111560 - RNA, 25 nt, Human
ucagccucccgaguagcugaggcag

SEQ ID NO: 1111561 - RNA, 23 nt, Human
uccacagugggacaugguuaggc

SEQ ID NO: 1111562 - RNA, 24 nt, Human
uccagccugggugacagagcuaga

SEQ ID NO: 1111563 - RNA, 27 nt, Human
uccauccaaaaaaaaaaaaaaaaagaa

SEQ ID NO: 1111564 - RNA, 20 nt, Human
uccccagagaacugaggguc

SEQ ID NO: 1111565 - RNA, 24 nt, Human
uccccagagaacugagggucucca

SEQ ID NO: 1111566 - RNA, 24 nt, Human
uccguggucaggaagggguggggg

SEQ ID NO: 1111567 - RNA, 24 nt, Human
ucgcuugaacccgggagguggagg

SEQ ID NO: 1111568 - RNA, 19 nt, Human
ucggagauccagccuuggg

SEQ ID NO: 1111569 - RNA, 25 nt, Human
ucucuacuaaaaauacaaaaaaaau

SEQ ID NO: 1111570 - RNA, 20 nt, Human
ucugaguucaagcaauucuc

SEQ ID NO: 1111571 - RNA, 20 nt, Human
ucugaguucaagcaauucuc

SEQ ID NO: 1111572 - RNA, 23 nt, Human
ucuggccuccagggaaucuccuu

SEQ ID NO: 1111573 - RNA, 21 nt, Human
ugaaacucccucugccccaag

SEQ ID NO: 1111574 - RNA, 22 nt, Human
ugaaacucccucugccccaagg

SEQ ID NO: 1111575 - RNA, 19 nt, Human
ugacaugcugggcuaguga

SEQ ID NO: 1111576 - RNA, 18 nt, Human
ugagacagagagagaggg

SEQ ID NO: 1111577 - RNA, 22 nt, Human
ugagccgagaucaugccauugu

SEQ ID NO: 1111578 - RNA, 18 nt, Human
ugagcugagggccagguc

SEQ ID NO: 1111579 - RNA, 23 nt, Human
ugaggaggcguguccuccaggcu

SEQ ID NO: 1111580 - RNA, 20 nt, Human
ugaggcaggagaaucgcuug

SEQ ID NO: 1111581 - RNA, 24 nt, Human
ugaggcaggagaaucgcuugaacc

SEQ ID NO: 1111582 - RNA, 25 nt, Human
ugaggcaggagaaucgcuugaaccc

SEQ ID NO: 1111583 - RNA, 23 nt, Human
ugaggcaggagaauggcgugaac

SEQ ID NO: 1111584 - RNA, 24 nt, Human
ugaggcaggagaauggcgugaacc

SEQ ID NO: 1111585 - RNA, 25 nt, Human
ugaggcaggagaauggcgugaaccc

SEQ ID NO: 1111586 - RNA, 20 nt, Human
ugagguaggagcccaagguu

SEQ ID NO: 1111587 - RNA, 24 nt, Human
ugaguucaagcaauucucuugccu

SEQ ID NO: 1111588 - RNA, 22 nt, Human
ugcagcagcagggcggccuggg

SEQ ID NO: 1111589 - RNA, 20 nt, Human
ugccaaaguugacaugcugg

SEQ ID NO: 1111590 - RNA, 21 nt, Human
ugcccuaugggcucuuagcac

SEQ ID NO: 1111591 - RNA, 22 nt, Human
ugccgucggagucuucugcagc

SEQ ID NO: 1111592 - RNA, 22 nt, Human
ugccucagccucccgaguagcu

SEQ ID NO: 1111593 - RNA, 24 nt, Human
ugccucagccucccgaguagcuga

SEQ ID NO: 1111594 - RNA, 24 nt, Human
ugcgaggguggaggcuggaggugc

SEQ ID NO: 1111595 - RNA, 23 nt, Human
ugcugcugcucaagcaugugugg

SEQ ID NO: 1111596 - RNA, 18 nt, Human
ugcugcugcugcucaagc

SEQ ID NO: 1111597 - RNA, 22 nt, Human
ugcuugggucagggaugggcag

SEQ ID NO: 1111598 - RNA, 22 nt, Human
uggaagcagggagagaaagugc

SEQ ID NO: 1111599 - RNA, 20 nt, Human
uggaaggcuggcggcgaggc

SEQ ID NO: 1111600 - RNA, 20 nt, Human
uggaggccaggggagcuggg

SEQ ID NO: 1111601 - RNA, 19 nt, Human
uggaggccggggguucgag

SEQ ID NO: 1111602 - RNA, 21 nt, Human
uggaggcugggggugcaaggg

SEQ ID NO: 1111603 - RNA, 23 nt, Human
uggaggcugggggugcaagggug

SEQ ID NO: 1111604 - RNA, 21 nt, Human
uggagggggagugaccuuggu

SEQ ID NO: 1111605 - RNA, 22 nt, Human
uggcucacgccugcaaucccag

SEQ ID NO: 1111606 - RNA, 24 nt, Human
uggcucacgccugcaaucccagca

SEQ ID NO: 1111607 - RNA, 22 nt, Human
uggcuucgcucuuccguaucac

SEQ ID NO: 1111608 - RNA, 23 nt, Human
ugggaggccgaggcggguggauc

SEQ ID NO: 1111609 - RNA, 24 nt, Human
ugggaggccgaggcggguggauca

SEQ ID NO: 1111610 - RNA, 23 nt, Human
uggggaccuagggggcgacccgg

SEQ ID NO: 1111611 - RNA, 18 nt, Human
ugggguggaggccggggg

SEQ ID NO: 1111612 - RNA, 21 nt, Human
ugggucccagucuugccagaa

SEQ ID NO: 1111613 - RNA, 20 nt, Human
uggguggaagggaaagacag

SEQ ID NO: 1111614 - RNA, 22 nt, Human
uggucaggaagggguggggggg

SEQ ID NO: 1111615 - RNA, 24 nt, Human
ugguggcgggcaccuguaguccca

SEQ ID NO: 1111616 - RNA, 24 nt, Human
ugguuugggguuguguggccugga

SEQ ID NO: 1111617 - RNA, 22 nt, Human
uguacuacagccugggcaacaa

SEQ ID NO: 1111618 - RNA, 22 nt, Human
ugucagggaacagccgagcugc

SEQ ID NO: 1111619 - RNA, 24 nt, Human
uugaacccgggagguggagguugc

SEQ ID NO: 1111620 - RNA, 19 nt, Human
uugcagugagccgagauca

SEQ ID NO: 1111621 - RNA, 20 nt, Human
uugcagugagccgagaucac

SEQ ID NO: 1111622 - RNA, 20 nt, Human
uugccgugagccgagaucau

SEQ ID NO: 1111623 - RNA, 23 nt, Human
uuggaaacuccauuuaggaccua

SEQ ID NO: 1111624 - RNA, 21 nt, Human
uuggccuuuccaaacaacccc

SEQ ID NO: 1111625 - RNA, 25 nt, Human
uugggaggccgaggcggguggauca

SEQ ID NO: 1111626 - RNA, 21 nt, Human
aacauccagaggcuucggcac

SEQ ID NO: 1111627 - RNA, 24 nt, Human
agagggaaggccuuagggcagagc

SEQ ID NO: 1111628 - RNA, 18 nt, Human
agggcagagcgggcagcc

SEQ ID NO: 1111629 - RNA, 23 nt, Human
cagagcgggcagcccagcguccc

SEQ ID NO: 1111630 - RNA, 21 nt, Human
ggaaggccuuagggcagagcg

SEQ ID NO: 1111631 - RNA, 18 nt, Human
ggaggacgcuggcacacc

SEQ ID NO: 1111632 - RNA, 19 nt, Human
ucccagggccccugggagc

SEQ ID NO: 1111633 - RNA, 19 nt, Human
ugcagagggaaggccuuag

SEQ ID NO: 1111634 - RNA, 20 nt, Human
agaauaucuuaaaccucugg

SEQ ID NO: 1111635 - RNA, 19 nt, Human
ccauaagccaguccagaug

SEQ ID NO: 1111636 - RNA, 19 nt, Human
ccucugguaaaaucucugg

SEQ ID NO: 1111637 - RNA, 19 nt, Human
uaacagugggaacacugac

SEQ ID NO: 1111638 - RNA, 22 nt, Human
uaacagugggaacacugacacc

SEQ ID NO: 1111639 - RNA, 24 nt, Human
uccagguuuaauauuuugugacaa

SEQ ID NO: 1111640 - RNA, 24 nt, Human
uccuuuacauucacuggaaauguu

SEQ ID NO: 1111641 - RNA, 22 nt, Human
ucuacagcaaacccucaggaga

SEQ ID NO: 1111642 - RNA, 19 nt, Human
ucucagagguguccagggu

SEQ ID NO: 1111643 - RNA, 25 nt, Human
ugagcagauacaaggacuguacaga

SEQ ID NO: 1111644 - RNA, 19 nt, Human
uggaauaggugagcagaua

SEQ ID NO: 1111645 - RNA, 31 nt, Human
uuaacagugggaacacugacacccuucuuuu

SEQ ID NO: 1111646 - RNA, 25 nt, Human
uuuuuuuuuguuuuuuaacaguggg

SEQ ID NO: 1111647 - RNA, 21 nt, Human
aaaacaaacaaacaaacaaac

SEQ ID NO: 1111648 - RNA, 22 nt, Human
aaaaggaagaaauuggccaaaa

SEQ ID NO: 1111649 - RNA, 22 nt, Human
aaaauaacuuccuuugaccucc

SEQ ID NO: 1111650 - RNA, 22 nt, Human
aaacaaacaaacaaacuaccag

SEQ ID NO: 1111651 - RNA, 21 nt, Human
aaacaaccagaugucaugcaa

SEQ ID NO: 1111652 - RNA, 24 nt, Human
aaagugcugggauuacaggcguga

SEQ ID NO: 1111653 - RNA, 23 nt, Human
aacaaacaaacaaacaaacaaac

SEQ ID NO: 1111654 - RNA, 23 nt, Human
aacaaacaaacaaacaaacaaac

SEQ ID NO: 1111655 - RNA, 23 nt, Human
aacaaacaaacaaacaaacaaac

SEQ ID NO: 1111656 - RNA, 23 nt, Human
aacaaacaaacaaacaaacaaac

SEQ ID NO: 1111657 - RNA, 19 nt, Human
aacaaggugaaaccucauc

SEQ ID NO: 1111658 - RNA, 20 nt, Human
aacaaggugaaaccucaucu

SEQ ID NO: 1111659 - RNA, 21 nt, Human
aacaaggugaaaccucaucuc

SEQ ID NO: 1111660 - RNA, 18 nt, Human
aacaaguuuguuacuucc

SEQ ID NO: 1111661 - RNA, 22 nt, Human
aaccagaugucaugcaaacucu

SEQ ID NO: 1111662 - RNA, 23 nt, Human
aaggaagaaauuggccaaaagaa

SEQ ID NO: 1111663 - RNA, 22 nt, Human
aagggcuggccuugaguacuug

SEQ ID NO: 1111664 - RNA, 19 nt, Human
aagugcugggauuacaggc

SEQ ID NO: 1111665 - RNA, 19 nt, Human
aagugcugggauuacaggc

SEQ ID NO: 1111666 - RNA, 26 nt, Human
aagugcugggauuacaggcgugagcc

SEQ ID NO: 1111667 - RNA, 23 nt, Human
aaucacuuuccaccagguccuac

SEQ ID NO: 1111668 - RNA, 24 nt, Human
aaucaucugaacccaggaggcaga

SEQ ID NO: 1111669 - RNA, 18 nt, Human
aauuagccaggcauggug

SEQ ID NO: 1111670 - RNA, 18 nt, Human
acaaacaaacaaacaaac

SEQ ID NO: 1111671 - RNA, 18 nt, Human
acaaacaaacaaacaaac

SEQ ID NO: 1111672 - RNA, 18 nt, Human
acaaacaaacaaacaaac

SEQ ID NO: 1111673 - RNA, 18 nt, Human
acaaacaaacaaacaaac

SEQ ID NO: 1111674 - RNA, 18 nt, Human
acacagauucaaaccaua

SEQ ID NO: 1111675 - RNA, 24 nt, Human
acagagggagacucugucucaaaa

SEQ ID NO: 1111676 - RNA, 20 nt, Human
accauccuggccaacaaggu

SEQ ID NO: 1111677 - RNA, 28 nt, Human
acccuguaaaauaagaaacugagggguc

SEQ ID NO: 1111678 - RNA, 18 nt, Human
acgggguuucaccguguu

SEQ ID NO: 1111679 - RNA, 19 nt, Human
acgggguuucaccguguua

SEQ ID NO: 1111680 - RNA, 20 nt, Human
acgggguuucaccguguuag

SEQ ID NO: 1111681 - RNA, 30 nt, Human
acucugucucaaaaaacaaacaaacaaacc

SEQ ID NO: 1111682 - RNA, 23 nt, Human
acugcacuccagccuggugacag

SEQ ID NO: 1111683 - RNA, 25 nt, Human
acugcacuccagccuggugacagag

SEQ ID NO: 1111684 - RNA, 21 nt, Human
agaacagcgcuaaggggauag

SEQ ID NO: 1111685 - RNA, 19 nt, Human
agaagcauauuugugagag

SEQ ID NO: 1111686 - RNA, 19 nt, Human
agaccauccuggccaacaa

SEQ ID NO: 1111687 - RNA, 19 nt, Human
agagacgggguuucaccgu

SEQ ID NO: 1111688 - RNA, 23 nt, Human
agccaggcauggugauggaggcc

SEQ ID NO: 1111689 - RNA, 21 nt, Human
agccuggugacagagggagac

SEQ ID NO: 1111690 - RNA, 22 nt, Human
aggaagaaauuggccaaaagaa

SEQ ID NO: 1111691 - RNA, 18 nt, Human
aggaaguguggggggagg

SEQ ID NO: 1111692 - RNA, 24 nt, Human
aggaggacagugguucuccuuaaa

SEQ ID NO: 1111693 - RNA, 20 nt, Human
aggcagagauugcagugagc

SEQ ID NO: 1111694 - RNA, 27 nt, Human
aggcagagauugcagugagcugcgauc

SEQ ID NO: 1111695 - RNA, 24 nt, Human
aggcagaucagaaggucaggagau

SEQ ID NO: 1111696 - RNA, 20 nt, Human
aggcaggcagaucagaaggu

SEQ ID NO: 1111697 - RNA, 24 nt, Human
aggcaggcagaucagaaggucagg

SEQ ID NO: 1111698 - RNA, 18 nt, Human
aggcaggggaaucaucug

SEQ ID NO: 1111699 - RNA, 24 nt, Human
aggcggaagugcaguggcgcgauc

SEQ ID NO: 1111700 - RNA, 25 nt, Human
aggcggaagugcaguggcgcgaucu

SEQ ID NO: 1111701 - RNA, 20 nt, Human
aggcugaggcaggggaauca

SEQ ID NO: 1111702 - RNA, 24 nt, Human
aggcugaggcaggggaaucaucug

SEQ ID NO: 1111703 - RNA, 24 nt, Human
agggcugcugucacucaccaggcc

SEQ ID NO: 1111704 - RNA, 19 nt, Human
aggggcaauggagugaggc

SEQ ID NO: 1111705 - RNA, 21 nt, Human
aguagagacgggguuucaccg

SEQ ID NO: 1111706 - RNA, 18 nt, Human
aguagcugggacuacagg

SEQ ID NO: 1111707 - RNA, 19 nt, Human
aguagcugggacuacaggc

SEQ ID NO: 1111708 - RNA, 18 nt, Human
aguccaaaaccaagcaga

SEQ ID NO: 1111709 - RNA, 23 nt, Human
agugcaguggcgcgaucuuggcu

SEQ ID NO: 1111710 - RNA, 24 nt, Human
agugcaguggcgcgaucuuggcuc

SEQ ID NO: 1111711 - RNA, 18 nt, Human
agugcugggauuacaggc

SEQ ID NO: 1111712 - RNA, 24 nt, Human
agugguucacgccuguaaucccag

SEQ ID NO: 1111713 - RNA, 19 nt, Human
aucacuuuccaccaggucc

SEQ ID NO: 1111714 - RNA, 24 nt, Human
aucgcaccacugcacuccagccug

SEQ ID NO: 1111715 - RNA, 19 nt, Human
auucuccaugaggguucca

SEQ ID NO: 1111716 - RNA, 21 nt, Human
auucuccugccucagccuccc

SEQ ID NO: 1111717 - RNA, 20 nt, Human
caaaccauauuguuccaccu

SEQ ID NO: 1111718 - RNA, 24 nt, Human
caaagugcugggauuacaggcgug

SEQ ID NO: 1111719 - RNA, 23 nt, Human
caagccuacacaaguccaaaacc

SEQ ID NO: 1111720 - RNA, 25 nt, Human
caagccuacacaaguccaaaaccaa

SEQ ID NO: 1111721 - RNA, 23 nt, Human
caccacacuucucuguaggacag

SEQ ID NO: 1111722 - RNA, 21 nt, Human
caccaggccuggccuaggggc

SEQ ID NO: 1111723 - RNA, 19 nt, Human
caccgcaagcuccgccucc

SEQ ID NO: 1111724 - RNA, 24 nt, Human
caccguguuagccacgauggucuc

SEQ ID NO: 1111725 - RNA, 24 nt, Human
caccucagccucccaaagugcugg

SEQ ID NO: 1111726 - RNA, 23 nt, Human
caccuguagaugcucucaagggc

SEQ ID NO: 1111727 - RNA, 22 nt, Human
cacgccauucuccugccucagc

SEQ ID NO: 1111728 - RNA, 24 nt, Human
cacgccuguaaucccagcacuuug

SEQ ID NO: 1111729 - RNA, 23 nt, Human
cacuaggaaguccuccaguggga

SEQ ID NO: 1111730 - RNA, 18 nt, Human
cacugcacuccagccugg

SEQ ID NO: 1111731 - RNA, 18 nt, Human
cacugcacuccagccugg

SEQ ID NO: 1111732 - RNA, 22 nt, Human
cacugcacuccagccuggugac

SEQ ID NO: 1111733 - RNA, 23 nt, Human
cacugcacuccagccuggugaca

SEQ ID NO: 1111734 - RNA, 23 nt, Human
cacugcacuccagccuggugaca

SEQ ID NO: 1111735 - RNA, 20 nt, Human
cacuuguggcuuuccagggu

SEQ ID NO: 1111736 - RNA, 24 nt, Human
cagcacuuuggguggccgaggcag

SEQ ID NO: 1111737 - RNA, 25 nt, Human
cagcacuuuggguggccgaggcagg

SEQ ID NO: 1111738 - RNA, 23 nt, Human
cagcgcuaaggggauagugcuaa

SEQ ID NO: 1111739 - RNA, 18 nt, Human
caggaggacagugguucu

SEQ ID NO: 1111740 - RNA, 26 nt, Human
caggcacgucuuugcuuuuuuuuuuu

SEQ ID NO: 1111741 - RNA, 22 nt, Human
caggcagaucagaaggucagga

SEQ ID NO: 1111742 - RNA, 19 nt, Human
caguggcgcgaucuuggcu

SEQ ID NO: 1111743 - RNA, 24 nt, Human
caugauccaaucacuuuccaccag

SEQ ID NO: 1111744 - RNA, 22 nt, Human
cauggugauggaggccuguagu

SEQ ID NO: 1111745 - RNA, 23 nt, Human
cauucccauucuaaaaggaagaa

SEQ ID NO: 1111746 - RNA, 22 nt, Human
ccaaagugcugggauuacaggc

SEQ ID NO: 1111747 - RNA, 22 nt, Human
ccaaagugcugggauuacaggc

SEQ ID NO: 1111748 - RNA, 24 nt, Human
ccaaagugcugggauuacaggcgu

SEQ ID NO: 1111749 - RNA, 24 nt, Human
ccacauuuccccuccacacugccc

SEQ ID NO: 1111750 - RNA, 18 nt, Human
ccaccgcgcccggccaca

SEQ ID NO: 1111751 - RNA, 19 nt, Human
ccacugcacuccagccugg

SEQ ID NO: 1111752 - RNA, 19 nt, Human
ccacugcacuccagccugg

SEQ ID NO: 1111753 - RNA, 19 nt, Human
ccacugcacuccagccugg

SEQ ID NO: 1111754 - RNA, 20 nt, Human
ccacugcacuccagccuggu

SEQ ID NO: 1111755 - RNA, 22 nt, Human
ccacugcacuccagccugguga

SEQ ID NO: 1111756 - RNA, 23 nt, Human
ccacugcacuccagccuggugac

SEQ ID NO: 1111757 - RNA, 24 nt, Human
ccacugcacuccagccuggugaca

SEQ ID NO: 1111758 - RNA, 21 nt, Human
ccagcacuuuggguggccgag

SEQ ID NO: 1111759 - RNA, 20 nt, Human
cccagguucacgccauucuc

SEQ ID NO: 1111760 - RNA, 23 nt, Human
cccgaguagcugggacuacaggc

SEQ ID NO: 1111761 - RNA, 24 nt, Human
cccgaguagcugggacuacaggcg

SEQ ID NO: 1111762 - RNA, 21 nt, Human
cccuagcuguauucacucucc

SEQ ID NO: 1111763 - RNA, 24 nt, Human
ccgcaagcuccgccucccagguuc

SEQ ID NO: 1111764 - RNA, 26 nt, Human
ccgcccaccucagccucccaaagugc

SEQ ID NO: 1111765 - RNA, 18 nt, Human
ccgcgcccggccacaggc

SEQ ID NO: 1111766 - RNA, 21 nt, Human
ccuacacaaguccaaaaccaa

SEQ ID NO: 1111767 - RNA, 23 nt, Human
ccuagcuguauucacucucccug

SEQ ID NO: 1111768 - RNA, 24 nt, Human
ccucccagguucacgccauucucc

SEQ ID NO: 1111769 - RNA, 21 nt, Human
ccuccuaucccacaucaaggg

SEQ ID NO: 1111770 - RNA, 23 nt, Human
ccugccucagccucccgaguagc

SEQ ID NO: 1111771 - RNA, 24 nt, Human
ccuggccaacaaggugaaaccuca

SEQ ID NO: 1111772 - RNA, 24 nt, Human
ccuguaaucccagcacuuugggug

SEQ ID NO: 1111773 - RNA, 22 nt, Human
ccuguagucccagcuacugggg

SEQ ID NO: 1111774 - RNA, 24 nt, Human
cgagaccauccuggccaacaaggu

SEQ ID NO: 1111775 - RNA, 24 nt, Human
cgaggcaggcagaucagaagguca

SEQ ID NO: 1111776 - RNA, 21 nt, Human
cgcaccacugcacuccagccu

SEQ ID NO: 1111777 - RNA, 19 nt, Human
cgccucccagguucacgcc

SEQ ID NO: 1111778 - RNA, 23 nt, Human
cgccuguaaucccagcacuuugg

SEQ ID NO: 1111779 - RNA, 24 nt, Human
cgccuguaaucccagcacuuuggg

SEQ ID NO: 1111780 - RNA, 19 nt, Human
cgggguuucaccguguuag

SEQ ID NO: 1111781 - RNA, 24 nt, Human
cgugauccgcccaccucagccucc

SEQ ID NO: 1111782 - RNA, 19 nt, Human
cucaaaaaacaaacaaaca

SEQ ID NO: 1111783 - RNA, 21 nt, Human
cucaaaaguccacaguccaaa

SEQ ID NO: 1111784 - RNA, 19 nt, Human
cucaagggcuggccuugag

SEQ ID NO: 1111785 - RNA, 24 nt, Human
cucagccucccgaguagcugggac

SEQ ID NO: 1111786 - RNA, 22 nt, Human
cuccugaccucgugauccgccc

SEQ ID NO: 1111787 - RNA, 27 nt, Human
cucuaagaagcauauuugugagaggag

SEQ ID NO: 1111788 - RNA, 20 nt, Human
cucuacaaaaauacaaaaaa

SEQ ID NO: 1111789 - RNA, 23 nt, Human
cucugugugggggcuccaacccc

SEQ ID NO: 1111790 - RNA, 23 nt, Human
cugccucagccucccgaguagcu

SEQ ID NO: 1111791 - RNA, 19 nt, Human
cugcguggacauccagacu

SEQ ID NO: 1111792 - RNA, 24 nt, Human
cuggagcaggaggaaguguggggg

SEQ ID NO: 1111793 - RNA, 23 nt, Human
cuggccaacaaggugaaaccuca

SEQ ID NO: 1111794 - RNA, 21 nt, Human
cuuuuaaacaaccagauguca

SEQ ID NO: 1111795 - RNA, 23 nt, Human
gaagugcaguggcgcgaucuugg

SEQ ID NO: 1111796 - RNA, 21 nt, Human
gaaguguggggggaggugcca

SEQ ID NO: 1111797 - RNA, 24 nt, Human
gacagagggagacucugucucaaa

SEQ ID NO: 1111798 - RNA, 22 nt, Human
gaccucgugauccgcccaccuc

SEQ ID NO: 1111799 - RNA, 24 nt, Human
gaccucgugauccgcccaccucag

SEQ ID NO: 1111800 - RNA, 24 nt, Human
gacuacaggcgcccgccaccgugc

SEQ ID NO: 1111801 - RNA, 24 nt, Human
gagacgggguuucaccguguuagc

SEQ ID NO: 1111802 - RNA, 25 nt, Human
gaggcaggcagaucagaaggucagg

SEQ ID NO: 1111803 - RNA, 25 nt, Human
gaguagcugggacuacaggcgcccg

SEQ ID NO: 1111804 - RNA, 21 nt, Human
gaucucgggacugcaggauuu

SEQ ID NO: 1111805 - RNA, 18 nt, Human
gauuacaggcgugagcca

SEQ ID NO: 1111806 - RNA, 22 nt, Human
gauuacaggcgugagccaccgc

SEQ ID NO: 1111807 - RNA, 22 nt, Human
gauuacaggcgugagccaccgc

SEQ ID NO: 1111808 - RNA, 20 nt, Human
gcaccacugcacuccagccu

SEQ ID NO: 1111809 - RNA, 28 nt, Human
gcacuccagccuggugacagagggagag

SEQ ID NO: 1111810 - RNA, 30 nt, Human
gcagaucagaaggucaggagaucgagaccc

SEQ ID NO: 1111811 - RNA, 18 nt, Human
gcagugguucacgccugu

SEQ ID NO: 1111812 - RNA, 19 nt, Human
gccaggcauggugauggag

SEQ ID NO: 1111813 - RNA, 23 nt, Human
gccuggcuaauuuuuuguauuuu

SEQ ID NO: 1111814 - RNA, 24 nt, Human
gcgugcagugguucacgccuguaa

SEQ ID NO: 1111815 - RNA, 26 nt, Human
gcuccaaccccacauuuccccuccac

SEQ ID NO: 1111816 - RNA, 22 nt, Human
gcucccaaagccuugggcagca

SEQ ID NO: 1111817 - RNA, 20 nt, Human
gcugcgaucgcaccacugca

SEQ ID NO: 1111818 - RNA, 24 nt, Human
ggaagugcaguggcgcgaucuugg

SEQ ID NO: 1111819 - RNA, 24 nt, Human
ggaaguguggggggaggugccaca

SEQ ID NO: 1111820 - RNA, 20 nt, Human
ggaggaaguguggggggagg

SEQ ID NO: 1111821 - RNA, 24 nt, Human
ggcagcaccacacuuguggcuuuc

SEQ ID NO: 1111822 - RNA, 22 nt, Human
ggccuguagucccagcuacugg

SEQ ID NO: 1111823 - RNA, 23 nt, Human
ggccuguagucccagcuacuggg

SEQ ID NO: 1111824 - RNA, 23 nt, Human
gggaaucaucugaacccaggagg

SEQ ID NO: 1111825 - RNA, 23 nt, Human
gggaggcugaggcaggggaauca

SEQ ID NO: 1111826 - RNA, 24 nt, Human
ggggaggcugaggcaggggaauca

SEQ ID NO: 1111827 - RNA, 18 nt, Human
gggguuucaccguguuag

SEQ ID NO: 1111828 - RNA, 22 nt, Human
ggguggccgaggcaggcagauc

SEQ ID NO: 1111829 - RNA, 19 nt, Human
gguggccgaggcaggcaga

SEQ ID NO: 1111830 - RNA, 20 nt, Human
gguuccacucgugcagcagg

SEQ ID NO: 1111831 - RNA, 23 nt, Human
guagagacgggguuucaccgugu

SEQ ID NO: 1111832 - RNA, 24 nt, Human
gugauccgcccaccucagccuccc

SEQ ID NO: 1111833 - RNA, 20 nt, Human
guggaucuaccauuaugaug

SEQ ID NO: 1111834 - RNA, 24 nt, Human
uaauuuuuuguauuuuuaguagag

SEQ ID NO: 1111835 - RNA, 25 nt, Human
uaauuuuuuguauuuuuaguagaga

SEQ ID NO: 1111836 - RNA, 21 nt, Human
uacacaaguccaaaaccaagc

SEQ ID NO: 1111837 - RNA, 23 nt, Human
uacaggcgugagccaccgcgccc

SEQ ID NO: 1111838 - RNA, 19 nt, Human
uaccggcugcgugcagugg

SEQ ID NO: 1111839 - RNA, 26 nt, Human
uaccuccaacacuggggauuccaauu

SEQ ID NO: 1111840 - RNA, 21 nt, Human
uagccaggcauggugauggag

SEQ ID NO: 1111841 - RNA, 18 nt, Human
uagcuccacuaggaaguu

SEQ ID NO: 1111842 - RNA, 21 nt, Human
uaguagagacgggguuucacc

SEQ ID NO: 1111843 - RNA, 24 nt, Human
uaguagagacgggguuucaccgug

SEQ ID NO: 1111844 - RNA, 25 nt, Human
uaguagagacgggguuucaccgugu

SEQ ID NO: 1111845 - RNA, 26 nt, Human
uaugacccuguaaaauaagaaacaag

SEQ ID NO: 1111846 - RNA, 22 nt, Human
uauuucaaaauacuaccggcug

SEQ ID NO: 1111847 - RNA, 21 nt, Human
ucaaaauacuaccggcugcgu

SEQ ID NO: 1111848 - RNA, 24 nt, Human
ucaccgcaagcuccgccucccagg

SEQ ID NO: 1111849 - RNA, 24 nt, Human
ucaccguguuagccacgauggucu

SEQ ID NO: 1111850 - RNA, 23 nt, Human
ucacgccuguaaucccagcacuu

SEQ ID NO: 1111851 - RNA, 24 nt, Human
ucagaaggucaggagaucgagacc

SEQ ID NO: 1111852 - RNA, 18 nt, Human
ucagccucccaaagugcu

SEQ ID NO: 1111853 - RNA, 23 nt, Human
ucagccucccgaguagcugggac

SEQ ID NO: 1111854 - RNA, 20 nt, Human
ucauauuucaaaauacuacc

SEQ ID NO: 1111855 - RNA, 20 nt, Human
uccaaaauaacuuccuuuga

SEQ ID NO: 1111856 - RNA, 27 nt, Human
uccacaguccaaagucuuaucugagac

SEQ ID NO: 1111857 - RNA, 24 nt, Human
uccaccucuggucucucccaaauc

SEQ ID NO: 1111858 - RNA, 19 nt, Human
uccacuaggaaguccucca

SEQ ID NO: 1111859 - RNA, 18 nt, Human
ucccaaagccuugggcag

SEQ ID NO: 1111860 - RNA, 24 nt, Human
ucccaaagugcugggauuacaggc

SEQ ID NO: 1111861 - RNA, 19 nt, Human
ucccagguucacgccauuc

SEQ ID NO: 1111862 - RNA, 20 nt, Human
ucccagguucacgccauucu

SEQ ID NO: 1111863 - RNA, 21 nt, Human
ucccagguucacgccauucuc

SEQ ID NO: 1111864 - RNA, 24 nt, Human
ucccagguucacgccauucuccug

SEQ ID NO: 1111865 - RNA, 19 nt, Human
uccccguucuuucacgucc

SEQ ID NO: 1111866 - RNA, 24 nt, Human
ucccgaguagcugggacuacaggc

SEQ ID NO: 1111867 - RNA, 21 nt, Human
uccgcccaccucagccuccca

SEQ ID NO: 1111868 - RNA, 23 nt, Human
ucgcaccacugcacuccagccug

SEQ ID NO: 1111869 - RNA, 23 nt, Human
ucucaaaaaacaaacaaacaaac

SEQ ID NO: 1111870 - RNA, 19 nt, Human
ucucaagggcuggccuuga

SEQ ID NO: 1111871 - RNA, 24 nt, Human
ucuccugccucagccucccgagua

SEQ ID NO: 1111872 - RNA, 23 nt, Human
ucucuacaaaaauacaaaaaauu

SEQ ID NO: 1111873 - RNA, 19 nt, Human
ugaccuccuaucccacauc

SEQ ID NO: 1111874 - RNA, 23 nt, Human
ugaccucgugauccgcccaccuc

SEQ ID NO: 1111875 - RNA, 20 nt, Human
ugaggcaggggaaucaucug

SEQ ID NO: 1111876 - RNA, 24 nt, Human
ugaggcaggggaaucaucugaacc

SEQ ID NO: 1111877 - RNA, 25 nt, Human
ugaggcaggggaaucaucugaaccc

SEQ ID NO: 1111878 - RNA, 24 nt, Human
ugauccgcccaccucagccuccca

SEQ ID NO: 1111879 - RNA, 19 nt, Human
ugcagcaggcuucugcgug

SEQ ID NO: 1111880 - RNA, 21 nt, Human
ugcaggauuuaaguggcagca

SEQ ID NO: 1111881 - RNA, 24 nt, Human
ugccucagccucccgaguagcugg

SEQ ID NO: 1111882 - RNA, 24 nt, Human
ugcugggauuacaggcgugagcca

SEQ ID NO: 1111883 - RNA, 20 nt, Human
ugcugucacucaccaggccu

SEQ ID NO: 1111884 - RNA, 23 nt, Human
uggagucucgcucuuucgcccag

SEQ ID NO: 1111885 - RNA, 20 nt, Human
uggcagcacucaacugcagc

SEQ ID NO: 1111886 - RNA, 24 nt, Human
uggcagcacucaacugcagcagag

SEQ ID NO: 1111887 - RNA, 21 nt, Human
uggccuaggggcaauggagug

SEQ ID NO: 1111888 - RNA, 18 nt, Human
uggcucaccgcaagcucc

SEQ ID NO: 1111889 - RNA, 19 nt, Human
uggcucaugguucuaaagg

SEQ ID NO: 1111890 - RNA, 21 nt, Human
ugggacuacaggcgcccgcca

SEQ ID NO: 1111891 - RNA, 22 nt, Human
ugggacuacaggcgcccgccac

SEQ ID NO: 1111892 - RNA, 23 nt, Human
ugggacuacaggcgcccgccacc

SEQ ID NO: 1111893 - RNA, 23 nt, Human
ugggacuacaggcgcccgccacc

SEQ ID NO: 1111894 - RNA, 24 nt, Human
ugggacuacaggcgcccgccaccg

SEQ ID NO: 1111895 - RNA, 18 nt, Human
ugggauuacaggcgugag

SEQ ID NO: 1111896 - RNA, 19 nt, Human
ugggauuacaggcgugagc

SEQ ID NO: 1111897 - RNA, 21 nt, Human
ugggauuacaggcgugagcca

SEQ ID NO: 1111898 - RNA, 22 nt, Human
ugggauuacaggcgugagccac

SEQ ID NO: 1111899 - RNA, 23 nt, Human
ugggauuacaggcgugagccacc

SEQ ID NO: 1111900 - RNA, 24 nt, Human
ugggauuacaggcgugagccaccg

SEQ ID NO: 1111901 - RNA, 24 nt, Human
uggguggccgaggcaggcagauca

SEQ ID NO: 1111902 - RNA, 20 nt, Human
ugguaucuauucggcuucug

SEQ ID NO: 1111903 - RNA, 24 nt, Human
uggugauggaggccuguaguccca

SEQ ID NO: 1111904 - RNA, 24 nt, Human
ugguucacgccuguaaucccagca

SEQ ID NO: 1111905 - RNA, 21 nt, Human
uguauuuuuaguagagacggg

SEQ ID NO: 1111906 - RNA, 21 nt, Human
ugucaugcaaacucucucaca

SEQ ID NO: 1111907 - RNA, 23 nt, Human
uguuccaccucuggucucuccca

SEQ ID NO: 1111908 - RNA, 25 nt, Human
uguuccaccucuggucucucccaaa

SEQ ID NO: 1111909 - RNA, 18 nt, Human
uuaguagagacgggguuu

SEQ ID NO: 1111910 - RNA, 22 nt, Human
uuaguagagacgggguuucacc

SEQ ID NO: 1111911 - RNA, 24 nt, Human
uuaguagagacgggguuucaccgu

SEQ ID NO: 1111912 - RNA, 22 nt, Human
uucaaaauacuaccggcugcgu

SEQ ID NO: 1111913 - RNA, 19 nt, Human
uugcagugagcugcgaucg

SEQ ID NO: 1111914 - RNA, 22 nt, Human
uugcagugagcugcgaucgcac

SEQ ID NO: 1111915 - RNA, 23 nt, Human
uuguauuuuuaguagagacgggg

SEQ ID NO: 1111916 - RNA, 22 nt, Human
uuucaggcugagagugcaagcu

SEQ ID NO: 1111917 - RNA, 23 nt, Human
uuucucaaaccacccuucgguua

SEQ ID NO: 1111918 - RNA, 24 nt, Human
uuuuuaguagagacgggguuucac

SEQ ID NO: 1111919 - RNA, 21 nt, Human
uuuuuguauuuuuaguagaga

SEQ ID NO: 1111920 - RNA, 24 nt, Human
uuuuuuguauuuuuaguagagacg

SEQ ID NO: 1111921 - RNA, 25 nt, Human
uuuuuuuuuuuugagauggagucuc

SEQ ID NO: 1111922 - RNA, 22 nt, Human
uuuuuuuuuuuuuugagaugga

SEQ ID NO: 1111923 - RNA, 18 nt, Human
uuuuuuuuuuuuuuuuug

SEQ ID NO: 1111924 - RNA, 19 nt, Human
acugugccugggaggaguu

SEQ ID NO: 1111925 - RNA, 20 nt, Human
aggcuuccagggguccuggu

SEQ ID NO: 1111926 - RNA, 20 nt, Human
aggucuccgaaauggcagga

SEQ ID NO: 1111927 - RNA, 19 nt, Human
agugaagaggagaccugga

SEQ ID NO: 1111928 - RNA, 21 nt, Human
caggacacagaguagugaaga

SEQ ID NO: 1111929 - RNA, 21 nt, Human
ccaauaccugcaggucacagg

SEQ ID NO: 1111930 - RNA, 18 nt, Human
ccuggagcuccggcugca

SEQ ID NO: 1111931 - RNA, 18 nt, Human
cuaggcuuccaggggucc

SEQ ID NO: 1111932 - RNA, 21 nt, Human
cugcaggucacagggccacag

SEQ ID NO: 1111933 - RNA, 22 nt, Human
ggacacagaguagugaagagga

SEQ ID NO: 1111934 - RNA, 20 nt, Human
uaccugcaggucacagggcc

SEQ ID NO: 1111935 - RNA, 21 nt, Human
uccaggucuccgaaauggcag

SEQ ID NO: 1111936 - RNA, 18 nt, Human
ucccaauaccugcagguc

SEQ ID NO: 1111937 - RNA, 20 nt, Human
uccuggugucuuagcugugg

SEQ ID NO: 1111938 - RNA, 18 nt, Human
ugggaggaguuugggaug

SEQ ID NO: 1111939 - RNA, 25 nt, Human
aagcgauccucccaucucagccucc

SEQ ID NO: 1111940 - RNA, 18 nt, Human
aagcugccaggcugggcc

SEQ ID NO: 1111941 - RNA, 18 nt, Human
aagcugccaggcugggcc

SEQ ID NO: 1111942 - RNA, 18 nt, Human
aaucaugccgcugugcac

SEQ ID NO: 1111943 - RNA, 20 nt, Human
acuacaauguugugccgcca

SEQ ID NO: 1111944 - RNA, 24 nt, Human
acuauauugcccaggcuggucuug

SEQ ID NO: 1111945 - RNA, 25 nt, Human
acuauauugcccaggcuggucuuga

SEQ ID NO: 1111946 - RNA, 25 nt, Human
acucacucccugucccccuccccag

SEQ ID NO: 1111947 - RNA, 20 nt, Human
acucauccuacuuccugucu

SEQ ID NO: 1111948 - RNA, 25 nt, Human
acucccugucccccuccccagcccc

SEQ ID NO: 1111949 - RNA, 25 nt, Human
acucuagggacuucccaggaguggg

SEQ ID NO: 1111950 - RNA, 22 nt, Human
agauuacaggugugagccacug

SEQ ID NO: 1111951 - RNA, 23 nt, Human
agggucuguuucuccaucuccuc

SEQ ID NO: 1111952 - RNA, 24 nt, Human
agguugcugagauuacagguguga

SEQ ID NO: 1111953 - RNA, 21 nt, Human
aguagcuggggcugcagacau

SEQ ID NO: 1111954 - RNA, 20 nt, Human
agugcaguggugcgaucaug

SEQ ID NO: 1111955 - RNA, 23 nt, Human
agugcaguggugcgaucauggcu

SEQ ID NO: 1111956 - RNA, 24 nt, Human
agugcaguggugcgaucauggcuc

SEQ ID NO: 1111957 - RNA, 24 nt, Human
aucuguugcccaggccggacuaca

SEQ ID NO: 1111958 - RNA, 18 nt, Human
augcauauucucugugga

SEQ ID NO: 1111959 - RNA, 28 nt, Human
caagcaauccucccaccucggacuccca

SEQ ID NO: 1111960 - RNA, 27 nt, Human
caagcgauccucccaucucagccuccc

SEQ ID NO: 1111961 - RNA, 22 nt, Human
cacccccgucuccuccaaccac

SEQ ID NO: 1111962 - RNA, 21 nt, Human
caccucggacucccagguugc

SEQ ID NO: 1111963 - RNA, 24 nt, Human
cacuauauugcccaggcuggucuu

SEQ ID NO: 1111964 - RNA, 27 nt, Human
cacuauauugcccaggcuggucuugaa

SEQ ID NO: 1111965 - RNA, 24 nt, Human
cagcaugcacggcuaacuuaaaau

SEQ ID NO: 1111966 - RNA, 21 nt, Human
cagccucccgaguagcugggg

SEQ ID NO: 1111967 - RNA, 18 nt, Human
cagcugcuguuaggcuua

SEQ ID NO: 1111968 - RNA, 20 nt, Human
caucaccaccauccucucca

SEQ ID NO: 1111969 - RNA, 24 nt, Human
caucucagccucccgaguagcugg

SEQ ID NO: 1111970 - RNA, 22 nt, Human
caucuccucucccgcucuuguc

SEQ ID NO: 1111971 - RNA, 21 nt, Human
cauggcucacugcaaccuccg

SEQ ID NO: 1111972 - RNA, 22 nt, Human
ccaccagccacgcacgaggguc

SEQ ID NO: 1111973 - RNA, 21 nt, Human
ccaggccggacuacaguggca

SEQ ID NO: 1111974 - RNA, 21 nt, Human
ccagguugcugagauuacagg

SEQ ID NO: 1111975 - RNA, 24 nt, Human
ccagguugcugagauuacaggugu

SEQ ID NO: 1111976 - RNA, 23 nt, Human
ccaucucagccucccgaguagcu

SEQ ID NO: 1111977 - RNA, 20 nt, Human
cccagguucaagcgauucuc

SEQ ID NO: 1111978 - RNA, 19 nt, Human
cccccuccccagccccugg

SEQ ID NO: 1111979 - RNA, 26 nt, Human
ccccgucuccuccaaccacacaucca

SEQ ID NO: 1111980 - RNA, 18 nt, Human
cccgaguagcuggggcug

SEQ ID NO: 1111981 - RNA, 24 nt, Human
cccgucgccuaggcuggagugcag

SEQ ID NO: 1111982 - RNA, 21 nt, Human
cccugcugucaguucuguggg

SEQ ID NO: 1111983 - RNA, 19 nt, Human
cccuuccucucccucucuc

SEQ ID NO: 1111984 - RNA, 25 nt, Human
ccgccaucaccaccauccucuccag

SEQ ID NO: 1111985 - RNA, 21 nt, Human
ccguguuuaccaugugagaag

SEQ ID NO: 1111986 - RNA, 19 nt, Human
ccucucacugagcgugagg

SEQ ID NO: 1111987 - RNA, 22 nt, Human
ccugcugucaguucuguggggu

SEQ ID NO: 1111988 - RNA, 21 nt, Human
ccuggcacucacucauccuac

SEQ ID NO: 1111989 - RNA, 20 nt, Human
ccugggcucaagcgauccuc

SEQ ID NO: 1111990 - RNA, 26 nt, Human
ccugucccccuccccagccccuggca

SEQ ID NO: 1111991 - RNA, 19 nt, Human
ccuugaauuccugggcuca

SEQ ID NO: 1111992 - RNA, 23 nt, Human
ccuugaauuccugggcucaagcg

SEQ ID NO: 1111993 - RNA, 21 nt, Human
cgaucuguugcccaggccgga

SEQ ID NO: 1111994 - RNA, 24 nt, Human
cgccuaggcuggagugcaguggug

SEQ ID NO: 1111995 - RNA, 21 nt, Human
cgcugugcacuugugugugca

SEQ ID NO: 1111996 - RNA, 20 nt, Human
cgucgccuaggcuggagugc

SEQ ID NO: 1111997 - RNA, 25 nt, Human
cucaagcaauccucccaccucggac

SEQ ID NO: 1111998 - RNA, 24 nt, Human
cucaagcgauccucccaucucagc

SEQ ID NO: 1111999 - RNA, 23 nt, Human
cucacucccugucccccucccca

SEQ ID NO: 1112000 - RNA, 24 nt, Human
cucacugcaaccuccgucucccag

SEQ ID NO: 1112001 - RNA, 24 nt, Human
cucagccucccgaguagcuggggc

SEQ ID NO: 1112002 - RNA, 23 nt, Human
cuccaaggcugcuggcaggcccu

SEQ ID NO: 1112003 - RNA, 18 nt, Human
cuccagaacuuucuccuc

SEQ ID NO: 1112004 - RNA, 23 nt, Human
cucccaccucggacucccagguu

SEQ ID NO: 1112005 - RNA, 27 nt, Human
cuccuggucucaagcaauccucccacc

SEQ ID NO: 1112006 - RNA, 19 nt, Human
cucgugguuucuccaaggc

SEQ ID NO: 1112007 - RNA, 23 nt, Human
cugcaaccuccgucucccagguu

SEQ ID NO: 1112008 - RNA, 24 nt, Human
cugcaaccuccgucucccagguuc

SEQ ID NO: 1112009 - RNA, 18 nt, Human
cugccaggcugggccuug

SEQ ID NO: 1112010 - RNA, 22 nt, Human
cuggauccucucacugagcgug

SEQ ID NO: 1112011 - RNA, 21 nt, Human
cuggucucaagcaauccuccc

SEQ ID NO: 1112012 - RNA, 22 nt, Human
cuggucucaagcaauccuccca

SEQ ID NO: 1112013 - RNA, 22 nt, Human
cuguguuuauccacugaugggc

SEQ ID NO: 1112014 - RNA, 23 nt, Human
cuuccugucucugugaaucugac

SEQ ID NO: 1112015 - RNA, 19 nt, Human
gaucauggcucacugcaac

SEQ ID NO: 1112016 - RNA, 19 nt, Human
gauccucucacugagcgug

SEQ ID NO: 1112017 - RNA, 18 nt, Human
gauuacaggugugagcca

SEQ ID NO: 1112018 - RNA, 24 nt, Human
gauuacaggugugagccacugugc

SEQ ID NO: 1112019 - RNA, 22 nt, Human
gcaaccuccgucucccagguuc

SEQ ID NO: 1112020 - RNA, 22 nt, Human
gcaauccucccaccucggacuc

SEQ ID NO: 1112021 - RNA, 19 nt, Human
gccggaagauggggcuugg

SEQ ID NO: 1112022 - RNA, 20 nt, Human
gccuaggcuggagugcagug

SEQ ID NO: 1112023 - RNA, 23 nt, Human
gccuaggcuggagugcaguggug

SEQ ID NO: 1112024 - RNA, 22 nt, Human
gccuuguuccauccccaccagc

SEQ ID NO: 1112025 - RNA, 23 nt, Human
ggccuuguuccauccccaccagc

SEQ ID NO: 1112026 - RNA, 24 nt, Human
ggcuggucuugaacuccuggucuc

SEQ ID NO: 1112027 - RNA, 23 nt, Human
ggcuguugggaaucaugccgcug

SEQ ID NO: 1112028 - RNA, 18 nt, Human
gggaagaaaggcugguug

SEQ ID NO: 1112029 - RNA, 22 nt, Human
gggcgccugggguggcuuccac

SEQ ID NO: 1112030 - RNA, 19 nt, Human
guggaucugccuguucugg

SEQ ID NO: 1112031 - RNA, 21 nt, Human
guugcccaggccggacuacag

SEQ ID NO: 1112032 - RNA, 18 nt, Human
uaaauggaaaccccgucc

SEQ ID NO: 1112033 - RNA, 24 nt, Human
uaacgaucuguugcccaggccgga

SEQ ID NO: 1112034 - RNA, 21 nt, Human
uacaggugugagccacugugc

SEQ ID NO: 1112035 - RNA, 20 nt, Human
uauauugcccaggcuggucu

SEQ ID NO: 1112036 - RNA, 23 nt, Human
uauauugcccaggcuggucuuga

SEQ ID NO: 1112037 - RNA, 24 nt, Human
uauauugcccaggcuggucuugaa

SEQ ID NO: 1112038 - RNA, 18 nt, Human
ucacugagcgugaggucc

SEQ ID NO: 1112039 - RNA, 23 nt, Human
ucacugagcgugagguccucaag

SEQ ID NO: 1112040 - RNA, 19 nt, Human
ucacugcaaccuccgucuc

SEQ ID NO: 1112041 - RNA, 24 nt, Human
ucacugcaaccuccgucucccagg

SEQ ID NO: 1112042 - RNA, 25 nt, Human
ucacugcaaccuccgucucccaggu

SEQ ID NO: 1112043 - RNA, 21 nt, Human
ucagcccuuccucucccucuc

SEQ ID NO: 1112044 - RNA, 23 nt, Human
ucagccucccgaguagcuggggc

SEQ ID NO: 1112045 - RNA, 22 nt, Human
uccaaggcugcuggcaggcccu

SEQ ID NO: 1112046 - RNA, 22 nt, Human
uccagaacuuucuccucuuccc

SEQ ID NO: 1112047 - RNA, 19 nt, Human
uccauccccaccagccacg

SEQ ID NO: 1112048 - RNA, 23 nt, Human
uccaugcauauucucuguggauc

SEQ ID NO: 1112049 - RNA, 21 nt, Human
ucccagguucaagcgauucuc

SEQ ID NO: 1112050 - RNA, 24 nt, Human
ucccagguucaagcgauucucccg

SEQ ID NO: 1112051 - RNA, 23 nt, Human
ucccagguugcugagauuacagg

SEQ ID NO: 1112052 - RNA, 26 nt, Human
uccccagccccuggcacucacucauc

SEQ ID NO: 1112053 - RNA, 22 nt, Human
uccccaugaaacacucacuccc

SEQ ID NO: 1112054 - RNA, 20 nt, Human
ucccgaguagcuggggcugc

SEQ ID NO: 1112055 - RNA, 21 nt, Human
ucccucucucuuuucucacua

SEQ ID NO: 1112056 - RNA, 22 nt, Human
ucccugucccccuccccagccc

SEQ ID NO: 1112057 - RNA, 26 nt, Human
uccucccaucucagccucccgaguag

SEQ ID NO: 1112058 - RNA, 21 nt, Human
uccugggcucaagcgauccuc

SEQ ID NO: 1112059 - RNA, 24 nt, Human
uccugggcucaagcgauccuccca

SEQ ID NO: 1112060 - RNA, 18 nt, Human
uccuuuuuuuuuuuuuuu

SEQ ID NO: 1112061 - RNA, 18 nt, Human
uccuuuuuuuuuuuuuuu

SEQ ID NO: 1112062 - RNA, 24 nt, Human
ucgccuaggcuggagugcaguggu

SEQ ID NO: 1112063 - RNA, 24 nt, Human
ucggugaagccuugaauuccuggg

SEQ ID NO: 1112064 - RNA, 23 nt, Human
ucucacuacaauguugugccgcc

SEQ ID NO: 1112065 - RNA, 23 nt, Human
ucucacuauauugcccaggcugg

SEQ ID NO: 1112066 - RNA, 26 nt, Human
ucucacuauauugcccaggcuggucu

SEQ ID NO: 1112067 - RNA, 27 nt, Human
ucucacuauauugcccaggcuggucuu

SEQ ID NO: 1112068 - RNA, 24 nt, Human
ucucccagguucaagcgauucucc

SEQ ID NO: 1112069 - RNA, 19 nt, Human
ucuccucuucccaaacuga

SEQ ID NO: 1112070 - RNA, 20 nt, Human
ucucuuucuuuuuucuuuuu

SEQ ID NO: 1112071 - RNA, 18 nt, Human
ucuguccccaugaaacac

SEQ ID NO: 1112072 - RNA, 24 nt, Human
ucuguugcccaggccggacuacag

SEQ ID NO: 1112073 - RNA, 18 nt, Human
ucuguuucuccaucuccu

SEQ ID NO: 1112074 - RNA, 21 nt, Human
ucuugaacuccuggucucaag

SEQ ID NO: 1112075 - RNA, 23 nt, Human
ucuugccccgucgccuaggcugg

SEQ ID NO: 1112076 - RNA, 24 nt, Human
ucuugccccgucgccuaggcugga

SEQ ID NO: 1112077 - RNA, 21 nt, Human
ucuuucagucccugcugucag

SEQ ID NO: 1112078 - RNA, 20 nt, Human
ucuuuucuucuagagauggg

SEQ ID NO: 1112079 - RNA, 23 nt, Human
ugaaacacucacucccugucccc

SEQ ID NO: 1112080 - RNA, 24 nt, Human
ugaacuccuggucucaagcaaucc

SEQ ID NO: 1112081 - RNA, 19 nt, Human
ugagacagagucuugcccc

SEQ ID NO: 1112082 - RNA, 22 nt, Human
ugagacagagucuugccccguc

SEQ ID NO: 1112083 - RNA, 21 nt, Human
ugagauuacaggugugagcca

SEQ ID NO: 1112084 - RNA, 22 nt, Human
ugagauuacaggugugagccac

SEQ ID NO: 1112085 - RNA, 22 nt, Human
ugagauuacaggugugagccac

SEQ ID NO: 1112086 - RNA, 22 nt, Human
ugagauuacaggugugagccac

SEQ ID NO: 1112087 - RNA, 24 nt, Human
ugagauuacaggugugagccacug

SEQ ID NO: 1112088 - RNA, 22 nt, Human
ugcaaacaccucuuucaguccc

SEQ ID NO: 1112089 - RNA, 24 nt, Human
ugcagacaugaaccagcaugcacg

SEQ ID NO: 1112090 - RNA, 23 nt, Human
ugcaguggugcgaucauggcuca

SEQ ID NO: 1112091 - RNA, 20 nt, Human
ugcccaggccggacuacagu

SEQ ID NO: 1112092 - RNA, 24 nt, Human
ugcccaggcuggucuugaacuccu

SEQ ID NO: 1112093 - RNA, 24 nt, Human
ugccccgucgccuaggcuggagug

SEQ ID NO: 1112094 - RNA, 20 nt, Human
ugcugagauuacagguguga

SEQ ID NO: 1112095 - RNA, 24 nt, Human
ugcugagauuacaggugugagcca

SEQ ID NO: 1112096 - RNA, 21 nt, Human
uggagugcaguggugcgauca

SEQ ID NO: 1112097 - RNA, 24 nt, Human
uggagugcaguggugcgaucaugg

SEQ ID NO: 1112098 - RNA, 18 nt, Human
uggcugaauuccagaacu

SEQ ID NO: 1112099 - RNA, 21 nt, Human
ugggauugcugggcccuaugg

SEQ ID NO: 1112100 - RNA, 23 nt, Human
uggggcuuggggcuuucagcccu

SEQ ID NO: 1112101 - RNA, 24 nt, Human
uggggucucacuauauugcccagg

SEQ ID NO: 1112102 - RNA, 21 nt, Human
uggucucaagcaauccuccca

SEQ ID NO: 1112103 - RNA, 21 nt, Human
ugguuggaccaugcuguguuu

SEQ ID NO: 1112104 - RNA, 19 nt, Human
ugucugguuggaccaugcu

SEQ ID NO: 1112105 - RNA, 18 nt, Human
ugugagaagcugccaggc

SEQ ID NO: 1112106 - RNA, 20 nt, Human
uguucuggaaauuucuccuu

SEQ ID NO: 1112107 - RNA, 22 nt, Human
uuagcagucacccccgucuccu

SEQ ID NO: 1112108 - RNA, 19 nt, Human
uucaaacucaacggugagg

SEQ ID NO: 1112109 - RNA, 20 nt, Human
uucagcccuuccucucccuc

SEQ ID NO: 1112110 - RNA, 19 nt, Human
uucccuuccuuuucauggc

SEQ ID NO: 1112111 - RNA, 23 nt, Human
uuccugggcucaagcgauccucc

SEQ ID NO: 1112112 - RNA, 24 nt, Human
uugccccgucgccuaggcuggagu

SEQ ID NO: 1112113 - RNA, 22 nt, Human
uugcugggcccuaugguaauuc

SEQ ID NO: 1112114 - RNA, 25 nt, Human
uuucauggcugcguaauauuccacu

SEQ ID NO: 1112115 - RNA, 21 nt, Human
uuucuuuuuucuuuuucuuuu

SEQ ID NO: 1112116 - RNA, 18 nt, Human
uuuuuuuuuuuuuuuuug

SEQ ID NO: 1112117 - RNA, 23 nt, Human
uuuuuuuuuuuuuuuuuuguuuu

SEQ ID NO: 1112118 - RNA, 25 nt, Human
aaacauuuacauaaugguggaaaua

SEQ ID NO: 1112119 - RNA, 18 nt, Human
aaccaggaagaagagcug

SEQ ID NO: 1112120 - RNA, 23 nt, Human
aaccaggaagaagagcugggccc

SEQ ID NO: 1112121 - RNA, 22 nt, Human
aagauaaacaaauuagaggcca

SEQ ID NO: 1112122 - RNA, 21 nt, Human
aaguggccgaaaggcaggagc

SEQ ID NO: 1112123 - RNA, 20 nt, Human
agaggcugacuugaggaggu

SEQ ID NO: 1112124 - RNA, 23 nt, Human
agauaaacaaauuagaggccaag

SEQ ID NO: 1112125 - RNA, 19 nt, Human
aggaagaagagcugggccc

SEQ ID NO: 1112126 - RNA, 18 nt, Human
aggcaggagcuggaccug

SEQ ID NO: 1112127 - RNA, 26 nt, Human
auaauaaggaaaauaaaauaaaaaac

SEQ ID NO: 1112128 - RNA, 21 nt, Human
augggccugaagaggccacug

SEQ ID NO: 1112129 - RNA, 18 nt, Human
auuaccuaccaaaacauu

SEQ ID NO: 1112130 - RNA, 24 nt, Human
caaauaaauuaccuaccaaaacau

SEQ ID NO: 1112131 - RNA, 20 nt, Human
caaauaauaaggaaaauaaa

SEQ ID NO: 1112132 - RNA, 18 nt, Human
caucggagggcaggagcu

SEQ ID NO: 1112133 - RNA, 18 nt, Human
ccccaugggccugaagag

SEQ ID NO: 1112134 - RNA, 19 nt, Human
cgaccaaggccgccaggag

SEQ ID NO: 1112135 - RNA, 21 nt, Human
cgcccggagggugcaaguggg

SEQ ID NO: 1112136 - RNA, 18 nt, Human
cuaaagaggccacuggca

SEQ ID NO: 1112137 - RNA, 18 nt, Human
cugaagaggccacuggca

SEQ ID NO: 1112138 - RNA, 19 nt, Human
cugggcccggagaggccgc

SEQ ID NO: 1112139 - RNA, 18 nt, Human
cugggccuaaagaggcca

SEQ ID NO: 1112140 - RNA, 22 nt, Human
gagggcaggagcucauccugga

SEQ ID NO: 1112141 - RNA, 21 nt, Human
gcaagugggucuggagaggcu

SEQ ID NO: 1112142 - RNA, 25 nt, Human
gccgaaaggcaggagcuuuggacug

SEQ ID NO: 1112143 - RNA, 21 nt, Human
ggaagggaaaaacggggccug

SEQ ID NO: 1112144 - RNA, 19 nt, Human
ggagacccaaccaggaaga

SEQ ID NO: 1112145 - RNA, 18 nt, Human
ggccuggaauggccgacg

SEQ ID NO: 1112146 - RNA, 24 nt, Human
gggaaaaacggggccuggaauggc

SEQ ID NO: 1112147 - RNA, 23 nt, Human
gggcaggagcucauccuggagag

SEQ ID NO: 1112148 - RNA, 19 nt, Human
gguucugggcccggagagg

SEQ ID NO: 1112149 - RNA, 21 nt, Human
uaaacaaauuagaggccaaga

SEQ ID NO: 1112150 - RNA, 22 nt, Human
uaccuaccaaaacauuuacaua

SEQ ID NO: 1112151 - RNA, 20 nt, Human
ugaaagguugggagcuuggc

SEQ ID NO: 1112152 - RNA, 22 nt, Human
ugaaagguugggagcuuggcuu

SEQ ID NO: 1112153 - RNA, 25 nt, Human
ugccggaagggaaaaacggggccug

SEQ ID NO: 1112154 - RNA, 18 nt, Human
uggagaggccaccgugag

SEQ ID NO: 1112155 - RNA, 20 nt, Human
uggagaggcugacuugagga

SEQ ID NO: 1112156 - RNA, 22 nt, Human
uggcaggcaggagcuggaccug

SEQ ID NO: 1112157 - RNA, 20 nt, Human
ugggccgaccaaggccgcca

SEQ ID NO: 1112158 - RNA, 20 nt, Human
ugggccuaaagaggccacug

SEQ ID NO: 1112159 - RNA, 24 nt, Human
uggggccuggagaugccaucggag

SEQ ID NO: 1112160 - RNA, 19 nt, Human
uggguaggcacugagucca

SEQ ID NO: 1112161 - RNA, 23 nt, Human
aaagauaaacaaauuagaggcca

SEQ ID NO: 1112162 - RNA, 23 nt, Human
agauaaacaaauuagaggccaag

SEQ ID NO: 1112163 - RNA, 22 nt, Human
auaaacaaauuagaggccaaga

SEQ ID NO: 1112164 - RNA, 21 nt, Human
ggaagggaaaaacggggccug

SEQ ID NO: 1112165 - RNA, 18 nt, Human
ggccuggaauggccgacg

SEQ ID NO: 1112166 - RNA, 24 nt, Human
gggaaaaacggggccuggaauggc

SEQ ID NO: 1112167 - RNA, 23 nt, Human
ugccggaagggaaaaacggggcc

SEQ ID NO: 1112168 - RNA, 22 nt, Human
aaagacguuguugggaccugga

SEQ ID NO: 1112169 - RNA, 27 nt, Human
aaauggccucacagucauaaguugggc

SEQ ID NO: 1112170 - RNA, 20 nt, Human
aagacguuguugggaccugg

SEQ ID NO: 1112171 - RNA, 21 nt, Human
aagcggccgagaggcaggagc

SEQ ID NO: 1112172 - RNA, 24 nt, Human
agacagaaguugggcaaaagccug

SEQ ID NO: 1112173 - RNA, 26 nt, Human
agacagaaguugggcaaaagggaccc

SEQ ID NO: 1112174 - RNA, 19 nt, Human
aggcacuaggccuggaaau

SEQ ID NO: 1112175 - RNA, 22 nt, Human
aggcaggagcuucaccugagga

SEQ ID NO: 1112176 - RNA, 25 nt, Human
aggcaggagcuucaccugaggaugc

SEQ ID NO: 1112177 - RNA, 19 nt, Human
aggcaggaggagcugggcc

SEQ ID NO: 1112178 - RNA, 21 nt, Human
aggcaggaggagcugggccug

SEQ ID NO: 1112179 - RNA, 19 nt, Human
aggcaggaggcugggccuu

SEQ ID NO: 1112180 - RNA, 20 nt, Human
aggcaugagcugggcugggc

SEQ ID NO: 1112181 - RNA, 23 nt, Human
agggaaguugugggccuaccagg

SEQ ID NO: 1112182 - RNA, 19 nt, Human
aucugggucuggagggucc

SEQ ID NO: 1112183 - RNA, 19 nt, Human
caacuugggccugcggcgg

SEQ ID NO: 1112184 - RNA, 21 nt, Human
cacuaggccuggaaauggccu

SEQ ID NO: 1112185 - RNA, 19 nt, Human
caucggagggccaggagcu

SEQ ID NO: 1112186 - RNA, 21 nt, Human
ccaccgaaagucaaaagcggg

SEQ ID NO: 1112187 - RNA, 21 nt, Human
ccaccgaccggagaccauuug

SEQ ID NO: 1112188 - RNA, 25 nt, Human
cccaccgaccggagaccauuugggg

SEQ ID NO: 1112189 - RNA, 25 nt, Human
cccaccgaccggaggccauuugggg

SEQ ID NO: 1112190 - RNA, 22 nt, Human
cgaccggagaccauuuggggcc

SEQ ID NO: 1112191 - RNA, 22 nt, Human
cgaccggaggccauuuggggcc

SEQ ID NO: 1112192 - RNA, 20 nt, Human
cgccgggaggcaugagcugg

SEQ ID NO: 1112193 - RNA, 22 nt, Human
cgggagcugggccugccgaagc

SEQ ID NO: 1112194 - RNA, 19 nt, Human
cgggccagaguccggccug

SEQ ID NO: 1112195 - RNA, 18 nt, Human
cugaagaggccacuggca

SEQ ID NO: 1112196 - RNA, 19 nt, Human
gaggcaggaggagcugggc

SEQ ID NO: 1112197 - RNA, 24 nt, Human
gccgaaaggcaggagcuucaccug

SEQ ID NO: 1112198 - RNA, 23 nt, Human
gccugcggcggucgccgggaggc

SEQ ID NO: 1112199 - RNA, 18 nt, Human
gcgggagcugggccugcc

SEQ ID NO: 1112200 - RNA, 24 nt, Human
gcguggaggagcccaccgaccgga

SEQ ID NO: 1112201 - RNA, 18 nt, Human
ggaaggccgccgggaggc

SEQ ID NO: 1112202 - RNA, 24 nt, Human
ggagaggccaccgcgaggccugag

SEQ ID NO: 1112203 - RNA, 20 nt, Human
ggaggcaggaggcugggccc

SEQ ID NO: 1112204 - RNA, 20 nt, Human
gggaggcaugagcugggcug

SEQ ID NO: 1112205 - RNA, 23 nt, Human
gggaggcaugagcugggcugggc

SEQ ID NO: 1112206 - RNA, 25 nt, Human
gggcaaaagccugauuugaggaagu

SEQ ID NO: 1112207 - RNA, 22 nt, Human
gggccagaguccggccuggaga

SEQ ID NO: 1112208 - RNA, 19 nt, Human
gggccgcugggagcugggc

SEQ ID NO: 1112209 - RNA, 19 nt, Human
gggcugggccgaaagaggc

SEQ ID NO: 1112210 - RNA, 18 nt, Human
gggcuugggaaggccgcc

SEQ ID NO: 1112211 - RNA, 18 nt, Human
gugaggcagaggcugacc

SEQ ID NO: 1112212 - RNA, 19 nt, Human
gugaggcagaggcugggcc

SEQ ID NO: 1112213 - RNA, 19 nt, Human
uccacugugaggcagaggc

SEQ ID NO: 1112214 - RNA, 20 nt, Human
uccacugugaggcagaggcu

SEQ ID NO: 1112215 - RNA, 20 nt, Human
uccgcugugaggcagaggcu

SEQ ID NO: 1112216 - RNA, 23 nt, Human
ugagcugggcugggccgaaagag

SEQ ID NO: 1112217 - RNA, 25 nt, Human
ugaggaugccacagugagacaccau

SEQ ID NO: 1112218 - RNA, 19 nt, Human
ugaggcagaggcugaccug

SEQ ID NO: 1112219 - RNA, 18 nt, Human
ugaggcagaggcugggcc

SEQ ID NO: 1112220 - RNA, 18 nt, Human
ugaggcagaggcugggcc

SEQ ID NO: 1112221 - RNA, 23 nt, Human
ugaguccaaagacguuguuggga

SEQ ID NO: 1112222 - RNA, 22 nt, Human
uggcaggcgggagcugggccug

SEQ ID NO: 1112223 - RNA, 20 nt, Human
ugggaggcaggaggagcugg

SEQ ID NO: 1112224 - RNA, 21 nt, Human
ugggaggcaggaggagcuggg

SEQ ID NO: 1112225 - RNA, 21 nt, Human
ugggcaaaagccugauuugag

SEQ ID NO: 1112226 - RNA, 26 nt, Human
ugggcaaaagccugauuugaggaagu

SEQ ID NO: 1112227 - RNA, 24 nt, Human
uggggccuggagaugccaucggag

SEQ ID NO: 1112228 - RNA, 18 nt, Human
ugugaggcagaggcuggg

SEQ ID NO: 1112229 - RNA, 22 nt, Human
uguugggaccuggagucgggcc

SEQ ID NO: 1112230 - RNA, 19 nt, Human
uuuggggccuggagaugcc

SEQ ID NO: 1112231 - RNA, 24 nt, Human
aaauaagucuugggaagaagccaa

SEQ ID NO: 1112232 - RNA, 19 nt, Human
aacaagggcgggucagagc

SEQ ID NO: 1112233 - RNA, 18 nt, Human
aagaagacgggcgugcug

SEQ ID NO: 1112234 - RNA, 19 nt, Human
aaggagcuuguagcacagg

SEQ ID NO: 1112235 - RNA, 18 nt, Human
aaucaggaacaggcaggc

SEQ ID NO: 1112236 - RNA, 23 nt, Human
agagggguguguguguuucagag

SEQ ID NO: 1112237 - RNA, 19 nt, Human
agccaacacuauggcugca

SEQ ID NO: 1112238 - RNA, 24 nt, Human
caaaagagggcagaaguccagaga

SEQ ID NO: 1112239 - RNA, 23 nt, Human
cacccaguauuacugaggagcac

SEQ ID NO: 1112240 - RNA, 19 nt, Human
caggaacaggcaggcagag

SEQ ID NO: 1112241 - RNA, 23 nt, Human
ccccgacucccaggccagggaga

SEQ ID NO: 1112242 - RNA, 21 nt, Human
ccccuguacaguugacccacc

SEQ ID NO: 1112243 - RNA, 22 nt, Human
cccgacucccaggccagggaga

SEQ ID NO: 1112244 - RNA, 24 nt, Human
ccuauaacaagggcgggucagagc

SEQ ID NO: 1112245 - RNA, 20 nt, Human
cgaccccucagguugguccc

SEQ ID NO: 1112246 - RNA, 22 nt, Human
cucugagaccccgacucccagg

SEQ ID NO: 1112247 - RNA, 22 nt, Human
cugccucugcugccacauaugu

SEQ ID NO: 1112248 - RNA, 24 nt, Human
gcugcagaaaacagagaacacagg

SEQ ID NO: 1112249 - RNA, 22 nt, Human
gcuguaaucaagcugccugguc

SEQ ID NO: 1112250 - RNA, 20 nt, Human
ggcagagggguguguguguu

SEQ ID NO: 1112251 - RNA, 25 nt, Human
ggcccuugaugcuguaaucaagcug

SEQ ID NO: 1112252 - RNA, 19 nt, Human
gucacucaagugagucacc

SEQ ID NO: 1112253 - RNA, 20 nt, Human
uaagucuugggaagaagcca

SEQ ID NO: 1112254 - RNA, 18 nt, Human
uagguguuucucugagac

SEQ ID NO: 1112255 - RNA, 25 nt, Human
uauggcugcagaaaacagagaacac

SEQ ID NO: 1112256 - RNA, 19 nt, Human
ucaggaacaggcaggcaga

SEQ ID NO: 1112257 - RNA, 18 nt, Human
ucucugagaccccgacuc

SEQ ID NO: 1112258 - RNA, 27 nt, Human
ucucugagaccccgacucccaggccag

SEQ ID NO: 1112259 - RNA, 18 nt, Human
ugaggagcacuccacaug

SEQ ID NO: 1112260 - RNA, 24 nt, Human
ugcagaaaacagagaacacagggg

SEQ ID NO: 1112261 - RNA, 23 nt, Human
ugccugguccugaaacucucacu

SEQ ID NO: 1112262 - RNA, 21 nt, Human
ugggaagaagccaacacuaug

SEQ ID NO: 1112263 - RNA, 18 nt, Human
uggucccgggcagcacac

SEQ ID NO: 1112264 - RNA, 22 nt, Human
aaaaaucugcaucccguucccc

SEQ ID NO: 1112265 - RNA, 21 nt, Human
aagaaagaaaggggaaggaag

SEQ ID NO: 1112266 - RNA, 19 nt, Human
aaggaaggaaaagaaaaaa

SEQ ID NO: 1112267 - RNA, 20 nt, Human
accuuguaauucugacacug

SEQ ID NO: 1112268 - RNA, 18 nt, Human
aggaaggaaaagaaaaaa

SEQ ID NO: 1112269 - RNA, 23 nt, Human
aggaaggaaaagaaaaaaaaaau

SEQ ID NO: 1112270 - RNA, 21 nt, Human
aggaaggaaggaaggaaggaa

SEQ ID NO: 1112271 - RNA, 24 nt, Human
aggaaggaaggaaguuggaaggaa

SEQ ID NO: 1112272 - RNA, 22 nt, Human
agguaaaagccaagaggcucuc

SEQ ID NO: 1112273 - RNA, 24 nt, Human
augggagauguaucugugcagaga

SEQ ID NO: 1112274 - RNA, 24 nt, Human
cacacagucgcagccaaggcagcc

SEQ ID NO: 1112275 - RNA, 24 nt, Human
cagccaaggcagccugggccuggg

SEQ ID NO: 1112276 - RNA, 24 nt, Human
cagcuggacuagcacucgcaucca

SEQ ID NO: 1112277 - RNA, 22 nt, Human
cagguaaaagccaagaggcucu

SEQ ID NO: 1112278 - RNA, 19 nt, Human
ccugcucugcggcuucauc

SEQ ID NO: 1112279 - RNA, 18 nt, Human
ccuuguguucuauaugac

SEQ ID NO: 1112280 - RNA, 23 nt, Human
cgcagccaaggcagccugggccu

SEQ ID NO: 1112281 - RNA, 19 nt, Human
cugcaggcacacagucgca

SEQ ID NO: 1112282 - RNA, 23 nt, Human
cugcaucccguuccccaccgagu

SEQ ID NO: 1112283 - RNA, 21 nt, Human
cuuguaauucugacacugugu

SEQ ID NO: 1112284 - RNA, 20 nt, Human
gaaggaaaagaaaaaaaaaa

SEQ ID NO: 1112285 - RNA, 22 nt, Human
gaaggaaggaaggaaguuggaa

SEQ ID NO: 1112286 - RNA, 23 nt, Human
gacacugugucucccgggcuugu

SEQ ID NO: 1112287 - RNA, 20 nt, Human
gauguguguguuggccuugu

SEQ ID NO: 1112288 - RNA, 18 nt, Human
gcagaccagguaaaagcc

SEQ ID NO: 1112289 - RNA, 19 nt, Human
gccucagcucccugcucug

SEQ ID NO: 1112290 - RNA, 21 nt, Human
gcuguggugaguuuuucccca

SEQ ID NO: 1112291 - RNA, 22 nt, Human
gggaaggaaggaaggaaguugg

SEQ ID NO: 1112292 - RNA, 23 nt, Human
ggggaaggaaggaaggaaguugg

SEQ ID NO: 1112293 - RNA, 21 nt, Human
uagaugggauaguggucucuc

SEQ ID NO: 1112294 - RNA, 21 nt, Human
uagcuuggccgggcggcugau

SEQ ID NO: 1112295 - RNA, 22 nt, Human
ucagcuguggugaguuuuuccc

SEQ ID NO: 1112296 - RNA, 23 nt, Human
uccccaguguccacuggaucagg

SEQ ID NO: 1112297 - RNA, 23 nt, Human
ucgcagccaaggcagccugggcc

SEQ ID NO: 1112298 - RNA, 22 nt, Human
ucucugcagauugguccuuguu

SEQ ID NO: 1112299 - RNA, 18 nt, Human
ucugcaucccguucccca

SEQ ID NO: 1112300 - RNA, 23 nt, Human
uggugaguuuuuccccagugucc

SEQ ID NO: 1112301 - RNA, 20 nt, Human
uuccccaguguccacuggau

SEQ ID NO: 1112302 - RNA, 22 nt, Human
uuggaaggaaggaaggaaggaa

SEQ ID NO: 1112303 - RNA, 22 nt, Human
uuggaugcucuuucucugcaga

SEQ ID NO: 1112304 - RNA, 21 nt, Human
uuggugguagagaggcuccuu

SEQ ID NO: 1112305 - RNA, 20 nt, Human
uuuaugggagauguaucugu

SEQ ID NO: 1112306 - RNA, 23 nt, Human
uuucucgcagaccagguaaaagc

SEQ ID NO: 1112307 - RNA, 18 nt, Human
aaaaaaagcaaaaaauuc

SEQ ID NO: 1112308 - RNA, 22 nt, Human
aaaaaaccacaucaaacaaugg

SEQ ID NO: 1112309 - RNA, 21 nt, Human
aaaaaaguagauguggccagg

SEQ ID NO: 1112310 - RNA, 22 nt, Human
aaaaaaguagauguggccaggc

SEQ ID NO: 1112311 - RNA, 18 nt, Human
aaaagaaacaaacuaucc

SEQ ID NO: 1112312 - RNA, 18 nt, Human
aaaaucagcugggcgugg

SEQ ID NO: 1112313 - RNA, 21 nt, Human
aaacuauccaaauuggaaaug

SEQ ID NO: 1112314 - RNA, 24 nt, Human
aaagaaacaaacuauccaaauugg

SEQ ID NO: 1112315 - RNA, 18 nt, Human
aaaugcaucaaagaccua

SEQ ID NO: 1112316 - RNA, 19 nt, Human
aacauggugaaaccccguc

SEQ ID NO: 1112317 - RNA, 20 nt, Human
aacauggugaaaccccgucu

SEQ ID NO: 1112318 - RNA, 21 nt, Human
aacauggugaaaccccgucuc

SEQ ID NO: 1112319 - RNA, 20 nt, Human
aagcaggauuguagggcggu

SEQ ID NO: 1112320 - RNA, 25 nt, Human
aagcccgggagacacagugucagaa

SEQ ID NO: 1112321 - RNA, 22 nt, Human
aagccgacaagcccgggagaca

SEQ ID NO: 1112322 - RNA, 19 nt, Human
aagcucaggaacaaggcaa

SEQ ID NO: 1112323 - RNA, 24 nt, Human
aaucgcuugaacccaggaggugga

SEQ ID NO: 1112324 - RNA, 23 nt, Human
acagagcgagacucugucucaaa

SEQ ID NO: 1112325 - RNA, 24 nt, Human
accccgucucuacuaaaaauacaa

SEQ ID NO: 1112326 - RNA, 22 nt, Human
accucauggaugcagagaaaag

SEQ ID NO: 1112327 - RNA, 22 nt, Human
acgaggucaagagauugagacc

SEQ ID NO: 1112328 - RNA, 23 nt, Human
agaaaacaucaugacaauaucac

SEQ ID NO: 1112329 - RNA, 20 nt, Human
agaauuaaaaagaaacaaac

SEQ ID NO: 1112330 - RNA, 24 nt, Human
agaauuacaaggugagaucagccg

SEQ ID NO: 1112331 - RNA, 21 nt, Human
agccuggugacagagcgagac

SEQ ID NO: 1112332 - RNA, 23 nt, Human
agccuggugacagagcgagacuc

SEQ ID NO: 1112333 - RNA, 23 nt, Human
agcugggcgugguggcgcaugcc

SEQ ID NO: 1112334 - RNA, 24 nt, Human
aggcagccggauaacgaggucaag

SEQ ID NO: 1112335 - RNA, 24 nt, Human
aggcaugguggcucacgccuguaa

SEQ ID NO: 1112336 - RNA, 24 nt, Human
aggcugaggcauaagaaucgcuug

SEQ ID NO: 1112337 - RNA, 20 nt, Human
aggggcuccguagaggaggg

SEQ ID NO: 1112338 - RNA, 21 nt, Human
agguggagguugcagugagcc

SEQ ID NO: 1112339 - RNA, 24 nt, Human
agguggagguugcagugagccgag

SEQ ID NO: 1112340 - RNA, 21 nt, Human
auccuggucaacauggugaaa

SEQ ID NO: 1112341 - RNA, 18 nt, Human
auguggaaagcucuagag

SEQ ID NO: 1112342 - RNA, 18 nt, Human
auuacaguggcagcagcg

SEQ ID NO: 1112343 - RNA, 22 nt, Human
auucuuagaaugcaaggauauc

SEQ ID NO: 1112344 - RNA, 26 nt, Human
auuucuauuccacauaguguuggaag

SEQ ID NO: 1112345 - RNA, 20 nt, Human
caacauggugaaaccccguc

SEQ ID NO: 1112346 - RNA, 22 nt, Human
caacauggugaaaccccgucuc

SEQ ID NO: 1112347 - RNA, 24 nt, Human
caacauggugaaaccccgucucua

SEQ ID NO: 1112348 - RNA, 25 nt, Human
caagcacauuuacaauagcacugaa

SEQ ID NO: 1112349 - RNA, 19 nt, Human
caaggauaucuuaaaacau

SEQ ID NO: 1112350 - RNA, 18 nt, Human
caagugcaauuuauucuu

SEQ ID NO: 1112351 - RNA, 20 nt, Human
cacacaaaaaguauuacaac

SEQ ID NO: 1112352 - RNA, 24 nt, Human
caccacgaccaagugcaauuuauu

SEQ ID NO: 1112353 - RNA, 24 nt, Human
cacgccuguaaucccagcacuuug

SEQ ID NO: 1112354 - RNA, 20 nt, Human
cacuguacagccuggugaca

SEQ ID NO: 1112355 - RNA, 20 nt, Human
cacuguacagccuggugaca

SEQ ID NO: 1112356 - RNA, 24 nt, Human
cacuguacagccuggugacagagc

SEQ ID NO: 1112357 - RNA, 24 nt, Human
cagcacuuugggaggaggaggcag

SEQ ID NO: 1112358 - RNA, 24 nt, Human
cagcagcgucccugugcgaggucu

SEQ ID NO: 1112359 - RNA, 29 nt, Human
caggagguggagguugcagugacaacggu

SEQ ID NO: 1112360 - RNA, 24 nt, Human
caggagguggagguugcagugagc

SEQ ID NO: 1112361 - RNA, 19 nt, Human
cagugucagaauuacaagg

SEQ ID NO: 1112362 - RNA, 26 nt, Human
ccacacaaaaaguauuacaacuaaua

SEQ ID NO: 1112363 - RNA, 22 nt, Human
ccaggagguggagguugcagug

SEQ ID NO: 1112364 - RNA, 21 nt, Human
cccaggagguggagguugcag

SEQ ID NO: 1112365 - RNA, 22 nt, Human
cccgggagacacagugucagaa

SEQ ID NO: 1112366 - RNA, 19 nt, Human
cccgugaacagccaagcuc

SEQ ID NO: 1112367 - RNA, 21 nt, Human
ccgggagacacagugucagaa

SEQ ID NO: 1112368 - RNA, 22 nt, Human
ccuggucaacauggugaaaccc

SEQ ID NO: 1112369 - RNA, 23 nt, Human
ccuggucaacauggugaaacccc

SEQ ID NO: 1112370 - RNA, 24 nt, Human
ccuggucaacauggugaaaccccg

SEQ ID NO: 1112371 - RNA, 19 nt, Human
ccuggucugcgagaaauca

SEQ ID NO: 1112372 - RNA, 21 nt, Human
ccuggugacagagcgagacuc

SEQ ID NO: 1112373 - RNA, 22 nt, Human
ccuguaaucccagcacuuuggg

SEQ ID NO: 1112374 - RNA, 21 nt, Human
ccuguagucccagauacuugg

SEQ ID NO: 1112375 - RNA, 22 nt, Human
cgcaguaaaauugcuccuccag

SEQ ID NO: 1112376 - RNA, 19 nt, Human
cuaacccaggugugggccc

SEQ ID NO: 1112377 - RNA, 22 nt, Human
cucacgccuguaaucccagcac

SEQ ID NO: 1112378 - RNA, 24 nt, Human
cucacgccuguaaucccagcacuu

SEQ ID NO: 1112379 - RNA, 18 nt, Human
cuucugcucuaagcucag

SEQ ID NO: 1112380 - RNA, 21 nt, Human
cuuugggaggaggaggcagcc

SEQ ID NO: 1112381 - RNA, 24 nt, Human
gacagagcgagacucugucucaaa

SEQ ID NO: 1112382 - RNA, 21 nt, Human
gaccaagugcaauuuauucuu

SEQ ID NO: 1112383 - RNA, 23 nt, Human
gagaucagccgcccggccaagcu

SEQ ID NO: 1112384 - RNA, 21 nt, Human
gaggggcuccguagaggaggg

SEQ ID NO: 1112385 - RNA, 21 nt, Human
gagguugcagugagccgagac

SEQ ID NO: 1112386 - RNA, 18 nt, Human
gauaacgaggucaagaga

SEQ ID NO: 1112387 - RNA, 22 nt, Human
gcaaaaaauucuauuuugcaga

SEQ ID NO: 1112388 - RNA, 20 nt, Human
gcucuaagcucaggaacaag

SEQ ID NO: 1112389 - RNA, 18 nt, Human
ggagguugcagugagccg

SEQ ID NO: 1112390 - RNA, 20 nt, Human
ggagguugcagugagccgag

SEQ ID NO: 1112391 - RNA, 22 nt, Human
ggagguugcagugagccgagac

SEQ ID NO: 1112392 - RNA, 24 nt, Human
ggagguugcagugagccgagacag

SEQ ID NO: 1112393 - RNA, 19 nt, Human
ggccacggcacuguacagc

SEQ ID NO: 1112394 - RNA, 21 nt, Human
ggcucacgccuguaaucccag

SEQ ID NO: 1112395 - RNA, 20 nt, Human
gggaguaacaaaaaaagcaa

SEQ ID NO: 1112396 - RNA, 22 nt, Human
gggugaaagacaaaaagcuucu

SEQ ID NO: 1112397 - RNA, 24 nt, Human
gguggcucacgccuguaaucccag

SEQ ID NO: 1112398 - RNA, 30 nt, Human
guagauguggccaggcaugguggcucacgg

SEQ ID NO: 1112399 - RNA, 24 nt, Human
gugacagagcgagacucugucuca

SEQ ID NO: 1112400 - RNA, 23 nt, Human
guggcucacgccuguaaucccag

SEQ ID NO: 1112401 - RNA, 23 nt, Human
guugcagugagccgagacaggcc

SEQ ID NO: 1112402 - RNA, 22 nt, Human
uaaaaaaccacaucaaacaaug

SEQ ID NO: 1112403 - RNA, 20 nt, Human
uaaaaagaaacaaacuaucc

SEQ ID NO: 1112404 - RNA, 24 nt, Human
uaaaauauaaguagaaaacaucau

SEQ ID NO: 1112405 - RNA, 18 nt, Human
uaacaaaaaaagcaaaaa

SEQ ID NO: 1112406 - RNA, 22 nt, Human
uacaaucucagcacaaagcagg

SEQ ID NO: 1112407 - RNA, 19 nt, Human
uacacauuaacaaaauaaa

SEQ ID NO: 1112408 - RNA, 23 nt, Human
uacagccuggugacagagcgaga

SEQ ID NO: 1112409 - RNA, 23 nt, Human
uagcacugaaaagaauaaaauac

SEQ ID NO: 1112410 - RNA, 22 nt, Human
uauccaaauuggaaauguagag

SEQ ID NO: 1112411 - RNA, 18 nt, Human
ucagcugggcgugguggc

SEQ ID NO: 1112412 - RNA, 24 nt, Human
ucagcugggcgugguggcgcaugc

SEQ ID NO: 1112413 - RNA, 20 nt, Human
uccacacaaaaaguauuaca

SEQ ID NO: 1112414 - RNA, 20 nt, Human
uccacacaaaaaguauuaca

SEQ ID NO: 1112415 - RNA, 18 nt, Human
uccacauaguguuggaag

SEQ ID NO: 1112416 - RNA, 21 nt, Human
uccacauaguguuggaaguug

SEQ ID NO: 1112417 - RNA, 21 nt, Human
uccagacagauguccacggag

SEQ ID NO: 1112418 - RNA, 19 nt, Human
ucccugugcgaggucuaac

SEQ ID NO: 1112419 - RNA, 18 nt, Human
uccugcugcguccgccuu

SEQ ID NO: 1112420 - RNA, 24 nt, Human
ucgcuugaacccaggagguggagg

SEQ ID NO: 1112421 - RNA, 23 nt, Human
ucuaagcucaggaacaaggcaaa

SEQ ID NO: 1112422 - RNA, 21 nt, Human
ucucuacuaaaaauacaaaaa

SEQ ID NO: 1112423 - RNA, 24 nt, Human
ugaauuuuuuaacauauaaaaauu

SEQ ID NO: 1112424 - RNA, 18 nt, Human
ugacaauaucacaaauau

SEQ ID NO: 1112425 - RNA, 24 nt, Human
ugagaccauccuggucaacauggu

SEQ ID NO: 1112426 - RNA, 20 nt, Human
ugagccgagacaggccacgg

SEQ ID NO: 1112427 - RNA, 24 nt, Human
ugaggcauaagaaucgcuugaacc

SEQ ID NO: 1112428 - RNA, 24 nt, Human
ugccuguagucccagauacuuggg

SEQ ID NO: 1112429 - RNA, 24 nt, Human
uggcucacgccuguaaucccagca

SEQ ID NO: 1112430 - RNA, 23 nt, Human
ugggaggcugaggcauaagaauc

SEQ ID NO: 1112431 - RNA, 27 nt, Human
ugggaggcugaggcauaagaaucgcuu

SEQ ID NO: 1112432 - RNA, 20 nt, Human
ugggaugcggggagcuguag

SEQ ID NO: 1112433 - RNA, 18 nt, Human
ugggcccugcagccagcc

SEQ ID NO: 1112434 - RNA, 24 nt, Human
ugguggcgcaugccuguaguccca

SEQ ID NO: 1112435 - RNA, 24 nt, Human
ugguggcucacgccuguaauccca

SEQ ID NO: 1112436 - RNA, 22 nt, Human
uguguacacauuaacaaaauaa

SEQ ID NO: 1112437 - RNA, 23 nt, Human
uucagggugaaaacacucaaaaa

SEQ ID NO: 1112438 - RNA, 24 nt, Human
uugaacccaggagguggagguugc

SEQ ID NO: 1112439 - RNA, 19 nt, Human
uugcagugagccgagacag

SEQ ID NO: 1112440 - RNA, 24 nt, Human
uugcagugagccgagacaggccac

SEQ ID NO: 1112441 - RNA, 24 nt, Human
uugggaggcugaggcauaagaauc

SEQ ID NO: 1112442 - RNA, 19 nt, Human
uuguagggcggugcggauc

SEQ ID NO: 1112443 - RNA, 22 nt, Human
uuuuauguggaaagcucuagag

SEQ ID NO: 1112444 - RNA, 19 nt, Human
aagcaacaaaaccucuuca

SEQ ID NO: 1112445 - RNA, 24 nt, Human
aaucauaggauauugugaaaaaga

SEQ ID NO: 1112446 - RNA, 24 nt, Human
agcaaaugcaguguaucgcaaaau

SEQ ID NO: 1112447 - RNA, 20 nt, Human
cacuguacaagcaacaaaac

SEQ ID NO: 1112448 - RNA, 22 nt, Human
ccucggccacccgcgccgggag

SEQ ID NO: 1112449 - RNA, 21 nt, Human
cgccucggccacccgcgccgg

SEQ ID NO: 1112450 - RNA, 25 nt, Human
cucuucacuuccaguuauuuccaau

SEQ ID NO: 1112451 - RNA, 21 nt, Human
cugacacuguacaagcaacaa

SEQ ID NO: 1112452 - RNA, 23 nt, Human
cugacacuguacaagcaacaaaa

SEQ ID NO: 1112453 - RNA, 22 nt, Human
gugaaaaagaugcauauuauau

SEQ ID NO: 1112454 - RNA, 19 nt, Human
uaaaaauagcaccagcaaa

SEQ ID NO: 1112455 - RNA, 23 nt, Human
uaacaguaguuuuuuucccccau

SEQ ID NO: 1112456 - RNA, 30 nt, Human; identical to SEQ ID NO: 178135

SEQ ID NO: 1112457 - RNA, 21 nt, Human
ucgguaauauuaaaaguuucu

SEQ ID NO: 1112458 - RNA, 24 nt, Human
ucuauccaccacuaauuuaagaca

SEQ ID NO: 1112459 - RNA, 23 nt, Human
ucuuucauuagcaguguuaacag

SEQ ID NO: 1112460 - RNA, 20 nt, Human
ugacacuguacaagcaacaa

SEQ ID NO: 1112461 - RNA, 20 nt, Human
uuaaaggcauuuucuuucau

SEQ ID NO: 1112462 - RNA, 22 nt, Human
uuaagacaacucugcuggcuug

SEQ ID NO: 1112463 - RNA, 28 nt, Human
uuagcaguguuaacaguaguuuuuuucu

SEQ ID NO: 1112464 - RNA, 19 nt, Human
aaaaaggaggagaagaaga

SEQ ID NO: 1112465 - RNA, 22 nt, Human
aaaaauaguccuuagcaugcaa

SEQ ID NO: 1112466 - RNA, 20 nt, Human
aaaaggaggaggaaagagaa

SEQ ID NO: 1112467 - RNA, 24 nt, Human
aaaaggaggcuaaguccgauagaa

SEQ ID NO: 1112468 - RNA, 23 nt, Human
aaacggguucacacauuggagcu

SEQ ID NO: 1112469 - RNA, 29 nt, Human
aaacuggaggcagaaaauuaagggacccc

SEQ ID NO: 1112470 - RNA, 20 nt, Human
aacagagcaagacuccaccu

SEQ ID NO: 1112471 - RNA, 24 nt, Human
aacugaucuuccaaacagaaggcc

SEQ ID NO: 1112472 - RNA, 24 nt, Human
aagaaaagaaugaggaaaagagaa

SEQ ID NO: 1112473 - RNA, 23 nt, Human
aagaaaaggaggaggaaagagaa

SEQ ID NO: 1112474 - RNA, 19 nt, Human
aagaagaaaagaaugagga

SEQ ID NO: 1112475 - RNA, 19 nt, Human
aagaagagaggaaguggag

SEQ ID NO: 1112476 - RNA, 19 nt, Human
aagauaaaauggcuuaaaa

SEQ ID NO: 1112477 - RNA, 21 nt, Human
aagcaagauuuauacccugua

SEQ ID NO: 1112478 - RNA, 21 nt, Human
aagcaccagaaugcacagggc

SEQ ID NO: 1112479 - RNA, 25 nt, Human
aagcagauauuuggauauuuaugga

SEQ ID NO: 1112480 - RNA, 23 nt, Human
aaggaagaggagaagacgaagag

SEQ ID NO: 1112481 - RNA, 25 nt, Human
aaggaagaggagaagacgaagagaa

SEQ ID NO: 1112482 - RNA, 18 nt, Human
aaggaggaaaggaagaga

SEQ ID NO: 1112483 - RNA, 18 nt, Human
aaggaggagaagaagaaa

SEQ ID NO: 1112484 - RNA, 18 nt, Human
aagugaaaauauagaguu

SEQ ID NO: 1112485 - RNA, 24 nt, Human
aauugcuugaaaccgggaggcaga

SEQ ID NO: 1112486 - RNA, 19 nt, Human
acaaggaagaggagaagac

SEQ ID NO: 1112487 - RNA, 25 nt, Human
acagagcaagauuauuucucauaga

SEQ ID NO: 1112488 - RNA, 27 nt, Human
acagaggaaaauacacaagccuccuca

SEQ ID NO: 1112489 - RNA, 21 nt, Human
acagcagacagacuugauaga

SEQ ID NO: 1112490 - RNA, 18 nt, Human
acaugaugguauucucca

SEQ ID NO: 1112491 - RNA, 23 nt, Human
accaauguggugaaaccugucuc

SEQ ID NO: 1112492 - RNA, 22 nt, Human
accacaaagguugcugcagaga

SEQ ID NO: 1112493 - RNA, 23 nt, Human
accagaaugcacagggcacucug

SEQ ID NO: 1112494 - RNA, 26 nt, Human
accuaccuuaucuucuggguaucccu

SEQ ID NO: 1112495 - RNA, 23 nt, Human
accugcauccuggcauccuccau

SEQ ID NO: 1112496 - RNA, 18 nt, Human
accuuuucaaccucaggg

SEQ ID NO: 1112497 - RNA, 18 nt, Human
acguguugagaccccguc

SEQ ID NO: 1112498 - RNA, 22 nt, Human
acucaugccacuagugaaacaa

SEQ ID NO: 1112499 - RNA, 24 nt, Human
acugcacaccagccuggauaacag

SEQ ID NO: 1112500 - RNA, 26 nt, Human
acugcacaccagccuggauaacagag

SEQ ID NO: 1112501 - RNA, 19 nt, Human
acugcacugcagccuaggu

SEQ ID NO: 1112502 - RNA, 21 nt, Human
acugcacugcagccuagguga

SEQ ID NO: 1112503 - RNA, 24 nt, Human
acugcacugcagccuaggugacag

SEQ ID NO: 1112504 - RNA, 22 nt, Human
agaaaaaaggaggagaagaaga

SEQ ID NO: 1112505 - RNA, 18 nt, Human
agaaaaagaggaaaggag

SEQ ID NO: 1112506 - RNA, 23 nt, Human
agaaaagaaugaggaaaagagaa

SEQ ID NO: 1112507 - RNA, 19 nt, Human
agaaacuggaggcagaaaa

SEQ ID NO: 1112508 - RNA, 23 nt, Human
agaagaaaaggaggaggaaagag

SEQ ID NO: 1112509 - RNA, 18 nt, Human
agaagaagaaaagaauga

SEQ ID NO: 1112510 - RNA, 27 nt, Human
agaagaagaaaagaaugaggaaaagag

SEQ ID NO: 1112511 - RNA, 22 nt, Human
agaagagaaaaugagaagaaga

SEQ ID NO: 1112512 - RNA, 18 nt, Human
agaagagaagaaaaggag

SEQ ID NO: 1112513 - RNA, 22 nt, Human
agagaaacuggaggcagaaaau

SEQ ID NO: 1112514 - RNA, 21 nt, Human
agagaacaggcauugggcacc

SEQ ID NO: 1112515 - RNA, 21 nt, Human
agagaagaaaaggaggaggaa

SEQ ID NO: 1112516 - RNA, 21 nt, Human
agagaaggaguaggaguggag

SEQ ID NO: 1112517 - RNA, 26 nt, Human
agagaggaaguggagaaaagggaccc

SEQ ID NO: 1112518 - RNA, 19 nt, Human
agagccugcagugagccaa

SEQ ID NO: 1112519 - RNA, 24 nt, Human
agagccugcagugagccaagauug

SEQ ID NO: 1112520 - RNA, 19 nt, Human
agaggaaaggaggaaagga

SEQ ID NO: 1112521 - RNA, 23 nt, Human
agaggaaaggaggaaaggaagag

SEQ ID NO: 1112522 - RNA, 26 nt, Human
agaggaaguggagaaaaaaaggagga

SEQ ID NO: 1112523 - RNA, 20 nt, Human
agaggaggaggagaggauga

SEQ ID NO: 1112524 - RNA, 19 nt, Human
agaguucuuacaaucugcu

SEQ ID NO: 1112525 - RNA, 23 nt, Human
agcaagauuauuucucauagaau

SEQ ID NO: 1112526 - RNA, 21 nt, Human
agcaccaaaaucuuuuccacc

SEQ ID NO: 1112527 - RNA, 18 nt, Human
agcauucuuuuuccuucu

SEQ ID NO: 1112528 - RNA, 21 nt, Human
agcccagaccacuuugggggc

SEQ ID NO: 1112529 - RNA, 21 nt, Human
agcccuuucuuuucuggaauu

SEQ ID NO: 1112530 - RNA, 23 nt, Human
agccugaccaauguggugaaacc

SEQ ID NO: 1112531 - RNA, 24 nt, Human
agccuggauaacagagcaagacuc

SEQ ID NO: 1112532 - RNA, 23 nt, Human
agcuacuugggaggcugaggcag

SEQ ID NO: 1112533 - RNA, 23 nt, Human
agcuggacgugguggugggugcc

SEQ ID NO: 1112534 - RNA, 25 nt, Human
aggaaagagaagaacuagaagagaa

SEQ ID NO: 1112535 - RNA, 18 nt, Human
aggaagagaaggaggagg

SEQ ID NO: 1112536 - RNA, 19 nt, Human
aggaagagaaggaggagga

SEQ ID NO: 1112537 - RNA, 24 nt, Human
aggaagaggagaagacgaagagaa

SEQ ID NO: 1112538 - RNA, 20 nt, Human
aggacagccaucaguaaugu

SEQ ID NO: 1112539 - RNA, 18 nt, Human
aggagaaaagggaagcua

SEQ ID NO: 1112540 - RNA, 18 nt, Human
aggagaagaagaaaagaa

SEQ ID NO: 1112541 - RNA, 24 nt, Human
aggagaagaagaaaagaaugagga

SEQ ID NO: 1112542 - RNA, 20 nt, Human
aggagaaggaggaguagagg

SEQ ID NO: 1112543 - RNA, 21 nt, Human
aggaggaaagagaagaacuag

SEQ ID NO: 1112544 - RNA, 25 nt, Human
aggaggaaagagaagaacuagaaga

SEQ ID NO: 1112545 - RNA, 19 nt, Human
aggaggagaagagaagaaa

SEQ ID NO: 1112546 - RNA, 18 nt, Human
aggaggagaggaugagaa

SEQ ID NO: 1112547 - RNA, 24 nt, Human
aggaggaggggacaaggaagagga

SEQ ID NO: 1112548 - RNA, 18 nt, Human
aggaugagaaaaagagga

SEQ ID NO: 1112549 - RNA, 21 nt, Human
aggaugagaaaaagaggaaag

SEQ ID NO: 1112550 - RNA, 21 nt, Human
aggcagaaaauuaacucaaga

SEQ ID NO: 1112551 - RNA, 19 nt, Human
aggcagagccugcagugag

SEQ ID NO: 1112552 - RNA, 24 nt, Human
aggcagagccugcagugagccaag

SEQ ID NO: 1112553 - RNA, 18 nt, Human
aggcaggagaauugcuug

SEQ ID NO: 1112554 - RNA, 24 nt, Human
aggcaggagaauugcuugaaaccg

SEQ ID NO: 1112555 - RNA, 26 nt, Human
aggcaggcggcucaccugaggucagg

SEQ ID NO: 1112556 - RNA, 24 nt, Human
aggcauggugucuuaugccuguaa

SEQ ID NO: 1112557 - RNA, 23 nt, Human
aggccaaggcaggcggcucaccu

SEQ ID NO: 1112558 - RNA, 21 nt, Human
aggcugaggcaggagaauugc

SEQ ID NO: 1112559 - RNA, 24 nt, Human
aggcugaggcaggagaauugcuug

SEQ ID NO: 1112560 - RNA, 21 nt, Human
agggagaaaaaaggaggagaa

SEQ ID NO: 1112561 - RNA, 22 nt, Human
agggugagcgacuuguagugug

SEQ ID NO: 1112562 - RNA, 24 nt, Human
aggugugaugggccacgccuguag

SEQ ID NO: 1112563 - RNA, 20 nt, Human
aguaaaaaaaaaaaugggaa

SEQ ID NO: 1112564 - RNA, 25 nt, Human
auaaaauggcuuaaaaaaaucuauu

SEQ ID NO: 1112565 - RNA, 19 nt, Human
auagauggggguaaaaguu

SEQ ID NO: 1112566 - RNA, 25 nt, Human
auauauauguguauauauauaugua

SEQ ID NO: 1112567 - RNA, 19 nt, Human
auauauguguauauauaua

SEQ ID NO: 1112568 - RNA, 19 nt, Human
auauguguauauauauaug

SEQ ID NO: 1112569 - RNA, 18 nt, Human
aucaguuacauaaguaca

SEQ ID NO: 1112570 - RNA, 21 nt, Human
aucauacuacuuuuuggccca

SEQ ID NO: 1112571 - RNA, 23 nt, Human
auccaaucagcaagccucucuua

SEQ ID NO: 1112572 - RNA, 21 nt, Human
auccccaucccucucagccag

SEQ ID NO: 1112573 - RNA, 20 nt, Human
augccacuagugaaacaaaa

SEQ ID NO: 1112574 - RNA, 18 nt, Human
auuccugucauucaccuc

SEQ ID NO: 1112575 - RNA, 24 nt, Human
auuguaucacugcacaccagccug

SEQ ID NO: 1112576 - RNA, 19 nt, Human
auuucucauagaauauauc

SEQ ID NO: 1112577 - RNA, 24 nt, Human
caaaacucuaaauaaguagagaaa

SEQ ID NO: 1112578 - RNA, 19 nt, Human
caaagcuuuccagaguucu

SEQ ID NO: 1112579 - RNA, 19 nt, Human
caaauucagagaaacacaa

SEQ ID NO: 1112580 - RNA, 24 nt, Human
caaggcaggcggcucaccugaggu

SEQ ID NO: 1112581 - RNA, 26 nt, Human
caaggcaggcggcucaccugagguca

SEQ ID NO: 1112582 - RNA, 21 nt, Human
caaugaggcaccaccauccac

SEQ ID NO: 1112583 - RNA, 23 nt, Human
caauguggugaaaccugucucua

SEQ ID NO: 1112584 - RNA, 24 nt, Human
cacaaaucaaauucagagaaacac

SEQ ID NO: 1112585 - RNA, 23 nt, Human
cacaccagccuggauaacagagc

SEQ ID NO: 1112586 - RNA, 23 nt, Human
cacaguaagagaaggaguaggag

SEQ ID NO: 1112587 - RNA, 23 nt, Human
caccaaccaugcaauugugcuag

SEQ ID NO: 1112588 - RNA, 22 nt, Human
caccaaugggaugcuuacaguc

SEQ ID NO: 1112589 - RNA, 21 nt, Human
caccagccuggauaacagagc

SEQ ID NO: 1112590 - RNA, 18 nt, Human
cacccauaaugcaaacuu

SEQ ID NO: 1112591 - RNA, 21 nt, Human
cacgcagcccuuucuuuucug

SEQ ID NO: 1112592 - RNA, 18 nt, Human
cacgccuguagucccagc

SEQ ID NO: 1112593 - RNA, 18 nt, Human
cacugcacaccagccugg

SEQ ID NO: 1112594 - RNA, 19 nt, Human
cacugcacaccagccugga

SEQ ID NO: 1112595 - RNA, 20 nt, Human
cacugcacaccagccuggau

SEQ ID NO: 1112596 - RNA, 24 nt, Human
cacugcacaccagccuggauaaca

SEQ ID NO: 1112597 - RNA, 20 nt, Human
cacugcacugcagccuaggu

SEQ ID NO: 1112598 - RNA, 24 nt, Human
cacugcacugcagccuaggugaca

SEQ ID NO: 1112599 - RNA, 23 nt, Human
cacugcagccuaggugacagagc

SEQ ID NO: 1112600 - RNA, 23 nt, Human
cagacacuguacuucccccauuu

SEQ ID NO: 1112601 - RNA, 21 nt, Human
cagagcaagacuccaccucuc

SEQ ID NO: 1112602 - RNA, 20 nt, Human
cagcaggguggaagauaaac

SEQ ID NO: 1112603 - RNA, 19 nt, Human
cagcaguagagagaaacug

SEQ ID NO: 1112604 - RNA, 22 nt, Human
cagcaguagagagaaacuggag

SEQ ID NO: 1112605 - RNA, 19 nt, Human
cagcgcugaagagggugcc

SEQ ID NO: 1112606 - RNA, 24 nt, Human
caggcggcucaccugaggucagga

SEQ ID NO: 1112607 - RNA, 20 nt, Human
caguaauguuccuggccuag

SEQ ID NO: 1112608 - RNA, 26 nt, Human
caguagagagaaacuggaggcaguac

SEQ ID NO: 1112609 - RNA, 18 nt, Human
cagugaccggagcauggu

SEQ ID NO: 1112610 - RNA, 23 nt, Human
caguuaacacugauagaagugac

SEQ ID NO: 1112611 - RNA, 22 nt, Human
cauauguauauacguauauaua

SEQ ID NO: 1112612 - RNA, 18 nt, Human
caucaguaauguuccugg

SEQ ID NO: 1112613 - RNA, 22 nt, Human
caucauacuacuuuuuggccca

SEQ ID NO: 1112614 - RNA, 18 nt, Human
cauggacagaagaccugg

SEQ ID NO: 1112615 - RNA, 18 nt, Human
cauggcaaucaccuucca

SEQ ID NO: 1112616 - RNA, 22 nt, Human
cauuagagagcuugcgcccagg

SEQ ID NO: 1112617 - RNA, 22 nt, Human
cauugcuuaauccagcauucca

SEQ ID NO: 1112618 - RNA, 23 nt, Human
ccacgccuguagucccagcuacc

SEQ ID NO: 1112619 - RNA, 18 nt, Human
ccacucucucaagaggaa

SEQ ID NO: 1112620 - RNA, 20 nt, Human
ccacugcacugcagccuagg

SEQ ID NO: 1112621 - RNA, 20 nt, Human
ccacugcacugcagccuagg

SEQ ID NO: 1112622 - RNA, 21 nt, Human
ccacugcacugcagccuaggu

SEQ ID NO: 1112623 - RNA, 24 nt, Human
ccacugcacugcagccuaggugac

SEQ ID NO: 1112624 - RNA, 22 nt, Human
cccagguaugggaccacaaagg

SEQ ID NO: 1112625 - RNA, 24 nt, Human
ccuaaaacaguacacaugauucuu

SEQ ID NO: 1112626 - RNA, 21 nt, Human
ccugaccaauguggugaaacc

SEQ ID NO: 1112627 - RNA, 18 nt, Human
ccugccuucucccuugcc

SEQ ID NO: 1112628 - RNA, 22 nt, Human
ccuggauaacagagcaagacuc

SEQ ID NO: 1112629 - RNA, 24 nt, Human
ccuguaaucggagcuacuugggag

SEQ ID NO: 1112630 - RNA, 22 nt, Human
ccuguagucccagcuaccucgg

SEQ ID NO: 1112631 - RNA, 22 nt, Human
ccugucucuacugaaaauacaa

SEQ ID NO: 1112632 - RNA, 20 nt, Human
ccuucuaucacacauccuuc

SEQ ID NO: 1112633 - RNA, 24 nt, Human
cgccuguagucccagcuaccucgg

SEQ ID NO: 1112634 - RNA, 25 nt, Human
cgccuguagucccagcuaccucggg

SEQ ID NO: 1112635 - RNA, 24 nt, Human
cggcucaccugaggucaggaguuc

SEQ ID NO: 1112636 - RNA, 24 nt, Human
cgggagcagaagaaggaggaggag

SEQ ID NO: 1112637 - RNA, 23 nt, Human
cguauauacauacauauguauag

SEQ ID NO: 1112638 - RNA, 18 nt, Human
cguauauauauauauaua

SEQ ID NO: 1112639 - RNA, 23 nt, Human
cucaagaaacagcgcucuaugaa

SEQ ID NO: 1112640 - RNA, 19 nt, Human
cucaagaggacaugcaugg

SEQ ID NO: 1112641 - RNA, 24 nt, Human
cucaugccacuagugaaacaaaac

SEQ ID NO: 1112642 - RNA, 23 nt, Human
cucccauacacaaaggccaaacu

SEQ ID NO: 1112643 - RNA, 22 nt, Human
cucucccauacacaaaggccaa

SEQ ID NO: 1112644 - RNA, 22 nt, Human
cugcagugagccaagauuguau

SEQ ID NO: 1112645 - RNA, 20 nt, Human
cugcuuacugcacgcagccc

SEQ ID NO: 1112646 - RNA, 23 nt, Human
cuggcagcaggguggaagauaaa

SEQ ID NO: 1112647 - RNA, 22 nt, Human
cugggugcuguuuggcauggcc

SEQ ID NO: 1112648 - RNA, 20 nt, Human
cugugcauuuauuuuuccuu

SEQ ID NO: 1112649 - RNA, 25 nt, Human
cuuacaaucugcucuagccccuauc

SEQ ID NO: 1112650 - RNA, 23 nt, Human
cuuaugccuguaaucccagcauu

SEQ ID NO: 1112651 - RNA, 21 nt, Human
gaaagagaagaacuagaagag

SEQ ID NO: 1112652 - RNA, 18 nt, Human
gaagaggacgagaggagg

SEQ ID NO: 1112653 - RNA, 25 nt, Human
gaaguggagaaaaaaaggagagggg

SEQ ID NO: 1112654 - RNA, 18 nt, Human
gaauuuagucuccucauc

SEQ ID NO: 1112655 - RNA, 20 nt, Human
gacgugguggugggugccug

SEQ ID NO: 1112656 - RNA, 23 nt, Human
gacgugguggugggugccuguaa

SEQ ID NO: 1112657 - RNA, 19 nt, Human
gagaagaaaaggaggagga

SEQ ID NO: 1112658 - RNA, 22 nt, Human
gagaagaagaaaagaaugagga

SEQ ID NO: 1112659 - RNA, 21 nt, Human
gagaagaggacgagaggagga

SEQ ID NO: 1112660 - RNA, 23 nt, Human
gagaauugcuugaaaccgggagg

SEQ ID NO: 1112661 - RNA, 21 nt, Human
gagaggaggagaaucgggagc

SEQ ID NO: 1112662 - RNA, 18 nt, Human
gagccugcagugagccaa

SEQ ID NO: 1112663 - RNA, 24 nt, Human
gaggaaagagaagaacuagaagag

SEQ ID NO: 1112664 - RNA, 20 nt, Human
gaggagaaggaggaguagag

SEQ ID NO: 1112665 - RNA, 23 nt, Human
gaggagaaggaggaguagaggag

SEQ ID NO: 1112666 - RNA, 21 nt, Human
gaugagaaaaagaggaaagga

SEQ ID NO: 1112667 - RNA, 24 nt, Human
gaugggccacgccuguagucccag

SEQ ID NO: 1112668 - RNA, 28 nt, Human
gcacaguaagagaaggaguaggagugga

SEQ ID NO: 1112669 - RNA, 27 nt, Human
gcaccaaaaucuuuuccaaccggaggg

SEQ ID NO: 1112670 - RNA, 19 nt, Human
gcaguagagagaaacugga

SEQ ID NO: 1112671 - RNA, 23 nt, Human
gcccagguaugggaccacaaagg

SEQ ID NO: 1112672 - RNA, 21 nt, Human
gcuauaaaauccaagaucagg

SEQ ID NO: 1112673 - RNA, 24 nt, Human
gcuuacugcacgcagcccuuucuu

SEQ ID NO: 1112674 - RNA, 24 nt, Human
gcuucagaaaaauuguaagugaaa

SEQ ID NO: 1112675 - RNA, 19 nt, Human
ggaaaguggaagggcagaa

SEQ ID NO: 1112676 - RNA, 23 nt, Human
ggacagccaucaguaauguuccu

SEQ ID NO: 1112677 - RNA, 27 nt, Human
ggacuaaauacagaucuguaaaaguaa

SEQ ID NO: 1112678 - RNA, 20 nt, Human
ggagaaaaaaaggagagggg

SEQ ID NO: 1112679 - RNA, 19 nt, Human
ggagaggagaggagaaaag

SEQ ID NO: 1112680 - RNA, 18 nt, Human
ggagaggaggagaaucgg

SEQ ID NO: 1112681 - RNA, 19 nt, Human
ggagagggggacaacagga

SEQ ID NO: 1112682 - RNA, 20 nt, Human
ggagcagaagaaggaggagg

SEQ ID NO: 1112683 - RNA, 25 nt, Human
ggaggaaagagaagaacuagaagag

SEQ ID NO: 1112684 - RNA, 29 nt, Human
ggaggaggagaagagaagaaaaggaggag

SEQ ID NO: 1112685 - RNA, 20 nt, Human
ggaggaggagaaggaggagu

SEQ ID NO: 1112686 - RNA, 25 nt, Human
ggaugagaaaaagaggaaaggagga

SEQ ID NO: 1112687 - RNA, 22 nt, Human
ggcaaucaccuuccagaaggaa

SEQ ID NO: 1112688 - RNA, 20 nt, Human
ggcauccuccauuccucucc

SEQ ID NO: 1112689 - RNA, 22 nt, Human
ggcucaccugaggucaggaguu

SEQ ID NO: 1112690 - RNA, 23 nt, Human
ggcucaccugaggucaggaguuc

SEQ ID NO: 1112691 - RNA, 23 nt, Human
gggagcccagaccacuuuggggg

SEQ ID NO: 1112692 - RNA, 25 nt, Human
gggcaccuggcaacugacaccaaug

SEQ ID NO: 1112693 - RNA, 18 nt, Human
gggguaaaaguuauuagg

SEQ ID NO: 1112694 - RNA, 24 nt, Human
ggugucuuaugccuguaaucccag

SEQ ID NO: 1112695 - RNA, 19 nt, Human
guaaaaaaaaaaaugggaa

SEQ ID NO: 1112696 - RNA, 18 nt, Human
guauauauauauauauac

SEQ ID NO: 1112697 - RNA, 19 nt, Human
guauauauauauguauaca

SEQ ID NO: 1112698 - RNA, 22 nt, Human
guauugcauucaauuuuuaaaa

SEQ ID NO: 1112699 - RNA, 21 nt, Human
uaaaaggaggcuaaguccgau

SEQ ID NO: 1112700 - RNA, 19 nt, Human
uaaaauaaauaaaucaaca

SEQ ID NO: 1112701 - RNA, 31 nt, Human
uaaaauaaauaaaucaacauguaguagucaa

SEQ ID NO: 1112702 - RNA, 23 nt, Human
uaacacugauagaagugaccugu

SEQ ID NO: 1112703 - RNA, 26 nt, Human
uaacagagcaagacuccaccucucaa

SEQ ID NO: 1112704 - RNA, 24 nt, Human
uaagguaagugggagcccagacca

SEQ ID NO: 1112705 - RNA, 18 nt, Human
uaaguuagaaucuuaugu

SEQ ID NO: 1112706 - RNA, 24 nt, Human
uacauauagauuuaaccaaccaaa

SEQ ID NO: 1112707 - RNA, 24 nt, Human
uacccuguagguuucugguauugc

SEQ ID NO: 1112708 - RNA, 28 nt, Human
uacguauauacauacauauguauauacg

SEQ ID NO: 1112709 - RNA, 20 nt, Human
uacguauauauauauauaua

SEQ ID NO: 1112710 - RNA, 23 nt, Human
uacugaaaauacaaaaauuagcu

SEQ ID NO: 1112711 - RNA, 18 nt, Human
uagcauguaagcacuuau

SEQ ID NO: 1112712 - RNA, 21 nt, Human
uagcgcagcgcugaagagggu

SEQ ID NO: 1112713 - RNA, 18 nt, Human
uagcuggacgugguggug

SEQ ID NO: 1112714 - RNA, 21 nt, Human
uaggaggaaguagggagaagg

SEQ ID NO: 1112715 - RNA, 20 nt, Human
uaggcaacguguugagaccc

SEQ ID NO: 1112716 - RNA, 23 nt, Human
uaguaagaagagaggaaguggag

SEQ ID NO: 1112717 - RNA, 18 nt, Human
uaguaguuagaacaaugc

SEQ ID NO: 1112718 - RNA, 19 nt, Human
uauaaaauccaagaucagg

SEQ ID NO: 1112719 - RNA, 18 nt, Human
uauaaauauauaugugua

SEQ ID NO: 1112720 - RNA, 21 nt, Human
uauacauacauauguauauac

SEQ ID NO: 1112721 - RNA, 20 nt, Human
uauacauacguauauacaua

SEQ ID NO: 1112722 - RNA, 22 nt, Human
uauacauacguauauacauaca

SEQ ID NO: 1112723 - RNA, 19 nt, Human
uauacguauauauauauau

SEQ ID NO: 1112724 - RNA, 22 nt, Human
uauagauuuaaccaaccaaauc

SEQ ID NO: 1112725 - RNA, 24 nt, Human
uauauacauacauauguauauacg

SEQ ID NO: 1112726 - RNA, 18 nt, Human
uauauacguauauauaua

SEQ ID NO: 1112727 - RNA, 18 nt, Human
uauauacguauauauaua

SEQ ID NO: 1112728 - RNA, 18 nt, Human
uauauauauguauacaua

SEQ ID NO: 1112729 - RNA, 20 nt, Human
uauauauguguauauauaua

SEQ ID NO: 1112730 - RNA, 24 nt, Human
uauauguauacauacguauauaca

SEQ ID NO: 1112731 - RNA, 18 nt, Human
uauauguguauauauaua

SEQ ID NO: 1112732 - RNA, 24 nt, Human
uaugccuguaaucccagcauuuug

SEQ ID NO: 1112733 - RNA, 26 nt, Human
uauguacauugcacacacaucaagca

SEQ ID NO: 1112734 - RNA, 25 nt, Human
uauguguauauauauauguauacaa

SEQ ID NO: 1112735 - RNA, 22 nt, Human
ucaaaaccagccugaccaaugu

SEQ ID NO: 1112736 - RNA, 23 nt, Human
ucaccucauucagugucuuuucu

SEQ ID NO: 1112737 - RNA, 21 nt, Human
ucaccugaggucaggaguuca

SEQ ID NO: 1112738 - RNA, 22 nt, Human
ucaccugaggucaggaguucaa

SEQ ID NO: 1112739 - RNA, 18 nt, Human
ucacgcccagguauggga

SEQ ID NO: 1112740 - RNA, 20 nt, Human
ucacugcacaccagccugga

SEQ ID NO: 1112741 - RNA, 20 nt, Human
ucacugucuccuuuauugca

SEQ ID NO: 1112742 - RNA, 19 nt, Human
ucagccaggguagcuggcu

SEQ ID NO: 1112743 - RNA, 19 nt, Human
ucagugucuuuucuucuuc

SEQ ID NO: 1112744 - RNA, 20 nt, Human
ucaguucuuucuagcgcagc

SEQ ID NO: 1112745 - RNA, 19 nt, Human
ucaucauacuacuuuuugg

SEQ ID NO: 1112746 - RNA, 23 nt, Human
ucauccugccuucucccuugccu

SEQ ID NO: 1112747 - RNA, 24 nt, Human
ucccagaucauauaaauuaucacu

SEQ ID NO: 1112748 - RNA, 21 nt, Human
ucccuguauuauccccauccc

SEQ ID NO: 1112749 - RNA, 21 nt, Human
uccucaucauccugccuucuc

SEQ ID NO: 1112750 - RNA, 19 nt, Human
uccugccuucucccuugcc

SEQ ID NO: 1112751 - RNA, 24 nt, Human
uccuggcauccuccauuccucucc

SEQ ID NO: 1112752 - RNA, 20 nt, Human
ucuccaaaaucuucaaaaau

SEQ ID NO: 1112753 - RNA, 23 nt, Human
ucucuacugaaaauacaaaaauu

SEQ ID NO: 1112754 - RNA, 18 nt, Human
ucucucucauugugaucu

SEQ ID NO: 1112755 - RNA, 19 nt, Human
ucuggugugaggccugggg

SEQ ID NO: 1112756 - RNA, 24 nt, Human
ugaaaagggcggauaguuauguaa

SEQ ID NO: 1112757 - RNA, 23 nt, Human
ugaccaauguggugaaaccuguc

SEQ ID NO: 1112758 - RNA, 21 nt, Human
ugaccugcauccuggcauccu

SEQ ID NO: 1112759 - RNA, 20 nt, Human
ugagaagaagauaguaagaa

SEQ ID NO: 1112760 - RNA, 25 nt, Human
ugaggcaggagaauugcuugaaacc

SEQ ID NO: 1112761 - RNA, 23 nt, Human
ugaggucaggaguucaaaaccag

SEQ ID NO: 1112762 - RNA, 21 nt, Human
ugaggugagaggaucucuuga

SEQ ID NO: 1112763 - RNA, 24 nt, Human
ugaggugagaggaucucuugaggc

SEQ ID NO: 1112764 - RNA, 20 nt, Human
ugauagauggggguaaaagu

SEQ ID NO: 1112765 - RNA, 24 nt, Human
ugaugggccacgccuguaguccca

SEQ ID NO: 1112766 - RNA, 22 nt, Human
ugcaagcaggcauuagcaagca

SEQ ID NO: 1112767 - RNA, 25 nt, Human
ugcacaccagccuggauaacagagc

SEQ ID NO: 1112768 - RNA, 20 nt, Human
ugcacagggcacucugcagg

SEQ ID NO: 1112769 - RNA, 21 nt, Human
ugcaugacagaugugccaaag

SEQ ID NO: 1112770 - RNA, 23 nt, Human
ugccaaaguuguuaguuuauacc

SEQ ID NO: 1112771 - RNA, 24 nt, Human
ugccuguaaucggagcuacuuggg

SEQ ID NO: 1112772 - RNA, 18 nt, Human
ugcugggugcuguuuggc

SEQ ID NO: 1112773 - RNA, 20 nt, Human
uggaaaaaauauucuugagg

SEQ ID NO: 1112774 - RNA, 21 nt, Human
uggaaaguggaagggcagaac

SEQ ID NO: 1112775 - RNA, 20 nt, Human
uggaagggcagaacaaggcu

SEQ ID NO: 1112776 - RNA, 30 nt, Human
uggaauaaagagaauuuauguacaaagcaa

SEQ ID NO: 1112777 - RNA, 24 nt, Human
uggagaaaaaaaggagagggggaa

SEQ ID NO: 1112778 - RNA, 22 nt, Human
uggaggagugaagaaagaggag

SEQ ID NO: 1112779 - RNA, 23 nt, Human
uggcauggccaguggcacaguaa

SEQ ID NO: 1112780 - RNA, 24 nt, Human
uggccaguggcacaguaagagaag

SEQ ID NO: 1112781 - RNA, 22 nt, Human
uggcugacauccacucucucaa

SEQ ID NO: 1112782 - RNA, 19 nt, Human
ugggaggcugaggcaggag

SEQ ID NO: 1112783 - RNA, 22 nt, Human
ugggaggcugaggcaggagaau

SEQ ID NO: 1112784 - RNA, 21 nt, Human
ugggugcuguuuggcauggga

SEQ ID NO: 1112785 - RNA, 22 nt, Human
ugguaaagacagaaccuucaca

SEQ ID NO: 1112786 - RNA, 18 nt, Human
uggugaaaccugucucua

SEQ ID NO: 1112787 - RNA, 21 nt, Human
ugguggugggugccuguaauc

SEQ ID NO: 1112788 - RNA, 23 nt, Human
ugguggugggugccuguaaucgg

SEQ ID NO: 1112789 - RNA, 24 nt, Human
uggugucuuaugccuguaauccca

SEQ ID NO: 1112790 - RNA, 20 nt, Human
uguauacauacguauauaca

SEQ ID NO: 1112791 - RNA, 29 nt, Human
uguauacauacguauauacauacauaugg

SEQ ID NO: 1112792 - RNA, 18 nt, Human
uguauauauauauguaua

SEQ ID NO: 1112793 - RNA, 21 nt, Human
uguauauauauauguauacau

SEQ ID NO: 1112794 - RNA, 31 nt, Human
uguauauauauauguauacauacguauagug

SEQ ID NO: 1112795 - RNA, 22 nt, Human
uguauuauccccaucccucuca

SEQ ID NO: 1112796 - RNA, 24 nt, Human
ugucuuaugccuguaaucccagca

SEQ ID NO: 1112797 - RNA, 18 nt, Human
uguguauauauauaugua

SEQ ID NO: 1112798 - RNA, 19 nt, Human
uguguauauauauauguau

SEQ ID NO: 1112799 - RNA, 24 nt, Human
uguguauauauauauguauacaua

SEQ ID NO: 1112800 - RNA, 20 nt, Human
uuacugucacgaugcugcag

SEQ ID NO: 1112801 - RNA, 24 nt, Human
uuagcuggacgugguggugggugc

SEQ ID NO: 1112802 - RNA, 23 nt, Human
uucaaagcuuuccagaguucuua

SEQ ID NO: 1112803 - RNA, 24 nt, Human
uucaucauuccugucauucaccuc

SEQ ID NO: 1112804 - RNA, 20 nt, Human
uuccuugaccugcauccugg

SEQ ID NO: 1112805 - RNA, 19 nt, Human
uucucuuuaagcugagcca

SEQ ID NO: 1112806 - RNA, 18 nt, Human
uugcuugaaaccgggagg

SEQ ID NO: 1112807 - RNA, 23 nt, Human
uugggaggcugaggcaggagaau

SEQ ID NO: 1112808 - RNA, 22 nt, Human
uuguaagugaaaauauagaguu

SEQ ID NO: 1112809 - RNA, 23 nt, Human
uuguaucacugcacaccagccug

SEQ ID NO: 1112810 - RNA, 21 nt, Human
uugugcugggugcuguuuggc

SEQ ID NO: 1112811 - RNA, 20 nt, Human
uuuagaauuauuaaaggcca

SEQ ID NO: 1112812 - RNA, 22 nt, Human
aaaaaaaaagaaaaagaaaaaa

SEQ ID NO: 1112813 - RNA, 18 nt, Human
aaaaaagaaaaagaaaaa

SEQ ID NO: 1112814 - RNA, 18 nt, Human
aaaaagaaaaaagaaaaa

SEQ ID NO: 1112815 - RNA, 20 nt, Human
aaaaauaaauacuaaaggug

SEQ ID NO: 1112816 - RNA, 24 nt, Human
aaaagaaaaagaaaaaagaaaaag

SEQ ID NO: 1112817 - RNA, 20 nt, Human
aaaagaaaaagaaaaacuaa

SEQ ID NO: 1112818 - RNA, 23 nt, Human
aaacccuggcuccauuaaaaaua

SEQ ID NO: 1112819 - RNA, 24 nt, Human
aaagugcugggauuacaggcguga

SEQ ID NO: 1112820 - RNA, 19 nt, Human
aacaaaaguaaauuuaaau

SEQ ID NO: 1112821 - RNA, 20 nt, Human
aacaagaucuguguuacaag

SEQ ID NO: 1112822 - RNA, 22 nt, Human
aacaccuguaauuccagcauug

SEQ ID NO: 1112823 - RNA, 22 nt, Human
aacauggcaaaacccuggcucc

SEQ ID NO: 1112824 - RNA, 19 nt, Human
aagaaaaagaaaaaagaaa

SEQ ID NO: 1112825 - RNA, 18 nt, Human
aagaaucuucuacucuuu

SEQ ID NO: 1112826 - RNA, 21 nt, Human
aagcugggcggaucaccuaaa

SEQ ID NO: 1112827 - RNA, 19 nt, Human
aagugcugggauuacaggc

SEQ ID NO: 1112828 - RNA, 19 nt, Human
aagugcugggauuacaggc

SEQ ID NO: 1112829 - RNA, 26 nt, Human
aagugcugggauuacaggcgugagcc

SEQ ID NO: 1112830 - RNA, 20 nt, Human
aaugcuauuaaguauaaauu

SEQ ID NO: 1112831 - RNA, 23 nt, Human
acagagcaagacuccaucuaaaa

SEQ ID NO: 1112832 - RNA, 19 nt, Human
acauuccuuauuugcagga

SEQ ID NO: 1112833 - RNA, 25 nt, Human
accuuuuaccuacacccuugaguaa

SEQ ID NO: 1112834 - RNA, 27 nt, Human
acuccaucuaaaaaaaaagaaaaagaa

SEQ ID NO: 1112835 - RNA, 22 nt, Human
acuguacuccagccuggguggg

SEQ ID NO: 1112836 - RNA, 28 nt, Human
acuguacuccagccugggugggcgacag

SEQ ID NO: 1112837 - RNA, 19 nt, Human
acuuugucacccaggaugg

SEQ ID NO: 1112838 - RNA, 23 nt, Human
agaaaaagaaaaaagaaaaagaa

SEQ ID NO: 1112839 - RNA, 22 nt, Human
agaaacaacaucagccaggagc

SEQ ID NO: 1112840 - RNA, 25 nt, Human
agaaccucuuuacuuagauuuucau

SEQ ID NO: 1112841 - RNA, 20 nt, Human
agauggagguugcagugagc

SEQ ID NO: 1112842 - RNA, 24 nt, Human
agauggagguugcagugagcugag

SEQ ID NO: 1112843 - RNA, 23 nt, Human
agauggcguuucuccaugugggu

SEQ ID NO: 1112844 - RNA, 24 nt, Human
agcauugugggaggccaagcuggg

SEQ ID NO: 1112845 - RNA, 23 nt, Human
agccaggcauggugguuugugcc

SEQ ID NO: 1112846 - RNA, 18 nt, Human
agccuggccaacauggca

SEQ ID NO: 1112847 - RNA, 24 nt, Human
agccuggccaacauggcaaaaccc

SEQ ID NO: 1112848 - RNA, 24 nt, Human
aggagcaguggcuaacaccuguaa

SEQ ID NO: 1112849 - RNA, 18 nt, Human
aggcaggagaaucacuug

SEQ ID NO: 1112850 - RNA, 23 nt, Human
aggcaggagaaucacuugaaacc

SEQ ID NO: 1112851 - RNA, 24 nt, Human
aggcauggugguuugugccuguaa

SEQ ID NO: 1112852 - RNA, 24 nt, Human
aggcugaggcaggagaaucacuug

SEQ ID NO: 1112853 - RNA, 24 nt, Human
aggugauccgcccgccuuugccuc

SEQ ID NO: 1112854 - RNA, 21 nt, Human
aguagcugggauuacaggcau

SEQ ID NO: 1112855 - RNA, 23 nt, Human
aguagcugggauuacaggcaugc

SEQ ID NO: 1112856 - RNA, 18 nt, Human
agugccauggcaugaucu

SEQ ID NO: 1112857 - RNA, 18 nt, Human
agugcugggauuacaggc

SEQ ID NO: 1112858 - RNA, 24 nt, Human
aguggcuaacaccuguaauuccag

SEQ ID NO: 1112859 - RNA, 25 nt, Human
auaaauucucugauguugaacaaag

SEQ ID NO: 1112860 - RNA, 19 nt, Human
augaauuaccuuaccuaca

SEQ ID NO: 1112861 - RNA, 24 nt, Human
auggagugccauggcaugaucucg

SEQ ID NO: 1112862 - RNA, 24 nt, Human
augugccugaaaaaacuaacaaaa

SEQ ID NO: 1112863 - RNA, 21 nt, Human
auuuuguauuuuuaguagaga

SEQ ID NO: 1112864 - RNA, 24 nt, Human
caaagugcugggauuacaggcgug

SEQ ID NO: 1112865 - RNA, 22 nt, Human
caagugauucuccugccucagc

SEQ ID NO: 1112866 - RNA, 18 nt, Human
cacacuguucacacuugu

SEQ ID NO: 1112867 - RNA, 21 nt, Human
caccgcaaccucugccuccug

SEQ ID NO: 1112868 - RNA, 23 nt, Human
caccgcaaccucugccuccuggg

SEQ ID NO: 1112869 - RNA, 23 nt, Human
caccuguaauuccagcauugugg

SEQ ID NO: 1112870 - RNA, 24 nt, Human
caccuguaauuccagcauuguggg

SEQ ID NO: 1112871 - RNA, 19 nt, Human
cacuguacuccagccuggg

SEQ ID NO: 1112872 - RNA, 19 nt, Human
cacuguacuccagccuggg

SEQ ID NO: 1112873 - RNA, 19 nt, Human
cacuguacuccagccuggg

SEQ ID NO: 1112874 - RNA, 21 nt, Human
cacuguacuccagccugggug

SEQ ID NO: 1112875 - RNA, 21 nt, Human
cacuguacuccagccugggug

SEQ ID NO: 1112876 - RNA, 25 nt, Human
cacuguacuccagccugggugggcg

SEQ ID NO: 1112877 - RNA, 28 nt, Human
cacuguacuccagccugggugggcgaca

SEQ ID NO: 1112878 - RNA, 24 nt, Human
cacuuugucacccaggauggagug

SEQ ID NO: 1112879 - RNA, 22 nt, Human
cagaauaugccauauauaacau

SEQ ID NO: 1112880 - RNA, 22 nt, Human
cagaaugaauacaacaagaucu

SEQ ID NO: 1112881 - RNA, 20 nt, Human
cagcacuuuaaaugcuuaua

SEQ ID NO: 1112882 - RNA, 20 nt, Human
cagcauugugggaggccaag

SEQ ID NO: 1112883 - RNA, 28 nt, Human
cagcauugugggaggccaagcugggcgg

SEQ ID NO: 1112884 - RNA, 24 nt, Human
cagcuacuugggaggcugaggcag

SEQ ID NO: 1112885 - RNA, 24 nt, Human
caugugggucaggcuggucuugaa

SEQ ID NO: 1112886 - RNA, 21 nt, Human
ccaaagaaucuucuacucuuu

SEQ ID NO: 1112887 - RNA, 20 nt, Human
ccaaagugcugggauuacag

SEQ ID NO: 1112888 - RNA, 22 nt, Human
ccaaagugcugggauuacaggc

SEQ ID NO: 1112889 - RNA, 22 nt, Human
ccaaagugcugggauuacaggc

SEQ ID NO: 1112890 - RNA, 24 nt, Human
ccaaagugcugggauuacaggcgu

SEQ ID NO: 1112891 - RNA, 20 nt, Human
ccacuguacuccagccuggg

SEQ ID NO: 1112892 - RNA, 20 nt, Human
ccacuguacuccagccuggg

SEQ ID NO: 1112893 - RNA, 21 nt, Human
ccacuguacuccagccugggu

SEQ ID NO: 1112894 - RNA, 21 nt, Human
ccacuguacuccagccugggu

SEQ ID NO: 1112895 - RNA, 22 nt, Human
ccacuguacuccagccugggug

SEQ ID NO: 1112896 - RNA, 23 nt, Human
ccacuguacuccagccugggugg

SEQ ID NO: 1112897 - RNA, 24 nt, Human
ccacuguacuccagccuggguggg

SEQ ID NO: 1112898 - RNA, 25 nt, Human
ccacuguacuccagccugggugggc

SEQ ID NO: 1112899 - RNA, 19 nt, Human
ccaugugggucaggcuggu

SEQ ID NO: 1112900 - RNA, 21 nt, Human
ccaugugggucaggcuggucu

SEQ ID NO: 1112901 - RNA, 21 nt, Human
ccaugugggucaggcuggucu

SEQ ID NO: 1112902 - RNA, 23 nt, Human
cccgaguagcugggauuacaggc

SEQ ID NO: 1112903 - RNA, 24 nt, Human
cccgaguagcugggauuacaggca

SEQ ID NO: 1112904 - RNA, 23 nt, Human
ccgaguagcugggauuacaggca

SEQ ID NO: 1112905 - RNA, 24 nt, Human
ccgaguagcugggauuacaggcau

SEQ ID NO: 1112906 - RNA, 23 nt, Human
ccgcaaccucugccuccuggguu

SEQ ID NO: 1112907 - RNA, 24 nt, Human
ccgcaaccucugccuccuggguuc

SEQ ID NO: 1112908 - RNA, 24 nt, Human
ccgccuuugccucccaaagugcug

SEQ ID NO: 1112909 - RNA, 21 nt, Human
ccuccuggguucaagugauuc

SEQ ID NO: 1112910 - RNA, 24 nt, Human
ccuccuggguucaagugauucucc

SEQ ID NO: 1112911 - RNA, 22 nt, Human
ccucugccuccuggguucaagu

SEQ ID NO: 1112912 - RNA, 18 nt, Human
ccugaccucaggugaucc

SEQ ID NO: 1112913 - RNA, 22 nt, Human
ccugaccucaggugauccgccc

SEQ ID NO: 1112914 - RNA, 20 nt, Human
ccuggagauggagguugcag

SEQ ID NO: 1112915 - RNA, 22 nt, Human
ccuggccaacauggcaaaaccc

SEQ ID NO: 1112916 - RNA, 24 nt, Human
ccuggccaacauggcaaaacccug

SEQ ID NO: 1112917 - RNA, 26 nt, Human
ccugggugggcgacagagcaagacuc

SEQ ID NO: 1112918 - RNA, 23 nt, Human
ccuggguucaagugauucuccuc

SEQ ID NO: 1112919 - RNA, 23 nt, Human
ccuggguucaagugauucuccug

SEQ ID NO: 1112920 - RNA, 21 nt, Human
ccuguaaucccagcuacuugg

SEQ ID NO: 1112921 - RNA, 22 nt, Human
ccuugaguaagguggacuaggu

SEQ ID NO: 1112922 - RNA, 24 nt, Human
cggaucaccuaaagucucgaguuc

SEQ ID NO: 1112923 - RNA, 20 nt, Human
cuagaccagccuggccaaca

SEQ ID NO: 1112924 - RNA, 24 nt, Human
cucaccgcaaccucugccuccugg

SEQ ID NO: 1112925 - RNA, 23 nt, Human
cucagccucccgaguagcuggga

SEQ ID NO: 1112926 - RNA, 26 nt, Human
cuccugaccucaggugauccgcccgc

SEQ ID NO: 1112927 - RNA, 21 nt, Human
cuccuggguucaagugauucu

SEQ ID NO: 1112928 - RNA, 23 nt, Human
cugccucagccucccgaguagcu

SEQ ID NO: 1112929 - RNA, 23 nt, Human
cugccuccuggguucaagugauu

SEQ ID NO: 1112930 - RNA, 23 nt, Human
cugggcggaucaccuaaagucuc

SEQ ID NO: 1112931 - RNA, 19 nt, Human
cuuagauuuucaucaugca

SEQ ID NO: 1112932 - RNA, 21 nt, Human
gaaaaagaaaaaagaaaaaga

SEQ ID NO: 1112933 - RNA, 24 nt, Human
gaccucaggugauccgcccgccuu

SEQ ID NO: 1112934 - RNA, 21 nt, Human
gagagggagucucacuuuguc

SEQ ID NO: 1112935 - RNA, 24 nt, Human
gagauggcguuucuccaugugggu

SEQ ID NO: 1112936 - RNA, 23 nt, Human
gagguugcagugagcugagaucg

SEQ ID NO: 1112937 - RNA, 18 nt, Human
gauuacaggcaugcgcca

SEQ ID NO: 1112938 - RNA, 22 nt, Human
gauuacaggcaugcgccaccau

SEQ ID NO: 1112939 - RNA, 18 nt, Human
gauuacaggcgugagcca

SEQ ID NO: 1112940 - RNA, 22 nt, Human
gauuacaggcgugagccaccgc

SEQ ID NO: 1112941 - RNA, 22 nt, Human
gauuacaggcgugagccaccgc

SEQ ID NO: 1112942 - RNA, 21 nt, Human
gauucuccugccucagccucc

SEQ ID NO: 1112943 - RNA, 18 nt, Human
gcaggagaaucacuugaa

SEQ ID NO: 1112944 - RNA, 19 nt, Human
gccacuguacuccagccug

SEQ ID NO: 1112945 - RNA, 19 nt, Human
gccacuguacuccagccug

SEQ ID NO: 1112946 - RNA, 24 nt, Human
gccacuguacuccagccugggugg

SEQ ID NO: 1112947 - RNA, 20 nt, Human
gccucagccucccgaguagc

SEQ ID NO: 1112948 - RNA, 20 nt, Human
gccuguaaucccagcuacuu

SEQ ID NO: 1112949 - RNA, 22 nt, Human
gccuuugccucccaaagugcug

SEQ ID NO: 1112950 - RNA, 23 nt, Human
gcuggucuugaacuccugaccuc

SEQ ID NO: 1112951 - RNA, 22 nt, Human
ggagaaucacuugaaaccugga

SEQ ID NO: 1112952 - RNA, 22 nt, Human
ggagcaguggcuaacaccugua

SEQ ID NO: 1112953 - RNA, 20 nt, Human
ggagguugcagugagcugag

SEQ ID NO: 1112954 - RNA, 22 nt, Human
ggagguugcagugagcugagau

SEQ ID NO: 1112955 - RNA, 24 nt, Human
ggagguugcagugagcugagaucg

SEQ ID NO: 1112956 - RNA, 24 nt, Human
ggauuacaggcaugcgccaccaug

SEQ ID NO: 1112957 - RNA, 24 nt, Human
ggcuggucuugaacuccugaccuc

SEQ ID NO: 1112958 - RNA, 18 nt, Human
gggaaaaaauaaauaaaa

SEQ ID NO: 1112959 - RNA, 23 nt, Human
ggucaggcuggucuugaacuccu

SEQ ID NO: 1112960 - RNA, 19 nt, Human
ggucuugaacuccugaccu

SEQ ID NO: 1112961 - RNA, 24 nt, Human
ggugguuugugccuguaaucccag

SEQ ID NO: 1112962 - RNA, 28 nt, Human
guacuccagccugggugggcgacagagc

SEQ ID NO: 1112963 - RNA, 20 nt, Human
guagcugggauuacaggcau

SEQ ID NO: 1112964 - RNA, 24 nt, Human
gugauucuccugccucagccuccc

SEQ ID NO: 1112965 - RNA, 23 nt, Human
gugguuugugccuguaaucccag

SEQ ID NO: 1112966 - RNA, 24 nt, Human
guugcagugagcugagaucgugcc

SEQ ID NO: 1112967 - RNA, 19 nt, Human
uaaaaaaacuaaaacugua

SEQ ID NO: 1112968 - RNA, 20 nt, Human
uaaaaauacaaaauuuagcc

SEQ ID NO: 1112969 - RNA, 21 nt, Human
uaaaaauacaaaauuuagcca

SEQ ID NO: 1112970 - RNA, 18 nt, Human
uaaaguuaccacaacuuc

SEQ ID NO: 1112971 - RNA, 25 nt, Human
uaaaugcucaccuaauaaaaaauaa

SEQ ID NO: 1112972 - RNA, 24 nt, Human
uaacuaaaacaaaauuugucucuc

SEQ ID NO: 1112973 - RNA, 26 nt, Human
uaacuaaaacaaaauuugucucucaa

SEQ ID NO: 1112974 - RNA, 24 nt, Human
uaaucguauauuuuaaaaaaacua

SEQ ID NO: 1112975 - RNA, 24 nt, Human
uaaugugauuauuauauauuguau

SEQ ID NO: 1112976 - RNA, 22 nt, Human
uacaaaaaauaaauacuaaagg

SEQ ID NO: 1112977 - RNA, 22 nt, Human
uacaggcaugcgccaccaugcc

SEQ ID NO: 1112978 - RNA, 22 nt, Human
uacaggcgugagccaccgcgcc

SEQ ID NO: 1112979 - RNA, 23 nt, Human
uacaggcgugagccaccgcgccu

SEQ ID NO: 1112980 - RNA, 23 nt, Human
uacauuuguucucaucaaguaua

SEQ ID NO: 1112981 - RNA, 18 nt, Human
uacuccagccuggguggg

SEQ ID NO: 1112982 - RNA, 19 nt, Human
uacuccagccugggugggc

SEQ ID NO: 1112983 - RNA, 27 nt, Human
uacuccagccugggugggcgacagagc

SEQ ID NO: 1112984 - RNA, 18 nt, Human
uacuguauaugcaaaaau

SEQ ID NO: 1112985 - RNA, 27 nt, Human
uaggaauaaagaaacaacaucagccaa

SEQ ID NO: 1112986 - RNA, 24 nt, Human
uaguagagauggcguuucuccaug

SEQ ID NO: 1112987 - RNA, 19 nt, Human
uaucagaauaugccauaua

SEQ ID NO: 1112988 - RNA, 24 nt, Human
uauuuauuuuuugagagggagucu

SEQ ID NO: 1112989 - RNA, 20 nt, Human
uauuuuaauaugaacucugg

SEQ ID NO: 1112990 - RNA, 19 nt, Human
ucaagugauucuccugccu

SEQ ID NO: 1112991 - RNA, 24 nt, Human
ucaccgcaaccucugccuccuggg

SEQ ID NO: 1112992 - RNA, 25 nt, Human
ucaccgcaaccucugccuccugggu

SEQ ID NO: 1112993 - RNA, 27 nt, Human
ucaccgcaaccucugccuccuggguuc

SEQ ID NO: 1112994 - RNA, 18 nt, Human
ucagccaggagcaguggc

SEQ ID NO: 1112995 - RNA, 20 nt, Human
ucagccucccgaguagcugg

SEQ ID NO: 1112996 - RNA, 23 nt, Human
uccagccugggugggcgacagag

SEQ ID NO: 1112997 - RNA, 22 nt, Human
uccaugugggucaggcuggucu

SEQ ID NO: 1112998 - RNA, 24 nt, Human
ucccaaagugcugggauuacaggc

SEQ ID NO: 1112999 - RNA, 24 nt, Human
ucccgaguagcugggauuacaggc

SEQ ID NO: 1113000 - RNA, 21 nt, Human
uccuggguucaagugauucuc

SEQ ID NO: 1113001 - RNA, 24 nt, Human
uccuggguucaagugauucuccug

SEQ ID NO: 1113002 - RNA, 23 nt, Human
ucgugccacuguacuccagccug

SEQ ID NO: 1113003 - RNA, 21 nt, Human
ucuaaaaaaaaagaaaaagaa

SEQ ID NO: 1113004 - RNA, 19 nt, Human
ucucacuuugucacccagg

SEQ ID NO: 1113005 - RNA, 20 nt, Human
ucucacuuugucacccagga

SEQ ID NO: 1113006 - RNA, 24 nt, Human
ucucacuuugucacccaggaugga

SEQ ID NO: 1113007 - RNA, 24 nt, Human
ucuccugccucagccucccgagua

SEQ ID NO: 1113008 - RNA, 18 nt, Human
ucugcugugcggugucca

SEQ ID NO: 1113009 - RNA, 23 nt, Human
ucuugaacuccugaccucaggug

SEQ ID NO: 1113010 - RNA, 20 nt, Human
ugaagugucauugccuuaua

SEQ ID NO: 1113011 - RNA, 18 nt, Human
ugaccucaggugauccgc

SEQ ID NO: 1113012 - RNA, 21 nt, Human
ugaccucaggugauccgcccg

SEQ ID NO: 1113013 - RNA, 24 nt, Human
ugaccucaggugauccgcccgccu

SEQ ID NO: 1113014 - RNA, 22 nt, Human
ugagcugagaucgugccacugu

SEQ ID NO: 1113015 - RNA, 25 nt, Human
ugaggcaggagaaucacuugaaacc

SEQ ID NO: 1113016 - RNA, 20 nt, Human
ugauucuccugccucagccu

SEQ ID NO: 1113017 - RNA, 19 nt, Human
ugcauucuuuuaccaaaua

SEQ ID NO: 1113018 - RNA, 24 nt, Human
ugccucagccucccgaguagcugg

SEQ ID NO: 1113019 - RNA, 22 nt, Human
ugccuccuggguucaagugauu

SEQ ID NO: 1113020 - RNA, 23 nt, Human
ugccuguaaucccagcuacuugg

SEQ ID NO: 1113021 - RNA, 24 nt, Human
ugccuguaaucccagcuacuuggg

SEQ ID NO: 1113022 - RNA, 24 nt, Human
ugcugggauuacaggcgugagcca

SEQ ID NO: 1113023 - RNA, 18 nt, Human
uggaauaaugugacuuga

SEQ ID NO: 1113024 - RNA, 23 nt, Human
uggagauggagguugcagugagc

SEQ ID NO: 1113025 - RNA, 18 nt, Human
uggagguugcagugagcu

SEQ ID NO: 1113026 - RNA, 24 nt, Human
uggagugccauggcaugaucucgg

SEQ ID NO: 1113027 - RNA, 24 nt, Human
uggcuaacaccuguaauuccagca

SEQ ID NO: 1113028 - RNA, 24 nt, Human
ugggaggccaagcugggcggauca

SEQ ID NO: 1113029 - RNA, 19 nt, Human
ugggaggcugaggcaggag

SEQ ID NO: 1113030 - RNA, 24 nt, Human
ugggaggcugaggcaggagaauca

SEQ ID NO: 1113031 - RNA, 18 nt, Human
ugggauuacaggcaugcg

SEQ ID NO: 1113032 - RNA, 21 nt, Human
ugggauuacaggcaugcgcca

SEQ ID NO: 1113033 - RNA, 22 nt, Human
ugggauuacaggcaugcgccac

SEQ ID NO: 1113034 - RNA, 24 nt, Human
ugggauuacaggcaugcgccacca

SEQ ID NO: 1113035 - RNA, 18 nt, Human
ugggauuacaggcgugag

SEQ ID NO: 1113036 - RNA, 19 nt, Human
ugggauuacaggcgugagc

SEQ ID NO: 1113037 - RNA, 21 nt, Human
ugggauuacaggcgugagcca

SEQ ID NO: 1113038 - RNA, 22 nt, Human
ugggauuacaggcgugagccac

SEQ ID NO: 1113039 - RNA, 23 nt, Human
ugggauuacaggcgugagccacc

SEQ ID NO: 1113040 - RNA, 24 nt, Human
ugggauuacaggcgugagccaccg

SEQ ID NO: 1113041 - RNA, 24 nt, Human
ugggcggaucaccuaaagucucga

SEQ ID NO: 1113042 - RNA, 23 nt, Human
uggguucaagugauucuccugcc

SEQ ID NO: 1113043 - RNA, 24 nt, Human
uggugguuugugccuguaauccca

SEQ ID NO: 1113044 - RNA, 21 nt, Human
ugguuugugccuguaauccca

SEQ ID NO: 1113045 - RNA, 22 nt, Human
ugguuugugccuguaaucccag

SEQ ID NO: 1113046 - RNA, 24 nt, Human
ugguuugugccuguaaucccagcu

SEQ ID NO: 1113047 - RNA, 24 nt, Human
ugugccuguaaucccagcuacuug

SEQ ID NO: 1113048 - RNA, 21 nt, Human
uguuacaaguaaaguuaccac

SEQ ID NO: 1113049 - RNA, 23 nt, Human
uuaacaugaaguaauuugaguua

SEQ ID NO: 1113050 - RNA, 29 nt, Human
uuacuuauuuauuuuuugagagggagucc

SEQ ID NO: 1113051 - RNA, 18 nt, Human
uuaguagagauggcguuu

SEQ ID NO: 1113052 - RNA, 24 nt, Human
uuaguagagauggcguuucuccau

SEQ ID NO: 1113053 - RNA, 20 nt, Human
uuagugcauucuuuuaccaa

SEQ ID NO: 1113054 - RNA, 21 nt, Human
uucaagugauucuccugccuc

SEQ ID NO: 1113055 - RNA, 23 nt, Human
uucaagugauucuccugccucag

SEQ ID NO: 1113056 - RNA, 24 nt, Human
uucaagugauucuccugccucagc

SEQ ID NO: 1113057 - RNA, 19 nt, Human
uucauaauacaaaaaauaa

SEQ ID NO: 1113058 - RNA, 22 nt, Human
uuccuauauaaauucugcugug

SEQ ID NO: 1113059 - RNA, 21 nt, Human
uugaacaaaguuugagcaauu

SEQ ID NO: 1113060 - RNA, 18 nt, Human
uugcagugagcugagauc

SEQ ID NO: 1113061 - RNA, 22 nt, Human
uugcagugagcugagaucgugc

SEQ ID NO: 1113062 - RNA, 25 nt, Human
uugggaggcugaggcaggagaauca

SEQ ID NO: 1113063 - RNA, 20 nt, Human
uugugccuguaaucccagcu

SEQ ID NO: 1113064 - RNA, 21 nt, Human
uuucuaaacucagaacucuga

SEQ ID NO: 1113065 - RNA, 19 nt, Human
uuuuguauuuuuaguagag

SEQ ID NO: 1113066 - RNA, 20 nt, Human
uuuuguauuuuuaguagaga

SEQ ID NO: 1113067 - RNA, 19 nt, Human
uuuuuaguagagauggcgu

SEQ ID NO: 1113068 - RNA, 19 nt, Human
uuuuucauaaaaguacaau

SEQ ID NO: 1113069 - RNA, 19 nt, Human
aaaauaguauuacaaaagc

SEQ ID NO: 1113070 - RNA, 22 nt, Human
aaagccacaucuuaagucaaaa

SEQ ID NO: 1113071 - RNA, 26 nt, Human
aaauuuugugugugugugugugugug

SEQ ID NO: 1113072 - RNA, 24 nt, Human
aaccaagauccaauuugccuuucu

SEQ ID NO: 1113073 - RNA, 19 nt, Human
aagaggucaaaauaguauu

SEQ ID NO: 1113074 - RNA, 21 nt, Human
aagaggucaaaauaguauuac

SEQ ID NO: 1113075 - RNA, 19 nt, Human
aagauccaauuugccuuuc

SEQ ID NO: 1113076 - RNA, 20 nt, Human
aauagaacaacaaaaaaaag

SEQ ID NO: 1113077 - RNA, 22 nt, Human
acaaagaaagacauuaaacaau

SEQ ID NO: 1113078 - RNA, 22 nt, Human
acugcaaagagacaaagaaaga

SEQ ID NO: 1113079 - RNA, 22 nt, Human
agacccggaguuccagcggcag

SEQ ID NO: 1113080 - RNA, 25 nt, Human
aggagcagaggacacagagcaguga

SEQ ID NO: 1113081 - RNA, 21 nt, Human
caaaaaaaauuaguaagucuc

SEQ ID NO: 1113082 - RNA, 24 nt, Human
caaaagccacaucuuaagucaaaa

SEQ ID NO: 1113083 - RNA, 21 nt, Human
cacagagcagugaagacgaga

SEQ ID NO: 1113084 - RNA, 20 nt, Human
cagaagaggucaaaauagua

SEQ ID NO: 1113085 - RNA, 21 nt, Human
ccaauaccugcaggucacagg

SEQ ID NO: 1113086 - RNA, 22 nt, Human
cuaugacaaauuuugugugugu

SEQ ID NO: 1113087 - RNA, 19 nt, Human
gcaaagagacaaagaaaga

SEQ ID NO: 1113088 - RNA, 20 nt, Human
ggucacaggaccagaggcug

SEQ ID NO: 1113089 - RNA, 23 nt, Human
uaagucaaaaacugucauaucuu

SEQ ID NO: 1113090 - RNA, 20 nt, Human
uaccugcaggucacaggacc

SEQ ID NO: 1113091 - RNA, 28 nt, Human
uaguaagucucuuuguuucagaaaacuu

SEQ ID NO: 1113092 - RNA, 19 nt, Human
uccaaucaagagacauacu

SEQ ID NO: 1113093 - RNA, 18 nt, Human
ucccaauaccugcagguc

SEQ ID NO: 1113094 - RNA, 24 nt, Human
ugacaaauuuugugugugugugug

SEQ ID NO: 1113095 - RNA, 23 nt, Human
ugcaugcaaauauuaaccaaaug

SEQ ID NO: 1113096 - RNA, 21 nt, Human
uggcaagauagauuuagacau

SEQ ID NO: 1113097 - RNA, 21 nt, Human
ugucauaucuuacauaaagua

SEQ ID NO: 1113098 - RNA, 21 nt, Human
ugugugugcacgucugugugu

SEQ ID NO: 1113099 - RNA, 22 nt, Human
ugugugugugcacgucugugug

SEQ ID NO: 1113100 - RNA, 22 nt, Human
ugugugugugugugcacgucug

SEQ ID NO: 1113101 - RNA, 21 nt, Human
ugugugugugugugugcacgu

SEQ ID NO: 1113102 - RNA, 21 nt, Human
ugugugugugugugugcacgu

SEQ ID NO: 1113103 - RNA, 24 nt, Human
ugugugugugugugugcacgucug

SEQ ID NO: 1113104 - RNA, 18 nt, Human
ugugugugugugugugug

SEQ ID NO: 1113105 - RNA, 18 nt, Human
ugugugugugugugugug

SEQ ID NO: 1113106 - RNA, 21 nt, Human
ugugugugugugugugugugu

SEQ ID NO: 1113107 - RNA, 21 nt, Human
ugugugugugugugugugugu

SEQ ID NO: 1113108 - RNA, 24 nt, Human
uuugugugugugugugugugugug

SEQ ID NO: 1113109 - RNA, 20 nt, Human
agacagagucuugccuugug

SEQ ID NO: 1113110 - RNA, 23 nt, Human
agguucaaaugauucuccugccu

SEQ ID NO: 1113111 - RNA, 28 nt, Human
caaaugauucuccugccucugccuccca

SEQ ID NO: 1113112 - RNA, 19 nt, Human
cacagggcagugaaggcga

SEQ ID NO: 1113113 - RNA, 18 nt, Human
cacugcaaccucugccuc

SEQ ID NO: 1113114 - RNA, 21 nt, Human
cacugcaaccucugccuccca

SEQ ID NO: 1113115 - RNA, 24 nt, Human
ccucccagguucaaaugauucucc

SEQ ID NO: 1113116 - RNA, 25 nt, Human
ccucugcgagcagaggacacagggc

SEQ ID NO: 1113117 - RNA, 21 nt, Human
ccuuguggcccaggcuggagu

SEQ ID NO: 1113118 - RNA, 22 nt, Human
cgagaccugcagcuccagcugc

SEQ ID NO: 1113119 - RNA, 24 nt, Human
cucacugcaaccucugccucccag

SEQ ID NO: 1113120 - RNA, 24 nt, Human
cucacugcaaccucugccucccag

SEQ ID NO: 1113121 - RNA, 23 nt, Human
cugcaaccucugccucccagguu

SEQ ID NO: 1113122 - RNA, 24 nt, Human
cugcaaccucugccucccagguuc

SEQ ID NO: 1113123 - RNA, 21 nt, Human
cugcaggucacagggccacag

SEQ ID NO: 1113124 - RNA, 19 nt, Human
cuuguggcccaggcuggag

SEQ ID NO: 1113125 - RNA, 22 nt, Human
gcaaccucugccucccagguuc

SEQ ID NO: 1113126 - RNA, 20 nt, Human
gcccaggcuggaguagaaug

SEQ ID NO: 1113127 - RNA, 21 nt, Human
gcucacugcaaccucugccuc

SEQ ID NO: 1113128 - RNA, 20 nt, Human
uaccugcaggucacagggcc

SEQ ID NO: 1113129 - RNA, 19 nt, Human
ucaaaugauucuccugccu

SEQ ID NO: 1113130 - RNA, 21 nt, Human
ucaauaccugcaggucacagg

SEQ ID NO: 1113131 - RNA, 19 nt, Human
ucacugcaaccucugccuc

SEQ ID NO: 1113132 - RNA, 24 nt, Human
ucacugcaaccucugccucccagg

SEQ ID NO: 1113133 - RNA, 25 nt, Human
ucacugcaaccucugccucccaggu

SEQ ID NO: 1113134 - RNA, 21 nt, Human
ucccagguucaaaugauucuc

SEQ ID NO: 1113135 - RNA, 24 nt, Human
ucccagguucaaaugauucuccug

SEQ ID NO: 1113136 - RNA, 18 nt, Human
ucucaauaccugcagguc

SEQ ID NO: 1113137 - RNA, 18 nt, Human
ucuugccuuguggcccag

SEQ ID NO: 1113138 - RNA, 22 nt, Human
ucuugccuuguggcccaggcug

SEQ ID NO: 1113139 - RNA, 23 nt, Human
ucuugccuuguggcccaggcugg

SEQ ID NO: 1113140 - RNA, 24 nt, Human
ucuugccuuguggcccaggcugga

SEQ ID NO: 1113141 - RNA, 24 nt, Human
ugccucugccucccaaguagcugg

SEQ ID NO: 1113142 - RNA, 19 nt, Human
ugccuuguggcccaggcug

SEQ ID NO: 1113143 - RNA, 23 nt, Human
uucaaaugauucuccugccucug

SEQ ID NO: 1113144 - RNA, 24 nt, Human
uucaaaugauucuccugccucugc

SEQ ID NO: 1113145 - RNA, 18 nt, Human
ccaauaccugcaggucag

SEQ ID NO: 1113146 - RNA, 19 nt, Human
ccugugcaauaagguguga

SEQ ID NO: 1113147 - RNA, 19 nt, Human
ugacaacuuuuaaagguuu

SEQ ID NO: 1113148 - RNA, 22 nt, Human
ugccacauucuucacacuuaua

SEQ ID NO: 1113149 - RNA, 24 nt, Human
ugcuuuccugugcaauaaggugug

SEQ ID NO: 1113150 - RNA, 21 nt, Human
uuaauggcuuuuucacauucu

SEQ ID NO: 1113151 - RNA, 23 nt, Human
aaacaaagcuggcugugggucug

SEQ ID NO: 1113152 - RNA, 21 nt, Human
aacaccucgaucccaacaccu

SEQ ID NO: 1113153 - RNA, 18 nt, Human
aaccgcagccccagcauc

SEQ ID NO: 1113154 - RNA, 19 nt, Human
acagaauugcugagacccc

SEQ ID NO: 1113155 - RNA, 21 nt, Human
acccaucccuccccagcuucc

SEQ ID NO: 1113156 - RNA, 25 nt, Human
acccgaaagcccagcgucgacgacg

SEQ ID NO: 1113157 - RNA, 19 nt, Human
acccgcagggaagcaggcc

SEQ ID NO: 1113158 - RNA, 22 nt, Human
acggccagacacacacgaaagc

SEQ ID NO: 1113159 - RNA, 19 nt, Human
agaaggaaguggggucagg

SEQ ID NO: 1113160 - RNA, 22 nt, Human
agaaggaaguggggucaggggc

SEQ ID NO: 1113161 - RNA, 24 nt, Human
agagagggugaggcagccccaggu

SEQ ID NO: 1113162 - RNA, 19 nt, Human
agagggugaggcagcccca

SEQ ID NO: 1113163 - RNA, 21 nt, Human
agcagaaacugggggcacagg

SEQ ID NO: 1113164 - RNA, 21 nt, Human
agccagaaagcagaaacuggg

SEQ ID NO: 1113165 - RNA, 22 nt, Human
agcugggauggggcagccacag

SEQ ID NO: 1113166 - RNA, 25 nt, Human
agcuggggggacaaggaaagcuaug

SEQ ID NO: 1113167 - RNA, 22 nt, Human
aggaaguggggucaggggcuca

SEQ ID NO: 1113168 - RNA, 22 nt, Human
aggcacccaugagccacuagga

SEQ ID NO: 1113169 - RNA, 22 nt, Human
aggcacuggcugaggccaggag

SEQ ID NO: 1113170 - RNA, 20 nt, Human
aggcccaggaccugcugcag

SEQ ID NO: 1113171 - RNA, 18 nt, Human
agggaaagccugggugca

SEQ ID NO: 1113172 - RNA, 19 nt, Human
agggcaguggcugggagac

SEQ ID NO: 1113173 - RNA, 21 nt, Human
agggccagaacccgcagggaa

SEQ ID NO: 1113174 - RNA, 24 nt, Human
agggcccagccucugggccgccuu

SEQ ID NO: 1113175 - RNA, 18 nt, Human
agugcagggugggaaggg

SEQ ID NO: 1113176 - RNA, 23 nt, Human
aucaccucuuccucaaaaugggc

SEQ ID NO: 1113177 - RNA, 20 nt, Human
augguggacaggggcugcgg

SEQ ID NO: 1113178 - RNA, 19 nt, Human
caaagccacuucagggagc

SEQ ID NO: 1113179 - RNA, 18 nt, Human
cacagcaccccagacagg

SEQ ID NO: 1113180 - RNA, 23 nt, Human
cacagcagccacuaccggggaga

SEQ ID NO: 1113181 - RNA, 21 nt, Human
caccuggacucagaaguggac

SEQ ID NO: 1113182 - RNA, 23 nt, Human
cacugccgggaccucccucggcc

SEQ ID NO: 1113183 - RNA, 23 nt, Human
cagcaagggcaguggcugggaga

SEQ ID NO: 1113184 - RNA, 20 nt, Human
cagcagccacuaccggggag

SEQ ID NO: 1113185 - RNA, 22 nt, Human
cagccucugggccgccuugccc

SEQ ID NO: 1113186 - RNA, 21 nt, Human
cagccuggcugggucucaggg

SEQ ID NO: 1113187 - RNA, 18 nt, Human
caggcccaggaccugcug

SEQ ID NO: 1113188 - RNA, 21 nt, Human
caggccccaguguggggcagg

SEQ ID NO: 1113189 - RNA, 19 nt, Human
caggcgagugccugccccc

SEQ ID NO: 1113190 - RNA, 21 nt, Human
cagggugggaagggauggcag

SEQ ID NO: 1113191 - RNA, 18 nt, Human
caugaccagugagaaguc

SEQ ID NO: 1113192 - RNA, 18 nt, Human
cauucagacggccagaca

SEQ ID NO: 1113193 - RNA, 22 nt, Human
cauugggugggcacucgcugga

SEQ ID NO: 1113194 - RNA, 20 nt, Human
ccacauucaagaaacaaagc

SEQ ID NO: 1113195 - RNA, 23 nt, Human
ccacugugagcugacgacagaau

SEQ ID NO: 1113196 - RNA, 22 nt, Human
ccagcuggggggacaaggaaag

SEQ ID NO: 1113197 - RNA, 20 nt, Human
cccacugcagagcacggcca

SEQ ID NO: 1113198 - RNA, 18 nt, Human
cccagaaggaaguggggu

SEQ ID NO: 1113199 - RNA, 20 nt, Human
cccagccuggcugggucuca

SEQ ID NO: 1113200 - RNA, 18 nt, Human
ccccagcggcccaggguc

SEQ ID NO: 1113201 - RNA, 21 nt, Human
ccccagcuuccggggccccgg

SEQ ID NO: 1113202 - RNA, 19 nt, Human
cccccagggccagaacccg

SEQ ID NO: 1113203 - RNA, 18 nt, Human
cccccucccccagggcca

SEQ ID NO: 1113204 - RNA, 20 nt, Human
ccccuccccaccuuccaccc

SEQ ID NO: 1113205 - RNA, 21 nt, Human
cccgaaagcccagcgucgacg

SEQ ID NO: 1113206 - RNA, 22 nt, Human
cccucccccagggccagaaccc

SEQ ID NO: 1113207 - RNA, 19 nt, Human
cccuccgccgcacuaacgc

SEQ ID NO: 1113208 - RNA, 21 nt, Human
ccggggcccagaaggaagugg

SEQ ID NO: 1113209 - RNA, 23 nt, Human
ccugcaugcagugcccggcagga

SEQ ID NO: 1113210 - RNA, 22 nt, Human
ccuggcccagcuggggggacaa

SEQ ID NO: 1113211 - RNA, 25 nt, Human
ccuggcccagcuggggguccccugg

SEQ ID NO: 1113212 - RNA, 22 nt, Human
cgacggacccccagggaaagcc

SEQ ID NO: 1113213 - RNA, 19 nt, Human
cggcaggacugagcagggu

SEQ ID NO: 1113214 - RNA, 22 nt, Human
cggccagacacacacgaaagcu

SEQ ID NO: 1113215 - RNA, 23 nt, Human
cgggacccgaaagcccagcgucg

SEQ ID NO: 1113216 - RNA, 24 nt, Human
cgggcugcucugacauuggguggg

SEQ ID NO: 1113217 - RNA, 19 nt, Human
cgguacccaucccucccca

SEQ ID NO: 1113218 - RNA, 18 nt, Human
cguggagcuaggcccagc

SEQ ID NO: 1113219 - RNA, 19 nt, Human
cuaggagcuguggcuggug

SEQ ID NO: 1113220 - RNA, 21 nt, Human
cuccagggggugcacagcacc

SEQ ID NO: 1113221 - RNA, 22 nt, Human
cugcaagcagcacagaagugca

SEQ ID NO: 1113222 - RNA, 19 nt, Human
cugcugcagcuggcagggu

SEQ ID NO: 1113223 - RNA, 22 nt, Human
cuggcugugggucuggagagag

SEQ ID NO: 1113224 - RNA, 20 nt, Human
cugggucucagggcugcuuc

SEQ ID NO: 1113225 - RNA, 22 nt, Human
cuggucccaagggagggcaggc

SEQ ID NO: 1113226 - RNA, 22 nt, Human
cuuccacauucaagaaacaaag

SEQ ID NO: 1113227 - RNA, 21 nt, Human
gaaagcagaaacugggggcac

SEQ ID NO: 1113228 - RNA, 23 nt, Human
gaagcagagccagaaagcagaaa

SEQ ID NO: 1113229 - RNA, 26 nt, Human
gaagucccuagggcccaggccgggcu

SEQ ID NO: 1113230 - RNA, 18 nt, Human
gaaguggacaggcgagug

SEQ ID NO: 1113231 - RNA, 23 nt, Human
gacacacacgaaagcuuuaugug

SEQ ID NO: 1113232 - RNA, 21 nt, Human
gagagggugaggcagccccag

SEQ ID NO: 1113233 - RNA, 19 nt, Human
gagcacggccacugugagc

SEQ ID NO: 1113234 - RNA, 24 nt, Human
gagcagcuucagaagcaugaccag

SEQ ID NO: 1113235 - RNA, 22 nt, Human
gagcaggguucccggggucgcc

SEQ ID NO: 1113236 - RNA, 19 nt, Human
gagccacuaggagcugugg

SEQ ID NO: 1113237 - RNA, 19 nt, Human
gagcugggacggccccacg

SEQ ID NO: 1113238 - RNA, 21 nt, Human
gcagggcccagccucugggcc

SEQ ID NO: 1113239 - RNA, 21 nt, Human
gcccccuccccaccuuccacc

SEQ ID NO: 1113240 - RNA, 19 nt, Human
gccccgggacggagccgcu

SEQ ID NO: 1113241 - RNA, 23 nt, Human
gccugggugcaggccaccuuggc

SEQ ID NO: 1113242 - RNA, 18 nt, Human
gcugcucugacauugggu

SEQ ID NO: 1113243 - RNA, 23 nt, Human
ggacacugccgggaccucccucg

SEQ ID NO: 1113244 - RNA, 18 nt, Human
ggacccgaaagcccagcg

SEQ ID NO: 1113245 - RNA, 18 nt, Human
ggacucagaaguggacag

SEQ ID NO: 1113246 - RNA, 20 nt, Human
ggaggagcccggggcccaga

SEQ ID NO: 1113247 - RNA, 21 nt, Human
ggcacaggguuugugggcacc

SEQ ID NO: 1113248 - RNA, 24 nt, Human
ggcacuggcugaggccaggagucu

SEQ ID NO: 1113249 - RNA, 29 nt, Human
ggcccagaaggaaguggggucaggggcuc

SEQ ID NO: 1113250 - RNA, 19 nt, Human
gggaagcaggcccaggacc

SEQ ID NO: 1113251 - RNA, 23 nt, Human
gggaagggauggcaggagccggc

SEQ ID NO: 1113252 - RNA, 18 nt, Human
gggcuccuggccagugac

SEQ ID NO: 1113253 - RNA, 18 nt, Human
ggggcagccacagcagcc

SEQ ID NO: 1113254 - RNA, 21 nt, Human
gggucaggcggacggucccug

SEQ ID NO: 1113255 - RNA, 25 nt, Human
ggucaggggcucaggcuggcccucg

SEQ ID NO: 1113256 - RNA, 21 nt, Human
ggugaccccagcggcccaggg

SEQ ID NO: 1113257 - RNA, 23 nt, Human
gugagaagucccuagggcccagg

SEQ ID NO: 1113258 - RNA, 20 nt, Human
gugcagggugggaagggaug

SEQ ID NO: 1113259 - RNA, 19 nt, Human
gugggcaccccacccagau

SEQ ID NO: 1113260 - RNA, 23 nt, Human
uacccaucccuccccagcuuccg

SEQ ID NO: 1113261 - RNA, 26 nt, Human
uagaucccuggaagcagagccagaaa

SEQ ID NO: 1113262 - RNA, 21 nt, Human
ucaaagccacuucagggagca

SEQ ID NO: 1113263 - RNA, 18 nt, Human
ucaggacacccugggcuc

SEQ ID NO: 1113264 - RNA, 21 nt, Human
uccagaaccccaguggggccc

SEQ ID NO: 1113265 - RNA, 20 nt, Human
uccagggggugcacagcacc

SEQ ID NO: 1113266 - RNA, 18 nt, Human
ucccaagggagggcaggc

SEQ ID NO: 1113267 - RNA, 25 nt, Human
ucccaggcuguguguggcaggcccc

SEQ ID NO: 1113268 - RNA, 18 nt, Human
ucccugcaugcagugccc

SEQ ID NO: 1113269 - RNA, 22 nt, Human
ucccuggaagcagagccagaaa

SEQ ID NO: 1113270 - RNA, 19 nt, Human
ucgccgguacccaucccuc

SEQ ID NO: 1113271 - RNA, 23 nt, Human
ucucagggcugcuucucuugggu

SEQ ID NO: 1113272 - RNA, 22 nt, Human
ucuugggugaccccagcggccc

SEQ ID NO: 1113273 - RNA, 18 nt, Human
ugacucacagcgguccuc

SEQ ID NO: 1113274 - RNA, 20 nt, Human
ugagaagucccuagggccca

SEQ ID NO: 1113275 - RNA, 19 nt, Human
ugagcaggguucccggggu

SEQ ID NO: 1113276 - RNA, 24 nt, Human
ugaggcagccccaggucucugggu

SEQ ID NO: 1113277 - RNA, 18 nt, Human
ugcaagcagcacagaagu

SEQ ID NO: 1113278 - RNA, 20 nt, Human
ugcaggccaccuugugcgcu

SEQ ID NO: 1113279 - RNA, 23 nt, Human
ugcagggugggaagggauggcag

SEQ ID NO: 1113280 - RNA, 20 nt, Human
uggagcuaggcccagccugg

SEQ ID NO: 1113281 - RNA, 20 nt, Human
uggcugugggucuggagaga

SEQ ID NO: 1113282 - RNA, 19 nt, Human
uggcuugugggaggagccc

SEQ ID NO: 1113283 - RNA, 24 nt, Human
ugggaagggauggcaggagccggc

SEQ ID NO: 1113284 - RNA, 22 nt, Human
ugggcugggaccccgugaaugc

SEQ ID NO: 1113285 - RNA, 18 nt, Human
uggggcaggaggcaccca

SEQ ID NO: 1113286 - RNA, 21 nt, Human
uggggcaggaggcacccauga

SEQ ID NO: 1113287 - RNA, 24 nt, Human
uggggcaggaggcacccaugagcc

SEQ ID NO: 1113288 - RNA, 21 nt, Human
uggggccgacggacccccagg

SEQ ID NO: 1113289 - RNA, 21 nt, Human
ugggggcacaggguuuguggg

SEQ ID NO: 1113290 - RNA, 21 nt, Human
ugggucuggagagagggugag

SEQ ID NO: 1113291 - RNA, 20 nt, Human
ugggugggucccaccaacuc

SEQ ID NO: 1113292 - RNA, 20 nt, Human
ugugcagggcccagccucug

SEQ ID NO: 1113293 - RNA, 20 nt, Human
ugugcgcugcccaagccugc

SEQ ID NO: 1113294 - RNA, 21 nt, Human
uguguguggcaggcccccuuu

SEQ ID NO: 1113295 - RNA, 18 nt, Human
uuccggggccccgggacg

SEQ ID NO: 1113296 - RNA, 21 nt, Human
uuuggcaagacccuccgccgc

SEQ ID NO: 1113297 - RNA, 21 nt, Human
uuugugggcaccccacccaga

SEQ ID NO: 1113298 - RNA, 18 nt, Human
aaaccaaggcugaggagg

SEQ ID NO: 1113299 - RNA, 21 nt, Human
aagaaguugaccagagaggug

SEQ ID NO: 1113300 - RNA, 24 nt, Human
aagagccaggaaccauccuucaua

SEQ ID NO: 1113301 - RNA, 21 nt, Human
aagagcucguccuucugcccc

SEQ ID NO: 1113302 - RNA, 22 nt, Human
aaguugaccagagaggugguca

SEQ ID NO: 1113303 - RNA, 18 nt, Human
acagcuccggcuucucca

SEQ ID NO: 1113304 - RNA, 18 nt, Human
accaccagcaggauggag

SEQ ID NO: 1113305 - RNA, 19 nt, Human
accaccagcaggauggagg

SEQ ID NO: 1113306 - RNA, 18 nt, Human
acucugaagagccagaag

SEQ ID NO: 1113307 - RNA, 19 nt, Human
agacagggccaccacgacc

SEQ ID NO: 1113308 - RNA, 22 nt, Human
agagcccaauguagagaacugg

SEQ ID NO: 1113309 - RNA, 19 nt, Human
agguggucacaccaugggc

SEQ ID NO: 1113310 - RNA, 22 nt, Human
caccacgaccgcaaaggacugg

SEQ ID NO: 1113311 - RNA, 22 nt, Human
cagcuccggcuucuccaggcuc

SEQ ID NO: 1113312 - RNA, 20 nt, Human
caucaugcuggccaugcucu

SEQ ID NO: 1113313 - RNA, 19 nt, Human
ccaggcucugcucugcgcu

SEQ ID NO: 1113314 - RNA, 21 nt, Human
ccccaccacguacagcuccgg

SEQ ID NO: 1113315 - RNA, 21 nt, Human
ccucgcuggggcccuccucca

SEQ ID NO: 1113316 - RNA, 21 nt, Human
ccugcaccaucaugcuggcca

SEQ ID NO: 1113317 - RNA, 20 nt, Human
cgcggcugauccacaguguc

SEQ ID NO: 1113318 - RNA, 21 nt, Human
cgcuggggucagauggacccu

SEQ ID NO: 1113319 - RNA, 22 nt, Human
cguuguagcaggcaaaccagac

SEQ ID NO: 1113320 - RNA, 20 nt, Human
cucgaagaugccucuucauc

SEQ ID NO: 1113321 - RNA, 20 nt, Human
cucgcuggggcccuccucca

SEQ ID NO: 1113322 - RNA, 18 nt, Human
cugaagagccagaagcuc

SEQ ID NO: 1113323 - RNA, 19 nt, Human
cugaccccugguccccucc

SEQ ID NO: 1113324 - RNA, 23 nt, Human
cuggcagggugcuguacaggagg

SEQ ID NO: 1113325 - RNA, 19 nt, Human
cuucauacaggggcugagc

SEQ ID NO: 1113326 - RNA, 21 nt, Human
gaccccugguccccuccgcag

SEQ ID NO: 1113327 - RNA, 21 nt, Human
gcaccagcaggaggcgcugca

SEQ ID NO: 1113328 - RNA, 19 nt, Human
gcaggaacuugcagauccg

SEQ ID NO: 1113329 - RNA, 22 nt, Human
gcaggcaaaccagaccugcacc

SEQ ID NO: 1113330 - RNA, 20 nt, Human
gcccuccuccaccuucuccu

SEQ ID NO: 1113331 - RNA, 18 nt, Human
gcguagaaaccaaggcug

SEQ ID NO: 1113332 - RNA, 23 nt, Human
ggaccaccagcaggauggaggga

SEQ ID NO: 1113333 - RNA, 21 nt, Human
ggaccagcggccgugcaccag

SEQ ID NO: 1113334 - RNA, 21 nt, Human
ggagggccaggacagggaagg

SEQ ID NO: 1113335 - RNA, 21 nt, Human
ggaguccuugucuuuagagga

SEQ ID NO: 1113336 - RNA, 24 nt, Human
ggcaagacagggccaccacgaccg

SEQ ID NO: 1113337 - RNA, 19 nt, Human
ggcccuccuccaccuucuc

SEQ ID NO: 1113338 - RNA, 20 nt, Human
ggcugaggaggauggucgcc

SEQ ID NO: 1113339 - RNA, 22 nt, Human
gggaagguguuuauggacacac

SEQ ID NO: 1113340 - RNA, 20 nt, Human
gggcugagccggugaagccg

SEQ ID NO: 1113341 - RNA, 21 nt, Human
ggugauggacagcaggcaaga

SEQ ID NO: 1113342 - RNA, 19 nt, Human
uagcaggcaaaccagaccu

SEQ ID NO: 1113343 - RNA, 20 nt, Human
uagcuggaacggcgggcacg

SEQ ID NO: 1113344 - RNA, 20 nt, Human
uccucgcuggggcccuccuc

SEQ ID NO: 1113345 - RNA, 22 nt, Human
uccuugagggcugggaagauga

SEQ ID NO: 1113346 - RNA, 23 nt, Human
ucgcggcugauccacagugucau

SEQ ID NO: 1113347 - RNA, 23 nt, Human
ucgcugaagcuggcgggucccgc

SEQ ID NO: 1113348 - RNA, 19 nt, Human
ucuccaggcucugcucugc

SEQ ID NO: 1113349 - RNA, 20 nt, Human
ugaaaagagccaggaaccau

SEQ ID NO: 1113350 - RNA, 21 nt, Human
ugaagaaguugaccagagagg

SEQ ID NO: 1113351 - RNA, 22 nt, Human
ugaccagagagguggucacacc

SEQ ID NO: 1113352 - RNA, 21 nt, Human
ugacucggagggccaggacag

SEQ ID NO: 1113353 - RNA, 22 nt, Human
ugaggucggcauacagaaacgg

SEQ ID NO: 1113354 - RNA, 22 nt, Human
uggcguagaaaccaaggcugag

SEQ ID NO: 1113355 - RNA, 23 nt, Human
uggcguagaaaccaaggcugagg

SEQ ID NO: 1113356 - RNA, 18 nt, Human
ugggagaaagcauagcug

SEQ ID NO: 1113357 - RNA, 19 nt, Human
uguagagaacuggcagggu

SEQ ID NO: 1113358 - RNA, 21 nt, Human
uugcagcagaacuggcuggag

SEQ ID NO: 1113359 - RNA, 23 nt, Human
auaggaaauaaagagcgaacaug

SEQ ID NO: 1113360 - RNA, 24 nt, Human
auggugauggaguagaaacagcac

SEQ ID NO: 1113361 - RNA, 24 nt, Human
cacagagugccuuccagcagccag

SEQ ID NO: 1113362 - RNA, 24 nt, Human
cagagugccuuccagcagccagcg

SEQ ID NO: 1113363 - RNA, 18 nt, Human
cagcagccagcgcaggau

SEQ ID NO: 1113364 - RNA, 22 nt, Human
cagcuccaugacggugaacgau

SEQ ID NO: 1113365 - RNA, 18 nt, Human
cagcuggugccaccacag

SEQ ID NO: 1113366 - RNA, 19 nt, Human
ccaggaccccaaugaccag

SEQ ID NO: 1113367 - RNA, 19 nt, Human
cccacugugccauggccau

SEQ ID NO: 1113368 - RNA, 18 nt, Human
ccgcaaccucaaccgcua

SEQ ID NO: 1113369 - RNA, 22 nt, Human
ccguggccucagcagcuccuug

SEQ ID NO: 1113370 - RNA, 21 nt, Human
ccucaaccgcuacucugccuu

SEQ ID NO: 1113371 - RNA, 18 nt, Human
ccucagcagcuccuuggu

SEQ ID NO: 1113372 - RNA, 19 nt, Human
ccucccagcauugggcauc

SEQ ID NO: 1113373 - RNA, 25 nt, Human
ccucccagcauugggcauccccugg

SEQ ID NO: 1113374 - RNA, 20 nt, Human
ccuuccugcugucugagccu

SEQ ID NO: 1113375 - RNA, 18 nt, Human
ccuuccuucucuccuucc

SEQ ID NO: 1113376 - RNA, 23 nt, Human
ccuuccuucucuccuuccugcug

SEQ ID NO: 1113377 - RNA, 21 nt, Human
cggaaguuccuuccuuccuuc

SEQ ID NO: 1113378 - RNA, 24 nt, Human
cucacuauccaggacccacugaug

SEQ ID NO: 1113379 - RNA, 19 nt, Human
cucagugcuuuccagcugc

SEQ ID NO: 1113380 - RNA, 21 nt, Human
cugaagccguggccucagcag

SEQ ID NO: 1113381 - RNA, 19 nt, Human
cugcagccgcagcuggugc

SEQ ID NO: 1113382 - RNA, 24 nt, Human
cugcagccgcagcuggugccacca

SEQ ID NO: 1113383 - RNA, 22 nt, Human
gacgacaagugggauggcagcu

SEQ ID NO: 1113384 - RNA, 18 nt, Human
gagguuucaaggcccugc

SEQ ID NO: 1113385 - RNA, 18 nt, Human
gcccugaagccguggccu

SEQ ID NO: 1113386 - RNA, 22 nt, Human
uaggaaauaaagagcgaacaug

SEQ ID NO: 1113387 - RNA, 18 nt, Human
uauccaggacccacugau

SEQ ID NO: 1113388 - RNA, 21 nt, Human
ucagcagcuccuugguggcaa

SEQ ID NO: 1113389 - RNA, 20 nt, Human
uccagcugcuacugcagccg

SEQ ID NO: 1113390 - RNA, 22 nt, Human
uccagcugcuacugcagccgca

SEQ ID NO: 1113391 - RNA, 19 nt, Human
uccaggcgguagggaugcc

SEQ ID NO: 1113392 - RNA, 24 nt, Human
uccccacgugggcaggagcucggu

SEQ ID NO: 1113393 - RNA, 23 nt, Human
ucgguacuacggaaguuccuucc

SEQ ID NO: 1113394 - RNA, 21 nt, Human
ugccauggccauuguaccacc

SEQ ID NO: 1113395 - RNA, 26 nt, Human
ugcccugaagccguggccucagcagc

SEQ ID NO: 1113396 - RNA, 21 nt, Human
uggaguagaaacagcaccacg

SEQ ID NO: 1113397 - RNA, 20 nt, Human
ugggcauccccugggccugg

SEQ ID NO: 1113398 - RNA, 23 nt, Human
uuccagcugcuacugcagccgca

SEQ ID NO: 1113399 - RNA, 20 nt, Human
uuccaggcgguagggaugcc

SEQ ID NO: 1113400 - RNA, 23 nt, Human
aaaaacgggcaacuuuagagccc

SEQ ID NO: 1113401 - RNA, 20 nt, Human
acaaauacugacaaaaggaa

SEQ ID NO: 1113402 - RNA, 24 nt, Human
agcaacaaauacugacaaaaggaa

SEQ ID NO: 1113403 - RNA, 21 nt, Human
caaaauugggagggggcaugc

SEQ ID NO: 1113404 - RNA, 19 nt, Human
cagcaacaaauacugacaa

SEQ ID NO: 1113405 - RNA, 26 nt, Human
caggaagagcaggaaugaucaguuca

SEQ ID NO: 1113406 - RNA, 24 nt, Human
ccaaacaucuuuguugagguuuca

SEQ ID NO: 1113407 - RNA, 22 nt, Human
gggcaacuuuagagcccacuaa

SEQ ID NO: 1113408 - RNA, 21 nt, Human
guuuucagcaacaaauacuga

SEQ ID NO: 1113409 - RNA, 21 nt, Human
uagagcccacuaaagcuauac

SEQ ID NO: 1113410 - RNA, 23 nt, Human
uagguuuucagcaacaaauacug

SEQ ID NO: 1113411 - RNA, 20 nt, Human
ugggagggggcaugcucuga

SEQ ID NO: 1113412 - RNA, 23 nt, Human
ugggagggggcaugcucugauuu

SEQ ID NO: 1113413 - RNA, 19 nt, Human
uuagagcccacuaaagcua

SEQ ID NO: 1113414 - RNA, 23 nt, Human
uuccauuuuuaguuccagggucc

SEQ ID NO: 1113415 - RNA, 22 nt, Human
uugaagcacugaaccaaacauc

SEQ ID NO: 1113416 - RNA, 18 nt, Human
uuucuggguuuuucuagg

SEQ ID NO: 1113417 - RNA, 22 nt, Human
uuuucuagguuuucagcaacaa

SEQ ID NO: 1113418 - RNA, 20 nt, Human
aaaagguggaaaauauaaua

SEQ ID NO: 1113419 - RNA, 24 nt, Human
aaagugcagggauuacaggcauga

SEQ ID NO: 1113420 - RNA, 22 nt, Human
aaaucauccaugaguccaaaac

SEQ ID NO: 1113421 - RNA, 20 nt, Human
aacaauaaaaauacucccag

SEQ ID NO: 1113422 - RNA, 22 nt, Human
aacagaaaucucccuaaaucua

SEQ ID NO: 1113423 - RNA, 25 nt, Human
aacuacuucuuaaaaaauggaauua

SEQ ID NO: 1113424 - RNA, 18 nt, Human
aagcaaagacaaacagca

SEQ ID NO: 1113425 - RNA, 18 nt, Human
aagcaaagacaaacagca

SEQ ID NO: 1113426 - RNA, 19 nt, Human
aagguguucacuauauaaa

SEQ ID NO: 1113427 - RNA, 19 nt, Human
aaguagcugggguuacagg

SEQ ID NO: 1113428 - RNA, 18 nt, Human
aaucauccaugaguccaa

SEQ ID NO: 1113429 - RNA, 24 nt, Human
acacaguggaaaucaagcacuuaa

SEQ ID NO: 1113430 - RNA, 18 nt, Human
acaggguuucaccauguu

SEQ ID NO: 1113431 - RNA, 19 nt, Human
acaggguuucaccauguua

SEQ ID NO: 1113432 - RNA, 24 nt, Human
acaggguuucaccauguuaaccag

SEQ ID NO: 1113433 - RNA, 21 nt, Human
acagguacucaccaccaugcc

SEQ ID NO: 1113434 - RNA, 22 nt, Human
agacaaacagcaaugggcaaac

SEQ ID NO: 1113435 - RNA, 21 nt, Human
aggaagguauuuguucucaca

SEQ ID NO: 1113436 - RNA, 25 nt, Human
aggcuggagugcaguggugugaucu

SEQ ID NO: 1113437 - RNA, 22 nt, Human
agggauuacaggcaugagcuac

SEQ ID NO: 1113438 - RNA, 24 nt, Human
agggauuacaggcaugagcuacug

SEQ ID NO: 1113439 - RNA, 19 nt, Human
aggguuuugagaaaaaucc

SEQ ID NO: 1113440 - RNA, 22 nt, Human
aguagagacaggguuucaccau

SEQ ID NO: 1113441 - RNA, 23 nt, Human
agugcaguggugugaucuuggcu

SEQ ID NO: 1113442 - RNA, 24 nt, Human
agugcaguggugugaucuuggcuc

SEQ ID NO: 1113443 - RNA, 20 nt, Human
aucuacagaagguuuuccuu

SEQ ID NO: 1113444 - RNA, 21 nt, Human
augaacuacagacacacuccu

SEQ ID NO: 1113445 - RNA, 21 nt, Human
caaaauucugccaacuacuuc

SEQ ID NO: 1113446 - RNA, 24 nt, Human
caaagugcagggauuacaggcaug

SEQ ID NO: 1113447 - RNA, 22 nt, Human
caagcacuucuccugucucagc

SEQ ID NO: 1113448 - RNA, 23 nt, Human
caaugcagaagaacuaucugcaa

SEQ ID NO: 1113449 - RNA, 18 nt, Human
cacaagcaaagacaaaca

SEQ ID NO: 1113450 - RNA, 23 nt, Human
caccaugccuggcuaauuuuugu

SEQ ID NO: 1113451 - RNA, 21 nt, Human
caccauguuaaccaggcuggu

SEQ ID NO: 1113452 - RNA, 24 nt, Human
caccauguuaaccaggcuggucuc

SEQ ID NO: 1113453 - RNA, 27 nt, Human
caccauguuaaccaggcuggucucaaa

SEQ ID NO: 1113454 - RNA, 22 nt, Human
cacucuaagaugaaaguuuuau

SEQ ID NO: 1113455 - RNA, 20 nt, Human
cacugacaacaaugcagaag

SEQ ID NO: 1113456 - RNA, 21 nt, Human
cacugcaaccuccgccuccua

SEQ ID NO: 1113457 - RNA, 23 nt, Human
cacuucaaaucauccaugagucc

SEQ ID NO: 1113458 - RNA, 23 nt, Human
cagaacgggagaaucagaagcuc

SEQ ID NO: 1113459 - RNA, 18 nt, Human
cagaagcucagagacugc

SEQ ID NO: 1113460 - RNA, 24 nt, Human
caggguuucaccauguuaaccagg

SEQ ID NO: 1113461 - RNA, 18 nt, Human
caucacaagucaaagccu

SEQ ID NO: 1113462 - RNA, 26 nt, Human
caucuccauuuaaugugaccccaaaa

SEQ ID NO: 1113463 - RNA, 24 nt, Human
cauguuaaccaggcuggucucaaa

SEQ ID NO: 1113464 - RNA, 24 nt, Human
ccaaagugcagggauuacaggcau

SEQ ID NO: 1113465 - RNA, 21 nt, Human
ccacacaggaauaucccuaau

SEQ ID NO: 1113466 - RNA, 22 nt, Human
cccaaguagcugggguuacagg

SEQ ID NO: 1113467 - RNA, 23 nt, Human
cccaaguagcugggguuacaggu

SEQ ID NO: 1113468 - RNA, 24 nt, Human
cccacacugacaacaaugcagaag

SEQ ID NO: 1113469 - RNA, 19 nt, Human
cccaggcuggagugcagug

SEQ ID NO: 1113470 - RNA, 22 nt, Human
cccaggcuggagugcaguggug

SEQ ID NO: 1113471 - RNA, 18 nt, Human
ccccgucucccaggcugg

SEQ ID NO: 1113472 - RNA, 21 nt, Human
cccuaugcaucuguccaucuc

SEQ ID NO: 1113473 - RNA, 21 nt, Human
ccuaacacuacccacacugac

SEQ ID NO: 1113474 - RNA, 21 nt, Human
ccuagguucaagcacuucucc

SEQ ID NO: 1113475 - RNA, 23 nt, Human
ccuagguucaagcacuucuccug

SEQ ID NO: 1113476 - RNA, 19 nt, Human
ccucccaaagugcagggau

SEQ ID NO: 1113477 - RNA, 20 nt, Human
ccucccaaagugcagggauu

SEQ ID NO: 1113478 - RNA, 18 nt, Human
ccucugacacaguggaaa

SEQ ID NO: 1113479 - RNA, 21 nt, Human
cgccuccuagguucaagcacu

SEQ ID NO: 1113480 - RNA, 18 nt, Human
cguaagaaacuaccuguu

SEQ ID NO: 1113481 - RNA, 27 nt, Human
cuaacacuacccacacugacaacaaug

SEQ ID NO: 1113482 - RNA, 22 nt, Human
cuacagaacgggagaaucagaa

SEQ ID NO: 1113483 - RNA, 22 nt, Human
cuacugugcccagcuaaacagg

SEQ ID NO: 1113484 - RNA, 24 nt, Human
cucagccucccaaguagcuggggu

SEQ ID NO: 1113485 - RNA, 23 nt, Human
cuccuugaguguccacuuucagg

SEQ ID NO: 1113486 - RNA, 24 nt, Human
cucuugauuggcaggaauaagaau

SEQ ID NO: 1113487 - RNA, 24 nt, Human
cugaccucaagccucccaaagugc

SEQ ID NO: 1113488 - RNA, 23 nt, Human
cugcaaccuccgccuccuagguu

SEQ ID NO: 1113489 - RNA, 23 nt, Human
cuggccaaacaauaaaaauacuc

SEQ ID NO: 1113490 - RNA, 23 nt, Human
cugucucagccucccaaguagcu

SEQ ID NO: 1113491 - RNA, 19 nt, Human
cuucuucauucuaaauuuc

SEQ ID NO: 1113492 - RNA, 24 nt, Human
cuuuccccgucucccaggcuggag

SEQ ID NO: 1113493 - RNA, 19 nt, Human
gaacuacagacacacuccu

SEQ ID NO: 1113494 - RNA, 22 nt, Human
gaaguuccuaacacuacccaca

SEQ ID NO: 1113495 - RNA, 22 nt, Human
gacuuacuucuucuucauucua

SEQ ID NO: 1113496 - RNA, 21 nt, Human
gauuacaggcaugagcuacug

SEQ ID NO: 1113497 - RNA, 24 nt, Human
gauuacaggcaugagcuacugugc

SEQ ID NO: 1113498 - RNA, 22 nt, Human
gcaaccuccgccuccuagguuc

SEQ ID NO: 1113499 - RNA, 23 nt, Human
gcuggucucaaacuccugaccuc

SEQ ID NO: 1113500 - RNA, 18 nt, Human
ggagaaucagaagcucag

SEQ ID NO: 1113501 - RNA, 24 nt, Human
ggauuacaggcaugagcuacugug

SEQ ID NO: 1113502 - RNA, 21 nt, Human
ggcaggcacacuuaaaaaugc

SEQ ID NO: 1113503 - RNA, 22 nt, Human
ggccaaacaauaaaaauacucc

SEQ ID NO: 1113504 - RNA, 22 nt, Human
ggcuggagugcaguggugugau

SEQ ID NO: 1113505 - RNA, 24 nt, Human
ggcuggucucaaacuccugaccuc

SEQ ID NO: 1113506 - RNA, 18 nt, Human
gggauuacaggcaugagc

SEQ ID NO: 1113507 - RNA, 21 nt, Human
gggauuacaggcaugagcuac

SEQ ID NO: 1113508 - RNA, 20 nt, Human
gguggaaucaggaucacaga

SEQ ID NO: 1113509 - RNA, 24 nt, Human
gguuacagguacucaccaccaugc

SEQ ID NO: 1113510 - RNA, 20 nt, Human
gucucccaggcuggagugca

SEQ ID NO: 1113511 - RNA, 24 nt, Human
uaauuuuuguguuuuuaguagaga

SEQ ID NO: 1113512 - RNA, 24 nt, Human
uacaggcaugagcuacugugccca

SEQ ID NO: 1113513 - RNA, 22 nt, Human
uacagguacucaccaccaugcc

SEQ ID NO: 1113514 - RNA, 22 nt, Human
uagagacaggguuucaccaugu

SEQ ID NO: 1113515 - RNA, 24 nt, Human
uaguagagacaggguuucaccaug

SEQ ID NO: 1113516 - RNA, 26 nt, Human
uaguagagacaggguuucaccauguu

SEQ ID NO: 1113517 - RNA, 20 nt, Human
uauacuccuuaaacaacuuu

SEQ ID NO: 1113518 - RNA, 24 nt, Human
uauccaauaccugucacacuaagu

SEQ ID NO: 1113519 - RNA, 23 nt, Human
ucacaagcaaagacaaacagcaa

SEQ ID NO: 1113520 - RNA, 19 nt, Human
ucacugcaaccuccgccuc

SEQ ID NO: 1113521 - RNA, 24 nt, Human
ucacugcaaccuccgccuccuagg

SEQ ID NO: 1113522 - RNA, 25 nt, Human
ucacugcaaccuccgccuccuaggu

SEQ ID NO: 1113523 - RNA, 27 nt, Human
ucacugcaaccuccgccuccuagguuc

SEQ ID NO: 1113524 - RNA, 20 nt, Human
ucagccucccaaguagcugg

SEQ ID NO: 1113525 - RNA, 20 nt, Human
ucagccucccaaguagcugg

SEQ ID NO: 1113526 - RNA, 24 nt, Human
ucccaaagugcagggauuacaggc

SEQ ID NO: 1113527 - RNA, 23 nt, Human
ucccaaguagcugggguuacagg

SEQ ID NO: 1113528 - RNA, 21 nt, Human
ucccaggcuggagugcagugg

SEQ ID NO: 1113529 - RNA, 22 nt, Human
ucccaguaaaaaagguggaaaa

SEQ ID NO: 1113530 - RNA, 21 nt, Human
uccuagguucaagcacuucuc

SEQ ID NO: 1113531 - RNA, 24 nt, Human
uccuagguucaagcacuucuccug

SEQ ID NO: 1113532 - RNA, 25 nt, Human
ucucaaacuccugaccucaagccuc

SEQ ID NO: 1113533 - RNA, 21 nt, Human
ucucacauaggacucggcagg

SEQ ID NO: 1113534 - RNA, 24 nt, Human
ucucccaggcuggagugcaguggu

SEQ ID NO: 1113535 - RNA, 26 nt, Human
ucuccugucucagccucccaaguagc

SEQ ID NO: 1113536 - RNA, 24 nt, Human
ucuuuccccgucucccaggcugga

SEQ ID NO: 1113537 - RNA, 19 nt, Human
ugaaacaaaauccacauua

SEQ ID NO: 1113538 - RNA, 20 nt, Human
ugaaacaaaauccacauuau

SEQ ID NO: 1113539 - RNA, 21 nt, Human
ugaacuacagacacacuccuu

SEQ ID NO: 1113540 - RNA, 22 nt, Human
ugcaguggugugaucuuggcuc

SEQ ID NO: 1113541 - RNA, 18 nt, Human
uggaaaauaagcugaagg

SEQ ID NO: 1113542 - RNA, 19 nt, Human
uggagugcaguggugugau

SEQ ID NO: 1113543 - RNA, 23 nt, Human
uggagugcaguggugugaucuug

SEQ ID NO: 1113544 - RNA, 24 nt, Human
uggagugcaguggugugaucuugg

SEQ ID NO: 1113545 - RNA, 19 nt, Human
uggccaaacaauaaaaaua

SEQ ID NO: 1113546 - RNA, 24 nt, Human
uggccaaacaauaaaaauacuccc

SEQ ID NO: 1113547 - RNA, 26 nt, Human
uggccaaacaauaaaaauacucccag

SEQ ID NO: 1113548 - RNA, 19 nt, Human
ugggguuacagguacucac

SEQ ID NO: 1113549 - RNA, 21 nt, Human
ugggguuacagguacucacca

SEQ ID NO: 1113550 - RNA, 24 nt, Human
ugucucagccucccaaguagcugg

SEQ ID NO: 1113551 - RNA, 22 nt, Human
ugugauggagucuuuccccguc

SEQ ID NO: 1113552 - RNA, 21 nt, Human
uuaaccuauaucaagaaacug

SEQ ID NO: 1113553 - RNA, 24 nt, Human
uuaguagagacaggguuucaccau

SEQ ID NO: 1113554 - RNA, 23 nt, Human
uugcaaaugaacuacagacacac

SEQ ID NO: 1113555 - RNA, 24 nt, Human
uuuccccgucucccaggcuggagu

SEQ ID NO: 1113556 - RNA, 23 nt, Human
uuugacugcaacacuguggcuuu

SEQ ID NO: 1113557 - RNA, 22 nt, Human
uuuuguguuuuuaguagagaca

SEQ ID NO: 1113558 - RNA, 24 nt, Human
uuuuuaguagagacaggguuucac

SEQ ID NO: 1113559 - RNA, 20 nt, Human
uuuuuguguuuuuaguagag

SEQ ID NO: 1113560 - RNA, 24 nt, Human
aaccaucugaacaucaaagaauga

SEQ ID NO: 1113561 - RNA, 22 nt, Human
accuguuacacagaagaacauc

SEQ ID NO: 1113562 - RNA, 20 nt, Human
agccccugacacggcucaua

SEQ ID NO: 1113563 - RNA, 18 nt, Human
cagagggccacaaccauc

SEQ ID NO: 1113564 - RNA, 20 nt, Human
cccccgaacccuaaaggaag

SEQ ID NO: 1113565 - RNA, 18 nt, Human
ccccuacgacauuagcuu

SEQ ID NO: 1113566 - RNA, 19 nt, Human
ccucccugagcccucacug

SEQ ID NO: 1113567 - RNA, 22 nt, Human
ggccacaaccaucugaacauca

SEQ ID NO: 1113568 - RNA, 20 nt, Human
gggaacaaggauauuuuguc

SEQ ID NO: 1113569 - RNA, 18 nt, Human
ggugcugguggugguggu

SEQ ID NO: 1113570 - RNA, 24 nt, Human
guacaauucauuaauaacucugag

SEQ ID NO: 1113571 - RNA, 20 nt, Human
uauuuugucucuucuguuca

SEQ ID NO: 1113572 - RNA, 19 nt, Human
ucacugcagcaccuaggac

SEQ ID NO: 1113573 - RNA, 19 nt, Human
ucccugagcccucacuguc

SEQ ID NO: 1113574 - RNA, 21 nt, Human
ucccuuguggaaggaggagau

SEQ ID NO: 1113575 - RNA, 20 nt, Human
ucugaacaucaaagaaugag

SEQ ID NO: 1113576 - RNA, 19 nt, Human
ugauggagugguggugcug

SEQ ID NO: 1113577 - RNA, 18 nt, Human
ugcugguggugguggugg

SEQ ID NO: 1113578 - RNA, 20 nt, Human
uggaaggaggagaucccccg

SEQ ID NO: 1113579 - RNA, 23 nt, Human
uggaaggaggagaucccccgaac

SEQ ID NO: 1113580 - RNA, 19 nt, Human
ugguggugcuggugguggu

SEQ ID NO: 1113581 - RNA, 20 nt, Human
ugguggugcuggugguggug

SEQ ID NO: 1113582 - RNA, 19 nt, Human
ugguggugguggugggagc

SEQ ID NO: 1113583 - RNA, 18 nt, Human
uggugguggugguggugg

SEQ ID NO: 1113584 - RNA, 22 nt, Human
uggugguggugguggugggagc

SEQ ID NO: 1113585 - RNA, 20 nt, Human
uguuuugggccccuacgaca

SEQ ID NO: 1113586 - RNA, 19 nt, Human
uucacugcagcaccuagga

SEQ ID NO: 1113587 - RNA, 24 nt, Human
uugacuugcauuccuuuuuuuugu

SEQ ID NO: 1113588 - RNA, 19 nt, Human
uugauggagugguggugcu

SEQ ID NO: 1113589 - RNA, 20 nt, Human
uuuuguuuguuugcuuuguu

SEQ ID NO: 1113590 - RNA, 24 nt, Human
augacagcagcuuuaaauaaguac

SEQ ID NO: 1113591 - RNA, 19 nt, Human
auuuguaagacugcucccu

SEQ ID NO: 1113592 - RNA, 20 nt, Human
caguaugaacuuucugaugu

SEQ ID NO: 1113593 - RNA, 19 nt, Human
caguaugaauucuuugaug

SEQ ID NO: 1113594 - RNA, 21 nt, Human
cauucauuacaugcauaaggu

SEQ ID NO: 1113595 - RNA, 23 nt, Human
ccuguaucuucuuggauuuuugu

SEQ ID NO: 1113596 - RNA, 21 nt, Human
cuccaguaugaauuuuuucau

SEQ ID NO: 1113597 - RNA, 23 nt, Human
cuccaguaugaauuuuuucauga

SEQ ID NO: 1113598 - RNA, 22 nt, Human
ggaagaauucucuaauguuuca

SEQ ID NO: 1113599 - RNA, 22 nt, Human
gucaagucuuuucagacaaaau

SEQ ID NO: 1113600 - RNA, 18 nt, Human
gugcaaugagguguuaau

SEQ ID NO: 1113601 - RNA, 20 nt, Human
uaaauaagccauucauuccc

SEQ ID NO: 1113602 - RNA, 19 nt, Human
uaaauaaguacaugauaua

SEQ ID NO: 1113603 - RNA, 22 nt, Human
uaccacauucauuacaugcaua

SEQ ID NO: 1113604 - RNA, 21 nt, Human
ucauguaaugugcaaugaggu

SEQ ID NO: 1113605 - RNA, 23 nt, Human
ucauuguuguguuuauucuuagg

SEQ ID NO: 1113606 - RNA, 18 nt, Human
ugaugugcaaugaggcuu

SEQ ID NO: 1113607 - RNA, 24 nt, Human
ugcuuugucaaguuuguuucagcu

SEQ ID NO: 1113608 - RNA, 19 nt, Human
uggaagugaucauguaaug

SEQ ID NO: 1113609 - RNA, 20 nt, Human
uggcugaaugcuuuuccaca

SEQ ID NO: 1113610 - RNA, 24 nt, Human
uggcugaaugcuuuuccacacuca

SEQ ID NO: 1113611 - RNA, 18 nt, Human
uguggcuuuuucagaagg

SEQ ID NO: 1113612 - RNA, 21 nt, Human
uguuguuaugcugauggaaga

SEQ ID NO: 1113613 - RNA, 18 nt, Human
uguuucuuuacuuuucca

SEQ ID NO: 1113614 - RNA, 24 nt, Human
uuaaaugacagcagcuuuaaauaa

SEQ ID NO: 1113615 - RNA, 19 nt, Human
uucauaagguuucucucca

SEQ ID NO: 1113616 - RNA, 21 nt, Human
uugcuuugucaaguuuguuuc

SEQ ID NO: 1113617 - RNA, 21 nt, Human
uuuccacacucauuacauuca

SEQ ID NO: 1113618 - RNA, 18 nt, Human
uuuguggcuuuuucagaa

SEQ ID NO: 1113619 - RNA, 23 nt, Human
aaacuccuggacucaagcaaucc

SEQ ID NO: 1113620 - RNA, 24 nt, Human
aaagugcugggacuauagguauga

SEQ ID NO: 1113621 - RNA, 25 nt, Human
aagcaauccuuccaccuuggcuucc

SEQ ID NO: 1113622 - RNA, 27 nt, Human
aagcaauccuuccaccuuggcuuccca

SEQ ID NO: 1113623 - RNA, 19 nt, Human
aagugcugggacuauaggu

SEQ ID NO: 1113624 - RNA, 26 nt, Human
aagugcugggacuauagguaugaacc

SEQ ID NO: 1113625 - RNA, 25 nt, Human
aaguucuuuccagcuguuuacaucc

SEQ ID NO: 1113626 - RNA, 25 nt, Human
acuauguugcccaggcuggucccaa

SEQ ID NO: 1113627 - RNA, 22 nt, Human
aggucucacuauguugcccagg

SEQ ID NO: 1113628 - RNA, 19 nt, Human
auuuaagauuacuugguug

SEQ ID NO: 1113629 - RNA, 25 nt, Human
caaacuccuggacucaagcaauccu

SEQ ID NO: 1113630 - RNA, 24 nt, Human
caaagugcugggacuauagguaug

SEQ ID NO: 1113631 - RNA, 27 nt, Human
caagcaauccuuccaccuuggcuuccc

SEQ ID NO: 1113632 - RNA, 19 nt, Human
cacuauguugcccaggcug

SEQ ID NO: 1113633 - RNA, 22 nt, Human
cacuauguugcccaggcugguc

SEQ ID NO: 1113634 - RNA, 27 nt, Human
cacuauguugcccaggcuggucccaaa

SEQ ID NO: 1113635 - RNA, 21 nt, Human
ccaaagugcugggacuauagg

SEQ ID NO: 1113636 - RNA, 22 nt, Human
ccaaagugcugggacuauaggu

SEQ ID NO: 1113637 - RNA, 24 nt, Human
ccaaagugcugggacuauagguau

SEQ ID NO: 1113638 - RNA, 22 nt, Human
cccaaagugcugggacuauagg

SEQ ID NO: 1113639 - RNA, 23 nt, Human
ccucaccugucugguucccuucc

SEQ ID NO: 1113640 - RNA, 24 nt, Human
ccucugaaaauaucuuugaagaau

SEQ ID NO: 1113641 - RNA, 20 nt, Human
ccuggacucaagcaauccuu

SEQ ID NO: 1113642 - RNA, 19 nt, Human
ccugucugguucccuucca

SEQ ID NO: 1113643 - RNA, 24 nt, Human
cucaagcaauccuuccaccuuggc

SEQ ID NO: 1113644 - RNA, 21 nt, Human
cucugaaggguccuagaaaaa

SEQ ID NO: 1113645 - RNA, 23 nt, Human
cuuugaagaauauuuuagaggga

SEQ ID NO: 1113646 - RNA, 19 nt, Human
gacuauagguaugaaccac

SEQ ID NO: 1113647 - RNA, 21 nt, Human
gacuauagguaugaaccacug

SEQ ID NO: 1113648 - RNA, 19 nt, Human
gcuggucccaaacuccugg

SEQ ID NO: 1113649 - RNA, 22 nt, Human
guccuguuucucucagcuggca

SEQ ID NO: 1113650 - RNA, 25 nt, Human
uaauaggcccugaccucuccucacc

SEQ ID NO: 1113651 - RNA, 21 nt, Human
uagguaugaaccacugugcca

SEQ ID NO: 1113652 - RNA, 23 nt, Human
uauguugcccaggcuggucccaa

SEQ ID NO: 1113653 - RNA, 24 nt, Human
uauguugcccaggcuggucccaaa

SEQ ID NO: 1113654 - RNA, 23 nt, Human
ucccaaagugcugggacuauagg

SEQ ID NO: 1113655 - RNA, 24 nt, Human
ucccaaagugcugggacuauaggu

SEQ ID NO: 1113656 - RNA, 23 nt, Human
uccccagauuuaagauuacuugg

SEQ ID NO: 1113657 - RNA, 19 nt, Human
ucucacuauguugcccagg

SEQ ID NO: 1113658 - RNA, 23 nt, Human
ucucacuauguugcccaggcugg

SEQ ID NO: 1113659 - RNA, 24 nt, Human
ucucacuauguugcccaggcuggu

SEQ ID NO: 1113660 - RNA, 26 nt, Human
ucucacuauguugcccaggcuggucc

SEQ ID NO: 1113661 - RNA, 27 nt, Human
ucucacuauguugcccaggcugguccc

SEQ ID NO: 1113662 - RNA, 24 nt, Human
ugaggucucacuauguugcccagg

SEQ ID NO: 1113663 - RNA, 24 nt, Human
ugcccaggcuggucccaaacuccu

SEQ ID NO: 1113664 - RNA, 22 nt, Human
ugggacuauagguaugaaccac

SEQ ID NO: 1113665 - RNA, 24 nt, Human
ugggacuauagguaugaaccacug

SEQ ID NO: 1113666 - RNA, 30 nt, Human
ugggacuauagguaugaaccacugugccaa

SEQ ID NO: 1113667 - RNA, 22 nt, Human
uugcccugugaccucaguucuc

SEQ ID NO: 1113668 - RNA, 22 nt, Human
uugguugcccugugaccucagu

SEQ ID NO: 1113669 - RNA, 22 nt, Human
uuuaagauuacuugguugcccu

SEQ ID NO: 1113670 - RNA, 22 nt, Human
aauccuggaacuuuucccacua

SEQ ID NO: 1113671 - RNA, 19 nt, Human
cagcaggaaguuaaaaaca

SEQ ID NO: 1113672 - RNA, 22 nt, Human
cgaaacaagcaguuuucagccc

SEQ ID NO: 1113673 - RNA, 20 nt, Human
uaaaaacacugguaaaucaa

SEQ ID NO: 1113674 - RNA, 25 nt, Human
uaauccuggaacuuuucccacuagc

SEQ ID NO: 1113675 - RNA, 27 nt, Human
uaguuuccugacauguaauccuggaac

SEQ ID NO: 1113676 - RNA, 22 nt, Human
ugaauucccaggaaucaaucac

SEQ ID NO: 1113677 - RNA, 24 nt, Human
uguaauccuggaacuuuucccacu

SEQ ID NO: 1113678 - RNA, 22 nt, Human
uuagauguuugcugucaaguuu

SEQ ID NO: 1113679 - RNA, 21 nt, Human
uuuccugacauguaauccugg

SEQ ID NO: 1113680 - RNA, 19 nt, Human
aaaugucuuuaaauagaua

SEQ ID NO: 1113681 - RNA, 23 nt, Human
agcuucuaauggugcaacaaucu

SEQ ID NO: 1113682 - RNA, 20 nt, Human
cgagaaaaacauuaaguugg

SEQ ID NO: 1113683 - RNA, 18 nt, Human
uauuugaauauuauaauu

SEQ ID NO: 1113684 - RNA, 20 nt, Human
ucuguggaucaaccuagcuu

SEQ ID NO: 1113685 - RNA, 22 nt, Human
uguggaucaaccuagcuucuaa

SEQ ID NO: 1113686 - RNA, 22 nt, Human
uucacauucuucgagaaaaaca

SEQ ID NO: 1113687 - RNA, 19 nt, Human
aaaaauauauauuccuauc

SEQ ID NO: 1113688 - RNA, 21 nt, Human
aaaacaaaaucauacuccucc

SEQ ID NO: 1113689 - RNA, 22 nt, Human
aaaacaaaaucauacuccuccu

SEQ ID NO: 1113690 - RNA, 23 nt, Human
aaaauauauauuccuaucuuuug

SEQ ID NO: 1113691 - RNA, 25 nt, Human
aaagugcuugagauuacaggcauga

SEQ ID NO: 1113692 - RNA, 18 nt, Human
aacaaguguaacuaacuu

SEQ ID NO: 1113693 - RNA, 19 nt, Human
aaccaccacaccuggccug

SEQ ID NO: 1113694 - RNA, 21 nt, Human
aacuaaaaacaaaaucauacu

SEQ ID NO: 1113695 - RNA, 20 nt, Human
aagaaagaaguuaaaaagaa

SEQ ID NO: 1113696 - RNA, 22 nt, Human
aagaaagaaguuaaaaagaaga

SEQ ID NO: 1113697 - RNA, 25 nt, Human
aagaaagaaguuaaaaagaagaggu

SEQ ID NO: 1113698 - RNA, 22 nt, Human
aagacuggguaauaauccauua

SEQ ID NO: 1113699 - RNA, 23 nt, Human
aagauuucuugaaguaagccacu

SEQ ID NO: 1113700 - RNA, 19 nt, Human
aagcugcuuuucuaauucu

SEQ ID NO: 1113701 - RNA, 20 nt, Human
aaggaucggguagcucaaaa

SEQ ID NO: 1113702 - RNA, 18 nt, Human
aagugauccucccacuuc

SEQ ID NO: 1113703 - RNA, 21 nt, Human
aagugauccucccacuucaga

SEQ ID NO: 1113704 - RNA, 27 nt, Human
aagugcuugagauuacaggcaugaacc

SEQ ID NO: 1113705 - RNA, 18 nt, Human
aaugacaucuuggggacc

SEQ ID NO: 1113706 - RNA, 21 nt, Human
aaugagguuaaaaaugggugu

SEQ ID NO: 1113707 - RNA, 24 nt, Human
acagaauuuccaucauuuuuaaag

SEQ ID NO: 1113708 - RNA, 23 nt, Human
acagggcuucuaaaagggcagga

SEQ ID NO: 1113709 - RNA, 20 nt, Human
accacauuuccuuuauccau

SEQ ID NO: 1113710 - RNA, 21 nt, Human
acccugaaauauuuuggaaaa

SEQ ID NO: 1113711 - RNA, 22 nt, Human
acuacaggugcaugccaccauu

SEQ ID NO: 1113712 - RNA, 19 nt, Human
acugcagccuugaccuccu

SEQ ID NO: 1113713 - RNA, 24 nt, Human
agaaauagcccuuuggcccacagg

SEQ ID NO: 1113714 - RNA, 18 nt, Human
agagaauccagucuauga

SEQ ID NO: 1113715 - RNA, 21 nt, Human
agagaauccagucuaugaaaa

SEQ ID NO: 1113716 - RNA, 22 nt, Human
agauuacaggcaugaaccacca

SEQ ID NO: 1113717 - RNA, 18 nt, Human
agcucaaaagaaggcaag

SEQ ID NO: 1113718 - RNA, 20 nt, Human
agcuggucucaaacuccugg

SEQ ID NO: 1113719 - RNA, 25 nt, Human
aggaaaaggugaguuacauuuagaa

SEQ ID NO: 1113720 - RNA, 18 nt, Human
aggauauacuguuugaaa

SEQ ID NO: 1113721 - RNA, 22 nt, Human
aggcaagcuuccucagagcuca

SEQ ID NO: 1113722 - RNA, 19 nt, Human
aggcaugaaccaccacacc

SEQ ID NO: 1113723 - RNA, 20 nt, Human
aggcugggguccagugagcu

SEQ ID NO: 1113724 - RNA, 22 nt, Human
agggaaccagguuugcaaaagu

SEQ ID NO: 1113725 - RNA, 18 nt, Human
auaaagaagcaaguuuaa

SEQ ID NO: 1113726 - RNA, 24 nt, Human
aucauacauaaguaaauguauuug

SEQ ID NO: 1113727 - RNA, 24 nt, Human
auuggcugacaaguugcuuuuugu

SEQ ID NO: 1113728 - RNA, 20 nt, Human
auuucuugaaguaagccacu

SEQ ID NO: 1113729 - RNA, 25 nt, Human
caaagugcuugagauuacaggcaug

SEQ ID NO: 1113730 - RNA, 21 nt, Human
caagaauaaagcugcuuuucu

SEQ ID NO: 1113731 - RNA, 19 nt, Human
cacauaguucaaaaucagg

SEQ ID NO: 1113732 - RNA, 19 nt, Human
caccucaaauacuuaacac

SEQ ID NO: 1113733 - RNA, 20 nt, Human
cacugagcacaauauucucc

SEQ ID NO: 1113734 - RNA, 19 nt, Human
cacugcagccuugaccucc

SEQ ID NO: 1113735 - RNA, 21 nt, Human
cacugcagccuugaccuccug

SEQ ID NO: 1113736 - RNA, 21 nt, Human
cacugcagccuugaccuccug

SEQ ID NO: 1113737 - RNA, 21 nt, Human
cacuguguugccuuagcuggu

SEQ ID NO: 1113738 - RNA, 24 nt, Human
cacuguguugccuuagcuggucuc

SEQ ID NO: 1113739 - RNA, 23 nt, Human
cagaauuuccaucauuuuuaaag

SEQ ID NO: 1113740 - RNA, 20 nt, Human
cagccuugaccuccuggacu

SEQ ID NO: 1113741 - RNA, 21 nt, Human
cauuaauaauugccaccuggc

SEQ ID NO: 1113742 - RNA, 25 nt, Human
ccaaagugcuugagauuacaggcau

SEQ ID NO: 1113743 - RNA, 19 nt, Human
ccacugcagccuugaccuc

SEQ ID NO: 1113744 - RNA, 20 nt, Human
cccugaaauauuuuggaaaa

SEQ ID NO: 1113745 - RNA, 22 nt, Human
ccuagaagugguauuacugaau

SEQ ID NO: 1113746 - RNA, 23 nt, Human
ccucuguaaccaccauucugcuc

SEQ ID NO: 1113747 - RNA, 20 nt, Human
ccugauuuuuuucuugagua

SEQ ID NO: 1113748 - RNA, 18 nt, Human
ccuggcuuauuucacuga

SEQ ID NO: 1113749 - RNA, 20 nt, Human
ccugggcugaagugauccuc

SEQ ID NO: 1113750 - RNA, 23 nt, Human
ccuguagcugggacuacaggugc

SEQ ID NO: 1113751 - RNA, 22 nt, Human
ccuugaccuccuggacucacgu

SEQ ID NO: 1113752 - RNA, 21 nt, Human
cggagauguaacagggcuucu

SEQ ID NO: 1113753 - RNA, 23 nt, Human
cgugauguggcagaagcgaaggg

SEQ ID NO: 1113754 - RNA, 24 nt, Human
cucauucugucaucuaggcugggg

SEQ ID NO: 1113755 - RNA, 21 nt, Human
cugagcacaauauucuccacu

SEQ ID NO: 1113756 - RNA, 22 nt, Human
cugcagccuugaccuccuggac

SEQ ID NO: 1113757 - RNA, 23 nt, Human
cugcagccuugaccuccuggacu

SEQ ID NO: 1113758 - RNA, 26 nt, Human
cuguagcugggacuacaggugcaugc

SEQ ID NO: 1113759 - RNA, 24 nt, Human
gaaauuuauucucuuaauugugaa

SEQ ID NO: 1113760 - RNA, 21 nt, Human
gaaccagguuugcaaaaguaa

SEQ ID NO: 1113761 - RNA, 21 nt, Human
gaagggaaccagguuugcaaa

SEQ ID NO: 1113762 - RNA, 19 nt, Human
gagacaggucucacugugu

SEQ ID NO: 1113763 - RNA, 19 nt, Human
ggcuuagaaggacaagaua

SEQ ID NO: 1113764 - RNA, 20 nt, Human
guaaaccaugcuauuaaccc

SEQ ID NO: 1113765 - RNA, 23 nt, Human
guccuguagcugggacuacaggu

SEQ ID NO: 1113766 - RNA, 22 nt, Human
gugauccucccacuucagacuc

SEQ ID NO: 1113767 - RNA, 18 nt, Human
gugcuugagauuacaggc

SEQ ID NO: 1113768 - RNA, 23 nt, Human
uaaaaacaaaaucauacuccucc

SEQ ID NO: 1113769 - RNA, 23 nt, Human
uaaaaguggcagguuucuuaaaa

SEQ ID NO: 1113770 - RNA, 22 nt, Human
uaaagugaugugauggcccaca

SEQ ID NO: 1113771 - RNA, 19 nt, Human
uaagaugucaguuuugaag

SEQ ID NO: 1113772 - RNA, 22 nt, Human
uacaggcaugaaccaccacacc

SEQ ID NO: 1113773 - RNA, 23 nt, Human
uacgagagaauccagucuaugaa

SEQ ID NO: 1113774 - RNA, 18 nt, Human
uacugcauuuuuuuauug

SEQ ID NO: 1113775 - RNA, 22 nt, Human
uacuguuugaaaauggaaaguu

SEQ ID NO: 1113776 - RNA, 24 nt, Human
uagaacuaaaaacaaaaucauacu

SEQ ID NO: 1113777 - RNA, 22 nt, Human
uagaagugguauuacugaaucu

SEQ ID NO: 1113778 - RNA, 21 nt, Human
uaggcugggguccagugagcu

SEQ ID NO: 1113779 - RNA, 19 nt, Human
uagggcacaugaaaugaaa

SEQ ID NO: 1113780 - RNA, 21 nt, Human
uaguuccuuuugagaaucugg

SEQ ID NO: 1113781 - RNA, 18 nt, Human
uauacuguuugaaaaugg

SEQ ID NO: 1113782 - RNA, 24 nt, Human
uauaguagggcacaugaaaugaaa

SEQ ID NO: 1113783 - RNA, 19 nt, Human
uauguauauguauaccaca

SEQ ID NO: 1113784 - RNA, 22 nt, Human
ucaaacuccugggcugaaguga

SEQ ID NO: 1113785 - RNA, 25 nt, Human
uccacaauaauguuuuuagguuauu

SEQ ID NO: 1113786 - RNA, 25 nt, Human
ucccaaagugcuugagauuacaggc

SEQ ID NO: 1113787 - RNA, 19 nt, Human
ucccuaaaaauuuggcaag

SEQ ID NO: 1113788 - RNA, 21 nt, Human
uccuccuguuggagauuuuau

SEQ ID NO: 1113789 - RNA, 23 nt, Human
uccuguagcugggacuacaggug

SEQ ID NO: 1113790 - RNA, 21 nt, Human
ucucaaacuccugggcugaag

SEQ ID NO: 1113791 - RNA, 24 nt, Human
ucucaaacuccugggcugaaguga

SEQ ID NO: 1113792 - RNA, 23 nt, Human
ucucacuguguugccuuagcugg

SEQ ID NO: 1113793 - RNA, 24 nt, Human
ucucauucugucaucuaggcuggg

SEQ ID NO: 1113794 - RNA, 21 nt, Human
ucucccuaaaaauuuggcaag

SEQ ID NO: 1113795 - RNA, 20 nt, Human
ucucuuggacaaacugauuu

SEQ ID NO: 1113796 - RNA, 25 nt, Human
ugaaaagaagcccaagaaagaaguu

SEQ ID NO: 1113797 - RNA, 20 nt, Human
ugaaaccaaguacuguuugc

SEQ ID NO: 1113798 - RNA, 18 nt, Human
ugaaaugaaaccaaguac

SEQ ID NO: 1113799 - RNA, 22 nt, Human
ugaaaugaaaccaaguacuguu

SEQ ID NO: 1113800 - RNA, 18 nt, Human
ugaagccauuuuuuuuua

SEQ ID NO: 1113801 - RNA, 19 nt, Human
ugaaguaagccacuugaac

SEQ ID NO: 1113802 - RNA, 20 nt, Human
ugaaugagguuaaaaauggg

SEQ ID NO: 1113803 - RNA, 18 nt, Human
ugagagcaauacaagaau

SEQ ID NO: 1113804 - RNA, 24 nt, Human
ugagauuacaggcaugaaccacca

SEQ ID NO: 1113805 - RNA, 24 nt, Human
ugagauuacaggcaugaaccacca

SEQ ID NO: 1113806 - RNA, 22 nt, Human
ugagcugugauugugccacugc

SEQ ID NO: 1113807 - RNA, 19 nt, Human
ugcaaacuuuaccaugcua

SEQ ID NO: 1113808 - RNA, 24 nt, Human
ugcaugccaccauuaauaauugcc

SEQ ID NO: 1113809 - RNA, 21 nt, Human
ugcauuaauauaguagggcac

SEQ ID NO: 1113810 - RNA, 21 nt, Human
ugccucuuuaagaaauagccc

SEQ ID NO: 1113811 - RNA, 19 nt, Human
ugcuauuaacccaacaucu

SEQ ID NO: 1113812 - RNA, 19 nt, Human
ugcucagaagaaggaucgg

SEQ ID NO: 1113813 - RNA, 19 nt, Human
ugcugcaaugaacauggga

SEQ ID NO: 1113814 - RNA, 24 nt, Human
uggaauagaaaguaauacuuaaug

SEQ ID NO: 1113815 - RNA, 21 nt, Human
uggcuucucaggccugggggg

SEQ ID NO: 1113816 - RNA, 21 nt, Human
ugggacuacaggugcaugcca

SEQ ID NO: 1113817 - RNA, 22 nt, Human
ugggacuacaggugcaugccac

SEQ ID NO: 1113818 - RNA, 24 nt, Human
ugggacuacaggugcaugccacca

SEQ ID NO: 1113819 - RNA, 25 nt, Human
ugggacuacaggugcaugccaccau

SEQ ID NO: 1113820 - RNA, 22 nt, Human
ugggagugccacucucuuggac

SEQ ID NO: 1113821 - RNA, 24 nt, Human
ugguagagaugaggucucauucug

SEQ ID NO: 1113822 - RNA, 19 nt, Human
uguacugucaaguauaaga

SEQ ID NO: 1113823 - RNA, 19 nt, Human
uguaguccuguagcuggga

SEQ ID NO: 1113824 - RNA, 24 nt, Human
ugugccacugcagccuugaccucc

SEQ ID NO: 1113825 - RNA, 24 nt, Human
uguguugccuuagcuggucucaaa

SEQ ID NO: 1113826 - RNA, 18 nt, Human
uuaagcucuuauucuuau

SEQ ID NO: 1113827 - RNA, 24 nt, Human
uuaagcucuuauucuuaugaaccu

SEQ ID NO: 1113828 - RNA, 22 nt, Human
uuaguuccuuuugagaaucugg

SEQ ID NO: 1113829 - RNA, 24 nt, Human
uucaagaaaacagguugggaaugg

SEQ ID NO: 1113830 - RNA, 19 nt, Human
uucugcucucugcuucugu

SEQ ID NO: 1113831 - RNA, 20 nt, Human
uucuuguugaacagcagcuu

SEQ ID NO: 1113832 - RNA, 27 nt, Human
uugccaccuggcuaauuaguuuuuuua

SEQ ID NO: 1113833 - RNA, 22 nt, Human
uuggcaagcaacagaccaacca

SEQ ID NO: 1113834 - RNA, 21 nt, Human
uugggaaugguucccacgugg

SEQ ID NO: 1113835 - RNA, 21 nt, Human
uugguagagaugaggucucau

SEQ ID NO: 1113836 - RNA, 19 nt, Human
uugguauuuuggcuaaggu

SEQ ID NO: 1113837 - RNA, 23 nt, Human
uuucuuguugaacagcagcuuca

SEQ ID NO: 1113838 - RNA, 23 nt, Human
uuuugugccuggcuuauuucacu

SEQ ID NO: 1113839 - RNA, 19 nt, Human
uuuuugguagagaugaggu

SEQ ID NO: 1113840 - RNA, 28 nt, Human
uuuuuuuuuuuaauuuuugguagagaug

SEQ ID NO: 1113841 - RNA, 20 nt, Human
aaacaugcagaaaagccccc

SEQ ID NO: 1113842 - RNA, 18 nt, Human
aaagcccccagcccuacu

SEQ ID NO: 1113843 - RNA, 22 nt, Human
aaagcccccagcccuacuuucc

SEQ ID NO: 1113844 - RNA, 24 nt, Human
aagcccccagcccuacuuuccuag

SEQ ID NO: 1113845 - RNA, 20 nt, Human
acccugcuuuuccucuauca

SEQ ID NO: 1113846 - RNA, 18 nt, Human
agaaaagcccccagcccu

SEQ ID NO: 1113847 - RNA, 18 nt, Human
agaaaggcagcuaguccc

SEQ ID NO: 1113848 - RNA, 19 nt, Human
aguucccuucccugggugg

SEQ ID NO: 1113849 - RNA, 22 nt, Human
aguucccuucccuggguggcau

SEQ ID NO: 1113850 - RNA, 20 nt, Human
caaguaacacuggaaaaccc

SEQ ID NO: 1113851 - RNA, 21 nt, Human
caaguauguacuaucuaccaa

SEQ ID NO: 1113852 - RNA, 25 nt, Human
cacccugcuuuuccucuaucaucuc

SEQ ID NO: 1113853 - RNA, 19 nt, Human
cacuggaaaacccgccugc

SEQ ID NO: 1113854 - RNA, 21 nt, Human
cagaaaggcagcuaguccccc

SEQ ID NO: 1113855 - RNA, 21 nt, Human
cagcccgcucugcuccagucc

SEQ ID NO: 1113856 - RNA, 19 nt, Human
cccagcccuacuuuccuag

SEQ ID NO: 1113857 - RNA, 22 nt, Human
cccccagcccuacuuuccuagc

SEQ ID NO: 1113858 - RNA, 20 nt, Human
cccgcucugcuccagucccg

SEQ ID NO: 1113859 - RNA, 21 nt, Human
ccuuccuucuaucuuuuaucc

SEQ ID NO: 1113860 - RNA, 22 nt, Human
cgccugcgcugggaagacccuc

SEQ ID NO: 1113861 - RNA, 20 nt, Human
cuacagcauugugccuuagu

SEQ ID NO: 1113862 - RNA, 19 nt, Human
cuccagucccgcaggcacc

SEQ ID NO: 1113863 - RNA, 21 nt, Human
cugaguaccuucuauauggga

SEQ ID NO: 1113864 - RNA, 21 nt, Human
cuuuccuagcaugcagcaccc

SEQ ID NO: 1113865 - RNA, 24 nt, Human
gaaaacaucuccacuaagaggacu

SEQ ID NO: 1113866 - RNA, 23 nt, Human
gcuccagucccgcaggcaccuuc

SEQ ID NO: 1113867 - RNA, 18 nt, Human
uaacacuggaaaacccgc

SEQ ID NO: 1113868 - RNA, 21 nt, Human
ucuacagcauugugccuuagu

SEQ ID NO: 1113869 - RNA, 18 nt, Human
ugaaaacaucuccacuaa

SEQ ID NO: 1113870 - RNA, 20 nt, Human
ugaaaacaucuccacuaaga

SEQ ID NO: 1113871 - RNA, 25 nt, Human
ugaaaacaucuccacuaagaggacu

SEQ ID NO: 1113872 - RNA, 21 nt, Human
ugaucuacagcauugugccuu

SEQ ID NO: 1113873 - RNA, 21 nt, Human
ugccagaaaggcagcuagucc

SEQ ID NO: 1113874 - RNA, 22 nt, Human
ugccagaaaggcagcuaguccc

SEQ ID NO: 1113875 - RNA, 19 nt, Human
uuacaagguuaccaugcaa

SEQ ID NO: 1113876 - RNA, 23 nt, Human
uugcggcuuccugccugcugcca

SEQ ID NO: 1113877 - RNA, 18 nt, Human
uuuacugaguaccuucua

SEQ ID NO: 1113878 - RNA, 25 nt, Human
uuuacugaguaccuucuauauggga

SEQ ID NO: 1113879 - RNA, 19 nt, Human
uaagagcccaugcaagaac

SEQ ID NO: 1113880 - RNA, 20 nt, Human
ugcuuaagagcccaugcaag

SEQ ID NO: 1113881 - RNA, 22 nt, Human
ugugaaaauuucccuuuaaguu

SEQ ID NO: 1113882 - RNA, 22 nt, Human
aaaaagaacucaauaagaagca

SEQ ID NO: 1113883 - RNA, 21 nt, Human
aaagagcagccacccuccaca

SEQ ID NO: 1113884 - RNA, 24 nt, Human
aaagugcggggauuacaggcauga

SEQ ID NO: 1113885 - RNA, 18 nt, Human
aagaaggccccugaaggc

SEQ ID NO: 1113886 - RNA, 20 nt, Human
aagaugccugggugacuugu

SEQ ID NO: 1113887 - RNA, 24 nt, Human
aagcaauccacccgccuuggcauc

SEQ ID NO: 1113888 - RNA, 21 nt, Human
aaggaagagccaggaccagug

SEQ ID NO: 1113889 - RNA, 21 nt, Human
aaggagccagaacuacaggug

SEQ ID NO: 1113890 - RNA, 20 nt, Human
aaggucuggaagccugagug

SEQ ID NO: 1113891 - RNA, 25 nt, Human
aaguaauccucccacuuuagccucc

SEQ ID NO: 1113892 - RNA, 22 nt, Human
aaguagccagcaaggcugggag

SEQ ID NO: 1113893 - RNA, 21 nt, Human
aauuugcaguuucucuuccuc

SEQ ID NO: 1113894 - RNA, 18 nt, Human
aauuuuaaaaaagaacuc

SEQ ID NO: 1113895 - RNA, 19 nt, Human
acacaugcugugccccaug

SEQ ID NO: 1113896 - RNA, 18 nt, Human
acagagcagcgaggggag

SEQ ID NO: 1113897 - RNA, 23 nt, Human
accaugguguggcugcccugggg

SEQ ID NO: 1113898 - RNA, 18 nt, Human
acccagagagacagcagg

SEQ ID NO: 1113899 - RNA, 25 nt, Human
acccugucgcccaggcuggugugca

SEQ ID NO: 1113900 - RNA, 21 nt, Human
acccuucucucccaccucuuc

SEQ ID NO: 1113901 - RNA, 19 nt, Human
acuacaggugugcgccacc

SEQ ID NO: 1113902 - RNA, 24 nt, Human
acuccuggccucaagcaauccacc

SEQ ID NO: 1113903 - RNA, 19 nt, Human
acugcagccuccaccuccu

SEQ ID NO: 1113904 - RNA, 24 nt, Human
acuguauugcccaggcuggucuug

SEQ ID NO: 1113905 - RNA, 25 nt, Human
acuguauugcccaggcuggucuuga

SEQ ID NO: 1113906 - RNA, 27 nt, Human
agaaacaggagggaggagccgguaccc

SEQ ID NO: 1113907 - RNA, 22 nt, Human
agaaccccaaagagagggccca

SEQ ID NO: 1113908 - RNA, 23 nt, Human
agaacuacaggugugcgccaccg

SEQ ID NO: 1113909 - RNA, 22 nt, Human
agagacagcaggggugaccccc

SEQ ID NO: 1113910 - RNA, 21 nt, Human
agagccaggaccaguggggga

SEQ ID NO: 1113911 - RNA, 21 nt, Human
aggaccagugggggagguggc

SEQ ID NO: 1113912 - RNA, 18 nt, Human
aggagcugguggcccugu

SEQ ID NO: 1113913 - RNA, 19 nt, Human
aggagggaggagcugcaac

SEQ ID NO: 1113914 - RNA, 21 nt, Human
aggagggaggagcugcagggc

SEQ ID NO: 1113915 - RNA, 23 nt, Human
aggcaugugcuagagaggucaag

SEQ ID NO: 1113916 - RNA, 28 nt, Human
aggccccugaaggcucuuuggggagugg

SEQ ID NO: 1113917 - RNA, 25 nt, Human
aguaauccucccacuuuagccuccc

SEQ ID NO: 1113918 - RNA, 24 nt, Human
auagcucacugcagccuccaccuc

SEQ ID NO: 1113919 - RNA, 24 nt, Human
caaagugcggggauuacaggcaug

SEQ ID NO: 1113920 - RNA, 21 nt, Human
caaggcugggagaacggggag

SEQ ID NO: 1113921 - RNA, 24 nt, Human
cacccgccuuggcaucccaaagug

SEQ ID NO: 1113922 - RNA, 21 nt, Human
cacccugggcccgggccccug

SEQ ID NO: 1113923 - RNA, 22 nt, Human
cacccugucgcccaggcuggug

SEQ ID NO: 1113924 - RNA, 25 nt, Human
cacccugucgcccaggcuggugugc

SEQ ID NO: 1113925 - RNA, 21 nt, Human
caccguggccacccugggccc

SEQ ID NO: 1113926 - RNA, 24 nt, Human
caccuccugggcucaaguaauccu

SEQ ID NO: 1113927 - RNA, 22 nt, Human
caccuugcggcuucccaggucu

SEQ ID NO: 1113928 - RNA, 23 nt, Human
cacugcagccuccaccuccuggg

SEQ ID NO: 1113929 - RNA, 24 nt, Human
cacuguauugcccaggcuggucuu

SEQ ID NO: 1113930 - RNA, 25 nt, Human
cagaaccccaaagagagggcccaga

SEQ ID NO: 1113931 - RNA, 21 nt, Human
cagaacuacaggugugcgcca

SEQ ID NO: 1113932 - RNA, 24 nt, Human
cagcaaaauuuuaaaaaagaacuc

SEQ ID NO: 1113933 - RNA, 19 nt, Human
cagccuccaccuccugggc

SEQ ID NO: 1113934 - RNA, 23 nt, Human
cagccuccaccuccugggcucaa

SEQ ID NO: 1113935 - RNA, 24 nt, Human
cagccuccaccuccugggcucaag

SEQ ID NO: 1113936 - RNA, 21 nt, Human
caggcgcacacaccccccucg

SEQ ID NO: 1113937 - RNA, 18 nt, Human
caggggggcagcuuuccu

SEQ ID NO: 1113938 - RNA, 24 nt, Human
cagggucucacuguauugcccagg

SEQ ID NO: 1113939 - RNA, 23 nt, Human
caugcugugccccaugcccuucc

SEQ ID NO: 1113940 - RNA, 24 nt, Human
ccaaagugcggggauuacaggcau

SEQ ID NO: 1113941 - RNA, 24 nt, Human
ccaaggagccagaacuacaggugu

SEQ ID NO: 1113942 - RNA, 24 nt, Human
ccaccuccugggcucaaguaaucc

SEQ ID NO: 1113943 - RNA, 22 nt, Human
ccccaggcgcacacaccccccu

SEQ ID NO: 1113944 - RNA, 24 nt, Human
ccccaggcgcacacaccccccucg

SEQ ID NO: 1113945 - RNA, 19 nt, Human
cccccggacccccagcaaa

SEQ ID NO: 1113946 - RNA, 21 nt, Human
cccuggccgggacauuugggc

SEQ ID NO: 1113947 - RNA, 18 nt, Human
ccuaugggguugcagaga

SEQ ID NO: 1113948 - RNA, 21 nt, Human
ccucaagcaauccacccgccu

SEQ ID NO: 1113949 - RNA, 22 nt, Human
ccuccaccuccugggcucaagu

SEQ ID NO: 1113950 - RNA, 26 nt, Human
ccucccacuuuagccucccaaggagc

SEQ ID NO: 1113951 - RNA, 22 nt, Human
ccugaaauuuuucugauuuuac

SEQ ID NO: 1113952 - RNA, 22 nt, Human
ccugcuucuagacccuucucuc

SEQ ID NO: 1113953 - RNA, 22 nt, Human
ccuggccucaagcaauccaccc

SEQ ID NO: 1113954 - RNA, 23 nt, Human
ccuggccucaagcaauccacccg

SEQ ID NO: 1113955 - RNA, 22 nt, Human
ccugggaggguuucccucgcgg

SEQ ID NO: 1113956 - RNA, 20 nt, Human
ccugggcucaaguaauccuc

SEQ ID NO: 1113957 - RNA, 22 nt, Human
cgcagcugcagguugcaccgca

SEQ ID NO: 1113958 - RNA, 23 nt, Human
cggugacacucacagaguggcac

SEQ ID NO: 1113959 - RNA, 19 nt, Human
cuacccagagagacagcag

SEQ ID NO: 1113960 - RNA, 24 nt, Human
cuagacccuucucucccaccucuu

SEQ ID NO: 1113961 - RNA, 24 nt, Human
cucaagcaauccacccgccuuggc

SEQ ID NO: 1113962 - RNA, 24 nt, Human
cucaaguaauccucccacuuuagc

SEQ ID NO: 1113963 - RNA, 21 nt, Human
cucacugcagccuccaccucc

SEQ ID NO: 1113964 - RNA, 24 nt, Human
cucacugcagccuccaccuccugg

SEQ ID NO: 1113965 - RNA, 22 nt, Human
cucccaccucuucugagcucug

SEQ ID NO: 1113966 - RNA, 22 nt, Human
cuccuccucaccguggccaccc

SEQ ID NO: 1113967 - RNA, 23 nt, Human
cuccuggccucaagcaauccacc

SEQ ID NO: 1113968 - RNA, 20 nt, Human
cugaaggcucuuuggggagu

SEQ ID NO: 1113969 - RNA, 23 nt, Human
cugcagccuccaccuccugggcu

SEQ ID NO: 1113970 - RNA, 22 nt, Human
cugcgcaugugguccuccuccu

SEQ ID NO: 1113971 - RNA, 23 nt, Human
cugcuucuagacccuucucuccc

SEQ ID NO: 1113972 - RNA, 19 nt, Human
cugggcccgggccccuggg

SEQ ID NO: 1113973 - RNA, 21 nt, Human
cuucccaggucucagccucaa

SEQ ID NO: 1113974 - RNA, 20 nt, Human
cuucccugcgcauguggucc

SEQ ID NO: 1113975 - RNA, 24 nt, Human
cuugccucucugagccucacucuu

SEQ ID NO: 1113976 - RNA, 24 nt, Human
gacaagaaggccccugaaggcucu

SEQ ID NO: 1113977 - RNA, 18 nt, Human
gagaaacaggagggagga

SEQ ID NO: 1113978 - RNA, 23 nt, Human
gagcugguggcccuguuguuuug

SEQ ID NO: 1113979 - RNA, 19 nt, Human
gaucauagcucacugcagc

SEQ ID NO: 1113980 - RNA, 24 nt, Human
gauuacaggcaugagcgauugugc

SEQ ID NO: 1113981 - RNA, 22 nt, Human
gcaaaauuuuaaaaaagaacuc

SEQ ID NO: 1113982 - RNA, 22 nt, Human
gcagccuccaccuccugggcuc

SEQ ID NO: 1113983 - RNA, 20 nt, Human
gcccggggggcggagggcuc

SEQ ID NO: 1113984 - RNA, 18 nt, Human
gcggagggcucagggaaa

SEQ ID NO: 1113985 - RNA, 23 nt, Human
gcuggucuugaacuccuggccuc

SEQ ID NO: 1113986 - RNA, 24 nt, Human
ggauuacaggcaugagcgauugug

SEQ ID NO: 1113987 - RNA, 18 nt, Human
ggcucagggaaaggucug

SEQ ID NO: 1113988 - RNA, 24 nt, Human
ggcuggucuugaacuccuggccuc

SEQ ID NO: 1113989 - RNA, 18 nt, Human
gggaaaggucuggaagcc

SEQ ID NO: 1113990 - RNA, 18 nt, Human
gggauuacaggcaugagc

SEQ ID NO: 1113991 - RNA, 22 nt, Human
gggccuuugacacagagccacc

SEQ ID NO: 1113992 - RNA, 21 nt, Human
gggcuggugcuggccaggggg

SEQ ID NO: 1113993 - RNA, 19 nt, Human
ggggagugggcccgggggg

SEQ ID NO: 1113994 - RNA, 20 nt, Human
ggggagugggcccggggggc

SEQ ID NO: 1113995 - RNA, 24 nt, Human
ggggauuacaggcaugagcgauug

SEQ ID NO: 1113996 - RNA, 19 nt, Human
gguugcagagaggagugag

SEQ ID NO: 1113997 - RNA, 18 nt, Human
guccuccuccuccucacc

SEQ ID NO: 1113998 - RNA, 24 nt, Human
gugugcagugaagcgaucauagcu

SEQ ID NO: 1113999 - RNA, 19 nt, Human
gugugcgccaccgcaacca

SEQ ID NO: 1114000 - RNA, 23 nt, Human
uaaaaaagaacucaauaagaagc

SEQ ID NO: 1114001 - RNA, 24 nt, Human
uaaaaaagaacucaauaagaagca

SEQ ID NO: 1114002 - RNA, 22 nt, Human
uagccucccaaggagccagaac

SEQ ID NO: 1114003 - RNA, 21 nt, Human
uagcucacugcagccuccacc

SEQ ID NO: 1114004 - RNA, 18 nt, Human
uauugcccaggcuggucu

SEQ ID NO: 1114005 - RNA, 22 nt, Human
uauugcccaggcuggucuugaa

SEQ ID NO: 1114006 - RNA, 23 nt, Human
ucacugcagccuccaccuccugg

SEQ ID NO: 1114007 - RNA, 24 nt, Human
ucacugcagccuccaccuccuggg

SEQ ID NO: 1114008 - RNA, 25 nt, Human
ucacugcagccuccaccuccugggc

SEQ ID NO: 1114009 - RNA, 27 nt, Human
ucacugcagccuccaccuccugggcuc

SEQ ID NO: 1114010 - RNA, 22 nt, Human
ucagcggggaaggaagagccag

SEQ ID NO: 1114011 - RNA, 21 nt, Human
uccaccuccugcuucuagacc

SEQ ID NO: 1114012 - RNA, 24 nt, Human
ucccaaagugcggggauuacaggc

SEQ ID NO: 1114013 - RNA, 19 nt, Human
ucccaaggagccagaacua

SEQ ID NO: 1114014 - RNA, 22 nt, Human
ucccaggucucagccucaacuc

SEQ ID NO: 1114015 - RNA, 21 nt, Human
ucccugaacgacugaguuucg

SEQ ID NO: 1114016 - RNA, 22 nt, Human
uccugggcucaaguaauccucc

SEQ ID NO: 1114017 - RNA, 24 nt, Human
uccugggcucaaguaauccuccca

SEQ ID NO: 1114018 - RNA, 18 nt, Human
ucgcccaggcuggugugc

SEQ ID NO: 1114019 - RNA, 18 nt, Human
ucguuauuguuguugcuu

SEQ ID NO: 1114020 - RNA, 23 nt, Human
ucuagacccuucucucccaccuc

SEQ ID NO: 1114021 - RNA, 23 nt, Human
ucucacccugucgcccaggcugg

SEQ ID NO: 1114022 - RNA, 26 nt, Human
ucucacccugucgcccaggcuggugu

SEQ ID NO: 1114023 - RNA, 27 nt, Human
ucucacccugucgcccaggcuggugug

SEQ ID NO: 1114024 - RNA, 23 nt, Human
ucucacuguauugcccaggcugg

SEQ ID NO: 1114025 - RNA, 26 nt, Human
ucucacuguauugcccaggcuggucu

SEQ ID NO: 1114026 - RNA, 20 nt, Human
ucucagccucaacucauuuc

SEQ ID NO: 1114027 - RNA, 22 nt, Human
ucuucugagcucugcuuggccu

SEQ ID NO: 1114028 - RNA, 21 nt, Human
ucuugaacuccuggccucaag

SEQ ID NO: 1114029 - RNA, 28 nt, Human
ucuuuggggaguggaaguaacguaaacg

SEQ ID NO: 1114030 - RNA, 22 nt, Human
ugaaaagagcagccacccucca

SEQ ID NO: 1114031 - RNA, 24 nt, Human
ugaacuccuggccucaagcaaucc

SEQ ID NO: 1114032 - RNA, 18 nt, Human
ugaaggcucuuuggggag

SEQ ID NO: 1114033 - RNA, 23 nt, Human
ugacauagaaucgguaacucgua

SEQ ID NO: 1114034 - RNA, 24 nt, Human
ugacccccaggcgcacacaccccc

SEQ ID NO: 1114035 - RNA, 19 nt, Human
ugagcuucaccugcacccc

SEQ ID NO: 1114036 - RNA, 24 nt, Human
ugcccaggcuggucuugaacuccu

SEQ ID NO: 1114037 - RNA, 19 nt, Human
ugcuagagaggucaagguu

SEQ ID NO: 1114038 - RNA, 18 nt, Human
ugcuggccaggggggcag

SEQ ID NO: 1114039 - RNA, 23 nt, Human
ugcuucuagacccuucucuccca

SEQ ID NO: 1114040 - RNA, 26 nt, Human
uggaagccugagugggcgcagcugac

SEQ ID NO: 1114041 - RNA, 23 nt, Human
uggcaaaaggcaugugcuagaga

SEQ ID NO: 1114042 - RNA, 22 nt, Human
uggccucaagcaauccacccgc

SEQ ID NO: 1114043 - RNA, 23 nt, Human
uggccucaagcaauccacccgcc

SEQ ID NO: 1114044 - RNA, 21 nt, Human
uggccucccagccuguugccu

SEQ ID NO: 1114045 - RNA, 19 nt, Human
ugggcccggggggcggagg

SEQ ID NO: 1114046 - RNA, 19 nt, Human
uggggaguggaaguagcca

SEQ ID NO: 1114047 - RNA, 21 nt, Human
uggggaguggaaguagccagc

SEQ ID NO: 1114048 - RNA, 21 nt, Human
ugggguggugguaauuggcau

SEQ ID NO: 1114049 - RNA, 24 nt, Human
uguauugcccaggcuggucuugaa

SEQ ID NO: 1114050 - RNA, 18 nt, Human
ugugugggccacacacau

SEQ ID NO: 1114051 - RNA, 21 nt, Human
ugugugggccacacacaugcu

SEQ ID NO: 1114052 - RNA, 19 nt, Human
uucccccggacccccagca

SEQ ID NO: 1114053 - RNA, 24 nt, Human
uucucuuccuccaccuccugcuuc

SEQ ID NO: 1114054 - RNA, 19 nt, Human
uucugauuuuacuaagcac

SEQ ID NO: 1114055 - RNA, 21 nt, Human
uuggacucuugaggagcuggu

SEQ ID NO: 1114056 - RNA, 20 nt, Human
uuuccuauggggugguggua

SEQ ID NO: 1114057 - RNA, 25 nt, Human
uuuucugauuuuacuaagcacuucc

SEQ ID NO: 1114058 - RNA, 24 nt, Human
agggagccuggggacagcuggguc

SEQ ID NO: 1114059 - RNA, 19 nt, Human
caaaucccacuuccaguga

SEQ ID NO: 1114060 - RNA, 19 nt, Human
cagcugggcaucuaagcca

SEQ ID NO: 1114061 - RNA, 19 nt, Human
ccagagcacguuuccugga

SEQ ID NO: 1114062 - RNA, 18 nt, Human
ccucuccaccuccguucc

SEQ ID NO: 1114063 - RNA, 21 nt, Human
ccuggaggugggcgucugggg

SEQ ID NO: 1114064 - RNA, 19 nt, Human
ccuggggacagcuggguca

SEQ ID NO: 1114065 - RNA, 24 nt, Human
cgggcguugccgacggucuccucu

SEQ ID NO: 1114066 - RNA, 22 nt, Human
ggacagcugggucacugagggu

SEQ ID NO: 1114067 - RNA, 23 nt, Human
ggcgucuggggguccaccuuucc

SEQ ID NO: 1114068 - RNA, 22 nt, Human
gggagccuggggacagcugggu

SEQ ID NO: 1114069 - RNA, 22 nt, Human
ggggacagcugggucacugagg

SEQ ID NO: 1114070 - RNA, 21 nt, Human
ucacuggggcuguccaagcca

SEQ ID NO: 1114071 - RNA, 21 nt, Human
ucccuggggagaccaggcccu

SEQ ID NO: 1114072 - RNA, 20 nt, Human
uggcugcauuucaaauccca

SEQ ID NO: 1114073 - RNA, 19 nt, Human
uggggacagcugggucacu

SEQ ID NO: 1114074 - RNA, 20 nt, Human
uuauuuauuuauuuauuucu

SEQ ID NO: 1114075 - RNA, 26 nt, Human
aacacucccauccccuccacacaccu

SEQ ID NO: 1114076 - RNA, 24 nt, Human
aagaccccagcccccacucaccgc

SEQ ID NO: 1114077 - RNA, 20 nt, Human
aagaccccagcccccacucu

SEQ ID NO: 1114078 - RNA, 22 nt, Human
aagcagccuucccacccccuga

SEQ ID NO: 1114079 - RNA, 19 nt, Human
agaagaagagcuaacacuc

SEQ ID NO: 1114080 - RNA, 24 nt, Human
agcaaagcagccuucccacccccu

SEQ ID NO: 1114081 - RNA, 24 nt, Human
agcaaagcagccuucccacccccu

SEQ ID NO: 1114082 - RNA, 19 nt, Human
agcagccuucccacccccu

SEQ ID NO: 1114083 - RNA, 19 nt, Human
auacuugcaagccccacac

SEQ ID NO: 1114084 - RNA, 19 nt, Human
augccuuaaacuagaagaa

SEQ ID NO: 1114085 - RNA, 21 nt, Human
cauuacugaugccaccuccuc

SEQ ID NO: 1114086 - RNA, 24 nt, Human
ccacacaguucccuccaccagaug

SEQ ID NO: 1114087 - RNA, 21 nt, Human
ccaucaagaccccagccccca

SEQ ID NO: 1114088 - RNA, 22 nt, Human
cccaucaagaccccagccccca

SEQ ID NO: 1114089 - RNA, 21 nt, Human
ccccacacaguucccuccacc

SEQ ID NO: 1114090 - RNA, 24 nt, Human
ccugacucccaucaagaccccagc

SEQ ID NO: 1114091 - RNA, 25 nt, Human
cucaccgcuaaacuuccgauucaga

SEQ ID NO: 1114092 - RNA, 19 nt, Human
cuccaggaagcacucccuc

SEQ ID NO: 1114093 - RNA, 21 nt, Human
cucccaucaagaccccagccc

SEQ ID NO: 1114094 - RNA, 23 nt, Human
cucccauccccuccacacaccug

SEQ ID NO: 1114095 - RNA, 27 nt, Human
cucucuccaucucuaccuuccaggcuc

SEQ ID NO: 1114096 - RNA, 24 nt, Human
cuuaaacuagaagaagagcuaaca

SEQ ID NO: 1114097 - RNA, 19 nt, Human
gagcagcugaggagacagg

SEQ ID NO: 1114098 - RNA, 23 nt, Human
gagcagcugaggagacaggugau

SEQ ID NO: 1114099 - RNA, 22 nt, Human
gagcuaacacucccauccccuc

SEQ ID NO: 1114100 - RNA, 24 nt, Human
gaugugcucucucuccaucucuac

SEQ ID NO: 1114101 - RNA, 22 nt, Human
gccccacacaguucccuccacc

SEQ ID NO: 1114102 - RNA, 20 nt, Human
gccuucccacccccugacuc

SEQ ID NO: 1114103 - RNA, 23 nt, Human
uagaagaagagcuaacacuccca

SEQ ID NO: 1114104 - RNA, 26 nt, Human
uagacauccaacauacuugcaagccc

SEQ ID NO: 1114105 - RNA, 25 nt, Human
uagcaaagcagccuucccacccccu

SEQ ID NO: 1114106 - RNA, 21 nt, Human
uaugccuuaaacuagaagaag

SEQ ID NO: 1114107 - RNA, 22 nt, Human
uccaacauacuugcaagcccca

SEQ ID NO: 1114108 - RNA, 22 nt, Human
uccaccagaugugcucucucuc

SEQ ID NO: 1114109 - RNA, 24 nt, Human
uccaccagaugugcucucucucca

SEQ ID NO: 1114110 - RNA, 22 nt, Human
uccaggaagcacucccucucau

SEQ ID NO: 1114111 - RNA, 22 nt, Human
uccauagcaaagcagccuuccc

SEQ ID NO: 1114112 - RNA, 18 nt, Human
ucccacccccugacuccc

SEQ ID NO: 1114113 - RNA, 21 nt, Human
ucccaucaagaccccagcccc

SEQ ID NO: 1114114 - RNA, 20 nt, Human
ucucuccaucucuaccuucc

SEQ ID NO: 1114115 - RNA, 21 nt, Human
uggggugguggugagcagcug

SEQ ID NO: 1114116 - RNA, 22 nt, Human
uuaaacuagaagaagagcuaac

SEQ ID NO: 1114117 - RNA, 26 nt, Human
aaaaacuaaacaggcauuuuggacaa

SEQ ID NO: 1114118 - RNA, 28 nt, Human
aaacaggcauuuuggacaacacauucuu

SEQ ID NO: 1114119 - RNA, 18 nt, Human
agacggagauaaaugaac

SEQ ID NO: 1114120 - RNA, 24 nt, Human
aggcauuuuggacaacacauucuu

SEQ ID NO: 1114121 - RNA, 21 nt, Human
auucuuggcaauggaaccugg

SEQ ID NO: 1114122 - RNA, 22 nt, Human
ccagauaucaacuguuacagaa

SEQ ID NO: 1114123 - RNA, 19 nt, Human
cgguagggaaaguucucac

SEQ ID NO: 1114124 - RNA, 26 nt, Human
cucacucugcauuauaaaaaggacaa

SEQ ID NO: 1114125 - RNA, 23 nt, Human
cugcauuauaaaaaggacagcca

SEQ ID NO: 1114126 - RNA, 20 nt, Human
gcauuuuggacaacacauuc

SEQ ID NO: 1114127 - RNA, 22 nt, Human
gggacagaaggcagacggagau

SEQ ID NO: 1114128 - RNA, 22 nt, Human
gugggacagaaggcagacggag

SEQ ID NO: 1114129 - RNA, 21 nt, Human
uagggaaaguucucacucugc

SEQ ID NO: 1114130 - RNA, 18 nt, Human
uaggugggacagaaggca

SEQ ID NO: 1114131 - RNA, 20 nt, Human
uaggugggacagaaggcaga

SEQ ID NO: 1114132 - RNA, 19 nt, Human
uauuuuugucuucccacaa

SEQ ID NO: 1114133 - RNA, 20 nt, Human
uccauacauauuuaaaacca

SEQ ID NO: 1114134 - RNA, 23 nt, Human
uggaaccuggacaacauuuauca

SEQ ID NO: 1114135 - RNA, 24 nt, Human
uggaaccuggacaacauuuaucaa

SEQ ID NO: 1114136 - RNA, 25 nt, Human
ugucugaccaccgcuacuacuaugu

SEQ ID NO: 1114137 - RNA, 24 nt, Human
aaaaaguacugauuuuaaaaacua

SEQ ID NO: 1114138 - RNA, 23 nt, Human
aaaaccaaagugguccacaaaac

SEQ ID NO: 1114139 - RNA, 18 nt, Human
aaacaaacaguucugaga

SEQ ID NO: 1114140 - RNA, 20 nt, Human
aaagaaaaccaaaguggucc

SEQ ID NO: 1114141 - RNA, 24 nt, Human
aacaguucugagaccguucuucca

SEQ ID NO: 1114142 - RNA, 21 nt, Human
aacuuuuuuaaugggucucaa

SEQ ID NO: 1114143 - RNA, 18 nt, Human
accacguucacgcucagc

SEQ ID NO: 1114144 - RNA, 23 nt, Human
acguucacgcucagcuuucaguu

SEQ ID NO: 1114145 - RNA, 24 nt, Human
acuugaaggagcccuuucccaucu

SEQ ID NO: 1114146 - RNA, 23 nt, Human
agaaaaccaaagugguccacaaa

SEQ ID NO: 1114147 - RNA, 20 nt, Human
agaaauuggcacaaaugcua

SEQ ID NO: 1114148 - RNA, 20 nt, Human
agcaacaauuaggacagcac

SEQ ID NO: 1114149 - RNA, 24 nt, Human
auaccagcuucaaauucaccaaca

SEQ ID NO: 1114150 - RNA, 26 nt, Human
auguuuuugaugaagucucugugucc

SEQ ID NO: 1114151 - RNA, 18 nt, Human
caaggagauaucaauggu

SEQ ID NO: 1114152 - RNA, 22 nt, Human
cagcaacaauuaggacagcaca

SEQ ID NO: 1114153 - RNA, 23 nt, Human
cagcacaaccagccugagauguc

SEQ ID NO: 1114154 - RNA, 22 nt, Human
cagcagccucuuucugcaauuu

SEQ ID NO: 1114155 - RNA, 18 nt, Human
ccacugauuaagaguggg

SEQ ID NO: 1114156 - RNA, 18 nt, Human
ccagcuucaaauucacca

SEQ ID NO: 1114157 - RNA, 23 nt, Human
cguucacgcucagcuuucaguuu

SEQ ID NO: 1114158 - RNA, 26 nt, Human
cugagaugucccuguaaucauguuuu

SEQ ID NO: 1114159 - RNA, 18 nt, Human
cugcugcaugcgaaaaag

SEQ ID NO: 1114160 - RNA, 24 nt, Human
cugcugcaugcgaaaaagaaaacc

SEQ ID NO: 1114161 - RNA, 21 nt, Human
cuuucaguuuauccaagacuc

SEQ ID NO: 1114162 - RNA, 24 nt, Human
gaaaaagaaaaccaaaguggucca

SEQ ID NO: 1114163 - RNA, 19 nt, Human
gaagucucuguguccuggg

SEQ ID NO: 1114164 - RNA, 19 nt, Human
gagcccuuucccaucucag

SEQ ID NO: 1114165 - RNA, 20 nt, Human
gcacaaaugcuacuguguug

SEQ ID NO: 1114166 - RNA, 23 nt, Human
ggagcccuuucccaucucagcag

SEQ ID NO: 1114167 - RNA, 25 nt, Human
gucaaguuguuuccauuuaaaaagu

SEQ ID NO: 1114168 - RNA, 23 nt, Human
gucuuuucuuuucccauuuuggc

SEQ ID NO: 1114169 - RNA, 24 nt, Human
uaauaacuuaaaacugcugcaugc

SEQ ID NO: 1114170 - RNA, 24 nt, Human
uaaugggucucaaaauucugugac

SEQ ID NO: 1114171 - RNA, 25 nt, Human
uaaugggucucaaaauucugugaca

SEQ ID NO: 1114172 - RNA, 19 nt, Human
uauuaucauuaaccagucu

SEQ ID NO: 1114173 - RNA, 23 nt, Human
ucaguuuauccaagacucaggca

SEQ ID NO: 1114174 - RNA, 23 nt, Human
uccacaaaacauucuccuuuccu

SEQ ID NO: 1114175 - RNA, 21 nt, Human
uccuucugaagguuuuauguu

SEQ ID NO: 1114176 - RNA, 18 nt, Human
ucuccuuuccuucugaag

SEQ ID NO: 1114177 - RNA, 23 nt, Human
ucuguguccuggggcaucaauga

SEQ ID NO: 1114178 - RNA, 23 nt, Human
ucuuaauguaagugcugauuucc

SEQ ID NO: 1114179 - RNA, 18 nt, Human
ucuuuugucgaugccacc

SEQ ID NO: 1114180 - RNA, 23 nt, Human
ugcauuauuaucauuaaccaguc

SEQ ID NO: 1114181 - RNA, 24 nt, Human
ugcauuauuaucauuaaccagucu

SEQ ID NO: 1114182 - RNA, 19 nt, Human
ugcccgaaucuacgugucc

SEQ ID NO: 1114183 - RNA, 23 nt, Human
ugcgaaaaagaaaaccaaagugg

SEQ ID NO: 1114184 - RNA, 24 nt, Human
ugcgaaaaagaaaaccaaaguggu

SEQ ID NO: 1114185 - RNA, 22 nt, Human
uggcagguauuagggauaauau

SEQ ID NO: 1114186 - RNA, 22 nt, Human
ugguccacaaaacauucuccuu

SEQ ID NO: 1114187 - RNA, 24 nt, Human
uuaaacuuuuuuaaugggucucaa

SEQ ID NO: 1114188 - RNA, 24 nt, Human
uuaaauggccaauugaaacaaaca

SEQ ID NO: 1114189 - RNA, 23 nt, Human
uucaccaacaccagcagcaacaa

SEQ ID NO: 1114190 - RNA, 18 nt, Human
uuccaccacugauuaaga

SEQ ID NO: 1114191 - RNA, 20 nt, Human
uucuuuucccauuuuggcuu

SEQ ID NO: 1114192 - RNA, 21 nt, Human
uugaugaagucucuguguccu

SEQ ID NO: 1114193 - RNA, 24 nt, Human
uugaugaagucucuguguccuggg

SEQ ID NO: 1114194 - RNA, 26 nt, Human
uuuacuacuaaacuuaaaagguuuuc

SEQ ID NO: 1114195 - RNA, 26 nt, Human
uuucccauuuuggcuuuuaggggaag

SEQ ID NO: 1114196 - RNA, 19 nt, Human
cauucauuacaucuaaagg

SEQ ID NO: 1114197 - RNA, 21 nt, Human
cauucauuacaucuaaagggu

SEQ ID NO: 1114198 - RNA, 27 nt, Human
uaaaggguuuuuccucugugugaguuc

SEQ ID NO: 1114199 - RNA, 25 nt, Human
uacauucauuacaucuaaaggguuu

SEQ ID NO: 1114200 - RNA, 20 nt, Human
ucucugauguauggugagac

SEQ ID NO: 1114201 - RNA, 23 nt, Human
ugggagaaaauuuuccuacauuc

SEQ ID NO: 1114202 - RNA, 22 nt, Human
aaggaagagcaagaaggcgagg

SEQ ID NO: 1114203 - RNA, 22 nt, Human
aaugcacucgaaacacguuuaa

SEQ ID NO: 1114204 - RNA, 18 nt, Human
acacaaaucgagcaaaua

SEQ ID NO: 1114205 - RNA, 22 nt, Human
acaggacagaggcaggaccuug

SEQ ID NO: 1114206 - RNA, 18 nt, Human
agcaagaaggcgagagcc

SEQ ID NO: 1114207 - RNA, 21 nt, Human
agcaggacaaacccaaaccca

SEQ ID NO: 1114208 - RNA, 23 nt, Human
agcaggacaaacccaaacccauc

SEQ ID NO: 1114209 - RNA, 18 nt, Human
agccaggcaaggcuggca

SEQ ID NO: 1114210 - RNA, 18 nt, Human
aggaagagcaagaaggcg

SEQ ID NO: 1114211 - RNA, 23 nt, Human
aggaagagcaagaaggcgagagc

SEQ ID NO: 1114212 - RNA, 25 nt, Human
aggcaggaaggugagcagacuccag

SEQ ID NO: 1114213 - RNA, 18 nt, Human
aggcaggaccuuggaucc

SEQ ID NO: 1114214 - RNA, 24 nt, Human
agguggcucaggggacaggacaga

SEQ ID NO: 1114215 - RNA, 30 nt, Human
agguggggaaggaagagcaagaaggcgagg

SEQ ID NO: 1114216 - RNA, 20 nt, Human
agucacaggaagaacuugca

SEQ ID NO: 1114217 - RNA, 22 nt, Human
aucugauguccucccuccaccc

SEQ ID NO: 1114218 - RNA, 21 nt, Human
auggagacaaggcgucugugg

SEQ ID NO: 1114219 - RNA, 19 nt, Human
caaacccaaacccaucucc

SEQ ID NO: 1114220 - RNA, 20 nt, Human
caaaucgagcaaauaugacu

SEQ ID NO: 1114221 - RNA, 22 nt, Human
cacagcaggacaaacccaaacc

SEQ ID NO: 1114222 - RNA, 18 nt, Human
caccuaggagcuuuagag

SEQ ID NO: 1114223 - RNA, 23 nt, Human
caccugaccugagaguggcgggc

SEQ ID NO: 1114224 - RNA, 21 nt, Human
cagacuccagaguucaagaga

SEQ ID NO: 1114225 - RNA, 18 nt, Human
cagagcacagcaggacaa

SEQ ID NO: 1114226 - RNA, 27 nt, Human
cagcaagcugcuuccucaacgaugcuu

SEQ ID NO: 1114227 - RNA, 19 nt, Human
cagcaggacaaacccaaac

SEQ ID NO: 1114228 - RNA, 21 nt, Human
cagcaggacaaacccaaaccc

SEQ ID NO: 1114229 - RNA, 22 nt, Human
ccggucccaccugaccugagag

SEQ ID NO: 1114230 - RNA, 19 nt, Human
ccucugauuaaacaggagu

SEQ ID NO: 1114231 - RNA, 22 nt, Human
cuccacccguaacuccccugaa

SEQ ID NO: 1114232 - RNA, 22 nt, Human
cuggaccacgugggagaggggc

SEQ ID NO: 1114233 - RNA, 19 nt, Human
cugggcacuugaccaggug

SEQ ID NO: 1114234 - RNA, 18 nt, Human
cuggggaggcuggagucc

SEQ ID NO: 1114235 - RNA, 21 nt, Human
gacagaggcaggaccuuggau

SEQ ID NO: 1114236 - RNA, 21 nt, Human
gagaaccaaguguucaggaac

SEQ ID NO: 1114237 - RNA, 21 nt, Human
gaggggcuugaggcaggaagg

SEQ ID NO: 1114238 - RNA, 24 nt, Human
gcacagcaggacaaacccaaaccc

SEQ ID NO: 1114239 - RNA, 18 nt, Human
ggagaggggcuugaggca

SEQ ID NO: 1114240 - RNA, 19 nt, Human
ggagcagagcacagcagga

SEQ ID NO: 1114241 - RNA, 22 nt, Human
guccucccuccacccguaacuc

SEQ ID NO: 1114242 - RNA, 19 nt, Human
guggcucaggggacaggac

SEQ ID NO: 1114243 - RNA, 23 nt, Human
uacaaaugaaauauguugaacac

SEQ ID NO: 1114244 - RNA, 24 nt, Human
uauaaaagaguagauauggagaca

SEQ ID NO: 1114245 - RNA, 24 nt, Human
uccacccguaacuccccugaaauc

SEQ ID NO: 1114246 - RNA, 25 nt, Human
ucugcaggcacacgagagucgcugg

SEQ ID NO: 1114247 - RNA, 21 nt, Human
ucuguggcccauaguauuuaa

SEQ ID NO: 1114248 - RNA, 18 nt, Human
ugagauggaauuuaaaau

SEQ ID NO: 1114249 - RNA, 20 nt, Human
uggcucaggggacaggacag

SEQ ID NO: 1114250 - RNA, 25 nt, Human
uguggccaguauugagaaccaagug

SEQ ID NO: 1114251 - RNA, 21 nt, Human
uguggcuguggccaguauuga

SEQ ID NO: 1114252 - RNA, 20 nt, Human
aacaggcagagggggucagg

SEQ ID NO: 1114253 - RNA, 18 nt, Human
aaccuagcucagcccuga

SEQ ID NO: 1114254 - RNA, 19 nt, Human
aagcaggagcguuggaucu

SEQ ID NO: 1114255 - RNA, 23 nt, Human
aauagcuaggauuacaggcaugc

SEQ ID NO: 1114256 - RNA, 23 nt, Human
aauuugcuggacaacagacccuc

SEQ ID NO: 1114257 - RNA, 23 nt, Human
acagugcccugcaugccugcggg

SEQ ID NO: 1114258 - RNA, 24 nt, Human
acagugccgggauuacaggcguga

SEQ ID NO: 1114259 - RNA, 25 nt, Human
accccugaacacaccugggucccca

SEQ ID NO: 1114260 - RNA, 23 nt, Human
accucacaccucagccuccccag

SEQ ID NO: 1114261 - RNA, 21 nt, Human
accucagccuccccagacucc

SEQ ID NO: 1114262 - RNA, 23 nt, Human
accucagccuccccagacuccca

SEQ ID NO: 1114263 - RNA, 19 nt, Human
accuggaggaggcgcuggg

SEQ ID NO: 1114264 - RNA, 22 nt, Human
acucccagcuuggucuccuucc

SEQ ID NO: 1114265 - RNA, 18 nt, Human
acucuuguugcccaggcu

SEQ ID NO: 1114266 - RNA, 20 nt, Human
acucuuguugcccaggcugg

SEQ ID NO: 1114267 - RNA, 20 nt, Human
acucuuguugcccaggcugg

SEQ ID NO: 1114268 - RNA, 21 nt, Human
agaagggggcaugaggggcug

SEQ ID NO: 1114269 - RNA, 18 nt, Human
agaccccugaacacaccu

SEQ ID NO: 1114270 - RNA, 24 nt, Human
agagcugcaaacccaggaagacag

SEQ ID NO: 1114271 - RNA, 19 nt, Human
agagggggucaggacgggg

SEQ ID NO: 1114272 - RNA, 18 nt, Human
agcagugaagccucaggg

SEQ ID NO: 1114273 - RNA, 23 nt, Human
agccuccccagacucccagcuug

SEQ ID NO: 1114274 - RNA, 27 nt, Human
agccugacacugccuggcacugaggac

SEQ ID NO: 1114275 - RNA, 21 nt, Human
agcucagcccugagcuccugg

SEQ ID NO: 1114276 - RNA, 20 nt, Human
agcuucugaacccacauccu

SEQ ID NO: 1114277 - RNA, 21 nt, Human
aggaagcuccaagcuugcacc

SEQ ID NO: 1114278 - RNA, 20 nt, Human
aggaggggacccaggaggac

SEQ ID NO: 1114279 - RNA, 18 nt, Human
aggaggggcaggaggggc

SEQ ID NO: 1114280 - RNA, 19 nt, Human
aggaucccugacccuuggc

SEQ ID NO: 1114281 - RNA, 21 nt, Human
aggcagagggggucaggacgg

SEQ ID NO: 1114282 - RNA, 25 nt, Human
aggcuggggugcaguggugcgauuu

SEQ ID NO: 1114283 - RNA, 22 nt, Human
agggaggggugcgggggcugcc

SEQ ID NO: 1114284 - RNA, 20 nt, Human
aggggccagccggcacucag

SEQ ID NO: 1114285 - RNA, 25 nt, Human
aggugauccucccaccucagccucc

SEQ ID NO: 1114286 - RNA, 19 nt, Human
aggugguggagguuugagg

SEQ ID NO: 1114287 - RNA, 21 nt, Human
aggugguggagguuugaggcc

SEQ ID NO: 1114288 - RNA, 20 nt, Human
aucuccuuuaggcuccugca

SEQ ID NO: 1114289 - RNA, 24 nt, Human
augaguccauuguccuugagcuuc

SEQ ID NO: 1114290 - RNA, 20 nt, Human
augggguuucuccauguugg

SEQ ID NO: 1114291 - RNA, 20 nt, Human
caaaggcuuugucaccaggg

SEQ ID NO: 1114292 - RNA, 24 nt, Human
caacagacccucaacccauccccu

SEQ ID NO: 1114293 - RNA, 21 nt, Human
cacaccucagccuccccagac

SEQ ID NO: 1114294 - RNA, 24 nt, Human
cacagugccgggauuacaggcgug

SEQ ID NO: 1114295 - RNA, 19 nt, Human
caccacagccuggacacug

SEQ ID NO: 1114296 - RNA, 24 nt, Human
caccucagccucccacagugccgg

SEQ ID NO: 1114297 - RNA, 19 nt, Human
cacgacagugcccugcaug

SEQ ID NO: 1114298 - RNA, 25 nt, Human
cacggcccucagaugaacaggcaga

SEQ ID NO: 1114299 - RNA, 18 nt, Human
cacugggggcagugagcu

SEQ ID NO: 1114300 - RNA, 21 nt, Human
cagaacugggccugcuggcuu

SEQ ID NO: 1114301 - RNA, 21 nt, Human
cagacucccagcuuggucucc

SEQ ID NO: 1114302 - RNA, 18 nt, Human
cagagcaggcagggggcc

SEQ ID NO: 1114303 - RNA, 20 nt, Human
cagccugacacugccuggca

SEQ ID NO: 1114304 - RNA, 24 nt, Human
cagcugccugggccugagccgaga

SEQ ID NO: 1114305 - RNA, 18 nt, Human
caggaggggcaggagggg

SEQ ID NO: 1114306 - RNA, 19 nt, Human
caggaggggcaggaggggc

SEQ ID NO: 1114307 - RNA, 22 nt, Human
caggaggggcugaucgcccuca

SEQ ID NO: 1114308 - RNA, 21 nt, Human
caggcagccccuguuacccaa

SEQ ID NO: 1114309 - RNA, 21 nt, Human
caggucccaggaucccugacc

SEQ ID NO: 1114310 - RNA, 25 nt, Human
cagugccgggauuacaggcgugagc

SEQ ID NO: 1114311 - RNA, 25 nt, Human
cauaacuggacuguaggccccacag

SEQ ID NO: 1114312 - RNA, 23 nt, Human
caucuccuuuaggcuccugcagu

SEQ ID NO: 1114313 - RNA, 22 nt, Human
cauugccagcugcgugugagca

SEQ ID NO: 1114314 - RNA, 19 nt, Human
ccaaaggcuuugucaccag

SEQ ID NO: 1114315 - RNA, 20 nt, Human
ccacaggggucucaucucug

SEQ ID NO: 1114316 - RNA, 24 nt, Human
ccacagugccgggauuacaggcgu

SEQ ID NO: 1114317 - RNA, 22 nt, Human
ccacauccuggccuuuccagaa

SEQ ID NO: 1114318 - RNA, 23 nt, Human
ccaggcccaggccuuggcucacg

SEQ ID NO: 1114319 - RNA, 19 nt, Human
ccauguuggucaggcuggu

SEQ ID NO: 1114320 - RNA, 22 nt, Human
ccauguuggucaggcuggucuc

SEQ ID NO: 1114321 - RNA, 23 nt, Human
ccauguuggucaggcuggucucg

SEQ ID NO: 1114322 - RNA, 20 nt, Human
ccauuguuccccagccuugc

SEQ ID NO: 1114323 - RNA, 22 nt, Human
cccaccuccuucacaggugcca

SEQ ID NO: 1114324 - RNA, 20 nt, Human
ccccagaacagcgcuuuggc

SEQ ID NO: 1114325 - RNA, 19 nt, Human
ccccuguuacccaaggugg

SEQ ID NO: 1114326 - RNA, 24 nt, Human
cccgaccucaggugauccucccac

SEQ ID NO: 1114327 - RNA, 19 nt, Human
cccgagccucauaguucag

SEQ ID NO: 1114328 - RNA, 23 nt, Human
cccggguucaagugauucuccuc

SEQ ID NO: 1114329 - RNA, 23 nt, Human
cccggguucaagugauucuccug

SEQ ID NO: 1114330 - RNA, 24 nt, Human
cccugcagccacugugaggugggu

SEQ ID NO: 1114331 - RNA, 20 nt, Human
cccuggcgggaugggggucu

SEQ ID NO: 1114332 - RNA, 24 nt, Human
ccgaauagcuaggauuacaggcau

SEQ ID NO: 1114333 - RNA, 24 nt, Human
ccgccucccggguucaagugauuc

SEQ ID NO: 1114334 - RNA, 25 nt, Human
ccuagcucagcccugagcuccuggc

SEQ ID NO: 1114335 - RNA, 20 nt, Human
ccucacaccucagccucccc

SEQ ID NO: 1114336 - RNA, 24 nt, Human
ccucacaccucagccuccccagac

SEQ ID NO: 1114337 - RNA, 26 nt, Human
ccucccaccucagccucccacagugc

SEQ ID NO: 1114338 - RNA, 24 nt, Human
ccucccggguucaagugauucucc

SEQ ID NO: 1114339 - RNA, 19 nt, Human
ccugacacugccuggcacu

SEQ ID NO: 1114340 - RNA, 26 nt, Human
ccugcaccacagccuggacacugggg

SEQ ID NO: 1114341 - RNA, 19 nt, Human
ccuuggccaggcccaggcc

SEQ ID NO: 1114342 - RNA, 20 nt, Human
cgaccucaggugauccuccc

SEQ ID NO: 1114343 - RNA, 24 nt, Human
cgaccucaggugauccucccaccu

SEQ ID NO: 1114344 - RNA, 22 nt, Human
cgcccucaccccagaacagcgc

SEQ ID NO: 1114345 - RNA, 23 nt, Human
cgcggucauaacacgugugugcc

SEQ ID NO: 1114346 - RNA, 21 nt, Human
cgggauuacaggcgugagcca

SEQ ID NO: 1114347 - RNA, 22 nt, Human
cgggauuacaggcgugagccac

SEQ ID NO: 1114348 - RNA, 24 nt, Human
cgggauuacaggcgugagccacug

SEQ ID NO: 1114349 - RNA, 21 nt, Human
cgggcucaggguggggguuug

SEQ ID NO: 1114350 - RNA, 24 nt, Human
cggguucaagugauucuccuguuu

SEQ ID NO: 1114351 - RNA, 18 nt, Human
cguugcugacacugcggg

SEQ ID NO: 1114352 - RNA, 20 nt, Human
cuagcucagcccugagcucc

SEQ ID NO: 1114353 - RNA, 23 nt, Human
cucacaccucagccuccccagac

SEQ ID NO: 1114354 - RNA, 20 nt, Human
cucacucuuuaccugcuguc

SEQ ID NO: 1114355 - RNA, 23 nt, Human
cucagcccugagcuccuggcaag

SEQ ID NO: 1114356 - RNA, 21 nt, Human
cucagccugacacugccuggc

SEQ ID NO: 1114357 - RNA, 24 nt, Human
cucaggugauccucccaccucagc

SEQ ID NO: 1114358 - RNA, 20 nt, Human
cuccacgaagccuuccugga

SEQ ID NO: 1114359 - RNA, 24 nt, Human
cuccauguuggucaggcuggucuc

SEQ ID NO: 1114360 - RNA, 22 nt, Human
cucccaccucagccucccacag

SEQ ID NO: 1114361 - RNA, 24 nt, Human
cucccgaauagcuaggauuacagg

SEQ ID NO: 1114362 - RNA, 20 nt, Human
cucccggguucaagugauuc

SEQ ID NO: 1114363 - RNA, 21 nt, Human
cuccuguuuaacccucccgaa

SEQ ID NO: 1114364 - RNA, 21 nt, Human
cucugugccaggcgcagagcu

SEQ ID NO: 1114365 - RNA, 24 nt, Human
cugcagccacugugaggugggugc

SEQ ID NO: 1114366 - RNA, 20 nt, Human
cuggccuuuccagaacuggg

SEQ ID NO: 1114367 - RNA, 24 nt, Human
cuucacgcagacaccaguccccuc

SEQ ID NO: 1114368 - RNA, 24 nt, Human
cuuguugcccaggcuggggugcag

SEQ ID NO: 1114369 - RNA, 24 nt, Human
gaaaugggguuucuccauguuggu

SEQ ID NO: 1114370 - RNA, 19 nt, Human
gacacugggggcagugagc

SEQ ID NO: 1114371 - RNA, 26 nt, Human
gacacugggggcagugagcugggcag

SEQ ID NO: 1114372 - RNA, 23 nt, Human
gaccucaggugauccucccaccu

SEQ ID NO: 1114373 - RNA, 24 nt, Human
gaccucaggugauccucccaccuc

SEQ ID NO: 1114374 - RNA, 19 nt, Human
gagagcagugaagccucag

SEQ ID NO: 1114375 - RNA, 18 nt, Human
gauuacaggcaugcgcca

SEQ ID NO: 1114376 - RNA, 22 nt, Human
gauuacaggcaugcgccaccau

SEQ ID NO: 1114377 - RNA, 18 nt, Human
gauuacaggcgugagcca

SEQ ID NO: 1114378 - RNA, 22 nt, Human
gauuacaggcgugagccacugc

SEQ ID NO: 1114379 - RNA, 22 nt, Human
gauuacaggcgugagccacugc

SEQ ID NO: 1114380 - RNA, 18 nt, Human
gcagaaaaggaagcucca

SEQ ID NO: 1114381 - RNA, 22 nt, Human
gcagagccaccuucugccaaag

SEQ ID NO: 1114382 - RNA, 19 nt, Human
gcagcaccuggcucuggcu

SEQ ID NO: 1114383 - RNA, 23 nt, Human
gccaggcgcagagcugcaaaccc

SEQ ID NO: 1114384 - RNA, 20 nt, Human
gcccagggaggggugcgggg

SEQ ID NO: 1114385 - RNA, 22 nt, Human
gccugcaccacagccuggacac

SEQ ID NO: 1114386 - RNA, 19 nt, Human
gccuggacgucugucccca

SEQ ID NO: 1114387 - RNA, 22 nt, Human
gcggucauaacacgugugugcc

SEQ ID NO: 1114388 - RNA, 23 nt, Human
gcuggucucgaacucccgaccuc

SEQ ID NO: 1114389 - RNA, 23 nt, Human
ggaaauaugugucccgauggcuc

SEQ ID NO: 1114390 - RNA, 25 nt, Human
ggagauagaagggggcaugaggggc

SEQ ID NO: 1114391 - RNA, 18 nt, Human
ggaggaccuggaggaggc

SEQ ID NO: 1114392 - RNA, 19 nt, Human
ggaggaggcgcugggugcu

SEQ ID NO: 1114393 - RNA, 19 nt, Human
ggaggggcaggaggggcug

SEQ ID NO: 1114394 - RNA, 22 nt, Human
ggauuacaggcaugcgccacca

SEQ ID NO: 1114395 - RNA, 24 nt, Human
ggauuacaggcaugcgccaccaug

SEQ ID NO: 1114396 - RNA, 20 nt, Human
ggcaggcuggcagcaccugg

SEQ ID NO: 1114397 - RNA, 22 nt, Human
ggcaggcuggcagcaccuggcu

SEQ ID NO: 1114398 - RNA, 24 nt, Human
ggcaggcuggcagcaccuggcucu

SEQ ID NO: 1114399 - RNA, 26 nt, Human
ggcugggggcagcagccgcggucaua

SEQ ID NO: 1114400 - RNA, 19 nt, Human
ggcugucauugugaaggag

SEQ ID NO: 1114401 - RNA, 18 nt, Human
gggaugggggucuggcug

SEQ ID NO: 1114402 - RNA, 18 nt, Human
gggauuacaggcgugagc

SEQ ID NO: 1114403 - RNA, 21 nt, Human
gggauuacaggcgugagccac

SEQ ID NO: 1114404 - RNA, 23 nt, Human
gggauuacaggcgugagccacug

SEQ ID NO: 1114405 - RNA, 25 nt, Human
gggauuacaggcgugagccacugcg

SEQ ID NO: 1114406 - RNA, 20 nt, Human
gggcaggaggggcugaucgc

SEQ ID NO: 1114407 - RNA, 23 nt, Human
gggcaggcuggcagcaccuggcu

SEQ ID NO: 1114408 - RNA, 25 nt, Human
gggcaggcuggcagcaccuggcucu

SEQ ID NO: 1114409 - RNA, 23 nt, Human
ggggagauagaagggggcaugag

SEQ ID NO: 1114410 - RNA, 22 nt, Human
gggggucuggcugcucccuccu

SEQ ID NO: 1114411 - RNA, 22 nt, Human
gggguuucuccauguuggucag

SEQ ID NO: 1114412 - RNA, 20 nt, Human
gggucuggcugcucccuccu

SEQ ID NO: 1114413 - RNA, 27 nt, Human
ggguggggcccgggcaauuugcugggg

SEQ ID NO: 1114414 - RNA, 19 nt, Human
ggguucaagugauucuccu

SEQ ID NO: 1114415 - RNA, 23 nt, Human
ggugcaguggugcgauuuuggcu

SEQ ID NO: 1114416 - RNA, 24 nt, Human
ggugcaguggugcgauuuuggcuc

SEQ ID NO: 1114417 - RNA, 18 nt, Human
guccuugccucuccaaag

SEQ ID NO: 1114418 - RNA, 24 nt, Human
gugauccucccaccucagccuccc

SEQ ID NO: 1114419 - RNA, 22 nt, Human
gugcaguggugcgauuuuggcu

SEQ ID NO: 1114420 - RNA, 23 nt, Human
gugcaguggugcgauuuuggcuc

SEQ ID NO: 1114421 - RNA, 24 nt, Human
uacaggcaugcgccaccaugccca

SEQ ID NO: 1114422 - RNA, 19 nt, Human
uacaggcgugagccacugc

SEQ ID NO: 1114423 - RNA, 24 nt, Human
uacaggcgugagccacugcgccca

SEQ ID NO: 1114424 - RNA, 24 nt, Human
uacucuuguugcccaggcuggggu

SEQ ID NO: 1114425 - RNA, 19 nt, Human
uagaaaugggguuucucca

SEQ ID NO: 1114426 - RNA, 21 nt, Human
uaggauuacaggcaugcgcca

SEQ ID NO: 1114427 - RNA, 22 nt, Human
uaggauuacaggcaugcgccac

SEQ ID NO: 1114428 - RNA, 24 nt, Human
uaggauuacaggcaugcgccacca

SEQ ID NO: 1114429 - RNA, 19 nt, Human
uaggcuccugcaguuccuc

SEQ ID NO: 1114430 - RNA, 24 nt, Human
uaguagaaaugggguuucuccaug

SEQ ID NO: 1114431 - RNA, 22 nt, Human
ucaacccauccccugccaaccu

SEQ ID NO: 1114432 - RNA, 25 nt, Human
ucacacugcccuucuuccugcugug

SEQ ID NO: 1114433 - RNA, 22 nt, Human
ucacagagauucccgggcugaa

SEQ ID NO: 1114434 - RNA, 21 nt, Human
ucacaggugccagcuggcagg

SEQ ID NO: 1114435 - RNA, 18 nt, Human
ucaccuggugacccuggc

SEQ ID NO: 1114436 - RNA, 21 nt, Human
ucacgacagugcccugcaugc

SEQ ID NO: 1114437 - RNA, 25 nt, Human
ucacugugauuauucauuaaccccu

SEQ ID NO: 1114438 - RNA, 18 nt, Human
ucagccucccacagugcc

SEQ ID NO: 1114439 - RNA, 20 nt, Human
ucagccucccacagugccgg

SEQ ID NO: 1114440 - RNA, 20 nt, Human
ucaggaggggcaggaggggc

SEQ ID NO: 1114441 - RNA, 18 nt, Human
ucagggugcuggauuacc

SEQ ID NO: 1114442 - RNA, 21 nt, Human
ucaugugaaaaugcugauugu

SEQ ID NO: 1114443 - RNA, 19 nt, Human
uccaagcuugcaccugggg

SEQ ID NO: 1114444 - RNA, 26 nt, Human
uccacugugggggccaggacaggggc

SEQ ID NO: 1114445 - RNA, 24 nt, Human
ucccacagugccgggauuacaggc

SEQ ID NO: 1114446 - RNA, 18 nt, Human
ucccaggaucccugaccc

SEQ ID NO: 1114447 - RNA, 26 nt, Human
ucccaggaucccugacccuuggccag

SEQ ID NO: 1114448 - RNA, 23 nt, Human
uccccagacucccagcuuggucu

SEQ ID NO: 1114449 - RNA, 19 nt, Human
ucccgaauagcuaggauua

SEQ ID NO: 1114450 - RNA, 24 nt, Human
ucccgaauagcuaggauuacaggc

SEQ ID NO: 1114451 - RNA, 21 nt, Human
ucccggguucaagugauucuc

SEQ ID NO: 1114452 - RNA, 24 nt, Human
ucccggguucaagugauucuccug

SEQ ID NO: 1114453 - RNA, 18 nt, Human
ucccugacccuuggccag

SEQ ID NO: 1114454 - RNA, 19 nt, Human
ucccugacccuuggccagg

SEQ ID NO: 1114455 - RNA, 19 nt, Human
uccgccuccauuguucccc

SEQ ID NO: 1114456 - RNA, 22 nt, Human
uccuaaauccacugacuugcca

SEQ ID NO: 1114457 - RNA, 19 nt, Human
uccugcggacgcacggcca

SEQ ID NO: 1114458 - RNA, 21 nt, Human
uccugcggacgcacggccaug

SEQ ID NO: 1114459 - RNA, 24 nt, Human
ucuccauaaccuccgccucccggg

SEQ ID NO: 1114460 - RNA, 20 nt, Human
ucuccgauuccuucaaccgu

SEQ ID NO: 1114461 - RNA, 18 nt, Human
ucuuguugcccaggcugg

SEQ ID NO: 1114462 - RNA, 22 nt, Human
ucuuguugcccaggcuggggug

SEQ ID NO: 1114463 - RNA, 19 nt, Human
ugaaagaaaggaggggacc

SEQ ID NO: 1114464 - RNA, 23 nt, Human
ugaaagaaaggaggggacccagg

SEQ ID NO: 1114465 - RNA, 24 nt, Human
ugaaagaaaggaggggacccagga

SEQ ID NO: 1114466 - RNA, 19 nt, Human
ugacccuggcgggaugggg

SEQ ID NO: 1114467 - RNA, 21 nt, Human
ugagcugggcagucgcggggc

SEQ ID NO: 1114468 - RNA, 19 nt, Human
ugagcuucugaacccacau

SEQ ID NO: 1114469 - RNA, 21 nt, Human
ugaggacagggcguugcugac

SEQ ID NO: 1114470 - RNA, 22 nt, Human
ugaggggcugucuccuugguuu

SEQ ID NO: 1114471 - RNA, 21 nt, Human
ugaguccauuguccuugagcu

SEQ ID NO: 1114472 - RNA, 22 nt, Human
ugauucuccuguuuaacccucc

SEQ ID NO: 1114473 - RNA, 18 nt, Human
ugcagaaaaggaagcucc

SEQ ID NO: 1114474 - RNA, 18 nt, Human
ugcccacugugaaugccc

SEQ ID NO: 1114475 - RNA, 18 nt, Human
ugcccaggcuggggugca

SEQ ID NO: 1114476 - RNA, 24 nt, Human
ugcccaggcuggggugcaguggug

SEQ ID NO: 1114477 - RNA, 24 nt, Human
ugccgggauuacaggcgugagcca

SEQ ID NO: 1114478 - RNA, 21 nt, Human
ugccuggacgucuguccccac

SEQ ID NO: 1114479 - RNA, 22 nt, Human
ugccuggcacugaggacagggc

SEQ ID NO: 1114480 - RNA, 22 nt, Human
ugccugggccugagccgagagc

SEQ ID NO: 1114481 - RNA, 22 nt, Human
ugcuggucccaccuccuucaca

SEQ ID NO: 1114482 - RNA, 22 nt, Human
uggacaacagacccucaaccca

SEQ ID NO: 1114483 - RNA, 19 nt, Human
uggcagcaccuggcucugg

SEQ ID NO: 1114484 - RNA, 20 nt, Human
uggcagcaccuggcucuggc

SEQ ID NO: 1114485 - RNA, 24 nt, Human
uggcagcaccuggcucuggcuugc

SEQ ID NO: 1114486 - RNA, 18 nt, Human
uggccuccacgcugcccc

SEQ ID NO: 1114487 - RNA, 20 nt, Human
uggcgggaugggggucuggc

SEQ ID NO: 1114488 - RNA, 18 nt, Human
ugggccugcuggcuuaca

SEQ ID NO: 1114489 - RNA, 21 nt, Human
uggggcccgggcaauuugcug

SEQ ID NO: 1114490 - RNA, 22 nt, Human
uggggcccgggcaauuugcugg

SEQ ID NO: 1114491 - RNA, 18 nt, Human
ugggggcagugagcuggg

SEQ ID NO: 1114492 - RNA, 24 nt, Human
uggggugcaguggugcgauuuugg

SEQ ID NO: 1114493 - RNA, 24 nt, Human
ugggguuucuccauguuggucagg

SEQ ID NO: 1114494 - RNA, 19 nt, Human
ugggugcuggucccaccuc

SEQ ID NO: 1114495 - RNA, 23 nt, Human
uggucaggcuggucucgaacucc

SEQ ID NO: 1114496 - RNA, 19 nt, Human
uggucucgaacucccgacc

SEQ ID NO: 1114497 - RNA, 22 nt, Human
ugguggagguuugaggccugau

SEQ ID NO: 1114498 - RNA, 20 nt, Human
uguccugcggacgcacggcc

SEQ ID NO: 1114499 - RNA, 20 nt, Human
ugugaaggagauuuaaucuu

SEQ ID NO: 1114500 - RNA, 25 nt, Human
ugugcucacgacagugcccugcaug

SEQ ID NO: 1114501 - RNA, 21 nt, Human
ugugggggccaggacaggggc

SEQ ID NO: 1114502 - RNA, 19 nt, Human
ugugugccacaccaggaaa

SEQ ID NO: 1114503 - RNA, 23 nt, Human
uguuuaacccucccgaauagcua

SEQ ID NO: 1114504 - RNA, 22 nt, Human
uuacucuuguugcccaggcugg

SEQ ID NO: 1114505 - RNA, 22 nt, Human
uuacucuuguugcccaggcugg

SEQ ID NO: 1114506 - RNA, 18 nt, Human
uuaguagaaaugggguuu

SEQ ID NO: 1114507 - RNA, 24 nt, Human
uuaguagaaaugggguuucuccau

SEQ ID NO: 1114508 - RNA, 23 nt, Human
uucaagugauucuccuguuuaac

SEQ ID NO: 1114509 - RNA, 23 nt, Human
uucccgggcugaaagugaaagaa

SEQ ID NO: 1114510 - RNA, 20 nt, Human
uucccugaaggagaccccug

SEQ ID NO: 1114511 - RNA, 25 nt, Human
uucucgguuuuauccuaaauccacu

SEQ ID NO: 1114512 - RNA, 23 nt, Human
uucugaguggccuggguggggcc

SEQ ID NO: 1114513 - RNA, 24 nt, Human
uugcccaggcuggggugcaguggu

SEQ ID NO: 1114514 - RNA, 18 nt, Human
uuggaucagguggcccgg

SEQ ID NO: 1114515 - RNA, 19 nt, Human
uuguuccccagccuugcuc

SEQ ID NO: 1114516 - RNA, 24 nt, Human
uuuacucuuguugcccaggcuggg

SEQ ID NO: 1114517 - RNA, 21 nt, Human
uuucuccauguuggucaggcu

SEQ ID NO: 1114518 - RNA, 24 nt, Human
uuuuacucuuguugcccaggcugg

SEQ ID NO: 1114519 - RNA, 22 nt, Human
uuuuuaguagaaaugggguuuc

SEQ ID NO: 1114520 - RNA, 21 nt, Human
agccuagcccccgucaucucc

SEQ ID NO: 1114521 - RNA, 18 nt, Human
aggccccuggcccuucca

SEQ ID NO: 1114522 - RNA, 22 nt, Human
auuugcaccagguucugccuuc

SEQ ID NO: 1114523 - RNA, 18 nt, Human
cagcaugaaagaccaaac

SEQ ID NO: 1114524 - RNA, 19 nt, Human
ccagguucugccuucacuc

SEQ ID NO: 1114525 - RNA, 19 nt, Human
ccccacaacugugggcugc

SEQ ID NO: 1114526 - RNA, 19 nt, Human
ccccuggcccuuccaccca

SEQ ID NO: 1114527 - RNA, 21 nt, Human
ccuccagcuggagcuuggccc

SEQ ID NO: 1114528 - RNA, 20 nt, Human
ccuggcccuuccacccaccu

SEQ ID NO: 1114529 - RNA, 21 nt, Human
ccugggaaaagccccuucccc

SEQ ID NO: 1114530 - RNA, 21 nt, Human
cucggcgccggccccuccagc

SEQ ID NO: 1114531 - RNA, 27 nt, Human
cucgggguccucuccguccccuaaggg

SEQ ID NO: 1114532 - RNA, 21 nt, Human
gaaagaccaaacguaucgaga

SEQ ID NO: 1114533 - RNA, 22 nt, Human
gaaagaccaaacguaucgagag

SEQ ID NO: 1114534 - RNA, 22 nt, Human
gccccuggcccuuccacccacc

SEQ ID NO: 1114535 - RNA, 20 nt, Human
gccccuuccccucggcgccg

SEQ ID NO: 1114536 - RNA, 18 nt, Human
ggaagcccaggggcagug

SEQ ID NO: 1114537 - RNA, 20 nt, Human
ggacccugggaaaagccccu

SEQ ID NO: 1114538 - RNA, 20 nt, Human
ggcccggaguggcgcccugc

SEQ ID NO: 1114539 - RNA, 23 nt, Human
ggcccggaguggcgcccugcacc

SEQ ID NO: 1114540 - RNA, 23 nt, Human
gggaaaagccccuuccccucggc

SEQ ID NO: 1114541 - RNA, 21 nt, Human
gggcugggcugguguggcugc

SEQ ID NO: 1114542 - RNA, 20 nt, Human
uagcccccgucaucuccuug

SEQ ID NO: 1114543 - RNA, 24 nt, Human
uaggggcugacggcauaagggaag

SEQ ID NO: 1114544 - RNA, 24 nt, Human
uccgagccaucuugugcccagagc

SEQ ID NO: 1114545 - RNA, 22 nt, Human
ucgagagcugggcugggcuggg

SEQ ID NO: 1114546 - RNA, 23 nt, Human
ucgagagcugggcugggcugggc

SEQ ID NO: 1114547 - RNA, 22 nt, Human
ugaaagaccaaacguaucgaga

SEQ ID NO: 1114548 - RNA, 23 nt, Human
ugaaagaccaaacguaucgagag

SEQ ID NO: 1114549 - RNA, 21 nt, Human
ugcccagagccuagcccccgu

SEQ ID NO: 1114550 - RNA, 21 nt, Human
ugccuucacuccaccaagucu

SEQ ID NO: 1114551 - RNA, 21 nt, Human
uggcccggaguggcgcccugc

SEQ ID NO: 1114552 - RNA, 19 nt, Human
uggcugcugaagccccaca

SEQ ID NO: 1114553 - RNA, 19 nt, Human
uggcugcugaagccccaca

SEQ ID NO: 1114554 - RNA, 19 nt, Human
ugggcugggcugggcuggu

SEQ ID NO: 1114555 - RNA, 20 nt, Human
ugggcugggcugggcuggug

SEQ ID NO: 1114556 - RNA, 23 nt, Human
ugggcugguguggcugcugaagc

SEQ ID NO: 1114557 - RNA, 18 nt, Human
ugguguggcugcugaagc

SEQ ID NO: 1114558 - RNA, 21 nt, Human
uguggcugcugaagccccaca

SEQ ID NO: 1114559 - RNA, 21 nt, Human
uuccacccaccuuugcccuca

SEQ ID NO: 1114560 - RNA, 23 nt, Human
aaacaguccuggacaacaggguc

SEQ ID NO: 1114561 - RNA, 20 nt, Human
aacaccagccucagcuuccc

SEQ ID NO: 1114562 - RNA, 23 nt, Human
aacccaauaacagacaugaggga

SEQ ID NO: 1114563 - RNA, 21 nt, Human
aagacagggauguggcagagc

SEQ ID NO: 1114564 - RNA, 21 nt, Human
aagaggucccccuccuggccc

SEQ ID NO: 1114565 - RNA, 25 nt, Human
acccacccuggcuccccucaagggc

SEQ ID NO: 1114566 - RNA, 25 nt, Human
acccugcuuccaaggcugcugccuu

SEQ ID NO: 1114567 - RNA, 21 nt, Human
accuccaaccugcgcagaaca

SEQ ID NO: 1114568 - RNA, 22 nt, Human
accuccaaccugcgcagaacaa

SEQ ID NO: 1114569 - RNA, 19 nt, Human
acuacgcccuaagccuuug

SEQ ID NO: 1114570 - RNA, 25 nt, Human
acucagugccugucagcccuuggua

SEQ ID NO: 1114571 - RNA, 22 nt, Human
agaacaaucagcguccugacca

SEQ ID NO: 1114572 - RNA, 20 nt, Human
agaugauguccauguuuugu

SEQ ID NO: 1114573 - RNA, 20 nt, Human
agcaguugcuggggagucuu

SEQ ID NO: 1114574 - RNA, 22 nt, Human
agccaucuccaggaagcaacac

SEQ ID NO: 1114575 - RNA, 19 nt, Human
agcccuugguaaacagucc

SEQ ID NO: 1114576 - RNA, 18 nt, Human
agccuuuggaggccaggg

SEQ ID NO: 1114577 - RNA, 24 nt, Human
aggagcacacccugcuuccaaggc

SEQ ID NO: 1114578 - RNA, 22 nt, Human
augcacacuucuccccuggucu

SEQ ID NO: 1114579 - RNA, 23 nt, Human
cacacagugggggauccccaccc

SEQ ID NO: 1114580 - RNA, 21 nt, Human
cacagcagugcgcagacccuu

SEQ ID NO: 1114581 - RNA, 22 nt, Human
caccaccuaccuccaaccugcg

SEQ ID NO: 1114582 - RNA, 22 nt, Human
cacccuggcuccccucaagggc

SEQ ID NO: 1114583 - RNA, 25 nt, Human
cacccuggcuccccucaagggcuuc

SEQ ID NO: 1114584 - RNA, 21 nt, Human
caccuagcagacaacuguccc

SEQ ID NO: 1114585 - RNA, 26 nt, Human
cacuccauccucacugcaggccuuca

SEQ ID NO: 1114586 - RNA, 21 nt, Human
cacuguccuuuccgcugcaug

SEQ ID NO: 1114587 - RNA, 18 nt, Human
cagaacaccagccucagc

SEQ ID NO: 1114588 - RNA, 22 nt, Human
cagaacaccagccucagcuucc

SEQ ID NO: 1114589 - RNA, 22 nt, Human
cagagcccugcggguugcuccc

SEQ ID NO: 1114590 - RNA, 18 nt, Human
cagcagcccagcagggau

SEQ ID NO: 1114591 - RNA, 19 nt, Human
cagcccuugguaaacaguc

SEQ ID NO: 1114592 - RNA, 24 nt, Human
caguugcuggggagucuuuccggg

SEQ ID NO: 1114593 - RNA, 22 nt, Human
ccacccacccuggcuccccuca

SEQ ID NO: 1114594 - RNA, 19 nt, Human
ccauaguccuccuguuccc

SEQ ID NO: 1114595 - RNA, 27 nt, Human
cccaauaacagacaugagggauggccc

SEQ ID NO: 1114596 - RNA, 24 nt, Human
ccccacccacccuggcuccccuca

SEQ ID NO: 1114597 - RNA, 24 nt, Human
ccccacccacccuggcuccccuca

SEQ ID NO: 1114598 - RNA, 21 nt, Human
cccccuccuggcccuugucac

SEQ ID NO: 1114599 - RNA, 19 nt, Human
cccuaagaggucccccucc

SEQ ID NO: 1114600 - RNA, 19 nt, Human
cccuccuggcccuugucac

SEQ ID NO: 1114601 - RNA, 24 nt, Human
cccugcggguugcucccaucacuc

SEQ ID NO: 1114602 - RNA, 18 nt, Human
cccugggcggccacauuc

SEQ ID NO: 1114603 - RNA, 20 nt, Human
cccuugguaaacaguccugg

SEQ ID NO: 1114604 - RNA, 19 nt, Human
ccgaccacuccauccucac

SEQ ID NO: 1114605 - RNA, 21 nt, Human
ccgcugcaugagugcaguguc

SEQ ID NO: 1114606 - RNA, 22 nt, Human
ccgcuuuccaguuaccugaccc

SEQ ID NO: 1114607 - RNA, 19 nt, Human
ccuaugucccccagauuca

SEQ ID NO: 1114608 - RNA, 26 nt, Human
ccucaagggcugcgugcacagugccc

SEQ ID NO: 1114609 - RNA, 19 nt, Human
ccuccaaaggcagcuggcu

SEQ ID NO: 1114610 - RNA, 24 nt, Human
ccucccacuccucuggcagucaca

SEQ ID NO: 1114611 - RNA, 23 nt, Human
ccuucacccuuugccagcaguug

SEQ ID NO: 1114612 - RNA, 24 nt, Human
ccuugccgcaaccugcuugucuug

SEQ ID NO: 1114613 - RNA, 22 nt, Human
cgaccacaccgaggagcacacc

SEQ ID NO: 1114614 - RNA, 20 nt, Human
cgaggagcacacccugcuuc

SEQ ID NO: 1114615 - RNA, 19 nt, Human
cgcccuaagccuuuggagg

SEQ ID NO: 1114616 - RNA, 22 nt, Human
cuacucagaacaccagccucag

SEQ ID NO: 1114617 - RNA, 21 nt, Human
cucaccaccuaccuccaaccu

SEQ ID NO: 1114618 - RNA, 21 nt, Human
cuccccuggucuuucugcccc

SEQ ID NO: 1114619 - RNA, 21 nt, Human
cucucugggacagagccucac

SEQ ID NO: 1114620 - RNA, 21 nt, Human
cugagucccuauuccauuuug

SEQ ID NO: 1114621 - RNA, 21 nt, Human
cugccuucugcacacaguggg

SEQ ID NO: 1114622 - RNA, 20 nt, Human
cugcugccuucugcacacag

SEQ ID NO: 1114623 - RNA, 22 nt, Human
cugcugccuucugcacacagug

SEQ ID NO: 1114624 - RNA, 22 nt, Human
cuguccuuuccgcugcaugagu

SEQ ID NO: 1114625 - RNA, 18 nt, Human
gaaacucaaacacucuuc

SEQ ID NO: 1114626 - RNA, 20 nt, Human
gaaaugcucccacaucaggu

SEQ ID NO: 1114627 - RNA, 23 nt, Human
gacucaccaccuaccuccaaccu

SEQ ID NO: 1114628 - RNA, 18 nt, Human
gagcccugcggguugcuc

SEQ ID NO: 1114629 - RNA, 18 nt, Human
gaggagcacacccugcuu

SEQ ID NO: 1114630 - RNA, 20 nt, Human
gcuggggagucuuuccggcc

SEQ ID NO: 1114631 - RNA, 20 nt, Human
ggacaacagggucaaggaca

SEQ ID NO: 1114632 - RNA, 25 nt, Human
ggauggcccugucucucugggacag

SEQ ID NO: 1114633 - RNA, 18 nt, Human
ggauguggcagagcccug

SEQ ID NO: 1114634 - RNA, 23 nt, Human
ggauugggggaaaugcucccaca

SEQ ID NO: 1114635 - RNA, 24 nt, Human
ggccagggacaaagucucguucac

SEQ ID NO: 1114636 - RNA, 20 nt, Human
uaccugacccacccugaguc

SEQ ID NO: 1114637 - RNA, 18 nt, Human
ucagcuucccuauguccc

SEQ ID NO: 1114638 - RNA, 21 nt, Human
ucccagggccugccccugaug

SEQ ID NO: 1114639 - RNA, 25 nt, Human
uccccacccacccuggcuccccuca

SEQ ID NO: 1114640 - RNA, 22 nt, Human
ucucagacucaccaccuaccuc

SEQ ID NO: 1114641 - RNA, 19 nt, Human
ucucucugggacagagccu

SEQ ID NO: 1114642 - RNA, 21 nt, Human
ucugccacuacucagaacacc

SEQ ID NO: 1114643 - RNA, 23 nt, Human
ugaccacuugcuagagauggcuu

SEQ ID NO: 1114644 - RNA, 19 nt, Human
ugagggauggcccugucuc

SEQ ID NO: 1114645 - RNA, 24 nt, Human
ugaugcacacuucuccccuggucu

SEQ ID NO: 1114646 - RNA, 21 nt, Human
ugccuucugcacacagugggg

SEQ ID NO: 1114647 - RNA, 22 nt, Human
uggaggccagggacaaagucuc

SEQ ID NO: 1114648 - RNA, 21 nt, Human
uggccaggugcacggggcacu

SEQ ID NO: 1114649 - RNA, 22 nt, Human
uggcccccuaagaggucccccu

SEQ ID NO: 1114650 - RNA, 18 nt, Human
uggcuugaauccuguggg

SEQ ID NO: 1114651 - RNA, 21 nt, Human
ugggugguggccuggucccug

SEQ ID NO: 1114652 - RNA, 22 nt, Human
ugucccccagauucagcagccc

SEQ ID NO: 1114653 - RNA, 21 nt, Human
ugucuggccaggugcacgggg

SEQ ID NO: 1114654 - RNA, 19 nt, Human
ugugccauaguccuccugu

SEQ ID NO: 1114655 - RNA, 18 nt, Human
uguggcagagcccugcgg

SEQ ID NO: 1114656 - RNA, 18 nt, Human
uuccaaggcugcugccuu

SEQ ID NO: 1114657 - RNA, 20 nt, Human
aaaaacaaguacuuaaccca

SEQ ID NO: 1114658 - RNA, 26 nt, Human
aaacacugcagcauaucccaauaaaa

SEQ ID NO: 1114659 - RNA, 20 nt, Human
aaaugucucuuugaacagag

SEQ ID NO: 1114660 - RNA, 18 nt, Human
aacagagauguagcaagc

SEQ ID NO: 1114661 - RNA, 22 nt, Human
aaccacaaagcaccaauucaac

SEQ ID NO: 1114662 - RNA, 19 nt, Human
aacccucuauaaaaaaggg

SEQ ID NO: 1114663 - RNA, 18 nt, Human
aagccuuuguggggagga

SEQ ID NO: 1114664 - RNA, 18 nt, Human
aaggaacagaggaauuca

SEQ ID NO: 1114665 - RNA, 24 nt, Human
aauucuuucuucagaaacaaagaa

SEQ ID NO: 1114666 - RNA, 21 nt, Human
acaaaauccaugaggaaaacc

SEQ ID NO: 1114667 - RNA, 20 nt, Human
acaaagcaccaauucaacaa

SEQ ID NO: 1114668 - RNA, 18 nt, Human
acacaagcucuaaggaac

SEQ ID NO: 1114669 - RNA, 23 nt, Human
acagcaaucccuuucuucuuucu

SEQ ID NO: 1114670 - RNA, 24 nt, Human
acauguauguauucuguuuacaaa

SEQ ID NO: 1114671 - RNA, 25 nt, Human
acggagcuucucuuuucagagcuau

SEQ ID NO: 1114672 - RNA, 24 nt, Human
agcauaucccaauaaaaccuuaau

SEQ ID NO: 1114673 - RNA, 25 nt, Human
aucccuuucuucuuucucccccuuc

SEQ ID NO: 1114674 - RNA, 18 nt, Human
caagcccacuuuuuccaa

SEQ ID NO: 1114675 - RNA, 19 nt, Human
caaggcguugacacacaga

SEQ ID NO: 1114676 - RNA, 21 nt, Human
caaguacuuaacccaggaacc

SEQ ID NO: 1114677 - RNA, 22 nt, Human
cccgcgcggagcucggcggccg

SEQ ID NO: 1114678 - RNA, 20 nt, Human
cccugugcgcaucuuguccu

SEQ ID NO: 1114679 - RNA, 22 nt, Human
ccuuucuucuuucucccccucc

SEQ ID NO: 1114680 - RNA, 24 nt, Human
cggccgccacgcgcaaagccccgg

SEQ ID NO: 1114681 - RNA, 23 nt, Human
cuaaucgugucaaagaucaucua

SEQ ID NO: 1114682 - RNA, 23 nt, Human
cuuaauaaggucaaguggagaac

SEQ ID NO: 1114683 - RNA, 23 nt, Human
gaaccgaacaaagcauaggacaa

SEQ ID NO: 1114684 - RNA, 19 nt, Human
gggggucggaggggcgggg

SEQ ID NO: 1114685 - RNA, 20 nt, Human
gggggucggaggggcggggg

SEQ ID NO: 1114686 - RNA, 21 nt, Human
gggggucggaggggcgggggc

SEQ ID NO: 1114687 - RNA, 21 nt, Human
gucuguaaccaaaagacuguc

SEQ ID NO: 1114688 - RNA, 24 nt, Human
uaacaaggcuuuuugaccuguaac

SEQ ID NO: 1114689 - RNA, 19 nt, Human
uaacccaggaaccgaacaa

SEQ ID NO: 1114690 - RNA, 25 nt, Human
uacauauacacauguauguauucug

SEQ ID NO: 1114691 - RNA, 23 nt, Human
uacuagaagggacaagaucuggg

SEQ ID NO: 1114692 - RNA, 21 nt, Human
uagaagggacaagaucugggc

SEQ ID NO: 1114693 - RNA, 22 nt, Human
uagaagggacaagaucugggca

SEQ ID NO: 1114694 - RNA, 25 nt, Human
uagcaagcccacuuuuuccaagcuc

SEQ ID NO: 1114695 - RNA, 22 nt, Human
uaugucauuauguauuuuuuga

SEQ ID NO: 1114696 - RNA, 19 nt, Human
uccuaagucuguaaccaaa

SEQ ID NO: 1114697 - RNA, 23 nt, Human
ucucuuugaacagagauguagca

SEQ ID NO: 1114698 - RNA, 23 nt, Human
ucuucuuucucccccuccccaag

SEQ ID NO: 1114699 - RNA, 19 nt, Human
ucuuugaacagagauguag

SEQ ID NO: 1114700 - RNA, 23 nt, Human
ugacaaaauccaugaggaaaacc

SEQ ID NO: 1114701 - RNA, 18 nt, Human
ugaggaaaauccuuauga

SEQ ID NO: 1114702 - RNA, 28 nt, Human
ugauuucaggugagcugaugaauugccu

SEQ ID NO: 1114703 - RNA, 21 nt, Human
ugcgcaucuuguccuugcucc

SEQ ID NO: 1114704 - RNA, 23 nt, Human
uuacaaaguuucauuacaugaaa

SEQ ID NO: 1114705 - RNA, 21 nt, Human
uuacauauacacauguaugua

SEQ ID NO: 1114706 - RNA, 25 nt, Human
uugaacagagauguagcaagcccac

SEQ ID NO: 1114707 - RNA, 24 nt, Human
uugcaaccacaaagcaccaauuca

SEQ ID NO: 1114708 - RNA, 20 nt, Human
uuuacauauacacauguaug

SEQ ID NO: 1114709 - RNA, 18 nt, Human
uuucagagcuaugauucu

SEQ ID NO: 1114710 - RNA, 22 nt, Human
aaacccgcuccuuugcgcugcc

SEQ ID NO: 1114711 - RNA, 20 nt, Human
aagcgcucagguuccaauug

SEQ ID NO: 1114712 - RNA, 20 nt, Human
accacuccauacuccuccac

SEQ ID NO: 1114713 - RNA, 23 nt, Human
accagucccccaugggaucccag

SEQ ID NO: 1114714 - RNA, 22 nt, Human
accuaaauugaagauagaccuc

SEQ ID NO: 1114715 - RNA, 19 nt, Human
acuccauacuccuccacaa

SEQ ID NO: 1114716 - RNA, 22 nt, Human
aggaacuccaggguccuguagu

SEQ ID NO: 1114717 - RNA, 23 nt, Human
aggaucuugaccaagcgcucagg

SEQ ID NO: 1114718 - RNA, 23 nt, Human
agugcuucugccucaggcuccug

SEQ ID NO: 1114719 - RNA, 25 nt, Human
auagaaucguucuccaagcucucag

SEQ ID NO: 1114720 - RNA, 19 nt, Human
auggccagagccccagggc

SEQ ID NO: 1114721 - RNA, 19 nt, Human
augggcuuggccgggggcu

SEQ ID NO: 1114722 - RNA, 21 nt, Human
auugaagauagaccuccacuu

SEQ ID NO: 1114723 - RNA, 26 nt, Human
cacccaaaaacccgcuccuuugcgcu

SEQ ID NO: 1114724 - RNA, 19 nt, Human
cagcagguugggagcccac

SEQ ID NO: 1114725 - RNA, 18 nt, Human
caggugcuccugcaaguc

SEQ ID NO: 1114726 - RNA, 27 nt, Human
cauccaccacuccauacuccuccacaa

SEQ ID NO: 1114727 - RNA, 21 nt, Human
ccacuccauacuccuccacaa

SEQ ID NO: 1114728 - RNA, 22 nt, Human
ccacuccauacuccuccacaaa

SEQ ID NO: 1114729 - RNA, 22 nt, Human
ccagagcgaccuaaauugaaga

SEQ ID NO: 1114730 - RNA, 18 nt, Human
ccagccagcugcugggcu

SEQ ID NO: 1114731 - RNA, 28 nt, Human
ccagcucguggugugccuggccaccugg

SEQ ID NO: 1114732 - RNA, 18 nt, Human
cccaaaaacccgcuccuu

SEQ ID NO: 1114733 - RNA, 22 nt, Human
cccauccaccacuccauacucc

SEQ ID NO: 1114734 - RNA, 21 nt, Human
ccccaagaccugugcccuacc

SEQ ID NO: 1114735 - RNA, 18 nt, Human
cccccagcccggauggcu

SEQ ID NO: 1114736 - RNA, 21 nt, Human
cccccguggaaguuuacgcuu

SEQ ID NO: 1114737 - RNA, 24 nt, Human
cccguggaaguuuacgcuuagucu

SEQ ID NO: 1114738 - RNA, 23 nt, Human
cccucugcugccucuauagaauc

SEQ ID NO: 1114739 - RNA, 18 nt, Human
cccuucuucuuuccuuuc

SEQ ID NO: 1114740 - RNA, 23 nt, Human
cccuucuucuuuccuuucugccg

SEQ ID NO: 1114741 - RNA, 20 nt, Human
ccgcccagcucguggugugc

SEQ ID NO: 1114742 - RNA, 18 nt, Human
ccuacagccucagcaaac

SEQ ID NO: 1114743 - RNA, 23 nt, Human
ccuacagccucagcaaacuuguc

SEQ ID NO: 1114744 - RNA, 23 nt, Human
ccucuggcucaucacuggccccc

SEQ ID NO: 1114745 - RNA, 33 nt, Human
ccuguaguuugggacagggaguucccgaagccg

SEQ ID NO: 1114746 - RNA, 24 nt, Human
ccuuguuggauuuauccucccugu

SEQ ID NO: 1114747 - RNA, 20 nt, Human
cgcucagguuccaauugcac

SEQ ID NO: 1114748 - RNA, 18 nt, Human
cucccuguccucagcccc

SEQ ID NO: 1114749 - RNA, 22 nt, Human
cuccugcaagucgcacccaaaa

SEQ ID NO: 1114750 - RNA, 19 nt, Human
cuccugccccuggggcccc

SEQ ID NO: 1114751 - RNA, 22 nt, Human
cuccuuugcgcugcccuucuuc

SEQ ID NO: 1114752 - RNA, 21 nt, Human
cugccucaggcuccuguucac

SEQ ID NO: 1114753 - RNA, 21 nt, Human
cugcugccucuauagaaucgu

SEQ ID NO: 1114754 - RNA, 19 nt, Human
cuggccgcaguguccccuu

SEQ ID NO: 1114755 - RNA, 19 nt, Human
cuguucacccucugcugcc

SEQ ID NO: 1114756 - RNA, 22 nt, Human
cuugaccaagcgcucagguucc

SEQ ID NO: 1114757 - RNA, 22 nt, Human
cuuggcccggccccaggggggc

SEQ ID NO: 1114758 - RNA, 18 nt, Human
cuuugcgcugcccuucuu

SEQ ID NO: 1114759 - RNA, 19 nt, Human
gagacuucauggccagagc

SEQ ID NO: 1114760 - RNA, 22 nt, Human
gagccgguaagugagcagggga

SEQ ID NO: 1114761 - RNA, 19 nt, Human
gcaagucgcacccaaaaac

SEQ ID NO: 1114762 - RNA, 24 nt, Human
gcaagucgcacccaaaaacccgcu

SEQ ID NO: 1114763 - RNA, 18 nt, Human
gccccagggcacuggccc

SEQ ID NO: 1114764 - RNA, 19 nt, Human
gccccaggggggcagggcu

SEQ ID NO: 1114765 - RNA, 20 nt, Human
gcccggauggcugaccgccc

SEQ ID NO: 1114766 - RNA, 23 nt, Human
gccugggcaacgggcagcagcuc

SEQ ID NO: 1114767 - RNA, 21 nt, Human
ggcagggcucccaauuggggg

SEQ ID NO: 1114768 - RNA, 18 nt, Human
ggccugggcaacgggcag

SEQ ID NO: 1114769 - RNA, 23 nt, Human
ggcucccaauuggggguggaggg

SEQ ID NO: 1114770 - RNA, 21 nt, Human
gggcagggcucccaauugggg

SEQ ID NO: 1114771 - RNA, 22 nt, Human
gggcagggcucccaauuggggg

SEQ ID NO: 1114772 - RNA, 20 nt, Human
ggggcagggcucccaauugg

SEQ ID NO: 1114773 - RNA, 22 nt, Human
gggggcugcugggccccaccag

SEQ ID NO: 1114774 - RNA, 20 nt, Human
ggggguggaggguggccugg

SEQ ID NO: 1114775 - RNA, 24 nt, Human
gucccccaugggaucccagccagc

SEQ ID NO: 1114776 - RNA, 21 nt, Human
uagagaugauguucgggggca

SEQ ID NO: 1114777 - RNA, 24 nt, Human
uaggaucuugaccaagcgcucagg

SEQ ID NO: 1114778 - RNA, 19 nt, Human
ucagccccccguggaaguu

SEQ ID NO: 1114779 - RNA, 23 nt, Human
ucagugaguccaugcuuuuggcu

SEQ ID NO: 1114780 - RNA, 23 nt, Human
ucccagccagcugcugggcuugg

SEQ ID NO: 1114781 - RNA, 22 nt, Human
uccugcaagucgcacccaaaaa

SEQ ID NO: 1114782 - RNA, 20 nt, Human
uccuggccugagugcugcag

SEQ ID NO: 1114783 - RNA, 25 nt, Human
ucucauggccagagcgaccuaaauu

SEQ ID NO: 1114784 - RNA, 21 nt, Human
ucugccgagacuucauggcca

SEQ ID NO: 1114785 - RNA, 22 nt, Human
ugaagauagaccuccacuuccu

SEQ ID NO: 1114786 - RNA, 20 nt, Human
ugaccaagcgcucagguucc

SEQ ID NO: 1114787 - RNA, 19 nt, Human
ugaggaacuccaggguccu

SEQ ID NO: 1114788 - RNA, 21 nt, Human
ugaggccauguguaccaagug

SEQ ID NO: 1114789 - RNA, 23 nt, Human
ugccccuggggccccggccacac

SEQ ID NO: 1114790 - RNA, 19 nt, Human
ugccucaggcuccuguuca

SEQ ID NO: 1114791 - RNA, 19 nt, Human
ugcugggccccaccagccc

SEQ ID NO: 1114792 - RNA, 19 nt, Human
uggaggagaccccugagag

SEQ ID NO: 1114793 - RNA, 26 nt, Human
uggcaagaaauuguguccccggaagc

SEQ ID NO: 1114794 - RNA, 20 nt, Human
uggccugagugcugcaggug

SEQ ID NO: 1114795 - RNA, 18 nt, Human
ugggcuuggccgggggcu

SEQ ID NO: 1114796 - RNA, 22 nt, Human
uggucugggcacugaaugaggc

SEQ ID NO: 1114797 - RNA, 20 nt, Human
uugcgcugcccuucuucuuu

SEQ ID NO: 1114798 - RNA, 21 nt, Human
caccagggccuccgggccccc

SEQ ID NO: 1114799 - RNA, 19 nt, Human
ccaccacgguucccuaucc

SEQ ID NO: 1114800 - RNA, 19 nt, Human
ccaccagggccuccgggcc

SEQ ID NO: 1114801 - RNA, 20 nt, Human
ccagggccuuggccccagcc

SEQ ID NO: 1114802 - RNA, 19 nt, Human
cccagggccaccagggccu

SEQ ID NO: 1114803 - RNA, 19 nt, Human
ccccagccccguccauggc

SEQ ID NO: 1114804 - RNA, 21 nt, Human
cccccccccacccgcugcacc

SEQ ID NO: 1114805 - RNA, 18 nt, Human
ccccccccccccccaccc

SEQ ID NO: 1114806 - RNA, 18 nt, Human
ccccccccccccccaccc

SEQ ID NO: 1114807 - RNA, 23 nt, Human
ccccccccccccccacccgcugc

SEQ ID NO: 1114808 - RNA, 24 nt, Human
ccccguccauggccgcgaccccgg

SEQ ID NO: 1114809 - RNA, 23 nt, Human
ccgcgaucuccagggccuuggcc

SEQ ID NO: 1114810 - RNA, 19 nt, Human
ccgggcccccccccccccc

SEQ ID NO: 1114811 - RNA, 18 nt, Human
ccuccgggcccccccccc

SEQ ID NO: 1114812 - RNA, 22 nt, Human
ccuccgggcccccccccccccc

SEQ ID NO: 1114813 - RNA, 26 nt, Human
ccuccgggccccccccccccccaccc

SEQ ID NO: 1114814 - RNA, 22 nt, Human
cgggccccccccccccccaccc

SEQ ID NO: 1114815 - RNA, 22 nt, Human
cuccagggccuuggccccagcc

SEQ ID NO: 1114816 - RNA, 23 nt, Human
cuccgcgaucuccagggccuugg

SEQ ID NO: 1114817 - RNA, 24 nt, Human
cuuggccccagccccguccauggc

SEQ ID NO: 1114818 - RNA, 21 nt, Human
gggccccccccccccccaccc

SEQ ID NO: 1114819 - RNA, 26 nt, Human
uauccuuggccuugccuccgcgaucu

SEQ ID NO: 1114820 - RNA, 23 nt, Human
ucccagggccaccagggccuccg

SEQ ID NO: 1114821 - RNA, 24 nt, Human
uccguggaagccaccacgguuccc

SEQ ID NO: 1114822 - RNA, 18 nt, Human
ucuccagggccuuggccc

SEQ ID NO: 1114823 - RNA, 22 nt, Human
ucuccagggccuuggccccagc

SEQ ID NO: 1114824 - RNA, 21 nt, Human
ugccaaaaccuccguggaagc

SEQ ID NO: 1114825 - RNA, 19 nt, Human
uggaugccacugccaaaac

SEQ ID NO: 1114826 - RNA, 22 nt, Human
uggaugccacugccaaaaccuc

SEQ ID NO: 1114827 - RNA, 18 nt, Human
uggccccagccccgucca

SEQ ID NO: 1114828 - RNA, 21 nt, Human
aaaaaucauuucccgaaagcc

SEQ ID NO: 1114829 - RNA, 25 nt, Human
aaacagauagggaauauuuuuccag

SEQ ID NO: 1114830 - RNA, 22 nt, Human
aaagaacuuaaccagcaaaaac

SEQ ID NO: 1114831 - RNA, 21 nt, Human
aagacugcagaguagaggaau

SEQ ID NO: 1114832 - RNA, 23 nt, Human
aagcaagaggaagaaaaagggac

SEQ ID NO: 1114833 - RNA, 20 nt, Human
acccucugccucugcucuuu

SEQ ID NO: 1114834 - RNA, 23 nt, Human
agagauaggaacaaguuuaaaga

SEQ ID NO: 1114835 - RNA, 21 nt, Human
agcaaauacccucugccucug

SEQ ID NO: 1114836 - RNA, 20 nt, Human
agccacacaaagaaagcugc

SEQ ID NO: 1114837 - RNA, 18 nt, Human
aggaagaaaaaugauucu

SEQ ID NO: 1114838 - RNA, 24 nt, Human
aggcaagguuuuuuuucuucuucu

SEQ ID NO: 1114839 - RNA, 19 nt, Human
aguuuuugagaucuuggaa

SEQ ID NO: 1114840 - RNA, 21 nt, Human
auagcaaauacccucugccuc

SEQ ID NO: 1114841 - RNA, 26 nt, Human
aucucuuuuaagagacuggguugugc

SEQ ID NO: 1114842 - RNA, 24 nt, Human
cacuuaaaaaaaucauuucccgaa

SEQ ID NO: 1114843 - RNA, 21 nt, Human
caguugaaaagaacuuaacca

SEQ ID NO: 1114844 - RNA, 24 nt, Human
caugacaccagcucuuaagcagca

SEQ ID NO: 1114845 - RNA, 18 nt, Human
ccacacaaagaaagcugc

SEQ ID NO: 1114846 - RNA, 22 nt, Human
ccacacaaagaaagcugcuuaa

SEQ ID NO: 1114847 - RNA, 20 nt, Human
ccuacugcaggaagugaggu

SEQ ID NO: 1114848 - RNA, 20 nt, Human
ccuuuuccuuugcuguaguu

SEQ ID NO: 1114849 - RNA, 20 nt, Human
cugcucuuuuucuuccuauu

SEQ ID NO: 1114850 - RNA, 22 nt, Human
cugcugugguucaaagccacac

SEQ ID NO: 1114851 - RNA, 22 nt, Human
cuggagucagggaagaugagca

SEQ ID NO: 1114852 - RNA, 25 nt, Human
gaacacuuaacuacuacugguccau

SEQ ID NO: 1114853 - RNA, 21 nt, Human
gagcacagucaugcacccuac

SEQ ID NO: 1114854 - RNA, 22 nt, Human
gcaagguuuuuuuucuucuucu

SEQ ID NO: 1114855 - RNA, 18 nt, Human
gcuucaggcaagagguuu

SEQ ID NO: 1114856 - RNA, 21 nt, Human
gguguuggcuuucuuuuggcu

SEQ ID NO: 1114857 - RNA, 20 nt, Human
gucagcucuuuuuuaaaguu

SEQ ID NO: 1114858 - RNA, 20 nt, Human
gugauccuuuggaaaucuug

SEQ ID NO: 1114859 - RNA, 21 nt, Human
uaaacuucugaaaugcaggcc

SEQ ID NO: 1114860 - RNA, 19 nt, Human
uaaccagcaaaaacuuggc

SEQ ID NO: 1114861 - RNA, 20 nt, Human
uacacuaaaaaugguguugg

SEQ ID NO: 1114862 - RNA, 18 nt, Human
ucaaagccacacaaagaa

SEQ ID NO: 1114863 - RNA, 18 nt, Human
uccuuuuccuuugcugua

SEQ ID NO: 1114864 - RNA, 23 nt, Human
ucugccucugcucuuuuucuucc

SEQ ID NO: 1114865 - RNA, 23 nt, Human
ucugcugugguucaaagccacac

SEQ ID NO: 1114866 - RNA, 24 nt, Human
ugaaaagaacuuaaccagcaaaaa

SEQ ID NO: 1114867 - RNA, 21 nt, Human
ugaaaagcaagaggaagaaaa

SEQ ID NO: 1114868 - RNA, 18 nt, Human
ugaaaagcaagaggaagg

SEQ ID NO: 1114869 - RNA, 19 nt, Human
ugaaaugcaggccaucaaa

SEQ ID NO: 1114870 - RNA, 23 nt, Human
ugacaccagcucuuaagcagcaa

SEQ ID NO: 1114871 - RNA, 19 nt, Human
ugagagcacagucaugcac

SEQ ID NO: 1114872 - RNA, 22 nt, Human
ugagcaggcaguugaaaagaac

SEQ ID NO: 1114873 - RNA, 23 nt, Human
ugauuugcuugaaauuaaacuuc

SEQ ID NO: 1114874 - RNA, 24 nt, Human
ugauuuucuucacaaucuguuuuu

SEQ ID NO: 1114875 - RNA, 19 nt, Human
ugcagaguagaggaaucuu

SEQ ID NO: 1114876 - RNA, 22 nt, Human
uggcuuuuuuccuccucuuaca

SEQ ID NO: 1114877 - RNA, 18 nt, Human
ugggaaagccacugggug

SEQ ID NO: 1114878 - RNA, 21 nt, Human
ugguucaacugcaaagacugc

SEQ ID NO: 1114879 - RNA, 21 nt, Human
ugugguccagugaaaagcaag

SEQ ID NO: 1114880 - RNA, 19 nt, Human
uuaagcagcaacaucugcu

SEQ ID NO: 1114881 - RNA, 24 nt, Human
uuacacuaaaaaugguguuggcuu

SEQ ID NO: 1114882 - RNA, 18 nt, Human
uuggcauucaugaucuug

SEQ ID NO: 1114883 - RNA, 21 nt, Human
uuuggcuuuuuuccuccucuu

SEQ ID NO: 1114884 - RNA, 19 nt, Human
uuugucucuacucugauga

SEQ ID NO: 1114885 - RNA, 22 nt, Human
uuuuccagccaacuuaucccaa

SEQ ID NO: 1114886 - RNA, 19 nt, Human
aaaagcuacaaaaacaugc

SEQ ID NO: 1114887 - RNA, 22 nt, Human
aaaggcauuccauguuccaaaa

SEQ ID NO: 1114888 - RNA, 19 nt, Human
aagcuacaaaaacaugcca

SEQ ID NO: 1114889 - RNA, 24 nt, Human
aaggugggaggauugcuugaggcc

SEQ ID NO: 1114890 - RNA, 18 nt, Human
aaguagcuucucagauca

SEQ ID NO: 1114891 - RNA, 24 nt, Human
aaucucugucucauuuaccagggg

SEQ ID NO: 1114892 - RNA, 24 nt, Human
aaugaacgcuucaaaaacuggagg

SEQ ID NO: 1114893 - RNA, 18 nt, Human
accaggggucauucaaaa

SEQ ID NO: 1114894 - RNA, 18 nt, Human
acugcaucccagccuggg

SEQ ID NO: 1114895 - RNA, 24 nt, Human
acugcaucccagccugggugacag

SEQ ID NO: 1114896 - RNA, 19 nt, Human
acugugacaugaauuggag

SEQ ID NO: 1114897 - RNA, 18 nt, Human
agcauuuugagaggcuaa

SEQ ID NO: 1114898 - RNA, 24 nt, Human
agcauuuugagaggcuaagguggg

SEQ ID NO: 1114899 - RNA, 22 nt, Human
agccugggugacagagugaggc

SEQ ID NO: 1114900 - RNA, 24 nt, Human
agcuacuugggaggcugagguggg

SEQ ID NO: 1114901 - RNA, 24 nt, Human
aggauugcuugaggccaggaauuu

SEQ ID NO: 1114902 - RNA, 24 nt, Human
aggcuaaggugggaggauugcuug

SEQ ID NO: 1114903 - RNA, 24 nt, Human
aggcugaggugggagggucacuug

SEQ ID NO: 1114904 - RNA, 19 nt, Human
aggcugcagugagcugugu

SEQ ID NO: 1114905 - RNA, 22 nt, Human
aggcugggcaacauggugagac

SEQ ID NO: 1114906 - RNA, 24 nt, Human
aggcugggcaacauggugagaccc

SEQ ID NO: 1114907 - RNA, 23 nt, Human
aggugggaggauugcuugaggcc

SEQ ID NO: 1114908 - RNA, 24 nt, Human
aggugggagggucacuugagcccg

SEQ ID NO: 1114909 - RNA, 21 nt, Human
auaaaaacuguggcucacacc

SEQ ID NO: 1114910 - RNA, 19 nt, Human
augcugcuguaguccuagc

SEQ ID NO: 1114911 - RNA, 20 nt, Human
augcugcuguaguccuagcu

SEQ ID NO: 1114912 - RNA, 24 nt, Human
augggucaguuauuugcucucuca

SEQ ID NO: 1114913 - RNA, 20 nt, Human
auugcccagggaugucauug

SEQ ID NO: 1114914 - RNA, 24 nt, Human
caacauggugagacccugugucug

SEQ ID NO: 1114915 - RNA, 24 nt, Human
cacaccuguaaucccagcauuuug

SEQ ID NO: 1114916 - RNA, 26 nt, Human
cacagucuugguguaauuaaccgccu

SEQ ID NO: 1114917 - RNA, 23 nt, Human
cacugcaucccagccugggugac

SEQ ID NO: 1114918 - RNA, 24 nt, Human
cacugcaucccagccugggugaca

SEQ ID NO: 1114919 - RNA, 24 nt, Human
cagauucaccauuucugauugugu

SEQ ID NO: 1114920 - RNA, 21 nt, Human
cagcauuuugagaggcuaagg

SEQ ID NO: 1114921 - RNA, 24 nt, Human
cagcauuuugagaggcuaaggugg

SEQ ID NO: 1114922 - RNA, 23 nt, Human
caucccagccugggugacagagu

SEQ ID NO: 1114923 - RNA, 24 nt, Human
caucccagccugggugacagagug

SEQ ID NO: 1114924 - RNA, 22 nt, Human
cauuucugauugugucuggaga

SEQ ID NO: 1114925 - RNA, 20 nt, Human
ccacugcaucccagccuggg

SEQ ID NO: 1114926 - RNA, 20 nt, Human
ccacugcaucccagccuggg

SEQ ID NO: 1114927 - RNA, 21 nt, Human
ccacugcaucccagccugggu

SEQ ID NO: 1114928 - RNA, 23 nt, Human
ccacugcaucccagccuggguga

SEQ ID NO: 1114929 - RNA, 24 nt, Human
ccacugcaucccagccugggugac

SEQ ID NO: 1114930 - RNA, 19 nt, Human
cccagccugggugacagag

SEQ ID NO: 1114931 - RNA, 24 nt, Human
cccagccugggugacagagugagg

SEQ ID NO: 1114932 - RNA, 20 nt, Human
ccccucucccuccuucccuc

SEQ ID NO: 1114933 - RNA, 19 nt, Human
cccuccuucccucuuuuuu

SEQ ID NO: 1114934 - RNA, 18 nt, Human
ccgggaaaucaaggcugc

SEQ ID NO: 1114935 - RNA, 18 nt, Human
ccugggugacagagugag

SEQ ID NO: 1114936 - RNA, 27 nt, Human
cuagaaaaucucugucucauuuaccag

SEQ ID NO: 1114937 - RNA, 21 nt, Human
cucacaccuguaaucccagca

SEQ ID NO: 1114938 - RNA, 21 nt, Human
cucacaccuguaaucccagca

SEQ ID NO: 1114939 - RNA, 21 nt, Human
cucauaagcaguacugugaca

SEQ ID NO: 1114940 - RNA, 22 nt, Human
cucauaagcaguacugugacau

SEQ ID NO: 1114941 - RNA, 20 nt, Human
cucccccucucccuccuucc

SEQ ID NO: 1114942 - RNA, 21 nt, Human
cugggcaacauggugagaccc

SEQ ID NO: 1114943 - RNA, 21 nt, Human
cuguaguccuagcuacuuggg

SEQ ID NO: 1114944 - RNA, 20 nt, Human
cugucacagcuguaugcacc

SEQ ID NO: 1114945 - RNA, 20 nt, Human
cuucucagaucacagauuuu

SEQ ID NO: 1114946 - RNA, 19 nt, Human
gaaaucaaggcugcaguga

SEQ ID NO: 1114947 - RNA, 23 nt, Human
gauacucccuuucuaacauaaaa

SEQ ID NO: 1114948 - RNA, 24 nt, Human
gauugcuugaggccaggaauuuga

SEQ ID NO: 1114949 - RNA, 24 nt, Human
gccacugcaucccagccuggguga

SEQ ID NO: 1114950 - RNA, 24 nt, Human
gcccgggaaaucaaggcugcagug

SEQ ID NO: 1114951 - RNA, 18 nt, Human
gcucagaaugugaaaaua

SEQ ID NO: 1114952 - RNA, 18 nt, Human
gcuuguucuuucagagcc

SEQ ID NO: 1114953 - RNA, 20 nt, Human
ggaggcugaggugggagggu

SEQ ID NO: 1114954 - RNA, 21 nt, Human
ggcucacaccuguaaucccag

SEQ ID NO: 1114955 - RNA, 20 nt, Human
gggaggcugaggugggaggg

SEQ ID NO: 1114956 - RNA, 20 nt, Human
gucauuguaaauauaugugc

SEQ ID NO: 1114957 - RNA, 22 nt, Human
guggcucacaccuguaauccca

SEQ ID NO: 1114958 - RNA, 24 nt, Human
uaaggugggaggauugcuugaggc

SEQ ID NO: 1114959 - RNA, 26 nt, Human
uaaggugggaggauugcuugaggcca

SEQ ID NO: 1114960 - RNA, 24 nt, Human
uagcuacuugggaggcugaggugg

SEQ ID NO: 1114961 - RNA, 18 nt, Human
uagguggacauuguggca

SEQ ID NO: 1114962 - RNA, 27 nt, Human
uauacacauaaacacagucuuggugua

SEQ ID NO: 1114963 - RNA, 19 nt, Human
uaucacuguccauauuuga

SEQ ID NO: 1114964 - RNA, 23 nt, Human
uccccaugaugaacucuuccuac

SEQ ID NO: 1114965 - RNA, 23 nt, Human
ucccuccuucccucuuuuuuuuu

SEQ ID NO: 1114966 - RNA, 26 nt, Human
ucuaaagugacuguuguuugguguug

SEQ ID NO: 1114967 - RNA, 20 nt, Human
ucucagugccccagauucac

SEQ ID NO: 1114968 - RNA, 22 nt, Human
ucucccuccuucccucuuuuuu

SEQ ID NO: 1114969 - RNA, 22 nt, Human
ugagaggcuaaggugggaggau

SEQ ID NO: 1114970 - RNA, 24 nt, Human
ugagauguauauuaucaugaaaua

SEQ ID NO: 1114971 - RNA, 24 nt, Human
ugagcccgggaaaucaaggcugca

SEQ ID NO: 1114972 - RNA, 22 nt, Human
ugaggugggagggucacuugag

SEQ ID NO: 1114973 - RNA, 23 nt, Human
ugaggugggagggucacuugagc

SEQ ID NO: 1114974 - RNA, 24 nt, Human
ugaggugggagggucacuugagcc

SEQ ID NO: 1114975 - RNA, 21 nt, Human
ugcaacuaugggucaguuauu

SEQ ID NO: 1114976 - RNA, 27 nt, Human
ugccuagagguucauacuucuggucau

SEQ ID NO: 1114977 - RNA, 23 nt, Human
ugcuguaguccuagcuacuuggg

SEQ ID NO: 1114978 - RNA, 21 nt, Human
uggcucacaccuguaauccca

SEQ ID NO: 1114979 - RNA, 22 nt, Human
uggcucacaccuguaaucccag

SEQ ID NO: 1114980 - RNA, 24 nt, Human
uggcucacaccuguaaucccagca

SEQ ID NO: 1114981 - RNA, 19 nt, Human
ugggaggcugaggugggag

SEQ ID NO: 1114982 - RNA, 24 nt, Human
ugggaggcugaggugggaggguca

SEQ ID NO: 1114983 - RNA, 21 nt, Human
ugggugacagagugaggcccu

SEQ ID NO: 1114984 - RNA, 18 nt, Human
uguaauuaaccgccuucu

SEQ ID NO: 1114985 - RNA, 21 nt, Human
uguaauuaaccgccuucuuca

SEQ ID NO: 1114986 - RNA, 22 nt, Human
ugucauuguaaauauaugugca

SEQ ID NO: 1114987 - RNA, 19 nt, Human
ugucuggagaacguuuucc

SEQ ID NO: 1114988 - RNA, 25 nt, Human
uuauuugcucucucaaugucucaug

SEQ ID NO: 1114989 - RNA, 19 nt, Human
uugagucagacucauaagc

SEQ ID NO: 1114990 - RNA, 21 nt, Human
uugauaugccaaaauuauaug

SEQ ID NO: 1114991 - RNA, 25 nt, Human
uugggaggcugaggugggaggguca

SEQ ID NO: 1114992 - RNA, 19 nt, Human
aagaaguaugauaguaucu

SEQ ID NO: 1114993 - RNA, 22 nt, Human
aaguaauacagucaucuggaac

SEQ ID NO: 1114994 - RNA, 21 nt, Human
aucaagaaggacaaggguuua

SEQ ID NO: 1114995 - RNA, 22 nt, Human
caucuggaaccaaaaauaagaa

SEQ ID NO: 1114996 - RNA, 18 nt, Human
uaucaagaaggacaaggg

SEQ ID NO: 1114997 - RNA, 20 nt, Human
uaucaagaaggacaaggguu

SEQ ID NO: 1114998 - RNA, 22 nt, Human
uaucaagaaggacaaggguuua

SEQ ID NO: 1114999 - RNA, 22 nt, Human
uaucaagaaggacaaggguuua

SEQ ID NO: 1115000 - RNA, 21 nt, Human
uaugauaucaagaaggacaag

SEQ ID NO: 1115001 - RNA, 21 nt, Human
ucaagaaggacaaggguuuau

SEQ ID NO: 1115002 - RNA, 23 nt, Human
ugagacuuugggcaaaucauuua

SEQ ID NO: 1115003 - RNA, 21 nt, Human
uuuuaaagccuguucuggaug

SEQ ID NO: 1115004 - RNA, 23 nt, Human
aaaagaacaaaaaugcaaucaag

SEQ ID NO: 1115005 - RNA, 18 nt, Human
aaacagaaaaagaaagac

SEQ ID NO: 1115006 - RNA, 23 nt, Human
aaacagaaaaagaaagacucaag

SEQ ID NO: 1115007 - RNA, 20 nt, Human
aaacagaaggaaaccuaaga

SEQ ID NO: 1115008 - RNA, 23 nt, Human
aaacagcuggccugagcccacca

SEQ ID NO: 1115009 - RNA, 21 nt, Human
aaaccgaacaccucuccccaa

SEQ ID NO: 1115010 - RNA, 18 nt, Human
aaacuggcuucagaaacu

SEQ ID NO: 1115011 - RNA, 22 nt, Human
aaagaaacaaugcuuaugaaaa

SEQ ID NO: 1115012 - RNA, 21 nt, Human
aacacaaaaaccaaggugucc

SEQ ID NO: 1115013 - RNA, 24 nt, Human
aaccgaacaccucuccccaacaca

SEQ ID NO: 1115014 - RNA, 20 nt, Human
acaaaauggagaugaguauc

SEQ ID NO: 1115015 - RNA, 21 nt, Human
acacaccaacuaagagggcac

SEQ ID NO: 1115016 - RNA, 23 nt, Human
acacucaagaaaaagcuuacacg

SEQ ID NO: 1115017 - RNA, 24 nt, Human
acagaaacagcuucgcuuuauaca

SEQ ID NO: 1115018 - RNA, 22 nt, Human
acagaaccauguaaacgaugug

SEQ ID NO: 1115019 - RNA, 24 nt, Human
acagaaccuaugaguucccacacu

SEQ ID NO: 1115020 - RNA, 21 nt, Human
acagaacuuuuaaaaaaauaa

SEQ ID NO: 1115021 - RNA, 18 nt, Human
accaagaccucacacacc

SEQ ID NO: 1115022 - RNA, 24 nt, Human
accaagguguccgacuucuuagac

SEQ ID NO: 1115023 - RNA, 21 nt, Human
accggcuccccgaccugacgc

SEQ ID NO: 1115024 - RNA, 24 nt, Human
acucccagguuuuuccagagcugg

SEQ ID NO: 1115025 - RNA, 20 nt, Human
agaaaaagaaagacucaagu

SEQ ID NO: 1115026 - RNA, 22 nt, Human
agaaccuaugaguucccacacu

SEQ ID NO: 1115027 - RNA, 18 nt, Human
agaacuaccaguguucca

SEQ ID NO: 1115028 - RNA, 21 nt, Human
agaaggaaaccuaagaaccac

SEQ ID NO: 1115029 - RNA, 21 nt, Human
agagccgggaggccugucggg

SEQ ID NO: 1115030 - RNA, 23 nt, Human
agaggcgggagaguggcugcagg

SEQ ID NO: 1115031 - RNA, 25 nt, Human
agaguucuuccacagccuccggcau

SEQ ID NO: 1115032 - RNA, 25 nt, Human
agaguucuuccacagccuccggcau

SEQ ID NO: 1115033 - RNA, 19 nt, Human
agcagaaaaacacuuugga

SEQ ID NO: 1115034 - RNA, 22 nt, Human
agccccucucccucccagcccc

SEQ ID NO: 1115035 - RNA, 20 nt, Human
agccuccggcaucaacuccc

SEQ ID NO: 1115036 - RNA, 21 nt, Human
agcgcccuuccaggggagccc

SEQ ID NO: 1115037 - RNA, 21 nt, Human
aggcaggcagagggcaagcca

SEQ ID NO: 1115038 - RNA, 25 nt, Human
aggcaggcagagggcaagccacuaa

SEQ ID NO: 1115039 - RNA, 22 nt, Human
aggcgggagaguggcugcaggg

SEQ ID NO: 1115040 - RNA, 23 nt, Human
aggcuccgcggcggcggccccgg

SEQ ID NO: 1115041 - RNA, 24 nt, Human
agggacagaucugcuaaaagaaca

SEQ ID NO: 1115042 - RNA, 19 nt, Human
agggcaaaaaagcccgcgg

SEQ ID NO: 1115043 - RNA, 21 nt, Human
agggccuacuuuuggggugac

SEQ ID NO: 1115044 - RNA, 18 nt, Human
aguuccauucuaaaguca

SEQ ID NO: 1115045 - RNA, 18 nt, Human
aguuucuaccuuggacag

SEQ ID NO: 1115046 - RNA, 23 nt, Human
auaaacuuuaaaauuacacagaa

SEQ ID NO: 1115047 - RNA, 22 nt, Human
aucagccaauacuuuuggcugu

SEQ ID NO: 1115048 - RNA, 19 nt, Human
aucccucccuccccucacu

SEQ ID NO: 1115049 - RNA, 20 nt, Human
caaaacaggaaacugaguua

SEQ ID NO: 1115050 - RNA, 18 nt, Human
caaacagcuggccugagc

SEQ ID NO: 1115051 - RNA, 22 nt, Human
caaacagcuggccugagcccac

SEQ ID NO: 1115052 - RNA, 23 nt, Human
caaagcagaaaaacacuuuggag

SEQ ID NO: 1115053 - RNA, 20 nt, Human
caacacaguggaagcagaau

SEQ ID NO: 1115054 - RNA, 20 nt, Human
caaccccccaaccaacuccc

SEQ ID NO: 1115055 - RNA, 18 nt, Human
caacggagagggcucccu

SEQ ID NO: 1115056 - RNA, 22 nt, Human
caagaccucacacaccaacuaa

SEQ ID NO: 1115057 - RNA, 23 nt, Human
caaggggucauccugaaggccca

SEQ ID NO: 1115058 - RNA, 22 nt, Human
cacacgugacaguugccagggc

SEQ ID NO: 1115059 - RNA, 23 nt, Human
cacagaaccauguaaacgaugug

SEQ ID NO: 1115060 - RNA, 21 nt, Human
cacaguuccaaggggucaucc

SEQ ID NO: 1115061 - RNA, 23 nt, Human
caccaacucaaaacagaaaaaga

SEQ ID NO: 1115062 - RNA, 19 nt, Human
caccaagaccucacacacc

SEQ ID NO: 1115063 - RNA, 24 nt, Human
caccaagaccucacacaccaacua

SEQ ID NO: 1115064 - RNA, 23 nt, Human
cacgggccaucucaaccccccaa

SEQ ID NO: 1115065 - RNA, 20 nt, Human
cacuucauuagccaccaacc

SEQ ID NO: 1115066 - RNA, 19 nt, Human
cagaaccuaugaguuccca

SEQ ID NO: 1115067 - RNA, 22 nt, Human
cagaaccuaugaguucccacac

SEQ ID NO: 1115068 - RNA, 28 nt, Human
cagagaaagccggagccccucucccucc

SEQ ID NO: 1115069 - RNA, 21 nt, Human
cagaguucuuccacagccucc

SEQ ID NO: 1115070 - RNA, 21 nt, Human
cagcgcccuuccaggggagcc

SEQ ID NO: 1115071 - RNA, 23 nt, Human
cagcugacccgccagcccagcgc

SEQ ID NO: 1115072 - RNA, 22 nt, Human
caggaaccacagaugggucgug

SEQ ID NO: 1115073 - RNA, 24 nt, Human
cagggggcggcggcggcggcggug

SEQ ID NO: 1115074 - RNA, 21 nt, Human
caguuccaaggggucauccug

SEQ ID NO: 1115075 - RNA, 20 nt, Human
caucucaaccccccaaccaa

SEQ ID NO: 1115076 - RNA, 22 nt, Human
caucucaaccccccaaccaacu

SEQ ID NO: 1115077 - RNA, 18 nt, Human
cauuagccaccaaccagg

SEQ ID NO: 1115078 - RNA, 22 nt, Human
ccaacucaaaacagaaaaagaa

SEQ ID NO: 1115079 - RNA, 19 nt, Human
ccaaggggucauccugaag

SEQ ID NO: 1115080 - RNA, 26 nt, Human
ccacagagaaguggccacauuguccc

SEQ ID NO: 1115081 - RNA, 23 nt, Human
cccaccaagaccucacacaccaa

SEQ ID NO: 1115082 - RNA, 21 nt, Human
cccacugaaaacaaacaugac

SEQ ID NO: 1115083 - RNA, 18 nt, Human
ccccaacacaguggaagc

SEQ ID NO: 1115084 - RNA, 19 nt, Human
ccccaaccaacucccuuuc

SEQ ID NO: 1115085 - RNA, 20 nt, Human
ccccaaccaacucccuuucc

SEQ ID NO: 1115086 - RNA, 20 nt, Human
cccgcaccagagcugagggu

SEQ ID NO: 1115087 - RNA, 24 nt, Human
cccgccagugccucccccagccgg

SEQ ID NO: 1115088 - RNA, 20 nt, Human
cccgggaggggucgcccggg

SEQ ID NO: 1115089 - RNA, 20 nt, Human
cccucucccucccagcccca

SEQ ID NO: 1115090 - RNA, 21 nt, Human
cccucucccucccagccccag

SEQ ID NO: 1115091 - RNA, 23 nt, Human
ccgccgaccggaguggacgaugc

SEQ ID NO: 1115092 - RNA, 18 nt, Human
ccgcgccggcucggccgc

SEQ ID NO: 1115093 - RNA, 22 nt, Human
ccggcuccccgaccugacgccc

SEQ ID NO: 1115094 - RNA, 19 nt, Human
ccucacaggggccucccag

SEQ ID NO: 1115095 - RNA, 18 nt, Human
ccucccagccccagaacu

SEQ ID NO: 1115096 - RNA, 21 nt, Human
ccucccagcucuccuuuaccc

SEQ ID NO: 1115097 - RNA, 23 nt, Human
ccucccagguccaggaucccagc

SEQ ID NO: 1115098 - RNA, 22 nt, Human
ccucccgccagugccuccccca

SEQ ID NO: 1115099 - RNA, 19 nt, Human
ccucccuccccucacuuca

SEQ ID NO: 1115100 - RNA, 18 nt, Human
ccuccggcaucaacuccc

SEQ ID NO: 1115101 - RNA, 20 nt, Human
ccuggcuguuugcccucguc

SEQ ID NO: 1115102 - RNA, 20 nt, Human
ccuugugggagugguagucc

SEQ ID NO: 1115103 - RNA, 20 nt, Human
cgacuggaagccagcggcga

SEQ ID NO: 1115104 - RNA, 18 nt, Human
cgagagugcaggagcugg

SEQ ID NO: 1115105 - RNA, 21 nt, Human
cgaggccgcgcgagcggggga

SEQ ID NO: 1115106 - RNA, 22 nt, Human
cgagggcggacccgggaggggu

SEQ ID NO: 1115107 - RNA, 20 nt, Human
cgagggggcguggcgcggga

SEQ ID NO: 1115108 - RNA, 20 nt, Human
cgcacagcuaccacggaccc

SEQ ID NO: 1115109 - RNA, 19 nt, Human
cgcccaguucggcucgugu

SEQ ID NO: 1115110 - RNA, 24 nt, Human
cgcgggaggcgggcgcggugccuu

SEQ ID NO: 1115111 - RNA, 18 nt, Human
cggcggcggcggcgguga

SEQ ID NO: 1115112 - RNA, 22 nt, Human
cggggcugggggcucgggcgac

SEQ ID NO: 1115113 - RNA, 24 nt, Human
cgguguguggaggcgggucuucug

SEQ ID NO: 1115114 - RNA, 19 nt, Human
cgguuggacaagugugaaa

SEQ ID NO: 1115115 - RNA, 18 nt, Human
cuauguacaguuucuacc

SEQ ID NO: 1115116 - RNA, 23 nt, Human
cucaaaacagaaaaagaaagacu

SEQ ID NO: 1115117 - RNA, 21 nt, Human
cucccagguccaggaucccag

SEQ ID NO: 1115118 - RNA, 22 nt, Human
cucccagguccaggaucccagc

SEQ ID NO: 1115119 - RNA, 18 nt, Human
cuccccgaccugacgccc

SEQ ID NO: 1115120 - RNA, 20 nt, Human
cucgcagccuccucgccagc

SEQ ID NO: 1115121 - RNA, 28 nt, Human
cugagcccaccaagaccucacacaccaa

SEQ ID NO: 1115122 - RNA, 20 nt, Human
cuuaugaaaaccuaccaauc

SEQ ID NO: 1115123 - RNA, 21 nt, Human
cuucagaaacuauuucucucu

SEQ ID NO: 1115124 - RNA, 21 nt, Human
cuuuuggggugacaucccucc

SEQ ID NO: 1115125 - RNA, 20 nt, Human
gaaacaaugcuuaugaaaac

SEQ ID NO: 1115126 - RNA, 25 nt, Human
gaacacgggccaucucaacccccca

SEQ ID NO: 1115127 - RNA, 23 nt, Human
gaaggaaaccuaagaaccaccag

SEQ ID NO: 1115128 - RNA, 22 nt, Human
gaaggggaagcccccagcagug

SEQ ID NO: 1115129 - RNA, 24 nt, Human
gacacuggacaggcguuaucucag

SEQ ID NO: 1115130 - RNA, 18 nt, Human
gaccggcuccccgaccug

SEQ ID NO: 1115131 - RNA, 19 nt, Human
gagcggggccgcccggggc

SEQ ID NO: 1115132 - RNA, 21 nt, Human
gagcgggggaggugcgggggc

SEQ ID NO: 1115133 - RNA, 24 nt, Human
gaggcuccgcggcggcggccccgg

SEQ ID NO: 1115134 - RNA, 22 nt, Human
gcaagccacuaaguaggggcaa

SEQ ID NO: 1115135 - RNA, 24 nt, Human
gcacaaaggaaaccuuggggacuc

SEQ ID NO: 1115136 - RNA, 18 nt, Human
gcacagcuaccacggacc

SEQ ID NO: 1115137 - RNA, 18 nt, Human
gcccgcgccggcucggcc

SEQ ID NO: 1115138 - RNA, 24 nt, Human
gcccgggcuggaggugaugggggg

SEQ ID NO: 1115139 - RNA, 20 nt, Human
gccggagccccucucccucc

SEQ ID NO: 1115140 - RNA, 25 nt, Human
gcgagagugcaggagcugggaugcu

SEQ ID NO: 1115141 - RNA, 18 nt, Human
gcggcggcggcggugagc

SEQ ID NO: 1115142 - RNA, 20 nt, Human
gcggcggcggcggugagcga

SEQ ID NO: 1115143 - RNA, 22 nt, Human
gcgggagaguggcugcaggggg

SEQ ID NO: 1115144 - RNA, 24 nt, Human
gcggugccuugugggagugguagu

SEQ ID NO: 1115145 - RNA, 19 nt, Human
gcugcagggggcggcggcg

SEQ ID NO: 1115146 - RNA, 23 nt, Human
ggaacccgaccggcuccccgacc

SEQ ID NO: 1115147 - RNA, 18 nt, Human
ggacccucauuuucaaau

SEQ ID NO: 1115148 - RNA, 22 nt, Human
ggacucgaggccgcgcgagcgg

SEQ ID NO: 1115149 - RNA, 19 nt, Human
ggcggcggcggcggcggug

SEQ ID NO: 1115150 - RNA, 23 nt, Human
ggcggcggcggugagcgggaacc

SEQ ID NO: 1115151 - RNA, 23 nt, Human
ggcucgggcggcugcgcaggggu

SEQ ID NO: 1115152 - RNA, 18 nt, Human
ggcugcgcagggcgaggg

SEQ ID NO: 1115153 - RNA, 22 nt, Human
ggcugggggcucgggcggcugc

SEQ ID NO: 1115154 - RNA, 24 nt, Human
gggcacucagcaagaaaucagcca

SEQ ID NO: 1115155 - RNA, 21 nt, Human
gggcgcggugccuugugggag

SEQ ID NO: 1115156 - RNA, 19 nt, Human
gggcggcggcggcggcggu

SEQ ID NO: 1115157 - RNA, 19 nt, Human
ggggccgcccggggcuggg

SEQ ID NO: 1115158 - RNA, 19 nt, Human
gggggcggcggcggcugcg

SEQ ID NO: 1115159 - RNA, 18 nt, Human
ggggggcggcggcggcug

SEQ ID NO: 1115160 - RNA, 19 nt, Human
ggucaggcagcagcugagg

SEQ ID NO: 1115161 - RNA, 18 nt, Human
gugguaguccaaggcccc

SEQ ID NO: 1115162 - RNA, 20 nt, Human
guguccgacuucuuagacac

SEQ ID NO: 1115163 - RNA, 21 nt, Human
guucauuucagagaaagccgg

SEQ ID NO: 1115164 - RNA, 21 nt, Human
uaacaggcuggggaaaccgaa

SEQ ID NO: 1115165 - RNA, 23 nt, Human
uaacuguacccuguggaaccggc

SEQ ID NO: 1115166 - RNA, 24 nt, Human
uaacuguacccuguggaaccggca

SEQ ID NO: 1115167 - RNA, 24 nt, Human
uaagaaccaccagcugacccgcca

SEQ ID NO: 1115168 - RNA, 22 nt, Human
uaagagaagggcaaaaaagccc

SEQ ID NO: 1115169 - RNA, 21 nt, Human
uaauacaagcaacagaacuuu

SEQ ID NO: 1115170 - RNA, 19 nt, Human
uacacagaaccauguaaac

SEQ ID NO: 1115171 - RNA, 20 nt, Human
uacagacacuuuugguaaaa

SEQ ID NO: 1115172 - RNA, 24 nt, Human
uacaucgugcaaaacaggaaacug

SEQ ID NO: 1115173 - RNA, 18 nt, Human
uacccuguggaaccggca

SEQ ID NO: 1115174 - RNA, 24 nt, Human
uagcaaugauagcaaaacgcacag

SEQ ID NO: 1115175 - RNA, 20 nt, Human
uaggacaaaaaaaaugccuc

SEQ ID NO: 1115176 - RNA, 21 nt, Human
uaucucaggguagaucuuugg

SEQ ID NO: 1115177 - RNA, 24 nt, Human
ucaaaacagaaaaagaaagacuca

SEQ ID NO: 1115178 - RNA, 20 nt, Human
ucaacuaagagaagggcaaa

SEQ ID NO: 1115179 - RNA, 24 nt, Human
uccaacccccaugaggcuccgcgg

SEQ ID NO: 1115180 - RNA, 24 nt, Human
uccaccuccacugcagggaacgca

SEQ ID NO: 1115181 - RNA, 20 nt, Human
uccaguccaccuccacugca

SEQ ID NO: 1115182 - RNA, 19 nt, Human
ucccagccccagaacuacc

SEQ ID NO: 1115183 - RNA, 22 nt, Human
ucccagcugagauuuaaggaac

SEQ ID NO: 1115184 - RNA, 21 nt, Human
ucccccagccggucaggcagc

SEQ ID NO: 1115185 - RNA, 22 nt, Human
uccccgaccugacgcccaguuc

SEQ ID NO: 1115186 - RNA, 19 nt, Human
uccuuuugcuuaggcaccu

SEQ ID NO: 1115187 - RNA, 19 nt, Human
ucgcagccuccucgccagc

SEQ ID NO: 1115188 - RNA, 18 nt, Human
ucgcccgggcuggaggug

SEQ ID NO: 1115189 - RNA, 18 nt, Human
ucgggaaauguagucugg

SEQ ID NO: 1115190 - RNA, 21 nt, Human
ucguguuaauacaagcaacag

SEQ ID NO: 1115191 - RNA, 21 nt, Human
ucuaccgaaccucccccuugg

SEQ ID NO: 1115192 - RNA, 23 nt, Human
ucucuaccgaaccucccccuugg

SEQ ID NO: 1115193 - RNA, 21 nt, Human
ugaacacgggccaucucaacc

SEQ ID NO: 1115194 - RNA, 23 nt, Human
ugaggcaggcagagggcaagcca

SEQ ID NO: 1115195 - RNA, 23 nt, Human
ugaguuaugaacacgggccaucu

SEQ ID NO: 1115196 - RNA, 20 nt, Human
ugauagcaaaacgcacagcu

SEQ ID NO: 1115197 - RNA, 18 nt, Human
ugcaaaaagacaggguuu

SEQ ID NO: 1115198 - RNA, 21 nt, Human
ugcaggagcugggaugcugga

SEQ ID NO: 1115199 - RNA, 19 nt, Human
ugccuuaaagaaacaaugc

SEQ ID NO: 1115200 - RNA, 25 nt, Human
ugcgagagugcaggagcugggaugc

SEQ ID NO: 1115201 - RNA, 26 nt, Human
ugcgggggcccgcgccggcucggccg

SEQ ID NO: 1115202 - RNA, 22 nt, Human
uggagcgcugguuauucacgug

SEQ ID NO: 1115203 - RNA, 21 nt, Human
uggcacaaaggugccacauga

SEQ ID NO: 1115204 - RNA, 18 nt, Human
uggcagcagcucuggcug

SEQ ID NO: 1115205 - RNA, 20 nt, Human
uggcagcagcucuggcuggc

SEQ ID NO: 1115206 - RNA, 21 nt, Human
uggcagcagcucuggcuggca

SEQ ID NO: 1115207 - RNA, 23 nt, Human
ugggagaaggugggaagagucug

SEQ ID NO: 1115208 - RNA, 24 nt, Human
ugggagaaggugggaagagucugc

SEQ ID NO: 1115209 - RNA, 20 nt, Human
ugggaugcuggagcggggcc

SEQ ID NO: 1115210 - RNA, 25 nt, Human
uggggaaaccgaacaccucucccca

SEQ ID NO: 1115211 - RNA, 19 nt, Human
uggguggcgacuggaagcc

SEQ ID NO: 1115212 - RNA, 20 nt, Human
uggguggcgacuggaagcca

SEQ ID NO: 1115213 - RNA, 20 nt, Human
ugucuaaagggcacacaaga

SEQ ID NO: 1115214 - RNA, 18 nt, Human
uuacccuauucuuuggag

SEQ ID NO: 1115215 - RNA, 18 nt, Human
uuagacaccacccacagg

SEQ ID NO: 1115216 - RNA, 22 nt, Human
uucaaagcagaaaaacacuuug

SEQ ID NO: 1115217 - RNA, 24 nt, Human
uucacaauaaacuggcuucagaaa

SEQ ID NO: 1115218 - RNA, 19 nt, Human
uucacagaaacagcuucgc

SEQ ID NO: 1115219 - RNA, 19 nt, Human
uucacguggugaagacacu

SEQ ID NO: 1115220 - RNA, 22 nt, Human
uucccacacucgcaaacagcug

SEQ ID NO: 1115221 - RNA, 27 nt, Human
uucccacacucgcaaacagcuggccug

SEQ ID NO: 1115222 - RNA, 21 nt, Human
uugcuuaggcaccuaaauggc

SEQ ID NO: 1115223 - RNA, 21 nt, Human
uuggauggcugcuguacagac

SEQ ID NO: 1115224 - RNA, 26 nt, Human
aaacaccaaaguaugcucgugcaagc

SEQ ID NO: 1115225 - RNA, 19 nt, Human
aacagacuccugaacaccu

SEQ ID NO: 1115226 - RNA, 19 nt, Human
aacuuaauuccccaacugg

SEQ ID NO: 1115227 - RNA, 22 nt, Human
aagaaccaaugggcccagauaa

SEQ ID NO: 1115228 - RNA, 22 nt, Human
aagcacccccuggaaccugucc

SEQ ID NO: 1115229 - RNA, 22 nt, Human
aagugggcaaccacagacacac

SEQ ID NO: 1115230 - RNA, 20 nt, Human
acauccagacaggagaggcc

SEQ ID NO: 1115231 - RNA, 28 nt, Human
accacagacacacagcaggagcaagccu

SEQ ID NO: 1115232 - RNA, 21 nt, Human
acgccagucccucagaagccc

SEQ ID NO: 1115233 - RNA, 24 nt, Human
acucagcuggacuucaccuggggc

SEQ ID NO: 1115234 - RNA, 18 nt, Human
acucauggcugcuugugg

SEQ ID NO: 1115235 - RNA, 23 nt, Human
acuccugaacaccugaaucaguc

SEQ ID NO: 1115236 - RNA, 24 nt, Human
acuccuggagcccagaccagccuc

SEQ ID NO: 1115237 - RNA, 19 nt, Human
agaaagacagggacccaag

SEQ ID NO: 1115238 - RNA, 22 nt, Human
agaaagugggcaaccacagaca

SEQ ID NO: 1115239 - RNA, 18 nt, Human
agaaccaaugggcccaga

SEQ ID NO: 1115240 - RNA, 26 nt, Human
agacuccugaacaccugaaucagucu

SEQ ID NO: 1115241 - RNA, 21 nt, Human
agccacagaaacuggacaucc

SEQ ID NO: 1115242 - RNA, 20 nt, Human
aggagaggccgacgucaguu

SEQ ID NO: 1115243 - RNA, 18 nt, Human
aggagcaagccugaggca

SEQ ID NO: 1115244 - RNA, 24 nt, Human
aggcagaagggugccaagaccaag

SEQ ID NO: 1115245 - RNA, 19 nt, Human
agggacccaagaaccaaug

SEQ ID NO: 1115246 - RNA, 25 nt, Human
caacacaaacaccaaaguaugcucg

SEQ ID NO: 1115247 - RNA, 20 nt, Human
cacaaggaggugauguaaua

SEQ ID NO: 1115248 - RNA, 18 nt, Human
cacaugcaugcucuggcc

SEQ ID NO: 1115249 - RNA, 22 nt, Human
cacccucagucccagaugaucu

SEQ ID NO: 1115250 - RNA, 23 nt, Human
cacccuggagccacgccaguccc

SEQ ID NO: 1115251 - RNA, 24 nt, Human
caccugaaucagucucucggagac

SEQ ID NO: 1115252 - RNA, 18 nt, Human
cagaagcccggugucccc

SEQ ID NO: 1115253 - RNA, 19 nt, Human
cagaccagccuccacuccu

SEQ ID NO: 1115254 - RNA, 19 nt, Human
cagaccagccuccacuccu

SEQ ID NO: 1115255 - RNA, 19 nt, Human
cagaccagccuccacuccu

SEQ ID NO: 1115256 - RNA, 22 nt, Human
cagcagaaagugggcaaccaca

SEQ ID NO: 1115257 - RNA, 22 nt, Human
cagccuccacuccugcuggaga

SEQ ID NO: 1115258 - RNA, 22 nt, Human
cagcucaccuggcugcuccuca

SEQ ID NO: 1115259 - RNA, 21 nt, Human
cagcuggacuucaccuggggc

SEQ ID NO: 1115260 - RNA, 21 nt, Human
cagggcuuccagcugggcccu

SEQ ID NO: 1115261 - RNA, 21 nt, Human
caugcaugcucuggccugcca

SEQ ID NO: 1115262 - RNA, 19 nt, Human
caugccaccagcucaccug

SEQ ID NO: 1115263 - RNA, 22 nt, Human
ccacagaaacuggacauccaga

SEQ ID NO: 1115264 - RNA, 20 nt, Human
ccaccagcucaccuggcugc

SEQ ID NO: 1115265 - RNA, 23 nt, Human
ccacuccuggagcccagaccagc

SEQ ID NO: 1115266 - RNA, 27 nt, Human
ccacuuuauuucucacaaggaggugau

SEQ ID NO: 1115267 - RNA, 18 nt, Human
ccagaccagccuccacuc

SEQ ID NO: 1115268 - RNA, 22 nt, Human
ccagaccagccuccacuccugc

SEQ ID NO: 1115269 - RNA, 22 nt, Human
ccagaccagccuccacuccugc

SEQ ID NO: 1115270 - RNA, 22 nt, Human
ccagaccagccuccacuccugc

SEQ ID NO: 1115271 - RNA, 19 nt, Human
ccagcacaugcaugcucug

SEQ ID NO: 1115272 - RNA, 21 nt, Human
ccagcagaaagugggcaacca

SEQ ID NO: 1115273 - RNA, 18 nt, Human
ccaguauaaggcagaagg

SEQ ID NO: 1115274 - RNA, 19 nt, Human
cccagaccagccuccacuc

SEQ ID NO: 1115275 - RNA, 19 nt, Human
cccagaccagccuccacuc

SEQ ID NO: 1115276 - RNA, 19 nt, Human
cccagaccagccuccacuc

SEQ ID NO: 1115277 - RNA, 24 nt, Human
ccccagaccagccuccacuccugc

SEQ ID NO: 1115278 - RNA, 19 nt, Human
cccccuggaaccuguccca

SEQ ID NO: 1115279 - RNA, 22 nt, Human
ccccuggaaccugucccagacc

SEQ ID NO: 1115280 - RNA, 21 nt, Human
ccucagaagcccggugucccc

SEQ ID NO: 1115281 - RNA, 19 nt, Human
ccuccacuccugcuggaga

SEQ ID NO: 1115282 - RNA, 22 nt, Human
ccuccuugcuuugcugucugga

SEQ ID NO: 1115283 - RNA, 19 nt, Human
ccugcuggagaccagucca

SEQ ID NO: 1115284 - RNA, 19 nt, Human
ccugcuggagaccagucca

SEQ ID NO: 1115285 - RNA, 19 nt, Human
ccuggagcccagaccagcc

SEQ ID NO: 1115286 - RNA, 20 nt, Human
ccuguugagaaagacaggga

SEQ ID NO: 1115287 - RNA, 26 nt, Human
ccuugccacaaacgccuuugucucuc

SEQ ID NO: 1115288 - RNA, 18 nt, Human
ccuugcuuugcugucugg

SEQ ID NO: 1115289 - RNA, 24 nt, Human
cgcuucaaccaggcugcuccccac

SEQ ID NO: 1115290 - RNA, 22 nt, Human
cgguguccccaacacaaacacc

SEQ ID NO: 1115291 - RNA, 18 nt, Human
cucacgcucccuccuugc

SEQ ID NO: 1115292 - RNA, 21 nt, Human
cuccugcuggagaccagucca

SEQ ID NO: 1115293 - RNA, 21 nt, Human
cuccugcuggagaccagucca

SEQ ID NO: 1115294 - RNA, 22 nt, Human
cuccuugcuuugcugucuggau

SEQ ID NO: 1115295 - RNA, 24 nt, Human
cucgugcaagccagcacaugcaug

SEQ ID NO: 1115296 - RNA, 21 nt, Human
cucguggaaaccucagcaccc

SEQ ID NO: 1115297 - RNA, 18 nt, Human
cucugcacaggcggcccc

SEQ ID NO: 1115298 - RNA, 21 nt, Human
cuggaugaggcugcuccacuu

SEQ ID NO: 1115299 - RNA, 22 nt, Human
cuggggagguguagcucucucc

SEQ ID NO: 1115300 - RNA, 18 nt, Human
cuggggcugccuguugag

SEQ ID NO: 1115301 - RNA, 20 nt, Human
cuucaaccaggcugcucccc

SEQ ID NO: 1115302 - RNA, 18 nt, Human
cuugcuuugcugucugga

SEQ ID NO: 1115303 - RNA, 23 nt, Human
cuuucgugagaccugggccuggg

SEQ ID NO: 1115304 - RNA, 18 nt, Human
gaacagacuccugaacac

SEQ ID NO: 1115305 - RNA, 22 nt, Human
gacuaaaacaaguucacuaaca

SEQ ID NO: 1115306 - RNA, 18 nt, Human
gacuguggacacagcagg

SEQ ID NO: 1115307 - RNA, 20 nt, Human
gagaaagacagggacccaag

SEQ ID NO: 1115308 - RNA, 18 nt, Human
gcaguggagcugggaucu

SEQ ID NO: 1115309 - RNA, 24 nt, Human
gcccagaccagccuccacuccugc

SEQ ID NO: 1115310 - RNA, 24 nt, Human
gcccagaccagccuccacuccugc

SEQ ID NO: 1115311 - RNA, 24 nt, Human
gcccuucgaugcuccuuucgugag

SEQ ID NO: 1115312 - RNA, 19 nt, Human
gccgcgcuucaaccaggcu

SEQ ID NO: 1115313 - RNA, 24 nt, Human
gcuucaaccaggcugcuccccacc

SEQ ID NO: 1115314 - RNA, 20 nt, Human
ggacaggagagggcuaagug

SEQ ID NO: 1115315 - RNA, 23 nt, Human
ggacccaagaaccaaugggccca

SEQ ID NO: 1115316 - RNA, 20 nt, Human
ggccuggggagguguagcuc

SEQ ID NO: 1115317 - RNA, 20 nt, Human
gguuucaaauugcagcuauc

SEQ ID NO: 1115318 - RNA, 19 nt, Human
uaaggcagaagggugccaa

SEQ ID NO: 1115319 - RNA, 21 nt, Human
uaaggcagaagggugccaaga

SEQ ID NO: 1115320 - RNA, 24 nt, Human
uaaggcagaagggugccaagacca

SEQ ID NO: 1115321 - RNA, 22 nt, Human
uacaggagcccagaggccaccc

SEQ ID NO: 1115322 - RNA, 22 nt, Human
ucaaccaggcugcuccccaccc

SEQ ID NO: 1115323 - RNA, 21 nt, Human
ucaccuggggcaugggugccu

SEQ ID NO: 1115324 - RNA, 22 nt, Human
uccagacaggagaggccgacgu

SEQ ID NO: 1115325 - RNA, 18 nt, Human
ucccagaccucauggcug

SEQ ID NO: 1115326 - RNA, 18 nt, Human
uccccaacuggggcugcc

SEQ ID NO: 1115327 - RNA, 22 nt, Human
ucgaugcuccuuucgugagacc

SEQ ID NO: 1115328 - RNA, 18 nt, Human
ucggugcccuucgaugcu

SEQ ID NO: 1115329 - RNA, 22 nt, Human
ucuggccugccagggcuuccag

SEQ ID NO: 1115330 - RNA, 19 nt, Human
ugaacaccugaaucagucu

SEQ ID NO: 1115331 - RNA, 24 nt, Human
ugagaaagacagggacccaagaac

SEQ ID NO: 1115332 - RNA, 18 nt, Human
ugagaccugggccugggg

SEQ ID NO: 1115333 - RNA, 20 nt, Human
ugaggagacuguggacacag

SEQ ID NO: 1115334 - RNA, 25 nt, Human
ugauguaauagcgaacagacuccug

SEQ ID NO: 1115335 - RNA, 28 nt, Human
ugcacaggcggccccaugcuguaaugac

SEQ ID NO: 1115336 - RNA, 19 nt, Human
ugccaccagcucaccuggc

SEQ ID NO: 1115337 - RNA, 22 nt, Human
ugccaccagcucaccuggcugc

SEQ ID NO: 1115338 - RNA, 19 nt, Human
uggaaaccucagcacccuc

SEQ ID NO: 1115339 - RNA, 25 nt, Human
uggaaaccucagcacccucccgcca

SEQ ID NO: 1115340 - RNA, 20 nt, Human
ugggcccuugccacaaacgc

SEQ ID NO: 1115341 - RNA, 22 nt, Human
uggggagggaugugaaauccug

SEQ ID NO: 1115342 - RNA, 20 nt, Human
ugggugccuuccuucagacu

SEQ ID NO: 1115343 - RNA, 18 nt, Human
uguaauagcgaacagacu

SEQ ID NO: 1115344 - RNA, 27 nt, Human
uguaauagcgaacagacuccugaacac

SEQ ID NO: 1115345 - RNA, 22 nt, Human
uuccccaacuggggcugccugu

SEQ ID NO: 1115346 - RNA, 21 nt, Human
uugacaggugaggagacugug

SEQ ID NO: 1115347 - RNA, 24 nt, Human
ccuuuuuuuuuuuuuuuuuuuuuu

SEQ ID NO: 1115348 - RNA, 18 nt, Human
ucuuuuuuuuuuuuuuuu

SEQ ID NO: 1115349 - RNA, 20 nt, Human
ugcacgucgucuccagacuc

SEQ ID NO: 1115350 - RNA, 30 nt, Human
uuucuuucuucuuuuuuuuuuuuuuuuuuu

SEQ ID NO: 1115351 - RNA, 31 nt, Human
uuuucuuucuucuuuuuuuuuuuuuuuuuuu

SEQ ID NO: 1115352 - RNA, 31 nt, Human
uuuuucuuucuucuuuuuuuuuuuuuuuuuu

SEQ ID NO: 1115353 - RNA, 31 nt, Human
uuuuuucuuucuucuuuuuuuuuuuuuuuuu

SEQ ID NO: 1115354 - RNA, 31 nt, Human
uuuuuuucuuucuucuuuuuuuuuuuuuuuu

SEQ ID NO: 1115355 - RNA, 24 nt, Human
uuuuuuuuuuucuuucuucuuuuu

SEQ ID NO: 1115356 - RNA, 26 nt, Human
uuuuuuuuuuuuuuuucuuucuucuu

SEQ ID NO: 1115357 - RNA, 24 nt, Human
uuuuuuuuuuuuuuuuucuuucuu

SEQ ID NO: 1115358 - RNA, 24 nt, Human
uuuuuuuuuuuuuuuuuuuucuuu

SEQ ID NO: 1115359 - RNA, 26 nt, Human
uuuuuuuuuuuuuuuuuuuuuucuuu

SEQ ID NO: 1115360 - RNA, 20 nt, Human
aaacaacaugcccaaaggcc

SEQ ID NO: 1115361 - RNA, 22 nt, Human
aaacaacaugcccaaaggccaa

SEQ ID NO: 1115362 - RNA, 23 nt, Human
aaacaacaugcccaaaggccaga

SEQ ID NO: 1115363 - RNA, 25 nt, Human
aaacagcccaaauacaaauuggcaa

SEQ ID NO: 1115364 - RNA, 19 nt, Human
aacaugcccaaaggccaga

SEQ ID NO: 1115365 - RNA, 22 nt, Human
aagaaaagcaaguacaggucua

SEQ ID NO: 1115366 - RNA, 21 nt, Human
aagcaaguacaggucuaccac

SEQ ID NO: 1115367 - RNA, 21 nt, Human
acaauaagaacaccccccccc

SEQ ID NO: 1115368 - RNA, 23 nt, Human
acaauaagaacacccccccccgc

SEQ ID NO: 1115369 - RNA, 18 nt, Human
accacagcuaugcauaaa

SEQ ID NO: 1115370 - RNA, 18 nt, Human
accuguuuggugugaaua

SEQ ID NO: 1115371 - RNA, 18 nt, Human
agaacacccccccccgcc

SEQ ID NO: 1115372 - RNA, 23 nt, Human
agaacacccccccccgccccccc

SEQ ID NO: 1115373 - RNA, 19 nt, Human
agaugcaccugcuagaaca

SEQ ID NO: 1115374 - RNA, 22 nt, Human
agaugcaccugcuagaacacag

SEQ ID NO: 1115375 - RNA, 21 nt, Human
aggagucauaaucuauuaaac

SEQ ID NO: 1115376 - RNA, 20 nt, Human
aggcuacaacgaucaacuaa

SEQ ID NO: 1115377 - RNA, 24 nt, Human
aggcuacaacgaucaacuaaacaa

SEQ ID NO: 1115378 - RNA, 23 nt, Human
aggugcugcuccaaacuucacug

SEQ ID NO: 1115379 - RNA, 22 nt, Human
auacaguauuaacugccuaaaa

SEQ ID NO: 1115380 - RNA, 19 nt, Human
augaauggugagggauagc

SEQ ID NO: 1115381 - RNA, 20 nt, Human
augagaagcagugcaccaca

SEQ ID NO: 1115382 - RNA, 23 nt, Human
augcuggaucucguaugccuagc

SEQ ID NO: 1115383 - RNA, 22 nt, Human
auguaauacaauaagaacaccc

SEQ ID NO: 1115384 - RNA, 22 nt, Human
caacccaaagcauuucaaauac

SEQ ID NO: 1115385 - RNA, 18 nt, Human
caauaagaacaccccccc

SEQ ID NO: 1115386 - RNA, 27 nt, Human
caauaagaacacccccccccgcccccc

SEQ ID NO: 1115387 - RNA, 24 nt, Human
caccacagcuaugcauaaacagcu

SEQ ID NO: 1115388 - RNA, 23 nt, Human
cacccccccccgcccccccgacc

SEQ ID NO: 1115389 - RNA, 26 nt, Human
caccugaacuggaccuuuggggaaga

SEQ ID NO: 1115390 - RNA, 21 nt, Human
cacuuuaaacuaacuuaauua

SEQ ID NO: 1115391 - RNA, 22 nt, Human
cagcccaaauacaaauuggcaa

SEQ ID NO: 1115392 - RNA, 19 nt, Human
caggcagagggagaugugg

SEQ ID NO: 1115393 - RNA, 24 nt, Human
cauuccaggcagggaaaacaacau

SEQ ID NO: 1115394 - RNA, 26 nt, Human
ccacacuucuucaacccaaagcauuu

SEQ ID NO: 1115395 - RNA, 19 nt, Human
ccaggcagggaaaacaaca

SEQ ID NO: 1115396 - RNA, 24 nt, Human
ccccccgcccccccgaccauagaa

SEQ ID NO: 1115397 - RNA, 23 nt, Human
cgcccccccgaccauagaauuug

SEQ ID NO: 1115398 - RNA, 19 nt, Human
cucuaugcucaaacaucuc

SEQ ID NO: 1115399 - RNA, 18 nt, Human
cuguuaccguaucacuuu

SEQ ID NO: 1115400 - RNA, 18 nt, Human
cuucaacccaaagcauuu

SEQ ID NO: 1115401 - RNA, 18 nt, Human
cuugaacuugugauuugg

SEQ ID NO: 1115402 - RNA, 20 nt, Human
cuuuucaaucaguuuuacau

SEQ ID NO: 1115403 - RNA, 21 nt, Human
gaaaacaacaugcccaaaggc

SEQ ID NO: 1115404 - RNA, 22 nt, Human
gaacacaggaugaauggugagg

SEQ ID NO: 1115405 - RNA, 22 nt, Human
gagggccuuaggaaggugacac

SEQ ID NO: 1115406 - RNA, 22 nt, Human
ggaaaacaacaugcccaaaggc

SEQ ID NO: 1115407 - RNA, 21 nt, Human
ggaagacgcacacacggacag

SEQ ID NO: 1115408 - RNA, 24 nt, Human
ggggaagacgcacacacggacagu

SEQ ID NO: 1115409 - RNA, 21 nt, Human
uaaacgugguggaggaaggga

SEQ ID NO: 1115410 - RNA, 23 nt, Human
uaaauauuuccucaaccaacaga

SEQ ID NO: 1115411 - RNA, 18 nt, Human
uaacuaagaacccaaggu

SEQ ID NO: 1115412 - RNA, 19 nt, Human
uaagaacacccccccccgc

SEQ ID NO: 1115413 - RNA, 23 nt, Human
uaagaacacccccccccgccccc

SEQ ID NO: 1115414 - RNA, 26 nt, Human
uaagaacacccccccccgcccccccg

SEQ ID NO: 1115415 - RNA, 23 nt, Human
uaccacacuucuucaacccaaag

SEQ ID NO: 1115416 - RNA, 24 nt, Human
uaccacacuucuucaacccaaagc

SEQ ID NO: 1115417 - RNA, 22 nt, Human
uagaauucaaacaagcgugugc

SEQ ID NO: 1115418 - RNA, 20 nt, Human
uaucagagguagacaggggc

SEQ ID NO: 1115419 - RNA, 23 nt, Human
uauuguauauauacaguauuaac

SEQ ID NO: 1115420 - RNA, 21 nt, Human
ucacaauucauuugaugguaa

SEQ ID NO: 1115421 - RNA, 19 nt, Human
ucagagguagacaggggca

SEQ ID NO: 1115422 - RNA, 19 nt, Human
uccaaacuucacuggcagu

SEQ ID NO: 1115423 - RNA, 22 nt, Human
uccaagcuucaguuuccucauc

SEQ ID NO: 1115424 - RNA, 21 nt, Human
uccauagaauucaaacaagcg

SEQ ID NO: 1115425 - RNA, 22 nt, Human
ucugugaccucuccaagcuuca

SEQ ID NO: 1115426 - RNA, 24 nt, Human
ugaauggaucaagccauuuaaagc

SEQ ID NO: 1115427 - RNA, 18 nt, Human
ugggaaagacagagaaug

SEQ ID NO: 1115428 - RNA, 22 nt, Human
ugggaaagacagagaaugagaa

SEQ ID NO: 1115429 - RNA, 19 nt, Human
ugggaguaacaacauagua

SEQ ID NO: 1115430 - RNA, 20 nt, Human
uggggggauguaauacaaua

SEQ ID NO: 1115431 - RNA, 22 nt, Human
uggugugaauauucauauguuu

SEQ ID NO: 1115432 - RNA, 22 nt, Human
ugugaaggcccagaggagucau

SEQ ID NO: 1115433 - RNA, 25 nt, Human
uguuaugcauuauauuguauauaua

SEQ ID NO: 1115434 - RNA, 20 nt, Human
uuaaagcugacuuaaccugu

SEQ ID NO: 1115435 - RNA, 19 nt, Human
uuagucuuugccuggugcc

SEQ ID NO: 1115436 - RNA, 19 nt, Human
uuccucaucuaaacacugg

SEQ ID NO: 1115437 - RNA, 21 nt, Human
aauggauucucgauucaccau

SEQ ID NO: 1115438 - RNA, 18 nt, Human
agacaggacagacaugua

SEQ ID NO: 1115439 - RNA, 22 nt, Human
agacauguacaccuggauccuc

SEQ ID NO: 1115440 - RNA, 21 nt, Human
agacccagccaagggccagga

SEQ ID NO: 1115441 - RNA, 20 nt, Human
agaccugggaccugacccca

SEQ ID NO: 1115442 - RNA, 18 nt, Human
aggacagacauguacacc

SEQ ID NO: 1115443 - RNA, 22 nt, Human
aggggcggcuucccacccagag

SEQ ID NO: 1115444 - RNA, 20 nt, Human
caccauguagccucccaggc

SEQ ID NO: 1115445 - RNA, 22 nt, Human
cagaccuugauuuccucaucug

SEQ ID NO: 1115446 - RNA, 21 nt, Human
caguccucccgugugaccuug

SEQ ID NO: 1115447 - RNA, 22 nt, Human
ccaagggccaggagcagccagg

SEQ ID NO: 1115448 - RNA, 20 nt, Human
cccccgaacagagaaauaag

SEQ ID NO: 1115449 - RNA, 18 nt, Human
cccgaacagagaaauaag

SEQ ID NO: 1115450 - RNA, 25 nt, Human
ccugaccccaguccucccgugugac

SEQ ID NO: 1115451 - RNA, 22 nt, Human
cgaagacccagccaagggccag

SEQ ID NO: 1115452 - RNA, 23 nt, Human
cuggcccccaaaucgcuucuuca

SEQ ID NO: 1115453 - RNA, 27 nt, Human
gagaagaagaagguauccagguccugg

SEQ ID NO: 1115454 - RNA, 23 nt, Human
gagcagccagguugccugggaga

SEQ ID NO: 1115455 - RNA, 19 nt, Human
gauggaucccucugucucc

SEQ ID NO: 1115456 - RNA, 23 nt, Human
ggagaguggggagaagaagaagg

SEQ ID NO: 1115457 - RNA, 19 nt, Human
uccagaccuugauuuccuc

SEQ ID NO: 1115458 - RNA, 21 nt, Human
ucccucugucuccuccagacc

SEQ ID NO: 1115459 - RNA, 20 nt, Human
ugggagaguggggagaagaa

SEQ ID NO: 1115460 - RNA, 24 nt, Human
uucccacccagaggcagugcugug

SEQ ID NO: 1115461 - RNA, 23 nt, Human
aagcgccgcucacgagaaaucuc

SEQ ID NO: 1115462 - RNA, 22 nt, Human
ggcgguugcugggcgaccagac

SEQ ID NO: 1115463 - RNA, 23 nt, Human
uccaagcgccgcucacgagaaau

SEQ ID NO: 1115464 - RNA, 21 nt, Human
uugcugggcgaccagacgcgc

SEQ ID NO: 1115465 - RNA, 22 nt, Human
aacagcuccuggaguacccaaa

SEQ ID NO: 1115466 - RNA, 24 nt, Human
acccaaagaucggaaccugcaacu

SEQ ID NO: 1115467 - RNA, 27 nt, Human
auagaacagcuccuggaguacccaaag

SEQ ID NO: 1115468 - RNA, 23 nt, Human
cagaagcaggggcuauagaacag

SEQ ID NO: 1115469 - RNA, 18 nt, Human
cggaaccugcaacuguug

SEQ ID NO: 1115470 - RNA, 24 nt, Human
cucagcccuggcucgguuuccagc

SEQ ID NO: 1115471 - RNA, 25 nt, Human
cuccuggaguacccaaagaucggaa

SEQ ID NO: 1115472 - RNA, 21 nt, Human
gaacagcuccuggaguaccca

SEQ ID NO: 1115473 - RNA, 21 nt, Human
gaagucacaguggacagcugu

SEQ ID NO: 1115474 - RNA, 21 nt, Human
gcccuggcucgguuuccagcu

SEQ ID NO: 1115475 - RNA, 19 nt, Human
guaaaaauacauauauaca

SEQ ID NO: 1115476 - RNA, 25 nt, Human
guaaaaauacauauauacauaaaua

SEQ ID NO: 1115477 - RNA, 21 nt, Human
gucagccggcucagcccuggc

SEQ ID NO: 1115478 - RNA, 20 nt, Human
uacauauauacauaaauauu

SEQ ID NO: 1115479 - RNA, 19 nt, Human
ucaacacaaaugcacacau

SEQ ID NO: 1115480 - RNA, 18 nt, Human
uggcucgguuuccagcuc

SEQ ID NO: 1115481 - RNA, 24 nt, Human
uuccagcuccuucgccgucucucc

SEQ ID NO: 1115482 - RNA, 19 nt, Human
uuuccagcuccuucgccgu

SEQ ID NO: 1115483 - RNA, 25 nt, Human
uuuuuuuuuuuuuuuuuuuuuuagg

SEQ ID NO: 1115484 - RNA, 21 nt, Human
aagaccgacaccgacccccga

SEQ ID NO: 1115485 - RNA, 19 nt, Human
aagacgaaggccuuuaaaa

SEQ ID NO: 1115486 - RNA, 23 nt, Human
acaguaccugaaaggaauaccaa

SEQ ID NO: 1115487 - RNA, 26 nt, Human
agacaagagagcuauauaaaccaaaa

SEQ ID NO: 1115488 - RNA, 24 nt, Human
agacccaagaccgacaccgacccc

SEQ ID NO: 1115489 - RNA, 20 nt, Human
aggcugugcgcaugacgcug

SEQ ID NO: 1115490 - RNA, 20 nt, Human
cccccgagaacgcaagcaga

SEQ ID NO: 1115491 - RNA, 22 nt, Human
cccccgagaacgcaagcagagc

SEQ ID NO: 1115492 - RNA, 21 nt, Human
ccccgagaacgcaagcagagc

SEQ ID NO: 1115493 - RNA, 22 nt, Human
cugcaggaaaagggauaggugc

SEQ ID NO: 1115494 - RNA, 24 nt, Human
gcuuuaucuuauauuccucuccca

SEQ ID NO: 1115495 - RNA, 18 nt, Human
ggaaaagggauaggugcu

SEQ ID NO: 1115496 - RNA, 21 nt, Human
ggaaggaaaguuuauauggug

SEQ ID NO: 1115497 - RNA, 20 nt, Human
uaaguagaacucacaguaaa

SEQ ID NO: 1115498 - RNA, 23 nt, Human
uauccagucucaaagacgaaggc

SEQ ID NO: 1115499 - RNA, 21 nt, Human
ugaaacccagaaauaaauacc

SEQ ID NO: 1115500 - RNA, 19 nt, Human
ugacuaaaaagcuuuacua

SEQ ID NO: 1115501 - RNA, 20 nt, Human
ugacuaaaaagcuuuacuau

SEQ ID NO: 1115502 - RNA, 24 nt, Human
ugagacaagagagcuauauaaacc

SEQ ID NO: 1115503 - RNA, 21 nt, Human
ugcggaaggaaaguuuauaug

SEQ ID NO: 1115504 - RNA, 19 nt, Human
uggaggucuacaggugcgg

SEQ ID NO: 1115505 - RNA, 20 nt, Human
uguuuaggaaacacuauugu

SEQ ID NO: 1115506 - RNA, 19 nt, Human
aaacgcagugccuaguaca

SEQ ID NO: 1115507 - RNA, 19 nt, Human
aaaggaagggaggaguggc

SEQ ID NO: 1115508 - RNA, 18 nt, Human
aauugcuaguuuuguacc

SEQ ID NO: 1115509 - RNA, 18 nt, Human
acgugugugugugugugu

SEQ ID NO: 1115510 - RNA, 21 nt, Human
agaauuccucacacccggccu

SEQ ID NO: 1115511 - RNA, 24 nt, Human
agacaggggcaccgggacaggaug

SEQ ID NO: 1115512 - RNA, 20 nt, Human
aggaaauuuugaacaucuua

SEQ ID NO: 1115513 - RNA, 19 nt, Human
aggaagggaggaguggccc

SEQ ID NO: 1115514 - RNA, 20 nt, Human
aggaagggaggaguggcccg

SEQ ID NO: 1115515 - RNA, 21 nt, Human
aggacaaagggaguggccucg

SEQ ID NO: 1115516 - RNA, 19 nt, Human
auccuggucuugaucaccu

SEQ ID NO: 1115517 - RNA, 18 nt, Human
auuugcugugucuucccu

SEQ ID NO: 1115518 - RNA, 19 nt, Human
cacaguguuuuuauacuug

SEQ ID NO: 1115519 - RNA, 21 nt, Human
cacccccauucuccuguggcu

SEQ ID NO: 1115520 - RNA, 18 nt, Human
cacggcucagggucuugg

SEQ ID NO: 1115521 - RNA, 18 nt, Human
cacgugcgcacgugugug

SEQ ID NO: 1115522 - RNA, 23 nt, Human
cacugcacgugcgcacgugugug

SEQ ID NO: 1115523 - RNA, 25 nt, Human
cagaauuccugggcaauuucaacau

SEQ ID NO: 1115524 - RNA, 18 nt, Human
caggacaaagcccuggcc

SEQ ID NO: 1115525 - RNA, 21 nt, Human
caguccccaggcuucccuccu

SEQ ID NO: 1115526 - RNA, 19 nt, Human
ccauggucacucauauuug

SEQ ID NO: 1115527 - RNA, 18 nt, Human
cccagccugggucaggug

SEQ ID NO: 1115528 - RNA, 21 nt, Human
cccaggacaaagcccuggccu

SEQ ID NO: 1115529 - RNA, 18 nt, Human
cccaggcuucccuccucc

SEQ ID NO: 1115530 - RNA, 18 nt, Human
ccccaggcuucccuccuc

SEQ ID NO: 1115531 - RNA, 21 nt, Human
ccccccaucccucuccccacc

SEQ ID NO: 1115532 - RNA, 24 nt, Human
ccccccaucccucuccccaccuuu

SEQ ID NO: 1115533 - RNA, 18 nt, Human
cccccccaucccucuccc

SEQ ID NO: 1115534 - RNA, 21 nt, Human
cccccccaucccucuccccac

SEQ ID NO: 1115535 - RNA, 19 nt, Human
ccgaaaggacaaagggagu

SEQ ID NO: 1115536 - RNA, 23 nt, Human
ccgggacaggaugggaauaagca

SEQ ID NO: 1115537 - RNA, 20 nt, Human
ccucacacccggccucaacc

SEQ ID NO: 1115538 - RNA, 26 nt, Human
ccuccaacucaaagucagauugcuau

SEQ ID NO: 1115539 - RNA, 21 nt, Human
ccucccacucgccuaagaccc

SEQ ID NO: 1115540 - RNA, 22 nt, Human
ccucuugcuccuucuucccagg

SEQ ID NO: 1115541 - RNA, 21 nt, Human
ccuggaagcccccccuucccc

SEQ ID NO: 1115542 - RNA, 21 nt, Human
ccugugccuccaacucaaagu

SEQ ID NO: 1115543 - RNA, 20 nt, Human
cgugcgcacgugugugugug

SEQ ID NO: 1115544 - RNA, 18 nt, Human
cucaagucccagaucuuc

SEQ ID NO: 1115545 - RNA, 24 nt, Human
cucaggaccuccugagggcugugu

SEQ ID NO: 1115546 - RNA, 23 nt, Human
cuccugagggcugugucacgggc

SEQ ID NO: 1115547 - RNA, 25 nt, Human
cucuagauucagaagacccagaucu

SEQ ID NO: 1115548 - RNA, 18 nt, Human
cuguguuuauacuucucu

SEQ ID NO: 1115549 - RNA, 21 nt, Human
cuuagccuaaccgcaagagau

SEQ ID NO: 1115550 - RNA, 23 nt, Human
cuucccccccaucccucucccca

SEQ ID NO: 1115551 - RNA, 21 nt, Human
cuucucuuuucauauccuggu

SEQ ID NO: 1115552 - RNA, 19 nt, Human
cuuuccaaccugacucugg

SEQ ID NO: 1115553 - RNA, 18 nt, Human
cuuucuggaccgacccaa

SEQ ID NO: 1115554 - RNA, 22 nt, Human
gaagacccagaucucaaguccc

SEQ ID NO: 1115555 - RNA, 19 nt, Human
gaauuccucacacccggcc

SEQ ID NO: 1115556 - RNA, 21 nt, Human
gacuucgguccccccaccccc

SEQ ID NO: 1115557 - RNA, 20 nt, Human
gagaauuccucacacccggc

SEQ ID NO: 1115558 - RNA, 18 nt, Human
gaggaagggaggcaagaa

SEQ ID NO: 1115559 - RNA, 21 nt, Human
gaguugucccgccuuucugga

SEQ ID NO: 1115560 - RNA, 21 nt, Human
gcacgugcgcacgugugugug

SEQ ID NO: 1115561 - RNA, 18 nt, Human
gcccggacaacaucaagg

SEQ ID NO: 1115562 - RNA, 20 nt, Human
ggcccggacaacaucaaggu

SEQ ID NO: 1115563 - RNA, 21 nt, Human
gucccugggcugcagucccca

SEQ ID NO: 1115564 - RNA, 25 nt, Human
gugcgcacgugugugugugugugug

SEQ ID NO: 1115565 - RNA, 21 nt, Human
guguguguguguguguggugu

SEQ ID NO: 1115566 - RNA, 22 nt, Human
guuuuauuuaacccuauauaug

SEQ ID NO: 1115567 - RNA, 18 nt, Human
uaaaaccaagcugugcca

SEQ ID NO: 1115568 - RNA, 19 nt, Human
uaaaaccaagcugugccag

SEQ ID NO: 1115569 - RNA, 23 nt, Human
uaaauucuaauuuuuuuuuuuau

SEQ ID NO: 1115570 - RNA, 19 nt, Human
uacauugccugauacauag

SEQ ID NO: 1115571 - RNA, 18 nt, Human
uaccuuaggcaaaugacu

SEQ ID NO: 1115572 - RNA, 25 nt, Human
uaccuuaggcaaaugacuucggucc

SEQ ID NO: 1115573 - RNA, 22 nt, Human
uacuuuauaucacuggcacggg

SEQ ID NO: 1115574 - RNA, 19 nt, Human
uauuucucuggaaaagcua

SEQ ID NO: 1115575 - RNA, 21 nt, Human
uauuucucuggaaaagcuaag

SEQ ID NO: 1115576 - RNA, 23 nt, Human
uauuucucuggaaaagcuaagag

SEQ ID NO: 1115577 - RNA, 19 nt, Human
ucaccgcuuccacaguguu

SEQ ID NO: 1115578 - RNA, 19 nt, Human
uccccaggcuucccuccuc

SEQ ID NO: 1115579 - RNA, 21 nt, Human
uccuguggcuguguuuauacu

SEQ ID NO: 1115580 - RNA, 23 nt, Human
ucgguccccccacccccauucuc

SEQ ID NO: 1115581 - RNA, 22 nt, Human
ucucaggaccuccugagggcug

SEQ ID NO: 1115582 - RNA, 22 nt, Human
ucuccccaccuuugaguugucc

SEQ ID NO: 1115583 - RNA, 24 nt, Human
ucucuaaaauguauaaaaccaagc

SEQ ID NO: 1115584 - RNA, 18 nt, Human
ucugcugggaaguggaag

SEQ ID NO: 1115585 - RNA, 23 nt, Human
ucuuuucauauccuggucuugau

SEQ ID NO: 1115586 - RNA, 21 nt, Human
ugacuucgguccccccacccc

SEQ ID NO: 1115587 - RNA, 23 nt, Human
ugccuggccacugcacgugcgca

SEQ ID NO: 1115588 - RNA, 19 nt, Human
ugcgcacgugugugugugu

SEQ ID NO: 1115589 - RNA, 21 nt, Human
ugcgcacgugugugugugugu

SEQ ID NO: 1115590 - RNA, 19 nt, Human
uggaaaggaagggaggagu

SEQ ID NO: 1115591 - RNA, 20 nt, Human
uggaaaggaagggaggagug

SEQ ID NO: 1115592 - RNA, 23 nt, Human
uggaagcccccccuuccccccca

SEQ ID NO: 1115593 - RNA, 19 nt, Human
uggcacaggcaaaucaggu

SEQ ID NO: 1115594 - RNA, 22 nt, Human
uggcccagccugggucaggugu

SEQ ID NO: 1115595 - RNA, 21 nt, Human
uggcuguagacaggggcaccg

SEQ ID NO: 1115596 - RNA, 22 nt, Human
uggguuggaagaggccucuuug

SEQ ID NO: 1115597 - RNA, 22 nt, Human
ugugccaggaccaccuugggca

SEQ ID NO: 1115598 - RNA, 19 nt, Human
uguggcuguagacaggggc

SEQ ID NO: 1115599 - RNA, 18 nt, Human
uguguguguguggugugu

SEQ ID NO: 1115600 - RNA, 20 nt, Human
uguguguguguguggugugu

SEQ ID NO: 1115601 - RNA, 22 nt, Human
uguguguguguguguggugugu

SEQ ID NO: 1115602 - RNA, 26 nt, Human
uguuuauacuucucuuaucaccuugg

SEQ ID NO: 1115603 - RNA, 21 nt, Human
uucaccuguagccuggaagcc

SEQ ID NO: 1115604 - RNA, 22 nt, Human
uucccccccaucccucucccca

SEQ ID NO: 1115605 - RNA, 19 nt, Human
uuccugggcaauuucaaca

SEQ ID NO: 1115606 - RNA, 18 nt, Human
uucguguuuaccucuugc

SEQ ID NO: 1115607 - RNA, 19 nt, Human
uucucaucgaugaguuuua

SEQ ID NO: 1115608 - RNA, 20 nt, Human
uugaacaucuuaauauaaau

SEQ ID NO: 1115609 - RNA, 22 nt, Human
uuucuggaccgacccaauguau

SEQ ID NO: 1115610 - RNA, 23 nt, Human
uuucuggaccgacccaauguauu

SEQ ID NO: 1115611 - RNA, 21 nt, Human
uuuugagugaauauuuuucag

SEQ ID NO: 1115612 - RNA, 23 nt, Human
aaaaacacaagcagagcuacacc

SEQ ID NO: 1115613 - RNA, 22 nt, Human
aagugguggcaagagaugaagc

SEQ ID NO: 1115614 - RNA, 21 nt, Human
aaugggacugcgaaaaaaaug

SEQ ID NO: 1115615 - RNA, 18 nt, Human
acaagaaagaauucaggg

SEQ ID NO: 1115616 - RNA, 22 nt, Human
acgugggguuugggacgagcug

SEQ ID NO: 1115617 - RNA, 19 nt, Human
acuccugggcggcagcggg

SEQ ID NO: 1115618 - RNA, 24 nt, Human
agaagcaggugucgguggaggccc

SEQ ID NO: 1115619 - RNA, 20 nt, Human
aggaacagggucccgaucca

SEQ ID NO: 1115620 - RNA, 25 nt, Human
aggaggcagacggaggcggcggguc

SEQ ID NO: 1115621 - RNA, 21 nt, Human
aggaggcagacggaggcggga

SEQ ID NO: 1115622 - RNA, 23 nt, Human
auuccccaggauuuuuucgcacc

SEQ ID NO: 1115623 - RNA, 22 nt, Human
caaaaacacaagcagagcuaca

SEQ ID NO: 1115624 - RNA, 25 nt, Human
caaaaacacaagcagagcuacacca

SEQ ID NO: 1115625 - RNA, 26 nt, Human
caaaaacacaagcagagcuggagacc

SEQ ID NO: 1115626 - RNA, 27 nt, Human
cacaagaaagaauucagggcgaguuuc

SEQ ID NO: 1115627 - RNA, 18 nt, Human
cagcagcgggcggagggg

SEQ ID NO: 1115628 - RNA, 23 nt, Human
caggcggggggcgaagguucugu

SEQ ID NO: 1115629 - RNA, 25 nt, Human
ccagaaaagcacuugaaaugcccag

SEQ ID NO: 1115630 - RNA, 27 nt, Human
ccagaaagugguggcaagagaugaagc

SEQ ID NO: 1115631 - RNA, 20 nt, Human
ccagcugcucaggcgggggg

SEQ ID NO: 1115632 - RNA, 22 nt, Human
ccccggugggcuuccgcucccc

SEQ ID NO: 1115633 - RNA, 23 nt, Human
ccggcccagaggcuccaacgcug

SEQ ID NO: 1115634 - RNA, 19 nt, Human
ccuccggcccagaggcucc

SEQ ID NO: 1115635 - RNA, 23 nt, Human
ccugguuccaugaucucuucugg

SEQ ID NO: 1115636 - RNA, 21 nt, Human
cggacaugaaaucuaccuauu

SEQ ID NO: 1115637 - RNA, 20 nt, Human
cgugggguuugggacgagcu

SEQ ID NO: 1115638 - RNA, 18 nt, Human
gagcccgggaggaggcag

SEQ ID NO: 1115639 - RNA, 19 nt, Human
gaggaggcugaccucggcc

SEQ ID NO: 1115640 - RNA, 24 nt, Human
gaggcggcgggucagcggcgggcc

SEQ ID NO: 1115641 - RNA, 23 nt, Human
gccaaaagccuuagguuacuccu

SEQ ID NO: 1115642 - RNA, 20 nt, Human
gccccgggauucaaaaacac

SEQ ID NO: 1115643 - RNA, 23 nt, Human
gccuuagguuacuccugggcggc

SEQ ID NO: 1115644 - RNA, 18 nt, Human
gcggcagcggggcagagg

SEQ ID NO: 1115645 - RNA, 23 nt, Human
gcggcagcggggcagaggucaga

SEQ ID NO: 1115646 - RNA, 22 nt, Human
ggaaaugggacugcgaaaaaaa

SEQ ID NO: 1115647 - RNA, 19 nt, Human
ggaaguaaaugagauaaug

SEQ ID NO: 1115648 - RNA, 21 nt, Human
ggagggguccugcccggcauc

SEQ ID NO: 1115649 - RNA, 18 nt, Human
ggauuuuuucgcaccgca

SEQ ID NO: 1115650 - RNA, 19 nt, Human
ggcagacggaggcggcggg

SEQ ID NO: 1115651 - RNA, 21 nt, Human
ggcccagaggcuccaacgcug

SEQ ID NO: 1115652 - RNA, 18 nt, Human
ggccccaguuccuccggc

SEQ ID NO: 1115653 - RNA, 24 nt, Human
ggcgcgcugggcccagagcccggg

SEQ ID NO: 1115654 - RNA, 22 nt, Human
ggcggcgggucagcggcgggcc

SEQ ID NO: 1115655 - RNA, 26 nt, Human
ucaaaaacacaagcagagcuacacca

SEQ ID NO: 1115656 - RNA, 20 nt, Human
ucaaaguuucagcuuucuca

SEQ ID NO: 1115657 - RNA, 22 nt, Human
ucaaauggcuuuaaaaucagaa

SEQ ID NO: 1115658 - RNA, 25 nt, Human
uccccaggauuuuuucgcaccgcau

SEQ ID NO: 1115659 - RNA, 27 nt, Human
ucucaagcagcuuuccacaccugguuc

SEQ ID NO: 1115660 - RNA, 20 nt, Human
ugcgaaaaaaauggaggcug

SEQ ID NO: 1115661 - RNA, 20 nt, Human
uggaggccccaguuccuccg

SEQ ID NO: 1115662 - RNA, 21 nt, Human
uggcaagagaugaagcuucgg

SEQ ID NO: 1115663 - RNA, 22 nt, Human
ugggacgagcugaauuccggau

SEQ ID NO: 1115664 - RNA, 18 nt, Human
ugugguucucuuuaauuc

SEQ ID NO: 1115665 - RNA, 21 nt, Human
ugugguucucuuuaauucucu

SEQ ID NO: 1115666 - RNA, 25 nt, Human
uuccggauaaagaugccuguaaaga

SEQ ID NO: 1115667 - RNA, 21 nt, Human
uuucgcaccgcauuuagaggu

SEQ ID NO: 1115668 - RNA, 22 nt, Human
uuugugguucucuuuaauucuc

SEQ ID NO: 1115669 - RNA, 18 nt, Human
aaagaaaggcagaaaaga

SEQ ID NO: 1115670 - RNA, 24 nt, Human
aaagugcugggauuacaggcauga

SEQ ID NO: 1115671 - RNA, 21 nt, Human
aacaauuuagaaauuaaaccc

SEQ ID NO: 1115672 - RNA, 20 nt, Human
aacaugccaacaauuuagaa

SEQ ID NO: 1115673 - RNA, 23 nt, Human
aacucaucucuuaaggaggucua

SEQ ID NO: 1115674 - RNA, 24 nt, Human
aagaagaggccuauuucaggagca

SEQ ID NO: 1115675 - RNA, 20 nt, Human
aagacuuugguacugauggu

SEQ ID NO: 1115676 - RNA, 20 nt, Human
aagauagaaauucaaagcac

SEQ ID NO: 1115677 - RNA, 20 nt, Human
aagguuuaaaaaaaaugaca

SEQ ID NO: 1115678 - RNA, 19 nt, Human
aagugcugggauuacaggc

SEQ ID NO: 1115679 - RNA, 21 nt, Human
aagugcugggauuacaggcau

SEQ ID NO: 1115680 - RNA, 26 nt, Human
aagugcugggauuacaggcaugagcc

SEQ ID NO: 1115681 - RNA, 20 nt, Human
aaugcuaaaauagaaaugaa

SEQ ID NO: 1115682 - RNA, 24 nt, Human
accauguuggccaagcuagucucg

SEQ ID NO: 1115683 - RNA, 22 nt, Human
accuccgucucucggguucaag

SEQ ID NO: 1115684 - RNA, 18 nt, Human
agaaaaagugcaaggaaa

SEQ ID NO: 1115685 - RNA, 19 nt, Human
agaaagguacacaagaaca

SEQ ID NO: 1115686 - RNA, 22 nt, Human
agaaagguacacaagaacauga

SEQ ID NO: 1115687 - RNA, 21 nt, Human
agagggcggcgggugucuaca

SEQ ID NO: 1115688 - RNA, 27 nt, Human
agccuuauuauaaaauaaaaaagcaau

SEQ ID NO: 1115689 - RNA, 24 nt, Human
agcgauucuccugccucagccucc

SEQ ID NO: 1115690 - RNA, 24 nt, Human
agcuagucucgaacuccugaccuc

SEQ ID NO: 1115691 - RNA, 26 nt, Human
aggcaaaagaaaggcagaagggaccc

SEQ ID NO: 1115692 - RNA, 21 nt, Human
aggcaugagccaccgugcccg

SEQ ID NO: 1115693 - RNA, 23 nt, Human
aggcaugagccaccgugcccggc

SEQ ID NO: 1115694 - RNA, 19 nt, Human
aggcuggagugcaguggca

SEQ ID NO: 1115695 - RNA, 22 nt, Human
agggaagauuuugcaaacagaa

SEQ ID NO: 1115696 - RNA, 21 nt, Human
agggauaaacaguguuaaaac

SEQ ID NO: 1115697 - RNA, 22 nt, Human
aguagagaugagguuucaccau

SEQ ID NO: 1115698 - RNA, 18 nt, Human
aguagcugggauuacagg

SEQ ID NO: 1115699 - RNA, 19 nt, Human
agucucgaacuccugaccu

SEQ ID NO: 1115700 - RNA, 22 nt, Human
agugaucgacccaccuuggccu

SEQ ID NO: 1115701 - RNA, 18 nt, Human
agugcugggauuacaggc

SEQ ID NO: 1115702 - RNA, 22 nt, Human
auaaggcaaaagaaaggcagaa

SEQ ID NO: 1115703 - RNA, 22 nt, Human
auagggauaaacaguguuaaaa

SEQ ID NO: 1115704 - RNA, 20 nt, Human
aucaagaagaggccuauuuc

SEQ ID NO: 1115705 - RNA, 20 nt, Human
augagguuucaccauguugg

SEQ ID NO: 1115706 - RNA, 22 nt, Human
augcauuuuuagaagaagaaac

SEQ ID NO: 1115707 - RNA, 18 nt, Human
caaagcacuaaaaugcca

SEQ ID NO: 1115708 - RNA, 24 nt, Human
caaagcacuaaaaugccaacuaag

SEQ ID NO: 1115709 - RNA, 24 nt, Human
caaagugcugggauuacaggcaug

SEQ ID NO: 1115710 - RNA, 21 nt, Human
caacuaaguaagcacggguau

SEQ ID NO: 1115711 - RNA, 22 nt, Human
caagcgauucuccugccucagc

SEQ ID NO: 1115712 - RNA, 21 nt, Human
caccauguuggccaagcuagu

SEQ ID NO: 1115713 - RNA, 24 nt, Human
caccauguuggccaagcuagucuc

SEQ ID NO: 1115714 - RNA, 27 nt, Human
caccauguuggccaagcuagucucgaa

SEQ ID NO: 1115715 - RNA, 23 nt, Human
cacugcaaccuccgucucucggg

SEQ ID NO: 1115716 - RNA, 24 nt, Human
cagagucuugcucugucgcccagg

SEQ ID NO: 1115717 - RNA, 21 nt, Human
caggcgccaaccaccacgccc

SEQ ID NO: 1115718 - RNA, 24 nt, Human
cauguuggccaagcuagucucgaa

SEQ ID NO: 1115719 - RNA, 23 nt, Human
ccaaagugcugggauuacaggca

SEQ ID NO: 1115720 - RNA, 24 nt, Human
ccaaagugcugggauuacaggcau

SEQ ID NO: 1115721 - RNA, 24 nt, Human
cccaaagugcugggauuacaggca

SEQ ID NO: 1115722 - RNA, 23 nt, Human
cccgaguagcugggauuacaggc

SEQ ID NO: 1115723 - RNA, 24 nt, Human
cccgaguagcugggauuacaggcg

SEQ ID NO: 1115724 - RNA, 18 nt, Human
ccgagccgggagagggcg

SEQ ID NO: 1115725 - RNA, 22 nt, Human
ccgaguagcugggauuacaggc

SEQ ID NO: 1115726 - RNA, 22 nt, Human
ccgggccgcuuggaggugcagu

SEQ ID NO: 1115727 - RNA, 23 nt, Human
ccgggccggcccgagggcuggcg

SEQ ID NO: 1115728 - RNA, 23 nt, Human
ccugagaaaaagaacaugccaac

SEQ ID NO: 1115729 - RNA, 23 nt, Human
ccugccucagccucccgaguagc

SEQ ID NO: 1115730 - RNA, 19 nt, Human
ccugugccgggucccgggg

SEQ ID NO: 1115731 - RNA, 23 nt, Human
cggccuucucuuuucuaagguuu

SEQ ID NO: 1115732 - RNA, 21 nt, Human
cgggccgcuuggaggugcagu

SEQ ID NO: 1115733 - RNA, 21 nt, Human
cggguucaagcgauucuccug

SEQ ID NO: 1115734 - RNA, 24 nt, Human
cucacugcaaccuccgucucucgg

SEQ ID NO: 1115735 - RNA, 23 nt, Human
cucagccucccgaguagcuggga

SEQ ID NO: 1115736 - RNA, 21 nt, Human
cuccugaccucagugaucgac

SEQ ID NO: 1115737 - RNA, 23 nt, Human
cugccucagccucccgaguagcu

SEQ ID NO: 1115738 - RNA, 21 nt, Human
cuugcucugucgcccaggcug

SEQ ID NO: 1115739 - RNA, 23 nt, Human
gaccucagugaucgacccaccuu

SEQ ID NO: 1115740 - RNA, 23 nt, Human
gagaaaaagaacaugccaacaau

SEQ ID NO: 1115741 - RNA, 18 nt, Human
gagguuucaccauguugg

SEQ ID NO: 1115742 - RNA, 27 nt, Human
gaguagcugggauuacaggcgccaacc

SEQ ID NO: 1115743 - RNA, 18 nt, Human
gauuacaggcaugagcca

SEQ ID NO: 1115744 - RNA, 21 nt, Human
gauuacaggcaugagccaccg

SEQ ID NO: 1115745 - RNA, 24 nt, Human
gauuacaggcaugagccaccgugc

SEQ ID NO: 1115746 - RNA, 22 nt, Human
gcaaccuccgucucucggguuc

SEQ ID NO: 1115747 - RNA, 22 nt, Human
gcagcaaaauuggugacauaaa

SEQ ID NO: 1115748 - RNA, 25 nt, Human
gcccagcuacuuuuuuuuguauuuu

SEQ ID NO: 1115749 - RNA, 23 nt, Human
gcccaggcuggagugcaguggca

SEQ ID NO: 1115750 - RNA, 24 nt, Human
gcgauucuccugccucagccuccc

SEQ ID NO: 1115751 - RNA, 25 nt, Human
gcucugucgcccaggcuggagugca

SEQ ID NO: 1115752 - RNA, 19 nt, Human
gcuggagugcaguggcaca

SEQ ID NO: 1115753 - RNA, 24 nt, Human
ggauuacaggcaugagccaccgug

SEQ ID NO: 1115754 - RNA, 22 nt, Human
ggcaaaagaaaggcagaaaaga

SEQ ID NO: 1115755 - RNA, 23 nt, Human
ggggcgagucgcgcgcgggcggc

SEQ ID NO: 1115756 - RNA, 22 nt, Human
ggguucaagcgauucuccugcc

SEQ ID NO: 1115757 - RNA, 24 nt, Human
gugaucgacccaccuuggccuccc

SEQ ID NO: 1115758 - RNA, 20 nt, Human
gugcaaggaaagcagauagg

SEQ ID NO: 1115759 - RNA, 19 nt, Human
uaagaaaagagugcauaca

SEQ ID NO: 1115760 - RNA, 27 nt, Human
uaagaaagguacacaagaacaugccaa

SEQ ID NO: 1115761 - RNA, 23 nt, Human
uacaggcaugagccaccgugccc

SEQ ID NO: 1115762 - RNA, 20 nt, Human
uaccagauuaucauagucau

SEQ ID NO: 1115763 - RNA, 22 nt, Human
uagagaugagguuucaccaugu

SEQ ID NO: 1115764 - RNA, 24 nt, Human
uaguagagaugagguuucaccaug

SEQ ID NO: 1115765 - RNA, 26 nt, Human
uaguagagaugagguuucaccauguu

SEQ ID NO: 1115766 - RNA, 25 nt, Human
uaguuucucucuuuuuuuuuuuuuu

SEQ ID NO: 1115767 - RNA, 18 nt, Human
uaucagcagauaugcugg

SEQ ID NO: 1115768 - RNA, 19 nt, Human
uaucagcagauaugcuggg

SEQ ID NO: 1115769 - RNA, 23 nt, Human
ucaaagcacuaaaaugccaacua

SEQ ID NO: 1115770 - RNA, 23 nt, Human
ucacugcaaccuccgucucucgg

SEQ ID NO: 1115771 - RNA, 24 nt, Human
ucacugcaaccuccgucucucggg

SEQ ID NO: 1115772 - RNA, 25 nt, Human
ucacugcaaccuccgucucucgggu

SEQ ID NO: 1115773 - RNA, 20 nt, Human
ucagccucccgaguagcugg

SEQ ID NO: 1115774 - RNA, 21 nt, Human
ucauuuaucuucauauaauca

SEQ ID NO: 1115775 - RNA, 24 nt, Human
ucccaaagugcugggauuacaggc

SEQ ID NO: 1115776 - RNA, 24 nt, Human
ucccgaguagcugggauuacaggc

SEQ ID NO: 1115777 - RNA, 24 nt, Human
ucgcccaggcuggagugcaguggc

SEQ ID NO: 1115778 - RNA, 24 nt, Human
ucuccugccucagccucccgagua

SEQ ID NO: 1115779 - RNA, 21 nt, Human
ucucggguucaagcgauucuc

SEQ ID NO: 1115780 - RNA, 24 nt, Human
ucucggguucaagcgauucuccug

SEQ ID NO: 1115781 - RNA, 24 nt, Human
ucucucggguucaagcgauucucc

SEQ ID NO: 1115782 - RNA, 24 nt, Human
ucugucgcccaggcuggagugcag

SEQ ID NO: 1115783 - RNA, 23 nt, Human
ucuugcucugucgcccaggcugg

SEQ ID NO: 1115784 - RNA, 24 nt, Human
ucuugcucugucgcccaggcugga

SEQ ID NO: 1115785 - RNA, 19 nt, Human
ugaaaaauguuguuacuuc

SEQ ID NO: 1115786 - RNA, 22 nt, Human
ugaaaaauguuguuacuucuga

SEQ ID NO: 1115787 - RNA, 18 nt, Human
ugagacagagucuugcuc

SEQ ID NO: 1115788 - RNA, 22 nt, Human
ugagacagagucuugcucuguc

SEQ ID NO: 1115789 - RNA, 24 nt, Human
ugagguuucaccauguuggccaag

SEQ ID NO: 1115790 - RNA, 21 nt, Human
ugcaaggaaagcagauaggga

SEQ ID NO: 1115791 - RNA, 24 nt, Human
ugccucagccucccgaguagcugg

SEQ ID NO: 1115792 - RNA, 24 nt, Human
ugcucugucgcccaggcuggagug

SEQ ID NO: 1115793 - RNA, 18 nt, Human
uggagugcaguggcacaa

SEQ ID NO: 1115794 - RNA, 19 nt, Human
uggagugcaguggcacaau

SEQ ID NO: 1115795 - RNA, 24 nt, Human
uggcacaauaucagcucacugcaa

SEQ ID NO: 1115796 - RNA, 28 nt, Human
uggcacaauaucagcucacugcaaccuc

SEQ ID NO: 1115797 - RNA, 24 nt, Human
uggccaagcuagucucgaacuccu

SEQ ID NO: 1115798 - RNA, 18 nt, Human
ugggauuacaggcaugag

SEQ ID NO: 1115799 - RNA, 21 nt, Human
ugggauuacaggcaugagcca

SEQ ID NO: 1115800 - RNA, 22 nt, Human
ugggauuacaggcaugagccac

SEQ ID NO: 1115801 - RNA, 23 nt, Human
ugggauuacaggcaugagccacc

SEQ ID NO: 1115802 - RNA, 23 nt, Human
ugggauuacaggcaugagccacc

SEQ ID NO: 1115803 - RNA, 24 nt, Human
ugggauuacaggcaugagccaccg

SEQ ID NO: 1115804 - RNA, 22 nt, Human
ugggauuacaggcgccaaccac

SEQ ID NO: 1115805 - RNA, 24 nt, Human
ugggauuacaggcgccaaccacca

SEQ ID NO: 1115806 - RNA, 24 nt, Human
uguaccagauuaucauagucaucu

SEQ ID NO: 1115807 - RNA, 18 nt, Human
uguuaagagcuauuuaca

SEQ ID NO: 1115808 - RNA, 24 nt, Human
uuaaaagcaguucccauucuugca

SEQ ID NO: 1115809 - RNA, 18 nt, Human
uuaguagagaugagguuu

SEQ ID NO: 1115810 - RNA, 22 nt, Human
uuaguagagaugagguuucacc

SEQ ID NO: 1115811 - RNA, 24 nt, Human
uuaguagagaugagguuucaccau

SEQ ID NO: 1115812 - RNA, 21 nt, Human
uucaagcgauucuccugccuc

SEQ ID NO: 1115813 - RNA, 23 nt, Human
uucaagcgauucuccugccucag

SEQ ID NO: 1115814 - RNA, 24 nt, Human
uucaagcgauucuccugccucagc

SEQ ID NO: 1115815 - RNA, 18 nt, Human
uucacagaaaaagugcaa

SEQ ID NO: 1115816 - RNA, 23 nt, Human
uucacagaaaaagugcaaggaaa

SEQ ID NO: 1115817 - RNA, 20 nt, Human
uucacagagaaaaaauacca

SEQ ID NO: 1115818 - RNA, 20 nt, Human
uuccuccgauuagccuaaau

SEQ ID NO: 1115819 - RNA, 22 nt, Human
uucugugcuuuaagauagaaau

SEQ ID NO: 1115820 - RNA, 20 nt, Human
uucuugcagcaaaauuggug

SEQ ID NO: 1115821 - RNA, 22 nt, Human
uugaugauagaauacuuggauu

SEQ ID NO: 1115822 - RNA, 24 nt, Human
uugcucugucgcccaggcuggagu

SEQ ID NO: 1115823 - RNA, 18 nt, Human
uuggccucccaaagugcu

SEQ ID NO: 1115824 - RNA, 21 nt, Human
uuuaagauagaaauucaaagc

SEQ ID NO: 1115825 - RNA, 21 nt, Human
uuucaccauguuggccaagcu

SEQ ID NO: 1115826 - RNA, 24 nt, Human
uuuuuaguagagaugagguuucac

SEQ ID NO: 1115827 - RNA, 21 nt, Human
uuuuuguauuuuuaguagaga

SEQ ID NO: 1115828 - RNA, 21 nt, Human
uuuuuuguauuuuuaguagag

SEQ ID NO: 1115829 - RNA, 24 nt, Human
uuuuuuguauuuuuaguagagaug

SEQ ID NO: 1115830 - RNA, 24 nt, Human
uuuuuuuuguauuuuuaguagaga

SEQ ID NO: 1115831 - RNA, 20 nt, Human
uuuuuuuuuuugagacagag

SEQ ID NO: 1115832 - RNA, 24 nt, Human
uuuuuuuuuuuugagacagagucu

SEQ ID NO: 1115833 - RNA, 25 nt, Human
aaacagggaccgggaugccugagcu

SEQ ID NO: 1115834 - RNA, 22 nt, Human
aaauucaauccucagugaagga

SEQ ID NO: 1115835 - RNA, 20 nt, Human
aauccucagugaaggacccc

SEQ ID NO: 1115836 - RNA, 21 nt, Human
acaacacuuuagaguccuuaa

SEQ ID NO: 1115837 - RNA, 21 nt, Human
acagaaugccagcaaaaagaa

SEQ ID NO: 1115838 - RNA, 18 nt, Human
acagcugaccuguccucc

SEQ ID NO: 1115839 - RNA, 19 nt, Human
accgcacuggggauggaca

SEQ ID NO: 1115840 - RNA, 18 nt, Human
agaagagguagagccagg

SEQ ID NO: 1115841 - RNA, 23 nt, Human
agacagcugaccuguccuccaca

SEQ ID NO: 1115842 - RNA, 18 nt, Human
caaaaacagggaccggga

SEQ ID NO: 1115843 - RNA, 24 nt, Human
caacagaaugccagcaaaaagaaa

SEQ ID NO: 1115844 - RNA, 25 nt, Human
cacaacagaaugccagcaaaaagaa

SEQ ID NO: 1115845 - RNA, 23 nt, Human
cacgacacaacacuuuagagucc

SEQ ID NO: 1115846 - RNA, 19 nt, Human
cacugggccuucucugccu

SEQ ID NO: 1115847 - RNA, 22 nt, Human
cacugggccuucucugccugca

SEQ ID NO: 1115848 - RNA, 19 nt, Human
cagagcuccuagaccccuc

SEQ ID NO: 1115849 - RNA, 21 nt, Human
cagagucccggcugacaugcu

SEQ ID NO: 1115850 - RNA, 19 nt, Human
cagauaacuucagaaugua

SEQ ID NO: 1115851 - RNA, 18 nt, Human
ccagcagcugcggacucc

SEQ ID NO: 1115852 - RNA, 26 nt, Human
ccgggaugccugagcucagagcugaa

SEQ ID NO: 1115853 - RNA, 23 nt, Human
ccuggcaaaauguuuaggcugaa

SEQ ID NO: 1115854 - RNA, 21 nt, Human
cugaaauucaauccucaguga

SEQ ID NO: 1115855 - RNA, 19 nt, Human
gaacauggcauugcucaua

SEQ ID NO: 1115856 - RNA, 18 nt, Human
gaccgggaugccugagcc

SEQ ID NO: 1115857 - RNA, 20 nt, Human
gagcucagagcugaaggcac

SEQ ID NO: 1115858 - RNA, 19 nt, Human
gagcuccuagaccccuccu

SEQ ID NO: 1115859 - RNA, 19 nt, Human
gcaaaaacagggaccggga

SEQ ID NO: 1115860 - RNA, 22 nt, Human
gcucacagcauggacucugcag

SEQ ID NO: 1115861 - RNA, 25 nt, Human
ggaugaaaguuauaauuggggcaga

SEQ ID NO: 1115862 - RNA, 29 nt, Human
gggauggacacacugggccuucucugccc

SEQ ID NO: 1115863 - RNA, 21 nt, Human
uaaauauaauaacugacacag

SEQ ID NO: 1115864 - RNA, 23 nt, Human
uaaccgcaaaaacagggaccggg

SEQ ID NO: 1115865 - RNA, 22 nt, Human
uaacugauggacuaaaauuaau

SEQ ID NO: 1115866 - RNA, 23 nt, Human
uacaagggacagagcuccuagac

SEQ ID NO: 1115867 - RNA, 22 nt, Human
uauuucaaaccacuuuccaaau

SEQ ID NO: 1115868 - RNA, 23 nt, Human
uccuuaaccgcaaaaacagggac

SEQ ID NO: 1115869 - RNA, 22 nt, Human
ucuccugccagcagcugcggac

SEQ ID NO: 1115870 - RNA, 18 nt, Human
ugacaugcugucuccugc

SEQ ID NO: 1115871 - RNA, 24 nt, Human
ugacaugcugucuccugccagcag

SEQ ID NO: 1115872 - RNA, 23 nt, Human
ugaccauccuaguaucaccgcac

SEQ ID NO: 1115873 - RNA, 22 nt, Human
ugaccuguccuccacaaacaag

SEQ ID NO: 1115874 - RNA, 22 nt, Human
ugagauagacaauuuucaaugu

SEQ ID NO: 1115875 - RNA, 18 nt, Human
ugagccagacagcugacc

SEQ ID NO: 1115876 - RNA, 18 nt, Human
ugagcucagagcugaagg

SEQ ID NO: 1115877 - RNA, 20 nt, Human
ugagggagguagcagccagc

SEQ ID NO: 1115878 - RNA, 19 nt, Human
ugcccuggcagagucccgg

SEQ ID NO: 1115879 - RNA, 23 nt, Human
ugccugagcucagagcugaaggc

SEQ ID NO: 1115880 - RNA, 24 nt, Human
ugccugcagaugggcugagguagg

SEQ ID NO: 1115881 - RNA, 25 nt, Human
ugcuuugcuguuuuaguuguuuuua

SEQ ID NO: 1115882 - RNA, 23 nt, Human
uggaaaagcugcuuuuugugaca

SEQ ID NO: 1115883 - RNA, 24 nt, Human
uggcagaagagguagagccaggga

SEQ ID NO: 1115884 - RNA, 23 nt, Human
uggucucccuagguauugaucac

SEQ ID NO: 1115885 - RNA, 23 nt, Human
uuaaccgcaaaaacagggaccgg

SEQ ID NO: 1115886 - RNA, 20 nt, Human
uuaccgccuaugaaacucag

SEQ ID NO: 1115887 - RNA, 23 nt, Human
uuagaguccuuaaccgcaaaaac

SEQ ID NO: 1115888 - RNA, 20 nt, Human
uugagaaaaaguugaugaac

SEQ ID NO: 1115889 - RNA, 22 nt, Human
uuuaaaauuuuaacugauggac

SEQ ID NO: 1115890 - RNA, 28 nt, Human
aagucauuuauuuguucagcaaacauuu

SEQ ID NO: 1115891 - RNA, 18 nt, Human
cagaaucagaacagaagc

SEQ ID NO: 1115892 - RNA, 21 nt, Human
ugccagaaucagaacagaagc

SEQ ID NO: 1115893 - RNA, 24 nt, Human
uggccugagcaguuucacgagugu

SEQ ID NO: 1115894 - RNA, 19 nt, Human
aaagcaccgaaaucuuuuc

SEQ ID NO: 1115895 - RNA, 20 nt, Human
acacaagaucuaauauaaau

SEQ ID NO: 1115896 - RNA, 22 nt, Human
accaagugaagcccuguuccug

SEQ ID NO: 1115897 - RNA, 22 nt, Human
acuuuuuccagcuuuuccuuuu

SEQ ID NO: 1115898 - RNA, 19 nt, Human
agcauuuacuucagaaaua

SEQ ID NO: 1115899 - RNA, 19 nt, Human
agcuuucucucucuccuuc

SEQ ID NO: 1115900 - RNA, 18 nt, Human
auaucuuuguugaucuug

SEQ ID NO: 1115901 - RNA, 19 nt, Human
caagugaagcccuguuccu

SEQ ID NO: 1115902 - RNA, 21 nt, Human
caaucuuuguuuugcuagaaa

SEQ ID NO: 1115903 - RNA, 21 nt, Human
cagcauuuacuucagaaauau

SEQ ID NO: 1115904 - RNA, 20 nt, Human
cagcuuucucucucuccuuc

SEQ ID NO: 1115905 - RNA, 22 nt, Human
cauucuuauccuagauugcagg

SEQ ID NO: 1115906 - RNA, 23 nt, Human
ccaagugaagcccuguuccugcu

SEQ ID NO: 1115907 - RNA, 25 nt, Human
cugaaugauaacaacacaagaucua

SEQ ID NO: 1115908 - RNA, 22 nt, Human
uaaauaagcacgccaaugcugu

SEQ ID NO: 1115909 - RNA, 24 nt, Human
uaaaugccauucucuaaaagcucu

SEQ ID NO: 1115910 - RNA, 21 nt, Human
uaaccaccaagugaagcccug

SEQ ID NO: 1115911 - RNA, 19 nt, Human
uaacucuuuuucucaaucu

SEQ ID NO: 1115912 - RNA, 24 nt, Human
uagcagaauuuucuucuuuagcuu

SEQ ID NO: 1115913 - RNA, 24 nt, Human
uauguugauucucuauucccaaaa

SEQ ID NO: 1115914 - RNA, 21 nt, Human
ucagaaaucuuugucuagugg

SEQ ID NO: 1115915 - RNA, 21 nt, Human
ucuaguggaauaucuucucca

SEQ ID NO: 1115916 - RNA, 29 nt, Human
ucuauaccaugauuguaugauaauagcaa

SEQ ID NO: 1115917 - RNA, 22 nt, Human
ucuccaauaucccugaauaagu

SEQ ID NO: 1115918 - RNA, 18 nt, Human
ugaagucaucagggguua

SEQ ID NO: 1115919 - RNA, 20 nt, Human
ugaauaauucuugcagcuua

SEQ ID NO: 1115920 - RNA, 22 nt, Human
ugcuagaaaauugauuacagcc

SEQ ID NO: 1115921 - RNA, 21 nt, Human
ugcuuuuccuuccagcguuca

SEQ ID NO: 1115922 - RNA, 18 nt, Human
aaacugauauaaguuacu

SEQ ID NO: 1115923 - RNA, 26 nt, Human
auaaaaaaacaaguucagagugguua

SEQ ID NO: 1115924 - RNA, 18 nt, Human
augcaaaacaacuuugca

SEQ ID NO: 1115925 - RNA, 18 nt, Human
caaaacaacuuugcaaga

SEQ ID NO: 1115926 - RNA, 19 nt, Human
caaugacuuuuucuccuga

SEQ ID NO: 1115927 - RNA, 18 nt, Human
cagcggagggucugacac

SEQ ID NO: 1115928 - RNA, 22 nt, Human
ccaaaugccucagguuuacucu

SEQ ID NO: 1115929 - RNA, 19 nt, Human
cccuaugcugcuuccaaag

SEQ ID NO: 1115930 - RNA, 22 nt, Human
cucuaaacgagaacuucccgaa

SEQ ID NO: 1115931 - RNA, 26 nt, Human
cugaagcucaugcucuuccccuaugc

SEQ ID NO: 1115932 - RNA, 19 nt, Human
cuugcuuucuagaaccuca

SEQ ID NO: 1115933 - RNA, 20 nt, Human
ggcagauguuugaaguuaug

SEQ ID NO: 1115934 - RNA, 23 nt, Human
uaaaaaaacaaguucagaguggu

SEQ ID NO: 1115935 - RNA, 23 nt, Human
uaauaagcgucaaaugcaaaaca

SEQ ID NO: 1115936 - RNA, 19 nt, Human
uaccaagauaagcggcuuc

SEQ ID NO: 1115937 - RNA, 21 nt, Human
uagaaccucagaacgguacca

SEQ ID NO: 1115938 - RNA, 18 nt, Human
ucagaacgguaccaagau

SEQ ID NO: 1115939 - RNA, 21 nt, Human
uccauuuaacagauaaaaaaa

SEQ ID NO: 1115940 - RNA, 19 nt, Human
ucccgaaggaagacuuggg

SEQ ID NO: 1115941 - RNA, 18 nt, Human
uuccccuaugcugcuucc

SEQ ID NO: 1115942 - RNA, 19 nt, Human
uuccccuaugcugcuucca

SEQ ID NO: 1115943 - RNA, 25 nt, Human
uucuccaacaucuguuugacucuga

SEQ ID NO: 1115944 - RNA, 25 nt, Human
uugggauauaacaaugacuuuuucu

SEQ ID NO: 1115945 - RNA, 24 nt, Human
uuuauuuauaucucgaaugaaauc

SEQ ID NO: 1115946 - RNA, 18 nt, Human
aaccaagccaaucacagc

SEQ ID NO: 1115947 - RNA, 22 nt, Human
acugaaccaagccaaucacagc

SEQ ID NO: 1115948 - RNA, 19 nt, Human
agagaggaacuauguugug

SEQ ID NO: 1115949 - RNA, 20 nt, Human
augugugugugugugugugu

SEQ ID NO: 1115950 - RNA, 21 nt, Human
auuguguguguguaugugugu

SEQ ID NO: 1115951 - RNA, 19 nt, Human
cauucgugguuggcagggu

SEQ ID NO: 1115952 - RNA, 19 nt, Human
ccaagggacugaaccaagc

SEQ ID NO: 1115953 - RNA, 24 nt, Human
ccauuaguggggggaagaugccuu

SEQ ID NO: 1115954 - RNA, 22 nt, Human
cugaaccaagccaaucacagcc

SEQ ID NO: 1115955 - RNA, 18 nt, Human
cuucaggaaaggagagag

SEQ ID NO: 1115956 - RNA, 18 nt, Human
uaugugugugugugugug

SEQ ID NO: 1115957 - RNA, 25 nt, Human
uauguguguguguguguguguugua

SEQ ID NO: 1115958 - RNA, 23 nt, Human
uauguugugauugugugugugua

SEQ ID NO: 1115959 - RNA, 23 nt, Human
uccaagggacugaaccaagccaa

SEQ ID NO: 1115960 - RNA, 19 nt, Human
ucuaugcugaauuuugaga

SEQ ID NO: 1115961 - RNA, 21 nt, Human
ucuaugcugaauuuugagacc

SEQ ID NO: 1115962 - RNA, 22 nt, Human
ugcuguggggauggcagcucca

SEQ ID NO: 1115963 - RNA, 26 nt, Human
uggcagcuccaagggacugaaccaag

SEQ ID NO: 1115964 - RNA, 21 nt, Human
uguaugugugugugugugugu

SEQ ID NO: 1115965 - RNA, 19 nt, Human
ugugauuguguguguguau

SEQ ID NO: 1115966 - RNA, 20 nt, Human
uguguaugugugugugugug

SEQ ID NO: 1115967 - RNA, 20 nt, Human
ugugugauuacacuucuaug

SEQ ID NO: 1115968 - RNA, 19 nt, Human
uguguguaugugugugugu

SEQ ID NO: 1115969 - RNA, 24 nt, Human
uguguguaugugugugugugugug

SEQ ID NO: 1115970 - RNA, 20 nt, Human
uguguguguguaugugugug

SEQ ID NO: 1115971 - RNA, 21 nt, Human
uguguguguguaugugugugu

SEQ ID NO: 1115972 - RNA, 21 nt, Human
uguguguguguaugugugugu

SEQ ID NO: 1115973 - RNA, 21 nt, Human
uguguguguguaugugugugu

SEQ ID NO: 1115974 - RNA, 18 nt, Human
ugugugugugugugugug

SEQ ID NO: 1115975 - RNA, 19 nt, Human
uguguguguguguguguug

SEQ ID NO: 1115976 - RNA, 25 nt, Human
uguguguguguguguuguauugugu

SEQ ID NO: 1115977 - RNA, 18 nt, Human
uguguguguguguuguau

SEQ ID NO: 1115978 - RNA, 23 nt, Human
uguguguguguguuguauugugu

SEQ ID NO: 1115979 - RNA, 23 nt, Human
uguuguauugugugauuacacuu

SEQ ID NO: 1115980 - RNA, 24 nt, Human
uuacacuucuaugcugaauuuuga

SEQ ID NO: 1115981 - RNA, 19 nt, Human
uuugcaaauacuuuagcag

SEQ ID NO: 1115982 - RNA, 23 nt, Human
aaaaaguuuuaacuacagagacu

SEQ ID NO: 1115983 - RNA, 20 nt, Human
aaacagauagugagcuagau

SEQ ID NO: 1115984 - RNA, 23 nt, Human
aaagaaaaaguuuuaacuacaga

SEQ ID NO: 1115985 - RNA, 19 nt, Human
aaaugucaaagauuauccu

SEQ ID NO: 1115986 - RNA, 22 nt, Human
agacaacauuaugaucuuuagu

SEQ ID NO: 1115987 - RNA, 19 nt, Human
agacuggaguuagauacaa

SEQ ID NO: 1115988 - RNA, 23 nt, Human
auaaucuuuaauacuuaacaaag

SEQ ID NO: 1115989 - RNA, 18 nt, Human
caaaaugucaaagauuau

SEQ ID NO: 1115990 - RNA, 24 nt, Human
ccucacaagaucagcugcucugaa

SEQ ID NO: 1115991 - RNA, 20 nt, Human
cuuuuuagaucuagcugaaa

SEQ ID NO: 1115992 - RNA, 22 nt, Human
gagcaaugaaaaaaaaaaucuu

SEQ ID NO: 1115993 - RNA, 22 nt, Human
uaaagggccucccaaaguagca

SEQ ID NO: 1115994 - RNA, 21 nt, Human
uaacagaccaguauacuuccu

SEQ ID NO: 1115995 - RNA, 26 nt, Human
uaaccaagaacuaaguauauaccuca

SEQ ID NO: 1115996 - RNA, 18 nt, Human
uacuugaaagauacacuu

SEQ ID NO: 1115997 - RNA, 24 nt, Human
uagguaucuuucauuguaaauucc

SEQ ID NO: 1115998 - RNA, 19 nt, Human
uauguaaagggccucccaa

SEQ ID NO: 1115999 - RNA, 21 nt, Human
ucaauucuuauuuuuccaaaa

SEQ ID NO: 1116000 - RNA, 18 nt, Human
ucucugcuaacagaccag

SEQ ID NO: 1116001 - RNA, 21 nt, Human
ucugaguuccaauuccagcug

SEQ ID NO: 1116002 - RNA, 25 nt, Human
ugacauuccauuguucuacgucccu

SEQ ID NO: 1116003 - RNA, 19 nt, Human
ugcuuugcaucuacuugaa

SEQ ID NO: 1116004 - RNA, 21 nt, Human
ugggagcaaugaaaaaaaaaa

SEQ ID NO: 1116005 - RNA, 20 nt, Human
uguaaauucugguguaacuu

SEQ ID NO: 1116006 - RNA, 22 nt, Human
uuaguauuauuaauacaaugac

SEQ ID NO: 1116007 - RNA, 24 nt, Human
uuaguauuauuaauacaaugacuu

SEQ ID NO: 1116008 - RNA, 21 nt, Human
uuaguucuagaguucaacaaa

SEQ ID NO: 1116009 - RNA, 18 nt, Human
uuaucuguaagacuggag

SEQ ID NO: 1116010 - RNA, 23 nt, Human
uuggucauauuuggcaaaaagaa

SEQ ID NO: 1116011 - RNA, 21 nt, Human
uuuaccaaauguuagagguua

SEQ ID NO: 1116012 - RNA, 22 nt, Human
uuuuaccaaauguuagagguua

SEQ ID NO: 1116013 - RNA, 26 nt, Human
aauaaacagcagaaauuuauuuucuc

SEQ ID NO: 1116014 - RNA, 22 nt, Human
agcuuguuuuccugcaacuaga

SEQ ID NO: 1116015 - RNA, 21 nt, Human
aggcugggcuagggacagagu

SEQ ID NO: 1116016 - RNA, 27 nt, Human
cagcagguuugguuucucccaaggccu

SEQ ID NO: 1116017 - RNA, 24 nt, Human
cagcuuguuuuccugcaacuagau

SEQ ID NO: 1116018 - RNA, 19 nt, Human
ccaagaucaaggugacagc

SEQ ID NO: 1116019 - RNA, 22 nt, Human
ccucacucagcuuguuuuccug

SEQ ID NO: 1116020 - RNA, 20 nt, Human
ccucucuucuuggcuugcgg

SEQ ID NO: 1116021 - RNA, 24 nt, Human
cuggaaguccaagaucaaggugac

SEQ ID NO: 1116022 - RNA, 19 nt, Human
cugggcuagggacagagug

SEQ ID NO: 1116023 - RNA, 26 nt, Human
gacugcuuuacaugcccuauuucuau

SEQ ID NO: 1116024 - RNA, 21 nt, Human
gagccaauccauaugaccuua

SEQ ID NO: 1116025 - RNA, 24 nt, Human
gauucuucccuuacaggguggguu

SEQ ID NO: 1116026 - RNA, 19 nt, Human
gcagugcucgccauaccgu

SEQ ID NO: 1116027 - RNA, 22 nt, Human
gcuugcggauggcaucuucuca

SEQ ID NO: 1116028 - RNA, 22 nt, Human
ggaaaaaccaggcugggcuagg

SEQ ID NO: 1116029 - RNA, 22 nt, Human
gggaauccucacucagcuuguu

SEQ ID NO: 1116030 - RNA, 22 nt, Human
uagaaucagugggaauccucac

SEQ ID NO: 1116031 - RNA, 30 nt, Human
ucaaggugacagcagguuugguuucucccu

SEQ ID NO: 1116032 - RNA, 24 nt, Human
ucacagugugcucacauggccauu

SEQ ID NO: 1116033 - RNA, 19 nt, Human
ucacucagcuuguuuuccu

SEQ ID NO: 1116034 - RNA, 18 nt, Human
ucccaggauucuucccuu

SEQ ID NO: 1116035 - RNA, 22 nt, Human
uccugggacuucauaggcuugc

SEQ ID NO: 1116036 - RNA, 22 nt, Human
ucucacaguucuugaggcugga

SEQ ID NO: 1116037 - RNA, 20 nt, Human
ucucacaguucuugaggcuu

SEQ ID NO: 1116038 - RNA, 21 nt, Human
ucucccaaggccucucuucuu

SEQ ID NO: 1116039 - RNA, 18 nt, Human
ucugagguguacuggggu

SEQ ID NO: 1116040 - RNA, 18 nt, Human
ugauuuauguugugguua

SEQ ID NO: 1116041 - RNA, 21 nt, Human
ugcucacauggccauugugug

SEQ ID NO: 1116042 - RNA, 25 nt, Human
ugcucacauggccauugugugcgug

SEQ ID NO: 1116043 - RNA, 23 nt, Human
uggguuucccgcaugcgcagugc

SEQ ID NO: 1116044 - RNA, 25 nt, Human
uuagugguuguagugauugggcuuc

SEQ ID NO: 1116045 - RNA, 22 nt, Human
uucccuuacaggguggguuucc

SEQ ID NO: 1116046 - RNA, 22 nt, Human
aaaagaacugaaaauccacaaa

SEQ ID NO: 1116047 - RNA, 24 nt, Human
aaaagaacugaaaauccacaaagg

SEQ ID NO: 1116048 - RNA, 21 nt, Human
aagaacugaaaauccacaaag

SEQ ID NO: 1116049 - RNA, 22 nt, Human
aauaaaagaacugaaaauccac

SEQ ID NO: 1116050 - RNA, 23 nt, Human
caauaaaagaacugaaaauccac

SEQ ID NO: 1116051 - RNA, 20 nt, Human
gucaauaaaagaacugaaaa

SEQ ID NO: 1116052 - RNA, 24 nt, Human
uaaaagaacugaaaauccacaaag

SEQ ID NO: 1116053 - RNA, 19 nt, Human
uauuccacuuugguaaagu

SEQ ID NO: 1116054 - RNA, 22 nt, Human
uccacaaagguuuccccaugga

SEQ ID NO: 1116055 - RNA, 22 nt, Human
ugaaugucaauaaaagaacuga

SEQ ID NO: 1116056 - RNA, 21 nt, Human
ugcaggugaugaagaggaugu

SEQ ID NO: 1116057 - RNA, 18 nt, Human
aacacagugagacccugu

SEQ ID NO: 1116058 - RNA, 24 nt, Human
aacagagugaggcccugucucaaa

SEQ ID NO: 1116059 - RNA, 20 nt, Human
aacuucugaaaauucuccuu

SEQ ID NO: 1116060 - RNA, 24 nt, Human
acagagugaggcccugucucaaaa

SEQ ID NO: 1116061 - RNA, 24 nt, Human
acugcauuccagccuuggcaacag

SEQ ID NO: 1116062 - RNA, 24 nt, Human
acugcauuccagccuuggcaacag

SEQ ID NO: 1116063 - RNA, 18 nt, Human
acugccgcacuccagccu

SEQ ID NO: 1116064 - RNA, 25 nt, Human
acugcugccucucccuucuuucucc

SEQ ID NO: 1116065 - RNA, 24 nt, Human
agaacaaauaccaaucugugccag

SEQ ID NO: 1116066 - RNA, 24 nt, Human
agccuggccaacacagugagaccc

SEQ ID NO: 1116067 - RNA, 22 nt, Human
agcgcagcucucugagcuaccu

SEQ ID NO: 1116068 - RNA, 19 nt, Human
agcuaggcgcaguggugca

SEQ ID NO: 1116069 - RNA, 24 nt, Human
aggaucacuugggcccaggaguuc

SEQ ID NO: 1116070 - RNA, 18 nt, Human
aggcaggaggauggccug

SEQ ID NO: 1116071 - RNA, 24 nt, Human
aggcaggaggauggccugagccca

SEQ ID NO: 1116072 - RNA, 27 nt, Human
aggcaggaggauggccugagcccagga

SEQ ID NO: 1116073 - RNA, 18 nt, Human
aggccgaggcaggaggau

SEQ ID NO: 1116074 - RNA, 24 nt, Human
aggcgcaguggugcacgccugucg

SEQ ID NO: 1116075 - RNA, 22 nt, Human
agugcuuugugaggcugauugg

SEQ ID NO: 1116076 - RNA, 24 nt, Human
aguggugcacgccugucgucccag

SEQ ID NO: 1116077 - RNA, 25 nt, Human
aucucgccacugcauuccagccuug

SEQ ID NO: 1116078 - RNA, 23 nt, Human
aucugcuuccucuccuuucuccu

SEQ ID NO: 1116079 - RNA, 20 nt, Human
augggcagaggagagagcau

SEQ ID NO: 1116080 - RNA, 22 nt, Human
caacagagugaggcccugucuc

SEQ ID NO: 1116081 - RNA, 20 nt, Human
caacuucugaaaauucuccu

SEQ ID NO: 1116082 - RNA, 19 nt, Human
cacugcauuccagccuugg

SEQ ID NO: 1116083 - RNA, 21 nt, Human
cacugcauuccagccuuggca

SEQ ID NO: 1116084 - RNA, 22 nt, Human
cacugcauuccagccuuggcaa

SEQ ID NO: 1116085 - RNA, 24 nt, Human
cacugcauuccagccuuggcaaca

SEQ ID NO: 1116086 - RNA, 24 nt, Human
cagcuacucaggaggccgaggcag

SEQ ID NO: 1116087 - RNA, 22 nt, Human
caggcucuccauccagcuuccc

SEQ ID NO: 1116088 - RNA, 21 nt, Human
cagguaccagagcuccugccg

SEQ ID NO: 1116089 - RNA, 23 nt, Human
cauuccagccuuggcaacagagu

SEQ ID NO: 1116090 - RNA, 20 nt, Human
ccacugcauuccagccuugg

SEQ ID NO: 1116091 - RNA, 20 nt, Human
ccacugcauuccagccuugg

SEQ ID NO: 1116092 - RNA, 21 nt, Human
ccacugcauuccagccuuggc

SEQ ID NO: 1116093 - RNA, 24 nt, Human
ccacugcauuccagccuuggcaac

SEQ ID NO: 1116094 - RNA, 18 nt, Human
ccagagaaauaaggaucc

SEQ ID NO: 1116095 - RNA, 23 nt, Human
ccagcaacuucugaaaauucucc

SEQ ID NO: 1116096 - RNA, 19 nt, Human
ccaggacuggcuuuucucc

SEQ ID NO: 1116097 - RNA, 18 nt, Human
cccaggcucuccauccag

SEQ ID NO: 1116098 - RNA, 24 nt, Human
ccccacuguacaggaaauggaggu

SEQ ID NO: 1116099 - RNA, 18 nt, Human
ccccgaguggcaacaguc

SEQ ID NO: 1116100 - RNA, 20 nt, Human
cccugcauggggucugcgug

SEQ ID NO: 1116101 - RNA, 20 nt, Human
cccuucuuucucccuucucc

SEQ ID NO: 1116102 - RNA, 22 nt, Human
ccgcacuccagccuggccaaca

SEQ ID NO: 1116103 - RNA, 18 nt, Human
ccgggauucuggcccagg

SEQ ID NO: 1116104 - RNA, 22 nt, Human
ccuccagcgcagcucucugagc

SEQ ID NO: 1116105 - RNA, 22 nt, Human
ccuggccaacacagugagaccc

SEQ ID NO: 1116106 - RNA, 21 nt, Human
ccugucgucccagcuacucag

SEQ ID NO: 1116107 - RNA, 20 nt, Human
cgaggcaggaggauggccug

SEQ ID NO: 1116108 - RNA, 24 nt, Human
cgccugucgucccagcuacucagg

SEQ ID NO: 1116109 - RNA, 21 nt, Human
cucuacaaccccgaguggcaa

SEQ ID NO: 1116110 - RNA, 18 nt, Human
cucucccuucuuucuccc

SEQ ID NO: 1116111 - RNA, 20 nt, Human
cucucccuucuuucucccuu

SEQ ID NO: 1116112 - RNA, 28 nt, Human
cucucccuucuuucucccuucuccaaaa

SEQ ID NO: 1116113 - RNA, 28 nt, Human
cugaaaauucuccuucccuggaguccgg

SEQ ID NO: 1116114 - RNA, 20 nt, Human
cugcaugugacuuuguuccu

SEQ ID NO: 1116115 - RNA, 21 nt, Human
cugccaggacuggcuuuucuc

SEQ ID NO: 1116116 - RNA, 20 nt, Human
cugccgcacuccagccuggc

SEQ ID NO: 1116117 - RNA, 22 nt, Human
cugugccagagaaauaaggauc

SEQ ID NO: 1116118 - RNA, 21 nt, Human
cuuucucccuucuccaaaaug

SEQ ID NO: 1116119 - RNA, 19 nt, Human
gaagagggaggggccaagg

SEQ ID NO: 1116120 - RNA, 19 nt, Human
gacugcugccucucccuuc

SEQ ID NO: 1116121 - RNA, 26 nt, Human
gacuuuguuccucugguuugaugccc

SEQ ID NO: 1116122 - RNA, 18 nt, Human
gagcccaggaguuugagg

SEQ ID NO: 1116123 - RNA, 19 nt, Human
gaggcugauuggaggauca

SEQ ID NO: 1116124 - RNA, 21 nt, Human
gaucucgccacugcauuccag

SEQ ID NO: 1116125 - RNA, 18 nt, Human
gaucugcuuccucuccuu

SEQ ID NO: 1116126 - RNA, 24 nt, Human
gauggccugagcccaggaguuuga

SEQ ID NO: 1116127 - RNA, 21 nt, Human
gcaguggugcacgccugucgu

SEQ ID NO: 1116128 - RNA, 24 nt, Human
gcauuccagccuuggcaacagagu

SEQ ID NO: 1116129 - RNA, 24 nt, Human
gcccaggaguuugaggcugcagug

SEQ ID NO: 1116130 - RNA, 24 nt, Human
gcccugacagauucggcaacucca

SEQ ID NO: 1116131 - RNA, 25 nt, Human
gccgcacuccagccuggccaacaca

SEQ ID NO: 1116132 - RNA, 28 nt, Human
gccucucccuucuuucucccuucuccaa

SEQ ID NO: 1116133 - RNA, 19 nt, Human
gcguguuucugugcaucuc

SEQ ID NO: 1116134 - RNA, 20 nt, Human
gcugugguucuccagucugg

SEQ ID NO: 1116135 - RNA, 23 nt, Human
gcuuccucuccuuucuccuccau

SEQ ID NO: 1116136 - RNA, 20 nt, Human
ggacuggcuuuucuccucca

SEQ ID NO: 1116137 - RNA, 23 nt, Human
ggaucacuugggcccaggaguuc

SEQ ID NO: 1116138 - RNA, 19 nt, Human
ggcaacagagugaggcccu

SEQ ID NO: 1116139 - RNA, 18 nt, Human
ggcccaggaguuccagac

SEQ ID NO: 1116140 - RNA, 19 nt, Human
gggaggggccaaggggagg

SEQ ID NO: 1116141 - RNA, 22 nt, Human
gggcugaugaagagggaggggc

SEQ ID NO: 1116142 - RNA, 24 nt, Human
gggcuuuacagaacaaauaccaau

SEQ ID NO: 1116143 - RNA, 18 nt, Human
ggggaggugaugggcaga

SEQ ID NO: 1116144 - RNA, 23 nt, Human
ggucccugcauggggucugcgug

SEQ ID NO: 1116145 - RNA, 22 nt, Human
guuccagacugccgcacuccag

SEQ ID NO: 1116146 - RNA, 20 nt, Human
guuuaaacaugguacuggag

SEQ ID NO: 1116147 - RNA, 19 nt, Human
uacauauuacucuacaacc

SEQ ID NO: 1116148 - RNA, 22 nt, Human
uagaauggauuugccaagguca

SEQ ID NO: 1116149 - RNA, 22 nt, Human
uaugugcagcccucugcaugug

SEQ ID NO: 1116150 - RNA, 21 nt, Human
ucacugcucugugaacccugg

SEQ ID NO: 1116151 - RNA, 22 nt, Human
uccaaaauggggcugaugaaga

SEQ ID NO: 1116152 - RNA, 23 nt, Human
uccagccuuggcaacagagugag

SEQ ID NO: 1116153 - RNA, 23 nt, Human
uccagccuuggcaacagagugag

SEQ ID NO: 1116154 - RNA, 24 nt, Human
uccagccuuggcaacagagugagg

SEQ ID NO: 1116155 - RNA, 21 nt, Human
uccagugcuuugugaggcuga

SEQ ID NO: 1116156 - RNA, 18 nt, Human
ucccagguaccagagcuc

SEQ ID NO: 1116157 - RNA, 19 nt, Human
uccccaagcauggagggcu

SEQ ID NO: 1116158 - RNA, 19 nt, Human
ucccuggggguaaaucagg

SEQ ID NO: 1116159 - RNA, 25 nt, Human
uccguguguguguuucccugugucu

SEQ ID NO: 1116160 - RNA, 20 nt, Human
ucucccuucuccaaaauggg

SEQ ID NO: 1116161 - RNA, 24 nt, Human
ucucugagcuaccugcuguaauuc

SEQ ID NO: 1116162 - RNA, 19 nt, Human
ucugaaaauucuccuuccc

SEQ ID NO: 1116163 - RNA, 25 nt, Human
ucugaaaauucuccuucccuggagu

SEQ ID NO: 1116164 - RNA, 19 nt, Human
ucugagcaccguuuaaaca

SEQ ID NO: 1116165 - RNA, 22 nt, Human
ucugugcaucuccgugugugug

SEQ ID NO: 1116166 - RNA, 22 nt, Human
ucuuucucccuucuccaaaaug

SEQ ID NO: 1116167 - RNA, 22 nt, Human
ugacagauucggcaacuccagc

SEQ ID NO: 1116168 - RNA, 20 nt, Human
ugaggcugauuggaggauca

SEQ ID NO: 1116169 - RNA, 23 nt, Human
ugaggcugcagugagcuaugauc

SEQ ID NO: 1116170 - RNA, 19 nt, Human
ugaucagauugcuuuccuc

SEQ ID NO: 1116171 - RNA, 18 nt, Human
ugccaaggucacaaagcu

SEQ ID NO: 1116172 - RNA, 24 nt, Human
ugcugccucucccuucuuucuccc

SEQ ID NO: 1116173 - RNA, 23 nt, Human
ugcuuccucuccuuucuccucca

SEQ ID NO: 1116174 - RNA, 20 nt, Human
ugggcagaggagagagcauu

SEQ ID NO: 1116175 - RNA, 22 nt, Human
uggggucugcguguuucugugc

SEQ ID NO: 1116176 - RNA, 18 nt, Human
ugguacuggagcuaggcc

SEQ ID NO: 1116177 - RNA, 21 nt, Human
ugguacugggcuuuacagaac

SEQ ID NO: 1116178 - RNA, 22 nt, Human
uuacauauuacucuacaacccc

SEQ ID NO: 1116179 - RNA, 19 nt, Human
uuacucuacaaccccgagu

SEQ ID NO: 1116180 - RNA, 25 nt, Human
uuagaucugcuuccucuccuuucuc

SEQ ID NO: 1116181 - RNA, 26 nt, Human
uucuccuccaucacugcucugugaac

SEQ ID NO: 1116182 - RNA, 22 nt, Human
uucugugcaucuccgugugugu

SEQ ID NO: 1116183 - RNA, 23 nt, Human
uucuuucucccuucuccaaaaug

SEQ ID NO: 1116184 - RNA, 18 nt, Human
uuggaggaucacuugggc

SEQ ID NO: 1116185 - RNA, 23 nt, Human
uugugaggcugauuggaggauca

SEQ ID NO: 1116186 - RNA, 19 nt, Human
uuuguagguguguuguccc

SEQ ID NO: 1116187 - RNA, 22 nt, Human
uuuucugagcaccguuuaaaca

SEQ ID NO: 1116188 - RNA, 20 nt, Human
agcagcagcaguggcuccag

SEQ ID NO: 1116189 - RNA, 21 nt, Human
cagcagcagcaguggcuccag

SEQ ID NO: 1116190 - RNA, 22 nt, Human
cagcagcaguggcuccagacag

SEQ ID NO: 1116191 - RNA, 21 nt, Human
cagcucgguggucacuggcaa

SEQ ID NO: 1116192 - RNA, 18 nt, Human
ccagcagcagcaguggcu

SEQ ID NO: 1116193 - RNA, 21 nt, Human
ccccagcagcagcaguggcuc

SEQ ID NO: 1116194 - RNA, 30 nt, Human
cugguuaguggccgacucugacuuccuccu

SEQ ID NO: 1116195 - RNA, 21 nt, Human
cuuuccuacuggggaggggca

SEQ ID NO: 1116196 - RNA, 18 nt, Human
gacucugacuuccuccuc

SEQ ID NO: 1116197 - RNA, 19 nt, Human
uggggaggggcaguggggc

SEQ ID NO: 1116198 - RNA, 21 nt, Human
uggggaggggcaguggggccc

SEQ ID NO: 1116199 - RNA, 20 nt, Human
uggggccuaagcccccugcc

SEQ ID NO: 1116200 - RNA, 20 nt, Human
uuuccuacuggggaggggca

SEQ ID NO: 1116201 - RNA, 20 nt, Human
caucaccccucucuccaaca

SEQ ID NO: 1116202 - RNA, 23 nt, Human
ccagcaccaggcaucaccccucu

SEQ ID NO: 1116203 - RNA, 18 nt, Human
cucugugcagggguucca

SEQ ID NO: 1116204 - RNA, 19 nt, Human
cuuccagaaaacuugguca

SEQ ID NO: 1116205 - RNA, 23 nt, Human
ucucuccaacaccuacuugaggg

SEQ ID NO: 1116206 - RNA, 20 nt, Human
uuccaccagcaccaggcauc

SEQ ID NO: 1116207 - RNA, 18 nt, Human
aaaagcacagcagaggca

SEQ ID NO: 1116208 - RNA, 25 nt, Human
aagcuugaggacaaaaguggugguu

SEQ ID NO: 1116209 - RNA, 25 nt, Human
acagaacauccuucugagugccccc

SEQ ID NO: 1116210 - RNA, 22 nt, Human
acccuaccuucuugcuccccag

SEQ ID NO: 1116211 - RNA, 25 nt, Human
acuccccuugucacuggcuuccccu

SEQ ID NO: 1116212 - RNA, 21 nt, Human
acugcaaucccugggagggcu

SEQ ID NO: 1116213 - RNA, 22 nt, Human
agagugggcggggggcgggggc

SEQ ID NO: 1116214 - RNA, 20 nt, Human
aggcaggcacagugguggcu

SEQ ID NO: 1116215 - RNA, 21 nt, Human
aggggaagggggggcaaaagc

SEQ ID NO: 1116216 - RNA, 21 nt, Human
auaacugagggcauggcacgc

SEQ ID NO: 1116217 - RNA, 20 nt, Human
aucuggaagcgcagugcgcc

SEQ ID NO: 1116218 - RNA, 18 nt, Human
aucuugucuuucuugcuc

SEQ ID NO: 1116219 - RNA, 18 nt, Human
caaaagcacagcagaggc

SEQ ID NO: 1116220 - RNA, 19 nt, Human
cacucaugucccaucugau

SEQ ID NO: 1116221 - RNA, 19 nt, Human
cacucaugucccaucugau

SEQ ID NO: 1116222 - RNA, 22 nt, Human
cagcuguaguccucuugugagg

SEQ ID NO: 1116223 - RNA, 24 nt, Human
cagggucccggcucucuccccgag

SEQ ID NO: 1116224 - RNA, 18 nt, Human
caucuugucuuucuugcu

SEQ ID NO: 1116225 - RNA, 25 nt, Human
caucuugucuuucuugcucagaaac

SEQ ID NO: 1116226 - RNA, 20 nt, Human
ccccucucuccaggcccuuc

SEQ ID NO: 1116227 - RNA, 18 nt, Human
cccgugacugcgcaucug

SEQ ID NO: 1116228 - RNA, 18 nt, Human
cccguucccccucucucc

SEQ ID NO: 1116229 - RNA, 21 nt, Human
cccuucuuucacucauguccc

SEQ ID NO: 1116230 - RNA, 23 nt, Human
ccuauggccccuagggccucucu

SEQ ID NO: 1116231 - RNA, 21 nt, Human
ccugggucucuggccuaggac

SEQ ID NO: 1116232 - RNA, 18 nt, Human
ccuguacagucuuaccuc

SEQ ID NO: 1116233 - RNA, 23 nt, Human
ccuucugcgugcagcggccaucu

SEQ ID NO: 1116234 - RNA, 23 nt, Human
ccuucuuauuacauaacugaggg

SEQ ID NO: 1116235 - RNA, 22 nt, Human
ccuuugguugggggagggaggc

SEQ ID NO: 1116236 - RNA, 23 nt, Human
cuagggaaugaggagaaucagaa

SEQ ID NO: 1116237 - RNA, 18 nt, Human
cuaggggcagagccgccu

SEQ ID NO: 1116238 - RNA, 20 nt, Human
cuccuccaugcccccugcca

SEQ ID NO: 1116239 - RNA, 20 nt, Human
cugaaggaaaagaugugaug

SEQ ID NO: 1116240 - RNA, 24 nt, Human
cuggcuuccccucuuuucccuggg

SEQ ID NO: 1116241 - RNA, 19 nt, Human
cuggucuccgacauggugg

SEQ ID NO: 1116242 - RNA, 25 nt, Human
cuguaguccucuugugaggcucccc

SEQ ID NO: 1116243 - RNA, 20 nt, Human
cuguccgccuuugguugggg

SEQ ID NO: 1116244 - RNA, 21 nt, Human
cuguuuuucuucucuuucucc

SEQ ID NO: 1116245 - RNA, 23 nt, Human
cuuccccucuuuucccugggugg

SEQ ID NO: 1116246 - RNA, 24 nt, Human
gaaugagaguggaggcagaggcuc

SEQ ID NO: 1116247 - RNA, 21 nt, Human
gacccgugguuuguguucccc

SEQ ID NO: 1116248 - RNA, 23 nt, Human
gaggcagaggcucggcagcucau

SEQ ID NO: 1116249 - RNA, 20 nt, Human
gaggggguuuaccaagcccu

SEQ ID NO: 1116250 - RNA, 19 nt, Human
gaguaguucggaaaagcug

SEQ ID NO: 1116251 - RNA, 21 nt, Human
gagugucugaaugagagugga

SEQ ID NO: 1116252 - RNA, 23 nt, Human
gcacagugguggcugccgcaaug

SEQ ID NO: 1116253 - RNA, 19 nt, Human
gcagcuuugaggaucuguu

SEQ ID NO: 1116254 - RNA, 21 nt, Human
gcccguucccccucucuccag

SEQ ID NO: 1116255 - RNA, 18 nt, Human
gccucaucuuggggaaga

SEQ ID NO: 1116256 - RNA, 20 nt, Human
gcgcaguggcccccacccgu

SEQ ID NO: 1116257 - RNA, 23 nt, Human
gcugcccguucccccucucucca

SEQ ID NO: 1116258 - RNA, 24 nt, Human
gcuuggaguaguucggaaaagcug

SEQ ID NO: 1116259 - RNA, 20 nt, Human
ggagacgggagguuuggagg

SEQ ID NO: 1116260 - RNA, 18 nt, Human
ggaggaggggaagggggg

SEQ ID NO: 1116261 - RNA, 23 nt, Human
ggaggggguggcacccuucuuuc

SEQ ID NO: 1116262 - RNA, 20 nt, Human
ggagggucugacuggguaga

SEQ ID NO: 1116263 - RNA, 23 nt, Human
ggcagcaggcuguccgccuuugg

SEQ ID NO: 1116264 - RNA, 18 nt, Human
ggcggggggcgggggcua

SEQ ID NO: 1116265 - RNA, 20 nt, Human
ggcggggggcgggggcuaug

SEQ ID NO: 1116266 - RNA, 19 nt, Human
gggaaugaggagaaucaga

SEQ ID NO: 1116267 - RNA, 22 nt, Human
gggagguuuggaggccccgggu

SEQ ID NO: 1116268 - RNA, 20 nt, Human
gggauuuccagaaaagucag

SEQ ID NO: 1116269 - RNA, 22 nt, Human
gggcagcaggcuguccgccuuu

SEQ ID NO: 1116270 - RNA, 25 nt, Human
gggcagcaggcuguccgccuuuggu

SEQ ID NO: 1116271 - RNA, 22 nt, Human
gggcgggggcuaugacggagga

SEQ ID NO: 1116272 - RNA, 25 nt, Human
ggggcaaaagcacagcagaggcagg

SEQ ID NO: 1116273 - RNA, 20 nt, Human
gggggagggaggccucgaaa

SEQ ID NO: 1116274 - RNA, 21 nt, Human
gggggcuaugacggaggaggg

SEQ ID NO: 1116275 - RNA, 21 nt, Human
guggggacagggaagugaggu

SEQ ID NO: 1116276 - RNA, 21 nt, Human
gugucagacccgugguuugug

SEQ ID NO: 1116277 - RNA, 18 nt, Human
guuucuuuugguggacca

SEQ ID NO: 1116278 - RNA, 26 nt, Human
guuuuucuucucuuucuccuccaugc

SEQ ID NO: 1116279 - RNA, 21 nt, Human
uagcagugaaggacugcaauc

SEQ ID NO: 1116280 - RNA, 22 nt, Human
uaggcucugucuccagcagccu

SEQ ID NO: 1116281 - RNA, 18 nt, Human
ucaacaccugggcccggc

SEQ ID NO: 1116282 - RNA, 21 nt, Human
ucccagaguaaaauuccuucc

SEQ ID NO: 1116283 - RNA, 19 nt, Human
ucccugggagggcuaacuc

SEQ ID NO: 1116284 - RNA, 20 nt, Human
ucccugggagggcuaacucu

SEQ ID NO: 1116285 - RNA, 21 nt, Human
uccgcagagugggcggggggc

SEQ ID NO: 1116286 - RNA, 21 nt, Human
ucucacguuuguggggagggg

SEQ ID NO: 1116287 - RNA, 20 nt, Human
ucucugguggaggggguggc

SEQ ID NO: 1116288 - RNA, 19 nt, Human
ucugucuccagcagccucc

SEQ ID NO: 1116289 - RNA, 23 nt, Human
ucuugugaggcuccccgcugccc

SEQ ID NO: 1116290 - RNA, 27 nt, Human
ucuuucuugcucagaaacuuaaaaugg

SEQ ID NO: 1116291 - RNA, 24 nt, Human
ugaggagaaucagaauaaaacuag

SEQ ID NO: 1116292 - RNA, 18 nt, Human
ugagugccccauaccacc

SEQ ID NO: 1116293 - RNA, 18 nt, Human
ugccaugguuccagcugu

SEQ ID NO: 1116294 - RNA, 20 nt, Human
ugcccguucccccucucucc

SEQ ID NO: 1116295 - RNA, 20 nt, Human
ugcgugcagcggccaucuug

SEQ ID NO: 1116296 - RNA, 20 nt, Human
uggaggcagaggcucggcag

SEQ ID NO: 1116297 - RNA, 22 nt, Human
uggcacccuucuuucacucaug

SEQ ID NO: 1116298 - RNA, 22 nt, Human
uggcacgcgccuucucggcccu

SEQ ID NO: 1116299 - RNA, 21 nt, Human
uggcccccacccgugacugcg

SEQ ID NO: 1116300 - RNA, 19 nt, Human
uggccuaggacgagcaccg

SEQ ID NO: 1116301 - RNA, 24 nt, Human
uggcguugguuuuucuguccugcu

SEQ ID NO: 1116302 - RNA, 19 nt, Human
ugggauuuccagaaaaguc

SEQ ID NO: 1116303 - RNA, 23 nt, Human
uggggaggggguuuaccaagccc

SEQ ID NO: 1116304 - RNA, 21 nt, Human
uggggauucagguggaaggcg

SEQ ID NO: 1116305 - RNA, 24 nt, Human
uggguagggguucaacaccugggc

SEQ ID NO: 1116306 - RNA, 23 nt, Human
ugguggaggggguggcacccuuc

SEQ ID NO: 1116307 - RNA, 24 nt, Human
uguuuuucuucucuuucuccucca

SEQ ID NO: 1116308 - RNA, 21 nt, Human
uucacucaugucccaucugau

SEQ ID NO: 1116309 - RNA, 18 nt, Human
uuccagaaaagucagugg

SEQ ID NO: 1116310 - RNA, 21 nt, Human
uuccccucuuuucccugggug

SEQ ID NO: 1116311 - RNA, 22 nt, Human
uucucggcccuuccuugcaacc

SEQ ID NO: 1116312 - RNA, 22 nt, Human
uuguggggaggggguuuaccaa

SEQ ID NO: 1116313 - RNA, 24 nt, Human
uuuaugaucuuucuggacuccucu

SEQ ID NO: 1116314 - RNA, 20 nt, Human
uuucuggacuccucugauga

SEQ ID NO: 1116315 - RNA, 24 nt, Human
uuuucuagccucaucuuggggaag

SEQ ID NO: 1116316 - RNA, 18 nt, Human
uuuuucuucucuuucucc

SEQ ID NO: 1116317 - RNA, 23 nt, Human
aaaacaacaaaaccagacaacca

SEQ ID NO: 1116318 - RNA, 24 nt, Human
aaaaugguuuugagagcccugcug

SEQ ID NO: 1116319 - RNA, 23 nt, Human
aaacaacaaaaccagacaaccau

SEQ ID NO: 1116320 - RNA, 20 nt, Human
aagcagcaggugaagugcag

SEQ ID NO: 1116321 - RNA, 22 nt, Human
aaggaugcuaccauuuuucuca

SEQ ID NO: 1116322 - RNA, 23 nt, Human
acaccuguaaaaacaacaaaacc

SEQ ID NO: 1116323 - RNA, 20 nt, Human
acagaagcaccugaccccau

SEQ ID NO: 1116324 - RNA, 20 nt, Human
agacagcucaggcugaaggg

SEQ ID NO: 1116325 - RNA, 23 nt, Human
agagagcuugucccuucugcccu

SEQ ID NO: 1116326 - RNA, 22 nt, Human
agagagguaggacagcaagcac

SEQ ID NO: 1116327 - RNA, 29 nt, Human
agauacuaaaacgucacacuucagggaaa

SEQ ID NO: 1116328 - RNA, 20 nt, Human
agaugcauugaguuaagggc

SEQ ID NO: 1116329 - RNA, 21 nt, Human
agauuccagugugucaagagg

SEQ ID NO: 1116330 - RNA, 19 nt, Human
agcagaaagaagacagcuc

SEQ ID NO: 1116331 - RNA, 24 nt, Human
agcagcaggggccagcuggaggga

SEQ ID NO: 1116332 - RNA, 20 nt, Human
agcaggcugcacugcagcag

SEQ ID NO: 1116333 - RNA, 19 nt, Human
agcaggggccagcuggagg

SEQ ID NO: 1116334 - RNA, 21 nt, Human
agcaggugaagugcagccaga

SEQ ID NO: 1116335 - RNA, 18 nt, Human
agcagguuaaugggggca

SEQ ID NO: 1116336 - RNA, 21 nt, Human
agccagaagcuuucaaaugcu

SEQ ID NO: 1116337 - RNA, 21 nt, Human
aggcagcagcaggggccagcu

SEQ ID NO: 1116338 - RNA, 19 nt, Human
agguaaggcagcuggguug

SEQ ID NO: 1116339 - RNA, 23 nt, Human
aggugaagugcagccagaagaga

SEQ ID NO: 1116340 - RNA, 22 nt, Human
auaauacagauuccaguguguc

SEQ ID NO: 1116341 - RNA, 19 nt, Human
aucauucuccacgcucucc

SEQ ID NO: 1116342 - RNA, 20 nt, Human
augccaagaugaaggccaaa

SEQ ID NO: 1116343 - RNA, 26 nt, Human
caaaccacucacagccagcuccggcu

SEQ ID NO: 1116344 - RNA, 22 nt, Human
caaagcauguuccugagacaag

SEQ ID NO: 1116345 - RNA, 21 nt, Human
caacaaaaccagacaaccauc

SEQ ID NO: 1116346 - RNA, 19 nt, Human
caagaagguucccagauga

SEQ ID NO: 1116347 - RNA, 18 nt, Human
caagacacagcguggcug

SEQ ID NO: 1116348 - RNA, 20 nt, Human
cacuaggggaggagaacugu

SEQ ID NO: 1116349 - RNA, 20 nt, Human
cacucacagccagcuccggc

SEQ ID NO: 1116350 - RNA, 20 nt, Human
cagcagaaagaagacagcuc

SEQ ID NO: 1116351 - RNA, 19 nt, Human
cagcagcaggggccagcug

SEQ ID NO: 1116352 - RNA, 22 nt, Human
cagcagcaggggccagcuggag

SEQ ID NO: 1116353 - RNA, 22 nt, Human
cagcucaggcugaagggagagc

SEQ ID NO: 1116354 - RNA, 19 nt, Human
cagcucucaucgcuggggg

SEQ ID NO: 1116355 - RNA, 20 nt, Human
cagcuuuuucccuuuucuua

SEQ ID NO: 1116356 - RNA, 18 nt, Human
caugcaagacacagcgug

SEQ ID NO: 1116357 - RNA, 19 nt, Human
caugcaagacacagcgugg

SEQ ID NO: 1116358 - RNA, 19 nt, Human
cauuguauuuucuuaaaaa

SEQ ID NO: 1116359 - RNA, 18 nt, Human
ccacccuccaauuggcca

SEQ ID NO: 1116360 - RNA, 22 nt, Human
ccacugagccuccugagucuca

SEQ ID NO: 1116361 - RNA, 20 nt, Human
ccagaaaaucuucacccaaa

SEQ ID NO: 1116362 - RNA, 24 nt, Human
ccccaucauucuccacgcucucca

SEQ ID NO: 1116363 - RNA, 19 nt, Human
ccugccaccuuccaugcca

SEQ ID NO: 1116364 - RNA, 20 nt, Human
ccuugaggccaggguaggag

SEQ ID NO: 1116365 - RNA, 20 nt, Human
ccuuugcuggaccacuuuuc

SEQ ID NO: 1116366 - RNA, 23 nt, Human
ccuuugcuggaccacuuuuccua

SEQ ID NO: 1116367 - RNA, 23 nt, Human
cggcucuucacucuccacccucc

SEQ ID NO: 1116368 - RNA, 21 nt, Human
cuacugagauguccgacugcc

SEQ ID NO: 1116369 - RNA, 23 nt, Human
cucaaagcauguuccugagacaa

SEQ ID NO: 1116370 - RNA, 19 nt, Human
cucaggacuuucccuagca

SEQ ID NO: 1116371 - RNA, 18 nt, Human
cucaugggauagagagcu

SEQ ID NO: 1116372 - RNA, 24 nt, Human
cuccacgcucuccacaaaccuuca

SEQ ID NO: 1116373 - RNA, 18 nt, Human
cuccugagucucaauucu

SEQ ID NO: 1116374 - RNA, 22 nt, Human
cucuccacaaaccuucaaggaa

SEQ ID NO: 1116375 - RNA, 18 nt, Human
cuugaguccagcuuuuuc

SEQ ID NO: 1116376 - RNA, 22 nt, Human
cuuucaaaugcucccuauuugu

SEQ ID NO: 1116377 - RNA, 22 nt, Human
gaaaaucuucacccaaacagag

SEQ ID NO: 1116378 - RNA, 22 nt, Human
gaaggcccugaaguucaucucc

SEQ ID NO: 1116379 - RNA, 20 nt, Human
gaggacgggaggcagcagca

SEQ ID NO: 1116380 - RNA, 19 nt, Human
gcacugcagcagaaagaag

SEQ ID NO: 1116381 - RNA, 22 nt, Human
gcagcagcaggggccagcugga

SEQ ID NO: 1116382 - RNA, 19 nt, Human
gccauugccccaucauucu

SEQ ID NO: 1116383 - RNA, 20 nt, Human
gcccaggccccaggagucuc

SEQ ID NO: 1116384 - RNA, 18 nt, Human
gccccaggcuacuuccuu

SEQ ID NO: 1116385 - RNA, 18 nt, Human
gcucuccacaaaccuuca

SEQ ID NO: 1116386 - RNA, 20 nt, Human
gcuugaguccagcuuuuucc

SEQ ID NO: 1116387 - RNA, 22 nt, Human
gcuuuuucccuuuucuuaauuc

SEQ ID NO: 1116388 - RNA, 24 nt, Human
gggggcaggcguggcaaccgggau

SEQ ID NO: 1116389 - RNA, 20 nt, Human
ggguuugagcaggaaaaguu

SEQ ID NO: 1116390 - RNA, 23 nt, Human
guucuguuuggggggaguauuuc

SEQ ID NO: 1116391 - RNA, 23 nt, Human
guuguggggaaaggcaggugggc

SEQ ID NO: 1116392 - RNA, 23 nt, Human
uaaaaacaacaaaaccagacaac

SEQ ID NO: 1116393 - RNA, 24 nt, Human
uaaaaacaacaaaaccagacaacc

SEQ ID NO: 1116394 - RNA, 21 nt, Human
uaacaaaaaaccccacuuuau

SEQ ID NO: 1116395 - RNA, 22 nt, Human
uaacaaaaaaccccacuuuauu

SEQ ID NO: 1116396 - RNA, 22 nt, Human
uaacugcugggagaugccaggu

SEQ ID NO: 1116397 - RNA, 20 nt, Human
uaagucaaagugaggacuuu

SEQ ID NO: 1116398 - RNA, 24 nt, Human
uacaaaacugguacccugugccac

SEQ ID NO: 1116399 - RNA, 22 nt, Human
uagaaaauaccaagagugaaac

SEQ ID NO: 1116400 - RNA, 18 nt, Human
uagaauaacaaaaaaccc

SEQ ID NO: 1116401 - RNA, 25 nt, Human
uagaauaacaaaaaaccccacuuua

SEQ ID NO: 1116402 - RNA, 20 nt, Human
uagauggggugggcugaacu

SEQ ID NO: 1116403 - RNA, 24 nt, Human
uauuagaauaacaaaaaaccccac

SEQ ID NO: 1116404 - RNA, 25 nt, Human
ucaaagugaggacuuugaaaugcag

SEQ ID NO: 1116405 - RNA, 24 nt, Human
ucacagccagcuccggcucuucac

SEQ ID NO: 1116406 - RNA, 24 nt, Human
ucaggcugaagggagagcuucucu

SEQ ID NO: 1116407 - RNA, 18 nt, Human
uccacaaaccuucaagga

SEQ ID NO: 1116408 - RNA, 18 nt, Human
uccacaacaccuguaaaa

SEQ ID NO: 1116409 - RNA, 24 nt, Human
uccaugcuuuuaaugacugaacuc

SEQ ID NO: 1116410 - RNA, 19 nt, Human
uccauucugccugccaccu

SEQ ID NO: 1116411 - RNA, 18 nt, Human
uccugagucucaauucuu

SEQ ID NO: 1116412 - RNA, 19 nt, Human
ucucaauucuuuucucucu

SEQ ID NO: 1116413 - RNA, 19 nt, Human
ucuccacgcucuccacaaa

SEQ ID NO: 1116414 - RNA, 21 nt, Human
ucucucauggaauccugagaa

SEQ ID NO: 1116415 - RNA, 19 nt, Human
ugaagagcaaacacuuugg

SEQ ID NO: 1116416 - RNA, 23 nt, Human
ugaagagcaaacacuuuggcuua

SEQ ID NO: 1116417 - RNA, 21 nt, Human
ugaaggaaggucagaagcuca

SEQ ID NO: 1116418 - RNA, 22 nt, Human
ugaaugaaugcaggaaacaguu

SEQ ID NO: 1116419 - RNA, 19 nt, Human
ugacugaacucuguaaaga

SEQ ID NO: 1116420 - RNA, 18 nt, Human
ugagaagaaugagaugug

SEQ ID NO: 1116421 - RNA, 19 nt, Human
ugagaagaaugagaugugg

SEQ ID NO: 1116422 - RNA, 19 nt, Human
ugagaagaaugagaugugg

SEQ ID NO: 1116423 - RNA, 21 nt, Human
ugagacaaggcgucggaaggc

SEQ ID NO: 1116424 - RNA, 19 nt, Human
ugagagcccugcuguggag

SEQ ID NO: 1116425 - RNA, 22 nt, Human
ugagauguggguguccacgaga

SEQ ID NO: 1116426 - RNA, 21 nt, Human
ugagcagccaugcggccagaa

SEQ ID NO: 1116427 - RNA, 23 nt, Human
ugagugcuaugaagagcaaacac

SEQ ID NO: 1116428 - RNA, 18 nt, Human
ugcaagacacagcguggc

SEQ ID NO: 1116429 - RNA, 20 nt, Human
ugcaagacacagcguggcuc

SEQ ID NO: 1116430 - RNA, 23 nt, Human
ugccaagaugaaggccaaauaag

SEQ ID NO: 1116431 - RNA, 19 nt, Human
ugccaagcaguggcuguga

SEQ ID NO: 1116432 - RNA, 23 nt, Human
uggcaggaaccagcuuccugaag

SEQ ID NO: 1116433 - RNA, 19 nt, Human
uggcaguagaaacaagagc

SEQ ID NO: 1116434 - RNA, 20 nt, Human
ugggcugaacuuuuuuacag

SEQ ID NO: 1116435 - RNA, 22 nt, Human
uggguuugagcaggaaaaguug

SEQ ID NO: 1116436 - RNA, 19 nt, Human
ugguagagaugcuacugag

SEQ ID NO: 1116437 - RNA, 22 nt, Human
ugguagagaugcuacugagaug

SEQ ID NO: 1116438 - RNA, 20 nt, Human
uguaaaaacaacaaaaccag

SEQ ID NO: 1116439 - RNA, 24 nt, Human
uguaaaaacaacaaaaccagacaa

SEQ ID NO: 1116440 - RNA, 18 nt, Human
uguccgacugccuuuaac

SEQ ID NO: 1116441 - RNA, 22 nt, Human
uguggccaaaccacucacagcc

SEQ ID NO: 1116442 - RNA, 18 nt, Human
uuagaauaacaaaaaacc

SEQ ID NO: 1116443 - RNA, 19 nt, Human
uuccacaacaccuguaaaa

SEQ ID NO: 1116444 - RNA, 20 nt, Human
uuccagugugucaagaggag

SEQ ID NO: 1116445 - RNA, 21 nt, Human
uuccccgucgaucugcuccca

SEQ ID NO: 1116446 - RNA, 24 nt, Human
uucuucguccagcacucauccauu

SEQ ID NO: 1116447 - RNA, 24 nt, Human
uuuacagguagcauaaggucuccu

SEQ ID NO: 1116448 - RNA, 24 nt, Human
uuugcuggaccacuuuuccuacaa

SEQ ID NO: 1116449 - RNA, 20 nt, Human
uuuggcuuagugcggaaggc

SEQ ID NO: 1116450 - RNA, 22 nt, Human
uuuuccuacaaaacugguaccc

SEQ ID NO: 1116451 - RNA, 24 nt, Human
accuuccuccaugccccuguccac

SEQ ID NO: 1116452 - RNA, 22 nt, Human
agaauuccacagaguuccacau

SEQ ID NO: 1116453 - RNA, 21 nt, Human
agagaccagguguuacaggug

SEQ ID NO: 1116454 - RNA, 24 nt, Human
agcaacaccacgaaucccaacgcg

SEQ ID NO: 1116455 - RNA, 23 nt, Human
agcucaccuuccuccaugccccu

SEQ ID NO: 1116456 - RNA, 19 nt, Human
cacaucgcuugcaauaucc

SEQ ID NO: 1116457 - RNA, 20 nt, Human
cagcaacaccacgaauccca

SEQ ID NO: 1116458 - RNA, 19 nt, Human
cagccagguccucucaggc

SEQ ID NO: 1116459 - RNA, 21 nt, Human
cagccagguccucucaggccc

SEQ ID NO: 1116460 - RNA, 24 nt, Human
caggucaaacuuuugguugaggcg

SEQ ID NO: 1116461 - RNA, 25 nt, Human
caggugccaggaccccuagaacucc

SEQ ID NO: 1116462 - RNA, 23 nt, Human
ccaaagauucugugccuacuuca

SEQ ID NO: 1116463 - RNA, 24 nt, Human
ccacauaacagugcauaaaugccc

SEQ ID NO: 1116464 - RNA, 23 nt, Human
cuccagggcagccagguccucuc

SEQ ID NO: 1116465 - RNA, 22 nt, Human
cucgcuguccaaagauucugug

SEQ ID NO: 1116466 - RNA, 20 nt, Human
gaccagguguuacaggugcc

SEQ ID NO: 1116467 - RNA, 21 nt, Human
gagauacacacacaacugugg

SEQ ID NO: 1116468 - RNA, 21 nt, Human
gcaacaccacgaaucccaacg

SEQ ID NO: 1116469 - RNA, 25 nt, Human
gggucuccagcaacaccacgaaucc

SEQ ID NO: 1116470 - RNA, 27 nt, Human
gucuccagcaacaccacgaaucccaag

SEQ ID NO: 1116471 - RNA, 21 nt, Human
uacacacacaacuguggugcg

SEQ ID NO: 1116472 - RNA, 18 nt, Human
ucaccuuccuccaugccc

SEQ ID NO: 1116473 - RNA, 24 nt, Human
ucauaauccuucuccagggcagcc

SEQ ID NO: 1116474 - RNA, 25 nt, Human
uccacauaacagugcauaaaugccc

SEQ ID NO: 1116475 - RNA, 18 nt, Human
ucucaggcccagagagcu

SEQ ID NO: 1116476 - RNA, 19 nt, Human
ucucaggcccagagagcuc

SEQ ID NO: 1116477 - RNA, 21 nt, Human
ugagauacacacacaacugug

SEQ ID NO: 1116478 - RNA, 21 nt, Human
ugccaggaccccuagaacucc

SEQ ID NO: 1116479 - RNA, 19 nt, Human
uggcauacaucaggucaaa

SEQ ID NO: 1116480 - RNA, 20 nt, Human
uguccacauaacagugcaua

SEQ ID NO: 1116481 - RNA, 20 nt, Human
aaaaaaaggaaaauccugga

SEQ ID NO: 1116482 - RNA, 18 nt, Human
aagcaggagaaucacuug

SEQ ID NO: 1116483 - RNA, 24 nt, Human
aagcaggagaaucacuuggaccca

SEQ ID NO: 1116484 - RNA, 24 nt, Human
aaucacuuggacccaggaggcgga

SEQ ID NO: 1116485 - RNA, 18 nt, Human
acaagcuucaaggaccag

SEQ ID NO: 1116486 - RNA, 18 nt, Human
acaccaccgcacuccagc

SEQ ID NO: 1116487 - RNA, 20 nt, Human
acaccaccgcacuccagccu

SEQ ID NO: 1116488 - RNA, 24 nt, Human
accaacauggagaaacccugucuc

SEQ ID NO: 1116489 - RNA, 18 nt, Human
accagagacuugccucaa

SEQ ID NO: 1116490 - RNA, 24 nt, Human
acccaggaggcggagguuguagug

SEQ ID NO: 1116491 - RNA, 27 nt, Human
acccagugauggaggggaacauggcuc

SEQ ID NO: 1116492 - RNA, 24 nt, Human
acccugucucuacuaaaaauacaa

SEQ ID NO: 1116493 - RNA, 18 nt, Human
accgcacuccagccugag

SEQ ID NO: 1116494 - RNA, 28 nt, Human
acucugucucaaaaaaaaaaaaaaaaaa

SEQ ID NO: 1116495 - RNA, 21 nt, Human
agaagguguggugccagaucu

SEQ ID NO: 1116496 - RNA, 22 nt, Human
agaaugaauaaauuuacaggug

SEQ ID NO: 1116497 - RNA, 25 nt, Human
agacacuggaaccacuuggacagcu

SEQ ID NO: 1116498 - RNA, 21 nt, Human
agacagaaaugaaacugguuc

SEQ ID NO: 1116499 - RNA, 25 nt, Human
agacagaaaugaaacugguucagga

SEQ ID NO: 1116500 - RNA, 18 nt, Human
agacccaccaagccacag

SEQ ID NO: 1116501 - RNA, 19 nt, Human
agagaagacggucgagcug

SEQ ID NO: 1116502 - RNA, 18 nt, Human
agagcgaaacucugucuc

SEQ ID NO: 1116503 - RNA, 18 nt, Human
agcaagacagaaaugaaa

SEQ ID NO: 1116504 - RNA, 23 nt, Human
agccgggugugguggcgcaugcc

SEQ ID NO: 1116505 - RNA, 24 nt, Human
agccuggauggcuguguaccuugc

SEQ ID NO: 1116506 - RNA, 27 nt, Human
aggaauagucggggagccagguguggc

SEQ ID NO: 1116507 - RNA, 20 nt, Human
aggaggaggacgcuguggug

SEQ ID NO: 1116508 - RNA, 23 nt, Human
aggaggaggacgcugugguggcc

SEQ ID NO: 1116509 - RNA, 19 nt, Human
aggcaggagaauugcuuga

SEQ ID NO: 1116510 - RNA, 23 nt, Human
aggcaggagaauugcuugaguuc

SEQ ID NO: 1116511 - RNA, 21 nt, Human
aggcggagguuguagugaacc

SEQ ID NO: 1116512 - RNA, 24 nt, Human
aggcggagguuguagugaaccgag

SEQ ID NO: 1116513 - RNA, 24 nt, Human
aggcugaagcaggagaaucacuug

SEQ ID NO: 1116514 - RNA, 19 nt, Human
agugauaggagaacccaga

SEQ ID NO: 1116515 - RNA, 21 nt, Human
agugauaggagaacccagagu

SEQ ID NO: 1116516 - RNA, 24 nt, Human
aucacaccaccgcacuccagccug

SEQ ID NO: 1116517 - RNA, 23 nt, Human
aucaccuaaggucgggaguuuga

SEQ ID NO: 1116518 - RNA, 25 nt, Human
auccagacgcaggauggcauggggg

SEQ ID NO: 1116519 - RNA, 24 nt, Human
caacauggagaaacccugucucua

SEQ ID NO: 1116520 - RNA, 23 nt, Human
caagggaacgguuaacaaaguca

SEQ ID NO: 1116521 - RNA, 23 nt, Human
cacacagacccaccaagccacag

SEQ ID NO: 1116522 - RNA, 25 nt, Human
cacacagacccaccaagccacagac

SEQ ID NO: 1116523 - RNA, 21 nt, Human
cacaccaccgcacuccagccu

SEQ ID NO: 1116524 - RNA, 24 nt, Human
cacaccugcaaucccagcacuuug

SEQ ID NO: 1116525 - RNA, 25 nt, Human
cacagacccaccaagccacagacuu

SEQ ID NO: 1116526 - RNA, 18 nt, Human
cacagauaaggagacugc

SEQ ID NO: 1116527 - RNA, 26 nt, Human
caccaccgcacuccagccugaguacc

SEQ ID NO: 1116528 - RNA, 23 nt, Human
caccugcaaucccagcacuuugg

SEQ ID NO: 1116529 - RNA, 24 nt, Human
caccugcaaucccagcacuuuggg

SEQ ID NO: 1116530 - RNA, 19 nt, Human
caccuuaguaccugcacag

SEQ ID NO: 1116531 - RNA, 19 nt, Human
cacuaauagaccagcaaga

SEQ ID NO: 1116532 - RNA, 24 nt, Human
cacucuagugugggcaacuagagc

SEQ ID NO: 1116533 - RNA, 24 nt, Human
cagcaaagccagcuuugcaugugg

SEQ ID NO: 1116534 - RNA, 24 nt, Human
cagcacuuugggaggccaaggcag

SEQ ID NO: 1116535 - RNA, 25 nt, Human
cagcacuuugggaggccaaggcagg

SEQ ID NO: 1116536 - RNA, 20 nt, Human
cagcagcacugggugcuccu

SEQ ID NO: 1116537 - RNA, 22 nt, Human
cagccugaguaccagagacuug

SEQ ID NO: 1116538 - RNA, 19 nt, Human
caggagcucuugccaggcu

SEQ ID NO: 1116539 - RNA, 24 nt, Human
cagggaggaggaggacgcuguggu

SEQ ID NO: 1116540 - RNA, 21 nt, Human
caggugccagucauccagacg

SEQ ID NO: 1116541 - RNA, 21 nt, Human
cagugauggaggggaacaugg

SEQ ID NO: 1116542 - RNA, 19 nt, Human
caucacccagguaggaguc

SEQ ID NO: 1116543 - RNA, 24 nt, Human
caucaccuaaggucgggaguuuga

SEQ ID NO: 1116544 - RNA, 24 nt, Human
caugcccguaaucccagcuacuug

SEQ ID NO: 1116545 - RNA, 19 nt, Human
cauugcacucuaguguggg

SEQ ID NO: 1116546 - RNA, 21 nt, Human
cauugcacucuagugugggca

SEQ ID NO: 1116547 - RNA, 22 nt, Human
cauugcacucuagugugggcaa

SEQ ID NO: 1116548 - RNA, 20 nt, Human
ccaccgcacuccagccugag

SEQ ID NO: 1116549 - RNA, 20 nt, Human
ccaccgcacuccagccugag

SEQ ID NO: 1116550 - RNA, 21 nt, Human
ccaccgcacuccagccugagu

SEQ ID NO: 1116551 - RNA, 25 nt, Human
ccaccgcacuccagccugaguacca

SEQ ID NO: 1116552 - RNA, 18 nt, Human
ccauggggugguugguca

SEQ ID NO: 1116553 - RNA, 19 nt, Human
ccauggguuuauacaucau

SEQ ID NO: 1116554 - RNA, 20 nt, Human
ccauugcacucuaguguggg

SEQ ID NO: 1116555 - RNA, 21 nt, Human
ccauugcacucuagugugggc

SEQ ID NO: 1116556 - RNA, 24 nt, Human
ccauugcacucuagugugggcaac

SEQ ID NO: 1116557 - RNA, 19 nt, Human
cccacaagcauguccucac

SEQ ID NO: 1116558 - RNA, 22 nt, Human
cccaccaagccacagacuuccc

SEQ ID NO: 1116559 - RNA, 18 nt, Human
cccguaaucccagcuacu

SEQ ID NO: 1116560 - RNA, 20 nt, Human
cccugggguucagcggggcc

SEQ ID NO: 1116561 - RNA, 21 nt, Human
cccugggguucagcggggccu

SEQ ID NO: 1116562 - RNA, 18 nt, Human
cccuggugccagggauac

SEQ ID NO: 1116563 - RNA, 21 nt, Human
cccuguguccugaaugggccc

SEQ ID NO: 1116564 - RNA, 18 nt, Human
cccuucuccccugugucc

SEQ ID NO: 1116565 - RNA, 22 nt, Human
ccuaaggucgggaguuugagac

SEQ ID NO: 1116566 - RNA, 22 nt, Human
ccuccagacacuggaaccacuu

SEQ ID NO: 1116567 - RNA, 22 nt, Human
ccugaccaacauggagaaaccc

SEQ ID NO: 1116568 - RNA, 24 nt, Human
ccugaccaacauggagaaacccug

SEQ ID NO: 1116569 - RNA, 24 nt, Human
cgccauugcacucuagugugggca

SEQ ID NO: 1116570 - RNA, 24 nt, Human
cuagagcgaaacucugucucaaaa

SEQ ID NO: 1116571 - RNA, 18 nt, Human
cucaaaaaaaaaaaaaaa

SEQ ID NO: 1116572 - RNA, 26 nt, Human
cucaaaaaaaaaaaaaaaaaaggaaa

SEQ ID NO: 1116573 - RNA, 24 nt, Human
cucaggcagcagcacugggugcuc

SEQ ID NO: 1116574 - RNA, 20 nt, Human
cucaucacccagguaggagu

SEQ ID NO: 1116575 - RNA, 21 nt, Human
cucaucacccagguaggaguc

SEQ ID NO: 1116576 - RNA, 19 nt, Human
cucugucucaaaaaaaaaa

SEQ ID NO: 1116577 - RNA, 20 nt, Human
cugcagcacuuuauuuuucc

SEQ ID NO: 1116578 - RNA, 19 nt, Human
cugggugcuccuugggagc

SEQ ID NO: 1116579 - RNA, 24 nt, Human
cuguguccugaaugggcccccaau

SEQ ID NO: 1116580 - RNA, 21 nt, Human
cuuaacacuaauagaccagca

SEQ ID NO: 1116581 - RNA, 21 nt, Human
cuucuggccuaugcccaccuu

SEQ ID NO: 1116582 - RNA, 18 nt, Human
gaaaugaaacugguucag

SEQ ID NO: 1116583 - RNA, 19 nt, Human
gaaaugaaacugguucagg

SEQ ID NO: 1116584 - RNA, 21 nt, Human
gaacuauacccagcaaagcca

SEQ ID NO: 1116585 - RNA, 24 nt, Human
gacagcuccuagaucuucuccagg

SEQ ID NO: 1116586 - RNA, 21 nt, Human
gagaaacccugucucuacuaa

SEQ ID NO: 1116587 - RNA, 23 nt, Human
gagaaucacuuggacccaggagg

SEQ ID NO: 1116588 - RNA, 20 nt, Human
gaggaggacgcugugguggc

SEQ ID NO: 1116589 - RNA, 23 nt, Human
gagguuguagugaaccgagguug

SEQ ID NO: 1116590 - RNA, 19 nt, Human
gagugagcaacuccauggg

SEQ ID NO: 1116591 - RNA, 20 nt, Human
gccaagaucacaccaccgca

SEQ ID NO: 1116592 - RNA, 23 nt, Human
gccagggauacccagugauggag

SEQ ID NO: 1116593 - RNA, 24 nt, Human
gccauugcacucuagugugggcaa

SEQ ID NO: 1116594 - RNA, 24 nt, Human
gcccguaaucccagcuacuuggga

SEQ ID NO: 1116595 - RNA, 19 nt, Human
gcggggccucaggcagcag

SEQ ID NO: 1116596 - RNA, 20 nt, Human
gcuugaguucaggagcuuga

SEQ ID NO: 1116597 - RNA, 23 nt, Human
ggaggaggaggacgcuguggugg

SEQ ID NO: 1116598 - RNA, 20 nt, Human
ggagguuguagugaaccgag

SEQ ID NO: 1116599 - RNA, 24 nt, Human
ggagguuguagugaaccgagguug

SEQ ID NO: 1116600 - RNA, 19 nt, Human
ggcucuagaaaaauccugg

SEQ ID NO: 1116601 - RNA, 20 nt, Human
ggcuguguaccuugcugggg

SEQ ID NO: 1116602 - RNA, 19 nt, Human
ggggagccagguguggcag

SEQ ID NO: 1116603 - RNA, 24 nt, Human
gggugugguggcgcaugcccguaa

SEQ ID NO: 1116604 - RNA, 21 nt, Human
ggucgggaguuugagacuagc

SEQ ID NO: 1116605 - RNA, 24 nt, Human
gguggcgcaugcccguaaucccag

SEQ ID NO: 1116606 - RNA, 21 nt, Human
gguguaaccagagguguacag

SEQ ID NO: 1116607 - RNA, 23 nt, Human
guagaagguguggugccagaucu

SEQ ID NO: 1116608 - RNA, 19 nt, Human
guuggugaugaugcggugg

SEQ ID NO: 1116609 - RNA, 19 nt, Human
guuuauacaucaucccuuc

SEQ ID NO: 1116610 - RNA, 22 nt, Human
uaaaaauacaaaauuagccggg

SEQ ID NO: 1116611 - RNA, 23 nt, Human
uaaaaauacaaaauuagccgggu

SEQ ID NO: 1116612 - RNA, 21 nt, Human
uaaaagaaugaauaaauuuac

SEQ ID NO: 1116613 - RNA, 28 nt, Human
uaaauuuacagguguaaauguaaaccgg

SEQ ID NO: 1116614 - RNA, 24 nt, Human
uaacaaagucaaaaucagcaccaa

SEQ ID NO: 1116615 - RNA, 19 nt, Human
uaaggagacugcaggucac

SEQ ID NO: 1116616 - RNA, 25 nt, Human
uacaagcuucaaggaccaguucuuu

SEQ ID NO: 1116617 - RNA, 22 nt, Human
uagagcgaaacucugucucaaa

SEQ ID NO: 1116618 - RNA, 25 nt, Human
uagaucuucuccagggaggaggagg

SEQ ID NO: 1116619 - RNA, 18 nt, Human
uagcaugagguguaugca

SEQ ID NO: 1116620 - RNA, 24 nt, Human
uagccugaccaacauggagaaacc

SEQ ID NO: 1116621 - RNA, 20 nt, Human
uagcugggcucccugaagau

SEQ ID NO: 1116622 - RNA, 24 nt, Human
ucacacagacccaccaagccacag

SEQ ID NO: 1116623 - RNA, 23 nt, Human
ucacaccugcaaucccagcacuu

SEQ ID NO: 1116624 - RNA, 19 nt, Human
ucaccuaaggucgggaguu

SEQ ID NO: 1116625 - RNA, 21 nt, Human
uccgcagcuucuccuugaugu

SEQ ID NO: 1116626 - RNA, 23 nt, Human
uccuggaacacugagcucucuga

SEQ ID NO: 1116627 - RNA, 22 nt, Human
ucucuacuaaaaauacaaaauu

SEQ ID NO: 1116628 - RNA, 23 nt, Human
ucugucucaaaaaaaaaaaaaaa

SEQ ID NO: 1116629 - RNA, 21 nt, Human
ucuucuuucuguuggcccugg

SEQ ID NO: 1116630 - RNA, 22 nt, Human
ugaaccgagguugcgccauugc

SEQ ID NO: 1116631 - RNA, 20 nt, Human
ugaagcaggagaaucacuug

SEQ ID NO: 1116632 - RNA, 22 nt, Human
ugaagcaggagaaucacuugga

SEQ ID NO: 1116633 - RNA, 24 nt, Human
ugaagcaggagaaucacuuggacc

SEQ ID NO: 1116634 - RNA, 24 nt, Human
ugaauaaauuuacagguguaaaug

SEQ ID NO: 1116635 - RNA, 24 nt, Human
ugaccaacauggagaaacccuguc

SEQ ID NO: 1116636 - RNA, 24 nt, Human
ugagacuagccugaccaacaugga

SEQ ID NO: 1116637 - RNA, 23 nt, Human
ugagcucucugacaccuuaguac

SEQ ID NO: 1116638 - RNA, 23 nt, Human
ugagugggugaguuacauuucug

SEQ ID NO: 1116639 - RNA, 24 nt, Human
ugcaucaccuaaggucgggaguuu

SEQ ID NO: 1116640 - RNA, 24 nt, Human
ugcccguaaucccagcuacuuggg

SEQ ID NO: 1116641 - RNA, 19 nt, Human
uggaaaaccaaaauuugug

SEQ ID NO: 1116642 - RNA, 20 nt, Human
uggaauggcugggcacagug

SEQ ID NO: 1116643 - RNA, 19 nt, Human
uggacccaggaggcggagg

SEQ ID NO: 1116644 - RNA, 20 nt, Human
uggcuguguaccuugcuggg

SEQ ID NO: 1116645 - RNA, 24 nt, Human
ugggaggcugaagcaggagaauca

SEQ ID NO: 1116646 - RNA, 19 nt, Human
uggugccagaucuucucca

SEQ ID NO: 1116647 - RNA, 24 nt, Human
ugguggcgcaugcccguaauccca

SEQ ID NO: 1116648 - RNA, 25 nt, Human
ugguuggucaggugccagucaucca

SEQ ID NO: 1116649 - RNA, 21 nt, Human
uguaugcauuugccaggggca

SEQ ID NO: 1116650 - RNA, 18 nt, Human
uuagccgggugugguggc

SEQ ID NO: 1116651 - RNA, 19 nt, Human
uuagccgggugugguggcg

SEQ ID NO: 1116652 - RNA, 24 nt, Human
uuagccgggugugguggcgcaugc

SEQ ID NO: 1116653 - RNA, 21 nt, Human
uugcuugaguucaggagcuug

SEQ ID NO: 1116654 - RNA, 24 nt, Human
uuggacccaggaggcggagguugu

SEQ ID NO: 1116655 - RNA, 25 nt, Human
uugggaggcugaagcaggagaauca

SEQ ID NO: 1116656 - RNA, 22 nt, Human
uuguagugaaccgagguugcgc

SEQ ID NO: 1116657 - RNA, 18 nt, Human
aaaggucccugggacuuc

SEQ ID NO: 1116658 - RNA, 24 nt, Human
aaaugguccccuccaccuucccca

SEQ ID NO: 1116659 - RNA, 19 nt, Human
aagcagaagugggaaugag

SEQ ID NO: 1116660 - RNA, 21 nt, Human
aagcagaagugggaaugagga

SEQ ID NO: 1116661 - RNA, 18 nt, Human
aagcagcaaaucaagucc

SEQ ID NO: 1116662 - RNA, 25 nt, Human
aaggagacgcaguucauuacaaaau

SEQ ID NO: 1116663 - RNA, 20 nt, Human
acaguugccaggccugaggc

SEQ ID NO: 1116664 - RNA, 18 nt, Human
agacaagaacaagagucc

SEQ ID NO: 1116665 - RNA, 23 nt, Human
agacagaugcucucucaacucuu

SEQ ID NO: 1116666 - RNA, 20 nt, Human
agaguccacauaagggagau

SEQ ID NO: 1116667 - RNA, 25 nt, Human
agcaagacaugucuucacuggucca

SEQ ID NO: 1116668 - RNA, 20 nt, Human
agcagaagugggaaugagag

SEQ ID NO: 1116669 - RNA, 22 nt, Human
agcagaagugggaaugagaggg

SEQ ID NO: 1116670 - RNA, 18 nt, Human
agcaggugugaaggucag

SEQ ID NO: 1116671 - RNA, 21 nt, Human
agccccuguauucaccggccu

SEQ ID NO: 1116672 - RNA, 20 nt, Human
aguucccagcacaaaggucc

SEQ ID NO: 1116673 - RNA, 20 nt, Human
augguccccuccaccuuccc

SEQ ID NO: 1116674 - RNA, 21 nt, Human
auuugucucugcugugggugu

SEQ ID NO: 1116675 - RNA, 23 nt, Human
caagaacaagaguccacauaagg

SEQ ID NO: 1116676 - RNA, 18 nt, Human
caagggcuguacaugugu

SEQ ID NO: 1116677 - RNA, 19 nt, Human
cacacugcucccaucaccu

SEQ ID NO: 1116678 - RNA, 21 nt, Human
caccggccucucccugagucc

SEQ ID NO: 1116679 - RNA, 18 nt, Human
cagaugugcagcaaacag

SEQ ID NO: 1116680 - RNA, 20 nt, Human
caugcaguacugcccucagg

SEQ ID NO: 1116681 - RNA, 26 nt, Human
ccagauaccaggcuggacacugcacc

SEQ ID NO: 1116682 - RNA, 25 nt, Human
ccaugcacacugcucccaucaccuc

SEQ ID NO: 1116683 - RNA, 18 nt, Human
ccaugcaguacugcccuc

SEQ ID NO: 1116684 - RNA, 20 nt, Human
cccaccccacucucagggga

SEQ ID NO: 1116685 - RNA, 24 nt, Human
cccaccccacucucaggggaucgc

SEQ ID NO: 1116686 - RNA, 19 nt, Human
cccaugcacacugcuccca

SEQ ID NO: 1116687 - RNA, 22 nt, Human
ccccccuaaaguccugaucgcu

SEQ ID NO: 1116688 - RNA, 29 nt, Human
ccccuaaaguccugaucgcuaaggcaggg

SEQ ID NO: 1116689 - RNA, 19 nt, Human
ccccucuacucaccucugc

SEQ ID NO: 1116690 - RNA, 24 nt, Human
cccuaaaguccugaucgcuaaggc

SEQ ID NO: 1116691 - RNA, 23 nt, Human
cccucaggugcccauggggccag

SEQ ID NO: 1116692 - RNA, 20 nt, Human
cccugggacuucugugugca

SEQ ID NO: 1116693 - RNA, 23 nt, Human
ccggccucucccugagucccucc

SEQ ID NO: 1116694 - RNA, 20 nt, Human
ccuauggagacgaaggcagg

SEQ ID NO: 1116695 - RNA, 20 nt, Human
ccucacacuacagaggugag

SEQ ID NO: 1116696 - RNA, 20 nt, Human
ccuccuccaucaccacccac

SEQ ID NO: 1116697 - RNA, 23 nt, Human
ccuccuccaucaccacccacaga

SEQ ID NO: 1116698 - RNA, 24 nt, Human
ccucgaaugcgcccugccugauuc

SEQ ID NO: 1116699 - RNA, 24 nt, Human
ccugagucccuccuccaucaccac

SEQ ID NO: 1116700 - RNA, 21 nt, Human
ccuuggaagcccccaggcccc

SEQ ID NO: 1116701 - RNA, 23 nt, Human
cgaagcuaggcucugccaggccc

SEQ ID NO: 1116702 - RNA, 22 nt, Human
cggccucucccugagucccucc

SEQ ID NO: 1116703 - RNA, 21 nt, Human
cgggggcaagggcuguacaug

SEQ ID NO: 1116704 - RNA, 21 nt, Human
cuaaaguccugaucgcuaagg

SEQ ID NO: 1116705 - RNA, 25 nt, Human
cuccuccaucaccacccacagaccc

SEQ ID NO: 1116706 - RNA, 23 nt, Human
cucugaaaugguccccuccaccu

SEQ ID NO: 1116707 - RNA, 19 nt, Human
cugcccaccccacucucag

SEQ ID NO: 1116708 - RNA, 21 nt, Human
cuucccguucucucuccuucc

SEQ ID NO: 1116709 - RNA, 24 nt, Human
cuucuguugugguuugugcagggc

SEQ ID NO: 1116710 - RNA, 19 nt, Human
cuuucaguucccagcacaa

SEQ ID NO: 1116711 - RNA, 19 nt, Human
gaaccugcccaccccacuc

SEQ ID NO: 1116712 - RNA, 23 nt, Human
gaagcccccaggccccucuacuc

SEQ ID NO: 1116713 - RNA, 19 nt, Human
gaccuggggccuuggaagc

SEQ ID NO: 1116714 - RNA, 20 nt, Human
gcagcaaacaggccuucagg

SEQ ID NO: 1116715 - RNA, 24 nt, Human
gcauugccaagcagaagugggaau

SEQ ID NO: 1116716 - RNA, 23 nt, Human
gccaggggccgcaggcagggggg

SEQ ID NO: 1116717 - RNA, 22 nt, Human
gccugccucgccaccucuggcc

SEQ ID NO: 1116718 - RNA, 19 nt, Human
gcuuucugucagacugcag

SEQ ID NO: 1116719 - RNA, 21 nt, Human
ggccccagagagagcuggagg

SEQ ID NO: 1116720 - RNA, 21 nt, Human
ggccugaggcauccugggcuc

SEQ ID NO: 1116721 - RNA, 21 nt, Human
gggagcaggugugaaggucag

SEQ ID NO: 1116722 - RNA, 19 nt, Human
gggcaggagucagggcaga

SEQ ID NO: 1116723 - RNA, 19 nt, Human
gggccgggggcaagggcug

SEQ ID NO: 1116724 - RNA, 19 nt, Human
ggugcaacuggcuggggcu

SEQ ID NO: 1116725 - RNA, 22 nt, Human
guacugcccucaggugcccaug

SEQ ID NO: 1116726 - RNA, 24 nt, Human
gugggauggaggaacuccuggugc

SEQ ID NO: 1116727 - RNA, 24 nt, Human
uaaggagacgcaguucauuacaaa

SEQ ID NO: 1116728 - RNA, 25 nt, Human
uaagggagauggagagcauugccaa

SEQ ID NO: 1116729 - RNA, 24 nt, Human
ucaacucuugccucaauuugucuc

SEQ ID NO: 1116730 - RNA, 23 nt, Human
ucaccagacagaugcucucucaa

SEQ ID NO: 1116731 - RNA, 26 nt, Human
ucaccggccucucccugagucccucc

SEQ ID NO: 1116732 - RNA, 22 nt, Human
ucaccucaccagacagaugcuc

SEQ ID NO: 1116733 - RNA, 20 nt, Human
ucagggcgacaggguccucc

SEQ ID NO: 1116734 - RNA, 25 nt, Human
uccaucaccacccacagacccucac

SEQ ID NO: 1116735 - RNA, 23 nt, Human
uccccacucuuucaguucccagc

SEQ ID NO: 1116736 - RNA, 22 nt, Human
ucccguucucucuccuuccuca

SEQ ID NO: 1116737 - RNA, 19 nt, Human
ucccugggacuucugugug

SEQ ID NO: 1116738 - RNA, 18 nt, Human
uccuauggagacgaaggc

SEQ ID NO: 1116739 - RNA, 19 nt, Human
uccucauacuugucacagu

SEQ ID NO: 1116740 - RNA, 19 nt, Human
uccuccaucaccacccaca

SEQ ID NO: 1116741 - RNA, 23 nt, Human
uccuccaucaccacccacagacc

SEQ ID NO: 1116742 - RNA, 19 nt, Human
uccugaucgcuaaggcagg

SEQ ID NO: 1116743 - RNA, 18 nt, Human
ucucuggggagcaggugu

SEQ ID NO: 1116744 - RNA, 28 nt, Human
ucucuggggagcaggugugacguaaacg

SEQ ID NO: 1116745 - RNA, 25 nt, Human
ucugcuguggguguggagaguggga

SEQ ID NO: 1116746 - RNA, 20 nt, Human
ucuucacugguccaagcacc

SEQ ID NO: 1116747 - RNA, 22 nt, Human
ucuuugaagaggccccccuaaa

SEQ ID NO: 1116748 - RNA, 23 nt, Human
ugaaggucaggggacuuagucca

SEQ ID NO: 1116749 - RNA, 21 nt, Human
ugaaguuuucagccccagggu

SEQ ID NO: 1116750 - RNA, 22 nt, Human
ugaggcauccugggcucuuccc

SEQ ID NO: 1116751 - RNA, 20 nt, Human
ugaguaagcagggaugguuc

SEQ ID NO: 1116752 - RNA, 19 nt, Human
ugauucccuucccguucuc

SEQ ID NO: 1116753 - RNA, 20 nt, Human
ugccaggccugaggcauccu

SEQ ID NO: 1116754 - RNA, 21 nt, Human
ugccaggccugaggcauccug

SEQ ID NO: 1116755 - RNA, 24 nt, Human
ugccugagccucucucacagcuga

SEQ ID NO: 1116756 - RNA, 22 nt, Human
ugcucugccugagccucucuca

SEQ ID NO: 1116757 - RNA, 24 nt, Human
ugcucugccugagccucucucaca

SEQ ID NO: 1116758 - RNA, 21 nt, Human
ugggauggaggaacuccuggu

SEQ ID NO: 1116759 - RNA, 24 nt, Human
uggggccaggggccgcaggcaggg

SEQ ID NO: 1116760 - RNA, 19 nt, Human
ugguagcccugagguugcc

SEQ ID NO: 1116761 - RNA, 25 nt, Human
ugugugcaacuucuguugugguuug

SEQ ID NO: 1116762 - RNA, 21 nt, Human
uucccguucucucuccuuccu

SEQ ID NO: 1116763 - RNA, 23 nt, Human
uugucacaguugccaggccugag

SEQ ID NO: 1116764 - RNA, 23 nt, Human
agacaagcacaugagccccgugc

SEQ ID NO: 1116765 - RNA, 19 nt, Human
cagcacagggcccagugga

SEQ ID NO: 1116766 - RNA, 26 nt, Human
cagcacagggcccaguggaggccgcc

SEQ ID NO: 1116767 - RNA, 24 nt, Human
ccacaggucuuuauuccaagaccc

SEQ ID NO: 1116768 - RNA, 20 nt, Human
ccaguggaggccgcccuucu

SEQ ID NO: 1116769 - RNA, 24 nt, Human
guggaggccgcccuucuggggagc

SEQ ID NO: 1116770 - RNA, 23 nt, Human
aaaagcugaaaauuccaaaaacc

SEQ ID NO: 1116771 - RNA, 24 nt, Human
aaaccagagcacaaaagcugaaaa

SEQ ID NO: 1116772 - RNA, 24 nt, Human
aaagugcugggauuacaggcguga

SEQ ID NO: 1116773 - RNA, 18 nt, Human
aaccacaaagguggggag

SEQ ID NO: 1116774 - RNA, 19 nt, Human
aagugcugggauuacaggc

SEQ ID NO: 1116775 - RNA, 19 nt, Human
aagugcugggauuacaggc

SEQ ID NO: 1116776 - RNA, 26 nt, Human
aagugcugggauuacaggcgugagcc

SEQ ID NO: 1116777 - RNA, 26 nt, Human
acaaagguggggagaaaccagagcac

SEQ ID NO: 1116778 - RNA, 19 nt, Human
acaggcaccugccaccacg

SEQ ID NO: 1116779 - RNA, 18 nt, Human
accacaaagguggggaga

SEQ ID NO: 1116780 - RNA, 24 nt, Human
accuugugauccgcccaccucggc

SEQ ID NO: 1116781 - RNA, 19 nt, Human
acucuguuagccaggaugg

SEQ ID NO: 1116782 - RNA, 18 nt, Human
acugcaagcuccgccucc

SEQ ID NO: 1116783 - RNA, 18 nt, Human
agagcacaaaagcugaaa

SEQ ID NO: 1116784 - RNA, 20 nt, Human
agcaauggaacaaagcagga

SEQ ID NO: 1116785 - RNA, 19 nt, Human
aguagagaugggguuucac

SEQ ID NO: 1116786 - RNA, 18 nt, Human
aguagcugggauuacagg

SEQ ID NO: 1116787 - RNA, 20 nt, Human
augggguuucacucuguuag

SEQ ID NO: 1116788 - RNA, 21 nt, Human
auucuccugccucagccuccc

SEQ ID NO: 1116789 - RNA, 19 nt, Human
caaagaccaaggguagaua

SEQ ID NO: 1116790 - RNA, 25 nt, Human
caaagaccaaggguagauaaaacca

SEQ ID NO: 1116791 - RNA, 24 nt, Human
caaagugcugggauuacaggcgug

SEQ ID NO: 1116792 - RNA, 25 nt, Human
caccacguccggcuaauuuuuugua

SEQ ID NO: 1116793 - RNA, 24 nt, Human
caccucggccucccaaagugcugg

SEQ ID NO: 1116794 - RNA, 22 nt, Human
cacgccauucuccugccucagc

SEQ ID NO: 1116795 - RNA, 24 nt, Human
cacucuguuagccaggauggucuc

SEQ ID NO: 1116796 - RNA, 22 nt, Human
cagcuccucgccagcaauggaa

SEQ ID NO: 1116797 - RNA, 21 nt, Human
caggcaccugccaccacgucc

SEQ ID NO: 1116798 - RNA, 25 nt, Human
caguagcugggauuacaggcaccug

SEQ ID NO: 1116799 - RNA, 22 nt, Human
ccaaagugcugggauuacaggc

SEQ ID NO: 1116800 - RNA, 22 nt, Human
ccaaagugcugggauuacaggc

SEQ ID NO: 1116801 - RNA, 24 nt, Human
ccaaagugcugggauuacaggcgu

SEQ ID NO: 1116802 - RNA, 20 nt, Human
ccaccacguccggcuaauuu

SEQ ID NO: 1116803 - RNA, 22 nt, Human
ccaguagcugggauuacaggca

SEQ ID NO: 1116804 - RNA, 23 nt, Human
cccaguagcugggauuacaggca

SEQ ID NO: 1116805 - RNA, 23 nt, Human
ccccaguagcugggauuacaggc

SEQ ID NO: 1116806 - RNA, 24 nt, Human
ccucccggguucacgccauucucc

SEQ ID NO: 1116807 - RNA, 19 nt, Human
cgccucccggguucacgcc

SEQ ID NO: 1116808 - RNA, 24 nt, Human
cucagccuccccaguagcugggau

SEQ ID NO: 1116809 - RNA, 21 nt, Human
cucccggguucacgccauucu

SEQ ID NO: 1116810 - RNA, 24 nt, Human
cuccuccaaaggaucgcagcuccc

SEQ ID NO: 1116811 - RNA, 22 nt, Human
cuccugaccuugugauccgccc

SEQ ID NO: 1116812 - RNA, 19 nt, Human
cugacaucccuucuccucc

SEQ ID NO: 1116813 - RNA, 22 nt, Human
cugccucagccuccccaguagc

SEQ ID NO: 1116814 - RNA, 23 nt, Human
cugccucagccuccccaguagcu

SEQ ID NO: 1116815 - RNA, 18 nt, Human
gaaaauuccaaaaaccug

SEQ ID NO: 1116816 - RNA, 22 nt, Human
gaccuugugauccgcccaccuc

SEQ ID NO: 1116817 - RNA, 22 nt, Human
gaccuugugauccgcccaccuc

SEQ ID NO: 1116818 - RNA, 24 nt, Human
gaccuugugauccgcccaccucgg

SEQ ID NO: 1116819 - RNA, 18 nt, Human
gauuacaggcgugagcca

SEQ ID NO: 1116820 - RNA, 22 nt, Human
gauuacaggcgugagccaccgc

SEQ ID NO: 1116821 - RNA, 22 nt, Human
gauuacaggcgugagccaccgc

SEQ ID NO: 1116822 - RNA, 24 nt, Human
ggauggucucgaucuccugaccuu

SEQ ID NO: 1116823 - RNA, 18 nt, Human
gggguuucacucuguuag

SEQ ID NO: 1116824 - RNA, 20 nt, Human
ggucucgaucuccugaccuu

SEQ ID NO: 1116825 - RNA, 18 nt, Human
guagcugggauuacaggc

SEQ ID NO: 1116826 - RNA, 24 nt, Human
gugauccgcccaccucggccuccc

SEQ ID NO: 1116827 - RNA, 24 nt, Human
uaauuuuuuguauuuuuaguagag

SEQ ID NO: 1116828 - RNA, 25 nt, Human
uaauuuuuuguauuuuuaguagaga

SEQ ID NO: 1116829 - RNA, 23 nt, Human
uacaggcaccugccaccacgucc

SEQ ID NO: 1116830 - RNA, 23 nt, Human
uacaggcgugagccaccgcgccc

SEQ ID NO: 1116831 - RNA, 19 nt, Human
uaguagagaugggguuuca

SEQ ID NO: 1116832 - RNA, 24 nt, Human
uaguagagaugggguuucacucug

SEQ ID NO: 1116833 - RNA, 24 nt, Human
ucacucuguuagccaggauggucu

SEQ ID NO: 1116834 - RNA, 18 nt, Human
ucacugcaagcuccgccu

SEQ ID NO: 1116835 - RNA, 19 nt, Human
ucacugcaagcuccgccuc

SEQ ID NO: 1116836 - RNA, 24 nt, Human
ucacugcaagcuccgccucccggg

SEQ ID NO: 1116837 - RNA, 20 nt, Human
ucagccuccccaguagcugg

SEQ ID NO: 1116838 - RNA, 19 nt, Human
uccaaaaaccugacauccc

SEQ ID NO: 1116839 - RNA, 24 nt, Human
ucccaaagugcugggauuacaggc

SEQ ID NO: 1116840 - RNA, 24 nt, Human
uccccaguagcugggauuacaggc

SEQ ID NO: 1116841 - RNA, 21 nt, Human
ucccggguucacgccauucuc

SEQ ID NO: 1116842 - RNA, 24 nt, Human
ucccggguucacgccauucuccug

SEQ ID NO: 1116843 - RNA, 20 nt, Human
ucccuucuccuccaaaggau

SEQ ID NO: 1116844 - RNA, 18 nt, Human
ucggccucccaaagugcu

SEQ ID NO: 1116845 - RNA, 25 nt, Human
ucuccugccucagccuccccaguag

SEQ ID NO: 1116846 - RNA, 22 nt, Human
ugaaaauuccaaaaaccugaca

SEQ ID NO: 1116847 - RNA, 22 nt, Human
ugacgcagugcagacacagauc

SEQ ID NO: 1116848 - RNA, 24 nt, Human
ugauccgcccaccucggccuccca

SEQ ID NO: 1116849 - RNA, 21 nt, Human
ugcagacacagaucuugugua

SEQ ID NO: 1116850 - RNA, 24 nt, Human
ugccucagccuccccaguagcugg

SEQ ID NO: 1116851 - RNA, 24 nt, Human
ugcugggauuacaggcgugagcca

SEQ ID NO: 1116852 - RNA, 21 nt, Human
ugggauuacaggcaccugcca

SEQ ID NO: 1116853 - RNA, 22 nt, Human
ugggauuacaggcaccugccac

SEQ ID NO: 1116854 - RNA, 24 nt, Human
ugggauuacaggcaccugccacca

SEQ ID NO: 1116855 - RNA, 18 nt, Human
ugggauuacaggcgugag

SEQ ID NO: 1116856 - RNA, 19 nt, Human
ugggauuacaggcgugagc

SEQ ID NO: 1116857 - RNA, 21 nt, Human
ugggauuacaggcgugagcca

SEQ ID NO: 1116858 - RNA, 22 nt, Human
ugggauuacaggcgugagccac

SEQ ID NO: 1116859 - RNA, 23 nt, Human
ugggauuacaggcgugagccacc

SEQ ID NO: 1116860 - RNA, 24 nt, Human
ugggauuacaggcgugagccaccg

SEQ ID NO: 1116861 - RNA, 22 nt, Human
uggggagaaaccagagcacaaa

SEQ ID NO: 1116862 - RNA, 24 nt, Human
ugggguuucacucuguuagccagg

SEQ ID NO: 1116863 - RNA, 18 nt, Human
uuaguagagaugggguuu

SEQ ID NO: 1116864 - RNA, 21 nt, Human
uuaguagagaugggguuucac

SEQ ID NO: 1116865 - RNA, 25 nt, Human
uuaguagagaugggguuucacucug

SEQ ID NO: 1116866 - RNA, 25 nt, Human
uuccaaaaaccugacaucccuucuc

SEQ ID NO: 1116867 - RNA, 23 nt, Human
uuguauuuuuaguagagaugggg

SEQ ID NO: 1116868 - RNA, 24 nt, Human
uuuuuaguagagaugggguuucac

SEQ ID NO: 1116869 - RNA, 21 nt, Human
uuuuuguauuuuuaguagaga

SEQ ID NO: 1116870 - RNA, 24 nt, Human
uuuuuuguauuuuuaguagagaug

SEQ ID NO: 1116871 - RNA, 20 nt, Human
aaaaaucucaacccuuaaau

SEQ ID NO: 1116872 - RNA, 24 nt, Human
aaacauuacucugcuauccaauuc

SEQ ID NO: 1116873 - RNA, 18 nt, Human
aaaucauuuccaaacuag

SEQ ID NO: 1116874 - RNA, 18 nt, Human
aaaugaggcuggaaaaau

SEQ ID NO: 1116875 - RNA, 21 nt, Human
aaauuggugaagagccccaca

SEQ ID NO: 1116876 - RNA, 21 nt, Human
aauagacuucuuucccuaauu

SEQ ID NO: 1116877 - RNA, 19 nt, Human
acucugcuauccaauucuc

SEQ ID NO: 1116878 - RNA, 20 nt, Human
agacucccuucaccuaagag

SEQ ID NO: 1116879 - RNA, 21 nt, Human
augauacuucuguccuaccug

SEQ ID NO: 1116880 - RNA, 18 nt, Human
augucuucugcuuucagc

SEQ ID NO: 1116881 - RNA, 22 nt, Human
auuaguuaggggguagggauga

SEQ ID NO: 1116882 - RNA, 20 nt, Human
caaaagcagagacucccuuc

SEQ ID NO: 1116883 - RNA, 22 nt, Human
cacagagauccggaaugcagua

SEQ ID NO: 1116884 - RNA, 24 nt, Human
cagccucaucugacucuggauaau

SEQ ID NO: 1116885 - RNA, 18 nt, Human
caggggguccuccguguc

SEQ ID NO: 1116886 - RNA, 21 nt, Human
ccacagagauccggaaugcag

SEQ ID NO: 1116887 - RNA, 18 nt, Human
ccaggccggcugcugucu

SEQ ID NO: 1116888 - RNA, 21 nt, Human
cccccagguccccaggccggc

SEQ ID NO: 1116889 - RNA, 24 nt, Human
cccccagguccccaggccggcugc

SEQ ID NO: 1116890 - RNA, 22 nt, Human
ccucuaaacuuauaagggugaa

SEQ ID NO: 1116891 - RNA, 21 nt, Human
ccuuauucugugauaauuuca

SEQ ID NO: 1116892 - RNA, 24 nt, Human
cuaaugaucaugucuucugcuuug

SEQ ID NO: 1116893 - RNA, 22 nt, Human
cuacucugugggucagcuccag

SEQ ID NO: 1116894 - RNA, 19 nt, Human
cucugcuauccaauucucc

SEQ ID NO: 1116895 - RNA, 21 nt, Human
cuucaaaagcagagacucccu

SEQ ID NO: 1116896 - RNA, 21 nt, Human
gcagagacucccuucaccuaa

SEQ ID NO: 1116897 - RNA, 22 nt, Human
gcagagacucccuucaccuaag

SEQ ID NO: 1116898 - RNA, 18 nt, Human
gcugcugucucacugagg

SEQ ID NO: 1116899 - RNA, 23 nt, Human
ggaaaaauuggugaagagcccca

SEQ ID NO: 1116900 - RNA, 23 nt, Human
ggucagcuccagccagggggucc

SEQ ID NO: 1116901 - RNA, 20 nt, Human
gugauaauuucaacccugga

SEQ ID NO: 1116902 - RNA, 23 nt, Human
uaccugugccauucuucaaaagc

SEQ ID NO: 1116903 - RNA, 20 nt, Human
uaguuaggggguagggauga

SEQ ID NO: 1116904 - RNA, 21 nt, Human
ucacugaggucagggaaccag

SEQ ID NO: 1116905 - RNA, 20 nt, Human
ucauuguuucacgugucucc

SEQ ID NO: 1116906 - RNA, 19 nt, Human
uccaaacuaguaaugggac

SEQ ID NO: 1116907 - RNA, 22 nt, Human
ucugcaguaaauggauuagaac

SEQ ID NO: 1116908 - RNA, 19 nt, Human
ugaaucaagaaagcagaac

SEQ ID NO: 1116909 - RNA, 20 nt, Human
uggcuaaugaucaugucuuc

SEQ ID NO: 1116910 - RNA, 20 nt, Human
ugggucagcuccagccaggg

SEQ ID NO: 1116911 - RNA, 22 nt, Human
ugucuccuaggcccugcuuccu

SEQ ID NO: 1116912 - RNA, 22 nt, Human
ugucuuccuccuuugaguuucu

SEQ ID NO: 1116913 - RNA, 21 nt, Human
ugucuucugcuuucagcucuu

SEQ ID NO: 1116914 - RNA, 19 nt, Human
ugugccauucuucaaaagc

SEQ ID NO: 1116915 - RNA, 23 nt, Human
uuaaugauucuuuacauucuucu

SEQ ID NO: 1116916 - RNA, 21 nt, Human
uuccagaggucaaacauuacu

SEQ ID NO: 1116917 - RNA, 18 nt, Human
uuuuuuuuuuuuuuuuug

SEQ ID NO: 1116918 - RNA, 23 nt, Human
uuuuuuuuuuuuuuuuugaugug

SEQ ID NO: 1116919 - RNA, 24 nt, Human
aaagugcugggauuacaggcguga

SEQ ID NO: 1116920 - RNA, 19 nt, Human
aagugcugggauuacaggc

SEQ ID NO: 1116921 - RNA, 19 nt, Human
aagugcugggauuacaggc

SEQ ID NO: 1116922 - RNA, 26 nt, Human
aagugcugggauuacaggcgugagcc

SEQ ID NO: 1116923 - RNA, 24 nt, Human
acgccuccaccucccaaagugcug

SEQ ID NO: 1116924 - RNA, 18 nt, Human
agugcugggauuacaggc

SEQ ID NO: 1116925 - RNA, 18 nt, Human
augggguuucaccauguu

SEQ ID NO: 1116926 - RNA, 19 nt, Human
augggguuucaccauguua

SEQ ID NO: 1116927 - RNA, 24 nt, Human
augggguuucaccauguuacucag

SEQ ID NO: 1116928 - RNA, 24 nt, Human
caaagugcugggauuacaggcgug

SEQ ID NO: 1116929 - RNA, 18 nt, Human
caccaugccuggccuagg

SEQ ID NO: 1116930 - RNA, 18 nt, Human
caccauguuacucaggau

SEQ ID NO: 1116931 - RNA, 22 nt, Human
caccauguuacucaggaugguc

SEQ ID NO: 1116932 - RNA, 24 nt, Human
caccauguuacucaggauggucuc

SEQ ID NO: 1116933 - RNA, 23 nt, Human
cagaugauccgcacgccuccacc

SEQ ID NO: 1116934 - RNA, 22 nt, Human
ccaaagugcugggauuacaggc

SEQ ID NO: 1116935 - RNA, 22 nt, Human
ccaaagugcugggauuacaggc

SEQ ID NO: 1116936 - RNA, 24 nt, Human
ccaaagugcugggauuacaggcgu

SEQ ID NO: 1116937 - RNA, 23 nt, Human
ccaccaugccuggccuaggugac

SEQ ID NO: 1116938 - RNA, 21 nt, Human
ccgcacgccuccaccucccaa

SEQ ID NO: 1116939 - RNA, 21 nt, Human
cucagaugauccgcacgccuc

SEQ ID NO: 1116940 - RNA, 18 nt, Human
gagaugggguuucaccau

SEQ ID NO: 1116941 - RNA, 20 nt, Human
gagaugggguuucaccaugu

SEQ ID NO: 1116942 - RNA, 18 nt, Human
gauuacaggcgugagcca

SEQ ID NO: 1116943 - RNA, 21 nt, Human
gauuacaggcgugagccacca

SEQ ID NO: 1116944 - RNA, 24 nt, Human
gauuacaggcgugagccaccaugc

SEQ ID NO: 1116945 - RNA, 23 nt, Human
gccuccaccucccaaagugcugg

SEQ ID NO: 1116946 - RNA, 24 nt, Human
ggauggucucaaacuccugaucuc

SEQ ID NO: 1116947 - RNA, 24 nt, Human
ggauuacaggcgugagccaccaug

SEQ ID NO: 1116948 - RNA, 22 nt, Human
gggguuucaccauguuacucag

SEQ ID NO: 1116949 - RNA, 24 nt, Human
gguuucaccauguuacucaggaug

SEQ ID NO: 1116950 - RNA, 19 nt, Human
guagagaugggguuucacc

SEQ ID NO: 1116951 - RNA, 21 nt, Human
guagagaugggguuucaccau

SEQ ID NO: 1116952 - RNA, 22 nt, Human
guagagaugggguuucaccaug

SEQ ID NO: 1116953 - RNA, 23 nt, Human
guagagaugggguuucaccaugu

SEQ ID NO: 1116954 - RNA, 24 nt, Human
uaauuuuuguauuuuucguagaga

SEQ ID NO: 1116955 - RNA, 22 nt, Human
uacaggcgugagccaccaugcc

SEQ ID NO: 1116956 - RNA, 22 nt, Human
uacaggcgugagccaccaugcc

SEQ ID NO: 1116957 - RNA, 23 nt, Human
uacaggcgugagccaccaugccu

SEQ ID NO: 1116958 - RNA, 22 nt, Human
uagagaugggguuucaccaugu

SEQ ID NO: 1116959 - RNA, 24 nt, Human
ucccaaagugcugggauuacaggc

SEQ ID NO: 1116960 - RNA, 23 nt, Human
uccgcacgccuccaccucccaaa

SEQ ID NO: 1116961 - RNA, 21 nt, Human
ucguagagaugggguuucacc

SEQ ID NO: 1116962 - RNA, 24 nt, Human
ucguagagaugggguuucaccaug

SEQ ID NO: 1116963 - RNA, 26 nt, Human
ugauccgcacgccuccaccucccaaa

SEQ ID NO: 1116964 - RNA, 24 nt, Human
ugaucucagaugauccgcacgccu

SEQ ID NO: 1116965 - RNA, 25 nt, Human
ugaucucagaugauccgcacgccuc

SEQ ID NO: 1116966 - RNA, 24 nt, Human
ugcugggauuacaggcgugagcca

SEQ ID NO: 1116967 - RNA, 18 nt, Human
ugggauuacaggcgugag

SEQ ID NO: 1116968 - RNA, 22 nt, Human
ugggauuacaggcgugagccac

SEQ ID NO: 1116969 - RNA, 23 nt, Human
ugggauuacaggcgugagccacc

SEQ ID NO: 1116970 - RNA, 24 nt, Human
ugggauuacaggcgugagccacca

SEQ ID NO: 1116971 - RNA, 25 nt, Human
ugggauuacaggcgugagccaccau

SEQ ID NO: 1116972 - RNA, 24 nt, Human
ugggguuucaccauguuacucagg

SEQ ID NO: 1116973 - RNA, 24 nt, Human
uucguagagaugggguuucaccau

SEQ ID NO: 1116974 - RNA, 20 nt, Human
uuucaccauguuacucagga

SEQ ID NO: 1116975 - RNA, 24 nt, Human
uuuuucguagagaugggguuucac

SEQ ID NO: 1116976 - RNA, 20 nt, Human
uuuuuguauuuuucguagag

SEQ ID NO: 1116977 - RNA, 23 nt, Human
uuuuuguauuuuucguagagaug

SEQ ID NO: 1116978 - RNA, 23 nt, Human
aaaagccaaagaaacagaaacaa

SEQ ID NO: 1116979 - RNA, 20 nt, Human
aaagaaacagaaacaacccc

SEQ ID NO: 1116980 - RNA, 26 nt, Human
aaagaugugcauuccccucuuccucc

SEQ ID NO: 1116981 - RNA, 24 nt, Human
aagcuaccagaagucggcuaacaa

SEQ ID NO: 1116982 - RNA, 24 nt, Human
aaggauuucggggaacacaagguu

SEQ ID NO: 1116983 - RNA, 19 nt, Human
acaacccauguggggcugu

SEQ ID NO: 1116984 - RNA, 23 nt, Human
acacaagguuagacacuuucugg

SEQ ID NO: 1116985 - RNA, 19 nt, Human
acacaauaaauggcucauc

SEQ ID NO: 1116986 - RNA, 20 nt, Human
acucggcguggugggcuggg

SEQ ID NO: 1116987 - RNA, 21 nt, Human
acugggcuguugcucugguga

SEQ ID NO: 1116988 - RNA, 22 nt, Human
agaaaagccaaagaaacagaaa

SEQ ID NO: 1116989 - RNA, 20 nt, Human
agaaacagaaacaacccaug

SEQ ID NO: 1116990 - RNA, 20 nt, Human
agagggagugcucugggccg

SEQ ID NO: 1116991 - RNA, 18 nt, Human
agcgagaaaagccaaaga

SEQ ID NO: 1116992 - RNA, 21 nt, Human
aggggacuggggcacacugca

SEQ ID NO: 1116993 - RNA, 19 nt, Human
agguggccagggcuggggg

SEQ ID NO: 1116994 - RNA, 24 nt, Human
aguccccacaagccaccuuaggcu

SEQ ID NO: 1116995 - RNA, 23 nt, Human
auccaggggacuggggcacacug

SEQ ID NO: 1116996 - RNA, 21 nt, Human
caaagugugaccagagcccag

SEQ ID NO: 1116997 - RNA, 24 nt, Human
caaccaagaaacuggcgaagcugc

SEQ ID NO: 1116998 - RNA, 22 nt, Human
cacacaagcuacucggcguggu

SEQ ID NO: 1116999 - RNA, 25 nt, Human
cacccuccucgaauucagugacuca

SEQ ID NO: 1117000 - RNA, 20 nt, Human
caccucuggcccacagaguu

SEQ ID NO: 1117001 - RNA, 24 nt, Human
caccuuaggcuuuaaagucaacuu

SEQ ID NO: 1117002 - RNA, 21 nt, Human
caccuuucguucaagcuguuu

SEQ ID NO: 1117003 - RNA, 21 nt, Human
cagagcccaggucugcuucuc

SEQ ID NO: 1117004 - RNA, 22 nt, Human
cagcaguugggggugcgucugg

SEQ ID NO: 1117005 - RNA, 20 nt, Human
cagcggcacccugaccuucc

SEQ ID NO: 1117006 - RNA, 23 nt, Human
cagcggcacccugaccuuccuca

SEQ ID NO: 1117007 - RNA, 25 nt, Human
cagcuccugaauguacaaagccccu

SEQ ID NO: 1117008 - RNA, 19 nt, Human
caggucugcuucucaaccc

SEQ ID NO: 1117009 - RNA, 21 nt, Human
caucacccccauggcccccgc

SEQ ID NO: 1117010 - RNA, 21 nt, Human
caucagcaagcaucccugcac

SEQ ID NO: 1117011 - RNA, 26 nt, Human
caucgccaggaaacuggggaguaggg

SEQ ID NO: 1117012 - RNA, 18 nt, Human
cauggcccccgccagggc

SEQ ID NO: 1117013 - RNA, 18 nt, Human
cauucaucacccccaugg

SEQ ID NO: 1117014 - RNA, 21 nt, Human
ccaaagugugaccagagccca

SEQ ID NO: 1117015 - RNA, 20 nt, Human
ccagaggagugucccaacca

SEQ ID NO: 1117016 - RNA, 19 nt, Human
cccacaagccaccuuaggc

SEQ ID NO: 1117017 - RNA, 19 nt, Human
cccacagaguuggagccag

SEQ ID NO: 1117018 - RNA, 19 nt, Human
cccacccuccucgaauuca

SEQ ID NO: 1117019 - RNA, 19 nt, Human
ccccauggcccccgccagg

SEQ ID NO: 1117020 - RNA, 18 nt, Human
ccccucuuccucccuccc

SEQ ID NO: 1117021 - RNA, 19 nt, Human
ccccucuuccucccucccc

SEQ ID NO: 1117022 - RNA, 25 nt, Human
ccccucuuccucccuccccgcuccc

SEQ ID NO: 1117023 - RNA, 19 nt, Human
ccccuggugccuacccgug

SEQ ID NO: 1117024 - RNA, 20 nt, Human
ccccuggugccuacccgugg

SEQ ID NO: 1117025 - RNA, 21 nt, Human
ccccuggugccuacccguggu

SEQ ID NO: 1117026 - RNA, 20 nt, Human
cccgcggcugagcagcuccg

SEQ ID NO: 1117027 - RNA, 20 nt, Human
cccgggaggccuccugagcc

SEQ ID NO: 1117028 - RNA, 18 nt, Human
cccucuguccccuuuucc

SEQ ID NO: 1117029 - RNA, 23 nt, Human
cccucuguccccuuuuccuaggc

SEQ ID NO: 1117030 - RNA, 18 nt, Human
ccucaucgccccuccagg

SEQ ID NO: 1117031 - RNA, 21 nt, Human
ccuccagguggccagggcugg

SEQ ID NO: 1117032 - RNA, 20 nt, Human
ccuccagguggccagggcuu

SEQ ID NO: 1117033 - RNA, 19 nt, Human
ccucccauccucaggacug

SEQ ID NO: 1117034 - RNA, 22 nt, Human
ccucccauccucaggacugggc

SEQ ID NO: 1117035 - RNA, 26 nt, Human
ccucucugcagcuccugaauguacaa

SEQ ID NO: 1117036 - RNA, 21 nt, Human
ccugcuccacggcgucacagg

SEQ ID NO: 1117037 - RNA, 18 nt, Human
ccugcuccgggcguggag

SEQ ID NO: 1117038 - RNA, 21 nt, Human
ccuggagaaaauggagucuca

SEQ ID NO: 1117039 - RNA, 19 nt, Human
ccuuugcugagcuuucccu

SEQ ID NO: 1117040 - RNA, 21 nt, Human
cgacucccgcguucggcuccc

SEQ ID NO: 1117041 - RNA, 24 nt, Human
cgagaaaagccaaagaaacagaaa

SEQ ID NO: 1117042 - RNA, 19 nt, Human
cgagcguggaaucccaagg

SEQ ID NO: 1117043 - RNA, 23 nt, Human
cgagcguggaaucccaaggcuaa

SEQ ID NO: 1117044 - RNA, 18 nt, Human
cgcggccuccccggcgcu

SEQ ID NO: 1117045 - RNA, 22 nt, Human
cguuucagcaagcgcguccuga

SEQ ID NO: 1117046 - RNA, 21 nt, Human
cuacaccugagcagacagcag

SEQ ID NO: 1117047 - RNA, 21 nt, Human
cuagcagucccccaccucugg

SEQ ID NO: 1117048 - RNA, 19 nt, Human
cucacaaagccacugccac

SEQ ID NO: 1117049 - RNA, 19 nt, Human
cucacaggacugcauccac

SEQ ID NO: 1117050 - RNA, 20 nt, Human
cuccccgcucccugcucccc

SEQ ID NO: 1117051 - RNA, 19 nt, Human
cucccuccccgcucccugc

SEQ ID NO: 1117052 - RNA, 21 nt, Human
cuccgaggacugcccugcucc

SEQ ID NO: 1117053 - RNA, 18 nt, Human
cugcccugcuccgggcgu

SEQ ID NO: 1117054 - RNA, 21 nt, Human
cuggccaagggcaucaguccc

SEQ ID NO: 1117055 - RNA, 21 nt, Human
gaaaagccaaagaaacagaaa

SEQ ID NO: 1117056 - RNA, 24 nt, Human
gaauucagugacucaggaguggga

SEQ ID NO: 1117057 - RNA, 21 nt, Human
gaccuagcagucccccaccuc

SEQ ID NO: 1117058 - RNA, 24 nt, Human
gcagcagugugggugugugugcgg

SEQ ID NO: 1117059 - RNA, 21 nt, Human
gcagugccguugacgccccgc

SEQ ID NO: 1117060 - RNA, 18 nt, Human
gcauuccccucuuccucc

SEQ ID NO: 1117061 - RNA, 18 nt, Human
gccaggauuagggcaaga

SEQ ID NO: 1117062 - RNA, 21 nt, Human
gcccggcgccccaucaaacua

SEQ ID NO: 1117063 - RNA, 19 nt, Human
gcggccuccccggcgcucc

SEQ ID NO: 1117064 - RNA, 22 nt, Human
ggauuucggggaacacaagguu

SEQ ID NO: 1117065 - RNA, 22 nt, Human
ggcagcgacucccgcguucggc

SEQ ID NO: 1117066 - RNA, 22 nt, Human
ggcguggugggcugggccgaga

SEQ ID NO: 1117067 - RNA, 19 nt, Human
ggcuacaccugagcagaca

SEQ ID NO: 1117068 - RNA, 20 nt, Human
gggcugggggcagguaccgc

SEQ ID NO: 1117069 - RNA, 26 nt, Human
ggggacuggggcacacugcaaggggu

SEQ ID NO: 1117070 - RNA, 22 nt, Human
gguugugguggugcuggggcug

SEQ ID NO: 1117071 - RNA, 22 nt, Human
gugcaguccccacaagccaccu

SEQ ID NO: 1117072 - RNA, 23 nt, Human
guggugcuggggcugccagagga

SEQ ID NO: 1117073 - RNA, 21 nt, Human
gugguggugcuggggcugcca

SEQ ID NO: 1117074 - RNA, 28 nt, Human
gugguuacugugugugugugugugugug

SEQ ID NO: 1117075 - RNA, 21 nt, Human
gugugugugugugugugugug

SEQ ID NO: 1117076 - RNA, 21 nt, Human
gugugugugugugugugugug

SEQ ID NO: 1117077 - RNA, 21 nt, Human
gugugugugugugugugugug

SEQ ID NO: 1117078 - RNA, 21 nt, Human
gugugugugugugugugugug

SEQ ID NO: 1117079 - RNA, 24 nt, Human
guuagucuaucugggcaagccucg

SEQ ID NO: 1117080 - RNA, 18 nt, Human
guuccuaagucagagaaa

SEQ ID NO: 1117081 - RNA, 21 nt, Human
uaacaaaaugaaaaaacuucu

SEQ ID NO: 1117082 - RNA, 20 nt, Human
uaaccaccuuucguucaagc

SEQ ID NO: 1117083 - RNA, 22 nt, Human
uaagcuaccagaagucggcuaa

SEQ ID NO: 1117084 - RNA, 22 nt, Human
uaccgcgcgaccugauuggcgc

SEQ ID NO: 1117085 - RNA, 24 nt, Human
uacucggcguggugggcugggccg

SEQ ID NO: 1117086 - RNA, 23 nt, Human
uaggcacggaugcuucaucuccc

SEQ ID NO: 1117087 - RNA, 23 nt, Human
ucacaggacugcauccacacaag

SEQ ID NO: 1117088 - RNA, 21 nt, Human
ucauccaucagcaagcauccc

SEQ ID NO: 1117089 - RNA, 26 nt, Human
uccaucagcaagcaucccugcacgca

SEQ ID NO: 1117090 - RNA, 27 nt, Human
uccaucagcaagcaucccugcacgcaa

SEQ ID NO: 1117091 - RNA, 21 nt, Human
ucccauccucaggacugggcu

SEQ ID NO: 1117092 - RNA, 23 nt, Human
uccccacaagccaccuuaggcuu

SEQ ID NO: 1117093 - RNA, 22 nt, Human
ucccccagcggcacccugaccu

SEQ ID NO: 1117094 - RNA, 20 nt, Human
ucccuggagaaaauggaguc

SEQ ID NO: 1117095 - RNA, 18 nt, Human
uccuaagucagagaaagg

SEQ ID NO: 1117096 - RNA, 23 nt, Human
uccuaagucagagaaaggauuuc

SEQ ID NO: 1117097 - RNA, 21 nt, Human
uccuagagcuaaugagugacc

SEQ ID NO: 1117098 - RNA, 19 nt, Human
uccugaauguacaaagccc

SEQ ID NO: 1117099 - RNA, 21 nt, Human
ucggaaauucucacuucuugg

SEQ ID NO: 1117100 - RNA, 22 nt, Human
ucggaguuggaaaugaggcugg

SEQ ID NO: 1117101 - RNA, 20 nt, Human
ucguuucagcaagcgcgucc

SEQ ID NO: 1117102 - RNA, 20 nt, Human
ucugcagcuccugaauguac

SEQ ID NO: 1117103 - RNA, 20 nt, Human
ugacagcaguagcuauggua

SEQ ID NO: 1117104 - RNA, 24 nt, Human
ugaccaaagugugaccagagccca

SEQ ID NO: 1117105 - RNA, 21 nt, Human
ugaccagagcccaggucugcu

SEQ ID NO: 1117106 - RNA, 19 nt, Human
ugagaugugauacguucag

SEQ ID NO: 1117107 - RNA, 20 nt, Human
ugagcagacagcaguugggg

SEQ ID NO: 1117108 - RNA, 22 nt, Human
ugagcagcuccgcucgggcagc

SEQ ID NO: 1117109 - RNA, 18 nt, Human
ugcaagggguuguggugg

SEQ ID NO: 1117110 - RNA, 19 nt, Human
ugcauccacacaagcuacu

SEQ ID NO: 1117111 - RNA, 19 nt, Human
ugcccucuguccccuuuuc

SEQ ID NO: 1117112 - RNA, 19 nt, Human
ugccuuaauaguggcgcaa

SEQ ID NO: 1117113 - RNA, 22 nt, Human
ugcgcgcgcgcgcgcgugcgua

SEQ ID NO: 1117114 - RNA, 21 nt, Human
ugcuccgggcguggagccuca

SEQ ID NO: 1117115 - RNA, 20 nt, Human
ugcuggggcugccagaggag

SEQ ID NO: 1117116 - RNA, 22 nt, Human
ugcuggggcugccagaggagug

SEQ ID NO: 1117117 - RNA, 20 nt, Human
uggagcagcggugacucagu

SEQ ID NO: 1117118 - RNA, 23 nt, Human
uggccagggcugggggcagguac

SEQ ID NO: 1117119 - RNA, 19 nt, Human
uggcccccgccagggcagc

SEQ ID NO: 1117120 - RNA, 18 nt, Human
uggcgcaaaagaugugca

SEQ ID NO: 1117121 - RNA, 22 nt, Human
ugggagaccuuuccucucugca

SEQ ID NO: 1117122 - RNA, 22 nt, Human
uggggauuggucacguguuaac

SEQ ID NO: 1117123 - RNA, 23 nt, Human
uggugggcugggccgagagacag

SEQ ID NO: 1117124 - RNA, 22 nt, Human
ugguuacugugugugugugugu

SEQ ID NO: 1117125 - RNA, 22 nt, Human
uguaaggugacaggugccuuaa

SEQ ID NO: 1117126 - RNA, 18 nt, Human
ugugcgcgcgcgcgcgcg

SEQ ID NO: 1117127 - RNA, 24 nt, Human
ugugcgcgcgcgcgcgcgugcgua

SEQ ID NO: 1117128 - RNA, 22 nt, Human
ugugugucugugcgcgcgcgcg

SEQ ID NO: 1117129 - RNA, 18 nt, Human
ugugugugugugucugug

SEQ ID NO: 1117130 - RNA, 21 nt, Human
ugugugugugugugugucugu

SEQ ID NO: 1117131 - RNA, 22 nt, Human
ugugugugugugugugucugug

SEQ ID NO: 1117132 - RNA, 18 nt, Human
ugugugugugugugugug

SEQ ID NO: 1117133 - RNA, 18 nt, Human
ugugugugugugugugug

SEQ ID NO: 1117134 - RNA, 18 nt, Human
ugugugugugugugugug

SEQ ID NO: 1117135 - RNA, 18 nt, Human
ugugugugugugugugug

SEQ ID NO: 1117136 - RNA, 18 nt, Human
ugugugugugugugugug

SEQ ID NO: 1117137 - RNA, 18 nt, Human
ugugugugugugugugug

SEQ ID NO: 1117138 - RNA, 18 nt, Human
ugugugugugugugugug

SEQ ID NO: 1117139 - RNA, 18 nt, Human
ugugugugugugugugug

SEQ ID NO: 1117140 - RNA, 18 nt, Human
ugugugugugugugugug

SEQ ID NO: 1117141 - RNA, 18 nt, Human
ugugugugugugugugug

SEQ ID NO: 1117142 - RNA, 22 nt, Human
ugugugugugugugugugucug

SEQ ID NO: 1117143 - RNA, 22 nt, Human
ugugugugugugugugugugag

SEQ ID NO: 1117144 - RNA, 21 nt, Human
ugugugugugugugugugugu

SEQ ID NO: 1117145 - RNA, 21 nt, Human
ugugugugugugugugugugu

SEQ ID NO: 1117146 - RNA, 21 nt, Human
ugugugugugugugugugugu

SEQ ID NO: 1117147 - RNA, 21 nt, Human
ugugugugugugugugugugu

SEQ ID NO: 1117148 - RNA, 21 nt, Human
ugugugugugugugugugugu

SEQ ID NO: 1117149 - RNA, 21 nt, Human
ugugugugugugugugugugu

SEQ ID NO: 1117150 - RNA, 21 nt, Human
ugugugugugugugugugugu

SEQ ID NO: 1117151 - RNA, 21 nt, Human
ugugugugugugugugugugu

SEQ ID NO: 1117152 - RNA, 21 nt, Human
ugugugugugugugugugugu

SEQ ID NO: 1117153 - RNA, 21 nt, Human
ugugugugugugugugugugu

SEQ ID NO: 1117154 - RNA, 21 nt, Human
ugugugugugugugugugugu

SEQ ID NO: 1117155 - RNA, 21 nt, Human
ugugugugugugugugugugu

SEQ ID NO: 1117156 - RNA, 21 nt, Human
ugugugugugugugugugugu

SEQ ID NO: 1117157 - RNA, 21 nt, Human
ugugugugugugugugugugu

SEQ ID NO: 1117158 - RNA, 21 nt, Human
ugugugugugugugugugugu

SEQ ID NO: 1117159 - RNA, 21 nt, Human
ugugugugugugugugugugu

SEQ ID NO: 1117160 - RNA, 21 nt, Human
ugugugugugugugugugugu

SEQ ID NO: 1117161 - RNA, 21 nt, Human
ugugugugugugugugugugu

SEQ ID NO: 1117162 - RNA, 22 nt, Human
ugugugugugugugugugugug

SEQ ID NO: 1117163 - RNA, 22 nt, Human
ugugugugugugugugugugug

SEQ ID NO: 1117164 - RNA, 22 nt, Human
ugugugugugugugugugugug

SEQ ID NO: 1117165 - RNA, 22 nt, Human
ugugugugugugugugugugug

SEQ ID NO: 1117166 - RNA, 22 nt, Human
uuccccucuuccucccuccccc

SEQ ID NO: 1117167 - RNA, 22 nt, Human
aaaugcuaccuuuaaaaagcac

SEQ ID NO: 1117168 - RNA, 21 nt, Human
accucaagaaggccaaaggga

SEQ ID NO: 1117169 - RNA, 23 nt, Human
acgaagcaggagaguccauuuuu

SEQ ID NO: 1117170 - RNA, 20 nt, Human
agacaguuguggaugguggg

SEQ ID NO: 1117171 - RNA, 19 nt, Human
aguguguggccuugcaccu

SEQ ID NO: 1117172 - RNA, 24 nt, Human
caggagaguccauuuuuaaugaua

SEQ ID NO: 1117173 - RNA, 18 nt, Human
ccucagagucauggcagg

SEQ ID NO: 1117174 - RNA, 20 nt, Human
ccuccauacagcugccucag

SEQ ID NO: 1117175 - RNA, 23 nt, Human
ccuccauacagcugccucaguuc

SEQ ID NO: 1117176 - RNA, 21 nt, Human
cugccucaguuccacguggcu

SEQ ID NO: 1117177 - RNA, 20 nt, Human
gacaguuguggauggugggg

SEQ ID NO: 1117178 - RNA, 22 nt, Human
gccucaguuccacguggcuggg

SEQ ID NO: 1117179 - RNA, 19 nt, Human
gcuccauuugcacuagccu

SEQ ID NO: 1117180 - RNA, 24 nt, Human
ggggguggugaaaggcacuucuua

SEQ ID NO: 1117181 - RNA, 18 nt, Human
gguguggggguggugaaa

SEQ ID NO: 1117182 - RNA, 19 nt, Human
gugaaaggcacuucuuaca

SEQ ID NO: 1117183 - RNA, 20 nt, Human
uaccuuuaaaaagcacugua

SEQ ID NO: 1117184 - RNA, 18 nt, Human
uagcuccauuugcacuag

SEQ ID NO: 1117185 - RNA, 19 nt, Human
uauuuuuauuauuuguggc

SEQ ID NO: 1117186 - RNA, 30 nt, Human
ucagaacagcagucaguucagucuuuucuu

SEQ ID NO: 1117187 - RNA, 22 nt, Human
ucagagucauggcagggugugg

SEQ ID NO: 1117188 - RNA, 22 nt, Human
uccagaguuuauucaaguucau

SEQ ID NO: 1117189 - RNA, 23 nt, Human
uccauacagcugccucaguucca

SEQ ID NO: 1117190 - RNA, 25 nt, Human
uccauacagcugccucaguuccacg

SEQ ID NO: 1117191 - RNA, 23 nt, Human
ucucuucuuucuguaccucuccc

SEQ ID NO: 1117192 - RNA, 27 nt, Human
ugaacagauuuguagcugcuguguaaa

SEQ ID NO: 1117193 - RNA, 22 nt, Human
ugccucaguuccacguggcugg

SEQ ID NO: 1117194 - RNA, 20 nt, Human
uggcaggguguggggguggu

SEQ ID NO: 1117195 - RNA, 22 nt, Human
uggccuccauacagcugccuuc

SEQ ID NO: 1117196 - RNA, 20 nt, Human
ugggugaaaugcuaccuuua

SEQ ID NO: 1117197 - RNA, 20 nt, Human
uguccagaguuuauucaagu

SEQ ID NO: 1117198 - RNA, 19 nt, Human
uguggcuagaugggguaag

SEQ ID NO: 1117199 - RNA, 19 nt, Human
uuacuucccuugucugcau

SEQ ID NO: 1117200 - RNA, 20 nt, Human
uucauuggguugaauuccaa

SEQ ID NO: 1117201 - RNA, 23 nt, Human
uuguccuucagauucuucuuauu

SEQ ID NO: 1117202 - RNA, 21 nt, Human
uuucucuucuuucuguaccuc

SEQ ID NO: 1117203 - RNA, 18 nt, Human
aaagacucauggaugggg

SEQ ID NO: 1117204 - RNA, 25 nt, Human
aaagccuccccacacuccugucuau

SEQ ID NO: 1117205 - RNA, 23 nt, Human
aaagggacugcugagaaccagca

SEQ ID NO: 1117206 - RNA, 24 nt, Human
aaaguucugggauuacaggcauga

SEQ ID NO: 1117207 - RNA, 19 nt, Human
aaauggccuuuguugagga

SEQ ID NO: 1117208 - RNA, 21 nt, Human
aagcacaggacucaacccccc

SEQ ID NO: 1117209 - RNA, 18 nt, Human
aagcagaaggcaaagccu

SEQ ID NO: 1117210 - RNA, 24 nt, Human
aagcagaaggcaaagccugcuguu

SEQ ID NO: 1117211 - RNA, 21 nt, Human
aagccuccccacacuccuguc

SEQ ID NO: 1117212 - RNA, 25 nt, Human
aagcgacccucugcuguuggaggau

SEQ ID NO: 1117213 - RNA, 19 nt, Human
aagggagcaaaaagggacu

SEQ ID NO: 1117214 - RNA, 22 nt, Human
aaguagcugggauuauaggcau

SEQ ID NO: 1117215 - RNA, 24 nt, Human
aaguagcugggauuauaggcaugc

SEQ ID NO: 1117216 - RNA, 22 nt, Human
aauuuuguauuuuuaguagaca

SEQ ID NO: 1117217 - RNA, 18 nt, Human
acaccccagucagaggcc

SEQ ID NO: 1117218 - RNA, 18 nt, Human
acaggcucauauagaguc

SEQ ID NO: 1117219 - RNA, 23 nt, Human
acauaacaagaguacacauuuua

SEQ ID NO: 1117220 - RNA, 24 nt, Human
accaugugggccagacuggucucg

SEQ ID NO: 1117221 - RNA, 23 nt, Human
acccccucccgcacacuccccac

SEQ ID NO: 1117222 - RNA, 22 nt, Human
acccucacauacgugucuuccu

SEQ ID NO: 1117223 - RNA, 18 nt, Human
acucugggggaggguggg

SEQ ID NO: 1117224 - RNA, 23 nt, Human
acuggucucgaacuccugaccuc

SEQ ID NO: 1117225 - RNA, 29 nt, Human
agaaugauguccaggacuucucccugccu

SEQ ID NO: 1117226 - RNA, 20 nt, Human
agacccagagcacaccccag

SEQ ID NO: 1117227 - RNA, 24 nt, Human
agaguacacauuuuauagauacaa

SEQ ID NO: 1117228 - RNA, 18 nt, Human
agaugucaucagacagca

SEQ ID NO: 1117229 - RNA, 21 nt, Human
agccaaagaccagaaaagccu

SEQ ID NO: 1117230 - RNA, 27 nt, Human
agccauggggcugaggaacuucgaaga

SEQ ID NO: 1117231 - RNA, 23 nt, Human
agccuccccacacuccugucuau

SEQ ID NO: 1117232 - RNA, 21 nt, Human
aggcaugcgccaccacgccca

SEQ ID NO: 1117233 - RNA, 25 nt, Human
aggcauuuauugucugcuggaaaug

SEQ ID NO: 1117234 - RNA, 25 nt, Human
aggcgccucggccucccaaaguucu

SEQ ID NO: 1117235 - RNA, 23 nt, Human
agggagcaaaaagggacucuggg

SEQ ID NO: 1117236 - RNA, 22 nt, Human
aggugcagacuccuagagagcc

SEQ ID NO: 1117237 - RNA, 20 nt, Human
agugcaauggcgcaaucucg

SEQ ID NO: 1117238 - RNA, 24 nt, Human
agugcaauggcgcaaucucggcuc

SEQ ID NO: 1117239 - RNA, 18 nt, Human
augcgccaccacgcccag

SEQ ID NO: 1117240 - RNA, 22 nt, Human
augggcccuugagaugcauucu

SEQ ID NO: 1117241 - RNA, 21 nt, Human
auucuccugccucagccuccc

SEQ ID NO: 1117242 - RNA, 23 nt, Human
auuucuuuuuuuuuuuccuuuga

SEQ ID NO: 1117243 - RNA, 23 nt, Human
caaaccugccaacucuacccccu

SEQ ID NO: 1117244 - RNA, 24 nt, Human
caaagggacugcugagaaccagca

SEQ ID NO: 1117245 - RNA, 24 nt, Human
caaaguucugggauuacaggcaug

SEQ ID NO: 1117246 - RNA, 23 nt, Human
caaccucuaccucccggguucaa

SEQ ID NO: 1117247 - RNA, 22 nt, Human
caagcaauucuccugccucagc

SEQ ID NO: 1117248 - RNA, 27 nt, Human
caagcaauucuccugccucagccuccc

SEQ ID NO: 1117249 - RNA, 22 nt, Human
caauucagaaagagccccugag

SEQ ID NO: 1117250 - RNA, 21 nt, Human
caccaugugggccagacuggu

SEQ ID NO: 1117251 - RNA, 24 nt, Human
caccaugugggccagacuggucuc

SEQ ID NO: 1117252 - RNA, 18 nt, Human
caccccagucagaggccu

SEQ ID NO: 1117253 - RNA, 21 nt, Human
cacugcaaccucuaccucccg

SEQ ID NO: 1117254 - RNA, 23 nt, Human
cacugcaaccucuaccucccggg

SEQ ID NO: 1117255 - RNA, 19 nt, Human
cagaaaagccuccccacac

SEQ ID NO: 1117256 - RNA, 23 nt, Human
cagaaagagccccugaggggaga

SEQ ID NO: 1117257 - RNA, 20 nt, Human
cagaagccgaaagugccccc

SEQ ID NO: 1117258 - RNA, 18 nt, Human
cagcccuccucacagccc

SEQ ID NO: 1117259 - RNA, 20 nt, Human
caggaccagggagugccugg

SEQ ID NO: 1117260 - RNA, 24 nt, Human
cauccucauuucacagauuaggga

SEQ ID NO: 1117261 - RNA, 21 nt, Human
caugcgccaccacgcccagcu

SEQ ID NO: 1117262 - RNA, 24 nt, Human
ccaaaguucugggauuacaggcau

SEQ ID NO: 1117263 - RNA, 24 nt, Human
ccaacucuacccccucccgcacac

SEQ ID NO: 1117264 - RNA, 24 nt, Human
ccaaguagcugggauuauaggcau

SEQ ID NO: 1117265 - RNA, 26 nt, Human
ccacaucaaagggacugcugagaacc

SEQ ID NO: 1117266 - RNA, 22 nt, Human
ccaccaacgcacucucagcugc

SEQ ID NO: 1117267 - RNA, 24 nt, Human
ccaccaacgcacucucagcugcag

SEQ ID NO: 1117268 - RNA, 20 nt, Human
ccaccacgcccagcuaauuu

SEQ ID NO: 1117269 - RNA, 19 nt, Human
ccacugcgcccggccuaag

SEQ ID NO: 1117270 - RNA, 20 nt, Human
ccacugcgcccggccuaagc

SEQ ID NO: 1117271 - RNA, 24 nt, Human
cccaaaguucugggauuacaggca

SEQ ID NO: 1117272 - RNA, 23 nt, Human
cccaaguagcugggauuauaggc

SEQ ID NO: 1117273 - RNA, 24 nt, Human
cccaaguagcugggauuauaggca

SEQ ID NO: 1117274 - RNA, 21 nt, Human
cccagacauacuccacagccg

SEQ ID NO: 1117275 - RNA, 19 nt, Human
cccaugauggcagcaggac

SEQ ID NO: 1117276 - RNA, 19 nt, Human
ccccagcacucgccaggcu

SEQ ID NO: 1117277 - RNA, 22 nt, Human
ccccccaucggcagagcccggc

SEQ ID NO: 1117278 - RNA, 19 nt, Human
ccccuccuuccccacccuc

SEQ ID NO: 1117279 - RNA, 19 nt, Human
ccccugaggggagaagccu

SEQ ID NO: 1117280 - RNA, 24 nt, Human
ccccugaggggagaagccuagucc

SEQ ID NO: 1117281 - RNA, 22 nt, Human
cccggccgcagcaggcuucugu

SEQ ID NO: 1117282 - RNA, 23 nt, Human
cccggguucaagcaauucuccug

SEQ ID NO: 1117283 - RNA, 20 nt, Human
cccucuggcucuccucugca

SEQ ID NO: 1117284 - RNA, 24 nt, Human
cccugcucaagugucaucuucuca

SEQ ID NO: 1117285 - RNA, 24 nt, Human
cccuggacaauucagaaagagccc

SEQ ID NO: 1117286 - RNA, 20 nt, Human
cccugggucacuagagaccc

SEQ ID NO: 1117287 - RNA, 20 nt, Human
cccugucugggguucucuuc

SEQ ID NO: 1117288 - RNA, 22 nt, Human
ccgguucagugcggggcgcaag

SEQ ID NO: 1117289 - RNA, 22 nt, Human
ccucacagccccuuggagccug

SEQ ID NO: 1117290 - RNA, 22 nt, Human
ccucccgcacacuccccaccaa

SEQ ID NO: 1117291 - RNA, 24 nt, Human
ccucccggguucaagcaauucucc

SEQ ID NO: 1117292 - RNA, 22 nt, Human
ccucucuuccucuuacaugucc

SEQ ID NO: 1117293 - RNA, 21 nt, Human
ccucugccuucacaccaccug

SEQ ID NO: 1117294 - RNA, 19 nt, Human
ccugaccucaggugaucca

SEQ ID NO: 1117295 - RNA, 19 nt, Human
ccugaccucaggugaucca

SEQ ID NO: 1117296 - RNA, 23 nt, Human
ccugccucagccucccaaguagc

SEQ ID NO: 1117297 - RNA, 20 nt, Human
ccugcucaagugucaucuuc

SEQ ID NO: 1117298 - RNA, 24 nt, Human
ccuguccugcuccccuaacgggag

SEQ ID NO: 1117299 - RNA, 20 nt, Human
ccuuccuuccccuccccucc

SEQ ID NO: 1117300 - RNA, 23 nt, Human
cgagggugccgggggcccugggu

SEQ ID NO: 1117301 - RNA, 21 nt, Human
cgcaagccagcccuccucaca

SEQ ID NO: 1117302 - RNA, 18 nt, Human
cgcccggccuaagcuucu

SEQ ID NO: 1117303 - RNA, 22 nt, Human
cggcagagcccggccgcagcag

SEQ ID NO: 1117304 - RNA, 20 nt, Human
cuacccccucccgcacacuc

SEQ ID NO: 1117305 - RNA, 24 nt, Human
cucacugcaaccucuaccucccgg

SEQ ID NO: 1117306 - RNA, 24 nt, Human
cucagccucccaaguagcugggau

SEQ ID NO: 1117307 - RNA, 21 nt, Human
cucccuuucucucuccuuccc

SEQ ID NO: 1117308 - RNA, 25 nt, Human
cuccucugcaaagauggccuucaaa

SEQ ID NO: 1117309 - RNA, 18 nt, Human
cucuagaucacauagcca

SEQ ID NO: 1117310 - RNA, 19 nt, Human
cucuagaucacauagccag

SEQ ID NO: 1117311 - RNA, 21 nt, Human
cucugcuguuggaggauggcc

SEQ ID NO: 1117312 - RNA, 21 nt, Human
cucuuguugcccaggcuggag

SEQ ID NO: 1117313 - RNA, 20 nt, Human
cugaauucccagagcugcac

SEQ ID NO: 1117314 - RNA, 23 nt, Human
cugcaaccucuaccucccggguu

SEQ ID NO: 1117315 - RNA, 23 nt, Human
cugccucagccucccaaguagcu

SEQ ID NO: 1117316 - RNA, 18 nt, Human
cugccucugccuucacac

SEQ ID NO: 1117317 - RNA, 20 nt, Human
cuggcucuccucugcaaaga

SEQ ID NO: 1117318 - RNA, 18 nt, Human
cuguccugcuccccuaac

SEQ ID NO: 1117319 - RNA, 19 nt, Human
cuguuggaggauggccugg

SEQ ID NO: 1117320 - RNA, 20 nt, Human
cuucucagaaaagccucccc

SEQ ID NO: 1117321 - RNA, 23 nt, Human
cuuucugaauucccagagcugca

SEQ ID NO: 1117322 - RNA, 22 nt, Human
cuuuuuauccuccugaggucca

SEQ ID NO: 1117323 - RNA, 19 nt, Human
gaaauggccuuuguugagg

SEQ ID NO: 1117324 - RNA, 18 nt, Human
gaacauaaucaucgggca

SEQ ID NO: 1117325 - RNA, 18 nt, Human
gaagaagcgacccucugc

SEQ ID NO: 1117326 - RNA, 24 nt, Human
gaccucaggugauccaggcgccuc

SEQ ID NO: 1117327 - RNA, 19 nt, Human
gaccuguccucucuuccuc

SEQ ID NO: 1117328 - RNA, 20 nt, Human
gaccuguccucucuuccucu

SEQ ID NO: 1117329 - RNA, 18 nt, Human
gagcugcacggcucagcc

SEQ ID NO: 1117330 - RNA, 18 nt, Human
gaggauagggauuugguc

SEQ ID NO: 1117331 - RNA, 18 nt, Human
gauuacaggcaugagcca

SEQ ID NO: 1117332 - RNA, 19 nt, Human
gauuacaggcaugagccac

SEQ ID NO: 1117333 - RNA, 22 nt, Human
gauuacaggcaugagccacugc

SEQ ID NO: 1117334 - RNA, 18 nt, Human
gauuauaggcaugcgcca

SEQ ID NO: 1117335 - RNA, 22 nt, Human
gcaaccucuaccucccggguuc

SEQ ID NO: 1117336 - RNA, 20 nt, Human
gcagaagccgaaagugcccc

SEQ ID NO: 1117337 - RNA, 22 nt, Human
gccagcccuccucacagccccu

SEQ ID NO: 1117338 - RNA, 19 nt, Human
gcccaggcuggagugcaau

SEQ ID NO: 1117339 - RNA, 19 nt, Human
gccgccccagccauggggc

SEQ ID NO: 1117340 - RNA, 23 nt, Human
gccucggccucccaaaguucugg

SEQ ID NO: 1117341 - RNA, 21 nt, Human
gcgccucggccucccaaaguu

SEQ ID NO: 1117342 - RNA, 20 nt, Human
gcucuccucugcaaagaugg

SEQ ID NO: 1117343 - RNA, 21 nt, Human
gcucuuguugcccaggcugga

SEQ ID NO: 1117344 - RNA, 19 nt, Human
gcuggagugcaauggcgca

SEQ ID NO: 1117345 - RNA, 21 nt, Human
ggaugugaaagccagcaaguu

SEQ ID NO: 1117346 - RNA, 22 nt, Human
ggauuacaggcaugagccacug

SEQ ID NO: 1117347 - RNA, 19 nt, Human
ggauuauaggcaugcgcca

SEQ ID NO: 1117348 - RNA, 20 nt, Human
gggacugcugagaaccagca

SEQ ID NO: 1117349 - RNA, 19 nt, Human
gggagggugggcggcagag

SEQ ID NO: 1117350 - RNA, 24 nt, Human
gggccagacuggucucgaacuccu

SEQ ID NO: 1117351 - RNA, 21 nt, Human
ggguuucaccaugugggccag

SEQ ID NO: 1117352 - RNA, 19 nt, Human
ggucucgaacuccugaccu

SEQ ID NO: 1117353 - RNA, 18 nt, Human
guagcugggauuauaggc

SEQ ID NO: 1117354 - RNA, 22 nt, Human
gucacguugcccugaaagacuc

SEQ ID NO: 1117355 - RNA, 24 nt, Human
gugaaagccagcaaguuaauacca

SEQ ID NO: 1117356 - RNA, 24 nt, Human
gugauccaggcgccucggccuccc

SEQ ID NO: 1117357 - RNA, 23 nt, Human
uacaggcaugagccacugcgccc

SEQ ID NO: 1117358 - RNA, 23 nt, Human
uaccaaaugcuccuuaugacucu

SEQ ID NO: 1117359 - RNA, 19 nt, Human
uaccagcaccugccacacc

SEQ ID NO: 1117360 - RNA, 23 nt, Human
uaccagcauccugccgguucagu

SEQ ID NO: 1117361 - RNA, 26 nt, Human
uacccccucccgcacacuccccaccc

SEQ ID NO: 1117362 - RNA, 19 nt, Human
uaccugagucugggcgccc

SEQ ID NO: 1117363 - RNA, 21 nt, Human
uagagucggaugugaaagcca

SEQ ID NO: 1117364 - RNA, 19 nt, Human
uagcaggcagacuuuuuuc

SEQ ID NO: 1117365 - RNA, 24 nt, Human
uaggagaucaaagcacaggacuca

SEQ ID NO: 1117366 - RNA, 23 nt, Human
uaguagacauggguuucaccaug

SEQ ID NO: 1117367 - RNA, 26 nt, Human
uauuuauuucuuuuuuuuuuuccuuu

SEQ ID NO: 1117368 - RNA, 25 nt, Human
ucacaccaccuguccggggggccug

SEQ ID NO: 1117369 - RNA, 22 nt, Human
ucacauacgugucuuccuuccc

SEQ ID NO: 1117370 - RNA, 24 nt, Human
ucacugcaaccucuaccucccggg

SEQ ID NO: 1117371 - RNA, 25 nt, Human
ucacugcaaccucuaccucccgggu

SEQ ID NO: 1117372 - RNA, 19 nt, Human
ucagaaaagccuccccaca

SEQ ID NO: 1117373 - RNA, 24 nt, Human
ucagaggcuuucugaauucccagg

SEQ ID NO: 1117374 - RNA, 20 nt, Human
ucagccucccaaguagcugg

SEQ ID NO: 1117375 - RNA, 22 nt, Human
uccacagccggaggaaaggaac

SEQ ID NO: 1117376 - RNA, 24 nt, Human
ucccaaaguucugggauuacaggc

SEQ ID NO: 1117377 - RNA, 24 nt, Human
ucccaaguagcugggauuauaggc

SEQ ID NO: 1117378 - RNA, 22 nt, Human
uccccacacuccugucuauacc

SEQ ID NO: 1117379 - RNA, 19 nt, Human
uccccacccucacauacgu

SEQ ID NO: 1117380 - RNA, 19 nt, Human
ucccccguaucuauaacac

SEQ ID NO: 1117381 - RNA, 20 nt, Human
ucccgcacacuccccaccaa

SEQ ID NO: 1117382 - RNA, 21 nt, Human
ucccggguucaagcaauucuc

SEQ ID NO: 1117383 - RNA, 24 nt, Human
ucccggguucaagcaauucuccug

SEQ ID NO: 1117384 - RNA, 18 nt, Human
ucccucuggcucuccucu

SEQ ID NO: 1117385 - RNA, 20 nt, Human
ucccugauccucuggggaau

SEQ ID NO: 1117386 - RNA, 19 nt, Human
uccuuccuuccccuccccu

SEQ ID NO: 1117387 - RNA, 22 nt, Human
ucggcagagcccggccgcagca

SEQ ID NO: 1117388 - RNA, 25 nt, Human
ucucccugccauugccuggguugaa

SEQ ID NO: 1117389 - RNA, 26 nt, Human
ucuccugccucagccucccaaguagc

SEQ ID NO: 1117390 - RNA, 23 nt, Human
ucucgaacuccugaccucaggug

SEQ ID NO: 1117391 - RNA, 19 nt, Human
ucugggggagggugggcgg

SEQ ID NO: 1117392 - RNA, 26 nt, Human
ucuguaucugucucucccuuucucuc

SEQ ID NO: 1117393 - RNA, 20 nt, Human
ucugucucucccuuucucuc

SEQ ID NO: 1117394 - RNA, 22 nt, Human
ucuuguugcccaggcuggagug

SEQ ID NO: 1117395 - RNA, 22 nt, Human
ugaacauaaucaucgggcacag

SEQ ID NO: 1117396 - RNA, 24 nt, Human
ugaccucaggugauccaggcgccu

SEQ ID NO: 1117397 - RNA, 25 nt, Human
ugaccucaggugauccaggcgccuc

SEQ ID NO: 1117398 - RNA, 21 nt, Human
ugagacccagagcacacccca

SEQ ID NO: 1117399 - RNA, 20 nt, Human
ugaggaagaggagagggcau

SEQ ID NO: 1117400 - RNA, 23 nt, Human
ugagggagggacgggaugcaaca

SEQ ID NO: 1117401 - RNA, 23 nt, Human
ugcaauggcgcaaucucggcuca

SEQ ID NO: 1117402 - RNA, 18 nt, Human
ugccacaccugcuuuauc

SEQ ID NO: 1117403 - RNA, 18 nt, Human
ugcccaggcuggagugca

SEQ ID NO: 1117404 - RNA, 21 nt, Human
ugcccaggcuggagugcaaug

SEQ ID NO: 1117405 - RNA, 21 nt, Human
ugcccaggcuggagugcaaug

SEQ ID NO: 1117406 - RNA, 24 nt, Human
ugcccaggcuggagugcaauggcg

SEQ ID NO: 1117407 - RNA, 18 nt, Human
ugccgguucagugcgggg

SEQ ID NO: 1117408 - RNA, 24 nt, Human
ugccucagccucccaaguagcugg

SEQ ID NO: 1117409 - RNA, 21 nt, Human
ugccugggcacaacggggagc

SEQ ID NO: 1117410 - RNA, 19 nt, Human
ugccuggguugaauugaga

SEQ ID NO: 1117411 - RNA, 27 nt, Human
ugccuuguuugcuaaggccgccccagc

SEQ ID NO: 1117412 - RNA, 24 nt, Human
ugcucuuguugcccaggcuggagu

SEQ ID NO: 1117413 - RNA, 21 nt, Human
ugcuuuaucugucuguuucuc

SEQ ID NO: 1117414 - RNA, 18 nt, Human
uggaagaagcgacccucu

SEQ ID NO: 1117415 - RNA, 20 nt, Human
uggaagaagcgacccucugc

SEQ ID NO: 1117416 - RNA, 22 nt, Human
uggagucaaaccugccaacucc

SEQ ID NO: 1117417 - RNA, 23 nt, Human
uggagugcaauggcgcaaucucg

SEQ ID NO: 1117418 - RNA, 24 nt, Human
uggagugcaauggcgcaaucucgg

SEQ ID NO: 1117419 - RNA, 18 nt, Human
ugggauuacaggcaugag

SEQ ID NO: 1117420 - RNA, 19 nt, Human
ugggauuacaggcaugagc

SEQ ID NO: 1117421 - RNA, 21 nt, Human
ugggauuacaggcaugagcca

SEQ ID NO: 1117422 - RNA, 22 nt, Human
ugggauuacaggcaugagccac

SEQ ID NO: 1117423 - RNA, 22 nt, Human
ugggauuacaggcaugagccac

SEQ ID NO: 1117424 - RNA, 23 nt, Human
ugggauuacaggcaugagccacu

SEQ ID NO: 1117425 - RNA, 24 nt, Human
ugggauuacaggcaugagccacug

SEQ ID NO: 1117426 - RNA, 26 nt, Human
ugggauuacaggcaugagccacugcg

SEQ ID NO: 1117427 - RNA, 18 nt, Human
ugggauuauaggcaugcg

SEQ ID NO: 1117428 - RNA, 21 nt, Human
ugggauuauaggcaugcgcca

SEQ ID NO: 1117429 - RNA, 22 nt, Human
ugggauuauaggcaugcgccac

SEQ ID NO: 1117430 - RNA, 24 nt, Human
ugggauuauaggcaugcgccacca

SEQ ID NO: 1117431 - RNA, 18 nt, Human
ugggcgugggcuuuugca

SEQ ID NO: 1117432 - RNA, 20 nt, Human
ugggcgugggcuuuugcaag

SEQ ID NO: 1117433 - RNA, 23 nt, Human
ugggcgugggcuuuugcaaguca

SEQ ID NO: 1117434 - RNA, 18 nt, Human
ugggggagggugggcggc

SEQ ID NO: 1117435 - RNA, 19 nt, Human
ugggggagggugggcggca

SEQ ID NO: 1117436 - RNA, 18 nt, Human
uggguuucaccauguggg

SEQ ID NO: 1117437 - RNA, 21 nt, Human
uggucucgaacuccugaccuc

SEQ ID NO: 1117438 - RNA, 18 nt, Human
uggucugcaaauguggua

SEQ ID NO: 1117439 - RNA, 25 nt, Human
ugucaucagacagcagggggacagu

SEQ ID NO: 1117440 - RNA, 20 nt, Human
ugucaucuucucagaaaagc

SEQ ID NO: 1117441 - RNA, 19 nt, Human
uguccaggacuucucccug

SEQ ID NO: 1117442 - RNA, 22 nt, Human
ugugugcacucacaucgacagg

SEQ ID NO: 1117443 - RNA, 20 nt, Human
uguguucgucuuucuguauc

SEQ ID NO: 1117444 - RNA, 20 nt, Human
uguugcccaggcuggagugc

SEQ ID NO: 1117445 - RNA, 22 nt, Human
uguugcccaggcuggagugcaa

SEQ ID NO: 1117446 - RNA, 19 nt, Human
uuaauaccagcauccugcc

SEQ ID NO: 1117447 - RNA, 23 nt, Human
uuaguagacauggguuucaccau

SEQ ID NO: 1117448 - RNA, 24 nt, Human
uuaguagacauggguuucaccaug

SEQ ID NO: 1117449 - RNA, 22 nt, Human
uuauacauaacaagaguacaca

SEQ ID NO: 1117450 - RNA, 21 nt, Human
uucaagcaauucuccugccuc

SEQ ID NO: 1117451 - RNA, 24 nt, Human
uucaagcaauucuccugccucagc

SEQ ID NO: 1117452 - RNA, 21 nt, Human
uucaugaggauagggauuugg

SEQ ID NO: 1117453 - RNA, 20 nt, Human
uucuggaccacagaccuugg

SEQ ID NO: 1117454 - RNA, 18 nt, Human
uugcccaggcuggagugc

SEQ ID NO: 1117455 - RNA, 23 nt, Human
uugcucuuguugcccaggcugga

SEQ ID NO: 1117456 - RNA, 24 nt, Human
uuuaguagacauggguuucaccau

SEQ ID NO: 1117457 - RNA, 18 nt, Human
uuucacagauuagggaac

SEQ ID NO: 1117458 - RNA, 21 nt, Human
uuucaccaugugggccagacu

SEQ ID NO: 1117459 - RNA, 24 nt, Human
uuucucuuucugaaggggagggaa

SEQ ID NO: 1117460 - RNA, 18 nt, Human
uuucugaauucccagagc

SEQ ID NO: 1117461 - RNA, 18 nt, Human
uuugcuaaggccgcccca

SEQ ID NO: 1117462 - RNA, 24 nt, Human
uuugcucuuguugcccaggcugga

SEQ ID NO: 1117463 - RNA, 24 nt, Human
uuuugcucuuguugcccaggcugg

SEQ ID NO: 1117464 - RNA, 18 nt, Human
uuuuguauuuuuaguaga

SEQ ID NO: 1117465 - RNA, 23 nt, Human
uuuuuaguagacauggguuucac

SEQ ID NO: 1117466 - RNA, 21 nt, Human
aaccaggcuuggauguggcuc

SEQ ID NO: 1117467 - RNA, 21 nt, Human
aaugggucuccuuccaugucu

SEQ ID NO: 1117468 - RNA, 24 nt, Human
acagcaccucaucaacauggucag

SEQ ID NO: 1117469 - RNA, 24 nt, Human
accugucccacggugacccagaag

SEQ ID NO: 1117470 - RNA, 18 nt, Human
agaaaaagaaaaaaaugg

SEQ ID NO: 1117471 - RNA, 18 nt, Human
agaacuagaaaaagaaaa

SEQ ID NO: 1117472 - RNA, 18 nt, Human
agagaugcacuucuucga

SEQ ID NO: 1117473 - RNA, 22 nt, Human
agauccuggcagcaucuaaccc

SEQ ID NO: 1117474 - RNA, 22 nt, Human
agaugcuuccccaucccaauug

SEQ ID NO: 1117475 - RNA, 19 nt, Human
agcacucagggugguuggc

SEQ ID NO: 1117476 - RNA, 21 nt, Human
agccuguuugcauauuuuguu

SEQ ID NO: 1117477 - RNA, 20 nt, Human
aggcagagaccugucccacg

SEQ ID NO: 1117478 - RNA, 22 nt, Human
agguauaaauaaaugacaacag

SEQ ID NO: 1117479 - RNA, 18 nt, Human
caacacugcgagagagag

SEQ ID NO: 1117480 - RNA, 22 nt, Human
cacccugaauccauacggcaac

SEQ ID NO: 1117481 - RNA, 18 nt, Human
cacggccucggaagcccu

SEQ ID NO: 1117482 - RNA, 22 nt, Human
cagaacuagaaaaagaaaaaaa

SEQ ID NO: 1117483 - RNA, 24 nt, Human
cagagaagugccugguaugagcac

SEQ ID NO: 1117484 - RNA, 20 nt, Human
cagcaacuggaucauagugc

SEQ ID NO: 1117485 - RNA, 23 nt, Human
cauuuccacuuuaaaagcagaga

SEQ ID NO: 1117486 - RNA, 23 nt, Human
ccaccaccccggccuuuacgcug

SEQ ID NO: 1117487 - RNA, 22 nt, Human
ccucaucaacauggucagcauu

SEQ ID NO: 1117488 - RNA, 20 nt, Human
ccuccucccugugccacaca

SEQ ID NO: 1117489 - RNA, 21 nt, Human
ccugaauccauacggcaacac

SEQ ID NO: 1117490 - RNA, 26 nt, Human
ccugggguuuuuugcucagaugcuuc

SEQ ID NO: 1117491 - RNA, 23 nt, Human
ccugucccacggugacccagaag

SEQ ID NO: 1117492 - RNA, 21 nt, Human
ccuugggcuguggcagggcuu

SEQ ID NO: 1117493 - RNA, 18 nt, Human
cggaagcccugaagcacu

SEQ ID NO: 1117494 - RNA, 22 nt, Human
cuagaaaaagaaaaaaaugggu

SEQ ID NO: 1117495 - RNA, 19 nt, Human
cucacugucacggccucgg

SEQ ID NO: 1117496 - RNA, 23 nt, Human
cuguacucagggcugcugggggu

SEQ ID NO: 1117497 - RNA, 24 nt, Human
cuguggcggaaacagauccuggca

SEQ ID NO: 1117498 - RNA, 21 nt, Human
gaccugaggcagcaacuggau

SEQ ID NO: 1117499 - RNA, 18 nt, Human
gagcauggccaagcugua

SEQ ID NO: 1117500 - RNA, 21 nt, Human
gaggcagcaacuggaucauag

SEQ ID NO: 1117501 - RNA, 18 nt, Human
gcagcaacuggaucauag

SEQ ID NO: 1117502 - RNA, 20 nt, Human
gcuguacucagggcugcugg

SEQ ID NO: 1117503 - RNA, 21 nt, Human
ggcagggcugggcuuggcuca

SEQ ID NO: 1117504 - RNA, 20 nt, Human
ggccaagcuguacucagggc

SEQ ID NO: 1117505 - RNA, 20 nt, Human
guaucuaugucuaaagccag

SEQ ID NO: 1117506 - RNA, 21 nt, Human
uaaaugacaacaguuuaacgc

SEQ ID NO: 1117507 - RNA, 18 nt, Human
uaaggagcuccuggccca

SEQ ID NO: 1117508 - RNA, 18 nt, Human
uacgcugggccuggguga

SEQ ID NO: 1117509 - RNA, 21 nt, Human
uagaaaaagaaaaaaaugggu

SEQ ID NO: 1117510 - RNA, 24 nt, Human
uauuuuuccugggguuuuuugcuc

SEQ ID NO: 1117511 - RNA, 24 nt, Human
uccagaacuagaaaaagaaaaaaa

SEQ ID NO: 1117512 - RNA, 27 nt, Human
uccagaacuagaaaaagaaaaaaaugg

SEQ ID NO: 1117513 - RNA, 26 nt, Human
ucccacggugacccagaagugccgcu

SEQ ID NO: 1117514 - RNA, 19 nt, Human
uccccaucccaauugagga

SEQ ID NO: 1117515 - RNA, 21 nt, Human
ucuaaccccuugggcuguggc

SEQ ID NO: 1117516 - RNA, 19 nt, Human
ucucagaaaaagauuagcu

SEQ ID NO: 1117517 - RNA, 24 nt, Human
ucuguggcggaaacagauccuggc

SEQ ID NO: 1117518 - RNA, 20 nt, Human
ugaacggggccaagguggca

SEQ ID NO: 1117519 - RNA, 21 nt, Human
ugaguaagacugaggccagug

SEQ ID NO: 1117520 - RNA, 18 nt, Human
ugccacacaaacagcacc

SEQ ID NO: 1117521 - RNA, 19 nt, Human
ugcccucacugucacggcc

SEQ ID NO: 1117522 - RNA, 22 nt, Human
ugcucagaugcuuccccauccc

SEQ ID NO: 1117523 - RNA, 18 nt, Human
uggcagggcugggcuugg

SEQ ID NO: 1117524 - RNA, 19 nt, Human
uggcagggcuucuguggug

SEQ ID NO: 1117525 - RNA, 26 nt, Human
uggcagggcuucuguggugggcugcc

SEQ ID NO: 1117526 - RNA, 23 nt, Human
ugggcugccuuugggagacgcaa

SEQ ID NO: 1117527 - RNA, 22 nt, Human
uggugggcugccuuugggagac

SEQ ID NO: 1117528 - RNA, 21 nt, Human
ugucaauccguguccugaggc

SEQ ID NO: 1117529 - RNA, 23 nt, Human
uguggcggaaacagauccuggca

SEQ ID NO: 1117530 - RNA, 24 nt, Human
uguguguaugugugcaugcgcaca

SEQ ID NO: 1117531 - RNA, 18 nt, Human
uuugggugucauugugaa

SEQ ID NO: 1117532 - RNA, 23 nt, Human
aacaaccagaagauaggagggaa

SEQ ID NO: 1117533 - RNA, 23 nt, Human
aacugcuuucaccaucagggaug

SEQ ID NO: 1117534 - RNA, 18 nt, Human
aagaauucagaccagucc

SEQ ID NO: 1117535 - RNA, 22 nt, Human
aagcaggaggggagcuuguugg

SEQ ID NO: 1117536 - RNA, 23 nt, Human
aagcaggaggggagcuuguugga

SEQ ID NO: 1117537 - RNA, 21 nt, Human
aaggcaucagcaucuccccuc

SEQ ID NO: 1117538 - RNA, 21 nt, Human
aaugacauuuugugacuucca

SEQ ID NO: 1117539 - RNA, 19 nt, Human
acacaaagccaugcaugca

SEQ ID NO: 1117540 - RNA, 20 nt, Human
acacagugguucugguucua

SEQ ID NO: 1117541 - RNA, 21 nt, Human
accaugauaggauuauguaac

SEQ ID NO: 1117542 - RNA, 26 nt, Human
acguacaaggcaucaugcaaacagac

SEQ ID NO: 1117543 - RNA, 19 nt, Human
acuacccuuggaaaccagu

SEQ ID NO: 1117544 - RNA, 21 nt, Human
agaagcuggugggcaaauagg

SEQ ID NO: 1117545 - RNA, 22 nt, Human
agccaggcaggcaucagaagcc

SEQ ID NO: 1117546 - RNA, 28 nt, Human
agccuggaacagauccuuucccaguccc

SEQ ID NO: 1117547 - RNA, 21 nt, Human
aggcaucagaagccucaggcu

SEQ ID NO: 1117548 - RNA, 19 nt, Human
agggaaccuacagagguug

SEQ ID NO: 1117549 - RNA, 19 nt, Human
agggaugaaaguugaagac

SEQ ID NO: 1117550 - RNA, 23 nt, Human
aggggagcuuguuggagaaggug

SEQ ID NO: 1117551 - RNA, 22 nt, Human
aggguuguugcagauguaauuu

SEQ ID NO: 1117552 - RNA, 18 nt, Human
agguagucagucucacug

SEQ ID NO: 1117553 - RNA, 19 nt, Human
auggggaagcaggagggga

SEQ ID NO: 1117554 - RNA, 23 nt, Human
caaaauggccacaaugauaucuc

SEQ ID NO: 1117555 - RNA, 19 nt, Human
caaacuagauuuacaacca

SEQ ID NO: 1117556 - RNA, 18 nt, Human
caagaacacuuccuuguc

SEQ ID NO: 1117557 - RNA, 18 nt, Human
cacaaaccagaaacagaa

SEQ ID NO: 1117558 - RNA, 23 nt, Human
cacagugguucugguucuaccag

SEQ ID NO: 1117559 - RNA, 20 nt, Human
cagaaggcaaggaacaacca

SEQ ID NO: 1117560 - RNA, 22 nt, Human
cagagccaccauguaggcuugu

SEQ ID NO: 1117561 - RNA, 18 nt, Human
cagcaucuccccucuggu

SEQ ID NO: 1117562 - RNA, 22 nt, Human
cagggagaacaccaaaugaaga

SEQ ID NO: 1117563 - RNA, 19 nt, Human
caucagaagccucaggcuc

SEQ ID NO: 1117564 - RNA, 19 nt, Human
caugcaaacagacugugca

SEQ ID NO: 1117565 - RNA, 21 nt, Human
caugcaaacagacugugcagu

SEQ ID NO: 1117566 - RNA, 21 nt, Human
cauggcaagccgcucaugcac

SEQ ID NO: 1117567 - RNA, 21 nt, Human
cauguugcaucuuucccaaaa

SEQ ID NO: 1117568 - RNA, 24 nt, Human
cauuuugugacuuccaagauuaga

SEQ ID NO: 1117569 - RNA, 18 nt, Human
ccacaguuuggggcuucu

SEQ ID NO: 1117570 - RNA, 21 nt, Human
ccacuggggaacaaacgggac

SEQ ID NO: 1117571 - RNA, 21 nt, Human
ccagccaggcaggcaucagaa

SEQ ID NO: 1117572 - RNA, 18 nt, Human
cccagaagaaggguucau

SEQ ID NO: 1117573 - RNA, 22 nt, Human
cccauuucugucuauuuucuaa

SEQ ID NO: 1117574 - RNA, 18 nt, Human
ccccaaaucuuaugucca

SEQ ID NO: 1117575 - RNA, 23 nt, Human
ccccaguaccucagaauguggcc

SEQ ID NO: 1117576 - RNA, 19 nt, Human
cccccaaaugcucccaaac

SEQ ID NO: 1117577 - RNA, 26 nt, Human
ccuccugcccccaaaugcucccaaac

SEQ ID NO: 1117578 - RNA, 18 nt, Human
ccucugguugaacuugac

SEQ ID NO: 1117579 - RNA, 22 nt, Human
ccugcacaaggauagauacccc

SEQ ID NO: 1117580 - RNA, 23 nt, Human
ccuuucaauucaauucauucauu

SEQ ID NO: 1117581 - RNA, 22 nt, Human
cgggaccaaaaucuacucugug

SEQ ID NO: 1117582 - RNA, 21 nt, Human
cgggcugugcucaguguccuu

SEQ ID NO: 1117583 - RNA, 23 nt, Human
cugaacucauauuuaaguacuga

SEQ ID NO: 1117584 - RNA, 18 nt, Human
cuuacugagaaccagcca

SEQ ID NO: 1117585 - RNA, 19 nt, Human
gaaauaggguuguugcaga

SEQ ID NO: 1117586 - RNA, 21 nt, Human
gaagauaggagggaagccugg

SEQ ID NO: 1117587 - RNA, 18 nt, Human
gagaauguuaauacagcu

SEQ ID NO: 1117588 - RNA, 18 nt, Human
gcagccagaaggcaagga

SEQ ID NO: 1117589 - RNA, 21 nt, Human
gcucaugcacgggcugugcuc

SEQ ID NO: 1117590 - RNA, 21 nt, Human
gcuccagaggagaagcuggug

SEQ ID NO: 1117591 - RNA, 22 nt, Human
ggagaacaccaaaugaagacua

SEQ ID NO: 1117592 - RNA, 19 nt, Human
ggagaagguggccucaaug

SEQ ID NO: 1117593 - RNA, 19 nt, Human
ggccugggcuggcguccuc

SEQ ID NO: 1117594 - RNA, 24 nt, Human
ggcuccagaggagaagcugguggg

SEQ ID NO: 1117595 - RNA, 18 nt, Human
gggugaccuggccugggc

SEQ ID NO: 1117596 - RNA, 18 nt, Human
ggguugggauggaggggu

SEQ ID NO: 1117597 - RNA, 18 nt, Human
gguggauugagggaaccu

SEQ ID NO: 1117598 - RNA, 21 nt, Human
guccuuuuuccucagccaugc

SEQ ID NO: 1117599 - RNA, 22 nt, Human
gugcagggguugggauggaggg

SEQ ID NO: 1117600 - RNA, 23 nt, Human
guuccaagccacccaguuuuugu

SEQ ID NO: 1117601 - RNA, 19 nt, Human
guuuggggcuucucccuca

SEQ ID NO: 1117602 - RNA, 19 nt, Human
uaaaauacuauacuaguuc

SEQ ID NO: 1117603 - RNA, 26 nt, Human
uaaacgacuacccuuggaaaccagua

SEQ ID NO: 1117604 - RNA, 21 nt, Human
uaaauaaacaccaugauagga

SEQ ID NO: 1117605 - RNA, 20 nt, Human
uacaaccaaggcuugcugag

SEQ ID NO: 1117606 - RNA, 24 nt, Human
uacaaccaaggcuugcugaguggc

SEQ ID NO: 1117607 - RNA, 22 nt, Human
uacaugcucuucuuacaaugua

SEQ ID NO: 1117608 - RNA, 21 nt, Human
uaccuggaauguuauaugauc

SEQ ID NO: 1117609 - RNA, 20 nt, Human
uagcuaauuaaaauacuaua

SEQ ID NO: 1117610 - RNA, 23 nt, Human
uauacacccucuuuuugaaccuu

SEQ ID NO: 1117611 - RNA, 21 nt, Human
uaugacugauggccucaugaa

SEQ ID NO: 1117612 - RNA, 20 nt, Human
ucacuguaguugcggugaau

SEQ ID NO: 1117613 - RNA, 20 nt, Human
ucagaagccucaggcuccaa

SEQ ID NO: 1117614 - RNA, 18 nt, Human
ucagaauguggccuucuu

SEQ ID NO: 1117615 - RNA, 19 nt, Human
ucagcaggggucuccacag

SEQ ID NO: 1117616 - RNA, 20 nt, Human
ucaugcaaacagacugugca

SEQ ID NO: 1117617 - RNA, 25 nt, Human
ucauuugauuacaaauguaaucaaa

SEQ ID NO: 1117618 - RNA, 23 nt, Human
uccaggccccagggucugaacuc

SEQ ID NO: 1117619 - RNA, 24 nt, Human
ucccaaaauggccacaaugauauc

SEQ ID NO: 1117620 - RNA, 18 nt, Human
ucccagaagaaggguuca

SEQ ID NO: 1117621 - RNA, 20 nt, Human
ucccucagcaggggucucca

SEQ ID NO: 1117622 - RNA, 22 nt, Human
uccucaaaccauucauccuggu

SEQ ID NO: 1117623 - RNA, 23 nt, Human
uccuuguccuguggugcaggggu

SEQ ID NO: 1117624 - RNA, 23 nt, Human
ucucccaacuacaugcucuucuu

SEQ ID NO: 1117625 - RNA, 19 nt, Human
ucuugguuuccuaacugcu

SEQ ID NO: 1117626 - RNA, 18 nt, Human
ugaaaggcaucagcaucu

SEQ ID NO: 1117627 - RNA, 20 nt, Human
ugacauugugacauguugca

SEQ ID NO: 1117628 - RNA, 18 nt, Human
ugacuucuucaccaauga

SEQ ID NO: 1117629 - RNA, 23 nt, Human
ugacuuguuuuuuuuuccaccau

SEQ ID NO: 1117630 - RNA, 19 nt, Human
ugagagccuuggugcauuc

SEQ ID NO: 1117631 - RNA, 22 nt, Human
ugagggaaccuacagagguugg

SEQ ID NO: 1117632 - RNA, 18 nt, Human
ugauuuaaaggaagaaca

SEQ ID NO: 1117633 - RNA, 19 nt, Human
ugcacaaggauagauaccc

SEQ ID NO: 1117634 - RNA, 21 nt, Human
ugcacacaugugcuauuugug

SEQ ID NO: 1117635 - RNA, 19 nt, Human
ugcagggguugggauggag

SEQ ID NO: 1117636 - RNA, 21 nt, Human
ugcccccaaaugcucccaaac

SEQ ID NO: 1117637 - RNA, 24 nt, Human
ugccuccugcccccaaaugcuccc

SEQ ID NO: 1117638 - RNA, 24 nt, Human
ugcuagauaauccaguggagccaa

SEQ ID NO: 1117639 - RNA, 21 nt, Human
uggguuagcugaggcccugcu

SEQ ID NO: 1117640 - RNA, 24 nt, Human
uggugcagggguugggauggaggg

SEQ ID NO: 1117641 - RNA, 23 nt, Human
ugugcagcccauuucugucuauu

SEQ ID NO: 1117642 - RNA, 27 nt, Human
uguggugcagggguugggauggagggg

SEQ ID NO: 1117643 - RNA, 19 nt, Human
uguugaaguuauaaccccc

SEQ ID NO: 1117644 - RNA, 18 nt, Human
uuaaugaucuugguuucc

SEQ ID NO: 1117645 - RNA, 23 nt, Human
uucacaaaccagaaacagaacaa

SEQ ID NO: 1117646 - RNA, 24 nt, Human
uuccaccaucacuccucccuuuca

SEQ ID NO: 1117647 - RNA, 20 nt, Human
uucugcuggccaagccgggu

SEQ ID NO: 1117648 - RNA, 20 nt, Human
uucuuacaauguaacucuga

SEQ ID NO: 1117649 - RNA, 26 nt, Human
aacauccaucccauucacucagugac

SEQ ID NO: 1117650 - RNA, 23 nt, Human
aacugcaugagcugcaggaacca

SEQ ID NO: 1117651 - RNA, 23 nt, Human
accuagccaggcagcccccacag

SEQ ID NO: 1117652 - RNA, 22 nt, Human
accuuggugaggcauccccggc

SEQ ID NO: 1117653 - RNA, 21 nt, Human
agagaagugggagaaaugcca

SEQ ID NO: 1117654 - RNA, 19 nt, Human
agcaggcggcacccuccau

SEQ ID NO: 1117655 - RNA, 22 nt, Human
agccaggcagcccccacagucc

SEQ ID NO: 1117656 - RNA, 18 nt, Human
agcccccacaguccagcc

SEQ ID NO: 1117657 - RNA, 20 nt, Human
agcugcaggaaccagggacg

SEQ ID NO: 1117658 - RNA, 23 nt, Human
aucuguggccacauggguauucu

SEQ ID NO: 1117659 - RNA, 23 nt, Human
cacaguccagccacaccuccuuc

SEQ ID NO: 1117660 - RNA, 18 nt, Human
cacccuguggucugcgug

SEQ ID NO: 1117661 - RNA, 23 nt, Human
caccucagccaugccccaggggc

SEQ ID NO: 1117662 - RNA, 20 nt, Human
cagaaugaggaggaccccac

SEQ ID NO: 1117663 - RNA, 19 nt, Human
cagcccccacaguccagcc

SEQ ID NO: 1117664 - RNA, 24 nt, Human
cagcugcacagacaucugaaagcc

SEQ ID NO: 1117665 - RNA, 22 nt, Human
cagcuuccuuuucagcuucucc

SEQ ID NO: 1117666 - RNA, 25 nt, Human
caguccagccacaccuccuucccug

SEQ ID NO: 1117667 - RNA, 21 nt, Human
cagugguugcacacccugugg

SEQ ID NO: 1117668 - RNA, 18 nt, Human
cauccaucccauucacuc

SEQ ID NO: 1117669 - RNA, 25 nt, Human
cauccccggccuggcucuggcccug

SEQ ID NO: 1117670 - RNA, 26 nt, Human
caucugaaagccccaaacauccaucc

SEQ ID NO: 1117671 - RNA, 21 nt, Human
caugaaagaccuggcucuuaa

SEQ ID NO: 1117672 - RNA, 22 nt, Human
ccagaaugaggaggaccccaca

SEQ ID NO: 1117673 - RNA, 23 nt, Human
ccaggcagcccccacaguccagc

SEQ ID NO: 1117674 - RNA, 20 nt, Human
cccacagccucuagcugugc

SEQ ID NO: 1117675 - RNA, 24 nt, Human
ccccggccuggcucuggcccuggc

SEQ ID NO: 1117676 - RNA, 21 nt, Human
cccuggugugaaguggcgugg

SEQ ID NO: 1117677 - RNA, 21 nt, Human
cccuggugugaaguggcgugg

SEQ ID NO: 1117678 - RNA, 22 nt, Human
ccucagccaugccccaggggcc

SEQ ID NO: 1117679 - RNA, 19 nt, Human
ccuccugcagacgccgagg

SEQ ID NO: 1117680 - RNA, 24 nt, Human
ccuggcucuggcccuggcagaguc

SEQ ID NO: 1117681 - RNA, 21 nt, Human
ccugugguuuggucccaggac

SEQ ID NO: 1117682 - RNA, 23 nt, Human
cgaacccugacauuuuuauuauu

SEQ ID NO: 1117683 - RNA, 22 nt, Human
cuagccaggcagcccccacagu

SEQ ID NO: 1117684 - RNA, 20 nt, Human
cuccuaaucucagguacagc

SEQ ID NO: 1117685 - RNA, 18 nt, Human
cugauaaauguagaugug

SEQ ID NO: 1117686 - RNA, 21 nt, Human
cuguggccacauggguauucc

SEQ ID NO: 1117687 - RNA, 21 nt, Human
cuugcagcuauguaaaacuac

SEQ ID NO: 1117688 - RNA, 22 nt, Human
cuuguuuucuuaaccuuacauu

SEQ ID NO: 1117689 - RNA, 21 nt, Human
gaagugggagaaaugccaccc

SEQ ID NO: 1117690 - RNA, 18 nt, Human
gaucaggguagguggugc

SEQ ID NO: 1117691 - RNA, 21 nt, Human
gccagaaugaggaggacccca

SEQ ID NO: 1117692 - RNA, 19 nt, Human
gccuggaucuugcacaagg

SEQ ID NO: 1117693 - RNA, 22 nt, Human
gcugccagaaugaggaggaccc

SEQ ID NO: 1117694 - RNA, 19 nt, Human
ggagaagguggguggggcu

SEQ ID NO: 1117695 - RNA, 19 nt, Human
ggaucaggguagguggugc

SEQ ID NO: 1117696 - RNA, 20 nt, Human
ggcaugguguccagugcagc

SEQ ID NO: 1117697 - RNA, 21 nt, Human
gggaaaacgcuugucugcagg

SEQ ID NO: 1117698 - RNA, 24 nt, Human
gugaggcauccccggccuggcucu

SEQ ID NO: 1117699 - RNA, 19 nt, Human
gugcugagugccaugcccc

SEQ ID NO: 1117700 - RNA, 22 nt, Human
guuaguacgcguacguguuacu

SEQ ID NO: 1117701 - RNA, 26 nt, Human
uaaugaaauggggcccuuccccucuc

SEQ ID NO: 1117702 - RNA, 19 nt, Human
uacagccgaccuucaguac

SEQ ID NO: 1117703 - RNA, 21 nt, Human
uagaugugaaaacaugauagg

SEQ ID NO: 1117704 - RNA, 19 nt, Human
uagccaggcagcccccaca

SEQ ID NO: 1117705 - RNA, 22 nt, Human
uauguaaaacuacauacgcaca

SEQ ID NO: 1117706 - RNA, 23 nt, Human
uccaagacuuuccaaacuguacu

SEQ ID NO: 1117707 - RNA, 23 nt, Human
uccucauacaauuaaggucccau

SEQ ID NO: 1117708 - RNA, 19 nt, Human
uccugcacucgugccugga

SEQ ID NO: 1117709 - RNA, 25 nt, Human
ucugcugucagaaccuuggugaggc

SEQ ID NO: 1117710 - RNA, 21 nt, Human
ugacagguuguugccaaggag

SEQ ID NO: 1117711 - RNA, 19 nt, Human
ugagaagggaaaacgcuug

SEQ ID NO: 1117712 - RNA, 21 nt, Human
ugagagaagugggagaaaugc

SEQ ID NO: 1117713 - RNA, 18 nt, Human
ugaggcauccccggccug

SEQ ID NO: 1117714 - RNA, 22 nt, Human
ugcacacccuguggucugcgug

SEQ ID NO: 1117715 - RNA, 21 nt, Human
ugccagaaugaggaggacccc

SEQ ID NO: 1117716 - RNA, 18 nt, Human
ugccauggaaagcccaca

SEQ ID NO: 1117717 - RNA, 19 nt, Human
ugccccaggggcccagcug

SEQ ID NO: 1117718 - RNA, 20 nt, Human
ugcugccagaaugaggagga

SEQ ID NO: 1117719 - RNA, 23 nt, Human
uggcacauagcaggacucaugaa

SEQ ID NO: 1117720 - RNA, 23 nt, Human
uggcucuggcccuggcagagucc

SEQ ID NO: 1117721 - RNA, 22 nt, Human
uggggcccuuccccucucauga

SEQ ID NO: 1117722 - RNA, 30 nt, Human
uggugaggcauccccggccuggcucuggcc

SEQ ID NO: 1117723 - RNA, 18 nt, Human
uguagaacgcuauaaggu

SEQ ID NO: 1117724 - RNA, 20 nt, Human
ugucuagacuuguguugggg

SEQ ID NO: 1117725 - RNA, 22 nt, Human
ugucuagacuuguguugggggc

SEQ ID NO: 1117726 - RNA, 22 nt, Human
uguguguugaugauagaauucu

SEQ ID NO: 1117727 - RNA, 19 nt, Human
uguguugaugauagaauuc

SEQ ID NO: 1117728 - RNA, 20 nt, Human
uuaauauagcagcuuccuuu

SEQ ID NO: 1117729 - RNA, 19 nt, Human
uuacagugaaauucuguga

SEQ ID NO: 1117730 - RNA, 24 nt, Human
uuacuuaauauagcagcuuccuuu

SEQ ID NO: 1117731 - RNA, 24 nt, Human
uucugugagagaagugggagaaau

SEQ ID NO: 1117732 - RNA, 21 nt, Human
uuuucagcuucuccuaaucuc

SEQ ID NO: 1117733 - RNA, 22 nt, Human
aggagaaaccaaaauugcaauc

SEQ ID NO: 1117734 - RNA, 20 nt, Human
caaaauugcaauccagggac

SEQ ID NO: 1117735 - RNA, 22 nt, Human
ugagaacagaaggagaaaccaa

SEQ ID NO: 1117736 - RNA, 24 nt, Human
acagugccucccagccugggcggg

SEQ ID NO: 1117737 - RNA, 19 nt, Human
agccugccccgccagggcc

SEQ ID NO: 1117738 - RNA, 18 nt, Human
cagcagugcguggguggc

SEQ ID NO: 1117739 - RNA, 19 nt, Human
cagggcccuggaaucagag

SEQ ID NO: 1117740 - RNA, 23 nt, Human
ccaccugaagcgucggaucccua

SEQ ID NO: 1117741 - RNA, 19 nt, Human
ccagcgccgcggggcagag

SEQ ID NO: 1117742 - RNA, 22 nt, Human
ccccacagaccuucggccuccg

SEQ ID NO: 1117743 - RNA, 20 nt, Human
ccccgcugccacguguggca

SEQ ID NO: 1117744 - RNA, 22 nt, Human
ccuacagugccucccagccugg

SEQ ID NO: 1117745 - RNA, 26 nt, Human
ccuacagugccucccagccugggcgg

SEQ ID NO: 1117746 - RNA, 21 nt, Human
ccucccagccugggcgggagc

SEQ ID NO: 1117747 - RNA, 22 nt, Human
ccugccccgccagggcccugga

SEQ ID NO: 1117748 - RNA, 22 nt, Human
ccuggaaucagagaaagucgcu

SEQ ID NO: 1117749 - RNA, 23 nt, Human
cgacggcacgaggaacuccuguc

SEQ ID NO: 1117750 - RNA, 19 nt, Human
cggaucccuacagugccuc

SEQ ID NO: 1117751 - RNA, 23 nt, Human
cucagccccaccccagaagcggc

SEQ ID NO: 1117752 - RNA, 19 nt, Human
cugcaccuuggcccuccgc

SEQ ID NO: 1117753 - RNA, 20 nt, Human
cugcagccucagccccaccu

SEQ ID NO: 1117754 - RNA, 23 nt, Human
cuggagccugccccgccagggcc

SEQ ID NO: 1117755 - RNA, 18 nt, Human
gccccaccccagaagcgg

SEQ ID NO: 1117756 - RNA, 19 nt, Human
gccccgccagggcccugga

SEQ ID NO: 1117757 - RNA, 22 nt, Human
gcucuuuggccaccugaagccg

SEQ ID NO: 1117758 - RNA, 26 nt, Human
ggcacugaguccgccaggaccacggu

SEQ ID NO: 1117759 - RNA, 19 nt, Human
gggguccuuggugcgaaag

SEQ ID NO: 1117760 - RNA, 21 nt, Human
guacuggagccugccccgcca

SEQ ID NO: 1117761 - RNA, 20 nt, Human
uagcgcccuccuucguccuc

SEQ ID NO: 1117762 - RNA, 22 nt, Human
ucccuacagugccucccagccu

SEQ ID NO: 1117763 - RNA, 24 nt, Human
uccuucguccucggcccuuccgac

SEQ ID NO: 1117764 - RNA, 22 nt, Human
uccuuggugcgaaagggaggca

SEQ ID NO: 1117765 - RNA, 21 nt, Human
ucgcugcggugggcguucucg

SEQ ID NO: 1117766 - RNA, 18 nt, Human
ugaauuagcgcccuccuu

SEQ ID NO: 1117767 - RNA, 22 nt, Human
ugccucccagccugggcgggag

SEQ ID NO: 1117768 - RNA, 19 nt, Human
uggccaccugaagcgucgg

SEQ ID NO: 1117769 - RNA, 23 nt, Human
uggccaccugaagcgucggaucc

SEQ ID NO: 1117770 - RNA, 21 nt, Human
agaacaaacauuaccugaaga

SEQ ID NO: 1117771 - RNA, 24 nt, Human
aucaugcaccacagaacaaacauu

SEQ ID NO: 1117772 - RNA, 20 nt, Human
caccacagaacaaacauuac

SEQ ID NO: 1117773 - RNA, 18 nt, Human
ccaaacuaauggguuucu

SEQ ID NO: 1117774 - RNA, 24 nt, Human
uaauggguuucuuccugaagaaca

SEQ ID NO: 1117775 - RNA, 18 nt, Human
uaccugaagaagauucca

SEQ ID NO: 1117776 - RNA, 21 nt, Human
uagagcagaaaagcucugucu

SEQ ID NO: 1117777 - RNA, 27 nt, Human
uagcuuuacuguaugcagagaaacaau

SEQ ID NO: 1117778 - RNA, 23 nt, Human
ucacucguagucucaaucauuuc

SEQ ID NO: 1117779 - RNA, 21 nt, Human
uuacuguaugcagagaaacaa

SEQ ID NO: 1117780 - RNA, 19 nt, Human
uuccugaagaacaguuucc

SEQ ID NO: 1117781 - RNA, 18 nt, Human
cagcucccggccccgcuc

SEQ ID NO: 1117782 - RNA, 20 nt, Human
cagcucccggccccgcuccu

SEQ ID NO: 1117783 - RNA, 21 nt, Human
cauacagucuacugcuaaacc

SEQ ID NO: 1117784 - RNA, 19 nt, Human
ccacuccgagcacgcccgc

SEQ ID NO: 1117785 - RNA, 25 nt, Human
cccccgccgcgagccgggcucuccc

SEQ ID NO: 1117786 - RNA, 22 nt, Human
cgaagccccgcccccuccgccu

SEQ ID NO: 1117787 - RNA, 18 nt, Human
cgaccacuccgagcacgc

SEQ ID NO: 1117788 - RNA, 24 nt, Human
cggccccgcuccuccggucccuca

SEQ ID NO: 1117789 - RNA, 19 nt, Human
cucagacuugcacucagau

SEQ ID NO: 1117790 - RNA, 20 nt, Human
cucgcagcucccggccccgc

SEQ ID NO: 1117791 - RNA, 20 nt, Human
cucgcagcucccggccccgc

SEQ ID NO: 1117792 - RNA, 22 nt, Human
cuggaacucucuugaaagacca

SEQ ID NO: 1117793 - RNA, 21 nt, Human
ucuacugcuaaacccugggac

SEQ ID NO: 1117794 - RNA, 21 nt, Human
ucugggugaaagugccagucu

SEQ ID NO: 1117795 - RNA, 22 nt, Human
ucugggugaaagugccagucug

SEQ ID NO: 1117796 - RNA, 18 nt, Human
ugaaagugccagucugga

SEQ ID NO: 1117797 - RNA, 25 nt, Human
uucugggugaaagugccagucugga

SEQ ID NO: 1117798 - RNA, 23 nt, Human
uugaaagaccauacagucuacug

SEQ ID NO: 1117799 - RNA, 19 nt, Human
uugguucugggugaaagug

SEQ ID NO: 1117800 - RNA, 22 nt, Human
uugguucugggugaaagugcca

SEQ ID NO: 1117801 - RNA, 24 nt, Human
uagccagcugcuucaggaaaacca

SEQ ID NO: 1117802 - RNA, 19 nt, Human
uccagucacaaguaacaaa

SEQ ID NO: 1117803 - RNA, 19 nt, Human
aaagaugggugagggaugg

SEQ ID NO: 1117804 - RNA, 24 nt, Human
aaagugcugggauuacaggcguga

SEQ ID NO: 1117805 - RNA, 23 nt, Human
aaccagugccuguuaguagcaca

SEQ ID NO: 1117806 - RNA, 22 nt, Human
aagaagcugggauuauaggcau

SEQ ID NO: 1117807 - RNA, 19 nt, Human
aagccaaagaaacucagau

SEQ ID NO: 1117808 - RNA, 21 nt, Human
aagcugcagggagagacugug

SEQ ID NO: 1117809 - RNA, 18 nt, Human
aaggaagugaaacugcac

SEQ ID NO: 1117810 - RNA, 22 nt, Human
aaguagcugggauuacaggugc

SEQ ID NO: 1117811 - RNA, 24 nt, Human
aagugauccacccgccucagccuc

SEQ ID NO: 1117812 - RNA, 19 nt, Human
aagugcugggauuacaggc

SEQ ID NO: 1117813 - RNA, 19 nt, Human
aagugcugggauuacaggc

SEQ ID NO: 1117814 - RNA, 26 nt, Human
aagugcugggauuacaggcgugagcc

SEQ ID NO: 1117815 - RNA, 20 nt, Human
acacugagugccugugaguc

SEQ ID NO: 1117816 - RNA, 19 nt, Human
acccaggcuggagugcaau

SEQ ID NO: 1117817 - RNA, 21 nt, Human
acccaucugucuguuccacuc

SEQ ID NO: 1117818 - RNA, 25 nt, Human
acccgccucagccucccaaagugcu

SEQ ID NO: 1117819 - RNA, 18 nt, Human
acuguguuggccaggcug

SEQ ID NO: 1117820 - RNA, 19 nt, Human
agacaaggagacaagccaa

SEQ ID NO: 1117821 - RNA, 21 nt, Human
agacaaggagacaagccaaga

SEQ ID NO: 1117822 - RNA, 20 nt, Human
agagguaaggcccaaucacu

SEQ ID NO: 1117823 - RNA, 23 nt, Human
agauaaccuagguacaaaagucu

SEQ ID NO: 1117824 - RNA, 23 nt, Human
agaucuggagguugugaucagcu

SEQ ID NO: 1117825 - RNA, 23 nt, Human
aggagccagaagccaaagaaacu

SEQ ID NO: 1117826 - RNA, 23 nt, Human
aggcaagacugaagacaaggaga

SEQ ID NO: 1117827 - RNA, 19 nt, Human
aggcaugccccaccacacc

SEQ ID NO: 1117828 - RNA, 18 nt, Human
agggaggagucugagggc

SEQ ID NO: 1117829 - RNA, 20 nt, Human
agggauggaggugauuagaa

SEQ ID NO: 1117830 - RNA, 23 nt, Human
agguagaucuggagguugugauc

SEQ ID NO: 1117831 - RNA, 23 nt, Human
agugcaaucucagcucgcugcaa

SEQ ID NO: 1117832 - RNA, 24 nt, Human
agugcccccacucagaggagccag

SEQ ID NO: 1117833 - RNA, 24 nt, Human
agugccucagccucccaagaagcu

SEQ ID NO: 1117834 - RNA, 21 nt, Human
auagaucacuggcaaaaacca

SEQ ID NO: 1117835 - RNA, 21 nt, Human
augagaaaauugaggcucaga

SEQ ID NO: 1117836 - RNA, 18 nt, Human
augggguuccaccauguu

SEQ ID NO: 1117837 - RNA, 22 nt, Human
augggguuccaccauguuggcc

SEQ ID NO: 1117838 - RNA, 24 nt, Human
augggguuccaccauguuggccag

SEQ ID NO: 1117839 - RNA, 19 nt, Human
auuacaggugccugccacc

SEQ ID NO: 1117840 - RNA, 21 nt, Human
auucuccugccucagccuccc

SEQ ID NO: 1117841 - RNA, 19 nt, Human
auuugcaugucauccuugg

SEQ ID NO: 1117842 - RNA, 23 nt, Human
auuuuccucucugcuuuucuaga

SEQ ID NO: 1117843 - RNA, 24 nt, Human
auuuuuguauuuuuaguagagaug

SEQ ID NO: 1117844 - RNA, 24 nt, Human
caaagugcugggauuacaggcgug

SEQ ID NO: 1117845 - RNA, 26 nt, Human
caaauuccugacuucaagugauccaa

SEQ ID NO: 1117846 - RNA, 23 nt, Human
caaccuccaccuccuggguucaa

SEQ ID NO: 1117847 - RNA, 22 nt, Human
caagcaauucuccugccucagc

SEQ ID NO: 1117848 - RNA, 27 nt, Human
caagcaauucuccugccucagccuccc

SEQ ID NO: 1117849 - RNA, 22 nt, Human
caagccaagacccaucaaagaa

SEQ ID NO: 1117850 - RNA, 20 nt, Human
caaggagacaagccaagacc

SEQ ID NO: 1117851 - RNA, 23 nt, Human
cacaaaacaauccuaaaaggcag

SEQ ID NO: 1117852 - RNA, 24 nt, Human
cacaaaacaauccuaaaaggcagg

SEQ ID NO: 1117853 - RNA, 18 nt, Human
cacagcccgugcucuuac

SEQ ID NO: 1117854 - RNA, 22 nt, Human
cacauuagaaucacccagcagc

SEQ ID NO: 1117855 - RNA, 24 nt, Human
caccacaccuggcuaauuuuugua

SEQ ID NO: 1117856 - RNA, 24 nt, Human
caccacgccuagcuaauuuuugua

SEQ ID NO: 1117857 - RNA, 20 nt, Human
caccauguuggccagcuggu

SEQ ID NO: 1117858 - RNA, 22 nt, Human
caccauguuggccagcugguuc

SEQ ID NO: 1117859 - RNA, 23 nt, Human
cacccaucugucuguuccacuca

SEQ ID NO: 1117860 - RNA, 23 nt, Human
cacccgccucagccucccaaagu

SEQ ID NO: 1117861 - RNA, 19 nt, Human
cacucugcaccugcucuca

SEQ ID NO: 1117862 - RNA, 23 nt, Human
cacugccccacccuacccaggaa

SEQ ID NO: 1117863 - RNA, 19 nt, Human
cacuguguuggccaggcug

SEQ ID NO: 1117864 - RNA, 21 nt, Human
cacuguguuggccaggcuggu

SEQ ID NO: 1117865 - RNA, 22 nt, Human
cacuguguuggccaggcugguc

SEQ ID NO: 1117866 - RNA, 21 nt, Human
cagaagccaaagaaacucaga

SEQ ID NO: 1117867 - RNA, 24 nt, Human
cagagucuugcucugucgcccagg

SEQ ID NO: 1117868 - RNA, 21 nt, Human
cagaugauguguagugccccc

SEQ ID NO: 1117869 - RNA, 24 nt, Human
cagcccuguuuuaccauguggagg

SEQ ID NO: 1117870 - RNA, 22 nt, Human
cagccucccaagaagcugggau

SEQ ID NO: 1117871 - RNA, 20 nt, Human
cagcucacaucccauccccu

SEQ ID NO: 1117872 - RNA, 20 nt, Human
caggagaggauggccaugcc

SEQ ID NO: 1117873 - RNA, 19 nt, Human
caggugccugccaccacgc

SEQ ID NO: 1117874 - RNA, 21 nt, Human
caggugccugccaccacgccu

SEQ ID NO: 1117875 - RNA, 23 nt, Human
cauccccauuuuacagaugagaa

SEQ ID NO: 1117876 - RNA, 24 nt, Human
cauguguugaucacuuaaaacucu

SEQ ID NO: 1117877 - RNA, 21 nt, Human
cauucuguucacugccccacc

SEQ ID NO: 1117878 - RNA, 22 nt, Human
cauuuguuuaaaaaacugagga

SEQ ID NO: 1117879 - RNA, 22 nt, Human
ccaaagugcugggauuacaggc

SEQ ID NO: 1117880 - RNA, 22 nt, Human
ccaaagugcugggauuacaggc

SEQ ID NO: 1117881 - RNA, 24 nt, Human
ccaaagugcugggauuacaggcgu

SEQ ID NO: 1117882 - RNA, 24 nt, Human
ccaagaagcugggauuauaggcau

SEQ ID NO: 1117883 - RNA, 21 nt, Human
ccaaguagcugggauuacagg

SEQ ID NO: 1117884 - RNA, 20 nt, Human
ccaccacgccuagcuaauuu

SEQ ID NO: 1117885 - RNA, 26 nt, Human
ccacccgccucagccucccaaagugc

SEQ ID NO: 1117886 - RNA, 27 nt, Human
ccaccuccuggguucaagcaauucuuu

SEQ ID NO: 1117887 - RNA, 19 nt, Human
ccacugcacccagccucac

SEQ ID NO: 1117888 - RNA, 23 nt, Human
cccaagaagcugggauuauaggc

SEQ ID NO: 1117889 - RNA, 24 nt, Human
cccaagaagcugggauuauaggca

SEQ ID NO: 1117890 - RNA, 22 nt, Human
cccaaguagcugggauuacagg

SEQ ID NO: 1117891 - RNA, 23 nt, Human
cccaaguagcugggauuacaggu

SEQ ID NO: 1117892 - RNA, 24 nt, Human
cccaaguagcugggauuacaggug

SEQ ID NO: 1117893 - RNA, 21 nt, Human
cccugaauuccagcagcaccc

SEQ ID NO: 1117894 - RNA, 23 nt, Human
ccgccucagccucccaaagugcu

SEQ ID NO: 1117895 - RNA, 25 nt, Human
ccucacucccuucccugaauuccag

SEQ ID NO: 1117896 - RNA, 19 nt, Human
ccuccaccuccuggguuca

SEQ ID NO: 1117897 - RNA, 24 nt, Human
ccuccuggguucaagcaauucucc

SEQ ID NO: 1117898 - RNA, 22 nt, Human
ccugacuucaagugauccaccc

SEQ ID NO: 1117899 - RNA, 23 nt, Human
ccuggguucaagcaauucuccug

SEQ ID NO: 1117900 - RNA, 24 nt, Human
ccuguuguuaggacaagccggggc

SEQ ID NO: 1117901 - RNA, 24 nt, Human
cgccucagccucccaaagugcugg

SEQ ID NO: 1117902 - RNA, 23 nt, Human
cuaauuuuuguauuuuuaguaga

SEQ ID NO: 1117903 - RNA, 20 nt, Human
cuaguccaagcaggucaaug

SEQ ID NO: 1117904 - RNA, 24 nt, Human
cucagccucccaaguagcugggau

SEQ ID NO: 1117905 - RNA, 21 nt, Human
cucaguuuucaccguggccag

SEQ ID NO: 1117906 - RNA, 21 nt, Human
cuccuggguucaagcaauucu

SEQ ID NO: 1117907 - RNA, 24 nt, Human
cucgcugcaaccuccaccuccugg

SEQ ID NO: 1117908 - RNA, 24 nt, Human
cucucaccacacugucuguugacc

SEQ ID NO: 1117909 - RNA, 18 nt, Human
cugcaaccuccaccuccu

SEQ ID NO: 1117910 - RNA, 21 nt, Human
cugcaaccuccaccuccuggg

SEQ ID NO: 1117911 - RNA, 23 nt, Human
cugcaaccuccaccuccuggguu

SEQ ID NO: 1117912 - RNA, 20 nt, Human
cugcaccugcucucaccaca

SEQ ID NO: 1117913 - RNA, 21 nt, Human
cugcccccucacucccuuccc

SEQ ID NO: 1117914 - RNA, 23 nt, Human
cugccucagccucccaaguagcu

SEQ ID NO: 1117915 - RNA, 24 nt, Human
cugggguuucacuguguuggccag

SEQ ID NO: 1117916 - RNA, 18 nt, Human
cugucacccaggcuggag

SEQ ID NO: 1117917 - RNA, 19 nt, Human
cugucgcccaggcuggagu

SEQ ID NO: 1117918 - RNA, 24 nt, Human
cuuuuaguagagcugggguuucac

SEQ ID NO: 1117919 - RNA, 20 nt, Human
cuuuuuuuuuuuuuuuuugg

SEQ ID NO: 1117920 - RNA, 22 nt, Human
gaagugaaacugcacaagguca

SEQ ID NO: 1117921 - RNA, 20 nt, Human
gacaaggagacaagccaaga

SEQ ID NO: 1117922 - RNA, 20 nt, Human
gacugaagacaaggagacaa

SEQ ID NO: 1117923 - RNA, 24 nt, Human
gacuucaagugauccacccgccuc

SEQ ID NO: 1117924 - RNA, 21 nt, Human
gagacagagucuugcucuguc

SEQ ID NO: 1117925 - RNA, 19 nt, Human
gaggcaggacugccaggug

SEQ ID NO: 1117926 - RNA, 22 nt, Human
gagggaggagucugagggcucc

SEQ ID NO: 1117927 - RNA, 18 nt, Human
gauuacaggcgugagcca

SEQ ID NO: 1117928 - RNA, 22 nt, Human
gauuacaggcgugagccacugc

SEQ ID NO: 1117929 - RNA, 23 nt, Human
gauuacaggcgugagccacugca

SEQ ID NO: 1117930 - RNA, 18 nt, Human
gauuacaggugccugcca

SEQ ID NO: 1117931 - RNA, 22 nt, Human
gcaaccuccaccuccuggguuc

SEQ ID NO: 1117932 - RNA, 22 nt, Human
gcaagacugaagacaaggagac

SEQ ID NO: 1117933 - RNA, 21 nt, Human
gccaggcuggucccaaauucc

SEQ ID NO: 1117934 - RNA, 19 nt, Human
gcccaggcuggaguacagu

SEQ ID NO: 1117935 - RNA, 20 nt, Human
gcccccucacucccuucccu

SEQ ID NO: 1117936 - RNA, 20 nt, Human
gccucagccucccaaguagc

SEQ ID NO: 1117937 - RNA, 25 nt, Human
gcucugucacccaggcuggagugca

SEQ ID NO: 1117938 - RNA, 25 nt, Human
gcucugucgcccaggcuggaguaca

SEQ ID NO: 1117939 - RNA, 18 nt, Human
gcugcaaccuccaccucc

SEQ ID NO: 1117940 - RNA, 19 nt, Human
ggagaagcagauaaccuag

SEQ ID NO: 1117941 - RNA, 25 nt, Human
ggagaagcagauaaccuagguacaa

SEQ ID NO: 1117942 - RNA, 22 nt, Human
ggaguacagugccucagccucc

SEQ ID NO: 1117943 - RNA, 22 nt, Human
ggcuggagugcaaucucagcuc

SEQ ID NO: 1117944 - RNA, 24 nt, Human
ggcuggucccaaauuccugacuuc

SEQ ID NO: 1117945 - RNA, 20 nt, Human
gggaacacuucacacauuug

SEQ ID NO: 1117946 - RNA, 20 nt, Human
gggcuccugggcccucgccc

SEQ ID NO: 1117947 - RNA, 22 nt, Human
gggguuccaccauguuggccag

SEQ ID NO: 1117948 - RNA, 22 nt, Human
gggguuucacuguguuggccag

SEQ ID NO: 1117949 - RNA, 23 nt, Human
gggguuucacuguguuggccagg

SEQ ID NO: 1117950 - RNA, 20 nt, Human
gguacaaaagucuugagaug

SEQ ID NO: 1117951 - RNA, 21 nt, Human
ggugauuagaacuuggaaaaa

SEQ ID NO: 1117952 - RNA, 23 nt, Human
guagagaugggguuccaccaugu

SEQ ID NO: 1117953 - RNA, 18 nt, Human
guagcugggauuacaggu

SEQ ID NO: 1117954 - RNA, 25 nt, Human
guccaauuauaguacaugugcugcu

SEQ ID NO: 1117955 - RNA, 24 nt, Human
gugauccacccgccucagccuccc

SEQ ID NO: 1117956 - RNA, 20 nt, Human
guggaggguggcuuaguaca

SEQ ID NO: 1117957 - RNA, 23 nt, Human
guggaggguggcuuaguacaugg

SEQ ID NO: 1117958 - RNA, 21 nt, Human
uaaaaaacugaggaccacugg

SEQ ID NO: 1117959 - RNA, 18 nt, Human
uaaaaggcagguauuugc

SEQ ID NO: 1117960 - RNA, 20 nt, Human
uaaaucaacacugcccccuc

SEQ ID NO: 1117961 - RNA, 22 nt, Human
uaaccacugaggaugcucaggu

SEQ ID NO: 1117962 - RNA, 25 nt, Human
uaaggcccaaucacuggguuuuggu

SEQ ID NO: 1117963 - RNA, 22 nt, Human
uaauuuuuguacuuuuaguaga

SEQ ID NO: 1117964 - RNA, 24 nt, Human
uaauuuuuguauuuuuaguagaga

SEQ ID NO: 1117965 - RNA, 19 nt, Human
uacaggcgugagccacugc

SEQ ID NO: 1117966 - RNA, 24 nt, Human
uacaggcgugagccacugcaccca

SEQ ID NO: 1117967 - RNA, 22 nt, Human
uacaggugccugccaccacgcc

SEQ ID NO: 1117968 - RNA, 19 nt, Human
uacccaggaaggccuuucc

SEQ ID NO: 1117969 - RNA, 22 nt, Human
uagagaugggguuccaccaugu

SEQ ID NO: 1117970 - RNA, 25 nt, Human
uagauggaggcaagacugaagacaa

SEQ ID NO: 1117971 - RNA, 19 nt, Human
uagauucugguccagcuca

SEQ ID NO: 1117972 - RNA, 24 nt, Human
uaggagaagcagauaaccuaggua

SEQ ID NO: 1117973 - RNA, 24 nt, Human
uaguagagaugggguuccaccaug

SEQ ID NO: 1117974 - RNA, 26 nt, Human
uaguagagaugggguuccaccauguu

SEQ ID NO: 1117975 - RNA, 20 nt, Human
uaguagagcugggguuucac

SEQ ID NO: 1117976 - RNA, 20 nt, Human
uaguagagcugggguuucac

SEQ ID NO: 1117977 - RNA, 24 nt, Human
uaguagagcugggguuucacugug

SEQ ID NO: 1117978 - RNA, 21 nt, Human
uaugaagcuacuuuuauuuaa

SEQ ID NO: 1117979 - RNA, 23 nt, Human
ucaacacugcccccucacucccu

SEQ ID NO: 1117980 - RNA, 19 nt, Human
ucaagcaauucuccugccu

SEQ ID NO: 1117981 - RNA, 20 nt, Human
ucacccagcagcuccggacc

SEQ ID NO: 1117982 - RNA, 22 nt, Human
ucacccaggcuggagugcaauc

SEQ ID NO: 1117983 - RNA, 22 nt, Human
ucacuguguuggccaggcuggu

SEQ ID NO: 1117984 - RNA, 21 nt, Human
ucacuuaucauuauuaaacuc

SEQ ID NO: 1117985 - RNA, 20 nt, Human
ucagccucccaaguagcugg

SEQ ID NO: 1117986 - RNA, 21 nt, Human
uccacccgccucagccuccca

SEQ ID NO: 1117987 - RNA, 24 nt, Human
ucccaaagugcugggauuacaggc

SEQ ID NO: 1117988 - RNA, 24 nt, Human
ucccaagaagcugggauuauaggc

SEQ ID NO: 1117989 - RNA, 23 nt, Human
ucccaaguagcugggauuacagg

SEQ ID NO: 1117990 - RNA, 24 nt, Human
ucccaaguagcugggauuacaggu

SEQ ID NO: 1117991 - RNA, 18 nt, Human
ucccuucccugaauucca

SEQ ID NO: 1117992 - RNA, 24 nt, Human
uccugggcccucgccccucgggag

SEQ ID NO: 1117993 - RNA, 21 nt, Human
uccuggguucaagcaauucuc

SEQ ID NO: 1117994 - RNA, 24 nt, Human
uccuggguucaagcaauucuccug

SEQ ID NO: 1117995 - RNA, 23 nt, Human
ucgcccaggcuggaguacagugc

SEQ ID NO: 1117996 - RNA, 24 nt, Human
ucgcugcaaccuccaccuccuggg

SEQ ID NO: 1117997 - RNA, 25 nt, Human
ucgcugcaaccuccaccuccugggu

SEQ ID NO: 1117998 - RNA, 27 nt, Human
ucgcugcaaccuccaccuccuggguuc

SEQ ID NO: 1117999 - RNA, 26 nt, Human
ucuccugccucagccucccaaguagc

SEQ ID NO: 1118000 - RNA, 22 nt, Human
ucucugugcugugauaucacuc

SEQ ID NO: 1118001 - RNA, 24 nt, Human
ucugucacccaggcuggagugcaa

SEQ ID NO: 1118002 - RNA, 18 nt, Human
ucugucgcccaggcugga

SEQ ID NO: 1118003 - RNA, 23 nt, Human
ucuugcucugucacccaggcugg

SEQ ID NO: 1118004 - RNA, 24 nt, Human
ucuugcucugucacccaggcugga

SEQ ID NO: 1118005 - RNA, 23 nt, Human
ucuugcucugucgcccaggcugg

SEQ ID NO: 1118006 - RNA, 24 nt, Human
ucuugcucugucgcccaggcugga

SEQ ID NO: 1118007 - RNA, 19 nt, Human
ugaccagcuagcccucccc

SEQ ID NO: 1118008 - RNA, 21 nt, Human
ugacuucaagugauccacccg

SEQ ID NO: 1118009 - RNA, 24 nt, Human
ugacuucaagugauccacccgccu

SEQ ID NO: 1118010 - RNA, 18 nt, Human
ugagacagagucuugcuc

SEQ ID NO: 1118011 - RNA, 22 nt, Human
ugagacagagucuugcucuguc

SEQ ID NO: 1118012 - RNA, 25 nt, Human
ugaggcucagagaggggaaggaagu

SEQ ID NO: 1118013 - RNA, 23 nt, Human
ugagugccugugagucagcuuug

SEQ ID NO: 1118014 - RNA, 20 nt, Human
ugauaucacucugcaccugc

SEQ ID NO: 1118015 - RNA, 22 nt, Human
ugaugcgugagggaggagucug

SEQ ID NO: 1118016 - RNA, 19 nt, Human
ugauuuggggguguuucuc

SEQ ID NO: 1118017 - RNA, 20 nt, Human
ugcacagcccgugcucuuac

SEQ ID NO: 1118018 - RNA, 24 nt, Human
ugccucagccucccaagaagcugg

SEQ ID NO: 1118019 - RNA, 24 nt, Human
ugccucagccucccaaguagcugg

SEQ ID NO: 1118020 - RNA, 24 nt, Human
ugcucugucacccaggcuggagug

SEQ ID NO: 1118021 - RNA, 22 nt, Human
ugcucugucgcccaggcuggag

SEQ ID NO: 1118022 - RNA, 23 nt, Human
ugcucuuacccuugucccuuggu

SEQ ID NO: 1118023 - RNA, 24 nt, Human
ugcugggauuacaggcgugagcca

SEQ ID NO: 1118024 - RNA, 22 nt, Human
uggauggguugcuucucugugc

SEQ ID NO: 1118025 - RNA, 24 nt, Human
uggccaggcuggucccaaauuccu

SEQ ID NO: 1118026 - RNA, 18 nt, Human
ugggauuacaggcgugag

SEQ ID NO: 1118027 - RNA, 19 nt, Human
ugggauuacaggcgugagc

SEQ ID NO: 1118028 - RNA, 21 nt, Human
ugggauuacaggcgugagcca

SEQ ID NO: 1118029 - RNA, 22 nt, Human
ugggauuacaggcgugagccac

SEQ ID NO: 1118030 - RNA, 22 nt, Human
ugggauuacaggcgugagccac

SEQ ID NO: 1118031 - RNA, 24 nt, Human
ugggauuacaggcgugagccacug

SEQ ID NO: 1118032 - RNA, 26 nt, Human
ugggauuacaggcgugagccacugca

SEQ ID NO: 1118033 - RNA, 21 nt, Human
ugggauuacaggugccugcca

SEQ ID NO: 1118034 - RNA, 22 nt, Human
ugggauuacaggugccugccac

SEQ ID NO: 1118035 - RNA, 24 nt, Human
ugggauuacaggugccugccacca

SEQ ID NO: 1118036 - RNA, 21 nt, Human
ugggauuauaggcaugcccca

SEQ ID NO: 1118037 - RNA, 24 nt, Human
ugggauuauaggcaugccccacca

SEQ ID NO: 1118038 - RNA, 19 nt, Human
ugggguuccaccauguugg

SEQ ID NO: 1118039 - RNA, 24 nt, Human
ugggguuucacuguguuggccagg

SEQ ID NO: 1118040 - RNA, 23 nt, Human
ugggugagggaugggcugccugg

SEQ ID NO: 1118041 - RNA, 21 nt, Human
uggguucaagcaauucuccug

SEQ ID NO: 1118042 - RNA, 23 nt, Human
uggguucaagcaauucuccugcc

SEQ ID NO: 1118043 - RNA, 24 nt, Human
uggguucaagcaauucuccugccu

SEQ ID NO: 1118044 - RNA, 21 nt, Human
ugguugucaucauugucuacu

SEQ ID NO: 1118045 - RNA, 21 nt, Human
uguauuuuuaguagagauggg

SEQ ID NO: 1118046 - RNA, 20 nt, Human
ugucacccaggcuggagugc

SEQ ID NO: 1118047 - RNA, 25 nt, Human
ugucuuauagaucacuggcaaaaac

SEQ ID NO: 1118048 - RNA, 23 nt, Human
ugugacaugugauagcuaccuua

SEQ ID NO: 1118049 - RNA, 24 nt, Human
ugugauaucacucugcaccugcuc

SEQ ID NO: 1118050 - RNA, 20 nt, Human
uguguagugcccccacucag

SEQ ID NO: 1118051 - RNA, 24 nt, Human
uguguuggccaggcuggucccaaa

SEQ ID NO: 1118052 - RNA, 19 nt, Human
uguuaggacaagcugcagg

SEQ ID NO: 1118053 - RNA, 23 nt, Human
uguucagacuugucucugugccu

SEQ ID NO: 1118054 - RNA, 22 nt, Human
uguuggccaggcuggucccaaa

SEQ ID NO: 1118055 - RNA, 21 nt, Human
uuaaaaaacugaggaccacug

SEQ ID NO: 1118056 - RNA, 22 nt, Human
uuaguagagaugggguuccacc

SEQ ID NO: 1118057 - RNA, 24 nt, Human
uuaguagagaugggguuccaccau

SEQ ID NO: 1118058 - RNA, 18 nt, Human
uuaguagagcugggguuu

SEQ ID NO: 1118059 - RNA, 21 nt, Human
uuaguagagcugggguuucac

SEQ ID NO: 1118060 - RNA, 24 nt, Human
uuaguagagcugggguuucacugu

SEQ ID NO: 1118061 - RNA, 21 nt, Human
uucaagcaauucuccugccuc

SEQ ID NO: 1118062 - RNA, 24 nt, Human
uucaagcaauucuccugccucagc

SEQ ID NO: 1118063 - RNA, 23 nt, Human
uucaagugauccacccgccucag

SEQ ID NO: 1118064 - RNA, 20 nt, Human
uucagacuugucucugugcc

SEQ ID NO: 1118065 - RNA, 18 nt, Human
uuccaccauguuggccag

SEQ ID NO: 1118066 - RNA, 21 nt, Human
uugaugcuaagucaaaagcuu

SEQ ID NO: 1118067 - RNA, 24 nt, Human
uugcucugucacccaggcuggagu

SEQ ID NO: 1118068 - RNA, 23 nt, Human
uuguauuuuuaguagagaugggg

SEQ ID NO: 1118069 - RNA, 24 nt, Human
uuucacuguguuggccaggcuggu

SEQ ID NO: 1118070 - RNA, 20 nt, Human
uuuucuagauucugguccag

SEQ ID NO: 1118071 - RNA, 24 nt, Human
uuuuuaguagagaugggguuccac

SEQ ID NO: 1118072 - RNA, 20 nt, Human
uuuuuguacuuuuaguagag

SEQ ID NO: 1118073 - RNA, 20 nt, Human
uuuuuguauuuuuaguagag

SEQ ID NO: 1118074 - RNA, 20 nt, Human
uuuuuuuuuuugagacagag

SEQ ID NO: 1118075 - RNA, 24 nt, Human
uuuuuuuuuuuugagacagagucu

SEQ ID NO: 1118076 - RNA, 20 nt, Human
ccuugagcggggaagguggc

SEQ ID NO: 1118077 - RNA, 18 nt, Human
ugagcggggaagguggcg

SEQ ID NO: 1118078 - RNA, 26 nt, Human
aaagacuccuaucaguuaacaacugg

SEQ ID NO: 1118079 - RNA, 19 nt, Human
aaaggcacucaacacaugg

SEQ ID NO: 1118080 - RNA, 27 nt, Human
aagaagaaauauauaagcucuggagaa

SEQ ID NO: 1118081 - RNA, 19 nt, Human
acacauggaacuggacucu

SEQ ID NO: 1118082 - RNA, 22 nt, Human
agagaggggaauaaaaggggga

SEQ ID NO: 1118083 - RNA, 21 nt, Human
agaugccaguggugagguuug

SEQ ID NO: 1118084 - RNA, 18 nt, Human
agcaagagugcccuaaau

SEQ ID NO: 1118085 - RNA, 22 nt, Human
aggagagaugaagagacagcuc

SEQ ID NO: 1118086 - RNA, 18 nt, Human
agggggucaaaggcacuc

SEQ ID NO: 1118087 - RNA, 25 nt, Human
aguaaggggagagaugcaggagaga

SEQ ID NO: 1118088 - RNA, 21 nt, Human
auaagcucuggagaaagcauc

SEQ ID NO: 1118089 - RNA, 20 nt, Human
auaggcuuggacugagauuu

SEQ ID NO: 1118090 - RNA, 18 nt, Human
augcacagaucacuuuau

SEQ ID NO: 1118091 - RNA, 19 nt, Human
auggugacaauuaugguag

SEQ ID NO: 1118092 - RNA, 23 nt, Human
cagaaguagaauaaauugaagag

SEQ ID NO: 1118093 - RNA, 20 nt, Human
caggccccuugaccucacag

SEQ ID NO: 1118094 - RNA, 28 nt, Human
cagguccagaaguagaauaaauugaaga

SEQ ID NO: 1118095 - RNA, 24 nt, Human
cagugaaauaaccagcauaagaca

SEQ ID NO: 1118096 - RNA, 21 nt, Human
cauaagacagauaagggacaa

SEQ ID NO: 1118097 - RNA, 23 nt, Human
caucccagcaagagugcccuaaa

SEQ ID NO: 1118098 - RNA, 23 nt, Human
ccuaacccagcaggccccuugac

SEQ ID NO: 1118099 - RNA, 21 nt, Human
ccucacaguuugugcagguga

SEQ ID NO: 1118100 - RNA, 21 nt, Human
cugacuuuaccuuaccccggc

SEQ ID NO: 1118101 - RNA, 20 nt, Human
gaaagcaucccagcaagagg

SEQ ID NO: 1118102 - RNA, 19 nt, Human
gaugcacagaucacuuuau

SEQ ID NO: 1118103 - RNA, 19 nt, Human
gaugcagaugucgggagga

SEQ ID NO: 1118104 - RNA, 22 nt, Human
gaugcaggagagagaggagaga

SEQ ID NO: 1118105 - RNA, 18 nt, Human
gcagcaaaugccagugga

SEQ ID NO: 1118106 - RNA, 23 nt, Human
gcagugaaauaaccagcauaaga

SEQ ID NO: 1118107 - RNA, 18 nt, Human
gccccuugaccucacagu

SEQ ID NO: 1118108 - RNA, 19 nt, Human
gcggagcagcugguagccc

SEQ ID NO: 1118109 - RNA, 21 nt, Human
ggagcagcugguagcccaagg

SEQ ID NO: 1118110 - RNA, 21 nt, Human
ggccccuugaccucacaguuu

SEQ ID NO: 1118111 - RNA, 19 nt, Human
gggaauaaaagggggaaga

SEQ ID NO: 1118112 - RNA, 24 nt, Human
guagaaccuguagaugccaguggu

SEQ ID NO: 1118113 - RNA, 21 nt, Human
guaguaucacaguuuggguaa

SEQ ID NO: 1118114 - RNA, 22 nt, Human
uaagaagaaauauauaagcucu

SEQ ID NO: 1118115 - RNA, 23 nt, Human
uaugguaguaucacaguuugggu

SEQ ID NO: 1118116 - RNA, 22 nt, Human
ucaaaaguuucaucaacacuag

SEQ ID NO: 1118117 - RNA, 24 nt, Human
uccagaaguagaauaaauugaaga

SEQ ID NO: 1118118 - RNA, 20 nt, Human
uccagguccagaaguagaau

SEQ ID NO: 1118119 - RNA, 19 nt, Human
ucucucgagcuccugcugu

SEQ ID NO: 1118120 - RNA, 22 nt, Human
ugaagagacagcucaugagucc

SEQ ID NO: 1118121 - RNA, 22 nt, Human
ugaauuucacuugggucucaua

SEQ ID NO: 1118122 - RNA, 22 nt, Human
ugacuccauggaugcguuugaa

SEQ ID NO: 1118123 - RNA, 23 nt, Human
ugagaaacuggcuccuggucugu

SEQ ID NO: 1118124 - RNA, 18 nt, Human
ugagauuuucucguugac

SEQ ID NO: 1118125 - RNA, 23 nt, Human
ugagcaagacagaugggcaaugu

SEQ ID NO: 1118126 - RNA, 22 nt, Human
ugggagaguuuaagagugagca

SEQ ID NO: 1118127 - RNA, 22 nt, Human
ugggguagaaccuguagaugcc

SEQ ID NO: 1118128 - RNA, 21 nt, Human
uggguuaguccugucccgggg

SEQ ID NO: 1118129 - RNA, 25 nt, Human
ugguagcccaaggccuugucaucag

SEQ ID NO: 1118130 - RNA, 23 nt, Human
uguagaugggguagaaccuguag

SEQ ID NO: 1118131 - RNA, 23 nt, Human
uugucaucagaagggcugacggg

SEQ ID NO: 1118132 - RNA, 19 nt, Human
uuucugcugacuuuaccuu

SEQ ID NO: 1118133 - RNA, 20 nt, Human
uuugaagucuucaggcugua

SEQ ID NO: 1118134 - RNA, 23 nt, Human
aaauccaaaaauaaaucugaaau

SEQ ID NO: 1118135 - RNA, 22 nt, Human
aaccagaaacuacacauccacc

SEQ ID NO: 1118136 - RNA, 23 nt, Human
aagagguugauucugagccaaca

SEQ ID NO: 1118137 - RNA, 23 nt, Human
aaugucagguuagcaaaggguug

SEQ ID NO: 1118138 - RNA, 20 nt, Human
acaagcaaaaacacauagaa

SEQ ID NO: 1118139 - RNA, 19 nt, Human
acacuucugcuuucugaug

SEQ ID NO: 1118140 - RNA, 18 nt, Human
accuucaggcuauucaga

SEQ ID NO: 1118141 - RNA, 20 nt, Human
acuaccucagccuccugagu

SEQ ID NO: 1118142 - RNA, 25 nt, Human
acucuguugcccaagcuggaaugug

SEQ ID NO: 1118143 - RNA, 23 nt, Human
agaaaaagaaaaauugaaguaaa

SEQ ID NO: 1118144 - RNA, 18 nt, Human
agacaaagucucauagau

SEQ ID NO: 1118145 - RNA, 18 nt, Human
agguggucaggucaccgu

SEQ ID NO: 1118146 - RNA, 24 nt, Human
auaaaauuaccuucaggcuauuca

SEQ ID NO: 1118147 - RNA, 25 nt, Human
auaaaauuaccuucaggcuauucag

SEQ ID NO: 1118148 - RNA, 20 nt, Human
caaaacacuucuggucccaa

SEQ ID NO: 1118149 - RNA, 18 nt, Human
caaacuuuacaagcaaaa

SEQ ID NO: 1118150 - RNA, 24 nt, Human
caaaguacucggaucacuggcaug

SEQ ID NO: 1118151 - RNA, 23 nt, Human
caaccucccagucucaaacaauc

SEQ ID NO: 1118152 - RNA, 20 nt, Human
caagauccuggcucaguuca

SEQ ID NO: 1118153 - RNA, 22 nt, Human
caaggugugucucaccucccuu

SEQ ID NO: 1118154 - RNA, 22 nt, Human
caccuaagccacagagaugcca

SEQ ID NO: 1118155 - RNA, 22 nt, Human
caccuaagccacagagaugcca

SEQ ID NO: 1118156 - RNA, 18 nt, Human
caccuccauguccucaaa

SEQ ID NO: 1118157 - RNA, 23 nt, Human
caccuggcuaauuuuuuaauuau

SEQ ID NO: 1118158 - RNA, 18 nt, Human
caccugucuuggcuuccc

SEQ ID NO: 1118159 - RNA, 23 nt, Human
caccugucuuggcuucccaaagu

SEQ ID NO: 1118160 - RNA, 19 nt, Human
cacucuguugcccaagcug

SEQ ID NO: 1118161 - RNA, 19 nt, Human
cacuggcaugaacugcauc

SEQ ID NO: 1118162 - RNA, 25 nt, Human
cagaaacuacacauccaaccuucag

SEQ ID NO: 1118163 - RNA, 18 nt, Human
cagaauccuucgauucuc

SEQ ID NO: 1118164 - RNA, 24 nt, Human
cagccucaaccucccagucucaaa

SEQ ID NO: 1118165 - RNA, 20 nt, Human
cagccuccugaguaccuggg

SEQ ID NO: 1118166 - RNA, 21 nt, Human
cagcuccugaguuucacuccc

SEQ ID NO: 1118167 - RNA, 21 nt, Human
cagucuggccucaaacuccug

SEQ ID NO: 1118168 - RNA, 22 nt, Human
caguucagccucaaccucccag

SEQ ID NO: 1118169 - RNA, 22 nt, Human
caugacuuaccauggccuggga

SEQ ID NO: 1118170 - RNA, 21 nt, Human
ccaaaacacuucuggucccaa

SEQ ID NO: 1118171 - RNA, 23 nt, Human
ccacagagaugccacauaucaga

SEQ ID NO: 1118172 - RNA, 22 nt, Human
ccaguacauagaaaaagaaaaa

SEQ ID NO: 1118173 - RNA, 19 nt, Human
ccagucucaaacaauccua

SEQ ID NO: 1118174 - RNA, 22 nt, Human
ccagucucaaacaauccuacua

SEQ ID NO: 1118175 - RNA, 20 nt, Human
cccagucucaaacaauccua

SEQ ID NO: 1118176 - RNA, 24 nt, Human
ccuacuaccucagccuccugagua

SEQ ID NO: 1118177 - RNA, 22 nt, Human
ccugaguaccugggacuacagg

SEQ ID NO: 1118178 - RNA, 22 nt, Human
ccuggcucaguucagccucaac

SEQ ID NO: 1118179 - RNA, 21 nt, Human
ccugggcucaagagauccacc

SEQ ID NO: 1118180 - RNA, 22 nt, Human
ccugggcucaagagauccaccu

SEQ ID NO: 1118181 - RNA, 23 nt, Human
cuaaagacuuaagaagucaguag

SEQ ID NO: 1118182 - RNA, 24 nt, Human
cucaaacaauccuacuaccucagc

SEQ ID NO: 1118183 - RNA, 22 nt, Human
cucagaaaagccaaugucaaaa

SEQ ID NO: 1118184 - RNA, 19 nt, Human
cuccugaguuucacucccc

SEQ ID NO: 1118185 - RNA, 26 nt, Human
cucuucucagaaaagccaaugucaaa

SEQ ID NO: 1118186 - RNA, 22 nt, Human
cugcuuucugaugguccaaugu

SEQ ID NO: 1118187 - RNA, 22 nt, Human
cuuauugguaaccaaaacccaa

SEQ ID NO: 1118188 - RNA, 21 nt, Human
cuucucagaaaagccaauguc

SEQ ID NO: 1118189 - RNA, 23 nt, Human
cuucuggucccaagcaucucauc

SEQ ID NO: 1118190 - RNA, 20 nt, Human
gagacagggucucacucugu

SEQ ID NO: 1118191 - RNA, 21 nt, Human
gagagcuuacaggucauaggu

SEQ ID NO: 1118192 - RNA, 24 nt, Human
gagauccaccugucuuggcuuccc

SEQ ID NO: 1118193 - RNA, 19 nt, Human
gagguggucaggucaccgu

SEQ ID NO: 1118194 - RNA, 20 nt, Human
gcaaacaaaauauaagcaca

SEQ ID NO: 1118195 - RNA, 18 nt, Human
gcagucuggccucaaacu

SEQ ID NO: 1118196 - RNA, 19 nt, Human
ggauggggagauguuggca

SEQ ID NO: 1118197 - RNA, 18 nt, Human
ggcaauugguugaaagag

SEQ ID NO: 1118198 - RNA, 21 nt, Human
ggugauaaagcagcuugagga

SEQ ID NO: 1118199 - RNA, 21 nt, Human
guagaaacgaggucucacugu

SEQ ID NO: 1118200 - RNA, 18 nt, Human
gugucucaccucccuucc

SEQ ID NO: 1118201 - RNA, 23 nt, Human
uaaaaccagaaacuacacaucca

SEQ ID NO: 1118202 - RNA, 23 nt, Human
uaacaaggugugucucaccuccc

SEQ ID NO: 1118203 - RNA, 22 nt, Human
uaaccaaaacccaaauucugua

SEQ ID NO: 1118204 - RNA, 22 nt, Human
uaacuaguguguugcaaacaaa

SEQ ID NO: 1118205 - RNA, 21 nt, Human
uaagcuuugucuaaagacuua

SEQ ID NO: 1118206 - RNA, 22 nt, Human
uacaggugugcaccaccacacc

SEQ ID NO: 1118207 - RNA, 24 nt, Human
uaccucagccuccugaguaccugg

SEQ ID NO: 1118208 - RNA, 19 nt, Human
uagccagaaaggaauguuu

SEQ ID NO: 1118209 - RNA, 19 nt, Human
uaggaagcuggcauaucau

SEQ ID NO: 1118210 - RNA, 21 nt, Human
uaugcaaaaauauccaguaca

SEQ ID NO: 1118211 - RNA, 18 nt, Human
ucacuugugcauaaacuc

SEQ ID NO: 1118212 - RNA, 21 nt, Human
ucacuugugcauaaacuccaa

SEQ ID NO: 1118213 - RNA, 21 nt, Human
ucaguucagccucaaccuccc

SEQ ID NO: 1118214 - RNA, 23 nt, Human
ucaguucagccucaaccucccag

SEQ ID NO: 1118215 - RNA, 22 nt, Human
ucaucuaagggauacucaacuc

SEQ ID NO: 1118216 - RNA, 24 nt, Human
uccugaguaccugggacuacaggu

SEQ ID NO: 1118217 - RNA, 18 nt, Human
uccugaguuucacucccc

SEQ ID NO: 1118218 - RNA, 18 nt, Human
uccugggcucaagagauc

SEQ ID NO: 1118219 - RNA, 19 nt, Human
uccugggcucaagagaucc

SEQ ID NO: 1118220 - RNA, 23 nt, Human
ucucacucuguugcccaagcugg

SEQ ID NO: 1118221 - RNA, 24 nt, Human
ucucacucuguugcccaagcugga

SEQ ID NO: 1118222 - RNA, 18 nt, Human
ucuguuucaggcauaaaa

SEQ ID NO: 1118223 - RNA, 20 nt, Human
ugaaacuuuuugagcacuga

SEQ ID NO: 1118224 - RNA, 20 nt, Human
ugacuuaccauggccuggga

SEQ ID NO: 1118225 - RNA, 23 nt, Human
ugacuuaccauggccugggauac

SEQ ID NO: 1118226 - RNA, 20 nt, Human
ugagacagggucucacucug

SEQ ID NO: 1118227 - RNA, 22 nt, Human
ugagacagggucucacucuguu

SEQ ID NO: 1118228 - RNA, 23 nt, Human
ugcaaacaaaauauaagcacaag

SEQ ID NO: 1118229 - RNA, 21 nt, Human
ugcccaagcuggaauguggug

SEQ ID NO: 1118230 - RNA, 23 nt, Human
ugccugagguggucaggucaccg

SEQ ID NO: 1118231 - RNA, 18 nt, Human
uggaaaccaaggucucug

SEQ ID NO: 1118232 - RNA, 24 nt, Human
uggaaugugguggcaagauccugg

SEQ ID NO: 1118233 - RNA, 20 nt, Human
uggacauauauuuguggaga

SEQ ID NO: 1118234 - RNA, 22 nt, Human
uggacauauauuuguggagacu

SEQ ID NO: 1118235 - RNA, 22 nt, Human
uggcauaucauuaaaaaacuuc

SEQ ID NO: 1118236 - RNA, 21 nt, Human
ugggacuacaggugugcacca

SEQ ID NO: 1118237 - RNA, 24 nt, Human
ugggacuacaggugugcaccacca

SEQ ID NO: 1118238 - RNA, 26 nt, Human
ugggacucuuauugccacaaucaguc

SEQ ID NO: 1118239 - RNA, 24 nt, Human
ugggcucaagagauccaccugucu

SEQ ID NO: 1118240 - RNA, 22 nt, Human
ugucucaccucccuuccuauca

SEQ ID NO: 1118241 - RNA, 19 nt, Human
uguggaaaccaaggucucu

SEQ ID NO: 1118242 - RNA, 18 nt, Human
ugugguggcaagauccug

SEQ ID NO: 1118243 - RNA, 25 nt, Human
ugugguggcaagauccuggcucaac

SEQ ID NO: 1118244 - RNA, 20 nt, Human
uuaaagagguugauucugag

SEQ ID NO: 1118245 - RNA, 21 nt, Human
uucgauucucuguuggcuaga

SEQ ID NO: 1118246 - RNA, 21 nt, Human
uuggauggggagauguuggca

SEQ ID NO: 1118247 - RNA, 21 nt, Human
uuucucuucucagaaaagcca

SEQ ID NO: 1118248 - RNA, 23 nt, Human
uuuuuuuuuugagacagggucuc

SEQ ID NO: 1118249 - RNA, 20 nt, Human
uuuuuuuuuuugagacaggg

SEQ ID NO: 1118250 - RNA, 23 nt, Human
uuuuuuuuuuuugagacaggguc

SEQ ID NO: 1118251 - RNA, 26 nt, Human
uuuuuuuuuuuugagacagggucuca

SEQ ID NO: 1118252 - RNA, 18 nt, Human
uuuuuuuuuuuuuuuuug

SEQ ID NO: 1118253 - RNA, 30 nt, Human; identical to SEQ ID NO: 526987

SEQ ID NO: 1118254 - RNA, 25 nt, Human
aaaaaaacaauuuauugaagaaaca

SEQ ID NO: 1118255 - RNA, 18 nt, Human
aaacaaaacauagcaaaa

SEQ ID NO: 1118256 - RNA, 18 nt, Human
aaacaaacaaaacauagc

SEQ ID NO: 1118257 - RNA, 21 nt, Human
aaauauaugcuucagaguaua

SEQ ID NO: 1118258 - RNA, 24 nt, Human
aagaaaaaaacaauuuauugaaga

SEQ ID NO: 1118259 - RNA, 25 nt, Human
aagaaacacaaauagccccaaaaca

SEQ ID NO: 1118260 - RNA, 21 nt, Human
aaggaaacaaacaaaacauag

SEQ ID NO: 1118261 - RNA, 22 nt, Human
acagcccccuucuuggguucaa

SEQ ID NO: 1118262 - RNA, 24 nt, Human
acauucaucccuucuucccuccau

SEQ ID NO: 1118263 - RNA, 24 nt, Human
accacaaaggaaacaaacaaaaca

SEQ ID NO: 1118264 - RNA, 24 nt, Human
agaaacacaaauagccccaaaaca

SEQ ID NO: 1118265 - RNA, 19 nt, Human
agaagcuggaagauaaacu

SEQ ID NO: 1118266 - RNA, 24 nt, Human
agcuguaagucuggguuaccacag

SEQ ID NO: 1118267 - RNA, 18 nt, Human
agggugagguauagggaa

SEQ ID NO: 1118268 - RNA, 22 nt, Human
auagccccaaaacauaccagaa

SEQ ID NO: 1118269 - RNA, 20 nt, Human
auauaccugugcacagcaug

SEQ ID NO: 1118270 - RNA, 21 nt, Human
auuuauuugccaagaaaucuu

SEQ ID NO: 1118271 - RNA, 18 nt, Human
caacacagaagacuucug

SEQ ID NO: 1118272 - RNA, 20 nt, Human
caagcaaacaaucaauccuu

SEQ ID NO: 1118273 - RNA, 24 nt, Human
caauuaauuugcuagagcagccca

SEQ ID NO: 1118274 - RNA, 23 nt, Human
cacaaauagccccaaaacauacc

SEQ ID NO: 1118275 - RNA, 22 nt, Human
cacagcauguguugagaugaga

SEQ ID NO: 1118276 - RNA, 23 nt, Human
caccaccuuccaggaaccuccac

SEQ ID NO: 1118277 - RNA, 23 nt, Human
cacuagaaaaacgauucaacacu

SEQ ID NO: 1118278 - RNA, 24 nt, Human
cagaacucauggaggcaucuacau

SEQ ID NO: 1118279 - RNA, 25 nt, Human
cagaagcuggaagauaaacugguga

SEQ ID NO: 1118280 - RNA, 24 nt, Human
caucccuucuucccuccauggagg

SEQ ID NO: 1118281 - RNA, 19 nt, Human
ccaaauaaaaugauacuga

SEQ ID NO: 1118282 - RNA, 21 nt, Human
ccacaaaggaaacaaacaaaa

SEQ ID NO: 1118283 - RNA, 22 nt, Human
ccacgucuucagcuaucuggaa

SEQ ID NO: 1118284 - RNA, 24 nt, Human
ccagugcacauguucugugauccc

SEQ ID NO: 1118285 - RNA, 18 nt, Human
cccacagaacucauggag

SEQ ID NO: 1118286 - RNA, 21 nt, Human
cccacagaacucauggaggca

SEQ ID NO: 1118287 - RNA, 23 nt, Human
cccacagaacucauggaggcauc

SEQ ID NO: 1118288 - RNA, 23 nt, Human
cccacuagaaaaacgauucaaca

SEQ ID NO: 1118289 - RNA, 18 nt, Human
cccauacaccaagcaaac

SEQ ID NO: 1118290 - RNA, 22 nt, Human
cccauacaccaagcaaacaauc

SEQ ID NO: 1118291 - RNA, 19 nt, Human
ccccaaaacauaccagaag

SEQ ID NO: 1118292 - RNA, 23 nt, Human
ccgcuacaaaucaguaagcaaaa

SEQ ID NO: 1118293 - RNA, 23 nt, Human
ccugugcacagcauguguugaga

SEQ ID NO: 1118294 - RNA, 22 nt, Human
cgucuucagcuaucuggaagcc

SEQ ID NO: 1118295 - RNA, 23 nt, Human
cucauaauaccugaccuaaaguu

SEQ ID NO: 1118296 - RNA, 22 nt, Human
cugacagaagcuggaagauaaa

SEQ ID NO: 1118297 - RNA, 20 nt, Human
cuggaagcccucugaaccca

SEQ ID NO: 1118298 - RNA, 22 nt, Human
gaaacaaacaaaacauagcaaa

SEQ ID NO: 1118299 - RNA, 19 nt, Human
gagcagcccacagaacuca

SEQ ID NO: 1118300 - RNA, 21 nt, Human
gagcuugcaugcucucuccag

SEQ ID NO: 1118301 - RNA, 19 nt, Human
gagguugggggcugggucu

SEQ ID NO: 1118302 - RNA, 18 nt, Human
ggugugugagaaauuacc

SEQ ID NO: 1118303 - RNA, 18 nt, Human
gguugggggcugggucug

SEQ ID NO: 1118304 - RNA, 24 nt, Human
guaaaacuaaaguuacuaacaaaa

SEQ ID NO: 1118305 - RNA, 23 nt, Human
uaacauacaaguaccacuuuaag

SEQ ID NO: 1118306 - RNA, 23 nt, Human
uaagcaaaaagguaaaacaauga

SEQ ID NO: 1118307 - RNA, 22 nt, Human
uaagucuggguuaccacagccc

SEQ ID NO: 1118308 - RNA, 23 nt, Human
uaaugaaaaugagaaauuccacg

SEQ ID NO: 1118309 - RNA, 24 nt, Human
uacaaaucaguaagcaaaaaggua

SEQ ID NO: 1118310 - RNA, 18 nt, Human
uacacauuauuggcaaaa

SEQ ID NO: 1118311 - RNA, 20 nt, Human
uacacauuauuggcaaaagu

SEQ ID NO: 1118312 - RNA, 23 nt, Human
uacaccaagcaaacaaucaaucc

SEQ ID NO: 1118313 - RNA, 21 nt, Human
uaccacaaaggaaacaaacaa

SEQ ID NO: 1118314 - RNA, 24 nt, Human
uaccacaaaggaaacaaacaaaac

SEQ ID NO: 1118315 - RNA, 23 nt, Human
uaccgcuacaaaucaguaagcaa

SEQ ID NO: 1118316 - RNA, 19 nt, Human
uaccugaccuaaaguucug

SEQ ID NO: 1118317 - RNA, 22 nt, Human
uaccugaccuaaaguucugaca

SEQ ID NO: 1118318 - RNA, 20 nt, Human
uagagcagcccacagaacuc

SEQ ID NO: 1118319 - RNA, 23 nt, Human
uagcaaaaggauaaaacguccca

SEQ ID NO: 1118320 - RNA, 27 nt, Human
uagcaaaaggauaaaacgucccacuag

SEQ ID NO: 1118321 - RNA, 24 nt, Human
uagccauuugucaacucauuaaca

SEQ ID NO: 1118322 - RNA, 22 nt, Human
uagccccaaaacauaccagaag

SEQ ID NO: 1118323 - RNA, 24 nt, Human
uaguuucugaauucuugcauuccu

SEQ ID NO: 1118324 - RNA, 25 nt, Human
uauagggaaaggcuguggagcuugc

SEQ ID NO: 1118325 - RNA, 24 nt, Human
uaugccuggaaaccuguugaagac

SEQ ID NO: 1118326 - RNA, 18 nt, Human
uauggaggcaucauucug

SEQ ID NO: 1118327 - RNA, 20 nt, Human
uauuuaauacauauaacauu

SEQ ID NO: 1118328 - RNA, 26 nt, Human
ucaaugccaaauaaaaugauacugag

SEQ ID NO: 1118329 - RNA, 20 nt, Human
ucagaguauauacaugugaa

SEQ ID NO: 1118330 - RNA, 18 nt, Human
ucuuacuucaggaagugu

SEQ ID NO: 1118331 - RNA, 20 nt, Human
ugaccaagggugacuggugc

SEQ ID NO: 1118332 - RNA, 28 nt, Human
ugacuggugcuccauccuucuggaaacu

SEQ ID NO: 1118333 - RNA, 19 nt, Human
ugagggugauuauaauuuu

SEQ ID NO: 1118334 - RNA, 21 nt, Human
ugcauagggugagguauaggg

SEQ ID NO: 1118335 - RNA, 18 nt, Human
ugccuuggucuuucaggu

SEQ ID NO: 1118336 - RNA, 21 nt, Human
ugcuccauccuucuggaaacu

SEQ ID NO: 1118337 - RNA, 24 nt, Human
uggagcuugcaugcucucuccagg

SEQ ID NO: 1118338 - RNA, 18 nt, Human
uggccaugaccaagggug

SEQ ID NO: 1118339 - RNA, 20 nt, Human
ugggguuaagcccauacacc

SEQ ID NO: 1118340 - RNA, 18 nt, Human
uguaauaaugaaaaugag

SEQ ID NO: 1118341 - RNA, 23 nt, Human
uuaaaacuuuuguaccacaaagg

SEQ ID NO: 1118342 - RNA, 18 nt, Human
uucuauaaggaaaaacaa

SEQ ID NO: 1118343 - RNA, 20 nt, Human
uugauaguuuauuuaauaca

SEQ ID NO: 1118344 - RNA, 18 nt, Human
uuguacacauuauuggca

SEQ ID NO: 1118345 - RNA, 23 nt, Human
uuucaggugcccagcucccaucc

SEQ ID NO: 1118346 - RNA, 24 nt, Human
aaaccccuaaaccuaguaacuccu

SEQ ID NO: 1118347 - RNA, 26 nt, Human
aaaccccuaaaccuaguaacuccuuu

SEQ ID NO: 1118348 - RNA, 19 nt, Human
aaaccuaguaacuccucuc

SEQ ID NO: 1118349 - RNA, 23 nt, Human
agccuggagcaccuuccagcccc

SEQ ID NO: 1118350 - RNA, 22 nt, Human
agggaggggcacuccagagcuc

SEQ ID NO: 1118351 - RNA, 18 nt, Human
aggggcacuccagagcuc

SEQ ID NO: 1118352 - RNA, 20 nt, Human
cagccccuggccagaguccu

SEQ ID NO: 1118353 - RNA, 24 nt, Human
caucucuggccuggccccugggag

SEQ ID NO: 1118354 - RNA, 22 nt, Human
ccagucugugcgguucgugaug

SEQ ID NO: 1118355 - RNA, 18 nt, Human
ccccuaaaccuaguaacu

SEQ ID NO: 1118356 - RNA, 26 nt, Human
ccccuaaaccuaguaacuccucuccu

SEQ ID NO: 1118357 - RNA, 19 nt, Human
ccccugggcugacugaacc

SEQ ID NO: 1118358 - RNA, 20 nt, Human
ccucuuuguugcugaaucuc

SEQ ID NO: 1118359 - RNA, 22 nt, Human
ccuggcccaucucuggccuggc

SEQ ID NO: 1118360 - RNA, 19 nt, Human
ccugggccagagggcagcc

SEQ ID NO: 1118361 - RNA, 19 nt, Human
ccugggccagagggcagcc

SEQ ID NO: 1118362 - RNA, 24 nt, Human
ccuuccagccccuggccagagucc

SEQ ID NO: 1118363 - RNA, 22 nt, Human
cucaggucagccagggguucau

SEQ ID NO: 1118364 - RNA, 20 nt, Human
cuggccccugggcugacuga

SEQ ID NO: 1118365 - RNA, 24 nt, Human
gguguucugggaaaaaccccuaaa

SEQ ID NO: 1118366 - RNA, 21 nt, Human
guucugggaaaaaccccuaaa

SEQ ID NO: 1118367 - RNA, 24 nt, Human
uaacuccucucccuacuaggccuc

SEQ ID NO: 1118368 - RNA, 21 nt, Human
uaccaggcucuuucgcauucc

SEQ ID NO: 1118369 - RNA, 19 nt, Human
uacuuuauuuggagggagg

SEQ ID NO: 1118370 - RNA, 26 nt, Human
uaguaacuccucucccuacuaggccu

SEQ ID NO: 1118371 - RNA, 24 nt, Human
uccuggguguucugggaaaaaccc

SEQ ID NO: 1118372 - RNA, 18 nt, Human
ucucccuacuaggccucu

SEQ ID NO: 1118373 - RNA, 20 nt, Human
ucucuggccccugggcugac

SEQ ID NO: 1118374 - RNA, 19 nt, Human
ucucuggccuggccccugg

SEQ ID NO: 1118375 - RNA, 21 nt, Human
ucuggccccugggcugacuga

SEQ ID NO: 1118376 - RNA, 18 nt, Human
ugccuggcccaucucugg

SEQ ID NO: 1118377 - RNA, 18 nt, Human
ugcuuugcauuugcacaa

SEQ ID NO: 1118378 - RNA, 23 nt, Human
uggagcaccuuccagccccuggc

SEQ ID NO: 1118379 - RNA, 22 nt, Human
uggccccugggaggaauuuccu

SEQ ID NO: 1118380 - RNA, 19 nt, Human
uggccccugggcugacuga

SEQ ID NO: 1118381 - RNA, 20 nt, Human
uuugcauuugcacaagucca

SEQ ID NO: 1118382 - RNA, 23 nt, Human
caucucaauguggcaggaagagc

SEQ ID NO: 1118383 - RNA, 21 nt, Human
ccgugccauaaguuuuuguuu

SEQ ID NO: 1118384 - RNA, 22 nt, Human
gugcaucuuaggugcuuuguuc

SEQ ID NO: 1118385 - RNA, 19 nt, Human
uaucuuuuucuucugggca

SEQ ID NO: 1118386 - RNA, 25 nt, Human
ucuucugggcaaccuccucuucugg

SEQ ID NO: 1118387 - RNA, 23 nt, Human
ugagcucuguaaguccguuggug

SEQ ID NO: 1118388 - RNA, 21 nt, Human
ugcaucuuaggugcuuuguuc

SEQ ID NO: 1118389 - RNA, 19 nt, Human
ugcuuuguucacuuggaua

SEQ ID NO: 1118390 - RNA, 22 nt, Human
uguggcaggaagagcucaugua

SEQ ID NO: 1118391 - RNA, 19 nt, Human
uguuucuucaguuucuucu

SEQ ID NO: 1118392 - RNA, 28 nt, Human
uucccgugccauaaguuuuuguuucuuc

SEQ ID NO: 1118393 - RNA, 23 nt, Human
uucuucugggcaaccuccucuuc

SEQ ID NO: 1118394 - RNA, 20 nt, Human
cuuguaaacauaaguuuuac

SEQ ID NO: 1118395 - RNA, 19 nt, Human
gcagcaaagugauguugga

SEQ ID NO: 1118396 - RNA, 19 nt, Human
gggcagcaaagugauguug

SEQ ID NO: 1118397 - RNA, 24 nt, Human
uaaauaaaaaauuaacaguaauau

SEQ ID NO: 1118398 - RNA, 23 nt, Human
uaaaugacaaauuuauauccuua

SEQ ID NO: 1118399 - RNA, 21 nt, Human
uacauaccugggcagcaaagu

SEQ ID NO: 1118400 - RNA, 20 nt, Human
ucuugcucugugaggagggc

SEQ ID NO: 1118401 - RNA, 23 nt, Human
uguuggaaaugcuuuagguguua

SEQ ID NO: 1118402 - RNA, 23 nt, Human
uugcaggccaacuauagauacau

SEQ ID NO: 1118403 - RNA, 20 nt, Human
agaucagcuuccagagcucc

SEQ ID NO: 1118404 - RNA, 19 nt, Human
agcaggacgcauggugggg

SEQ ID NO: 1118405 - RNA, 19 nt, Human
aggagaucagcuuccagag

SEQ ID NO: 1118406 - RNA, 23 nt, Human
cagcuuccagagcuccagguccu

SEQ ID NO: 1118407 - RNA, 20 nt, Human
caggacgcauggugggggcg

SEQ ID NO: 1118408 - RNA, 23 nt, Human
ccagagcuccagguccugugggc

SEQ ID NO: 1118409 - RNA, 21 nt, Human
gaccguauuugggggccuggc

SEQ ID NO: 1118410 - RNA, 20 nt, Human
ggaggagaucagcuuccaga

SEQ ID NO: 1118411 - RNA, 21 nt, Human
gguucuggagcugggccccgg

SEQ ID NO: 1118412 - RNA, 22 nt, Human
gugcagugggaggagaucagcu

SEQ ID NO: 1118413 - RNA, 24 nt, Human
gugguucuggagcugggccccggc

SEQ ID NO: 1118414 - RNA, 25 nt, Human
ucagcuuccagagcuccagguccug

SEQ ID NO: 1118415 - RNA, 18 nt, Human
uccagguccugugggcuc

SEQ ID NO: 1118416 - RNA, 19 nt, Human
uccugggagcagugguggc

SEQ ID NO: 1118417 - RNA, 22 nt, Human
ugaccguauuugggggccuggc

SEQ ID NO: 1118418 - RNA, 23 nt, Human
ugagagcaggacgcauggugggg

SEQ ID NO: 1118419 - RNA, 25 nt, Human
ugcugggcugaccguauuugggggc

SEQ ID NO: 1118420 - RNA, 21 nt, Human
uucuggagcugggccccggcc

SEQ ID NO: 1118421 - RNA, 18 nt, Human
cacaacaaagggcaggga

SEQ ID NO: 1118422 - RNA, 18 nt, Human
cagcgcauccaggcaaca

SEQ ID NO: 1118423 - RNA, 19 nt, Human
cagcguucuggagcgucgc

SEQ ID NO: 1118424 - RNA, 20 nt, Human
cagcguucuggagcgucgcu

SEQ ID NO: 1118425 - RNA, 24 nt, Human
cagggagggcaaggccaggagccu

SEQ ID NO: 1118426 - RNA, 19 nt, Human
ccacuccacggcugcgggc

SEQ ID NO: 1118427 - RNA, 21 nt, Human
ccccgcccgcgcgcggccgaa

SEQ ID NO: 1118428 - RNA, 20 nt, Human
ccccgggguugcgggcggca

SEQ ID NO: 1118429 - RNA, 18 nt, Human
ccuccuuuaacgcggagg

SEQ ID NO: 1118430 - RNA, 24 nt, Human
cggcagcgucuacgcaagcagcgu

SEQ ID NO: 1118431 - RNA, 20 nt, Human
cgucgcucugccaccuuccc

SEQ ID NO: 1118432 - RNA, 19 nt, Human
cuccacggcugcgggcgcg

SEQ ID NO: 1118433 - RNA, 18 nt, Human
cuuagaucaagagggaaa

SEQ ID NO: 1118434 - RNA, 20 nt, Human
cuuagaucaagagggaaagc

SEQ ID NO: 1118435 - RNA, 22 nt, Human
gcagcgucuacgcaagcagcgu

SEQ ID NO: 1118436 - RNA, 21 nt, Human
gccccgggguugcgggcggca

SEQ ID NO: 1118437 - RNA, 19 nt, Human
gcgcagaccggcggccccg

SEQ ID NO: 1118438 - RNA, 29 nt, Human
ucucgggguuucucagggcugcugcguuu

SEQ ID NO: 1118439 - RNA, 18 nt, Human
ugaaggcagcggcagcgu

SEQ ID NO: 1118440 - RNA, 20 nt, Human
uuaacgcggaggcgcggagu

SEQ ID NO: 1118441 - RNA, 21 nt, Human
uuucucagggcugcugcguuu

SEQ ID NO: 1118442 - RNA, 22 nt, Human
uuucucagggcugcugcguuuc

SEQ ID NO: 1118443 - RNA, 20 nt, Human
aaaaaaaaccgugacugcac

SEQ ID NO: 1118444 - RNA, 22 nt, Human
aaaaaaaccgugacugcacaug

SEQ ID NO: 1118445 - RNA, 25 nt, Human
aaaaacaaaaaaaaaaccgugacug

SEQ ID NO: 1118446 - RNA, 19 nt, Human
aaaaggcaggacggcgggu

SEQ ID NO: 1118447 - RNA, 26 nt, Human
aaacaagggacggggccaccccaggg

SEQ ID NO: 1118448 - RNA, 20 nt, Human
aacaagggacggggccaccc

SEQ ID NO: 1118449 - RNA, 19 nt, Human
aacacagagacagacagga

SEQ ID NO: 1118450 - RNA, 20 nt, Human
aacacagagacagacaggag

SEQ ID NO: 1118451 - RNA, 24 nt, Human
aacacagagacagacaggagcccg

SEQ ID NO: 1118452 - RNA, 20 nt, Human
aacauggugaaacccugucu

SEQ ID NO: 1118453 - RNA, 21 nt, Human
aacauggugaaacccugucuc

SEQ ID NO: 1118454 - RNA, 19 nt, Human
aagcugugucucaacaagc

SEQ ID NO: 1118455 - RNA, 24 nt, Human
aaucgcuugaacccgggaggcaga

SEQ ID NO: 1118456 - RNA, 19 nt, Human
acaaaaaaaaaaccgugac

SEQ ID NO: 1118457 - RNA, 24 nt, Human
acagagcgagacaccgucucaaaa

SEQ ID NO: 1118458 - RNA, 24 nt, Human
acagagcgagacccugucucaaaa

SEQ ID NO: 1118459 - RNA, 24 nt, Human
accaacauggugaaacccugucuc

SEQ ID NO: 1118460 - RNA, 19 nt, Human
accccaggggcucaugcac

SEQ ID NO: 1118461 - RNA, 24 nt, Human
acccggagaaaaggcaggacggcg

SEQ ID NO: 1118462 - RNA, 24 nt, Human
acccugucucuacuaaaaauacaa

SEQ ID NO: 1118463 - RNA, 24 nt, Human
accggcgugcaggcugccaaccug

SEQ ID NO: 1118464 - RNA, 19 nt, Human
acgcggccccugcaccucu

SEQ ID NO: 1118465 - RNA, 24 nt, Human
acugcacuccagccugggcgacag

SEQ ID NO: 1118466 - RNA, 26 nt, Human
acugcacuccagccugggcgacagag

SEQ ID NO: 1118467 - RNA, 22 nt, Human
agacgggcggaucaccugagag

SEQ ID NO: 1118468 - RNA, 24 nt, Human
agacugaggcaggagaaucgcuug

SEQ ID NO: 1118469 - RNA, 18 nt, Human
agacuugggccuagaucu

SEQ ID NO: 1118470 - RNA, 20 nt, Human
agagcaccgucuggaccucc

SEQ ID NO: 1118471 - RNA, 18 nt, Human
agagcguguccgggcgcc

SEQ ID NO: 1118472 - RNA, 26 nt, Human
agaggcggggcugcuggcgggggagc

SEQ ID NO: 1118473 - RNA, 18 nt, Human
agauguugcagugagccg

SEQ ID NO: 1118474 - RNA, 24 nt, Human
agcacuuugggaggccgagacggg

SEQ ID NO: 1118475 - RNA, 23 nt, Human
agccaccuucuauccccggccuc

SEQ ID NO: 1118476 - RNA, 24 nt, Human
agccugaccaacauggugaaaccc

SEQ ID NO: 1118477 - RNA, 18 nt, Human
agcugugucucaacaagc

SEQ ID NO: 1118478 - RNA, 28 nt, Human
aggagcccgcccugcuuuaaugcgcaug

SEQ ID NO: 1118479 - RNA, 22 nt, Human
aggauccggcuggucagaaaca

SEQ ID NO: 1118480 - RNA, 21 nt, Human
aggcagauguugcagugagcc

SEQ ID NO: 1118481 - RNA, 24 nt, Human
aggcagauguugcagugagccgag

SEQ ID NO: 1118482 - RNA, 24 nt, Human
aggcaggagaaucgcuugaacccg

SEQ ID NO: 1118483 - RNA, 18 nt, Human
aggcagggguggcaggag

SEQ ID NO: 1118484 - RNA, 21 nt, Human
aggccgagacgggcggaucac

SEQ ID NO: 1118485 - RNA, 19 nt, Human
aggggucagcuuccccgcc

SEQ ID NO: 1118486 - RNA, 20 nt, Human
agguguggugacgccuguaa

SEQ ID NO: 1118487 - RNA, 24 nt, Human
aucaugccacugcacuccagccug

SEQ ID NO: 1118488 - RNA, 22 nt, Human
aucugcccuaaaccaaacguca

SEQ ID NO: 1118489 - RNA, 22 nt, Human
augccacugcacuccagccugg

SEQ ID NO: 1118490 - RNA, 24 nt, Human
caacacagagacagacaggagccc

SEQ ID NO: 1118491 - RNA, 24 nt, Human
caacauggugaaacccugucucua

SEQ ID NO: 1118492 - RNA, 22 nt, Human
cacaacacagagacagacagga

SEQ ID NO: 1118493 - RNA, 26 nt, Human
cacaacacagagacagacaggagccc

SEQ ID NO: 1118494 - RNA, 19 nt, Human
cacaugagcuaaccacgcc

SEQ ID NO: 1118495 - RNA, 20 nt, Human
cacaugagcuaaccacgccu

SEQ ID NO: 1118496 - RNA, 23 nt, Human
caccacggagaaggacgccguca

SEQ ID NO: 1118497 - RNA, 24 nt, Human
cacccagugccuucugaagccccc

SEQ ID NO: 1118498 - RNA, 25 nt, Human
caccgugcccgugaggaggccacgc

SEQ ID NO: 1118499 - RNA, 24 nt, Human
cacgccuguaaucccagcacuuug

SEQ ID NO: 1118500 - RNA, 18 nt, Human
cacgccuguccacaaagu

SEQ ID NO: 1118501 - RNA, 24 nt, Human
cacgccuguccacaaaguuaggaa

SEQ ID NO: 1118502 - RNA, 23 nt, Human
cacuccagccugggcgacagagc

SEQ ID NO: 1118503 - RNA, 24 nt, Human
cacuccagccugggcgacagagcg

SEQ ID NO: 1118504 - RNA, 19 nt, Human
cacugcacuccagccuggg

SEQ ID NO: 1118505 - RNA, 20 nt, Human
cacugcacuccagccugggc

SEQ ID NO: 1118506 - RNA, 22 nt, Human
cacugcacuccagccugggcga

SEQ ID NO: 1118507 - RNA, 23 nt, Human
cacugcacuccagccugggcgac

SEQ ID NO: 1118508 - RNA, 24 nt, Human
cacugcacuccagccugggcgaca

SEQ ID NO: 1118509 - RNA, 21 nt, Human
cagagcccacccagugccuuc

SEQ ID NO: 1118510 - RNA, 24 nt, Human
cagcacuuugggaggccgagacgg

SEQ ID NO: 1118511 - RNA, 26 nt, Human
cagcacuuugggaggccgagacgggc

SEQ ID NO: 1118512 - RNA, 28 nt, Human
cagcccaacuggagcggcuggaaaugac

SEQ ID NO: 1118513 - RNA, 20 nt, Human
cagccccucccuccagaagc

SEQ ID NO: 1118514 - RNA, 21 nt, Human
cagccccucccuccagaagcu

SEQ ID NO: 1118515 - RNA, 21 nt, Human
caggagggcgcuggcgcuggg

SEQ ID NO: 1118516 - RNA, 23 nt, Human
caggccccugcguccgagcuggg

SEQ ID NO: 1118517 - RNA, 21 nt, Human
caggggagcagggcugcaggg

SEQ ID NO: 1118518 - RNA, 24 nt, Human
cagugaaucugcccuaaaccaaac

SEQ ID NO: 1118519 - RNA, 24 nt, Human
cagugccuucugaagcccccgagg

SEQ ID NO: 1118520 - RNA, 23 nt, Human
ccacggagaaggacgccgucacc

SEQ ID NO: 1118521 - RNA, 20 nt, Human
ccacugcacuccagccuggg

SEQ ID NO: 1118522 - RNA, 20 nt, Human
ccacugcacuccagccuggg

SEQ ID NO: 1118523 - RNA, 21 nt, Human
ccacugcacuccagccugggc

SEQ ID NO: 1118524 - RNA, 21 nt, Human
ccacugcacuccagccugggc

SEQ ID NO: 1118525 - RNA, 23 nt, Human
ccacugcacuccagccugggcga

SEQ ID NO: 1118526 - RNA, 24 nt, Human
ccacugcacuccagccugggcgac

SEQ ID NO: 1118527 - RNA, 19 nt, Human
ccaggccuggccaaggugu

SEQ ID NO: 1118528 - RNA, 21 nt, Human
cccccgagggucacucagucu

SEQ ID NO: 1118529 - RNA, 19 nt, Human
cccggcugcaggacagugg

SEQ ID NO: 1118530 - RNA, 20 nt, Human
cccggggcugagugggcggc

SEQ ID NO: 1118531 - RNA, 23 nt, Human
cccugucucaaaaaaaaaaaaac

SEQ ID NO: 1118532 - RNA, 18 nt, Human
cccugugguguggacagg

SEQ ID NO: 1118533 - RNA, 23 nt, Human
ccgcccugcuuuaaugcgcaugc

SEQ ID NO: 1118534 - RNA, 20 nt, Human
ccgcuguccacagugggggc

SEQ ID NO: 1118535 - RNA, 21 nt, Human
ccggccucauguggccccauc

SEQ ID NO: 1118536 - RNA, 25 nt, Human
ccuaaaccaaacgucagaaagaaaa

SEQ ID NO: 1118537 - RNA, 19 nt, Human
ccuccgcggcaugcuggcc

SEQ ID NO: 1118538 - RNA, 19 nt, Human
ccucugagaugccuucaga

SEQ ID NO: 1118539 - RNA, 22 nt, Human
ccugaccaacauggugaaaccc

SEQ ID NO: 1118540 - RNA, 24 nt, Human
ccugaccaacauggugaaacccug

SEQ ID NO: 1118541 - RNA, 19 nt, Human
ccuggccaagguguggccc

SEQ ID NO: 1118542 - RNA, 20 nt, Human
ccuggccaagguguggcccu

SEQ ID NO: 1118543 - RNA, 20 nt, Human
ccuggccugaucugcccugu

SEQ ID NO: 1118544 - RNA, 22 nt, Human
ccugggaaccagccccucccuc

SEQ ID NO: 1118545 - RNA, 22 nt, Human
ccuguaaucccagcacuuuggg

SEQ ID NO: 1118546 - RNA, 21 nt, Human
ccuguaaucccagcuacucag

SEQ ID NO: 1118547 - RNA, 21 nt, Human
cgagacaccgucucaaaaaaa

SEQ ID NO: 1118548 - RNA, 26 nt, Human
cgagacgggcggaucaccugagauca

SEQ ID NO: 1118549 - RNA, 18 nt, Human
cgaggucaucuugucccg

SEQ ID NO: 1118550 - RNA, 26 nt, Human
cgcagagagcaccgucuggaccuccg

SEQ ID NO: 1118551 - RNA, 23 nt, Human
cgccuguaaucccagcacuuugg

SEQ ID NO: 1118552 - RNA, 24 nt, Human
cgccuguaaucccagcuacucagg

SEQ ID NO: 1118553 - RNA, 21 nt, Human
cggaucaccugagaucaguuc

SEQ ID NO: 1118554 - RNA, 22 nt, Human
cggcaugcuggccgcagagagc

SEQ ID NO: 1118555 - RNA, 24 nt, Human
cgggaggcagauguugcagugagc

SEQ ID NO: 1118556 - RNA, 19 nt, Human
cgggaggggugucugagcg

SEQ ID NO: 1118557 - RNA, 27 nt, Human
cgggcggaucaccugagaucaguucaa

SEQ ID NO: 1118558 - RNA, 24 nt, Human
cggggcugcuggcgggggagagcg

SEQ ID NO: 1118559 - RNA, 18 nt, Human
cgggggagccgagaggcg

SEQ ID NO: 1118560 - RNA, 21 nt, Human
cgucagaaagaaaagcggcag

SEQ ID NO: 1118561 - RNA, 28 nt, Human
cgucagaaagaaaagcggcagacguuuc

SEQ ID NO: 1118562 - RNA, 18 nt, Human
cucaaaaaaaaaaaaaca

SEQ ID NO: 1118563 - RNA, 25 nt, Human
cucaaaaaaaaaaaaacaaaaaaaa

SEQ ID NO: 1118564 - RNA, 22 nt, Human
cucacgccuguaaucccagcac

SEQ ID NO: 1118565 - RNA, 24 nt, Human
cucacgccuguaaucccagcacuu

SEQ ID NO: 1118566 - RNA, 23 nt, Human
cucugagaugccuucagaccccc

SEQ ID NO: 1118567 - RNA, 24 nt, Human
cugaccaacauggugaaacccugu

SEQ ID NO: 1118568 - RNA, 23 nt, Human
cugagacuuuccggcuucugccc

SEQ ID NO: 1118569 - RNA, 18 nt, Human
cuggccgcagagagcacc

SEQ ID NO: 1118570 - RNA, 21 nt, Human
cuguccacaaaguuaggaaaa

SEQ ID NO: 1118571 - RNA, 25 nt, Human
cugucucaaaaaaaaaaaaacaaaa

SEQ ID NO: 1118572 - RNA, 19 nt, Human
gaaacccugucucuacuaa

SEQ ID NO: 1118573 - RNA, 19 nt, Human
gaaaggggucagcuucccc

SEQ ID NO: 1118574 - RNA, 18 nt, Human
gaacccgggaggcagaug

SEQ ID NO: 1118575 - RNA, 24 nt, Human
gaaucugcccuaaaccaaacguca

SEQ ID NO: 1118576 - RNA, 21 nt, Human
gacagagcgagacccugucuc

SEQ ID NO: 1118577 - RNA, 19 nt, Human
gacgccuguaaucccagcu

SEQ ID NO: 1118578 - RNA, 19 nt, Human
gagaaaaggcaggacggcg

SEQ ID NO: 1118579 - RNA, 22 nt, Human
gagaaaaggcaggacggcgggu

SEQ ID NO: 1118580 - RNA, 23 nt, Human
gagaaucgcuugaacccgggagg

SEQ ID NO: 1118581 - RNA, 23 nt, Human
gagaucaugccacugcacuccag

SEQ ID NO: 1118582 - RNA, 18 nt, Human
gaggagggaccaagccuc

SEQ ID NO: 1118583 - RNA, 23 nt, Human
gaggcggggcugcuggcggggga

SEQ ID NO: 1118584 - RNA, 23 nt, Human
gaggcggggcugcuggcggggga

SEQ ID NO: 1118585 - RNA, 21 nt, Human
gaucaccugagaucaguucaa

SEQ ID NO: 1118586 - RNA, 23 nt, Human
gaucaccugagaucaguucaaga

SEQ ID NO: 1118587 - RNA, 22 nt, Human
gaucaguucaagaccagccuga

SEQ ID NO: 1118588 - RNA, 21 nt, Human
gcaagggaggggccacacuca

SEQ ID NO: 1118589 - RNA, 24 nt, Human
gcacuccagccugggcgacagagc

SEQ ID NO: 1118590 - RNA, 19 nt, Human
gcagauguugcagugagcc

SEQ ID NO: 1118591 - RNA, 24 nt, Human
gcagggcugcagggugggcuggca

SEQ ID NO: 1118592 - RNA, 19 nt, Human
gcaggggagcagggcugca

SEQ ID NO: 1118593 - RNA, 22 nt, Human
gccacugcacuccagccugggc

SEQ ID NO: 1118594 - RNA, 24 nt, Human
gccacugcacuccagccugggcga

SEQ ID NO: 1118595 - RNA, 21 nt, Human
gccaggggaaaggggucagcu

SEQ ID NO: 1118596 - RNA, 20 nt, Human
gccgagaucaugccacugca

SEQ ID NO: 1118597 - RNA, 19 nt, Human
gccgcagagagcaccgucu

SEQ ID NO: 1118598 - RNA, 23 nt, Human
gccugacccggagaaaaggcagg

SEQ ID NO: 1118599 - RNA, 23 nt, Human
gccuguaaucccagcuacucagg

SEQ ID NO: 1118600 - RNA, 23 nt, Human
gcgacagagcgagacccugucuc

SEQ ID NO: 1118601 - RNA, 18 nt, Human
gcgcaugcgggggagccg

SEQ ID NO: 1118602 - RNA, 19 nt, Human
gcgcugggaugguggccgg

SEQ ID NO: 1118603 - RNA, 19 nt, Human
gcggaagagcuuuguccug

SEQ ID NO: 1118604 - RNA, 23 nt, Human
gcgggggagccgagaggcggggc

SEQ ID NO: 1118605 - RNA, 19 nt, Human
ggaaaugaccaucaccagg

SEQ ID NO: 1118606 - RNA, 23 nt, Human
ggaccaagccucaccacggagaa

SEQ ID NO: 1118607 - RNA, 23 nt, Human
ggcaggggagcagggcugcaggg

SEQ ID NO: 1118608 - RNA, 21 nt, Human
ggccgggcgcgguggcucacg

SEQ ID NO: 1118609 - RNA, 22 nt, Human
ggcgccugcucagcuugagaac

SEQ ID NO: 1118610 - RNA, 20 nt, Human
ggcgcgguggcucacgccug

SEQ ID NO: 1118611 - RNA, 20 nt, Human
ggcgcgguggcucacgccug

SEQ ID NO: 1118612 - RNA, 23 nt, Human
ggcgcgguggcucacgccuguaa

SEQ ID NO: 1118613 - RNA, 21 nt, Human
ggggagccgagaggcggggcu

SEQ ID NO: 1118614 - RNA, 22 nt, Human
gggggagccgagaggcggggcu

SEQ ID NO: 1118615 - RNA, 20 nt, Human
ggugacgccuguaaucccag

SEQ ID NO: 1118616 - RNA, 23 nt, Human
gguggccggccaggcaggggugg

SEQ ID NO: 1118617 - RNA, 23 nt, Human
gguggcucacgccuguaauccca

SEQ ID NO: 1118618 - RNA, 24 nt, Human
gguggcucacgccuguaaucccag

SEQ ID NO: 1118619 - RNA, 24 nt, Human
guguggugacgccuguaaucccag

SEQ ID NO: 1118620 - RNA, 24 nt, Human
guugcagugagccgagaucaugcc

SEQ ID NO: 1118621 - RNA, 21 nt, Human
uaaaaauacaaaaauuagcca

SEQ ID NO: 1118622 - RNA, 22 nt, Human
uauccccggccucauguggccc

SEQ ID NO: 1118623 - RNA, 19 nt, Human
ucacaacacagagacagac

SEQ ID NO: 1118624 - RNA, 23 nt, Human
ucaugccacugcacuccagccug

SEQ ID NO: 1118625 - RNA, 28 nt, Human
uccacaaaguuaggaaaacggcggaccg

SEQ ID NO: 1118626 - RNA, 23 nt, Human
uccagccugggcgacagagcgag

SEQ ID NO: 1118627 - RNA, 24 nt, Human
uccagccugggcgacagagcgaga

SEQ ID NO: 1118628 - RNA, 20 nt, Human
ucccuccagaagcuuucucu

SEQ ID NO: 1118629 - RNA, 18 nt, Human
uccgagcugggggugggg

SEQ ID NO: 1118630 - RNA, 24 nt, Human
uccgcggcaugcuggccgcagaga

SEQ ID NO: 1118631 - RNA, 20 nt, Human
uccgggcgccgcacucugcg

SEQ ID NO: 1118632 - RNA, 18 nt, Human
ucgcuugaacccgggagg

SEQ ID NO: 1118633 - RNA, 23 nt, Human
ucucaaaaaaaaaaaaacaaaaa

SEQ ID NO: 1118634 - RNA, 26 nt, Human
ucucaaaaaaaaaaaaacaaaaaaaa

SEQ ID NO: 1118635 - RNA, 23 nt, Human
ucucuacuaaaaauacaaaaauu

SEQ ID NO: 1118636 - RNA, 22 nt, Human
ucucugcuccugccgcuggaga

SEQ ID NO: 1118637 - RNA, 20 nt, Human
ucugaagcccccgaggguca

SEQ ID NO: 1118638 - RNA, 24 nt, Human
ucugcccuaaaccaaacgucagaa

SEQ ID NO: 1118639 - RNA, 19 nt, Human
ucuggcgccugcucagcuu

SEQ ID NO: 1118640 - RNA, 23 nt, Human
ucugggaggccccacgcggcccc

SEQ ID NO: 1118641 - RNA, 24 nt, Human
ugaccaacauggugaaacccuguc

SEQ ID NO: 1118642 - RNA, 19 nt, Human
ugacccggagaaaaggcag

SEQ ID NO: 1118643 - RNA, 21 nt, Human
ugacuuccggccaugacuccc

SEQ ID NO: 1118644 - RNA, 20 nt, Human
ugagaugccuucagaccccc

SEQ ID NO: 1118645 - RNA, 22 nt, Human
ugagccgagaucaugccacugc

SEQ ID NO: 1118646 - RNA, 21 nt, Human
ugaggaggccacgccaggccc

SEQ ID NO: 1118647 - RNA, 20 nt, Human
ugaggcaggagaaucgcuug

SEQ ID NO: 1118648 - RNA, 24 nt, Human
ugaggcaggagaaucgcuugaacc

SEQ ID NO: 1118649 - RNA, 25 nt, Human
ugaggcaggagaaucgcuugaaccc

SEQ ID NO: 1118650 - RNA, 20 nt, Human
ugcaggcugccaaccugcca

SEQ ID NO: 1118651 - RNA, 21 nt, Human
ugcagugaaucugcccuaaac

SEQ ID NO: 1118652 - RNA, 33 nt, Human
ugccaaccugccacucugggaggccccacgccg

SEQ ID NO: 1118653 - RNA, 22 nt, Human
ugccagaaggugcuaagaucug

SEQ ID NO: 1118654 - RNA, 21 nt, Human
ugccggagcuggcgugcucag

SEQ ID NO: 1118655 - RNA, 21 nt, Human
ugccuucagacccccgccugu

SEQ ID NO: 1118656 - RNA, 21 nt, Human
uggaaaugaccaucaccaggc

SEQ ID NO: 1118657 - RNA, 19 nt, Human
uggacaggccagcccggcu

SEQ ID NO: 1118658 - RNA, 27 nt, Human
uggaccuccgggcccucucugcuccuu

SEQ ID NO: 1118659 - RNA, 24 nt, Human
uggccaagguguggcccuggaagc

SEQ ID NO: 1118660 - RNA, 25 nt, Human
uggccaagguguggcccuggaagcc

SEQ ID NO: 1118661 - RNA, 20 nt, Human
uggccugaucugcccugucc

SEQ ID NO: 1118662 - RNA, 24 nt, Human
uggcucacgccuguaaucccagca

SEQ ID NO: 1118663 - RNA, 21 nt, Human
ugggaaccagccccucccucc

SEQ ID NO: 1118664 - RNA, 19 nt, Human
ugggaggccgagacgggcg

SEQ ID NO: 1118665 - RNA, 24 nt, Human
ugggaggccgagacgggcggauca

SEQ ID NO: 1118666 - RNA, 18 nt, Human
ugggaugguggccggcca

SEQ ID NO: 1118667 - RNA, 20 nt, Human
ugggauucuggcgccugcuc

SEQ ID NO: 1118668 - RNA, 19 nt, Human
ugggcgacagagcgagaca

SEQ ID NO: 1118669 - RNA, 19 nt, Human
uggggguggggaagcuggu

SEQ ID NO: 1118670 - RNA, 19 nt, Human
uggggguggggaagcugug

SEQ ID NO: 1118671 - RNA, 21 nt, Human
uggugacgccuguaaucccag

SEQ ID NO: 1118672 - RNA, 21 nt, Human
ugucccggggcugagugggcg

SEQ ID NO: 1118673 - RNA, 22 nt, Human
ugucccggggcugagugggcgg

SEQ ID NO: 1118674 - RNA, 19 nt, Human
ugucccgggguuuccaggc

SEQ ID NO: 1118675 - RNA, 20 nt, Human
uguggacaggccagcccggc

SEQ ID NO: 1118676 - RNA, 18 nt, Human
uguggccccaucagccca

SEQ ID NO: 1118677 - RNA, 21 nt, Human
uuagccagguguggugacgcc

SEQ ID NO: 1118678 - RNA, 23 nt, Human
uuccccgccuggggcugugucug

SEQ ID NO: 1118679 - RNA, 18 nt, Human
uugcagugagccgagauc

SEQ ID NO: 1118680 - RNA, 20 nt, Human
uugcagugagccgagaucau

SEQ ID NO: 1118681 - RNA, 21 nt, Human
uugcagugagccgagaucaug

SEQ ID NO: 1118682 - RNA, 19 nt, Human
uuuccggcuucugcccauc

SEQ ID NO: 1118683 - RNA, 25 nt, Human
uuugggggcccucugagaugccuuc

SEQ ID NO: 1118684 - RNA, 25 nt, Human
aaaaacaaggcccagaaaaacaauu

SEQ ID NO: 1118685 - RNA, 22 nt, Human
aaaagcagcucuuuccaaagca

SEQ ID NO: 1118686 - RNA, 19 nt, Human
aaagaacucauuuuacaga

SEQ ID NO: 1118687 - RNA, 19 nt, Human
aaagacaagaauuauuggc

SEQ ID NO: 1118688 - RNA, 24 nt, Human
aaauaacuguuacaagcaaauccu

SEQ ID NO: 1118689 - RNA, 20 nt, Human
aacaaugaagucagcuugaa

SEQ ID NO: 1118690 - RNA, 18 nt, Human
aacaauugagggcaggag

SEQ ID NO: 1118691 - RNA, 25 nt, Human
aacaauugagggcaggagggaagaa

SEQ ID NO: 1118692 - RNA, 18 nt, Human
aacuaaaaaacaaggccc

SEQ ID NO: 1118693 - RNA, 21 nt, Human
aagaaaaagcacugccaagaa

SEQ ID NO: 1118694 - RNA, 22 nt, Human
aagaagacaaugacucacccaa

SEQ ID NO: 1118695 - RNA, 19 nt, Human
aauguuauuuucugcaaug

SEQ ID NO: 1118696 - RNA, 19 nt, Human
acaaaaccucauaacaagg

SEQ ID NO: 1118697 - RNA, 19 nt, Human
acaaagagccucagagacc

SEQ ID NO: 1118698 - RNA, 23 nt, Human
acaaagagccucagagaccaucc

SEQ ID NO: 1118699 - RNA, 18 nt, Human
acaaccauacaccugcca

SEQ ID NO: 1118700 - RNA, 19 nt, Human
acagcaaggaaguaaagcc

SEQ ID NO: 1118701 - RNA, 22 nt, Human
acaggaacaggagauacacaga

SEQ ID NO: 1118702 - RNA, 18 nt, Human
acauacagaaacuaaaaa

SEQ ID NO: 1118703 - RNA, 24 nt, Human
acauacagaaacuaaaaaacaagg

SEQ ID NO: 1118704 - RNA, 18 nt, Human
accugcagcuuucucugg

SEQ ID NO: 1118705 - RNA, 18 nt, Human
acuaaaaaacaaggccca

SEQ ID NO: 1118706 - RNA, 19 nt, Human
acucacuaggaacccucca

SEQ ID NO: 1118707 - RNA, 20 nt, Human
acuguguggcacugggcaag

SEQ ID NO: 1118708 - RNA, 22 nt, Human
agaaaaagcacugccaagaaua

SEQ ID NO: 1118709 - RNA, 24 nt, Human
agaaaacugucauaaaaguggguu

SEQ ID NO: 1118710 - RNA, 19 nt, Human
agaacacuauagugccccc

SEQ ID NO: 1118711 - RNA, 19 nt, Human
agaacccugcuccccacuc

SEQ ID NO: 1118712 - RNA, 20 nt, Human
agaacgccaggagauacugu

SEQ ID NO: 1118713 - RNA, 23 nt, Human
agagaagagccacagacuuaguu

SEQ ID NO: 1118714 - RNA, 19 nt, Human
agagaccaucccaucuaau

SEQ ID NO: 1118715 - RNA, 20 nt, Human
agauuucaagauggcagccc

SEQ ID NO: 1118716 - RNA, 26 nt, Human
agcccagagaaacagccuccagccuu

SEQ ID NO: 1118717 - RNA, 20 nt, Human
aggagggaguagucucacag

SEQ ID NO: 1118718 - RNA, 20 nt, Human
aggcagaggaugcuggguca

SEQ ID NO: 1118719 - RNA, 21 nt, Human
aggcagaggaugcugggucag

SEQ ID NO: 1118720 - RNA, 24 nt, Human
aggcagcacagaccccuuucugcu

SEQ ID NO: 1118721 - RNA, 18 nt, Human
agggacccagccucuggg

SEQ ID NO: 1118722 - RNA, 23 nt, Human
agggacccagccucugggucccc

SEQ ID NO: 1118723 - RNA, 23 nt, Human
agugucuacuucauaaagguagc

SEQ ID NO: 1118724 - RNA, 20 nt, Human
auaacaagguagccagggac

SEQ ID NO: 1118725 - RNA, 19 nt, Human
auacagaaacuaaaaaaca

SEQ ID NO: 1118726 - RNA, 20 nt, Human
aucaccuuuccuccagcgaa

SEQ ID NO: 1118727 - RNA, 18 nt, Human
aucaugauagucgacuug

SEQ ID NO: 1118728 - RNA, 21 nt, Human
auuggcgagaucuuuuuaggc

SEQ ID NO: 1118729 - RNA, 25 nt, Human
caaaaaaagcagcagcacguggaag

SEQ ID NO: 1118730 - RNA, 22 nt, Human
caaaagcaaaaaacagccacag

SEQ ID NO: 1118731 - RNA, 21 nt, Human
caaaagcaaaaaacagccacc

SEQ ID NO: 1118732 - RNA, 22 nt, Human
caaaggggccuauaaugcaaua

SEQ ID NO: 1118733 - RNA, 18 nt, Human
caacacucaaagacaaga

SEQ ID NO: 1118734 - RNA, 22 nt, Human
caacucacuaggaacccuccaa

SEQ ID NO: 1118735 - RNA, 20 nt, Human
caagaacacuauagugcccc

SEQ ID NO: 1118736 - RNA, 22 nt, Human
caagaagacaaugacucacccc

SEQ ID NO: 1118737 - RNA, 27 nt, Human
caaggcccagaaaaacaauugagggca

SEQ ID NO: 1118738 - RNA, 22 nt, Human
caagguggaaacaaugaaguca

SEQ ID NO: 1118739 - RNA, 19 nt, Human
cacagcaaggaaguaaagc

SEQ ID NO: 1118740 - RNA, 20 nt, Human
cacagcuucuuuauccaccu

SEQ ID NO: 1118741 - RNA, 19 nt, Human
caccuuuccuccagcgaag

SEQ ID NO: 1118742 - RNA, 24 nt, Human
cacuggagagaaagcaggcgaugc

SEQ ID NO: 1118743 - RNA, 20 nt, Human
cagaaaaacaauugagggca

SEQ ID NO: 1118744 - RNA, 18 nt, Human
cagacagggaaacugagg

SEQ ID NO: 1118745 - RNA, 22 nt, Human
cagagaaacagccuccagccuu

SEQ ID NO: 1118746 - RNA, 25 nt, Human
cagcaaggaaguaaagccaugggga

SEQ ID NO: 1118747 - RNA, 18 nt, Human
cagcagagaagagccaca

SEQ ID NO: 1118748 - RNA, 25 nt, Human
cagcagcacguggaagagaucagcu

SEQ ID NO: 1118749 - RNA, 22 nt, Human
cagccucuggguccccauuccu

SEQ ID NO: 1118750 - RNA, 23 nt, Human
caggaccccugaugaugaggccu

SEQ ID NO: 1118751 - RNA, 20 nt, Human
caggagauacuguguggcac

SEQ ID NO: 1118752 - RNA, 24 nt, Human
cauccuuggccccacugcagaucc

SEQ ID NO: 1118753 - RNA, 22 nt, Human
ccaaaagcaaaaaacagccaca

SEQ ID NO: 1118754 - RNA, 18 nt, Human
ccaagaagacaaugacuc

SEQ ID NO: 1118755 - RNA, 24 nt, Human
ccaagcagcucuauugccaggucc

SEQ ID NO: 1118756 - RNA, 23 nt, Human
ccaagcugcggaagaaaacuguc

SEQ ID NO: 1118757 - RNA, 23 nt, Human
ccaaugauacacaugcacccaag

SEQ ID NO: 1118758 - RNA, 20 nt, Human
ccacaaagagccucagagac

SEQ ID NO: 1118759 - RNA, 21 nt, Human
ccagaaaaacaauugagggca

SEQ ID NO: 1118760 - RNA, 21 nt, Human
ccagcgacagguucuggccuc

SEQ ID NO: 1118761 - RNA, 21 nt, Human
ccagggacccagccucugggu

SEQ ID NO: 1118762 - RNA, 22 nt, Human
cccaaaagcaaaaaacagccac

SEQ ID NO: 1118763 - RNA, 24 nt, Human
cccaaaagcaaaaaacagccacag

SEQ ID NO: 1118764 - RNA, 23 nt, Human
cccaugagauuaaaacauacaga

SEQ ID NO: 1118765 - RNA, 19 nt, Human
ccccaggacgacaagucca

SEQ ID NO: 1118766 - RNA, 20 nt, Human
cccccaacaaaggggccuau

SEQ ID NO: 1118767 - RNA, 26 nt, Human
cccucaaugcguauguacguaucacc

SEQ ID NO: 1118768 - RNA, 19 nt, Human
cccugcaucccgaacacuc

SEQ ID NO: 1118769 - RNA, 26 nt, Human
cccugcaucccgaacacuccacugac

SEQ ID NO: 1118770 - RNA, 20 nt, Human
ccuccaggugccuuuggaag

SEQ ID NO: 1118771 - RNA, 24 nt, Human
ccugaugaugaggccuggguccaa

SEQ ID NO: 1118772 - RNA, 23 nt, Human
ccuuucugcuuuaagucugaaga

SEQ ID NO: 1118773 - RNA, 21 nt, Human
ccuuuggaaggugagcagaga

SEQ ID NO: 1118774 - RNA, 20 nt, Human
cucacuaggaacccuccaac

SEQ ID NO: 1118775 - RNA, 26 nt, Human
cugcuccccacucgggguauucaaaa

SEQ ID NO: 1118776 - RNA, 19 nt, Human
cugguaguuuaauguucuc

SEQ ID NO: 1118777 - RNA, 19 nt, Human
cugguaguuuaauguucuc

SEQ ID NO: 1118778 - RNA, 18 nt, Human
cuggugcucaggaaagga

SEQ ID NO: 1118779 - RNA, 19 nt, Human
cuggugcucaggaaaggag

SEQ ID NO: 1118780 - RNA, 21 nt, Human
cuugccagccauuugaagccc

SEQ ID NO: 1118781 - RNA, 23 nt, Human
cuuggccccacugcagaucccuu

SEQ ID NO: 1118782 - RNA, 23 nt, Human
gacaaauuccucuggaggaaguc

SEQ ID NO: 1118783 - RNA, 18 nt, Human
gacccagccucugggucc

SEQ ID NO: 1118784 - RNA, 19 nt, Human
gacgacaaguccaagaaca

SEQ ID NO: 1118785 - RNA, 22 nt, Human
gacuugcagaaauccggggccc

SEQ ID NO: 1118786 - RNA, 23 nt, Human
gagaaauaacaaaaccucauaac

SEQ ID NO: 1118787 - RNA, 21 nt, Human
gagagagcugggguuggggag

SEQ ID NO: 1118788 - RNA, 21 nt, Human
gagcugggaagcagcaggaaa

SEQ ID NO: 1118789 - RNA, 19 nt, Human
gaggaacaggagggaguag

SEQ ID NO: 1118790 - RNA, 22 nt, Human
gauacuguguggcacugggcaa

SEQ ID NO: 1118791 - RNA, 24 nt, Human
gaugaugaggccuggguccaaaca

SEQ ID NO: 1118792 - RNA, 18 nt, Human
gauggugaaaacaggaga

SEQ ID NO: 1118793 - RNA, 20 nt, Human
gcaaggaaguaaagccaugg

SEQ ID NO: 1118794 - RNA, 18 nt, Human
gcagagaagagccacaga

SEQ ID NO: 1118795 - RNA, 24 nt, Human
gccauggggaaaaaaauccagcuu

SEQ ID NO: 1118796 - RNA, 18 nt, Human
gccccacugcagaucccu

SEQ ID NO: 1118797 - RNA, 26 nt, Human
gcccccaacaaaggggccuauaaugc

SEQ ID NO: 1118798 - RNA, 21 nt, Human
gcuuugaggagaacccugcuc

SEQ ID NO: 1118799 - RNA, 19 nt, Human
ggaaacaaugaagucagcc

SEQ ID NO: 1118800 - RNA, 21 nt, Human
ggaacccuccaacaaccauac

SEQ ID NO: 1118801 - RNA, 25 nt, Human
ggagcuucucugagcucauccccau

SEQ ID NO: 1118802 - RNA, 25 nt, Human
ggcagccccagcaaaaggggaacgc

SEQ ID NO: 1118803 - RNA, 20 nt, Human
gggacccagccucugggucc

SEQ ID NO: 1118804 - RNA, 19 nt, Human
gguuuguugaccgggggca

SEQ ID NO: 1118805 - RNA, 18 nt, Human
guaaagugcgaugccucc

SEQ ID NO: 1118806 - RNA, 24 nt, Human
gugagcagagagagcugggguugg

SEQ ID NO: 1118807 - RNA, 28 nt, Human
guggaccaacaggcugcccccaacaaag

SEQ ID NO: 1118808 - RNA, 18 nt, Human
uaaaaaacaaggcccaga

SEQ ID NO: 1118809 - RNA, 19 nt, Human
uaaaaauaaaaucuaucua

SEQ ID NO: 1118810 - RNA, 26 nt, Human
uaaaacauacagaaacuaaaaaacaa

SEQ ID NO: 1118811 - RNA, 24 nt, Human
uaaaagcagcucuuuccaaagcaa

SEQ ID NO: 1118812 - RNA, 22 nt, Human
uaaagaacuaaaacugccccag

SEQ ID NO: 1118813 - RNA, 23 nt, Human
uaacaaaaccucauaacaaggua

SEQ ID NO: 1118814 - RNA, 20 nt, Human
uacguggcuuucugaaaagu

SEQ ID NO: 1118815 - RNA, 24 nt, Human
uacuguguggcacugggcaaggcu

SEQ ID NO: 1118816 - RNA, 21 nt, Human
uaggaacccuccaacaaccau

SEQ ID NO: 1118817 - RNA, 18 nt, Human
uauaaagaacuaaaacug

SEQ ID NO: 1118818 - RNA, 19 nt, Human
uauaaugcaauaacaguuu

SEQ ID NO: 1118819 - RNA, 23 nt, Human
uauagugcccccugcaucccgaa

SEQ ID NO: 1118820 - RNA, 21 nt, Human
uaucagaguggcaaaaaaagc

SEQ ID NO: 1118821 - RNA, 19 nt, Human
ucagagaccaucccaucua

SEQ ID NO: 1118822 - RNA, 20 nt, Human
ucaggaaaggagaugcauga

SEQ ID NO: 1118823 - RNA, 18 nt, Human
ucaguauauguucugagc

SEQ ID NO: 1118824 - RNA, 22 nt, Human
uccaagaagacaaugacucacc

SEQ ID NO: 1118825 - RNA, 19 nt, Human
uccaaggggaaagaaauga

SEQ ID NO: 1118826 - RNA, 19 nt, Human
uccagcgacagguucuggc

SEQ ID NO: 1118827 - RNA, 23 nt, Human
uccauaauaccuagacuccuaga

SEQ ID NO: 1118828 - RNA, 19 nt, Human
ucuauugccagguccccca

SEQ ID NO: 1118829 - RNA, 24 nt, Human
ucuguaggaaugcaucagcuuggu

SEQ ID NO: 1118830 - RNA, 20 nt, Human
ugaaaacaggagaaccuuag

SEQ ID NO: 1118831 - RNA, 19 nt, Human
ugaaauaacuguuacaagc

SEQ ID NO: 1118832 - RNA, 18 nt, Human
ugaaggcagagaagacaa

SEQ ID NO: 1118833 - RNA, 18 nt, Human
ugagagagaccagagcac

SEQ ID NO: 1118834 - RNA, 18 nt, Human
ugagggcaggagggaaga

SEQ ID NO: 1118835 - RNA, 19 nt, Human
ugagugaaggcagagaaga

SEQ ID NO: 1118836 - RNA, 24 nt, Human
ugauccuaugguugugaggcuuug

SEQ ID NO: 1118837 - RNA, 24 nt, Human
ugcaagcuugccuacagcugaggg

SEQ ID NO: 1118838 - RNA, 22 nt, Human
ugccacaaagagccucagagac

SEQ ID NO: 1118839 - RNA, 18 nt, Human
ugccaggaaauucauagg

SEQ ID NO: 1118840 - RNA, 18 nt, Human
ugccaggaaauucauagg

SEQ ID NO: 1118841 - RNA, 22 nt, Human
ugccuuuggaaggugagcagag

SEQ ID NO: 1118842 - RNA, 25 nt, Human
ugcggaagaaaacugucauaaaagu

SEQ ID NO: 1118843 - RNA, 22 nt, Human
uggaaacaaugaagucagcuug

SEQ ID NO: 1118844 - RNA, 22 nt, Human
uggaaagauccagacuuuggca

SEQ ID NO: 1118845 - RNA, 22 nt, Human
uggaagagaucagcugcuggua

SEQ ID NO: 1118846 - RNA, 22 nt, Human
uggcagccccagcaaaagggca

SEQ ID NO: 1118847 - RNA, 21 nt, Human
uggcgagaucuuuuuaggcau

SEQ ID NO: 1118848 - RNA, 18 nt, Human
uggggagggaugauguca

SEQ ID NO: 1118849 - RNA, 24 nt, Human
ugggguggcauccuuggccccacu

SEQ ID NO: 1118850 - RNA, 23 nt, Human
ugguaaagugcgaugccuccucc

SEQ ID NO: 1118851 - RNA, 25 nt, Human
ugguaagccaggagccaggucaaac

SEQ ID NO: 1118852 - RNA, 24 nt, Human
ugguugugaggcuuugaggagaac

SEQ ID NO: 1118853 - RNA, 18 nt, Human
ugguuuccagcgacaggu

SEQ ID NO: 1118854 - RNA, 24 nt, Human
uguggaccaacaggcugcccccaa

SEQ ID NO: 1118855 - RNA, 19 nt, Human
uguugaccgggggcagugg

SEQ ID NO: 1118856 - RNA, 18 nt, Human
uguuggugcugcugaaau

SEQ ID NO: 1118857 - RNA, 26 nt, Human
uguuggugcugcugaaauguggaaag

SEQ ID NO: 1118858 - RNA, 24 nt, Human
uuacaagcaaauccuauugcacuc

SEQ ID NO: 1118859 - RNA, 20 nt, Human
uuagagaucauccauuucaa

SEQ ID NO: 1118860 - RNA, 24 nt, Human
uuaguaucagaguggcaaaaaaag

SEQ ID NO: 1118861 - RNA, 24 nt, Human
uuggugcccuuagagaucauccau

SEQ ID NO: 1118862 - RNA, 20 nt, Human
uuggugcugcugaaaugugg

SEQ ID NO: 1118863 - RNA, 23 nt, Human
uugucagagaaauaacaaaaccu

SEQ ID NO: 1118864 - RNA, 18 nt, Human
uuuccauaauaccuagac

SEQ ID NO: 1118865 - RNA, 18 nt, Human
uuuucaacuuccccaugu

SEQ ID NO: 1118866 - RNA, 21 nt, Human
aaaaaaaagcacuuacagaag

SEQ ID NO: 1118867 - RNA, 22 nt, Human
aagaaaaaaaaagcacuuacag

SEQ ID NO: 1118868 - RNA, 24 nt, Human
aagaaaaaaaaagcacuuacagaa

SEQ ID NO: 1118869 - RNA, 21 nt, Human
acagggacugcuaacauccug

SEQ ID NO: 1118870 - RNA, 23 nt, Human
accuccgggaccugcccgugcuu

SEQ ID NO: 1118871 - RNA, 25 nt, Human
agaaaaaaaaagcacuuacagaagg

SEQ ID NO: 1118872 - RNA, 24 nt, Human
agccucucuucucuuuccaaccuc

SEQ ID NO: 1118873 - RNA, 23 nt, Human
cagaaggaggcaggcagccaagc

SEQ ID NO: 1118874 - RNA, 21 nt, Human
cagccucucuucucuuuccaa

SEQ ID NO: 1118875 - RNA, 21 nt, Human
ccagccucucuucucuuucca

SEQ ID NO: 1118876 - RNA, 20 nt, Human
cccccgccccgcaggccugc

SEQ ID NO: 1118877 - RNA, 19 nt, Human
cccggaucagggccucaga

SEQ ID NO: 1118878 - RNA, 24 nt, Human
ccucucuucucuuuccaaccucua

SEQ ID NO: 1118879 - RNA, 19 nt, Human
cgccaccccgcccccgccc

SEQ ID NO: 1118880 - RNA, 22 nt, Human
cuccacaggcacaguggccugg

SEQ ID NO: 1118881 - RNA, 18 nt, Human
cucccagccucucuucuc

SEQ ID NO: 1118882 - RNA, 21 nt, Human
cugcccgugcucucuagaauc

SEQ ID NO: 1118883 - RNA, 22 nt, Human
cugguaauagaguacagguuuu

SEQ ID NO: 1118884 - RNA, 23 nt, Human
cuuacagaaggaggcaggcagcc

SEQ ID NO: 1118885 - RNA, 20 nt, Human
gccaccccgcccccgccccg

SEQ ID NO: 1118886 - RNA, 21 nt, Human
gccaccccgcccccgccccgc

SEQ ID NO: 1118887 - RNA, 20 nt, Human
gcccagggucccuucggugc

SEQ ID NO: 1118888 - RNA, 25 nt, Human
ggaggcaggcagccaagcugagccc

SEQ ID NO: 1118889 - RNA, 24 nt, Human
gguaauagaguacagguuuaagga

SEQ ID NO: 1118890 - RNA, 23 nt, Human
guaagucuguucgucccccacuc

SEQ ID NO: 1118891 - RNA, 21 nt, Human
ucccaggugaagaaaaaaaaa

SEQ ID NO: 1118892 - RNA, 19 nt, Human
ucccaucagccaguggagc

SEQ ID NO: 1118893 - RNA, 20 nt, Human
uccugggcgccaccccgccc

SEQ ID NO: 1118894 - RNA, 21 nt, Human
uccugggcgccaccccgcccc

SEQ ID NO: 1118895 - RNA, 20 nt, Human
ucugagaccuccgggaccuu

SEQ ID NO: 1118896 - RNA, 22 nt, Human
ugagagaacgcugcggcucugg

SEQ ID NO: 1118897 - RNA, 19 nt, Human
ugaucccaucagccagugg

SEQ ID NO: 1118898 - RNA, 23 nt, Human
uggaacccguucgcggucucuca

SEQ ID NO: 1118899 - RNA, 22 nt, Human
aggaagcagauccagagaggca

SEQ ID NO: 1118900 - RNA, 24 nt, Human
auuccauucaugauccuggaauag

SEQ ID NO: 1118901 - RNA, 26 nt, Human
auuccauucaugauccuggaauagaa

SEQ ID NO: 1118902 - RNA, 23 nt, Human
gcuguuuacaugccuuccuugag

SEQ ID NO: 1118903 - RNA, 19 nt, Human
gggcaugaaagccaguggc

SEQ ID NO: 1118904 - RNA, 21 nt, Human
ucaggaagcagauccagagag

SEQ ID NO: 1118905 - RNA, 20 nt, Human
uccuggaauagggcaugaaa

SEQ ID NO: 1118906 - RNA, 22 nt, Human
uccuggaauagggcaugaaagc

SEQ ID NO: 1118907 - RNA, 18 nt, Human
uucaaggcuggagaacua

SEQ ID NO: 1118908 - RNA, 20 nt, Human
aacaacuuuucacaagccga

SEQ ID NO: 1118909 - RNA, 22 nt, Human
aacucccuucuucaauggacua

SEQ ID NO: 1118910 - RNA, 21 nt, Human
acaacaacuuucaaacucccu

SEQ ID NO: 1118911 - RNA, 23 nt, Human
agaaagccgcuauaaaacccaaa

SEQ ID NO: 1118912 - RNA, 20 nt, Human
caaacuguauccagcuuuau

SEQ ID NO: 1118913 - RNA, 18 nt, Human
cagcuuuauuaaagauac

SEQ ID NO: 1118914 - RNA, 20 nt, Human
ccacaaucuagaaauggaac

SEQ ID NO: 1118915 - RNA, 21 nt, Human
ggcaucacuggaaaguccaga

SEQ ID NO: 1118916 - RNA, 20 nt, Human
uacgaaaaaucagaaagccg

SEQ ID NO: 1118917 - RNA, 25 nt, Human
uagaaauggaaccacugcucuuuug

SEQ ID NO: 1118918 - RNA, 24 nt, Human
ucaauggacuacgaaaaaucagaa

SEQ ID NO: 1118919 - RNA, 22 nt, Human
ucaggcaggacaugggcagaca

SEQ ID NO: 1118920 - RNA, 22 nt, Human
ucaggucccaacagaugccugg

SEQ ID NO: 1118921 - RNA, 20 nt, Human
ugaaaauggcagaauuuauc

SEQ ID NO: 1118922 - RNA, 21 nt, Human
ugaaaauggcagaauuuaucu

SEQ ID NO: 1118923 - RNA, 23 nt, Human
uggaaccacugcucuuuugacag

SEQ ID NO: 1118924 - RNA, 18 nt, Human
uggcaucacuggaaaguc

SEQ ID NO: 1118925 - RNA, 20 nt, Human
uuaucugaagauccacaauc

SEQ ID NO: 1118926 - RNA, 29 nt, Human
uuuagagugaggguugacauuucacauuu

SEQ ID NO: 1118927 - RNA, 26 nt, Human
uuucaaacucccuucuucaauggacu

SEQ ID NO: 1118928 - RNA, 22 nt, Human
aaaaagucaaaauuuagccagg

SEQ ID NO: 1118929 - RNA, 18 nt, Human
aaacccaagcuacggcaa

SEQ ID NO: 1118930 - RNA, 25 nt, Human
aaacuaagaaguaaauaagccagaa

SEQ ID NO: 1118931 - RNA, 19 nt, Human
aaagugcuaggguuacagg

SEQ ID NO: 1118932 - RNA, 24 nt, Human
aaagugcuaggguuacagguguga

SEQ ID NO: 1118933 - RNA, 24 nt, Human
aaagugcugggauuacaggcguga

SEQ ID NO: 1118934 - RNA, 20 nt, Human
aaccccucccuacucauccc

SEQ ID NO: 1118935 - RNA, 22 nt, Human
aagaagaggaggauucuaagaa

SEQ ID NO: 1118936 - RNA, 18 nt, Human
aagacuucagcuuccacc

SEQ ID NO: 1118937 - RNA, 20 nt, Human
aagcaaauuccugaauuuuc

SEQ ID NO: 1118938 - RNA, 19 nt, Human
aagcauuuugggaggcuga

SEQ ID NO: 1118939 - RNA, 24 nt, Human
aagcauuuugggaggcugaggugg

SEQ ID NO: 1118940 - RNA, 21 nt, Human
aaggagcuggagagacagugg

SEQ ID NO: 1118941 - RNA, 24 nt, Human
aaggagcuggagagacaguggggu

SEQ ID NO: 1118942 - RNA, 22 nt, Human
aagucaaaauuuagccaggccu

SEQ ID NO: 1118943 - RNA, 26 nt, Human
aagugcuaggguuacaggugugagcc

SEQ ID NO: 1118944 - RNA, 19 nt, Human
aagugcugggauuacaggc

SEQ ID NO: 1118945 - RNA, 19 nt, Human
aagugcugggauuacaggc

SEQ ID NO: 1118946 - RNA, 26 nt, Human
aagugcugggauuacaggcgugagcc

SEQ ID NO: 1118947 - RNA, 24 nt, Human
aauaagccagaaccccucccuacu

SEQ ID NO: 1118948 - RNA, 21 nt, Human
aauaagccagaaccccuccuc

SEQ ID NO: 1118949 - RNA, 18 nt, Human
acaggguuucaccauguu

SEQ ID NO: 1118950 - RNA, 23 nt, Human
acaggguuucaccauguuggcca

SEQ ID NO: 1118951 - RNA, 24 nt, Human
acaggguuucaccauguuggccag

SEQ ID NO: 1118952 - RNA, 25 nt, Human
acagugcugugugguccucaggaca

SEQ ID NO: 1118953 - RNA, 24 nt, Human
accaugcaaccucaggggaaccuu

SEQ ID NO: 1118954 - RNA, 18 nt, Human
accauguuggccaggcug

SEQ ID NO: 1118955 - RNA, 24 nt, Human
accugaggucaggaguucgagacc

SEQ ID NO: 1118956 - RNA, 22 nt, Human
accuggucaccaccauucacag

SEQ ID NO: 1118957 - RNA, 24 nt, Human
acucauccccuuuggucuccccaa

SEQ ID NO: 1118958 - RNA, 21 nt, Human
acugguuccucuguugagcaa

SEQ ID NO: 1118959 - RNA, 23 nt, Human
agagacaguggggucuucggggg

SEQ ID NO: 1118960 - RNA, 22 nt, Human
agaggcuauuucugccaagugg

SEQ ID NO: 1118961 - RNA, 20 nt, Human
agcauuuugggaggcugagg

SEQ ID NO: 1118962 - RNA, 24 nt, Human
agcauuuugggaggcugagguggg

SEQ ID NO: 1118963 - RNA, 23 nt, Human
agccaugauugcaucaugcaacc

SEQ ID NO: 1118964 - RNA, 20 nt, Human
aggaggcccggggagacugc

SEQ ID NO: 1118965 - RNA, 24 nt, Human
aggcacaguggcucaugccugcaa

SEQ ID NO: 1118966 - RNA, 24 nt, Human
aggcugagguggguggaucaccug

SEQ ID NO: 1118967 - RNA, 28 nt, Human
aggcugcagugagccaugauugcaucau

SEQ ID NO: 1118968 - RNA, 24 nt, Human
aggugaucugcccaccuuggucuc

SEQ ID NO: 1118969 - RNA, 24 nt, Human
aggugaucugccugccuuggccuc

SEQ ID NO: 1118970 - RNA, 19 nt, Human
agguggaggcugcagugag

SEQ ID NO: 1118971 - RNA, 24 nt, Human
agguggaggcugcagugagccaug

SEQ ID NO: 1118972 - RNA, 24 nt, Human
aggugggaggaucgcuugagccug

SEQ ID NO: 1118973 - RNA, 22 nt, Human
agguggguggaucaccugaggu

SEQ ID NO: 1118974 - RNA, 24 nt, Human
agugccuacccccaggaaggcagc

SEQ ID NO: 1118975 - RNA, 18 nt, Human
agugcugggauuacaggc

SEQ ID NO: 1118976 - RNA, 24 nt, Human
aguggcucaugccugcaaucgaag

SEQ ID NO: 1118977 - RNA, 21 nt, Human
aucaccugaggucaggaguuc

SEQ ID NO: 1118978 - RNA, 24 nt, Human
aucaccugaggucaggaguucgag

SEQ ID NO: 1118979 - RNA, 24 nt, Human
aucaugcaaccucugccuucuggg

SEQ ID NO: 1118980 - RNA, 23 nt, Human
aucgcuugagccugggaggugga

SEQ ID NO: 1118981 - RNA, 20 nt, Human
augcaaccucugccuucugg

SEQ ID NO: 1118982 - RNA, 24 nt, Human
augcaaccucugccuucuggguuc

SEQ ID NO: 1118983 - RNA, 22 nt, Human
caaaaacucacacuuuugaugc

SEQ ID NO: 1118984 - RNA, 20 nt, Human
caaagucuccaaggaaagcc

SEQ ID NO: 1118985 - RNA, 24 nt, Human
caaagugcuaggguuacaggugug

SEQ ID NO: 1118986 - RNA, 24 nt, Human
caaagugcugggauuacaggcgug

SEQ ID NO: 1118987 - RNA, 22 nt, Human
caagcaauucuccugccucagc

SEQ ID NO: 1118988 - RNA, 18 nt, Human
caagccccugcccugccc

SEQ ID NO: 1118989 - RNA, 19 nt, Human
caccaugcaaccucagggg

SEQ ID NO: 1118990 - RNA, 21 nt, Human
caccauguuggccaggcuggu

SEQ ID NO: 1118991 - RNA, 24 nt, Human
caccauguuggccaggcuggucuc

SEQ ID NO: 1118992 - RNA, 27 nt, Human
caccauguuggccaggcuggucucaaa

SEQ ID NO: 1118993 - RNA, 23 nt, Human
caccugaggucaggaguucgaga

SEQ ID NO: 1118994 - RNA, 22 nt, Human
cacugcgccuggcccccuccug

SEQ ID NO: 1118995 - RNA, 18 nt, Human
cagagacauacccagaga

SEQ ID NO: 1118996 - RNA, 19 nt, Human
cagccuccugaguagcugg

SEQ ID NO: 1118997 - RNA, 20 nt, Human
cagcugcgccgggcugugcu

SEQ ID NO: 1118998 - RNA, 26 nt, Human
cagcugcucucccaauggagccgaga

SEQ ID NO: 1118999 - RNA, 22 nt, Human
cagcuuauuuaaucacacagag

SEQ ID NO: 1119000 - RNA, 24 nt, Human
caggguuucaccauguuggccagg

SEQ ID NO: 1119001 - RNA, 24 nt, Human
caggugugagccacugugcccggc

SEQ ID NO: 1119002 - RNA, 22 nt, Human
caucaagguccacugggugggg

SEQ ID NO: 1119003 - RNA, 24 nt, Human
caugccugcaaucgaagcauuuug

SEQ ID NO: 1119004 - RNA, 24 nt, Human
cauguuggccaggcuggucucaaa

SEQ ID NO: 1119005 - RNA, 20 nt, Human
ccaaagugcuaggguuacag

SEQ ID NO: 1119006 - RNA, 21 nt, Human
ccaaagugcuaggguuacagg

SEQ ID NO: 1119007 - RNA, 24 nt, Human
ccaaagugcuaggguuacaggugu

SEQ ID NO: 1119008 - RNA, 22 nt, Human
ccaaagugcugggauuacaggc

SEQ ID NO: 1119009 - RNA, 22 nt, Human
ccaaagugcugggauuacaggc

SEQ ID NO: 1119010 - RNA, 24 nt, Human
ccaaagugcugggauuacaggcgu

SEQ ID NO: 1119011 - RNA, 23 nt, Human
ccaccauucacagugaucacuca

SEQ ID NO: 1119012 - RNA, 24 nt, Human
ccaccuuggucucccaaagugcug

SEQ ID NO: 1119013 - RNA, 25 nt, Human
ccacugcgccuggcccccuccugga

SEQ ID NO: 1119014 - RNA, 18 nt, Human
ccagagacauacccagag

SEQ ID NO: 1119015 - RNA, 22 nt, Human
ccaucaagaaaucuguuuucuu

SEQ ID NO: 1119016 - RNA, 18 nt, Human
ccccucccuacucauccc

SEQ ID NO: 1119017 - RNA, 22 nt, Human
ccccugcagcagggacucacag

SEQ ID NO: 1119018 - RNA, 19 nt, Human
cccucccuacucauccccu

SEQ ID NO: 1119019 - RNA, 19 nt, Human
cccucuacaggccuuuccu

SEQ ID NO: 1119020 - RNA, 22 nt, Human
cccugaccagccgggaaucugc

SEQ ID NO: 1119021 - RNA, 20 nt, Human
cccugcccaccuggucacca

SEQ ID NO: 1119022 - RNA, 23 nt, Human
ccuacccccaggaaggcagcacc

SEQ ID NO: 1119023 - RNA, 23 nt, Human
ccucuguggccuauauugucuuu

SEQ ID NO: 1119024 - RNA, 20 nt, Human
ccucuuccugcccuuguucc

SEQ ID NO: 1119025 - RNA, 20 nt, Human
ccucuuccugcccuuguucc

SEQ ID NO: 1119026 - RNA, 24 nt, Human
ccugaccucaggugaucugcccac

SEQ ID NO: 1119027 - RNA, 22 nt, Human
ccugaggucaggaguucgagac

SEQ ID NO: 1119028 - RNA, 25 nt, Human
ccugcaaucgaagcauuuugggagg

SEQ ID NO: 1119029 - RNA, 24 nt, Human
ccugccucagccuccugaguagcu

SEQ ID NO: 1119030 - RNA, 22 nt, Human
ccugccuuggccucccaaagug

SEQ ID NO: 1119031 - RNA, 21 nt, Human
ccuggccucaggugaucugcc

SEQ ID NO: 1119032 - RNA, 19 nt, Human
ccugggagguggaggcugc

SEQ ID NO: 1119033 - RNA, 21 nt, Human
ccugggcuaaggcacuuagac

SEQ ID NO: 1119034 - RNA, 24 nt, Human
ccuucuggguucaagcaauucucc

SEQ ID NO: 1119035 - RNA, 22 nt, Human
cgagaccagccuggccucaggu

SEQ ID NO: 1119036 - RNA, 22 nt, Human
cgccucuuccugcccuuguucc

SEQ ID NO: 1119037 - RNA, 22 nt, Human
cgugggccaggacgcugguacc

SEQ ID NO: 1119038 - RNA, 22 nt, Human
cucacacuuuugaugccacaac

SEQ ID NO: 1119039 - RNA, 24 nt, Human
cucacagaagugccuacccccaau

SEQ ID NO: 1119040 - RNA, 18 nt, Human
cucagggagcugaggugg

SEQ ID NO: 1119041 - RNA, 24 nt, Human
cucaggugaucugcccaccuuggu

SEQ ID NO: 1119042 - RNA, 23 nt, Human
cucauccccuuuggucuccccaa

SEQ ID NO: 1119043 - RNA, 24 nt, Human
cucaugccugcaaucgaagcauuu

SEQ ID NO: 1119044 - RNA, 21 nt, Human
cucucccaauggagccgagag

SEQ ID NO: 1119045 - RNA, 19 nt, Human
cugagcccucagcucccuc

SEQ ID NO: 1119046 - RNA, 21 nt, Human
cugcagugagccaugauugca

SEQ ID NO: 1119047 - RNA, 25 nt, Human
cugcccaccuggucaccaccauuca

SEQ ID NO: 1119048 - RNA, 20 nt, Human
cugcccugcccaccugguca

SEQ ID NO: 1119049 - RNA, 23 nt, Human
cugccuuggccucccaaagugcu

SEQ ID NO: 1119050 - RNA, 20 nt, Human
cugggugggggcacuguggc

SEQ ID NO: 1119051 - RNA, 23 nt, Human
cuugacacucaaacccaagcuac

SEQ ID NO: 1119052 - RNA, 20 nt, Human
gaaagccggguucuccagag

SEQ ID NO: 1119053 - RNA, 20 nt, Human
gaccacagccaguccaucug

SEQ ID NO: 1119054 - RNA, 24 nt, Human
gaccucaggugaucugcccaccuu

SEQ ID NO: 1119055 - RNA, 22 nt, Human
gagaggccaggaggcccgggga

SEQ ID NO: 1119056 - RNA, 24 nt, Human
gagcugaggugggaggaucgcuug

SEQ ID NO: 1119057 - RNA, 26 nt, Human
gagcugaggugggaggaucgcuugag

SEQ ID NO: 1119058 - RNA, 23 nt, Human
gaggcugcagugagccaugauug

SEQ ID NO: 1119059 - RNA, 20 nt, Human
gagggagaggccaggaggcc

SEQ ID NO: 1119060 - RNA, 23 nt, Human
gagguggguggaucaccugaggu

SEQ ID NO: 1119061 - RNA, 24 nt, Human
gaguagcuggcacuacaggcacac

SEQ ID NO: 1119062 - RNA, 24 nt, Human
gaucaccugaggucaggaguucga

SEQ ID NO: 1119063 - RNA, 24 nt, Human
gaucgcuugagccugggaggugga

SEQ ID NO: 1119064 - RNA, 18 nt, Human
gauuacaggcgugagcca

SEQ ID NO: 1119065 - RNA, 22 nt, Human
gauuacaggcgugagccacugc

SEQ ID NO: 1119066 - RNA, 22 nt, Human
gauuacaggcgugagccacugc

SEQ ID NO: 1119067 - RNA, 23 nt, Human
gcacuacaggcacacgaaaccac

SEQ ID NO: 1119068 - RNA, 22 nt, Human
gcagcggaggaagcugacuaga

SEQ ID NO: 1119069 - RNA, 20 nt, Human
gccaggaggcccggggagac

SEQ ID NO: 1119070 - RNA, 19 nt, Human
gcccuuguuccagcuuugg

SEQ ID NO: 1119071 - RNA, 20 nt, Human
gccucagccuccugaguagc

SEQ ID NO: 1119072 - RNA, 24 nt, Human
gccugggagguggaggcugcagug

SEQ ID NO: 1119073 - RNA, 22 nt, Human
gccugggcuaaggcacuuagac

SEQ ID NO: 1119074 - RNA, 23 nt, Human
gcuggucucaaacuccugaccuc

SEQ ID NO: 1119075 - RNA, 21 nt, Human
ggacaggcacaguggcucaug

SEQ ID NO: 1119076 - RNA, 21 nt, Human
ggagaggccaggaggcccggg

SEQ ID NO: 1119077 - RNA, 21 nt, Human
ggaggaagcugacuagagaua

SEQ ID NO: 1119078 - RNA, 22 nt, Human
ggaggcugcagugagccaugau

SEQ ID NO: 1119079 - RNA, 24 nt, Human
ggaggcugcagugagccaugauug

SEQ ID NO: 1119080 - RNA, 19 nt, Human
ggagggagaggccaggagg

SEQ ID NO: 1119081 - RNA, 26 nt, Human
ggauaggugcacagaugugggucccu

SEQ ID NO: 1119082 - RNA, 22 nt, Human
ggaucaccugaggucaggaguu

SEQ ID NO: 1119083 - RNA, 20 nt, Human
ggaucgcuugagccugggag

SEQ ID NO: 1119084 - RNA, 24 nt, Human
ggccucaggugaucugccugccuu

SEQ ID NO: 1119085 - RNA, 24 nt, Human
ggccuguggucccagcuucucagg

SEQ ID NO: 1119086 - RNA, 25 nt, Human
ggccuguggucccagcuucucaggg

SEQ ID NO: 1119087 - RNA, 24 nt, Human
ggcuggucucaaacuccugaccuc

SEQ ID NO: 1119088 - RNA, 20 nt, Human
gggaggcugaggugggugga

SEQ ID NO: 1119089 - RNA, 24 nt, Human
ggggcuucuggugcagcagacaug

SEQ ID NO: 1119090 - RNA, 22 nt, Human
gggucccucagauuguaaacag

SEQ ID NO: 1119091 - RNA, 20 nt, Human
ggguuacaggugugagccac

SEQ ID NO: 1119092 - RNA, 20 nt, Human
ggguuacaggugugagccac

SEQ ID NO: 1119093 - RNA, 22 nt, Human
ggguuacaggugugagccacug

SEQ ID NO: 1119094 - RNA, 20 nt, Human
ggguucaagcaauucuccug

SEQ ID NO: 1119095 - RNA, 22 nt, Human
ggguuucaccauguuggccagg

SEQ ID NO: 1119096 - RNA, 21 nt, Human
gguaacuggaucuaagaagga

SEQ ID NO: 1119097 - RNA, 19 nt, Human
ggugcaaaaacucacacuu

SEQ ID NO: 1119098 - RNA, 21 nt, Human
gguggaucaccugaggucagg

SEQ ID NO: 1119099 - RNA, 18 nt, Human
gguuacaggugugagcca

SEQ ID NO: 1119100 - RNA, 24 nt, Human
gguuacaggugugagccacugugc

SEQ ID NO: 1119101 - RNA, 19 nt, Human
gguucaagcaauucuccug

SEQ ID NO: 1119102 - RNA, 19 nt, Human
uaaaacagcaagacuucag

SEQ ID NO: 1119103 - RNA, 20 nt, Human
uaaaacagcaagacuucagc

SEQ ID NO: 1119104 - RNA, 22 nt, Human
uaaauaagccagaaccccuccc

SEQ ID NO: 1119105 - RNA, 22 nt, Human
uaacuuuuuggagguuuuuaca

SEQ ID NO: 1119106 - RNA, 20 nt, Human
uaagaaggaggcgauauugc

SEQ ID NO: 1119107 - RNA, 21 nt, Human
uaagaaguaaauaagccagaa

SEQ ID NO: 1119108 - RNA, 22 nt, Human
uaagaaguaaauaagccagaac

SEQ ID NO: 1119109 - RNA, 19 nt, Human
uaaggcacuuagacaagcc

SEQ ID NO: 1119110 - RNA, 22 nt, Human
uacaggcgugagccacugcgcc

SEQ ID NO: 1119111 - RNA, 22 nt, Human
uacaggcgugagccacugcgcc

SEQ ID NO: 1119112 - RNA, 23 nt, Human
uacaggcgugagccacugcgccu

SEQ ID NO: 1119113 - RNA, 23 nt, Human
uacaggugugagccacugugccc

SEQ ID NO: 1119114 - RNA, 23 nt, Human
uacaggugugagccacugugccc

SEQ ID NO: 1119115 - RNA, 18 nt, Human
uaccagagacauacccag

SEQ ID NO: 1119116 - RNA, 22 nt, Human
uagaaacaggguuucaccaugu

SEQ ID NO: 1119117 - RNA, 20 nt, Human
uagaagaagcugaguuggca

SEQ ID NO: 1119118 - RNA, 20 nt, Human
uagacugacuugguaacugg

SEQ ID NO: 1119119 - RNA, 23 nt, Human
uagccaggccuguggucccagcu

SEQ ID NO: 1119120 - RNA, 18 nt, Human
uagcuggcacuacaggca

SEQ ID NO: 1119121 - RNA, 24 nt, Human
uaggguuacaggugugagccacug

SEQ ID NO: 1119122 - RNA, 24 nt, Human
uaguagaaacaggguuucaccaug

SEQ ID NO: 1119123 - RNA, 25 nt, Human
uaguagaaacaggguuucaccaugu

SEQ ID NO: 1119124 - RNA, 24 nt, Human
uauuuaguagaaacaggguuucac

SEQ ID NO: 1119125 - RNA, 19 nt, Human
ucaagcaauucuccugccu

SEQ ID NO: 1119126 - RNA, 21 nt, Human
ucacagaagugccuaccccca

SEQ ID NO: 1119127 - RNA, 20 nt, Human
ucagccuccugaguagcugg

SEQ ID NO: 1119128 - RNA, 23 nt, Human
ucaugcaaccucugccuucuggg

SEQ ID NO: 1119129 - RNA, 23 nt, Human
ucccaaagugcuaggguuacagg

SEQ ID NO: 1119130 - RNA, 24 nt, Human
ucccaaagugcugggauuacaggc

SEQ ID NO: 1119131 - RNA, 24 nt, Human
uccccuuuggucuccccaagaaga

SEQ ID NO: 1119132 - RNA, 18 nt, Human
ucccucagauuguaaaca

SEQ ID NO: 1119133 - RNA, 29 nt, Human
ucccucuacaggccuuuccugaccacagg

SEQ ID NO: 1119134 - RNA, 22 nt, Human
ucccugagcagcugcgccgggc

SEQ ID NO: 1119135 - RNA, 20 nt, Human
ucccuggagcagcccagagc

SEQ ID NO: 1119136 - RNA, 21 nt, Human
ucccuggagcagcccagagcu

SEQ ID NO: 1119137 - RNA, 22 nt, Human
ucccuggagcagcccagagcuc

SEQ ID NO: 1119138 - RNA, 24 nt, Human
uccugaguagcuggcacuacaggc

SEQ ID NO: 1119139 - RNA, 21 nt, Human
ucgaagcauuuugggaggcug

SEQ ID NO: 1119140 - RNA, 24 nt, Human
ucgcuugagccugggagguggagg

SEQ ID NO: 1119141 - RNA, 23 nt, Human
ucuccagagaaucuuaacacccu

SEQ ID NO: 1119142 - RNA, 24 nt, Human
ucuccugccucagccuccugagua

SEQ ID NO: 1119143 - RNA, 24 nt, Human
ucucuacaaaaagucaaaauuuag

SEQ ID NO: 1119144 - RNA, 23 nt, Human
ucucugagggccccugacagcuu

SEQ ID NO: 1119145 - RNA, 18 nt, Human
ucugaagugauugacagg

SEQ ID NO: 1119146 - RNA, 21 nt, Human
ucugaagugauugacaggugg

SEQ ID NO: 1119147 - RNA, 24 nt, Human
ucugccuucuggguucaagcaauu

SEQ ID NO: 1119148 - RNA, 21 nt, Human
ucuguggcaagaggugggcag

SEQ ID NO: 1119149 - RNA, 19 nt, Human
ugacagguggggacaggag

SEQ ID NO: 1119150 - RNA, 18 nt, Human
ugaccucaggugaucugc

SEQ ID NO: 1119151 - RNA, 20 nt, Human
ugaccucaggugaucugccc

SEQ ID NO: 1119152 - RNA, 21 nt, Human
ugaccucaggugaucugccca

SEQ ID NO: 1119153 - RNA, 24 nt, Human
ugaccucaggugaucugcccaccu

SEQ ID NO: 1119154 - RNA, 18 nt, Human
ugagcacuacccacccag

SEQ ID NO: 1119155 - RNA, 18 nt, Human
ugagccugggagguggag

SEQ ID NO: 1119156 - RNA, 24 nt, Human
ugagccugggagguggaggcugca

SEQ ID NO: 1119157 - RNA, 18 nt, Human
ugaggugggaggaucgcu

SEQ ID NO: 1119158 - RNA, 20 nt, Human
ugaggugggaggaucgcuug

SEQ ID NO: 1119159 - RNA, 22 nt, Human
ugaggugggaggaucgcuugag

SEQ ID NO: 1119160 - RNA, 23 nt, Human
ugaggugggaggaucgcuugagc

SEQ ID NO: 1119161 - RNA, 24 nt, Human
ugaggugggaggaucgcuugagcc

SEQ ID NO: 1119162 - RNA, 20 nt, Human
ugagguggguggaucaccug

SEQ ID NO: 1119163 - RNA, 24 nt, Human
ugagguggguggaucaccugaggu

SEQ ID NO: 1119164 - RNA, 26 nt, Human
ugagguggguggaucaccugagguca

SEQ ID NO: 1119165 - RNA, 24 nt, Human
ugaucugcccaccuuggucuccca

SEQ ID NO: 1119166 - RNA, 21 nt, Human
ugcaaaaacucacacuuuuga

SEQ ID NO: 1119167 - RNA, 20 nt, Human
ugcaaccucugccuucuggg

SEQ ID NO: 1119168 - RNA, 23 nt, Human
ugcaaccucugccuucuggguuc

SEQ ID NO: 1119169 - RNA, 20 nt, Human
ugcccuuguuccagcuuugg

SEQ ID NO: 1119170 - RNA, 22 nt, Human
ugccuacccccaggaaggcagc

SEQ ID NO: 1119171 - RNA, 24 nt, Human
ugccucagccuccugaguagcugg

SEQ ID NO: 1119172 - RNA, 19 nt, Human
ugccugaggaucuaggagg

SEQ ID NO: 1119173 - RNA, 23 nt, Human
ugccugaggaucuaggagguaga

SEQ ID NO: 1119174 - RNA, 18 nt, Human
ugccugccuuggccuccc

SEQ ID NO: 1119175 - RNA, 24 nt, Human
ugcugggauuacaggcgugagcca

SEQ ID NO: 1119176 - RNA, 20 nt, Human
ugcuguaacgucuucagggg

SEQ ID NO: 1119177 - RNA, 22 nt, Human
ugcugucccugagcagcugcgc

SEQ ID NO: 1119178 - RNA, 24 nt, Human
uggaucaccugaggucaggaguuc

SEQ ID NO: 1119179 - RNA, 27 nt, Human
uggaucaccugaggucaggaguucgag

SEQ ID NO: 1119180 - RNA, 21 nt, Human
uggauuacucaucucuccggc

SEQ ID NO: 1119181 - RNA, 22 nt, Human
uggcaagaggugggcagcggag

SEQ ID NO: 1119182 - RNA, 24 nt, Human
uggcacuacaggcacacgaaacca

SEQ ID NO: 1119183 - RNA, 23 nt, Human
uggccacagcugugggccaccgg

SEQ ID NO: 1119184 - RNA, 24 nt, Human
uggccacagcugugggccaccggc

SEQ ID NO: 1119185 - RNA, 24 nt, Human
uggccaggcuggucucaaacuccu

SEQ ID NO: 1119186 - RNA, 24 nt, Human
uggccucaggugaucugccugccu

SEQ ID NO: 1119187 - RNA, 18 nt, Human
uggcucaugccugcaauc

SEQ ID NO: 1119188 - RNA, 18 nt, Human
uggcucaugccugcaauc

SEQ ID NO: 1119189 - RNA, 24 nt, Human
uggcucaugccugcaaucgaagca

SEQ ID NO: 1119190 - RNA, 21 nt, Human
uggcuuggguacagcagggag

SEQ ID NO: 1119191 - RNA, 23 nt, Human
ugggaggcugagguggguggauc

SEQ ID NO: 1119192 - RNA, 24 nt, Human
ugggaggcugagguggguggauca

SEQ ID NO: 1119193 - RNA, 18 nt, Human
ugggagguggaggcugca

SEQ ID NO: 1119194 - RNA, 24 nt, Human
ugggagguggaggcugcagugagc

SEQ ID NO: 1119195 - RNA, 18 nt, Human
ugggauuacaggcgugag

SEQ ID NO: 1119196 - RNA, 19 nt, Human
ugggauuacaggcgugagc

SEQ ID NO: 1119197 - RNA, 21 nt, Human
ugggauuacaggcgugagcca

SEQ ID NO: 1119198 - RNA, 22 nt, Human
ugggauuacaggcgugagccac

SEQ ID NO: 1119199 - RNA, 22 nt, Human
ugggauuacaggcgugagccac

SEQ ID NO: 1119200 - RNA, 24 nt, Human
ugggauuacaggcgugagccacug

SEQ ID NO: 1119201 - RNA, 24 nt, Human
ugggauuacaggcgugagccacug

SEQ ID NO: 1119202 - RNA, 24 nt, Human
uggguggaucaccugaggucagga

SEQ ID NO: 1119203 - RNA, 22 nt, Human
ugggugggggcacuguggccac

SEQ ID NO: 1119204 - RNA, 21 nt, Human
uggguucaagcaauucuccug

SEQ ID NO: 1119205 - RNA, 23 nt, Human
uggguucaagcaauucuccugcc

SEQ ID NO: 1119206 - RNA, 24 nt, Human
uggguucaagcaauucuccugccu

SEQ ID NO: 1119207 - RNA, 22 nt, Human
uggugcagcagacaugcacuuc

SEQ ID NO: 1119208 - RNA, 20 nt, Human
ugucucagcucuggcuuggg

SEQ ID NO: 1119209 - RNA, 22 nt, Human
ugucucuacaaaaagucaaaau

SEQ ID NO: 1119210 - RNA, 19 nt, Human
uuaaucauguucucuuuug

SEQ ID NO: 1119211 - RNA, 19 nt, Human
uuacaggugugagccacug

SEQ ID NO: 1119212 - RNA, 24 nt, Human
uuaguagaaacaggguuucaccau

SEQ ID NO: 1119213 - RNA, 21 nt, Human
uucaagcaauucuccugccuc

SEQ ID NO: 1119214 - RNA, 24 nt, Human
uucaagcaauucuccugccucagc

SEQ ID NO: 1119215 - RNA, 24 nt, Human
uuccaucaagaaaucuguuuucuu

SEQ ID NO: 1119216 - RNA, 19 nt, Human
uucuaagaaaggagcugga

SEQ ID NO: 1119217 - RNA, 24 nt, Human
uucuguuugcacccucagccuggg

SEQ ID NO: 1119218 - RNA, 19 nt, Human
uugacacucaaacccaagc

SEQ ID NO: 1119219 - RNA, 21 nt, Human
uugagccugggagguggaggc

SEQ ID NO: 1119220 - RNA, 25 nt, Human
uugggaggcugagguggguggauca

SEQ ID NO: 1119221 - RNA, 23 nt, Human
uuuaccagagacauacccagaga

SEQ ID NO: 1119222 - RNA, 24 nt, Human
uuucaccauguuggccaggcuggu

SEQ ID NO: 1119223 - RNA, 18 nt, Human
uuugcuguaacgucuuca

SEQ ID NO: 1119224 - RNA, 23 nt, Human
uuuugggaggcugaggugggugg

SEQ ID NO: 1119225 - RNA, 22 nt, Human
aagagaaugaggaaaccacgug

SEQ ID NO: 1119226 - RNA, 19 nt, Human
aagggucucaggccugggc

SEQ ID NO: 1119227 - RNA, 22 nt, Human
aaguugccuccucugaccccca

SEQ ID NO: 1119228 - RNA, 19 nt, Human
acccuggggagagcauggc

SEQ ID NO: 1119229 - RNA, 23 nt, Human
acccuggggcaucucuggggcac

SEQ ID NO: 1119230 - RNA, 24 nt, Human
acuuugguuuuuccaacauccacu

SEQ ID NO: 1119231 - RNA, 21 nt, Human
agaggacagcagaagauagag

SEQ ID NO: 1119232 - RNA, 22 nt, Human
agcagugagaagaugggaggaa

SEQ ID NO: 1119233 - RNA, 21 nt, Human
agccagcauuuguggaaggca

SEQ ID NO: 1119234 - RNA, 26 nt, Human
aggaagagagaagucagaucacaaaa

SEQ ID NO: 1119235 - RNA, 20 nt, Human
aggcagccccuucauggagg

SEQ ID NO: 1119236 - RNA, 24 nt, Human
aggcagccccuucauggaggucug

SEQ ID NO: 1119237 - RNA, 19 nt, Human
aggcaggaugugguccagg

SEQ ID NO: 1119238 - RNA, 21 nt, Human
aggcaggaugugguccagguu

SEQ ID NO: 1119239 - RNA, 22 nt, Human
aggcaucggggauuccauagcc

SEQ ID NO: 1119240 - RNA, 19 nt, Human
aggggcagggaauaggcag

SEQ ID NO: 1119241 - RNA, 20 nt, Human
agggucccugucugugguuc

SEQ ID NO: 1119242 - RNA, 22 nt, Human
agggucccugucugugguucuu

SEQ ID NO: 1119243 - RNA, 25 nt, Human
agguguggagggaggaacaauguuu

SEQ ID NO: 1119244 - RNA, 24 nt, Human
aguuguuuguaccugucccuuugu

SEQ ID NO: 1119245 - RNA, 21 nt, Human
auaggcagacagaagcaggga

SEQ ID NO: 1119246 - RNA, 22 nt, Human
aucuugucuagccccucuauug

SEQ ID NO: 1119247 - RNA, 19 nt, Human
auucccacccccuccaccc

SEQ ID NO: 1119248 - RNA, 20 nt, Human
auuuguggaaggcagccccu

SEQ ID NO: 1119249 - RNA, 21 nt, Human
cacagcucagucuccacaucc

SEQ ID NO: 1119250 - RNA, 23 nt, Human
cacagcucagucuccacaucccc

SEQ ID NO: 1119251 - RNA, 24 nt, Human
cacagcucagucuccacauccccc

SEQ ID NO: 1119252 - RNA, 23 nt, Human
cacagggcaaagcuuggagacag

SEQ ID NO: 1119253 - RNA, 19 nt, Human
caccaagggucucaggccu

SEQ ID NO: 1119254 - RNA, 24 nt, Human
cacccccuccacccuggggcaucu

SEQ ID NO: 1119255 - RNA, 24 nt, Human
cacgguagaugggacuuugaagug

SEQ ID NO: 1119256 - RNA, 21 nt, Human
cagaagcagggagggugcugg

SEQ ID NO: 1119257 - RNA, 19 nt, Human
cagcagaagauagagccuu

SEQ ID NO: 1119258 - RNA, 24 nt, Human
cagcagaagauagagccuuggaua

SEQ ID NO: 1119259 - RNA, 20 nt, Human
cagcagccugagauauuguu

SEQ ID NO: 1119260 - RNA, 23 nt, Human
cagcauuuguggaaggcagcccc

SEQ ID NO: 1119261 - RNA, 24 nt, Human
caggaugugguccagguugaaccu

SEQ ID NO: 1119262 - RNA, 23 nt, Human
cagguugaaccgagccuucagga

SEQ ID NO: 1119263 - RNA, 20 nt, Human
caucccccauucccaccccc

SEQ ID NO: 1119264 - RNA, 22 nt, Human
ccaagaugaggagcccugagaa

SEQ ID NO: 1119265 - RNA, 18 nt, Human
ccacacucuccacagcuc

SEQ ID NO: 1119266 - RNA, 20 nt, Human
ccagcagccugagauauugu

SEQ ID NO: 1119267 - RNA, 22 nt, Human
ccauuggugcuggaucuuccuu

SEQ ID NO: 1119268 - RNA, 22 nt, Human
cccacccccuccacccuggggc

SEQ ID NO: 1119269 - RNA, 24 nt, Human
cccacgguagaugggaccgggguc

SEQ ID NO: 1119270 - RNA, 20 nt, Human
ccccagcaucucucucugcc

SEQ ID NO: 1119271 - RNA, 21 nt, Human
ccccauucccacccccuccac

SEQ ID NO: 1119272 - RNA, 22 nt, Human
ccccauucccacccccuccacc

SEQ ID NO: 1119273 - RNA, 23 nt, Human
cccccauucccacccccuccacc

SEQ ID NO: 1119274 - RNA, 21 nt, Human
ccccggguccccggcuucagc

SEQ ID NO: 1119275 - RNA, 20 nt, Human
ccccugggcuagaccguggg

SEQ ID NO: 1119276 - RNA, 20 nt, Human
cccucugcucccacucucaa

SEQ ID NO: 1119277 - RNA, 25 nt, Human
cccugggcuagaccgugggggugga

SEQ ID NO: 1119278 - RNA, 18 nt, Human
ccuggcccucugcuccca

SEQ ID NO: 1119279 - RNA, 18 nt, Human
ccugucccugaggaacug

SEQ ID NO: 1119280 - RNA, 22 nt, Human
cggcuucagcuucuccaggguc

SEQ ID NO: 1119281 - RNA, 18 nt, Human
cggguccccggcuucagc

SEQ ID NO: 1119282 - RNA, 19 nt, Human
cucugcucccacucucaag

SEQ ID NO: 1119283 - RNA, 18 nt, Human
cugccacuugugcagagg

SEQ ID NO: 1119284 - RNA, 18 nt, Human
cugccuggcccugccagg

SEQ ID NO: 1119285 - RNA, 22 nt, Human
gaaacccuggggcugggaagca

SEQ ID NO: 1119286 - RNA, 21 nt, Human
gaagcacagugaagucagggg

SEQ ID NO: 1119287 - RNA, 22 nt, Human
gaaguugccuccucugaccccc

SEQ ID NO: 1119288 - RNA, 21 nt, Human
gacagagguugguggaagaga

SEQ ID NO: 1119289 - RNA, 19 nt, Human
gagaccuggcugcaggccu

SEQ ID NO: 1119290 - RNA, 18 nt, Human
gagccccccaaauucccc

SEQ ID NO: 1119291 - RNA, 18 nt, Human
gagccccugggcuagacc

SEQ ID NO: 1119292 - RNA, 20 nt, Human
gaggaucgaagauggauagg

SEQ ID NO: 1119293 - RNA, 18 nt, Human
gagggaaacccuggggcu

SEQ ID NO: 1119294 - RNA, 23 nt, Human
gaguccuuuuuccaguggggccu

SEQ ID NO: 1119295 - RNA, 19 nt, Human
gccgucuccauugauccug

SEQ ID NO: 1119296 - RNA, 22 nt, Human
ggaagaaggacgugauuucuag

SEQ ID NO: 1119297 - RNA, 18 nt, Human
ggacaggcugcugcgggc

SEQ ID NO: 1119298 - RNA, 24 nt, Human
ggagaacacagggcaaagcuugga

SEQ ID NO: 1119299 - RNA, 19 nt, Human
ggagggaaacccuggggcu

SEQ ID NO: 1119300 - RNA, 20 nt, Human
ggagggaaacccuggggcug

SEQ ID NO: 1119301 - RNA, 22 nt, Human
ggagggucccugucugugguuc

SEQ ID NO: 1119302 - RNA, 19 nt, Human
ggcagggaauaggcagcag

SEQ ID NO: 1119303 - RNA, 23 nt, Human
ggcuagaccguggggguggaggg

SEQ ID NO: 1119304 - RNA, 20 nt, Human
gggaggcuucuaagaggaag

SEQ ID NO: 1119305 - RNA, 20 nt, Human
gggcacugaggugaggaucg

SEQ ID NO: 1119306 - RNA, 28 nt, Human
gggcagggaauaggcagcagcugggugg

SEQ ID NO: 1119307 - RNA, 21 nt, Human
gggccucagcuuucccaucug

SEQ ID NO: 1119308 - RNA, 18 nt, Human
ggguggagaggagggcag

SEQ ID NO: 1119309 - RNA, 21 nt, Human
gguccagguugaaccgagccu

SEQ ID NO: 1119310 - RNA, 23 nt, Human
gguccccggcuucagcuucucca

SEQ ID NO: 1119311 - RNA, 20 nt, Human
ggucugccccuggaugggga

SEQ ID NO: 1119312 - RNA, 20 nt, Human
gguggagaggagggcaguuc

SEQ ID NO: 1119313 - RNA, 21 nt, Human
gguggagggucccugucugug

SEQ ID NO: 1119314 - RNA, 21 nt, Human
guccccagcaucucucucugc

SEQ ID NO: 1119315 - RNA, 18 nt, Human
guggaaggcagccccuuc

SEQ ID NO: 1119316 - RNA, 20 nt, Human
gugguucuugugggccugug

SEQ ID NO: 1119317 - RNA, 19 nt, Human
guucaaagagaggaaguug

SEQ ID NO: 1119318 - RNA, 18 nt, Human
uaagcaccuacuggucug

SEQ ID NO: 1119319 - RNA, 21 nt, Human
uacuggucuggugcuagacac

SEQ ID NO: 1119320 - RNA, 22 nt, Human
ucaggggaggcuucuaagagga

SEQ ID NO: 1119321 - RNA, 21 nt, Human
ucauugauugaggagggacca

SEQ ID NO: 1119322 - RNA, 20 nt, Human
uccacagcucagucuccaca

SEQ ID NO: 1119323 - RNA, 22 nt, Human
uccccagcaucucucucugccu

SEQ ID NO: 1119324 - RNA, 19 nt, Human
ucccccauucccacccccu

SEQ ID NO: 1119325 - RNA, 21 nt, Human
ucccuuugugagccccccaaa

SEQ ID NO: 1119326 - RNA, 23 nt, Human
uccucagccccccggguccccgg

SEQ ID NO: 1119327 - RNA, 19 nt, Human
ucuacccacgguagauggg

SEQ ID NO: 1119328 - RNA, 19 nt, Human
ucugacccccaggcgaagu

SEQ ID NO: 1119329 - RNA, 22 nt, Human
ugaaggaaacgaagucucuaca

SEQ ID NO: 1119330 - RNA, 19 nt, Human
ugaaggaaaggagaagggg

SEQ ID NO: 1119331 - RNA, 22 nt, Human
ugagaagaugggaggaagagag

SEQ ID NO: 1119332 - RNA, 19 nt, Human
ugagagggguugaugggca

SEQ ID NO: 1119333 - RNA, 19 nt, Human
ugagccccccaaauucccc

SEQ ID NO: 1119334 - RNA, 18 nt, Human
ugaggaacugccaggagu

SEQ ID NO: 1119335 - RNA, 19 nt, Human
ugauugaggagggaccagc

SEQ ID NO: 1119336 - RNA, 19 nt, Human
ugccugaaagguggcaaga

SEQ ID NO: 1119337 - RNA, 20 nt, Human
ugccuggagggugcaggugu

SEQ ID NO: 1119338 - RNA, 22 nt, Human
ugcucagagccugucccugagg

SEQ ID NO: 1119339 - RNA, 18 nt, Human
uggaagagaaugaggaaa

SEQ ID NO: 1119340 - RNA, 22 nt, Human
uggagggucccugucugugguu

SEQ ID NO: 1119341 - RNA, 23 nt, Human
ugggcucagcugagaaguugccu

SEQ ID NO: 1119342 - RNA, 22 nt, Human
uggggccucagcuuucccaucu

SEQ ID NO: 1119343 - RNA, 21 nt, Human
uggggguggagggucccuguc

SEQ ID NO: 1119344 - RNA, 21 nt, Human
uguagaggucaaacaacucug

SEQ ID NO: 1119345 - RNA, 24 nt, Human
uguugccauuggugcuggaucuuc

SEQ ID NO: 1119346 - RNA, 25 nt, Human
uuccuuguugccauuggugcuggau

SEQ ID NO: 1119347 - RNA, 19 nt, Human
uugaugggcaggggggagg

SEQ ID NO: 1119348 - RNA, 25 nt, Human
uuguugccauuggugcuggaucuuc

SEQ ID NO: 1119349 - RNA, 20 nt, Human
uuugaaguggcuucccaggg

SEQ ID NO: 1119350 - RNA, 19 nt, Human
uuuuccaacauccacuggg

SEQ ID NO: 1119351 - RNA, 21 nt, Human
aaaaaaguccagaccuggggg

SEQ ID NO: 1119352 - RNA, 19 nt, Human
aaagagauuucugcgcuuc

SEQ ID NO: 1119353 - RNA, 21 nt, Human
aaagcagaaacaguugugucc

SEQ ID NO: 1119354 - RNA, 19 nt, Human
aacaauaaagucuucccuc

SEQ ID NO: 1119355 - RNA, 23 nt, Human
accagcauggaagggucaagugu

SEQ ID NO: 1119356 - RNA, 23 nt, Human
acccuacucccagacuucaugcc

SEQ ID NO: 1119357 - RNA, 20 nt, Human
agccuacccuacucccagac

SEQ ID NO: 1119358 - RNA, 18 nt, Human
aggaggacacguauaaua

SEQ ID NO: 1119359 - RNA, 20 nt, Human
aggcagaagucccaggccca

SEQ ID NO: 1119360 - RNA, 22 nt, Human
aggcagaagucccaggcccagc

SEQ ID NO: 1119361 - RNA, 18 nt, Human
aggcagguacuuuuagga

SEQ ID NO: 1119362 - RNA, 24 nt, Human
aggcccagcuggcugggcccaaga

SEQ ID NO: 1119363 - RNA, 25 nt, Human
caacaauaaagucuucccucuguuu

SEQ ID NO: 1119364 - RNA, 18 nt, Human
cacacacacacacacaca

SEQ ID NO: 1119365 - RNA, 21 nt, Human
cacacacacacacacacaccc

SEQ ID NO: 1119366 - RNA, 18 nt, Human
cacaccccacagugaaaa

SEQ ID NO: 1119367 - RNA, 21 nt, Human
cagacuccugagaaccagaag

SEQ ID NO: 1119368 - RNA, 24 nt, Human
cagacuccugagaaccagaagucc

SEQ ID NO: 1119369 - RNA, 22 nt, Human
cagcuagcucucacagacacac

SEQ ID NO: 1119370 - RNA, 25 nt, Human
cagcuccaugaaugccucccuguga

SEQ ID NO: 1119371 - RNA, 20 nt, Human
caggcuccuggggguccccu

SEQ ID NO: 1119372 - RNA, 21 nt, Human
cagggugggaccccaguuucc

SEQ ID NO: 1119373 - RNA, 26 nt, Human
cagguuagaaauuauugcucaaagca

SEQ ID NO: 1119374 - RNA, 24 nt, Human
cauugaguggggcaugauauugga

SEQ ID NO: 1119375 - RNA, 25 nt, Human
cccaaucuauuuauccauccaucca

SEQ ID NO: 1119376 - RNA, 22 nt, Human
cccaggaggacacguauaauac

SEQ ID NO: 1119377 - RNA, 20 nt, Human
cccccagcucuccaggacuc

SEQ ID NO: 1119378 - RNA, 21 nt, Human
cccccuagccuacccuacucc

SEQ ID NO: 1119379 - RNA, 26 nt, Human
cccccuagccuacccuacucccagac

SEQ ID NO: 1119380 - RNA, 18 nt, Human
ccccucugccagccaccc

SEQ ID NO: 1119381 - RNA, 24 nt, Human
cccucugccagccacccuauguuc

SEQ ID NO: 1119382 - RNA, 21 nt, Human
cccucuggcuuuccauucugg

SEQ ID NO: 1119383 - RNA, 18 nt, Human
cccugguuucuccagcuc

SEQ ID NO: 1119384 - RNA, 22 nt, Human
ccuagaugcucuccccuucucc

SEQ ID NO: 1119385 - RNA, 24 nt, Human
ccucgcuccacagccucuggcaaa

SEQ ID NO: 1119386 - RNA, 20 nt, Human
ccugugucugcagugggucg

SEQ ID NO: 1119387 - RNA, 23 nt, Human
cggucagggcgacagguaggcag

SEQ ID NO: 1119388 - RNA, 18 nt, Human
cucacagacacaccccac

SEQ ID NO: 1119389 - RNA, 23 nt, Human
cucugcuuggggcaagugcuucc

SEQ ID NO: 1119390 - RNA, 22 nt, Human
cugggcccaagagcuccaucug

SEQ ID NO: 1119391 - RNA, 24 nt, Human
cuuggcucaggaaacaaccccagc

SEQ ID NO: 1119392 - RNA, 22 nt, Human
cuuuccauguguaucucuaugu

SEQ ID NO: 1119393 - RNA, 21 nt, Human
gaaacaaccccagccaaccca

SEQ ID NO: 1119394 - RNA, 24 nt, Human
gaaacccccuagccuacccuacuc

SEQ ID NO: 1119395 - RNA, 19 nt, Human
gauccaacuggcuggaaug

SEQ ID NO: 1119396 - RNA, 20 nt, Human
gcaagugcuuccaaaauccc

SEQ ID NO: 1119397 - RNA, 26 nt, Human
gcccuggacaguuucucccucuucuu

SEQ ID NO: 1119398 - RNA, 21 nt, Human
gccucaguuuccccaccugug

SEQ ID NO: 1119399 - RNA, 22 nt, Human
gcuucauuugccaucuccauuu

SEQ ID NO: 1119400 - RNA, 22 nt, Human
ggaaacaaccccagccaaccca

SEQ ID NO: 1119401 - RNA, 22 nt, Human
ggaacucaaggcaaggcuccuc

SEQ ID NO: 1119402 - RNA, 23 nt, Human
ggaguauaugauucccagaugaa

SEQ ID NO: 1119403 - RNA, 19 nt, Human
ggcugggaaggaggcaggu

SEQ ID NO: 1119404 - RNA, 19 nt, Human
gguaagagaaucagagccu

SEQ ID NO: 1119405 - RNA, 20 nt, Human
gguaagagaaucagagccug

SEQ ID NO: 1119406 - RNA, 23 nt, Human
ggucaggaucccugguuucucca

SEQ ID NO: 1119407 - RNA, 19 nt, Human
guagccuggaagguuugaa

SEQ ID NO: 1119408 - RNA, 22 nt, Human
gucaucucauccaucccgacuc

SEQ ID NO: 1119409 - RNA, 24 nt, Human
gugaaaaucacacacacacacaca

SEQ ID NO: 1119410 - RNA, 27 nt, Human
gugaaaaucacacacacacacacacag

SEQ ID NO: 1119411 - RNA, 21 nt, Human
guguagccuggaagguuugaa

SEQ ID NO: 1119412 - RNA, 27 nt, Human
uaaaaauaaauuuuccaacccuccccc

SEQ ID NO: 1119413 - RNA, 22 nt, Human
uaccaaaaauaacaacaauaaa

SEQ ID NO: 1119414 - RNA, 21 nt, Human
uagaagaaacccccuagccua

SEQ ID NO: 1119415 - RNA, 24 nt, Human
uagaagaaacccccuagccuaccc

SEQ ID NO: 1119416 - RNA, 19 nt, Human
uagaugcucuccccuucuc

SEQ ID NO: 1119417 - RNA, 27 nt, Human
uaggcagacuccugagaaccagaaguc

SEQ ID NO: 1119418 - RNA, 21 nt, Human
uauaauacaggccuucuugga

SEQ ID NO: 1119419 - RNA, 24 nt, Human
ucacaggcagacugcucacuuucu

SEQ ID NO: 1119420 - RNA, 23 nt, Human
ucauggucugauggucccauggu

SEQ ID NO: 1119421 - RNA, 21 nt, Human
uccacagccucuggcaaagcu

SEQ ID NO: 1119422 - RNA, 22 nt, Human
uccauguguaucucuauguagc

SEQ ID NO: 1119423 - RNA, 24 nt, Human
uccauucuggcaucccagagugga

SEQ ID NO: 1119424 - RNA, 21 nt, Human
ucccagaaaucagcccuugcc

SEQ ID NO: 1119425 - RNA, 20 nt, Human
ucccaggcccagcuggcugg

SEQ ID NO: 1119426 - RNA, 23 nt, Human
ucccaggcccagcuggcugggcc

SEQ ID NO: 1119427 - RNA, 24 nt, Human
ucccaggcccagcuggcugggccc

SEQ ID NO: 1119428 - RNA, 22 nt, Human
uccccagggugggaccccaguu

SEQ ID NO: 1119429 - RNA, 23 nt, Human
uccccagggugggaccccaguuu

SEQ ID NO: 1119430 - RNA, 21 nt, Human
uccugccucaguuuccccacc

SEQ ID NO: 1119431 - RNA, 20 nt, Human
ucuccauccacaagcgguca

SEQ ID NO: 1119432 - RNA, 18 nt, Human
ucugccagccacccuaug

SEQ ID NO: 1119433 - RNA, 20 nt, Human
ugaaaaucacacacacacac

SEQ ID NO: 1119434 - RNA, 25 nt, Human
ugaauguagagcaacaucuacaacc

SEQ ID NO: 1119435 - RNA, 23 nt, Human
ugaguaauggagugcugcgugaa

SEQ ID NO: 1119436 - RNA, 23 nt, Human
ugauggaagaguguagccuggaa

SEQ ID NO: 1119437 - RNA, 19 nt, Human
ugccaaggagggguaaggc

SEQ ID NO: 1119438 - RNA, 23 nt, Human
ugccagagguuuaacuccacuuc

SEQ ID NO: 1119439 - RNA, 25 nt, Human
ugccagagguuuaacuccacuuccc

SEQ ID NO: 1119440 - RNA, 19 nt, Human
ugccaggccacucuggagg

SEQ ID NO: 1119441 - RNA, 21 nt, Human
ugccucaguuuccccaccugu

SEQ ID NO: 1119442 - RNA, 23 nt, Human
ugccuucagauuccuucaggcuc

SEQ ID NO: 1119443 - RNA, 21 nt, Human
uggagguacugaguaauggag

SEQ ID NO: 1119444 - RNA, 22 nt, Human
uggaguauaugauucccagaug

SEQ ID NO: 1119445 - RNA, 19 nt, Human
uggcuggaaugugucaggg

SEQ ID NO: 1119446 - RNA, 23 nt, Human
ugggagggcagaacccuguuccu

SEQ ID NO: 1119447 - RNA, 19 nt, Human
uggucccauggucugaugg

SEQ ID NO: 1119448 - RNA, 24 nt, Human
uguagcaauugaugggcccugcgg

SEQ ID NO: 1119449 - RNA, 18 nt, Human
uguccaggggcucggacc

SEQ ID NO: 1119450 - RNA, 25 nt, Human
ugugcacuuacacacauggucagau

SEQ ID NO: 1119451 - RNA, 22 nt, Human
uuagaaauuauugcucaaagca

SEQ ID NO: 1119452 - RNA, 22 nt, Human
uuauuuugugcugggcuucaga

SEQ ID NO: 1119453 - RNA, 22 nt, Human
uuccccguauguacauugagac

SEQ ID NO: 1119454 - RNA, 18 nt, Human
uucucccucuucuucucc

SEQ ID NO: 1119455 - RNA, 19 nt, Human
uugcucaaagcagaaacag

SEQ ID NO: 1119456 - RNA, 19 nt, Human
uuggcucaggaaacaaccc

SEQ ID NO: 1119457 - RNA, 21 nt, Human
uuugugcacuuacacacaugg

SEQ ID NO: 1119458 - RNA, 19 nt, Human
uuuugugcugggcuucaga

SEQ ID NO: 1119459 - RNA, 19 nt, Human
aaaaaacagaaaacaaaca

SEQ ID NO: 1119460 - RNA, 22 nt, Human
aaaacaaagaggcuacaggccc

SEQ ID NO: 1119461 - RNA, 27 nt, Human
aaacaaaugcauaaagucccugucccc

SEQ ID NO: 1119462 - RNA, 23 nt, Human
aaacagaaaacaaacagauauag

SEQ ID NO: 1119463 - RNA, 25 nt, Human
aaacagaaaacaaacagauauagga

SEQ ID NO: 1119464 - RNA, 20 nt, Human
aaacagauauaggauguaau

SEQ ID NO: 1119465 - RNA, 24 nt, Human
aaagugcugggauuacagguguga

SEQ ID NO: 1119466 - RNA, 24 nt, Human
aaaugcauaaagucccugucccca

SEQ ID NO: 1119467 - RNA, 19 nt, Human
aagcgauucucccaccucu

SEQ ID NO: 1119468 - RNA, 18 nt, Human
aagugcugggauuacagg

SEQ ID NO: 1119469 - RNA, 19 nt, Human
aagugcugggauuacaggu

SEQ ID NO: 1119470 - RNA, 26 nt, Human
aagugcugggauuacaggugugagcc

SEQ ID NO: 1119471 - RNA, 20 nt, Human
aauggcuacuuucaaagaca

SEQ ID NO: 1119472 - RNA, 21 nt, Human
aauggcuacuuucaaagacau

SEQ ID NO: 1119473 - RNA, 24 nt, Human
acacugcgaaccauauuaccuaau

SEQ ID NO: 1119474 - RNA, 22 nt, Human
accaagucccuaggcugcacac

SEQ ID NO: 1119475 - RNA, 20 nt, Human
accauucuggggucuggagg

SEQ ID NO: 1119476 - RNA, 19 nt, Human
acguagucaggguucccca

SEQ ID NO: 1119477 - RNA, 20 nt, Human
acuuugaauucaaacaaaag

SEQ ID NO: 1119478 - RNA, 21 nt, Human
agaaaacaaacagauauagga

SEQ ID NO: 1119479 - RNA, 23 nt, Human
agaaaacaaacagauauaggaug

SEQ ID NO: 1119480 - RNA, 21 nt, Human
agaaacuguuccugauucugg

SEQ ID NO: 1119481 - RNA, 23 nt, Human
agacaaagacagcuugugcagag

SEQ ID NO: 1119482 - RNA, 24 nt, Human
agacccaacagccugggauccuga

SEQ ID NO: 1119483 - RNA, 23 nt, Human
aggaccccgggccuggccaacaa

SEQ ID NO: 1119484 - RNA, 20 nt, Human
aggcgaagguuuccaaaccc

SEQ ID NO: 1119485 - RNA, 18 nt, Human
aggcugagaagucccaca

SEQ ID NO: 1119486 - RNA, 24 nt, Human
agggauaaauacuuugaauucaaa

SEQ ID NO: 1119487 - RNA, 23 nt, Human
aggugugagccacugugccuggc

SEQ ID NO: 1119488 - RNA, 22 nt, Human
aguagaaaugggguuucaccau

SEQ ID NO: 1119489 - RNA, 24 nt, Human
agugcaguguuaugauuuuggcuc

SEQ ID NO: 1119490 - RNA, 22 nt, Human
auccaagggcaggaauggaagc

SEQ ID NO: 1119491 - RNA, 18 nt, Human
augggguuucaccauguu

SEQ ID NO: 1119492 - RNA, 22 nt, Human
augggguuucaccauguuggcc

SEQ ID NO: 1119493 - RNA, 23 nt, Human
augggguuucaccauguuggcca

SEQ ID NO: 1119494 - RNA, 24 nt, Human
augggguuucaccauguuggccag

SEQ ID NO: 1119495 - RNA, 22 nt, Human
auuccacccauggccccuccca

SEQ ID NO: 1119496 - RNA, 22 nt, Human
caaaaccaaucacaccauccca

SEQ ID NO: 1119497 - RNA, 22 nt, Human
caaacuucugccuggccaucca

SEQ ID NO: 1119498 - RNA, 20 nt, Human
caaaggccuuagaaccccuc

SEQ ID NO: 1119499 - RNA, 24 nt, Human
caaagugcugggauuacaggugug

SEQ ID NO: 1119500 - RNA, 19 nt, Human
caaaugggauaaauugguc

SEQ ID NO: 1119501 - RNA, 24 nt, Human
caaccaaacccuaucauuccaccc

SEQ ID NO: 1119502 - RNA, 26 nt, Human
caaccaaacccuaucauuccaccccg

SEQ ID NO: 1119503 - RNA, 19 nt, Human
caagcgauucucccaccuc

SEQ ID NO: 1119504 - RNA, 20 nt, Human
caagucccaaagucucagaa

SEQ ID NO: 1119505 - RNA, 27 nt, Human
caagucccaaagucucagaaucaggaa

SEQ ID NO: 1119506 - RNA, 19 nt, Human
caagugauccuccugccuc

SEQ ID NO: 1119507 - RNA, 22 nt, Human
caagugauccuccugccucggc

SEQ ID NO: 1119508 - RNA, 27 nt, Human
caagugauccuccugccucggccuucc

SEQ ID NO: 1119509 - RNA, 27 nt, Human
caauuugccuuucuuccguuuuuguuc

SEQ ID NO: 1119510 - RNA, 23 nt, Human
cacaaccaaacccuaucauucca

SEQ ID NO: 1119511 - RNA, 22 nt, Human
cacaggcacacgccaccacacc

SEQ ID NO: 1119512 - RNA, 18 nt, Human
caccauguuggccaggau

SEQ ID NO: 1119513 - RNA, 22 nt, Human
caccauguuggccaggaugguc

SEQ ID NO: 1119514 - RNA, 31 nt, Human
caccauguuggccaggauggucccgaacucc

SEQ ID NO: 1119515 - RNA, 23 nt, Human
caccuaaaauuaaccaucacaaa

SEQ ID NO: 1119516 - RNA, 23 nt, Human
caccucugccucccguguagcug

SEQ ID NO: 1119517 - RNA, 24 nt, Human
caccucugccucccguguagcugg

SEQ ID NO: 1119518 - RNA, 25 nt, Human
cacugcccuggcagaggaucuccau

SEQ ID NO: 1119519 - RNA, 26 nt, Human
cagagaaacucccccuuauagagcca

SEQ ID NO: 1119520 - RNA, 21 nt, Human
cagauggaagggguggguucc

SEQ ID NO: 1119521 - RNA, 18 nt, Human
cagcaguaaacaaaugca

SEQ ID NO: 1119522 - RNA, 19 nt, Human
cagccucccucucagcugc

SEQ ID NO: 1119523 - RNA, 24 nt, Human
caggaugagauuuggguggggaca

SEQ ID NO: 1119524 - RNA, 22 nt, Human
caggauggucccgaacuccuga

SEQ ID NO: 1119525 - RNA, 18 nt, Human
caggcccaugagagucca

SEQ ID NO: 1119526 - RNA, 19 nt, Human
caggcugcaaauuuuccga

SEQ ID NO: 1119527 - RNA, 24 nt, Human
cauguuggccaggauggucccgaa

SEQ ID NO: 1119528 - RNA, 25 nt, Human
cauuccacccauggccccucccaaa

SEQ ID NO: 1119529 - RNA, 21 nt, Human
ccaaagugcugggauuacagg

SEQ ID NO: 1119530 - RNA, 21 nt, Human
ccaaagugcugggauuacagg

SEQ ID NO: 1119531 - RNA, 24 nt, Human
ccaaagugcugggauuacaggugu

SEQ ID NO: 1119532 - RNA, 24 nt, Human
ccacauuucccuucugcacugccc

SEQ ID NO: 1119533 - RNA, 19 nt, Human
ccagucaagcugacaccua

SEQ ID NO: 1119534 - RNA, 23 nt, Human
ccaguucuugacuucugugcacu

SEQ ID NO: 1119535 - RNA, 19 nt, Human
ccauggccccucccaaauu

SEQ ID NO: 1119536 - RNA, 19 nt, Human
ccauguucaagcgauucuc

SEQ ID NO: 1119537 - RNA, 24 nt, Human
cccauggucuugggcagcucugcc

SEQ ID NO: 1119538 - RNA, 19 nt, Human
cccuaucauuccacccaug

SEQ ID NO: 1119539 - RNA, 23 nt, Human
ccgaagcuacagcccaagcucua

SEQ ID NO: 1119540 - RNA, 20 nt, Human
ccuauaaaauccaaagcaag

SEQ ID NO: 1119541 - RNA, 26 nt, Human
ccuccugccucggccuuccaaagugc

SEQ ID NO: 1119542 - RNA, 20 nt, Human
ccucuucucacagcuccacu

SEQ ID NO: 1119543 - RNA, 22 nt, Human
ccucuuuaaucuaggcgaaggu

SEQ ID NO: 1119544 - RNA, 18 nt, Human
ccugaccucaagugaucc

SEQ ID NO: 1119545 - RNA, 23 nt, Human
ccugaccucaagugauccuccug

SEQ ID NO: 1119546 - RNA, 21 nt, Human
ccugggauccugaaauccaag

SEQ ID NO: 1119547 - RNA, 21 nt, Human
ccuuucuuccguuuuuguucc

SEQ ID NO: 1119548 - RNA, 21 nt, Human
cgccaccacaccuagcuacuu

SEQ ID NO: 1119549 - RNA, 22 nt, Human
cggaugguucccucuuagccca

SEQ ID NO: 1119550 - RNA, 24 nt, Human
cucaagugauccuccugccucggc

SEQ ID NO: 1119551 - RNA, 21 nt, Human
cuccugccucggccuuccaaa

SEQ ID NO: 1119552 - RNA, 23 nt, Human
cucuugacuccacaucucacauc

SEQ ID NO: 1119553 - RNA, 18 nt, Human
cugccccuguaccuuugc

SEQ ID NO: 1119554 - RNA, 23 nt, Human
cuuagaaccccagcggugacgga

SEQ ID NO: 1119555 - RNA, 19 nt, Human
cuugcacuccccgaagcua

SEQ ID NO: 1119556 - RNA, 21 nt, Human
cuuguauucuaauggaaaaaa

SEQ ID NO: 1119557 - RNA, 22 nt, Human
gaaaacaaacagauauaggaug

SEQ ID NO: 1119558 - RNA, 22 nt, Human
gaagcguguauuccagcuccaa

SEQ ID NO: 1119559 - RNA, 25 nt, Human
gacaaagacagcuugugcagagaaa

SEQ ID NO: 1119560 - RNA, 22 nt, Human
gaccucaagugauccuccugcc

SEQ ID NO: 1119561 - RNA, 24 nt, Human
gaccucaagugauccuccugccuc

SEQ ID NO: 1119562 - RNA, 21 nt, Human
gagauggagucuugcucuguu

SEQ ID NO: 1119563 - RNA, 18 nt, Human
gaggaccccgggccuggc

SEQ ID NO: 1119564 - RNA, 18 nt, Human
gauuacaggugugagcca

SEQ ID NO: 1119565 - RNA, 21 nt, Human
gauuacaggugugagccacug

SEQ ID NO: 1119566 - RNA, 24 nt, Human
gauuacaggugugagccacugugc

SEQ ID NO: 1119567 - RNA, 18 nt, Human
gauuuuggcucacugcaa

SEQ ID NO: 1119568 - RNA, 18 nt, Human
gcaaccucuaccauguuc

SEQ ID NO: 1119569 - RNA, 23 nt, Human
gcaagcuggagacccagggauac

SEQ ID NO: 1119570 - RNA, 21 nt, Human
ggaagcguguauuccagcucc

SEQ ID NO: 1119571 - RNA, 21 nt, Human
ggagacccagggauacuggua

SEQ ID NO: 1119572 - RNA, 24 nt, Human
ggauggucccgaacuccugaccuc

SEQ ID NO: 1119573 - RNA, 20 nt, Human
gggcuugcacuccccgaagc

SEQ ID NO: 1119574 - RNA, 18 nt, Human
gggguugccauaaagacc

SEQ ID NO: 1119575 - RNA, 22 nt, Human
gggguuucaccauguuggccag

SEQ ID NO: 1119576 - RNA, 24 nt, Human
gguuucaccauguuggccaggaug

SEQ ID NO: 1119577 - RNA, 19 nt, Human
gucaugcagauggaagggg

SEQ ID NO: 1119578 - RNA, 18 nt, Human
guggaucuaccauucugg

SEQ ID NO: 1119579 - RNA, 24 nt, Human
guguagcugggaucacaggcacac

SEQ ID NO: 1119580 - RNA, 21 nt, Human
guucaagcgauucucccaccu

SEQ ID NO: 1119581 - RNA, 22 nt, Human
uaaaaaaaaauggcuacuuuca

SEQ ID NO: 1119582 - RNA, 23 nt, Human
uaaugccuuuccaguucucuagg

SEQ ID NO: 1119583 - RNA, 19 nt, Human
uaauggaaaaaacagaaaa

SEQ ID NO: 1119584 - RNA, 21 nt, Human
uacagcaguaaacaaaugcau

SEQ ID NO: 1119585 - RNA, 22 nt, Human
uacagcccaagcucuaccuugc

SEQ ID NO: 1119586 - RNA, 22 nt, Human
uacaggugugagccacugugcc

SEQ ID NO: 1119587 - RNA, 22 nt, Human
uacaggugugagccacugugcc

SEQ ID NO: 1119588 - RNA, 23 nt, Human
uacaggugugagccacugugccu

SEQ ID NO: 1119589 - RNA, 24 nt, Human
uacucaugcaaauuucugcagcca

SEQ ID NO: 1119590 - RNA, 22 nt, Human
uacuuuuuguauuuuuaguaga

SEQ ID NO: 1119591 - RNA, 22 nt, Human
uagaaaugggguuucaccaugu

SEQ ID NO: 1119592 - RNA, 19 nt, Human
uagcuaugucuauugagca

SEQ ID NO: 1119593 - RNA, 24 nt, Human
uaguagaaaugggguuucaccaug

SEQ ID NO: 1119594 - RNA, 26 nt, Human
uaguagaaaugggguuucaccauguu

SEQ ID NO: 1119595 - RNA, 23 nt, Human
uauaauagcuaugucuauugagc

SEQ ID NO: 1119596 - RNA, 19 nt, Human
uaugagccuauaaaaucca

SEQ ID NO: 1119597 - RNA, 21 nt, Human
uaugagccuauaaaauccaaa

SEQ ID NO: 1119598 - RNA, 26 nt, Human
ucaaaacaaagaggcuacaggcccau

SEQ ID NO: 1119599 - RNA, 22 nt, Human
ucaaaaccaaucacaccauccc

SEQ ID NO: 1119600 - RNA, 21 nt, Human
ucaaagacaucuuggaguuca

SEQ ID NO: 1119601 - RNA, 20 nt, Human
ucacugcaaccucuaccaug

SEQ ID NO: 1119602 - RNA, 26 nt, Human
ucacugcaaccucuaccauguucaag

SEQ ID NO: 1119603 - RNA, 24 nt, Human
ucauuccacccauggccccuccca

SEQ ID NO: 1119604 - RNA, 22 nt, Human
uccaaagugcugggauuacagg

SEQ ID NO: 1119605 - RNA, 24 nt, Human
uccaaagugcugggauuacaggug

SEQ ID NO: 1119606 - RNA, 22 nt, Human
uccacccauggccccucccaaa

SEQ ID NO: 1119607 - RNA, 24 nt, Human
uccacccauggccccucccaaauu

SEQ ID NO: 1119608 - RNA, 19 nt, Human
uccacuagguggugcccca

SEQ ID NO: 1119609 - RNA, 25 nt, Human
uccagguacacggugcaagcuggcc

SEQ ID NO: 1119610 - RNA, 22 nt, Human
ucccaaagucucagaaucagga

SEQ ID NO: 1119611 - RNA, 19 nt, Human
uccugccucggccuuccaa

SEQ ID NO: 1119612 - RNA, 21 nt, Human
ucuaauggaaaaaacagaaaa

SEQ ID NO: 1119613 - RNA, 19 nt, Human
ucuccucagaaaaugggaa

SEQ ID NO: 1119614 - RNA, 24 nt, Human
ucuguugcccaaccuggagugcag

SEQ ID NO: 1119615 - RNA, 25 nt, Human
ucuucuggaaauacccucacagaca

SEQ ID NO: 1119616 - RNA, 23 nt, Human
ucuugcucuguugcccaaccugg

SEQ ID NO: 1119617 - RNA, 24 nt, Human
ucuugcucuguugcccaaccugga

SEQ ID NO: 1119618 - RNA, 23 nt, Human
ugacaugcccuggagacauuuuc

SEQ ID NO: 1119619 - RNA, 18 nt, Human
ugaccccacauuucccuu

SEQ ID NO: 1119620 - RNA, 21 nt, Human
ugaccccacauuucccuucug

SEQ ID NO: 1119621 - RNA, 18 nt, Human
ugaccucaagugauccuc

SEQ ID NO: 1119622 - RNA, 20 nt, Human
ugaccucaagugauccuccu

SEQ ID NO: 1119623 - RNA, 21 nt, Human
ugaccucaagugauccuccug

SEQ ID NO: 1119624 - RNA, 24 nt, Human
ugaccucaagugauccuccugccu

SEQ ID NO: 1119625 - RNA, 20 nt, Human
ugacuaaaccauuagaaauu

SEQ ID NO: 1119626 - RNA, 22 nt, Human
ugacuccacaucucacauccag

SEQ ID NO: 1119627 - RNA, 23 nt, Human
ugacuccacaucucacauccagg

SEQ ID NO: 1119628 - RNA, 23 nt, Human
ugagacccaacagccugggaucc

SEQ ID NO: 1119629 - RNA, 19 nt, Human
ugagcacucaagcguauuc

SEQ ID NO: 1119630 - RNA, 19 nt, Human
ugaggaccccgggccuggc

SEQ ID NO: 1119631 - RNA, 24 nt, Human
ugaguuagaaagggcucacaugau

SEQ ID NO: 1119632 - RNA, 25 nt, Human
ugaucuccucuugacuccacaucuc

SEQ ID NO: 1119633 - RNA, 24 nt, Human
ugcaagcuggagacccagggauac

SEQ ID NO: 1119634 - RNA, 23 nt, Human
ugcacucgcagucucaacaccac

SEQ ID NO: 1119635 - RNA, 22 nt, Human
ugcagagaaacucccccuuaau

SEQ ID NO: 1119636 - RNA, 20 nt, Human
ugcagcaaacuucugccugg

SEQ ID NO: 1119637 - RNA, 26 nt, Human
ugcauaaagucccuguccccaugaaa

SEQ ID NO: 1119638 - RNA, 21 nt, Human
ugcccuggagacauuuucccc

SEQ ID NO: 1119639 - RNA, 22 nt, Human
ugcucuguugcccaaccuggag

SEQ ID NO: 1119640 - RNA, 24 nt, Human
ugcugggauuacaggugugagcca

SEQ ID NO: 1119641 - RNA, 24 nt, Human
uggaaaaaacagaaaacaaacaga

SEQ ID NO: 1119642 - RNA, 28 nt, Human
uggaaaaaacagaaaacaaacagauaua

SEQ ID NO: 1119643 - RNA, 21 nt, Human
uggaagggguggguucccaug

SEQ ID NO: 1119644 - RNA, 21 nt, Human
uggagugcaguguuaugauuc

SEQ ID NO: 1119645 - RNA, 21 nt, Human
uggagugcaguguuaugauuu

SEQ ID NO: 1119646 - RNA, 23 nt, Human
uggagugcaguguuaugauuuug

SEQ ID NO: 1119647 - RNA, 24 nt, Human
uggagugcaguguuaugauuuugg

SEQ ID NO: 1119648 - RNA, 24 nt, Human
uggccaggauggucccgaacuccu

SEQ ID NO: 1119649 - RNA, 18 nt, Human
uggcugggaugcagggca

SEQ ID NO: 1119650 - RNA, 21 nt, Human
ugggaauuagcauuuggcucc

SEQ ID NO: 1119651 - RNA, 24 nt, Human
ugggauaaauuggucaaaacaaag

SEQ ID NO: 1119652 - RNA, 21 nt, Human
ugggaucacaggcacacgcca

SEQ ID NO: 1119653 - RNA, 22 nt, Human
ugggaucacaggcacacgccac

SEQ ID NO: 1119654 - RNA, 24 nt, Human
ugggaucacaggcacacgccacca

SEQ ID NO: 1119655 - RNA, 22 nt, Human
ugggaugcagggcaccaagucc

SEQ ID NO: 1119656 - RNA, 18 nt, Human
ugggauuacaggugugag

SEQ ID NO: 1119657 - RNA, 21 nt, Human
ugggauuacaggugugagcca

SEQ ID NO: 1119658 - RNA, 22 nt, Human
ugggauuacaggugugagccac

SEQ ID NO: 1119659 - RNA, 22 nt, Human
ugggauuacaggugugagccac

SEQ ID NO: 1119660 - RNA, 22 nt, Human
ugggauuacaggugugagccac

SEQ ID NO: 1119661 - RNA, 24 nt, Human
ugggauuacaggugugagccacug

SEQ ID NO: 1119662 - RNA, 20 nt, Human
uggggacacaaccaaacccu

SEQ ID NO: 1119663 - RNA, 21 nt, Human
uggggacacaaccaaacccua

SEQ ID NO: 1119664 - RNA, 24 nt, Human
ugggguuucaccauguuggccagg

SEQ ID NO: 1119665 - RNA, 25 nt, Human
ugggucccucccacaacgcauggga

SEQ ID NO: 1119666 - RNA, 18 nt, Human
uggguucccauggucuug

SEQ ID NO: 1119667 - RNA, 20 nt, Human
uggucccgaacuccugaccu

SEQ ID NO: 1119668 - RNA, 21 nt, Human
uguauuuuuaguagaaauggg

SEQ ID NO: 1119669 - RNA, 24 nt, Human
uuagaaauuaaaaaaaaauggcua

SEQ ID NO: 1119670 - RNA, 24 nt, Human
uuagcccaaaggccuuagaacccc

SEQ ID NO: 1119671 - RNA, 18 nt, Human
uuaguagaaaugggguuu

SEQ ID NO: 1119672 - RNA, 22 nt, Human
uuaguagaaaugggguuucacc

SEQ ID NO: 1119673 - RNA, 24 nt, Human
uuaguagaaaugggguuucaccau

SEQ ID NO: 1119674 - RNA, 24 nt, Human
uucaagcgauucucccaccucugc

SEQ ID NO: 1119675 - RNA, 24 nt, Human
uucaggaugagauuugggugggga

SEQ ID NO: 1119676 - RNA, 22 nt, Human
uuccacccauggccccucccaa

SEQ ID NO: 1119677 - RNA, 22 nt, Human
uuccagguacacggugcaagcu

SEQ ID NO: 1119678 - RNA, 24 nt, Human
uugcccaaccuggagugcaguguu

SEQ ID NO: 1119679 - RNA, 19 nt, Human
uuucaccauguuggccagg

SEQ ID NO: 1119680 - RNA, 20 nt, Human
uuucaccauguuggccagga

SEQ ID NO: 1119681 - RNA, 24 nt, Human
uuuccaguucucuagguauucuuu

SEQ ID NO: 1119682 - RNA, 24 nt, Human
uuuuuaguagaaaugggguuucac

SEQ ID NO: 1119683 - RNA, 19 nt, Human
uuuuuguauuuuuaguaga

SEQ ID NO: 1119684 - RNA, 22 nt, Human
aaaacaaagaggcuacaggccc

SEQ ID NO: 1119685 - RNA, 23 nt, Human
aaacagaaaacaaacagauauag

SEQ ID NO: 1119686 - RNA, 25 nt, Human
aaacagaaaacaaacagauauagga

SEQ ID NO: 1119687 - RNA, 20 nt, Human
aaacagauauaggauguaau

SEQ ID NO: 1119688 - RNA, 28 nt, Human
aaagacaaagacagcuugugcagagaaa

SEQ ID NO: 1119689 - RNA, 24 nt, Human
aaagugcugggauuacagguguga

SEQ ID NO: 1119690 - RNA, 24 nt, Human
aaccaaacccuaucauuccacccc

SEQ ID NO: 1119691 - RNA, 21 nt, Human
aaccccaauucuugacuucug

SEQ ID NO: 1119692 - RNA, 19 nt, Human
aagaaacagaaaacaaaca

SEQ ID NO: 1119693 - RNA, 19 nt, Human
aagcgauucucccaccucu

SEQ ID NO: 1119694 - RNA, 19 nt, Human
aagcucuaccuugccuccc

SEQ ID NO: 1119695 - RNA, 27 nt, Human
aagugauccuccugccucggccuccca

SEQ ID NO: 1119696 - RNA, 18 nt, Human
aagugcugggauuacagg

SEQ ID NO: 1119697 - RNA, 19 nt, Human
aagugcugggauuacaggu

SEQ ID NO: 1119698 - RNA, 26 nt, Human
aagugcugggauuacaggugugagcc

SEQ ID NO: 1119699 - RNA, 20 nt, Human
aauagcuaugucuauugagc

SEQ ID NO: 1119700 - RNA, 24 nt, Human
acacugcgaaccauauuaccuaau

SEQ ID NO: 1119701 - RNA, 22 nt, Human
accaagucccuaggcugcacac

SEQ ID NO: 1119702 - RNA, 20 nt, Human
accauucuggggucuggagg

SEQ ID NO: 1119703 - RNA, 22 nt, Human
accuaaaauuaaccaucacaaa

SEQ ID NO: 1119704 - RNA, 23 nt, Human
accucugccucccguguagcugg

SEQ ID NO: 1119705 - RNA, 24 nt, Human
acgcagauggaagggguggguucc

SEQ ID NO: 1119706 - RNA, 22 nt, Human
acuuugaauucaaacaaaagua

SEQ ID NO: 1119707 - RNA, 21 nt, Human
agaaaacaaacagauauagga

SEQ ID NO: 1119708 - RNA, 23 nt, Human
agaaaacaaacagauauaggaug

SEQ ID NO: 1119709 - RNA, 21 nt, Human
agaaacuguuccugauucugg

SEQ ID NO: 1119710 - RNA, 23 nt, Human
agacaaagacagcuugugcagag

SEQ ID NO: 1119711 - RNA, 25 nt, Human
agacccaacagccugggauccugaa

SEQ ID NO: 1119712 - RNA, 20 nt, Human
aggcgaagguuuccaaaccc

SEQ ID NO: 1119713 - RNA, 24 nt, Human
agggauaaauacuuugaauucaaa

SEQ ID NO: 1119714 - RNA, 24 nt, Human
agugcaguguuaugauuuuggcuc

SEQ ID NO: 1119715 - RNA, 20 nt, Human
auagcuaugucuauugagca

SEQ ID NO: 1119716 - RNA, 22 nt, Human
auccaagggcaggaauggaagc

SEQ ID NO: 1119717 - RNA, 18 nt, Human
augggguuucaccauguu

SEQ ID NO: 1119718 - RNA, 22 nt, Human
augggguuucaccauguuggcc

SEQ ID NO: 1119719 - RNA, 23 nt, Human
augggguuucaccauguuggcca

SEQ ID NO: 1119720 - RNA, 24 nt, Human
augggguuucaccauguuggccag

SEQ ID NO: 1119721 - RNA, 22 nt, Human
auuccacccauggccccuccca

SEQ ID NO: 1119722 - RNA, 22 nt, Human
caaaaccaaucacaccauccca

SEQ ID NO: 1119723 - RNA, 22 nt, Human
caaacuucugacugggcaucca

SEQ ID NO: 1119724 - RNA, 20 nt, Human
caaaggccuuagaaccccuc

SEQ ID NO: 1119725 - RNA, 24 nt, Human
caaagugcugggauuacaggugug

SEQ ID NO: 1119726 - RNA, 24 nt, Human
caaccaaacccuaucauuccaccc

SEQ ID NO: 1119727 - RNA, 20 nt, Human
caagucccaaagccucagaa

SEQ ID NO: 1119728 - RNA, 27 nt, Human
caagucccaaagccucagaaucaggaa

SEQ ID NO: 1119729 - RNA, 22 nt, Human
caagugauccuccugccucggc

SEQ ID NO: 1119730 - RNA, 27 nt, Human
caagugauccuccugccucggccuccc

SEQ ID NO: 1119731 - RNA, 27 nt, Human
caauuugccuuucuuccguuuuuguuu

SEQ ID NO: 1119732 - RNA, 23 nt, Human
cacaaccaaacccuaucauucca

SEQ ID NO: 1119733 - RNA, 22 nt, Human
cacaggcacacgccaccacacc

SEQ ID NO: 1119734 - RNA, 18 nt, Human
caccauguuggccaggau

SEQ ID NO: 1119735 - RNA, 22 nt, Human
caccauguuggccaggaugguc

SEQ ID NO: 1119736 - RNA, 31 nt, Human; identical to SEQ ID NO: 1119514

SEQ ID NO: 1119737 - RNA, 21 nt, Human
caccucugccucccguguagc

SEQ ID NO: 1119738 - RNA, 25 nt, Human
cacugcccuggcagaggaucuccau

SEQ ID NO: 1119739 - RNA, 26 nt, Human
cagagaaacucccccuuauagagcca

SEQ ID NO: 1119740 - RNA, 19 nt, Human
cagcaaacuucugacuggg

SEQ ID NO: 1119741 - RNA, 20 nt, Human
cagccucccucucagcugcu

SEQ ID NO: 1119742 - RNA, 24 nt, Human
caggaugagauuuggguggggaca

SEQ ID NO: 1119743 - RNA, 22 nt, Human
caggauggucccgaacuccuga

SEQ ID NO: 1119744 - RNA, 18 nt, Human
caggcccaugagagucca

SEQ ID NO: 1119745 - RNA, 19 nt, Human
caggcugcaaauuuuccga

SEQ ID NO: 1119746 - RNA, 24 nt, Human
caggugugagccacugugccuggc

SEQ ID NO: 1119747 - RNA, 24 nt, Human
cauguuggccaggauggucccgaa

SEQ ID NO: 1119748 - RNA, 24 nt, Human
cauuagaaauuuaaaaaauggcua

SEQ ID NO: 1119749 - RNA, 25 nt, Human
cauuccacccauggccccucccaaa

SEQ ID NO: 1119750 - RNA, 25 nt, Human
ccaaaaugaucuccuuugacuccac

SEQ ID NO: 1119751 - RNA, 21 nt, Human
ccaaagugcugggauuacagg

SEQ ID NO: 1119752 - RNA, 21 nt, Human
ccaaagugcugggauuacagg

SEQ ID NO: 1119753 - RNA, 24 nt, Human
ccaaagugcugggauuacaggugu

SEQ ID NO: 1119754 - RNA, 24 nt, Human
ccacauuucccuucugcacugccc

SEQ ID NO: 1119755 - RNA, 21 nt, Human
ccaccugcacauugagggcgg

SEQ ID NO: 1119756 - RNA, 19 nt, Human
ccagucaagcugacaccua

SEQ ID NO: 1119757 - RNA, 19 nt, Human
ccauguucaagcgauucuc

SEQ ID NO: 1119758 - RNA, 21 nt, Human
cccauggccccucccaaauuu

SEQ ID NO: 1119759 - RNA, 24 nt, Human
cccauggucuugggcagcucugcc

SEQ ID NO: 1119760 - RNA, 19 nt, Human
cccuaucauuccacccaug

SEQ ID NO: 1119761 - RNA, 23 nt, Human
ccgaagcuacagcccaagcucua

SEQ ID NO: 1119762 - RNA, 20 nt, Human
ccuauaaaauccaaagcaag

SEQ ID NO: 1119763 - RNA, 26 nt, Human
ccuccugccucggccucccaaagugc

SEQ ID NO: 1119764 - RNA, 20 nt, Human
ccucuucucacagcuccacu

SEQ ID NO: 1119765 - RNA, 22 nt, Human
ccucuuuaaucuaggcgaaggu

SEQ ID NO: 1119766 - RNA, 18 nt, Human
ccugaccucaagugaucc

SEQ ID NO: 1119767 - RNA, 23 nt, Human
ccugaccucaagugauccuccug

SEQ ID NO: 1119768 - RNA, 19 nt, Human
ccugcacauugagggcgga

SEQ ID NO: 1119769 - RNA, 24 nt, Human
ccugccucggccucccaaagugcu

SEQ ID NO: 1119770 - RNA, 21 nt, Human
ccugggauccugaaauccaag

SEQ ID NO: 1119771 - RNA, 21 nt, Human
cgccaccacaccuagcuacuu

SEQ ID NO: 1119772 - RNA, 24 nt, Human
cguagucaggguucgccaaagaga

SEQ ID NO: 1119773 - RNA, 24 nt, Human
cucaagugauccuccugccucggc

SEQ ID NO: 1119774 - RNA, 19 nt, Human
cucacugcaaccucugucu

SEQ ID NO: 1119775 - RNA, 22 nt, Human
cucacugcaaccucugucuacc

SEQ ID NO: 1119776 - RNA, 24 nt, Human
cugcaaccucugucuaccauguuc

SEQ ID NO: 1119777 - RNA, 18 nt, Human
cugccccuguaccuuugc

SEQ ID NO: 1119778 - RNA, 23 nt, Human
cuuagaaccccagcggugacgga

SEQ ID NO: 1119779 - RNA, 19 nt, Human
cuugcacuccccgaagcua

SEQ ID NO: 1119780 - RNA, 21 nt, Human
cuuguauucuaauggaagaaa

SEQ ID NO: 1119781 - RNA, 22 nt, Human
gaaaacaaacagauauaggaug

SEQ ID NO: 1119782 - RNA, 22 nt, Human
gaagcguguauuccagcuccaa

SEQ ID NO: 1119783 - RNA, 22 nt, Human
gaccucaagugauccuccugcc

SEQ ID NO: 1119784 - RNA, 24 nt, Human
gaccucaagugauccuccugccuc

SEQ ID NO: 1119785 - RNA, 18 nt, Human
gaggaccccgggccuggc

SEQ ID NO: 1119786 - RNA, 24 nt, Human
gaggaccccgggccuggccaacaa

SEQ ID NO: 1119787 - RNA, 21 nt, Human
gagucuugcuguguugcccag

SEQ ID NO: 1119788 - RNA, 18 nt, Human
gauuacaggugugagcca

SEQ ID NO: 1119789 - RNA, 21 nt, Human
gauuacaggugugagccacug

SEQ ID NO: 1119790 - RNA, 24 nt, Human
gauuacaggugugagccacugugc

SEQ ID NO: 1119791 - RNA, 18 nt, Human
gauuuuggcucacugcaa

SEQ ID NO: 1119792 - RNA, 23 nt, Human
gcaagcuggagacccagggauac

SEQ ID NO: 1119793 - RNA, 21 nt, Human
ggaagcguguauuccagcucc

SEQ ID NO: 1119794 - RNA, 21 nt, Human
ggagacccagggauacuggua

SEQ ID NO: 1119795 - RNA, 24 nt, Human
ggauggucccgaacuccugaccuc

SEQ ID NO: 1119796 - RNA, 20 nt, Human
gggcuugcacuccccgaagc

SEQ ID NO: 1119797 - RNA, 18 nt, Human
gggguugccauaaagacc

SEQ ID NO: 1119798 - RNA, 22 nt, Human
gggguuucaccauguuggccag

SEQ ID NO: 1119799 - RNA, 21 nt, Human
ggucccucccacaacgcaugg

SEQ ID NO: 1119800 - RNA, 24 nt, Human
gguuucaccauguuggccaggaug

SEQ ID NO: 1119801 - RNA, 22 nt, Human
guagucaggguucgccaaagag

SEQ ID NO: 1119802 - RNA, 18 nt, Human
guggaucuaccauucugg

SEQ ID NO: 1119803 - RNA, 24 nt, Human
guguagcugggaucacaggcacac

SEQ ID NO: 1119804 - RNA, 23 nt, Human
uaaugccuuuccaguucucuagg

SEQ ID NO: 1119805 - RNA, 19 nt, Human
uaauggaagaaacagaaaa

SEQ ID NO: 1119806 - RNA, 24 nt, Human
uacagcaguaaacaaauggauaaa

SEQ ID NO: 1119807 - RNA, 23 nt, Human
uacagcccaagcucuaccuugcc

SEQ ID NO: 1119808 - RNA, 22 nt, Human
uacaggugugagccacugugcc

SEQ ID NO: 1119809 - RNA, 22 nt, Human
uacaggugugagccacugugcc

SEQ ID NO: 1119810 - RNA, 23 nt, Human
uacaggugugagccacugugccu

SEQ ID NO: 1119811 - RNA, 24 nt, Human
uacucaugcaaauuucugcagcca

SEQ ID NO: 1119812 - RNA, 22 nt, Human
uacuuuuuguauuuuuaguaga

SEQ ID NO: 1119813 - RNA, 22 nt, Human
uagaaaugggguuucaccaugu

SEQ ID NO: 1119814 - RNA, 24 nt, Human
uaguagaaaugggguuucaccaug

SEQ ID NO: 1119815 - RNA, 26 nt, Human
uaguagaaaugggguuucaccauguu

SEQ ID NO: 1119816 - RNA, 24 nt, Human
uauauccaugaaucaacuauaguc

SEQ ID NO: 1119817 - RNA, 21 nt, Human
uaugagccuauaaaauccaaa

SEQ ID NO: 1119818 - RNA, 24 nt, Human
ucaaaacaaagaggcuacaggccc

SEQ ID NO: 1119819 - RNA, 26 nt, Human
ucaaaacaaagaggcuacaggcccau

SEQ ID NO: 1119820 - RNA, 22 nt, Human
ucaaaaccaaucacaccauccc

SEQ ID NO: 1119821 - RNA, 21 nt, Human
ucaaagacaucuuggaguuca

SEQ ID NO: 1119822 - RNA, 18 nt, Human
ucacauccaggucacgca

SEQ ID NO: 1119823 - RNA, 18 nt, Human
ucacugcaaccucugucu

SEQ ID NO: 1119824 - RNA, 19 nt, Human
ucacugcaaccucugucua

SEQ ID NO: 1119825 - RNA, 24 nt, Human
ucacugcaaccucugucuaccaug

SEQ ID NO: 1119826 - RNA, 28 nt, Human
ucacugcaaccucugucuagggcccucc

SEQ ID NO: 1119827 - RNA, 28 nt, Human
ucacugcaaccucugucuaggguccucc

SEQ ID NO: 1119828 - RNA, 24 nt, Human
ucauuccacccauggccccuccca

SEQ ID NO: 1119829 - RNA, 22 nt, Human
uccacccauggccccucccaaa

SEQ ID NO: 1119830 - RNA, 24 nt, Human
uccacccauggccccucccaaauu

SEQ ID NO: 1119831 - RNA, 19 nt, Human
uccacuagguggugcccca

SEQ ID NO: 1119832 - RNA, 25 nt, Human
uccagguacacggugcaagcuggcc

SEQ ID NO: 1119833 - RNA, 19 nt, Human
uccaugagggcccugcucc

SEQ ID NO: 1119834 - RNA, 20 nt, Human
ucccaaagccucagaaucag

SEQ ID NO: 1119835 - RNA, 23 nt, Human
ucccaaagugcugggauuacagg

SEQ ID NO: 1119836 - RNA, 23 nt, Human
uccguuuuuguuucaagccaccu

SEQ ID NO: 1119837 - RNA, 19 nt, Human
uccuggaguccugagaccc

SEQ ID NO: 1119838 - RNA, 18 nt, Human
ucggccucccaaagugcu

SEQ ID NO: 1119839 - RNA, 19 nt, Human
ucuccucagaaaaugggaa

SEQ ID NO: 1119840 - RNA, 25 nt, Human
ucuucuggaaauacccucacagaca

SEQ ID NO: 1119841 - RNA, 24 nt, Human
ucuugcuguguugcccagccugga

SEQ ID NO: 1119842 - RNA, 23 nt, Human
ugacaugcccuggagacauuuuc

SEQ ID NO: 1119843 - RNA, 18 nt, Human
ugaccccacauuucccuu

SEQ ID NO: 1119844 - RNA, 21 nt, Human
ugaccccacauuucccuucug

SEQ ID NO: 1119845 - RNA, 18 nt, Human
ugaccucaagugauccuc

SEQ ID NO: 1119846 - RNA, 20 nt, Human
ugaccucaagugauccuccu

SEQ ID NO: 1119847 - RNA, 21 nt, Human
ugaccucaagugauccuccug

SEQ ID NO: 1119848 - RNA, 24 nt, Human
ugaccucaagugauccuccugccu

SEQ ID NO: 1119849 - RNA, 20 nt, Human
ugacuaaaccauuagaaauu

SEQ ID NO: 1119850 - RNA, 22 nt, Human
ugacuccacaucucacauccag

SEQ ID NO: 1119851 - RNA, 23 nt, Human
ugacuccacaucucacauccagg

SEQ ID NO: 1119852 - RNA, 23 nt, Human
ugagacccaacagccugggaucc

SEQ ID NO: 1119853 - RNA, 19 nt, Human
ugagcacucaaguguauuc

SEQ ID NO: 1119854 - RNA, 19 nt, Human
ugaggaccccgggccuggc

SEQ ID NO: 1119855 - RNA, 25 nt, Human
ugaguuagaaagggcucacaugauu

SEQ ID NO: 1119856 - RNA, 24 nt, Human
ugaucuccuuugacuccacaucuc

SEQ ID NO: 1119857 - RNA, 21 nt, Human
ugauguagguccuggaguccu

SEQ ID NO: 1119858 - RNA, 24 nt, Human
ugcaagcuggagacccagggauac

SEQ ID NO: 1119859 - RNA, 23 nt, Human
ugcacucgcagucucaacaccac

SEQ ID NO: 1119860 - RNA, 22 nt, Human
ugcagagaaacucccccuuaau

SEQ ID NO: 1119861 - RNA, 22 nt, Human
ugcccagccuggagugcagugu

SEQ ID NO: 1119862 - RNA, 21 nt, Human
ugcccuggagacauuuucccc

SEQ ID NO: 1119863 - RNA, 21 nt, Human
ugccucggccucccaaagugc

SEQ ID NO: 1119864 - RNA, 24 nt, Human
ugccucggccucccaaagugcugg

SEQ ID NO: 1119865 - RNA, 24 nt, Human
ugcugggauuacaggugugagcca

SEQ ID NO: 1119866 - RNA, 18 nt, Human
ugcuguguugcccagccu

SEQ ID NO: 1119867 - RNA, 24 nt, Human
uggaagaaacagaaaacaaacaga

SEQ ID NO: 1119868 - RNA, 28 nt, Human
uggaagaaacagaaaacaaacagauaua

SEQ ID NO: 1119869 - RNA, 21 nt, Human
uggaagggguggguucccaug

SEQ ID NO: 1119870 - RNA, 24 nt, Human
uggaguccugagacccaacagccu

SEQ ID NO: 1119871 - RNA, 18 nt, Human
uggagucuugcuguguug

SEQ ID NO: 1119872 - RNA, 21 nt, Human
uggagugcaguguuaugauuc

SEQ ID NO: 1119873 - RNA, 23 nt, Human
uggagugcaguguuaugauuuug

SEQ ID NO: 1119874 - RNA, 24 nt, Human
uggagugcaguguuaugauuuugg

SEQ ID NO: 1119875 - RNA, 24 nt, Human
uggccaggauggucccgaacuccu

SEQ ID NO: 1119876 - RNA, 18 nt, Human
uggcugggaugcagggca

SEQ ID NO: 1119877 - RNA, 21 nt, Human
ugggaauuagcauuuggcucc

SEQ ID NO: 1119878 - RNA, 24 nt, Human
ugggauaaauuggucaaaacaaag

SEQ ID NO: 1119879 - RNA, 21 nt, Human
ugggaucacaggcacacgcca

SEQ ID NO: 1119880 - RNA, 22 nt, Human
ugggaucacaggcacacgccac

SEQ ID NO: 1119881 - RNA, 24 nt, Human
ugggaucacaggcacacgccacca

SEQ ID NO: 1119882 - RNA, 22 nt, Human
ugggaugcagggcaccaagucc

SEQ ID NO: 1119883 - RNA, 18 nt, Human
ugggauuacaggugugag

SEQ ID NO: 1119884 - RNA, 21 nt, Human
ugggauuacaggugugagcca

SEQ ID NO: 1119885 - RNA, 22 nt, Human
ugggauuacaggugugagccac

SEQ ID NO: 1119886 - RNA, 22 nt, Human
ugggauuacaggugugagccac

SEQ ID NO: 1119887 - RNA, 22 nt, Human
ugggauuacaggugugagccac

SEQ ID NO: 1119888 - RNA, 24 nt, Human
ugggauuacaggugugagccacug

SEQ ID NO: 1119889 - RNA, 20 nt, Human
uggggacacaaccaaacccu

SEQ ID NO: 1119890 - RNA, 21 nt, Human
uggggacacaaccaaacccua

SEQ ID NO: 1119891 - RNA, 24 nt, Human
ugggguuucaccauguuggccagg

SEQ ID NO: 1119892 - RNA, 18 nt, Human
uggguucccauggucuug

SEQ ID NO: 1119893 - RNA, 20 nt, Human
uggucccgaacuccugaccu

SEQ ID NO: 1119894 - RNA, 21 nt, Human
uguauuuuuaguagaaauggg

SEQ ID NO: 1119895 - RNA, 24 nt, Human
uguguugcccagccuggagugcag

SEQ ID NO: 1119896 - RNA, 24 nt, Human
uuagcccaaaggccuuagaacccc

SEQ ID NO: 1119897 - RNA, 18 nt, Human
uuaguagaaaugggguuu

SEQ ID NO: 1119898 - RNA, 22 nt, Human
uuaguagaaaugggguuucacc

SEQ ID NO: 1119899 - RNA, 24 nt, Human
uuaguagaaaugggguuucaccau

SEQ ID NO: 1119900 - RNA, 24 nt, Human
uucaagcgauucucccaccucugc

SEQ ID NO: 1119901 - RNA, 24 nt, Human
uucaggaugagauuugggugggga

SEQ ID NO: 1119902 - RNA, 22 nt, Human
uuccacccauggccccucccaa

SEQ ID NO: 1119903 - RNA, 22 nt, Human
uuccagguacacggugcaagcu

SEQ ID NO: 1119904 - RNA, 24 nt, Human
uugcccagccuggagugcaguguu

SEQ ID NO: 1119905 - RNA, 23 nt, Human
uuguauuuuuaguagaaaugggg

SEQ ID NO: 1119906 - RNA, 19 nt, Human
uuucaccauguuggccagg

SEQ ID NO: 1119907 - RNA, 20 nt, Human
uuucaccauguuggccagga

SEQ ID NO: 1119908 - RNA, 24 nt, Human
uuuccaguucucuagguauucuuu

SEQ ID NO: 1119909 - RNA, 24 nt, Human
uuuuuaguagaaaugggguuucac

SEQ ID NO: 1119910 - RNA, 19 nt, Human
uuuuuguauuuuuaguaga

SEQ ID NO: 1119911 - RNA, 24 nt, Human
aaaccacuuaaggaaacaaagccc

SEQ ID NO: 1119912 - RNA, 19 nt, Human
aaagugcuaggauuacagg

SEQ ID NO: 1119913 - RNA, 24 nt, Human
aaagugcuaggauuacaggcauga

SEQ ID NO: 1119914 - RNA, 20 nt, Human
aacagugcagaguaagggga

SEQ ID NO: 1119915 - RNA, 24 nt, Human
aacgaguuucgaacuccugaccuc

SEQ ID NO: 1119916 - RNA, 19 nt, Human
aagaaaaggaaaaaaaccc

SEQ ID NO: 1119917 - RNA, 18 nt, Human
aagaauuccggagucggu

SEQ ID NO: 1119918 - RNA, 21 nt, Human
aagcucuuagcgcucaggucu

SEQ ID NO: 1119919 - RNA, 26 nt, Human
aagugcuaggauuacaggcaugagcc

SEQ ID NO: 1119920 - RNA, 22 nt, Human
acacggcucgcccugcgucucc

SEQ ID NO: 1119921 - RNA, 20 nt, Human
accacuuaaggaaacaaagc

SEQ ID NO: 1119922 - RNA, 21 nt, Human
acggguuucaccauguuggcc

SEQ ID NO: 1119923 - RNA, 23 nt, Human
acggguuucaccauguuggccug

SEQ ID NO: 1119924 - RNA, 24 nt, Human
acggguuucaccauguuggccugg

SEQ ID NO: 1119925 - RNA, 20 nt, Human
agaaaagagcuucuggaaua

SEQ ID NO: 1119926 - RNA, 27 nt, Human
agagagcggaggcgguggugguggcgg

SEQ ID NO: 1119927 - RNA, 22 nt, Human
agaguaaggggauagaggagga

SEQ ID NO: 1119928 - RNA, 18 nt, Human
aggcaggugcuagaucag

SEQ ID NO: 1119929 - RNA, 21 nt, Human
aggcgguggugguggcggccg

SEQ ID NO: 1119930 - RNA, 21 nt, Human
agguguugagauuacaaagau

SEQ ID NO: 1119931 - RNA, 19 nt, Human
aguaaggggauagaggagg

SEQ ID NO: 1119932 - RNA, 20 nt, Human
aguaaggggauagaggagga

SEQ ID NO: 1119933 - RNA, 18 nt, Human
aucugugugucucucccc

SEQ ID NO: 1119934 - RNA, 26 nt, Human
caaaaacggcaaaacuggccaucauc

SEQ ID NO: 1119935 - RNA, 24 nt, Human
caaagugcuaggauuacaggcaug

SEQ ID NO: 1119936 - RNA, 18 nt, Human
caacucuggguagccccu

SEQ ID NO: 1119937 - RNA, 26 nt, Human
caagacgggaagcgggcugcugagcc

SEQ ID NO: 1119938 - RNA, 19 nt, Human
caaguucccaggcccagca

SEQ ID NO: 1119939 - RNA, 18 nt, Human
caccauguuggccugguu

SEQ ID NO: 1119940 - RNA, 21 nt, Human
cacccccccucccuugaccua

SEQ ID NO: 1119941 - RNA, 23 nt, Human
cacccccccucccuugaccuacc

SEQ ID NO: 1119942 - RNA, 22 nt, Human
cacccggcccacucuugggaac

SEQ ID NO: 1119943 - RNA, 22 nt, Human
cagaaaagagcuucuggaauag

SEQ ID NO: 1119944 - RNA, 20 nt, Human
cagaagaaauccuuguggca

SEQ ID NO: 1119945 - RNA, 22 nt, Human
caggcgccucucgcucuguuuu

SEQ ID NO: 1119946 - RNA, 22 nt, Human
cauuccaagaaaaggaaaaaaa

SEQ ID NO: 1119947 - RNA, 19 nt, Human
ccaaagugcuaggauuaca

SEQ ID NO: 1119948 - RNA, 24 nt, Human
ccaaagugcuaggauuacaggcau

SEQ ID NO: 1119949 - RNA, 19 nt, Human
ccaaguucccaggcccagc

SEQ ID NO: 1119950 - RNA, 18 nt, Human
ccacauccgccucccaaa

SEQ ID NO: 1119951 - RNA, 21 nt, Human
ccaggcccagcaccuuguacg

SEQ ID NO: 1119952 - RNA, 25 nt, Human
ccaugugugcgcuccuauuucuccc

SEQ ID NO: 1119953 - RNA, 22 nt, Human
cccagcaccuuguacggaaggc

SEQ ID NO: 1119954 - RNA, 20 nt, Human
cccauuuggucccuguuagu

SEQ ID NO: 1119955 - RNA, 19 nt, Human
ccccaagagccagccgcac

SEQ ID NO: 1119956 - RNA, 19 nt, Human
ccccagccggacacccccc

SEQ ID NO: 1119957 - RNA, 22 nt, Human
ccccaucccaaguucccaggcc

SEQ ID NO: 1119958 - RNA, 25 nt, Human
cccccaagagccagccgcacaguuc

SEQ ID NO: 1119959 - RNA, 19 nt, Human
cccccucccccaucccaag

SEQ ID NO: 1119960 - RNA, 21 nt, Human
ccccuaaggaugggccugacc

SEQ ID NO: 1119961 - RNA, 22 nt, Human
ccccucccccaucccaaguucc

SEQ ID NO: 1119962 - RNA, 18 nt, Human
cccggcccacucuuggga

SEQ ID NO: 1119963 - RNA, 22 nt, Human
cccgugcuuguaacugccccag

SEQ ID NO: 1119964 - RNA, 20 nt, Human
cccuaaggaugggccugacc

SEQ ID NO: 1119965 - RNA, 21 nt, Human
cccugcgucuccccgucaccu

SEQ ID NO: 1119966 - RNA, 22 nt, Human
ccgcccacauccgccucccaaa

SEQ ID NO: 1119967 - RNA, 21 nt, Human
ccggcccacucuugggaaccu

SEQ ID NO: 1119968 - RNA, 19 nt, Human
ccuaaggaugggccugacc

SEQ ID NO: 1119969 - RNA, 28 nt, Human
ccucagggccaccgcgcaaugugucccc

SEQ ID NO: 1119970 - RNA, 23 nt, Human
ccucagucuucucgagcacaucg

SEQ ID NO: 1119971 - RNA, 22 nt, Human
ccuccuccuaugcucccaaccc

SEQ ID NO: 1119972 - RNA, 19 nt, Human
ccugaccucaagugauccg

SEQ ID NO: 1119973 - RNA, 24 nt, Human
ccugaccucaagugauccgcccac

SEQ ID NO: 1119974 - RNA, 23 nt, Human
ccugcgcccccccucgcuuccca

SEQ ID NO: 1119975 - RNA, 21 nt, Human
ccuuguacggaaggcggaggu

SEQ ID NO: 1119976 - RNA, 20 nt, Human
cgacccgaagucaucgcugg

SEQ ID NO: 1119977 - RNA, 19 nt, Human
cgauaguauagaaaccacu

SEQ ID NO: 1119978 - RNA, 18 nt, Human
cgcaggcgccucucgcuc

SEQ ID NO: 1119979 - RNA, 22 nt, Human
cgcccccccucgcuucccagcc

SEQ ID NO: 1119980 - RNA, 25 nt, Human
cgcccugcgucuccccgucaccuca

SEQ ID NO: 1119981 - RNA, 23 nt, Human
cgcucuguuuuccguuggccuua

SEQ ID NO: 1119982 - RNA, 22 nt, Human
cggcguuggugguggcagugga

SEQ ID NO: 1119983 - RNA, 24 nt, Human
cgggaagcgggcugcugagccucg

SEQ ID NO: 1119984 - RNA, 24 nt, Human
cucaagugauccgcccacauccgc

SEQ ID NO: 1119985 - RNA, 22 nt, Human
cucaggucagcccugguguugc

SEQ ID NO: 1119986 - RNA, 24 nt, Human
cucccccaucccaaguucccaggc

SEQ ID NO: 1119987 - RNA, 21 nt, Human
cucccuugaccuacccggucu

SEQ ID NO: 1119988 - RNA, 22 nt, Human
cucucaggggaaaaugggccuc

SEQ ID NO: 1119989 - RNA, 20 nt, Human
cucuggguagccccuaacuc

SEQ ID NO: 1119990 - RNA, 23 nt, Human
cucuucagaaaagagcuucugga

SEQ ID NO: 1119991 - RNA, 23 nt, Human
cuggccaucauccaggaaguggc

SEQ ID NO: 1119992 - RNA, 19 nt, Human
cuucccagccgguuucccc

SEQ ID NO: 1119993 - RNA, 20 nt, Human
cuuugugcuguagcccucuu

SEQ ID NO: 1119994 - RNA, 21 nt, Human
cuuugugcuguagcccucuuc

SEQ ID NO: 1119995 - RNA, 24 nt, Human
gaccucaagugauccgcccacauc

SEQ ID NO: 1119996 - RNA, 21 nt, Human
gaguuucgaacuccugaccuc

SEQ ID NO: 1119997 - RNA, 25 nt, Human
gauggcggcggcguuggugguggca

SEQ ID NO: 1119998 - RNA, 18 nt, Human
gauuacaggcaugagcca

SEQ ID NO: 1119999 - RNA, 22 nt, Human
gauuacaggcaugagccaccgc

SEQ ID NO: 1120000 - RNA, 22 nt, Human
gauuacaggcaugagccaccgc

SEQ ID NO: 1120001 - RNA, 22 nt, Human
gcccacucuugggaaccuuuac

SEQ ID NO: 1120002 - RNA, 22 nt, Human
gcggcggcguuggugguggcag

SEQ ID NO: 1120003 - RNA, 18 nt, Human
gcggcugggccuggaaca

SEQ ID NO: 1120004 - RNA, 24 nt, Human
ggaaacggggauuuucagaagaaa

SEQ ID NO: 1120005 - RNA, 19 nt, Human
ggacucucaggggaaaaug

SEQ ID NO: 1120006 - RNA, 22 nt, Human
ggauuacaggcaugagccaccg

SEQ ID NO: 1120007 - RNA, 20 nt, Human
ggcaaaacuggccaucaucc

SEQ ID NO: 1120008 - RNA, 19 nt, Human
gggaaccuuuacccacacc

SEQ ID NO: 1120009 - RNA, 23 nt, Human
gguguugagauuacaaagaugau

SEQ ID NO: 1120010 - RNA, 20 nt, Human
guagagacggguuucaccau

SEQ ID NO: 1120011 - RNA, 21 nt, Human
guagagacggguuucaccaug

SEQ ID NO: 1120012 - RNA, 22 nt, Human
guaggguccuccuuagaggcaa

SEQ ID NO: 1120013 - RNA, 20 nt, Human
gugguggcaguggacggggc

SEQ ID NO: 1120014 - RNA, 19 nt, Human
guggugguggcggccgcug

SEQ ID NO: 1120015 - RNA, 21 nt, Human
guguugagauuacaaagauga

SEQ ID NO: 1120016 - RNA, 22 nt, Human
uaaaaacacaguccuugcccuc

SEQ ID NO: 1120017 - RNA, 22 nt, Human
uaagccccgccccuugugcguc

SEQ ID NO: 1120018 - RNA, 21 nt, Human
uaaggaaacaaagcccugaaa

SEQ ID NO: 1120019 - RNA, 23 nt, Human
uaaggaaacaaagcccugaaagg

SEQ ID NO: 1120020 - RNA, 18 nt, Human
uaaggggauagaggagga

SEQ ID NO: 1120021 - RNA, 23 nt, Human
uacaggcaugagccaccgcgccc

SEQ ID NO: 1120022 - RNA, 21 nt, Human
uagagacggguuucaccaugu

SEQ ID NO: 1120023 - RNA, 18 nt, Human
uaggauuacaggcaugag

SEQ ID NO: 1120024 - RNA, 21 nt, Human
uaggauuacaggcaugagcca

SEQ ID NO: 1120025 - RNA, 22 nt, Human
uaggauuacaggcaugagccac

SEQ ID NO: 1120026 - RNA, 23 nt, Human
uaggauuacaggcaugagccacc

SEQ ID NO: 1120027 - RNA, 24 nt, Human
uaggauuacaggcaugagccaccg

SEQ ID NO: 1120028 - RNA, 24 nt, Human
uaggauuacaggcaugagccaccg

SEQ ID NO: 1120029 - RNA, 22 nt, Human
uauagaaaccacuuaaggaaac

SEQ ID NO: 1120030 - RNA, 23 nt, Human
uauagaaaccacuuaaggaaaca

SEQ ID NO: 1120031 - RNA, 28 nt, Human
uaucuuaguuuaccuccucuaacuccca

SEQ ID NO: 1120032 - RNA, 20 nt, Human
ucaagcuacugagccccuuc

SEQ ID NO: 1120033 - RNA, 19 nt, Human
ucaccauguuggccugguu

SEQ ID NO: 1120034 - RNA, 19 nt, Human
uccaagaaaaggaaaaaaa

SEQ ID NO: 1120035 - RNA, 21 nt, Human
uccaagaaaaggaaaaaaacc

SEQ ID NO: 1120036 - RNA, 24 nt, Human
ucccaaagugcuaggauuacaggc

SEQ ID NO: 1120037 - RNA, 18 nt, Human
ucccaaguucccaggccc

SEQ ID NO: 1120038 - RNA, 23 nt, Human
uccggagucgguuguugucuugu

SEQ ID NO: 1120039 - RNA, 23 nt, Human
ucguagagacggguuucaccaug

SEQ ID NO: 1120040 - RNA, 21 nt, Human
ucucgcucuguuuuccguugg

SEQ ID NO: 1120041 - RNA, 18 nt, Human
ugacaguaaggcuaguga

SEQ ID NO: 1120042 - RNA, 20 nt, Human
ugacccaagacgggaagcgg

SEQ ID NO: 1120043 - RNA, 18 nt, Human
ugaccucaagugauccgc

SEQ ID NO: 1120044 - RNA, 19 nt, Human
ugaggcuagagcagagcua

SEQ ID NO: 1120045 - RNA, 25 nt, Human
ugcccccaagagccagccgcacugc

SEQ ID NO: 1120046 - RNA, 22 nt, Human
uggcagcgcaggcgcaagcgca

SEQ ID NO: 1120047 - RNA, 20 nt, Human
uggccuuaagccccgccccu

SEQ ID NO: 1120048 - RNA, 19 nt, Human
uggcggccgcuggccagug

SEQ ID NO: 1120049 - RNA, 20 nt, Human
uggcggcggcguugguggug

SEQ ID NO: 1120050 - RNA, 21 nt, Human
uggcggcggcguugguggugg

SEQ ID NO: 1120051 - RNA, 21 nt, Human
ugggaggagaugaaucagaua

SEQ ID NO: 1120052 - RNA, 27 nt, Human
uggugguggcaguggacggggcggcug

SEQ ID NO: 1120053 - RNA, 19 nt, Human
ugucuuguggucuuguacc

SEQ ID NO: 1120054 - RNA, 18 nt, Human
uguggucuuguacccuuu

SEQ ID NO: 1120055 - RNA, 20 nt, Human
uguuuagaguaucacaagau

SEQ ID NO: 1120056 - RNA, 24 nt, Human
uuaucugugugucucuccccuccu

SEQ ID NO: 1120057 - RNA, 24 nt, Human
uucaaaaacggcaaaacuggccau

SEQ ID NO: 1120058 - RNA, 20 nt, Human
uuccaagaaaaggaaaaaaa

SEQ ID NO: 1120059 - RNA, 23 nt, Human
uucguagagacggguuucaccau

SEQ ID NO: 1120060 - RNA, 23 nt, Human
uucguugggugacccaugugugc

SEQ ID NO: 1120061 - RNA, 20 nt, Human
uugcuucguugggugaccca

SEQ ID NO: 1120062 - RNA, 23 nt, Human
uuuauuaugugaugggaauugga

SEQ ID NO: 1120063 - RNA, 27 nt, Human
uuuauuuuuuuuuuuuuuuguauuuuu

SEQ ID NO: 1120064 - RNA, 19 nt, Human
uuucaccauguuggccugg

SEQ ID NO: 1120065 - RNA, 21 nt, Human
uuucgaacuccugaccucaag

SEQ ID NO: 1120066 - RNA, 25 nt, Human
uuuucagaagaaauccuuguggcaa

SEQ ID NO: 1120067 - RNA, 23 nt, Human
uuuuucguagagacggguuucac

SEQ ID NO: 1120068 - RNA, 24 nt, Human
uuuuuuguauuuuucguagagacg

SEQ ID NO: 1120069 - RNA, 20 nt, Human
agaacuucccgagccagcau

SEQ ID NO: 1120070 - RNA, 21 nt, Human
cagaacuucccgagccagcau

SEQ ID NO: 1120071 - RNA, 22 nt, Human
cagcagcagccugcucuucuuu

SEQ ID NO: 1120072 - RNA, 19 nt, Human
gaucaggcacgaccuccca

SEQ ID NO: 1120073 - RNA, 20 nt, Human
ucccgagccagcauccauca

SEQ ID NO: 1120074 - RNA, 23 nt, Human
ucccuuuaaguuaugacgggaau

SEQ ID NO: 1120075 - RNA, 24 nt, Human
ucucuucaggaucuuuguagaagu

SEQ ID NO: 1120076 - RNA, 22 nt, Human
uguagaaguagagaucaggcac

SEQ ID NO: 1120077 - RNA, 19 nt, Human
ccccgcugcacugguguca

SEQ ID NO: 1120078 - RNA, 19 nt, Human
ccuccgggcccccccccgc

SEQ ID NO: 1120079 - RNA, 20 nt, Human
ccuccgggcccccccccgcu

SEQ ID NO: 1120080 - RNA, 22 nt, Human
gccuccgggcccccccccgcug

SEQ ID NO: 1120081 - RNA, 20 nt, Human
uaauucgcuuuauuuuccuu

SEQ ID NO: 1120082 - RNA, 19 nt, Human
aacccgggugcuggcacag

SEQ ID NO: 1120083 - RNA, 20 nt, Human
agcagccagggaucugacag

SEQ ID NO: 1120084 - RNA, 20 nt, Human
agcagccagggaucugacag

SEQ ID NO: 1120085 - RNA, 22 nt, Human
agggagcuggggucuguguagc

SEQ ID NO: 1120086 - RNA, 20 nt, Human
agggccaggccgggcccgcu

SEQ ID NO: 1120087 - RNA, 20 nt, Human
cgucagaggggggcuccgga

SEQ ID NO: 1120088 - RNA, 19 nt, Human
cgugucuaggugggugcgc

SEQ ID NO: 1120089 - RNA, 23 nt, Human
cugaaggccuucuggcaacccgg

SEQ ID NO: 1120090 - RNA, 19 nt, Human
gaaggccuucuggcaaccc

SEQ ID NO: 1120091 - RNA, 24 nt, Human
gggccaggccgggcccgcuuggaa

SEQ ID NO: 1120092 - RNA, 19 nt, Human
uagcgcuuggagcagccag

SEQ ID NO: 1120093 - RNA, 20 nt, Human
ucgcuggaguugcugaaggc

SEQ ID NO: 1120094 - RNA, 18 nt, Human
ugggaggagcggaugaug

SEQ ID NO: 1120095 - RNA, 19 nt, Human
ugggaggagcggaugaugg

SEQ ID NO: 1120096 - RNA, 20 nt, Human
ugggaggagcggaugaugga

SEQ ID NO: 1120097 - RNA, 24 nt, Human
uggggucuguguagcgcuuggagc

SEQ ID NO: 1120098 - RNA, 28 nt, Human
ugggugcgcuggugcuugggggucuccu

SEQ ID NO: 1120099 - RNA, 22 nt, Human
uucuggcaacccgggugcuggc

SEQ ID NO: 1120100 - RNA, 19 nt, Human
uuuacacaggugaccagag

SEQ ID NO: 1120101 - RNA, 19 nt, Human
aaaaaaagauauaacagga

SEQ ID NO: 1120102 - RNA, 23 nt, Human
aaagaaaaaaagauauaacagga

SEQ ID NO: 1120103 - RNA, 26 nt, Human
aagaaaaaaagauauaacaggaaugu

SEQ ID NO: 1120104 - RNA, 18 nt, Human
acuaccacaauuuacagg

SEQ ID NO: 1120105 - RNA, 19 nt, Human
acucccaccaccagaucca

SEQ ID NO: 1120106 - RNA, 21 nt, Human
agaaaaaaagauauaacagga

SEQ ID NO: 1120107 - RNA, 24 nt, Human
agauccauaaccaccaucauaggg

SEQ ID NO: 1120108 - RNA, 18 nt, Human
auuaccuccaccaccucc

SEQ ID NO: 1120109 - RNA, 22 nt, Human
caccaaaguuuccaccacagcc

SEQ ID NO: 1120110 - RNA, 22 nt, Human
caccaccagauccauaaccacc

SEQ ID NO: 1120111 - RNA, 24 nt, Human
caccagauccauaaccaccaucau

SEQ ID NO: 1120112 - RNA, 22 nt, Human
ccaaaguuuccaccacagccaa

SEQ ID NO: 1120113 - RNA, 20 nt, Human
ccacucccaccaccagaucc

SEQ ID NO: 1120114 - RNA, 21 nt, Human
cccaccaccagauccauaacc

SEQ ID NO: 1120115 - RNA, 24 nt, Human
cccaccaccagauccauaaccacc

SEQ ID NO: 1120116 - RNA, 27 nt, Human
ccugcagcuuuccugacaacuccuugc

SEQ ID NO: 1120117 - RNA, 19 nt, Human
ccuucugcuaccauaucua

SEQ ID NO: 1120118 - RNA, 23 nt, Human
cuaccacucccaccaccagaucc

SEQ ID NO: 1120119 - RNA, 23 nt, Human
cuccaccaaaguuuccaccacag

SEQ ID NO: 1120120 - RNA, 25 nt, Human
cugacuauggaucauugcuccuucu

SEQ ID NO: 1120121 - RNA, 24 nt, Human
cugauguaaugaaaagaaaaaaag

SEQ ID NO: 1120122 - RNA, 22 nt, Human
cugcuguuuuuagaaccuucug

SEQ ID NO: 1120123 - RNA, 20 nt, Human
gccaaaauuaccuccaccac

SEQ ID NO: 1120124 - RNA, 27 nt, Human
gccuccuccuccaccaaaguuuccacc

SEQ ID NO: 1120125 - RNA, 22 nt, Human
uaagcugcaguaacuuuucuga

SEQ ID NO: 1120126 - RNA, 18 nt, Human
uaaucaguagcugcacuu

SEQ ID NO: 1120127 - RNA, 18 nt, Human
uagcugcacuuuuuggaa

SEQ ID NO: 1120128 - RNA, 18 nt, Human
uccugacaacuccuugcu

SEQ ID NO: 1120129 - RNA, 21 nt, Human
uggcugugucaguccugaaca

SEQ ID NO: 1120130 - RNA, 21 nt, Human
ugucucaaaguaaccugcagc

SEQ ID NO: 1120131 - RNA, 18 nt, Human
uuuuuuuuuuuuuuuuug

SEQ ID NO: 1120132 - RNA, 20 nt, Human
augcugcccaagaggcaggg

SEQ ID NO: 1120133 - RNA, 24 nt, Human
caacggcgagcacggucgccuccc

SEQ ID NO: 1120134 - RNA, 25 nt, Human
cagcuuggcggagacagguagucag

SEQ ID NO: 1120135 - RNA, 26 nt, Human
cgccgccaacccuagccugccaacgg

SEQ ID NO: 1120136 - RNA, 19 nt, Human
cgccucccgugccgcuucc

SEQ ID NO: 1120137 - RNA, 26 nt, Human
cuggagguuuucauacagagaacugg

SEQ ID NO: 1120138 - RNA, 21 nt, Human
gagcacggucgccucccgugc

SEQ ID NO: 1120139 - RNA, 18 nt, Human
ggaugcugcccaagaggc

SEQ ID NO: 1120140 - RNA, 20 nt, Human
ggcgagcacggucgccuccc

SEQ ID NO: 1120141 - RNA, 21 nt, Human
ugccaacggcgagcacggucc

SEQ ID NO: 1120142 - RNA, 22 nt, Human
ugccaacggcgagcacggucgc

SEQ ID NO: 1120143 - RNA, 23 nt, Human
ugccaacggcgagcacggucgcc

SEQ ID NO: 1120144 - RNA, 22 nt, Human
ugcugcccaagaggcagggaca

SEQ ID NO: 1120145 - RNA, 18 nt, Human
uggcggagacagguaguc

SEQ ID NO: 1120146 - RNA, 22 nt, Human
ugggaaggugauguccacgaug

SEQ ID NO: 1120147 - RNA, 27 nt, Human
uuggacucucaggggcuuucccuccgg

SEQ ID NO: 1120148 - RNA, 21 nt, Human
ugggagaacuugccgagcgcc

SEQ ID NO: 1120149 - RNA, 18 nt, Human
aaaauaacuuuggacaaa

SEQ ID NO: 1120150 - RNA, 20 nt, Human
aacaacacacacuagcaaaa

SEQ ID NO: 1120151 - RNA, 21 nt, Human
aaggugucucuaaaagggaca

SEQ ID NO: 1120152 - RNA, 21 nt, Human
aauaauagacacaggcaggga

SEQ ID NO: 1120153 - RNA, 19 nt, Human
aaugacaacaacaaaaaga

SEQ ID NO: 1120154 - RNA, 20 nt, Human
aauugucaagagcaguuggu

SEQ ID NO: 1120155 - RNA, 21 nt, Human
acacugaagauacaaagaaug

SEQ ID NO: 1120156 - RNA, 19 nt, Human
acuauaguuucauucaaau

SEQ ID NO: 1120157 - RNA, 21 nt, Human
agagcugaccuguccucuaua

SEQ ID NO: 1120158 - RNA, 19 nt, Human
agaguccugggugacaugc

SEQ ID NO: 1120159 - RNA, 23 nt, Human
agcaguuggugguucugaaauac

SEQ ID NO: 1120160 - RNA, 19 nt, Human
aggcagaaacaguuuccca

SEQ ID NO: 1120161 - RNA, 23 nt, Human
auagagccaugcccacugaccca

SEQ ID NO: 1120162 - RNA, 25 nt, Human
augacaacaacaaaaagaugaggaa

SEQ ID NO: 1120163 - RNA, 22 nt, Human
auugucucugcaguguucccgg

SEQ ID NO: 1120164 - RNA, 24 nt, Human
caaaaacaaaggcacaguaaacaa

SEQ ID NO: 1120165 - RNA, 27 nt, Human
caacacacacuagcaaaaacaaaggca

SEQ ID NO: 1120166 - RNA, 22 nt, Human
caauugcccaggcuuugcugaa

SEQ ID NO: 1120167 - RNA, 19 nt, Human
cacagggugccacuggcau

SEQ ID NO: 1120168 - RNA, 21 nt, Human
cacaguuaugugaacguguca

SEQ ID NO: 1120169 - RNA, 21 nt, Human
caccggcagaguccuggguga

SEQ ID NO: 1120170 - RNA, 20 nt, Human
cacuguuuaucucuugucug

SEQ ID NO: 1120171 - RNA, 19 nt, Human
cagacaacuucagaaugua

SEQ ID NO: 1120172 - RNA, 18 nt, Human
cagcauugucucugcagg

SEQ ID NO: 1120173 - RNA, 19 nt, Human
cagcauugucucugcagug

SEQ ID NO: 1120174 - RNA, 25 nt, Human
cagcggcuccugacuccuguucucu

SEQ ID NO: 1120175 - RNA, 21 nt, Human
caugugcugcacaguuaugug

SEQ ID NO: 1120176 - RNA, 20 nt, Human
ccaauggggaucauuccuuc

SEQ ID NO: 1120177 - RNA, 22 nt, Human
cccaaaauaucucuucuccuuu

SEQ ID NO: 1120178 - RNA, 26 nt, Human
ccccuccuuaaccaaguaaccagucc

SEQ ID NO: 1120179 - RNA, 21 nt, Human
cguagagauaugaauauaaua

SEQ ID NO: 1120180 - RNA, 23 nt, Human
cuaaaacaauucaacacugaaga

SEQ ID NO: 1120181 - RNA, 25 nt, Human
cuaaaacaauucaacacugaagaua

SEQ ID NO: 1120182 - RNA, 19 nt, Human
cuaacuuggguccauuguc

SEQ ID NO: 1120183 - RNA, 21 nt, Human
cuaagcguuuucugcaagaac

SEQ ID NO: 1120184 - RNA, 24 nt, Human
cuauagguccugccugcaggaaug

SEQ ID NO: 1120185 - RNA, 22 nt, Human
cugaccuugagcagguauagaa

SEQ ID NO: 1120186 - RNA, 26 nt, Human
cugcauuccaauugcccaggcuuugc

SEQ ID NO: 1120187 - RNA, 20 nt, Human
cuguggucuuccuaaguacu

SEQ ID NO: 1120188 - RNA, 18 nt, Human
cuuucccaauacaucuaa

SEQ ID NO: 1120189 - RNA, 18 nt, Human
gaagacauuuucagacaa

SEQ ID NO: 1120190 - RNA, 22 nt, Human
gaccuucucugcccgcagaugg

SEQ ID NO: 1120191 - RNA, 20 nt, Human
gcugaaacacaggcacccua

SEQ ID NO: 1120192 - RNA, 25 nt, Human
ggauggaaucgagaggagcagggcu

SEQ ID NO: 1120193 - RNA, 26 nt, Human
ggcuaaggccucccaaugcuguuugu

SEQ ID NO: 1120194 - RNA, 23 nt, Human
gggguucaaaauaacuaaagaaa

SEQ ID NO: 1120195 - RNA, 21 nt, Human
guacaacaucaucaaggcaga

SEQ ID NO: 1120196 - RNA, 25 nt, Human
gugguucugaaauacaauccucagc

SEQ ID NO: 1120197 - RNA, 18 nt, Human
uaacuaaagaaaugcagc

SEQ ID NO: 1120198 - RNA, 22 nt, Human
uaacuaaagaaaugcagcuaua

SEQ ID NO: 1120199 - RNA, 22 nt, Human
uacaacaucaucaaggcagaaa

SEQ ID NO: 1120200 - RNA, 22 nt, Human
uagagccaugcccacugacccc

SEQ ID NO: 1120201 - RNA, 19 nt, Human
uagcaaaaacaaaggcaca

SEQ ID NO: 1120202 - RNA, 21 nt, Human
uagcaaaaacaaaggcacagu

SEQ ID NO: 1120203 - RNA, 22 nt, Human
uagcuguggucuuccuaaguac

SEQ ID NO: 1120204 - RNA, 24 nt, Human
uaggaauagagccaugcccacuga

SEQ ID NO: 1120205 - RNA, 21 nt, Human
uaggcaaaagcuuuuaauugu

SEQ ID NO: 1120206 - RNA, 24 nt, Human
uagguucauugaaaccaggguaac

SEQ ID NO: 1120207 - RNA, 23 nt, Human
uauuccucacuguuuaucucuug

SEQ ID NO: 1120208 - RNA, 23 nt, Human
ucaaaauaacuaaagaaaugcag

SEQ ID NO: 1120209 - RNA, 24 nt, Human
ucaccaccaucaaugacaacaaca

SEQ ID NO: 1120210 - RNA, 25 nt, Human
ucagagacaugacugcaaaaugaaa

SEQ ID NO: 1120211 - RNA, 18 nt, Human
ucauucaaaucuucacgu

SEQ ID NO: 1120212 - RNA, 21 nt, Human
ucauugaaaccaggguaacac

SEQ ID NO: 1120213 - RNA, 18 nt, Human
ucccggcaugugcugcac

SEQ ID NO: 1120214 - RNA, 25 nt, Human
ucuauaaacaaguccaugucaccac

SEQ ID NO: 1120215 - RNA, 19 nt, Human
ucucucggcuuaguaaggg

SEQ ID NO: 1120216 - RNA, 27 nt, Human
ugaaacacaggcacccuagucucaccu

SEQ ID NO: 1120217 - RNA, 21 nt, Human
ugaaaccaggguaacaccuuu

SEQ ID NO: 1120218 - RNA, 21 nt, Human
ugaaauacaauccucagccaa

SEQ ID NO: 1120219 - RNA, 18 nt, Human
ugaaaucccugaggaacu

SEQ ID NO: 1120220 - RNA, 21 nt, Human
ugaauauaauaauagacacag

SEQ ID NO: 1120221 - RNA, 24 nt, Human
ugacaacaacaaaaagaugaggaa

SEQ ID NO: 1120222 - RNA, 18 nt, Human
ugacaugcugucuccugc

SEQ ID NO: 1120223 - RNA, 24 nt, Human
ugacaugcugucuccugccagcgg

SEQ ID NO: 1120224 - RNA, 18 nt, Human
ugagccagagagcugacc

SEQ ID NO: 1120225 - RNA, 24 nt, Human
ugaggaacuuuguagcuacccaga

SEQ ID NO: 1120226 - RNA, 18 nt, Human
ugccacagacccgugucu

SEQ ID NO: 1120227 - RNA, 21 nt, Human
ugcugauggacaaacuagacc

SEQ ID NO: 1120228 - RNA, 21 nt, Human
ugcugcacaguuaugugaacg

SEQ ID NO: 1120229 - RNA, 22 nt, Human
uggaaacucacagcauugucuc

SEQ ID NO: 1120230 - RNA, 20 nt, Human
uggaauacaggacauuucua

SEQ ID NO: 1120231 - RNA, 21 nt, Human
ugucaagagcaguuggugguu

SEQ ID NO: 1120232 - RNA, 19 nt, Human
uguguuaaagauggaucag

SEQ ID NO: 1120233 - RNA, 20 nt, Human
uuaaugguagucaugaaguc

SEQ ID NO: 1120234 - RNA, 20 nt, Human
uugaaaaccacccucccaaa

SEQ ID NO: 1120235 - RNA, 22 nt, Human
uuugaaaaccacccucccaaau

SEQ ID NO: 1120236 - RNA, 22 nt, Human
uuugcugaaacacaggcacccu

SEQ ID NO: 1120237 - RNA, 20 nt, Human
uuuuguugugugauuugugg

SEQ ID NO: 1120238 - RNA, 21 nt, Human
aaaaaaccuauuguccauguc

SEQ ID NO: 1120239 - RNA, 21 nt, Human
aaaguaaaaaaccuauugucc

SEQ ID NO: 1120240 - RNA, 19 nt, Human
aagcguuuucugcaagaac

SEQ ID NO: 1120241 - RNA, 20 nt, Human
aaggaucccuccuguguuac

SEQ ID NO: 1120242 - RNA, 21 nt, Human
aaggugucucuaaaagggaca

SEQ ID NO: 1120243 - RNA, 21 nt, Human
aauaauagacacaggcaggga

SEQ ID NO: 1120244 - RNA, 20 nt, Human
aauugucaagagcaguuggu

SEQ ID NO: 1120245 - RNA, 21 nt, Human
acacugaagacacaaagaaug

SEQ ID NO: 1120246 - RNA, 18 nt, Human
acagcugaccuguccucu

SEQ ID NO: 1120247 - RNA, 21 nt, Human
acaguaaaaauugagacccaa

SEQ ID NO: 1120248 - RNA, 22 nt, Human
acaguaaaaauugagacccaaa

SEQ ID NO: 1120249 - RNA, 18 nt, Human
acccagagauacgugguu

SEQ ID NO: 1120250 - RNA, 19 nt, Human
acuauaguuucauucaaau

SEQ ID NO: 1120251 - RNA, 18 nt, Human
agacacuaguaaaaacaa

SEQ ID NO: 1120252 - RNA, 23 nt, Human
agacagcugaccuguccucuaua

SEQ ID NO: 1120253 - RNA, 19 nt, Human
agaguccugggugacaugc

SEQ ID NO: 1120254 - RNA, 23 nt, Human
agcaguuggugguucugaaauac

SEQ ID NO: 1120255 - RNA, 19 nt, Human
agccaacacugaagacaca

SEQ ID NO: 1120256 - RNA, 23 nt, Human
auagagccaugcccacugaccca

SEQ ID NO: 1120257 - RNA, 25 nt, Human
augacaacaacaaaaagaugaggaa

SEQ ID NO: 1120258 - RNA, 25 nt, Human
caacagcagacacuaguaaaaacaa

SEQ ID NO: 1120259 - RNA, 26 nt, Human
caagccaacacugaagacacaaagaa

SEQ ID NO: 1120260 - RNA, 21 nt, Human
cacaguuaugugaacguguca

SEQ ID NO: 1120261 - RNA, 21 nt, Human
caccggcagaguccuggguga

SEQ ID NO: 1120262 - RNA, 19 nt, Human
cagacaacuucagaaugua

SEQ ID NO: 1120263 - RNA, 18 nt, Human
cagcauugucucugcagg

SEQ ID NO: 1120264 - RNA, 19 nt, Human
cagcauugucucugcagug

SEQ ID NO: 1120265 - RNA, 19 nt, Human
caguaaaaauugagaccca

SEQ ID NO: 1120266 - RNA, 22 nt, Human
cagucugcaagcacagucagcc

SEQ ID NO: 1120267 - RNA, 21 nt, Human
caugugcugcacaguuaugug

SEQ ID NO: 1120268 - RNA, 26 nt, Human
ccagcggcuccugacuccuguucucu

SEQ ID NO: 1120269 - RNA, 26 nt, Human
ccccuccuuaaccaaguaaccagucc

SEQ ID NO: 1120270 - RNA, 21 nt, Human
cguagagauaugaauauaaua

SEQ ID NO: 1120271 - RNA, 23 nt, Human
cuaaaacaagccaacacugaaga

SEQ ID NO: 1120272 - RNA, 24 nt, Human
cuauagguccugccugcaggaaug

SEQ ID NO: 1120273 - RNA, 22 nt, Human
cugaccuugagcagguauagaa

SEQ ID NO: 1120274 - RNA, 20 nt, Human
cuguggucuuccuaaguacu

SEQ ID NO: 1120275 - RNA, 24 nt, Human
cuucucaccgucaaaguaaaaaac

SEQ ID NO: 1120276 - RNA, 21 nt, Human
cuugaaaaccacuuucccaag

SEQ ID NO: 1120277 - RNA, 18 nt, Human
gaagacauuuucagacaa

SEQ ID NO: 1120278 - RNA, 22 nt, Human
gaccuucucugcccgcagaugg

SEQ ID NO: 1120279 - RNA, 18 nt, Human
gauuaccuccuaugaaac

SEQ ID NO: 1120280 - RNA, 19 nt, Human
gcagacacuaguaaaaaca

SEQ ID NO: 1120281 - RNA, 21 nt, Human
gcaguguucccgucaaaaagu

SEQ ID NO: 1120282 - RNA, 23 nt, Human
gcaugggucaccguucaacugaa

SEQ ID NO: 1120283 - RNA, 21 nt, Human
gcugcuuauugugggaauaug

SEQ ID NO: 1120284 - RNA, 22 nt, Human
ggaauaugacucccaucuggaa

SEQ ID NO: 1120285 - RNA, 21 nt, Human
ggaauugagaggagcagggcu

SEQ ID NO: 1120286 - RNA, 26 nt, Human
ggcuaaggccucccaaugcuguuugu

SEQ ID NO: 1120287 - RNA, 23 nt, Human
gggguucaaaauaacuaaagaaa

SEQ ID NO: 1120288 - RNA, 25 nt, Human
gugguucugaaauacaauccucagc

SEQ ID NO: 1120289 - RNA, 21 nt, Human
uaaccaguccugauaucauaa

SEQ ID NO: 1120290 - RNA, 22 nt, Human
uaacuaaagaaaugcagcuaca

SEQ ID NO: 1120291 - RNA, 23 nt, Human
uaacuaaagaaaugcagcuacau

SEQ ID NO: 1120292 - RNA, 24 nt, Human
uacagauggaucagcuaaaacaag

SEQ ID NO: 1120293 - RNA, 22 nt, Human
uacaggauauuuauacucuuga

SEQ ID NO: 1120294 - RNA, 22 nt, Human
uagagccaugcccacugacccc

SEQ ID NO: 1120295 - RNA, 22 nt, Human
uagcuguggucuuccuaaguac

SEQ ID NO: 1120296 - RNA, 24 nt, Human
uaggaauagagccaugcccacuga

SEQ ID NO: 1120297 - RNA, 19 nt, Human
uaguaaaaacaaaggcaca

SEQ ID NO: 1120298 - RNA, 23 nt, Human
ucaaaauaacuaaagaaaugcag

SEQ ID NO: 1120299 - RNA, 18 nt, Human
ucagagacaugccugcaa

SEQ ID NO: 1120300 - RNA, 19 nt, Human
ucauucaaaucuucaggug

SEQ ID NO: 1120301 - RNA, 21 nt, Human
ucauugaaaccaggguaacac

SEQ ID NO: 1120302 - RNA, 18 nt, Human
ucccggcaugugcugcac

SEQ ID NO: 1120303 - RNA, 18 nt, Human
ucuaggcaugggucaccg

SEQ ID NO: 1120304 - RNA, 25 nt, Human
ucuauaaacaaguccaugucaccac

SEQ ID NO: 1120305 - RNA, 22 nt, Human
ucugaaauacaauccucagcca

SEQ ID NO: 1120306 - RNA, 21 nt, Human
ucuucaggugccuauaggucc

SEQ ID NO: 1120307 - RNA, 21 nt, Human
ugaaaccaggguaacaccuuu

SEQ ID NO: 1120308 - RNA, 21 nt, Human
ugaaauacaauccucagccaa

SEQ ID NO: 1120309 - RNA, 21 nt, Human
ugaauauaauaauagacacag

SEQ ID NO: 1120310 - RNA, 24 nt, Human
ugacaacaacaaaaagaugaggaa

SEQ ID NO: 1120311 - RNA, 18 nt, Human
ugacaugcugucuccugc

SEQ ID NO: 1120312 - RNA, 24 nt, Human
ugacaugcugucuccugccagcgg

SEQ ID NO: 1120313 - RNA, 20 nt, Human
ugagaggagcagggcuaagg

SEQ ID NO: 1120314 - RNA, 18 nt, Human
ugagccagacagcugacc

SEQ ID NO: 1120315 - RNA, 22 nt, Human
ugaggaauuuuguagcuaccca

SEQ ID NO: 1120316 - RNA, 26 nt, Human
ugaugugcuguuccucaaaugaguaa

SEQ ID NO: 1120317 - RNA, 23 nt, Human
ugcaacagcagacacuaguaaaa

SEQ ID NO: 1120318 - RNA, 21 nt, Human
ugcugcacaguuaugugaacg

SEQ ID NO: 1120319 - RNA, 18 nt, Human
ugcuggaaugagucaggu

SEQ ID NO: 1120320 - RNA, 22 nt, Human
uggaaacucacagcauugucuc

SEQ ID NO: 1120321 - RNA, 21 nt, Human
uggagucgaauaauaucuauc

SEQ ID NO: 1120322 - RNA, 21 nt, Human
ugucaagagcaguuggugguu

SEQ ID NO: 1120323 - RNA, 18 nt, Human
uucuucuuuuugcaacag

SEQ ID NO: 1120324 - RNA, 18 nt, Human
uuuugcaacagcagacac

SEQ ID NO: 1120325 - RNA, 20 nt, Human
uuuuguugugugauuugugg

SEQ ID NO: 1120326 - RNA, 22 nt, Human
aaaaagccagaacugggaagug

SEQ ID NO: 1120327 - RNA, 23 nt, Human
caaaaagccagaacugggaagug

SEQ ID NO: 1120328 - RNA, 24 nt, Human
cuggaggccccuugguggggcugg

SEQ ID NO: 1120329 - RNA, 22 nt, Human
gacacuuauuguuccugggguc

SEQ ID NO: 1120330 - RNA, 23 nt, Human
ggggucucuggaggccccuuggu

SEQ ID NO: 1120331 - RNA, 22 nt, Human
gggucucuggaggccccuuggu

SEQ ID NO: 1120332 - RNA, 23 nt, Human
ucucuggaggccccuuggugggg

SEQ ID NO: 1120333 - RNA, 20 nt, Human
uggaggccccuugguggggc

SEQ ID NO: 1120334 - RNA, 21 nt, Human
uggaggccccuugguggggcu

SEQ ID NO: 1120335 - RNA, 23 nt, Human
uggggucucuggaggccccuugg

SEQ ID NO: 1120336 - RNA, 19 nt, Human
uuguuccuggggucucugg

SEQ ID NO: 1120337 - RNA, 19 nt, Human
ccagccccacagcguugua

SEQ ID NO: 1120338 - RNA, 20 nt, Human
uggagguggcagugguggug

SEQ ID NO: 1120339 - RNA, 19 nt, Human
uggcagugguggugggguu

SEQ ID NO: 1120340 - RNA, 20 nt, Human
uggcagugguggugggguug

SEQ ID NO: 1120341 - RNA, 24 nt, Human
uugguggugaacuugacaagcagu

SEQ ID NO: 1120342 - RNA, 22 nt, Human
aaggcguccaaaguuauuaaaa

SEQ ID NO: 1120343 - RNA, 24 nt, Human
aauaucuuuuuuuuuuaaagcccu

SEQ ID NO: 1120344 - RNA, 19 nt, Human
agagaaaaaguuuagaagu

SEQ ID NO: 1120345 - RNA, 20 nt, Human
agcagaagauaaaaguagga

SEQ ID NO: 1120346 - RNA, 21 nt, Human
auaccaaaauacaagaaaacc

SEQ ID NO: 1120347 - RNA, 18 nt, Human
aucuagacuaggaugagg

SEQ ID NO: 1120348 - RNA, 23 nt, Human
gugaacuaugugcaggguuuguu

SEQ ID NO: 1120349 - RNA, 23 nt, Human
uaccaaaauacaagaaaaccuac

SEQ ID NO: 1120350 - RNA, 24 nt, Human
uaggagcagaagauaaaaguagga

SEQ ID NO: 1120351 - RNA, 23 nt, Human
ugaauugcuugcagauacugcua

SEQ ID NO: 1120352 - RNA, 20 nt, Human
uucacagaacaaaaacaaau

SEQ ID NO: 1120353 - RNA, 18 nt, Human
uuuuuaguagugguguuu

SEQ ID NO: 1120354 - RNA, 23 nt, Human
acucucagagggcaaaccccagc

SEQ ID NO: 1120355 - RNA, 19 nt, Human
aggcggccagcuucugaac

SEQ ID NO: 1120356 - RNA, 20 nt, Human
auccugguuaggauguguuc

SEQ ID NO: 1120357 - RNA, 18 nt, Human
auggagcuaagcuucucc

SEQ ID NO: 1120358 - RNA, 24 nt, Human
ccaagcccaugacauagaugcuga

SEQ ID NO: 1120359 - RNA, 21 nt, Human
ccucccacagacacguagaau

SEQ ID NO: 1120360 - RNA, 22 nt, Human
cguguuguacaaggagcuguuu

SEQ ID NO: 1120361 - RNA, 18 nt, Human
cuccauggccgcggcacc

SEQ ID NO: 1120362 - RNA, 21 nt, Human
gcaccuccauuguuuuuaauc

SEQ ID NO: 1120363 - RNA, 18 nt, Human
guguuguacaaggagcug

SEQ ID NO: 1120364 - RNA, 21 nt, Human
uagaugcugaaacauggaggc

SEQ ID NO: 1120365 - RNA, 23 nt, Human
ucauagcugaugcaucuccaaaa

SEQ ID NO: 1120366 - RNA, 22 nt, Human
ucuccaaaaaauuuuucaugaa

SEQ ID NO: 1120367 - RNA, 22 nt, Human
ucuccauggccgcggcaccucc

SEQ ID NO: 1120368 - RNA, 24 nt, Human
uuaauccacuccaggaccaagccc

SEQ ID NO: 1120369 - RNA, 26 nt, Human
aaaaaauccaaaaugauuaguaaaga

SEQ ID NO: 1120370 - RNA, 22 nt, Human
aaaaagacaagccaaaaugcuu

SEQ ID NO: 1120371 - RNA, 18 nt, Human
aaaaugcuucaggaacca

SEQ ID NO: 1120372 - RNA, 22 nt, Human
acacugguuuguauuauugcga

SEQ ID NO: 1120373 - RNA, 18 nt, Human
agaaggucagagguacac

SEQ ID NO: 1120374 - RNA, 23 nt, Human
aguaucuucccugcccaauaauu

SEQ ID NO: 1120375 - RNA, 18 nt, Human
caaagcaccccagcucuc

SEQ ID NO: 1120376 - RNA, 25 nt, Human
caggaaccacauauccaaccuucag

SEQ ID NO: 1120377 - RNA, 21 nt, Human
cauuuaaaaagacaagccaaa

SEQ ID NO: 1120378 - RNA, 24 nt, Human
ccucaaaugaguuuaguuugccuc

SEQ ID NO: 1120379 - RNA, 21 nt, Human
gauuaguaaagaaaaauauaa

SEQ ID NO: 1120380 - RNA, 19 nt, Human
guaaagaaaaauauaagaa

SEQ ID NO: 1120381 - RNA, 24 nt, Human
uaaaaagacaagccaaaaugcuuc

SEQ ID NO: 1120382 - RNA, 25 nt, Human
uaacagacccuuuaaauuuguuuua

SEQ ID NO: 1120383 - RNA, 22 nt, Human
uaagaauuaacagacccuuuaa

SEQ ID NO: 1120384 - RNA, 25 nt, Human
ugaaugaauacccuaauggcaaacc

SEQ ID NO: 1120385 - RNA, 27 nt, Human
ugcauuugggggagaaggguaggggag

SEQ ID NO: 1120386 - RNA, 19 nt, Human
ugccucgcacuaauaaacu

SEQ ID NO: 1120387 - RNA, 18 nt, Human
uucaaaggaaaaaaaucc

SEQ ID NO: 1120388 - RNA, 22 nt, Human
uucaaaggaaaaaaauccaaaa

SEQ ID NO: 1120389 - RNA, 20 nt, Human
uugcuuuuccuucagcaagg

SEQ ID NO: 1120390 - RNA, 18 nt, Human
uuuaagguuuaaaaagug

SEQ ID NO: 1120391 - RNA, 27 nt, Human
aaaacaaacaucaacaccccugcuccc

SEQ ID NO: 1120392 - RNA, 21 nt, Human
acaaacaucaacaccccugcu

SEQ ID NO: 1120393 - RNA, 26 nt, Human
acaaacaucaacaccccugcucccuc

SEQ ID NO: 1120394 - RNA, 23 nt, Human
acuugcacacagccccacucugc

SEQ ID NO: 1120395 - RNA, 25 nt, Human
agacaaaaagccugguaagggggag

SEQ ID NO: 1120396 - RNA, 22 nt, Human
agccugggacagcuucagacua

SEQ ID NO: 1120397 - RNA, 21 nt, Human
auccucagccacagcugaagc

SEQ ID NO: 1120398 - RNA, 20 nt, Human
cacacagccccacucugcaa

SEQ ID NO: 1120399 - RNA, 19 nt, Human
cacucugcaacuugaccuu

SEQ ID NO: 1120400 - RNA, 24 nt, Human
cagaggcuccuagaacaaacccaa

SEQ ID NO: 1120401 - RNA, 19 nt, Human
cagggccagcaauaaccau

SEQ ID NO: 1120402 - RNA, 25 nt, Human
ccacagcugaagccaguggcgaggc

SEQ ID NO: 1120403 - RNA, 22 nt, Human
ccacuacccucuuggcugcugg

SEQ ID NO: 1120404 - RNA, 31 nt, Human
ccagcaauaaccauaacacuggucucucuuu

SEQ ID NO: 1120405 - RNA, 23 nt, Human
ccaguggcgaggcucucuuuggg

SEQ ID NO: 1120406 - RNA, 20 nt, Human
cccaguccuggcuggcagcc

SEQ ID NO: 1120407 - RNA, 20 nt, Human
ccccauuccugaacacacug

SEQ ID NO: 1120408 - RNA, 21 nt, Human
ccuacaugugaggggaagggu

SEQ ID NO: 1120409 - RNA, 19 nt, Human
cgguacaccacuacccucu

SEQ ID NO: 1120410 - RNA, 24 nt, Human
cuaaaacaaacaucaacaccccug

SEQ ID NO: 1120411 - RNA, 24 nt, Human
cuaaaugggggacuuaccaggucc

SEQ ID NO: 1120412 - RNA, 20 nt, Human
cuagaacaaacccaacacca

SEQ ID NO: 1120413 - RNA, 25 nt, Human
cuccuagaacaaacccaacaccauu

SEQ ID NO: 1120414 - RNA, 20 nt, Human
cucgcaguccccauacucac

SEQ ID NO: 1120415 - RNA, 24 nt, Human
cuucuacauucccaacaguaacca

SEQ ID NO: 1120416 - RNA, 24 nt, Human
cuuggcugcuggacugccaccugc

SEQ ID NO: 1120417 - RNA, 20 nt, Human
gcugcuggacugccaccugc

SEQ ID NO: 1120418 - RNA, 26 nt, Human
ggccagcaauaaccauaacacugguc

SEQ ID NO: 1120419 - RNA, 23 nt, Human
uaaaacaaacaucaacaccccug

SEQ ID NO: 1120420 - RNA, 22 nt, Human
ucaacacaguuucccaguccug

SEQ ID NO: 1120421 - RNA, 22 nt, Human
ucaacaccccugcucccucaca

SEQ ID NO: 1120422 - RNA, 25 nt, Human
ucacccaucaagcaugcuggacuuc

SEQ ID NO: 1120423 - RNA, 27 nt, Human
ucaggagcuucaacacaguuucccagu

SEQ ID NO: 1120424 - RNA, 20 nt, Human
uccccaggagucccuacaug

SEQ ID NO: 1120425 - RNA, 23 nt, Human
ugaggggaaggguggcacagggc

SEQ ID NO: 1120426 - RNA, 20 nt, Human
uggcuggcagccugggacag

SEQ ID NO: 1120427 - RNA, 21 nt, Human
uggcuggcagccugggacagc

SEQ ID NO: 1120428 - RNA, 21 nt, Human
ugggagccugggaagaauggg

SEQ ID NO: 1120429 - RNA, 25 nt, Human
uuucuuggccuuacuaaaacaaaca

SEQ ID NO: 1120430 - RNA, 19 nt, Human
aaaaaagacacagaaacac

SEQ ID NO: 1120431 - RNA, 20 nt, Human
aaacaaaaaagacacagaaa

SEQ ID NO: 1120432 - RNA, 22 nt, Human
aaagaagaaaaugcaugcaaag

SEQ ID NO: 1120433 - RNA, 18 nt, Human
aaagaagcuucugagaug

SEQ ID NO: 1120434 - RNA, 21 nt, Human
aacacaugcauucucucagca

SEQ ID NO: 1120435 - RNA, 18 nt, Human
aagaagaaaaugcaugca

SEQ ID NO: 1120436 - RNA, 20 nt, Human
aagggucagcccaucuccuc

SEQ ID NO: 1120437 - RNA, 19 nt, Human
acaaacaaaaaagacacag

SEQ ID NO: 1120438 - RNA, 25 nt, Human
acuacaaacaaaaaagacacagaaa

SEQ ID NO: 1120439 - RNA, 20 nt, Human
agaaacacuauucuccaggc

SEQ ID NO: 1120440 - RNA, 27 nt, Human
agcccaucuccucccuucugcccacaa

SEQ ID NO: 1120441 - RNA, 19 nt, Human
aggaucacagacuacaaac

SEQ ID NO: 1120442 - RNA, 21 nt, Human
augaggcuuaaagaagaaaau

SEQ ID NO: 1120443 - RNA, 18 nt, Human
augcugcccugggaaggg

SEQ ID NO: 1120444 - RNA, 23 nt, Human
augugaugaggcuuaaagaagaa

SEQ ID NO: 1120445 - RNA, 19 nt, Human
caaaaaagacacagaaaca

SEQ ID NO: 1120446 - RNA, 21 nt, Human
caagaccaagucccggcaugg

SEQ ID NO: 1120447 - RNA, 19 nt, Human
caagucccggcauggcgug

SEQ ID NO: 1120448 - RNA, 20 nt, Human
cacagaaacacuauucucca

SEQ ID NO: 1120449 - RNA, 18 nt, Human
cacagacuacaaacaaaa

SEQ ID NO: 1120450 - RNA, 25 nt, Human
cacagacuacaaacaaaaaagacac

SEQ ID NO: 1120451 - RNA, 18 nt, Human
cacaguaccuggcaguga

SEQ ID NO: 1120452 - RNA, 22 nt, Human
caccaagaacacucuucccaag

SEQ ID NO: 1120453 - RNA, 21 nt, Human
cacccccacucugucaggucu

SEQ ID NO: 1120454 - RNA, 19 nt, Human
cacucugucaggucuuuac

SEQ ID NO: 1120455 - RNA, 22 nt, Human
cagaauaagaggaaaaggcugg

SEQ ID NO: 1120456 - RNA, 19 nt, Human
caggcacagagagccagag

SEQ ID NO: 1120457 - RNA, 22 nt, Human
ccguugcugaagggucagccca

SEQ ID NO: 1120458 - RNA, 19 nt, Human
ccucccgacaacacaugca

SEQ ID NO: 1120459 - RNA, 20 nt, Human
cuccgucuaggccaggaccc

SEQ ID NO: 1120460 - RNA, 20 nt, Human
cuccucagaagugaccuccc

SEQ ID NO: 1120461 - RNA, 24 nt, Human
cugcaggaugcugcccugggaagg

SEQ ID NO: 1120462 - RNA, 22 nt, Human
cugccaccggugcuuccaccug

SEQ ID NO: 1120463 - RNA, 19 nt, Human
cugugccccagcuaugugu

SEQ ID NO: 1120464 - RNA, 18 nt, Human
gaaaaggcugggguugcc

SEQ ID NO: 1120465 - RNA, 19 nt, Human
gaaaaggcugggguugccu

SEQ ID NO: 1120466 - RNA, 21 nt, Human
gcacaguaccuggcagugagu

SEQ ID NO: 1120467 - RNA, 22 nt, Human
gccccagggcucccaggaucac

SEQ ID NO: 1120468 - RNA, 18 nt, Human
ggcagugaccucacuucc

SEQ ID NO: 1120469 - RNA, 26 nt, Human
uacaaacaaaaaagacacagaaacac

SEQ ID NO: 1120470 - RNA, 25 nt, Human
ucagcccaucuccucccuucugccc

SEQ ID NO: 1120471 - RNA, 26 nt, Human
uccaccaagaacacucuucccaagcu

SEQ ID NO: 1120472 - RNA, 24 nt, Human
ucccugggccugcuugaguuucug

SEQ ID NO: 1120473 - RNA, 23 nt, Human
ucucucagcauuuacugugcccc

SEQ ID NO: 1120474 - RNA, 24 nt, Human
ucucucagcauuuacugugcccca

SEQ ID NO: 1120475 - RNA, 21 nt, Human
ucugccaccggugcuuccacc

SEQ ID NO: 1120476 - RNA, 21 nt, Human
ucuggaagcggcugaccaucc

SEQ ID NO: 1120477 - RNA, 18 nt, Human
ucugucaggucuuuacug

SEQ ID NO: 1120478 - RNA, 19 nt, Human
ucugucuauaaaguaggug

SEQ ID NO: 1120479 - RNA, 20 nt, Human
ucugucuauaaaguaggugu

SEQ ID NO: 1120480 - RNA, 23 nt, Human
ucugugguuagacaggacgaaga

SEQ ID NO: 1120481 - RNA, 21 nt, Human
ucuuuacugggcucuccgucc

SEQ ID NO: 1120482 - RNA, 21 nt, Human
ugagauaauggaugccaaaga

SEQ ID NO: 1120483 - RNA, 21 nt, Human
ugaguauaugugcaauaauau

SEQ ID NO: 1120484 - RNA, 24 nt, Human
ugccacuguuuucccucccugggc

SEQ ID NO: 1120485 - RNA, 20 nt, Human
ugcccugggaaggagccaga

SEQ ID NO: 1120486 - RNA, 20 nt, Human
uggagggaagggaaaucggg

SEQ ID NO: 1120487 - RNA, 21 nt, Human
uggcagugaguauaugugcaa

SEQ ID NO: 1120488 - RNA, 21 nt, Human
ugggaaggagccagaggucgu

SEQ ID NO: 1120489 - RNA, 18 nt, Human
uggggaggaguugcuucc

SEQ ID NO: 1120490 - RNA, 21 nt, Human
uggggaggaguugcuuccagg

SEQ ID NO: 1120491 - RNA, 21 nt, Human
uggggcccuguuuaaacuggc

SEQ ID NO: 1120492 - RNA, 24 nt, Human
ugugaugaggcuuaaagaagaaaa

SEQ ID NO: 1120493 - RNA, 21 nt, Human
uguuuaaacuggccccagggc

SEQ ID NO: 1120494 - RNA, 21 nt, Human
uuuaagacuugccuccucaga

SEQ ID NO: 1120495 - RNA, 20 nt, Human
aaaaagguuaucuguccuuu

SEQ ID NO: 1120496 - RNA, 18 nt, Human
aaagcccucagaaaccaa

SEQ ID NO: 1120497 - RNA, 24 nt, Human
aaagcccucagaaaccaagggcac

SEQ ID NO: 1120498 - RNA, 24 nt, Human
aaagugcugggauuauaggcguga

SEQ ID NO: 1120499 - RNA, 20 nt, Human
aacaaguuuuaaaaccuccu

SEQ ID NO: 1120500 - RNA, 21 nt, Human
aacagaacgagcacuaacaag

SEQ ID NO: 1120501 - RNA, 22 nt, Human
aaccagacagggaaaccaucca

SEQ ID NO: 1120502 - RNA, 20 nt, Human
aaccuccucuuccccaccaa

SEQ ID NO: 1120503 - RNA, 21 nt, Human
aaccucugcaccauguggccc

SEQ ID NO: 1120504 - RNA, 21 nt, Human
aagaaaaacaggagaccucag

SEQ ID NO: 1120505 - RNA, 19 nt, Human
aagugcugggauuauaggc

SEQ ID NO: 1120506 - RNA, 19 nt, Human
aagugcugggauuauaggc

SEQ ID NO: 1120507 - RNA, 26 nt, Human
aagugcugggauuauaggcgugagcc

SEQ ID NO: 1120508 - RNA, 19 nt, Human
aaucgucaaaugccaaacc

SEQ ID NO: 1120509 - RNA, 20 nt, Human
aaugguuuuuagagaaagag

SEQ ID NO: 1120510 - RNA, 22 nt, Human
acacagcaagaaaaacaggaga

SEQ ID NO: 1120511 - RNA, 24 nt, Human
acacuguugcccaggcuggagugg

SEQ ID NO: 1120512 - RNA, 23 nt, Human
acagugaaaaaauguuccucuca

SEQ ID NO: 1120513 - RNA, 18 nt, Human
accacacaaaaagguuau

SEQ ID NO: 1120514 - RNA, 24 nt, Human
accauugccauggcaacaccugga

SEQ ID NO: 1120515 - RNA, 21 nt, Human
accuggggucauagccucccu

SEQ ID NO: 1120516 - RNA, 22 nt, Human
accugugauaagagaaguuuua

SEQ ID NO: 1120517 - RNA, 18 nt, Human
acgggguuucgccauguu

SEQ ID NO: 1120518 - RNA, 23 nt, Human
acgggguuucgccauguugguca

SEQ ID NO: 1120519 - RNA, 24 nt, Human
acgggguuucgccauguuggucag

SEQ ID NO: 1120520 - RNA, 26 nt, Human
acucaacuccaaaggccggacucgga

SEQ ID NO: 1120521 - RNA, 18 nt, Human
acuugaucccaaaacuua

SEQ ID NO: 1120522 - RNA, 23 nt, Human
agaaagaggaugauaacaaagga

SEQ ID NO: 1120523 - RNA, 18 nt, Human
agacaaggucucacacug

SEQ ID NO: 1120524 - RNA, 18 nt, Human
agauagucuaauaaaaau

SEQ ID NO: 1120525 - RNA, 21 nt, Human
agcugcugucuaacaccacug

SEQ ID NO: 1120526 - RNA, 24 nt, Human
aggacugaaucaauauaaaaacaa

SEQ ID NO: 1120527 - RNA, 18 nt, Human
aggcgugagccaccgcac

SEQ ID NO: 1120528 - RNA, 23 nt, Human
aguagcugggauuacaggcacau

SEQ ID NO: 1120529 - RNA, 23 nt, Human
aguagcugggauuacaggcacau

SEQ ID NO: 1120530 - RNA, 21 nt, Human
agucauugucugugucgcucu

SEQ ID NO: 1120531 - RNA, 19 nt, Human
auaaaaacaagccuggaga

SEQ ID NO: 1120532 - RNA, 21 nt, Human
auaaguauuccaagccuuuaa

SEQ ID NO: 1120533 - RNA, 23 nt, Human
aucaauauaaaaacaagccugga

SEQ ID NO: 1120534 - RNA, 19 nt, Human
augguguagcccugcucca

SEQ ID NO: 1120535 - RNA, 22 nt, Human
caaagcccucagaaaccaaggg

SEQ ID NO: 1120536 - RNA, 18 nt, Human
caaaggccggacucggac

SEQ ID NO: 1120537 - RNA, 24 nt, Human
caaagugcugggauuauaggcgug

SEQ ID NO: 1120538 - RNA, 25 nt, Human
caacaacagaacgagcacuaacaag

SEQ ID NO: 1120539 - RNA, 23 nt, Human
caaccucugcaccauguggcccu

SEQ ID NO: 1120540 - RNA, 20 nt, Human
caaccuuuuccaggcucaag

SEQ ID NO: 1120541 - RNA, 21 nt, Human
caagaaaaacaggagaccuca

SEQ ID NO: 1120542 - RNA, 22 nt, Human
caagggcaccacacaaaaaggu

SEQ ID NO: 1120543 - RNA, 24 nt, Human
caaggucucacacuguugcccagg

SEQ ID NO: 1120544 - RNA, 24 nt, Human
caauuaccauugccauggcaacac

SEQ ID NO: 1120545 - RNA, 24 nt, Human
cacacuguugcccaggcuggagug

SEQ ID NO: 1120546 - RNA, 22 nt, Human
caccaagcuaagguugaugggc

SEQ ID NO: 1120547 - RNA, 21 nt, Human
caccauguggcccucuagcug

SEQ ID NO: 1120548 - RNA, 20 nt, Human
caccgcacacagccaagaau

SEQ ID NO: 1120549 - RNA, 24 nt, Human
caccugcccuacaucagcauaaac

SEQ ID NO: 1120550 - RNA, 26 nt, Human
cagaacgagcacuaacaaguuuuaaa

SEQ ID NO: 1120551 - RNA, 21 nt, Human
cagaccaauacgugguccugc

SEQ ID NO: 1120552 - RNA, 20 nt, Human
cagcaagaaaaacaggagac

SEQ ID NO: 1120553 - RNA, 18 nt, Human
cagcccgaagcgccgcag

SEQ ID NO: 1120554 - RNA, 20 nt, Human
cagccuccugaguagcuggg

SEQ ID NO: 1120555 - RNA, 20 nt, Human
cagugcguggcuccgcaggu

SEQ ID NO: 1120556 - RNA, 23 nt, Human
caucaucaucaucgggugugucu

SEQ ID NO: 1120557 - RNA, 19 nt, Human
cauguucgucugcccauaa

SEQ ID NO: 1120558 - RNA, 24 nt, Human
ccaaaccagacagggaaaccaucc

SEQ ID NO: 1120559 - RNA, 22 nt, Human
ccaaagugcugggauuauaggc

SEQ ID NO: 1120560 - RNA, 24 nt, Human
ccaaagugcugggauuauaggcgu

SEQ ID NO: 1120561 - RNA, 23 nt, Human
ccacacaaaaagguuaucugucc

SEQ ID NO: 1120562 - RNA, 19 nt, Human
ccauguuggucaggcuggu

SEQ ID NO: 1120563 - RNA, 19 nt, Human
cccaggcuggaguggagug

SEQ ID NO: 1120564 - RNA, 18 nt, Human
ccccaauuuuugggcuca

SEQ ID NO: 1120565 - RNA, 20 nt, Human
cccuugaauucuuuccuggg

SEQ ID NO: 1120566 - RNA, 19 nt, Human
ccucagggccugcuuugac

SEQ ID NO: 1120567 - RNA, 22 nt, Human
ccucugggcuaagccccaauuu

SEQ ID NO: 1120568 - RNA, 23 nt, Human
ccugaccucaaguguuccaucug

SEQ ID NO: 1120569 - RNA, 23 nt, Human
ccugaguagcugggauuacaggc

SEQ ID NO: 1120570 - RNA, 24 nt, Human
ccugaguagcugggauuacaggca

SEQ ID NO: 1120571 - RNA, 18 nt, Human
ccuggaagucacugcccc

SEQ ID NO: 1120572 - RNA, 22 nt, Human
ccuugaauucuuuccuggguga

SEQ ID NO: 1120573 - RNA, 24 nt, Human
cgccacagccuccugaguagcugg

SEQ ID NO: 1120574 - RNA, 24 nt, Human
cgccauguuggucaggcugguauc

SEQ ID NO: 1120575 - RNA, 24 nt, Human
cgggguuucgccauguuggucagg

SEQ ID NO: 1120576 - RNA, 18 nt, Human
cgugaauguucuccugca

SEQ ID NO: 1120577 - RNA, 21 nt, Human
cucaaguguuccucucgccac

SEQ ID NO: 1120578 - RNA, 19 nt, Human
cuccucugggcuaagcccc

SEQ ID NO: 1120579 - RNA, 24 nt, Human
cucgccacagccuccugaguagcu

SEQ ID NO: 1120580 - RNA, 23 nt, Human
cugaguagcugggauuacaggca

SEQ ID NO: 1120581 - RNA, 27 nt, Human
cuggagauuuucuuaucuuucuccuaa

SEQ ID NO: 1120582 - RNA, 27 nt, Human
cuuggcaaagguaaacuugaucccaaa

SEQ ID NO: 1120583 - RNA, 23 nt, Human
gaccucaaguguuccaucugccu

SEQ ID NO: 1120584 - RNA, 23 nt, Human
gagacgggguuucgccauguugg

SEQ ID NO: 1120585 - RNA, 24 nt, Human
gagacgggguuucgccauguuggu

SEQ ID NO: 1120586 - RNA, 23 nt, Human
gaugccauaaugagccuuucaga

SEQ ID NO: 1120587 - RNA, 18 nt, Human
gauuauaggcgugagcca

SEQ ID NO: 1120588 - RNA, 22 nt, Human
gauuauaggcgugagccaccgc

SEQ ID NO: 1120589 - RNA, 23 nt, Human
gauuauaggcgugagccaccgca

SEQ ID NO: 1120590 - RNA, 19 nt, Human
gccauggcaacaccuggaa

SEQ ID NO: 1120591 - RNA, 24 nt, Human
gccauguuggucaggcugguaucg

SEQ ID NO: 1120592 - RNA, 19 nt, Human
gccuuggccucccaaagug

SEQ ID NO: 1120593 - RNA, 22 nt, Human
gccuuggccucccaaagugcug

SEQ ID NO: 1120594 - RNA, 18 nt, Human
gcugcuguugggcacugc

SEQ ID NO: 1120595 - RNA, 23 nt, Human
gcugguaucgaacuccugaccuc

SEQ ID NO: 1120596 - RNA, 25 nt, Human
ggacaggugacucgugaauguucuc

SEQ ID NO: 1120597 - RNA, 21 nt, Human
ggaguaccuuuuaugaucaug

SEQ ID NO: 1120598 - RNA, 21 nt, Human
ggcgguggugggaggguggug

SEQ ID NO: 1120599 - RNA, 24 nt, Human
ggcugguaucgaacuccugaccuc

SEQ ID NO: 1120600 - RNA, 21 nt, Human
gggaaaccauccagaccuggg

SEQ ID NO: 1120601 - RNA, 19 nt, Human
gggaggguggugcaggaag

SEQ ID NO: 1120602 - RNA, 23 nt, Human
gggguuucgccauguuggucagg

SEQ ID NO: 1120603 - RNA, 19 nt, Human
ggugcagcugucacacagc

SEQ ID NO: 1120604 - RNA, 19 nt, Human
guaaaagaaugccagaggc

SEQ ID NO: 1120605 - RNA, 18 nt, Human
guagcugggauuacaggc

SEQ ID NO: 1120606 - RNA, 21 nt, Human
guauccaaccucugcaccaug

SEQ ID NO: 1120607 - RNA, 22 nt, Human
uaaaagaaugccagaggcagcu

SEQ ID NO: 1120608 - RNA, 19 nt, Human
uaacaaaggaaugcagagg

SEQ ID NO: 1120609 - RNA, 21 nt, Human
uaaguaaaagaaugccagagg

SEQ ID NO: 1120610 - RNA, 24 nt, Human
uaauuuuuguauuuuugcuagaga

SEQ ID NO: 1120611 - RNA, 25 nt, Human
uacaagcugcugucuaacaccacug

SEQ ID NO: 1120612 - RNA, 19 nt, Human
uacaggcugguauccaacc

SEQ ID NO: 1120613 - RNA, 18 nt, Human
uagaaucgucaaaugcca

SEQ ID NO: 1120614 - RNA, 20 nt, Human
uagagacgggguuucgccau

SEQ ID NO: 1120615 - RNA, 21 nt, Human
uagagacgggguuucgccaug

SEQ ID NO: 1120616 - RNA, 22 nt, Human
uagagacgggguuucgccaugu

SEQ ID NO: 1120617 - RNA, 21 nt, Human
uauaauaacagugaaaaaaug

SEQ ID NO: 1120618 - RNA, 24 nt, Human
ucacacuguugcccaggcuggagu

SEQ ID NO: 1120619 - RNA, 19 nt, Human
ucacugcaaccuuuuccag

SEQ ID NO: 1120620 - RNA, 20 nt, Human
ucacugcaaccuuuuccagg

SEQ ID NO: 1120621 - RNA, 21 nt, Human
ucagaucauucccauguucgu

SEQ ID NO: 1120622 - RNA, 24 nt, Human
ucaucaucaucaucgggugugucu

SEQ ID NO: 1120623 - RNA, 19 nt, Human
uccagcagggucauuuucc

SEQ ID NO: 1120624 - RNA, 19 nt, Human
uccaggcucaaguguuccu

SEQ ID NO: 1120625 - RNA, 23 nt, Human
uccauaccucacucaagaagaca

SEQ ID NO: 1120626 - RNA, 18 nt, Human
uccaucugccuuggccuc

SEQ ID NO: 1120627 - RNA, 24 nt, Human
ucccaaagugcugggauuauaggc

SEQ ID NO: 1120628 - RNA, 23 nt, Human
ucccucaugaagaucuuuuaaaa

SEQ ID NO: 1120629 - RNA, 20 nt, Human
uccucugggcuaagccccaa

SEQ ID NO: 1120630 - RNA, 24 nt, Human
uccugaguagcugggauuacaggc

SEQ ID NO: 1120631 - RNA, 23 nt, Human
uccuuugagucacaaaauccaac

SEQ ID NO: 1120632 - RNA, 22 nt, Human
ucgccauguuggucaggcuggu

SEQ ID NO: 1120633 - RNA, 22 nt, Human
ucucacacuguugcccaggcug

SEQ ID NO: 1120634 - RNA, 23 nt, Human
ucucacacuguugcccaggcugg

SEQ ID NO: 1120635 - RNA, 24 nt, Human
ucucacacuguugcccaggcugga

SEQ ID NO: 1120636 - RNA, 19 nt, Human
ucuccugcagcccuugcag

SEQ ID NO: 1120637 - RNA, 24 nt, Human
ucugccuuggccucccaaagugcu

SEQ ID NO: 1120638 - RNA, 21 nt, Human
ugaacugguccauaccucacu

SEQ ID NO: 1120639 - RNA, 21 nt, Human
ugaagccuccaccaagcuaag

SEQ ID NO: 1120640 - RNA, 18 nt, Human
ugaccagaacugaacugg

SEQ ID NO: 1120641 - RNA, 26 nt, Human
ugaccagaacugaacugguccauacc

SEQ ID NO: 1120642 - RNA, 19 nt, Human
ugaccucaaguguuccauc

SEQ ID NO: 1120643 - RNA, 20 nt, Human
ugacucgugaauguucuccu

SEQ ID NO: 1120644 - RNA, 23 nt, Human
ugacucgugaauguucuccugca

SEQ ID NO: 1120645 - RNA, 22 nt, Human
ugagacaaggucucacacuguu

SEQ ID NO: 1120646 - RNA, 25 nt, Human
ugccaccacuccugacuaauuuuug

SEQ ID NO: 1120647 - RNA, 19 nt, Human
ugcccaggcuggaguggag

SEQ ID NO: 1120648 - RNA, 21 nt, Human
ugcccaggcuggaguggagug

SEQ ID NO: 1120649 - RNA, 24 nt, Human
ugcccaggcuggaguggaguggca

SEQ ID NO: 1120650 - RNA, 31 nt, Human
ugcccaggcuggaguggaguggcacgauucc

SEQ ID NO: 1120651 - RNA, 19 nt, Human
ugcccuacaucagcauaaa

SEQ ID NO: 1120652 - RNA, 24 nt, Human
ugcccuugaauucuuuccuggggg

SEQ ID NO: 1120653 - RNA, 24 nt, Human
ugcuagagacgggguuucgccaug

SEQ ID NO: 1120654 - RNA, 19 nt, Human
ugcuguugggcacugcugc

SEQ ID NO: 1120655 - RNA, 18 nt, Human
uggaaagugggcgaaagg

SEQ ID NO: 1120656 - RNA, 19 nt, Human
uggaguggaguggcacgau

SEQ ID NO: 1120657 - RNA, 19 nt, Human
uggaguggaguggcacgau

SEQ ID NO: 1120658 - RNA, 24 nt, Human
uggcacgauuccagcucacugcaa

SEQ ID NO: 1120659 - RNA, 23 nt, Human
uggccagcaaagcccucagaaac

SEQ ID NO: 1120660 - RNA, 19 nt, Human
uggcccucuagcugaccag

SEQ ID NO: 1120661 - RNA, 19 nt, Human
ugggaggguggugcaggaa

SEQ ID NO: 1120662 - RNA, 21 nt, Human
ugggauuacaggcacaugcca

SEQ ID NO: 1120663 - RNA, 22 nt, Human
ugggauuacaggcacaugccac

SEQ ID NO: 1120664 - RNA, 24 nt, Human
ugggauuacaggcacaugccacca

SEQ ID NO: 1120665 - RNA, 18 nt, Human
ugggauuauaggcgugag

SEQ ID NO: 1120666 - RNA, 19 nt, Human
ugggauuauaggcgugagc

SEQ ID NO: 1120667 - RNA, 21 nt, Human
ugggauuauaggcgugagcca

SEQ ID NO: 1120668 - RNA, 22 nt, Human
ugggauuauaggcgugagccac

SEQ ID NO: 1120669 - RNA, 23 nt, Human
ugggauuauaggcgugagccacc

SEQ ID NO: 1120670 - RNA, 24 nt, Human
ugggauuauaggcgugagccaccg

SEQ ID NO: 1120671 - RNA, 24 nt, Human
uggguauaaauauaagugccgacc

SEQ ID NO: 1120672 - RNA, 24 nt, Human
uggucaggcugguaucgaacuccu

SEQ ID NO: 1120673 - RNA, 19 nt, Human
uggugggaggguggugcag

SEQ ID NO: 1120674 - RNA, 19 nt, Human
ugguuuuuagagaaagagg

SEQ ID NO: 1120675 - RNA, 19 nt, Human
uguagccagaccgcccugc

SEQ ID NO: 1120676 - RNA, 22 nt, Human
ugucgcucuuuucuuggcuuuc

SEQ ID NO: 1120677 - RNA, 18 nt, Human
ugugucgcucuuuucuug

SEQ ID NO: 1120678 - RNA, 23 nt, Human
ugugucgcucuuuucuuggcuuu

SEQ ID NO: 1120679 - RNA, 21 nt, Human
uguguggcuggaaagugggcg

SEQ ID NO: 1120680 - RNA, 24 nt, Human
uguuccaucugccuuggccuccca

SEQ ID NO: 1120681 - RNA, 20 nt, Human
uucaacaacagaacgagcac

SEQ ID NO: 1120682 - RNA, 21 nt, Human
uugcccaggcuggaguggagu

SEQ ID NO: 1120683 - RNA, 24 nt, Human
uugcuagagacgggguuucgccau

SEQ ID NO: 1120684 - RNA, 18 nt, Human
uuggccucccaaagugcu

SEQ ID NO: 1120685 - RNA, 20 nt, Human
uuuaaaagaugaacauuuua

SEQ ID NO: 1120686 - RNA, 18 nt, Human
uuuaauacuuugccagaa

SEQ ID NO: 1120687 - RNA, 21 nt, Human
uuuaugaucauguagccagac

SEQ ID NO: 1120688 - RNA, 25 nt, Human
uuuccaggcucaaguguuccucucg

SEQ ID NO: 1120689 - RNA, 24 nt, Human
uuucgccauguuggucaggcuggu

SEQ ID NO: 1120690 - RNA, 26 nt, Human
uuuuaugaucauguagccagaccgcc

SEQ ID NO: 1120691 - RNA, 21 nt, Human
uuuuguauuuuugcuagagac

SEQ ID NO: 1120692 - RNA, 23 nt, Human
uuuuugcuagagacgggguuucg

SEQ ID NO: 1120693 - RNA, 24 nt, Human
uuuuugcuagagacgggguuucgc

SEQ ID NO: 1120694 - RNA, 20 nt, Human
uuuuuguauuuuugcuagag

SEQ ID NO: 1120695 - RNA, 25 nt, Human
aaaaaaaaaaaacagugaagcaagu

SEQ ID NO: 1120696 - RNA, 26 nt, Human
aaaaaaaaaaaacagugaagcaagug

SEQ ID NO: 1120697 - RNA, 27 nt, Human
aaaaaaaaaaaacagugaagcaaguga

SEQ ID NO: 1120698 - RNA, 20 nt, Human
aaaaaaaaaaaacgaaaaaa

SEQ ID NO: 1120699 - RNA, 21 nt, Human
aaaaagaaaacucaacagaga

SEQ ID NO: 1120700 - RNA, 22 nt, Human
aaaaagaaaacucaacagagag

SEQ ID NO: 1120701 - RNA, 18 nt, Human
aaacuuaaaaaaaaaaaa

SEQ ID NO: 1120702 - RNA, 24 nt, Human
aaagaaaacucaacagagagguuc

SEQ ID NO: 1120703 - RNA, 20 nt, Human
aagcugccgcaccccucugc

SEQ ID NO: 1120704 - RNA, 20 nt, Human
aagggccgggggugggggca

SEQ ID NO: 1120705 - RNA, 19 nt, Human
aauuccuuuguuucuugcc

SEQ ID NO: 1120706 - RNA, 22 nt, Human
acagcucgagaggugcgagcca

SEQ ID NO: 1120707 - RNA, 20 nt, Human
acccagcccauccccacccc

SEQ ID NO: 1120708 - RNA, 21 nt, Human
agaaauacaaagagcagaggg

SEQ ID NO: 1120709 - RNA, 23 nt, Human
agaccugaggccauggcaagaga

SEQ ID NO: 1120710 - RNA, 21 nt, Human
agagguucaaagugcucugag

SEQ ID NO: 1120711 - RNA, 18 nt, Human
agauccaggcccacuccc

SEQ ID NO: 1120712 - RNA, 18 nt, Human
agcaagugaagggugggg

SEQ ID NO: 1120713 - RNA, 24 nt, Human
aguuucugucuaguuuucuuuuuu

SEQ ID NO: 1120714 - RNA, 20 nt, Human
aucuggaggaaauucuggag

SEQ ID NO: 1120715 - RNA, 23 nt, Human
aucuggaggaaauucuggaggga

SEQ ID NO: 1120716 - RNA, 18 nt, Human
caaaacggaacuccagau

SEQ ID NO: 1120717 - RNA, 20 nt, Human
caacagagaaauacaaagaa

SEQ ID NO: 1120718 - RNA, 23 nt, Human
caccccucucguuucugccuccu

SEQ ID NO: 1120719 - RNA, 19 nt, Human
cacccuuugguccugugga

SEQ ID NO: 1120720 - RNA, 23 nt, Human
cacccuuugguccuguggaucuc

SEQ ID NO: 1120721 - RNA, 21 nt, Human
caccuguacgucuugcccucc

SEQ ID NO: 1120722 - RNA, 24 nt, Human
cacucccuccccaucccccugccc

SEQ ID NO: 1120723 - RNA, 21 nt, Human
cagcaccaacuuccuggccaa

SEQ ID NO: 1120724 - RNA, 24 nt, Human
cagcccauccccaccccauuuccc

SEQ ID NO: 1120725 - RNA, 24 nt, Human
caggcacucaggggcgaagggcuc

SEQ ID NO: 1120726 - RNA, 23 nt, Human
cagggcuucugcggaccaagcuu

SEQ ID NO: 1120727 - RNA, 18 nt, Human
caucccccugcccacagu

SEQ ID NO: 1120728 - RNA, 22 nt, Human
ccacucccuccccaucccccug

SEQ ID NO: 1120729 - RNA, 22 nt, Human
cccauccccaccccauuucccu

SEQ ID NO: 1120730 - RNA, 23 nt, Human
ccccaccccauuucccugggccc

SEQ ID NO: 1120731 - RNA, 18 nt, Human
ccccaugggcaaagaaac

SEQ ID NO: 1120732 - RNA, 18 nt, Human
ccccggagggagcugggg

SEQ ID NO: 1120733 - RNA, 18 nt, Human
ccccggggaucccuuccc

SEQ ID NO: 1120734 - RNA, 22 nt, Human
cccugggcccgccacccagccc

SEQ ID NO: 1120735 - RNA, 18 nt, Human
ccucaccucccugccucc

SEQ ID NO: 1120736 - RNA, 20 nt, Human
ccucaccucccugccuccaa

SEQ ID NO: 1120737 - RNA, 23 nt, Human
ccucggcuggggauucccacucc

SEQ ID NO: 1120738 - RNA, 19 nt, Human
ccucugguucucugcgucc

SEQ ID NO: 1120739 - RNA, 20 nt, Human
ccucugguucucugcgucca

SEQ ID NO: 1120740 - RNA, 19 nt, Human
ccugaagcugccgcacccc

SEQ ID NO: 1120741 - RNA, 21 nt, Human
ccugggaccugccuccccggg

SEQ ID NO: 1120742 - RNA, 28 nt, Human
cgucuugcccuccuuggcagucucgccc

SEQ ID NO: 1120743 - RNA, 18 nt, Human
cuacaaggacaggcggac

SEQ ID NO: 1120744 - RNA, 23 nt, Human
cuauauacaccgacacgcauggu

SEQ ID NO: 1120745 - RNA, 22 nt, Human
cuccggcugcuuccugccccuc

SEQ ID NO: 1120746 - RNA, 24 nt, Human
cuccugaagcugccgcaccccucu

SEQ ID NO: 1120747 - RNA, 19 nt, Human
cuccugggaccugccuccc

SEQ ID NO: 1120748 - RNA, 21 nt, Human
cuccuuggcagucucgcccga

SEQ ID NO: 1120749 - RNA, 20 nt, Human
cucugcucagugaugcccag

SEQ ID NO: 1120750 - RNA, 18 nt, Human
cugaagcugccgcacccc

SEQ ID NO: 1120751 - RNA, 23 nt, Human
cugaagcugccgcaccccucugc

SEQ ID NO: 1120752 - RNA, 18 nt, Human
cuuggugguuccuggagg

SEQ ID NO: 1120753 - RNA, 18 nt, Human
cuuggugguuccuggagg

SEQ ID NO: 1120754 - RNA, 20 nt, Human
cuuuggaugccaccaaaaca

SEQ ID NO: 1120755 - RNA, 24 nt, Human
gaacaaaaagaaaacucaacagag

SEQ ID NO: 1120756 - RNA, 23 nt, Human
gaagcugccgcaccccucugcuc

SEQ ID NO: 1120757 - RNA, 20 nt, Human
gacuuggugaaaaaggucag

SEQ ID NO: 1120758 - RNA, 20 nt, Human
gagaggugcgagccaggcac

SEQ ID NO: 1120759 - RNA, 24 nt, Human
gagccaggcacucaggggcgaagg

SEQ ID NO: 1120760 - RNA, 22 nt, Human
gagggcccccggagggagcugg

SEQ ID NO: 1120761 - RNA, 25 nt, Human
gagggcccccggagggagcuggggc

SEQ ID NO: 1120762 - RNA, 19 nt, Human
gccaagcaggccguggccc

SEQ ID NO: 1120763 - RNA, 21 nt, Human
gcccagggcacagcucgagag

SEQ ID NO: 1120764 - RNA, 19 nt, Human
gccgcaccccucugcucag

SEQ ID NO: 1120765 - RNA, 25 nt, Human
ggacaggcggaccccccggguucuc

SEQ ID NO: 1120766 - RNA, 22 nt, Human
ggaccccccggguucuccgccu

SEQ ID NO: 1120767 - RNA, 22 nt, Human
ggaugccaccaaaacaguccag

SEQ ID NO: 1120768 - RNA, 18 nt, Human
ggcagggucugcuccugg

SEQ ID NO: 1120769 - RNA, 22 nt, Human
ggccagcaccgagguagacugg

SEQ ID NO: 1120770 - RNA, 23 nt, Human
ggcccgagccuucccucaagacc

SEQ ID NO: 1120771 - RNA, 24 nt, Human
ggccgggggugggggcagagaacc

SEQ ID NO: 1120772 - RNA, 22 nt, Human
gggaacaaaaagaaaacucaac

SEQ ID NO: 1120773 - RNA, 24 nt, Human
gggauaggggacuacaaggacagg

SEQ ID NO: 1120774 - RNA, 19 nt, Human
gggcagcaggggagggcca

SEQ ID NO: 1120775 - RNA, 21 nt, Human
ggguggucuucagggcagcag

SEQ ID NO: 1120776 - RNA, 18 nt, Human
gugaaaaaggucaguggg

SEQ ID NO: 1120777 - RNA, 19 nt, Human
guucggacuugggggggcc

SEQ ID NO: 1120778 - RNA, 21 nt, Human
uacccagcccauccccacccc

SEQ ID NO: 1120779 - RNA, 20 nt, Human
uaccuuacaccuguacgucu

SEQ ID NO: 1120780 - RNA, 23 nt, Human
uagaugaguuucugucuaguuuu

SEQ ID NO: 1120781 - RNA, 21 nt, Human
uagcagcaccaacuuccuggc

SEQ ID NO: 1120782 - RNA, 21 nt, Human
ucaaagugcucugagaucguc

SEQ ID NO: 1120783 - RNA, 19 nt, Human
ucaccucccugccuccaag

SEQ ID NO: 1120784 - RNA, 23 nt, Human
ucagugaugcccagggcacagcu

SEQ ID NO: 1120785 - RNA, 23 nt, Human
uccauggcagggaagaccggggc

SEQ ID NO: 1120786 - RNA, 20 nt, Human
ucccagauccaggcccacuc

SEQ ID NO: 1120787 - RNA, 23 nt, Human
uccccaccccauuucccugggcc

SEQ ID NO: 1120788 - RNA, 23 nt, Human
ucccugggcccgccacccagccc

SEQ ID NO: 1120789 - RNA, 19 nt, Human
ucggucuuagcagcaccaa

SEQ ID NO: 1120790 - RNA, 19 nt, Human
ucugacuuggugaaaaagg

SEQ ID NO: 1120791 - RNA, 21 nt, Human
ucuguacaugguuccuauaua

SEQ ID NO: 1120792 - RNA, 24 nt, Human
ucuugauggaguccaggagagggg

SEQ ID NO: 1120793 - RNA, 21 nt, Human
ucuuuggaugccaccaaaaca

SEQ ID NO: 1120794 - RNA, 21 nt, Human
ugagaucgucuuuggaugcca

SEQ ID NO: 1120795 - RNA, 25 nt, Human
ugcccagggcacagcucgagaggug

SEQ ID NO: 1120796 - RNA, 24 nt, Human
ugccuccugaagcugccgcacccc

SEQ ID NO: 1120797 - RNA, 26 nt, Human
ugccugggucugugucugccagugga

SEQ ID NO: 1120798 - RNA, 18 nt, Human
ugcgagccaggcacucag

SEQ ID NO: 1120799 - RNA, 24 nt, Human
uggcagggaagacaaauaaccccu

SEQ ID NO: 1120800 - RNA, 24 nt, Human
uggcagucucgcccgaggccagga

SEQ ID NO: 1120801 - RNA, 21 nt, Human
ugggccggguggggcggcgcc

SEQ ID NO: 1120802 - RNA, 18 nt, Human
ugggguggucuucagggc

SEQ ID NO: 1120803 - RNA, 21 nt, Human
ugggguggucuucagggcagc

SEQ ID NO: 1120804 - RNA, 20 nt, Human
uggggugugucugugggggc

SEQ ID NO: 1120805 - RNA, 19 nt, Human
uguagggggcuucucuggg

SEQ ID NO: 1120806 - RNA, 18 nt, Human
ugugggggcugggggcag

SEQ ID NO: 1120807 - RNA, 23 nt, Human
uuccugccccucccaccuggggg

SEQ ID NO: 1120808 - RNA, 19 nt, Human
uuccuggccagcaccgagg

SEQ ID NO: 1120809 - RNA, 20 nt, Human
uucucggucuuagcagcacc

SEQ ID NO: 1120810 - RNA, 23 nt, Human
uugauuuucauuugcuccccacu

SEQ ID NO: 1120811 - RNA, 20 nt, Human
uugcuccccacucccuuuuu

SEQ ID NO: 1120812 - RNA, 22 nt, Human
uuggugguuccuggagggcccc

SEQ ID NO: 1120813 - RNA, 20 nt, Human
uuucuuuuuuuucccggggg

SEQ ID NO: 1120814 - RNA, 21 nt, Human
aaaaggaagaggaaaacaaaa

SEQ ID NO: 1120815 - RNA, 22 nt, Human
aacaguucuucguaggagucuu

SEQ ID NO: 1120816 - RNA, 24 nt, Human
aaggaagaggaaaacaaaaacagu

SEQ ID NO: 1120817 - RNA, 20 nt, Human
accuacugccacagcagaga

SEQ ID NO: 1120818 - RNA, 24 nt, Human
acuccuuucucggaguuggcuguu

SEQ ID NO: 1120819 - RNA, 22 nt, Human
aggcacaccuacugccacagca

SEQ ID NO: 1120820 - RNA, 22 nt, Human
aggcugugcccugauuuucccu

SEQ ID NO: 1120821 - RNA, 26 nt, Human
caaauuuccauauaucaaaaaaaagc

SEQ ID NO: 1120822 - RNA, 23 nt, Human
cacaccuacugccacagcagaga

SEQ ID NO: 1120823 - RNA, 21 nt, Human
ccuugggggguugaagaauuc

SEQ ID NO: 1120824 - RNA, 25 nt, Human
cucaaaaggaagaggaaaacaaaaa

SEQ ID NO: 1120825 - RNA, 24 nt, Human
cugcugacaucagugauccucucu

SEQ ID NO: 1120826 - RNA, 29 nt, Human
cugugcccugauuuucccuuucugaaagg

SEQ ID NO: 1120827 - RNA, 23 nt, Human
gcaugaggcacaccuacugccac

SEQ ID NO: 1120828 - RNA, 18 nt, Human
ggaaaacaaaaacaguuc

SEQ ID NO: 1120829 - RNA, 22 nt, Human
gugaauauuuggggaacacaga

SEQ ID NO: 1120830 - RNA, 22 nt, Human
uauaugucuuaaccaacuugga

SEQ ID NO: 1120831 - RNA, 21 nt, Human
uauucuucuuucaaccuggau

SEQ ID NO: 1120832 - RNA, 20 nt, Human
ucaaaaggaagaggaaaaca

SEQ ID NO: 1120833 - RNA, 20 nt, Human
ucccuugggggguugaagaa

SEQ ID NO: 1120834 - RNA, 24 nt, Human
uccucucuggggugaggcuggagg

SEQ ID NO: 1120835 - RNA, 19 nt, Human
uggggugaggcuggagggc

SEQ ID NO: 1120836 - RNA, 23 nt, Human
uuaaagugugaauauuuggggaa

SEQ ID NO: 1120837 - RNA, 20 nt, Human
uuagucccuacccugccgcu

SEQ ID NO: 1120838 - RNA, 21 nt, Human
uuggcgcacacccuuaaagga

SEQ ID NO: 1120839 - RNA, 24 nt, Human
uuuggggaacacagaccaaggcug

SEQ ID NO: 1120840 - RNA, 21 nt, Human
aaacaaacacagggucuccua

SEQ ID NO: 1120841 - RNA, 19 nt, Human
aaauacacacacgaagaca

SEQ ID NO: 1120842 - RNA, 23 nt, Human
aacacagacuccccacacacacc

SEQ ID NO: 1120843 - RNA, 22 nt, Human
aaccaaagaaggacaggaguug

SEQ ID NO: 1120844 - RNA, 22 nt, Human
aagaggaaacagaaguugagag

SEQ ID NO: 1120845 - RNA, 21 nt, Human
aagcagcaggccaggaccugc

SEQ ID NO: 1120846 - RNA, 21 nt, Human
aaggaccagccccauguccuc

SEQ ID NO: 1120847 - RNA, 23 nt, Human
aauaugggcaacuaaaauugaaa

SEQ ID NO: 1120848 - RNA, 23 nt, Human
acacacccaugccugggcacaca

SEQ ID NO: 1120849 - RNA, 23 nt, Human
acacagagauacaugcaugaaca

SEQ ID NO: 1120850 - RNA, 23 nt, Human
acacagagcacagagauacacca

SEQ ID NO: 1120851 - RNA, 21 nt, Human
acacgaagacacacacccaga

SEQ ID NO: 1120852 - RNA, 25 nt, Human
acagacuccccacacacacccaugc

SEQ ID NO: 1120853 - RNA, 21 nt, Human
acagagauacaugcaugaaca

SEQ ID NO: 1120854 - RNA, 33 nt, Human
acaugcacauacacacauacccaccugugcagu

SEQ ID NO: 1120855 - RNA, 21 nt, Human
acaugcaugcaaacacacguc

SEQ ID NO: 1120856 - RNA, 22 nt, Human
acgaagacacacacccagaaac

SEQ ID NO: 1120857 - RNA, 18 nt, Human
agaaguugagagacagga

SEQ ID NO: 1120858 - RNA, 25 nt, Human
agacuccacauagaagcagccaggc

SEQ ID NO: 1120859 - RNA, 19 nt, Human
agagagaccuaaacacaca

SEQ ID NO: 1120860 - RNA, 19 nt, Human
agagauacaccagagagac

SEQ ID NO: 1120861 - RNA, 24 nt, Human
agagauacaccagagagaccuaaa

SEQ ID NO: 1120862 - RNA, 18 nt, Human
agagcacagagauacacc

SEQ ID NO: 1120863 - RNA, 18 nt, Human
agagcccaacccucugcc

SEQ ID NO: 1120864 - RNA, 18 nt, Human
agccaagacaugcacaua

SEQ ID NO: 1120865 - RNA, 20 nt, Human
agcccaacccucugcccuuc

SEQ ID NO: 1120866 - RNA, 22 nt, Human
agguccugggccagggcagcac

SEQ ID NO: 1120867 - RNA, 18 nt, Human
auaaaggaccagccccau

SEQ ID NO: 1120868 - RNA, 24 nt, Human
auacacacacgaagacacacaccc

SEQ ID NO: 1120869 - RNA, 27 nt, Human
auacacacauacccaccugugcacaca

SEQ ID NO: 1120870 - RNA, 23 nt, Human
auccagaacucacuccuuccgau

SEQ ID NO: 1120871 - RNA, 18 nt, Human
augaacacagacucccca

SEQ ID NO: 1120872 - RNA, 19 nt, Human
augaacacagacuccccac

SEQ ID NO: 1120873 - RNA, 26 nt, Human
augggguggagggacagcaggaagag

SEQ ID NO: 1120874 - RNA, 20 nt, Human
caaagcaguguggcccggac

SEQ ID NO: 1120875 - RNA, 21 nt, Human
caaggcaccucaagguaaggg

SEQ ID NO: 1120876 - RNA, 19 nt, Human
cacacccagaaacacuuca

SEQ ID NO: 1120877 - RNA, 18 nt, Human
cacacgaagacacacacc

SEQ ID NO: 1120878 - RNA, 21 nt, Human
cacagacuccccacacacacc

SEQ ID NO: 1120879 - RNA, 26 nt, Human
cacauacacacauacccaccugugca

SEQ ID NO: 1120880 - RNA, 25 nt, Human
cacauacaugaccaaaugugugcac

SEQ ID NO: 1120881 - RNA, 27 nt, Human
cacaugcaugcaaacacacgucacaua

SEQ ID NO: 1120882 - RNA, 22 nt, Human
caccagagagaccuaaacacac

SEQ ID NO: 1120883 - RNA, 22 nt, Human
caccaggaagaaggaauggcuc

SEQ ID NO: 1120884 - RNA, 22 nt, Human
cacccagaaacacuucacacac

SEQ ID NO: 1120885 - RNA, 24 nt, Human
cacccccagcgcccguaccagcuc

SEQ ID NO: 1120886 - RNA, 20 nt, Human
caccuggacaguggcauccc

SEQ ID NO: 1120887 - RNA, 30 nt, Human
cacgucacauacaugaccaaaugugugcag

SEQ ID NO: 1120888 - RNA, 20 nt, Human
cagacuccccacacacaccc

SEQ ID NO: 1120889 - RNA, 18 nt, Human
cagagcccaacccucugc

SEQ ID NO: 1120890 - RNA, 19 nt, Human
cagcacagccacuguuccc

SEQ ID NO: 1120891 - RNA, 18 nt, Human
cagcccucuuggcaauga

SEQ ID NO: 1120892 - RNA, 22 nt, Human
cagccuccagugccugccuccc

SEQ ID NO: 1120893 - RNA, 24 nt, Human
caggaccugccucugggguccagc

SEQ ID NO: 1120894 - RNA, 20 nt, Human
cauccccgaggcacccugca

SEQ ID NO: 1120895 - RNA, 24 nt, Human
caugaccaaaugugugcacacacc

SEQ ID NO: 1120896 - RNA, 27 nt, Human
caugcaaacacacgucacauacaugac

SEQ ID NO: 1120897 - RNA, 21 nt, Human
caugcagacagacuccacaua

SEQ ID NO: 1120898 - RNA, 23 nt, Human
caugcagacagacuccacauaga

SEQ ID NO: 1120899 - RNA, 20 nt, Human
cauguacguguccacaugug

SEQ ID NO: 1120900 - RNA, 25 nt, Human
ccaaaaaaacuacuuguauccaagu

SEQ ID NO: 1120901 - RNA, 21 nt, Human
ccaccgggcuccagcacagcc

SEQ ID NO: 1120902 - RNA, 20 nt, Human
ccagaccacagccuucaacc

SEQ ID NO: 1120903 - RNA, 21 nt, Human
ccagcacguguugaugugcca

SEQ ID NO: 1120904 - RNA, 18 nt, Human
ccagggccuggggacacc

SEQ ID NO: 1120905 - RNA, 19 nt, Human
ccauccuggcccacccacc

SEQ ID NO: 1120906 - RNA, 24 nt, Human
cccacacacacccaugccugggca

SEQ ID NO: 1120907 - RNA, 18 nt, Human
cccagaaacacuucacac

SEQ ID NO: 1120908 - RNA, 21 nt, Human
cccggacaccaacccaucaca

SEQ ID NO: 1120909 - RNA, 21 nt, Human
cccguaccagcucaccuccuc

SEQ ID NO: 1120910 - RNA, 19 nt, Human
cccucggaaacuagcugga

SEQ ID NO: 1120911 - RNA, 19 nt, Human
cccuucuaucucucuuucc

SEQ ID NO: 1120912 - RNA, 22 nt, Human
ccucagggagguccugggccag

SEQ ID NO: 1120913 - RNA, 25 nt, Human
ccugacuuccucauuggcgcuucca

SEQ ID NO: 1120914 - RNA, 19 nt, Human
ccuugacaccacgcuccuc

SEQ ID NO: 1120915 - RNA, 20 nt, Human
cggaucaucuccaaaaaaac

SEQ ID NO: 1120916 - RNA, 22 nt, Human
cguacacacucgcacaugcaug

SEQ ID NO: 1120917 - RNA, 22 nt, Human
cguacacacucgcacaugcaug

SEQ ID NO: 1120918 - RNA, 18 nt, Human
cguaccagcucaccuccu

SEQ ID NO: 1120919 - RNA, 20 nt, Human
cuccaaaaaaacuacuugua

SEQ ID NO: 1120920 - RNA, 24 nt, Human
cucgcacaugcaugcaaacacacg

SEQ ID NO: 1120921 - RNA, 18 nt, Human
cucuccuccagggccugg

SEQ ID NO: 1120922 - RNA, 21 nt, Human
cucugcccuuccucuccucca

SEQ ID NO: 1120923 - RNA, 20 nt, Human
cugacccccagcuccuggga

SEQ ID NO: 1120924 - RNA, 23 nt, Human
cugcaucaguccuuucauccccg

SEQ ID NO: 1120925 - RNA, 22 nt, Human
cuggggacaccuggacaguggc

SEQ ID NO: 1120926 - RNA, 21 nt, Human
cuggugcagcggcccacagug

SEQ ID NO: 1120927 - RNA, 24 nt, Human
cuuccucuccuccagggccugggg

SEQ ID NO: 1120928 - RNA, 21 nt, Human
cuugacaccacgcuccucagg

SEQ ID NO: 1120929 - RNA, 21 nt, Human
gacaugcacauacacacauag

SEQ ID NO: 1120930 - RNA, 29 nt, Human
gcacauacacacauacccaccugugcaca

SEQ ID NO: 1120931 - RNA, 19 nt, Human
gcaugcaaacacacgucac

SEQ ID NO: 1120932 - RNA, 21 nt, Human
gcccacccaccgggcuccagc

SEQ ID NO: 1120933 - RNA, 19 nt, Human
gcccggacaccaacccauc

SEQ ID NO: 1120934 - RNA, 18 nt, Human
gccuccuggggagugcuc

SEQ ID NO: 1120935 - RNA, 20 nt, Human
gcucuuaagccaccagggag

SEQ ID NO: 1120936 - RNA, 19 nt, Human
gcuuccggcugccuccugg

SEQ ID NO: 1120937 - RNA, 22 nt, Human
ggagggacugagcagcaagagu

SEQ ID NO: 1120938 - RNA, 19 nt, Human
gggacaggcucucgguagc

SEQ ID NO: 1120939 - RNA, 21 nt, Human
gggguccagcacagccacugu

SEQ ID NO: 1120940 - RNA, 20 nt, Human
ggguccagcacagccacugu

SEQ ID NO: 1120941 - RNA, 20 nt, Human
guacguguccacauguguuc

SEQ ID NO: 1120942 - RNA, 20 nt, Human
gucaagauauuuacaaagca

SEQ ID NO: 1120943 - RNA, 19 nt, Human
gugcagcggcccacagugg

SEQ ID NO: 1120944 - RNA, 19 nt, Human
guggcccggacaccaaccc

SEQ ID NO: 1120945 - RNA, 22 nt, Human
guggcccggacaccaacccauc

SEQ ID NO: 1120946 - RNA, 19 nt, Human
uacaugaccaaaugugugc

SEQ ID NO: 1120947 - RNA, 22 nt, Human
uacccaccugugcacacagagc

SEQ ID NO: 1120948 - RNA, 20 nt, Human
uagaagcagccaggcucugc

SEQ ID NO: 1120949 - RNA, 23 nt, Human
uagcagaggcggaaggagccaua

SEQ ID NO: 1120950 - RNA, 22 nt, Human
uagugggaugauucugagguuc

SEQ ID NO: 1120951 - RNA, 19 nt, Human
uccacauccagaacucacu

SEQ ID NO: 1120952 - RNA, 18 nt, Human
uccacauguguucuaagc

SEQ ID NO: 1120953 - RNA, 23 nt, Human
uccacggaucaucuccaaaaaaa

SEQ ID NO: 1120954 - RNA, 29 nt, Human
uccaggcagcucauaucaugcccagcccu

SEQ ID NO: 1120955 - RNA, 21 nt, Human
uccggcugccuccuggggagu

SEQ ID NO: 1120956 - RNA, 21 nt, Human
ucucagagucugcuuuugggg

SEQ ID NO: 1120957 - RNA, 24 nt, Human
ucucauucugugggcuuucuccag

SEQ ID NO: 1120958 - RNA, 23 nt, Human
ucuccagcacccucggaaacuag

SEQ ID NO: 1120959 - RNA, 20 nt, Human
ucucuuuccugacuuccuca

SEQ ID NO: 1120960 - RNA, 18 nt, Human
ucugcccuuccucuccuc

SEQ ID NO: 1120961 - RNA, 19 nt, Human
ugauguugacagcggccau

SEQ ID NO: 1120962 - RNA, 23 nt, Human
ugcaaaaugauuuccagccucca

SEQ ID NO: 1120963 - RNA, 27 nt, Human
ugcaugcaaacacacgucacauacaug

SEQ ID NO: 1120964 - RNA, 18 nt, Human
ugcccgugcaaaaugauu

SEQ ID NO: 1120965 - RNA, 21 nt, Human
ugcccuuccucuccuccaggg

SEQ ID NO: 1120966 - RNA, 18 nt, Human
ugccucugggguccagca

SEQ ID NO: 1120967 - RNA, 19 nt, Human
ugccugggcacacaugcgg

SEQ ID NO: 1120968 - RNA, 20 nt, Human
ugcugcacacgcucugaucu

SEQ ID NO: 1120969 - RNA, 19 nt, Human
uggaaaacaacccacgccu

SEQ ID NO: 1120970 - RNA, 18 nt, Human
uggaaugggguggaggga

SEQ ID NO: 1120971 - RNA, 21 nt, Human
uggaaugggguggagggacag

SEQ ID NO: 1120972 - RNA, 21 nt, Human
uggaggaagauccuguuggcc

SEQ ID NO: 1120973 - RNA, 21 nt, Human
uggccaucuuugagauaauac

SEQ ID NO: 1120974 - RNA, 24 nt, Human
uggcccacccaccgggcuccagca

SEQ ID NO: 1120975 - RNA, 24 nt, Human
uggcucuuaagccaccagggagaa

SEQ ID NO: 1120976 - RNA, 24 nt, Human
ugggacagagcccaacccucugcc

SEQ ID NO: 1120977 - RNA, 19 nt, Human
ugggagggacugagcagca

SEQ ID NO: 1120978 - RNA, 18 nt, Human
ugggaugauucugagguu

SEQ ID NO: 1120979 - RNA, 22 nt, Human
ugggaugauucugagguucuac

SEQ ID NO: 1120980 - RNA, 21 nt, Human
ugucucagagucugcuuuugg

SEQ ID NO: 1120981 - RNA, 23 nt, Human
ugucucagagucugcuuuugggg

SEQ ID NO: 1120982 - RNA, 23 nt, Human
ugugugcacacaccaagacggug

SEQ ID NO: 1120983 - RNA, 23 nt, Human
uuccagccuccagugccugccuc

SEQ ID NO: 1120984 - RNA, 23 nt, Human
uuccggggaagcccccuccaaug

SEQ ID NO: 1120985 - RNA, 20 nt, Human
uuccuccacauccagaacuc

SEQ ID NO: 1120986 - RNA, 18 nt, Human
uuccucuccuccagggcc

SEQ ID NO: 1120987 - RNA, 24 nt, Human
uugacuuuucucccuucuaucucu

SEQ ID NO: 1120988 - RNA, 21 nt, Human
uugggcccggagcccuccauu

SEQ ID NO: 1120989 - RNA, 19 nt, Human
acucaucccaggucuccug

SEQ ID NO: 1120990 - RNA, 18 nt, Human
caggucuccugaaggacc

SEQ ID NO: 1120991 - RNA, 21 nt, Human
uaaccgggaaggacggugcgg

SEQ ID NO: 1120992 - RNA, 22 nt, Human
uuuuggggaagcaccacucauc

SEQ ID NO: 1120993 - RNA, 21 nt, Human
aaaaaagaaaaacaaccaaaa

SEQ ID NO: 1120994 - RNA, 27 nt, Human
aaaaaagaaaaacaaccaaaacaagcc

SEQ ID NO: 1120995 - RNA, 20 nt, Human
aacuuuguuuagguccuugu

SEQ ID NO: 1120996 - RNA, 19 nt, Human
agaaaaacaaccaaaacaa

SEQ ID NO: 1120997 - RNA, 21 nt, Human
aguacagucuauuaaaaugcc

SEQ ID NO: 1120998 - RNA, 19 nt, Human
caacaaacaacaaagguuu

SEQ ID NO: 1120999 - RNA, 24 nt, Human
cacaauaccaacaaagaauacgga

SEQ ID NO: 1121000 - RNA, 21 nt, Human
cagcuauaucuuaaacuccaa

SEQ ID NO: 1121001 - RNA, 22 nt, Human
cauaagcaaugcuacugcaucu

SEQ ID NO: 1121002 - RNA, 24 nt, Human
caugucacauugcaaguauauaua

SEQ ID NO: 1121003 - RNA, 23 nt, Human
ccacacugccaccgacaugaaua

SEQ ID NO: 1121004 - RNA, 23 nt, Human
ccauugcagcaguugucugcaug

SEQ ID NO: 1121005 - RNA, 20 nt, Human
cuaaauauaaacucugcacu

SEQ ID NO: 1121006 - RNA, 18 nt, Human
cuauauaaaggaaaagaa

SEQ ID NO: 1121007 - RNA, 19 nt, Human
cucauagcaauacuguuga

SEQ ID NO: 1121008 - RNA, 19 nt, Human
cugcauguguugcggugaa

SEQ ID NO: 1121009 - RNA, 18 nt, Human
gaaauuauauuauguuca

SEQ ID NO: 1121010 - RNA, 18 nt, Human
gaccugaacugaugggaa

SEQ ID NO: 1121011 - RNA, 19 nt, Human
gcacauuaaaaaaaauggu

SEQ ID NO: 1121012 - RNA, 20 nt, Human
gcagcaguugucugcaugug

SEQ ID NO: 1121013 - RNA, 19 nt, Human
gcugaucugcaggcuggag

SEQ ID NO: 1121014 - RNA, 19 nt, Human
guggcacaauaccaacaaa

SEQ ID NO: 1121015 - RNA, 18 nt, Human
guuauuugguguuggaag

SEQ ID NO: 1121016 - RNA, 19 nt, Human
uaaaaugccuuauuuggag

SEQ ID NO: 1121017 - RNA, 20 nt, Human
uaaacauauguaacauaagc

SEQ ID NO: 1121018 - RNA, 28 nt, Human
uaaaggaaaagaacuucucaaaaacaau

SEQ ID NO: 1121019 - RNA, 25 nt, Human
uaaauauaaugcuggucagcaaugc

SEQ ID NO: 1121020 - RNA, 23 nt, Human
uaauaaaucucacaacaaugcac

SEQ ID NO: 1121021 - RNA, 22 nt, Human
uauauuauguucagauauuuca

SEQ ID NO: 1121022 - RNA, 22 nt, Human
ucagugguuuccuuaaaacuag

SEQ ID NO: 1121023 - RNA, 22 nt, Human
uccaaauacauacuuuuuacaa

SEQ ID NO: 1121024 - RNA, 23 nt, Human
uccuaaaaaagaaaaacaaccaa

SEQ ID NO: 1121025 - RNA, 24 nt, Human
ucuacagaaccaugucacauugca

SEQ ID NO: 1121026 - RNA, 20 nt, Human
ugaauauaaacauauguaac

SEQ ID NO: 1121027 - RNA, 19 nt, Human
ugcaaauaaacaaaaaaau

SEQ ID NO: 1121028 - RNA, 20 nt, Human
ugcaggcuggagccccuggu

SEQ ID NO: 1121029 - RNA, 22 nt, Human
ugcugguuuaagaagcaguaca

SEQ ID NO: 1121030 - RNA, 19 nt, Human
uggaauuuccacacugcca

SEQ ID NO: 1121031 - RNA, 18 nt, Human
uggagccccuggucugga

SEQ ID NO: 1121032 - RNA, 18 nt, Human
uggcacaauaccaacaaa

SEQ ID NO: 1121033 - RNA, 19 nt, Human
uggcacaauaccaacaaag

SEQ ID NO: 1121034 - RNA, 18 nt, Human
uggcugaucugcaggcug

SEQ ID NO: 1121035 - RNA, 19 nt, Human
ugggaagacaugccaaauc

SEQ ID NO: 1121036 - RNA, 23 nt, Human
ugggaagacaugccaaauccauu

SEQ ID NO: 1121037 - RNA, 20 nt, Human
uuuaauaaaucucacaacaa

SEQ ID NO: 1121038 - RNA, 21 nt, Human
uuuccuuauaaaaucuuuuua

SEQ ID NO: 1121039 - RNA, 22 nt, Human
aacccaucuuugcaugugggca

SEQ ID NO: 1121040 - RNA, 24 nt, Human
aggcaauucccaaagaggacugaa

SEQ ID NO: 1121041 - RNA, 21 nt, Human
agugaucuugggugaggugac

SEQ ID NO: 1121042 - RNA, 26 nt, Human
caccaucagcaacugggggaguaguc

SEQ ID NO: 1121043 - RNA, 20 nt, Human
cagaguagucucaaguuggg

SEQ ID NO: 1121044 - RNA, 22 nt, Human
cugaaaacugagggcugaccac

SEQ ID NO: 1121045 - RNA, 20 nt, Human
ucagaaugugcuguucucau

SEQ ID NO: 1121046 - RNA, 21 nt, Human
ugagggcugaccacaccauca

SEQ ID NO: 1121047 - RNA, 24 nt, Human
ugauauacuacaccacaucagaau

SEQ ID NO: 1121048 - RNA, 19 nt, Human
ugggggaguagucuccaau

SEQ ID NO: 1121049 - RNA, 21 nt, Human
uugggugaggugacuuucuuc

SEQ ID NO: 1121050 - RNA, 26 nt, Human
aagaacaagcuuugacuuaggcucug

SEQ ID NO: 1121051 - RNA, 27 nt, Human
aggaagacauaccauucacuggaagga

SEQ ID NO: 1121052 - RNA, 24 nt, Human
ccagcuguucucacaagugcguca

SEQ ID NO: 1121053 - RNA, 19 nt, Human
ccuggguccaagaacaagc

SEQ ID NO: 1121054 - RNA, 18 nt, Human
gauauaucagcucugaaa

SEQ ID NO: 1121055 - RNA, 26 nt, Human
ggcuggaagcuagcugucccgccgac

SEQ ID NO: 1121056 - RNA, 26 nt, Human
uaggaagacauaccauucacuggaag

SEQ ID NO: 1121057 - RNA, 18 nt, Human
uggaagcuagcuguccuu

SEQ ID NO: 1121058 - RNA, 22 nt, Human
uggaaggauuugacauauuucc

SEQ ID NO: 1121059 - RNA, 24 nt, Human
uggaaggauuugacauauuuccug

SEQ ID NO: 1121060 - RNA, 19 nt, Human
uuuccuggguccaagaaca

SEQ ID NO: 1121061 - RNA, 22 nt, Human
aaaagaaaagaaguuuggggaa

SEQ ID NO: 1121062 - RNA, 25 nt, Human
aaacagggugacacagaccggaccc

SEQ ID NO: 1121063 - RNA, 18 nt, Human
aaacauagcacacaaugu

SEQ ID NO: 1121064 - RNA, 23 nt, Human
aaacauagcacacaauguguugc

SEQ ID NO: 1121065 - RNA, 26 nt, Human
aacccccagcauaacucccacccaag

SEQ ID NO: 1121066 - RNA, 22 nt, Human
aagacaaaucccacacacccuc

SEQ ID NO: 1121067 - RNA, 19 nt, Human
aagcagcaauucucucuca

SEQ ID NO: 1121068 - RNA, 24 nt, Human
aaucccaccacacacgccaagaag

SEQ ID NO: 1121069 - RNA, 20 nt, Human
acagguuucagaugggagcu

SEQ ID NO: 1121070 - RNA, 23 nt, Human
accccaaucccaccacacacgcc

SEQ ID NO: 1121071 - RNA, 18 nt, Human
accuacucccccacacca

SEQ ID NO: 1121072 - RNA, 21 nt, Human
accuuguggccuuccagccuc

SEQ ID NO: 1121073 - RNA, 21 nt, Human
agaaaaagggcauggccaugg

SEQ ID NO: 1121074 - RNA, 21 nt, Human
agaaaugcaccucuccgucuc

SEQ ID NO: 1121075 - RNA, 21 nt, Human
agacaaaucccacacacccuc

SEQ ID NO: 1121076 - RNA, 22 nt, Human
agauugacaaacagggugacac

SEQ ID NO: 1121077 - RNA, 20 nt, Human
agcugaagacaaaucccaca

SEQ ID NO: 1121078 - RNA, 22 nt, Human
aggccucucccaucucagucuc

SEQ ID NO: 1121079 - RNA, 19 nt, Human
aucccacacacccuccagc

SEQ ID NO: 1121080 - RNA, 21 nt, Human
augcagcaucauaaaacaaag

SEQ ID NO: 1121081 - RNA, 24 nt, Human
caacccccagcauaacucccaccc

SEQ ID NO: 1121082 - RNA, 20 nt, Human
caacccccagcauaacuccu

SEQ ID NO: 1121083 - RNA, 22 nt, Human
caagaagccccuaggagcccga

SEQ ID NO: 1121084 - RNA, 24 nt, Human
caagaagccccuaggagcccgaug

SEQ ID NO: 1121085 - RNA, 20 nt, Human
cacacacccuccagccccuc

SEQ ID NO: 1121086 - RNA, 20 nt, Human
cacacacgccaagaagcccc

SEQ ID NO: 1121087 - RNA, 20 nt, Human
cacacccuccagccccuccc

SEQ ID NO: 1121088 - RNA, 24 nt, Human
cacagguuucagaugggagcuggg

SEQ ID NO: 1121089 - RNA, 20 nt, Human
caccacacacgccaagaagc

SEQ ID NO: 1121090 - RNA, 27 nt, Human
caccccuccucagcugaaaauagccca

SEQ ID NO: 1121091 - RNA, 19 nt, Human
caccuuguggccuuccagc

SEQ ID NO: 1121092 - RNA, 19 nt, Human
caccuuguggccuuccagc

SEQ ID NO: 1121093 - RNA, 21 nt, Human
caccuuguggccuuccagccu

SEQ ID NO: 1121094 - RNA, 23 nt, Human
cacgccaagaagccccuaggagc

SEQ ID NO: 1121095 - RNA, 19 nt, Human
cacgcuccucuccaggcua

SEQ ID NO: 1121096 - RNA, 21 nt, Human
cacugaugcucagaagggcuc

SEQ ID NO: 1121097 - RNA, 26 nt, Human
cagcaauucucucucaggagaggucu

SEQ ID NO: 1121098 - RNA, 21 nt, Human
cauucuguuccuuagcaagca

SEQ ID NO: 1121099 - RNA, 19 nt, Human
ccacacacgccaagaagcu

SEQ ID NO: 1121100 - RNA, 21 nt, Human
ccagccccucccauuugagaa

SEQ ID NO: 1121101 - RNA, 21 nt, Human
ccagccuccgcucccaggaac

SEQ ID NO: 1121102 - RNA, 20 nt, Human
ccagucaccagcagaaaugc

SEQ ID NO: 1121103 - RNA, 23 nt, Human
ccagucaccagcagaaaugcacc

SEQ ID NO: 1121104 - RNA, 23 nt, Human
cccacaccacugaugcucagaag

SEQ ID NO: 1121105 - RNA, 18 nt, Human
cccacgguacagagcagc

SEQ ID NO: 1121106 - RNA, 21 nt, Human
cccacgguacagagcagccac

SEQ ID NO: 1121107 - RNA, 25 nt, Human
ccccaaucccaccacacacgccaag

SEQ ID NO: 1121108 - RNA, 25 nt, Human
ccccuaggagcccgaugccucccuu

SEQ ID NO: 1121109 - RNA, 24 nt, Human
ccccuccucagcugaaaauagccc

SEQ ID NO: 1121110 - RNA, 23 nt, Human
cccuaggagcccgaugccucccu

SEQ ID NO: 1121111 - RNA, 21 nt, Human
cccugcagacuuggccuugac

SEQ ID NO: 1121112 - RNA, 22 nt, Human
ccucauucuggucccuccucca

SEQ ID NO: 1121113 - RNA, 23 nt, Human
ccucauucuggucccuccuccag

SEQ ID NO: 1121114 - RNA, 28 nt, Human
ccuccagucaccagcagaaaugcaccuc

SEQ ID NO: 1121115 - RNA, 24 nt, Human
ccuccuccagucaccagcagaaau

SEQ ID NO: 1121116 - RNA, 24 nt, Human
ccucuccgucucaggccucuccca

SEQ ID NO: 1121117 - RNA, 19 nt, Human
cgguacagagcagccacuc

SEQ ID NO: 1121118 - RNA, 21 nt, Human
cguguauaaauagccugugua

SEQ ID NO: 1121119 - RNA, 20 nt, Human
cuaaauaagaugauguccuc

SEQ ID NO: 1121120 - RNA, 19 nt, Human
cuaggagcccgaugccucc

SEQ ID NO: 1121121 - RNA, 22 nt, Human
cucccccacaccacugaugcuc

SEQ ID NO: 1121122 - RNA, 23 nt, Human
cucccuagaggaccgcacucccu

SEQ ID NO: 1121123 - RNA, 21 nt, Human
cuccgucucaggccucuccca

SEQ ID NO: 1121124 - RNA, 21 nt, Human
cugagcucugagcugucuggg

SEQ ID NO: 1121125 - RNA, 22 nt, Human
cugccgggucuauuucucacgu

SEQ ID NO: 1121126 - RNA, 19 nt, Human
cuugacucugggucauucu

SEQ ID NO: 1121127 - RNA, 19 nt, Human
cuuggccuugacucugggu

SEQ ID NO: 1121128 - RNA, 20 nt, Human
cuuguggccuuccagccucc

SEQ ID NO: 1121129 - RNA, 23 nt, Human
gaaaauagcccagcaggcucaag

SEQ ID NO: 1121130 - RNA, 21 nt, Human
gaagcagcaauucucucucag

SEQ ID NO: 1121131 - RNA, 21 nt, Human
gaccaauugauuugcauuuaa

SEQ ID NO: 1121132 - RNA, 20 nt, Human
gacucugggucauucuguuc

SEQ ID NO: 1121133 - RNA, 21 nt, Human
gcaagcaccuuguggccuucc

SEQ ID NO: 1121134 - RNA, 19 nt, Human
gcacagcuagcgaagcgac

SEQ ID NO: 1121135 - RNA, 21 nt, Human
gccuguguauguuaaacagua

SEQ ID NO: 1121136 - RNA, 19 nt, Human
gcgacucgagggucagcga

SEQ ID NO: 1121137 - RNA, 20 nt, Human
gcucccagcugcugcgugau

SEQ ID NO: 1121138 - RNA, 19 nt, Human
gcuuucaacaggucccugc

SEQ ID NO: 1121139 - RNA, 19 nt, Human
ggaccccaaucccaccaca

SEQ ID NO: 1121140 - RNA, 24 nt, Human
gguuucagaugggagcuggggacg

SEQ ID NO: 1121141 - RNA, 21 nt, Human
guacagagcagccacuccaca

SEQ ID NO: 1121142 - RNA, 19 nt, Human
gucugcacgcuccucucca

SEQ ID NO: 1121143 - RNA, 22 nt, Human
uaaacaguagaaaagaaaagaa

SEQ ID NO: 1121144 - RNA, 24 nt, Human
uacacaaacaccauucauaaaccu

SEQ ID NO: 1121145 - RNA, 22 nt, Human
ucaccccuccucagcugaaaau

SEQ ID NO: 1121146 - RNA, 21 nt, Human
ucagaugggagcuggggacgu

SEQ ID NO: 1121147 - RNA, 25 nt, Human
ucauucuggucccuccuccagucac

SEQ ID NO: 1121148 - RNA, 19 nt, Human
uccaggcuagugcccagga

SEQ ID NO: 1121149 - RNA, 29 nt, Human
ucccaccacacacgccaagaagccccuag

SEQ ID NO: 1121150 - RNA, 18 nt, Human
ucccugcagacuuggccu

SEQ ID NO: 1121151 - RNA, 19 nt, Human
ucgaaugccaaagauugac

SEQ ID NO: 1121152 - RNA, 19 nt, Human
ucgaccuaaacaguacaaa

SEQ ID NO: 1121153 - RNA, 23 nt, Human
ucugagcucugagcugucugggg

SEQ ID NO: 1121154 - RNA, 23 nt, Human
ucuugggcagccaagacauucuc

SEQ ID NO: 1121155 - RNA, 22 nt, Human
ugacaaacagggugacacagac

SEQ ID NO: 1121156 - RNA, 21 nt, Human
ugacugccugccgggucuauu

SEQ ID NO: 1121157 - RNA, 22 nt, Human
ugagguggcaaaagaagaauac

SEQ ID NO: 1121158 - RNA, 20 nt, Human
ugauuugcauuuaaagacuc

SEQ ID NO: 1121159 - RNA, 19 nt, Human
ugccaaagauugacaaaca

SEQ ID NO: 1121160 - RNA, 20 nt, Human
ugccaaagauugacaaacag

SEQ ID NO: 1121161 - RNA, 20 nt, Human
uggaagaaaggcaacaagaa

SEQ ID NO: 1121162 - RNA, 21 nt, Human
uguauaaauagccuguguaug

SEQ ID NO: 1121163 - RNA, 22 nt, Human
uguauaaauagccuguguaugu

SEQ ID NO: 1121164 - RNA, 19 nt, Human
ugugguggagaacuaacac

SEQ ID NO: 1121165 - RNA, 18 nt, Human
ugugguggagaacuaacc

SEQ ID NO: 1121166 - RNA, 22 nt, Human
uguuucgucaccuacuccccca

SEQ ID NO: 1121167 - RNA, 18 nt, Human
uucaccccuccucagcug

SEQ ID NO: 1121168 - RNA, 18 nt, Human
uucauaaaccugagucac

SEQ ID NO: 1121169 - RNA, 24 nt, Human
uucgucaccuacucccccacacca

SEQ ID NO: 1121170 - RNA, 21 nt, Human
uugcuacacaaacaccauuca

SEQ ID NO: 1121171 - RNA, 22 nt, Human
uuuaaagacucugugaugguuu

SEQ ID NO: 1121172 - RNA, 22 nt, Human
uuuacaacccccagcauaacuc

SEQ ID NO: 1121173 - RNA, 20 nt, Human
uuucugagcucugagcuguc

SEQ ID NO: 1121174 - RNA, 23 nt, Human
aaacaccacaaaucuaccaucuu

SEQ ID NO: 1121175 - RNA, 24 nt, Human
aaagugcugggauuacaggcguga

SEQ ID NO: 1121176 - RNA, 20 nt, Human
aaaguucugggauuacaggc

SEQ ID NO: 1121177 - RNA, 24 nt, Human
aaaguucugggauuacaggcguga

SEQ ID NO: 1121178 - RNA, 21 nt, Human
aacaccacaaaucuaccaucu

SEQ ID NO: 1121179 - RNA, 19 nt, Human
aaccguaacaugagguccc

SEQ ID NO: 1121180 - RNA, 19 nt, Human
aagaguuagagaucagccu

SEQ ID NO: 1121181 - RNA, 26 nt, Human
aagccacccccauuccuugacuuacc

SEQ ID NO: 1121182 - RNA, 21 nt, Human
aagcgauccucccaccucagc

SEQ ID NO: 1121183 - RNA, 25 nt, Human
aagcgauccucccaccucagccucc

SEQ ID NO: 1121184 - RNA, 19 nt, Human
aaguagcugggauuacagg

SEQ ID NO: 1121185 - RNA, 25 nt, Human
aaguagcugggauuacaggcaccca

SEQ ID NO: 1121186 - RNA, 19 nt, Human
aagugcugggauuacaggc

SEQ ID NO: 1121187 - RNA, 19 nt, Human
aagugcugggauuacaggc

SEQ ID NO: 1121188 - RNA, 26 nt, Human
aagugcugggauuacaggcgugagcc

SEQ ID NO: 1121189 - RNA, 22 nt, Human
acaaccuccaccucccggguuc

SEQ ID NO: 1121190 - RNA, 21 nt, Human
acaggcacccaccaccacacc

SEQ ID NO: 1121191 - RNA, 24 nt, Human
acaggcgugagcaaccguaacaug

SEQ ID NO: 1121192 - RNA, 24 nt, Human
accaucuuggcuaggcuggucuug

SEQ ID NO: 1121193 - RNA, 23 nt, Human
accauguuggucaggcuggucuc

SEQ ID NO: 1121194 - RNA, 26 nt, Human
accucgugacuccauauucaaggcca

SEQ ID NO: 1121195 - RNA, 19 nt, Human
accucgugauccacccucc

SEQ ID NO: 1121196 - RNA, 22 nt, Human
agaggaaggauugcuugaggcc

SEQ ID NO: 1121197 - RNA, 20 nt, Human
agccaccgcaccuggcccca

SEQ ID NO: 1121198 - RNA, 21 nt, Human
agcugccagagaaagcaacca

SEQ ID NO: 1121199 - RNA, 22 nt, Human
agcugccagagaaagcaaccac

SEQ ID NO: 1121200 - RNA, 23 nt, Human
agcuggacauggugaugcaugcc

SEQ ID NO: 1121201 - RNA, 19 nt, Human
aggaggagggcuagcugcc

SEQ ID NO: 1121202 - RNA, 18 nt, Human
aggcuaaggugggaggau

SEQ ID NO: 1121203 - RNA, 22 nt, Human
aguagagaugggguuucaccau

SEQ ID NO: 1121204 - RNA, 23 nt, Human
aguagcuggaauuauagggaugu

SEQ ID NO: 1121205 - RNA, 18 nt, Human
agugcugggauuacaggc

SEQ ID NO: 1121206 - RNA, 24 nt, Human
agugguccaugugccucagccuuc

SEQ ID NO: 1121207 - RNA, 18 nt, Human
aguucugggauuacaggc

SEQ ID NO: 1121208 - RNA, 22 nt, Human
aucccaacauuuugggaggcca

SEQ ID NO: 1121209 - RNA, 20 nt, Human
augggguuucaccaucuugg

SEQ ID NO: 1121210 - RNA, 22 nt, Human
augggguuucaccaucuuggcu

SEQ ID NO: 1121211 - RNA, 24 nt, Human
augggguuucaccaucuuggcuag

SEQ ID NO: 1121212 - RNA, 21 nt, Human
augggguuucaccauguuggu

SEQ ID NO: 1121213 - RNA, 23 nt, Human
augggguuucaccauguugguca

SEQ ID NO: 1121214 - RNA, 24 nt, Human
augggguuucaccauguuggucag

SEQ ID NO: 1121215 - RNA, 24 nt, Human
auguuuguauuuuuaguagagaug

SEQ ID NO: 1121216 - RNA, 21 nt, Human
auuuuuuguuguugcuacaac

SEQ ID NO: 1121217 - RNA, 26 nt, Human
caaacucuugaccucaagugguccaa

SEQ ID NO: 1121218 - RNA, 24 nt, Human
caaacugcuaggauuacaggagug

SEQ ID NO: 1121219 - RNA, 24 nt, Human
caaagugcugggauuacaggcgug

SEQ ID NO: 1121220 - RNA, 21 nt, Human
caacauuuugggaggccaaag

SEQ ID NO: 1121221 - RNA, 23 nt, Human
caaccuccaccucccggguucaa

SEQ ID NO: 1121222 - RNA, 22 nt, Human
caagcaauucuccugccucggc

SEQ ID NO: 1121223 - RNA, 19 nt, Human
caagugauucucugccucc

SEQ ID NO: 1121224 - RNA, 20 nt, Human
caagugguccaugugccuca

SEQ ID NO: 1121225 - RNA, 22 nt, Human
caagugguccaugugccucagc

SEQ ID NO: 1121226 - RNA, 21 nt, Human
caccaucuuggcuaggcuggu

SEQ ID NO: 1121227 - RNA, 24 nt, Human
caccaucuuggcuaggcuggucuu

SEQ ID NO: 1121228 - RNA, 21 nt, Human
caccauguuggucaggcuggu

SEQ ID NO: 1121229 - RNA, 24 nt, Human
caccauguuggucaggcuggucuc

SEQ ID NO: 1121230 - RNA, 18 nt, Human
cacccaccaccacaccug

SEQ ID NO: 1121231 - RNA, 24 nt, Human
caccucagccuccuaaaguucugg

SEQ ID NO: 1121232 - RNA, 21 nt, Human
cacuacaaccuccaccucccg

SEQ ID NO: 1121233 - RNA, 23 nt, Human
cacugcaaugucugccuuuuggg

SEQ ID NO: 1121234 - RNA, 21 nt, Human
cagcuucuagaagccaccccc

SEQ ID NO: 1121235 - RNA, 22 nt, Human
caguucugggggccagaagccc

SEQ ID NO: 1121236 - RNA, 22 nt, Human
caucuguaaucccaacauuuug

SEQ ID NO: 1121237 - RNA, 24 nt, Human
cauuauguuguccaggcuggucuu

SEQ ID NO: 1121238 - RNA, 22 nt, Human
ccaaagugcugggauuacaggc

SEQ ID NO: 1121239 - RNA, 22 nt, Human
ccaaagugcugggauuacaggc

SEQ ID NO: 1121240 - RNA, 24 nt, Human
ccaaagugcugggauuacaggcgu

SEQ ID NO: 1121241 - RNA, 23 nt, Human
ccaaguagcugggauuacaggca

SEQ ID NO: 1121242 - RNA, 20 nt, Human
ccaccacaccuggcuaaugu

SEQ ID NO: 1121243 - RNA, 19 nt, Human
ccacccccauuccuugacu

SEQ ID NO: 1121244 - RNA, 18 nt, Human
ccaccgcaccuggcccca

SEQ ID NO: 1121245 - RNA, 27 nt, Human
ccaccucccggguucaagcaauucuuu

SEQ ID NO: 1121246 - RNA, 24 nt, Human
cccaacauuuugggaggccaaaga

SEQ ID NO: 1121247 - RNA, 23 nt, Human
cccaaguagcugggauuacaggc

SEQ ID NO: 1121248 - RNA, 24 nt, Human
cccaaguagcugggauuacaggca

SEQ ID NO: 1121249 - RNA, 19 nt, Human
cccgaguagcuggaauuau

SEQ ID NO: 1121250 - RNA, 23 nt, Human
cccggguucaagcaauucuccug

SEQ ID NO: 1121251 - RNA, 25 nt, Human
ccucaccugcugaacuccaggaggc

SEQ ID NO: 1121252 - RNA, 23 nt, Human
ccucccaccucagccuccuaaag

SEQ ID NO: 1121253 - RNA, 24 nt, Human
ccucccggguucaagcaauucucc

SEQ ID NO: 1121254 - RNA, 21 nt, Human
ccucgugauccacccuccucg

SEQ ID NO: 1121255 - RNA, 18 nt, Human
ccucucugaccucuucuu

SEQ ID NO: 1121256 - RNA, 23 nt, Human
ccugccucggccucccgaguagc

SEQ ID NO: 1121257 - RNA, 20 nt, Human
ccugggcuuaagcgauccuc

SEQ ID NO: 1121258 - RNA, 18 nt, Human
ccuguaguuccagcuacu

SEQ ID NO: 1121259 - RNA, 21 nt, Human
ccuuuuggguucaagugauuc

SEQ ID NO: 1121260 - RNA, 24 nt, Human
cuaaaguucugggauuacaggcgu

SEQ ID NO: 1121261 - RNA, 23 nt, Human
cuacaaccuccaccucccggguu

SEQ ID NO: 1121262 - RNA, 23 nt, Human
cucaagugguccaugugccucag

SEQ ID NO: 1121263 - RNA, 19 nt, Human
cucaccugcugaacuccag

SEQ ID NO: 1121264 - RNA, 24 nt, Human
cucacuacaaccuccaccucccgg

SEQ ID NO: 1121265 - RNA, 25 nt, Human
cucacuacaaccuccaccucccggg

SEQ ID NO: 1121266 - RNA, 19 nt, Human
cucacugcaaugucugccu

SEQ ID NO: 1121267 - RNA, 25 nt, Human
cucagccuccuaaaguucugggauu

SEQ ID NO: 1121268 - RNA, 23 nt, Human
cuccugggcuuaagcgauccucc

SEQ ID NO: 1121269 - RNA, 19 nt, Human
cucggucgcccaggcugaa

SEQ ID NO: 1121270 - RNA, 24 nt, Human
cucuccuaccucauucucuuauaa

SEQ ID NO: 1121271 - RNA, 18 nt, Human
cucuuguagcccaggcug

SEQ ID NO: 1121272 - RNA, 19 nt, Human
cucuuguagcccaggcugg

SEQ ID NO: 1121273 - RNA, 22 nt, Human
cucuuguagcccaggcuggagu

SEQ ID NO: 1121274 - RNA, 23 nt, Human
cugccucggccucccgaguagcu

SEQ ID NO: 1121275 - RNA, 23 nt, Human
cugccuuuuggguucaagugauu

SEQ ID NO: 1121276 - RNA, 23 nt, Human
cugggggccagaagcccaacuag

SEQ ID NO: 1121277 - RNA, 21 nt, Human
cuguaaucccaacauuuuggg

SEQ ID NO: 1121278 - RNA, 22 nt, Human
cuucaaaucucccucucugacc

SEQ ID NO: 1121279 - RNA, 21 nt, Human
cuuccaaacugcuaggauuac

SEQ ID NO: 1121280 - RNA, 21 nt, Human
cuucuagaagccacccccauu

SEQ ID NO: 1121281 - RNA, 18 nt, Human
cuucugaccucgugaucc

SEQ ID NO: 1121282 - RNA, 21 nt, Human
cuugaccucaagugguccaug

SEQ ID NO: 1121283 - RNA, 19 nt, Human
cuuguagcccaggcuggag

SEQ ID NO: 1121284 - RNA, 24 nt, Human
cuuguagcccaggcuggagugcaa

SEQ ID NO: 1121285 - RNA, 25 nt, Human
cuuucagccucaccugcugaacucc

SEQ ID NO: 1121286 - RNA, 24 nt, Human
gaaaugggguuucaccauguuggu

SEQ ID NO: 1121287 - RNA, 24 nt, Human
gaccucaagugguccaugugccuc

SEQ ID NO: 1121288 - RNA, 22 nt, Human
gaccucgugauccacccuccuc

SEQ ID NO: 1121289 - RNA, 22 nt, Human
gaccucgugauccacccuccuc

SEQ ID NO: 1121290 - RNA, 24 nt, Human
gaccucgugauccacccuccucgg

SEQ ID NO: 1121291 - RNA, 21 nt, Human
gaccucuucuuccauuaccac

SEQ ID NO: 1121292 - RNA, 18 nt, Human
gagaugggguuucaccau

SEQ ID NO: 1121293 - RNA, 24 nt, Human
gagaugggguuucaccaucuuggc

SEQ ID NO: 1121294 - RNA, 18 nt, Human
gauuacaggagugagcca

SEQ ID NO: 1121295 - RNA, 18 nt, Human
gauuacaggcgugagcca

SEQ ID NO: 1121296 - RNA, 22 nt, Human
gauuacaggcgugagccacugc

SEQ ID NO: 1121297 - RNA, 22 nt, Human
gauuacaggcgugagccacugc

SEQ ID NO: 1121298 - RNA, 23 nt, Human
gauugcuugaggccaagaguuag

SEQ ID NO: 1121299 - RNA, 19 nt, Human
gcaucaaacaccacaaauc

SEQ ID NO: 1121300 - RNA, 21 nt, Human
gccacaacgccuagcuaacug

SEQ ID NO: 1121301 - RNA, 19 nt, Human
gcccaggcuggagugcaau

SEQ ID NO: 1121302 - RNA, 23 nt, Human
gcccaggcuggagugcaauggca

SEQ ID NO: 1121303 - RNA, 21 nt, Human
gccucggccucccgaguagcu

SEQ ID NO: 1121304 - RNA, 23 nt, Human
gccuggggaaaaaaaggaagauc

SEQ ID NO: 1121305 - RNA, 23 nt, Human
gcuacaacaaaguacccuacauu

SEQ ID NO: 1121306 - RNA, 20 nt, Human
gcucacugcaaugucugccu

SEQ ID NO: 1121307 - RNA, 19 nt, Human
gcucuuguagcccaggcug

SEQ ID NO: 1121308 - RNA, 20 nt, Human
gcucuuguagcccaggcugg

SEQ ID NO: 1121309 - RNA, 24 nt, Human
gcucuuguagcccaggcuggagug

SEQ ID NO: 1121310 - RNA, 19 nt, Human
gcuggagugcaauggcaca

SEQ ID NO: 1121311 - RNA, 22 nt, Human
ggaugcuguugagcuaacaggg

SEQ ID NO: 1121312 - RNA, 22 nt, Human
ggauuacaggagugagccaccg

SEQ ID NO: 1121313 - RNA, 21 nt, Human
ggccaaagaggaaggauugcu

SEQ ID NO: 1121314 - RNA, 24 nt, Human
ggcuggucuugaacuucugaccuc

SEQ ID NO: 1121315 - RNA, 19 nt, Human
gggguuucaccaucuuggc

SEQ ID NO: 1121316 - RNA, 22 nt, Human
gggguuucaccauguuggucag

SEQ ID NO: 1121317 - RNA, 19 nt, Human
ggguucaagugauucucug

SEQ ID NO: 1121318 - RNA, 22 nt, Human
ggguuucaccaucuuggcuagg

SEQ ID NO: 1121319 - RNA, 22 nt, Human
ggguuucaccauguuggucagg

SEQ ID NO: 1121320 - RNA, 24 nt, Human
ggucucauuauguuguccaggcug

SEQ ID NO: 1121321 - RNA, 20 nt, Human
ggucuugaacuucugaccuc

SEQ ID NO: 1121322 - RNA, 18 nt, Human
guagcugggauuacaggc

SEQ ID NO: 1121323 - RNA, 24 nt, Human
gugauccacccuccucggccuccc

SEQ ID NO: 1121324 - RNA, 25 nt, Human
gugauucucugccucccaaguagcu

SEQ ID NO: 1121325 - RNA, 19 nt, Human
gugccucagccuuccaaac

SEQ ID NO: 1121326 - RNA, 24 nt, Human
gugguccaugugccucagccuucc

SEQ ID NO: 1121327 - RNA, 22 nt, Human
guugcuacaacaaaguacccua

SEQ ID NO: 1121328 - RNA, 20 nt, Human
uaagcgauccucccaccuca

SEQ ID NO: 1121329 - RNA, 27 nt, Human
uaagcgauccucccaccucagccuccu

SEQ ID NO: 1121330 - RNA, 21 nt, Human
uaagcuccugggcuuaagcga

SEQ ID NO: 1121331 - RNA, 18 nt, Human
uaaggugggaggauugcu

SEQ ID NO: 1121332 - RNA, 24 nt, Human
uaauguuuguauuuuuaguagaga

SEQ ID NO: 1121333 - RNA, 22 nt, Human
uacaggagugagccaccgcacc

SEQ ID NO: 1121334 - RNA, 22 nt, Human
uacaggagugagccaccgcacc

SEQ ID NO: 1121335 - RNA, 23 nt, Human
uacaggagugagccaccgcaccu

SEQ ID NO: 1121336 - RNA, 23 nt, Human
uacaggagugagccaccgcaccu

SEQ ID NO: 1121337 - RNA, 22 nt, Human
uacaggcgugagccacugcgcc

SEQ ID NO: 1121338 - RNA, 23 nt, Human
uacaggcgugagccacugcgccu

SEQ ID NO: 1121339 - RNA, 22 nt, Human
uagaaaugggguuucaccaugu

SEQ ID NO: 1121340 - RNA, 22 nt, Human
uaggauuacaggagugagccac

SEQ ID NO: 1121341 - RNA, 23 nt, Human
uaggauuacaggagugagccacc

SEQ ID NO: 1121342 - RNA, 24 nt, Human
uaggauuacaggagugagccaccg

SEQ ID NO: 1121343 - RNA, 24 nt, Human
uaguagaaaugggguuucaccaug

SEQ ID NO: 1121344 - RNA, 26 nt, Human
uaguagaaaugggguuucaccauguu

SEQ ID NO: 1121345 - RNA, 19 nt, Human
uaguagagaugggguuuca

SEQ ID NO: 1121346 - RNA, 23 nt, Human
uaguagagaugggguuucaccau

SEQ ID NO: 1121347 - RNA, 26 nt, Human
uaguagagaugggguuucaccaucuu

SEQ ID NO: 1121348 - RNA, 23 nt, Human
uauguuguccaggcuggucuuaa

SEQ ID NO: 1121349 - RNA, 24 nt, Human
uauguuguccaggcuggucuuaag

SEQ ID NO: 1121350 - RNA, 24 nt, Human
ucacuacaaccuccaccucccggg

SEQ ID NO: 1121351 - RNA, 25 nt, Human
ucacuacaaccuccaccucccgggu

SEQ ID NO: 1121352 - RNA, 27 nt, Human
ucacuacaaccuccaccucccggguuc

SEQ ID NO: 1121353 - RNA, 24 nt, Human
ucacugcaaugucugccuuuuggg

SEQ ID NO: 1121354 - RNA, 27 nt, Human
ucacuuucucuaauucugacucuccua

SEQ ID NO: 1121355 - RNA, 21 nt, Human
uccacccuccucggccuccca

SEQ ID NO: 1121356 - RNA, 24 nt, Human
ucccaaagugcugggauuacaggc

SEQ ID NO: 1121357 - RNA, 24 nt, Human
ucccaaguagcugggauuacaggc

SEQ ID NO: 1121358 - RNA, 21 nt, Human
ucccggguucaagcaauucuc

SEQ ID NO: 1121359 - RNA, 24 nt, Human
ucccggguucaagcaauucuccug

SEQ ID NO: 1121360 - RNA, 25 nt, Human
ucccucucugaccucuucuuccauu

SEQ ID NO: 1121361 - RNA, 24 nt, Human
uccuaaaguucugggauuacaggc

SEQ ID NO: 1121362 - RNA, 20 nt, Human
uccucccaccucagccuccc

SEQ ID NO: 1121363 - RNA, 21 nt, Human
uccucggccucccaaagugcu

SEQ ID NO: 1121364 - RNA, 21 nt, Human
uccugggcuuaagcgauccuc

SEQ ID NO: 1121365 - RNA, 24 nt, Human
uccugggcuuaagcgauccuccca

SEQ ID NO: 1121366 - RNA, 18 nt, Human
ucgcccaggcugaagugu

SEQ ID NO: 1121367 - RNA, 23 nt, Human
ucggccucccgaguagcuggaau

SEQ ID NO: 1121368 - RNA, 25 nt, Human
ucuagaaagaaugugcuccuuugcc

SEQ ID NO: 1121369 - RNA, 21 nt, Human
ucuagaagccacccccauucc

SEQ ID NO: 1121370 - RNA, 21 nt, Human
ucucaaacucuugaccucaag

SEQ ID NO: 1121371 - RNA, 23 nt, Human
ucucauuauguuguccaggcugg

SEQ ID NO: 1121372 - RNA, 24 nt, Human
ucucauuauguuguccaggcuggu

SEQ ID NO: 1121373 - RNA, 19 nt, Human
ucucggucgcccaggcuga

SEQ ID NO: 1121374 - RNA, 28 nt, Human
ucucuaauucugacucuccuaccucauu

SEQ ID NO: 1121375 - RNA, 18 nt, Human
ucucugaccucuucuucc

SEQ ID NO: 1121376 - RNA, 19 nt, Human
ucucuuauaaagauccuug

SEQ ID NO: 1121377 - RNA, 24 nt, Human
ugaccucaagugguccaugugccu

SEQ ID NO: 1121378 - RNA, 20 nt, Human
ugaggcuuggaacuuucagc

SEQ ID NO: 1121379 - RNA, 18 nt, Human
ugaugcaugccuguaguu

SEQ ID NO: 1121380 - RNA, 24 nt, Human
ugccucagccuuccaaacugcuag

SEQ ID NO: 1121381 - RNA, 20 nt, Human
ugccucggccucccgaguaa

SEQ ID NO: 1121382 - RNA, 21 nt, Human
ugccucggccucccgaguagc

SEQ ID NO: 1121383 - RNA, 24 nt, Human
ugccucggccucccgaguagcugg

SEQ ID NO: 1121384 - RNA, 22 nt, Human
ugccuguaguuccagcuacugg

SEQ ID NO: 1121385 - RNA, 22 nt, Human
ugccuuuuggguucaagugauu

SEQ ID NO: 1121386 - RNA, 24 nt, Human
ugcugggauuacaggcgugagcca

SEQ ID NO: 1121387 - RNA, 21 nt, Human
uggaauuauagggaugugcca

SEQ ID NO: 1121388 - RNA, 22 nt, Human
uggaauuauagggaugugccac

SEQ ID NO: 1121389 - RNA, 23 nt, Human
uggagugcaauggcacaaucuca

SEQ ID NO: 1121390 - RNA, 24 nt, Human
uggagugcaauggcacaaucucag

SEQ ID NO: 1121391 - RNA, 24 nt, Human
uggcacaaucucagcucacuacaa

SEQ ID NO: 1121392 - RNA, 24 nt, Human
uggcuaggcuggucuugaacuucu

SEQ ID NO: 1121393 - RNA, 22 nt, Human
ugggaggccaaagaggaaggau

SEQ ID NO: 1121394 - RNA, 19 nt, Human
ugggauuacaggcacccac

SEQ ID NO: 1121395 - RNA, 21 nt, Human
ugggauuacaggcacccacca

SEQ ID NO: 1121396 - RNA, 24 nt, Human
ugggauuacaggcacccaccacca

SEQ ID NO: 1121397 - RNA, 18 nt, Human
ugggauuacaggcgugag

SEQ ID NO: 1121398 - RNA, 18 nt, Human
ugggauuacaggcgugag

SEQ ID NO: 1121399 - RNA, 19 nt, Human
ugggauuacaggcgugagc

SEQ ID NO: 1121400 - RNA, 19 nt, Human
ugggauuacaggcgugagc

SEQ ID NO: 1121401 - RNA, 23 nt, Human
ugggauuacaggcgugagcaacc

SEQ ID NO: 1121402 - RNA, 23 nt, Human
ugggauuacaggcgugagcaacc

SEQ ID NO: 1121403 - RNA, 24 nt, Human
ugggauuacaggcgugagcaaccg

SEQ ID NO: 1121404 - RNA, 27 nt, Human
ugggauuacaggcgugagcaaccguaa

SEQ ID NO: 1121405 - RNA, 21 nt, Human
ugggauuacaggcgugagcca

SEQ ID NO: 1121406 - RNA, 22 nt, Human
ugggauuacaggcgugagccac

SEQ ID NO: 1121407 - RNA, 22 nt, Human
ugggauuacaggcgugagccac

SEQ ID NO: 1121408 - RNA, 24 nt, Human
ugggauuacaggcgugagccacug

SEQ ID NO: 1121409 - RNA, 24 nt, Human
ugggauuacaggcgugagccacug

SEQ ID NO: 1121410 - RNA, 24 nt, Human
ugggggcucccaucuguaauccca

SEQ ID NO: 1121411 - RNA, 24 nt, Human
ugggguuucaccaucuuggcuagg

SEQ ID NO: 1121412 - RNA, 24 nt, Human
ugggguuucaccauguuggucagg

SEQ ID NO: 1121413 - RNA, 18 nt, Human
uggguucaagugauucuc

SEQ ID NO: 1121414 - RNA, 20 nt, Human
uggguucaagugauucucuu

SEQ ID NO: 1121415 - RNA, 24 nt, Human
uggucaggcuggucucaaacucuu

SEQ ID NO: 1121416 - RNA, 20 nt, Human
ugguccaugugccucagccu

SEQ ID NO: 1121417 - RNA, 23 nt, Human
uggugaugcaugccuguaguucc

SEQ ID NO: 1121418 - RNA, 24 nt, Human
uggugaugcaugccuguaguucca

SEQ ID NO: 1121419 - RNA, 21 nt, Human
uguauuuuuaguagagauggg

SEQ ID NO: 1121420 - RNA, 24 nt, Human
uguccaggcuggucuuaagcuccu

SEQ ID NO: 1121421 - RNA, 21 nt, Human
ugugauugguggguauggggg

SEQ ID NO: 1121422 - RNA, 21 nt, Human
uguuuguauuuuuaguagaga

SEQ ID NO: 1121423 - RNA, 18 nt, Human
uuaagguuaaagucaagg

SEQ ID NO: 1121424 - RNA, 18 nt, Human
uuaguagaaaugggguuu

SEQ ID NO: 1121425 - RNA, 22 nt, Human
uuaguagaaaugggguuucacc

SEQ ID NO: 1121426 - RNA, 24 nt, Human
uuaguagaaaugggguuucaccau

SEQ ID NO: 1121427 - RNA, 18 nt, Human
uuaguagagaugggguuu

SEQ ID NO: 1121428 - RNA, 22 nt, Human
uuaguagagaugggguuucacc

SEQ ID NO: 1121429 - RNA, 24 nt, Human
uuaguagagaugggguuucaccau

SEQ ID NO: 1121430 - RNA, 21 nt, Human
uucaagcaauucuccugccuc

SEQ ID NO: 1121431 - RNA, 24 nt, Human
uucaagcaauucuccugccucggc

SEQ ID NO: 1121432 - RNA, 22 nt, Human
uucaggaggagggcuagcugcc

SEQ ID NO: 1121433 - RNA, 20 nt, Human
uugaggccaagaguuagaga

SEQ ID NO: 1121434 - RNA, 19 nt, Human
uuuaaaacggaguuuggcu

SEQ ID NO: 1121435 - RNA, 24 nt, Human
uuucaccaucuuggcuaggcuggu

SEQ ID NO: 1121436 - RNA, 24 nt, Human
uuucaccauguuggucaggcuggu

SEQ ID NO: 1121437 - RNA, 22 nt, Human
uuugccuuuuccagcuucuaga

SEQ ID NO: 1121438 - RNA, 18 nt, Human
uuuguauuuuuaguagag

SEQ ID NO: 1121439 - RNA, 18 nt, Human
uuuuguuguugcuacaac

SEQ ID NO: 1121440 - RNA, 24 nt, Human
uuuuuaguagaaaugggguuucac

SEQ ID NO: 1121441 - RNA, 24 nt, Human
uuuuuaguagagaugggguuucac

SEQ ID NO: 1121442 - RNA, 24 nt, Human
uuuuugaggcuuggaacuuucagc

SEQ ID NO: 1121443 - RNA, 24 nt, Human
uuuuuuuuuuaaaacggaguuugg

SEQ ID NO: 1121444 - RNA, 24 nt, Human
aaacuguaaucccagcuacuuggg

SEQ ID NO: 1121445 - RNA, 18 nt, Human
aacuuauuuccacauucu

SEQ ID NO: 1121446 - RNA, 21 nt, Human
aagcagaggucgcagugagcc

SEQ ID NO: 1121447 - RNA, 24 nt, Human
aagcagaggucgcagugagccgag

SEQ ID NO: 1121448 - RNA, 19 nt, Human
aagcagcgcggacccacgg

SEQ ID NO: 1121449 - RNA, 19 nt, Human
accuggagguuguguaacu

SEQ ID NO: 1121450 - RNA, 23 nt, Human
agacacuggcagggccagaaacg

SEQ ID NO: 1121451 - RNA, 24 nt, Human
agaggagcuauugcagcugcugug

SEQ ID NO: 1121452 - RNA, 23 nt, Human
agaggucgcagugagccgagauc

SEQ ID NO: 1121453 - RNA, 21 nt, Human
aggaagcagaggucgcaguga

SEQ ID NO: 1121454 - RNA, 22 nt, Human
aggcaggagaauccuugaaccc

SEQ ID NO: 1121455 - RNA, 23 nt, Human
aggcaggagaauccuugaaccca

SEQ ID NO: 1121456 - RNA, 23 nt, Human
aggcugaggcaggagaauccuug

SEQ ID NO: 1121457 - RNA, 18 nt, Human
aguuaccugcagaaccca

SEQ ID NO: 1121458 - RNA, 19 nt, Human
caauagagaggagcuauug

SEQ ID NO: 1121459 - RNA, 21 nt, Human
cacauguaguaacacaacuua

SEQ ID NO: 1121460 - RNA, 18 nt, Human
cagaagccuugacagcaa

SEQ ID NO: 1121461 - RNA, 24 nt, Human
cagcuacuugggaggcugaggcag

SEQ ID NO: 1121462 - RNA, 22 nt, Human
cccacggcgcaccgaacgcacu

SEQ ID NO: 1121463 - RNA, 23 nt, Human
cccacggcgcaccgaacgcacuc

SEQ ID NO: 1121464 - RNA, 19 nt, Human
cggcgcaccgaacgcacuc

SEQ ID NO: 1121465 - RNA, 19 nt, Human
cuaacaggaaguugggugg

SEQ ID NO: 1121466 - RNA, 22 nt, Human
cuccagccucauccauacaccc

SEQ ID NO: 1121467 - RNA, 24 nt, Human
cuggagguuguguaacugcaccug

SEQ ID NO: 1121468 - RNA, 21 nt, Human
cuguaaucccagcuacuuggg

SEQ ID NO: 1121469 - RNA, 20 nt, Human
gaacgcacuccaacagaacc

SEQ ID NO: 1121470 - RNA, 24 nt, Human
gaauccuugaacccaggaagcaga

SEQ ID NO: 1121471 - RNA, 22 nt, Human
gagaauccuugaacccaggaag

SEQ ID NO: 1121472 - RNA, 21 nt, Human
gcggagacacuggcagggcca

SEQ ID NO: 1121473 - RNA, 22 nt, Human
ggaagcagcgcggacccacggc

SEQ ID NO: 1121474 - RNA, 22 nt, Human
ggcgcaccgaacgcacuccaac

SEQ ID NO: 1121475 - RNA, 20 nt, Human
guccucuucuuuaucgcacc

SEQ ID NO: 1121476 - RNA, 23 nt, Human
guguccugcacccuaggauuaca

SEQ ID NO: 1121477 - RNA, 22 nt, Human
uaaaaguaucuuugugucuuca

SEQ ID NO: 1121478 - RNA, 21 nt, Human
uaaauccaguccuuaaacagg

SEQ ID NO: 1121479 - RNA, 21 nt, Human
uaaccucuaaguaguuauccu

SEQ ID NO: 1121480 - RNA, 22 nt, Human
uaaccucuaaguaguuauccuu

SEQ ID NO: 1121481 - RNA, 23 nt, Human
uaccugcagaacccaucacucua

SEQ ID NO: 1121482 - RNA, 20 nt, Human
uaggagcuuacagaggacua

SEQ ID NO: 1121483 - RNA, 20 nt, Human
uauggaaccucccggccggu

SEQ ID NO: 1121484 - RNA, 20 nt, Human
ucgcagugagccgagaucau

SEQ ID NO: 1121485 - RNA, 19 nt, Human
ucuauggaaccucccggcc

SEQ ID NO: 1121486 - RNA, 22 nt, Human
ucuguagccaaagccuaauggg

SEQ ID NO: 1121487 - RNA, 19 nt, Human
ucuuuggucccagaucacu

SEQ ID NO: 1121488 - RNA, 22 nt, Human
ugagccgagaucaugccauugu

SEQ ID NO: 1121489 - RNA, 19 nt, Human
ugaggcaggagaauccuug

SEQ ID NO: 1121490 - RNA, 23 nt, Human
ugaggcaggagaauccuugaacc

SEQ ID NO: 1121491 - RNA, 24 nt, Human
ugaggcaggagaauccuugaaccc

SEQ ID NO: 1121492 - RNA, 23 nt, Human
ugcagaacccaucacucuaugga

SEQ ID NO: 1121493 - RNA, 22 nt, Human
ugcagcugcugugacgacuggc

SEQ ID NO: 1121494 - RNA, 21 nt, Human
uggaagcagcgcggacccacg

SEQ ID NO: 1121495 - RNA, 18 nt, Human
ugggaggcugaggcagga

SEQ ID NO: 1121496 - RNA, 19 nt, Human
ugggaggcugaggcaggag

SEQ ID NO: 1121497 - RNA, 24 nt, Human
uguagccaaagccuaaugggucag

SEQ ID NO: 1121498 - RNA, 20 nt, Human
ugugacaggagagaaacuaa

SEQ ID NO: 1121499 - RNA, 19 nt, Human
uucuguagccaaagccuaa

SEQ ID NO: 1121500 - RNA, 21 nt, Human
uugcagcugcugugacgacug

SEQ ID NO: 1121501 - RNA, 18 nt, Human
aaccaggaagaagagcug

SEQ ID NO: 1121502 - RNA, 23 nt, Human
aaccaggaagaagagcugggccc

SEQ ID NO: 1121503 - RNA, 20 nt, Human
agaggcugacuugaggaggu

SEQ ID NO: 1121504 - RNA, 19 nt, Human
aggaagaagagcugggccc

SEQ ID NO: 1121505 - RNA, 21 nt, Human
augggccugaagaggccacug

SEQ ID NO: 1121506 - RNA, 19 nt, Human
cagcaaacaagcucuuuug

SEQ ID NO: 1121507 - RNA, 18 nt, Human
caucggagggcaggagcu

SEQ ID NO: 1121508 - RNA, 18 nt, Human
ccccaugggccugaagag

SEQ ID NO: 1121509 - RNA, 19 nt, Human
cgaccaaggccgccaggag

SEQ ID NO: 1121510 - RNA, 21 nt, Human
cgcccggagggugcaaguggg

SEQ ID NO: 1121511 - RNA, 18 nt, Human
cugaagaggccacuggca

SEQ ID NO: 1121512 - RNA, 19 nt, Human
cugggcccggagaggccgc

SEQ ID NO: 1121513 - RNA, 22 nt, Human
gagggcaggagcucauccugga

SEQ ID NO: 1121514 - RNA, 21 nt, Human
gcaagugggucuggagaggcu

SEQ ID NO: 1121515 - RNA, 19 nt, Human
ggagacccaaccaggaaga

SEQ ID NO: 1121516 - RNA, 23 nt, Human
gggcaggagcucauccuggagag

SEQ ID NO: 1121517 - RNA, 19 nt, Human
gguucugggcccggagagg

SEQ ID NO: 1121518 - RNA, 20 nt, Human
ugaaagguugggagcuuggc

SEQ ID NO: 1121519 - RNA, 22 nt, Human
ugaaagguugggagcuuggcuu

SEQ ID NO: 1121520 - RNA, 18 nt, Human
uggagaggccaccgugag

SEQ ID NO: 1121521 - RNA, 20 nt, Human
uggagaggcugacuugagga

SEQ ID NO: 1121522 - RNA, 20 nt, Human
ugggccgaccaaggccgcca

SEQ ID NO: 1121523 - RNA, 24 nt, Human
uggggccuggagaugccaucggag

SEQ ID NO: 1121524 - RNA, 19 nt, Human
uggguaggcacugagucca

SEQ ID NO: 1121525 - RNA, 25 nt, Human
aagccggcccccaucuccucugacc

SEQ ID NO: 1121526 - RNA, 24 nt, Human
aauaccaguaaagugagaagcaga

SEQ ID NO: 1121527 - RNA, 21 nt, Human
aauaccuccccucgaacaucc

SEQ ID NO: 1121528 - RNA, 19 nt, Human
accagucggagagcugggg

SEQ ID NO: 1121529 - RNA, 21 nt, Human
accuccuccccaccucuugcc

SEQ ID NO: 1121530 - RNA, 22 nt, Human
agaccuucuccugggaccacag

SEQ ID NO: 1121531 - RNA, 21 nt, Human
agcuacaaauauccaaaaucc

SEQ ID NO: 1121532 - RNA, 20 nt, Human
aucuccucugaccuccuccc

SEQ ID NO: 1121533 - RNA, 21 nt, Human
auggacccugauuauccauug

SEQ ID NO: 1121534 - RNA, 21 nt, Human
auuugcuguuuucuuucugau

SEQ ID NO: 1121535 - RNA, 22 nt, Human
caaacaccagucggagagcugg

SEQ ID NO: 1121536 - RNA, 21 nt, Human
caaucuaugcagccugugacu

SEQ ID NO: 1121537 - RNA, 21 nt, Human
cacacccaagucagaccaggu

SEQ ID NO: 1121538 - RNA, 18 nt, Human
cacaguuauccacacagu

SEQ ID NO: 1121539 - RNA, 20 nt, Human
cacauugcuacuccucugcc

SEQ ID NO: 1121540 - RNA, 21 nt, Human
caccagucggagagcuggggu

SEQ ID NO: 1121541 - RNA, 22 nt, Human
cacccuucccuccaaacagcca

SEQ ID NO: 1121542 - RNA, 21 nt, Human
caccuccgcgaaggacagcuu

SEQ ID NO: 1121543 - RNA, 22 nt, Human
caccucuccccuggagacagcc

SEQ ID NO: 1121544 - RNA, 18 nt, Human
caccucucucccucagcu

SEQ ID NO: 1121545 - RNA, 19 nt, Human
cacuacacccgaggcccgc

SEQ ID NO: 1121546 - RNA, 24 nt, Human
cagcaaagccggcccccaucuccu

SEQ ID NO: 1121547 - RNA, 18 nt, Human
cagcacccagagugcucg

SEQ ID NO: 1121548 - RNA, 18 nt, Human
cagcacccagagugcucg

SEQ ID NO: 1121549 - RNA, 18 nt, Human
cagcacccagagugcucg

SEQ ID NO: 1121550 - RNA, 24 nt, Human
cagcagagccagccuccaucuccu

SEQ ID NO: 1121551 - RNA, 24 nt, Human
cagcagagccggcccccaucuccu

SEQ ID NO: 1121552 - RNA, 18 nt, Human
cagcagagccggcccccc

SEQ ID NO: 1121553 - RNA, 22 nt, Human
cagcaggagcugccccauaaua

SEQ ID NO: 1121554 - RNA, 20 nt, Human
cagcccucuuggcccugugg

SEQ ID NO: 1121555 - RNA, 24 nt, Human
cagcuucauccuuucagcuacuca

SEQ ID NO: 1121556 - RNA, 22 nt, Human
cagggaugcccauggacccuga

SEQ ID NO: 1121557 - RNA, 22 nt, Human
caggucacuguggugggagugu

SEQ ID NO: 1121558 - RNA, 23 nt, Human
cagucggagagcugggguccucc

SEQ ID NO: 1121559 - RNA, 21 nt, Human
caucuccuucuccaggaaauc

SEQ ID NO: 1121560 - RNA, 21 nt, Human
cauggcuccaaaacaagcagg

SEQ ID NO: 1121561 - RNA, 20 nt, Human
cauucagaaaacauacuaag

SEQ ID NO: 1121562 - RNA, 20 nt, Human
cauucuggcugugugcagag

SEQ ID NO: 1121563 - RNA, 19 nt, Human
cauuuggaggaaaacccag

SEQ ID NO: 1121564 - RNA, 25 nt, Human
ccacauugcuacuccucugccugua

SEQ ID NO: 1121565 - RNA, 24 nt, Human
ccaccucuccccuggagacagccc

SEQ ID NO: 1121566 - RNA, 23 nt, Human
ccagccuccaucuccucugaccu

SEQ ID NO: 1121567 - RNA, 25 nt, Human
cccaucuccucugaccuccucccca

SEQ ID NO: 1121568 - RNA, 26 nt, Human
cccgacccugauggcagagaagcaaa

SEQ ID NO: 1121569 - RNA, 24 nt, Human
cccgccacccauuuuugccugaau

SEQ ID NO: 1121570 - RNA, 18 nt, Human
cccuacccgcuucucugu

SEQ ID NO: 1121571 - RNA, 23 nt, Human
ccggcccccaucuccucugaccu

SEQ ID NO: 1121572 - RNA, 23 nt, Human
ccggcccccaucuccucugaccu

SEQ ID NO: 1121573 - RNA, 23 nt, Human
ccggcccccaucuccucugaccu

SEQ ID NO: 1121574 - RNA, 20 nt, Human
ccucccaccucucucccuca

SEQ ID NO: 1121575 - RNA, 25 nt, Human
ccucccaccucucucccucagcuag

SEQ ID NO: 1121576 - RNA, 19 nt, Human
ccucccagcccucuuggcc

SEQ ID NO: 1121577 - RNA, 22 nt, Human
ccucucgcccucugcacccaga

SEQ ID NO: 1121578 - RNA, 23 nt, Human
cgcccucagcacccagagugcuc

SEQ ID NO: 1121579 - RNA, 24 nt, Human
cggcccccaucuccucugaccucc

SEQ ID NO: 1121580 - RNA, 24 nt, Human
cggcccccaucuccucugaccucc

SEQ ID NO: 1121581 - RNA, 18 nt, Human
cgugacggccagcagagc

SEQ ID NO: 1121582 - RNA, 21 nt, Human
cuacacccgaggcccgccacc

SEQ ID NO: 1121583 - RNA, 21 nt, Human
cuagugacccccagaccuucu

SEQ ID NO: 1121584 - RNA, 23 nt, Human
cucaauaccuccccucgaacauc

SEQ ID NO: 1121585 - RNA, 23 nt, Human
cucacaguggcccugacccaacu

SEQ ID NO: 1121586 - RNA, 21 nt, Human
cucagcacccagagugcucgu

SEQ ID NO: 1121587 - RNA, 20 nt, Human
cuccaaacagccaccucucc

SEQ ID NO: 1121588 - RNA, 21 nt, Human
cucccagcccucuuggcccug

SEQ ID NO: 1121589 - RNA, 20 nt, Human
cucgugacggccagcagagc

SEQ ID NO: 1121590 - RNA, 20 nt, Human
cucguguuggccagcaaagc

SEQ ID NO: 1121591 - RNA, 20 nt, Human
cucguguuggccggcagagc

SEQ ID NO: 1121592 - RNA, 20 nt, Human
cucugaccuccuccccaccu

SEQ ID NO: 1121593 - RNA, 24 nt, Human
cucugccuguagggguacccacag

SEQ ID NO: 1121594 - RNA, 18 nt, Human
cucugcucuucucucucc

SEQ ID NO: 1121595 - RNA, 19 nt, Human
cucugcucuucucucucca

SEQ ID NO: 1121596 - RNA, 21 nt, Human
cucugcucuucucucuccacc

SEQ ID NO: 1121597 - RNA, 23 nt, Human
cugaccucccaccucucgcccuc

SEQ ID NO: 1121598 - RNA, 23 nt, Human
cugaccucccaccucucgcccuc

SEQ ID NO: 1121599 - RNA, 24 nt, Human
cugggguccucccagcccucuugg

SEQ ID NO: 1121600 - RNA, 19 nt, Human
cuugggacccacauugcua

SEQ ID NO: 1121601 - RNA, 23 nt, Human
gaaggcuuggaagcaugcaagug

SEQ ID NO: 1121602 - RNA, 27 nt, Human
gagaucugcucacacccaagucagacc

SEQ ID NO: 1121603 - RNA, 18 nt, Human
gccccauacuccacucag

SEQ ID NO: 1121604 - RNA, 22 nt, Human
gcgaaggacagcuucauccuuu

SEQ ID NO: 1121605 - RNA, 23 nt, Human
gcuacuuauucauucagaaaaca

SEQ ID NO: 1121606 - RNA, 24 nt, Human
gcuucauccuuucagcuacucagg

SEQ ID NO: 1121607 - RNA, 18 nt, Human
ggaagacagcaggagcug

SEQ ID NO: 1121608 - RNA, 23 nt, Human
ggcccccaucuccucugaccucc

SEQ ID NO: 1121609 - RNA, 23 nt, Human
ggguacccacaguuauccacaca

SEQ ID NO: 1121610 - RNA, 19 nt, Human
guccucccagcccucuugg

SEQ ID NO: 1121611 - RNA, 21 nt, Human
guccugguacucugcucuucu

SEQ ID NO: 1121612 - RNA, 18 nt, Human
gugacuccauccaugggc

SEQ ID NO: 1121613 - RNA, 18 nt, Human
uaccuccccucgaacauc

SEQ ID NO: 1121614 - RNA, 23 nt, Human
ucaauggcccguccugguacucu

SEQ ID NO: 1121615 - RNA, 21 nt, Human
ucacacccaagucagaccagg

SEQ ID NO: 1121616 - RNA, 22 nt, Human
ucagaccagguuacuccucugc

SEQ ID NO: 1121617 - RNA, 23 nt, Human
ucauuugcuguuuucuuucugau

SEQ ID NO: 1121618 - RNA, 19 nt, Human
uccauggcuaaaacugagc

SEQ ID NO: 1121619 - RNA, 18 nt, Human
uccccuggagacagcccc

SEQ ID NO: 1121620 - RNA, 23 nt, Human
uccucugaccucccaccucucgc

SEQ ID NO: 1121621 - RNA, 23 nt, Human
uccucugaccucccaccucucgc

SEQ ID NO: 1121622 - RNA, 29 nt, Human
uccucugaccucccaccucucucccucaa

SEQ ID NO: 1121623 - RNA, 21 nt, Human
uccugauacucucucccuacc

SEQ ID NO: 1121624 - RNA, 20 nt, Human
uccugguacucugcucuucu

SEQ ID NO: 1121625 - RNA, 21 nt, Human
uccugguacucugcucuucuc

SEQ ID NO: 1121626 - RNA, 24 nt, Human
ucucaaaguuugaaggguauuguc

SEQ ID NO: 1121627 - RNA, 22 nt, Human
ucuccaccuucgcuuuccugca

SEQ ID NO: 1121628 - RNA, 24 nt, Human
ucuccccuggagacagccccauac

SEQ ID NO: 1121629 - RNA, 20 nt, Human
ucucgcccucugcacccaga

SEQ ID NO: 1121630 - RNA, 23 nt, Human
ucugcucacacccaagucagacc

SEQ ID NO: 1121631 - RNA, 23 nt, Human
ucugguauccuugucaccugcuu

SEQ ID NO: 1121632 - RNA, 22 nt, Human
ugaagucaucuccuucuccagg

SEQ ID NO: 1121633 - RNA, 20 nt, Human
ugacccccagaccuucuccu

SEQ ID NO: 1121634 - RNA, 21 nt, Human
ugaccuccuccccaccucuug

SEQ ID NO: 1121635 - RNA, 18 nt, Human
ugagggagcuacaaauau

SEQ ID NO: 1121636 - RNA, 22 nt, Human
ugauggcagagaagcaaacacc

SEQ ID NO: 1121637 - RNA, 24 nt, Human
ugcaagugggagaagaaaggaguc

SEQ ID NO: 1121638 - RNA, 23 nt, Human
ugcccucagcacccagagugcuc

SEQ ID NO: 1121639 - RNA, 22 nt, Human
ugcucgugacggccagcagagc

SEQ ID NO: 1121640 - RNA, 22 nt, Human
ugcucgugacggccagcagagc

SEQ ID NO: 1121641 - RNA, 19 nt, Human
ugcucguguuggccagcaa

SEQ ID NO: 1121642 - RNA, 19 nt, Human
uggaagcaugcaaguggga

SEQ ID NO: 1121643 - RNA, 18 nt, Human
uggaggaaaacccagagu

SEQ ID NO: 1121644 - RNA, 19 nt, Human
uggcagagaagcaaacacc

SEQ ID NO: 1121645 - RNA, 20 nt, Human
uggcuacuuauucauucaga

SEQ ID NO: 1121646 - RNA, 19 nt, Human
ugggagaagaaaggaguca

SEQ ID NO: 1121647 - RNA, 19 nt, Human
ugguauccuugucaccugc

SEQ ID NO: 1121648 - RNA, 21 nt, Human
ugucacccuucccuccaaaca

SEQ ID NO: 1121649 - RNA, 18 nt, Human
ugugcagaggcaggucac

SEQ ID NO: 1121650 - RNA, 23 nt, Human
uguggucccaccuugggacccac

SEQ ID NO: 1121651 - RNA, 19 nt, Human
uucauccuuucagcuacuc

SEQ ID NO: 1121652 - RNA, 21 nt, Human
uucaugugcuguuggcuacuu

SEQ ID NO: 1121653 - RNA, 21 nt, Human
uucccuccaaacagccaccuc

SEQ ID NO: 1121654 - RNA, 21 nt, Human
uuggaucaugucauuugcugu

SEQ ID NO: 1121655 - RNA, 18 nt, Human
aaaguucugggccuggag

SEQ ID NO: 1121656 - RNA, 23 nt, Human
aagcuuguuuuccugcaacugga

SEQ ID NO: 1121657 - RNA, 24 nt, Human
aagcuuguuuuccugcaacuggau

SEQ ID NO: 1121658 - RNA, 24 nt, Human
aagcuuguuuuccugcaacuggau

SEQ ID NO: 1121659 - RNA, 19 nt, Human
aaugagccaugauaggacc

SEQ ID NO: 1121660 - RNA, 18 nt, Human
acuacacuccagccuugg

SEQ ID NO: 1121661 - RNA, 18 nt, Human
acuacacuccagccuugg

SEQ ID NO: 1121662 - RNA, 19 nt, Human
acuacacuccagccuugga

SEQ ID NO: 1121663 - RNA, 25 nt, Human
acuacacuccagccuuggacaacag

SEQ ID NO: 1121664 - RNA, 19 nt, Human
acuacacuccagccuuggg

SEQ ID NO: 1121665 - RNA, 18 nt, Human
agaggcugccgggaggua

SEQ ID NO: 1121666 - RNA, 19 nt, Human
agaggcugccgggagguag

SEQ ID NO: 1121667 - RNA, 24 nt, Human
agcaccuguagucucagccacgug

SEQ ID NO: 1121668 - RNA, 22 nt, Human
agcugugccuguggaggcuguu

SEQ ID NO: 1121669 - RNA, 19 nt, Human
aggcaggaggcugggccuu

SEQ ID NO: 1121670 - RNA, 19 nt, Human
aggcugccgugacguaggg

SEQ ID NO: 1121671 - RNA, 23 nt, Human
agguugacgugggaggaucgcuu

SEQ ID NO: 1121672 - RNA, 24 nt, Human
aguggcaagcaccuguagucucag

SEQ ID NO: 1121673 - RNA, 19 nt, Human
aguucugggccuggagagg

SEQ ID NO: 1121674 - RNA, 19 nt, Human
aguucugggccuggagagg

SEQ ID NO: 1121675 - RNA, 20 nt, Human
augguaggauugcuugagcc

SEQ ID NO: 1121676 - RNA, 25 nt, Human
caacaggaaaacuccuucaccucau

SEQ ID NO: 1121677 - RNA, 25 nt, Human
caccugaauaacauguugcccaguc

SEQ ID NO: 1121678 - RNA, 23 nt, Human
caccuguagucucagccacgugg

SEQ ID NO: 1121679 - RNA, 24 nt, Human
caccuguagucucagccacguggg

SEQ ID NO: 1121680 - RNA, 23 nt, Human
cagccuuggacaacagagggaga

SEQ ID NO: 1121681 - RNA, 23 nt, Human
cagcuccucgcugaugaagcaau

SEQ ID NO: 1121682 - RNA, 22 nt, Human
cagcuguagucccagcuacugg

SEQ ID NO: 1121683 - RNA, 23 nt, Human
cagcuguagucccagcuacuggg

SEQ ID NO: 1121684 - RNA, 24 nt, Human
cagucagucucucuuccuggauuc

SEQ ID NO: 1121685 - RNA, 21 nt, Human
cauuucugugcugcuugggag

SEQ ID NO: 1121686 - RNA, 22 nt, Human
ccaccugaauaacauguugccc

SEQ ID NO: 1121687 - RNA, 19 nt, Human
ccacugaacucuauccuga

SEQ ID NO: 1121688 - RNA, 20 nt, Human
ccuguuucugaagaaaaaaa

SEQ ID NO: 1121689 - RNA, 19 nt, Human
cgaguaaacaucacccucc

SEQ ID NO: 1121690 - RNA, 23 nt, Human
cgcugucaccccucuggaaucca

SEQ ID NO: 1121691 - RNA, 26 nt, Human
cggcaaacgaguaaacaucacccucc

SEQ ID NO: 1121692 - RNA, 22 nt, Human
cuacuacacuccagccuuggac

SEQ ID NO: 1121693 - RNA, 22 nt, Human
cucggcaaacgaguaaacauca

SEQ ID NO: 1121694 - RNA, 23 nt, Human
cucucucggcaaacgaguaaaca

SEQ ID NO: 1121695 - RNA, 23 nt, Human
cugagaauguucagggccuggag

SEQ ID NO: 1121696 - RNA, 23 nt, Human
cuggaagguugaggcugcaguca

SEQ ID NO: 1121697 - RNA, 22 nt, Human
cuuccuggauucacaagucuuu

SEQ ID NO: 1121698 - RNA, 19 nt, Human
gaaaguucugggccuggag

SEQ ID NO: 1121699 - RNA, 18 nt, Human
gaaucagggcccucucca

SEQ ID NO: 1121700 - RNA, 19 nt, Human
gaauccacguauaugaaaa

SEQ ID NO: 1121701 - RNA, 22 nt, Human
gacaacagagggagaccugaga

SEQ ID NO: 1121702 - RNA, 18 nt, Human
gaggcuguugugaggcag

SEQ ID NO: 1121703 - RNA, 21 nt, Human
gagugacagggcaagguccug

SEQ ID NO: 1121704 - RNA, 18 nt, Human
gauugcuugagccuggga

SEQ ID NO: 1121705 - RNA, 22 nt, Human
gauugcuugagccugggaguuu

SEQ ID NO: 1121706 - RNA, 18 nt, Human
gcugcagucagcugcgau

SEQ ID NO: 1121707 - RNA, 24 nt, Human
gcuguagucccagcuacugggaag

SEQ ID NO: 1121708 - RNA, 20 nt, Human
ggaaggcugacaugguagga

SEQ ID NO: 1121709 - RNA, 18 nt, Human
ggaguuugaggcuauaau

SEQ ID NO: 1121710 - RNA, 20 nt, Human
ggcugggaggcaggagcugg

SEQ ID NO: 1121711 - RNA, 24 nt, Human
gggcauaguggcaagcaccuguag

SEQ ID NO: 1121712 - RNA, 19 nt, Human
gugaggcagaggcugggcc

SEQ ID NO: 1121713 - RNA, 25 nt, Human
uacuacacuccagccuuggacaaca

SEQ ID NO: 1121714 - RNA, 20 nt, Human
uagcacuacuacacuccagc

SEQ ID NO: 1121715 - RNA, 23 nt, Human
uaguggcaagcaccuguagucuc

SEQ ID NO: 1121716 - RNA, 24 nt, Human
uaguggcaagcaccuguagucuca

SEQ ID NO: 1121717 - RNA, 20 nt, Human
uaguugggcauaguggcaag

SEQ ID NO: 1121718 - RNA, 19 nt, Human
ucagggccuggagagaagg

SEQ ID NO: 1121719 - RNA, 23 nt, Human
uccaugcugaggugccuacaagg

SEQ ID NO: 1121720 - RNA, 20 nt, Human
uccgcugugaggcagaggcu

SEQ ID NO: 1121721 - RNA, 21 nt, Human
ugacagggcaagguccuguuu

SEQ ID NO: 1121722 - RNA, 18 nt, Human
ugacaugguaggauugcu

SEQ ID NO: 1121723 - RNA, 23 nt, Human
ugagaauguucagggccuggaga

SEQ ID NO: 1121724 - RNA, 22 nt, Human
ugagccugggaguuugaggcua

SEQ ID NO: 1121725 - RNA, 23 nt, Human
ugagcuuggucuguagaggcuga

SEQ ID NO: 1121726 - RNA, 23 nt, Human
ugagcuuggucuguagaggcuga

SEQ ID NO: 1121727 - RNA, 18 nt, Human
ugaggcagaggcugggcc

SEQ ID NO: 1121728 - RNA, 18 nt, Human
ugaggcagaggcugggcc

SEQ ID NO: 1121729 - RNA, 20 nt, Human
ugaggcaguagccucaucug

SEQ ID NO: 1121730 - RNA, 19 nt, Human
uggaagguugaggcugcag

SEQ ID NO: 1121731 - RNA, 22 nt, Human
uggaagguugaggcugcaguca

SEQ ID NO: 1121732 - RNA, 19 nt, Human
uggaaucagggcccucucc

SEQ ID NO: 1121733 - RNA, 19 nt, Human
uggagcugugccuguggag

SEQ ID NO: 1121734 - RNA, 18 nt, Human
ugggaggcaggagcuggg

SEQ ID NO: 1121735 - RNA, 18 nt, Human
ugggaggccuggacagcc

SEQ ID NO: 1121736 - RNA, 23 nt, Human
ugggagguugacgugggaggauc

SEQ ID NO: 1121737 - RNA, 18 nt, Human
ugggccuggagaggcugc

SEQ ID NO: 1121738 - RNA, 18 nt, Human
ugugaggcagaggcuggg

SEQ ID NO: 1121739 - RNA, 19 nt, Human
ugugccuguggaggcuguu

SEQ ID NO: 1121740 - RNA, 22 nt, Human
uguucagggccuggagagaagg

SEQ ID NO: 1121741 - RNA, 18 nt, Human
uuaguugggcauaguggc

SEQ ID NO: 1121742 - RNA, 22 nt, Human
uucagggccuggagagaaggcu

SEQ ID NO: 1121743 - RNA, 24 nt, Human
uugcuugagccugggaguuugagg

SEQ ID NO: 1121744 - RNA, 18 nt, Human
aaaagccaaguucaucaa

SEQ ID NO: 1121745 - RNA, 20 nt, Human
aaacaaaaaaugccggacau

SEQ ID NO: 1121746 - RNA, 24 nt, Human
aaacuggugccugauaaaugcuga

SEQ ID NO: 1121747 - RNA, 18 nt, Human
aagagcugggaggggaca

SEQ ID NO: 1121748 - RNA, 22 nt, Human
accaagaaaauuuccacuguga

SEQ ID NO: 1121749 - RNA, 19 nt, Human
agagccagugcugacagag

SEQ ID NO: 1121750 - RNA, 24 nt, Human
agauaccagaacuuuaucugaagc

SEQ ID NO: 1121751 - RNA, 25 nt, Human
agauaccagaacuuuaucugaagcu

SEQ ID NO: 1121752 - RNA, 19 nt, Human
agauuuccccuuucccuug

SEQ ID NO: 1121753 - RNA, 23 nt, Human
agccccgaagccuuccaacacuc

SEQ ID NO: 1121754 - RNA, 22 nt, Human
agcggcaggcuguuguccugga

SEQ ID NO: 1121755 - RNA, 23 nt, Human
aggccacauccugguagacacca

SEQ ID NO: 1121756 - RNA, 18 nt, Human
aggggacagucaugugag

SEQ ID NO: 1121757 - RNA, 18 nt, Human
aucacagacguggcagga

SEQ ID NO: 1121758 - RNA, 24 nt, Human
aucaccaccaggacaaagcugcag

SEQ ID NO: 1121759 - RNA, 21 nt, Human
auccugguagacaccaagaaa

SEQ ID NO: 1121760 - RNA, 21 nt, Human
auuuauuuucaaaauaaauua

SEQ ID NO: 1121761 - RNA, 21 nt, Human
caaaauaaauauagagaugcc

SEQ ID NO: 1121762 - RNA, 21 nt, Human
caacaaaagacgaaacugaca

SEQ ID NO: 1121763 - RNA, 18 nt, Human
caagccggcucugaccga

SEQ ID NO: 1121764 - RNA, 20 nt, Human
cacugcuggagggacaggcc

SEQ ID NO: 1121765 - RNA, 20 nt, Human
cacuguguggucuugggcaa

SEQ ID NO: 1121766 - RNA, 24 nt, Human
cagaggcccuguccucacccagug

SEQ ID NO: 1121767 - RNA, 23 nt, Human
cagcauuugguaaacuuuccugc

SEQ ID NO: 1121768 - RNA, 18 nt, Human
cagcugggccucaugguc

SEQ ID NO: 1121769 - RNA, 22 nt, Human
cagcugggccucauggucacag

SEQ ID NO: 1121770 - RNA, 22 nt, Human
caggacaagcagggacacugcc

SEQ ID NO: 1121771 - RNA, 18 nt, Human
cagguuuguuuccucucc

SEQ ID NO: 1121772 - RNA, 21 nt, Human
cagugcugacagaggcccugu

SEQ ID NO: 1121773 - RNA, 24 nt, Human
caucaugggccacagcacacagga

SEQ ID NO: 1121774 - RNA, 23 nt, Human
cauggcaccacugcuggagggac

SEQ ID NO: 1121775 - RNA, 24 nt, Human
cauuacagaaggcugcaccgagcu

SEQ ID NO: 1121776 - RNA, 22 nt, Human
ccaaaauaaauauagagaugcc

SEQ ID NO: 1121777 - RNA, 22 nt, Human
ccaacacucugaagaucagcgg

SEQ ID NO: 1121778 - RNA, 22 nt, Human
ccacugcuggagggacaggccu

SEQ ID NO: 1121779 - RNA, 21 nt, Human
ccagcuccucugccaccaugg

SEQ ID NO: 1121780 - RNA, 23 nt, Human
cccagagaaagagauacauaaau

SEQ ID NO: 1121781 - RNA, 18 nt, Human
cccccccaagagcuggga

SEQ ID NO: 1121782 - RNA, 19 nt, Human
cccucuggaaucccuccuc

SEQ ID NO: 1121783 - RNA, 20 nt, Human
ccgcucaggaacauuaacag

SEQ ID NO: 1121784 - RNA, 26 nt, Human
ccuaggucccccccaagagcugggag

SEQ ID NO: 1121785 - RNA, 19 nt, Human
ccucuggaaucccuccucc

SEQ ID NO: 1121786 - RNA, 21 nt, Human
ccuggaucugcugugcacugg

SEQ ID NO: 1121787 - RNA, 22 nt, Human
ccuguccucacccagugaggag

SEQ ID NO: 1121788 - RNA, 23 nt, Human
cgugggguuuccuucggaguggg

SEQ ID NO: 1121789 - RNA, 23 nt, Human
cugacacuggagcugggcgacug

SEQ ID NO: 1121790 - RNA, 20 nt, Human
cuggaaucccuccuccugug

SEQ ID NO: 1121791 - RNA, 24 nt, Human
cuggucaaggugagagacugcucc

SEQ ID NO: 1121792 - RNA, 24 nt, Human
cugugcacuggguguggaccccuc

SEQ ID NO: 1121793 - RNA, 24 nt, Human
cuuccagcuggagagggcggcugg

SEQ ID NO: 1121794 - RNA, 19 nt, Human
cuuucagguucauguggca

SEQ ID NO: 1121795 - RNA, 22 nt, Human
gaagcugacacuggagcugggc

SEQ ID NO: 1121796 - RNA, 25 nt, Human
gagaaagagauacauaaaucaaugu

SEQ ID NO: 1121797 - RNA, 25 nt, Human
gagcaggagacggaaccgcucagga

SEQ ID NO: 1121798 - RNA, 22 nt, Human
gagccaaaugugcacacagcaa

SEQ ID NO: 1121799 - RNA, 18 nt, Human
gcccuguggcucgagaug

SEQ ID NO: 1121800 - RNA, 21 nt, Human
gccguuugcugggugucuuug

SEQ ID NO: 1121801 - RNA, 20 nt, Human
gccuaccugcucacggaaac

SEQ ID NO: 1121802 - RNA, 22 nt, Human
ggcaagagggcagcuuuucaga

SEQ ID NO: 1121803 - RNA, 18 nt, Human
gggacacugcccaggucu

SEQ ID NO: 1121804 - RNA, 19 nt, Human
guacauaggacacuaaagu

SEQ ID NO: 1121805 - RNA, 20 nt, Human
guggucuugggcaagucacu

SEQ ID NO: 1121806 - RNA, 25 nt, Human
uaaacucugcucaccauacacacac

SEQ ID NO: 1121807 - RNA, 24 nt, Human
uacgugggguuuccuucggagugg

SEQ ID NO: 1121808 - RNA, 20 nt, Human
uagaaugccaccaaaauaaa

SEQ ID NO: 1121809 - RNA, 20 nt, Human
ucaaggugagagacugcucc

SEQ ID NO: 1121810 - RNA, 26 nt, Human
ucaccaccaggacaaagcugcagcau

SEQ ID NO: 1121811 - RNA, 24 nt, Human
ucaccauacacacacucccauccc

SEQ ID NO: 1121812 - RNA, 20 nt, Human
ucacggaaaccgccguuugc

SEQ ID NO: 1121813 - RNA, 19 nt, Human
ucacuucacuccucugacc

SEQ ID NO: 1121814 - RNA, 21 nt, Human
uccacauagcaaaugcaaggu

SEQ ID NO: 1121815 - RNA, 22 nt, Human
ucccaugguagcaaacauugcc

SEQ ID NO: 1121816 - RNA, 18 nt, Human
uccuacauuugggaugug

SEQ ID NO: 1121817 - RNA, 20 nt, Human
ucugaagaucagcgggauga

SEQ ID NO: 1121818 - RNA, 21 nt, Human
ucugaccucaccuguacgugg

SEQ ID NO: 1121819 - RNA, 23 nt, Human
ucugcagagccacacagucugca

SEQ ID NO: 1121820 - RNA, 20 nt, Human
ucugccaccauggcuugggg

SEQ ID NO: 1121821 - RNA, 18 nt, Human
ucuuugacucucaucuuc

SEQ ID NO: 1121822 - RNA, 21 nt, Human
ugcagaugauacaacaaaaga

SEQ ID NO: 1121823 - RNA, 22 nt, Human
ugcaggacaagcagggacacug

SEQ ID NO: 1121824 - RNA, 20 nt, Human
ugcccugugagauuuccccu

SEQ ID NO: 1121825 - RNA, 19 nt, Human
ugcugugcacugggugugg

SEQ ID NO: 1121826 - RNA, 19 nt, Human
ugcuugacguuccuucccc

SEQ ID NO: 1121827 - RNA, 21 nt, Human
uggaccccucuguguuuccag

SEQ ID NO: 1121828 - RNA, 19 nt, Human
uggcuucagguuuguuucc

SEQ ID NO: 1121829 - RNA, 21 nt, Human
ugggaggggacagucauguga

SEQ ID NO: 1121830 - RNA, 26 nt, Human
ugggccucauggucacaggacccguc

SEQ ID NO: 1121831 - RNA, 23 nt, Human
ugggugucuuugacucucaucuu

SEQ ID NO: 1121832 - RNA, 19 nt, Human
ugguagacaccaagaaaau

SEQ ID NO: 1121833 - RNA, 23 nt, Human
ugguagcaaacauugccagucuc

SEQ ID NO: 1121834 - RNA, 21 nt, Human
uguacgugggguuuccuucgg

SEQ ID NO: 1121835 - RNA, 23 nt, Human
uguccuaggucccccccaagagc

SEQ ID NO: 1121836 - RNA, 22 nt, Human
ugugcacacagcaagccggcuc

SEQ ID NO: 1121837 - RNA, 20 nt, Human
ugugcacaugagaaagguca

SEQ ID NO: 1121838 - RNA, 18 nt, Human
uguguggucuugggcaag

SEQ ID NO: 1121839 - RNA, 24 nt, Human
uuauuuucaaaauaaauuauaucu

SEQ ID NO: 1121840 - RNA, 19 nt, Human
uuccaacacucugaagauc

SEQ ID NO: 1121841 - RNA, 21 nt, Human
uuccaccucagccccgaagcc

SEQ ID NO: 1121842 - RNA, 18 nt, Human
uucccuccugugcacaug

SEQ ID NO: 1121843 - RNA, 22 nt, Human
uugcugggugucuuugacucuc

SEQ ID NO: 1121844 - RNA, 20 nt, Human
uuugacugugucucucccca

SEQ ID NO: 1121845 - RNA, 20 nt, Human
uuugacugugucucucccca

SEQ ID NO: 1121846 - RNA, 19 nt, Human
acaaagccuggcccacagc

SEQ ID NO: 1121847 - RNA, 23 nt, Human
accuaacaacaaagccuggccca

SEQ ID NO: 1121848 - RNA, 18 nt, Human
agcuagucuuuccaggug

SEQ ID NO: 1121849 - RNA, 19 nt, Human
aggcagguucauuuuaagg

SEQ ID NO: 1121850 - RNA, 21 nt, Human
caacaaagccuggcccacagc

SEQ ID NO: 1121851 - RNA, 21 nt, Human
cccuggucgucccaaaccccc

SEQ ID NO: 1121852 - RNA, 19 nt, Human
ccucccagauggggguggg

SEQ ID NO: 1121853 - RNA, 18 nt, Human
ccuggcccacagcuggua

SEQ ID NO: 1121854 - RNA, 22 nt, Human
ccuugcuucccucuugaggucc

SEQ ID NO: 1121855 - RNA, 24 nt, Human
cugaagccagagcuagucuuucca

SEQ ID NO: 1121856 - RNA, 19 nt, Human
cuggggacugugugacucc

SEQ ID NO: 1121857 - RNA, 21 nt, Human
gaaaauaccuaacaacaaagg

SEQ ID NO: 1121858 - RNA, 20 nt, Human
gcuucggaggccccucccuc

SEQ ID NO: 1121859 - RNA, 19 nt, Human
guuagucgaaaccucgugg

SEQ ID NO: 1121860 - RNA, 21 nt, Human
ucccuggggacugugugacuc

SEQ ID NO: 1121861 - RNA, 22 nt, Human
ucggaggccccucccucacuga

SEQ ID NO: 1121862 - RNA, 27 nt, Human
ugggggugggguaucacuugcagcugg

SEQ ID NO: 1121863 - RNA, 23 nt, Human
ugggguaucacuugcagcuggaa

SEQ ID NO: 1121864 - RNA, 23 nt, Human
uugcuucccucuugagguccuua

SEQ ID NO: 1121865 - RNA, 18 nt, Human
aaaacagcagacuugauu

SEQ ID NO: 1121866 - RNA, 19 nt, Human
aaacagauaucuaaacacu

SEQ ID NO: 1121867 - RNA, 22 nt, Human
aaacagauaucuaaacacuaca

SEQ ID NO: 1121868 - RNA, 24 nt, Human
aaacagauaucuaaacacuacaac

SEQ ID NO: 1121869 - RNA, 18 nt, Human
aagauucugccaaucuga

SEQ ID NO: 1121870 - RNA, 24 nt, Human
acaggucuugcuuugugggugggu

SEQ ID NO: 1121871 - RNA, 26 nt, Human
accccaaagcccaccuuucagacccu

SEQ ID NO: 1121872 - RNA, 21 nt, Human
acggggcccugacgggucccg

SEQ ID NO: 1121873 - RNA, 20 nt, Human
agacccucugcccacagccu

SEQ ID NO: 1121874 - RNA, 23 nt, Human
agagagauuuguagaaacaacca

SEQ ID NO: 1121875 - RNA, 23 nt, Human
agcgagaguuguuacuguggugu

SEQ ID NO: 1121876 - RNA, 19 nt, Human
agggggggguggggacggg

SEQ ID NO: 1121877 - RNA, 22 nt, Human
auucucuucccccuccucacca

SEQ ID NO: 1121878 - RNA, 24 nt, Human
caaccacuucuacuacgaaaggcc

SEQ ID NO: 1121879 - RNA, 24 nt, Human
caaguuucugacccuggaaaugua

SEQ ID NO: 1121880 - RNA, 19 nt, Human
cacccccagcugccaagca

SEQ ID NO: 1121881 - RNA, 18 nt, Human
cacuacaaccacuucuac

SEQ ID NO: 1121882 - RNA, 24 nt, Human
cacucuaggaaaacuguugccaag

SEQ ID NO: 1121883 - RNA, 21 nt, Human
cagauaucuaaacacuacaac

SEQ ID NO: 1121884 - RNA, 21 nt, Human
cagcugccaagcaucccccca

SEQ ID NO: 1121885 - RNA, 23 nt, Human
ccaaagcccaccuuucagacccu

SEQ ID NO: 1121886 - RNA, 20 nt, Human
ccagcgguggaggggggggu

SEQ ID NO: 1121887 - RNA, 22 nt, Human
ccccaaagcccaccuuucagac

SEQ ID NO: 1121888 - RNA, 24 nt, Human
ccccaaagcccaccuuucagaccc

SEQ ID NO: 1121889 - RNA, 22 nt, Human
cccccagcugccaagcaucccc

SEQ ID NO: 1121890 - RNA, 22 nt, Human
cccccuccucaccauuucuacc

SEQ ID NO: 1121891 - RNA, 24 nt, Human
ccuggaaauguaauucucuucccc

SEQ ID NO: 1121892 - RNA, 21 nt, Human
cuaaagauucugccaaucuga

SEQ ID NO: 1121893 - RNA, 22 nt, Human
cuacuacgaaaggccaaaacag

SEQ ID NO: 1121894 - RNA, 19 nt, Human
cuaggaaaacuguugccaa

SEQ ID NO: 1121895 - RNA, 19 nt, Human
cucacccccagcugccaag

SEQ ID NO: 1121896 - RNA, 22 nt, Human
cucccugagcccucggcuuaua

SEQ ID NO: 1121897 - RNA, 18 nt, Human
cuccucacccccagcugc

SEQ ID NO: 1121898 - RNA, 24 nt, Human
cugccaaucugauucugcugcccg

SEQ ID NO: 1121899 - RNA, 21 nt, Human
cuucccccuccucaccauuuc

SEQ ID NO: 1121900 - RNA, 24 nt, Human
cuuuuuguuguuguuuauugaaaa

SEQ ID NO: 1121901 - RNA, 20 nt, Human
gaaaaaaaugcaauacaaga

SEQ ID NO: 1121902 - RNA, 25 nt, Human
gaagcaagaccaaacagauaucuaa

SEQ ID NO: 1121903 - RNA, 24 nt, Human
gcaagaccaaacagauaucuaaac

SEQ ID NO: 1121904 - RNA, 19 nt, Human
gcaauacaagaagcaagac

SEQ ID NO: 1121905 - RNA, 23 nt, Human
gcaauacaagaagcaagaccaaa

SEQ ID NO: 1121906 - RNA, 23 nt, Human
gcgguggagggggggguggggac

SEQ ID NO: 1121907 - RNA, 18 nt, Human
gcucuggcuccaguuccc

SEQ ID NO: 1121908 - RNA, 22 nt, Human
ggaaauguaauucucuuccccc

SEQ ID NO: 1121909 - RNA, 21 nt, Human
ggagggggggguggggacggg

SEQ ID NO: 1121910 - RNA, 24 nt, Human
guaauucucuucccccuccucacc

SEQ ID NO: 1121911 - RNA, 20 nt, Human
gucuccucacccccagcugc

SEQ ID NO: 1121912 - RNA, 22 nt, Human
uacaagaagcaagaccaaacag

SEQ ID NO: 1121913 - RNA, 19 nt, Human
uaccccaaagcccaccuuu

SEQ ID NO: 1121914 - RNA, 20 nt, Human
uacgaaaggccaaaacagca

SEQ ID NO: 1121915 - RNA, 23 nt, Human
uagaaacaaccagccuggggcug

SEQ ID NO: 1121916 - RNA, 21 nt, Human
ucuaggaaaacuguugccaag

SEQ ID NO: 1121917 - RNA, 19 nt, Human
ugagauccugggcagaaau

SEQ ID NO: 1121918 - RNA, 28 nt, Human
ugagcccucggcuuauaaauacaggucu

SEQ ID NO: 1121919 - RNA, 19 nt, Human
ugaugggcccagcggugga

SEQ ID NO: 1121920 - RNA, 20 nt, Human
ugccagaguccucauguggc

SEQ ID NO: 1121921 - RNA, 21 nt, Human
ugcuuugugggugggugccag

SEQ ID NO: 1121922 - RNA, 23 nt, Human
ugggucacggggcccugacgggu

SEQ ID NO: 1121923 - RNA, 18 nt, Human
uggugugucugagucacu

SEQ ID NO: 1121924 - RNA, 20 nt, Human
uuaaaaaaaauuuacaaagg

SEQ ID NO: 1121925 - RNA, 20 nt, Human
uucucuucccccuccucacc

SEQ ID NO: 1121926 - RNA, 22 nt, Human
uuucccgugagcaucaaaaggc

SEQ ID NO: 1121927 - RNA, 21 nt, Human
aaaacaaaacaaaacaaaaaa

SEQ ID NO: 1121928 - RNA, 28 nt, Human
aaaacaagaaauagaacaaaagggaccc

SEQ ID NO: 1121929 - RNA, 22 nt, Human
aaaaccugugaaaaaagaggcc

SEQ ID NO: 1121930 - RNA, 20 nt, Human
aaacaaaaaacagagcuuac

SEQ ID NO: 1121931 - RNA, 19 nt, Human
aaacaaaacaaaacaaaaa

SEQ ID NO: 1121932 - RNA, 22 nt, Human
aaacaaaacaaaacaaaacaaa

SEQ ID NO: 1121933 - RNA, 22 nt, Human
aaacaaaacaaaacaaaacaaa

SEQ ID NO: 1121934 - RNA, 20 nt, Human
aaacagagcuuacgacugcg

SEQ ID NO: 1121935 - RNA, 18 nt, Human
aaacgcuagugaaaaaca

SEQ ID NO: 1121936 - RNA, 21 nt, Human
aaagaugcauuucaaagcuaa

SEQ ID NO: 1121937 - RNA, 23 nt, Human
aaagcccuuucucccuucugccc

SEQ ID NO: 1121938 - RNA, 24 nt, Human
aaagcccuuucucccuucugcccc

SEQ ID NO: 1121939 - RNA, 19 nt, Human
aaagucaaacauccaaaug

SEQ ID NO: 1121940 - RNA, 21 nt, Human
aaauaaaugcaaugagaccug

SEQ ID NO: 1121941 - RNA, 22 nt, Human
aacaaaacaaaacaaaaaacag

SEQ ID NO: 1121942 - RNA, 18 nt, Human
aacauucaaugcaaaacc

SEQ ID NO: 1121943 - RNA, 19 nt, Human
aaccucugugugucaccuc

SEQ ID NO: 1121944 - RNA, 24 nt, Human
aagugacaccguaucuaagagcac

SEQ ID NO: 1121945 - RNA, 22 nt, Human
aauccugcuccucacaguuucu

SEQ ID NO: 1121946 - RNA, 26 nt, Human
acaaaacaaaacaaaaaacagagcuu

SEQ ID NO: 1121947 - RNA, 27 nt, Human
acaaaacaaaacaaaacaaaacaaaaa

SEQ ID NO: 1121948 - RNA, 18 nt, Human
acaccguaucuaagagca

SEQ ID NO: 1121949 - RNA, 24 nt, Human
agcuauccccaauuuucuaggggc

SEQ ID NO: 1121950 - RNA, 22 nt, Human
aggaggaggggggacaaugggc

SEQ ID NO: 1121951 - RNA, 23 nt, Human
aggaggaggggggacaaugggcu

SEQ ID NO: 1121952 - RNA, 27 nt, Human
agugaaaaacaagaaauagaacaaaag

SEQ ID NO: 1121953 - RNA, 18 nt, Human
auagaacaaaacacaucu

SEQ ID NO: 1121954 - RNA, 18 nt, Human
auauucccgggguuccug

SEQ ID NO: 1121955 - RNA, 26 nt, Human
aucaacaucaacacuaagaaauuuug

SEQ ID NO: 1121956 - RNA, 25 nt, Human
auccuggcuuuuagucccacucacc

SEQ ID NO: 1121957 - RNA, 18 nt, Human
auggccaaugcuugaugu

SEQ ID NO: 1121958 - RNA, 23 nt, Human
caaaacaaaaaacagagcuuacg

SEQ ID NO: 1121959 - RNA, 27 nt, Human
caaaacaaaacaaaacaaaaaacagag

SEQ ID NO: 1121960 - RNA, 24 nt, Human
caaaacaaaacaaaacaaaacaaa

SEQ ID NO: 1121961 - RNA, 25 nt, Human
caaaacaaaacaaaacaaaacaaaa

SEQ ID NO: 1121962 - RNA, 23 nt, Human
caaacauccaaaugguugaccac

SEQ ID NO: 1121963 - RNA, 21 nt, Human
caaacgcuagugaaaaacaag

SEQ ID NO: 1121964 - RNA, 22 nt, Human
caaagaugcauuucaaagcuaa

SEQ ID NO: 1121965 - RNA, 18 nt, Human
caaagcccuuucucccuu

SEQ ID NO: 1121966 - RNA, 24 nt, Human
caaagcuauccccaauuuucuagg

SEQ ID NO: 1121967 - RNA, 20 nt, Human
caacaggagaggguuccccu

SEQ ID NO: 1121968 - RNA, 24 nt, Human
caacaggagaggguuccccuggga

SEQ ID NO: 1121969 - RNA, 18 nt, Human
caaugcauggccucaagc

SEQ ID NO: 1121970 - RNA, 21 nt, Human
caaugggcuccaucuuuaaau

SEQ ID NO: 1121971 - RNA, 21 nt, Human
caccccagaauagacugcgga

SEQ ID NO: 1121972 - RNA, 19 nt, Human
caccccugcaguucccugu

SEQ ID NO: 1121973 - RNA, 21 nt, Human
cagcaaagcccuuucucccuu

SEQ ID NO: 1121974 - RNA, 24 nt, Human
caguuuauuguaucagaaaauaau

SEQ ID NO: 1121975 - RNA, 19 nt, Human
cauggccaaagcuaucccc

SEQ ID NO: 1121976 - RNA, 21 nt, Human
cauggccaaagcuauccccaa

SEQ ID NO: 1121977 - RNA, 21 nt, Human
ccaacccagaagcuaucaaca

SEQ ID NO: 1121978 - RNA, 25 nt, Human
ccagaagcuaucaacaucaacacua

SEQ ID NO: 1121979 - RNA, 22 nt, Human
ccaguugccccgcuugucuucc

SEQ ID NO: 1121980 - RNA, 22 nt, Human
cccauggccaaagcuaucccca

SEQ ID NO: 1121981 - RNA, 19 nt, Human
ccccugggagcagcagcug

SEQ ID NO: 1121982 - RNA, 21 nt, Human
cccucuggcuucagaggaagc

SEQ ID NO: 1121983 - RNA, 26 nt, Human
ccgaaaacaaaacaaaacaaaacaaa

SEQ ID NO: 1121984 - RNA, 19 nt, Human
ccucccauggccaaagcua

SEQ ID NO: 1121985 - RNA, 21 nt, Human
ccuuagagaauccugcuccuc

SEQ ID NO: 1121986 - RNA, 19 nt, Human
ccuucugccccaggugagu

SEQ ID NO: 1121987 - RNA, 24 nt, Human
cgaaaacaaaacaaaacaaaacaa

SEQ ID NO: 1121988 - RNA, 18 nt, Human
cuagggccuuucacccuc

SEQ ID NO: 1121989 - RNA, 19 nt, Human
cucugugacuuguccccac

SEQ ID NO: 1121990 - RNA, 24 nt, Human
cucugugacuuguccccacucauu

SEQ ID NO: 1121991 - RNA, 21 nt, Human
cugaggaggaggggggacaau

SEQ ID NO: 1121992 - RNA, 19 nt, Human
cuuccagccccuuaacugg

SEQ ID NO: 1121993 - RNA, 18 nt, Human
cuugcuccucccauggcc

SEQ ID NO: 1121994 - RNA, 23 nt, Human
gaaaaacaagaaauagaacaaaa

SEQ ID NO: 1121995 - RNA, 18 nt, Human
gaagagugaacaagaaug

SEQ ID NO: 1121996 - RNA, 24 nt, Human
gaccugguccuucuauuucucaga

SEQ ID NO: 1121997 - RNA, 20 nt, Human
gagaggguuccccugggagc

SEQ ID NO: 1121998 - RNA, 25 nt, Human
gagccaugccaucagcuugcuccua

SEQ ID NO: 1121999 - RNA, 19 nt, Human
gccaaagcuauccccaauu

SEQ ID NO: 1122000 - RNA, 24 nt, Human
gcccggggauugguacaauggugu

SEQ ID NO: 1122001 - RNA, 21 nt, Human
gccgaaaacaaaacaaaacaa

SEQ ID NO: 1122002 - RNA, 26 nt, Human
gcuuacgacugcguaguguucuugcu

SEQ ID NO: 1122003 - RNA, 19 nt, Human
ggcagccugagacuucagc

SEQ ID NO: 1122004 - RNA, 20 nt, Human
gggggacaaugggcuccauc

SEQ ID NO: 1122005 - RNA, 21 nt, Human
gggugagcugaggaggagggg

SEQ ID NO: 1122006 - RNA, 21 nt, Human
gggugagcugaggaggagggg

SEQ ID NO: 1122007 - RNA, 19 nt, Human
ggugagcugaggaggaggg

SEQ ID NO: 1122008 - RNA, 23 nt, Human
ggugugggcaaacacccccucug

SEQ ID NO: 1122009 - RNA, 25 nt, Human
gguuuuguaggccuuaagugguagg

SEQ ID NO: 1122010 - RNA, 19 nt, Human
guaaacauguguuccuuuu

SEQ ID NO: 1122011 - RNA, 24 nt, Human
gugaaaaaagaggccauguggccg

SEQ ID NO: 1122012 - RNA, 25 nt, Human
gugaaaaacaagaaauagaacaaaa

SEQ ID NO: 1122013 - RNA, 22 nt, Human
gugaaagucaaacauccaaaug

SEQ ID NO: 1122014 - RNA, 20 nt, Human
guguuccuuuugagaaaaua

SEQ ID NO: 1122015 - RNA, 26 nt, Human
uaacuaacuuugcuagggccuuucac

SEQ ID NO: 1122016 - RNA, 19 nt, Human
uaacugggagaauugugcu

SEQ ID NO: 1122017 - RNA, 21 nt, Human
uaagagcaccuuagagaaucc

SEQ ID NO: 1122018 - RNA, 22 nt, Human
uagaacaaaacacaucugcgga

SEQ ID NO: 1122019 - RNA, 24 nt, Human
uagggccuuucacccucuggcuuc

SEQ ID NO: 1122020 - RNA, 24 nt, Human
ucaaacauccaaaugguugacuag

SEQ ID NO: 1122021 - RNA, 24 nt, Human
ucaaugcaaaaccugugaaaaaag

SEQ ID NO: 1122022 - RNA, 24 nt, Human
ucaauguccaguucaauacuuucu

SEQ ID NO: 1122023 - RNA, 19 nt, Human
uccacauguaugugagaga

SEQ ID NO: 1122024 - RNA, 23 nt, Human
uccaugggugagcugaggaggag

SEQ ID NO: 1122025 - RNA, 27 nt, Human
uccaugggugagcugaggaggaggggg

SEQ ID NO: 1122026 - RNA, 22 nt, Human
uccccaauuuucuaggggcaag

SEQ ID NO: 1122027 - RNA, 24 nt, Human
uccucacaguuucuagggucccau

SEQ ID NO: 1122028 - RNA, 22 nt, Human
ucucugugacuuguccccacuc

SEQ ID NO: 1122029 - RNA, 21 nt, Human
ucugugacuuguccccacuca

SEQ ID NO: 1122030 - RNA, 22 nt, Human
ugaaaaacaagaaauagaacaa

SEQ ID NO: 1122031 - RNA, 18 nt, Human
ugaaagucaaacauccaa

SEQ ID NO: 1122032 - RNA, 21 nt, Human
ugacucuuagacagaugcccc

SEQ ID NO: 1122033 - RNA, 24 nt, Human
ugagagaaauaauagagaauggug

SEQ ID NO: 1122034 - RNA, 19 nt, Human
ugagcugaggaggaggggg

SEQ ID NO: 1122035 - RNA, 20 nt, Human
ugaggaggaggggggacaau

SEQ ID NO: 1122036 - RNA, 21 nt, Human
ugaggaggaggggggacaaug

SEQ ID NO: 1122037 - RNA, 23 nt, Human
ugcauggccucaagcuucauuca

SEQ ID NO: 1122038 - RNA, 18 nt, Human
ugcccagauacgcccaau

SEQ ID NO: 1122039 - RNA, 19 nt, Human
ugccccgcuugucuuccag

SEQ ID NO: 1122040 - RNA, 21 nt, Human
ugccccgcuugucuuccagcc

SEQ ID NO: 1122041 - RNA, 23 nt, Human
ugccccgcuugucuuccagcccc

SEQ ID NO: 1122042 - RNA, 21 nt, Human
ugccgaaaacaaaacaaaaca

SEQ ID NO: 1122043 - RNA, 23 nt, Human
ugccgaaaacaaaacaaaacaaa

SEQ ID NO: 1122044 - RNA, 24 nt, Human
ugcuguauuagcaguggcuguaag

SEQ ID NO: 1122045 - RNA, 21 nt, Human
uggcaaagaugcauuucaaag

SEQ ID NO: 1122046 - RNA, 21 nt, Human
uggcuugggaugacugaagag

SEQ ID NO: 1122047 - RNA, 19 nt, Human
ugggaugacugaagaguga

SEQ ID NO: 1122048 - RNA, 18 nt, Human
ugggcaaacacccccucu

SEQ ID NO: 1122049 - RNA, 18 nt, Human
ugggugagcugaggagga

SEQ ID NO: 1122050 - RNA, 25 nt, Human
uggugccgaaaacaaaacaaaacaa

SEQ ID NO: 1122051 - RNA, 24 nt, Human
uguuucacugaguauccuguuuau

SEQ ID NO: 1122052 - RNA, 18 nt, Human
uuaaaguucacgugaggc

SEQ ID NO: 1122053 - RNA, 25 nt, Human
uucacugaguauccuguuuauucca

SEQ ID NO: 1122054 - RNA, 23 nt, Human
uuccacuuaaucguagacacucu

SEQ ID NO: 1122055 - RNA, 19 nt, Human
uucgaauuuucccuuuugg

SEQ ID NO: 1122056 - RNA, 19 nt, Human
uucgugaacaguuucuaca

SEQ ID NO: 1122057 - RNA, 24 nt, Human
uugcugucauucuccuuuccauuu

SEQ ID NO: 1122058 - RNA, 19 nt, Human
uuguaguaaacauguguuc

SEQ ID NO: 1122059 - RNA, 25 nt, Human
uuucuuguccugugguucagcuuca

SEQ ID NO: 1122060 - RNA, 20 nt, Human
aagugagaacaugcgguguu

SEQ ID NO: 1122061 - RNA, 21 nt, Human
accacauuuucuuuauccagu

SEQ ID NO: 1122062 - RNA, 19 nt, Human
acuaauuuacauucccacc

SEQ ID NO: 1122063 - RNA, 23 nt, Human
agggaagacaucauuccagggcu

SEQ ID NO: 1122064 - RNA, 18 nt, Human
augauaguuucuuuugcu

SEQ ID NO: 1122065 - RNA, 18 nt, Human
auggcuagccaguucucc

SEQ ID NO: 1122066 - RNA, 21 nt, Human
auggcugcaugguauuccaug

SEQ ID NO: 1122067 - RNA, 24 nt, Human
augguauuucugguucuaaaucuu

SEQ ID NO: 1122068 - RNA, 18 nt, Human
caaaauaucccaaguguc

SEQ ID NO: 1122069 - RNA, 19 nt, Human
caacagcguaaaaacguug

SEQ ID NO: 1122070 - RNA, 24 nt, Human
cacucugaugauaguuucuuuugc

SEQ ID NO: 1122071 - RNA, 25 nt, Human
cagaaugugauccagaaaagcaggu

SEQ ID NO: 1122072 - RNA, 22 nt, Human
caguuuucagaaugugauccag

SEQ ID NO: 1122073 - RNA, 20 nt, Human
caucccugucccugcaaagg

SEQ ID NO: 1122074 - RNA, 23 nt, Human
ccauuugucaauuuuugcuuuug

SEQ ID NO: 1122075 - RNA, 21 nt, Human
ccgcugggagccuggcuucug

SEQ ID NO: 1122076 - RNA, 21 nt, Human
ccuaucaacccuuccuucacc

SEQ ID NO: 1122077 - RNA, 22 nt, Human
ccuaucaacccuuccuucaccu

SEQ ID NO: 1122078 - RNA, 22 nt, Human
ccuccagcuccaucccuguccc

SEQ ID NO: 1122079 - RNA, 24 nt, Human
ccuuccccauugcuuguuuuuguc

SEQ ID NO: 1122080 - RNA, 24 nt, Human
cuauacugucuuccacaaugguug

SEQ ID NO: 1122081 - RNA, 23 nt, Human
cuccaccccgcacucccccaacu

SEQ ID NO: 1122082 - RNA, 19 nt, Human
cuccgcuguccucccaggu

SEQ ID NO: 1122083 - RNA, 20 nt, Human
cucucuccaccccgcacucc

SEQ ID NO: 1122084 - RNA, 22 nt, Human
cucuggcucccccuuuggcucc

SEQ ID NO: 1122085 - RNA, 24 nt, Human
cugcaccuaucaacccuuccuuca

SEQ ID NO: 1122086 - RNA, 19 nt, Human
cugucucuuucucucugga

SEQ ID NO: 1122087 - RNA, 24 nt, Human
cuuccacaaugguugaacuaauuu

SEQ ID NO: 1122088 - RNA, 23 nt, Human
gaagaucagaugguuguagaugu

SEQ ID NO: 1122089 - RNA, 23 nt, Human
gcaccauuuauuaaauagggaau

SEQ ID NO: 1122090 - RNA, 24 nt, Human
gcccacuuuuuaaugggguuguuu

SEQ ID NO: 1122091 - RNA, 24 nt, Human
gcuccuggcuccgcuguccuccca

SEQ ID NO: 1122092 - RNA, 21 nt, Human
ggaaucccuuccccauugcuu

SEQ ID NO: 1122093 - RNA, 19 nt, Human
ggcugcaugguauuccaug

SEQ ID NO: 1122094 - RNA, 18 nt, Human
gguuacuguagccuugua

SEQ ID NO: 1122095 - RNA, 23 nt, Human
guaguauaguuugaaguugggua

SEQ ID NO: 1122096 - RNA, 21 nt, Human
guuaauuuuuguguaaggugu

SEQ ID NO: 1122097 - RNA, 24 nt, Human
uaagcccggcaugcauuagcuauu

SEQ ID NO: 1122098 - RNA, 24 nt, Human
uaagugagaacaugcgguguuugg

SEQ ID NO: 1122099 - RNA, 21 nt, Human
uacaagcucuuguuugguucu

SEQ ID NO: 1122100 - RNA, 22 nt, Human
uagaauuauuuauauuccuuug

SEQ ID NO: 1122101 - RNA, 23 nt, Human
uagcuauuuuuccugaugcucuc

SEQ ID NO: 1122102 - RNA, 24 nt, Human
uagcuauuuuuccugaugcucucu

SEQ ID NO: 1122103 - RNA, 29 nt, Human
uaucaacccuuccuucaccuagguauuaa

SEQ ID NO: 1122104 - RNA, 24 nt, Human
uauugugaauagugcggcauugaa

SEQ ID NO: 1122105 - RNA, 19 nt, Human
ucagcucccauuuauaagu

SEQ ID NO: 1122106 - RNA, 24 nt, Human
uccacaaugguugaacuaauuuac

SEQ ID NO: 1122107 - RNA, 21 nt, Human
ucccccuuuggcucccuggaa

SEQ ID NO: 1122108 - RNA, 20 nt, Human
ucccugcaaaggauaugauc

SEQ ID NO: 1122109 - RNA, 19 nt, Human
ucccuguguccauguguuc

SEQ ID NO: 1122110 - RNA, 24 nt, Human
ucucuaaugaucaguaauguugag

SEQ ID NO: 1122111 - RNA, 19 nt, Human
ucucucuggaccaggcugg

SEQ ID NO: 1122112 - RNA, 21 nt, Human
ucucuggaccaggcuggagcc

SEQ ID NO: 1122113 - RNA, 19 nt, Human
ucuuucucucuggaccagg

SEQ ID NO: 1122114 - RNA, 24 nt, Human
ucuuucucucuggaccaggcugga

SEQ ID NO: 1122115 - RNA, 18 nt, Human
ugaauguuauugccuaga

SEQ ID NO: 1122116 - RNA, 19 nt, Human
ugacacagcugcggagcuc

SEQ ID NO: 1122117 - RNA, 24 nt, Human
ugagaugguaucucauugugguuu

SEQ ID NO: 1122118 - RNA, 22 nt, Human
ugauaguuucuuuugcugugca

SEQ ID NO: 1122119 - RNA, 21 nt, Human
ugcaccuaucaacccuuccuu

SEQ ID NO: 1122120 - RNA, 22 nt, Human
ugcggcauugaacauaugcaug

SEQ ID NO: 1122121 - RNA, 26 nt, Human
ugcucucuccaccccgcacuccccca

SEQ ID NO: 1122122 - RNA, 21 nt, Human
uguaaggaaggggccaguuuc

SEQ ID NO: 1122123 - RNA, 19 nt, Human
ugugaagaaugucaguggu

SEQ ID NO: 1122124 - RNA, 23 nt, Human
ugugauccagaaaagcagguuuc

SEQ ID NO: 1122125 - RNA, 22 nt, Human
uguuuugguuacuguagccuug

SEQ ID NO: 1122126 - RNA, 19 nt, Human
uuacauagguaaacaugug

SEQ ID NO: 1122127 - RNA, 21 nt, Human
uuauaagugagaacaugcggu

SEQ ID NO: 1122128 - RNA, 24 nt, Human
uuauaagugagaacaugcgguguu

SEQ ID NO: 1122129 - RNA, 25 nt, Human
uuccaugguguauauauaccacauu

SEQ ID NO: 1122130 - RNA, 18 nt, Human
uucccaguaaugggauug

SEQ ID NO: 1122131 - RNA, 24 nt, Human
uuccuuguagauucuggauauuag

SEQ ID NO: 1122132 - RNA, 18 nt, Human
uuggguagcaugaugccu

SEQ ID NO: 1122133 - RNA, 20 nt, Human
uugguuuuacguuuaagucu

SEQ ID NO: 1122134 - RNA, 23 nt, Human
uuguaguauaguuugaaguuggg

SEQ ID NO: 1122135 - RNA, 20 nt, Human
uugucuguucacucugauga

SEQ ID NO: 1122136 - RNA, 19 nt, Human
uuuccugaugcucucucca

SEQ ID NO: 1122137 - RNA, 18 nt, Human
uuucggaagaucagaugg

SEQ ID NO: 1122138 - RNA, 21 nt, Human
uuucucucuggaccaggcugg

SEQ ID NO: 1122139 - RNA, 18 nt, Human
uuucugguucuaaaucuu

SEQ ID NO: 1122140 - RNA, 22 nt, Human
uuugcugaggauaaugccucca

SEQ ID NO: 1122141 - RNA, 21 nt, Human
uuuguagcauaccaugcuguu

SEQ ID NO: 1122142 - RNA, 19 nt, Human
aacauggagaaaccccauc

SEQ ID NO: 1122143 - RNA, 20 nt, Human
aacauggagaaaccccaucu

SEQ ID NO: 1122144 - RNA, 21 nt, Human
aacauggagaaaccccaucuc

SEQ ID NO: 1122145 - RNA, 18 nt, Human
aagcccauuaaaaaccaa

SEQ ID NO: 1122146 - RNA, 25 nt, Human
aaggugggcagaucaccugagguca

SEQ ID NO: 1122147 - RNA, 24 nt, Human
aaucacucgaauccgggagacaga

SEQ ID NO: 1122148 - RNA, 24 nt, Human
accccaucucuacuaaaaauacaa

SEQ ID NO: 1122149 - RNA, 25 nt, Human
accuuccccagggccuccaggagca

SEQ ID NO: 1122150 - RNA, 20 nt, Human
agacagagguugcagugagc

SEQ ID NO: 1122151 - RNA, 18 nt, Human
agagguugcagugagcag

SEQ ID NO: 1122152 - RNA, 23 nt, Human
agcacuuuggaggccaagguggg

SEQ ID NO: 1122153 - RNA, 23 nt, Human
agcagggugugguugugcaugcc

SEQ ID NO: 1122154 - RNA, 24 nt, Human
aggcaggagaaucacucgaauccg

SEQ ID NO: 1122155 - RNA, 21 nt, Human
aggccaaggugggcagaucac

SEQ ID NO: 1122156 - RNA, 19 nt, Human
aggcugaggcaggagaauc

SEQ ID NO: 1122157 - RNA, 22 nt, Human
aggugggcagaucaccugaggg

SEQ ID NO: 1122158 - RNA, 18 nt, Human
caagcuccuggccgggca

SEQ ID NO: 1122159 - RNA, 24 nt, Human
caaggugggcagaucaccugaggu

SEQ ID NO: 1122160 - RNA, 24 nt, Human
cacaccuguaauuccagcacuuug

SEQ ID NO: 1122161 - RNA, 18 nt, Human
caccuguaauuccagcac

SEQ ID NO: 1122162 - RNA, 23 nt, Human
caccuguaauuccagcacuuugg

SEQ ID NO: 1122163 - RNA, 27 nt, Human
cagaucaccugaggucagaaguucgag

SEQ ID NO: 1122164 - RNA, 23 nt, Human
cagcacuuuggaggccaaggugg

SEQ ID NO: 1122165 - RNA, 24 nt, Human
cagccugaccaacauggagaaacc

SEQ ID NO: 1122166 - RNA, 24 nt, Human
cagcuacucgggaggcugaggcag

SEQ ID NO: 1122167 - RNA, 33 nt, Human
ccaagcuccuggccgggcacgguggcucacagu

SEQ ID NO: 1122168 - RNA, 24 nt, Human
ccagcacuuuggaggccaaggugg

SEQ ID NO: 1122169 - RNA, 21 nt, Human
ccccaaccuuccaucaaggcc

SEQ ID NO: 1122170 - RNA, 21 nt, Human
ccccagggccuccaggagcag

SEQ ID NO: 1122171 - RNA, 23 nt, Human
ccccagggccuccaggagcagug

SEQ ID NO: 1122172 - RNA, 23 nt, Human
ccuccagggcaaggcugccgcuu

SEQ ID NO: 1122173 - RNA, 24 nt, Human
ccugaccaacauggagaaacccca

SEQ ID NO: 1122174 - RNA, 22 nt, Human
ccugaggucagaaguucgagac

SEQ ID NO: 1122175 - RNA, 21 nt, Human
ccuguaaucccagcuacucgg

SEQ ID NO: 1122176 - RNA, 21 nt, Human
cggcaagcccauuaaaaacca

SEQ ID NO: 1122177 - RNA, 24 nt, Human
cggcaagcccauuaaaaaccaagc

SEQ ID NO: 1122178 - RNA, 24 nt, Human
cgggagacagagguugcagugagc

SEQ ID NO: 1122179 - RNA, 24 nt, Human
cucacaccuguaauuccagcacuu

SEQ ID NO: 1122180 - RNA, 20 nt, Human
cuccaggagcagugcuucuc

SEQ ID NO: 1122181 - RNA, 23 nt, Human
cuccagggcaaggcugccgcuuc

SEQ ID NO: 1122182 - RNA, 23 nt, Human
gagaccagccugaccaacaugga

SEQ ID NO: 1122183 - RNA, 24 nt, Human
gaucaccugaggucagaaguucga

SEQ ID NO: 1122184 - RNA, 23 nt, Human
gcaggagaaucacucgaauccgg

SEQ ID NO: 1122185 - RNA, 22 nt, Human
gccacggcaagcccauuaaaaa

SEQ ID NO: 1122186 - RNA, 18 nt, Human
gccuccaggagcagugcu

SEQ ID NO: 1122187 - RNA, 22 nt, Human
ggaggccaaggugggcagauca

SEQ ID NO: 1122188 - RNA, 23 nt, Human
ggcacgguggcucacaccuguaa

SEQ ID NO: 1122189 - RNA, 23 nt, Human
gggaggcugaggcaggagaauca

SEQ ID NO: 1122190 - RNA, 22 nt, Human
gggugugguugugcaugccugu

SEQ ID NO: 1122191 - RNA, 23 nt, Human
gguggcucacaccuguaauucca

SEQ ID NO: 1122192 - RNA, 24 nt, Human
gguggcucacaccuguaauuccag

SEQ ID NO: 1122193 - RNA, 24 nt, Human
gguugugcaugccuguaaucccag

SEQ ID NO: 1122194 - RNA, 23 nt, Human
guggcucacaccuguaauuccag

SEQ ID NO: 1122195 - RNA, 22 nt, Human
uaaaaauacaaaauuagcaggg

SEQ ID NO: 1122196 - RNA, 23 nt, Human
uaaaaauacaaaauuagcagggu

SEQ ID NO: 1122197 - RNA, 24 nt, Human
uaggcucuggaucucucggccccc

SEQ ID NO: 1122198 - RNA, 24 nt, Human
ucacaaguccccucccauaggcuc

SEQ ID NO: 1122199 - RNA, 20 nt, Human
ucccauaggcucuggaucuc

SEQ ID NO: 1122200 - RNA, 25 nt, Human
uccccagggccuccaggagcagugc

SEQ ID NO: 1122201 - RNA, 21 nt, Human
uccgggagacagagguugcag

SEQ ID NO: 1122202 - RNA, 25 nt, Human
ucgggaggcugaggcaggagaauca

SEQ ID NO: 1122203 - RNA, 20 nt, Human
ucucuacuaaaaauacaaaa

SEQ ID NO: 1122204 - RNA, 20 nt, Human
ugaggcaggagaaucacucg

SEQ ID NO: 1122205 - RNA, 24 nt, Human
ugaggcaggagaaucacucgaauc

SEQ ID NO: 1122206 - RNA, 25 nt, Human
ugaggcaggagaaucacucgaaucc

SEQ ID NO: 1122207 - RNA, 21 nt, Human
ugccagcacucacaagucccc

SEQ ID NO: 1122208 - RNA, 23 nt, Human
ugccuguaaucccagcuacucgg

SEQ ID NO: 1122209 - RNA, 24 nt, Human
ugccuguaaucccagcuacucggg

SEQ ID NO: 1122210 - RNA, 23 nt, Human
uggaucucucggccccccaaccu

SEQ ID NO: 1122211 - RNA, 20 nt, Human
uggccuggcuuggccacggc

SEQ ID NO: 1122212 - RNA, 21 nt, Human
uggcucacaccuguaauucca

SEQ ID NO: 1122213 - RNA, 22 nt, Human
uggcucacaccuguaauuccag

SEQ ID NO: 1122214 - RNA, 24 nt, Human
uggcucacaccuguaauuccagca

SEQ ID NO: 1122215 - RNA, 18 nt, Human
ugggcagaucaccugagg

SEQ ID NO: 1122216 - RNA, 24 nt, Human
ugggcagaucaccugaggucagaa

SEQ ID NO: 1122217 - RNA, 24 nt, Human
ugguugugcaugccuguaauccca

SEQ ID NO: 1122218 - RNA, 18 nt, Human
ugugcaugccuguaaucc

SEQ ID NO: 1122219 - RNA, 21 nt, Human
ugugcaugccuguaaucccag

SEQ ID NO: 1122220 - RNA, 27 nt, Human
ugugcaugccuguaauccccggagccc

SEQ ID NO: 1122221 - RNA, 20 nt, Human
uuagcagggugugguugugc

SEQ ID NO: 1122222 - RNA, 19 nt, Human
aaagugcugggauuacagg

SEQ ID NO: 1122223 - RNA, 24 nt, Human
aaagugcugggauuacaggaguga

SEQ ID NO: 1122224 - RNA, 19 nt, Human
aaguagcugggacuacagg

SEQ ID NO: 1122225 - RNA, 20 nt, Human
aaguagcugggacuacaggc

SEQ ID NO: 1122226 - RNA, 25 nt, Human
aaguagcugggacuacaggcgccca

SEQ ID NO: 1122227 - RNA, 18 nt, Human
aagugcugggauuacagg

SEQ ID NO: 1122228 - RNA, 22 nt, Human
aagugcugggauuacaggaguc

SEQ ID NO: 1122229 - RNA, 26 nt, Human
aagugcugggauuacaggagugagcc

SEQ ID NO: 1122230 - RNA, 18 nt, Human
acagagcaccucagcacc

SEQ ID NO: 1122231 - RNA, 21 nt, Human
acagcaccagccugcugcaga

SEQ ID NO: 1122232 - RNA, 21 nt, Human
acaggcgcccaccacuacgcc

SEQ ID NO: 1122233 - RNA, 19 nt, Human
acccuguuagccaggaugg

SEQ ID NO: 1122234 - RNA, 20 nt, Human
accucugaccugggaacgag

SEQ ID NO: 1122235 - RNA, 20 nt, Human
acgugguuucacccuguuag

SEQ ID NO: 1122236 - RNA, 21 nt, Human
acugcaaaaagaaaaacaccu

SEQ ID NO: 1122237 - RNA, 20 nt, Human
acugcaagcuccgccucccg

SEQ ID NO: 1122238 - RNA, 19 nt, Human
agagguauuuuucuagagg

SEQ ID NO: 1122239 - RNA, 19 nt, Human
aggccacaccagaaaagga

SEQ ID NO: 1122240 - RNA, 25 nt, Human
aggcuggagugcaguggcgugaucu

SEQ ID NO: 1122241 - RNA, 20 nt, Human
aguagcacugaacauggcuc

SEQ ID NO: 1122242 - RNA, 19 nt, Human
agugcaguggcgugaucuc

SEQ ID NO: 1122243 - RNA, 20 nt, Human
agugcaguggcgugaucucg

SEQ ID NO: 1122244 - RNA, 23 nt, Human
agugcaguggcgugaucucggcu

SEQ ID NO: 1122245 - RNA, 24 nt, Human
agugcaguggcgugaucucggcuc

SEQ ID NO: 1122246 - RNA, 24 nt, Human
aucuaaggucagaaucugugaggu

SEQ ID NO: 1122247 - RNA, 24 nt, Human
caaagugcugggauuacaggagug

SEQ ID NO: 1122248 - RNA, 21 nt, Human
cacaccagaaaaggaaagcuu

SEQ ID NO: 1122249 - RNA, 19 nt, Human
cacagaaucuaaggucaga

SEQ ID NO: 1122250 - RNA, 20 nt, Human
cacagcaccagccugcugca

SEQ ID NO: 1122251 - RNA, 24 nt, Human
caccagaaaaggaaagcugggucc

SEQ ID NO: 1122252 - RNA, 19 nt, Human
caccagccugcugcagagu

SEQ ID NO: 1122253 - RNA, 18 nt, Human
cacccaucugcugaccuc

SEQ ID NO: 1122254 - RNA, 24 nt, Human
cacccuguuagccaggauggucuc

SEQ ID NO: 1122255 - RNA, 21 nt, Human
caccucagcaccacucgccug

SEQ ID NO: 1122256 - RNA, 22 nt, Human
cacgccauucuccugccucagc

SEQ ID NO: 1122257 - RNA, 22 nt, Human
cagcacuagguaaaacugcaaa

SEQ ID NO: 1122258 - RNA, 24 nt, Human
cagcugaaccccacauggugacau

SEQ ID NO: 1122259 - RNA, 25 nt, Human
caggcacuagcuacaaggccacacc

SEQ ID NO: 1122260 - RNA, 21 nt, Human
caggcgcccaccacuacgccu

SEQ ID NO: 1122261 - RNA, 23 nt, Human
cauuguuuaguaauuucuuaagc

SEQ ID NO: 1122262 - RNA, 19 nt, Human
ccaaagugcugggauuaca

SEQ ID NO: 1122263 - RNA, 21 nt, Human
ccaaagugcugggauuacagg

SEQ ID NO: 1122264 - RNA, 24 nt, Human
ccaaagugcugggauuacaggagu

SEQ ID NO: 1122265 - RNA, 22 nt, Human
ccacccagaaacacccaucugc

SEQ ID NO: 1122266 - RNA, 23 nt, Human
cccaaguagcugggacuacaggc

SEQ ID NO: 1122267 - RNA, 23 nt, Human
cccaaguagcugggacuacaggc

SEQ ID NO: 1122268 - RNA, 22 nt, Human
cccagaaacacccaucugcuga

SEQ ID NO: 1122269 - RNA, 22 nt, Human
cccaggcuggagugcaguggcg

SEQ ID NO: 1122270 - RNA, 24 nt, Human
cccaugccugacggcccacccaga

SEQ ID NO: 1122271 - RNA, 20 nt, Human
ccccacauggugacaucuuc

SEQ ID NO: 1122272 - RNA, 21 nt, Human
cccucgcgccgcgggcucccg

SEQ ID NO: 1122273 - RNA, 22 nt, Human
cccucgcgccgcgggcucccgu

SEQ ID NO: 1122274 - RNA, 23 nt, Human
ccucacgcccauuuacaggcccc

SEQ ID NO: 1122275 - RNA, 18 nt, Human
ccucgcgccgcgggcucc

SEQ ID NO: 1122276 - RNA, 20 nt, Human
ccugcugcagaguucaaaac

SEQ ID NO: 1122277 - RNA, 19 nt, Human
cgccucccggguucacgcc

SEQ ID NO: 1122278 - RNA, 24 nt, Human
cgcucugucgcccaggcuggagug

SEQ ID NO: 1122279 - RNA, 24 nt, Human
cuaaucacaguagcacugaacaug

SEQ ID NO: 1122280 - RNA, 24 nt, Human
cucagccucccaaguagcugggac

SEQ ID NO: 1122281 - RNA, 21 nt, Human
cucccggguucacgccauucu

SEQ ID NO: 1122282 - RNA, 22 nt, Human
cuccugaccucgugauccgccc

SEQ ID NO: 1122283 - RNA, 24 nt, Human
cucgcucugucgcccaggcuggag

SEQ ID NO: 1122284 - RNA, 23 nt, Human
cugccucagccucccaaguagcu

SEQ ID NO: 1122285 - RNA, 24 nt, Human
cuggagcacagagguauuuuucua

SEQ ID NO: 1122286 - RNA, 19 nt, Human
cugucgcccaggcuggagu

SEQ ID NO: 1122287 - RNA, 21 nt, Human
cuucaggacaggaacucuucc

SEQ ID NO: 1122288 - RNA, 23 nt, Human
gaaaaagaacugaacucccagca

SEQ ID NO: 1122289 - RNA, 21 nt, Human
gaaaaggaaagcuggguccug

SEQ ID NO: 1122290 - RNA, 21 nt, Human
gaacauggcucuagugagugg

SEQ ID NO: 1122291 - RNA, 22 nt, Human
gaccucgugauccgcccaucuc

SEQ ID NO: 1122292 - RNA, 22 nt, Human
gaccucgugauccgcccaucuc

SEQ ID NO: 1122293 - RNA, 24 nt, Human
gaccucgugauccgcccaucucgg

SEQ ID NO: 1122294 - RNA, 19 nt, Human
gagaagacagaugaugugg

SEQ ID NO: 1122295 - RNA, 21 nt, Human
gagacggagucucgcucuguc

SEQ ID NO: 1122296 - RNA, 18 nt, Human
gagcaccucagcaccacu

SEQ ID NO: 1122297 - RNA, 23 nt, Human
gagcugcccugggcuaaguucag

SEQ ID NO: 1122298 - RNA, 24 nt, Human
gaggaaaaagaacugaacucccag

SEQ ID NO: 1122299 - RNA, 21 nt, Human
gaugcaggcuggcagaaggga

SEQ ID NO: 1122300 - RNA, 18 nt, Human
gauuacaggagugagcca

SEQ ID NO: 1122301 - RNA, 24 nt, Human
gcaaggcaaggacaucagcaccuc

SEQ ID NO: 1122302 - RNA, 22 nt, Human
gccacuacacagcaccagccug

SEQ ID NO: 1122303 - RNA, 20 nt, Human
gcccaggcuggagugcagug

SEQ ID NO: 1122304 - RNA, 24 nt, Human
gcccaggcuggagugcaguggcgu

SEQ ID NO: 1122305 - RNA, 20 nt, Human
gccucagccucccaaguagc

SEQ ID NO: 1122306 - RNA, 25 nt, Human
gccucccggguucacgccauucucc

SEQ ID NO: 1122307 - RNA, 18 nt, Human
gccugacggcccacccag

SEQ ID NO: 1122308 - RNA, 24 nt, Human
gccuggcuaauuuuuuuguauuuu

SEQ ID NO: 1122309 - RNA, 25 nt, Human
gcucugucgcccaggcuggagugca

SEQ ID NO: 1122310 - RNA, 19 nt, Human
gcuggagugcaguggcgug

SEQ ID NO: 1122311 - RNA, 19 nt, Human
ggaaagcuggguccuggaa

SEQ ID NO: 1122312 - RNA, 24 nt, Human
ggauggucucgaucuccugaccuc

SEQ ID NO: 1122313 - RNA, 22 nt, Human
ggcuggagugcaguggcgugau

SEQ ID NO: 1122314 - RNA, 24 nt, Human
gggaaggaggccugaggagaggau

SEQ ID NO: 1122315 - RNA, 21 nt, Human
gugaucucggcucacugcaag

SEQ ID NO: 1122316 - RNA, 20 nt, Human
guugugguaaagccauagcc

SEQ ID NO: 1122317 - RNA, 21 nt, Human
uaaagccauagccagcccagc

SEQ ID NO: 1122318 - RNA, 26 nt, Human
uaaagccauagccagcccagcuccug

SEQ ID NO: 1122319 - RNA, 26 nt, Human
uaauuuuuuuguauuuuuaguagaga

SEQ ID NO: 1122320 - RNA, 18 nt, Human
uacaaggccacaccagaa

SEQ ID NO: 1122321 - RNA, 24 nt, Human
uacaggagugagccaccacgccca

SEQ ID NO: 1122322 - RNA, 21 nt, Human
uacuacuaaucacaguagcac

SEQ ID NO: 1122323 - RNA, 24 nt, Human
uaguagagacgugguuucacccug

SEQ ID NO: 1122324 - RNA, 26 nt, Human
uaguagagacgugguuucacccuguu

SEQ ID NO: 1122325 - RNA, 24 nt, Human
ucaaauaugguucccuaacuuaga

SEQ ID NO: 1122326 - RNA, 24 nt, Human
ucacccuguuagccaggauggucu

SEQ ID NO: 1122327 - RNA, 18 nt, Human
ucacugcaagcuccgccu

SEQ ID NO: 1122328 - RNA, 19 nt, Human
ucacugcaagcuccgccuc

SEQ ID NO: 1122329 - RNA, 24 nt, Human
ucacugcaagcuccgccucccggg

SEQ ID NO: 1122330 - RNA, 23 nt, Human
ucagcaccacucgccugaggaac

SEQ ID NO: 1122331 - RNA, 18 nt, Human
ucagccucccaaguagcu

SEQ ID NO: 1122332 - RNA, 20 nt, Human
ucagccucccaaguagcugg

SEQ ID NO: 1122333 - RNA, 24 nt, Human
ucaggacaggaacucuuccuuggu

SEQ ID NO: 1122334 - RNA, 18 nt, Human
ucccaaagugcugggauu

SEQ ID NO: 1122335 - RNA, 23 nt, Human
ucccaaagugcugggauuacagg

SEQ ID NO: 1122336 - RNA, 24 nt, Human
ucccaaguagcugggacuacaggc

SEQ ID NO: 1122337 - RNA, 21 nt, Human
ucccggguucacgccauucuc

SEQ ID NO: 1122338 - RNA, 24 nt, Human
ucccggguucacgccauucuccug

SEQ ID NO: 1122339 - RNA, 24 nt, Human
ucgcccaggcuggagugcaguggc

SEQ ID NO: 1122340 - RNA, 21 nt, Human
ucuagaggaaaaagaacugaa

SEQ ID NO: 1122341 - RNA, 26 nt, Human
ucuccugccucagccucccaaguagc

SEQ ID NO: 1122342 - RNA, 19 nt, Human
ucucgcucugucgcccagg

SEQ ID NO: 1122343 - RNA, 23 nt, Human
ucucgcucugucgcccaggcugg

SEQ ID NO: 1122344 - RNA, 24 nt, Human
ucucgcucugucgcccaggcugga

SEQ ID NO: 1122345 - RNA, 26 nt, Human
ucucgcucugucgcccaggcuggagu

SEQ ID NO: 1122346 - RNA, 27 nt, Human
ucucgcucugucgcccaggcuggagug

SEQ ID NO: 1122347 - RNA, 20 nt, Human
ucucggccucccaaagugcu

SEQ ID NO: 1122348 - RNA, 18 nt, Human
ucuuccagcaaggcaagg

SEQ ID NO: 1122349 - RNA, 24 nt, Human
ugaaccccacauggugacaucuua

SEQ ID NO: 1122350 - RNA, 23 nt, Human
ugagugggccucagucaguucag

SEQ ID NO: 1122351 - RNA, 24 nt, Human
ugauccgcccaucucggccuccca

SEQ ID NO: 1122352 - RNA, 20 nt, Human
ugaugugggaaggaggccug

SEQ ID NO: 1122353 - RNA, 22 nt, Human
ugcaguggcgugaucucggcuc

SEQ ID NO: 1122354 - RNA, 18 nt, Human
ugcccugggcuaaguuca

SEQ ID NO: 1122355 - RNA, 20 nt, Human
ugcccugggcuaaguucagu

SEQ ID NO: 1122356 - RNA, 24 nt, Human
ugccucagccucccaaguagcugg

SEQ ID NO: 1122357 - RNA, 19 nt, Human
ugcugaccucugaccuggg

SEQ ID NO: 1122358 - RNA, 19 nt, Human
uggagugcaguggcgugau

SEQ ID NO: 1122359 - RNA, 23 nt, Human
uggagugcaguggcgugaucucg

SEQ ID NO: 1122360 - RNA, 24 nt, Human
uggagugcaguggcgugaucucgg

SEQ ID NO: 1122361 - RNA, 18 nt, Human
uggcagaagggagcaggg

SEQ ID NO: 1122362 - RNA, 20 nt, Human
uggcagaagggagcagggug

SEQ ID NO: 1122363 - RNA, 20 nt, Human
uggcgugaucucggcucacu

SEQ ID NO: 1122364 - RNA, 19 nt, Human
uggcuacaaccucagcuga

SEQ ID NO: 1122365 - RNA, 18 nt, Human
ugggaaggaggccugagg

SEQ ID NO: 1122366 - RNA, 21 nt, Human
ugggacuacaggcgcccacca

SEQ ID NO: 1122367 - RNA, 24 nt, Human
ugggacuacaggcgcccaccacua

SEQ ID NO: 1122368 - RNA, 19 nt, Human
ugggaggagcuuaaaccua

SEQ ID NO: 1122369 - RNA, 21 nt, Human
ugggaggagcuuaaaccuaga

SEQ ID NO: 1122370 - RNA, 18 nt, Human
ugggauuacaggagugag

SEQ ID NO: 1122371 - RNA, 19 nt, Human
ugggauuacaggagugagc

SEQ ID NO: 1122372 - RNA, 22 nt, Human
ugggauuacaggagugagccac

SEQ ID NO: 1122373 - RNA, 23 nt, Human
ugggauuacaggagugagccacc

SEQ ID NO: 1122374 - RNA, 24 nt, Human
ugggauuacaggagugagccacca

SEQ ID NO: 1122375 - RNA, 19 nt, Human
ugggccucagucaguucag

SEQ ID NO: 1122376 - RNA, 20 nt, Human
uggguggccacuacacagca

SEQ ID NO: 1122377 - RNA, 22 nt, Human
ugguaaagccauagccagccca

SEQ ID NO: 1122378 - RNA, 20 nt, Human
ugucacagaaucuaagguca

SEQ ID NO: 1122379 - RNA, 21 nt, Human
ugucgcccaggcuggagugca

SEQ ID NO: 1122380 - RNA, 18 nt, Human
uuaguagagacgugguuu

SEQ ID NO: 1122381 - RNA, 25 nt, Human
uuaguagagacgugguuucacccug

SEQ ID NO: 1122382 - RNA, 21 nt, Human
uuuuguauuuuuaguagagac

SEQ ID NO: 1122383 - RNA, 24 nt, Human
uuuuuaguagagacgugguuucac

SEQ ID NO: 1122384 - RNA, 21 nt, Human
uuuuuguauuuuuaguagaga

SEQ ID NO: 1122385 - RNA, 21 nt, Human
uuuuuuguauuuuuaguagag

SEQ ID NO: 1122386 - RNA, 20 nt, Human
aaaccucuuuccuuuauaaa

SEQ ID NO: 1122387 - RNA, 21 nt, Human
aacaucucacccugcacaaga

SEQ ID NO: 1122388 - RNA, 22 nt, Human
aagacgccccuucccccaugcc

SEQ ID NO: 1122389 - RNA, 19 nt, Human
aagcaaguggggcaggggc

SEQ ID NO: 1122390 - RNA, 19 nt, Human
aauccucaagguugcucug

SEQ ID NO: 1122391 - RNA, 20 nt, Human
acacacacagcaugggcaua

SEQ ID NO: 1122392 - RNA, 24 nt, Human
acaguccuuaccacccaccacuac

SEQ ID NO: 1122393 - RNA, 21 nt, Human
accacuaccugcucuaaacag

SEQ ID NO: 1122394 - RNA, 22 nt, Human
acuggaaccccaagcagccagg

SEQ ID NO: 1122395 - RNA, 20 nt, Human
agagauguguacacauccuc

SEQ ID NO: 1122396 - RNA, 24 nt, Human
agcauucccagagcaggagacgcc

SEQ ID NO: 1122397 - RNA, 24 nt, Human
agcauuuacuggaaccccaagcag

SEQ ID NO: 1122398 - RNA, 25 nt, Human
agcauuuacuggaaccccaagcagc

SEQ ID NO: 1122399 - RNA, 21 nt, Human
agcccagagcuugccuuggag

SEQ ID NO: 1122400 - RNA, 18 nt, Human
aggguuguccaagcagca

SEQ ID NO: 1122401 - RNA, 19 nt, Human
auugagcaaaugagggaaa

SEQ ID NO: 1122402 - RNA, 22 nt, Human
caaccaaaucucaucuugaacu

SEQ ID NO: 1122403 - RNA, 18 nt, Human
caagcagcauucccagag

SEQ ID NO: 1122404 - RNA, 26 nt, Human
cacacacacagcaugggcauaaacac

SEQ ID NO: 1122405 - RNA, 23 nt, Human
caccccauguguguuuuugaagu

SEQ ID NO: 1122406 - RNA, 24 nt, Human
cacccgucucagucucuccagagc

SEQ ID NO: 1122407 - RNA, 23 nt, Human
cagcagccaucaacaaagauacu

SEQ ID NO: 1122408 - RNA, 21 nt, Human
cagcaugaaggguggucugug

SEQ ID NO: 1122409 - RNA, 22 nt, Human
cagcauucccagagcaggagac

SEQ ID NO: 1122410 - RNA, 19 nt, Human
caggagacgccuuguccac

SEQ ID NO: 1122411 - RNA, 19 nt, Human
caucaacaaagauacugua

SEQ ID NO: 1122412 - RNA, 25 nt, Human
caucaacaaagauacuguagaaaag

SEQ ID NO: 1122413 - RNA, 24 nt, Human
caucucacccugcacaagacuuuc

SEQ ID NO: 1122414 - RNA, 20 nt, Human
caucugcuuuucuucauuuu

SEQ ID NO: 1122415 - RNA, 19 nt, Human
cauguacacagagaugugu

SEQ ID NO: 1122416 - RNA, 19 nt, Human
cauuggaauagggaaauuc

SEQ ID NO: 1122417 - RNA, 20 nt, Human
ccaaagacgccccuuccccc

SEQ ID NO: 1122418 - RNA, 19 nt, Human
ccaacagaggcacacacac

SEQ ID NO: 1122419 - RNA, 19 nt, Human
ccaaccaaaucucaucuug

SEQ ID NO: 1122420 - RNA, 19 nt, Human
ccaagcagcauucccagag

SEQ ID NO: 1122421 - RNA, 27 nt, Human
cccaaagacgccccuucccccaugccu

SEQ ID NO: 1122422 - RNA, 18 nt, Human
cccacaugucaugggagg

SEQ ID NO: 1122423 - RNA, 23 nt, Human
cccaccacuaccugcucuaaaca

SEQ ID NO: 1122424 - RNA, 25 nt, Human
cccaccacuaccugcucuaaacaga

SEQ ID NO: 1122425 - RNA, 19 nt, Human
cccaugugccccacccacc

SEQ ID NO: 1122426 - RNA, 24 nt, Human
ccccacccaccugugccuccgcag

SEQ ID NO: 1122427 - RNA, 20 nt, Human
ccugaggccuccccagcccu

SEQ ID NO: 1122428 - RNA, 25 nt, Human
ccuucccccaugccugccuuuccug

SEQ ID NO: 1122429 - RNA, 19 nt, Human
cgccccuucccccaugccu

SEQ ID NO: 1122430 - RNA, 22 nt, Human
cucaagguugcucugauuauuc

SEQ ID NO: 1122431 - RNA, 21 nt, Human
cucugauuauucaaagaagag

SEQ ID NO: 1122432 - RNA, 19 nt, Human
cugguggccucuuuccgug

SEQ ID NO: 1122433 - RNA, 21 nt, Human
cugugccuccgcagaccuggg

SEQ ID NO: 1122434 - RNA, 23 nt, Human
cugugccuccgcagaccuggguu

SEQ ID NO: 1122435 - RNA, 19 nt, Human
cugugguaggcaccccaug

SEQ ID NO: 1122436 - RNA, 21 nt, Human
cuuggagucaacaucucaccc

SEQ ID NO: 1122437 - RNA, 22 nt, Human
gcagaggggaaaaccaagccca

SEQ ID NO: 1122438 - RNA, 21 nt, Human
gcaggagacgccuuguccaca

SEQ ID NO: 1122439 - RNA, 21 nt, Human
gcuguucucgugguagugagg

SEQ ID NO: 1122440 - RNA, 18 nt, Human
ggaaccccaagcagccag

SEQ ID NO: 1122441 - RNA, 22 nt, Human
ggccagcuccaagcaggagucc

SEQ ID NO: 1122442 - RNA, 18 nt, Human
gggagaagcugccaggua

SEQ ID NO: 1122443 - RNA, 22 nt, Human
gggcauuccaggcuaagggaga

SEQ ID NO: 1122444 - RNA, 22 nt, Human
gugccuccgcagaccuggguuc

SEQ ID NO: 1122445 - RNA, 20 nt, Human
guggccucuuuccguggcau

SEQ ID NO: 1122446 - RNA, 22 nt, Human
gugguagugagcgaguucucac

SEQ ID NO: 1122447 - RNA, 18 nt, Human
uaagcuccugagaugugc

SEQ ID NO: 1122448 - RNA, 21 nt, Human
uaccuccaugcuguucucgug

SEQ ID NO: 1122449 - RNA, 21 nt, Human
uacuggaaccccaagcagcca

SEQ ID NO: 1122450 - RNA, 20 nt, Human
uaggagacaguccuuaccac

SEQ ID NO: 1122451 - RNA, 21 nt, Human
ucaacaaagauacuguagaaa

SEQ ID NO: 1122452 - RNA, 23 nt, Human
ucaggacacucacugcugguggc

SEQ ID NO: 1122453 - RNA, 22 nt, Human
uccaagcaaguggggcaggggc

SEQ ID NO: 1122454 - RNA, 18 nt, Human
uccaggcuaagggagaag

SEQ ID NO: 1122455 - RNA, 22 nt, Human
ucccaaagacgccccuuccccc

SEQ ID NO: 1122456 - RNA, 18 nt, Human
ucccagagcaggagacgc

SEQ ID NO: 1122457 - RNA, 19 nt, Human
uccugaggccuccccagcc

SEQ ID NO: 1122458 - RNA, 19 nt, Human
ugaaugguggugggauugg

SEQ ID NO: 1122459 - RNA, 20 nt, Human
ugacucacggagugauugcc

SEQ ID NO: 1122460 - RNA, 21 nt, Human
ugacucacggagugauugccu

SEQ ID NO: 1122461 - RNA, 18 nt, Human
ugcacaucuccuugcugc

SEQ ID NO: 1122462 - RNA, 25 nt, Human
ugccccacccaccugugccuccgca

SEQ ID NO: 1122463 - RNA, 21 nt, Human
ugccuccgcagaccuggguuc

SEQ ID NO: 1122464 - RNA, 22 nt, Human
ugccugccuuuccugucugguc

SEQ ID NO: 1122465 - RNA, 24 nt, Human
ugccuggcuaaaggaagagagagc

SEQ ID NO: 1122466 - RNA, 18 nt, Human
ugggagggacccccuggg

SEQ ID NO: 1122467 - RNA, 21 nt, Human
uguagaaaaguaagcuccuga

SEQ ID NO: 1122468 - RNA, 21 nt, Human
ugucccaugugccccacccac

SEQ ID NO: 1122469 - RNA, 23 nt, Human
uuaaaccucuuuccuuuauaaau

SEQ ID NO: 1122470 - RNA, 21 nt, Human
uucacaaaugcacauguacac

SEQ ID NO: 1122471 - RNA, 24 nt, Human
uucacaaaugcacauguacacaga

SEQ ID NO: 1122472 - RNA, 24 nt, Human
uucaucauacauucagcagccauc

SEQ ID NO: 1122473 - RNA, 18 nt, Human
uucauuuugcacagugag

SEQ ID NO: 1122474 - RNA, 23 nt, Human
uucccccaugccugccuuuccug

SEQ ID NO: 1122475 - RNA, 23 nt, Human
uugagcaaaugagggaaauucau

SEQ ID NO: 1122476 - RNA, 23 nt, Human
uugcaucauccccacaugucaug

SEQ ID NO: 1122477 - RNA, 19 nt, Human
uuuacucuacuccuucugu

SEQ ID NO: 1122478 - RNA, 23 nt, Human
uuuacuggaaccccaagcagcca

SEQ ID NO: 1122479 - RNA, 22 nt, Human
uuucacaaaugcacauguacac

SEQ ID NO: 1122480 - RNA, 19 nt, Human
aaagugcugggauuacaga

SEQ ID NO: 1122481 - RNA, 24 nt, Human
aaagugcugggauuacagacguga

SEQ ID NO: 1122482 - RNA, 19 nt, Human
aaccacuggucucuauggg

SEQ ID NO: 1122483 - RNA, 22 nt, Human
aaccagagguccuguccucaag

SEQ ID NO: 1122484 - RNA, 18 nt, Human
aaccugggcuugcuuucu

SEQ ID NO: 1122485 - RNA, 19 nt, Human
aagcagaagccacgucaug

SEQ ID NO: 1122486 - RNA, 25 nt, Human
aagcagaagccacgucaugagccug

SEQ ID NO: 1122487 - RNA, 21 nt, Human
aagccagccucccagaggccc

SEQ ID NO: 1122488 - RNA, 22 nt, Human
aagugagcuauccugucacaaa

SEQ ID NO: 1122489 - RNA, 19 nt, Human
aagugcugggauuacagac

SEQ ID NO: 1122490 - RNA, 26 nt, Human
aagugcugggauuacagacgugagcc

SEQ ID NO: 1122491 - RNA, 24 nt, Human
aauuggagaccagccugggcaaca

SEQ ID NO: 1122492 - RNA, 18 nt, Human
acagacgugagccaccgc

SEQ ID NO: 1122493 - RNA, 22 nt, Human
acaggugcccaccaccagagac

SEQ ID NO: 1122494 - RNA, 20 nt, Human
accaagcacuuuaacauccc

SEQ ID NO: 1122495 - RNA, 24 nt, Human
accauguuagccaggcuggucucg

SEQ ID NO: 1122496 - RNA, 25 nt, Human
acccgccuuggccucccaaagugcu

SEQ ID NO: 1122497 - RNA, 20 nt, Human
acgcggguuucaccauguua

SEQ ID NO: 1122498 - RNA, 20 nt, Human
acgcggguuucaccauguuu

SEQ ID NO: 1122499 - RNA, 21 nt, Human
acgugagccaccgcgcccggc

SEQ ID NO: 1122500 - RNA, 23 nt, Human
agaaagaaaggaggcaaacuugg

SEQ ID NO: 1122501 - RNA, 28 nt, Human
agaaaggaggcaaacuuggggagugaga

SEQ ID NO: 1122502 - RNA, 23 nt, Human
agaaauuggagaccagccugggc

SEQ ID NO: 1122503 - RNA, 18 nt, Human
agaagccacgucaugagc

SEQ ID NO: 1122504 - RNA, 20 nt, Human
agaagcuaucagggccaugu

SEQ ID NO: 1122505 - RNA, 19 nt, Human
agacuuguuuuuguuuguu

SEQ ID NO: 1122506 - RNA, 18 nt, Human
agagagagguuuagccau

SEQ ID NO: 1122507 - RNA, 18 nt, Human
agccuccugaguagcugg

SEQ ID NO: 1122508 - RNA, 24 nt, Human
agccugggcaacaaaaugagaucc

SEQ ID NO: 1122509 - RNA, 21 nt, Human
aggaagcuguccaggggcugu

SEQ ID NO: 1122510 - RNA, 20 nt, Human
aggccgaggugagaggaucg

SEQ ID NO: 1122511 - RNA, 24 nt, Human
aggccgaggugagaggaucguuug

SEQ ID NO: 1122512 - RNA, 24 nt, Human
aggugauccacccgccuuggccuc

SEQ ID NO: 1122513 - RNA, 18 nt, Human
aguagcugggauuacagg

SEQ ID NO: 1122514 - RNA, 24 nt, Human
agugauucgugcuaguaaucccag

SEQ ID NO: 1122515 - RNA, 20 nt, Human
agugggaagcugggacucug

SEQ ID NO: 1122516 - RNA, 20 nt, Human
agugggaagcugggacucug

SEQ ID NO: 1122517 - RNA, 24 nt, Human
caaagugcugggauuacagacgug

SEQ ID NO: 1122518 - RNA, 20 nt, Human
caagugauucucccgccuua

SEQ ID NO: 1122519 - RNA, 22 nt, Human
caagugauucucccgccuuagc

SEQ ID NO: 1122520 - RNA, 26 nt, Human
caaucugcgccaccucgguagcccca

SEQ ID NO: 1122521 - RNA, 23 nt, Human
cacagcccagaccggcguccucc

SEQ ID NO: 1122522 - RNA, 20 nt, Human
cacaggaccuccgcacagcc

SEQ ID NO: 1122523 - RNA, 23 nt, Human
caccaagcacuuuaacaucccuc

SEQ ID NO: 1122524 - RNA, 25 nt, Human
caccagagacgcggguuucaccaug

SEQ ID NO: 1122525 - RNA, 21 nt, Human
caccauguuagccaggcuggu

SEQ ID NO: 1122526 - RNA, 24 nt, Human
caccauguuagccaggcuggucuc

SEQ ID NO: 1122527 - RNA, 27 nt, Human
caccauguuagccaggcuggucucgaa

SEQ ID NO: 1122528 - RNA, 23 nt, Human
cacccgccuuggccucccaaagu

SEQ ID NO: 1122529 - RNA, 24 nt, Human
cacccgccuuggccucccaaagug

SEQ ID NO: 1122530 - RNA, 21 nt, Human
cacugcaaccucugccucccg

SEQ ID NO: 1122531 - RNA, 23 nt, Human
cacugcaaccucugccucccggg

SEQ ID NO: 1122532 - RNA, 20 nt, Human
cacuuaagaagaccugguca

SEQ ID NO: 1122533 - RNA, 19 nt, Human
cagagcagaaagaaaggag

SEQ ID NO: 1122534 - RNA, 18 nt, Human
cagcacuuuuggaggccg

SEQ ID NO: 1122535 - RNA, 20 nt, Human
cagcacuuuuggaggccgag

SEQ ID NO: 1122536 - RNA, 19 nt, Human
cagccucgggcaagcugcg

SEQ ID NO: 1122537 - RNA, 20 nt, Human
cagccuuucccugagccagu

SEQ ID NO: 1122538 - RNA, 24 nt, Human
cagcgcccagaggugugacggagg

SEQ ID NO: 1122539 - RNA, 18 nt, Human
cagcggacgcgaaaggag

SEQ ID NO: 1122540 - RNA, 24 nt, Human
cagggccauguuuagcacacugaa

SEQ ID NO: 1122541 - RNA, 21 nt, Human
caggugcccaccaccagagac

SEQ ID NO: 1122542 - RNA, 23 nt, Human
cagucuuagccgcagccucgggc

SEQ ID NO: 1122543 - RNA, 21 nt, Human
cauguuagccaggcuggucuc

SEQ ID NO: 1122544 - RNA, 24 nt, Human
cauguuagccaggcuggucucgaa

SEQ ID NO: 1122545 - RNA, 18 nt, Human
cauuuugcaugaacuucu

SEQ ID NO: 1122546 - RNA, 22 nt, Human
ccaaagugcugggauuacagac

SEQ ID NO: 1122547 - RNA, 24 nt, Human
ccaaagugcugggauuacagacgu

SEQ ID NO: 1122548 - RNA, 18 nt, Human
ccagaggugugacggagg

SEQ ID NO: 1122549 - RNA, 18 nt, Human
ccagaggugugacggagg

SEQ ID NO: 1122550 - RNA, 22 nt, Human
ccagcacugguuuuauguugag

SEQ ID NO: 1122551 - RNA, 23 nt, Human
ccaggccucguguuccccaccuc

SEQ ID NO: 1122552 - RNA, 18 nt, Human
cccaaaagacuugcuccc

SEQ ID NO: 1122553 - RNA, 23 nt, Human
cccaccagagcagaaagaaagga

SEQ ID NO: 1122554 - RNA, 22 nt, Human
cccagccucacauuucccuggc

SEQ ID NO: 1122555 - RNA, 20 nt, Human
cccaggcuggagugcaauga

SEQ ID NO: 1122556 - RNA, 19 nt, Human
ccccagccucacauuuccc

SEQ ID NO: 1122557 - RNA, 23 nt, Human
cccgccuuagccuccugaguagc

SEQ ID NO: 1122558 - RNA, 19 nt, Human
cccggcccaaaagacuugc

SEQ ID NO: 1122559 - RNA, 22 nt, Human
cccggguucaagugauucuccc

SEQ ID NO: 1122560 - RNA, 23 nt, Human
ccgccuuagccuccugaguagcu

SEQ ID NO: 1122561 - RNA, 21 nt, Human
ccgcgcccggcccaaaagacu

SEQ ID NO: 1122562 - RNA, 24 nt, Human
ccucccggguucaagugauucucc

SEQ ID NO: 1122563 - RNA, 24 nt, Human
ccucccuucccuucaccuuguuaa

SEQ ID NO: 1122564 - RNA, 19 nt, Human
ccuccuccuccucccuucc

SEQ ID NO: 1122565 - RNA, 23 nt, Human
ccucgguagccccacuuuccuug

SEQ ID NO: 1122566 - RNA, 22 nt, Human
ccucuccccgucugggaguggg

SEQ ID NO: 1122567 - RNA, 22 nt, Human
ccugaguagcugggauuacagg

SEQ ID NO: 1122568 - RNA, 22 nt, Human
ccugaguagcugggauuacagg

SEQ ID NO: 1122569 - RNA, 23 nt, Human
ccugaguagcugggauuacaggu

SEQ ID NO: 1122570 - RNA, 24 nt, Human
ccugaguagcugggauuacaggug

SEQ ID NO: 1122571 - RNA, 22 nt, Human
ccugaugucaggugauccaccc

SEQ ID NO: 1122572 - RNA, 19 nt, Human
ccuggcccgugccugaggc

SEQ ID NO: 1122573 - RNA, 25 nt, Human
ccuggcccgugccugaggccuggga

SEQ ID NO: 1122574 - RNA, 24 nt, Human
ccugggcaacaaaaugagauccca

SEQ ID NO: 1122575 - RNA, 25 nt, Human
cgagaaggcagcggacgcgaaagga

SEQ ID NO: 1122576 - RNA, 21 nt, Human
cgagguggagucaagccuggg

SEQ ID NO: 1122577 - RNA, 20 nt, Human
cgcaagcggccgcgcguggc

SEQ ID NO: 1122578 - RNA, 22 nt, Human
cgcccagaggugugacggaggu

SEQ ID NO: 1122579 - RNA, 24 nt, Human
cgccuuagccuccugaguagcugg

SEQ ID NO: 1122580 - RNA, 20 nt, Human
cgcgaaaggagcccagccag

SEQ ID NO: 1122581 - RNA, 20 nt, Human
cgcggguuucaccauguuag

SEQ ID NO: 1122582 - RNA, 22 nt, Human
cggguuucaccauguuagccag

SEQ ID NO: 1122583 - RNA, 21 nt, Human
cuaggauuacagcccagagau

SEQ ID NO: 1122584 - RNA, 20 nt, Human
cuaggucccuggcccgugcc

SEQ ID NO: 1122585 - RNA, 24 nt, Human
cucacugcaaccucugccucccgg

SEQ ID NO: 1122586 - RNA, 22 nt, Human
cuccagucaaucucaggaugcc

SEQ ID NO: 1122587 - RNA, 20 nt, Human
cucccggguucaagugauuc

SEQ ID NO: 1122588 - RNA, 22 nt, Human
cuccgcacagcccagaccggcg

SEQ ID NO: 1122589 - RNA, 18 nt, Human
cucuccucugugagggau

SEQ ID NO: 1122590 - RNA, 20 nt, Human
cucuuguugcccaggcugga

SEQ ID NO: 1122591 - RNA, 21 nt, Human
cucuuguugcccaggcuggag

SEQ ID NO: 1122592 - RNA, 21 nt, Human
cugaguagcugggauuacagg

SEQ ID NO: 1122593 - RNA, 19 nt, Human
cugcaaccucugccucccg

SEQ ID NO: 1122594 - RNA, 23 nt, Human
cugcaaccucugccucccggguu

SEQ ID NO: 1122595 - RNA, 24 nt, Human
cugcaaccucugccucccggguuc

SEQ ID NO: 1122596 - RNA, 19 nt, Human
cugcacuggcaaccugggc

SEQ ID NO: 1122597 - RNA, 23 nt, Human
cugcccucuccccgucugggagu

SEQ ID NO: 1122598 - RNA, 23 nt, Human
cugccucccggguucaagugauu

SEQ ID NO: 1122599 - RNA, 23 nt, Human
cuggaaggaacugggcaguccca

SEQ ID NO: 1122600 - RNA, 18 nt, Human
cugugcggauucgagaag

SEQ ID NO: 1122601 - RNA, 23 nt, Human
cuuagccgcagccucgggcaagc

SEQ ID NO: 1122602 - RNA, 23 nt, Human
cuuagccuccugaguagcuggga

SEQ ID NO: 1122603 - RNA, 24 nt, Human
cuuguugcccaggcuggagugcaa

SEQ ID NO: 1122604 - RNA, 21 nt, Human
cuuuucuuuccuucgaaaggu

SEQ ID NO: 1122605 - RNA, 21 nt, Human
gaaaggugagguuuuugucgu

SEQ ID NO: 1122606 - RNA, 18 nt, Human
gaacuugcacugagccag

SEQ ID NO: 1122607 - RNA, 18 nt, Human
gaagcuguccaggggcug

SEQ ID NO: 1122608 - RNA, 18 nt, Human
gaccuggucauuggucca

SEQ ID NO: 1122609 - RNA, 22 nt, Human
gagccugggggcugcccucucc

SEQ ID NO: 1122610 - RNA, 21 nt, Human
gagcuauccugucacaaaaga

SEQ ID NO: 1122611 - RNA, 19 nt, Human
gaggggcuuggccugggac

SEQ ID NO: 1122612 - RNA, 21 nt, Human
gagguccuguccucaagggcu

SEQ ID NO: 1122613 - RNA, 22 nt, Human
gagugagaagccagccucccag

SEQ ID NO: 1122614 - RNA, 24 nt, Human
gaugucaggugauccacccgccuu

SEQ ID NO: 1122615 - RNA, 18 nt, Human
gauguuccauaggcuggg

SEQ ID NO: 1122616 - RNA, 18 nt, Human
gauuacagacgugagcca

SEQ ID NO: 1122617 - RNA, 22 nt, Human
gauuacagacgugagccaccgc

SEQ ID NO: 1122618 - RNA, 24 nt, Human
gcaaggaagagcccagcgcccaga

SEQ ID NO: 1122619 - RNA, 25 nt, Human
gcagaagccacgucaugagccuggg

SEQ ID NO: 1122620 - RNA, 18 nt, Human
gccaaggcucuccucugu

SEQ ID NO: 1122621 - RNA, 21 nt, Human
gccaucauauuucagcuccag

SEQ ID NO: 1122622 - RNA, 19 nt, Human
gcccagaggugugacggag

SEQ ID NO: 1122623 - RNA, 19 nt, Human
gcccaggcuggagugcaau

SEQ ID NO: 1122624 - RNA, 21 nt, Human
gccccgggccccagucuuagc

SEQ ID NO: 1122625 - RNA, 22 nt, Human
gccuuggccucccaaagugcug

SEQ ID NO: 1122626 - RNA, 23 nt, Human
gcggguuucaccauguuagccag

SEQ ID NO: 1122627 - RNA, 19 nt, Human
gcuaguaaucccagcacuu

SEQ ID NO: 1122628 - RNA, 21 nt, Human
gcucuuguugcccaggcugga

SEQ ID NO: 1122629 - RNA, 30 nt, Human
gcuggagugcaaugaugcaaucucagcucc

SEQ ID NO: 1122630 - RNA, 21 nt, Human
gcugggauuacagacgugagc

SEQ ID NO: 1122631 - RNA, 21 nt, Human
gcugggugcagugauucgugc

SEQ ID NO: 1122632 - RNA, 19 nt, Human
ggaccuccgcacagcccag

SEQ ID NO: 1122633 - RNA, 21 nt, Human
ggagccuggacaaaccacugg

SEQ ID NO: 1122634 - RNA, 18 nt, Human
ggcaagcugcguaacauc

SEQ ID NO: 1122635 - RNA, 21 nt, Human
ggcaagcugcguaacaucucu

SEQ ID NO: 1122636 - RNA, 21 nt, Human
ggcagccuuucccugagccag

SEQ ID NO: 1122637 - RNA, 22 nt, Human
ggccccagucuuagccgcagcc

SEQ ID NO: 1122638 - RNA, 19 nt, Human
ggccucguguuccccaccu

SEQ ID NO: 1122639 - RNA, 20 nt, Human
ggccucguguuccccaccuc

SEQ ID NO: 1122640 - RNA, 20 nt, Human
gggcuugcuuucugcuucug

SEQ ID NO: 1122641 - RNA, 23 nt, Human
ggguucaagugauucucccgccu

SEQ ID NO: 1122642 - RNA, 22 nt, Human
ggguuucaccauguuagccagg

SEQ ID NO: 1122643 - RNA, 22 nt, Human
guacuggagccuggacaaacca

SEQ ID NO: 1122644 - RNA, 18 nt, Human
guagcugggauuacaggu

SEQ ID NO: 1122645 - RNA, 24 nt, Human
gucaggugauccacccgccuuggc

SEQ ID NO: 1122646 - RNA, 24 nt, Human
gugauccacccgccuuggccuccc

SEQ ID NO: 1122647 - RNA, 21 nt, Human
guuacagagagggcaagguuu

SEQ ID NO: 1122648 - RNA, 23 nt, Human
uacagacgugagccaccgcgccc

SEQ ID NO: 1122649 - RNA, 20 nt, Human
uagauguuccauaggcuggg

SEQ ID NO: 1122650 - RNA, 24 nt, Human
uagccaggcuggucucgaacuccu

SEQ ID NO: 1122651 - RNA, 18 nt, Human
uagccccacuuuccuugc

SEQ ID NO: 1122652 - RNA, 28 nt, Human
uagccccgagguggagucaagccugggg

SEQ ID NO: 1122653 - RNA, 20 nt, Human
uagccuccugaguagcuggg

SEQ ID NO: 1122654 - RNA, 18 nt, Human
uaggucccuggcccgugc

SEQ ID NO: 1122655 - RNA, 19 nt, Human
ucaagugauucucccgccu

SEQ ID NO: 1122656 - RNA, 23 nt, Human
ucacugcaaccucugccucccgg

SEQ ID NO: 1122657 - RNA, 24 nt, Human
ucacugcaaccucugccucccggg

SEQ ID NO: 1122658 - RNA, 19 nt, Human
ucaguggauauaucuauag

SEQ ID NO: 1122659 - RNA, 18 nt, Human
ucccaaagugcugggauu

SEQ ID NO: 1122660 - RNA, 24 nt, Human
ucccaaagugcugggauuacagac

SEQ ID NO: 1122661 - RNA, 23 nt, Human
uccccaccuccaacccucccgug

SEQ ID NO: 1122662 - RNA, 21 nt, Human
ucccggguucaagugauucuc

SEQ ID NO: 1122663 - RNA, 24 nt, Human
ucccggguucaagugauucucccg

SEQ ID NO: 1122664 - RNA, 21 nt, Human
ucccugagccaguacggggac

SEQ ID NO: 1122665 - RNA, 21 nt, Human
ucccuggcccgugccugaggc

SEQ ID NO: 1122666 - RNA, 21 nt, Human
uccgcacagcccagaccggcg

SEQ ID NO: 1122667 - RNA, 25 nt, Human
uccgcacagcccagaccggcguccu

SEQ ID NO: 1122668 - RNA, 22 nt, Human
uccuccuccuccucccuucccc

SEQ ID NO: 1122669 - RNA, 24 nt, Human
uccucugugagggauggguuuuac

SEQ ID NO: 1122670 - RNA, 24 nt, Human
uccugaguagcugggauuacaggu

SEQ ID NO: 1122671 - RNA, 23 nt, Human
ucguguuccccaccuccaacccu

SEQ ID NO: 1122672 - RNA, 24 nt, Human
ucucccgccuuagccuccugagua

SEQ ID NO: 1122673 - RNA, 20 nt, Human
ucucgaacuccugaugucag

SEQ ID NO: 1122674 - RNA, 20 nt, Human
ucucuuauugaagcagaagc

SEQ ID NO: 1122675 - RNA, 21 nt, Human
ucugcacuggcaaccugggcu

SEQ ID NO: 1122676 - RNA, 18 nt, Human
ucuguacuggagccugga

SEQ ID NO: 1122677 - RNA, 22 nt, Human
ucuuguugcccaggcuggagug

SEQ ID NO: 1122678 - RNA, 20 nt, Human
ugaauuaccuguguggagaa

SEQ ID NO: 1122679 - RNA, 28 nt, Human
ugagaagccagccucccagaggcccagg

SEQ ID NO: 1122680 - RNA, 18 nt, Human
ugagccugggggcugccc

SEQ ID NO: 1122681 - RNA, 24 nt, Human
ugaugcaaucucagcucacugcaa

SEQ ID NO: 1122682 - RNA, 24 nt, Human
ugaugucaggugauccacccgccu

SEQ ID NO: 1122683 - RNA, 24 nt, Human
ugauucgugcuaguaaucccagca

SEQ ID NO: 1122684 - RNA, 20 nt, Human
ugauucucccgccuuagccu

SEQ ID NO: 1122685 - RNA, 19 nt, Human
ugccacaggaccuccgcac

SEQ ID NO: 1122686 - RNA, 18 nt, Human
ugcccaggcuggagugca

SEQ ID NO: 1122687 - RNA, 21 nt, Human
ugcccaggcuggagugcaaug

SEQ ID NO: 1122688 - RNA, 22 nt, Human
ugcccaggcuggagugcaauga

SEQ ID NO: 1122689 - RNA, 22 nt, Human
ugccugaggccugggaucucug

SEQ ID NO: 1122690 - RNA, 24 nt, Human
ugcucuuguugcccaggcuggagu

SEQ ID NO: 1122691 - RNA, 24 nt, Human
ugcugggauuacagacgugagcca

SEQ ID NO: 1122692 - RNA, 19 nt, Human
uggaaggaacugggcaguc

SEQ ID NO: 1122693 - RNA, 21 nt, Human
uggagccuggacaaaccacug

SEQ ID NO: 1122694 - RNA, 24 nt, Human
uggaggccgaggugagaggaucgu

SEQ ID NO: 1122695 - RNA, 23 nt, Human
uggagugcaaugaugcaaucuca

SEQ ID NO: 1122696 - RNA, 18 nt, Human
ugggauuacagacgugag

SEQ ID NO: 1122697 - RNA, 19 nt, Human
ugggauuacagacgugagc

SEQ ID NO: 1122698 - RNA, 21 nt, Human
ugggauuacagacgugagcca

SEQ ID NO: 1122699 - RNA, 22 nt, Human
ugggauuacagacgugagccac

SEQ ID NO: 1122700 - RNA, 23 nt, Human
ugggauuacagacgugagccacc

SEQ ID NO: 1122701 - RNA, 24 nt, Human
ugggauuacagacgugagccaccg

SEQ ID NO: 1122702 - RNA, 21 nt, Human
ugggauuacaggugcccacca

SEQ ID NO: 1122703 - RNA, 24 nt, Human
ugggauuacaggugcccaccacca

SEQ ID NO: 1122704 - RNA, 21 nt, Human
ugggcuugcuuucugcuucug

SEQ ID NO: 1122705 - RNA, 23 nt, Human
uggggagugagaagccagccucc

SEQ ID NO: 1122706 - RNA, 24 nt, Human
uggucucuaugggaggccccagcc

SEQ ID NO: 1122707 - RNA, 23 nt, Human
uggugaauuaccuguguggagaa

SEQ ID NO: 1122708 - RNA, 21 nt, Human
ugucacaaaagauagaaggaa

SEQ ID NO: 1122709 - RNA, 20 nt, Human
uguugcccaggcuggagugc

SEQ ID NO: 1122710 - RNA, 23 nt, Human
uucaagugauucucccgccuuag

SEQ ID NO: 1122711 - RNA, 24 nt, Human
uucaagugauucucccgccuuagc

SEQ ID NO: 1122712 - RNA, 18 nt, Human
uugcccaggcuggagugc

SEQ ID NO: 1122713 - RNA, 23 nt, Human
uugcucuuguugcccaggcugga

SEQ ID NO: 1122714 - RNA, 22 nt, Human
uugcuucagauugucugcuaca

SEQ ID NO: 1122715 - RNA, 18 nt, Human
uuggccucccaaagugcu

SEQ ID NO: 1122716 - RNA, 21 nt, Human
uuucaccauguuagccaggcu

SEQ ID NO: 1122717 - RNA, 24 nt, Human
uuugcucuuguugcccaggcugga

SEQ ID NO: 1122718 - RNA, 21 nt, Human
uuuuccuaggucccuggcccg

SEQ ID NO: 1122719 - RNA, 24 nt, Human
uuuugcucuuguugcccaggcugg

SEQ ID NO: 1122720 - RNA, 20 nt, Human
aaagacuuccauccugccca

SEQ ID NO: 1122721 - RNA, 21 nt, Human
aaagguugcagaggggggaug

SEQ ID NO: 1122722 - RNA, 24 nt, Human
aagacuuccauccugcccaaaucc

SEQ ID NO: 1122723 - RNA, 27 nt, Human
accccaucuccucaccucauuugccaa

SEQ ID NO: 1122724 - RNA, 22 nt, Human
acccuccuuggcccagaggcug

SEQ ID NO: 1122725 - RNA, 22 nt, Human
acgugugugugugugugugugu

SEQ ID NO: 1122726 - RNA, 23 nt, Human
acguguguguguguguguguguu

SEQ ID NO: 1122727 - RNA, 21 nt, Human
acuuugaugguugacaaaggc

SEQ ID NO: 1122728 - RNA, 23 nt, Human
acuuugaugguugacaaaggcua

SEQ ID NO: 1122729 - RNA, 19 nt, Human
agacuuccauccugcccaa

SEQ ID NO: 1122730 - RNA, 18 nt, Human
agcaggauguucuaggcu

SEQ ID NO: 1122731 - RNA, 19 nt, Human
agcuuggaaggcugagcug

SEQ ID NO: 1122732 - RNA, 18 nt, Human
aggagugugacaagucca

SEQ ID NO: 1122733 - RNA, 21 nt, Human
aggauggaaggaagccacugu

SEQ ID NO: 1122734 - RNA, 19 nt, Human
aggccaggacuuccgaggg

SEQ ID NO: 1122735 - RNA, 19 nt, Human
agggacaggcacaggguug

SEQ ID NO: 1122736 - RNA, 18 nt, Human
auauauauauauauauaa

SEQ ID NO: 1122737 - RNA, 19 nt, Human
auauauauauauauauaua

SEQ ID NO: 1122738 - RNA, 25 nt, Human
auaugugcauaaauagauauacgug

SEQ ID NO: 1122739 - RNA, 23 nt, Human
auggcccagaggaucccaagccg

SEQ ID NO: 1122740 - RNA, 21 nt, Human
auuccaucuaucuaaccuuca

SEQ ID NO: 1122741 - RNA, 19 nt, Human
caaacgcuggccaggagcu

SEQ ID NO: 1122742 - RNA, 25 nt, Human
caagauacaaaugcagaacucacug

SEQ ID NO: 1122743 - RNA, 22 nt, Human
cacuuagcucuggacccccauc

SEQ ID NO: 1122744 - RNA, 19 nt, Human
cagcccccagagagaaagg

SEQ ID NO: 1122745 - RNA, 18 nt, Human
cagcccugcccaagaaca

SEQ ID NO: 1122746 - RNA, 22 nt, Human
cagccucuugguuauugaucau

SEQ ID NO: 1122747 - RNA, 24 nt, Human
caggagcucugcucuagauuccca

SEQ ID NO: 1122748 - RNA, 20 nt, Human
caggccagagagggaucaag

SEQ ID NO: 1122749 - RNA, 25 nt, Human
caguagcaguauuugacugcagccu

SEQ ID NO: 1122750 - RNA, 20 nt, Human
caucugggcucuguucauuc

SEQ ID NO: 1122751 - RNA, 21 nt, Human
ccagagacccuuuccccacuu

SEQ ID NO: 1122752 - RNA, 21 nt, Human
ccagagagaaagguugcagag

SEQ ID NO: 1122753 - RNA, 18 nt, Human
cccaagaacaugccucuc

SEQ ID NO: 1122754 - RNA, 18 nt, Human
cccaggugggaggccagg

SEQ ID NO: 1122755 - RNA, 19 nt, Human
ccccaucugggcucuguuc

SEQ ID NO: 1122756 - RNA, 25 nt, Human
cccuuagaaaaucuucaaagugaca

SEQ ID NO: 1122757 - RNA, 20 nt, Human
cccuuucgugacuggggaau

SEQ ID NO: 1122758 - RNA, 25 nt, Human
ccgccuccucugggcuucgcaccgu

SEQ ID NO: 1122759 - RNA, 19 nt, Human
ccucugggcuucgcaccgu

SEQ ID NO: 1122760 - RNA, 22 nt, Human
ccucugggcuucgcaccgucuc

SEQ ID NO: 1122761 - RNA, 21 nt, Human
ccucuugccguagccagcccu

SEQ ID NO: 1122762 - RNA, 18 nt, Human
cuaagcagcuuggaaggc

SEQ ID NO: 1122763 - RNA, 20 nt, Human
cugaaagggggaagcaaacc

SEQ ID NO: 1122764 - RNA, 18 nt, Human
cugcccccggcaagaugc

SEQ ID NO: 1122765 - RNA, 18 nt, Human
cugcccccggcaagaugc

SEQ ID NO: 1122766 - RNA, 20 nt, Human
cugcccccggcaagaugcuu

SEQ ID NO: 1122767 - RNA, 22 nt, Human
cuggggagggggcucauuggcu

SEQ ID NO: 1122768 - RNA, 20 nt, Human
cuuucugggugagcucuggg

SEQ ID NO: 1122769 - RNA, 26 nt, Human
gacaguagcaguauuugacugcagcc

SEQ ID NO: 1122770 - RNA, 21 nt, Human
gagcuggcuuaguucggugcc

SEQ ID NO: 1122771 - RNA, 20 nt, Human
gcaguuaccccaucuccuca

SEQ ID NO: 1122772 - RNA, 22 nt, Human
gccccaggugggaggccaggcu

SEQ ID NO: 1122773 - RNA, 23 nt, Human
gcccccggcaagaugcuuucugg

SEQ ID NO: 1122774 - RNA, 22 nt, Human
gccuuugguacagcccccagag

SEQ ID NO: 1122775 - RNA, 18 nt, Human
gggaauaggauggaagga

SEQ ID NO: 1122776 - RNA, 20 nt, Human
ggggaauaggauggaaggaa

SEQ ID NO: 1122777 - RNA, 22 nt, Human
gguuucuugggugagguugaga

SEQ ID NO: 1122778 - RNA, 19 nt, Human
guauauauauauauauaua

SEQ ID NO: 1122779 - RNA, 21 nt, Human
gucuguaggacccuccuuggc

SEQ ID NO: 1122780 - RNA, 19 nt, Human
guggcagagggacaggcac

SEQ ID NO: 1122781 - RNA, 23 nt, Human
guguguauauauauauauaaaau

SEQ ID NO: 1122782 - RNA, 20 nt, Human
guguguauauauauauauau

SEQ ID NO: 1122783 - RNA, 21 nt, Human
uaaaaagaaugcugcugaaag

SEQ ID NO: 1122784 - RNA, 23 nt, Human
uaaaggcaguuaccccaucuccu

SEQ ID NO: 1122785 - RNA, 24 nt, Human
uaaaugccccaggugggaggccag

SEQ ID NO: 1122786 - RNA, 27 nt, Human
uaauacuagcaaaucaaauuggcccca

SEQ ID NO: 1122787 - RNA, 18 nt, Human
uaauguguguguauaucc

SEQ ID NO: 1122788 - RNA, 24 nt, Human
uacaguuuauugucuaauacuagc

SEQ ID NO: 1122789 - RNA, 23 nt, Human
uaccagacugagguaccaugccu

SEQ ID NO: 1122790 - RNA, 19 nt, Human
uaccccaucuccucaccuc

SEQ ID NO: 1122791 - RNA, 19 nt, Human
uaccccaucuccucaccuc

SEQ ID NO: 1122792 - RNA, 23 nt, Human
uacgugugugugugugugugugu

SEQ ID NO: 1122793 - RNA, 23 nt, Human
uacgugugugugugugugugugu

SEQ ID NO: 1122794 - RNA, 21 nt, Human
uagaaagaugcuaaggggaug

SEQ ID NO: 1122795 - RNA, 25 nt, Human
uagacaaagacuuccauccugccca

SEQ ID NO: 1122796 - RNA, 31 nt, Human
uagauauacgugugugugugugugugugugg

SEQ ID NO: 1122797 - RNA, 20 nt, Human
uagcaguauuugacugcagc

SEQ ID NO: 1122798 - RNA, 19 nt, Human
uauacgugugugugugugu

SEQ ID NO: 1122799 - RNA, 19 nt, Human
uauacgugugugugugugu

SEQ ID NO: 1122800 - RNA, 23 nt, Human
uauauauauaauguguguguaua

SEQ ID NO: 1122801 - RNA, 19 nt, Human
uauauauauauauauauau

SEQ ID NO: 1122802 - RNA, 21 nt, Human
uaugugcauaaauagauauac

SEQ ID NO: 1122803 - RNA, 31 nt, Human
uaugugcauaaauagauauacgugugugugg

SEQ ID NO: 1122804 - RNA, 24 nt, Human
ucagagcaggauguucuaggcugg

SEQ ID NO: 1122805 - RNA, 24 nt, Human
ucccaaaggccggagagcaagugu

SEQ ID NO: 1122806 - RNA, 23 nt, Human
uccccaggugggucacuuagcuc

SEQ ID NO: 1122807 - RNA, 20 nt, Human
ucccuccuccuggggagggg

SEQ ID NO: 1122808 - RNA, 23 nt, Human
uccgagggaaugcccugcccccg

SEQ ID NO: 1122809 - RNA, 22 nt, Human
uccuggggagggggcucauugg

SEQ ID NO: 1122810 - RNA, 20 nt, Human
uccuuaggccaggacuuccg

SEQ ID NO: 1122811 - RNA, 20 nt, Human
ucuaggcuggcgacagggug

SEQ ID NO: 1122812 - RNA, 23 nt, Human
ucuguaggacccuccuuggccca

SEQ ID NO: 1122813 - RNA, 21 nt, Human
ucugugcuacagggccaggga

SEQ ID NO: 1122814 - RNA, 23 nt, Human
ucuuaguuuuaagagcugccagg

SEQ ID NO: 1122815 - RNA, 20 nt, Human
ugaaaaggagugugacaagu

SEQ ID NO: 1122816 - RNA, 22 nt, Human
ugacaaguccaaggaacuugua

SEQ ID NO: 1122817 - RNA, 22 nt, Human
ugagaugccaccuugucuguag

SEQ ID NO: 1122818 - RNA, 18 nt, Human
ugagcucuggggaccagc

SEQ ID NO: 1122819 - RNA, 22 nt, Human
ugaugguugacaaaggcuaagc

SEQ ID NO: 1122820 - RNA, 20 nt, Human
ugcaagauacaaaugcagaa

SEQ ID NO: 1122821 - RNA, 21 nt, Human
uggaaggaagccacuguggca

SEQ ID NO: 1122822 - RNA, 19 nt, Human
uggaaggcugagcuggcuu

SEQ ID NO: 1122823 - RNA, 21 nt, Human
uggcagagggacaggcacagg

SEQ ID NO: 1122824 - RNA, 25 nt, Human
uggcuuaguucggugccccaguggg

SEQ ID NO: 1122825 - RNA, 22 nt, Human
ugggaggccaggcuucaaacgc

SEQ ID NO: 1122826 - RNA, 21 nt, Human
ugggguaaagucccggggguu

SEQ ID NO: 1122827 - RNA, 20 nt, Human
ugggucacuuagcucuggac

SEQ ID NO: 1122828 - RNA, 18 nt, Human
uguauauauauauauaua

SEQ ID NO: 1122829 - RNA, 22 nt, Human
uguauauauauauauauauaua

SEQ ID NO: 1122830 - RNA, 19 nt, Human
ugucuguaggacccuccuu

SEQ ID NO: 1122831 - RNA, 18 nt, Human
uguguauauauauauaua

SEQ ID NO: 1122832 - RNA, 20 nt, Human
uguguauauauauauauaua

SEQ ID NO: 1122833 - RNA, 22 nt, Human
uguguauauauauauauauaua

SEQ ID NO: 1122834 - RNA, 22 nt, Human
uguguguauauauauauauaua

SEQ ID NO: 1122835 - RNA, 18 nt, Human
uguguguguauauauaua

SEQ ID NO: 1122836 - RNA, 18 nt, Human
uguguguguauauauaua

SEQ ID NO: 1122837 - RNA, 23 nt, Human
uguguguguguauauauauauau

SEQ ID NO: 1122838 - RNA, 18 nt, Human
uguguguguguguauaua

SEQ ID NO: 1122839 - RNA, 23 nt, Human
uguguguguguguauauauauau

SEQ ID NO: 1122840 - RNA, 18 nt, Human
uguguguguguguguaua

SEQ ID NO: 1122841 - RNA, 20 nt, Human
uguguguguguguguauaua

SEQ ID NO: 1122842 - RNA, 18 nt, Human
ugugugugugugugugug

SEQ ID NO: 1122843 - RNA, 18 nt, Human
ugugugugugugugugug

SEQ ID NO: 1122844 - RNA, 22 nt, Human
uguguguguguguguguguaua

SEQ ID NO: 1122845 - RNA, 24 nt, Human
uguguguguguguguguguauaua

SEQ ID NO: 1122846 - RNA, 19 nt, Human
uucagaccuagacaaagac

SEQ ID NO: 1122847 - RNA, 19 nt, Human
uugcagaggggggauguca

SEQ ID NO: 1122848 - RNA, 21 nt, Human
uugcaugggucuccuuugugc

SEQ ID NO: 1122849 - RNA, 23 nt, Human
uuucacagucuggauaccagacu

SEQ ID NO: 1122850 - RNA, 20 nt, Human
uuucuugggugagguugaga

SEQ ID NO: 1122851 - RNA, 24 nt, Human
uuuguccccugacagagauuccau

SEQ ID NO: 1122852 - RNA, 24 nt, Human
aaagugcugggauuacaggcguga

SEQ ID NO: 1122853 - RNA, 26 nt, Human
aaccacugaguaagguaguagccacc

SEQ ID NO: 1122854 - RNA, 25 nt, Human
aagcaaagggcagaacaccccagga

SEQ ID NO: 1122855 - RNA, 19 nt, Human
aagcuugaagguuaagagc

SEQ ID NO: 1122856 - RNA, 19 nt, Human
aaguagcugggauuacagg

SEQ ID NO: 1122857 - RNA, 23 nt, Human
aaguagcugggauuacaggggcu

SEQ ID NO: 1122858 - RNA, 19 nt, Human
aagugcugggauuacaggc

SEQ ID NO: 1122859 - RNA, 19 nt, Human
aagugcugggauuacaggc

SEQ ID NO: 1122860 - RNA, 26 nt, Human
aagugcugggauuacaggcgugagcc

SEQ ID NO: 1122861 - RNA, 19 nt, Human
aauucacuucauuuucccu

SEQ ID NO: 1122862 - RNA, 20 nt, Human
aauucauggaaguccaucuu

SEQ ID NO: 1122863 - RNA, 23 nt, Human
acacaccauacugcuugugggga

SEQ ID NO: 1122864 - RNA, 18 nt, Human
acaggguuucaccauguu

SEQ ID NO: 1122865 - RNA, 19 nt, Human
acaggguuucaccauguug

SEQ ID NO: 1122866 - RNA, 24 nt, Human
acaggguuucaccauguugaccag

SEQ ID NO: 1122867 - RNA, 20 nt, Human
acucaucccugcaucccccg

SEQ ID NO: 1122868 - RNA, 24 nt, Human
acucuuguugcccaggcuggagug

SEQ ID NO: 1122869 - RNA, 23 nt, Human
agagaugggacccuggggaagga

SEQ ID NO: 1122870 - RNA, 24 nt, Human
agagccgacauaggaggcuuugcu

SEQ ID NO: 1122871 - RNA, 18 nt, Human
agcaaaauuuagcuccau

SEQ ID NO: 1122872 - RNA, 27 nt, Human
agccacugagugaaugaacuggaguuc

SEQ ID NO: 1122873 - RNA, 19 nt, Human
agccauuagaagguagggg

SEQ ID NO: 1122874 - RNA, 19 nt, Human
agccugggaugaggagcuu

SEQ ID NO: 1122875 - RNA, 21 nt, Human
aggacagcacuggauuugacu

SEQ ID NO: 1122876 - RNA, 18 nt, Human
aggcccagcaaccuguga

SEQ ID NO: 1122877 - RNA, 21 nt, Human
aggcuggcuucagcugagaga

SEQ ID NO: 1122878 - RNA, 23 nt, Human
aggcuuugcuuugcaaaugaaaa

SEQ ID NO: 1122879 - RNA, 18 nt, Human
agggaauuggagacucug

SEQ ID NO: 1122880 - RNA, 24 nt, Human
aggugauccacccaccuugguguc

SEQ ID NO: 1122881 - RNA, 20 nt, Human
aguaguucuugaccuuucug

SEQ ID NO: 1122882 - RNA, 21 nt, Human
agucgugugggaggccaagcc

SEQ ID NO: 1122883 - RNA, 19 nt, Human
agucuugaacuucugaccu

SEQ ID NO: 1122884 - RNA, 24 nt, Human
agugcaauggcucgaucuuggcuc

SEQ ID NO: 1122885 - RNA, 18 nt, Human
agugcugggauuacaggc

SEQ ID NO: 1122886 - RNA, 22 nt, Human
aucucaccccuagagaccugga

SEQ ID NO: 1122887 - RNA, 22 nt, Human
augcauccugggaccacccugu

SEQ ID NO: 1122888 - RNA, 21 nt, Human
auuacaggggcucaccaccau

SEQ ID NO: 1122889 - RNA, 21 nt, Human
caaagcugagacacaccauac

SEQ ID NO: 1122890 - RNA, 24 nt, Human
caaagugcugggauuacaggcgug

SEQ ID NO: 1122891 - RNA, 24 nt, Human
caaaugaaaacacugggaauucac

SEQ ID NO: 1122892 - RNA, 22 nt, Human
caaccuuggcugcauauguaag

SEQ ID NO: 1122893 - RNA, 22 nt, Human
caagugauucuccugccucagc

SEQ ID NO: 1122894 - RNA, 27 nt, Human
caagugauucuccugccucagccuccc

SEQ ID NO: 1122895 - RNA, 24 nt, Human
caccaugccuggcuaauuuuugua

SEQ ID NO: 1122896 - RNA, 21 nt, Human
caccauguugaccaggcuagu

SEQ ID NO: 1122897 - RNA, 22 nt, Human
caccauguugaccaggcuaguc

SEQ ID NO: 1122898 - RNA, 24 nt, Human
caccauguugaccaggcuagucuu

SEQ ID NO: 1122899 - RNA, 23 nt, Human
cacccaccuuggugucccaaagu

SEQ ID NO: 1122900 - RNA, 19 nt, Human
caccccugagaggaguaca

SEQ ID NO: 1122901 - RNA, 19 nt, Human
cacgugguccucagcaucc

SEQ ID NO: 1122902 - RNA, 24 nt, Human
cacucuuguugcccaggcuggagu

SEQ ID NO: 1122903 - RNA, 23 nt, Human
cacugcaaacucugccuccuggg

SEQ ID NO: 1122904 - RNA, 25 nt, Human
cagaacaccccaggauucacucuaa

SEQ ID NO: 1122905 - RNA, 22 nt, Human
cagagacaggguuucaccaugu

SEQ ID NO: 1122906 - RNA, 24 nt, Human
cagaguuuagagcuaacgaguggg

SEQ ID NO: 1122907 - RNA, 21 nt, Human
cagcccuucccugagucagga

SEQ ID NO: 1122908 - RNA, 23 nt, Human
cagcuggguugaugaugacugag

SEQ ID NO: 1122909 - RNA, 18 nt, Human
caggcuagucuugaacuu

SEQ ID NO: 1122910 - RNA, 24 nt, Human
caggguuucaccauguugaccagg

SEQ ID NO: 1122911 - RNA, 18 nt, Human
cagugcugagcaucuggu

SEQ ID NO: 1122912 - RNA, 20 nt, Human
caucuggagcucaguugcuc

SEQ ID NO: 1122913 - RNA, 25 nt, Human
cauguacacagaaaaauuugucagc

SEQ ID NO: 1122914 - RNA, 24 nt, Human
cauguugaccaggcuagucuugaa

SEQ ID NO: 1122915 - RNA, 19 nt, Human
ccaaagccaagguuaggcu

SEQ ID NO: 1122916 - RNA, 22 nt, Human
ccaaagugcugggauuacaggc

SEQ ID NO: 1122917 - RNA, 22 nt, Human
ccaaagugcugggauuacaggc

SEQ ID NO: 1122918 - RNA, 24 nt, Human
ccaaagugcugggauuacaggcgu

SEQ ID NO: 1122919 - RNA, 21 nt, Human
ccaagccccacuccagacuua

SEQ ID NO: 1122920 - RNA, 24 nt, Human
ccaaguagcugggauuacaggggc

SEQ ID NO: 1122921 - RNA, 25 nt, Human
ccacacacgcagcuccuauaauccc

SEQ ID NO: 1122922 - RNA, 19 nt, Human
ccacugaguaagguaguag

SEQ ID NO: 1122923 - RNA, 23 nt, Human
ccagcaaccugugauuuugccac

SEQ ID NO: 1122924 - RNA, 18 nt, Human
ccaucuggagcucaguug

SEQ ID NO: 1122925 - RNA, 25 nt, Human
cccaaguagcugggauuacaggggc

SEQ ID NO: 1122926 - RNA, 18 nt, Human
cccaggcuggagugcaau

SEQ ID NO: 1122927 - RNA, 22 nt, Human
cccuugguugacucuuucuccu

SEQ ID NO: 1122928 - RNA, 24 nt, Human
cccuuuaaugcaguaguucuugac

SEQ ID NO: 1122929 - RNA, 20 nt, Human
ccgagcaccucgugggugcc

SEQ ID NO: 1122930 - RNA, 21 nt, Human
ccguaaaggcagcuggguuga

SEQ ID NO: 1122931 - RNA, 21 nt, Human
ccuccuggguucaagugauuc

SEQ ID NO: 1122932 - RNA, 24 nt, Human
ccuccuggguucaagugauucucc

SEQ ID NO: 1122933 - RNA, 23 nt, Human
ccugccucagccucccaaguagc

SEQ ID NO: 1122934 - RNA, 24 nt, Human
ccugccucagccucccaaguagcu

SEQ ID NO: 1122935 - RNA, 21 nt, Human
ccuggggaaggaggaggagag

SEQ ID NO: 1122936 - RNA, 23 nt, Human
ccuggguucaagugauucuccuc

SEQ ID NO: 1122937 - RNA, 23 nt, Human
ccuggguucaagugauucuccug

SEQ ID NO: 1122938 - RNA, 20 nt, Human
cguaaaggcagcuggguuga

SEQ ID NO: 1122939 - RNA, 21 nt, Human
cguaagcgaugccaucucuuc

SEQ ID NO: 1122940 - RNA, 19 nt, Human
cuaaugcacagccaagguu

SEQ ID NO: 1122941 - RNA, 23 nt, Human
cucacugcaaacucugccuccug

SEQ ID NO: 1122942 - RNA, 24 nt, Human
cucacugcaaacucugccuccugg

SEQ ID NO: 1122943 - RNA, 24 nt, Human
cucagccucccaaguagcugggau

SEQ ID NO: 1122944 - RNA, 24 nt, Human
cucaggugauccacccaccuuggu

SEQ ID NO: 1122945 - RNA, 18 nt, Human
cucagugccacccccaug

SEQ ID NO: 1122946 - RNA, 21 nt, Human
cuccuggguucaagugauucu

SEQ ID NO: 1122947 - RNA, 18 nt, Human
cucuuguugcccaggcug

SEQ ID NO: 1122948 - RNA, 23 nt, Human
cugaccucaggugauccacccac

SEQ ID NO: 1122949 - RNA, 20 nt, Human
cugagucaggagaccugggu

SEQ ID NO: 1122950 - RNA, 18 nt, Human
cugcagugcugagcaucu

SEQ ID NO: 1122951 - RNA, 23 nt, Human
cugccuccuggguucaagugauu

SEQ ID NO: 1122952 - RNA, 21 nt, Human
cuggcuucagcugagagagcu

SEQ ID NO: 1122953 - RNA, 24 nt, Human
cuggggaagcaaagggcagggacc

SEQ ID NO: 1122954 - RNA, 19 nt, Human
cuggguugaugaugacuga

SEQ ID NO: 1122955 - RNA, 22 nt, Human
cuuaccauggaaggaauuugga

SEQ ID NO: 1122956 - RNA, 20 nt, Human
cuugaacuucugaccucagg

SEQ ID NO: 1122957 - RNA, 24 nt, Human
cuuguugcccaggcuggagugcaa

SEQ ID NO: 1122958 - RNA, 19 nt, Human
cuuuuguucuuuguuacca

SEQ ID NO: 1122959 - RNA, 19 nt, Human
gaaaacacugggaauucac

SEQ ID NO: 1122960 - RNA, 18 nt, Human
gaaggaggaggagaggga

SEQ ID NO: 1122961 - RNA, 19 nt, Human
gaaggaggaggagagggag

SEQ ID NO: 1122962 - RNA, 21 nt, Human
gaauucacuucauuuucccua

SEQ ID NO: 1122963 - RNA, 20 nt, Human
gacccuggggaaggaggagg

SEQ ID NO: 1122964 - RNA, 27 nt, Human
gacccuggggaaggaggaggagaggga

SEQ ID NO: 1122965 - RNA, 23 nt, Human
gaccucaggugauccacccaccu

SEQ ID NO: 1122966 - RNA, 22 nt, Human
gagacagaguuucacucuuguu

SEQ ID NO: 1122967 - RNA, 20 nt, Human
gagcuuuuuaaaagguggua

SEQ ID NO: 1122968 - RNA, 21 nt, Human
gaggagagggaggcuguuagg

SEQ ID NO: 1122969 - RNA, 22 nt, Human
gagggcccugagaaaaauggcc

SEQ ID NO: 1122970 - RNA, 21 nt, Human
gagguggggagguuugguuac

SEQ ID NO: 1122971 - RNA, 19 nt, Human
gaguacacaccauccacau

SEQ ID NO: 1122972 - RNA, 18 nt, Human
gauuacaggcgugagcca

SEQ ID NO: 1122973 - RNA, 21 nt, Human
gauuacaggcgugagccacca

SEQ ID NO: 1122974 - RNA, 24 nt, Human
gauuacaggcgugagccaccaugc

SEQ ID NO: 1122975 - RNA, 19 nt, Human
gauuacaggggcucaccac

SEQ ID NO: 1122976 - RNA, 21 nt, Human
gauucuccugccucagccucc

SEQ ID NO: 1122977 - RNA, 21 nt, Human
gccacccccaugcauccuggg

SEQ ID NO: 1122978 - RNA, 21 nt, Human
gcccuugguugacucuuucuc

SEQ ID NO: 1122979 - RNA, 21 nt, Human
gcucacugcaaacucugccuc

SEQ ID NO: 1122980 - RNA, 19 nt, Human
gcugcagucuagucgugug

SEQ ID NO: 1122981 - RNA, 23 nt, Human
gcugcagucuagucgugugggag

SEQ ID NO: 1122982 - RNA, 25 nt, Human
gcuggagugcaauggcucgaucuug

SEQ ID NO: 1122983 - RNA, 21 nt, Human
gcuucagcugagagagcuugg

SEQ ID NO: 1122984 - RNA, 19 nt, Human
ggacagcacuggauuugac

SEQ ID NO: 1122985 - RNA, 26 nt, Human
ggagcucaguugcucuugcccugggg

SEQ ID NO: 1122986 - RNA, 20 nt, Human
ggaggcuguuaggauggggg

SEQ ID NO: 1122987 - RNA, 20 nt, Human
ggaggcuguuaggauggggg

SEQ ID NO: 1122988 - RNA, 24 nt, Human
ggauuacaggcgugagccaccaug

SEQ ID NO: 1122989 - RNA, 24 nt, Human
ggcuagucuugaacuucugaccuc

SEQ ID NO: 1122990 - RNA, 24 nt, Human
ggcuucacucaggucuucccaugg

SEQ ID NO: 1122991 - RNA, 21 nt, Human
gggaagagaugauggggaggu

SEQ ID NO: 1122992 - RNA, 23 nt, Human
gggaagcaaagggcagaacaccc

SEQ ID NO: 1122993 - RNA, 18 nt, Human
gggaaggaggaggagagg

SEQ ID NO: 1122994 - RNA, 20 nt, Human
ggggguuacagggcaguggg

SEQ ID NO: 1122995 - RNA, 22 nt, Human
ggugagguggggagguuugguu

SEQ ID NO: 1122996 - RNA, 21 nt, Human
ggugggugggagguggggcug

SEQ ID NO: 1122997 - RNA, 20 nt, Human
guagcugggauuacaggggc

SEQ ID NO: 1122998 - RNA, 21 nt, Human
guagucucgaauccugcagcu

SEQ ID NO: 1122999 - RNA, 24 nt, Human
gugauccacccaccuugguguccc

SEQ ID NO: 1123000 - RNA, 24 nt, Human
gugauucuccugccucagccuccc

SEQ ID NO: 1123001 - RNA, 23 nt, Human
gugccacccccaugcauccuggg

SEQ ID NO: 1123002 - RNA, 22 nt, Human
guggggguuacagggcaguggg

SEQ ID NO: 1123003 - RNA, 27 nt, Human
guucuaguuccuccuccaucacucacu

SEQ ID NO: 1123004 - RNA, 20 nt, Human
uaaagcuccccaggugauuc

SEQ ID NO: 1123005 - RNA, 20 nt, Human
uaauguacguaucucacccc

SEQ ID NO: 1123006 - RNA, 24 nt, Human
uaauuuuuguauuuuuagcagaga

SEQ ID NO: 1123007 - RNA, 20 nt, Human
uacaaagcugagacacacca

SEQ ID NO: 1123008 - RNA, 18 nt, Human
uacaggcgugagccacca

SEQ ID NO: 1123009 - RNA, 24 nt, Human
uacaggggcucaccaccaugccug

SEQ ID NO: 1123010 - RNA, 18 nt, Human
uacuaugugccaggugcu

SEQ ID NO: 1123011 - RNA, 21 nt, Human
uagaagccaaagccaagguua

SEQ ID NO: 1123012 - RNA, 24 nt, Human
uagcagagacaggguuucaccaug

SEQ ID NO: 1123013 - RNA, 26 nt, Human
uagcagagacaggguuucaccauguu

SEQ ID NO: 1123014 - RNA, 19 nt, Human
uagcccaaggauguuauag

SEQ ID NO: 1123015 - RNA, 21 nt, Human
uaggauggggguggcugggua

SEQ ID NO: 1123016 - RNA, 24 nt, Human
uagucuugaacuucugaccucagg

SEQ ID NO: 1123017 - RNA, 19 nt, Human
ucaagugauucuccugccu

SEQ ID NO: 1123018 - RNA, 22 nt, Human
ucacucuuguugcccaggcugg

SEQ ID NO: 1123019 - RNA, 23 nt, Human
ucacucuuguugcccaggcugga

SEQ ID NO: 1123020 - RNA, 18 nt, Human
ucacugcaaacucugccu

SEQ ID NO: 1123021 - RNA, 24 nt, Human
ucacugcaaacucugccuccuggg

SEQ ID NO: 1123022 - RNA, 20 nt, Human
ucagccucccaaguagcugg

SEQ ID NO: 1123023 - RNA, 23 nt, Human
uccaucacucacuguaaaaugaa

SEQ ID NO: 1123024 - RNA, 24 nt, Human
ucccaaagugcugggauuacaggc

SEQ ID NO: 1123025 - RNA, 23 nt, Human
ucccaaguagcugggauuacagg

SEQ ID NO: 1123026 - RNA, 18 nt, Human
ucccugagucaggagacc

SEQ ID NO: 1123027 - RNA, 23 nt, Human
ucccugagucaggagaccugggu

SEQ ID NO: 1123028 - RNA, 23 nt, Human
ucccugcaucccccgagcaccuc

SEQ ID NO: 1123029 - RNA, 20 nt, Human
ucccuggaccagcaaucacu

SEQ ID NO: 1123030 - RNA, 24 nt, Human
ucccuggaccagcaaucacuuggg

SEQ ID NO: 1123031 - RNA, 18 nt, Human
ucccuuggcaacucccag

SEQ ID NO: 1123032 - RNA, 22 nt, Human
uccucuguaguuagccccugau

SEQ ID NO: 1123033 - RNA, 21 nt, Human
uccuggguucaagugauucuc

SEQ ID NO: 1123034 - RNA, 24 nt, Human
uccuggguucaagugauucuccug

SEQ ID NO: 1123035 - RNA, 20 nt, Human
uccuugaggcuggcuucagc

SEQ ID NO: 1123036 - RNA, 18 nt, Human
ucuaaagugcccucucuc

SEQ ID NO: 1123037 - RNA, 20 nt, Human
ucuaaagugcccucucucca

SEQ ID NO: 1123038 - RNA, 19 nt, Human
ucuccagaaauguuacauc

SEQ ID NO: 1123039 - RNA, 26 nt, Human
ucuccuccucuucacuugguagcaaa

SEQ ID NO: 1123040 - RNA, 26 nt, Human
ucuccugccucagccucccaaguagc

SEQ ID NO: 1123041 - RNA, 18 nt, Human
ucuguacuuugacgggau

SEQ ID NO: 1123042 - RNA, 23 nt, Human
ucuguggugggugggaggugggg

SEQ ID NO: 1123043 - RNA, 22 nt, Human
ucuuguugcccaggcuggagug

SEQ ID NO: 1123044 - RNA, 21 nt, Human
ucuuugacccacugacucuag

SEQ ID NO: 1123045 - RNA, 24 nt, Human
ugaccaggcuagucuugaacuucu

SEQ ID NO: 1123046 - RNA, 20 nt, Human
ugacccacugacucuagugg

SEQ ID NO: 1123047 - RNA, 21 nt, Human
ugaccucaggugauccaccca

SEQ ID NO: 1123048 - RNA, 24 nt, Human
ugaccucaggugauccacccaccu

SEQ ID NO: 1123049 - RNA, 19 nt, Human
ugacucuaguggagggccc

SEQ ID NO: 1123050 - RNA, 24 nt, Human
ugagagaugggacccuggggaagg

SEQ ID NO: 1123051 - RNA, 26 nt, Human
ugagaugaggcccagcaaccugugau

SEQ ID NO: 1123052 - RNA, 26 nt, Human
ugagcaucugguuuuuuuaaagcucc

SEQ ID NO: 1123053 - RNA, 20 nt, Human
ugagccacugagugaaugaa

SEQ ID NO: 1123054 - RNA, 21 nt, Human
ugaggcuggcuucagcugaga

SEQ ID NO: 1123055 - RNA, 18 nt, Human
ugagucaggagaccuggg

SEQ ID NO: 1123056 - RNA, 20 nt, Human
ugagucaggagaccuggguu

SEQ ID NO: 1123057 - RNA, 21 nt, Human
ugaugcugggaagagaugaug

SEQ ID NO: 1123058 - RNA, 21 nt, Human
ugauggggagguuguaaagac

SEQ ID NO: 1123059 - RNA, 20 nt, Human
ugauucuccugccucagccu

SEQ ID NO: 1123060 - RNA, 24 nt, Human
ugccaggugcuuugcauguuuucu

SEQ ID NO: 1123061 - RNA, 18 nt, Human
ugccaucucuucuuuauc

SEQ ID NO: 1123062 - RNA, 21 nt, Human
ugcccaggcuggagugcaaug

SEQ ID NO: 1123063 - RNA, 25 nt, Human
ugcccaggcuggagugcaauggcuc

SEQ ID NO: 1123064 - RNA, 18 nt, Human
ugcccucucuccagaaau

SEQ ID NO: 1123065 - RNA, 24 nt, Human
ugcccuggggaagcaaagggcaga

SEQ ID NO: 1123066 - RNA, 24 nt, Human
ugccucagccucccaaguagcugg

SEQ ID NO: 1123067 - RNA, 19 nt, Human
ugcugggaagagaugaugg

SEQ ID NO: 1123068 - RNA, 24 nt, Human
ugcugggauuacaggcgugagcca

SEQ ID NO: 1123069 - RNA, 23 nt, Human
ugcuuguggggaggucacuaggg

SEQ ID NO: 1123070 - RNA, 18 nt, Human
uggaggacccuucggaau

SEQ ID NO: 1123071 - RNA, 19 nt, Human
uggagugcaauggcucgau

SEQ ID NO: 1123072 - RNA, 23 nt, Human
uggagugcaauggcucgaucuug

SEQ ID NO: 1123073 - RNA, 24 nt, Human
uggagugcaauggcucgaucuugg

SEQ ID NO: 1123074 - RNA, 23 nt, Human
ugggagccagagugagagauggg

SEQ ID NO: 1123075 - RNA, 18 nt, Human
ugggagguggggcuggag

SEQ ID NO: 1123076 - RNA, 18 nt, Human
ugggaugaggagcuucca

SEQ ID NO: 1123077 - RNA, 18 nt, Human
ugggauuacaggcgugag

SEQ ID NO: 1123078 - RNA, 22 nt, Human
ugggauuacaggcgugagccac

SEQ ID NO: 1123079 - RNA, 23 nt, Human
ugggauuacaggcgugagccacc

SEQ ID NO: 1123080 - RNA, 24 nt, Human
ugggauuacaggcgugagccacca

SEQ ID NO: 1123081 - RNA, 25 nt, Human
ugggauuacaggcgugagccaccau

SEQ ID NO: 1123082 - RNA, 18 nt, Human
ugggauuacaggggcuca

SEQ ID NO: 1123083 - RNA, 19 nt, Human
ugggauuacaggggcucac

SEQ ID NO: 1123084 - RNA, 21 nt, Human
ugggauuacaggggcucacca

SEQ ID NO: 1123085 - RNA, 24 nt, Human
ugggauuacaggggcucaccacca

SEQ ID NO: 1123086 - RNA, 25 nt, Human
ugggauuacaggggcucaccaccau

SEQ ID NO: 1123087 - RNA, 18 nt, Human
uggggaagcaaagggcag

SEQ ID NO: 1123088 - RNA, 19 nt, Human
uggggaggucacuaggguc

SEQ ID NO: 1123089 - RNA, 21 nt, Human
uggggguuacagggcaguggg

SEQ ID NO: 1123090 - RNA, 20 nt, Human
ugggugggagguggggcugg

SEQ ID NO: 1123091 - RNA, 23 nt, Human
uggguucaagugauucuccugcc

SEQ ID NO: 1123092 - RNA, 24 nt, Human
uggguucaagugauucuccugccu

SEQ ID NO: 1123093 - RNA, 19 nt, Human
ugguagcaaaauuuagcuc

SEQ ID NO: 1123094 - RNA, 22 nt, Human
uggugggugggagguggggcuc

SEQ ID NO: 1123095 - RNA, 22 nt, Human
uguaugauucccgcacccuuua

SEQ ID NO: 1123096 - RNA, 23 nt, Human
ugugaagugaugugcuuucuguc

SEQ ID NO: 1123097 - RNA, 22 nt, Human
ugugauuuugccaccccuccag

SEQ ID NO: 1123098 - RNA, 21 nt, Human
uguuacaucuacauguacaca

SEQ ID NO: 1123099 - RNA, 23 nt, Human
uguuacaucuacauguacacaga

SEQ ID NO: 1123100 - RNA, 20 nt, Human
uguugcccaggcuggagugc

SEQ ID NO: 1123101 - RNA, 22 nt, Human
uguuuucucauuuaaucuucac

SEQ ID NO: 1123102 - RNA, 24 nt, Human
uuagcagagacaggguuucaccau

SEQ ID NO: 1123103 - RNA, 21 nt, Human
uucaagugauucuccugccuc

SEQ ID NO: 1123104 - RNA, 23 nt, Human
uucaagugauucuccugccucag

SEQ ID NO: 1123105 - RNA, 24 nt, Human
uucaagugauucuccugccucagc

SEQ ID NO: 1123106 - RNA, 24 nt, Human
uucacucuuguugcccaggcugga

SEQ ID NO: 1123107 - RNA, 20 nt, Human
uucuguggugggugggaggu

SEQ ID NO: 1123108 - RNA, 19 nt, Human
uugaguguuacacaccccu

SEQ ID NO: 1123109 - RNA, 18 nt, Human
uugcccaggcuggagugc

SEQ ID NO: 1123110 - RNA, 23 nt, Human
uugcuccugccugccacacacgc

SEQ ID NO: 1123111 - RNA, 24 nt, Human
uuucaccauguugaccaggcuagu

SEQ ID NO: 1123112 - RNA, 24 nt, Human
uuucacucuuguugcccaggcugg

SEQ ID NO: 1123113 - RNA, 20 nt, Human
uuugacccacugacucuagu

SEQ ID NO: 1123114 - RNA, 22 nt, Human
uuuuguauuuuuagcagagaca

SEQ ID NO: 1123115 - RNA, 22 nt, Human
uuuuuaaagcuccccaggugau

SEQ ID NO: 1123116 - RNA, 24 nt, Human
uuuuuagcagagacaggguuucac

SEQ ID NO: 1123117 - RNA, 20 nt, Human
uuuuuguauuuuuagcagag

SEQ ID NO: 1123118 - RNA, 21 nt, Human
aaaacugguuuccccccacag

SEQ ID NO: 1123119 - RNA, 27 nt, Human
aaacugguuuccccccacaguucuucu

SEQ ID NO: 1123120 - RNA, 24 nt, Human
aagcaucuccucuggccuccaccc

SEQ ID NO: 1123121 - RNA, 21 nt, Human
aagcccuggguaucccagagc

SEQ ID NO: 1123122 - RNA, 18 nt, Human
aaggccagacuguugaga

SEQ ID NO: 1123123 - RNA, 18 nt, Human
aaggcuggaugaaccugg

SEQ ID NO: 1123124 - RNA, 22 nt, Human
acaaagcacuuccacuuaauua

SEQ ID NO: 1123125 - RNA, 20 nt, Human
acaagcacaaagcacuucca

SEQ ID NO: 1123126 - RNA, 21 nt, Human
acaagcacaaagcacuuccac

SEQ ID NO: 1123127 - RNA, 18 nt, Human
acccccaaguuccugggc

SEQ ID NO: 1123128 - RNA, 21 nt, Human
acccccuuacaggaucugcug

SEQ ID NO: 1123129 - RNA, 23 nt, Human
agaccagacaccagucucagaga

SEQ ID NO: 1123130 - RNA, 18 nt, Human
agcacaagcacaaagcac

SEQ ID NO: 1123131 - RNA, 20 nt, Human
agccccuagacccuagcacc

SEQ ID NO: 1123132 - RNA, 22 nt, Human
agcucugaaugccaagaccacc

SEQ ID NO: 1123133 - RNA, 19 nt, Human
aggaggaggaugccgcacc

SEQ ID NO: 1123134 - RNA, 18 nt, Human
aggcaagggcagggcggg

SEQ ID NO: 1123135 - RNA, 22 nt, Human
aggccaagcucccagagaagcu

SEQ ID NO: 1123136 - RNA, 21 nt, Human
aggcccaggcccugaaacggc

SEQ ID NO: 1123137 - RNA, 22 nt, Human
aggcuuggagaugagaagagcu

SEQ ID NO: 1123138 - RNA, 19 nt, Human
aggcuuuggauggaaagcu

SEQ ID NO: 1123139 - RNA, 19 nt, Human
agggcggggccgcuccagu

SEQ ID NO: 1123140 - RNA, 21 nt, Human
agugguggugggaaggggagg

SEQ ID NO: 1123141 - RNA, 22 nt, Human
agugugcuaggccgcaucugcu

SEQ ID NO: 1123142 - RNA, 22 nt, Human
auccugaagcaggaaaaagccc

SEQ ID NO: 1123143 - RNA, 18 nt, Human
augaaguggcuugcuccc

SEQ ID NO: 1123144 - RNA, 24 nt, Human
auggauccugaagcaggaaaaagc

SEQ ID NO: 1123145 - RNA, 22 nt, Human
auggcagugguggugggaaggg

SEQ ID NO: 1123146 - RNA, 22 nt, Human
caaagcacaaaccaugcuccug

SEQ ID NO: 1123147 - RNA, 22 nt, Human
caaccuggugggauccuuuugc

SEQ ID NO: 1123148 - RNA, 23 nt, Human
caaguuccugggcccuccccaca

SEQ ID NO: 1123149 - RNA, 24 nt, Human
caauaggccccuggugggagaccu

SEQ ID NO: 1123150 - RNA, 24 nt, Human
caccagguacuaugugcagcaucu

SEQ ID NO: 1123151 - RNA, 19 nt, Human
cacccuggcaaugguccug

SEQ ID NO: 1123152 - RNA, 18 nt, Human
cagaaaauuacuaaaaau

SEQ ID NO: 1123153 - RNA, 23 nt, Human
cagaaugcccacauuuuguguuc

SEQ ID NO: 1123154 - RNA, 23 nt, Human
cagaauuaggaucacccccuuac

SEQ ID NO: 1123155 - RNA, 20 nt, Human
cagcacaagcacaaagcacu

SEQ ID NO: 1123156 - RNA, 22 nt, Human
cagcacaagcacaaagcacuuc

SEQ ID NO: 1123157 - RNA, 18 nt, Human
cagcagggggacgggcag

SEQ ID NO: 1123158 - RNA, 20 nt, Human
cagcaucuaagaccagacac

SEQ ID NO: 1123159 - RNA, 19 nt, Human
cagccuccugccagguucu

SEQ ID NO: 1123160 - RNA, 22 nt, Human
caggaaaaagcccaccagcauc

SEQ ID NO: 1123161 - RNA, 23 nt, Human
caggaaaaagcccaccagcauca

SEQ ID NO: 1123162 - RNA, 24 nt, Human
caggaaaaagcccaccagcaucag

SEQ ID NO: 1123163 - RNA, 23 nt, Human
caggcccaggcccugaaacggca

SEQ ID NO: 1123164 - RNA, 24 nt, Human
caguucuucucacauuccaaucuu

SEQ ID NO: 1123165 - RNA, 25 nt, Human
cauaaaagaaaggcaggcaagggca

SEQ ID NO: 1123166 - RNA, 25 nt, Human
cauacacaacauucagauacacuuc

SEQ ID NO: 1123167 - RNA, 23 nt, Human
caugcuucauucuggcucucaca

SEQ ID NO: 1123168 - RNA, 18 nt, Human
cauggacugggcuaacug

SEQ ID NO: 1123169 - RNA, 20 nt, Human
ccaagaccacccccaaguuu

SEQ ID NO: 1123170 - RNA, 23 nt, Human
ccaagcucccagagaagcuggac

SEQ ID NO: 1123171 - RNA, 27 nt, Human
ccagagccgcccugggcuccaggaaag

SEQ ID NO: 1123172 - RNA, 21 nt, Human
ccaggcuacagucacaggaag

SEQ ID NO: 1123173 - RNA, 23 nt, Human
cccacaguucuucucacauucca

SEQ ID NO: 1123174 - RNA, 24 nt, Human
cccaccagcaucagcauaaaagaa

SEQ ID NO: 1123175 - RNA, 24 nt, Human
ccccacaguucuucucacauucca

SEQ ID NO: 1123176 - RNA, 21 nt, Human
ccccuagacccuagcaccagg

SEQ ID NO: 1123177 - RNA, 23 nt, Human
ccccugaaaagcuguucugaucc

SEQ ID NO: 1123178 - RNA, 18 nt, Human
cccuggcaaugguccugg

SEQ ID NO: 1123179 - RNA, 19 nt, Human
ccgcaucugcuggggccug

SEQ ID NO: 1123180 - RNA, 19 nt, Human
ccuccaccccaggggcaga

SEQ ID NO: 1123181 - RNA, 22 nt, Human
ccuccccacaaaaccaaaucag

SEQ ID NO: 1123182 - RNA, 22 nt, Human
ccuccugccagguucuggaagc

SEQ ID NO: 1123183 - RNA, 28 nt, Human
ccucucauggacugggcuaacugaaggc

SEQ ID NO: 1123184 - RNA, 23 nt, Human
ccugcugaggcuccuaguugugu

SEQ ID NO: 1123185 - RNA, 18 nt, Human
ccuggacaaccugguggg

SEQ ID NO: 1123186 - RNA, 21 nt, Human
cgggccagagccgcccugggc

SEQ ID NO: 1123187 - RNA, 23 nt, Human
cuaacugaaggccaagcucccag

SEQ ID NO: 1123188 - RNA, 23 nt, Human
cuacagucacaggaaggccagac

SEQ ID NO: 1123189 - RNA, 21 nt, Human
cucauggacugggcuaacuga

SEQ ID NO: 1123190 - RNA, 23 nt, Human
cuccccacaaaaccaaaucagag

SEQ ID NO: 1123191 - RNA, 22 nt, Human
cugaccagaugggagaaaccuu

SEQ ID NO: 1123192 - RNA, 19 nt, Human
cugcaccugcaauaccugu

SEQ ID NO: 1123193 - RNA, 18 nt, Human
cugcugggcuuugggcag

SEQ ID NO: 1123194 - RNA, 21 nt, Human
cuggacaaccuggugggaucc

SEQ ID NO: 1123195 - RNA, 23 nt, Human
cuggggccuggcucucccugucg

SEQ ID NO: 1123196 - RNA, 22 nt, Human
cuggucugggccaaggccucug

SEQ ID NO: 1123197 - RNA, 19 nt, Human
gaaaaagaacguucuccuc

SEQ ID NO: 1123198 - RNA, 19 nt, Human
gaaagcuggucugggccaa

SEQ ID NO: 1123199 - RNA, 18 nt, Human
gaggaugccgcaccgccg

SEQ ID NO: 1123200 - RNA, 20 nt, Human
gaggcuuuggauggaaagcu

SEQ ID NO: 1123201 - RNA, 22 nt, Human
gccaagaccacccccaaguucc

SEQ ID NO: 1123202 - RNA, 24 nt, Human
gccccagagugcaggggcuugcuu

SEQ ID NO: 1123203 - RNA, 24 nt, Human
gcucccaggauguguguuugggga

SEQ ID NO: 1123204 - RNA, 22 nt, Human
gcucuggguuuuuagcaccagc

SEQ ID NO: 1123205 - RNA, 18 nt, Human
ggaaagcuggucugggcc

SEQ ID NO: 1123206 - RNA, 22 nt, Human
ggaggcccaggcaacuucagaa

SEQ ID NO: 1123207 - RNA, 19 nt, Human
ggagguuauggugggguug

SEQ ID NO: 1123208 - RNA, 21 nt, Human
ggagguuauggugggguuggg

SEQ ID NO: 1123209 - RNA, 21 nt, Human
ggaguaacaaggagauaaaag

SEQ ID NO: 1123210 - RNA, 22 nt, Human
ggccagagccgcccugggcucc

SEQ ID NO: 1123211 - RNA, 22 nt, Human
ggccggacgugccauucccagc

SEQ ID NO: 1123212 - RNA, 23 nt, Human
gguaagcaucuccucuggccucc

SEQ ID NO: 1123213 - RNA, 21 nt, Human
gucagucccuuacauggaucc

SEQ ID NO: 1123214 - RNA, 21 nt, Human
gugcaggggcuugcuagguuu

SEQ ID NO: 1123215 - RNA, 22 nt, Human
gugcgggauuacugagggugug

SEQ ID NO: 1123216 - RNA, 20 nt, Human
guggugggaaggggagcaga

SEQ ID NO: 1123217 - RNA, 20 nt, Human
guuuuuagcaccagcucuga

SEQ ID NO: 1123218 - RNA, 18 nt, Human
uaaaagaccuuguggucc

SEQ ID NO: 1123219 - RNA, 23 nt, Human
uaagaaaggcugcaccugcaaua

SEQ ID NO: 1123220 - RNA, 20 nt, Human
uacaccagccuccugccagg

SEQ ID NO: 1123221 - RNA, 22 nt, Human
uaccccaaaccauucugggaac

SEQ ID NO: 1123222 - RNA, 18 nt, Human
uagaacaggggaggccac

SEQ ID NO: 1123223 - RNA, 21 nt, Human
uagacccuagcaccagguacu

SEQ ID NO: 1123224 - RNA, 19 nt, Human
uagcaauccugcugaggcu

SEQ ID NO: 1123225 - RNA, 19 nt, Human
uagcaccagcucugaaugc

SEQ ID NO: 1123226 - RNA, 19 nt, Human
uaucccagagcuuaugggu

SEQ ID NO: 1123227 - RNA, 22 nt, Human
uauuuuaggcugcaaggugggg

SEQ ID NO: 1123228 - RNA, 18 nt, Human
ucaguaucagacacaggu

SEQ ID NO: 1123229 - RNA, 21 nt, Human
ucccagagaagcuggacucac

SEQ ID NO: 1123230 - RNA, 18 nt, Human
uccccaguggucgcucuu

SEQ ID NO: 1123231 - RNA, 20 nt, Human
ucccugcuucugcucugggu

SEQ ID NO: 1123232 - RNA, 18 nt, Human
uccgaacuggagccaauc

SEQ ID NO: 1123233 - RNA, 22 nt, Human
uccuccucauuacccugcccuc

SEQ ID NO: 1123234 - RNA, 22 nt, Human
ucuaagaccagacaccagucuc

SEQ ID NO: 1123235 - RNA, 23 nt, Human
ucucccagggaaccggccaccuu

SEQ ID NO: 1123236 - RNA, 19 nt, Human
ucuguaaucuuccuccucc

SEQ ID NO: 1123237 - RNA, 21 nt, Human
ugagaagagcugggaagcaag

SEQ ID NO: 1123238 - RNA, 22 nt, Human
ugagaagagcugggaagcaagc

SEQ ID NO: 1123239 - RNA, 26 nt, Human
ugagaagagcugggaagcaagcccug

SEQ ID NO: 1123240 - RNA, 19 nt, Human
ugagauggacauggaaacc

SEQ ID NO: 1123241 - RNA, 21 nt, Human
ugagauggacauggaaaccaa

SEQ ID NO: 1123242 - RNA, 24 nt, Human
ugaguaggagguuauggugggguu

SEQ ID NO: 1123243 - RNA, 23 nt, Human
ugcagcagggggacgggcagguu

SEQ ID NO: 1123244 - RNA, 21 nt, Human
ugcaggaugaguaguagcugu

SEQ ID NO: 1123245 - RNA, 19 nt, Human
uggacauggaaaccaggug

SEQ ID NO: 1123246 - RNA, 21 nt, Human
uggacugggcuaacugaaggc

SEQ ID NO: 1123247 - RNA, 20 nt, Human
uggagaugagaagagcuggg

SEQ ID NO: 1123248 - RNA, 22 nt, Human
uggagcagggucccauggcacu

SEQ ID NO: 1123249 - RNA, 20 nt, Human
ugggaaggggagcagaggcu

SEQ ID NO: 1123250 - RNA, 21 nt, Human
ugggaaggggagcagaggcuu

SEQ ID NO: 1123251 - RNA, 20 nt, Human
ugggagaaaccuugggaacc

SEQ ID NO: 1123252 - RNA, 23 nt, Human
ugggagaaaccuugggaacccug

SEQ ID NO: 1123253 - RNA, 19 nt, Human
ugggcuauagaguggaggc

SEQ ID NO: 1123254 - RNA, 24 nt, Human
uggggccuggcucucccugucuuc

SEQ ID NO: 1123255 - RNA, 18 nt, Human
uggguuuuuagcaccagc

SEQ ID NO: 1123256 - RNA, 18 nt, Human
uggugggaaggggagcag

SEQ ID NO: 1123257 - RNA, 19 nt, Human
uggugggaaggggagcaga

SEQ ID NO: 1123258 - RNA, 25 nt, Human
ugguggugggaaggggagcagaggc

SEQ ID NO: 1123259 - RNA, 26 nt, Human
ugguggugggaaggggagcagaggcu

SEQ ID NO: 1123260 - RNA, 24 nt, Human
uguaugucuuccauaucagccaca

SEQ ID NO: 1123261 - RNA, 24 nt, Human
ugugcaauuuccuucuaccagaaa

SEQ ID NO: 1123262 - RNA, 23 nt, Human
uguucaagaaaaagaacguucuc

SEQ ID NO: 1123263 - RNA, 22 nt, Human
uguucgacaucugaccagaugg

SEQ ID NO: 1123264 - RNA, 21 nt, Human
uuaaaacugguuuccccccac

SEQ ID NO: 1123265 - RNA, 23 nt, Human
uucuaccagaaaauuacuaaaaa

SEQ ID NO: 1123266 - RNA, 22 nt, Human
uucucugucccauccucacucc

SEQ ID NO: 1123267 - RNA, 22 nt, Human
uuuagcaccagcucugaaugcc

SEQ ID NO: 1123268 - RNA, 20 nt, Human
uuuauauggcagugguggug

SEQ ID NO: 1123269 - RNA, 23 nt, Human
aauggugaaaaauacuaaaguac

SEQ ID NO: 1123270 - RNA, 20 nt, Human
agcugcucgguuucccauag

SEQ ID NO: 1123271 - RNA, 23 nt, Human
aggcagcugcccauagcugcuuu

SEQ ID NO: 1123272 - RNA, 19 nt, Human
agguacuguaauccaugga

SEQ ID NO: 1123273 - RNA, 20 nt, Human
auaagcaccagugccauacc

SEQ ID NO: 1123274 - RNA, 18 nt, Human
auagcugacaucaauggg

SEQ ID NO: 1123275 - RNA, 22 nt, Human
caacauuauaaauauggaauua

SEQ ID NO: 1123276 - RNA, 21 nt, Human
caaugggcuguccauagguuc

SEQ ID NO: 1123277 - RNA, 22 nt, Human
cacaaauggugaaaaauacuaa

SEQ ID NO: 1123278 - RNA, 20 nt, Human
cagugggcuuguuuccauuc

SEQ ID NO: 1123279 - RNA, 20 nt, Human
ccuggguauagcugacauca

SEQ ID NO: 1123280 - RNA, 22 nt, Human
cucugcugcccguagcugcugc

SEQ ID NO: 1123281 - RNA, 24 nt, Human
cucugcuguccauagcugcucggu

SEQ ID NO: 1123282 - RNA, 21 nt, Human
cugcuguccauagcugcucgg

SEQ ID NO: 1123283 - RNA, 19 nt, Human
cuguagcccugcugcgcug

SEQ ID NO: 1123284 - RNA, 19 nt, Human
gcaguuggaguaguauaac

SEQ ID NO: 1123285 - RNA, 23 nt, Human
gccuggguauagcugacaucaau

SEQ ID NO: 1123286 - RNA, 23 nt, Human
gcuuuguugaccauagcuacucu

SEQ ID NO: 1123287 - RNA, 20 nt, Human
ggccugggugguggugacug

SEQ ID NO: 1123288 - RNA, 24 nt, Human
gggugguggugacuguagcagugg

SEQ ID NO: 1123289 - RNA, 24 nt, Human
guaguauaaccagugggaggcugu

SEQ ID NO: 1123290 - RNA, 19 nt, Human
guccauauccuaggcuggg

SEQ ID NO: 1123291 - RNA, 19 nt, Human
gugggaggcagcugcccau

SEQ ID NO: 1123292 - RNA, 19 nt, Human
guuugggguggguaacuag

SEQ ID NO: 1123293 - RNA, 24 nt, Human
uaaaacauuuucugguuuaaaaaa

SEQ ID NO: 1123294 - RNA, 21 nt, Human
uaacugcucugaucauaacua

SEQ ID NO: 1123295 - RNA, 23 nt, Human
uaauccauggaugccauuuucuc

SEQ ID NO: 1123296 - RNA, 18 nt, Human
uaccuggggauaacugca

SEQ ID NO: 1123297 - RNA, 19 nt, Human
uaccuggggauaacugcag

SEQ ID NO: 1123298 - RNA, 25 nt, Human
uacuaaaguacagagaaagaauaau

SEQ ID NO: 1123299 - RNA, 21 nt, Human
uagcucccagguaccugggga

SEQ ID NO: 1123300 - RNA, 19 nt, Human
uaggaggguaggauggagg

SEQ ID NO: 1123301 - RNA, 19 nt, Human
uaggaggguaggauggagg

SEQ ID NO: 1123302 - RNA, 18 nt, Human
uaggauggaggugcggug

SEQ ID NO: 1123303 - RNA, 21 nt, Human
uaugcagauugagcugcauag

SEQ ID NO: 1123304 - RNA, 19 nt, Human
uccuugagugggcugggug

SEQ ID NO: 1123305 - RNA, 22 nt, Human
ucuccuuccuccucguucucuc

SEQ ID NO: 1123306 - RNA, 24 nt, Human
ucugcagucuuguaggugcagugg

SEQ ID NO: 1123307 - RNA, 24 nt, Human
ugaaaaauacuaaaguacagagaa

SEQ ID NO: 1123308 - RNA, 19 nt, Human
ugaccauagcuacucugcu

SEQ ID NO: 1123309 - RNA, 18 nt, Human
ugccauaccccuggacag

SEQ ID NO: 1123310 - RNA, 19 nt, Human
ugccauaccccuggacagg

SEQ ID NO: 1123311 - RNA, 18 nt, Human
ugcccauaugccugggug

SEQ ID NO: 1123312 - RNA, 19 nt, Human
ugcccauaugccugggugg

SEQ ID NO: 1123313 - RNA, 19 nt, Human
ugcccguagcugcugcucu

SEQ ID NO: 1123314 - RNA, 20 nt, Human
uggcugcauggaguagcucc

SEQ ID NO: 1123315 - RNA, 19 nt, Human
ugggaggcuguccauaaga

SEQ ID NO: 1123316 - RNA, 24 nt, Human
ugggaggcuguccauaagaaguug

SEQ ID NO: 1123317 - RNA, 23 nt, Human
ugggcugguuguaacccccugug

SEQ ID NO: 1123318 - RNA, 18 nt, Human
ugggcuguccauagguuc

SEQ ID NO: 1123319 - RNA, 22 nt, Human
uggguaacuagugggaggcagc

SEQ ID NO: 1123320 - RNA, 24 nt, Human
ugggugguggugacuguagcagug

SEQ ID NO: 1123321 - RNA, 25 nt, Human
ugguaggaggguaggauggaggugc

SEQ ID NO: 1123322 - RNA, 23 nt, Human
ugguaucauaagcaccagugcca

SEQ ID NO: 1123323 - RNA, 26 nt, Human
uguagcaguggugguaucauaagcac

SEQ ID NO: 1123324 - RNA, 23 nt, Human
uguagcccugcugcgcugcagcu

SEQ ID NO: 1123325 - RNA, 22 nt, Human
uguaggaucaaguuuggggugg

SEQ ID NO: 1123326 - RNA, 21 nt, Human
uguaggugcaguggcuacugg

SEQ ID NO: 1123327 - RNA, 19 nt, Human
uugcaguggucugagccug

SEQ ID NO: 1123328 - RNA, 19 nt, Human
agaggucugcuuuggcuca

SEQ ID NO: 1123329 - RNA, 22 nt, Human
agcagcccuacucuucaaaagu

SEQ ID NO: 1123330 - RNA, 21 nt, Human
aggaggcggcagcggcggcgg

SEQ ID NO: 1123331 - RNA, 19 nt, Human
aggcggcagcggcggcggc

SEQ ID NO: 1123332 - RNA, 19 nt, Human
aggcggcagcggcggcggc

SEQ ID NO: 1123333 - RNA, 21 nt, Human
aggcggcgggugcccucgccg

SEQ ID NO: 1123334 - RNA, 22 nt, Human
caccgacacuccucggcccggc

SEQ ID NO: 1123335 - RNA, 19 nt, Human
cacugcaugucucagaggc

SEQ ID NO: 1123336 - RNA, 18 nt, Human
cagcccggccccgccccg

SEQ ID NO: 1123337 - RNA, 21 nt, Human
ccccccgccccucgccggaga

SEQ ID NO: 1123338 - RNA, 18 nt, Human
cccccuccucuugcagcc

SEQ ID NO: 1123339 - RNA, 20 nt, Human
ccccgacguccgcccacgcc

SEQ ID NO: 1123340 - RNA, 23 nt, Human
ccccgccccucgccggagaggag

SEQ ID NO: 1123341 - RNA, 27 nt, Human
ccccgcugccccgacguccgcccacgc

SEQ ID NO: 1123342 - RNA, 20 nt, Human
ccccguagccggaccacacc

SEQ ID NO: 1123343 - RNA, 18 nt, Human
cccgcccccucgcuccgg

SEQ ID NO: 1123344 - RNA, 21 nt, Human
cccgccccucgccggagagga

SEQ ID NO: 1123345 - RNA, 20 nt, Human
cccggccccgccccguagcc

SEQ ID NO: 1123346 - RNA, 23 nt, Human
cccggccccgccccguagccgga

SEQ ID NO: 1123347 - RNA, 24 nt, Human
cccgggccggagccccccgccccu

SEQ ID NO: 1123348 - RNA, 21 nt, Human
cccguagccggaccacaccga

SEQ ID NO: 1123349 - RNA, 21 nt, Human
ccgccgggcauccuuggggaa

SEQ ID NO: 1123350 - RNA, 25 nt, Human
ccucgccggcuccagcgcccgggcg

SEQ ID NO: 1123351 - RNA, 24 nt, Human
ccucggcccggcugccucggcccg

SEQ ID NO: 1123352 - RNA, 23 nt, Human
cggagccccccgccccucgccgg

SEQ ID NO: 1123353 - RNA, 22 nt, Human
cggcagcggcggcggcauggag

SEQ ID NO: 1123354 - RNA, 22 nt, Human
cggcggcagcagcagcagcccg

SEQ ID NO: 1123355 - RNA, 19 nt, Human
cggcggcauggagccgggg

SEQ ID NO: 1123356 - RNA, 19 nt, Human
cggcguggggcagcgcggg

SEQ ID NO: 1123357 - RNA, 28 nt, Human
cgggccggagccccccgccccucgccgg

SEQ ID NO: 1123358 - RNA, 24 nt, Human
cgggugcccucgccggcuccagcg

SEQ ID NO: 1123359 - RNA, 21 nt, Human
cggucagacucagcucgcacc

SEQ ID NO: 1123360 - RNA, 23 nt, Human
cggucagacucagcucgcaccua

SEQ ID NO: 1123361 - RNA, 22 nt, Human
cucccggucagacucagcucgc

SEQ ID NO: 1123362 - RNA, 19 nt, Human
cucggcccggcugccucgg

SEQ ID NO: 1123363 - RNA, 25 nt, Human
cuugcagccgcgcgggguccccgaa

SEQ ID NO: 1123364 - RNA, 24 nt, Human
gagggcggcgguggcagcgcccgg

SEQ ID NO: 1123365 - RNA, 20 nt, Human
gccccguagccggaccacac

SEQ ID NO: 1123366 - RNA, 21 nt, Human
gcgcggcguggggcagcgcgg

SEQ ID NO: 1123367 - RNA, 20 nt, Human
gcggcgguggcagcgcccgg

SEQ ID NO: 1123368 - RNA, 21 nt, Human
gcggcgguggcagcgcccggu

SEQ ID NO: 1123369 - RNA, 19 nt, Human
gcucgcaccuaggagcggg

SEQ ID NO: 1123370 - RNA, 25 nt, Human
ggaccacaccgacacuccucggccc

SEQ ID NO: 1123371 - RNA, 18 nt, Human
ggagaggaggaggcggca

SEQ ID NO: 1123372 - RNA, 20 nt, Human
ggccggagccccccgccccu

SEQ ID NO: 1123373 - RNA, 21 nt, Human
ggcggcagcagcagcagcccg

SEQ ID NO: 1123374 - RNA, 19 nt, Human
ggcggcagcggcggcggca

SEQ ID NO: 1123375 - RNA, 23 nt, Human
ggcggcggcauggagccggggga

SEQ ID NO: 1123376 - RNA, 18 nt, Human
ggcggcgguggcagcgcc

SEQ ID NO: 1123377 - RNA, 19 nt, Human
gggcagggaggggagcggc

SEQ ID NO: 1123378 - RNA, 23 nt, Human
gggcggcgguggcagcgcccggu

SEQ ID NO: 1123379 - RNA, 23 nt, Human
gggggagggcggcgguggcagcg

SEQ ID NO: 1123380 - RNA, 21 nt, Human
uccccgcugccccgacguccg

SEQ ID NO: 1123381 - RNA, 19 nt, Human
uccugccaccccuggcacc

SEQ ID NO: 1123382 - RNA, 20 nt, Human
ugcagccgcgcggggucccc

SEQ ID NO: 1123383 - RNA, 25 nt, Human
uggggaagcccccuccucuugcagc

SEQ ID NO: 1123384 - RNA, 24 nt, Human
ugguucuaccacccaaggagcagc

SEQ ID NO: 1123385 - RNA, 18 nt, Human
aacccugccuucccuccc

SEQ ID NO: 1123386 - RNA, 23 nt, Human
aacgggggauuuguaucucccuu

SEQ ID NO: 1123387 - RNA, 19 nt, Human
acagaguuucugagccaaa

SEQ ID NO: 1123388 - RNA, 22 nt, Human
agaugggguucauucagauccc

SEQ ID NO: 1123389 - RNA, 20 nt, Human
aguuucugagccaaagcaga

SEQ ID NO: 1123390 - RNA, 20 nt, Human
aucccaaguccuuuccccaa

SEQ ID NO: 1123391 - RNA, 24 nt, Human
aucccaaguccuuuccccaacccu

SEQ ID NO: 1123392 - RNA, 21 nt, Human
auggggagcuguguuaaagug

SEQ ID NO: 1123393 - RNA, 22 nt, Human
caaacagaguuucugagccaaa

SEQ ID NO: 1123394 - RNA, 18 nt, Human
cagaguuucugagccaaa

SEQ ID NO: 1123395 - RNA, 27 nt, Human
cagaucccaaguccuuuccccaacccu

SEQ ID NO: 1123396 - RNA, 24 nt, Human
caggagccaaacagaguuucugag

SEQ ID NO: 1123397 - RNA, 19 nt, Human
ccuucccucccuaugcuuu

SEQ ID NO: 1123398 - RNA, 23 nt, Human
ccuugguucccaaacccugccuu

SEQ ID NO: 1123399 - RNA, 22 nt, Human
gcccagccuugguucccaaacc

SEQ ID NO: 1123400 - RNA, 20 nt, Human
gccugcuuggcccaugggga

SEQ ID NO: 1123401 - RNA, 20 nt, Human
uaaauaccuaauguggccca

SEQ ID NO: 1123402 - RNA, 21 nt, Human
uagaaagaugggguucauuca

SEQ ID NO: 1123403 - RNA, 18 nt, Human
uaucucccuuccuccucc

SEQ ID NO: 1123404 - RNA, 24 nt, Human
ucccaaacccugccuucccucccu

SEQ ID NO: 1123405 - RNA, 19 nt, Human
ucccuaugcuuuugggugg

SEQ ID NO: 1123406 - RNA, 24 nt, Human
ucugagccaaagcagaccgggguc

SEQ ID NO: 1123407 - RNA, 19 nt, Human
ugauuugacagacuugcug

SEQ ID NO: 1123408 - RNA, 19 nt, Human
ugcuuggcccauggggagc

SEQ ID NO: 1123409 - RNA, 19 nt, Human
uguguagaaagaugggguu

SEQ ID NO: 1123410 - RNA, 18 nt, Human
uugggugggaaacggggg

SEQ ID NO: 1123411 - RNA, 22 nt, Human
uuugccagccuuugcagccacu

SEQ ID NO: 1123412 - RNA, 24 nt, Human
aaacuccaucaagugaaagauaac

SEQ ID NO: 1123413 - RNA, 25 nt, Human
aaagaaucucccuuacuggcccaac

SEQ ID NO: 1123414 - RNA, 19 nt, Human
aaccugcucuucuguccuc

SEQ ID NO: 1123415 - RNA, 21 nt, Human
aaccugcucuucuguccucca

SEQ ID NO: 1123416 - RNA, 19 nt, Human
aacuuaaaaaacuccgaug

SEQ ID NO: 1123417 - RNA, 21 nt, Human
aagugaaagauaacaaaagcc

SEQ ID NO: 1123418 - RNA, 19 nt, Human
aauacagugaaacuccauc

SEQ ID NO: 1123419 - RNA, 22 nt, Human
acuccagagaaagcuugggaag

SEQ ID NO: 1123420 - RNA, 18 nt, Human
agacagugugugcacaug

SEQ ID NO: 1123421 - RNA, 19 nt, Human
agagaggagaaggggcugg

SEQ ID NO: 1123422 - RNA, 20 nt, Human
agaguaggacccugagagau

SEQ ID NO: 1123423 - RNA, 24 nt, Human
agcaggguaaggagacagcagaga

SEQ ID NO: 1123424 - RNA, 19 nt, Human
aggaaggaaauacauggug

SEQ ID NO: 1123425 - RNA, 19 nt, Human
aggaaggaaauacauggug

SEQ ID NO: 1123426 - RNA, 22 nt, Human
aggaaggaaauacaugguguaa

SEQ ID NO: 1123427 - RNA, 27 nt, Human
aggagacagcagagaggaccgguaccc

SEQ ID NO: 1123428 - RNA, 24 nt, Human
agggaauggcugggcagcugaggg

SEQ ID NO: 1123429 - RNA, 21 nt, Human
agugaaagauaacaaaagccc

SEQ ID NO: 1123430 - RNA, 22 nt, Human
agugugucuaacaguuuguaua

SEQ ID NO: 1123431 - RNA, 19 nt, Human
auacuagaacuuuccaacc

SEQ ID NO: 1123432 - RNA, 24 nt, Human
auagcugaaaagauaaagagcaga

SEQ ID NO: 1123433 - RNA, 18 nt, Human
aucacagguuucccuagg

SEQ ID NO: 1123434 - RNA, 22 nt, Human
aucuggguggggaggggcaagg

SEQ ID NO: 1123435 - RNA, 26 nt, Human
augaacauaauacagugaaacuccau

SEQ ID NO: 1123436 - RNA, 19 nt, Human
augaagggcugcgcuuaca

SEQ ID NO: 1123437 - RNA, 25 nt, Human
cacacacacauuuacucauacccag

SEQ ID NO: 1123438 - RNA, 23 nt, Human
cacacauuuacucauacccagca

SEQ ID NO: 1123439 - RNA, 21 nt, Human
ccagagaagugaaaugcaaca

SEQ ID NO: 1123440 - RNA, 18 nt, Human
ccaggacaacgaaacaca

SEQ ID NO: 1123441 - RNA, 19 nt, Human
cccaccacuacagccacuc

SEQ ID NO: 1123442 - RNA, 20 nt, Human
cccucuccagggaucugcua

SEQ ID NO: 1123443 - RNA, 19 nt, Human
ccugaaauucccaccacua

SEQ ID NO: 1123444 - RNA, 26 nt, Human
ccugcccccucuccagggaucugcua

SEQ ID NO: 1123445 - RNA, 22 nt, Human
ccugguuucucuuucuucaaag

SEQ ID NO: 1123446 - RNA, 19 nt, Human
ccuguuuuguuuuuguuuu

SEQ ID NO: 1123447 - RNA, 20 nt, Human
cgcuggagagggaauggcug

SEQ ID NO: 1123448 - RNA, 19 nt, Human
cgggaagaggacuccagag

SEQ ID NO: 1123449 - RNA, 22 nt, Human
cucaugccuuaaccugcucuuc

SEQ ID NO: 1123450 - RNA, 22 nt, Human
cucuuuagcacccacugacuga

SEQ ID NO: 1123451 - RNA, 20 nt, Human
cuggcccacuucugggccug

SEQ ID NO: 1123452 - RNA, 24 nt, Human
cuuacccacaucacagguuucccu

SEQ ID NO: 1123453 - RNA, 20 nt, Human
gaaauuacuuagauggagga

SEQ ID NO: 1123454 - RNA, 25 nt, Human
gaaauucccaccacuacagccacuc

SEQ ID NO: 1123455 - RNA, 24 nt, Human
gaacuuacccacaucacagguuuc

SEQ ID NO: 1123456 - RNA, 19 nt, Human
gaauggcugggcagcugag

SEQ ID NO: 1123457 - RNA, 18 nt, Human
gacagguaugacucgggg

SEQ ID NO: 1123458 - RNA, 18 nt, Human
gacagugugugcacaugu

SEQ ID NO: 1123459 - RNA, 24 nt, Human
gaccugcccccucuccagggaucu

SEQ ID NO: 1123460 - RNA, 24 nt, Human
gaggggcaagggagaggugauacu

SEQ ID NO: 1123461 - RNA, 22 nt, Human
gcaagggagaggugauacuaga

SEQ ID NO: 1123462 - RNA, 26 nt, Human
gcacaauuccaaggaggagggaacgc

SEQ ID NO: 1123463 - RNA, 22 nt, Human
gcagagaggagaaggggcugga

SEQ ID NO: 1123464 - RNA, 19 nt, Human
gcauuaucuguagccccua

SEQ ID NO: 1123465 - RNA, 21 nt, Human
ggaaauuacuuagauggagga

SEQ ID NO: 1123466 - RNA, 22 nt, Human
ggaagaggacuccagagaaagc

SEQ ID NO: 1123467 - RNA, 22 nt, Human
ggaggaaaugguaaaggaagga

SEQ ID NO: 1123468 - RNA, 22 nt, Human
ggagugugugaaacaaugcuug

SEQ ID NO: 1123469 - RNA, 19 nt, Human
ggcugggcagcugagggga

SEQ ID NO: 1123470 - RNA, 20 nt, Human
ggcuuugugugugugugugu

SEQ ID NO: 1123471 - RNA, 21 nt, Human
gggaaagaaggcuugguggua

SEQ ID NO: 1123472 - RNA, 18 nt, Human
ggggagcaggguaaggag

SEQ ID NO: 1123473 - RNA, 19 nt, Human
gguaaggagacagcagaga

SEQ ID NO: 1123474 - RNA, 23 nt, Human
gguaaggagacagcagagaggac

SEQ ID NO: 1123475 - RNA, 22 nt, Human
gguaugggacgcuggagaggga

SEQ ID NO: 1123476 - RNA, 24 nt, Human
guaacaucugaagacugacaacuc

SEQ ID NO: 1123477 - RNA, 19 nt, Human
gugaaacaaugcuugcccc

SEQ ID NO: 1123478 - RNA, 20 nt, Human
gugcagagaggagaaggggc

SEQ ID NO: 1123479 - RNA, 19 nt, Human
guggggugggccagauggc

SEQ ID NO: 1123480 - RNA, 25 nt, Human
gugugugcacauguacguguacacg

SEQ ID NO: 1123481 - RNA, 21 nt, Human
gugugugugugugugugugug

SEQ ID NO: 1123482 - RNA, 21 nt, Human
gugugugugugugugugugug

SEQ ID NO: 1123483 - RNA, 19 nt, Human
uaaagucauuuuuaaggca

SEQ ID NO: 1123484 - RNA, 18 nt, Human
uaacuuaaaaaacuccga

SEQ ID NO: 1123485 - RNA, 19 nt, Human
uaacuuaaaaaacuccgau

SEQ ID NO: 1123486 - RNA, 19 nt, Human
uaaggagacagcagagagg

SEQ ID NO: 1123487 - RNA, 27 nt, Human
uacacgcacucacacacacauuuacuc

SEQ ID NO: 1123488 - RNA, 26 nt, Human
uacguguacacgcacucacacacaca

SEQ ID NO: 1123489 - RNA, 27 nt, Human
uaggcuuugugugugugugugugugug

SEQ ID NO: 1123490 - RNA, 22 nt, Human
uauuauacauucuauguauaua

SEQ ID NO: 1123491 - RNA, 20 nt, Human
uccaggacaacgaaacacag

SEQ ID NO: 1123492 - RNA, 18 nt, Human
ucccuguuuuguuuuugu

SEQ ID NO: 1123493 - RNA, 20 nt, Human
ucuccagggaucugcuaugg

SEQ ID NO: 1123494 - RNA, 21 nt, Human
ucuggguaacuuaaaaaacuc

SEQ ID NO: 1123495 - RNA, 20 nt, Human
ugaaagauaacaaaagcccu

SEQ ID NO: 1123496 - RNA, 19 nt, Human
ugaaaugcaacaucuguuu

SEQ ID NO: 1123497 - RNA, 21 nt, Human
ugacaacucagaauuuccuaa

SEQ ID NO: 1123498 - RNA, 18 nt, Human
ugacugaacugucaccua

SEQ ID NO: 1123499 - RNA, 19 nt, Human
ugagagaugggacauaggg

SEQ ID NO: 1123500 - RNA, 19 nt, Human
ugauacacacaugcucaug

SEQ ID NO: 1123501 - RNA, 22 nt, Human
ugcccccucuccagggaucugc

SEQ ID NO: 1123502 - RNA, 22 nt, Human
uggaggaacgggaagaggacuc

SEQ ID NO: 1123503 - RNA, 26 nt, Human
uggaggaacgggaagaggacuccaga

SEQ ID NO: 1123504 - RNA, 19 nt, Human
uggcaucucuauagaucua

SEQ ID NO: 1123505 - RNA, 24 nt, Human
ugggacauagggcagggacauuug

SEQ ID NO: 1123506 - RNA, 21 nt, Human
ugguguaggggagcaggguaa

SEQ ID NO: 1123507 - RNA, 21 nt, Human
uguauguagacagugugugca

SEQ ID NO: 1123508 - RNA, 18 nt, Human
ugugcacauguacgugua

SEQ ID NO: 1123509 - RNA, 20 nt, Human
uguguagugugucuaacagu

SEQ ID NO: 1123510 - RNA, 21 nt, Human
uguguguguguagugugucua

SEQ ID NO: 1123511 - RNA, 20 nt, Human
uguguguguguguagugugu

SEQ ID NO: 1123512 - RNA, 21 nt, Human
uguguguguguguguguagug

SEQ ID NO: 1123513 - RNA, 22 nt, Human
uguguguguguguguguagugu

SEQ ID NO: 1123514 - RNA, 22 nt, Human
uguguguguguguguguagugu

SEQ ID NO: 1123515 - RNA, 24 nt, Human
uguguguguguguguguagugugu

SEQ ID NO: 1123516 - RNA, 18 nt, Human
ugugugugugugugugug

SEQ ID NO: 1123517 - RNA, 18 nt, Human
ugugugugugugugugug

SEQ ID NO: 1123518 - RNA, 18 nt, Human
ugugugugugugugugug

SEQ ID NO: 1123519 - RNA, 18 nt, Human
ugugugugugugugugug

SEQ ID NO: 1123520 - RNA, 18 nt, Human
ugugugugugugugugug

SEQ ID NO: 1123521 - RNA, 18 nt, Human
ugugugugugugugugug

SEQ ID NO: 1123522 - RNA, 18 nt, Human
ugugugugugugugugug

SEQ ID NO: 1123523 - RNA, 18 nt, Human
ugugugugugugugugug

SEQ ID NO: 1123524 - RNA, 18 nt, Human
ugugugugugugugugug

SEQ ID NO: 1123525 - RNA, 18 nt, Human
ugugugugugugugugug

SEQ ID NO: 1123526 - RNA, 21 nt, Human
ugugugugugugugugugugu

SEQ ID NO: 1123527 - RNA, 21 nt, Human
ugugugugugugugugugugu

SEQ ID NO: 1123528 - RNA, 21 nt, Human
ugugugugugugugugugugu

SEQ ID NO: 1123529 - RNA, 21 nt, Human
ugugugugugugugugugugu

SEQ ID NO: 1123530 - RNA, 21 nt, Human
ugugugugugugugugugugu

SEQ ID NO: 1123531 - RNA, 21 nt, Human
ugugugugugugugugugugu

SEQ ID NO: 1123532 - RNA, 21 nt, Human
ugugugugugugugugugugu

SEQ ID NO: 1123533 - RNA, 21 nt, Human
ugugugugugugugugugugu

SEQ ID NO: 1123534 - RNA, 21 nt, Human
ugugugugugugugugugugu

SEQ ID NO: 1123535 - RNA, 21 nt, Human
ugugugugugugugugugugu

SEQ ID NO: 1123536 - RNA, 21 nt, Human
ugugugugugugugugugugu

SEQ ID NO: 1123537 - RNA, 21 nt, Human
ugugugugugugugugugugu

SEQ ID NO: 1123538 - RNA, 21 nt, Human
ugugugugugugugugugugu

SEQ ID NO: 1123539 - RNA, 21 nt, Human
ugugugugugugugugugugu

SEQ ID NO: 1123540 - RNA, 21 nt, Human
ugugugugugugugugugugu

SEQ ID NO: 1123541 - RNA, 21 nt, Human
ugugugugugugugugugugu

SEQ ID NO: 1123542 - RNA, 21 nt, Human
ugugugugugugugugugugu

SEQ ID NO: 1123543 - RNA, 22 nt, Human
ugugugugugugugugugugua

SEQ ID NO: 1123544 - RNA, 22 nt, Human
ugugugugugugugugugugug

SEQ ID NO: 1123545 - RNA, 22 nt, Human
ugugugugugugugugugugug

SEQ ID NO: 1123546 - RNA, 22 nt, Human
ugugugugugugugugugugug

SEQ ID NO: 1123547 - RNA, 22 nt, Human
ugugugugugugugugugugug

SEQ ID NO: 1123548 - RNA, 22 nt, Human
ugugugugugugugugugugug

SEQ ID NO: 1123549 - RNA, 21 nt, Human
uguuuuguuuuuguuuuuuuu

SEQ ID NO: 1123550 - RNA, 18 nt, Human
uguuuuuguuuuuuuugg

SEQ ID NO: 1123551 - RNA, 20 nt, Human
uucacauuagagucaucugg

SEQ ID NO: 1123552 - RNA, 21 nt, Human
uugaacaggguggggugggcc

SEQ ID NO: 1123553 - RNA, 23 nt, Human
uuggcugagcugauggggaaggu

SEQ ID NO: 1123554 - RNA, 25 nt, Human
uuggguuuuuuuuuuucauuuuuaa

SEQ ID NO: 1123555 - RNA, 19 nt, Human
uuguuuuuguuuuuuuugg

SEQ ID NO: 1123556 - RNA, 20 nt, Human
uuuaacuuuuuuuaauccca

SEQ ID NO: 1123557 - RNA, 26 nt, Human
uuuacucauacccagcaguggagauc

SEQ ID NO: 1123558 - RNA, 24 nt, Human
uuugugugugugugugugugugug

SEQ ID NO: 1123559 - RNA, 18 nt, Human
aaaaagaaaagggagagg

SEQ ID NO: 1123560 - RNA, 23 nt, Human
aaaagccaaggcucucccagaca

SEQ ID NO: 1123561 - RNA, 21 nt, Human
aaacagugugucacagacccc

SEQ ID NO: 1123562 - RNA, 18 nt, Human
aacaucucuggcucuucu

SEQ ID NO: 1123563 - RNA, 25 nt, Human
aacccaccuaccuagcuggcugccc

SEQ ID NO: 1123564 - RNA, 24 nt, Human
aagaaacuugggucaguagaaggc

SEQ ID NO: 1123565 - RNA, 18 nt, Human
aagaauuggugaucauuu

SEQ ID NO: 1123566 - RNA, 19 nt, Human
aagcaucuuaaaagggggg

SEQ ID NO: 1123567 - RNA, 22 nt, Human
aagcucugcuggggaccagguu

SEQ ID NO: 1123568 - RNA, 24 nt, Human
aagguagggugguaaaaagaaaag

SEQ ID NO: 1123569 - RNA, 23 nt, Human
aauacuuuguaaaaacugcuuuu

SEQ ID NO: 1123570 - RNA, 19 nt, Human
acaggcucugagagcaaug

SEQ ID NO: 1123571 - RNA, 19 nt, Human
accaaaguuacucuccuca

SEQ ID NO: 1123572 - RNA, 19 nt, Human
accaacaucaccccacucu

SEQ ID NO: 1123573 - RNA, 23 nt, Human
accacagguagaugaggaagcag

SEQ ID NO: 1123574 - RNA, 23 nt, Human
acugaaaagccaaggcucuccca

SEQ ID NO: 1123575 - RNA, 20 nt, Human
acugcaaaccuccaggaagc

SEQ ID NO: 1123576 - RNA, 23 nt, Human
agaaaagguucuccaaaauguuu

SEQ ID NO: 1123577 - RNA, 21 nt, Human
agaacuccuucaggcucacuu

SEQ ID NO: 1123578 - RNA, 18 nt, Human
agagagaaccaagcacca

SEQ ID NO: 1123579 - RNA, 20 nt, Human
agaggaguccaucuuccaag

SEQ ID NO: 1123580 - RNA, 22 nt, Human
agauuuagagucaaacugagcc

SEQ ID NO: 1123581 - RNA, 22 nt, Human
agcuggcugcccgagaaaaaga

SEQ ID NO: 1123582 - RNA, 23 nt, Human
agcuguuuccaagcuaggagugg

SEQ ID NO: 1123583 - RNA, 21 nt, Human
agcuucaaguaaaguugagca

SEQ ID NO: 1123584 - RNA, 22 nt, Human
agggugguaaaaagaaaaggga

SEQ ID NO: 1123585 - RNA, 23 nt, Human
augaaaugaacaucucuggcucu

SEQ ID NO: 1123586 - RNA, 20 nt, Human
augcuucuaugcuuguuucc

SEQ ID NO: 1123587 - RNA, 21 nt, Human
caacaucaccccacucugcuc

SEQ ID NO: 1123588 - RNA, 20 nt, Human
cacauacaaccaacaucacc

SEQ ID NO: 1123589 - RNA, 20 nt, Human
caccaagcagcagcucucag

SEQ ID NO: 1123590 - RNA, 18 nt, Human
cacccugaacagcagagu

SEQ ID NO: 1123591 - RNA, 27 nt, Human
cacucugcucaucugugccuccacccu

SEQ ID NO: 1123592 - RNA, 19 nt, Human
cagagcuccccugccacuc

SEQ ID NO: 1123593 - RNA, 19 nt, Human
cagcagcucucaggaaagg

SEQ ID NO: 1123594 - RNA, 23 nt, Human
caugacgcugcuagugagaaucc

SEQ ID NO: 1123595 - RNA, 20 nt, Human
ccacuaacaauaaagguagg

SEQ ID NO: 1123596 - RNA, 23 nt, Human
ccacuccaugaggcgcugcugcc

SEQ ID NO: 1123597 - RNA, 20 nt, Human
ccacuggauggcucuggagc

SEQ ID NO: 1123598 - RNA, 21 nt, Human
ccacuggauggcucuggagcc

SEQ ID NO: 1123599 - RNA, 22 nt, Human
ccagaggcucuuaaaaaacuaa

SEQ ID NO: 1123600 - RNA, 21 nt, Human
ccauagaaagcucaaguucag

SEQ ID NO: 1123601 - RNA, 22 nt, Human
ccaucccuuccuuguuccagaa

SEQ ID NO: 1123602 - RNA, 21 nt, Human
ccaugaggcgcugcugccggc

SEQ ID NO: 1123603 - RNA, 21 nt, Human
ccauggaaucagagacccaga

SEQ ID NO: 1123604 - RNA, 18 nt, Human
cccaaauauuucaaccuc

SEQ ID NO: 1123605 - RNA, 22 nt, Human
cccaacaccacagguagaugag

SEQ ID NO: 1123606 - RNA, 25 nt, Human
cccacacccagccugcaauggucca

SEQ ID NO: 1123607 - RNA, 22 nt, Human
ccccacucugcucaucugugcc

SEQ ID NO: 1123608 - RNA, 23 nt, Human
ccccugccacuccaugaggcgcu

SEQ ID NO: 1123609 - RNA, 20 nt, Human
cccuccacagacagagcucc

SEQ ID NO: 1123610 - RNA, 21 nt, Human
cccugaccaaaguuacucucc

SEQ ID NO: 1123611 - RNA, 24 nt, Human
cccugaccaaaguuacucuccuca

SEQ ID NO: 1123612 - RNA, 22 nt, Human
ccgaagcccucacccacaccca

SEQ ID NO: 1123613 - RNA, 24 nt, Human
ccgaagcccucacccacacccagc

SEQ ID NO: 1123614 - RNA, 26 nt, Human
ccgaagcccucacccacacccagccu

SEQ ID NO: 1123615 - RNA, 19 nt, Human
ccucacccacacccagccu

SEQ ID NO: 1123616 - RNA, 23 nt, Human
ccucacccacacccagccugcaa

SEQ ID NO: 1123617 - RNA, 22 nt, Human
ccucacugcaaaccuccaggaa

SEQ ID NO: 1123618 - RNA, 30 nt, Human
ccuccacagacagagcuccccugccacucu

SEQ ID NO: 1123619 - RNA, 21 nt, Human
ccugaaagucuccggguggca

SEQ ID NO: 1123620 - RNA, 20 nt, Human
ccuucaggcucacuugggcu

SEQ ID NO: 1123621 - RNA, 22 nt, Human
ccuuccaucccuuccuuguucc

SEQ ID NO: 1123622 - RNA, 24 nt, Human
cuagaaaucuccaccccaaauauu

SEQ ID NO: 1123623 - RNA, 21 nt, Human
cuaugcuuguuuccuaaacac

SEQ ID NO: 1123624 - RNA, 19 nt, Human
cucacccacacccagccug

SEQ ID NO: 1123625 - RNA, 26 nt, Human
cucacugcaaaccuccaggaagcgga

SEQ ID NO: 1123626 - RNA, 20 nt, Human
cuccauggaaucagagaccc

SEQ ID NO: 1123627 - RNA, 21 nt, Human
cucugcucaucugugccucca

SEQ ID NO: 1123628 - RNA, 22 nt, Human
cugcuucaucucagaacugauc

SEQ ID NO: 1123629 - RNA, 19 nt, Human
cugguccacuaauucuacu

SEQ ID NO: 1123630 - RNA, 21 nt, Human
cuuaaaaggggggaaaaaaaa

SEQ ID NO: 1123631 - RNA, 22 nt, Human
cuucagagccugcacggucucc

SEQ ID NO: 1123632 - RNA, 23 nt, Human
cuuggucccaacaccacagguag

SEQ ID NO: 1123633 - RNA, 20 nt, Human
gaaaaucuggugugaccagg

SEQ ID NO: 1123634 - RNA, 24 nt, Human
gaaaugaacaucucuggcucuucu

SEQ ID NO: 1123635 - RNA, 21 nt, Human
gagaggaguccaucuuccaag

SEQ ID NO: 1123636 - RNA, 21 nt, Human
gauggcucuggagccagggga

SEQ ID NO: 1123637 - RNA, 25 nt, Human
gcacauacaaccaacaucaccccac

SEQ ID NO: 1123638 - RNA, 21 nt, Human
gcucacuugggcuccccucca

SEQ ID NO: 1123639 - RNA, 18 nt, Human
gcucauuagugugaagga

SEQ ID NO: 1123640 - RNA, 19 nt, Human
ggauaaacagccaaggcac

SEQ ID NO: 1123641 - RNA, 22 nt, Human
gggauagcuaagggcacagucc

SEQ ID NO: 1123642 - RNA, 19 nt, Human
gggcaggaagagagaacca

SEQ ID NO: 1123643 - RNA, 20 nt, Human
gugccuccacccugaacagc

SEQ ID NO: 1123644 - RNA, 19 nt, Human
uaaaaaacuaagaccauug

SEQ ID NO: 1123645 - RNA, 23 nt, Human
uaaaaagaaaagggagaggagca

SEQ ID NO: 1123646 - RNA, 24 nt, Human
uaaaauagcaaaacagauuuagag

SEQ ID NO: 1123647 - RNA, 25 nt, Human
uaaacagccaaggcacuaaaugguu

SEQ ID NO: 1123648 - RNA, 23 nt, Human
uagaaggcucauuagugugaagg

SEQ ID NO: 1123649 - RNA, 24 nt, Human
uagggugguaaaaagaaaagggag

SEQ ID NO: 1123650 - RNA, 25 nt, Human
ucacugcaaaccuccaggaagcgga

SEQ ID NO: 1123651 - RNA, 20 nt, Human
ucagagaugagaggagucca

SEQ ID NO: 1123652 - RNA, 21 nt, Human
ucaggcuccaacuuagguacc

SEQ ID NO: 1123653 - RNA, 20 nt, Human
uccaagcuaggagugggcua

SEQ ID NO: 1123654 - RNA, 21 nt, Human
uccacacacaauaccugggca

SEQ ID NO: 1123655 - RNA, 25 nt, Human
uccacacacaauaccugggcaggaa

SEQ ID NO: 1123656 - RNA, 18 nt, Human
uccagagaaaacacuacc

SEQ ID NO: 1123657 - RNA, 23 nt, Human
ucccuuccuuguuccagaaacag

SEQ ID NO: 1123658 - RNA, 18 nt, Human
uccuuguuccagaaacag

SEQ ID NO: 1123659 - RNA, 20 nt, Human
ucuacuccugacucuccaug

SEQ ID NO: 1123660 - RNA, 18 nt, Human
ucuccggguggcaagcuc

SEQ ID NO: 1123661 - RNA, 21 nt, Human
ucugcagucagaaacugaggc

SEQ ID NO: 1123662 - RNA, 23 nt, Human
ucuguacuuccagagaaaacacu

SEQ ID NO: 1123663 - RNA, 24 nt, Human
ucugucuuuauuuacagcaaagua

SEQ ID NO: 1123664 - RNA, 20 nt, Human
ucugugccuccacccugaac

SEQ ID NO: 1123665 - RNA, 21 nt, Human
ugaccaaaguuacucuccuca

SEQ ID NO: 1123666 - RNA, 18 nt, Human
ugcauucccugcuucauc

SEQ ID NO: 1123667 - RNA, 24 nt, Human
ugccuccacccugaacagcagagu

SEQ ID NO: 1123668 - RNA, 19 nt, Human
ugcucaucugugccuccac

SEQ ID NO: 1123669 - RNA, 19 nt, Human
ugcugagucugggggaaaa

SEQ ID NO: 1123670 - RNA, 20 nt, Human
uggccaaaugcugggcugcc

SEQ ID NO: 1123671 - RNA, 18 nt, Human
ugggagccuucccuugcu

SEQ ID NO: 1123672 - RNA, 18 nt, Human
ugggauaaacagccaagg

SEQ ID NO: 1123673 - RNA, 20 nt, Human
ugggauagcuaagggcacag

SEQ ID NO: 1123674 - RNA, 18 nt, Human
ugggcugccacggagggg

SEQ ID NO: 1123675 - RNA, 20 nt, Human
uggugaucauuugacaaggg

SEQ ID NO: 1123676 - RNA, 21 nt, Human
uggugaucauuugacaagggg

SEQ ID NO: 1123677 - RNA, 20 nt, Human
ugugaaggagugagaggcca

SEQ ID NO: 1123678 - RNA, 18 nt, Human
uuccuuguuccagaaaca

SEQ ID NO: 1123679 - RNA, 18 nt, Human
uugacaaggggcagggca

SEQ ID NO: 1123680 - RNA, 21 nt, Human
uuggccaaaugcugggcugcc

SEQ ID NO: 1123681 - RNA, 18 nt, Human
uuucuggcaauggcagcc

SEQ ID NO: 1123682 - RNA, 25 nt, Human
aaccacaccuggacgacacggacac

SEQ ID NO: 1123683 - RNA, 22 nt, Human
aagccagugaccccucaaagaa

SEQ ID NO: 1123684 - RNA, 19 nt, Human
aaugaauccccaaaccacc

SEQ ID NO: 1123685 - RNA, 22 nt, Human
acacaggagauggauaacagag

SEQ ID NO: 1123686 - RNA, 23 nt, Human
agugaccccucaaagaauauggu

SEQ ID NO: 1123687 - RNA, 23 nt, Human
augaauccccaaaccaccacacc

SEQ ID NO: 1123688 - RNA, 23 nt, Human
cacaccaaguggaaaaagccaga

SEQ ID NO: 1123689 - RNA, 25 nt, Human
caccuggacgacacggacacucagc

SEQ ID NO: 1123690 - RNA, 24 nt, Human
cacucagcccugucucugcagcca

SEQ ID NO: 1123691 - RNA, 19 nt, Human
ccaccacaccaaguggaaa

SEQ ID NO: 1123692 - RNA, 21 nt, Human
ccacucgccuccaggaauggg

SEQ ID NO: 1123693 - RNA, 20 nt, Human
ccccaaaccaccacaccaag

SEQ ID NO: 1123694 - RNA, 21 nt, Human
ccccaaaccaccacaccaagu

SEQ ID NO: 1123695 - RNA, 22 nt, Human
ccucuggguguucugcugaucu

SEQ ID NO: 1123696 - RNA, 25 nt, Human
ccuggacgacacggacacucagccc

SEQ ID NO: 1123697 - RNA, 25 nt, Human
cugguuuuggaaccacaccuggacg

SEQ ID NO: 1123698 - RNA, 24 nt, Human
gacacggacacucagcccugucuc

SEQ ID NO: 1123699 - RNA, 21 nt, Human
gccuugcucaccucuggacua

SEQ ID NO: 1123700 - RNA, 21 nt, Human
gcugcugcugcugucgccugg

SEQ ID NO: 1123701 - RNA, 19 nt, Human
gcugcugcugucgccuggc

SEQ ID NO: 1123702 - RNA, 20 nt, Human
uagucacagaacucuagggg

SEQ ID NO: 1123703 - RNA, 23 nt, Human
uauacaguggaaugcugaaauag

SEQ ID NO: 1123704 - RNA, 21 nt, Human
ucaccuggugacuggaaacaa

SEQ ID NO: 1123705 - RNA, 23 nt, Human
ucagcccugucucugcagccaga

SEQ ID NO: 1123706 - RNA, 18 nt, Human
uccccaaaccaccacacc

SEQ ID NO: 1123707 - RNA, 19 nt, Human
uccccaaaccaccacacca

SEQ ID NO: 1123708 - RNA, 22 nt, Human
uccccaaaccaccacaccaagu

SEQ ID NO: 1123709 - RNA, 19 nt, Human
ucugcagccagagucucuc

SEQ ID NO: 1123710 - RNA, 21 nt, Human
ucuugcugcugcugcugcugu

SEQ ID NO: 1123711 - RNA, 19 nt, Human
ugaaauaggaaugaaugaa

SEQ ID NO: 1123712 - RNA, 22 nt, Human
ugaaauaggaaugaaugaaucc

SEQ ID NO: 1123713 - RNA, 23 nt, Human
ugaauccccaaaccaccacacca

SEQ ID NO: 1123714 - RNA, 19 nt, Human
ugaaugaauccccaaacca

SEQ ID NO: 1123715 - RNA, 18 nt, Human
ugagaacaccaaucagag

SEQ ID NO: 1123716 - RNA, 25 nt, Human
ugagaacaccaaucagagcucagcc

SEQ ID NO: 1123717 - RNA, 22 nt, Human
ugcagccagagucucucucacc

SEQ ID NO: 1123718 - RNA, 22 nt, Human
ugcugaaauaggaaugaaugaa

SEQ ID NO: 1123719 - RNA, 27 nt, Human
ugcugaucuugcugcugcugcugcugu

SEQ ID NO: 1123720 - RNA, 20 nt, Human
uggugacuggaaacauggug

SEQ ID NO: 1123721 - RNA, 28 nt, Human
uucugcugaucuugcugcugcugcugcc

SEQ ID NO: 1123722 - RNA, 18 nt, Human
cuucuugagagcaggagu

SEQ ID NO: 1123723 - RNA, 19 nt, Human
aagcguuuucugcaagaac

SEQ ID NO: 1123724 - RNA, 20 nt, Human
aaggaucccuccuguguuac

SEQ ID NO: 1123725 - RNA, 21 nt, Human
aaggugucucuaaaagggaca

SEQ ID NO: 1123726 - RNA, 21 nt, Human
aauaauagacacaggcaggga

SEQ ID NO: 1123727 - RNA, 18 nt, Human
aauggugauggacaaacu

SEQ ID NO: 1123728 - RNA, 20 nt, Human
aauugucaagagcaguuggu

SEQ ID NO: 1123729 - RNA, 21 nt, Human
acacugaagacacaaagaaug

SEQ ID NO: 1123730 - RNA, 21 nt, Human
acaggauauuuauacucuuga

SEQ ID NO: 1123731 - RNA, 18 nt, Human
acccagagauacgugguu

SEQ ID NO: 1123732 - RNA, 19 nt, Human
acuguacuuucauucaaau

SEQ ID NO: 1123733 - RNA, 18 nt, Human
agacacuaguaaaaacaa

SEQ ID NO: 1123734 - RNA, 19 nt, Human
agaguccugggugacaugc

SEQ ID NO: 1123735 - RNA, 19 nt, Human
agccaacacugaagacaca

SEQ ID NO: 1123736 - RNA, 23 nt, Human
agcgacuccugacuccugaccuc

SEQ ID NO: 1123737 - RNA, 18 nt, Human
agguugccacuggcaugg

SEQ ID NO: 1123738 - RNA, 23 nt, Human
auagagccaugcccacugaccca

SEQ ID NO: 1123739 - RNA, 25 nt, Human
augacaacaacaaaaagaugaggaa

SEQ ID NO: 1123740 - RNA, 20 nt, Human
augugcugcacaguuaugug

SEQ ID NO: 1123741 - RNA, 22 nt, Human
auugucucugcaguguuccugg

SEQ ID NO: 1123742 - RNA, 18 nt, Human
caaagaugacaaugaccu

SEQ ID NO: 1123743 - RNA, 21 nt, Human
cacaguuaugugaacguguca

SEQ ID NO: 1123744 - RNA, 21 nt, Human
caccggcagaguccuggguga

SEQ ID NO: 1123745 - RNA, 19 nt, Human
cagacaacuucagaaugua

SEQ ID NO: 1123746 - RNA, 18 nt, Human
cagcauugucucugcagg

SEQ ID NO: 1123747 - RNA, 19 nt, Human
cagcauugucucugcagug

SEQ ID NO: 1123748 - RNA, 19 nt, Human
caggauggaauagagagga

SEQ ID NO: 1123749 - RNA, 26 nt, Human
caguaaaaauugagaccccaaauuug

SEQ ID NO: 1123750 - RNA, 26 nt, Human
ccccuccuuaaccaaguaaccagucc

SEQ ID NO: 1123751 - RNA, 23 nt, Human
ccuggcaaaacguuuaggcugaa

SEQ ID NO: 1123752 - RNA, 20 nt, Human
cgacuccugacuccugaccu

SEQ ID NO: 1123753 - RNA, 24 nt, Human
cuauagguccugccugcaggaaug

SEQ ID NO: 1123754 - RNA, 24 nt, Human
cuccugacuccugaccucuacagg

SEQ ID NO: 1123755 - RNA, 23 nt, Human
cuucagacugcgcacagguugcc

SEQ ID NO: 1123756 - RNA, 21 nt, Human
cuugaaaaccgcuuucccaag

SEQ ID NO: 1123757 - RNA, 18 nt, Human
gaagacauuuucagacaa

SEQ ID NO: 1123758 - RNA, 22 nt, Human
gaccuucucugcccgcagaugg

SEQ ID NO: 1123759 - RNA, 24 nt, Human
gagcaguuggugguucugaaauac

SEQ ID NO: 1123760 - RNA, 18 nt, Human
gauuaccuccuaugaaac

SEQ ID NO: 1123761 - RNA, 19 nt, Human
gcagacacuaguaaaaaca

SEQ ID NO: 1123762 - RNA, 22 nt, Human
gccaacacugaagacacaaaga

SEQ ID NO: 1123763 - RNA, 21 nt, Human
ggcacuucuguagggcuggca

SEQ ID NO: 1123764 - RNA, 26 nt, Human
ggcuaaggccucccaaugcuguuugu

SEQ ID NO: 1123765 - RNA, 23 nt, Human
gggguucaaaauaacuaaagaaa

SEQ ID NO: 1123766 - RNA, 25 nt, Human
gugguucugaaauacaauccucagc

SEQ ID NO: 1123767 - RNA, 22 nt, Human
uaaaacaagccaacacugaaga

SEQ ID NO: 1123768 - RNA, 21 nt, Human
uaaccaguccugauaucauaa

SEQ ID NO: 1123769 - RNA, 22 nt, Human
uaacuaaagaaaugcagcuaca

SEQ ID NO: 1123770 - RNA, 23 nt, Human
uaacuaaagaaaugcagcuacau

SEQ ID NO: 1123771 - RNA, 24 nt, Human
uacagauggaucagcuaaaacaag

SEQ ID NO: 1123772 - RNA, 22 nt, Human
uagagccaugcccacugacccc

SEQ ID NO: 1123773 - RNA, 22 nt, Human
uagcuguggucuuccuaaguac

SEQ ID NO: 1123774 - RNA, 24 nt, Human
uaggaauagagccaugcccacuga

SEQ ID NO: 1123775 - RNA, 24 nt, Human
uagguucauugaaaccaggguaac

SEQ ID NO: 1123776 - RNA, 19 nt, Human
uaguaaaaacaaaggcaca

SEQ ID NO: 1123777 - RNA, 23 nt, Human
ucaaaauaacuaaagaaaugcag

SEQ ID NO: 1123778 - RNA, 18 nt, Human
ucagagacaugccugcaa

SEQ ID NO: 1123779 - RNA, 23 nt, Human
ucagucaguucaagacaaccuga

SEQ ID NO: 1123780 - RNA, 19 nt, Human
ucauucaaaucuucacuug

SEQ ID NO: 1123781 - RNA, 21 nt, Human
ucauugaaaccaggguaacac

SEQ ID NO: 1123782 - RNA, 18 nt, Human
ucccggcaugugcugcac

SEQ ID NO: 1123783 - RNA, 24 nt, Human
uccuggcaaaacguuuaggcugaa

SEQ ID NO: 1123784 - RNA, 25 nt, Human
ucuauaaacaaguccaugucaccac

SEQ ID NO: 1123785 - RNA, 22 nt, Human
ucugaaauacaauccucagcca

SEQ ID NO: 1123786 - RNA, 21 nt, Human
ugaaaccaggguaacaccuuu

SEQ ID NO: 1123787 - RNA, 20 nt, Human
ugaaauacaauccucagcca

SEQ ID NO: 1123788 - RNA, 21 nt, Human
ugaauauaauaauagacacag

SEQ ID NO: 1123789 - RNA, 24 nt, Human
ugacaacaacaaaaagaugaggaa

SEQ ID NO: 1123790 - RNA, 18 nt, Human
ugacaugcugucuccugc

SEQ ID NO: 1123791 - RNA, 24 nt, Human
ugacaugcugucuccugccagcga

SEQ ID NO: 1123792 - RNA, 18 nt, Human
ugagccagacagcugacc

SEQ ID NO: 1123793 - RNA, 23 nt, Human
ugcaacagcagacacuaguaaaa

SEQ ID NO: 1123794 - RNA, 22 nt, Human
ugcaguguuccuggcaaaacgu

SEQ ID NO: 1123795 - RNA, 21 nt, Human
ugcugcacaguuaugugaacg

SEQ ID NO: 1123796 - RNA, 22 nt, Human
uggaaacucacagcauugucuc

SEQ ID NO: 1123797 - RNA, 21 nt, Human
uguagagauaugaauauaaua

SEQ ID NO: 1123798 - RNA, 21 nt, Human
ugucaagagcaguuggugguu

SEQ ID NO: 1123799 - RNA, 18 nt, Human
uucaagacaaccugaagg

SEQ ID NO: 1123800 - RNA, 18 nt, Human
uuuugcaacagcagacac

SEQ ID NO: 1123801 - RNA, 20 nt, Human
uuuuguugugugauuugugg

SEQ ID NO: 1123802 - RNA, 22 nt, Human
aggcucaggcgggcagccgagc

SEQ ID NO: 1123803 - RNA, 19 nt, Human
caccagggccuugcgggcu

SEQ ID NO: 1123804 - RNA, 22 nt, Human
cacccuggaggccaccagggcc

SEQ ID NO: 1123805 - RNA, 26 nt, Human
cacugaguccggguagaucaccuggu

SEQ ID NO: 1123806 - RNA, 19 nt, Human
cagagcuccuggaggugcc

SEQ ID NO: 1123807 - RNA, 24 nt, Human
ccagcugcugcuccagccgcugcu

SEQ ID NO: 1123808 - RNA, 19 nt, Human
cccaggauuuggcagagcu

SEQ ID NO: 1123809 - RNA, 19 nt, Human
cgcccaggauuuggcagag

SEQ ID NO: 1123810 - RNA, 20 nt, Human
gcuccagccgcugcuucucc

SEQ ID NO: 1123811 - RNA, 21 nt, Human
ucaggcucaggcgggcagccg

SEQ ID NO: 1123812 - RNA, 18 nt, Human
uggcagagcuccuggagg

SEQ ID NO: 1123813 - RNA, 18 nt, Human
aaagcaacccucaucccu

SEQ ID NO: 1123814 - RNA, 19 nt, Human
aaagugcugggauuacaga

SEQ ID NO: 1123815 - RNA, 24 nt, Human
aaagugcugggauuacagacguga

SEQ ID NO: 1123816 - RNA, 23 nt, Human
aaauccccuuccccaugccucuc

SEQ ID NO: 1123817 - RNA, 21 nt, Human
aacccccacaccugcccacac

SEQ ID NO: 1123818 - RNA, 20 nt, Human
aacuucuucuucauggcucu

SEQ ID NO: 1123819 - RNA, 20 nt, Human
aagaaguccuccuggaucuu

SEQ ID NO: 1123820 - RNA, 19 nt, Human
aagccacagccaagcuccg

SEQ ID NO: 1123821 - RNA, 18 nt, Human
aagcuccaggccccugcu

SEQ ID NO: 1123822 - RNA, 20 nt, Human
aaggcccuccaccccaccug

SEQ ID NO: 1123823 - RNA, 19 nt, Human
aaguagcugggauuacagg

SEQ ID NO: 1123824 - RNA, 27 nt, Human
aaguagcugggauuacaggcacaaccc

SEQ ID NO: 1123825 - RNA, 19 nt, Human
aagugcugggauuacagac

SEQ ID NO: 1123826 - RNA, 26 nt, Human
aagugcugggauuacagacgugagcc

SEQ ID NO: 1123827 - RNA, 22 nt, Human
aauggauagagggagggaggga

SEQ ID NO: 1123828 - RNA, 24 nt, Human
aauuuugcauuuuuaguagagaca

SEQ ID NO: 1123829 - RNA, 24 nt, Human
acaaauccccuuccccaugccucu

SEQ ID NO: 1123830 - RNA, 18 nt, Human
acagacgugagccaccgc

SEQ ID NO: 1123831 - RNA, 26 nt, Human
acagaggccgacaaugaccagcacca

SEQ ID NO: 1123832 - RNA, 23 nt, Human
acagcccuccucccaaucuccga

SEQ ID NO: 1123833 - RNA, 18 nt, Human
acaggguuucaccauguu

SEQ ID NO: 1123834 - RNA, 23 nt, Human
acaggguuucaccauguuggcca

SEQ ID NO: 1123835 - RNA, 24 nt, Human
acaggguuucaccauguuggccag

SEQ ID NO: 1123836 - RNA, 24 nt, Human
accaacccccacaccugcccacac

SEQ ID NO: 1123837 - RNA, 26 nt, Human
accaccuccuccaagaaguccuccug

SEQ ID NO: 1123838 - RNA, 22 nt, Human
accauguuggccaggcuggucu

SEQ ID NO: 1123839 - RNA, 22 nt, Human
accucagccccccagguucuag

SEQ ID NO: 1123840 - RNA, 23 nt, Human
accucggccucccaaagugcugg

SEQ ID NO: 1123841 - RNA, 21 nt, Human
acgugagccaccgcaccuggc

SEQ ID NO: 1123842 - RNA, 23 nt, Human
acucuguggagugcaguggugca

SEQ ID NO: 1123843 - RNA, 21 nt, Human
agaaagccacagccaagcucc

SEQ ID NO: 1123844 - RNA, 23 nt, Human
agaccuuugugcaggccaugccc

SEQ ID NO: 1123845 - RNA, 22 nt, Human
agcacugcuuggcaucugcagc

SEQ ID NO: 1123846 - RNA, 19 nt, Human
agccaccaccuccuccaag

SEQ ID NO: 1123847 - RNA, 23 nt, Human
agcgccugucacggguggguggc

SEQ ID NO: 1123848 - RNA, 23 nt, Human
aggaaucccuuccucucucugcc

SEQ ID NO: 1123849 - RNA, 26 nt, Human
aggaguccucugaaggcccuccaccc

SEQ ID NO: 1123850 - RNA, 24 nt, Human
aggugauccacccaccucggccuc

SEQ ID NO: 1123851 - RNA, 20 nt, Human
agugcaguggugcaaucucg

SEQ ID NO: 1123852 - RNA, 24 nt, Human
agugcaguggugcaaucucggcuc

SEQ ID NO: 1123853 - RNA, 21 nt, Human
aguggccacugggaccccaug

SEQ ID NO: 1123854 - RNA, 23 nt, Human
aguggcugagccuccacugcuua

SEQ ID NO: 1123855 - RNA, 19 nt, Human
auagagggagggagggagg

SEQ ID NO: 1123856 - RNA, 18 nt, Human
augaaacagugacaaaaa

SEQ ID NO: 1123857 - RNA, 27 nt, Human
caaagcaacccucaucccuuguaaccc

SEQ ID NO: 1123858 - RNA, 24 nt, Human
caaagugcugggauuacagacgug

SEQ ID NO: 1123859 - RNA, 18 nt, Human
caacccccacaccugccc

SEQ ID NO: 1123860 - RNA, 24 nt, Human
caaccucagccccccagguucuag

SEQ ID NO: 1123861 - RNA, 24 nt, Human
caagcuccaggccccugcuccaca

SEQ ID NO: 1123862 - RNA, 26 nt, Human
caccacuaacuucuucuucauggcuc

SEQ ID NO: 1123863 - RNA, 20 nt, Human
caccaggaccacggccagcg

SEQ ID NO: 1123864 - RNA, 21 nt, Human
caccauguuggccaggcuggu

SEQ ID NO: 1123865 - RNA, 23 nt, Human
caccauguuggccaggcuggucu

SEQ ID NO: 1123866 - RNA, 24 nt, Human
caccauguuggccaggcuggucuu

SEQ ID NO: 1123867 - RNA, 27 nt, Human
caccauguuggccaggcuggucuugaa

SEQ ID NO: 1123868 - RNA, 22 nt, Human
cacccaccucggccucccaaag

SEQ ID NO: 1123869 - RNA, 23 nt, Human
cacccaccucggccucccaaagu

SEQ ID NO: 1123870 - RNA, 21 nt, Human
caccccacagauucacugcca

SEQ ID NO: 1123871 - RNA, 24 nt, Human
caccugcccacacaggagaccagc

SEQ ID NO: 1123872 - RNA, 23 nt, Human
cacgcuaaucacccuccuccaug

SEQ ID NO: 1123873 - RNA, 19 nt, Human
cacggccagcaggcccagc

SEQ ID NO: 1123874 - RNA, 19 nt, Human
cacucuguggagugcagug

SEQ ID NO: 1123875 - RNA, 21 nt, Human
cacugcaaccucagcccccca

SEQ ID NO: 1123876 - RNA, 22 nt, Human
cacugcuuagggagaagcucca

SEQ ID NO: 1123877 - RNA, 22 nt, Human
cagacauucccuggcaccuccc

SEQ ID NO: 1123878 - RNA, 19 nt, Human
cagcaccaggaccacggcc

SEQ ID NO: 1123879 - RNA, 21 nt, Human
cagcaggugggguggacuuag

SEQ ID NO: 1123880 - RNA, 21 nt, Human
cagccacggcagcccuggugu

SEQ ID NO: 1123881 - RNA, 19 nt, Human
cagcccagccaccaccucc

SEQ ID NO: 1123882 - RNA, 24 nt, Human
cagcccagccaccaccuccuccaa

SEQ ID NO: 1123883 - RNA, 22 nt, Human
cagccccccagguucuagcgau

SEQ ID NO: 1123884 - RNA, 18 nt, Human
cagcccuccucccaaucu

SEQ ID NO: 1123885 - RNA, 19 nt, Human
cagcccuccucccaaucuc

SEQ ID NO: 1123886 - RNA, 21 nt, Human
cagcccuccucccaaucuccg

SEQ ID NO: 1123887 - RNA, 23 nt, Human
caggaguccucugaaggcccucc

SEQ ID NO: 1123888 - RNA, 23 nt, Human
caggcacaacccaccaugccuga

SEQ ID NO: 1123889 - RNA, 24 nt, Human
caggcacugccaccgacagcccuc

SEQ ID NO: 1123890 - RNA, 18 nt, Human
caggccaugcccucugcc

SEQ ID NO: 1123891 - RNA, 21 nt, Human
cagggccuugccuaccuccuc

SEQ ID NO: 1123892 - RNA, 19 nt, Human
caggguccugaaggcagag

SEQ ID NO: 1123893 - RNA, 24 nt, Human
caggguuucaccauguuggccagg

SEQ ID NO: 1123894 - RNA, 19 nt, Human
cagguucuagcgauucucc

SEQ ID NO: 1123895 - RNA, 25 nt, Human
cagugacaaaaauuaccugaagaaa

SEQ ID NO: 1123896 - RNA, 21 nt, Human
caucuccagcagcggcccuuc

SEQ ID NO: 1123897 - RNA, 22 nt, Human
caucuccagcagcggcccuucc

SEQ ID NO: 1123898 - RNA, 18 nt, Human
caucucugcccucccaaa

SEQ ID NO: 1123899 - RNA, 24 nt, Human
cauguuggccaggcuggucuugaa

SEQ ID NO: 1123900 - RNA, 22 nt, Human
ccaaagugcugggauuacagac

SEQ ID NO: 1123901 - RNA, 24 nt, Human
ccaaagugcugggauuacagacgu

SEQ ID NO: 1123902 - RNA, 19 nt, Human
ccaacccccacaccugccc

SEQ ID NO: 1123903 - RNA, 19 nt, Human
ccaagcuccaggccccugc

SEQ ID NO: 1123904 - RNA, 23 nt, Human
ccaaguagcugggauuacaggca

SEQ ID NO: 1123905 - RNA, 19 nt, Human
ccacacaggagaccagcac

SEQ ID NO: 1123906 - RNA, 21 nt, Human
ccacaccccucuuucugcagg

SEQ ID NO: 1123907 - RNA, 26 nt, Human
ccacaccccucuuucugcagggccuu

SEQ ID NO: 1123908 - RNA, 22 nt, Human
ccacaccugcccacacaggaga

SEQ ID NO: 1123909 - RNA, 21 nt, Human
ccagcaccaggaccacggcca

SEQ ID NO: 1123910 - RNA, 24 nt, Human
ccagcagcagacgggggccccaag

SEQ ID NO: 1123911 - RNA, 19 nt, Human
ccagggcugcugccaagcc

SEQ ID NO: 1123912 - RNA, 22 nt, Human
ccaugcccucugccagaagcuc

SEQ ID NO: 1123913 - RNA, 18 nt, Human
ccaugggguaaggagcag

SEQ ID NO: 1123914 - RNA, 23 nt, Human
cccaaguagcugggauuacaggc

SEQ ID NO: 1123915 - RNA, 24 nt, Human
cccaaguagcugggauuacaggca

SEQ ID NO: 1123916 - RNA, 21 nt, Human
cccacaaucagagcaccccac

SEQ ID NO: 1123917 - RNA, 26 nt, Human
cccacaccugcccacacaggagacca

SEQ ID NO: 1123918 - RNA, 21 nt, Human
cccacagacauaccacaagac

SEQ ID NO: 1123919 - RNA, 27 nt, Human
cccacagacauaccacaagacaggcug

SEQ ID NO: 1123920 - RNA, 21 nt, Human
cccacauguggugggaagggu

SEQ ID NO: 1123921 - RNA, 19 nt, Human
cccagccucagacauuccc

SEQ ID NO: 1123922 - RNA, 21 nt, Human
cccaugcugcuggugugccag

SEQ ID NO: 1123923 - RNA, 24 nt, Human
ccccaccucagccuagagccuggc

SEQ ID NO: 1123924 - RNA, 22 nt, Human
ccccagauuuccacaccccucu

SEQ ID NO: 1123925 - RNA, 21 nt, Human
ccccagguucuagcgauucuc

SEQ ID NO: 1123926 - RNA, 24 nt, Human
ccccagguucuagcgauucuccug

SEQ ID NO: 1123927 - RNA, 23 nt, Human
ccccaugcucagaaugugucccc

SEQ ID NO: 1123928 - RNA, 21 nt, Human
cccccaccucagccuagagcc

SEQ ID NO: 1123929 - RNA, 25 nt, Human
cccccagguucuagcgauucuccug

SEQ ID NO: 1123930 - RNA, 24 nt, Human
ccccccagguucuagcgauucucc

SEQ ID NO: 1123931 - RNA, 21 nt, Human
ccccugcuccacaaauccccu

SEQ ID NO: 1123932 - RNA, 21 nt, Human
cccucuacugggccuuagccc

SEQ ID NO: 1123933 - RNA, 22 nt, Human
cccugcuuaucuucagagccca

SEQ ID NO: 1123934 - RNA, 22 nt, Human
cccuuccccaugccucucucaa

SEQ ID NO: 1123935 - RNA, 24 nt, Human
ccgacagcccuccucccaaucucc

SEQ ID NO: 1123936 - RNA, 18 nt, Human
ccucacaguggcugagcc

SEQ ID NO: 1123937 - RNA, 24 nt, Human
ccuccaugaaacagugacaaaaau

SEQ ID NO: 1123938 - RNA, 18 nt, Human
ccucccaaauccucccug

SEQ ID NO: 1123939 - RNA, 23 nt, Human
ccuccuagugucccuugccacuc

SEQ ID NO: 1123940 - RNA, 24 nt, Human
ccugaccucaggugauccacccac

SEQ ID NO: 1123941 - RNA, 19 nt, Human
ccugccacagccucccaag

SEQ ID NO: 1123942 - RNA, 19 nt, Human
ccuggcucagagggccuuu

SEQ ID NO: 1123943 - RNA, 20 nt, Human
ccuuccccaugccucucuca

SEQ ID NO: 1123944 - RNA, 19 nt, Human
ccuugccacucaggacaca

SEQ ID NO: 1123945 - RNA, 19 nt, Human
ccuugccuaccuccucaca

SEQ ID NO: 1123946 - RNA, 22 nt, Human
cggcagcccugguguacacaug

SEQ ID NO: 1123947 - RNA, 20 nt, Human
cggcucacugcaaccucagc

SEQ ID NO: 1123948 - RNA, 19 nt, Human
cuagaccaacccccacacc

SEQ ID NO: 1123949 - RNA, 27 nt, Human
cuagcgauucuccugccacagccuccc

SEQ ID NO: 1123950 - RNA, 25 nt, Human
cuagugucccuuccgggaaccuccu

SEQ ID NO: 1123951 - RNA, 22 nt, Human
cucacaguggcugagccuccac

SEQ ID NO: 1123952 - RNA, 21 nt, Human
cucacgaugaauggauagagg

SEQ ID NO: 1123953 - RNA, 20 nt, Human
cucacugcaaccucagcccc

SEQ ID NO: 1123954 - RNA, 24 nt, Human
cucacugcaaccucagccccccag

SEQ ID NO: 1123955 - RNA, 18 nt, Human
cucaucucugcccuccca

SEQ ID NO: 1123956 - RNA, 23 nt, Human
cucccugcuuaucuucagagccc

SEQ ID NO: 1123957 - RNA, 19 nt, Human
cuccgagcacugcuuggca

SEQ ID NO: 1123958 - RNA, 22 nt, Human
cucggcucacugcaaccucagc

SEQ ID NO: 1123959 - RNA, 20 nt, Human
cucugaaggcccuccacccc

SEQ ID NO: 1123960 - RNA, 24 nt, Human
cugaaggcccuccaccccaccugg

SEQ ID NO: 1123961 - RNA, 23 nt, Human
cugcaaccucagccccccagguu

SEQ ID NO: 1123962 - RNA, 24 nt, Human
cugcaaccucagccccccagguuc

SEQ ID NO: 1123963 - RNA, 20 nt, Human
cugcagccacggcagcccug

SEQ ID NO: 1123964 - RNA, 18 nt, Human
cugggaccccaugcucag

SEQ ID NO: 1123965 - RNA, 22 nt, Human
cuguuccucugcuaggaauccc

SEQ ID NO: 1123966 - RNA, 20 nt, Human
cuuagcccagcuguuccucu

SEQ ID NO: 1123967 - RNA, 19 nt, Human
cuuccauagugcccacaau

SEQ ID NO: 1123968 - RNA, 21 nt, Human
cuuugugcaggccaugcccuc

SEQ ID NO: 1123969 - RNA, 19 nt, Human
gaaggcccuccaccccacc

SEQ ID NO: 1123970 - RNA, 22 nt, Human
gaaucaaagcccccucuacugg

SEQ ID NO: 1123971 - RNA, 21 nt, Human
gacagcccuccucccaaucuc

SEQ ID NO: 1123972 - RNA, 24 nt, Human
gaccucaggugauccacccaccuc

SEQ ID NO: 1123973 - RNA, 18 nt, Human
gagacagaggccgacaau

SEQ ID NO: 1123974 - RNA, 24 nt, Human
gagcccccagauuuccacaccccu

SEQ ID NO: 1123975 - RNA, 18 nt, Human
gagucagcuccagacaga

SEQ ID NO: 1123976 - RNA, 18 nt, Human
gauuacagacgugagcca

SEQ ID NO: 1123977 - RNA, 23 nt, Human
gauuacagacgugagccaccgca

SEQ ID NO: 1123978 - RNA, 24 nt, Human
gauuacaggcacaacccaccaugc

SEQ ID NO: 1123979 - RNA, 18 nt, Human
gcacugccaccgacagcc

SEQ ID NO: 1123980 - RNA, 19 nt, Human
gcaggcuguccggccccca

SEQ ID NO: 1123981 - RNA, 19 nt, Human
gccaauuuccagccucagu

SEQ ID NO: 1123982 - RNA, 21 nt, Human
gccuagagccuggcacugucc

SEQ ID NO: 1123983 - RNA, 23 nt, Human
gcuccacaaauccccuuccccau

SEQ ID NO: 1123984 - RNA, 18 nt, Human
gcuggaugcugggcugga

SEQ ID NO: 1123985 - RNA, 21 nt, Human
gcugggauuacagacgugagc

SEQ ID NO: 1123986 - RNA, 23 nt, Human
gcuggucuugaacuccugaccuc

SEQ ID NO: 1123987 - RNA, 22 nt, Human
gcuguauucuagcgcuucccua

SEQ ID NO: 1123988 - RNA, 18 nt, Human
gcugugccugcccugccu

SEQ ID NO: 1123989 - RNA, 18 nt, Human
ggaagaggcgagcccagg

SEQ ID NO: 1123990 - RNA, 23 nt, Human
ggaaucccuuccucucucugccu

SEQ ID NO: 1123991 - RNA, 23 nt, Human
ggaggcucuuaauucuccuggag

SEQ ID NO: 1123992 - RNA, 19 nt, Human
ggcacugccaccgacagcc

SEQ ID NO: 1123993 - RNA, 24 nt, Human
ggcuggucuugaacuccugaccuc

SEQ ID NO: 1123994 - RNA, 24 nt, Human
gggcagccgcccaugcugcuggug

SEQ ID NO: 1123995 - RNA, 19 nt, Human
ggguggcccugucacucag

SEQ ID NO: 1123996 - RNA, 22 nt, Human
ggguuucaccauguuggccagg

SEQ ID NO: 1123997 - RNA, 23 nt, Human
gguccugaaggcagagggccgcu

SEQ ID NO: 1123998 - RNA, 19 nt, Human
ggucuugaacuccugaccu

SEQ ID NO: 1123999 - RNA, 18 nt, Human
guagcugggauuacaggc

SEQ ID NO: 1124000 - RNA, 24 nt, Human
gugauccacccaccucggccuccc

SEQ ID NO: 1124001 - RNA, 19 nt, Human
guggcugagccuccacugc

SEQ ID NO: 1124002 - RNA, 22 nt, Human
uacagacgugagccaccgcacc

SEQ ID NO: 1124003 - RNA, 21 nt, Human
uaccugaagaaagccacagcc

SEQ ID NO: 1124004 - RNA, 25 nt, Human
uaccugaagaaagccacagccaagc

SEQ ID NO: 1124005 - RNA, 22 nt, Human
uagagacaggguuucaccaugu

SEQ ID NO: 1124006 - RNA, 20 nt, Human
uagcuagaccaacccccaca

SEQ ID NO: 1124007 - RNA, 18 nt, Human
uagcuuccauagugcccu

SEQ ID NO: 1124008 - RNA, 19 nt, Human
uaggaaucccuuccucucu

SEQ ID NO: 1124009 - RNA, 24 nt, Human
uaguagagacaggguuucaccaug

SEQ ID NO: 1124010 - RNA, 26 nt, Human
uaguagagacaggguuucaccauguu

SEQ ID NO: 1124011 - RNA, 18 nt, Human
ucacugcaaccucagccc

SEQ ID NO: 1124012 - RNA, 21 nt, Human
ucacugcaaccucagcccccc

SEQ ID NO: 1124013 - RNA, 24 nt, Human
ucacugcaaccucagccccccagg

SEQ ID NO: 1124014 - RNA, 19 nt, Human
ucagaauguguccccacau

SEQ ID NO: 1124015 - RNA, 20 nt, Human
ucaggugauccacccaccuc

SEQ ID NO: 1124016 - RNA, 21 nt, Human
ucagguuccuuggaggcugag

SEQ ID NO: 1124017 - RNA, 22 nt, Human
uccagggcugcugccaagcccu

SEQ ID NO: 1124018 - RNA, 21 nt, Human
uccaugaaacagugacaaaaa

SEQ ID NO: 1124019 - RNA, 18 nt, Human
ucccaaagugcugggauu

SEQ ID NO: 1124020 - RNA, 24 nt, Human
ucccaaagugcugggauuacagac

SEQ ID NO: 1124021 - RNA, 24 nt, Human
ucccaaguagcugggauuacaggc

SEQ ID NO: 1124022 - RNA, 27 nt, Human
uccccacauguggugggaagggucugu

SEQ ID NO: 1124023 - RNA, 21 nt, Human
ucccccaccucagccuagagc

SEQ ID NO: 1124024 - RNA, 19 nt, Human
ucccugcuuaucuucagag

SEQ ID NO: 1124025 - RNA, 24 nt, Human
uccuccaagaaguccuccuggauc

SEQ ID NO: 1124026 - RNA, 20 nt, Human
uccuuggaggcugagggcag

SEQ ID NO: 1124027 - RNA, 18 nt, Human
ucggccucccaaagugcu

SEQ ID NO: 1124028 - RNA, 19 nt, Human
ucuacugggccuuagccca

SEQ ID NO: 1124029 - RNA, 23 nt, Human
ucuagcgcuucccuagcccuggc

SEQ ID NO: 1124030 - RNA, 26 nt, Human
ucugcagccacggcagcccuggugua

SEQ ID NO: 1124031 - RNA, 27 nt, Human
ucugcagccacggcagcccugguugac

SEQ ID NO: 1124032 - RNA, 19 nt, Human
ucuucauggcucugcugcu

SEQ ID NO: 1124033 - RNA, 20 nt, Human
ucuucuucauggcucugcug

SEQ ID NO: 1124034 - RNA, 23 nt, Human
ucuugaacuccugaccucaggug

SEQ ID NO: 1124035 - RNA, 20 nt, Human
ugaaggcagagggccgcucc

SEQ ID NO: 1124036 - RNA, 21 nt, Human
ugaaggcccuccaccccaccu

SEQ ID NO: 1124037 - RNA, 21 nt, Human
ugaccucaggugauccaccca

SEQ ID NO: 1124038 - RNA, 24 nt, Human
ugaccucaggugauccacccaccu

SEQ ID NO: 1124039 - RNA, 23 nt, Human
ugaggcagcaggugggguggacu

SEQ ID NO: 1124040 - RNA, 24 nt, Human
ugauccacccaccucggccuccca

SEQ ID NO: 1124041 - RNA, 20 nt, Human
ugcaagguccuugggcugug

SEQ ID NO: 1124042 - RNA, 22 nt, Human
ugcaguggugcaaucucggcuc

SEQ ID NO: 1124043 - RNA, 24 nt, Human
ugccacagccucccaaguagcugg

SEQ ID NO: 1124044 - RNA, 20 nt, Human
ugccugcccugccuguguca

SEQ ID NO: 1124045 - RNA, 24 nt, Human
ugcugggauuacagacgugagcca

SEQ ID NO: 1124046 - RNA, 24 nt, Human
ugcuuagggagaagcuccaguagg

SEQ ID NO: 1124047 - RNA, 22 nt, Human
uggacuuagcuagaccaacccc

SEQ ID NO: 1124048 - RNA, 19 nt, Human
uggagcaugggguuuagcu

SEQ ID NO: 1124049 - RNA, 23 nt, Human
uggagugcaguggugcaaucucg

SEQ ID NO: 1124050 - RNA, 24 nt, Human
uggagugcaguggugcaaucucgg

SEQ ID NO: 1124051 - RNA, 25 nt, Human
uggcaucugcagccacggcagcccu

SEQ ID NO: 1124052 - RNA, 24 nt, Human
uggccaggcuggucuugaacuccu

SEQ ID NO: 1124053 - RNA, 19 nt, Human
uggcugagccuccacugcu

SEQ ID NO: 1124054 - RNA, 18 nt, Human
ugggauuacagacgugag

SEQ ID NO: 1124055 - RNA, 19 nt, Human
ugggauuacagacgugagc

SEQ ID NO: 1124056 - RNA, 21 nt, Human
ugggauuacagacgugagcca

SEQ ID NO: 1124057 - RNA, 22 nt, Human
ugggauuacagacgugagccac

SEQ ID NO: 1124058 - RNA, 23 nt, Human
ugggauuacagacgugagccacc

SEQ ID NO: 1124059 - RNA, 24 nt, Human
ugggauuacagacgugagccaccg

SEQ ID NO: 1124060 - RNA, 22 nt, Human
ugggauuacaggcacaacccac

SEQ ID NO: 1124061 - RNA, 24 nt, Human
ugggauuacaggcacaacccacca

SEQ ID NO: 1124062 - RNA, 25 nt, Human
ugggauuacaggcacaacccaccau

SEQ ID NO: 1124063 - RNA, 24 nt, Human
ugggccuuagcccagcuguuccuu

SEQ ID NO: 1124064 - RNA, 21 nt, Human
uggguggcccugucacucagc

SEQ ID NO: 1124065 - RNA, 23 nt, Human
ugguuucuccugugucccccacc

SEQ ID NO: 1124066 - RNA, 24 nt, Human
uuaguagagacaggguuucaccau

SEQ ID NO: 1124067 - RNA, 23 nt, Human
uuccagccucagugguaaagguu

SEQ ID NO: 1124068 - RNA, 18 nt, Human
uucccuggcaccucccca

SEQ ID NO: 1124069 - RNA, 21 nt, Human
uucccuggcaccuccccagca

SEQ ID NO: 1124070 - RNA, 19 nt, Human
uuccuuggaggcugagggc

SEQ ID NO: 1124071 - RNA, 21 nt, Human
uuccuuggaggcugagggcag

SEQ ID NO: 1124072 - RNA, 21 nt, Human
uucuagcgauucuccugccac

SEQ ID NO: 1124073 - RNA, 21 nt, Human
uucuccuggagucagcuccag

SEQ ID NO: 1124074 - RNA, 24 nt, Human
uuucaccauguuggccaggcuggu

SEQ ID NO: 1124075 - RNA, 19 nt, Human
uuuugcauuuuuaguagag

SEQ ID NO: 1124076 - RNA, 20 nt, Human
uuuugcauuuuuaguagaga

SEQ ID NO: 1124077 - RNA, 24 nt, Human
uuuuuaguagagacaggguuucac

SEQ ID NO: 1124078 - RNA, 20 nt, Human
acaggccccccgacacaugc

SEQ ID NO: 1124079 - RNA, 26 nt, Human
accuguccccccacuggaccccucca

SEQ ID NO: 1124080 - RNA, 20 nt, Human
aggaccuguccccccacugg

SEQ ID NO: 1124081 - RNA, 19 nt, Human
aggcugaacaggccccccg

SEQ ID NO: 1124082 - RNA, 21 nt, Human
agggcuuguggacguaccaga

SEQ ID NO: 1124083 - RNA, 21 nt, Human
caccagcagguuggagguccu

SEQ ID NO: 1124084 - RNA, 22 nt, Human
cagaaaccuccucugccagcuu

SEQ ID NO: 1124085 - RNA, 24 nt, Human
caggccccccgacacaugccucuc

SEQ ID NO: 1124086 - RNA, 22 nt, Human
ccacuggaccccuccaucccgg

SEQ ID NO: 1124087 - RNA, 22 nt, Human
ccccuccaucccgggugaaggu

SEQ ID NO: 1124088 - RNA, 19 nt, Human
ccuccacguaaguaccgua

SEQ ID NO: 1124089 - RNA, 21 nt, Human
cgcccagaaaccuccucugcc

SEQ ID NO: 1124090 - RNA, 18 nt, Human
cucagcagccacuacucc

SEQ ID NO: 1124091 - RNA, 22 nt, Human
cucucaggcccuccuccuccac

SEQ ID NO: 1124092 - RNA, 18 nt, Human
cugaugcuuaggcagacg

SEQ ID NO: 1124093 - RNA, 22 nt, Human
cugcagcacccugaucaccagc

SEQ ID NO: 1124094 - RNA, 21 nt, Human
cugcagcuuugucacuggcug

SEQ ID NO: 1124095 - RNA, 23 nt, Human
gaccuguccccccacuggacccc

SEQ ID NO: 1124096 - RNA, 18 nt, Human
gagguccucuccgccagu

SEQ ID NO: 1124097 - RNA, 19 nt, Human
gcagcuuugucacuggcug

SEQ ID NO: 1124098 - RNA, 25 nt, Human
gcccagaaaccuccucugccagcuu

SEQ ID NO: 1124099 - RNA, 22 nt, Human
gcucucaggcccuccuccucca

SEQ ID NO: 1124100 - RNA, 29 nt, Human
guugcaguucuuccgccacagcucugauc

SEQ ID NO: 1124101 - RNA, 23 nt, Human
ucaccaagucauggaacuccacu

SEQ ID NO: 1124102 - RNA, 21 nt, Human
ucacuggcugcagcacccuga

SEQ ID NO: 1124103 - RNA, 19 nt, Human
ucggaagcuggaggaccug

SEQ ID NO: 1124104 - RNA, 21 nt, Human
ucucaaacuggagccuggcuc

SEQ ID NO: 1124105 - RNA, 18 nt, Human
ugaacggugaccugccgc

SEQ ID NO: 1124106 - RNA, 21 nt, Human
uggguggucuucaggauaagu

SEQ ID NO: 1124107 - RNA, 21 nt, Human
uucacagugacuucugugccc

SEQ ID NO: 1124108 - RNA, 21 nt, Human
uucuuccgccacagcucugcc

SEQ ID NO: 1124109 - RNA, 18 nt, Human
uuggagguccucuccgcc

SEQ ID NO: 1124110 - RNA, 22 nt, Human
acaguuuucuucuuggaacugu

SEQ ID NO: 1124111 - RNA, 18 nt, Human
accaaugucugcuacauu

SEQ ID NO: 1124112 - RNA, 23 nt, Human
aggucaaagccagcaacuaagga

SEQ ID NO: 1124113 - RNA, 18 nt, Human
auaagucuuggguggguu

SEQ ID NO: 1124114 - RNA, 24 nt, Human
caacauaaaaggucaaagccagca

SEQ ID NO: 1124115 - RNA, 20 nt, Human
cacaccauccuggguauaag

SEQ ID NO: 1124116 - RNA, 18 nt, Human
caggaagcugccuggguu

SEQ ID NO: 1124117 - RNA, 18 nt, Human
cauaaaaggucaaagcca

SEQ ID NO: 1124118 - RNA, 23 nt, Human
cauccaucuaucacauugucuuc

SEQ ID NO: 1124119 - RNA, 22 nt, Human
ccauccuggguauaagucuugg

SEQ ID NO: 1124120 - RNA, 27 nt, Human
uaaaaggucaaagccagcaacuaagga

SEQ ID NO: 1124121 - RNA, 19 nt, Human
uagacgcaggcauauaggg

SEQ ID NO: 1124122 - RNA, 23 nt, Human
uauggcaguugagaaaauagaug

SEQ ID NO: 1124123 - RNA, 19 nt, Human
ucaaagccagcaacuaagg

SEQ ID NO: 1124124 - RNA, 24 nt, Human
ucuguaacugagucaucccugauu

SEQ ID NO: 1124125 - RNA, 20 nt, Human
ugcagaauaagaucuucuuc

SEQ ID NO: 1124126 - RNA, 18 nt, Human
ugccaggaagcugccugg

SEQ ID NO: 1124127 - RNA, 20 nt, Human
ugccaggaagcugccugggu

SEQ ID NO: 1124128 - RNA, 21 nt, Human
ugcuacauuuuccacuucuuc

SEQ ID NO: 1124129 - RNA, 24 nt, Human
uggcacugccaggaagcugccugg

SEQ ID NO: 1124130 - RNA, 19 nt, Human
ugucuggaggugucugaag

SEQ ID NO: 1124131 - RNA, 21 nt, Human
uuaaaaauuucccgaccuccu

SEQ ID NO: 1124132 - RNA, 23 nt, Human
uuaaaaauuucccgaccuccuga

SEQ ID NO: 1124133 - RNA, 20 nt, Human
uuauaaucuucaauuucagu

SEQ ID NO: 1124134 - RNA, 23 nt, Human
uuauggguacuccaagccuccua

SEQ ID NO: 1124135 - RNA, 19 nt, Human
uucauugcagaauaagauc

SEQ ID NO: 1124136 - RNA, 19 nt, Human
uucuuggaacuguaacugu

SEQ ID NO: 1124137 - RNA, 19 nt, Human
uugugcuacaagugaagau

SEQ ID NO: 1124138 - RNA, 22 nt, Human
uuuaaaaauuucccgaccuccu

SEQ ID NO: 1124139 - RNA, 22 nt, Human
uuugguuuugacaguuuucuuc

SEQ ID NO: 1124140 - RNA, 21 nt, Human
uugguggcggcuccacugcag

SEQ ID NO: 1124141 - RNA, 19 nt, Human
cagggaaaugcuuuuucca

SEQ ID NO: 1124142 - RNA, 20 nt, Human
cuucuuaaauucaucaggga

SEQ ID NO: 1124143 - RNA, 19 nt, Human
aacccuugacccucucccu

SEQ ID NO: 1124144 - RNA, 26 nt, Human
aaccugucacccaaauagugaacaca

SEQ ID NO: 1124145 - RNA, 19 nt, Human
aagaagccugucuguauca

SEQ ID NO: 1124146 - RNA, 21 nt, Human
aagcagagaugaaaagcagag

SEQ ID NO: 1124147 - RNA, 21 nt, Human
aagccagaaauaaaauucagg

SEQ ID NO: 1124148 - RNA, 23 nt, Human
aauaagcagagaugaaaagcaga

SEQ ID NO: 1124149 - RNA, 20 nt, Human
aaucaggaucacccaaauuc

SEQ ID NO: 1124150 - RNA, 19 nt, Human
aaucuauagacaauaaccu

SEQ ID NO: 1124151 - RNA, 19 nt, Human
acagugucucucauaugcc

SEQ ID NO: 1124152 - RNA, 24 nt, Human
acccaaauagugaacacaguaccc

SEQ ID NO: 1124153 - RNA, 21 nt, Human
acccaaauucaaaaugacacc

SEQ ID NO: 1124154 - RNA, 19 nt, Human
acccaacacucucugaccc

SEQ ID NO: 1124155 - RNA, 20 nt, Human
agagaugaaaagcagagaga

SEQ ID NO: 1124156 - RNA, 22 nt, Human
aggaagauuuaaauuuaagcug

SEQ ID NO: 1124157 - RNA, 18 nt, Human
agguacgagccagggacc

SEQ ID NO: 1124158 - RNA, 19 nt, Human
agguagguaggcaaacaag

SEQ ID NO: 1124159 - RNA, 20 nt, Human
agugggaacaugcaguauuu

SEQ ID NO: 1124160 - RNA, 23 nt, Human
auccccucuucauugagaaaggc

SEQ ID NO: 1124161 - RNA, 18 nt, Human
cacaaacagaaauaagca

SEQ ID NO: 1124162 - RNA, 19 nt, Human
caccagaaaaagaggccca

SEQ ID NO: 1124163 - RNA, 22 nt, Human
caccagaaaaagaggcccaaug

SEQ ID NO: 1124164 - RNA, 21 nt, Human
cacugucauacuuugcaaaga

SEQ ID NO: 1124165 - RNA, 22 nt, Human
cagauaucauucaguacuuucc

SEQ ID NO: 1124166 - RNA, 21 nt, Human
caggagggacauguacagguu

SEQ ID NO: 1124167 - RNA, 24 nt, Human
caggaucacccaaauucaaaauga

SEQ ID NO: 1124168 - RNA, 20 nt, Human
ccaaucaaaucacaauucca

SEQ ID NO: 1124169 - RNA, 20 nt, Human
cccaacacucucugacccuu

SEQ ID NO: 1124170 - RNA, 20 nt, Human
cccacaugggccagucagaa

SEQ ID NO: 1124171 - RNA, 19 nt, Human
cccccuuaccucagugucc

SEQ ID NO: 1124172 - RNA, 22 nt, Human
cccuccccucuuuuaguguccc

SEQ ID NO: 1124173 - RNA, 19 nt, Human
cccucucccuccccucuuu

SEQ ID NO: 1124174 - RNA, 18 nt, Human
ccugcauaauugcaaagu

SEQ ID NO: 1124175 - RNA, 24 nt, Human
ccuguacuagguacuugacagaag

SEQ ID NO: 1124176 - RNA, 23 nt, Human
cgucaagauuuacagaaaacuga

SEQ ID NO: 1124177 - RNA, 19 nt, Human
cucauaugccuauauaacc

SEQ ID NO: 1124178 - RNA, 21 nt, Human
cucccccuuaccucagugucc

SEQ ID NO: 1124179 - RNA, 22 nt, Human
cucuuccuccuucauuacacug

SEQ ID NO: 1124180 - RNA, 23 nt, Human
cuuaagaccuucaacugauuaac

SEQ ID NO: 1124181 - RNA, 21 nt, Human
cuucucuuucuuuccuauuuu

SEQ ID NO: 1124182 - RNA, 22 nt, Human
cuucucuuucuuuccuauuuuu

SEQ ID NO: 1124183 - RNA, 23 nt, Human
cuuuccagguagguaggcaaaca

SEQ ID NO: 1124184 - RNA, 25 nt, Human
gaagaagccugucuguaucaccaga

SEQ ID NO: 1124185 - RNA, 28 nt, Human
gaucacccaaauucaaaaugacacccaa

SEQ ID NO: 1124186 - RNA, 18 nt, Human
gcagagaugaaaagcaga

SEQ ID NO: 1124187 - RNA, 19 nt, Human
gcagagaugaaaagcagag

SEQ ID NO: 1124188 - RNA, 23 nt, Human
gucuguaucaccagaaaaagagg

SEQ ID NO: 1124189 - RNA, 23 nt, Human
guguccugucacagguacgagcc

SEQ ID NO: 1124190 - RNA, 23 nt, Human
guuguuucuucucccuagaagcu

SEQ ID NO: 1124191 - RNA, 21 nt, Human
uaaaaucaggaucacccaaau

SEQ ID NO: 1124192 - RNA, 22 nt, Human
uaacaauaauagcaaagauuua

SEQ ID NO: 1124193 - RNA, 19 nt, Human
uaacacaaacagaaauaag

SEQ ID NO: 1124194 - RNA, 23 nt, Human
uaacacaaacagaaauaagcaga

SEQ ID NO: 1124195 - RNA, 22 nt, Human
uaacuucuugugagacaguguc

SEQ ID NO: 1124196 - RNA, 19 nt, Human
uaagaccuucaacugauua

SEQ ID NO: 1124197 - RNA, 18 nt, Human
uaagcagagaugaaaagc

SEQ ID NO: 1124198 - RNA, 21 nt, Human
uaagcugcuuaauagccaucu

SEQ ID NO: 1124199 - RNA, 23 nt, Human
uaagugggaacaugcaguauuug

SEQ ID NO: 1124200 - RNA, 20 nt, Human
uacagaaaacugaaagauua

SEQ ID NO: 1124201 - RNA, 23 nt, Human
uagauaaugcuauauacaaagca

SEQ ID NO: 1124202 - RNA, 18 nt, Human
uagcaaagauuuagauaa

SEQ ID NO: 1124203 - RNA, 22 nt, Human
uauaaaaucaggaucacccaaa

SEQ ID NO: 1124204 - RNA, 20 nt, Human
uauaaccaagguaucuacuc

SEQ ID NO: 1124205 - RNA, 25 nt, Human
uauaguaacaguaugagguagguac

SEQ ID NO: 1124206 - RNA, 23 nt, Human
uaucugccaagcacuaauuuaau

SEQ ID NO: 1124207 - RNA, 23 nt, Human
ucacacauguuguuucuucuccc

SEQ ID NO: 1124208 - RNA, 18 nt, Human
ucacagguacgagccagg

SEQ ID NO: 1124209 - RNA, 18 nt, Human
ucagaauccuccauguga

SEQ ID NO: 1124210 - RNA, 19 nt, Human
ucaggccagaguuguccau

SEQ ID NO: 1124211 - RNA, 21 nt, Human
ucauaugccuauauaaccaag

SEQ ID NO: 1124212 - RNA, 18 nt, Human
ucccaagucguauggaag

SEQ ID NO: 1124213 - RNA, 21 nt, Human
ucccauguuacagauaagggu

SEQ ID NO: 1124214 - RNA, 23 nt, Human
uccccagugucuguuguucccau

SEQ ID NO: 1124215 - RNA, 19 nt, Human
uccuuagaacaugagcaca

SEQ ID NO: 1124216 - RNA, 18 nt, Human
ucucauagcagcugcucu

SEQ ID NO: 1124217 - RNA, 18 nt, Human
ucugucucuuccuccuuc

SEQ ID NO: 1124218 - RNA, 21 nt, Human
ugaaaagcagagagacaucuc

SEQ ID NO: 1124219 - RNA, 22 nt, Human
ugaaaagcagagagacaucucu

SEQ ID NO: 1124220 - RNA, 22 nt, Human
ugaauaaacagcucaaucaaaa

SEQ ID NO: 1124221 - RNA, 22 nt, Human
ugagaaaggccucccccuuacc

SEQ ID NO: 1124222 - RNA, 25 nt, Human
ugagaaugaauaaacagcucaauca

SEQ ID NO: 1124223 - RNA, 22 nt, Human
ugaggagcuaagauugaauaug

SEQ ID NO: 1124224 - RNA, 25 nt, Human
ugccugucuaucugucucuuccucc

SEQ ID NO: 1124225 - RNA, 19 nt, Human
uggaagaagccugucugua

SEQ ID NO: 1124226 - RNA, 19 nt, Human
uguccaugcuucaagcaac

SEQ ID NO: 1124227 - RNA, 23 nt, Human
uuaaauaacaauaauagcaaaga

SEQ ID NO: 1124228 - RNA, 24 nt, Human
uucagguucugccugucuaacucu

SEQ ID NO: 1124229 - RNA, 23 nt, Human
uugguaagaggcaaagccagaaa

SEQ ID NO: 1124230 - RNA, 20 nt, Human
acccaggggagcccccagca

SEQ ID NO: 1124231 - RNA, 23 nt, Human
acuggcugcacugggaugccugg

SEQ ID NO: 1124232 - RNA, 18 nt, Human
acugggggcccagcuggg

SEQ ID NO: 1124233 - RNA, 19 nt, Human
agcaguaccgaugguagca

SEQ ID NO: 1124234 - RNA, 24 nt, Human
agcggcgcggcccggcggagcccc

SEQ ID NO: 1124235 - RNA, 19 nt, Human
aggaacagaggaagcagcc

SEQ ID NO: 1124236 - RNA, 20 nt, Human
caacaaagaggaucacagcu

SEQ ID NO: 1124237 - RNA, 25 nt, Human
caacaggaacagaggaagcagcaga

SEQ ID NO: 1124238 - RNA, 21 nt, Human
cagagcgauugcggugagcgg

SEQ ID NO: 1124239 - RNA, 19 nt, Human
cagcaacaaagaggaucac

SEQ ID NO: 1124240 - RNA, 23 nt, Human
cagcagaaggugaagaacucgca

SEQ ID NO: 1124241 - RNA, 18 nt, Human
cagcuuugggguccuggg

SEQ ID NO: 1124242 - RNA, 25 nt, Human
caggucccgcagcagaaggugaaga

SEQ ID NO: 1124243 - RNA, 19 nt, Human
ccacagcaacaaagaggau

SEQ ID NO: 1124244 - RNA, 20 nt, Human
ccagagaagggaccgcagga

SEQ ID NO: 1124245 - RNA, 24 nt, Human
ccagcaccaacagagcgauugcgg

SEQ ID NO: 1124246 - RNA, 20 nt, Human
ccccagcaccaacagagcga

SEQ ID NO: 1124247 - RNA, 19 nt, Human
ccccauccccuuacccagg

SEQ ID NO: 1124248 - RNA, 19 nt, Human
cccccagcaccaacagagc

SEQ ID NO: 1124249 - RNA, 22 nt, Human
cccgcagcagaaggugaagaac

SEQ ID NO: 1124250 - RNA, 19 nt, Human
cccugcagcaguaccgaug

SEQ ID NO: 1124251 - RNA, 18 nt, Human
ccgaugguagcagguccc

SEQ ID NO: 1124252 - RNA, 19 nt, Human
ccugcagcaguaccgaugg

SEQ ID NO: 1124253 - RNA, 22 nt, Human
cgcagcagaaggugaagaacuc

SEQ ID NO: 1124254 - RNA, 20 nt, Human
cucuccccauccccuuaccc

SEQ ID NO: 1124255 - RNA, 21 nt, Human
gagcggcgcggcccggcggag

SEQ ID NO: 1124256 - RNA, 25 nt, Human
gaggagcugcaggguuguagacugg

SEQ ID NO: 1124257 - RNA, 21 nt, Human
gcagcagaaggugaagaacuc

SEQ ID NO: 1124258 - RNA, 24 nt, Human
gccuucaaaugggcucuggagcug

SEQ ID NO: 1124259 - RNA, 19 nt, Human
ggagcaggaccacuaggug

SEQ ID NO: 1124260 - RNA, 19 nt, Human
ggcccagggcuuggcuugg

SEQ ID NO: 1124261 - RNA, 18 nt, Human
ggcugugggggugcaggg

SEQ ID NO: 1124262 - RNA, 21 nt, Human
ggcuuggcuuggucuggggcc

SEQ ID NO: 1124263 - RNA, 19 nt, Human
ggcuuggucuggggccugg

SEQ ID NO: 1124264 - RNA, 18 nt, Human
gggcccagcuggguagag

SEQ ID NO: 1124265 - RNA, 20 nt, Human
gggcugaaggccaggcagug

SEQ ID NO: 1124266 - RNA, 21 nt, Human
gggcugggcgcggccgggguc

SEQ ID NO: 1124267 - RNA, 22 nt, Human
gggcugggcgcggccggggucg

SEQ ID NO: 1124268 - RNA, 20 nt, Human
ggggcugggcgcggccgggg

SEQ ID NO: 1124269 - RNA, 22 nt, Human
uagacugggggcccagcugggu

SEQ ID NO: 1124270 - RNA, 25 nt, Human
ucuccccauccccuuacccagggga

SEQ ID NO: 1124271 - RNA, 20 nt, Human
ugcggugagcggcgcggccc

SEQ ID NO: 1124272 - RNA, 20 nt, Human
uggcuuggucuggggccugg

SEQ ID NO: 1124273 - RNA, 22 nt, Human
uggggagcaggaccacuaggug

SEQ ID NO: 1124274 - RNA, 21 nt, Human
ugggguccuggggguaugggu

SEQ ID NO: 1124275 - RNA, 23 nt, Human
ugguagcaggucccgcagcagaa

SEQ ID NO: 1124276 - RNA, 23 nt, Human
ugguggcaaccacagcaacaaag

SEQ ID NO: 1124277 - RNA, 22 nt, Human
ugucauuggaaucuccuggccu

SEQ ID NO: 1124278 - RNA, 23 nt, Human
aaccagugccauugcaguuacaa

SEQ ID NO: 1124279 - RNA, 19 nt, Human
aagaaagagaaagaucuga

SEQ ID NO: 1124280 - RNA, 26 nt, Human
aagaaagagaaagaucugaaaaaugc

SEQ ID NO: 1124281 - RNA, 21 nt, Human
aagagaagcaaguagaaucug

SEQ ID NO: 1124282 - RNA, 18 nt, Human
aagcagagauuugaaucc

SEQ ID NO: 1124283 - RNA, 21 nt, Human
aauaauaugaagaguagguac

SEQ ID NO: 1124284 - RNA, 23 nt, Human
acagaaacacgucugccucuuuu

SEQ ID NO: 1124285 - RNA, 24 nt, Human
acaggccaaaggcggcguguguug

SEQ ID NO: 1124286 - RNA, 20 nt, Human
acaguaauuuagugcuugcu

SEQ ID NO: 1124287 - RNA, 21 nt, Human
accugcaaaagacugaaauag

SEQ ID NO: 1124288 - RNA, 19 nt, Human
acucacgcugggcccagcc

SEQ ID NO: 1124289 - RNA, 19 nt, Human
acuccugauaucucaauau

SEQ ID NO: 1124290 - RNA, 21 nt, Human
agaaaaggagauuacaaacgu

SEQ ID NO: 1124291 - RNA, 19 nt, Human
agaaagagaaagaucugaa

SEQ ID NO: 1124292 - RNA, 19 nt, Human
agaagagaagcaaguagaa

SEQ ID NO: 1124293 - RNA, 22 nt, Human
agaagcaaauuuagccacaauc

SEQ ID NO: 1124294 - RNA, 24 nt, Human
agcuagaagcaaauuuagccacaa

SEQ ID NO: 1124295 - RNA, 20 nt, Human
aggccaaaggcggcgugugu

SEQ ID NO: 1124296 - RNA, 20 nt, Human
aggguaguugaaaaccagug

SEQ ID NO: 1124297 - RNA, 21 nt, Human
agugguaauaaugaauauuua

SEQ ID NO: 1124298 - RNA, 18 nt, Human
auaacguggagaagagaa

SEQ ID NO: 1124299 - RNA, 22 nt, Human
auauacauagaaacuauguaug

SEQ ID NO: 1124300 - RNA, 18 nt, Human
augguagcauucuuaggu

SEQ ID NO: 1124301 - RNA, 24 nt, Human
caaauacgcaauucuacaucaaau

SEQ ID NO: 1124302 - RNA, 23 nt, Human
caagaaauaaguacaauagccaa

SEQ ID NO: 1124303 - RNA, 18 nt, Human
cacaaaaccuaaugugcu

SEQ ID NO: 1124304 - RNA, 21 nt, Human
cacagcuucauuguugccccu

SEQ ID NO: 1124305 - RNA, 20 nt, Human
caccaugcugguaccaagcu

SEQ ID NO: 1124306 - RNA, 19 nt, Human
cacugugcuacuccguuua

SEQ ID NO: 1124307 - RNA, 20 nt, Human
cagcagcgccgugggguggu

SEQ ID NO: 1124308 - RNA, 18 nt, Human
caggggaauguaggaagc

SEQ ID NO: 1124309 - RNA, 22 nt, Human
cagugccauugcaguuacaaaa

SEQ ID NO: 1124310 - RNA, 24 nt, Human
caugcauauaaaaauuuauccccu

SEQ ID NO: 1124311 - RNA, 20 nt, Human
ccacgcgcgggcucccgccu

SEQ ID NO: 1124312 - RNA, 19 nt, Human
ccagggggaggacagcggg

SEQ ID NO: 1124313 - RNA, 21 nt, Human
cccagaaugaagacacaaaac

SEQ ID NO: 1124314 - RNA, 18 nt, Human
ccuacauagacauggccu

SEQ ID NO: 1124315 - RNA, 21 nt, Human
cgcgggcucccgccggggagc

SEQ ID NO: 1124316 - RNA, 21 nt, Human
cuaauaacguggagaagagaa

SEQ ID NO: 1124317 - RNA, 20 nt, Human
cucaaauauccucucuuguu

SEQ ID NO: 1124318 - RNA, 18 nt, Human
cucacgcugggcccagcc

SEQ ID NO: 1124319 - RNA, 21 nt, Human
cugguuagaauugcuuccuug

SEQ ID NO: 1124320 - RNA, 26 nt, Human
cuuacugcugaauccaaaagguuuuc

SEQ ID NO: 1124321 - RNA, 19 nt, Human
cuugcucuuucccacacuu

SEQ ID NO: 1124322 - RNA, 23 nt, Human
gaacauuaaauuugucagaaaug

SEQ ID NO: 1124323 - RNA, 21 nt, Human
gcaaaagacugaaauagcuca

SEQ ID NO: 1124324 - RNA, 18 nt, Human
gcuucgcugaaaaagcaa

SEQ ID NO: 1124325 - RNA, 20 nt, Human
ggugacuaauugcccccgua

SEQ ID NO: 1124326 - RNA, 19 nt, Human
gucugcugccgugcugucc

SEQ ID NO: 1124327 - RNA, 23 nt, Human
gugggguggugacuaauugcccc

SEQ ID NO: 1124328 - RNA, 19 nt, Human
gugguaauaaugaauauuu

SEQ ID NO: 1124329 - RNA, 21 nt, Human
uaaauaugugcuuaguuuucc

SEQ ID NO: 1124330 - RNA, 19 nt, Human
uaaaucaagaaaaaaguga

SEQ ID NO: 1124331 - RNA, 19 nt, Human
uaaggauacuaaacuccug

SEQ ID NO: 1124332 - RNA, 18 nt, Human
uacauagacauggccuuu

SEQ ID NO: 1124333 - RNA, 21 nt, Human
uaccaaaauuauaaccauuaa

SEQ ID NO: 1124334 - RNA, 18 nt, Human
uaccaagcucaucaacau

SEQ ID NO: 1124335 - RNA, 19 nt, Human
uaccagguggagaaaacua

SEQ ID NO: 1124336 - RNA, 21 nt, Human
uacuaaacuccugaugaagcu

SEQ ID NO: 1124337 - RNA, 22 nt, Human
uagcaaguuuguuuugcuaugu

SEQ ID NO: 1124338 - RNA, 25 nt, Human
uauuccaacauacaaacauguuuau

SEQ ID NO: 1124339 - RNA, 19 nt, Human
ucaagcaggaacauauaac

SEQ ID NO: 1124340 - RNA, 18 nt, Human
ucaauaucuacuuacaaa

SEQ ID NO: 1124341 - RNA, 23 nt, Human
ucacaaccuuucauucuagguuu

SEQ ID NO: 1124342 - RNA, 24 nt, Human
ucacaaccuuucauucuagguuuc

SEQ ID NO: 1124343 - RNA, 25 nt, Human
ucacaaccuuucauucuagguuucu

SEQ ID NO: 1124344 - RNA, 24 nt, Human
ucacccacagcuucauuguugccc

SEQ ID NO: 1124345 - RNA, 21 nt, Human
uccagggggaggacagcgggc

SEQ ID NO: 1124346 - RNA, 18 nt, Human
uccccgacaaaaaaaguc

SEQ ID NO: 1124347 - RNA, 22 nt, Human
uccuggguucuuucacaaccuu

SEQ ID NO: 1124348 - RNA, 27 nt, Human
ucucuaggacuccaacauacaggccaa

SEQ ID NO: 1124349 - RNA, 19 nt, Human
ucucuguuuucauucaauc

SEQ ID NO: 1124350 - RNA, 21 nt, Human
ugaagaagcacuguuuuucac

SEQ ID NO: 1124351 - RNA, 21 nt, Human
ugaagaguagguacccagaau

SEQ ID NO: 1124352 - RNA, 20 nt, Human
ugcaguuacaaauacgcaau

SEQ ID NO: 1124353 - RNA, 21 nt, Human
ugccgugcuguccucagcagc

SEQ ID NO: 1124354 - RNA, 24 nt, Human
uggcaauuuuuuucuuaaggaaag

SEQ ID NO: 1124355 - RNA, 21 nt, Human
uguaugaacacaaacacaggg

SEQ ID NO: 1124356 - RNA, 22 nt, Human
ugucauuccguguuuuuccuca

SEQ ID NO: 1124357 - RNA, 21 nt, Human
ugucuggagagcagugcaaag

SEQ ID NO: 1124358 - RNA, 23 nt, Human
uucacucuuuacuagcccacacu

SEQ ID NO: 1124359 - RNA, 22 nt, Human
uuccaacauacaaacauguuua

SEQ ID NO: 1124360 - RNA, 25 nt, Human
uuccccgacaaaaaaaguccucugg

SEQ ID NO: 1124361 - RNA, 22 nt, Human
uugaagaagcacuguucugugg

SEQ ID NO: 1124362 - RNA, 25 nt, Human
uugcacagaaacacgucugccucuu

SEQ ID NO: 1124363 - RNA, 22 nt, Human
uugcugguuagaauugcuuccu

SEQ ID NO: 1124364 - RNA, 22 nt, Human
uugcuuccuuguuacaggguag

SEQ ID NO: 1124365 - RNA, 21 nt, Human
uuuaaaaucauuucucucccu

SEQ ID NO: 1124366 - RNA, 18 nt, Human
aaacaagaaaaggcuagg

SEQ ID NO: 1124367 - RNA, 19 nt, Human
aagcucucucucugcauau

SEQ ID NO: 1124368 - RNA, 22 nt, Human
aaggugucuuuuuuccccaaga

SEQ ID NO: 1124369 - RNA, 20 nt, Human
agcucaaguaacaaguuuua

SEQ ID NO: 1124370 - RNA, 19 nt, Human
cacauauaaacagacccaa

SEQ ID NO: 1124371 - RNA, 19 nt, Human
cagccgcugucagugccug

SEQ ID NO: 1124372 - RNA, 22 nt, Human
ccaaagcaagacuuaaugccac

SEQ ID NO: 1124373 - RNA, 18 nt, Human
ccgcugucagugccugca

SEQ ID NO: 1124374 - RNA, 24 nt, Human
gaccacaaaggcagaguagcagcc

SEQ ID NO: 1124375 - RNA, 20 nt, Human
uauauaagcucucucucugc

SEQ ID NO: 1124376 - RNA, 22 nt, Human
ucaaucaagcccaugauuccaa

SEQ ID NO: 1124377 - RNA, 18 nt, Human
uccaagcucaaguaacaa

SEQ ID NO: 1124378 - RNA, 23 nt, Human
ugaagcaaacaagaaaaggcuag

SEQ ID NO: 1124379 - RNA, 18 nt, Human
ugcauauauacacauaua

SEQ ID NO: 1124380 - RNA, 23 nt, Human
ugcauauauacacauauaaacag

SEQ ID NO: 1124381 - RNA, 22 nt, Human
ugugaaauaaggcuuuaaccaa

SEQ ID NO: 1124382 - RNA, 18 nt, Human
aaaaaccaauugagggcc

SEQ ID NO: 1124383 - RNA, 22 nt, Human
aaacaaacaccucucaugcuua

SEQ ID NO: 1124384 - RNA, 20 nt, Human
aaacacagcuaccggcucac

SEQ ID NO: 1124385 - RNA, 21 nt, Human
aaagaacaacugcagaaccac

SEQ ID NO: 1124386 - RNA, 19 nt, Human
aaagaaggcagaggccugg

SEQ ID NO: 1124387 - RNA, 23 nt, Human
aaagaauguggucaacaaacaca

SEQ ID NO: 1124388 - RNA, 18 nt, Human
aaagugacaugaugaccc

SEQ ID NO: 1124389 - RNA, 22 nt, Human
aacaaacacagcuaccggcuca

SEQ ID NO: 1124390 - RNA, 21 nt, Human
aacaaagaaggcagaggccug

SEQ ID NO: 1124391 - RNA, 24 nt, Human
aaccaauugagggccacaaaccca

SEQ ID NO: 1124392 - RNA, 19 nt, Human
aagaaguuccuguugcuuc

SEQ ID NO: 1124393 - RNA, 23 nt, Human
aagaauguggucaacaaacacag

SEQ ID NO: 1124394 - RNA, 20 nt, Human
aagcaggcuuuggggaaaua

SEQ ID NO: 1124395 - RNA, 27 nt, Human
aagcagucaccuucccgaaccugaagc

SEQ ID NO: 1124396 - RNA, 22 nt, Human
aaguuacuccucagccagccca

SEQ ID NO: 1124397 - RNA, 20 nt, Human
aaguuccuucuucacuuuuc

SEQ ID NO: 1124398 - RNA, 20 nt, Human
aauacaaaaauuagaaaaaa

SEQ ID NO: 1124399 - RNA, 19 nt, Human
acaccaaguuacuccucag

SEQ ID NO: 1124400 - RNA, 23 nt, Human
acacuggucagagaacacuggaa

SEQ ID NO: 1124401 - RNA, 22 nt, Human
acagagccugcccaggcucaau

SEQ ID NO: 1124402 - RNA, 21 nt, Human
accacuccccgcuaccccccg

SEQ ID NO: 1124403 - RNA, 21 nt, Human
acugaggcacagaaaggauaa

SEQ ID NO: 1124404 - RNA, 21 nt, Human
acugcugacagguagccuguu

SEQ ID NO: 1124405 - RNA, 18 nt, Human
agaaaacacaguguuugc

SEQ ID NO: 1124406 - RNA, 23 nt, Human
agaacacuggaacgccccccaca

SEQ ID NO: 1124407 - RNA, 20 nt, Human
agaaccacauuacagaggca

SEQ ID NO: 1124408 - RNA, 21 nt, Human
agaaccuaucgcaaaauguca

SEQ ID NO: 1124409 - RNA, 18 nt, Human
agaccagaaaacacagug

SEQ ID NO: 1124410 - RNA, 18 nt, Human
agacccaacagguuggca

SEQ ID NO: 1124411 - RNA, 18 nt, Human
agagaaagggcgcaaaga

SEQ ID NO: 1124412 - RNA, 22 nt, Human
agagaacacuggaacgcccccc

SEQ ID NO: 1124413 - RNA, 20 nt, Human
agaggcuuccccggcugggu

SEQ ID NO: 1124414 - RNA, 20 nt, Human
agcaccacccuccucaaacu

SEQ ID NO: 1124415 - RNA, 18 nt, Human
agcagcagccuccuugac

SEQ ID NO: 1124416 - RNA, 23 nt, Human
agcaggcuuuggggaaauaccuu

SEQ ID NO: 1124417 - RNA, 20 nt, Human
agcagucaccuucccgaacc

SEQ ID NO: 1124418 - RNA, 22 nt, Human
agcaguguucuuuagcauucac

SEQ ID NO: 1124419 - RNA, 21 nt, Human
agccagcagguggccauggga

SEQ ID NO: 1124420 - RNA, 18 nt, Human
aggaaaagcaggcuuugg

SEQ ID NO: 1124421 - RNA, 25 nt, Human
aggaaguggggagcgggcagggggc

SEQ ID NO: 1124422 - RNA, 18 nt, Human
aggagcugggaugcuaug

SEQ ID NO: 1124423 - RNA, 22 nt, Human
aggaggcuuggauggaagacac

SEQ ID NO: 1124424 - RNA, 21 nt, Human
aggcaagaaaauuggacuucu

SEQ ID NO: 1124425 - RNA, 18 nt, Human
aggcagaggccuggguua

SEQ ID NO: 1124426 - RNA, 23 nt, Human
agggagagaaagggcgcaaagag

SEQ ID NO: 1124427 - RNA, 24 nt, Human
aggggagggaggagaaauggggau

SEQ ID NO: 1124428 - RNA, 23 nt, Human
aggggcuucugcucacagaggcc

SEQ ID NO: 1124429 - RNA, 20 nt, Human
agugagacugcugacaggua

SEQ ID NO: 1124430 - RNA, 21 nt, Human
auaggaaaccugucuuaaagg

SEQ ID NO: 1124431 - RNA, 20 nt, Human
aucuugaauauuugccaaua

SEQ ID NO: 1124432 - RNA, 23 nt, Human
augugaugggggaaggggaggga

SEQ ID NO: 1124433 - RNA, 22 nt, Human
auucaaacaggccucgccggga

SEQ ID NO: 1124434 - RNA, 21 nt, Human
auuuacaccaaguuacuccuc

SEQ ID NO: 1124435 - RNA, 26 nt, Human
caaaaaauacaaacgcuuguggauac

SEQ ID NO: 1124436 - RNA, 23 nt, Human
caaaaacacaaguguguggcacg

SEQ ID NO: 1124437 - RNA, 19 nt, Human
caaaacaaggacgcgaagc

SEQ ID NO: 1124438 - RNA, 21 nt, Human
caaaagccucaucuugauauc

SEQ ID NO: 1124439 - RNA, 18 nt, Human
caaagaauguggucaaca

SEQ ID NO: 1124440 - RNA, 26 nt, Human
caaagaccagaaaacacaguguuugc

SEQ ID NO: 1124441 - RNA, 19 nt, Human
caaagaggagggugggccu

SEQ ID NO: 1124442 - RNA, 29 nt, Human
caaaguacauaucaggcugaagaugcagg

SEQ ID NO: 1124443 - RNA, 22 nt, Human
caaauaccaacaacgagugacc

SEQ ID NO: 1124444 - RNA, 23 nt, Human
caacaaacacagcuaccggcuca

SEQ ID NO: 1124445 - RNA, 22 nt, Human
caacguuaaacaaacaccucuc

SEQ ID NO: 1124446 - RNA, 23 nt, Human
caagagcugccaccaaauaccaa

SEQ ID NO: 1124447 - RNA, 24 nt, Human
caauggaacucgacauuuuuaaac

SEQ ID NO: 1124448 - RNA, 19 nt, Human
caccaaauaccaacaacga

SEQ ID NO: 1124449 - RNA, 24 nt, Human
cacuggaacgccccccaaccggag

SEQ ID NO: 1124450 - RNA, 21 nt, Human
cagaaaguucaacuaaccccc

SEQ ID NO: 1124451 - RNA, 22 nt, Human
cagaaccuaucgcaaaauguca

SEQ ID NO: 1124452 - RNA, 18 nt, Human
cagaggagguagguuagu

SEQ ID NO: 1124453 - RNA, 22 nt, Human
cagaggccuggguuaguguccu

SEQ ID NO: 1124454 - RNA, 22 nt, Human
cagcagcagccuccuugacacu

SEQ ID NO: 1124455 - RNA, 21 nt, Human
cagcagguggccaugggacca

SEQ ID NO: 1124456 - RNA, 24 nt, Human
cagcagguggccaugggaccagca

SEQ ID NO: 1124457 - RNA, 23 nt, Human
caggcucaauccggaaagcacca

SEQ ID NO: 1124458 - RNA, 24 nt, Human
caggcucaauccggaaagcaccac

SEQ ID NO: 1124459 - RNA, 19 nt, Human
cagggcuaggaggaguugg

SEQ ID NO: 1124460 - RNA, 24 nt, Human
cauucacacugcagagaccccucc

SEQ ID NO: 1124461 - RNA, 23 nt, Human
cauuucuacucugaaacccggga

SEQ ID NO: 1124462 - RNA, 18 nt, Human
ccaaagaccagaaaacac

SEQ ID NO: 1124463 - RNA, 23 nt, Human
ccaagagggagagaaagggcgca

SEQ ID NO: 1124464 - RNA, 23 nt, Human
ccaaggagaacagagagaggaaa

SEQ ID NO: 1124465 - RNA, 18 nt, Human
ccacagagccugcccagg

SEQ ID NO: 1124466 - RNA, 21 nt, Human
ccacuagcccaaccagccuuc

SEQ ID NO: 1124467 - RNA, 24 nt, Human
ccagaacuuagguaacaaagaagg

SEQ ID NO: 1124468 - RNA, 20 nt, Human
ccagggccucccccaaccug

SEQ ID NO: 1124469 - RNA, 19 nt, Human
cccaaagaccagaaaacac

SEQ ID NO: 1124470 - RNA, 19 nt, Human
cccaccggugccgaaaccc

SEQ ID NO: 1124471 - RNA, 21 nt, Human
cccaggcucaauccggaaagc

SEQ ID NO: 1124472 - RNA, 23 nt, Human
ccccgcuaccccccguguuuuca

SEQ ID NO: 1124473 - RNA, 22 nt, Human
ccccuaaggauugacccucccu

SEQ ID NO: 1124474 - RNA, 23 nt, Human
ccccuaaggauugacccucccuc

SEQ ID NO: 1124475 - RNA, 18 nt, Human
cccgcuccccacuucuuc

SEQ ID NO: 1124476 - RNA, 23 nt, Human
cccucccucacuaccucaaagcc

SEQ ID NO: 1124477 - RNA, 20 nt, Human
ccgaaacccgccuucccagg

SEQ ID NO: 1124478 - RNA, 21 nt, Human
ccgagggcugaacuugguguc

SEQ ID NO: 1124479 - RNA, 22 nt, Human
ccggcccacaggucccuaggcc

SEQ ID NO: 1124480 - RNA, 22 nt, Human
ccuacggcauacagaaccuauc

SEQ ID NO: 1124481 - RNA, 22 nt, Human
ccuccuugacacugaaccaccu

SEQ ID NO: 1124482 - RNA, 24 nt, Human
ccugaaauuuuccagcaucaccau

SEQ ID NO: 1124483 - RNA, 23 nt, Human
ccugguuuuggccucuccucaga

SEQ ID NO: 1124484 - RNA, 20 nt, Human
ccugucguucucuuugaagu

SEQ ID NO: 1124485 - RNA, 22 nt, Human
ccuucuucacuuuucugauccc

SEQ ID NO: 1124486 - RNA, 22 nt, Human
cggcccacaggucccuaggccu

SEQ ID NO: 1124487 - RNA, 19 nt, Human
cggcucacuugcaaaagaa

SEQ ID NO: 1124488 - RNA, 25 nt, Human
cggcugggucucacccaguaagcac

SEQ ID NO: 1124489 - RNA, 18 nt, Human
cgggaccuuccuggccau

SEQ ID NO: 1124490 - RNA, 18 nt, Human
cggucaaaacaaggacgc

SEQ ID NO: 1124491 - RNA, 20 nt, Human
cucacagaggccuugaggcc

SEQ ID NO: 1124492 - RNA, 18 nt, Human
cugaagccugguuuuggc

SEQ ID NO: 1124493 - RNA, 21 nt, Human
cugccaccaaauaccaacaac

SEQ ID NO: 1124494 - RNA, 26 nt, Human
cuucccagggggaccaagccuuucgc

SEQ ID NO: 1124495 - RNA, 22 nt, Human
cuugacacugaaccaccugccc

SEQ ID NO: 1124496 - RNA, 18 nt, Human
gaaauaccuuccccugcu

SEQ ID NO: 1124497 - RNA, 18 nt, Human
gaaguggggagcgggcag

SEQ ID NO: 1124498 - RNA, 19 nt, Human
gaccugucguucucuuuuu

SEQ ID NO: 1124499 - RNA, 18 nt, Human
gaccuuccuggccaugag

SEQ ID NO: 1124500 - RNA, 19 nt, Human
gagaaacccuggcgccacc

SEQ ID NO: 1124501 - RNA, 21 nt, Human
gagaaagccuggggcucuggg

SEQ ID NO: 1124502 - RNA, 20 nt, Human
gagaccccucgaaacaaagg

SEQ ID NO: 1124503 - RNA, 20 nt, Human
gagcugccaccaaauaccaa

SEQ ID NO: 1124504 - RNA, 18 nt, Human
gaggugucugugaaggag

SEQ ID NO: 1124505 - RNA, 24 nt, Human
gcaaagaacaacugcagaaccaca

SEQ ID NO: 1124506 - RNA, 22 nt, Human
gcucugggugucugguuuccag

SEQ ID NO: 1124507 - RNA, 23 nt, Human
ggaaguaaccgagggcugaacuu

SEQ ID NO: 1124508 - RNA, 19 nt, Human
ggauggaagacacugguca

SEQ ID NO: 1124509 - RNA, 20 nt, Human
ggcaagaaaauuggacuucu

SEQ ID NO: 1124510 - RNA, 22 nt, Human
ggccaugaggaauugauaaguu

SEQ ID NO: 1124511 - RNA, 20 nt, Human
gggaauggaaacauaugggg

SEQ ID NO: 1124512 - RNA, 21 nt, Human
gggcugugcagcaguguucuu

SEQ ID NO: 1124513 - RNA, 20 nt, Human
ggggagggaggagaaauggg

SEQ ID NO: 1124514 - RNA, 20 nt, Human
ggggagggaggagaaauggg

SEQ ID NO: 1124515 - RNA, 29 nt, Human
ggguguuacuuucuauggucauaggagac

SEQ ID NO: 1124516 - RNA, 24 nt, Human
gugaagccccagcagucccagcgg

SEQ ID NO: 1124517 - RNA, 21 nt, Human
gugaugggggaaggggaggga

SEQ ID NO: 1124518 - RNA, 20 nt, Human
guguuuugugcugaagacag

SEQ ID NO: 1124519 - RNA, 18 nt, Human
uaacccccaaagaccaga

SEQ ID NO: 1124520 - RNA, 25 nt, Human
uacaccaaguuacuccucagccagc

SEQ ID NO: 1124521 - RNA, 21 nt, Human
uaccacuccccgcuacccccc

SEQ ID NO: 1124522 - RNA, 23 nt, Human
uaccaugaaucacuauuaaagcc

SEQ ID NO: 1124523 - RNA, 19 nt, Human
uaccccccguguuuucagu

SEQ ID NO: 1124524 - RNA, 20 nt, Human
uagcaaagaacaacugcaga

SEQ ID NO: 1124525 - RNA, 18 nt, Human
uaggaccaagagcugcca

SEQ ID NO: 1124526 - RNA, 21 nt, Human
uaggaccaagagcugccacca

SEQ ID NO: 1124527 - RNA, 24 nt, Human
uaggaccaagagcugccaccaaau

SEQ ID NO: 1124528 - RNA, 27 nt, Human
uauacaguuuuauaguguuuaggucag

SEQ ID NO: 1124529 - RNA, 20 nt, Human
uauaguguuuaggucaguuu

SEQ ID NO: 1124530 - RNA, 21 nt, Human
ucaaaacuucggcucaguugc

SEQ ID NO: 1124531 - RNA, 24 nt, Human
ucacaaggaggcuuggauggaaga

SEQ ID NO: 1124532 - RNA, 21 nt, Human
ucaccggcccacaggucccua

SEQ ID NO: 1124533 - RNA, 23 nt, Human
ucagagcuuuacccgagggccug

SEQ ID NO: 1124534 - RNA, 24 nt, Human
ucagucaucugaaagugacaugau

SEQ ID NO: 1124535 - RNA, 18 nt, Human
ucauugaaaaagccaggg

SEQ ID NO: 1124536 - RNA, 24 nt, Human
uccagggcuaggaggaguuggaga

SEQ ID NO: 1124537 - RNA, 20 nt, Human
ucccagggggaccaagccuu

SEQ ID NO: 1124538 - RNA, 22 nt, Human
ucccgaaccugaagccugguuu

SEQ ID NO: 1124539 - RNA, 21 nt, Human
uccggacgagacuucccugga

SEQ ID NO: 1124540 - RNA, 23 nt, Human
uccucagccagcccaacaaaagc

SEQ ID NO: 1124541 - RNA, 18 nt, Human
uccugcuacugcaguugc

SEQ ID NO: 1124542 - RNA, 23 nt, Human
uccuucuucacuuuucugauccc

SEQ ID NO: 1124543 - RNA, 27 nt, Human
ucgacggucaaaacaaggacgcgaagc

SEQ ID NO: 1124544 - RNA, 21 nt, Human
ucgcagugagacugcugacag

SEQ ID NO: 1124545 - RNA, 24 nt, Human
ucuauggucauaggaaaccggggc

SEQ ID NO: 1124546 - RNA, 23 nt, Human
ucuauggucauaggaaaccuguc

SEQ ID NO: 1124547 - RNA, 22 nt, Human
ugaaaaagccagggccuccccc

SEQ ID NO: 1124548 - RNA, 23 nt, Human
ugaaccaccugcccaccggugcc

SEQ ID NO: 1124549 - RNA, 18 nt, Human
ugaagccccagcaguccc

SEQ ID NO: 1124550 - RNA, 20 nt, Human
ugacacugaaccaccugccc

SEQ ID NO: 1124551 - RNA, 18 nt, Human
ugagacugcugacaggua

SEQ ID NO: 1124552 - RNA, 21 nt, Human
ugagagugcugugguggggcg

SEQ ID NO: 1124553 - RNA, 19 nt, Human
ugauaaguuccuucuucac

SEQ ID NO: 1124554 - RNA, 18 nt, Human
ugauccuuuccugagagu

SEQ ID NO: 1124555 - RNA, 23 nt, Human
ugccaaagaauguggucaacaaa

SEQ ID NO: 1124556 - RNA, 23 nt, Human
uggaacauccacagcaauaggac

SEQ ID NO: 1124557 - RNA, 19 nt, Human
uggaagaaauacacaaaga

SEQ ID NO: 1124558 - RNA, 20 nt, Human
uggaugagaauuccaugacc

SEQ ID NO: 1124559 - RNA, 25 nt, Human
ugggaccagcagcagccuccuugac

SEQ ID NO: 1124560 - RNA, 18 nt, Human
ugggaggaacugccaaag

SEQ ID NO: 1124561 - RNA, 18 nt, Human
ugggaugcuauguaugca

SEQ ID NO: 1124562 - RNA, 19 nt, Human
ugggccugcccccagcucu

SEQ ID NO: 1124563 - RNA, 18 nt, Human
uggggagcgggcaggggg

SEQ ID NO: 1124564 - RNA, 18 nt, Human
ugggggaaggggagggag

SEQ ID NO: 1124565 - RNA, 21 nt, Human
ugggggaaggggagggaggag

SEQ ID NO: 1124566 - RNA, 18 nt, Human
ugguggggcggagggcag

SEQ ID NO: 1124567 - RNA, 22 nt, Human
ugugaugggggaaggggaggga

SEQ ID NO: 1124568 - RNA, 24 nt, Human
ugugggucaguauuacuggugucc

SEQ ID NO: 1124569 - RNA, 23 nt, Human
ugugguaaaacucagguuuucca

SEQ ID NO: 1124570 - RNA, 25 nt, Human
ugugguggggcggagggcaggggca

SEQ ID NO: 1124571 - RNA, 21 nt, Human
uguugcuuccaguaaaaugug

SEQ ID NO: 1124572 - RNA, 22 nt, Human
uguuuaggucaguuaccuugug

SEQ ID NO: 1124573 - RNA, 19 nt, Human
uguuuugugcugaagacag

SEQ ID NO: 1124574 - RNA, 21 nt, Human
uuacuccucagccagcccaac

SEQ ID NO: 1124575 - RNA, 22 nt, Human
uuccagggcuaggaggaguugg

SEQ ID NO: 1124576 - RNA, 20 nt, Human
uucugcuuugcccgcucccc

SEQ ID NO: 1124577 - RNA, 19 nt, Human
uucugggugccgagaaagc

SEQ ID NO: 1124578 - RNA, 18 nt, Human
uugacccucccucacuac

SEQ ID NO: 1124579 - RNA, 18 nt, Human
uugcaacuacaaaguaca

SEQ ID NO: 1124580 - RNA, 19 nt, Human
aaaaggaaggaaagucaga

SEQ ID NO: 1124581 - RNA, 22 nt, Human
aaacaacccaaacaaguggaac

SEQ ID NO: 1124582 - RNA, 27 nt, Human
aaacaaguggaacccaggagcucccac

SEQ ID NO: 1124583 - RNA, 20 nt, Human
aacaggacaaaucgggccug

SEQ ID NO: 1124584 - RNA, 24 nt, Human
aagcccagcucuaaggguugcugg

SEQ ID NO: 1124585 - RNA, 18 nt, Human
aaggcacgucugccagaa

SEQ ID NO: 1124586 - RNA, 18 nt, Human
acaaagaugauugaacgg

SEQ ID NO: 1124587 - RNA, 18 nt, Human
accacgggucacauuuca

SEQ ID NO: 1124588 - RNA, 21 nt, Human
acccuccuacacuggagggau

SEQ ID NO: 1124589 - RNA, 20 nt, Human
agaaaggagucuccccucac

SEQ ID NO: 1124590 - RNA, 22 nt, Human
agccagccuguacuccacggcc

SEQ ID NO: 1124591 - RNA, 22 nt, Human
aggaaagucagaagggagaaug

SEQ ID NO: 1124592 - RNA, 22 nt, Human
aggaccagggagugagccggga

SEQ ID NO: 1124593 - RNA, 20 nt, Human
aggguugcuggauaaacacc

SEQ ID NO: 1124594 - RNA, 23 nt, Human
aguugaccacgggucacauuuca

SEQ ID NO: 1124595 - RNA, 19 nt, Human
auaaaacaaaggcacgucu

SEQ ID NO: 1124596 - RNA, 19 nt, Human
aucccuaguaggagacaca

SEQ ID NO: 1124597 - RNA, 18 nt, Human
auggucccugcagcuguc

SEQ ID NO: 1124598 - RNA, 24 nt, Human
caaacaaguggaacccaggagcuc

SEQ ID NO: 1124599 - RNA, 23 nt, Human
caaaggcacgucugccagaacaa

SEQ ID NO: 1124600 - RNA, 22 nt, Human
caaauggcuuucagcgccacuc

SEQ ID NO: 1124601 - RNA, 25 nt, Human
caaguggaacccaggagcucccacc

SEQ ID NO: 1124602 - RNA, 22 nt, Human
cacaggcaugugccuaccccuu

SEQ ID NO: 1124603 - RNA, 21 nt, Human
cacaggcucuguacuagggac

SEQ ID NO: 1124604 - RNA, 19 nt, Human
caccaugaguagagugcca

SEQ ID NO: 1124605 - RNA, 22 nt, Human
cacgaaaucagugaauucagaa

SEQ ID NO: 1124606 - RNA, 20 nt, Human
cacuucggucaccaucugcu

SEQ ID NO: 1124607 - RNA, 18 nt, Human
cagaagacacuguugagu

SEQ ID NO: 1124608 - RNA, 18 nt, Human
cagacccggauagccccu

SEQ ID NO: 1124609 - RNA, 23 nt, Human
cagcucucccucccacccuccua

SEQ ID NO: 1124610 - RNA, 24 nt, Human
caggacaaaucgggccugaccugg

SEQ ID NO: 1124611 - RNA, 24 nt, Human
caggcaugugccuacccccugaag

SEQ ID NO: 1124612 - RNA, 22 nt, Human
caguuugccaacuggggagacu

SEQ ID NO: 1124613 - RNA, 19 nt, Human
cauugcaucugagggaugc

SEQ ID NO: 1124614 - RNA, 18 nt, Human
ccacggcgggacccccag

SEQ ID NO: 1124615 - RNA, 22 nt, Human
ccagcucucccucccacccucc

SEQ ID NO: 1124616 - RNA, 19 nt, Human
cccaacccugaagcccagc

SEQ ID NO: 1124617 - RNA, 19 nt, Human
cccaggaagucuguguucc

SEQ ID NO: 1124618 - RNA, 22 nt, Human
ccccaggaagucuguguuccag

SEQ ID NO: 1124619 - RNA, 20 nt, Human
cccugaagcccagcucuaag

SEQ ID NO: 1124620 - RNA, 21 nt, Human
ccguggaccuccuuuuagucc

SEQ ID NO: 1124621 - RNA, 22 nt, Human
ccuaauuccagcccuaccaggc

SEQ ID NO: 1124622 - RNA, 23 nt, Human
ccuacacuggagggaucugagaa

SEQ ID NO: 1124623 - RNA, 19 nt, Human
ccucaccccuggaccagcu

SEQ ID NO: 1124624 - RNA, 21 nt, Human
ccucccacccuccuacacugg

SEQ ID NO: 1124625 - RNA, 22 nt, Human
ccugcaccuuccacccuucuca

SEQ ID NO: 1124626 - RNA, 20 nt, Human
ccuggaccagcucucccucc

SEQ ID NO: 1124627 - RNA, 23 nt, Human
ccuuccaugcacaccaucauuaa

SEQ ID NO: 1124628 - RNA, 25 nt, Human
ccuugggcugcagcacugggaccuu

SEQ ID NO: 1124629 - RNA, 21 nt, Human
cggcagguuggggagggucag

SEQ ID NO: 1124630 - RNA, 19 nt, Human
cggcgggacccccaggaag

SEQ ID NO: 1124631 - RNA, 22 nt, Human
cuaaggguugcuggauaaacac

SEQ ID NO: 1124632 - RNA, 24 nt, Human
cuaauuccagcccuaccaggcugu

SEQ ID NO: 1124633 - RNA, 19 nt, Human
cucacagagggcaagaaac

SEQ ID NO: 1124634 - RNA, 20 nt, Human
cucccucccacccuccuaca

SEQ ID NO: 1124635 - RNA, 25 nt, Human
cucugggguucucauucccuaaggg

SEQ ID NO: 1124636 - RNA, 24 nt, Human
cugcaguaggcaaauggcuuucag

SEQ ID NO: 1124637 - RNA, 22 nt, Human
cuguguuccagcccccagugca

SEQ ID NO: 1124638 - RNA, 23 nt, Human
cuucggucaccaucugcuggcuc

SEQ ID NO: 1124639 - RNA, 18 nt, Human
gaccagcucucccuccca

SEQ ID NO: 1124640 - RNA, 18 nt, Human
gagaagggcuauccugca

SEQ ID NO: 1124641 - RNA, 23 nt, Human
gaggacacgaagucucacagagg

SEQ ID NO: 1124642 - RNA, 23 nt, Human
gaggauaauggaaggucaacagc

SEQ ID NO: 1124643 - RNA, 20 nt, Human
gcaggccuuuggggugggua

SEQ ID NO: 1124644 - RNA, 18 nt, Human
gccuaggcuaguguggag

SEQ ID NO: 1124645 - RNA, 23 nt, Human
gcuaguguggagcugagcuggug

SEQ ID NO: 1124646 - RNA, 18 nt, Human
ggacacggucaaguagau

SEQ ID NO: 1124647 - RNA, 20 nt, Human
ggcaugugccuaccccuugu

SEQ ID NO: 1124648 - RNA, 21 nt, Human
ggcucaaugggaagugugugu

SEQ ID NO: 1124649 - RNA, 21 nt, Human
ggucacauuucauuggucagg

SEQ ID NO: 1124650 - RNA, 22 nt, Human
gguugcuggauaaacacccagc

SEQ ID NO: 1124651 - RNA, 19 nt, Human
guggaacccaggagcuccc

SEQ ID NO: 1124652 - RNA, 19 nt, Human
guugagugcccguucugca

SEQ ID NO: 1124653 - RNA, 20 nt, Human
uaaaacaaaggcacgucugc

SEQ ID NO: 1124654 - RNA, 19 nt, Human
uaaacacccagcagugcuc

SEQ ID NO: 1124655 - RNA, 19 nt, Human
uaccaggcugugcucagug

SEQ ID NO: 1124656 - RNA, 22 nt, Human
uaucugaaaacucccugugaga

SEQ ID NO: 1124657 - RNA, 19 nt, Human
uauuccaaccagcaguuug

SEQ ID NO: 1124658 - RNA, 22 nt, Human
ucaccccuggaccagcucuccc

SEQ ID NO: 1124659 - RNA, 27 nt, Human
ucagcagcgcauccguggaccuccuuu

SEQ ID NO: 1124660 - RNA, 21 nt, Human
ucaguucugauuugcugaugu

SEQ ID NO: 1124661 - RNA, 22 nt, Human
uccacccuucucaggauuccca

SEQ ID NO: 1124662 - RNA, 26 nt, Human
ucccaccacggcgggacccccaggaa

SEQ ID NO: 1124663 - RNA, 19 nt, Human
ucccacccuccuacacugg

SEQ ID NO: 1124664 - RNA, 18 nt, Human
ucccugaacccagggccu

SEQ ID NO: 1124665 - RNA, 23 nt, Human
uccuaaauccgaguugcuggcuc

SEQ ID NO: 1124666 - RNA, 20 nt, Human
uccugcaccuuccacccuuc

SEQ ID NO: 1124667 - RNA, 21 nt, Human
ucucaggauucccagagccuu

SEQ ID NO: 1124668 - RNA, 21 nt, Human
ucuguacuagggacacaaaga

SEQ ID NO: 1124669 - RNA, 20 nt, Human
ucuguguuccagcccccagu

SEQ ID NO: 1124670 - RNA, 20 nt, Human
ugagaaaggagucuccccuc

SEQ ID NO: 1124671 - RNA, 24 nt, Human
ugagccgggaugaacaggcagcga

SEQ ID NO: 1124672 - RNA, 20 nt, Human
ugaggcaggccuuuggggug

SEQ ID NO: 1124673 - RNA, 21 nt, Human
ugaguagagugccagucccug

SEQ ID NO: 1124674 - RNA, 19 nt, Human
ugcacaccaucauuaaacc

SEQ ID NO: 1124675 - RNA, 20 nt, Human
ugcacaccaucauuaaaccu

SEQ ID NO: 1124676 - RNA, 21 nt, Human
uggaacaggacaaaucgggcc

SEQ ID NO: 1124677 - RNA, 20 nt, Human
uggaacccaggagcucccac

SEQ ID NO: 1124678 - RNA, 22 nt, Human
uggagggaucugagaaaagaaa

SEQ ID NO: 1124679 - RNA, 18 nt, Human
uggcagugugagcaggaa

SEQ ID NO: 1124680 - RNA, 24 nt, Human
uggggagacucagccuucaguaua

SEQ ID NO: 1124681 - RNA, 18 nt, Human
uggguaucaucaccccaa

SEQ ID NO: 1124682 - RNA, 20 nt, Human
uguuuuccucaucugaagug

SEQ ID NO: 1124683 - RNA, 22 nt, Human
uucacacgugaggacacgaagu

SEQ ID NO: 1124684 - RNA, 19 nt, Human
uucccauugcaucugaggg

SEQ ID NO: 1124685 - RNA, 18 nt, Human
aaaacagaggcccucagc

SEQ ID NO: 1124686 - RNA, 23 nt, Human
aaacaucgggauuuugucgaacu

SEQ ID NO: 1124687 - RNA, 23 nt, Human
aaacugccaaacugcuuuccaac

SEQ ID NO: 1124688 - RNA, 25 nt, Human
aaaggguuuuccuuuucuuaggaga

SEQ ID NO: 1124689 - RNA, 20 nt, Human
aaccuagaguuuuuggggcu

SEQ ID NO: 1124690 - RNA, 23 nt, Human
aagagaacagugaccacaaaaau

SEQ ID NO: 1124691 - RNA, 23 nt, Human
aagaguaagaucccuggaccacc

SEQ ID NO: 1124692 - RNA, 19 nt, Human
aagaucaucagcaauguca

SEQ ID NO: 1124693 - RNA, 24 nt, Human
aauagaagaaaaaugugaagagag

SEQ ID NO: 1124694 - RNA, 18 nt, Human
aauugacuuacugacacu

SEQ ID NO: 1124695 - RNA, 18 nt, Human
acacugaugcauaaaugg

SEQ ID NO: 1124696 - RNA, 20 nt, Human
acacugaugcauaaaugguc

SEQ ID NO: 1124697 - RNA, 20 nt, Human
acaguccacacaucgcugcc

SEQ ID NO: 1124698 - RNA, 26 nt, Human
agaaaucccucaugcucaucaauacc

SEQ ID NO: 1124699 - RNA, 18 nt, Human
agaagaaaaaugugaaga

SEQ ID NO: 1124700 - RNA, 19 nt, Human
agaagaaaaaugugaagag

SEQ ID NO: 1124701 - RNA, 18 nt, Human
agaagacuguggauagcc

SEQ ID NO: 1124702 - RNA, 23 nt, Human
agaagagaacagugaccacaaaa

SEQ ID NO: 1124703 - RNA, 21 nt, Human
agacaaccccuaauugacuua

SEQ ID NO: 1124704 - RNA, 30 nt, Human
agacaaccccuaauugacuuacugacacuu

SEQ ID NO: 1124705 - RNA, 22 nt, Human
agacauaucgacauuuagaggu

SEQ ID NO: 1124706 - RNA, 19 nt, Human
agagacauauacuagguag

SEQ ID NO: 1124707 - RNA, 23 nt, Human
agcaaugucaccugcaccacuaa

SEQ ID NO: 1124708 - RNA, 23 nt, Human
agcuagaucccaccaaaaucaaa

SEQ ID NO: 1124709 - RNA, 26 nt, Human
aggaaaaguuucuagacugaauccug

SEQ ID NO: 1124710 - RNA, 19 nt, Human
agggagccccaccuuguug

SEQ ID NO: 1124711 - RNA, 24 nt, Human
agggucaauugauuuucacaaaag

SEQ ID NO: 1124712 - RNA, 24 nt, Human
agguauuugaaguguacuugaaga

SEQ ID NO: 1124713 - RNA, 23 nt, Human
aguugugccaugaagaucucaga

SEQ ID NO: 1124714 - RNA, 21 nt, Human
aucugggaaaaucaacugccc

SEQ ID NO: 1124715 - RNA, 21 nt, Human
auucccacuccccagcuccag

SEQ ID NO: 1124716 - RNA, 21 nt, Human
caaaagggugaucgaccucau

SEQ ID NO: 1124717 - RNA, 19 nt, Human
caacaaccucaagaucauc

SEQ ID NO: 1124718 - RNA, 27 nt, Human
caacaaccucaagaucaucagcaaugu

SEQ ID NO: 1124719 - RNA, 21 nt, Human
caacaaggaaugaaagugcua

SEQ ID NO: 1124720 - RNA, 20 nt, Human
caacugcccagaaccuagag

SEQ ID NO: 1124721 - RNA, 19 nt, Human
caacuggaaaguccaacac

SEQ ID NO: 1124722 - RNA, 20 nt, Human
caauggaggaacacacaggc

SEQ ID NO: 1124723 - RNA, 23 nt, Human
cacaaagauuacuaaucagcaaa

SEQ ID NO: 1124724 - RNA, 19 nt, Human
cacugaugcauaaaugguc

SEQ ID NO: 1124725 - RNA, 19 nt, Human
cauagaguccaccgacauc

SEQ ID NO: 1124726 - RNA, 18 nt, Human
caucacaaucuuguuuug

SEQ ID NO: 1124727 - RNA, 19 nt, Human
caugaugcucggggaaggu

SEQ ID NO: 1124728 - RNA, 20 nt, Human
ccaaaaaugaugacaucaag

SEQ ID NO: 1124729 - RNA, 23 nt, Human
ccaaaagcuagaucccaccaaaa

SEQ ID NO: 1124730 - RNA, 20 nt, Human
ccaaguucauccaugacaac

SEQ ID NO: 1124731 - RNA, 18 nt, Human
ccaccauuuuccaaaagc

SEQ ID NO: 1124732 - RNA, 21 nt, Human
ccaccccuuauucccacuccc

SEQ ID NO: 1124733 - RNA, 18 nt, Human
ccacuccccagcuccaga

SEQ ID NO: 1124734 - RNA, 20 nt, Human
ccacuccccagcuccagaca

SEQ ID NO: 1124735 - RNA, 21 nt, Human
ccacucuuccaccuuugaucc

SEQ ID NO: 1124736 - RNA, 22 nt, Human
cccauacuaaugagagccuggg

SEQ ID NO: 1124737 - RNA, 24 nt, Human
cccauacuaaugagagccugggac

SEQ ID NO: 1124738 - RNA, 21 nt, Human
cccucagcuucuggggagucc

SEQ ID NO: 1124739 - RNA, 23 nt, Human
ccugccacacucagugccccacc

SEQ ID NO: 1124740 - RNA, 24 nt, Human
ccugggacuuuugcccaggccaaa

SEQ ID NO: 1124741 - RNA, 22 nt, Human
cucauacaucuuuuuauuacca

SEQ ID NO: 1124742 - RNA, 20 nt, Human
cucauugcccacagggccuu

SEQ ID NO: 1124743 - RNA, 24 nt, Human
cuccagacaaccccuaauugacuu

SEQ ID NO: 1124744 - RNA, 19 nt, Human
cucgugcaaaggguuuucc

SEQ ID NO: 1124745 - RNA, 21 nt, Human
cugaaaacgggaagcuuguca

SEQ ID NO: 1124746 - RNA, 20 nt, Human
cugccccucugcugacgccc

SEQ ID NO: 1124747 - RNA, 21 nt, Human
cugccccucugcugacgcccc

SEQ ID NO: 1124748 - RNA, 19 nt, Human
cuuuggugucauggaagga

SEQ ID NO: 1124749 - RNA, 19 nt, Human
gaagagaacagugaccaca

SEQ ID NO: 1124750 - RNA, 20 nt, Human
gaauacaaauuuaaccacca

SEQ ID NO: 1124751 - RNA, 20 nt, Human
gaaucuccccuccucacagu

SEQ ID NO: 1124752 - RNA, 21 nt, Human
gagaaucuccccuccucacag

SEQ ID NO: 1124753 - RNA, 24 nt, Human
gaguccaccgacaucuucaccacc

SEQ ID NO: 1124754 - RNA, 23 nt, Human
ggaaaacucacaaagauuacuaa

SEQ ID NO: 1124755 - RNA, 25 nt, Human
ggagucccugccacacucagugccc

SEQ ID NO: 1124756 - RNA, 23 nt, Human
ggagucgguggccggcaggagga

SEQ ID NO: 1124757 - RNA, 19 nt, Human
guggguaagaaguggugug

SEQ ID NO: 1124758 - RNA, 20 nt, Human
guuucuagacugaauccugg

SEQ ID NO: 1124759 - RNA, 20 nt, Human
uaaagaaauggaaguauggg

SEQ ID NO: 1124760 - RNA, 21 nt, Human
uaagaauauucaaggauaaaa

SEQ ID NO: 1124761 - RNA, 22 nt, Human
uaagaucccuggaccaccagcc

SEQ ID NO: 1124762 - RNA, 19 nt, Human
uacuagguagagucccuca

SEQ ID NO: 1124763 - RNA, 18 nt, Human
uacugaguaggagucggu

SEQ ID NO: 1124764 - RNA, 20 nt, Human
uagaagagaacagugaccac

SEQ ID NO: 1124765 - RNA, 21 nt, Human
uagaagagaacagugaccaca

SEQ ID NO: 1124766 - RNA, 26 nt, Human
uagagucauacaacaugugguuuuuu

SEQ ID NO: 1124767 - RNA, 20 nt, Human
uagaguccaccgacaucuuc

SEQ ID NO: 1124768 - RNA, 23 nt, Human
uagcaaaagggugaucgaccuca

SEQ ID NO: 1124769 - RNA, 18 nt, Human
uagcaugaggacacagcu

SEQ ID NO: 1124770 - RNA, 24 nt, Human
uaggaaaacucacaaagauuacua

SEQ ID NO: 1124771 - RNA, 19 nt, Human
uagguuuuuuuccuuugga

SEQ ID NO: 1124772 - RNA, 19 nt, Human
uagguuuuuuuccuuugga

SEQ ID NO: 1124773 - RNA, 22 nt, Human
uaucauagcauucuagugggua

SEQ ID NO: 1124774 - RNA, 19 nt, Human
uaugacaaugaauuuggcu

SEQ ID NO: 1124775 - RNA, 19 nt, Human
uauggauaaagcugcuacu

SEQ ID NO: 1124776 - RNA, 25 nt, Human
uauuuuauauuuuggauacaaaucu

SEQ ID NO: 1124777 - RNA, 23 nt, Human
ucaacugcccagaaccuagaguu

SEQ ID NO: 1124778 - RNA, 26 nt, Human
ucaauggaggaacacacaggcuuuug

SEQ ID NO: 1124779 - RNA, 25 nt, Human
ucacugccaacauguuauuugugga

SEQ ID NO: 1124780 - RNA, 18 nt, Human
ucagaguagaaauguguu

SEQ ID NO: 1124781 - RNA, 20 nt, Human
ucagguauuugaaguguacu

SEQ ID NO: 1124782 - RNA, 26 nt, Human
ucauaaaaauagagucauacaacaug

SEQ ID NO: 1124783 - RNA, 22 nt, Human
ucaugcugggaaaaagaaaauc

SEQ ID NO: 1124784 - RNA, 20 nt, Human
uccaaaagcuagaucccacc

SEQ ID NO: 1124785 - RNA, 24 nt, Human
uccaaaagggucauuaucucugcc

SEQ ID NO: 1124786 - RNA, 20 nt, Human
uccacacaucgcugccaccc

SEQ ID NO: 1124787 - RNA, 21 nt, Human
uccacacaucgcugccaccca

SEQ ID NO: 1124788 - RNA, 24 nt, Human
uccacacaucgcugccacccagaa

SEQ ID NO: 1124789 - RNA, 19 nt, Human
ucccacuccccagcuccag

SEQ ID NO: 1124790 - RNA, 18 nt, Human
ucccacuccccagcuccg

SEQ ID NO: 1124791 - RNA, 21 nt, Human
uccccauccuccugucuuaca

SEQ ID NO: 1124792 - RNA, 18 nt, Human
ucccugaguugaacagga

SEQ ID NO: 1124793 - RNA, 18 nt, Human
ucccuggaccaccagccc

SEQ ID NO: 1124794 - RNA, 24 nt, Human
uccuuuauugauccuuagcaccuu

SEQ ID NO: 1124795 - RNA, 23 nt, Human
ucgcugccacccagaagacugug

SEQ ID NO: 1124796 - RNA, 25 nt, Human
ucgcugccacccagaagacugugga

SEQ ID NO: 1124797 - RNA, 21 nt, Human
ucugaagagggagaggccuag

SEQ ID NO: 1124798 - RNA, 23 nt, Human
ucugcugacgcccccauaucuga

SEQ ID NO: 1124799 - RNA, 19 nt, Human
ucuuucccagaaggccuuc

SEQ ID NO: 1124800 - RNA, 21 nt, Human
ugaaaacgggaagcuugucau

SEQ ID NO: 1124801 - RNA, 23 nt, Human
ugaaaacgggaagcuugucauga

SEQ ID NO: 1124802 - RNA, 21 nt, Human
ugaauuguccacaugaugcuc

SEQ ID NO: 1124803 - RNA, 22 nt, Human
ugacugaugauacugaccaucu

SEQ ID NO: 1124804 - RNA, 21 nt, Human
ugagacgcgcaugaaccauga

SEQ ID NO: 1124805 - RNA, 19 nt, Human
ugaguugaacaggaggcuu

SEQ ID NO: 1124806 - RNA, 19 nt, Human
ugccaugaagaucucagag

SEQ ID NO: 1124807 - RNA, 24 nt, Human
ugccaugaagaucucagaguagaa

SEQ ID NO: 1124808 - RNA, 19 nt, Human
ugccccaccacaaugagaa

SEQ ID NO: 1124809 - RNA, 24 nt, Human
ugcguucagccaaaaaaaaaaaaa

SEQ ID NO: 1124810 - RNA, 20 nt, Human
uggaaaguccaacacacguu

SEQ ID NO: 1124811 - RNA, 29 nt, Human
uggagugaagaguuuguuuuuguuguggu

SEQ ID NO: 1124812 - RNA, 19 nt, Human
uggauagccccuccaggaa

SEQ ID NO: 1124813 - RNA, 24 nt, Human
uggauaugaauagguucucaggua

SEQ ID NO: 1124814 - RNA, 24 nt, Human
uggcaacaucauaaguaauuuggu

SEQ ID NO: 1124815 - RNA, 22 nt, Human
uguauggaucacucccauuugu

SEQ ID NO: 1124816 - RNA, 24 nt, Human
uguggauagccccuccaggaaacu

SEQ ID NO: 1124817 - RNA, 22 nt, Human
ugugguucaccuguguuguagg

SEQ ID NO: 1124818 - RNA, 18 nt, Human
uuaaauuguauggaucac

SEQ ID NO: 1124819 - RNA, 18 nt, Human
uuagaauaauuauacccc

SEQ ID NO: 1124820 - RNA, 19 nt, Human
uucaaaaagaauguggucc

SEQ ID NO: 1124821 - RNA, 21 nt, Human
uucaagaaguugugccaugaa

SEQ ID NO: 1124822 - RNA, 27 nt, Human
uucagccaaaaaaaaaaaaaugcugua

SEQ ID NO: 1124823 - RNA, 21 nt, Human
uuccaaaagcuagaucccacc

SEQ ID NO: 1124824 - RNA, 25 nt, Human
uucccauacuaaugagagccuggga

SEQ ID NO: 1124825 - RNA, 23 nt, Human
uuccuuuucuuaggagagaaagc

SEQ ID NO: 1124826 - RNA, 22 nt, Human
uucuaccaggaaacaucggggg

SEQ ID NO: 1124827 - RNA, 24 nt, Human
uucucagucucuggauuauauuuc

SEQ ID NO: 1124828 - RNA, 19 nt, Human
uuguagcacguaucaauau

SEQ ID NO: 1124829 - RNA, 20 nt, Human
uuuaaacaaguaauacugag

SEQ ID NO: 1124830 - RNA, 20 nt, Human
uuugcccaacuuaaaauugg

SEQ ID NO: 1124831 - RNA, 20 nt, Human
uuugcccaggccaaagaugu

SEQ ID NO: 1124832 - RNA, 20 nt, Human
uuugugguucaccuguguug

SEQ ID NO: 1124833 - RNA, 23 nt, Human
uuuuuggggcucgugcaaagggu

SEQ ID NO: 1124834 - RNA, 20 nt, Human
agagaagggauuccucggau

SEQ ID NO: 1124835 - RNA, 21 nt, Human
agagaagggauuccucggauu

SEQ ID NO: 1124836 - RNA, 23 nt, Human
agggauuccucggauucccaagg

SEQ ID NO: 1124837 - RNA, 23 nt, Human
caaggcacccagcgccccugccu

SEQ ID NO: 1124838 - RNA, 22 nt, Human
cccaaggcacccagcgccccug

SEQ ID NO: 1124839 - RNA, 20 nt, Human
uuccucggauucccaaggca

SEQ ID NO: 1124840 - RNA, 23 nt, Human
uuuaauggggauguguucaaggc

SEQ ID NO: 1124841 - RNA, 22 nt, Human
aaaauacagggacaaauauuac

SEQ ID NO: 1124842 - RNA, 18 nt, Human
aaacaggcagggcauguu

SEQ ID NO: 1124843 - RNA, 22 nt, Human
aaacaucuuauuuaccaaaaua

SEQ ID NO: 1124844 - RNA, 18 nt, Human
aaagcccuccucccgccc

SEQ ID NO: 1124845 - RNA, 20 nt, Human
aacaaugaauaccccucccc

SEQ ID NO: 1124846 - RNA, 24 nt, Human
aacagagggguaaacaugaucuga

SEQ ID NO: 1124847 - RNA, 18 nt, Human
aacugcagaagcuccucu

SEQ ID NO: 1124848 - RNA, 27 nt, Human
aacugcagaagcuccucugucaagaug

SEQ ID NO: 1124849 - RNA, 22 nt, Human
aagaggagaaagggcaggagag

SEQ ID NO: 1124850 - RNA, 24 nt, Human
aagcaaggaauaaaauaagccaaa

SEQ ID NO: 1124851 - RNA, 21 nt, Human
aagcccuccucccgcccacgg

SEQ ID NO: 1124852 - RNA, 22 nt, Human
aauacagaagcagaaaaccgaa

SEQ ID NO: 1124853 - RNA, 23 nt, Human
aauccauuagccaggcccacaug

SEQ ID NO: 1124854 - RNA, 19 nt, Human
acaaaauacagaagcagaa

SEQ ID NO: 1124855 - RNA, 21 nt, Human
acaacuucacauaauacagcu

SEQ ID NO: 1124856 - RNA, 19 nt, Human
acagcuaagaaucugaaca

SEQ ID NO: 1124857 - RNA, 25 nt, Human
acaggcagggcauguuuuuaauaua

SEQ ID NO: 1124858 - RNA, 25 nt, Human
acccauaaacaucuuaucugccuuu

SEQ ID NO: 1124859 - RNA, 21 nt, Human
accccuccccugagugaaucc

SEQ ID NO: 1124860 - RNA, 18 nt, Human
accuggccuagucaauga

SEQ ID NO: 1124861 - RNA, 21 nt, Human
agaaugauuuuuaaaccuuug

SEQ ID NO: 1124862 - RNA, 21 nt, Human
agacagguaguaggagccaga

SEQ ID NO: 1124863 - RNA, 20 nt, Human
agaccgagaccuagacagaa

SEQ ID NO: 1124864 - RNA, 21 nt, Human
agccaugcagacacuauggga

SEQ ID NO: 1124865 - RNA, 18 nt, Human
agcuaagaaucugaacaa

SEQ ID NO: 1124866 - RNA, 27 nt, Human
aggaccaacgaggggaaaccgguaccc

SEQ ID NO: 1124867 - RNA, 24 nt, Human
aggagaguaguaggaaacacagug

SEQ ID NO: 1124868 - RNA, 19 nt, Human
aggcaaauggauucacaag

SEQ ID NO: 1124869 - RNA, 21 nt, Human
aggcaaauggauucacaagaa

SEQ ID NO: 1124870 - RNA, 18 nt, Human
agggauguuaugagucug

SEQ ID NO: 1124871 - RNA, 21 nt, Human
agggcccugagacaggacagg

SEQ ID NO: 1124872 - RNA, 21 nt, Human
auaccccuccccugagugaau

SEQ ID NO: 1124873 - RNA, 22 nt, Human
aucuugacagauacugucagga

SEQ ID NO: 1124874 - RNA, 21 nt, Human
auggcugcauaguauuccaug

SEQ ID NO: 1124875 - RNA, 18 nt, Human
auguggggucggaggcuu

SEQ ID NO: 1124876 - RNA, 21 nt, Human
caaaacaagcacuaaagcccu

SEQ ID NO: 1124877 - RNA, 24 nt, Human
caaaauacagaagcagaaaaccga

SEQ ID NO: 1124878 - RNA, 21 nt, Human
caaaugauuucagcccccucc

SEQ ID NO: 1124879 - RNA, 24 nt, Human
caagaugacccuugagagucccaa

SEQ ID NO: 1124880 - RNA, 23 nt, Human
caaggcaaauggauucacaagaa

SEQ ID NO: 1124881 - RNA, 24 nt, Human
caauacuaaggauuaaaagugaaa

SEQ ID NO: 1124882 - RNA, 19 nt, Human
caaugaauaccccuccccu

SEQ ID NO: 1124883 - RNA, 23 nt, Human
caauugccaccucuauaggugga

SEQ ID NO: 1124884 - RNA, 24 nt, Human
caccaacaaugaauaccccucccc

SEQ ID NO: 1124885 - RNA, 21 nt, Human
cacuaugggaagaauguucca

SEQ ID NO: 1124886 - RNA, 23 nt, Human
cacuuccucugugaagcugagaa

SEQ ID NO: 1124887 - RNA, 21 nt, Human
caggacagggucaagcaugcc

SEQ ID NO: 1124888 - RNA, 21 nt, Human
caggcagagggaacagcaggg

SEQ ID NO: 1124889 - RNA, 22 nt, Human
cagggcccugagacaggacagg

SEQ ID NO: 1124890 - RNA, 19 nt, Human
cauaauacagcuaagaauc

SEQ ID NO: 1124891 - RNA, 22 nt, Human
cauaauacagcuaagaaucuga

SEQ ID NO: 1124892 - RNA, 22 nt, Human
caucaacccauaaucuacauua

SEQ ID NO: 1124893 - RNA, 26 nt, Human
cauggcuucaguucggaugugggguc

SEQ ID NO: 1124894 - RNA, 19 nt, Human
cauucuggcagcaguuucc

SEQ ID NO: 1124895 - RNA, 18 nt, Human
ccauauuuucuuuaucca

SEQ ID NO: 1124896 - RNA, 24 nt, Human
cccacagagacugacaauguacaa

SEQ ID NO: 1124897 - RNA, 19 nt, Human
ccccuguaacuccuugacu

SEQ ID NO: 1124898 - RNA, 23 nt, Human
ccccuguaacuccuugacuggag

SEQ ID NO: 1124899 - RNA, 19 nt, Human
cccugagugaauccauuua

SEQ ID NO: 1124900 - RNA, 18 nt, Human
ccuaguguccaacccagu

SEQ ID NO: 1124901 - RNA, 20 nt, Human
ccucccgcccacgguucugc

SEQ ID NO: 1124902 - RNA, 25 nt, Human
cucacagaagcagcaaaacaagcac

SEQ ID NO: 1124903 - RNA, 19 nt, Human
cucauaaacuccagacaau

SEQ ID NO: 1124904 - RNA, 19 nt, Human
cuccauaccuggccuaguc

SEQ ID NO: 1124905 - RNA, 21 nt, Human
cugaaaagguaugcuuaugaa

SEQ ID NO: 1124906 - RNA, 20 nt, Human
cugcccccaucaacccauaa

SEQ ID NO: 1124907 - RNA, 21 nt, Human
cuggagcagaguaaacaggcu

SEQ ID NO: 1124908 - RNA, 21 nt, Human
gaaaugcugcuggcgcagccc

SEQ ID NO: 1124909 - RNA, 23 nt, Human
gaacugaauauauuacaaagcca

SEQ ID NO: 1124910 - RNA, 18 nt, Human
gacacaaaaaucuugaau

SEQ ID NO: 1124911 - RNA, 26 nt, Human
gacugguuucuaauggacugcuccau

SEQ ID NO: 1124912 - RNA, 20 nt, Human
gagaugguguucaagguaug

SEQ ID NO: 1124913 - RNA, 20 nt, Human
gaggacuauuuaaagcacaa

SEQ ID NO: 1124914 - RNA, 22 nt, Human
gcaaaacaagcacuaaagcccu

SEQ ID NO: 1124915 - RNA, 23 nt, Human
gcacuaaagcccuccucccgccc

SEQ ID NO: 1124916 - RNA, 23 nt, Human
gcacuaaagcccuccucccgccc

SEQ ID NO: 1124917 - RNA, 22 nt, Human
ggaaacaggcagggcauguuuu

SEQ ID NO: 1124918 - RNA, 21 nt, Human
ggacaugaacucauucuuuuu

SEQ ID NO: 1124919 - RNA, 21 nt, Human
gggcuaaauuaaaacccaaca

SEQ ID NO: 1124920 - RNA, 22 nt, Human
gguaacaauucccaacugcaga

SEQ ID NO: 1124921 - RNA, 22 nt, Human
gucuuugggagaccaaaaagca

SEQ ID NO: 1124922 - RNA, 21 nt, Human
guggaaguauaggccuaacaa

SEQ ID NO: 1124923 - RNA, 20 nt, Human
uaacccacagagacugacaa

SEQ ID NO: 1124924 - RNA, 22 nt, Human
uaagcaaugaagcugacaaaca

SEQ ID NO: 1124925 - RNA, 22 nt, Human
uacaaagccaaaagaucugcag

SEQ ID NO: 1124926 - RNA, 18 nt, Human
uacacaugugccauggug

SEQ ID NO: 1124927 - RNA, 24 nt, Human
uacagcuaagaaucugaacaacca

SEQ ID NO: 1124928 - RNA, 21 nt, Human
uaccaaaauagaaaaaggagg

SEQ ID NO: 1124929 - RNA, 23 nt, Human
uacgagaagccaaugggcuaccc

SEQ ID NO: 1124930 - RNA, 20 nt, Human
uacuaaggauuaaaagugaa

SEQ ID NO: 1124931 - RNA, 20 nt, Human
uagaaacacccccacagcau

SEQ ID NO: 1124932 - RNA, 25 nt, Human
uagaacucccaagcacaaggcaaau

SEQ ID NO: 1124933 - RNA, 23 nt, Human
uagaaugauuuuuaaaccuuugg

SEQ ID NO: 1124934 - RNA, 25 nt, Human
uagccaggcccacauggcuucaguu

SEQ ID NO: 1124935 - RNA, 19 nt, Human
uaggaaacacagugagaca

SEQ ID NO: 1124936 - RNA, 18 nt, Human
uagguauuucucuuaaug

SEQ ID NO: 1124937 - RNA, 19 nt, Human
uaguaggagccagaucaug

SEQ ID NO: 1124938 - RNA, 24 nt, Human
uaguuugcugagaauaaugguuuc

SEQ ID NO: 1124939 - RNA, 19 nt, Human
uaucuucacagaaaugacc

SEQ ID NO: 1124940 - RNA, 24 nt, Human
uauugugaauagugcugcaauaaa

SEQ ID NO: 1124941 - RNA, 18 nt, Human
uauuucaccaacaaugaa

SEQ ID NO: 1124942 - RNA, 20 nt, Human
uauuucaccaacaaugaaua

SEQ ID NO: 1124943 - RNA, 21 nt, Human
uccagacaauugggaggagac

SEQ ID NO: 1124944 - RNA, 25 nt, Human
ucccccuguaacuccuugacuggaa

SEQ ID NO: 1124945 - RNA, 21 nt, Human
ucccugagaggccggaugcag

SEQ ID NO: 1124946 - RNA, 20 nt, Human
ucccugcaaaggacaugaac

SEQ ID NO: 1124947 - RNA, 22 nt, Human
ucccuugccucucaccccccga

SEQ ID NO: 1124948 - RNA, 24 nt, Human
ucccuugccucucaccccccgaca

SEQ ID NO: 1124949 - RNA, 20 nt, Human
uccucugugaagcugagaac

SEQ ID NO: 1124950 - RNA, 18 nt, Human
uccuguguuaguuugcug

SEQ ID NO: 1124951 - RNA, 23 nt, Human
uccuugacuggagcagaguaaac

SEQ ID NO: 1124952 - RNA, 22 nt, Human
ucggaggcuuucuauuccggug

SEQ ID NO: 1124953 - RNA, 21 nt, Human
ucuaaaauacagggacaaaua

SEQ ID NO: 1124954 - RNA, 20 nt, Human
ucucaccccccgacaggccc

SEQ ID NO: 1124955 - RNA, 21 nt, Human
ucucuuaaugcuaucacuucc

SEQ ID NO: 1124956 - RNA, 25 nt, Human
ucugcuacaacuugcaaauauagug

SEQ ID NO: 1124957 - RNA, 21 nt, Human
ucuuugggagaccaaaaagca

SEQ ID NO: 1124958 - RNA, 24 nt, Human
ucuuuguuauugugaauagugcug

SEQ ID NO: 1124959 - RNA, 21 nt, Human
ugaaaugcugcuggcgcagcc

SEQ ID NO: 1124960 - RNA, 18 nt, Human
ugaauaaauguggaacug

SEQ ID NO: 1124961 - RNA, 19 nt, Human
ugaaugccaggaucuugag

SEQ ID NO: 1124962 - RNA, 20 nt, Human
ugaaugugcuucacuuccuc

SEQ ID NO: 1124963 - RNA, 20 nt, Human
ugacaaacaacuucacauaa

SEQ ID NO: 1124964 - RNA, 23 nt, Human
ugacagaagcagacccgguccuu

SEQ ID NO: 1124965 - RNA, 20 nt, Human
ugaccauauuguugcccauc

SEQ ID NO: 1124966 - RNA, 24 nt, Human
ugagaauaaugguuuccagcuuca

SEQ ID NO: 1124967 - RNA, 21 nt, Human
ugagacagguaguaggagcca

SEQ ID NO: 1124968 - RNA, 23 nt, Human
ugaggacacaaaaaucuugaaug

SEQ ID NO: 1124969 - RNA, 19 nt, Human
ugagugagaacaugcggug

SEQ ID NO: 1124970 - RNA, 24 nt, Human
ugagugagaacaugcgguguuugg

SEQ ID NO: 1124971 - RNA, 26 nt, Human
ugcccccaucaacccauaaucuacau

SEQ ID NO: 1124972 - RNA, 21 nt, Human
ugccuugauucccccuguaac

SEQ ID NO: 1124973 - RNA, 22 nt, Human
ugcugcaauaaacauauguaug

SEQ ID NO: 1124974 - RNA, 18 nt, Human
uggaaagucacuggagaa

SEQ ID NO: 1124975 - RNA, 21 nt, Human
uggcaguagguguaaaaaaca

SEQ ID NO: 1124976 - RNA, 19 nt, Human
uggcuucaguucggaugug

SEQ ID NO: 1124977 - RNA, 18 nt, Human
ugggaaaggccuuugaua

SEQ ID NO: 1124978 - RNA, 20 nt, Human
ugggaagaauguuccaggca

SEQ ID NO: 1124979 - RNA, 20 nt, Human
ugggcucacagaagcagcaa

SEQ ID NO: 1124980 - RNA, 21 nt, Human
uguaaaaacuggaaagucacu

SEQ ID NO: 1124981 - RNA, 19 nt, Human
uguaugcaugugucuuuau

SEQ ID NO: 1124982 - RNA, 21 nt, Human
uguaugcaugugucuuuauag

SEQ ID NO: 1124983 - RNA, 19 nt, Human
ugugauguuccccccacug

SEQ ID NO: 1124984 - RNA, 22 nt, Human
uguggaacugaauauauuacaa

SEQ ID NO: 1124985 - RNA, 20 nt, Human
uguuaugagucugagaucac

SEQ ID NO: 1124986 - RNA, 24 nt, Human
uguuaugagucugagaucacagag

SEQ ID NO: 1124987 - RNA, 24 nt, Human
uguuugguuuucuguuccuguguu

SEQ ID NO: 1124988 - RNA, 20 nt, Human
uuaaagcacaaggccagaaa

SEQ ID NO: 1124989 - RNA, 18 nt, Human
uuacauagguacacaugu

SEQ ID NO: 1124990 - RNA, 24 nt, Human
uuaugagugagaacaugcgguguu

SEQ ID NO: 1124991 - RNA, 23 nt, Human
uucaucuacuauccacauuaccg

SEQ ID NO: 1124992 - RNA, 23 nt, Human
uugcugagaauaaugguuuccag

SEQ ID NO: 1124993 - RNA, 22 nt, Human
uuucaccaacaaugaauacccc

SEQ ID NO: 1124994 - RNA, 19 nt, Human
uuuccagcuucauccaugu

SEQ ID NO: 1124995 - RNA, 22 nt, Human
uuuggggccagcaucuugacag

SEQ ID NO: 1124996 - RNA, 22 nt, Human
uuuuauggcugcauaguauucc

SEQ ID NO: 1124997 - RNA, 23 nt, Human
acggggagugauugggcgagcug

SEQ ID NO: 1124998 - RNA, 23 nt, Human
agcaggugcgcggagccucccac

SEQ ID NO: 1124999 - RNA, 20 nt, Human
agccgcgggggccccagacg

SEQ ID NO: 1125000 - RNA, 19 nt, Human
auccucaauagucuguucc

SEQ ID NO: 1125001 - RNA, 20 nt, Human
auguagcagggggugaugag

SEQ ID NO: 1125002 - RNA, 21 nt, Human
auguagcagggggugaugagc

SEQ ID NO: 1125003 - RNA, 19 nt, Human
cacccggggcgugcgggcg

SEQ ID NO: 1125004 - RNA, 21 nt, Human
cacccggggcgugcgggcgcc

SEQ ID NO: 1125005 - RNA, 19 nt, Human
cacuccauucucaagcccu

SEQ ID NO: 1125006 - RNA, 22 nt, Human
cagcaggugcgcggagccuccc

SEQ ID NO: 1125007 - RNA, 18 nt, Human
cagccgagcggcucaggc

SEQ ID NO: 1125008 - RNA, 18 nt, Human
cagcgcuggcuaggcgcg

SEQ ID NO: 1125009 - RNA, 21 nt, Human
cagggcaggauacugccucuc

SEQ ID NO: 1125010 - RNA, 23 nt, Human
caucgccugaggcugucacucca

SEQ ID NO: 1125011 - RNA, 19 nt, Human
ccaccgccgcugucacucg

SEQ ID NO: 1125012 - RNA, 25 nt, Human
ccaccgccgcugucacucgccaccc

SEQ ID NO: 1125013 - RNA, 24 nt, Human
ccccaccgccgcugucacucgcca

SEQ ID NO: 1125014 - RNA, 21 nt, Human
cccggugcuucuuggccgggg

SEQ ID NO: 1125015 - RNA, 22 nt, Human
cccucggcucagggaggguucc

SEQ ID NO: 1125016 - RNA, 24 nt, Human
ccgcugucacucgccaccccgcgc

SEQ ID NO: 1125017 - RNA, 27 nt, Human
cgccaccccgcgcuccagcaggugcgc

SEQ ID NO: 1125018 - RNA, 19 nt, Human
cggcucaggccggccgcaa

SEQ ID NO: 1125019 - RNA, 20 nt, Human
cggcucagggaggguuccgg

SEQ ID NO: 1125020 - RNA, 23 nt, Human
cucggcucagggaggguuccggc

SEQ ID NO: 1125021 - RNA, 20 nt, Human
cucuguguccagggcaggau

SEQ ID NO: 1125022 - RNA, 22 nt, Human
gcccggugcuucuuggccgggg

SEQ ID NO: 1125023 - RNA, 19 nt, Human
gccggggcggcuacggagg

SEQ ID NO: 1125024 - RNA, 18 nt, Human
gcgcuggcuaggcgcggg

SEQ ID NO: 1125025 - RNA, 22 nt, Human
gcuccagcaggugcgcggagcc

SEQ ID NO: 1125026 - RNA, 23 nt, Human
ggccggccgcaaggccgccgucg

SEQ ID NO: 1125027 - RNA, 20 nt, Human
ggcuacggaggccagggcag

SEQ ID NO: 1125028 - RNA, 19 nt, Human
ggcuaggcgcggggcugcc

SEQ ID NO: 1125029 - RNA, 26 nt, Human
gggcaguucuggacccucggcucagg

SEQ ID NO: 1125030 - RNA, 18 nt, Human
ggggacugagacggggag

SEQ ID NO: 1125031 - RNA, 24 nt, Human
guccagggcaggauacugccucuc

SEQ ID NO: 1125032 - RNA, 21 nt, Human
uccagggcaggauacugccuc

SEQ ID NO: 1125033 - RNA, 22 nt, Human
ucgagacagacaucgccugagg

SEQ ID NO: 1125034 - RNA, 22 nt, Human
ucuuggccggggcggcuacgga

SEQ ID NO: 1125035 - RNA, 18 nt, Human
uggccggggcggcuacgg

SEQ ID NO: 1125036 - RNA, 20 nt, Human
uggcuaggcgcggggcugcc

SEQ ID NO: 1125037 - RNA, 22 nt, Human
aaaaaaaaaaaaaacaacuuaa

SEQ ID NO: 1125038 - RNA, 23 nt, Human
aaaaacaacaacaacgaagagaa

SEQ ID NO: 1125039 - RNA, 27 nt, Human
aaaaacaccauaaaucauggcaaaaga

SEQ ID NO: 1125040 - RNA, 20 nt, Human
aaaacaacaacaacgaagag

SEQ ID NO: 1125041 - RNA, 19 nt, Human
aaaacaccauaaaucaugg

SEQ ID NO: 1125042 - RNA, 19 nt, Human
aaacaacaacaacgaagag

SEQ ID NO: 1125043 - RNA, 18 nt, Human
aaacaccauaaaucaugg

SEQ ID NO: 1125044 - RNA, 21 nt, Human
aaauaaaugcucgguuaccua

SEQ ID NO: 1125045 - RNA, 24 nt, Human
aacaaauuguagacaaccauacaa

SEQ ID NO: 1125046 - RNA, 26 nt, Human
aagagaaaacagcaucagugccaaaa

SEQ ID NO: 1125047 - RNA, 23 nt, Human
acaaaaaaaaaaaaaaacaacuu

SEQ ID NO: 1125048 - RNA, 24 nt, Human
acaaaaaaaaaaaaaaacaacuua

SEQ ID NO: 1125049 - RNA, 24 nt, Human
acaaaguaucccuuagcaccaaaa

SEQ ID NO: 1125050 - RNA, 19 nt, Human
acaaagucuucaaaccaaa

SEQ ID NO: 1125051 - RNA, 24 nt, Human
acaaccccauauuuucacuggcca

SEQ ID NO: 1125052 - RNA, 24 nt, Human
acaacgaagagaaaaaacagaccu

SEQ ID NO: 1125053 - RNA, 22 nt, Human
acagcaucagugccaaaaugaa

SEQ ID NO: 1125054 - RNA, 23 nt, Human
acaguagguacuuaauaaauacc

SEQ ID NO: 1125055 - RNA, 23 nt, Human
accaucaucuaugaaucucugcu

SEQ ID NO: 1125056 - RNA, 22 nt, Human
accaucuuuucuuacuccuggc

SEQ ID NO: 1125057 - RNA, 27 nt, Human
acgcugccgcuucucccucucaugggc

SEQ ID NO: 1125058 - RNA, 19 nt, Human
acugaaagaacaaagacaa

SEQ ID NO: 1125059 - RNA, 21 nt, Human
agaaaaaacagaccagcagaa

SEQ ID NO: 1125060 - RNA, 22 nt, Human
agacaaagucuucaaaccaaaa

SEQ ID NO: 1125061 - RNA, 19 nt, Human
agacaagagaaaacagcau

SEQ ID NO: 1125062 - RNA, 19 nt, Human
agacgucccaaugcagugg

SEQ ID NO: 1125063 - RNA, 25 nt, Human
agagaaaaaacagaccagcagaaag

SEQ ID NO: 1125064 - RNA, 23 nt, Human
aggaaaaaaaaaaucccacaaaa

SEQ ID NO: 1125065 - RNA, 24 nt, Human
aggaacuaacuguacaaccccaua

SEQ ID NO: 1125066 - RNA, 20 nt, Human
aguugcuuucauuucuuaag

SEQ ID NO: 1125067 - RNA, 20 nt, Human
aucagggcaggcaaagugag

SEQ ID NO: 1125068 - RNA, 18 nt, Human
aucccuuagcaccaaaaa

SEQ ID NO: 1125069 - RNA, 23 nt, Human
augaaaggaacuccagugacuca

SEQ ID NO: 1125070 - RNA, 23 nt, Human
augaugcuuuuucuuacucccua

SEQ ID NO: 1125071 - RNA, 24 nt, Human
augccuuaaaaaaaaagcuguaua

SEQ ID NO: 1125072 - RNA, 21 nt, Human
augcgcuuaggaaacuguggc

SEQ ID NO: 1125073 - RNA, 20 nt, Human
auguaucaaguauuacaguu

SEQ ID NO: 1125074 - RNA, 21 nt, Human
auuucauuagggggaggggca

SEQ ID NO: 1125075 - RNA, 24 nt, Human
caaaaaacaccauaaaucauggca

SEQ ID NO: 1125076 - RNA, 22 nt, Human
caaaaaaucuacaggaacccca

SEQ ID NO: 1125077 - RNA, 22 nt, Human
caaaaaaucuacaggaacccca

SEQ ID NO: 1125078 - RNA, 23 nt, Human
caaaguaucccuuagcaccaaaa

SEQ ID NO: 1125079 - RNA, 20 nt, Human
caacaacaacgaagagaaaa

SEQ ID NO: 1125080 - RNA, 22 nt, Human
caagaggaauaauggucuguug

SEQ ID NO: 1125081 - RNA, 18 nt, Human
caaggcacuguguacgaa

SEQ ID NO: 1125082 - RNA, 22 nt, Human
caagugcagacgucccaaugca

SEQ ID NO: 1125083 - RNA, 24 nt, Human
cacaguagguacuuaauaaauacc

SEQ ID NO: 1125084 - RNA, 19 nt, Human
caccagcaaaucucaaaaa

SEQ ID NO: 1125085 - RNA, 21 nt, Human
caccucauacccuuaccccca

SEQ ID NO: 1125086 - RNA, 23 nt, Human
cagaagaaacuuccugaucaccu

SEQ ID NO: 1125087 - RNA, 19 nt, Human
cagaccagcagaaagaacu

SEQ ID NO: 1125088 - RNA, 22 nt, Human
cagcaaaucucaaaaacccaaa

SEQ ID NO: 1125089 - RNA, 20 nt, Human
cagcagaaagaacuauucug

SEQ ID NO: 1125090 - RNA, 25 nt, Human
cauacaaagauaaaaucaaacuaac

SEQ ID NO: 1125091 - RNA, 24 nt, Human
cauauacauaaauauauacauaua

SEQ ID NO: 1125092 - RNA, 25 nt, Human
cauuuugucaugcuggugaauuacu

SEQ ID NO: 1125093 - RNA, 21 nt, Human
ccaaaaaaucuacaggaaccc

SEQ ID NO: 1125094 - RNA, 19 nt, Human
ccaguguguuuccaccucu

SEQ ID NO: 1125095 - RNA, 21 nt, Human
cccacaaaaaaucuaaacccu

SEQ ID NO: 1125096 - RNA, 18 nt, Human
ccuuuacaaaguuucaaa

SEQ ID NO: 1125097 - RNA, 24 nt, Human
cuaauacugacgaggaaugucuaa

SEQ ID NO: 1125098 - RNA, 25 nt, Human
cucaaaaacccaaaccuacaucaaa

SEQ ID NO: 1125099 - RNA, 22 nt, Human
cugaucaccucauacccuuacc

SEQ ID NO: 1125100 - RNA, 19 nt, Human
cuguguauguaucuucucc

SEQ ID NO: 1125101 - RNA, 23 nt, Human
cuguguauguaucuucucccacu

SEQ ID NO: 1125102 - RNA, 20 nt, Human
cuucaagaggaauaaugguc

SEQ ID NO: 1125103 - RNA, 24 nt, Human
cuugcagcuauagggcacuggaga

SEQ ID NO: 1125104 - RNA, 20 nt, Human
cuuuugaccaaaaauucuag

SEQ ID NO: 1125105 - RNA, 18 nt, Human
gaaguuuugcuuucauuu

SEQ ID NO: 1125106 - RNA, 23 nt, Human
gacucuaugaggaacaauugcuu

SEQ ID NO: 1125107 - RNA, 21 nt, Human
gagcucauuugguuucuucaa

SEQ ID NO: 1125108 - RNA, 21 nt, Human
gcaaaauaacauucuaggaac

SEQ ID NO: 1125109 - RNA, 20 nt, Human
gcaaaucucaaaaacccaaa

SEQ ID NO: 1125110 - RNA, 19 nt, Human
gcauuuuuuucauauggaa

SEQ ID NO: 1125111 - RNA, 21 nt, Human
gccaaaaugaaaggaacucca

SEQ ID NO: 1125112 - RNA, 28 nt, Human
gccaaaaugaaaggaacuccagugacuc

SEQ ID NO: 1125113 - RNA, 19 nt, Human
gcugccgcuucucccucuc

SEQ ID NO: 1125114 - RNA, 23 nt, Human
ggcaggcaaagugaggguggagc

SEQ ID NO: 1125115 - RNA, 24 nt, Human
ggccuuuggcuaaaugccauuuuu

SEQ ID NO: 1125116 - RNA, 24 nt, Human
guggagcucauuugguuucuucaa

SEQ ID NO: 1125117 - RNA, 22 nt, Human
uaaacagaagcagcauaucauc

SEQ ID NO: 1125118 - RNA, 24 nt, Human
uaaacagaagcagcauaucaucca

SEQ ID NO: 1125119 - RNA, 21 nt, Human
uaaauuacaaucauuuucccc

SEQ ID NO: 1125120 - RNA, 18 nt, Human
uacaaaaaaaaaaaaaaa

SEQ ID NO: 1125121 - RNA, 21 nt, Human
uaccagauaauuuuagacccu

SEQ ID NO: 1125122 - RNA, 24 nt, Human
uacuuuguagcugcuacaauaguu

SEQ ID NO: 1125123 - RNA, 22 nt, Human
uagacaaagucuucaaaccaaa

SEQ ID NO: 1125124 - RNA, 18 nt, Human
uauaugauuuuucauuuu

SEQ ID NO: 1125125 - RNA, 23 nt, Human
uaucugacacuuaacacuuacuu

SEQ ID NO: 1125126 - RNA, 22 nt, Human
uauuaugggcaaggcacugugu

SEQ ID NO: 1125127 - RNA, 24 nt, Human
uauuugaagagcaaaugaugcaug

SEQ ID NO: 1125128 - RNA, 23 nt, Human
ucaaaaaagcugagauuaugaaa

SEQ ID NO: 1125129 - RNA, 24 nt, Human
ucaugaugcuuuuucuuacucccu

SEQ ID NO: 1125130 - RNA, 23 nt, Human
ucaugcuggugaauuacuuugua

SEQ ID NO: 1125131 - RNA, 23 nt, Human
ucaugggcucugcaggccgccau

SEQ ID NO: 1125132 - RNA, 23 nt, Human
uccaagcacauagauauuugaag

SEQ ID NO: 1125133 - RNA, 24 nt, Human
uccagaagaaacuuccugaucacc

SEQ ID NO: 1125134 - RNA, 31 nt, Human
ucuaauacuauuuugacuuuugaccaaaaaa

SEQ ID NO: 1125135 - RNA, 23 nt, Human
ucucaaaaacccaaaccuacauc

SEQ ID NO: 1125136 - RNA, 19 nt, Human
ucucccucucaugggcucu

SEQ ID NO: 1125137 - RNA, 23 nt, Human
ucucccucucaugggcucugcag

SEQ ID NO: 1125138 - RNA, 18 nt, Human
ucugaacacauuugaaac

SEQ ID NO: 1125139 - RNA, 25 nt, Human
ucugacacuuaacacuuacuucauc

SEQ ID NO: 1125140 - RNA, 21 nt, Human
ugaaagaacaaagacaaagaa

SEQ ID NO: 1125141 - RNA, 22 nt, Human
ugaaagaauuucacuucacagg

SEQ ID NO: 1125142 - RNA, 22 nt, Human
ugaaauauuuggucuuuuuuca

SEQ ID NO: 1125143 - RNA, 21 nt, Human
ugaaucaccaaccugcugcca

SEQ ID NO: 1125144 - RNA, 24 nt, Human
ugacauagacuguaucagugauug

SEQ ID NO: 1125145 - RNA, 20 nt, Human
ugaccaaaaauucuagugcu

SEQ ID NO: 1125146 - RNA, 21 nt, Human
ugaccauuuugucaugcuggu

SEQ ID NO: 1125147 - RNA, 24 nt, Human
ugacugcaugacuaauucaacucu

SEQ ID NO: 1125148 - RNA, 19 nt, Human
ugaggaaaaaaaaaauccc

SEQ ID NO: 1125149 - RNA, 23 nt, Human
ugaggcaggaccaaaaacuaugc

SEQ ID NO: 1125150 - RNA, 22 nt, Human
ugaucaccucauacccuuaccc

SEQ ID NO: 1125151 - RNA, 23 nt, Human
ugaucaccucauacccuuacccc

SEQ ID NO: 1125152 - RNA, 22 nt, Human
ugcaucacuguuaaacagaagc

SEQ ID NO: 1125153 - RNA, 21 nt, Human
ugcauuaccagcaugcaaacc

SEQ ID NO: 1125154 - RNA, 22 nt, Human
ugcauuaccagcaugcaaaccu

SEQ ID NO: 1125155 - RNA, 21 nt, Human
ugccaaaaugaaaggaacucc

SEQ ID NO: 1125156 - RNA, 29 nt, Human
ugcgcacauucacauacuuacauauacau

SEQ ID NO: 1125157 - RNA, 19 nt, Human
uggaaguucaaaaaagcug

SEQ ID NO: 1125158 - RNA, 30 nt, Human
uggauuuaagaaaaaugaggaaaaaaaaaa

SEQ ID NO: 1125159 - RNA, 19 nt, Human
uggcuccaagcacauagau

SEQ ID NO: 1125160 - RNA, 21 nt, Human
uguggaaguucaaaaaagcug

SEQ ID NO: 1125161 - RNA, 20 nt, Human
uguuuccuuuacaaaguuuc

SEQ ID NO: 1125162 - RNA, 23 nt, Human
uuacaauuaaaaacaacaacaac

SEQ ID NO: 1125163 - RNA, 23 nt, Human
uucaaaaaagcugagauuaugaa

SEQ ID NO: 1125164 - RNA, 25 nt, Human
uucacacauagcaaaguuuucaaac

SEQ ID NO: 1125165 - RNA, 23 nt, Human
uucaccagcaaaucucaaaaacc

SEQ ID NO: 1125166 - RNA, 24 nt, Human
uucaccagcaaaucucaaaaaccc

SEQ ID NO: 1125167 - RNA, 18 nt, Human
uucacuggccacagcugc

SEQ ID NO: 1125168 - RNA, 19 nt, Human
uuccaaauaucacuaacca

SEQ ID NO: 1125169 - RNA, 20 nt, Human
uuuucagccacauaauguug

SEQ ID NO: 1125170 - RNA, 24 nt, Human
aaacggagacccaggccgggcgca

SEQ ID NO: 1125171 - RNA, 18 nt, Human
acagagugagacucugcc

SEQ ID NO: 1125172 - RNA, 24 nt, Human
accccgucucuacuaaaaauacaa

SEQ ID NO: 1125173 - RNA, 24 nt, Human
acgccacugcccuccagccugggc

SEQ ID NO: 1125174 - RNA, 18 nt, Human
acugcccuccagccuggg

SEQ ID NO: 1125175 - RNA, 24 nt, Human
acugcccuccagccugggcgacag

SEQ ID NO: 1125176 - RNA, 21 nt, Human
agaauccaagucugccugacc

SEQ ID NO: 1125177 - RNA, 24 nt, Human
agcacuuugggaggcugagguggg

SEQ ID NO: 1125178 - RNA, 20 nt, Human
agccgggcgugguggugggc

SEQ ID NO: 1125179 - RNA, 23 nt, Human
agccgggcgugguggugggcgcc

SEQ ID NO: 1125180 - RNA, 24 nt, Human
agccugggcgacagagugagacuc

SEQ ID NO: 1125181 - RNA, 21 nt, Human
agcuagagaaacggagaccca

SEQ ID NO: 1125182 - RNA, 23 nt, Human
aggcaggcauuuucauucuugcu

SEQ ID NO: 1125183 - RNA, 18 nt, Human
aggcccagggcugggcaa

SEQ ID NO: 1125184 - RNA, 24 nt, Human
agguggggcuugcagugagccgag

SEQ ID NO: 1125185 - RNA, 24 nt, Human
aggugggugaaucacgaggucagg

SEQ ID NO: 1125186 - RNA, 23 nt, Human
aguggcucaugccuguaauccca

SEQ ID NO: 1125187 - RNA, 24 nt, Human
aguggcucaugccuguaaucccag

SEQ ID NO: 1125188 - RNA, 24 nt, Human
aucacgccacugcccuccagccug

SEQ ID NO: 1125189 - RNA, 19 nt, Human
augccuguaaucccagcac

SEQ ID NO: 1125190 - RNA, 24 nt, Human
caacaaaccacaaggcaggcauuu

SEQ ID NO: 1125191 - RNA, 24 nt, Human
cacugcccuccagccugggcgaca

SEQ ID NO: 1125192 - RNA, 20 nt, Human
cagaagguggggcuugcagu

SEQ ID NO: 1125193 - RNA, 24 nt, Human
cagcacuuugggaggcugaggugg

SEQ ID NO: 1125194 - RNA, 24 nt, Human
cagcuacucgggaggcugaggcag

SEQ ID NO: 1125195 - RNA, 21 nt, Human
cagggcugggcaaagggcagg

SEQ ID NO: 1125196 - RNA, 24 nt, Human
caguugccuuccuuccuaaggucc

SEQ ID NO: 1125197 - RNA, 20 nt, Human
caugccuguaaucccagcac

SEQ ID NO: 1125198 - RNA, 24 nt, Human
caugccuguaaucccagcacuuug

SEQ ID NO: 1125199 - RNA, 21 nt, Human
cauuucacagcuagagaaacg

SEQ ID NO: 1125200 - RNA, 20 nt, Human
ccacugcccuccagccuggg

SEQ ID NO: 1125201 - RNA, 21 nt, Human
ccacugcccuccagccugggc

SEQ ID NO: 1125202 - RNA, 21 nt, Human
ccacugcccuccagccugggc

SEQ ID NO: 1125203 - RNA, 23 nt, Human
ccacugcccuccagccugggcga

SEQ ID NO: 1125204 - RNA, 24 nt, Human
ccacugcccuccagccugggcgac

SEQ ID NO: 1125205 - RNA, 26 nt, Human
ccacuugccacgcacaaaaauaguuc

SEQ ID NO: 1125206 - RNA, 25 nt, Human
ccaggccgggcgcaguggcucaugc

SEQ ID NO: 1125207 - RNA, 20 nt, Human
cccagcuggagcugagauuc

SEQ ID NO: 1125208 - RNA, 22 nt, Human
ccugggcgacagagugagacuc

SEQ ID NO: 1125209 - RNA, 22 nt, Human
ccuguaaucccagcacuuuggg

SEQ ID NO: 1125210 - RNA, 21 nt, Human
ccuguagucccagcuacucgg

SEQ ID NO: 1125211 - RNA, 22 nt, Human
ccuguagucccagcuacucggg

SEQ ID NO: 1125212 - RNA, 26 nt, Human
cgcacaaaaauaguucccuaccauca

SEQ ID NO: 1125213 - RNA, 23 nt, Human
cgccuguagucccagcuacucgg

SEQ ID NO: 1125214 - RNA, 24 nt, Human
cgccuguagucccagcuacucggg

SEQ ID NO: 1125215 - RNA, 19 nt, Human
cggugaaaccccgucucua

SEQ ID NO: 1125216 - RNA, 24 nt, Human
cucaugccuguaaucccagcacuu

SEQ ID NO: 1125217 - RNA, 20 nt, Human
cuccagccugggcgacagag

SEQ ID NO: 1125218 - RNA, 20 nt, Human
cugaccccaaaggcuuuuuc

SEQ ID NO: 1125219 - RNA, 19 nt, Human
cuugcagugagccgagauc

SEQ ID NO: 1125220 - RNA, 24 nt, Human
cuuggcuaaugcggugaaaccccg

SEQ ID NO: 1125221 - RNA, 23 nt, Human
gagaucacgccacugcccuccag

SEQ ID NO: 1125222 - RNA, 24 nt, Human
gaucugugcugggugggccccagg

SEQ ID NO: 1125223 - RNA, 22 nt, Human
gccacugcccuccagccugggc

SEQ ID NO: 1125224 - RNA, 24 nt, Human
gcuaaugcggugaaaccccgucuc

SEQ ID NO: 1125225 - RNA, 24 nt, Human
gcugagccgcugagccgcugaggg

SEQ ID NO: 1125226 - RNA, 23 nt, Human
ggagacccaggccgggcgcagug

SEQ ID NO: 1125227 - RNA, 23 nt, Human
ggccgggcgcaguggcucaugcc

SEQ ID NO: 1125228 - RNA, 23 nt, Human
ggcgcaguggcucaugccuguaa

SEQ ID NO: 1125229 - RNA, 22 nt, Human
ggcgugguggugggcgccugua

SEQ ID NO: 1125230 - RNA, 21 nt, Human
ggcuugcagugagccgagauc

SEQ ID NO: 1125231 - RNA, 18 nt, Human
ggggcuugcagugagccg

SEQ ID NO: 1125232 - RNA, 24 nt, Human
ggggcuugcagugagccgagauca

SEQ ID NO: 1125233 - RNA, 18 nt, Human
ggugaaucacgaggucag

SEQ ID NO: 1125234 - RNA, 24 nt, Human
gguggugggcgccuguagucccag

SEQ ID NO: 1125235 - RNA, 25 nt, Human
guucccuaccaucaaggcaagagug

SEQ ID NO: 1125236 - RNA, 19 nt, Human
uaaacuuuuauuuucuccc

SEQ ID NO: 1125237 - RNA, 19 nt, Human
uaagccgggcgugguggug

SEQ ID NO: 1125238 - RNA, 22 nt, Human
uaaugcggugaaaccccgucuc

SEQ ID NO: 1125239 - RNA, 19 nt, Human
uacaucucagauuccuucu

SEQ ID NO: 1125240 - RNA, 24 nt, Human
uagaauccaagucugccugacccc

SEQ ID NO: 1125241 - RNA, 18 nt, Human
ucacgaggucaggagauc

SEQ ID NO: 1125242 - RNA, 24 nt, Human
ucacgaggucaggagaucgagacc

SEQ ID NO: 1125243 - RNA, 23 nt, Human
ucacgccacugcccuccagccug

SEQ ID NO: 1125244 - RNA, 24 nt, Human
ucagaagccucacaguugccuucc

SEQ ID NO: 1125245 - RNA, 22 nt, Human
ucaugccuguaaucccagcacu

SEQ ID NO: 1125246 - RNA, 25 nt, Human
ucauucuugcuaccuccucuucaca

SEQ ID NO: 1125247 - RNA, 20 nt, Human
uccacaucaaggauccucuu

SEQ ID NO: 1125248 - RNA, 23 nt, Human
uccagccugggcgacagagugag

SEQ ID NO: 1125249 - RNA, 24 nt, Human
uccagccugggcgacagagugaga

SEQ ID NO: 1125250 - RNA, 24 nt, Human
ucccuaccaucaaggcaagaguug

SEQ ID NO: 1125251 - RNA, 18 nt, Human
uccuucucagaagccuca

SEQ ID NO: 1125252 - RNA, 21 nt, Human
ucucagagcaacuggucugug

SEQ ID NO: 1125253 - RNA, 22 nt, Human
ucucuacuaaaaauacaaaaaa

SEQ ID NO: 1125254 - RNA, 19 nt, Human
ucugugcugggugggcccc

SEQ ID NO: 1125255 - RNA, 19 nt, Human
ugagagagaucagaccagg

SEQ ID NO: 1125256 - RNA, 21 nt, Human
ugagagagaucagaccaggua

SEQ ID NO: 1125257 - RNA, 22 nt, Human
ugagccgagaucacgccacugc

SEQ ID NO: 1125258 - RNA, 23 nt, Human
ugaggcaguagaauggcgugaac

SEQ ID NO: 1125259 - RNA, 24 nt, Human
ugaggcaguagaauggcgugaacu

SEQ ID NO: 1125260 - RNA, 25 nt, Human
ugaggcaguagaauggcgugaacuc

SEQ ID NO: 1125261 - RNA, 24 nt, Human
ugaggugggugaaucacgagguca

SEQ ID NO: 1125262 - RNA, 23 nt, Human
ugaggugggugaaucacgagguu

SEQ ID NO: 1125263 - RNA, 24 nt, Human
ugcagauuggaggcccagggcugg

SEQ ID NO: 1125264 - RNA, 18 nt, Human
ugccaaaguccggcaggg

SEQ ID NO: 1125265 - RNA, 21 nt, Human
ugccacgcacaaaaauaguuc

SEQ ID NO: 1125266 - RNA, 25 nt, Human
ugccacgcacaaaaauaguucccua

SEQ ID NO: 1125267 - RNA, 22 nt, Human
ugccugaccccaaaggccggcg

SEQ ID NO: 1125268 - RNA, 23 nt, Human
ugccuguaaucccagcacuuugg

SEQ ID NO: 1125269 - RNA, 23 nt, Human
ugccuguaaucccagcacuuugg

SEQ ID NO: 1125270 - RNA, 20 nt, Human
ugcugggugggccccaggcc

SEQ ID NO: 1125271 - RNA, 19 nt, Human
uggagacaagauugcucag

SEQ ID NO: 1125272 - RNA, 18 nt, Human
uggaggcccagggcuggg

SEQ ID NO: 1125273 - RNA, 19 nt, Human
uggcgugaacucagaaggu

SEQ ID NO: 1125274 - RNA, 24 nt, Human
uggcgugaacucagaagguggggc

SEQ ID NO: 1125275 - RNA, 21 nt, Human
uggcuaaugcggugaaacccc

SEQ ID NO: 1125276 - RNA, 24 nt, Human
uggcucaugccuguaaucccagca

SEQ ID NO: 1125277 - RNA, 19 nt, Human
ugggaggcugaggugggug

SEQ ID NO: 1125278 - RNA, 24 nt, Human
ugggaggcugaggugggugaauca

SEQ ID NO: 1125279 - RNA, 21 nt, Human
ugggcaaagggcaggaacaga

SEQ ID NO: 1125280 - RNA, 24 nt, Human
ugggccccaggcccgugaguccag

SEQ ID NO: 1125281 - RNA, 21 nt, Human
ugggcgacagagugagacucu

SEQ ID NO: 1125282 - RNA, 24 nt, Human
ugguggugggcgccuguaguccca

SEQ ID NO: 1125283 - RNA, 23 nt, Human
uuagaacagucauuucacagcua

SEQ ID NO: 1125284 - RNA, 20 nt, Human
uucccuaccaucaaggcaag

SEQ ID NO: 1125285 - RNA, 20 nt, Human
uugcagugagccgagaucac

SEQ ID NO: 1125286 - RNA, 21 nt, Human
uugcagugagccgagaucacg

SEQ ID NO: 1125287 - RNA, 22 nt, Human
uuggaacugagagaagaacucc

SEQ ID NO: 1125288 - RNA, 24 nt, Human
uuggcuaaugcggugaaaccccgu

SEQ ID NO: 1125289 - RNA, 25 nt, Human
uugggaggcugaggugggugaauca

SEQ ID NO: 1125290 - RNA, 18 nt, Human
aaagguucuagggaggcg

SEQ ID NO: 1125291 - RNA, 18 nt, Human
aaagugcuggagggcagg

SEQ ID NO: 1125292 - RNA, 25 nt, Human
aaccaagaacugggaagggggccag

SEQ ID NO: 1125293 - RNA, 23 nt, Human
aaugugccauccugggaagaggg

SEQ ID NO: 1125294 - RNA, 18 nt, Human
acacccaggacagacagc

SEQ ID NO: 1125295 - RNA, 21 nt, Human
acagccccgugcaaaaugaaa

SEQ ID NO: 1125296 - RNA, 23 nt, Human
acauaauuugcacagccccgugc

SEQ ID NO: 1125297 - RNA, 18 nt, Human
accaagacagugagggcu

SEQ ID NO: 1125298 - RNA, 20 nt, Human
acugaguccccgaaggguag

SEQ ID NO: 1125299 - RNA, 20 nt, Human
agaaagguucuagggaggcg

SEQ ID NO: 1125300 - RNA, 21 nt, Human
agaaggaaaugugacccagga

SEQ ID NO: 1125301 - RNA, 20 nt, Human
agacagccagcguggacuug

SEQ ID NO: 1125302 - RNA, 24 nt, Human
agacggcaacagcaaaguacuaaa

SEQ ID NO: 1125303 - RNA, 18 nt, Human
agacugggucuacgugcc

SEQ ID NO: 1125304 - RNA, 18 nt, Human
agagagagagagagaggc

SEQ ID NO: 1125305 - RNA, 24 nt, Human
agcagggagacgcgacgaauacca

SEQ ID NO: 1125306 - RNA, 20 nt, Human
agcauauuuuaggggucgag

SEQ ID NO: 1125307 - RNA, 21 nt, Human
agcaucuacacccaggacaga

SEQ ID NO: 1125308 - RNA, 18 nt, Human
aggaggggccgugaggug

SEQ ID NO: 1125309 - RNA, 25 nt, Human
agucaagaggagaaagaggcccauu

SEQ ID NO: 1125310 - RNA, 23 nt, Human
caaaaugaaaacacaagaacccc

SEQ ID NO: 1125311 - RNA, 19 nt, Human
caaacagugaccaagccag

SEQ ID NO: 1125312 - RNA, 27 nt, Human
caacagcaaaguacuaaaccaaguaca

SEQ ID NO: 1125313 - RNA, 21 nt, Human
caagacagugagggcuggagc

SEQ ID NO: 1125314 - RNA, 21 nt, Human
cacaccccugggcuuccagaa

SEQ ID NO: 1125315 - RNA, 21 nt, Human
cacagccccgugcaaaaugaa

SEQ ID NO: 1125316 - RNA, 18 nt, Human
cacauaauuugcacagcc

SEQ ID NO: 1125317 - RNA, 24 nt, Human
caccaaaucagcaucuacacccag

SEQ ID NO: 1125318 - RNA, 20 nt, Human
cagaccaagacagugagggc

SEQ ID NO: 1125319 - RNA, 24 nt, Human
cagagccucuggagucuuguacau

SEQ ID NO: 1125320 - RNA, 23 nt, Human
cagcaaacagugaccaagccaga

SEQ ID NO: 1125321 - RNA, 21 nt, Human
cagcgccucgcccacucgggg

SEQ ID NO: 1125322 - RNA, 18 nt, Human
caggagggaaagguaaug

SEQ ID NO: 1125323 - RNA, 19 nt, Human
caggccgagggaucuccaa

SEQ ID NO: 1125324 - RNA, 19 nt, Human
ccaagaacugggaaggggg

SEQ ID NO: 1125325 - RNA, 24 nt, Human
ccaggcacagcccgaggcugugcu

SEQ ID NO: 1125326 - RNA, 19 nt, Human
ccaucuaauaagcaaacuc

SEQ ID NO: 1125327 - RNA, 22 nt, Human
ccccagcaaacagugaccaagc

SEQ ID NO: 1125328 - RNA, 19 nt, Human
ccgcagcuccuguucccgc

SEQ ID NO: 1125329 - RNA, 22 nt, Human
ccuccugagggugcgcggaggu

SEQ ID NO: 1125330 - RNA, 20 nt, Human
ccugggaagagggccagacc

SEQ ID NO: 1125331 - RNA, 21 nt, Human
cgagggaucuccaaacgcagc

SEQ ID NO: 1125332 - RNA, 25 nt, Human
cgccaccgagcuggacccgccuccu

SEQ ID NO: 1125333 - RNA, 23 nt, Human
cggauggggcuaaacguggagag

SEQ ID NO: 1125334 - RNA, 25 nt, Human
cgguaucggagccuacagccgccag

SEQ ID NO: 1125335 - RNA, 21 nt, Human
cgugugugugugugugugugu

SEQ ID NO: 1125336 - RNA, 21 nt, Human
cuaaaccaaguacaggauucc

SEQ ID NO: 1125337 - RNA, 24 nt, Human
cugggaagggggccagggugagga

SEQ ID NO: 1125338 - RNA, 25 nt, Human
cuuccagaaaaaccaguaaaagaag

SEQ ID NO: 1125339 - RNA, 21 nt, Human
gaacugggaagggggccaggg

SEQ ID NO: 1125340 - RNA, 25 nt, Human
gacggcaacagcaaaguacuaaacc

SEQ ID NO: 1125341 - RNA, 20 nt, Human
gaggcccauucugcgcauuc

SEQ ID NO: 1125342 - RNA, 23 nt, Human
gaggggccgugaggugagagagu

SEQ ID NO: 1125343 - RNA, 21 nt, Human
gcaacagcaaaguacuaaacc

SEQ ID NO: 1125344 - RNA, 19 nt, Human
gcuaaaauagaagaaagcu

SEQ ID NO: 1125345 - RNA, 18 nt, Human
gcuggagagaggcuuugc

SEQ ID NO: 1125346 - RNA, 20 nt, Human
gcugggcggcccaaggugga

SEQ ID NO: 1125347 - RNA, 19 nt, Human
ggaagggggccagggugag

SEQ ID NO: 1125348 - RNA, 21 nt, Human
ggacacagaccccgcgggggc

SEQ ID NO: 1125349 - RNA, 23 nt, Human
ggagagcaacaagcagggagacg

SEQ ID NO: 1125350 - RNA, 23 nt, Human
gggaaagguaaugauuaaaacac

SEQ ID NO: 1125351 - RNA, 22 nt, Human
gggaagagggccagaccuggaa

SEQ ID NO: 1125352 - RNA, 25 nt, Human
gugcaaaaugaaaacacaagaaccc

SEQ ID NO: 1125353 - RNA, 21 nt, Human
gugugugugugugugugugug

SEQ ID NO: 1125354 - RNA, 22 nt, Human
uaaaauagaagaaagcugcaaa

SEQ ID NO: 1125355 - RNA, 20 nt, Human
uagaagaaagcugcaaagug

SEQ ID NO: 1125356 - RNA, 18 nt, Human
uagggaggcgcggaggcg

SEQ ID NO: 1125357 - RNA, 20 nt, Human
uauaccgugugugugugugu

SEQ ID NO: 1125358 - RNA, 20 nt, Human
uauaccgugugugugugugu

SEQ ID NO: 1125359 - RNA, 20 nt, Human
uauaccgugugugugugugu

SEQ ID NO: 1125360 - RNA, 27 nt, Human
uauaccgugugugugugugugugugug

SEQ ID NO: 1125361 - RNA, 23 nt, Human
ucagcaucuacacccaggacaga

SEQ ID NO: 1125362 - RNA, 19 nt, Human
ucagcgcguugaagcgcuc

SEQ ID NO: 1125363 - RNA, 21 nt, Human
uccagccugggagccaggcac

SEQ ID NO: 1125364 - RNA, 24 nt, Human
ucccgcgcgaguucucgcgggagc

SEQ ID NO: 1125365 - RNA, 19 nt, Human
ucugaaguuugcccuaggg

SEQ ID NO: 1125366 - RNA, 24 nt, Human
ucuggcagaggggacugcaggcuu

SEQ ID NO: 1125367 - RNA, 25 nt, Human
ugaaaacacaagaaccccuauuaga

SEQ ID NO: 1125368 - RNA, 18 nt, Human
ugaaaccagcucugucuc

SEQ ID NO: 1125369 - RNA, 22 nt, Human
ugagaaagguucuagggaggcg

SEQ ID NO: 1125370 - RNA, 28 nt, Human
ugagcaugcggcccguuguuguaaugac

SEQ ID NO: 1125371 - RNA, 20 nt, Human
ugaggcugggcggcccaagg

SEQ ID NO: 1125372 - RNA, 18 nt, Human
ugaggugagagaguccgg

SEQ ID NO: 1125373 - RNA, 19 nt, Human
ugaggugagagaguccggg

SEQ ID NO: 1125374 - RNA, 23 nt, Human
ugaggugagagaguccgggagcc

SEQ ID NO: 1125375 - RNA, 20 nt, Human
ugccacagaccaagacagug

SEQ ID NO: 1125376 - RNA, 19 nt, Human
ugcuggagggcaggaguca

SEQ ID NO: 1125377 - RNA, 19 nt, Human
uggaaggaggggccgugag

SEQ ID NO: 1125378 - RNA, 20 nt, Human
uggagagcaacaagcaggga

SEQ ID NO: 1125379 - RNA, 24 nt, Human
uggcagaggggacugcaggcuuug

SEQ ID NO: 1125380 - RNA, 20 nt, Human
uggcucuucccacagagccu

SEQ ID NO: 1125381 - RNA, 25 nt, Human
ugggaagagggccagaccuggaagu

SEQ ID NO: 1125382 - RNA, 25 nt, Human
ugggaagggggccagggugaggauu

SEQ ID NO: 1125383 - RNA, 20 nt, Human
ugggagccaggcacagcccg

SEQ ID NO: 1125384 - RNA, 19 nt, Human
uggggcuaaacguggagag

SEQ ID NO: 1125385 - RNA, 20 nt, Human
ugguggggcugggggggagu

SEQ ID NO: 1125386 - RNA, 18 nt, Human
ugugugugugugugugug

SEQ ID NO: 1125387 - RNA, 18 nt, Human
ugugugugugugugugug

SEQ ID NO: 1125388 - RNA, 18 nt, Human
ugugugugugugugugug

SEQ ID NO: 1125389 - RNA, 18 nt, Human
ugugugugugugugugug

SEQ ID NO: 1125390 - RNA, 18 nt, Human
ugugugugugugugugug

SEQ ID NO: 1125391 - RNA, 18 nt, Human
ugugugugugugugugug

SEQ ID NO: 1125392 - RNA, 18 nt, Human
ugugugugugugugugug

SEQ ID NO: 1125393 - RNA, 18 nt, Human
ugugugugugugugugug

SEQ ID NO: 1125394 - RNA, 18 nt, Human
ugugugugugugugugug

SEQ ID NO: 1125395 - RNA, 18 nt, Human
ugugugugugugugugug

SEQ ID NO: 1125396 - RNA, 18 nt, Human
ugugugugugugugugug

SEQ ID NO: 1125397 - RNA, 18 nt, Human
ugugugugugugugugug

SEQ ID NO: 1125398 - RNA, 21 nt, Human
ugugugugugugugugugugu

SEQ ID NO: 1125399 - RNA, 21 nt, Human
ugugugugugugugugugugu

SEQ ID NO: 1125400 - RNA, 21 nt, Human
ugugugugugugugugugugu

SEQ ID NO: 1125401 - RNA, 21 nt, Human
ugugugugugugugugugugu

SEQ ID NO: 1125402 - RNA, 21 nt, Human
ugugugugugugugugugugu

SEQ ID NO: 1125403 - RNA, 21 nt, Human
ugugugugugugugugugugu

SEQ ID NO: 1125404 - RNA, 21 nt, Human
ugugugugugugugugugugu

SEQ ID NO: 1125405 - RNA, 21 nt, Human
ugugugugugugugugugugu

SEQ ID NO: 1125406 - RNA, 21 nt, Human
ugugugugugugugugugugu

SEQ ID NO: 1125407 - RNA, 21 nt, Human
ugugugugugugugugugugu

SEQ ID NO: 1125408 - RNA, 21 nt, Human
ugugugugugugugugugugu

SEQ ID NO: 1125409 - RNA, 21 nt, Human
ugugugugugugugugugugu

SEQ ID NO: 1125410 - RNA, 21 nt, Human
ugugugugugugugugugugu

SEQ ID NO: 1125411 - RNA, 21 nt, Human
ugugugugugugugugugugu

SEQ ID NO: 1125412 - RNA, 21 nt, Human
ugugugugugugugugugugu

SEQ ID NO: 1125413 - RNA, 21 nt, Human
ugugugugugugugugugugu

SEQ ID NO: 1125414 - RNA, 21 nt, Human
ugugugugugugugugugugu

SEQ ID NO: 1125415 - RNA, 21 nt, Human
ugugugugugugugugugugu

SEQ ID NO: 1125416 - RNA, 21 nt, Human
ugugugugugugugugugugu

SEQ ID NO: 1125417 - RNA, 21 nt, Human
ugugugugugugugugugugu

SEQ ID NO: 1125418 - RNA, 21 nt, Human
ugugugugugugugugugugu

SEQ ID NO: 1125419 - RNA, 21 nt, Human
ugugugugugugugugugugu

SEQ ID NO: 1125420 - RNA, 22 nt, Human
ugugugugugugugugugugug

SEQ ID NO: 1125421 - RNA, 22 nt, Human
ugugugugugugugugugugug

SEQ ID NO: 1125422 - RNA, 22 nt, Human
ugugugugugugugugugugug

SEQ ID NO: 1125423 - RNA, 22 nt, Human
ugugugugugugugugugugug

SEQ ID NO: 1125424 - RNA, 22 nt, Human
ugugugugugugugugugugug

SEQ ID NO: 1125425 - RNA, 22 nt, Human
ugugugugugugugugugugug

SEQ ID NO: 1125426 - RNA, 22 nt, Human
ugugugugugugugugugugug

SEQ ID NO: 1125427 - RNA, 22 nt, Human
ugugugugugugugugugugug

SEQ ID NO: 1125428 - RNA, 22 nt, Human
ugugugugugugugugugugug

SEQ ID NO: 1125429 - RNA, 22 nt, Human
ugugugugugugugugugugug

SEQ ID NO: 1125430 - RNA, 20 nt, Human
uuguuuguuuguuuuguuuu

SEQ ID NO: 1125431 - RNA, 22 nt, Human
uuuuuguuuguuuguuuuguuu

SEQ ID NO: 1125432 - RNA, 20 nt, Human
accaggccacagggcugugg

SEQ ID NO: 1125433 - RNA, 18 nt, Human
agaaacauuuuuaauugu

SEQ ID NO: 1125434 - RNA, 21 nt, Human
agcccauguguuucucagaug

SEQ ID NO: 1125435 - RNA, 21 nt, Human
aggcaggccagagaggccagg

SEQ ID NO: 1125436 - RNA, 19 nt, Human
aucaccaggggagucccgg

SEQ ID NO: 1125437 - RNA, 21 nt, Human
caaggcaggccagagaggcca

SEQ ID NO: 1125438 - RNA, 22 nt, Human
caaggcaggccagagaggccag

SEQ ID NO: 1125439 - RNA, 21 nt, Human
caggccagagaggccaggggc

SEQ ID NO: 1125440 - RNA, 25 nt, Human
ccacagggcuguggggcaugcagcc

SEQ ID NO: 1125441 - RNA, 21 nt, Human
ccugccccaucaccaggggag

SEQ ID NO: 1125442 - RNA, 22 nt, Human
cuguggggcaugcagccgaugg

SEQ ID NO: 1125443 - RNA, 18 nt, Human
gcucuugcuuuccccugg

SEQ ID NO: 1125444 - RNA, 24 nt, Human
gggcaugcagccgauggugcagcu

SEQ ID NO: 1125445 - RNA, 21 nt, Human
uccugccccaucaccagggga

SEQ ID NO: 1125446 - RNA, 23 nt, Human
ugacagaagaaacauuuuuaauu

SEQ ID NO: 1125447 - RNA, 20 nt, Human
ugcaccaggccacagggcuu

SEQ ID NO: 1125448 - RNA, 22 nt, Human
ugccccaucaccaggggagucc

SEQ ID NO: 1125449 - RNA, 18 nt, Human
ugggaugucgaggacacu

SEQ ID NO: 1125450 - RNA, 20 nt, Human
uguucugguccugccccauc

SEQ ID NO: 1125451 - RNA, 22 nt, Human
aaagaacgagaaauagccaaac

SEQ ID NO: 1125452 - RNA, 18 nt, Human
aaaguguuauggucugau

SEQ ID NO: 1125453 - RNA, 18 nt, Human
aaauucuuucagauaacc

SEQ ID NO: 1125454 - RNA, 23 nt, Human
aacaagauugugagaguucagag

SEQ ID NO: 1125455 - RNA, 24 nt, Human
aacccucuguacuugugcuuuacc

SEQ ID NO: 1125456 - RNA, 21 nt, Human
aagaaugcaguguaaauggaa

SEQ ID NO: 1125457 - RNA, 20 nt, Human
aagcaagcacuauuuuagac

SEQ ID NO: 1125458 - RNA, 27 nt, Human
aagcaagggaugaggcaaaagggaccc

SEQ ID NO: 1125459 - RNA, 18 nt, Human
aaguguuaaaaaaacaug

SEQ ID NO: 1125460 - RNA, 23 nt, Human
aauagcuggguuuacaggcaugu

SEQ ID NO: 1125461 - RNA, 19 nt, Human
aaucauagcucacugcagc

SEQ ID NO: 1125462 - RNA, 22 nt, Human
aauucagucucccuggaaguug

SEQ ID NO: 1125463 - RNA, 24 nt, Human
acagcagcagucuagggcuuccaa

SEQ ID NO: 1125464 - RNA, 19 nt, Human
acaggcuggagugcagcug

SEQ ID NO: 1125465 - RNA, 21 nt, Human
accucagccuccugaauagcu

SEQ ID NO: 1125466 - RNA, 25 nt, Human
accucagccuccugaauagcugggu

SEQ ID NO: 1125467 - RNA, 19 nt, Human
accucugauccccuaaucc

SEQ ID NO: 1125468 - RNA, 19 nt, Human
acugcagccucaaacuccu

SEQ ID NO: 1125469 - RNA, 22 nt, Human
agaaaaccaucaugcucccccc

SEQ ID NO: 1125470 - RNA, 21 nt, Human
agaaccuuaaccagggcaggc

SEQ ID NO: 1125471 - RNA, 20 nt, Human
agaagcuggccgcugcaucc

SEQ ID NO: 1125472 - RNA, 21 nt, Human
agacaaccuuuacugagcacc

SEQ ID NO: 1125473 - RNA, 19 nt, Human
agcagguaccuccuucagg

SEQ ID NO: 1125474 - RNA, 20 nt, Human
agccucaaacuccuggccuc

SEQ ID NO: 1125475 - RNA, 18 nt, Human
agccuccugaauagcugg

SEQ ID NO: 1125476 - RNA, 19 nt, Human
aggauugaggcgggggugu

SEQ ID NO: 1125477 - RNA, 19 nt, Human
aggcaugugacacugugcc

SEQ ID NO: 1125478 - RNA, 23 nt, Human
agggaugaggcaaaaggcaucuu

SEQ ID NO: 1125479 - RNA, 24 nt, Human
agguaauuaggucaugaaggugga

SEQ ID NO: 1125480 - RNA, 21 nt, Human
agguggguguagagagggugc

SEQ ID NO: 1125481 - RNA, 23 nt, Human
agugcagcugugcaaucauagcu

SEQ ID NO: 1125482 - RNA, 18 nt, Human
auagcucacugcagccuc

SEQ ID NO: 1125483 - RNA, 25 nt, Human
aucaugcuccccccgccccgaacuc

SEQ ID NO: 1125484 - RNA, 20 nt, Human
aucuuggacuuccagacucc

SEQ ID NO: 1125485 - RNA, 21 nt, Human
auugugagaguucagaguucc

SEQ ID NO: 1125486 - RNA, 22 nt, Human
caaaauagcacccauuucaggc

SEQ ID NO: 1125487 - RNA, 24 nt, Human
caacagcauuugugacucugucua

SEQ ID NO: 1125488 - RNA, 23 nt, Human
caagacaaccuuuacugagcacc

SEQ ID NO: 1125489 - RNA, 19 nt, Human
caccucugauccccuaauc

SEQ ID NO: 1125490 - RNA, 23 nt, Human
cacuuagcuuuggggugguggga

SEQ ID NO: 1125491 - RNA, 24 nt, Human
cagaaagaacgagaaauagccaaa

SEQ ID NO: 1125492 - RNA, 25 nt, Human
cagaacucggccaugauggcaccau

SEQ ID NO: 1125493 - RNA, 23 nt, Human
cagcagcagucuagggcuuccaa

SEQ ID NO: 1125494 - RNA, 25 nt, Human
cagcaggaggauugaggcgggggug

SEQ ID NO: 1125495 - RNA, 23 nt, Human
cagccucaaacuccuggccucaa

SEQ ID NO: 1125496 - RNA, 18 nt, Human
caggagcaggagcuaaga

SEQ ID NO: 1125497 - RNA, 19 nt, Human
caugcuccccccgccccga

SEQ ID NO: 1125498 - RNA, 23 nt, Human
ccaaguguuaaaaaaacauggga

SEQ ID NO: 1125499 - RNA, 23 nt, Human
ccagaagagggcccucaccagaa

SEQ ID NO: 1125500 - RNA, 18 nt, Human
ccagggcaggcguagaga

SEQ ID NO: 1125501 - RNA, 20 nt, Human
ccaucaugcuccccccgccc

SEQ ID NO: 1125502 - RNA, 18 nt, Human
ccccuaaucccauuccgu

SEQ ID NO: 1125503 - RNA, 24 nt, Human
cccugcccucaugaggcuuuacag

SEQ ID NO: 1125504 - RNA, 23 nt, Human
ccgauccucccaccucagccucc

SEQ ID NO: 1125505 - RNA, 19 nt, Human
ccugucccuagaggaucug

SEQ ID NO: 1125506 - RNA, 24 nt, Human
ccuuaaccagggcaggccgggguc

SEQ ID NO: 1125507 - RNA, 21 nt, Human
cgggacgguaaagaaaguauc

SEQ ID NO: 1125508 - RNA, 24 nt, Human
cuagucaaaauagcacccauuuca

SEQ ID NO: 1125509 - RNA, 24 nt, Human
cucaaccgauccucccaccucagc

SEQ ID NO: 1125510 - RNA, 21 nt, Human
cucacugcagccucaaacucc

SEQ ID NO: 1125511 - RNA, 24 nt, Human
cucacugcagccucaaacuccugg

SEQ ID NO: 1125512 - RNA, 25 nt, Human
cuccaaaagucuauaauaauacuua

SEQ ID NO: 1125513 - RNA, 21 nt, Human
cuccccccgccccgaacucau

SEQ ID NO: 1125514 - RNA, 24 nt, Human
cuccugaauagcuggguuuacagg

SEQ ID NO: 1125515 - RNA, 27 nt, Human
cuccuggccucaaccgauccucccacc

SEQ ID NO: 1125516 - RNA, 22 nt, Human
cugcagccucaaacuccuggcc

SEQ ID NO: 1125517 - RNA, 27 nt, Human
cugcagccucaaacuccuggccucaac

SEQ ID NO: 1125518 - RNA, 18 nt, Human
gaaauagccaaaccauga

SEQ ID NO: 1125519 - RNA, 21 nt, Human
gaaauucuuucagauaaccuu

SEQ ID NO: 1125520 - RNA, 23 nt, Human
gaaccaacccggcagccuguguu

SEQ ID NO: 1125521 - RNA, 20 nt, Human
gaacucggccaugauggcac

SEQ ID NO: 1125522 - RNA, 18 nt, Human
gacucugucuaguucuug

SEQ ID NO: 1125523 - RNA, 19 nt, Human
gacuggaggggucaggggc

SEQ ID NO: 1125524 - RNA, 18 nt, Human
gagcaagcuuacccucca

SEQ ID NO: 1125525 - RNA, 18 nt, Human
gagcaccuaucauaaagc

SEQ ID NO: 1125526 - RNA, 18 nt, Human
gagcucaggaagaggcag

SEQ ID NO: 1125527 - RNA, 23 nt, Human
gaucuuggacuuccagacuccug

SEQ ID NO: 1125528 - RNA, 19 nt, Human
gaugugaagguugagaaaa

SEQ ID NO: 1125529 - RNA, 25 nt, Human
gcaaaaggcaucuuugaaaauuaca

SEQ ID NO: 1125530 - RNA, 24 nt, Human
gcagcaggaggauugaggcggggg

SEQ ID NO: 1125531 - RNA, 23 nt, Human
gccaagcuaaucuuuuuaaaagu

SEQ ID NO: 1125532 - RNA, 24 nt, Human
gcuccccccgccccgaacucauuu

SEQ ID NO: 1125533 - RNA, 20 nt, Human
gggaaauguccuuuuucucu

SEQ ID NO: 1125534 - RNA, 18 nt, Human
gggaauguuaagucuaac

SEQ ID NO: 1125535 - RNA, 19 nt, Human
ggugggguuauuccagaca

SEQ ID NO: 1125536 - RNA, 21 nt, Human
guggugggagggagggguugg

SEQ ID NO: 1125537 - RNA, 18 nt, Human
guuuggagauggcaucuu

SEQ ID NO: 1125538 - RNA, 21 nt, Human
uaaaaauuucuguguauccuc

SEQ ID NO: 1125539 - RNA, 21 nt, Human
uaaacaaugucacaugauuaa

SEQ ID NO: 1125540 - RNA, 27 nt, Human
uacagcagcagucuagggcuuccaaga

SEQ ID NO: 1125541 - RNA, 24 nt, Human
uacaggcaugugacacugugccca

SEQ ID NO: 1125542 - RNA, 21 nt, Human
uagagaugaacuuaagaccua

SEQ ID NO: 1125543 - RNA, 23 nt, Human
uagaugaaguuucagcaagggcu

SEQ ID NO: 1125544 - RNA, 23 nt, Human
uagccaaaccaugaguucccuca

SEQ ID NO: 1125545 - RNA, 24 nt, Human
uagcucacugcagccucaaacucc

SEQ ID NO: 1125546 - RNA, 21 nt, Human
uauaauaauacuuaaaagcaa

SEQ ID NO: 1125547 - RNA, 23 nt, Human
uaugcugucuucacgggacggua

SEQ ID NO: 1125548 - RNA, 25 nt, Human
ucaaccgauccucccaccucagccu

SEQ ID NO: 1125549 - RNA, 24 nt, Human
ucacugcagccucaaacuccuggc

SEQ ID NO: 1125550 - RNA, 24 nt, Human
ucacuuagcuuuggggugguggga

SEQ ID NO: 1125551 - RNA, 20 nt, Human
ucagauaaccuggagggaaa

SEQ ID NO: 1125552 - RNA, 19 nt, Human
ucaggaagaggcagggccc

SEQ ID NO: 1125553 - RNA, 21 nt, Human
ucaggggcaacucccagguug

SEQ ID NO: 1125554 - RNA, 21 nt, Human
ucauagaauauacacucucaa

SEQ ID NO: 1125555 - RNA, 20 nt, Human
uccccagaaugaugguguuu

SEQ ID NO: 1125556 - RNA, 23 nt, Human
ucccuagaggaucugcucaauuc

SEQ ID NO: 1125557 - RNA, 23 nt, Human
ucccucaccucugauccccuaau

SEQ ID NO: 1125558 - RNA, 26 nt, Human
uccucccaccucagccuccugaauag

SEQ ID NO: 1125559 - RNA, 18 nt, Human
ucucagcacaggcuggag

SEQ ID NO: 1125560 - RNA, 23 nt, Human
ucucagcacaggcuggagugcag

SEQ ID NO: 1125561 - RNA, 24 nt, Human
ucugugaucaacagcauuugugac

SEQ ID NO: 1125562 - RNA, 22 nt, Human
ugaagaaacaagauugugagag

SEQ ID NO: 1125563 - RNA, 18 nt, Human
ugaauagcuggguuuaca

SEQ ID NO: 1125564 - RNA, 21 nt, Human
ugagcagguaccuccuucagg

SEQ ID NO: 1125565 - RNA, 22 nt, Human
ugaguaagguuccaaaccugcc

SEQ ID NO: 1125566 - RNA, 23 nt, Human
ugaguucccucaccucugauccc

SEQ ID NO: 1125567 - RNA, 21 nt, Human
ugauccccuaaucccauuccg

SEQ ID NO: 1125568 - RNA, 21 nt, Human
ugaugagaaccuuaaccaggg

SEQ ID NO: 1125569 - RNA, 18 nt, Human
uggaaccggggugggguu

SEQ ID NO: 1125570 - RNA, 28 nt, Human
uggagugaacaauuucauggcaggcacu

SEQ ID NO: 1125571 - RNA, 18 nt, Human
uggcagaagaaauucagu

SEQ ID NO: 1125572 - RNA, 21 nt, Human
uggcaucuuugggagguaauu

SEQ ID NO: 1125573 - RNA, 26 nt, Human
ugggagggagggguugggaagcuuuc

SEQ ID NO: 1125574 - RNA, 18 nt, Human
ugggguggugggagggag

SEQ ID NO: 1125575 - RNA, 18 nt, Human
ugggguggugggagggag

SEQ ID NO: 1125576 - RNA, 19 nt, Human
ugggguggugggagggagg

SEQ ID NO: 1125577 - RNA, 25 nt, Human
ugggguggugggagggagggguugg

SEQ ID NO: 1125578 - RNA, 24 nt, Human
uggguuuacaggcaugugacacug

SEQ ID NO: 1125579 - RNA, 23 nt, Human
ugguauuuuguuacaggagcagg

SEQ ID NO: 1125580 - RNA, 21 nt, Human
uggucugauguaucccccaaa

SEQ ID NO: 1125581 - RNA, 24 nt, Human
ugguguuuggagauggcaucuuug

SEQ ID NO: 1125582 - RNA, 21 nt, Human
uguaaagaaucagagagccca

SEQ ID NO: 1125583 - RNA, 22 nt, Human
uguaugaaaugugcauggcggu

SEQ ID NO: 1125584 - RNA, 23 nt, Human
ugugacacugugcccagcucuuc

SEQ ID NO: 1125585 - RNA, 23 nt, Human
ugugcaaucauagcucacugcag

SEQ ID NO: 1125586 - RNA, 23 nt, Human
uguuacagaggcaagaagagggg

SEQ ID NO: 1125587 - RNA, 18 nt, Human
uguuuuguuuuguuuuug

SEQ ID NO: 1125588 - RNA, 20 nt, Human
uguuuuguuuuugcagggcu

SEQ ID NO: 1125589 - RNA, 19 nt, Human
uuacagaggcaagaagagg

SEQ ID NO: 1125590 - RNA, 19 nt, Human
uuacaggcaugugacacug

SEQ ID NO: 1125591 - RNA, 22 nt, Human
uucaagucucucaauucuaacu

SEQ ID NO: 1125592 - RNA, 21 nt, Human
uuccguggagguaaccacuua

SEQ ID NO: 1125593 - RNA, 19 nt, Human
uuccugacuuggguggaac

SEQ ID NO: 1125594 - RNA, 23 nt, Human
uuccuuccucaccugcugcaagu

SEQ ID NO: 1125595 - RNA, 19 nt, Human
uugaagaaugcaguguaaa

SEQ ID NO: 1125596 - RNA, 23 nt, Human
uugaugguguuacugacuggcag

SEQ ID NO: 1125597 - RNA, 18 nt, Human
uuggagauggcaucuuug

SEQ ID NO: 1125598 - RNA, 19 nt, Human
uuuacugagcaccuaucaa

SEQ ID NO: 1125599 - RNA, 21 nt, Human
uuugcaugccucuaaggggcu

SEQ ID NO: 1125600 - RNA, 20 nt, Human
ccuuuuggaaauagcucugg

SEQ ID NO: 1125601 - RNA, 23 nt, Human
ucagcaaauguaaagccccacuu

SEQ ID NO: 1125602 - RNA, 18 nt, Human
ugcucagcaaauguaaag

SEQ ID NO: 1125603 - RNA, 21 nt, Human
uucaccuuuuggaaauagcuc

SEQ ID NO: 1125604 - RNA, 21 nt, Human
aaagcccuucucugaccgcac

SEQ ID NO: 1125605 - RNA, 18 nt, Human
aaagugcugggauuacaa

SEQ ID NO: 1125606 - RNA, 24 nt, Human
aaagugcugggauuacaagcguga

SEQ ID NO: 1125607 - RNA, 18 nt, Human
aagcuccuaacgcccucc

SEQ ID NO: 1125608 - RNA, 18 nt, Human
aagucccuguugugcccc

SEQ ID NO: 1125609 - RNA, 19 nt, Human
aagugcugggauuacaagc

SEQ ID NO: 1125610 - RNA, 19 nt, Human
aagugcugggauuacaagc

SEQ ID NO: 1125611 - RNA, 26 nt, Human
aagugcugggauuacaagcgugagcc

SEQ ID NO: 1125612 - RNA, 24 nt, Human
acacaggccccguccaagccacgc

SEQ ID NO: 1125613 - RNA, 25 nt, Human
acacuacaguccccugaggagcuac

SEQ ID NO: 1125614 - RNA, 20 nt, Human
accauauuggccaggcuagu

SEQ ID NO: 1125615 - RNA, 18 nt, Human
acccuggaccucugucuc

SEQ ID NO: 1125616 - RNA, 21 nt, Human
accgcacugcugagugcagca

SEQ ID NO: 1125617 - RNA, 20 nt, Human
accuccaccucuucccuugg

SEQ ID NO: 1125618 - RNA, 29 nt, Human
accugggcuugaggccucauagaggagcc

SEQ ID NO: 1125619 - RNA, 18 nt, Human
acgggguuuuaccauauu

SEQ ID NO: 1125620 - RNA, 20 nt, Human
acgggguuuuaccauauugg

SEQ ID NO: 1125621 - RNA, 24 nt, Human
acgggguuuuaccauauuggccag

SEQ ID NO: 1125622 - RNA, 21 nt, Human
acuacaguccccugaggagcu

SEQ ID NO: 1125623 - RNA, 20 nt, Human
acugcaaccuccaccucccg

SEQ ID NO: 1125624 - RNA, 20 nt, Human
agagccuggcuggggacugg

SEQ ID NO: 1125625 - RNA, 24 nt, Human
agcgauucuccugccucagccucc

SEQ ID NO: 1125626 - RNA, 26 nt, Human
agcuccacccacagucucugggcagc

SEQ ID NO: 1125627 - RNA, 21 nt, Human
aggaggacuuugugccaaggc

SEQ ID NO: 1125628 - RNA, 21 nt, Human
aggccaaggccaggcuuggga

SEQ ID NO: 1125629 - RNA, 19 nt, Human
aggggacagagccuggcug

SEQ ID NO: 1125630 - RNA, 23 nt, Human
aggggcaggacucuggggaaccu

SEQ ID NO: 1125631 - RNA, 26 nt, Human
aggggcaggacucuggggaaccuauu

SEQ ID NO: 1125632 - RNA, 23 nt, Human
aggggucagcacugaccacucug

SEQ ID NO: 1125633 - RNA, 19 nt, Human
agguauggcaggggacaga

SEQ ID NO: 1125634 - RNA, 18 nt, Human
aguagcugggauuacagg

SEQ ID NO: 1125635 - RNA, 19 nt, Human
agucucgaacuccugacuu

SEQ ID NO: 1125636 - RNA, 24 nt, Human
caaagugcugggauuacaagcgug

SEQ ID NO: 1125637 - RNA, 23 nt, Human
caaccuccaccucccgaguucaa

SEQ ID NO: 1125638 - RNA, 23 nt, Human
caagaccaaaagcccuucucuga

SEQ ID NO: 1125639 - RNA, 20 nt, Human
caagcgauucuccugccuca

SEQ ID NO: 1125640 - RNA, 22 nt, Human
caagcgauucuccugccucagc

SEQ ID NO: 1125641 - RNA, 19 nt, Human
caagcuccuaacgcccucc

SEQ ID NO: 1125642 - RNA, 24 nt, Human
caagcuccuaacgcccuccccaca

SEQ ID NO: 1125643 - RNA, 20 nt, Human
cacaguaacaggggcagggu

SEQ ID NO: 1125644 - RNA, 24 nt, Human
caccacagccagcuaauuuuugua

SEQ ID NO: 1125645 - RNA, 24 nt, Human
caccucggccucccaaagugcugg

SEQ ID NO: 1125646 - RNA, 21 nt, Human
cagagccuggcuggggacugg

SEQ ID NO: 1125647 - RNA, 18 nt, Human
cagcaggcagcuccaccc

SEQ ID NO: 1125648 - RNA, 20 nt, Human
cagcaggcagcuccacccac

SEQ ID NO: 1125649 - RNA, 19 nt, Human
caggagaggaggaauggua

SEQ ID NO: 1125650 - RNA, 22 nt, Human
caggagaggaggaaugguaggu

SEQ ID NO: 1125651 - RNA, 19 nt, Human
caggccccguccaagccac

SEQ ID NO: 1125652 - RNA, 18 nt, Human
caggguuuacuaccuugg

SEQ ID NO: 1125653 - RNA, 22 nt, Human
caggguuuacuaccuuggggcc

SEQ ID NO: 1125654 - RNA, 24 nt, Human
cagguaucuacccaccucggccuc

SEQ ID NO: 1125655 - RNA, 20 nt, Human
caggugcccaccaccacagc

SEQ ID NO: 1125656 - RNA, 24 nt, Human
cagucucugggcagccccaggcug

SEQ ID NO: 1125657 - RNA, 19 nt, Human
caguggcacgaucuuggcu

SEQ ID NO: 1125658 - RNA, 22 nt, Human
cauagaggagcccucagugcug

SEQ ID NO: 1125659 - RNA, 24 nt, Human
cauauuggccaggcuagucucgaa

SEQ ID NO: 1125660 - RNA, 24 nt, Human
cauuagaggggcaggacucugggg

SEQ ID NO: 1125661 - RNA, 28 nt, Human
cauugcacuauagcuucagaacaguggu

SEQ ID NO: 1125662 - RNA, 20 nt, Human
cauugcacuauagcuucagg

SEQ ID NO: 1125663 - RNA, 20 nt, Human
ccaaagugcugggauuacaa

SEQ ID NO: 1125664 - RNA, 22 nt, Human
ccaaagugcugggauuacaagc

SEQ ID NO: 1125665 - RNA, 24 nt, Human
ccaaagugcugggauuacaagcgu

SEQ ID NO: 1125666 - RNA, 18 nt, Human
ccaagccacgcugaggac

SEQ ID NO: 1125667 - RNA, 19 nt, Human
ccaaggccaaggccaggcu

SEQ ID NO: 1125668 - RNA, 24 nt, Human
ccaccucccgaguucaagcgauuc

SEQ ID NO: 1125669 - RNA, 21 nt, Human
ccaggcuguccccuccccacu

SEQ ID NO: 1125670 - RNA, 24 nt, Human
cccaagagccccaggggucagcac

SEQ ID NO: 1125671 - RNA, 21 nt, Human
cccaccaccacagccagcuaa

SEQ ID NO: 1125672 - RNA, 18 nt, Human
ccccaggcuguccccucc

SEQ ID NO: 1125673 - RNA, 22 nt, Human
ccccugaggagcuacaugacuu

SEQ ID NO: 1125674 - RNA, 23 nt, Human
cccgaguagcugggauuacaggu

SEQ ID NO: 1125675 - RNA, 24 nt, Human
cccgaguagcugggauuacaggug

SEQ ID NO: 1125676 - RNA, 23 nt, Human
cccgaguucaagcgauucuccug

SEQ ID NO: 1125677 - RNA, 25 nt, Human
cccuccccacucugauucuaggaca

SEQ ID NO: 1125678 - RNA, 21 nt, Human
ccgaguagcugggauuacagg

SEQ ID NO: 1125679 - RNA, 23 nt, Human
ccucaggggcagccuccaggagu

SEQ ID NO: 1125680 - RNA, 24 nt, Human
ccucccgaguucaagcgauucucc

SEQ ID NO: 1125681 - RNA, 26 nt, Human
ccucugaauuauuucuugcuuagccc

SEQ ID NO: 1125682 - RNA, 23 nt, Human
ccugccucagccucccgaguagc

SEQ ID NO: 1125683 - RNA, 18 nt, Human
ccuggcuggggacuggac

SEQ ID NO: 1125684 - RNA, 25 nt, Human
ccuugggacugaucugggcugguuu

SEQ ID NO: 1125685 - RNA, 24 nt, Human
cucagccucccgaguagcugggau

SEQ ID NO: 1125686 - RNA, 19 nt, Human
cucugaauuauuucuugcu

SEQ ID NO: 1125687 - RNA, 23 nt, Human
cugcaaccuccaccucccgaguu

SEQ ID NO: 1125688 - RNA, 24 nt, Human
cugcaaccuccaccucccgaguuc

SEQ ID NO: 1125689 - RNA, 23 nt, Human
cugccucagccucccgaguagcu

SEQ ID NO: 1125690 - RNA, 23 nt, Human
cuggacuucaagaccaaaagccc

SEQ ID NO: 1125691 - RNA, 19 nt, Human
cuggagcacaguaacaggg

SEQ ID NO: 1125692 - RNA, 25 nt, Human
cuggagggccuuccaggaacugucc

SEQ ID NO: 1125693 - RNA, 20 nt, Human
cugggcagccccaggcuguc

SEQ ID NO: 1125694 - RNA, 18 nt, Human
cugggguuggagccuagg

SEQ ID NO: 1125695 - RNA, 19 nt, Human
cugggguuggagccuaggc

SEQ ID NO: 1125696 - RNA, 21 nt, Human
cuuugugccaaggccaaggcc

SEQ ID NO: 1125697 - RNA, 21 nt, Human
gaccucugucuccucaucuuu

SEQ ID NO: 1125698 - RNA, 22 nt, Human
gaccuugcucaggacaguccua

SEQ ID NO: 1125699 - RNA, 23 nt, Human
gacuucagguaucuacccaccuc

SEQ ID NO: 1125700 - RNA, 19 nt, Human
gagcacaguaacaggggca

SEQ ID NO: 1125701 - RNA, 18 nt, Human
gauuacaagcgugagcca

SEQ ID NO: 1125702 - RNA, 24 nt, Human
gauuacaagcgugagccaccgugc

SEQ ID NO: 1125703 - RNA, 18 nt, Human
gauucuaggacaaagacc

SEQ ID NO: 1125704 - RNA, 18 nt, Human
gcaaccuccaccucccga

SEQ ID NO: 1125705 - RNA, 22 nt, Human
gcaaccuccaccucccgaguuc

SEQ ID NO: 1125706 - RNA, 22 nt, Human
gcagcaggcagcuccacccaca

SEQ ID NO: 1125707 - RNA, 20 nt, Human
gcagccccaggcuguccccu

SEQ ID NO: 1125708 - RNA, 20 nt, Human
gccaaggccaaggccaggcu

SEQ ID NO: 1125709 - RNA, 24 nt, Human
gcgauucuccugccucagccuccc

SEQ ID NO: 1125710 - RNA, 21 nt, Human
gcugggauuacaagcgugagc

SEQ ID NO: 1125711 - RNA, 22 nt, Human
ggaacugucccuucccuuagga

SEQ ID NO: 1125712 - RNA, 23 nt, Human
ggcagggcacacucugguucagg

SEQ ID NO: 1125713 - RNA, 20 nt, Human
ggcaggggacagagccuggc

SEQ ID NO: 1125714 - RNA, 21 nt, Human
gggcugcagaccuugcucagg

SEQ ID NO: 1125715 - RNA, 18 nt, Human
ggggcucccugacccugg

SEQ ID NO: 1125716 - RNA, 23 nt, Human
gggggcccuuggcggaggcgggc

SEQ ID NO: 1125717 - RNA, 22 nt, Human
ggggggucccuagacagagggu

SEQ ID NO: 1125718 - RNA, 18 nt, Human
ggggugagcagagcuggg

SEQ ID NO: 1125719 - RNA, 23 nt, Human
gggguuuuaccauauuggccagg

SEQ ID NO: 1125720 - RNA, 22 nt, Human
ggguuuuaccauauuggccagg

SEQ ID NO: 1125721 - RNA, 19 nt, Human
ggucagguggccacauccu

SEQ ID NO: 1125722 - RNA, 18 nt, Human
guagcugggauuacaggu

SEQ ID NO: 1125723 - RNA, 23 nt, Human
guaggacaaaggacucuggccuu

SEQ ID NO: 1125724 - RNA, 23 nt, Human
guaucuacccaccucggccuccc

SEQ ID NO: 1125725 - RNA, 21 nt, Human
guccccuccccacucugauuc

SEQ ID NO: 1125726 - RNA, 24 nt, Human
uaauagacacgggguuuuaccaua

SEQ ID NO: 1125727 - RNA, 22 nt, Human
uaauuuuuguauuuuuaauaga

SEQ ID NO: 1125728 - RNA, 22 nt, Human
uacaagcgugagccaccgugcc

SEQ ID NO: 1125729 - RNA, 24 nt, Human
uaccauauuggccaggcuagucuc

SEQ ID NO: 1125730 - RNA, 27 nt, Human
uaccauauuggccaggcuagucucgaa

SEQ ID NO: 1125731 - RNA, 22 nt, Human
uacccaccucggccucccaaag

SEQ ID NO: 1125732 - RNA, 23 nt, Human
uacccaccucggccucccaaagu

SEQ ID NO: 1125733 - RNA, 25 nt, Human
uaccuggacuucaagaccaaaagcc

SEQ ID NO: 1125734 - RNA, 23 nt, Human
uaccuuggggccucuuuccacac

SEQ ID NO: 1125735 - RNA, 20 nt, Human
uagacacgggguuuuaccau

SEQ ID NO: 1125736 - RNA, 23 nt, Human
uagguguggaaacaaggggcagg

SEQ ID NO: 1125737 - RNA, 21 nt, Human
ucaagaccaaaagcccuucuc

SEQ ID NO: 1125738 - RNA, 25 nt, Human
ucaagaccaaaagcccuucucugac

SEQ ID NO: 1125739 - RNA, 20 nt, Human
ucagccucccgaguagcugg

SEQ ID NO: 1125740 - RNA, 18 nt, Human
ucaggcacccagaggaga

SEQ ID NO: 1125741 - RNA, 20 nt, Human
uccaaaaaaauaugaaacac

SEQ ID NO: 1125742 - RNA, 22 nt, Human
uccaaaaaaauaugaaacacac

SEQ ID NO: 1125743 - RNA, 21 nt, Human
uccacccacagucucugggca

SEQ ID NO: 1125744 - RNA, 18 nt, Human
ucccaaagugcugggauu

SEQ ID NO: 1125745 - RNA, 24 nt, Human
ucccaaagugcugggauuacaagc

SEQ ID NO: 1125746 - RNA, 25 nt, Human
uccccagcauccagcuggagggccu

SEQ ID NO: 1125747 - RNA, 23 nt, Human
ucccgaguagcugggauuacagg

SEQ ID NO: 1125748 - RNA, 24 nt, Human
ucccgaguagcugggauuacaggu

SEQ ID NO: 1125749 - RNA, 21 nt, Human
ucccgaguucaagcgauucuc

SEQ ID NO: 1125750 - RNA, 24 nt, Human
ucccgaguucaagcgauucuccug

SEQ ID NO: 1125751 - RNA, 26 nt, Human
ucccuagacagaggguaggaccucug

SEQ ID NO: 1125752 - RNA, 20 nt, Human
ucccucugcagaccucacag

SEQ ID NO: 1125753 - RNA, 20 nt, Human
ucccuuuucuacauggggag

SEQ ID NO: 1125754 - RNA, 22 nt, Human
uccuaaugccugcaagcuccua

SEQ ID NO: 1125755 - RNA, 18 nt, Human
uccuagagcugggccaag

SEQ ID NO: 1125756 - RNA, 22 nt, Human
uccuagagcugggccaagccuc

SEQ ID NO: 1125757 - RNA, 18 nt, Human
ucggccucccaaagugcu

SEQ ID NO: 1125758 - RNA, 21 nt, Human
ucuacccaccucggccuccca

SEQ ID NO: 1125759 - RNA, 24 nt, Human
ucuccugccucagccucccgagua

SEQ ID NO: 1125760 - RNA, 23 nt, Human
ucucgaacuccugacuucaggua

SEQ ID NO: 1125761 - RNA, 20 nt, Human
ucucugggcagccccaggcu

SEQ ID NO: 1125762 - RNA, 21 nt, Human
ucugggcagccccaggcuguc

SEQ ID NO: 1125763 - RNA, 19 nt, Human
ucugggguuggagccuagg

SEQ ID NO: 1125764 - RNA, 19 nt, Human
ucuugcucugucauccagg

SEQ ID NO: 1125765 - RNA, 20 nt, Human
ucuugcucugucauccagga

SEQ ID NO: 1125766 - RNA, 23 nt, Human
ucuugcucugucauccaggaugg

SEQ ID NO: 1125767 - RNA, 18 nt, Human
ucuuuucucccucugcag

SEQ ID NO: 1125768 - RNA, 20 nt, Human
ugaccacacacuacaguccc

SEQ ID NO: 1125769 - RNA, 19 nt, Human
ugaccagaggcuggacaag

SEQ ID NO: 1125770 - RNA, 19 nt, Human
ugaccuccaccucuucccu

SEQ ID NO: 1125771 - RNA, 22 nt, Human
ugacugcaaccuccaccucccg

SEQ ID NO: 1125772 - RNA, 24 nt, Human
ugacugcaaccuccaccucccgag

SEQ ID NO: 1125773 - RNA, 19 nt, Human
ugacuucagguaucuaccc

SEQ ID NO: 1125774 - RNA, 20 nt, Human
ugacuucugaugccaggucc

SEQ ID NO: 1125775 - RNA, 23 nt, Human
ugauuggggcuggauguucacuu

SEQ ID NO: 1125776 - RNA, 18 nt, Human
ugcaggguugggaaccau

SEQ ID NO: 1125777 - RNA, 24 nt, Human
ugccucagccucccgaguagcugg

SEQ ID NO: 1125778 - RNA, 19 nt, Human
ugcucaggacaguccuaau

SEQ ID NO: 1125779 - RNA, 24 nt, Human
ugcugggauuacaagcgugagcca

SEQ ID NO: 1125780 - RNA, 22 nt, Human
ugcuggggaucaggagaggagg

SEQ ID NO: 1125781 - RNA, 22 nt, Human
uggagggccuuccaggaacugu

SEQ ID NO: 1125782 - RNA, 19 nt, Human
uggagucuugcucugucau

SEQ ID NO: 1125783 - RNA, 24 nt, Human
uggccaggcuagucucgaacuccu

SEQ ID NO: 1125784 - RNA, 21 nt, Human
ugggauuacaagcgugagcca

SEQ ID NO: 1125785 - RNA, 22 nt, Human
ugggauuacaagcgugagccac

SEQ ID NO: 1125786 - RNA, 23 nt, Human
ugggauuacaagcgugagccacc

SEQ ID NO: 1125787 - RNA, 23 nt, Human
ugggauuacaagcgugagccacc

SEQ ID NO: 1125788 - RNA, 24 nt, Human
ugggauuacaagcgugagccaccg

SEQ ID NO: 1125789 - RNA, 21 nt, Human
ugggauuacaggugcccacca

SEQ ID NO: 1125790 - RNA, 24 nt, Human
ugggauuacaggugcccaccacca

SEQ ID NO: 1125791 - RNA, 23 nt, Human
ugguagguguggaaacaaggggc

SEQ ID NO: 1125792 - RNA, 24 nt, Human
uggugugcaguggcacgaucuugg

SEQ ID NO: 1125793 - RNA, 21 nt, Human
ugucuccucaucuuucugccc

SEQ ID NO: 1125794 - RNA, 24 nt, Human
ugugcaguggcacgaucuuggcug

SEQ ID NO: 1125795 - RNA, 24 nt, Human
uuaauagacacgggguuuuaccau

SEQ ID NO: 1125796 - RNA, 21 nt, Human
uucaagcgauucuccugccuc

SEQ ID NO: 1125797 - RNA, 23 nt, Human
uucaagcgauucuccugccucag

SEQ ID NO: 1125798 - RNA, 24 nt, Human
uucaagcgauucuccugccucagc

SEQ ID NO: 1125799 - RNA, 19 nt, Human
uucagguaucuacccaccu

SEQ ID NO: 1125800 - RNA, 18 nt, Human
uucggggugagcagagcu

SEQ ID NO: 1125801 - RNA, 18 nt, Human
uuucucccucugcagacc

SEQ ID NO: 1125802 - RNA, 18 nt, Human
uuuuguauuuuuaauaga

SEQ ID NO: 1125803 - RNA, 21 nt, Human
uuuuuaauagacacgggguuu

SEQ ID NO: 1125804 - RNA, 18 nt, Human
uuuuuguauuuuuaauag

SEQ ID NO: 1125805 - RNA, 23 nt, Human
agacaagaccgugccuggaccug

SEQ ID NO: 1125806 - RNA, 24 nt, Human
agaccuuggcccucacagcagccc

SEQ ID NO: 1125807 - RNA, 19 nt, Human
agaggaccgagggucccag

SEQ ID NO: 1125808 - RNA, 19 nt, Human
agauugcagggugggugcu

SEQ ID NO: 1125809 - RNA, 20 nt, Human
agcuguggggucgggggcag

SEQ ID NO: 1125810 - RNA, 19 nt, Human
aggggacagagccuggcug

SEQ ID NO: 1125811 - RNA, 19 nt, Human
agguauggcaggggacaga

SEQ ID NO: 1125812 - RNA, 21 nt, Human
cagagccuggcuggggacugg

SEQ ID NO: 1125813 - RNA, 20 nt, Human
cagagcugggccagggugcc

SEQ ID NO: 1125814 - RNA, 20 nt, Human
cagcaggggcuuuggucaug

SEQ ID NO: 1125815 - RNA, 23 nt, Human
cagccgggcuggugccugagggc

SEQ ID NO: 1125816 - RNA, 21 nt, Human
ccagaccuuggcccucacagc

SEQ ID NO: 1125817 - RNA, 19 nt, Human
cccaguggcccugcccagg

SEQ ID NO: 1125818 - RNA, 18 nt, Human
ccucacagcagcccugcc

SEQ ID NO: 1125819 - RNA, 18 nt, Human
ccuggcuggggacuggac

SEQ ID NO: 1125820 - RNA, 19 nt, Human
cgggggcaggggcugugca

SEQ ID NO: 1125821 - RNA, 21 nt, Human
cguggccagaccuuggcccuc

SEQ ID NO: 1125822 - RNA, 21 nt, Human
cuggaccugcaucugugugua

SEQ ID NO: 1125823 - RNA, 24 nt, Human
cugggccagggugccagcaggggc

SEQ ID NO: 1125824 - RNA, 20 nt, Human
cuguguguaugccugggggc

SEQ ID NO: 1125825 - RNA, 18 nt, Human
gagcccaugggacugggg

SEQ ID NO: 1125826 - RNA, 19 nt, Human
gagcugggccagggugcca

SEQ ID NO: 1125827 - RNA, 21 nt, Human
gagcugggccagggugccagc

SEQ ID NO: 1125828 - RNA, 24 nt, Human
gagcuguggggucgggggcagggg

SEQ ID NO: 1125829 - RNA, 25 nt, Human
gcacuggaagaaccugagaccuaaa

SEQ ID NO: 1125830 - RNA, 18 nt, Human
gcccuugugggguugcug

SEQ ID NO: 1125831 - RNA, 19 nt, Human
gcuguggggucgggggcag

SEQ ID NO: 1125832 - RNA, 19 nt, Human
ggacuggggagggugaagg

SEQ ID NO: 1125833 - RNA, 23 nt, Human
ggagugagcuguggggucggggg

SEQ ID NO: 1125834 - RNA, 20 nt, Human
ggcaggggacagagccuggc

SEQ ID NO: 1125835 - RNA, 22 nt, Human
gggccacuggguggggggcugg

SEQ ID NO: 1125836 - RNA, 22 nt, Human
gggccagggugccagcaggggc

SEQ ID NO: 1125837 - RNA, 19 nt, Human
ggggcuggguccugccucu

SEQ ID NO: 1125838 - RNA, 23 nt, Human
gggggcccuuggcggaggcgggc

SEQ ID NO: 1125839 - RNA, 21 nt, Human
guguaugccugggggcugggu

SEQ ID NO: 1125840 - RNA, 20 nt, Human
uaugcccauccuaugcccca

SEQ ID NO: 1125841 - RNA, 18 nt, Human
ucacagcagcccugccug

SEQ ID NO: 1125842 - RNA, 22 nt, Human
ucaggcccggacauggguacug

SEQ ID NO: 1125843 - RNA, 23 nt, Human
ucaggcccggacauggguacugg

SEQ ID NO: 1125844 - RNA, 20 nt, Human
uccaaaaaaauaugaaacac

SEQ ID NO: 1125845 - RNA, 22 nt, Human
uccaaaaaaauaugaaacacac

SEQ ID NO: 1125846 - RNA, 24 nt, Human
ucccaggacucagagcugggccag

SEQ ID NO: 1125847 - RNA, 18 nt, Human
ucuguguguaugccuggg

SEQ ID NO: 1125848 - RNA, 18 nt, Human
ugcccagggugcugcgag

SEQ ID NO: 1125849 - RNA, 20 nt, Human
ugccugagggccugucucca

SEQ ID NO: 1125850 - RNA, 24 nt, Human
ugccuggggcccauucccgggggc

SEQ ID NO: 1125851 - RNA, 22 nt, Human
ugcugugaggagcccaugggaa

SEQ ID NO: 1125852 - RNA, 21 nt, Human
uggaagaaccugagaccuaaa

SEQ ID NO: 1125853 - RNA, 21 nt, Human
uggaccugcaucuguguguau

SEQ ID NO: 1125854 - RNA, 24 nt, Human
uggagugagcuguggggucggggg

SEQ ID NO: 1125855 - RNA, 23 nt, Human
uggcccucacagcagcccugccu

SEQ ID NO: 1125856 - RNA, 19 nt, Human
uggggucgggggcaggggc

SEQ ID NO: 1125857 - RNA, 19 nt, Human
uggggucgggggcaggggc

SEQ ID NO: 1125858 - RNA, 21 nt, Human
uggggucgggggcaggggcug

SEQ ID NO: 1125859 - RNA, 19 nt, Human
uguguugaggacaagcugc

SEQ ID NO: 1125860 - RNA, 21 nt, Human
uugcugugaggagcccauggg

SEQ ID NO: 1125861 - RNA, 19 nt, Human
aaagugcuaagauuacagg

SEQ ID NO: 1125862 - RNA, 24 nt, Human
aaaguggugggaauacaggcauga

SEQ ID NO: 1125863 - RNA, 20 nt, Human
aaauaaggucuggcucuguc

SEQ ID NO: 1125864 - RNA, 21 nt, Human
aaaugcuggugguccagccuc

SEQ ID NO: 1125865 - RNA, 19 nt, Human
aaccagcuggagacccagc

SEQ ID NO: 1125866 - RNA, 22 nt, Human
aaccagcuggagacccagcccc

SEQ ID NO: 1125867 - RNA, 19 nt, Human
aaccucugccuccugggcc

SEQ ID NO: 1125868 - RNA, 25 nt, Human
aacucauagacucaagcaauccacc

SEQ ID NO: 1125869 - RNA, 19 nt, Human
aagagagcccggccggugc

SEQ ID NO: 1125870 - RNA, 24 nt, Human
aagcaauccacccacuuuggccuc

SEQ ID NO: 1125871 - RNA, 18 nt, Human
aagccccccaagaauccc

SEQ ID NO: 1125872 - RNA, 22 nt, Human
aagccccccaagaaucccugga

SEQ ID NO: 1125873 - RNA, 24 nt, Human
aagcugaagugcaguggcacaauc

SEQ ID NO: 1125874 - RNA, 23 nt, Human
aaggcgucccagaggaggugauu

SEQ ID NO: 1125875 - RNA, 20 nt, Human
aaguagcugggacuacaagc

SEQ ID NO: 1125876 - RNA, 26 nt, Human
aagugcuaagauuacaggcaagagcc

SEQ ID NO: 1125877 - RNA, 24 nt, Human
acagaguuuuaccauguugcccag

SEQ ID NO: 1125878 - RNA, 19 nt, Human
acaggcaagagccgccacg

SEQ ID NO: 1125879 - RNA, 20 nt, Human
accauguugcccaggcuggu

SEQ ID NO: 1125880 - RNA, 22 nt, Human
accauguugcccaggcuggucu

SEQ ID NO: 1125881 - RNA, 24 nt, Human
accauguugcccaggcuggucuug

SEQ ID NO: 1125882 - RNA, 25 nt, Human
accauguugcccaggcuggucuuga

SEQ ID NO: 1125883 - RNA, 25 nt, Human
acccacuuuggccucccaaagugcu

SEQ ID NO: 1125884 - RNA, 28 nt, Human
acccauccugccccaccucgaguucccu

SEQ ID NO: 1125885 - RNA, 23 nt, Human
accucugccuccugggccaaggg

SEQ ID NO: 1125886 - RNA, 18 nt, Human
acgggguuucauguuggu

SEQ ID NO: 1125887 - RNA, 21 nt, Human
acgggguuucauguuggucag

SEQ ID NO: 1125888 - RNA, 19 nt, Human
acuugcugggugaucuugg

SEQ ID NO: 1125889 - RNA, 18 nt, Human
agaaucagagcugugaaa

SEQ ID NO: 1125890 - RNA, 24 nt, Human
agacaaggacacugaugcccagag

SEQ ID NO: 1125891 - RNA, 23 nt, Human
agagaaggccgcggaggcucaga

SEQ ID NO: 1125892 - RNA, 18 nt, Human
agauuacaggcaagagcc

SEQ ID NO: 1125893 - RNA, 25 nt, Human
agcaacaaagacucugcaggaaaaa

SEQ ID NO: 1125894 - RNA, 19 nt, Human
agcaauccacccacuuugg

SEQ ID NO: 1125895 - RNA, 18 nt, Human
agccuccaaaguagcugg

SEQ ID NO: 1125896 - RNA, 24 nt, Human
agcucgugcaaccucagcaucccu

SEQ ID NO: 1125897 - RNA, 24 nt, Human
agcugggacuacaagcacacaaca

SEQ ID NO: 1125898 - RNA, 20 nt, Human
agcugggcaacagcaggcuu

SEQ ID NO: 1125899 - RNA, 18 nt, Human
aggcaccuuuucagagaa

SEQ ID NO: 1125900 - RNA, 18 nt, Human
aggcagagauccagcaac

SEQ ID NO: 1125901 - RNA, 24 nt, Human
aggugauccacccaccuuggccuc

SEQ ID NO: 1125902 - RNA, 18 nt, Human
aguagagacgggguuuca

SEQ ID NO: 1125903 - RNA, 21 nt, Human
aguagaggaaggcgucccaga

SEQ ID NO: 1125904 - RNA, 18 nt, Human
aguagcuggaauuacagg

SEQ ID NO: 1125905 - RNA, 23 nt, Human
aguagcugggacuacaagcacac

SEQ ID NO: 1125906 - RNA, 21 nt, Human
agucaaucccugggcaagacc

SEQ ID NO: 1125907 - RNA, 24 nt, Human
agugauucuccugccucagccucc

SEQ ID NO: 1125908 - RNA, 21 nt, Human
agugcaguggcacaaucucag

SEQ ID NO: 1125909 - RNA, 24 nt, Human
agugcaguggcacaaucucagcuc

SEQ ID NO: 1125910 - RNA, 21 nt, Human
aguuugcgugguuccgugcug

SEQ ID NO: 1125911 - RNA, 23 nt, Human
augcauuuccaggcaagagagcc

SEQ ID NO: 1125912 - RNA, 22 nt, Human
augcuggugguccagcccugaa

SEQ ID NO: 1125913 - RNA, 18 nt, Human
auucuccugccucagccu

SEQ ID NO: 1125914 - RNA, 19 nt, Human
caaaagcaaggcuuggcuc

SEQ ID NO: 1125915 - RNA, 21 nt, Human
caaagccuacagaaggaguuu

SEQ ID NO: 1125916 - RNA, 22 nt, Human
caaaguagcugggacuacaagc

SEQ ID NO: 1125917 - RNA, 24 nt, Human
caaaguagcugggacuacaagcac

SEQ ID NO: 1125918 - RNA, 27 nt, Human
caaagugcuaagauuacaggcaagagc

SEQ ID NO: 1125919 - RNA, 19 nt, Human
caagagagcccggccggug

SEQ ID NO: 1125920 - RNA, 19 nt, Human
caagagccgccacguccag

SEQ ID NO: 1125921 - RNA, 20 nt, Human
caagagccgccacguccagc

SEQ ID NO: 1125922 - RNA, 20 nt, Human
caagcacacaacaccacacc

SEQ ID NO: 1125923 - RNA, 22 nt, Human
caagugauucuccugccucagc

SEQ ID NO: 1125924 - RNA, 24 nt, Human
caauccacccacuuuggccuccca

SEQ ID NO: 1125925 - RNA, 23 nt, Human
cacacaacaccacacucagcuaa

SEQ ID NO: 1125926 - RNA, 18 nt, Human
cacacccuucuuccaccc

SEQ ID NO: 1125927 - RNA, 20 nt, Human
caccaugcugacaagguacc

SEQ ID NO: 1125928 - RNA, 23 nt, Human
cacccaagcugaagugcaguggc

SEQ ID NO: 1125929 - RNA, 22 nt, Human
cacccaccuuggccucccaaag

SEQ ID NO: 1125930 - RNA, 23 nt, Human
cacccaccuuggccucccaaagu

SEQ ID NO: 1125931 - RNA, 22 nt, Human
cacccgcuacuccgcgcauccc

SEQ ID NO: 1125932 - RNA, 21 nt, Human
cacccugcccuuacugggguc

SEQ ID NO: 1125933 - RNA, 18 nt, Human
cacccuucuuccacccag

SEQ ID NO: 1125934 - RNA, 27 nt, Human
cacucccuacccauccugccccaccuc

SEQ ID NO: 1125935 - RNA, 21 nt, Human
cacugcaaccucugccuccug

SEQ ID NO: 1125936 - RNA, 23 nt, Human
cacugcaaccucugccuccuggg

SEQ ID NO: 1125937 - RNA, 19 nt, Human
cagaagucuuuucucuuuc

SEQ ID NO: 1125938 - RNA, 24 nt, Human
cagaguuuuaccauguugcccagg

SEQ ID NO: 1125939 - RNA, 20 nt, Human
cagccagacagaagucuuuu

SEQ ID NO: 1125940 - RNA, 22 nt, Human
cagcccugaaugccucacuccu

SEQ ID NO: 1125941 - RNA, 18 nt, Human
cagggaagggagaaguca

SEQ ID NO: 1125942 - RNA, 19 nt, Human
cagggccaggagacagcug

SEQ ID NO: 1125943 - RNA, 21 nt, Human
cagugggcccccaguucagcc

SEQ ID NO: 1125944 - RNA, 25 nt, Human
cauccucaccacagcccugugaggg

SEQ ID NO: 1125945 - RNA, 25 nt, Human
caucugcuuuucucaucaauccuuu

SEQ ID NO: 1125946 - RNA, 20 nt, Human
cauguugcccaggcuggucu

SEQ ID NO: 1125947 - RNA, 23 nt, Human
cauguugcccaggcuggucuuga

SEQ ID NO: 1125948 - RNA, 24 nt, Human
cauguugcccaggcuggucuugaa

SEQ ID NO: 1125949 - RNA, 21 nt, Human
cauguuggucaggguggucuc

SEQ ID NO: 1125950 - RNA, 24 nt, Human
ccaaaguggugggaauacaggcau

SEQ ID NO: 1125951 - RNA, 22 nt, Human
ccacccacuuuggccucccaaa

SEQ ID NO: 1125952 - RNA, 27 nt, Human
ccagcagccuccucuaaaguaacuucu

SEQ ID NO: 1125953 - RNA, 19 nt, Human
ccagcccugcagauauucu

SEQ ID NO: 1125954 - RNA, 23 nt, Human
ccagcucuccacagugggccccc

SEQ ID NO: 1125955 - RNA, 23 nt, Human
ccagcuugccuuacagccgggua

SEQ ID NO: 1125956 - RNA, 18 nt, Human
ccaguccagcuuuccacc

SEQ ID NO: 1125957 - RNA, 21 nt, Human
ccauccugccccaccucgagu

SEQ ID NO: 1125958 - RNA, 23 nt, Human
cccaagcugaagugcaguggcac

SEQ ID NO: 1125959 - RNA, 21 nt, Human
cccauccugccccaccucgag

SEQ ID NO: 1125960 - RNA, 22 nt, Human
cccauccugccccaccucgagu

SEQ ID NO: 1125961 - RNA, 21 nt, Human
ccccagcagccuccucuaaag

SEQ ID NO: 1125962 - RNA, 23 nt, Human
cccccauucuuucuguaaccuca

SEQ ID NO: 1125963 - RNA, 25 nt, Human
ccccccaagaaucccuggagguaga

SEQ ID NO: 1125964 - RNA, 23 nt, Human
ccccuucauccucaccacagccc

SEQ ID NO: 1125965 - RNA, 25 nt, Human
ccccuucauccucaccacagcccug

SEQ ID NO: 1125966 - RNA, 23 nt, Human
cccgaguagcuggaauuacaggu

SEQ ID NO: 1125967 - RNA, 23 nt, Human
cccugguucaagugauucuccuc

SEQ ID NO: 1125968 - RNA, 23 nt, Human
cccugguucaagugauucuccug

SEQ ID NO: 1125969 - RNA, 19 nt, Human
ccucccaaaguggugggaa

SEQ ID NO: 1125970 - RNA, 25 nt, Human
ccucugaucucacucccuacccauc

SEQ ID NO: 1125971 - RNA, 24 nt, Human
ccugaccucaggugauccacccac

SEQ ID NO: 1125972 - RNA, 19 nt, Human
ccugcagauauucuuuacc

SEQ ID NO: 1125973 - RNA, 27 nt, Human
ccugccccaccucgaguucccuggaag

SEQ ID NO: 1125974 - RNA, 23 nt, Human
ccugccucagccucccgaguagc

SEQ ID NO: 1125975 - RNA, 22 nt, Human
ccugguucaagugauucuccug

SEQ ID NO: 1125976 - RNA, 26 nt, Human
ccuuacagccggguaccggcuccacc

SEQ ID NO: 1125977 - RNA, 22 nt, Human
cgccccagcagccuccucuaaa

SEQ ID NO: 1125978 - RNA, 24 nt, Human
cgcucaggccccaagcccccauuc

SEQ ID NO: 1125979 - RNA, 24 nt, Human
cgcuucagccuccaaaguagcugg

SEQ ID NO: 1125980 - RNA, 24 nt, Human
cucaagcaauccacccacuuuggc

SEQ ID NO: 1125981 - RNA, 24 nt, Human
cucacugcaaccucugccuccugg

SEQ ID NO: 1125982 - RNA, 21 nt, Human
cucagcucgugcaaccucagc

SEQ ID NO: 1125983 - RNA, 24 nt, Human
cucaggugauccacccaccuuggc

SEQ ID NO: 1125984 - RNA, 18 nt, Human
cucauagacucaagcaau

SEQ ID NO: 1125985 - RNA, 23 nt, Human
cucauagacucaagcaauccacc

SEQ ID NO: 1125986 - RNA, 23 nt, Human
cuccugggccaagggauccuucc

SEQ ID NO: 1125987 - RNA, 18 nt, Human
cucuuguugcccaggcug

SEQ ID NO: 1125988 - RNA, 18 nt, Human
cucuuguugcccaggcug

SEQ ID NO: 1125989 - RNA, 19 nt, Human
cucuuguugcccaggcugg

SEQ ID NO: 1125990 - RNA, 19 nt, Human
cugcaaccucugccuccug

SEQ ID NO: 1125991 - RNA, 22 nt, Human
cugcaaccucugccuccugggc

SEQ ID NO: 1125992 - RNA, 23 nt, Human
cugcaaccucugccuccugggcc

SEQ ID NO: 1125993 - RNA, 23 nt, Human
cugccucagccucccgaguagcu

SEQ ID NO: 1125994 - RNA, 20 nt, Human
cugccuccugggccaaggga

SEQ ID NO: 1125995 - RNA, 23 nt, Human
cuggaaggaacacccugcccuua

SEQ ID NO: 1125996 - RNA, 24 nt, Human
cugggccucaguuugcuucaucug

SEQ ID NO: 1125997 - RNA, 24 nt, Human
cuuacuugcugggugaucuugggc

SEQ ID NO: 1125998 - RNA, 22 nt, Human
cuuagagacaaggacacugaug

SEQ ID NO: 1125999 - RNA, 20 nt, Human
cuuguugcccaggcuggagg

SEQ ID NO: 1126000 - RNA, 22 nt, Human
gaauacaggcaugagccacugc

SEQ ID NO: 1126001 - RNA, 22 nt, Human
gaauacaggcaugagccacugc

SEQ ID NO: 1126002 - RNA, 24 nt, Human
gaccucaggugauccacccaccuu

SEQ ID NO: 1126003 - RNA, 22 nt, Human
gacgggguuucauguuggucag

SEQ ID NO: 1126004 - RNA, 21 nt, Human
gacuacaagcacacaacacca

SEQ ID NO: 1126005 - RNA, 20 nt, Human
gacucaagcaauccacccac

SEQ ID NO: 1126006 - RNA, 23 nt, Human
gacucaagcaauccacccacuuu

SEQ ID NO: 1126007 - RNA, 22 nt, Human
gagaacuccaguccagcuuucc

SEQ ID NO: 1126008 - RNA, 21 nt, Human
gagacagaguuuuaccauguu

SEQ ID NO: 1126009 - RNA, 21 nt, Human
gagacgggguuucauguuggu

SEQ ID NO: 1126010 - RNA, 20 nt, Human
gaggaugaugaugaugauga

SEQ ID NO: 1126011 - RNA, 22 nt, Human
gaggcaauggagguguuggggg

SEQ ID NO: 1126012 - RNA, 24 nt, Human
gaguagcuggaauuacaggugcgc

SEQ ID NO: 1126013 - RNA, 20 nt, Human
gaugaugauagcaacaaaga

SEQ ID NO: 1126014 - RNA, 20 nt, Human
gcaccuuuucagagaacucc

SEQ ID NO: 1126015 - RNA, 21 nt, Human
gcagcggugcgaucucagcuc

SEQ ID NO: 1126016 - RNA, 23 nt, Human
gcaggaaaaaagccugcucuaag

SEQ ID NO: 1126017 - RNA, 18 nt, Human
gccaucccaccacugaga

SEQ ID NO: 1126018 - RNA, 19 nt, Human
gccauuucugcuauucauc

SEQ ID NO: 1126019 - RNA, 19 nt, Human
gccccaagcccccauucuu

SEQ ID NO: 1126020 - RNA, 21 nt, Human
gcccccauucuuucuguaacc

SEQ ID NO: 1126021 - RNA, 25 nt, Human
gcucugucacccaagcugaagugca

SEQ ID NO: 1126022 - RNA, 20 nt, Human
gcucuguuucuuacuugcug

SEQ ID NO: 1126023 - RNA, 19 nt, Human
gcucuuguugcccaggcug

SEQ ID NO: 1126024 - RNA, 21 nt, Human
gcucuuguugcccaggcugga

SEQ ID NO: 1126025 - RNA, 19 nt, Human
gcugaagugcaguggcaca

SEQ ID NO: 1126026 - RNA, 21 nt, Human
gcugccugccagggccaagaa

SEQ ID NO: 1126027 - RNA, 22 nt, Human
gcugccugccagggccaagaag

SEQ ID NO: 1126028 - RNA, 22 nt, Human
ggaauacaggcaugagccacug

SEQ ID NO: 1126029 - RNA, 24 nt, Human
ggaggguggggucccaaccagcug

SEQ ID NO: 1126030 - RNA, 22 nt, Human
ggauccuuccgcuucagccucc

SEQ ID NO: 1126031 - RNA, 24 nt, Human
ggcagaggcaauggagguguuggg

SEQ ID NO: 1126032 - RNA, 19 nt, Human
ggccccaagcccccauucu

SEQ ID NO: 1126033 - RNA, 22 nt, Human
gggcauuuucugcugugugggg

SEQ ID NO: 1126034 - RNA, 19 nt, Human
gggggguggagacagggaa

SEQ ID NO: 1126035 - RNA, 20 nt, Human
gggguuucauguuggucagg

SEQ ID NO: 1126036 - RNA, 24 nt, Human
ggguggucucaaacuccugaccuc

SEQ ID NO: 1126037 - RNA, 19 nt, Human
ggguuucauguuggucagg

SEQ ID NO: 1126038 - RNA, 21 nt, Human
gguucaagugauucuccugcc

SEQ ID NO: 1126039 - RNA, 25 nt, Human
guaccuacccacccugcgccccagc

SEQ ID NO: 1126040 - RNA, 20 nt, Human
guagagacgggguuucaugu

SEQ ID NO: 1126041 - RNA, 19 nt, Human
guagcuggaauuacaggug

SEQ ID NO: 1126042 - RNA, 22 nt, Human
gucagggccaggagacagcuga

SEQ ID NO: 1126043 - RNA, 21 nt, Human
gugaaccuucagagggcaaag

SEQ ID NO: 1126044 - RNA, 24 nt, Human
gugauccacccaccuuggccuccc

SEQ ID NO: 1126045 - RNA, 24 nt, Human
gugauucuccugccucagccuccc

SEQ ID NO: 1126046 - RNA, 24 nt, Human
guggggucccaaccagcuggagac

SEQ ID NO: 1126047 - RNA, 22 nt, Human
guuggucaggguggucucaaac

SEQ ID NO: 1126048 - RNA, 24 nt, Human
guuuuaccauguugcccaggcugg

SEQ ID NO: 1126049 - RNA, 24 nt, Human
uaagauuacaggcaagagccgcca

SEQ ID NO: 1126050 - RNA, 22 nt, Human
uaagccccccaagaaucccugg

SEQ ID NO: 1126051 - RNA, 24 nt, Human
uaauuuuuuguauuuuuaguagag

SEQ ID NO: 1126052 - RNA, 21 nt, Human
uacacauauaaagggcauccc

SEQ ID NO: 1126053 - RNA, 20 nt, Human
uacagccggguaccggcucc

SEQ ID NO: 1126054 - RNA, 24 nt, Human
uacaggcaagagccgccacgucca

SEQ ID NO: 1126055 - RNA, 20 nt, Human
uacaugugcugccagacccc

SEQ ID NO: 1126056 - RNA, 21 nt, Human
uaccauguugcccaggcuggu

SEQ ID NO: 1126057 - RNA, 24 nt, Human
uaccauguugcccaggcuggucuu

SEQ ID NO: 1126058 - RNA, 27 nt, Human
uaccauguugcccaggcuggucuugaa

SEQ ID NO: 1126059 - RNA, 24 nt, Human
uaccuacccacccugcgccccagc

SEQ ID NO: 1126060 - RNA, 20 nt, Human
uacuccgcgcaucccagcuu

SEQ ID NO: 1126061 - RNA, 23 nt, Human
uagagagacagaguuuuaccaug

SEQ ID NO: 1126062 - RNA, 19 nt, Human
uaguagagacgggguuuca

SEQ ID NO: 1126063 - RNA, 19 nt, Human
uaguagagacgggguuuca

SEQ ID NO: 1126064 - RNA, 21 nt, Human
uaguagagacgggguuucaug

SEQ ID NO: 1126065 - RNA, 24 nt, Human
uaguagagacgggguuucauguug

SEQ ID NO: 1126066 - RNA, 23 nt, Human
uauaagcuucugcaccccauugc

SEQ ID NO: 1126067 - RNA, 18 nt, Human
uaucacagcacccgucac

SEQ ID NO: 1126068 - RNA, 24 nt, Human
uauuucucuauccugcauucugga

SEQ ID NO: 1126069 - RNA, 19 nt, Human
ucaagugauucuccugccu

SEQ ID NO: 1126070 - RNA, 22 nt, Human
ucaauccuuuacaaagccuaca

SEQ ID NO: 1126071 - RNA, 24 nt, Human
ucacagaaguuguagagcucuuuc

SEQ ID NO: 1126072 - RNA, 19 nt, Human
ucacagauauccuuuuuuu

SEQ ID NO: 1126073 - RNA, 20 nt, Human
ucacccagcggccgagugag

SEQ ID NO: 1126074 - RNA, 24 nt, Human
ucacugcaaccucugccuccuggg

SEQ ID NO: 1126075 - RNA, 25 nt, Human
ucacugcaaccucugccuccugggc

SEQ ID NO: 1126076 - RNA, 27 nt, Human
ucacugcaaccucugccuccugggcca

SEQ ID NO: 1126077 - RNA, 22 nt, Human
ucagccucccgaguagcuggaa

SEQ ID NO: 1126078 - RNA, 23 nt, Human
ucagugaaccuucagagggcaaa

SEQ ID NO: 1126079 - RNA, 21 nt, Human
uccauaccuuccacacccuuc

SEQ ID NO: 1126080 - RNA, 24 nt, Human
ucccaaagugcuaagauuacaggc

SEQ ID NO: 1126081 - RNA, 24 nt, Human
ucccaaaguggugggaauacaggc

SEQ ID NO: 1126082 - RNA, 22 nt, Human
ucccagaggaggugauuuuaaa

SEQ ID NO: 1126083 - RNA, 23 nt, Human
ucccgaguagcuggaauuacagg

SEQ ID NO: 1126084 - RNA, 18 nt, Human
ucccucugaucucacucc

SEQ ID NO: 1126085 - RNA, 20 nt, Human
ucccugggcaagaccuccug

SEQ ID NO: 1126086 - RNA, 22 nt, Human
ucccugggcaagaccuccugga

SEQ ID NO: 1126087 - RNA, 21 nt, Human
ucccugguucaagugauucuc

SEQ ID NO: 1126088 - RNA, 22 nt, Human
ucccugguucaagugauucucc

SEQ ID NO: 1126089 - RNA, 24 nt, Human
ucccugguucaagugauucuccug

SEQ ID NO: 1126090 - RNA, 26 nt, Human
ucccuguaucacagcacccgucacuc

SEQ ID NO: 1126091 - RNA, 23 nt, Human
ucuccacagugggcccccaguuc

SEQ ID NO: 1126092 - RNA, 28 nt, Human
ucuccagcucuguuucuuacuugcuggg

SEQ ID NO: 1126093 - RNA, 24 nt, Human
ucuccugccucagccucccgagua

SEQ ID NO: 1126094 - RNA, 21 nt, Human
ucugccuccugggccaaggga

SEQ ID NO: 1126095 - RNA, 18 nt, Human
ucuggcucugucacccaa

SEQ ID NO: 1126096 - RNA, 23 nt, Human
ucuggcucugucacccaagcuga

SEQ ID NO: 1126097 - RNA, 24 nt, Human
ucuggcucugucacccaagcugaa

SEQ ID NO: 1126098 - RNA, 24 nt, Human
ucugucacccaagcugaagugcag

SEQ ID NO: 1126099 - RNA, 26 nt, Human
ugaacucauagacucaagcaauccac

SEQ ID NO: 1126100 - RNA, 19 nt, Human
ugaagugcaguggcacaau

SEQ ID NO: 1126101 - RNA, 22 nt, Human
ugaagugggugggauacucuca

SEQ ID NO: 1126102 - RNA, 21 nt, Human
ugaccucaggugauccaccca

SEQ ID NO: 1126103 - RNA, 24 nt, Human
ugaccucaggugauccacccaccu

SEQ ID NO: 1126104 - RNA, 18 nt, Human
ugagaaguagaggaaggc

SEQ ID NO: 1126105 - RNA, 21 nt, Human
ugaggaugaggaugaugauga

SEQ ID NO: 1126106 - RNA, 18 nt, Human
ugauagcaacaaagacuc

SEQ ID NO: 1126107 - RNA, 24 nt, Human
ugauccacccaccuuggccuccca

SEQ ID NO: 1126108 - RNA, 20 nt, Human
ugaugauagcaacaaagacu

SEQ ID NO: 1126109 - RNA, 23 nt, Human
ugaugaugaggaugaggaugaug

SEQ ID NO: 1126110 - RNA, 22 nt, Human
ugcagcacagacuguacacaua

SEQ ID NO: 1126111 - RNA, 22 nt, Human
ugccagauaauuuguacaaccu

SEQ ID NO: 1126112 - RNA, 23 nt, Human
ugccagggccaagaagauguucu

SEQ ID NO: 1126113 - RNA, 21 nt, Human
ugcccaggcuggucuugaacu

SEQ ID NO: 1126114 - RNA, 18 nt, Human
ugcccugagucacacagc

SEQ ID NO: 1126115 - RNA, 24 nt, Human
ugccucagccucccgaguagcugg

SEQ ID NO: 1126116 - RNA, 23 nt, Human
ugccuccugggccaagggauccu

SEQ ID NO: 1126117 - RNA, 19 nt, Human
ugccuuguuuaagcccccc

SEQ ID NO: 1126118 - RNA, 21 nt, Human
uggaauuacaggugcgcacca

SEQ ID NO: 1126119 - RNA, 24 nt, Human
uggaauuacaggugcgcaccacaa

SEQ ID NO: 1126120 - RNA, 18 nt, Human
uggagacccagccccacc

SEQ ID NO: 1126121 - RNA, 21 nt, Human
uggagacccagccccaccaug

SEQ ID NO: 1126122 - RNA, 18 nt, Human
uggagguagaugaugaug

SEQ ID NO: 1126123 - RNA, 24 nt, Human
uggcacaaucucagcucacugcaa

SEQ ID NO: 1126124 - RNA, 24 nt, Human
uggcaggcagagauccagcaacac

SEQ ID NO: 1126125 - RNA, 18 nt, Human
uggcugccugccagggcc

SEQ ID NO: 1126126 - RNA, 19 nt, Human
ugggaaaccagcucuccac

SEQ ID NO: 1126127 - RNA, 22 nt, Human
ugggaauacaggcaugagccac

SEQ ID NO: 1126128 - RNA, 22 nt, Human
ugggaauacaggcaugagccac

SEQ ID NO: 1126129 - RNA, 24 nt, Human
ugggaauacaggcaugagccacug

SEQ ID NO: 1126130 - RNA, 24 nt, Human
ugggaauacaggcaugagccacug

SEQ ID NO: 1126131 - RNA, 26 nt, Human
ugggaauacaggcaugagccacugcg

SEQ ID NO: 1126132 - RNA, 20 nt, Human
ugggacuacaagcacacaac

SEQ ID NO: 1126133 - RNA, 24 nt, Human
ugggacuacaagcacacaacacca

SEQ ID NO: 1126134 - RNA, 24 nt, Human
ugggauaauggggcaaaagcuuca

SEQ ID NO: 1126135 - RNA, 21 nt, Human
ugggauacucucagccuuuga

SEQ ID NO: 1126136 - RNA, 23 nt, Human
ugggccaagggauccuuccgcuu

SEQ ID NO: 1126137 - RNA, 18 nt, Human
uggggaguaaucaaucac

SEQ ID NO: 1126138 - RNA, 18 nt, Human
ugggggguggagacaggg

SEQ ID NO: 1126139 - RNA, 24 nt, Human
uggucaggguggucucaaacuccu

SEQ ID NO: 1126140 - RNA, 19 nt, Human
uguaaucacagauauccuu

SEQ ID NO: 1126141 - RNA, 21 nt, Human
uguauuuuuaguagagacggg

SEQ ID NO: 1126142 - RNA, 18 nt, Human
ugucaguaagguggagaa

SEQ ID NO: 1126143 - RNA, 24 nt, Human
ugugcgcauuaauaaauuugcaug

SEQ ID NO: 1126144 - RNA, 24 nt, Human
ugugggggguggagacagggaagg

SEQ ID NO: 1126145 - RNA, 21 nt, Human
uguguggggcagaacaggccu

SEQ ID NO: 1126146 - RNA, 22 nt, Human
uguuccuaccagcuccucucau

SEQ ID NO: 1126147 - RNA, 18 nt, Human
uguugggggagcacccuc

SEQ ID NO: 1126148 - RNA, 22 nt, Human
uuacgugaaggguccggccucc

SEQ ID NO: 1126149 - RNA, 20 nt, Human
uuagaaaagucagggccagg

SEQ ID NO: 1126150 - RNA, 23 nt, Human
uuagagagacagaguuuuaccau

SEQ ID NO: 1126151 - RNA, 20 nt, Human
uuaguagagacgggguuuca

SEQ ID NO: 1126152 - RNA, 20 nt, Human
uuaguagagacgggguuuca

SEQ ID NO: 1126153 - RNA, 23 nt, Human
uuaguagagacgggguuucaugu

SEQ ID NO: 1126154 - RNA, 21 nt, Human
uucaagugauucuccugccuc

SEQ ID NO: 1126155 - RNA, 23 nt, Human
uucaagugauucuccugccucag

SEQ ID NO: 1126156 - RNA, 24 nt, Human
uucaagugauucuccugccucagc

SEQ ID NO: 1126157 - RNA, 24 nt, Human
uucagccuccaaaguagcugggac

SEQ ID NO: 1126158 - RNA, 21 nt, Human
uuccacacccuucuuccaccc

SEQ ID NO: 1126159 - RNA, 21 nt, Human
uugaaauggucccaugcagac

SEQ ID NO: 1126160 - RNA, 18 nt, Human
uugcccaggcuggagggc

SEQ ID NO: 1126161 - RNA, 23 nt, Human
uuguauuuuuaguagagacgggg

SEQ ID NO: 1126162 - RNA, 24 nt, Human
uuucauguuggucaggguggucuc

SEQ ID NO: 1126163 - RNA, 19 nt, Human
uuuggccucccaaagugcu

SEQ ID NO: 1126164 - RNA, 23 nt, Human
uuuuaccauguugcccaggcugg

SEQ ID NO: 1126165 - RNA, 21 nt, Human
uuuucagugaaccuucagagg

SEQ ID NO: 1126166 - RNA, 20 nt, Human
uuuuuagagagacagaguuu

SEQ ID NO: 1126167 - RNA, 24 nt, Human
uuuuuaguagagacgggguuucau

SEQ ID NO: 1126168 - RNA, 21 nt, Human
uuuuuguauuuuuaguagaga

SEQ ID NO: 1126169 - RNA, 24 nt, Human
uuuuuuguauuuuuaguagagacg

SEQ ID NO: 1126170 - RNA, 24 nt, Human
uuuuuuuuuuuaaauaaggucugg

SEQ ID NO: 1126171 - RNA, 19 nt, Human
aagaaggagagagaaaaga

SEQ ID NO: 1126172 - RNA, 23 nt, Human
aagcaacccggacacuuucaaac

SEQ ID NO: 1126173 - RNA, 24 nt, Human
acauacauuuuuagguguaucucu

SEQ ID NO: 1126174 - RNA, 24 nt, Human
accaacuacccccauaauccuuuu

SEQ ID NO: 1126175 - RNA, 19 nt, Human
accacgcauguauccagag

SEQ ID NO: 1126176 - RNA, 18 nt, Human
acucuauaccuaugaaac

SEQ ID NO: 1126177 - RNA, 20 nt, Human
agaagaaggagagagaaaag

SEQ ID NO: 1126178 - RNA, 21 nt, Human
agaagaaggagagagaaaaga

SEQ ID NO: 1126179 - RNA, 18 nt, Human
agagagaaaagacauugg

SEQ ID NO: 1126180 - RNA, 26 nt, Human
agagguaggggccaaucucccaaggg

SEQ ID NO: 1126181 - RNA, 22 nt, Human
aggaugcguuuucccgagggcu

SEQ ID NO: 1126182 - RNA, 20 nt, Human
agggaugaacaaggcacgua

SEQ ID NO: 1126183 - RNA, 21 nt, Human
agggcuucugaagccaggccu

SEQ ID NO: 1126184 - RNA, 23 nt, Human
aggugugggacuggguuccuggg

SEQ ID NO: 1126185 - RNA, 24 nt, Human
augaaucccuugucacagacagag

SEQ ID NO: 1126186 - RNA, 24 nt, Human
auggaugaauaaauaagagagaag

SEQ ID NO: 1126187 - RNA, 24 nt, Human
auggaugcuugguugcuuccacau

SEQ ID NO: 1126188 - RNA, 22 nt, Human
caaacaucaugcguccagaaug

SEQ ID NO: 1126189 - RNA, 18 nt, Human
caaccaccacucugucuu

SEQ ID NO: 1126190 - RNA, 19 nt, Human
cacaguuguagcugcaaga

SEQ ID NO: 1126191 - RNA, 19 nt, Human
cagcaaagauaauuuuggc

SEQ ID NO: 1126192 - RNA, 20 nt, Human
caggaugcguuuucccgagg

SEQ ID NO: 1126193 - RNA, 27 nt, Human
caucaaacgccgauaucucucgaaggc

SEQ ID NO: 1126194 - RNA, 23 nt, Human
ccaaaacucuauaccuaugaaac

SEQ ID NO: 1126195 - RNA, 19 nt, Human
cccacaaacaucaugcguc

SEQ ID NO: 1126196 - RNA, 23 nt, Human
cccacaaacaucaugcguccaga

SEQ ID NO: 1126197 - RNA, 21 nt, Human
cccccauaauccuuuugucuu

SEQ ID NO: 1126198 - RNA, 23 nt, Human
ccucaaugucgugcuagaggggc

SEQ ID NO: 1126199 - RNA, 24 nt, Human
ccugcagccccugccaaccaccac

SEQ ID NO: 1126200 - RNA, 22 nt, Human
ccuggaaguaguuuaaacaaag

SEQ ID NO: 1126201 - RNA, 18 nt, Human
ccuugaggguguggucug

SEQ ID NO: 1126202 - RNA, 22 nt, Human
cggaaguaugguuugccgccgg

SEQ ID NO: 1126203 - RNA, 24 nt, Human
cggaaguaugguuugccgccggaa

SEQ ID NO: 1126204 - RNA, 22 nt, Human
cggcgagauggacacuccccuc

SEQ ID NO: 1126205 - RNA, 19 nt, Human
cgugcgugcggcgagaugg

SEQ ID NO: 1126206 - RNA, 18 nt, Human
cuauagcaacgacaaacc

SEQ ID NO: 1126207 - RNA, 20 nt, Human
cugcagccccugccaaccac

SEQ ID NO: 1126208 - RNA, 23 nt, Human
cugcucaccuuggugauaggacc

SEQ ID NO: 1126209 - RNA, 20 nt, Human
cuuccugcagccccugccaa

SEQ ID NO: 1126210 - RNA, 20 nt, Human
gaagaaggccgugaacgacg

SEQ ID NO: 1126211 - RNA, 18 nt, Human
gaaggccgugaacgacgu

SEQ ID NO: 1126212 - RNA, 24 nt, Human
gaaugguucccaccgaggugccca

SEQ ID NO: 1126213 - RNA, 28 nt, Human
gagguaggggccaaucuucagggcuaug

SEQ ID NO: 1126214 - RNA, 20 nt, Human
gcaggugugggacuggguuc

SEQ ID NO: 1126215 - RNA, 20 nt, Human
gcgugcggcgagauggacac

SEQ ID NO: 1126216 - RNA, 21 nt, Human
gcuagaggggccgaagaaggc

SEQ ID NO: 1126217 - RNA, 21 nt, Human
ggauccuaagcaacccggaca

SEQ ID NO: 1126218 - RNA, 21 nt, Human
ggcaggugugggacuggguuc

SEQ ID NO: 1126219 - RNA, 23 nt, Human
ggcuccuuucagucuggggcauu

SEQ ID NO: 1126220 - RNA, 19 nt, Human
gguggccuuuuguacccuc

SEQ ID NO: 1126221 - RNA, 19 nt, Human
guccagaaugcgagaugac

SEQ ID NO: 1126222 - RNA, 18 nt, Human
uaaauaagagagaagaag

SEQ ID NO: 1126223 - RNA, 22 nt, Human
uacacagcaccaucugugccac

SEQ ID NO: 1126224 - RNA, 19 nt, Human
uagcugcaagacuugagca

SEQ ID NO: 1126225 - RNA, 24 nt, Human
uauagauauaccaucuuuugcuua

SEQ ID NO: 1126226 - RNA, 20 nt, Human
ucacagacagagaguugcag

SEQ ID NO: 1126227 - RNA, 22 nt, Human
uccuauagcaacgacaaaccgg

SEQ ID NO: 1126228 - RNA, 22 nt, Human
uccuguggacagauuccauuca

SEQ ID NO: 1126229 - RNA, 23 nt, Human
ucuauaccuaugaaacaaucauu

SEQ ID NO: 1126230 - RNA, 25 nt, Human
ucucucgaaggcaaggaaucugcaa

SEQ ID NO: 1126231 - RNA, 23 nt, Human
ucucuggaggaggaggcagcugu

SEQ ID NO: 1126232 - RNA, 24 nt, Human
ucucuggaggaggaggcagcugug

SEQ ID NO: 1126233 - RNA, 22 nt, Human
ucugcaaucuccuugagggugu

SEQ ID NO: 1126234 - RNA, 18 nt, Human
ugaacaaggcacguagca

SEQ ID NO: 1126235 - RNA, 26 nt, Human
ugaauaaauaagagagaagaaggaga

SEQ ID NO: 1126236 - RNA, 20 nt, Human
ugagaagggugaauggaagg

SEQ ID NO: 1126237 - RNA, 18 nt, Human
ugaggguguggucugauc

SEQ ID NO: 1126238 - RNA, 20 nt, Human
ugcuccaaguaucuccuaaa

SEQ ID NO: 1126239 - RNA, 22 nt, Human
ugcuuccacauuuugacuguug

SEQ ID NO: 1126240 - RNA, 19 nt, Human
uggacacucccccgcucuc

SEQ ID NO: 1126241 - RNA, 23 nt, Human
uggcgguguaggugacaucaaac

SEQ ID NO: 1126242 - RNA, 21 nt, Human
ugggacgugcgugcggcgaga

SEQ ID NO: 1126243 - RNA, 18 nt, Human
ugggagguugaagggaug

SEQ ID NO: 1126244 - RNA, 23 nt, Human
ugggguggccuuuuguacccuca

SEQ ID NO: 1126245 - RNA, 22 nt, Human
ugguagcacauugcagaauucc

SEQ ID NO: 1126246 - RNA, 23 nt, Human
uggucaagugcagcccacacuca

SEQ ID NO: 1126247 - RNA, 22 nt, Human
uggucugauccaacagcaaaga

SEQ ID NO: 1126248 - RNA, 19 nt, Human
ugucacagacagagaguug

SEQ ID NO: 1126249 - RNA, 22 nt, Human
ugucuuguaaaaccaaaacucu

SEQ ID NO: 1126250 - RNA, 21 nt, Human
uucccaccgaggugcccacaa

SEQ ID NO: 1126251 - RNA, 23 nt, Human
uuccuggaaguaguuuaaacaaa

SEQ ID NO: 1126252 - RNA, 19 nt, Human
uugaagggaugaacaaggc

SEQ ID NO: 1126253 - RNA, 18 nt, Human
uugacuguugaacauaga

SEQ ID NO: 1126254 - RNA, 20 nt, Human
uuuccuaggcuaaauuccug

SEQ ID NO: 1126255 - RNA, 23 nt, Human
uuugccgccggaagcggaagucc

SEQ ID NO: 1126256 - RNA, 20 nt, Human
uuugcuaucuuaaccauuuu

SEQ ID NO: 1126257 - RNA, 24 nt, Human
aagaaaccaagaggccgagaggca

SEQ ID NO: 1126258 - RNA, 21 nt, Human
acagagggccuuauguccaca

SEQ ID NO: 1126259 - RNA, 26 nt, Human
acuguccuuaagcugucaggcaugga

SEQ ID NO: 1126260 - RNA, 20 nt, Human
agaaaagaaaccaagaggcc

SEQ ID NO: 1126261 - RNA, 25 nt, Human
agccucaaccagaaagagcccuggc

SEQ ID NO: 1126262 - RNA, 19 nt, Human
aggcaagaaaagaaaccaa

SEQ ID NO: 1126263 - RNA, 20 nt, Human
aggcaugaucacagagggcc

SEQ ID NO: 1126264 - RNA, 21 nt, Human
aggcccccagaugccaggcag

SEQ ID NO: 1126265 - RNA, 21 nt, Human
auccugagaacagcagggaac

SEQ ID NO: 1126266 - RNA, 18 nt, Human
caaccagaaagagcccug

SEQ ID NO: 1126267 - RNA, 23 nt, Human
caaccuuuaagccccagccaccu

SEQ ID NO: 1126268 - RNA, 22 nt, Human
caguaaaguaggggaaggcaag

SEQ ID NO: 1126269 - RNA, 21 nt, Human
ccaggcagccccagggcacaa

SEQ ID NO: 1126270 - RNA, 23 nt, Human
ccagggcacaaguccuucaagaa

SEQ ID NO: 1126271 - RNA, 20 nt, Human
ccccagaugccaggcagccc

SEQ ID NO: 1126272 - RNA, 21 nt, Human
cccccagaugccaggcagccc

SEQ ID NO: 1126273 - RNA, 19 nt, Human
ccucaaccagaaagagccc

SEQ ID NO: 1126274 - RNA, 18 nt, Human
ccugagaacagcagggaa

SEQ ID NO: 1126275 - RNA, 22 nt, Human
ccuggccaaccuuuaagcccca

SEQ ID NO: 1126276 - RNA, 29 nt, Human
cucagccucaaccagaaagagcccuggcc

SEQ ID NO: 1126277 - RNA, 21 nt, Human
cugaugacaccagugagucuc

SEQ ID NO: 1126278 - RNA, 23 nt, Human
cuguccuuaagcugucaggcaug

SEQ ID NO: 1126279 - RNA, 22 nt, Human
cuucaagaacugugcacaaucc

SEQ ID NO: 1126280 - RNA, 22 nt, Human
gagagggucauugucacuuugc

SEQ ID NO: 1126281 - RNA, 20 nt, Human
gagggaguggggagggucua

SEQ ID NO: 1126282 - RNA, 24 nt, Human
gcaagaaaagaaaccaagaggccg

SEQ ID NO: 1126283 - RNA, 19 nt, Human
gccaaccuuuaagccccag

SEQ ID NO: 1126284 - RNA, 20 nt, Human
ggccugaugacaccagugag

SEQ ID NO: 1126285 - RNA, 20 nt, Human
gggagggucuaaagauggga

SEQ ID NO: 1126286 - RNA, 22 nt, Human
ucccugagguucaaggccccca

SEQ ID NO: 1126287 - RNA, 21 nt, Human
ucccuggccaaccuuuaagcc

SEQ ID NO: 1126288 - RNA, 23 nt, Human
ucccuggccaaccuuuaagcccc

SEQ ID NO: 1126289 - RNA, 18 nt, Human
uccgcggaguaagcuucc

SEQ ID NO: 1126290 - RNA, 24 nt, Human
ucucagccucaaccagaaagagcc

SEQ ID NO: 1126291 - RNA, 22 nt, Human
ucugaggaggcccccagaugcc

SEQ ID NO: 1126292 - RNA, 22 nt, Human
ugagaguuauugagcaagagag

SEQ ID NO: 1126293 - RNA, 18 nt, Human
uggcucugaggaggcccc

SEQ ID NO: 1126294 - RNA, 22 nt, Human
uuacuccaucccuggccaaccu

SEQ ID NO: 1126295 - RNA, 23 nt, Human
acaggaacaccugcccagcuucu

SEQ ID NO: 1126296 - RNA, 20 nt, Human
cacucuugaccccugaccuc

SEQ ID NO: 1126297 - RNA, 20 nt, Human
cagcccucccgcgccggccc

SEQ ID NO: 1126298 - RNA, 22 nt, Human
caucacacagcccucccgcgcc

SEQ ID NO: 1126299 - RNA, 19 nt, Human
ccucccgcgccggcccggg

SEQ ID NO: 1126300 - RNA, 27 nt, Human
cuugaccccugaccucgcuaccucggc

SEQ ID NO: 1126301 - RNA, 21 nt, Human
gcgcuccgaggccaucacaca

SEQ ID NO: 1126302 - RNA, 18 nt, Human
ucgaugcaagauccaggc

SEQ ID NO: 1126303 - RNA, 24 nt, Human
ucgggagauucgauaauccuuuuu

SEQ ID NO: 1126304 - RNA, 21 nt, Human
ugaccccugaccucgcuaccu

SEQ ID NO: 1126305 - RNA, 22 nt, Human
ugaccccugaccucgcuaccuc

SEQ ID NO: 1126306 - RNA, 19 nt, Human
uucuuccaccuccggcucc

SEQ ID NO: 1126307 - RNA, 18 nt, Human
aagcuggcugggccaaag

SEQ ID NO: 1126308 - RNA, 21 nt, Human
aagggccagacagaccaacag

SEQ ID NO: 1126309 - RNA, 23 nt, Human
acgccgccguccccggcucggac

SEQ ID NO: 1126310 - RNA, 21 nt, Human
caagaccagaucugaagcugg

SEQ ID NO: 1126311 - RNA, 18 nt, Human
cagagccuacucggugac

SEQ ID NO: 1126312 - RNA, 19 nt, Human
cagcugaggcggcagcggc

SEQ ID NO: 1126313 - RNA, 21 nt, Human
cggccacucagcuccagacac

SEQ ID NO: 1126314 - RNA, 26 nt, Human
cugccaggccuuuguggaggccuggg

SEQ ID NO: 1126315 - RNA, 18 nt, Human
cuggaaugagaccucugu

SEQ ID NO: 1126316 - RNA, 23 nt, Human
cuguggcagaagccagagccuac

SEQ ID NO: 1126317 - RNA, 21 nt, Human
gagaaaggccaaaggcuuuga

SEQ ID NO: 1126318 - RNA, 19 nt, Human
gcagcggcagacaggugcg

SEQ ID NO: 1126319 - RNA, 20 nt, Human
gcugugcuuugucugggucc

SEQ ID NO: 1126320 - RNA, 20 nt, Human
ggcaaggggguggggcaagg

SEQ ID NO: 1126321 - RNA, 21 nt, Human
ggccugggaggagaaaggcca

SEQ ID NO: 1126322 - RNA, 22 nt, Human
gggcaagggccagacagaccaa

SEQ ID NO: 1126323 - RNA, 20 nt, Human
gguccuggcgagagcucgcc

SEQ ID NO: 1126324 - RNA, 19 nt, Human
ucugggucccccaggggac

SEQ ID NO: 1126325 - RNA, 26 nt, Human
ugaggcggcagcggcagacaggugcg

SEQ ID NO: 1126326 - RNA, 18 nt, Human
ugccaggccuuuguggag

SEQ ID NO: 1126327 - RNA, 22 nt, Human
ugccaggccuuuguggaggccu

SEQ ID NO: 1126328 - RNA, 21 nt, Human
ugcccggccacucagcuccag

SEQ ID NO: 1126329 - RNA, 22 nt, Human
uggaaugagaccucugucugcc

SEQ ID NO: 1126330 - RNA, 22 nt, Human
uggcagaagccagagccuacuc

SEQ ID NO: 1126331 - RNA, 24 nt, Human
uggcugggccaaagcagcugaggc

SEQ ID NO: 1126332 - RNA, 19 nt, Human
ugggaccgaugcccggcca

SEQ ID NO: 1126333 - RNA, 25 nt, Human
ugggccaaagcagcugaggcggcag

SEQ ID NO: 1126334 - RNA, 20 nt, Human
uguggcagaagccagagccu

SEQ ID NO: 1126335 - RNA, 23 nt, Human
uguggcagaagccagagccuacu

SEQ ID NO: 1126336 - RNA, 19 nt, Human
gcggaaagagaaaaaaaaa

SEQ ID NO: 1126337 - RNA, 23 nt, Human
uccuugaggcauuuuauuuguaa

SEQ ID NO: 1126338 - RNA, 22 nt, Human
uggcggaaagagaaaaaaaaaa

SEQ ID NO: 1126339 - RNA, 22 nt, Human
ugugacggcguggaaagauggc

SEQ ID NO: 1126340 - RNA, 22 nt, Human
aaaaaaaaaaaaaaaggccgag

SEQ ID NO: 1126341 - RNA, 18 nt, Human
aaagaaggagcugaggcc

SEQ ID NO: 1126342 - RNA, 20 nt, Human
aacauggugaaacccccguc

SEQ ID NO: 1126343 - RNA, 21 nt, Human
aacauggugaaacccccgucu

SEQ ID NO: 1126344 - RNA, 22 nt, Human
aacauggugaaacccccgucuc

SEQ ID NO: 1126345 - RNA, 24 nt, Human
aaccuggccaacauggugaaaccc

SEQ ID NO: 1126346 - RNA, 22 nt, Human
aaggagcugaggccgggcaugg

SEQ ID NO: 1126347 - RNA, 18 nt, Human
aaggggcugcgcguggca

SEQ ID NO: 1126348 - RNA, 24 nt, Human
aaucgcuugaacccgggaggcgga

SEQ ID NO: 1126349 - RNA, 24 nt, Human
acagagcaagacucugucucaaaa

SEQ ID NO: 1126350 - RNA, 24 nt, Human
acaugaagucaggaguucgagacc

SEQ ID NO: 1126351 - RNA, 24 nt, Human
accucagccaccggccgcuccagc

SEQ ID NO: 1126352 - RNA, 21 nt, Human
acggaaaugagaaacacgaug

SEQ ID NO: 1126353 - RNA, 24 nt, Human
acuacacuccagccucgacgacag

SEQ ID NO: 1126354 - RNA, 21 nt, Human
agacaggacagguugaaccug

SEQ ID NO: 1126355 - RNA, 22 nt, Human
agacaggacagguugaaccugg

SEQ ID NO: 1126356 - RNA, 21 nt, Human
agacgacaaugcccaggggca

SEQ ID NO: 1126357 - RNA, 21 nt, Human
agaggccagaggcucggggac

SEQ ID NO: 1126358 - RNA, 18 nt, Human
agaggcucggggacagga

SEQ ID NO: 1126359 - RNA, 18 nt, Human
agagggagaagcagggac

SEQ ID NO: 1126360 - RNA, 19 nt, Human
agagggagaagcagggacu

SEQ ID NO: 1126361 - RNA, 24 nt, Human
agcacuuugggaggccgaggcugg

SEQ ID NO: 1126362 - RNA, 18 nt, Human
aggcacgagaaucgcuug

SEQ ID NO: 1126363 - RNA, 24 nt, Human
aggcacgagaaucgcuugaacccg

SEQ ID NO: 1126364 - RNA, 21 nt, Human
aggcaucagaggccagaggcu

SEQ ID NO: 1126365 - RNA, 21 nt, Human
aggccgaggcuggcggaucac

SEQ ID NO: 1126366 - RNA, 24 nt, Human
aggcugaggcacgagaaucgcuug

SEQ ID NO: 1126367 - RNA, 26 nt, Human
aggcuggcggaucacaugaagucagg

SEQ ID NO: 1126368 - RNA, 25 nt, Human
caacauggugaaacccccgucucua

SEQ ID NO: 1126369 - RNA, 20 nt, Human
caaggaugagauccagguuu

SEQ ID NO: 1126370 - RNA, 22 nt, Human
cacaccuguaaucccagcacuu

SEQ ID NO: 1126371 - RNA, 24 nt, Human
cacaccuguaaucccagcacuuug

SEQ ID NO: 1126372 - RNA, 23 nt, Human
cacaugaagucaggaguucgaga

SEQ ID NO: 1126373 - RNA, 26 nt, Human
caccacuacacuccagccucgacgac

SEQ ID NO: 1126374 - RNA, 24 nt, Human
caccgccgcgcccacgcgcgccca

SEQ ID NO: 1126375 - RNA, 19 nt, Human
caccuguaaucccagcacu

SEQ ID NO: 1126376 - RNA, 24 nt, Human
caccuguaaucccagcacuuuggg

SEQ ID NO: 1126377 - RNA, 25 nt, Human
cacgccuccacaaucugcuccaccg

SEQ ID NO: 1126378 - RNA, 24 nt, Human
cacuacacuccagccucgacgaca

SEQ ID NO: 1126379 - RNA, 23 nt, Human
cacuccagccucgacgacagagc

SEQ ID NO: 1126380 - RNA, 22 nt, Human
cagcacuuugggaggccgaggc

SEQ ID NO: 1126381 - RNA, 25 nt, Human
cagcacuuugggaggccgaggcugg

SEQ ID NO: 1126382 - RNA, 19 nt, Human
cagcagcgcggccgccgac

SEQ ID NO: 1126383 - RNA, 20 nt, Human
cagcgcuccugcagcugccc

SEQ ID NO: 1126384 - RNA, 20 nt, Human
cagcucuuucaccaccgggg

SEQ ID NO: 1126385 - RNA, 20 nt, Human
cagcugccccaggccaaagg

SEQ ID NO: 1126386 - RNA, 22 nt, Human
cagcugccccaggccaaagguu

SEQ ID NO: 1126387 - RNA, 24 nt, Human
caggaggcugaggcacgagaaucg

SEQ ID NO: 1126388 - RNA, 20 nt, Human
cauggcauuuccacgccucc

SEQ ID NO: 1126389 - RNA, 21 nt, Human
ccacgcagcgcuccugcagcu

SEQ ID NO: 1126390 - RNA, 19 nt, Human
ccacuacacuccagccucg

SEQ ID NO: 1126391 - RNA, 20 nt, Human
ccacuacacuccagccucga

SEQ ID NO: 1126392 - RNA, 21 nt, Human
ccacuacacuccagccucgac

SEQ ID NO: 1126393 - RNA, 20 nt, Human
cccacgcgcgcccagcuucg

SEQ ID NO: 1126394 - RNA, 18 nt, Human
cccaugcacgaccagucc

SEQ ID NO: 1126395 - RNA, 19 nt, Human
cccaugcacgaccaguccc

SEQ ID NO: 1126396 - RNA, 24 nt, Human
cccaugcacgaccagucccaaggg

SEQ ID NO: 1126397 - RNA, 23 nt, Human
ccccgucucuacuaaaaauacaa

SEQ ID NO: 1126398 - RNA, 22 nt, Human
cccgaccccaccucgcccacac

SEQ ID NO: 1126399 - RNA, 19 nt, Human
cccugcccggcccgacccc

SEQ ID NO: 1126400 - RNA, 21 nt, Human
ccgagccuguggugucugagg

SEQ ID NO: 1126401 - RNA, 21 nt, Human
ccgccaccucagccaccggcc

SEQ ID NO: 1126402 - RNA, 21 nt, Human
ccgccgcgcccacgcgcgccc

SEQ ID NO: 1126403 - RNA, 19 nt, Human
ccgccggggccagcaaggc

SEQ ID NO: 1126404 - RNA, 21 nt, Human
ccuccacaaucugcuccaccg

SEQ ID NO: 1126405 - RNA, 20 nt, Human
ccuccugcgagccggcaaau

SEQ ID NO: 1126406 - RNA, 22 nt, Human
ccucgacgacagagcaagacuc

SEQ ID NO: 1126407 - RNA, 21 nt, Human
ccucggguccggagggccucc

SEQ ID NO: 1126408 - RNA, 23 nt, Human
ccuggccaacauggugaaacccc

SEQ ID NO: 1126409 - RNA, 25 nt, Human
ccuggccaacauggugaaacccccg

SEQ ID NO: 1126410 - RNA, 22 nt, Human
ccuguggugucugaggggcauu

SEQ ID NO: 1126411 - RNA, 24 nt, Human
cgagaccaaccuggccaacauggu

SEQ ID NO: 1126412 - RNA, 26 nt, Human
cgaggcuggcggaucacaugaaguca

SEQ ID NO: 1126413 - RNA, 21 nt, Human
cgaugggggcagagcugggga

SEQ ID NO: 1126414 - RNA, 21 nt, Human
cgcacaccuguaaucccagca

SEQ ID NO: 1126415 - RNA, 18 nt, Human
cgcccggcucacugggca

SEQ ID NO: 1126416 - RNA, 22 nt, Human
cggagggccuccugcgagccgg

SEQ ID NO: 1126417 - RNA, 21 nt, Human
cggaucacaugaagucaggag

SEQ ID NO: 1126418 - RNA, 24 nt, Human
cggaucacaugaagucaggaguuc

SEQ ID NO: 1126419 - RNA, 20 nt, Human
cguuguggugcaugucugua

SEQ ID NO: 1126420 - RNA, 21 nt, Human
cuaguagacgacaaugcccag

SEQ ID NO: 1126421 - RNA, 18 nt, Human
cucaaaaaaaaaaaaaaa

SEQ ID NO: 1126422 - RNA, 22 nt, Human
cucagccaccggccgcuccagc

SEQ ID NO: 1126423 - RNA, 19 nt, Human
cucccggggcagggugccu

SEQ ID NO: 1126424 - RNA, 19 nt, Human
cucugucucaaaaaaaaaa

SEQ ID NO: 1126425 - RNA, 24 nt, Human
gacagagcaagacucugucucaaa

SEQ ID NO: 1126426 - RNA, 18 nt, Human
gacagguugaaccugggg

SEQ ID NO: 1126427 - RNA, 18 nt, Human
gaccccaccucgcccaca

SEQ ID NO: 1126428 - RNA, 18 nt, Human
gagaaacacgaugggggc

SEQ ID NO: 1126429 - RNA, 19 nt, Human
gagaagcagggacuuggga

SEQ ID NO: 1126430 - RNA, 18 nt, Human
gagcaggagaggcccaag

SEQ ID NO: 1126431 - RNA, 21 nt, Human
gagcuugucgcugcggagcag

SEQ ID NO: 1126432 - RNA, 21 nt, Human
gaggucaaugggauguuccag

SEQ ID NO: 1126433 - RNA, 22 nt, Human
gagugcugcggaaaaagguuca

SEQ ID NO: 1126434 - RNA, 24 nt, Human
gaucacaugaagucaggaguucga

SEQ ID NO: 1126435 - RNA, 23 nt, Human
gaucuccaggggggcaggucugg

SEQ ID NO: 1126436 - RNA, 26 nt, Human
gaugagugguuccugccgguucugcu

SEQ ID NO: 1126437 - RNA, 19 nt, Human
gcagggcguagagucaggg

SEQ ID NO: 1126438 - RNA, 19 nt, Human
gcaugucuguaaucccagc

SEQ ID NO: 1126439 - RNA, 25 nt, Human
gccaacauggugaaacccccgucuc

SEQ ID NO: 1126440 - RNA, 21 nt, Human
gccaggcccuagagcugguga

SEQ ID NO: 1126441 - RNA, 20 nt, Human
gccgaaaucgcaccacuaca

SEQ ID NO: 1126442 - RNA, 21 nt, Human
gccugggaggccuggccaggc

SEQ ID NO: 1126443 - RNA, 19 nt, Human
gcgcucagcuccgccgggg

SEQ ID NO: 1126444 - RNA, 24 nt, Human
gcuguaguuuggggcaggcucagc

SEQ ID NO: 1126445 - RNA, 18 nt, Human
ggaaauggauugaggggg

SEQ ID NO: 1126446 - RNA, 18 nt, Human
ggagaagcagggacuugg

SEQ ID NO: 1126447 - RNA, 22 nt, Human
ggagccugggaggccuggccag

SEQ ID NO: 1126448 - RNA, 21 nt, Human
ggaggccuguuugcugagaag

SEQ ID NO: 1126449 - RNA, 21 nt, Human
ggaguucgagaccaaccuggc

SEQ ID NO: 1126450 - RNA, 23 nt, Human
ggaucacaugaagucaggaguuc

SEQ ID NO: 1126451 - RNA, 21 nt, Human
ggcaggcucagcugggcgggu

SEQ ID NO: 1126452 - RNA, 20 nt, Human
ggcagggcguagagucaggg

SEQ ID NO: 1126453 - RNA, 19 nt, Human
ggccagaggcucggggaca

SEQ ID NO: 1126454 - RNA, 18 nt, Human
ggcccaagcuccugaagg

SEQ ID NO: 1126455 - RNA, 19 nt, Human
ggcucggggacaggaacag

SEQ ID NO: 1126456 - RNA, 22 nt, Human
gggacaggaacagacacaggga

SEQ ID NO: 1126457 - RNA, 20 nt, Human
gggaggagcagaaugcggug

SEQ ID NO: 1126458 - RNA, 19 nt, Human
gggaggcccagcccaagcc

SEQ ID NO: 1126459 - RNA, 25 nt, Human
gggcagagcuggggaaaagcugggg

SEQ ID NO: 1126460 - RNA, 22 nt, Human
gggcaggcucagcugggcgggu

SEQ ID NO: 1126461 - RNA, 20 nt, Human
gggcagggugccucuccggc

SEQ ID NO: 1126462 - RNA, 24 nt, Human
gggcaugguggcgcacaccuguaa

SEQ ID NO: 1126463 - RNA, 23 nt, Human
gggcgccccgggccucauccccu

SEQ ID NO: 1126464 - RNA, 19 nt, Human
gggcguagagucagggugu

SEQ ID NO: 1126465 - RNA, 21 nt, Human
ggggcagagcuggggaaaagc

SEQ ID NO: 1126466 - RNA, 19 nt, Human
ggugaggaguaugaaggga

SEQ ID NO: 1126467 - RNA, 24 nt, Human
gguggcgcacaccuguaaucccag

SEQ ID NO: 1126468 - RNA, 24 nt, Human
gguucugcucuuccagggcgcuca

SEQ ID NO: 1126469 - RNA, 22 nt, Human
guggugcaugucuguaauccca

SEQ ID NO: 1126470 - RNA, 23 nt, Human
guggugcaugucuguaaucccag

SEQ ID NO: 1126471 - RNA, 21 nt, Human
gugguuccugccgguucugcu

SEQ ID NO: 1126472 - RNA, 18 nt, Human
guuuggggcaggcucagc

SEQ ID NO: 1126473 - RNA, 28 nt, Human
uaagccccauaggacugacaaucaaaaa

SEQ ID NO: 1126474 - RNA, 20 nt, Human
uaccuggcugugggccucua

SEQ ID NO: 1126475 - RNA, 21 nt, Human
uaggacugacaaucaaaaaca

SEQ ID NO: 1126476 - RNA, 19 nt, Human
ucaaaaacaggucuggcug

SEQ ID NO: 1126477 - RNA, 23 nt, Human
ucacaugaagucaggaguucgag

SEQ ID NO: 1126478 - RNA, 19 nt, Human
ucacugggcacgcugggaa

SEQ ID NO: 1126479 - RNA, 18 nt, Human
uccagguuucuggcgugg

SEQ ID NO: 1126480 - RNA, 22 nt, Human
ucccggggcagggugccucucc

SEQ ID NO: 1126481 - RNA, 19 nt, Human
uccucguuuucgaguuuca

SEQ ID NO: 1126482 - RNA, 18 nt, Human
uccugcagcugccccagg

SEQ ID NO: 1126483 - RNA, 24 nt, Human
ucgagggcucccugcgagucccgg

SEQ ID NO: 1126484 - RNA, 18 nt, Human
ucgcuugaacccgggagg

SEQ ID NO: 1126485 - RNA, 19 nt, Human
ucggagugcugcggaaaaa

SEQ ID NO: 1126486 - RNA, 19 nt, Human
ucggagugcugcggaaaaa

SEQ ID NO: 1126487 - RNA, 25 nt, Human
ucggagugcugcggaaaaagguuca

SEQ ID NO: 1126488 - RNA, 23 nt, Human
ucucuacuaaaaauacaacaauu

SEQ ID NO: 1126489 - RNA, 21 nt, Human
ucuguaaucccagcuacucag

SEQ ID NO: 1126490 - RNA, 23 nt, Human
ucugucucaaaaaaaaaaaaaaa

SEQ ID NO: 1126491 - RNA, 25 nt, Human
ucugucucaaaaaaaaaaaaaaaaa

SEQ ID NO: 1126492 - RNA, 18 nt, Human
ugaaagaaggagcugagg

SEQ ID NO: 1126493 - RNA, 23 nt, Human
ugaaagaaggagcugaggccggg

SEQ ID NO: 1126494 - RNA, 23 nt, Human
ugaaggcaucagaggccagaggc

SEQ ID NO: 1126495 - RNA, 18 nt, Human
ugagaagggguuggggug

SEQ ID NO: 1126496 - RNA, 24 nt, Human
ugagagaacugaaccaacuggaaa

SEQ ID NO: 1126497 - RNA, 20 nt, Human
ugagagggagaagcagggac

SEQ ID NO: 1126498 - RNA, 24 nt, Human
ugaggcacgagaaucgcuugaacc

SEQ ID NO: 1126499 - RNA, 24 nt, Human
ugaggccgggcaugguggcgcaca

SEQ ID NO: 1126500 - RNA, 18 nt, Human
ugaugcucccggggcagg

SEQ ID NO: 1126501 - RNA, 21 nt, Human
ugcacgaccagucccaagggc

SEQ ID NO: 1126502 - RNA, 20 nt, Human
ugcggagcaggggcagcagc

SEQ ID NO: 1126503 - RNA, 21 nt, Human
uggaaugaaagaaggagcuga

SEQ ID NO: 1126504 - RNA, 21 nt, Human
uggcauuuccacgccuccaca

SEQ ID NO: 1126505 - RNA, 25 nt, Human
uggccaacauggugaaacccccguc

SEQ ID NO: 1126506 - RNA, 24 nt, Human
uggcgcacaccuguaaucccagca

SEQ ID NO: 1126507 - RNA, 23 nt, Human
uggcggaucacaugaagucagga

SEQ ID NO: 1126508 - RNA, 24 nt, Human
ugggaggccgaggcuggcggauca

SEQ ID NO: 1126509 - RNA, 18 nt, Human
ugggaggccuggccaggc

SEQ ID NO: 1126510 - RNA, 18 nt, Human
ugggguggaggagggagc

SEQ ID NO: 1126511 - RNA, 21 nt, Human
uggugcaugucuguaauccca

SEQ ID NO: 1126512 - RNA, 22 nt, Human
uggugcaugucuguaaucccag

SEQ ID NO: 1126513 - RNA, 24 nt, Human
ugguggcgcacaccuguaauccca

SEQ ID NO: 1126514 - RNA, 21 nt, Human
ugucgcugcggagcaggggca

SEQ ID NO: 1126515 - RNA, 24 nt, Human
ugucuguaaucccagcuacucagg

SEQ ID NO: 1126516 - RNA, 21 nt, Human
ugugggaaauggauugaggaa

SEQ ID NO: 1126517 - RNA, 19 nt, Human
ugugggccucuaugaaagc

SEQ ID NO: 1126518 - RNA, 21 nt, Human
uguggugcaugucuguaaucc

SEQ ID NO: 1126519 - RNA, 24 nt, Human
uguggugcaugucuguaaucccag

SEQ ID NO: 1126520 - RNA, 21 nt, Human
uuagccgggcguuguggugca

SEQ ID NO: 1126521 - RNA, 22 nt, Human
uuccaggacuuaagccccauag

SEQ ID NO: 1126522 - RNA, 25 nt, Human
uugaaccuggggcugagagaacuga

SEQ ID NO: 1126523 - RNA, 22 nt, Human
uugaagugagccgaaaucgcac

SEQ ID NO: 1126524 - RNA, 18 nt, Human
uugagggggcgcuggagu

SEQ ID NO: 1126525 - RNA, 25 nt, Human
uugggaggccgaggcuggcggauca

SEQ ID NO: 1126526 - RNA, 21 nt, Human
uuugaagugagccgaaaucgc

SEQ ID NO: 1126527 - RNA, 26 nt, Human
aaacagaagagguacagaagggaccc

SEQ ID NO: 1126528 - RNA, 21 nt, Human
aaagagcucagccugaccugc

SEQ ID NO: 1126529 - RNA, 19 nt, Human
aaaggcagaggaggaugaa

SEQ ID NO: 1126530 - RNA, 18 nt, Human
aaccagccaagaccugca

SEQ ID NO: 1126531 - RNA, 21 nt, Human
aagaccugcagaagggaucaa

SEQ ID NO: 1126532 - RNA, 19 nt, Human
aagccagaggcagagagga

SEQ ID NO: 1126533 - RNA, 19 nt, Human
aagccuuuggcuguggugc

SEQ ID NO: 1126534 - RNA, 18 nt, Human
aaggauggcacaguugcc

SEQ ID NO: 1126535 - RNA, 18 nt, Human
agaggaagggcccgaagu

SEQ ID NO: 1126536 - RNA, 22 nt, Human
agaugugcuggacaccggaggu

SEQ ID NO: 1126537 - RNA, 19 nt, Human
agcaggaggugggggcagg

SEQ ID NO: 1126538 - RNA, 18 nt, Human
agcugugguuggaacugg

SEQ ID NO: 1126539 - RNA, 22 nt, Human
aggcgccagcggccacuuagca

SEQ ID NO: 1126540 - RNA, 20 nt, Human
aggggaaaggcagaggagga

SEQ ID NO: 1126541 - RNA, 18 nt, Human
aucagcaaagccaacugc

SEQ ID NO: 1126542 - RNA, 22 nt, Human
augaaagagacauaaagccaga

SEQ ID NO: 1126543 - RNA, 18 nt, Human
auguucagaugcucaucu

SEQ ID NO: 1126544 - RNA, 24 nt, Human
caagccuuuggcuguggugcccua

SEQ ID NO: 1126545 - RNA, 18 nt, Human
cacccaaauccaggaagc

SEQ ID NO: 1126546 - RNA, 21 nt, Human
cacccaaauccaggaagccuc

SEQ ID NO: 1126547 - RNA, 23 nt, Human
cagaagagguacagaaaaguuaa

SEQ ID NO: 1126548 - RNA, 27 nt, Human
caucucuauccuugacuccacugaggg

SEQ ID NO: 1126549 - RNA, 21 nt, Human
cauguucagaugcucaucucc

SEQ ID NO: 1126550 - RNA, 19 nt, Human
ccaaggcuaaggcuggggu

SEQ ID NO: 1126551 - RNA, 19 nt, Human
ccaucgcgugccaagccag

SEQ ID NO: 1126552 - RNA, 21 nt, Human
ccccugccagaccugcagcuc

SEQ ID NO: 1126553 - RNA, 20 nt, Human
ccgcaggaaaucauagaaaa

SEQ ID NO: 1126554 - RNA, 21 nt, Human
ccuagcccaugcuagccccug

SEQ ID NO: 1126555 - RNA, 20 nt, Human
ccuguaggucuggaaauagg

SEQ ID NO: 1126556 - RNA, 24 nt, Human
ccuguaggucuggaaauaggcccc

SEQ ID NO: 1126557 - RNA, 19 nt, Human
cgggagcaggagguggggg

SEQ ID NO: 1126558 - RNA, 21 nt, Human
cgggagcaggaggugggggca

SEQ ID NO: 1126559 - RNA, 22 nt, Human
cuagcccaugcuagccccugcc

SEQ ID NO: 1126560 - RNA, 21 nt, Human
cucuugcauucaccagccgca

SEQ ID NO: 1126561 - RNA, 25 nt, Human
cugaaaccagccaagaccugcagaa

SEQ ID NO: 1126562 - RNA, 24 nt, Human
cugccagugucuguacagcugcau

SEQ ID NO: 1126563 - RNA, 26 nt, Human
cugcgggggugaggaagcuggcuucc

SEQ ID NO: 1126564 - RNA, 21 nt, Human
cugugguccuuccuguauccc

SEQ ID NO: 1126565 - RNA, 25 nt, Human
cuuccagugaagaugugcuggacac

SEQ ID NO: 1126566 - RNA, 23 nt, Human
cuuccuguaucccguccaucgcg

SEQ ID NO: 1126567 - RNA, 18 nt, Human
cuugacuccacugagggg

SEQ ID NO: 1126568 - RNA, 20 nt, Human
gaaagagacauaaagccaga

SEQ ID NO: 1126569 - RNA, 20 nt, Human
gagcaggaggugggggcagg

SEQ ID NO: 1126570 - RNA, 18 nt, Human
gaggaagggcccgaagug

SEQ ID NO: 1126571 - RNA, 23 nt, Human
gagggugguagucugggcacagg

SEQ ID NO: 1126572 - RNA, 23 nt, Human
gaggugggggaucagcaaagcca

SEQ ID NO: 1126573 - RNA, 21 nt, Human
gaugugcuggacaccggaggu

SEQ ID NO: 1126574 - RNA, 21 nt, Human
ggaaaucauagaaaaugacca

SEQ ID NO: 1126575 - RNA, 22 nt, Human
ggaaucccauucagcugcccuu

SEQ ID NO: 1126576 - RNA, 19 nt, Human
ggaggugguaaagcugugg

SEQ ID NO: 1126577 - RNA, 20 nt, Human
ggaggugguaaagcuguggu

SEQ ID NO: 1126578 - RNA, 21 nt, Human
gggcaggggaaaggcagagga

SEQ ID NO: 1126579 - RNA, 18 nt, Human
ggggaucagcaaagccaa

SEQ ID NO: 1126580 - RNA, 18 nt, Human
ggugguagucugggcaca

SEQ ID NO: 1126581 - RNA, 18 nt, Human
guagucugggcacaggcu

SEQ ID NO: 1126582 - RNA, 21 nt, Human
uaacgggaggugguaaagcug

SEQ ID NO: 1126583 - RNA, 20 nt, Human
uacaaaaacagaagagguac

SEQ ID NO: 1126584 - RNA, 20 nt, Human
uagcacccgcugaucuuggu

SEQ ID NO: 1126585 - RNA, 24 nt, Human
uaggucuggaaauaggccccaguc

SEQ ID NO: 1126586 - RNA, 25 nt, Human
ucaagggcaggggaaaggcagagga

SEQ ID NO: 1126587 - RNA, 21 nt, Human
ucagcaaagccaacugcgggg

SEQ ID NO: 1126588 - RNA, 21 nt, Human
uccaggaagccucaaggcccc

SEQ ID NO: 1126589 - RNA, 19 nt, Human
ucccauucagcugcccaag

SEQ ID NO: 1126590 - RNA, 20 nt, Human
ucucuugcauucaccagccg

SEQ ID NO: 1126591 - RNA, 24 nt, Human
ugaaagagacauaaagccagaggc

SEQ ID NO: 1126592 - RNA, 20 nt, Human
ugaugagggugguagucugg

SEQ ID NO: 1126593 - RNA, 22 nt, Human
ugccaagccaguccuuaguugc

SEQ ID NO: 1126594 - RNA, 19 nt, Human
ugcccuagcccaugcuagc

SEQ ID NO: 1126595 - RNA, 21 nt, Human
ugcccuagcccaugcuagccc

SEQ ID NO: 1126596 - RNA, 20 nt, Human
ugccugaggaaucccauuca

SEQ ID NO: 1126597 - RNA, 20 nt, Human
uggaaauaggccccaguccu

SEQ ID NO: 1126598 - RNA, 21 nt, Human
uggcaaggauggcacaguugc

SEQ ID NO: 1126599 - RNA, 23 nt, Human
ugggacccguuuccugaaaccag

SEQ ID NO: 1126600 - RNA, 20 nt, Human
ugggggcaggcaaagggcug

SEQ ID NO: 1126601 - RNA, 22 nt, Human
ugggggcaggcaaagggcuggg

SEQ ID NO: 1126602 - RNA, 24 nt, Human
uuacaaaaacagaagagguacaga

SEQ ID NO: 1126603 - RNA, 25 nt, Human
uugcuggauugaucucugccagugu

SEQ ID NO: 1126604 - RNA, 20 nt, Human
accccaccgucucccuccca

SEQ ID NO: 1126605 - RNA, 24 nt, Human
accccaccgucucccucccaccuu

SEQ ID NO: 1126606 - RNA, 26 nt, Human
accgucucccucccaccuucccacug

SEQ ID NO: 1126607 - RNA, 22 nt, Human
agucacagcgacuggcacaacc

SEQ ID NO: 1126608 - RNA, 24 nt, Human
caccgucucccucccaccuuccca

SEQ ID NO: 1126609 - RNA, 18 nt, Human
cccaccgucucccuccca

SEQ ID NO: 1126610 - RNA, 22 nt, Human
ccucccaccuucccacugcagu

SEQ ID NO: 1126611 - RNA, 19 nt, Human
cucccucccaccuucccac

SEQ ID NO: 1126612 - RNA, 20 nt, Human
gcacaaccuucuccaaacug

SEQ ID NO: 1126613 - RNA, 26 nt, Human
ucacagcgacuggcacaaccuucucc

SEQ ID NO: 1126614 - RNA, 29 nt, Human
ucagcccuuaccccaccgucucccuccca

SEQ ID NO: 1126615 - RNA, 19 nt, Human
uccaugaacagggucacag

SEQ ID NO: 1126616 - RNA, 22 nt, Human
uccaugaacagggucacagcca

SEQ ID NO: 1126617 - RNA, 22 nt, Human
aaggagcuggagcccgcgccag

SEQ ID NO: 1126618 - RNA, 24 nt, Human
aaggggcaggcugggaggggcugc

SEQ ID NO: 1126619 - RNA, 18 nt, Human
acgcagcugccgcaacau

SEQ ID NO: 1126620 - RNA, 18 nt, Human
acucauguucugcauccc

SEQ ID NO: 1126621 - RNA, 18 nt, Human
agccgcugguggucuucg

SEQ ID NO: 1126622 - RNA, 21 nt, Human
agccggcucuccucgcccucc

SEQ ID NO: 1126623 - RNA, 19 nt, Human
agccuggagccggcugaug

SEQ ID NO: 1126624 - RNA, 23 nt, Human
aggagucggaggacucggacacc

SEQ ID NO: 1126625 - RNA, 20 nt, Human
aggcuggggcuugugaggcc

SEQ ID NO: 1126626 - RNA, 19 nt, Human
cacuugggcaggagucgga

SEQ ID NO: 1126627 - RNA, 23 nt, Human
cagcugccgcaacauguccugcu

SEQ ID NO: 1126628 - RNA, 21 nt, Human
cagcuuccuaucacgugucuc

SEQ ID NO: 1126629 - RNA, 21 nt, Human
ccaggcucuugcagcuccuca

SEQ ID NO: 1126630 - RNA, 20 nt, Human
ccccauaggccgagcucaga

SEQ ID NO: 1126631 - RNA, 25 nt, Human
cccgcgccagagccaaagcuggagc

SEQ ID NO: 1126632 - RNA, 23 nt, Human
cccucccaggcucuggggcagcg

SEQ ID NO: 1126633 - RNA, 24 nt, Human
ccuccagcucggacaacuuggcgu

SEQ ID NO: 1126634 - RNA, 24 nt, Human
ccucccucccaggcucuggggcag

SEQ ID NO: 1126635 - RNA, 20 nt, Human
cgcccuccaguagcuuccug

SEQ ID NO: 1126636 - RNA, 23 nt, Human
cgcugcagggcggccuccagcuc

SEQ ID NO: 1126637 - RNA, 23 nt, Human
cucaaucucagccuggagccggc

SEQ ID NO: 1126638 - RNA, 18 nt, Human
cuccagggaagcccucug

SEQ ID NO: 1126639 - RNA, 19 nt, Human
cuccucgcccuccaguagc

SEQ ID NO: 1126640 - RNA, 20 nt, Human
cucuccgcgcugcugugcau

SEQ ID NO: 1126641 - RNA, 18 nt, Human
cugcuuggcccgcugcag

SEQ ID NO: 1126642 - RNA, 25 nt, Human
cuuggcccgcugcagggcggccucc

SEQ ID NO: 1126643 - RNA, 21 nt, Human
cuugugaggcccccauaggcc

SEQ ID NO: 1126644 - RNA, 23 nt, Human
gagcuggugcggcugaaggagcu

SEQ ID NO: 1126645 - RNA, 19 nt, Human
gccagagccaaagcuggag

SEQ ID NO: 1126646 - RNA, 18 nt, Human
gcccuccaguagcuuccu

SEQ ID NO: 1126647 - RNA, 25 nt, Human
gccgcaacauguccugcuuggcccg

SEQ ID NO: 1126648 - RNA, 23 nt, Human
ggaggggcugccucagcuguuca

SEQ ID NO: 1126649 - RNA, 20 nt, Human
ggcccccauaggccgagcuc

SEQ ID NO: 1126650 - RNA, 21 nt, Human
ggcuggggcuugugaggcccc

SEQ ID NO: 1126651 - RNA, 19 nt, Human
gggcagcgcagaaggggca

SEQ ID NO: 1126652 - RNA, 24 nt, Human
guucacuugggcaggagucggagg

SEQ ID NO: 1126653 - RNA, 22 nt, Human
uaguggccucccucccaggcuc

SEQ ID NO: 1126654 - RNA, 24 nt, Human
ucacaaccacggcccucgaggagc

SEQ ID NO: 1126655 - RNA, 24 nt, Human
ucacgugucucgaucuucuucaca

SEQ ID NO: 1126656 - RNA, 23 nt, Human
uccagcucggacaacuuggcguu

SEQ ID NO: 1126657 - RNA, 23 nt, Human
uccgcgcugcugugcaucugcaa

SEQ ID NO: 1126658 - RNA, 23 nt, Human
ucgcccuccaguagcuuccugua

SEQ ID NO: 1126659 - RNA, 19 nt, Human
ucugcaucccagacuccag

SEQ ID NO: 1126660 - RNA, 21 nt, Human
ugaggcuggggcuugugaggc

SEQ ID NO: 1126661 - RNA, 24 nt, Human
ugccucagcuguucacuugggcag

SEQ ID NO: 1126662 - RNA, 24 nt, Human
ugcuucccagccaggcucuugcag

SEQ ID NO: 1126663 - RNA, 27 nt, Human
uggagcccaggccauagcugaggcugg

SEQ ID NO: 1126664 - RNA, 18 nt, Human
uggagccggcugauguuc

SEQ ID NO: 1126665 - RNA, 21 nt, Human
ugggcaggagucggaggacuc

SEQ ID NO: 1126666 - RNA, 23 nt, Human
uggggcccucaaucucagccugg

SEQ ID NO: 1126667 - RNA, 21 nt, Human
uggugcggcugaaggagcugg

SEQ ID NO: 1126668 - RNA, 20 nt, Human
uucccagccaggcucuugca

SEQ ID NO: 1126669 - RNA, 21 nt, Human
uucccagccaggcucuugcag

SEQ ID NO: 1126670 - RNA, 20 nt, Human
uugacguucaucagcugcug

SEQ ID NO: 1126671 - RNA, 20 nt, Human
aaaaaaaaaagaggaaccag

SEQ ID NO: 1126672 - RNA, 23 nt, Human
aaaaaacaaacaaacaaacaaaa

SEQ ID NO: 1126673 - RNA, 18 nt, Human
aaaauuagcugggcgugg

SEQ ID NO: 1126674 - RNA, 25 nt, Human
aaacaaacaaaaaaagaaggaucca

SEQ ID NO: 1126675 - RNA, 22 nt, Human
aaacagaauaguauaaugagac

SEQ ID NO: 1126676 - RNA, 19 nt, Human
aaagaccaagggaggcgcc

SEQ ID NO: 1126677 - RNA, 22 nt, Human
aaaugaaccccaagaccucuga

SEQ ID NO: 1126678 - RNA, 24 nt, Human
aaauggggcuaaugcccucauccc

SEQ ID NO: 1126679 - RNA, 18 nt, Human
aacacuuugagaggcuga

SEQ ID NO: 1126680 - RNA, 27 nt, Human
aaccggccugcacaaaugaacccccuc

SEQ ID NO: 1126681 - RNA, 21 nt, Human
aagcaggugugugggggaggu

SEQ ID NO: 1126682 - RNA, 22 nt, Human
aagcccccagcuggggcacucc

SEQ ID NO: 1126683 - RNA, 19 nt, Human
aagggacgcgugugcucug

SEQ ID NO: 1126684 - RNA, 20 nt, Human
aaguucaggaguucgagacc

SEQ ID NO: 1126685 - RNA, 23 nt, Human
aaguugggguggagaaaaauggg

SEQ ID NO: 1126686 - RNA, 24 nt, Human
aaucaccuaaguucaggaguucga

SEQ ID NO: 1126687 - RNA, 25 nt, Human
aaucuuguuucaucugcacucccac

SEQ ID NO: 1126688 - RNA, 18 nt, Human
aauuagccaggcauggug

SEQ ID NO: 1126689 - RNA, 24 nt, Human
acaaaugaaccccaagaccucuga

SEQ ID NO: 1126690 - RNA, 20 nt, Human
acaagagcaaaacuccaucu

SEQ ID NO: 1126691 - RNA, 19 nt, Human
acacagugaaggggaucuc

SEQ ID NO: 1126692 - RNA, 24 nt, Human
acagcgccacugcacucuagccug

SEQ ID NO: 1126693 - RNA, 22 nt, Human
acccacccuccaccacccaacc

SEQ ID NO: 1126694 - RNA, 22 nt, Human
acgcagcggcuguggauggggc

SEQ ID NO: 1126695 - RNA, 23 nt, Human
acuaaagucuugguggauucuuc

SEQ ID NO: 1126696 - RNA, 23 nt, Human
acucccaccuccuuuucccccac

SEQ ID NO: 1126697 - RNA, 24 nt, Human
acugcacuacagccugggcaacag

SEQ ID NO: 1126698 - RNA, 27 nt, Human
acugcacucuagccuggccgacaagag

SEQ ID NO: 1126699 - RNA, 24 nt, Human
acugcagcugggggauaggaguga

SEQ ID NO: 1126700 - RNA, 19 nt, Human
agaacccagacagcagccc

SEQ ID NO: 1126701 - RNA, 18 nt, Human
agaacugagagcuuccac

SEQ ID NO: 1126702 - RNA, 24 nt, Human
agaaucaccuaaguucaggaguuc

SEQ ID NO: 1126703 - RNA, 22 nt, Human
agacaagagaggggcuggaggc

SEQ ID NO: 1126704 - RNA, 23 nt, Human
agagaaacucagugucucagggg

SEQ ID NO: 1126705 - RNA, 19 nt, Human
agagaggccuuuccugggg

SEQ ID NO: 1126706 - RNA, 18 nt, Human
agaggagaggggugggga

SEQ ID NO: 1126707 - RNA, 22 nt, Human
agagguugcagugagcugagau

SEQ ID NO: 1126708 - RNA, 24 nt, Human
agagguugcagugagcugagaucg

SEQ ID NO: 1126709 - RNA, 21 nt, Human
agaugcuguugggacaaaaug

SEQ ID NO: 1126710 - RNA, 22 nt, Human
agcaggugugugggggagguuc

SEQ ID NO: 1126711 - RNA, 23 nt, Human
agccaggcaugguggcaggcgcc

SEQ ID NO: 1126712 - RNA, 23 nt, Human
agccuggccaacguggugaaccc

SEQ ID NO: 1126713 - RNA, 22 nt, Human
agccugggcaacagcgagacuc

SEQ ID NO: 1126714 - RNA, 24 nt, Human
agcucuggggccugccuaaagcaa

SEQ ID NO: 1126715 - RNA, 18 nt, Human
agcugggcccacucaugg

SEQ ID NO: 1126716 - RNA, 20 nt, Human
agcugggcgugguggugggc

SEQ ID NO: 1126717 - RNA, 20 nt, Human
aggagaggacucauaaaugg

SEQ ID NO: 1126718 - RNA, 22 nt, Human
aggagagggguggggaugcugg

SEQ ID NO: 1126719 - RNA, 24 nt, Human
aggaugugauucaagcaaagacca

SEQ ID NO: 1126720 - RNA, 20 nt, Human
aggcagagguugcagugagc

SEQ ID NO: 1126721 - RNA, 24 nt, Human
aggcagagguugcagugagcugag

SEQ ID NO: 1126722 - RNA, 19 nt, Human
aggcaggagaaucaccuaa

SEQ ID NO: 1126723 - RNA, 21 nt, Human
aggcaggaucgcuugaacccg

SEQ ID NO: 1126724 - RNA, 24 nt, Human
aggcaugguggcaggcgccuguaa

SEQ ID NO: 1126725 - RNA, 22 nt, Human
aggcccaaaacacaacugacag

SEQ ID NO: 1126726 - RNA, 19 nt, Human
aggcugaggcaggagaauc

SEQ ID NO: 1126727 - RNA, 18 nt, Human
aggcugugcagccccagg

SEQ ID NO: 1126728 - RNA, 22 nt, Human
agggacagccuguacaaaagcc

SEQ ID NO: 1126729 - RNA, 20 nt, Human
agggagacggagauggaugg

SEQ ID NO: 1126730 - RNA, 21 nt, Human
aggugcuuagggaaaaccagg

SEQ ID NO: 1126731 - RNA, 21 nt, Human
agguggaaguugcagugagcc

SEQ ID NO: 1126732 - RNA, 24 nt, Human
agguggaaguugcagugagccgag

SEQ ID NO: 1126733 - RNA, 23 nt, Human
agguggcuuuuggggucucugga

SEQ ID NO: 1126734 - RNA, 26 nt, Human
agguggcuuuuggggucucuggagga

SEQ ID NO: 1126735 - RNA, 24 nt, Human
aguaagucacugaagcaccugccc

SEQ ID NO: 1126736 - RNA, 24 nt, Human
agucacuugaacccaggaggcaga

SEQ ID NO: 1126737 - RNA, 24 nt, Human
aucgcaccacugcacuacagccug

SEQ ID NO: 1126738 - RNA, 23 nt, Human
aucgcuugaacccgggaggugga

SEQ ID NO: 1126739 - RNA, 21 nt, Human
auggggggaagcaggugugug

SEQ ID NO: 1126740 - RNA, 22 nt, Human
caaaacacaacugacaggccgg

SEQ ID NO: 1126741 - RNA, 21 nt, Human
caaaugaaccccaagaccucu

SEQ ID NO: 1126742 - RNA, 24 nt, Human
caacacuuugagaggcugaggcag

SEQ ID NO: 1126743 - RNA, 24 nt, Human
caacccccaucgccucccacacca

SEQ ID NO: 1126744 - RNA, 24 nt, Human
caacguggugaacccucgucucua

SEQ ID NO: 1126745 - RNA, 22 nt, Human
caagccccacaguguccuggag

SEQ ID NO: 1126746 - RNA, 24 nt, Human
caagcccccagcuggggcacuccu

SEQ ID NO: 1126747 - RNA, 20 nt, Human
cacaaaugaaccccaagacc

SEQ ID NO: 1126748 - RNA, 23 nt, Human
cacaaaugaaccccaagaccucu

SEQ ID NO: 1126749 - RNA, 22 nt, Human
cacaacugacaggccgucccuu

SEQ ID NO: 1126750 - RNA, 18 nt, Human
cacagaccagcccagaga

SEQ ID NO: 1126751 - RNA, 22 nt, Human
cacaggaucaaaggcaucccgg

SEQ ID NO: 1126752 - RNA, 21 nt, Human
caccacccaacccccaucgcc

SEQ ID NO: 1126753 - RNA, 24 nt, Human
caccacccaacccccaucgccucc

SEQ ID NO: 1126754 - RNA, 20 nt, Human
caccaccuccaccgcccucu

SEQ ID NO: 1126755 - RNA, 24 nt, Human
caccacugcacuacagccugggca

SEQ ID NO: 1126756 - RNA, 25 nt, Human
caccgcgucacccagaccuugacuc

SEQ ID NO: 1126757 - RNA, 23 nt, Human
caccugcaaucccagcuacucgg

SEQ ID NO: 1126758 - RNA, 24 nt, Human
caccugcaaucccagcuacucggg

SEQ ID NO: 1126759 - RNA, 23 nt, Human
cacucaugguggcccacacucag

SEQ ID NO: 1126760 - RNA, 24 nt, Human
cacucuagccuggccgacaagagc

SEQ ID NO: 1126761 - RNA, 23 nt, Human
cacugcacuacagccugggcaac

SEQ ID NO: 1126762 - RNA, 24 nt, Human
cacugcacuacagccugggcaaca

SEQ ID NO: 1126763 - RNA, 18 nt, Human
cacugcacucuagccugg

SEQ ID NO: 1126764 - RNA, 21 nt, Human
cacugcacucuagccuggccg

SEQ ID NO: 1126765 - RNA, 24 nt, Human
cacugcacucuagccuggccgaca

SEQ ID NO: 1126766 - RNA, 25 nt, Human
cacugcacucuagccuggccgacaa

SEQ ID NO: 1126767 - RNA, 26 nt, Human
cagaacccagacagcagcccauggga

SEQ ID NO: 1126768 - RNA, 25 nt, Human
cagagccagaacccagacagcagcc

SEQ ID NO: 1126769 - RNA, 18 nt, Human
cagagggacagccuguac

SEQ ID NO: 1126770 - RNA, 23 nt, Human
cagcccagagaucccuggaaauc

SEQ ID NO: 1126771 - RNA, 21 nt, Human
cagcccagcgcuugccagcgg

SEQ ID NO: 1126772 - RNA, 18 nt, Human
cagccccacaccuggccc

SEQ ID NO: 1126773 - RNA, 20 nt, Human
cagccccacaccuggcccuc

SEQ ID NO: 1126774 - RNA, 18 nt, Human
cagccucauccuucagga

SEQ ID NO: 1126775 - RNA, 18 nt, Human
cagccugggcaacagcga

SEQ ID NO: 1126776 - RNA, 24 nt, Human
cagcuacucaggaggcugaggcag

SEQ ID NO: 1126777 - RNA, 21 nt, Human
cagcugagggcucuccugcca

SEQ ID NO: 1126778 - RNA, 20 nt, Human
caggcacaacaaagcccacc

SEQ ID NO: 1126779 - RNA, 21 nt, Human
caggcacacauccuggccucg

SEQ ID NO: 1126780 - RNA, 20 nt, Human
caggcccaaaacacaacuga

SEQ ID NO: 1126781 - RNA, 18 nt, Human
caggcgcccacccacgcu

SEQ ID NO: 1126782 - RNA, 18 nt, Human
cagguuuuguuccacuuu

SEQ ID NO: 1126783 - RNA, 18 nt, Human
cagugauggccacucccc

SEQ ID NO: 1126784 - RNA, 20 nt, Human
cauccuggccucggccugcc

SEQ ID NO: 1126785 - RNA, 23 nt, Human
caucugaaaaauggggauacaaa

SEQ ID NO: 1126786 - RNA, 24 nt, Human
caugccuguuaucccaacacuuug

SEQ ID NO: 1126787 - RNA, 21 nt, Human
ccaaccgccccauugucccag

SEQ ID NO: 1126788 - RNA, 20 nt, Human
ccaacguggugaacccucgu

SEQ ID NO: 1126789 - RNA, 24 nt, Human
ccaagaccucugaccccaugaccu

SEQ ID NO: 1126790 - RNA, 23 nt, Human
ccaauaaucgaggcuuguggggc

SEQ ID NO: 1126791 - RNA, 18 nt, Human
ccacacugauggggaggg

SEQ ID NO: 1126792 - RNA, 21 nt, Human
ccacccuccaccacccaaccc

SEQ ID NO: 1126793 - RNA, 19 nt, Human
ccaccucuccagccgccug

SEQ ID NO: 1126794 - RNA, 18 nt, Human
ccacucaugguggcccac

SEQ ID NO: 1126795 - RNA, 20 nt, Human
ccacugcacuacagccuggg

SEQ ID NO: 1126796 - RNA, 20 nt, Human
ccacugcacuacagccuggg

SEQ ID NO: 1126797 - RNA, 21 nt, Human
ccacugcacuacagccugggc

SEQ ID NO: 1126798 - RNA, 24 nt, Human
ccacugcacuacagccugggcaac

SEQ ID NO: 1126799 - RNA, 19 nt, Human
ccacugcacucuagccugg

SEQ ID NO: 1126800 - RNA, 20 nt, Human
ccacugcacucuagccuggc

SEQ ID NO: 1126801 - RNA, 24 nt, Human
ccacugcacucuagccuggccgac

SEQ ID NO: 1126802 - RNA, 24 nt, Human
ccagaacccagacagcagcccaug

SEQ ID NO: 1126803 - RNA, 20 nt, Human
ccagagagcagggcugcugg

SEQ ID NO: 1126804 - RNA, 21 nt, Human
ccagagccuucgcacucacca

SEQ ID NO: 1126805 - RNA, 23 nt, Human
ccagccgccuggacucugggucc

SEQ ID NO: 1126806 - RNA, 22 nt, Human
ccaggaggcagagguugcagug

SEQ ID NO: 1126807 - RNA, 22 nt, Human
ccaggcaaaagggaaagggaca

SEQ ID NO: 1126808 - RNA, 19 nt, Human
ccaggcccgcccugcacac

SEQ ID NO: 1126809 - RNA, 21 nt, Human
ccaggcgcugcucuucuugcu

SEQ ID NO: 1126810 - RNA, 22 nt, Human
ccagguuuuguuccacuuuuuc

SEQ ID NO: 1126811 - RNA, 22 nt, Human
cccaagaccucugaccccauga

SEQ ID NO: 1126812 - RNA, 22 nt, Human
cccacaguguccuggagcacau

SEQ ID NO: 1126813 - RNA, 22 nt, Human
cccacaguguccuggagcacau

SEQ ID NO: 1126814 - RNA, 18 nt, Human
cccacccacgcucucuca

SEQ ID NO: 1126815 - RNA, 20 nt, Human
cccaccccccauagaugggc

SEQ ID NO: 1126816 - RNA, 19 nt, Human
cccacccuccaccacccaa

SEQ ID NO: 1126817 - RNA, 21 nt, Human
cccacccuccaccacccaacc

SEQ ID NO: 1126818 - RNA, 22 nt, Human
cccacccuccaccacccaaccc

SEQ ID NO: 1126819 - RNA, 25 nt, Human
cccacccuccaccacccaaccccca

SEQ ID NO: 1126820 - RNA, 21 nt, Human
cccagacagcagcccauggga

SEQ ID NO: 1126821 - RNA, 22 nt, Human
cccagagaaacucagugucuca

SEQ ID NO: 1126822 - RNA, 26 nt, Human
ccccaaccgccccauugucccaggcc

SEQ ID NO: 1126823 - RNA, 22 nt, Human
ccccaaccgccccauugucccu

SEQ ID NO: 1126824 - RNA, 19 nt, Human
ccccacaccuggcccucuc

SEQ ID NO: 1126825 - RNA, 19 nt, Human
ccccacagaccagcccaga

SEQ ID NO: 1126826 - RNA, 19 nt, Human
ccccaccucuccagccgcc

SEQ ID NO: 1126827 - RNA, 21 nt, Human
ccccagccccacaccuggccc

SEQ ID NO: 1126828 - RNA, 22 nt, Human
ccccaggccacguccccucucc

SEQ ID NO: 1126829 - RNA, 18 nt, Human
ccccaucgccucccacac

SEQ ID NO: 1126830 - RNA, 20 nt, Human
ccccauugucccaggcccgg

SEQ ID NO: 1126831 - RNA, 23 nt, Human
ccccuacugcagcugggggauag

SEQ ID NO: 1126832 - RNA, 22 nt, Human
ccccuggcagggccugagguga

SEQ ID NO: 1126833 - RNA, 23 nt, Human
ccccugggcucagucuggcaggg

SEQ ID NO: 1126834 - RNA, 23 nt, Human
cccggugccaggcgcugcucuuc

SEQ ID NO: 1126835 - RNA, 20 nt, Human
cccucaacucccauccucaa

SEQ ID NO: 1126836 - RNA, 24 nt, Human
cccucgucucuacuaaaaauacaa

SEQ ID NO: 1126837 - RNA, 24 nt, Human
cccugggcucagucuggcaggcca

SEQ ID NO: 1126838 - RNA, 31 nt, Human
ccgacaggcccaaaacacaacugacaggccu

SEQ ID NO: 1126839 - RNA, 22 nt, Human
ccggccugcacaaaugaacccc

SEQ ID NO: 1126840 - RNA, 20 nt, Human
ccggcuguggcuccaggugc

SEQ ID NO: 1126841 - RNA, 21 nt, Human
ccucaaggcaggauaaugggc

SEQ ID NO: 1126842 - RNA, 26 nt, Human
ccuccaccacccaacccccaucgccu

SEQ ID NO: 1126843 - RNA, 21 nt, Human
ccucgccccaccccccauaga

SEQ ID NO: 1126844 - RNA, 21 nt, Human
ccucgcccucccaggccccuc

SEQ ID NO: 1126845 - RNA, 20 nt, Human
ccucggccugcccaguuugg

SEQ ID NO: 1126846 - RNA, 21 nt, Human
ccugcaaucccagcuacucgg

SEQ ID NO: 1126847 - RNA, 22 nt, Human
ccugcacaaaugaaccccaaga

SEQ ID NO: 1126848 - RNA, 20 nt, Human
ccugcugggccagcugggcc

SEQ ID NO: 1126849 - RNA, 22 nt, Human
ccuggagaagccaccccugggc

SEQ ID NO: 1126850 - RNA, 21 nt, Human
ccuggccaacguggugaaccc

SEQ ID NO: 1126851 - RNA, 22 nt, Human
ccuggccaacguggugaacccu

SEQ ID NO: 1126852 - RNA, 24 nt, Human
ccuggccaacguggugaacccucg

SEQ ID NO: 1126853 - RNA, 20 nt, Human
ccugggcaacagcgagacuc

SEQ ID NO: 1126854 - RNA, 22 nt, Human
ccugguuugcagggcggcgggc

SEQ ID NO: 1126855 - RNA, 21 nt, Human
ccuguaaucccagcuacucag

SEQ ID NO: 1126856 - RNA, 22 nt, Human
ccuguaaucccagcuacucagg

SEQ ID NO: 1126857 - RNA, 21 nt, Human
ccuugugguaauagccccucg

SEQ ID NO: 1126858 - RNA, 24 nt, Human
ccuuuccuuggcaacugggccaag

SEQ ID NO: 1126859 - RNA, 21 nt, Human
cgacaagagcaaaacuccauc

SEQ ID NO: 1126860 - RNA, 23 nt, Human
cgacaggcccaaaacacaacuga

SEQ ID NO: 1126861 - RNA, 22 nt, Human
cgagacagcgccacugcacucu

SEQ ID NO: 1126862 - RNA, 24 nt, Human
cgagacagcgccacugcacucuag

SEQ ID NO: 1126863 - RNA, 24 nt, Human
cgagaccagccuggccaacguggu

SEQ ID NO: 1126864 - RNA, 19 nt, Human
cgaggcaaggcugggcugg

SEQ ID NO: 1126865 - RNA, 24 nt, Human
cgccuguaaucccagcuacucagg

SEQ ID NO: 1126866 - RNA, 24 nt, Human
cgggaggcugaggcacaagaguca

SEQ ID NO: 1126867 - RNA, 24 nt, Human
cgggagguggaaguugcagugagc

SEQ ID NO: 1126868 - RNA, 21 nt, Human
cuaaagcaagggugaccaucc

SEQ ID NO: 1126869 - RNA, 19 nt, Human
cuacugggacauuguugug

SEQ ID NO: 1126870 - RNA, 20 nt, Human
cuagcccucgccccaccccc

SEQ ID NO: 1126871 - RNA, 22 nt, Human
cuagucuggggaagggacuccu

SEQ ID NO: 1126872 - RNA, 19 nt, Human
cucacagagagcaccucac

SEQ ID NO: 1126873 - RNA, 23 nt, Human
cucagccucagagccaagauggg

SEQ ID NO: 1126874 - RNA, 24 nt, Human
cucaugccuguuaucccaacacuu

SEQ ID NO: 1126875 - RNA, 22 nt, Human
cucaugguggcccacacucagc

SEQ ID NO: 1126876 - RNA, 23 nt, Human
cuccagaggucagaggagcagcu

SEQ ID NO: 1126877 - RNA, 20 nt, Human
cuccaggugcugaaggaccc

SEQ ID NO: 1126878 - RNA, 19 nt, Human
cuccaucucaaaaaaaaaa

SEQ ID NO: 1126879 - RNA, 23 nt, Human
cuccccacagugcagccuccuca

SEQ ID NO: 1126880 - RNA, 22 nt, Human
cugaggcaggaucgcuugaacc

SEQ ID NO: 1126881 - RNA, 20 nt, Human
cugagggcucuccugccaag

SEQ ID NO: 1126882 - RNA, 21 nt, Human
cugcaaucccagcuacucggg

SEQ ID NO: 1126883 - RNA, 24 nt, Human
cugcagugugcucuuccccaggcc

SEQ ID NO: 1126884 - RNA, 21 nt, Human
cugcugccugcuacagcauua

SEQ ID NO: 1126885 - RNA, 23 nt, Human
cugcuggagacaagagaggggcc

SEQ ID NO: 1126886 - RNA, 20 nt, Human
cuggagcacauuccuugcuc

SEQ ID NO: 1126887 - RNA, 22 nt, Human
cuggagcacauuccuugcucua

SEQ ID NO: 1126888 - RNA, 20 nt, Human
cuggcccucucaggcagccc

SEQ ID NO: 1126889 - RNA, 24 nt, Human
cuggccgacaagagcaaaacucca

SEQ ID NO: 1126890 - RNA, 23 nt, Human
cuggggccugccuaaagcaaggg

SEQ ID NO: 1126891 - RNA, 18 nt, Human
cuugcuggggcacuggcc

SEQ ID NO: 1126892 - RNA, 20 nt, Human
cuuuaaagauccuccucacc

SEQ ID NO: 1126893 - RNA, 21 nt, Human
cuuugucuccacccacccucc

SEQ ID NO: 1126894 - RNA, 22 nt, Human
gaaccccaagaccucugacccc

SEQ ID NO: 1126895 - RNA, 19 nt, Human
gaagcaccugcccgugagg

SEQ ID NO: 1126896 - RNA, 19 nt, Human
gaagcagguguguggggga

SEQ ID NO: 1126897 - RNA, 25 nt, Human
gaaggggauugggaacaagcccccu

SEQ ID NO: 1126898 - RNA, 20 nt, Human
gacagugauggccacucccc

SEQ ID NO: 1126899 - RNA, 18 nt, Human
gaccaucugcuaaugccu

SEQ ID NO: 1126900 - RNA, 22 nt, Human
gacccgacaggcccaaaacaca

SEQ ID NO: 1126901 - RNA, 23 nt, Human
gacccgacaggcccaaaacacaa

SEQ ID NO: 1126902 - RNA, 21 nt, Human
gagaagcccaagcccccagcu

SEQ ID NO: 1126903 - RNA, 19 nt, Human
gagagggaggcuggggugg

SEQ ID NO: 1126904 - RNA, 31 nt, Human
gagccagaacccagacagcagcccaugggaa

SEQ ID NO: 1126905 - RNA, 21 nt, Human
gagcugggaaggaggggacgc

SEQ ID NO: 1126906 - RNA, 21 nt, Human
gagcugucgggggaauuaaau

SEQ ID NO: 1126907 - RNA, 21 nt, Human
gaggcagagguugcagugagc

SEQ ID NO: 1126908 - RNA, 20 nt, Human
gaggcuggggugguuuccug

SEQ ID NO: 1126909 - RNA, 19 nt, Human
gaggcugugcagccccagg

SEQ ID NO: 1126910 - RNA, 22 nt, Human
gauccagcucuaaucuaauuug

SEQ ID NO: 1126911 - RNA, 24 nt, Human
gaucgcuugaacccgggaggugga

SEQ ID NO: 1126912 - RNA, 23 nt, Human
gcacaacaaagcccacuuccucu

SEQ ID NO: 1126913 - RNA, 25 nt, Human
gcagccccaggucagaaugcugugc

SEQ ID NO: 1126914 - RNA, 20 nt, Human
gcagccgcugugggcagugc

SEQ ID NO: 1126915 - RNA, 20 nt, Human
gcagcggcuguggauggggc

SEQ ID NO: 1126916 - RNA, 18 nt, Human
gccacuccccuacugcag

SEQ ID NO: 1126917 - RNA, 20 nt, Human
gccacugcacucuagccugg

SEQ ID NO: 1126918 - RNA, 19 nt, Human
gccagaacccagacagcag

SEQ ID NO: 1126919 - RNA, 23 nt, Human
gccagagcauaagagaaccucug

SEQ ID NO: 1126920 - RNA, 22 nt, Human
gcccaaaacacaacugacaggc

SEQ ID NO: 1126921 - RNA, 18 nt, Human
gccccaggucagaaugcu

SEQ ID NO: 1126922 - RNA, 20 nt, Human
gcccucgccccaccccccau

SEQ ID NO: 1126923 - RNA, 19 nt, Human
gccuaaagcaagggugacc

SEQ ID NO: 1126924 - RNA, 21 nt, Human
gccuagcccucgccccacccc

SEQ ID NO: 1126925 - RNA, 21 nt, Human
gccuccugcugggccagcugg

SEQ ID NO: 1126926 - RNA, 24 nt, Human
gccuggggccccacagaccagccc

SEQ ID NO: 1126927 - RNA, 21 nt, Human
gcgggcaaagggggacucagg

SEQ ID NO: 1126928 - RNA, 20 nt, Human
gcgggugaggggauggaugg

SEQ ID NO: 1126929 - RNA, 20 nt, Human
gcugagaucgcaccacugca

SEQ ID NO: 1126930 - RNA, 24 nt, Human
ggaaggggacccacccuccaccac

SEQ ID NO: 1126931 - RNA, 18 nt, Human
ggaaguugcagugagccg

SEQ ID NO: 1126932 - RNA, 22 nt, Human
ggaaguugcagugagccgagac

SEQ ID NO: 1126933 - RNA, 27 nt, Human
ggacaggaagggcgggugaggggaugg

SEQ ID NO: 1126934 - RNA, 20 nt, Human
ggaccccagccccacaccug

SEQ ID NO: 1126935 - RNA, 18 nt, Human
ggagaagccaccccuggg

SEQ ID NO: 1126936 - RNA, 19 nt, Human
ggagagggguggggaugcu

SEQ ID NO: 1126937 - RNA, 24 nt, Human
ggagauggagggcaauggaaggga

SEQ ID NO: 1126938 - RNA, 20 nt, Human
ggagcacauuccuugcucua

SEQ ID NO: 1126939 - RNA, 21 nt, Human
ggaggcgcagaaucagcccuc

SEQ ID NO: 1126940 - RNA, 21 nt, Human
ggcacaguggcucaugccugu

SEQ ID NO: 1126941 - RNA, 21 nt, Human
ggccuacuuggugccugccug

SEQ ID NO: 1126942 - RNA, 23 nt, Human
ggcgggcaaagggggacucagga

SEQ ID NO: 1126943 - RNA, 19 nt, Human
ggcuggaggccugaauggc

SEQ ID NO: 1126944 - RNA, 21 nt, Human
ggcugggcacaguggcucaug

SEQ ID NO: 1126945 - RNA, 18 nt, Human
gggaaggaggggacgcug

SEQ ID NO: 1126946 - RNA, 20 nt, Human
gggacagccuguacaaaagc

SEQ ID NO: 1126947 - RNA, 21 nt, Human
gggaggggcccugcaaaaugu

SEQ ID NO: 1126948 - RNA, 20 nt, Human
gggagguuuggcccccuuua

SEQ ID NO: 1126949 - RNA, 20 nt, Human
gggauuaaaagccuuccaac

SEQ ID NO: 1126950 - RNA, 18 nt, Human
gggcacaguggcucaugc

SEQ ID NO: 1126951 - RNA, 19 nt, Human
gggcacuccuggcccuucc

SEQ ID NO: 1126952 - RNA, 18 nt, Human
ggggaucucgcugcccug

SEQ ID NO: 1126953 - RNA, 18 nt, Human
ggggcaguucccaggagg

SEQ ID NO: 1126954 - RNA, 20 nt, Human
ggggcuggaaagauggggaa

SEQ ID NO: 1126955 - RNA, 22 nt, Human
gggggcucccuggagugcaggu

SEQ ID NO: 1126956 - RNA, 19 nt, Human
ggggggaagcaggugugug

SEQ ID NO: 1126957 - RNA, 18 nt, Human
ggggguugagagggaggc

SEQ ID NO: 1126958 - RNA, 19 nt, Human
ggugaccaucugcuaaugc

SEQ ID NO: 1126959 - RNA, 24 nt, Human
gguggcaggcgccuguaaucccag

SEQ ID NO: 1126960 - RNA, 24 nt, Human
gguucggagugccggguccuccag

SEQ ID NO: 1126961 - RNA, 23 nt, Human
gguugagagggaggcuggggugg

SEQ ID NO: 1126962 - RNA, 26 nt, Human
gguugagagggaggcuggggugguuu

SEQ ID NO: 1126963 - RNA, 23 nt, Human
gucccuccuuuucucugcaaggc

SEQ ID NO: 1126964 - RNA, 25 nt, Human
gugaggaauugcagggaggaggggg

SEQ ID NO: 1126965 - RNA, 20 nt, Human
gugaucuggagaaaaacaag

SEQ ID NO: 1126966 - RNA, 24 nt, Human
gugccaggcgcugcucuucuugcu

SEQ ID NO: 1126967 - RNA, 20 nt, Human
gugccggguccuccagaggu

SEQ ID NO: 1126968 - RNA, 18 nt, Human
gugccuuugucuccaccc

SEQ ID NO: 1126969 - RNA, 18 nt, Human
guggauggcagaaggggg

SEQ ID NO: 1126970 - RNA, 23 nt, Human
guggcaggcgccuguaaucccag

SEQ ID NO: 1126971 - RNA, 24 nt, Human
guggcauuucagucccuucucuuu

SEQ ID NO: 1126972 - RNA, 19 nt, Human
gugggcagaggagaggggu

SEQ ID NO: 1126973 - RNA, 23 nt, Human
gugguaauagccccucgcccucc

SEQ ID NO: 1126974 - RNA, 24 nt, Human
guugcagugagccgagacagcgcc

SEQ ID NO: 1126975 - RNA, 19 nt, Human
guugcagugagcugagauc

SEQ ID NO: 1126976 - RNA, 21 nt, Human
uaaaaauacaaaaauuagcca

SEQ ID NO: 1126977 - RNA, 23 nt, Human
uaaagcaagggugaccaucugcu

SEQ ID NO: 1126978 - RNA, 19 nt, Human
uaaccacugugaaaccccc

SEQ ID NO: 1126979 - RNA, 20 nt, Human
uaaguucaggaguucgagac

SEQ ID NO: 1126980 - RNA, 23 nt, Human
uaaucugcagugugcucuucccc

SEQ ID NO: 1126981 - RNA, 25 nt, Human
uacaguaucagggcuuucaaaaaac

SEQ ID NO: 1126982 - RNA, 28 nt, Human
uaccccugccuccugcugggccagcugg

SEQ ID NO: 1126983 - RNA, 20 nt, Human
uagcccucgccccacccccc

SEQ ID NO: 1126984 - RNA, 24 nt, Human
uaucagggcuuucaaaaaacaaac

SEQ ID NO: 1126985 - RNA, 21 nt, Human
ucaaaaaacaaacaaacaaac

SEQ ID NO: 1126986 - RNA, 23 nt, Human
ucaaaagcuguaggaaaaaguca

SEQ ID NO: 1126987 - RNA, 18 nt, Human
ucaacaucugccaaucuu

SEQ ID NO: 1126988 - RNA, 24 nt, Human
ucaccaccuccaccgcccucucag

SEQ ID NO: 1126989 - RNA, 23 nt, Human
ucaccuaaguucaggaguucgag

SEQ ID NO: 1126990 - RNA, 21 nt, Human
ucagcugccguggaucacuuc

SEQ ID NO: 1126991 - RNA, 20 nt, Human
ucagucccuucucuuugccu

SEQ ID NO: 1126992 - RNA, 23 nt, Human
ucauaggccucuuacaggcacac

SEQ ID NO: 1126993 - RNA, 19 nt, Human
uccaaccaaucucuccuac

SEQ ID NO: 1126994 - RNA, 22 nt, Human
uccacagccugguuugcagggc

SEQ ID NO: 1126995 - RNA, 23 nt, Human
uccaucucaaaaaaaaaaaaaaa

SEQ ID NO: 1126996 - RNA, 25 nt, Human
uccaucucaaaaaaaaaaaaaaaaa

SEQ ID NO: 1126997 - RNA, 19 nt, Human
ucccacaccagggugccuu

SEQ ID NO: 1126998 - RNA, 24 nt, Human
ucccaccuccuuuucccccacuuc

SEQ ID NO: 1126999 - RNA, 20 nt, Human
ucccaggaggagacugccuu

SEQ ID NO: 1127000 - RNA, 25 nt, Human
ucccaggaggagacugccuuuuguu

SEQ ID NO: 1127001 - RNA, 18 nt, Human
ucccaggcagaucuggcc

SEQ ID NO: 1127002 - RNA, 21 nt, Human
ucccccaccucuccagccgcc

SEQ ID NO: 1127003 - RNA, 20 nt, Human
ucccccacuucccguguuau

SEQ ID NO: 1127004 - RNA, 19 nt, Human
uccccuggcagggccugag

SEQ ID NO: 1127005 - RNA, 19 nt, Human
ucccucgucuagcuucaac

SEQ ID NO: 1127006 - RNA, 19 nt, Human
ucccuggagugcagguugu

SEQ ID NO: 1127007 - RNA, 25 nt, Human
uccucaccaccuccaccgcccucuc

SEQ ID NO: 1127008 - RNA, 22 nt, Human
uccuccucaccaccuccaccgc

SEQ ID NO: 1127009 - RNA, 24 nt, Human
uccuccucaccaccuccaccgccc

SEQ ID NO: 1127010 - RNA, 24 nt, Human
uccuugcucuagggagacggagau

SEQ ID NO: 1127011 - RNA, 18 nt, Human
ucgcuugaacccgggagg

SEQ ID NO: 1127012 - RNA, 25 nt, Human
ucgggaggcugaggcacaagaguca

SEQ ID NO: 1127013 - RNA, 22 nt, Human
ucuaaucuaauuugccccuaac

SEQ ID NO: 1127014 - RNA, 21 nt, Human
ucucuacuaaaaauacaaaaa

SEQ ID NO: 1127015 - RNA, 26 nt, Human
ucucugcaaggcucagugaacccccc

SEQ ID NO: 1127016 - RNA, 23 nt, Human
ucucuucuuauucccuggguugg

SEQ ID NO: 1127017 - RNA, 19 nt, Human
ucugcaaggcucagugaac

SEQ ID NO: 1127018 - RNA, 26 nt, Human
ugaaacccccgcaggaggggccacac

SEQ ID NO: 1127019 - RNA, 21 nt, Human
ugaaauggggcuaaugcccuc

SEQ ID NO: 1127020 - RNA, 18 nt, Human
ugaaccccccguggugcc

SEQ ID NO: 1127021 - RNA, 22 nt, Human
ugacaguacccucuggccugac

SEQ ID NO: 1127022 - RNA, 21 nt, Human
ugagacaaagccccagggcac

SEQ ID NO: 1127023 - RNA, 19 nt, Human
ugagacgucaccuggagaa

SEQ ID NO: 1127024 - RNA, 24 nt, Human
ugagaggcugaggcaggagaauca

SEQ ID NO: 1127025 - RNA, 22 nt, Human
ugagcugagaucgcaccacugc

SEQ ID NO: 1127026 - RNA, 19 nt, Human
ugagcuggccggggaaagg

SEQ ID NO: 1127027 - RNA, 19 nt, Human
ugagcugugggcugccaga

SEQ ID NO: 1127028 - RNA, 24 nt, Human
ugaggcacaagagucacuugaacc

SEQ ID NO: 1127029 - RNA, 19 nt, Human
ugaggcaggagaaucaccu

SEQ ID NO: 1127030 - RNA, 25 nt, Human
ugaggcaggagaaucaccuaaguuc

SEQ ID NO: 1127031 - RNA, 22 nt, Human
ugaggcaggaucgcuugaaccc

SEQ ID NO: 1127032 - RNA, 22 nt, Human
ugaggcagggagcucuggggcc

SEQ ID NO: 1127033 - RNA, 23 nt, Human
ugaggcagggagcucuggggccu

SEQ ID NO: 1127034 - RNA, 22 nt, Human
ugagggaaacauucuggucaga

SEQ ID NO: 1127035 - RNA, 22 nt, Human
ugaguaagucacugaagcaccu

SEQ ID NO: 1127036 - RNA, 24 nt, Human
ugaguaagucacugaagcaccugc

SEQ ID NO: 1127037 - RNA, 22 nt, Human
ugauggggcaguucccaggagg

SEQ ID NO: 1127038 - RNA, 18 nt, Human
ugauucaagcaaagacca

SEQ ID NO: 1127039 - RNA, 23 nt, Human
ugcagccgcugugggcagugcca

SEQ ID NO: 1127040 - RNA, 22 nt, Human
ugcaggcgcccacccacgcucu

SEQ ID NO: 1127041 - RNA, 19 nt, Human
ugcagggauuccagguugg

SEQ ID NO: 1127042 - RNA, 20 nt, Human
ugccaagaagagcagggugg

SEQ ID NO: 1127043 - RNA, 24 nt, Human
ugccagagcugaggccagcagggc

SEQ ID NO: 1127044 - RNA, 22 nt, Human
ugccggguccuccagaggucag

SEQ ID NO: 1127045 - RNA, 21 nt, Human
ugccugccuggggccccacag

SEQ ID NO: 1127046 - RNA, 23 nt, Human
ugccuguuaucccaacacuuuga

SEQ ID NO: 1127047 - RNA, 22 nt, Human
ugccuugacuccccacagugca

SEQ ID NO: 1127048 - RNA, 19 nt, Human
uggacaccgcgucacccag

SEQ ID NO: 1127049 - RNA, 19 nt, Human
uggagaaaaacaaggaaag

SEQ ID NO: 1127050 - RNA, 22 nt, Human
uggagacaagagaggggcugga

SEQ ID NO: 1127051 - RNA, 25 nt, Human
uggagauggagggcaauggaaggga

SEQ ID NO: 1127052 - RNA, 20 nt, Human
uggauggugcugagcuggga

SEQ ID NO: 1127053 - RNA, 19 nt, Human
uggcagaagggggugcaga

SEQ ID NO: 1127054 - RNA, 24 nt, Human
uggcagaagggggugcagaggcca

SEQ ID NO: 1127055 - RNA, 22 nt, Human
uggcaggccacacugaugggga

SEQ ID NO: 1127056 - RNA, 23 nt, Human
uggcagggccugaggugagcugg

SEQ ID NO: 1127057 - RNA, 18 nt, Human
uggcagggucaaagguca

SEQ ID NO: 1127058 - RNA, 21 nt, Human
uggccaacguggugaacccuc

SEQ ID NO: 1127059 - RNA, 22 nt, Human
uggccacuccccuacugcagcu

SEQ ID NO: 1127060 - RNA, 21 nt, Human
uggcccuucccccaccucucc

SEQ ID NO: 1127061 - RNA, 21 nt, Human
uggccucggccugcccaguuu

SEQ ID NO: 1127062 - RNA, 21 nt, Human
uggcucaugccuguuauccca

SEQ ID NO: 1127063 - RNA, 24 nt, Human
uggcugggcacaguggcucaugcc

SEQ ID NO: 1127064 - RNA, 19 nt, Human
ugggaaaauccagacgaug

SEQ ID NO: 1127065 - RNA, 20 nt, Human
ugggaacaagccccacagug

SEQ ID NO: 1127066 - RNA, 24 nt, Human
ugggaaggaacccuccggcugugg

SEQ ID NO: 1127067 - RNA, 21 nt, Human
ugggcacccaguaacugaggg

SEQ ID NO: 1127068 - RNA, 27 nt, Human
ugggcagaggagaggggucgaacguuu

SEQ ID NO: 1127069 - RNA, 20 nt, Human
uggggagggggccuaagccc

SEQ ID NO: 1127070 - RNA, 18 nt, Human
uggggaugcuggaucacc

SEQ ID NO: 1127071 - RNA, 23 nt, Human
uggggaugcuggaucaccuucuu

SEQ ID NO: 1127072 - RNA, 21 nt, Human
uggggggaagcaggugugugg

SEQ ID NO: 1127073 - RNA, 23 nt, Human
uggggguugagagggaggcuggg

SEQ ID NO: 1127074 - RNA, 23 nt, Human
uggguugggagagacuaaagucu

SEQ ID NO: 1127075 - RNA, 24 nt, Human
ugguggcaggcgccuguaauccca

SEQ ID NO: 1127076 - RNA, 18 nt, Human
ugguguggggcggaggca

SEQ ID NO: 1127077 - RNA, 22 nt, Human
uguaggaaaaagucaagacauu

SEQ ID NO: 1127078 - RNA, 22 nt, Human
ugucccugcccuacccuugccu

SEQ ID NO: 1127079 - RNA, 25 nt, Human
ugucuccacccacccuccccuggca

SEQ ID NO: 1127080 - RNA, 21 nt, Human
ugugaaacccccgcaggaggg

SEQ ID NO: 1127081 - RNA, 27 nt, Human
ugugaaauggggcuaaugcccucaucc

SEQ ID NO: 1127082 - RNA, 19 nt, Human
ugugggcagugccagagcu

SEQ ID NO: 1127083 - RNA, 21 nt, Human
uguggggcguggacaggaagg

SEQ ID NO: 1127084 - RNA, 24 nt, Human
uguggugauuagaugccugggcug

SEQ ID NO: 1127085 - RNA, 23 nt, Human
uguuucaucugcacucccaccuc

SEQ ID NO: 1127086 - RNA, 22 nt, Human
uuaaaauaaggugccuccagcc

SEQ ID NO: 1127087 - RNA, 18 nt, Human
uuagcugggcgugguggu

SEQ ID NO: 1127088 - RNA, 24 nt, Human
uuagcugggcgugguggugggcac

SEQ ID NO: 1127089 - RNA, 18 nt, Human
uucaagcaaagaccaagg

SEQ ID NO: 1127090 - RNA, 25 nt, Human
uucccaggaggagacugccuuuugu

SEQ ID NO: 1127091 - RNA, 18 nt, Human
uucccaggcugcgcgggg

SEQ ID NO: 1127092 - RNA, 22 nt, Human
uugaccccaaaggccagagcau

SEQ ID NO: 1127093 - RNA, 23 nt, Human
uugaccccaaaggccagagcaua

SEQ ID NO: 1127094 - RNA, 25 nt, Human
uugagaggcugaggcaggagaauca

SEQ ID NO: 1127095 - RNA, 19 nt, Human
uugcagugagccgagacag

SEQ ID NO: 1127096 - RNA, 22 nt, Human
uugcagugagccgagacagcgc

SEQ ID NO: 1127097 - RNA, 18 nt, Human
uugcagugagcugagauc

SEQ ID NO: 1127098 - RNA, 19 nt, Human
uugcagugagcugagaucg

SEQ ID NO: 1127099 - RNA, 20 nt, Human
uugcagugagcugagaucgc

SEQ ID NO: 1127100 - RNA, 22 nt, Human
uugcagugagcugagaucgcac

SEQ ID NO: 1127101 - RNA, 23 nt, Human
uuguaggaguggaaugagaaucc

SEQ ID NO: 1127102 - RNA, 19 nt, Human
uuucucacagagagcaccu

SEQ ID NO: 1127103 - RNA, 19 nt, Human
uuucucaucugaaaaaugg

SEQ ID NO: 1127104 - RNA, 27 nt, Human
uuuuucucuucuuauucccuggguugg

SEQ ID NO: 1127105 - RNA, 22 nt, Human
aaccagcccacccagaaccagc

SEQ ID NO: 1127106 - RNA, 19 nt, Human
cagaaccagcccacagcac

SEQ ID NO: 1127107 - RNA, 22 nt, Human
cagcccacccagaaccagccca

SEQ ID NO: 1127108 - RNA, 21 nt, Human
cagguugguguugaccaggcu

SEQ ID NO: 1127109 - RNA, 22 nt, Human
ccacacuucucgugacuccaau

SEQ ID NO: 1127110 - RNA, 22 nt, Human
ccacagcacuuuccuccacucu

SEQ ID NO: 1127111 - RNA, 24 nt, Human
ccacagcacuuuccuccacucuga

SEQ ID NO: 1127112 - RNA, 22 nt, Human
ccacccagaaccagcccacagc

SEQ ID NO: 1127113 - RNA, 21 nt, Human
ccacccagaaccagcccaccc

SEQ ID NO: 1127114 - RNA, 21 nt, Human
cccacacuucucgugacucca

SEQ ID NO: 1127115 - RNA, 22 nt, Human
cccacagcacuuuccuccacuc

SEQ ID NO: 1127116 - RNA, 21 nt, Human
cccacaguugcuguccacacc

SEQ ID NO: 1127117 - RNA, 20 nt, Human
cccagaaccagcccacagca

SEQ ID NO: 1127118 - RNA, 20 nt, Human
cccagaaccagcccacccag

SEQ ID NO: 1127119 - RNA, 21 nt, Human
ccccugcugcggcccccacag

SEQ ID NO: 1127120 - RNA, 23 nt, Human
ccugccagcuccccacccagaac

SEQ ID NO: 1127121 - RNA, 23 nt, Human
cuccccacccagaaccagcccac

SEQ ID NO: 1127122 - RNA, 18 nt, Human
cuccccugcugcggcccc

SEQ ID NO: 1127123 - RNA, 21 nt, Human
cuccucugcccugccagcucc

SEQ ID NO: 1127124 - RNA, 22 nt, Human
cuccucugcccugccagcuccc

SEQ ID NO: 1127125 - RNA, 28 nt, Human
cucucccaccuacagguguguucaggau

SEQ ID NO: 1127126 - RNA, 20 nt, Human
cucuccucucccaccuacag

SEQ ID NO: 1127127 - RNA, 19 nt, Human
gaaccagcccacccagaac

SEQ ID NO: 1127128 - RNA, 21 nt, Human
gccagcuccccacccagaacc

SEQ ID NO: 1127129 - RNA, 25 nt, Human
gugcugcaaacuuuugccuuuuggg

SEQ ID NO: 1127130 - RNA, 21 nt, Human
ugaccaggcucagcuuguauc

SEQ ID NO: 1127131 - RNA, 20 nt, Human
ugcugcaaacuuuugccuuu

SEQ ID NO: 1127132 - RNA, 22 nt, Human
ugcuguccacaccucucccaca

SEQ ID NO: 1127133 - RNA, 23 nt, Human
ugcuguccacaccucucccacac

SEQ ID NO: 1127134 - RNA, 18 nt, Human
aacacacagacccacaca

SEQ ID NO: 1127135 - RNA, 24 nt, Human
aacacaggggcauucagagaaaga

SEQ ID NO: 1127136 - RNA, 23 nt, Human
aagaagauacagguucagaugga

SEQ ID NO: 1127137 - RNA, 23 nt, Human
aagcagucggcaagagaugcagc

SEQ ID NO: 1127138 - RNA, 19 nt, Human
acaguggggcugugcgugg

SEQ ID NO: 1127139 - RNA, 25 nt, Human
accuucugccugucagucguagucg

SEQ ID NO: 1127140 - RNA, 22 nt, Human
agacccacacagagacucagga

SEQ ID NO: 1127141 - RNA, 21 nt, Human
agaggaguggggaggccuagg

SEQ ID NO: 1127142 - RNA, 22 nt, Human
agagggcugggccagcauguuu

SEQ ID NO: 1127143 - RNA, 24 nt, Human
agccccaaggaugcuggccaggaa

SEQ ID NO: 1127144 - RNA, 22 nt, Human
agcuggggcuggggcuggggcu

SEQ ID NO: 1127145 - RNA, 22 nt, Human
aggaagggccugaagagcugug

SEQ ID NO: 1127146 - RNA, 21 nt, Human
aggacgaggaagagcuggaga

SEQ ID NO: 1127147 - RNA, 19 nt, Human
aggagacuggaagacagca

SEQ ID NO: 1127148 - RNA, 24 nt, Human
agggagaggagcacaggcugaagg

SEQ ID NO: 1127149 - RNA, 18 nt, Human
auggagcagcuggagcug

SEQ ID NO: 1127150 - RNA, 25 nt, Human
caauagucugguggcagagacacac

SEQ ID NO: 1127151 - RNA, 18 nt, Human
cacacaaugucacuguga

SEQ ID NO: 1127152 - RNA, 24 nt, Human
cacacaaugucacugugauguauu

SEQ ID NO: 1127153 - RNA, 22 nt, Human
cacagacccacacagagacuca

SEQ ID NO: 1127154 - RNA, 20 nt, Human
cacagugucagaagugggac

SEQ ID NO: 1127155 - RNA, 18 nt, Human
cagcucagcaaggggcag

SEQ ID NO: 1127156 - RNA, 23 nt, Human
caggaagggccugaagagcugug

SEQ ID NO: 1127157 - RNA, 18 nt, Human
caggggcauucagagaaa

SEQ ID NO: 1127158 - RNA, 19 nt, Human
cauggaggucagaagccca

SEQ ID NO: 1127159 - RNA, 21 nt, Human
cauuacuagaggaguggggag

SEQ ID NO: 1127160 - RNA, 22 nt, Human
ccagagcaucaaggagcaauag

SEQ ID NO: 1127161 - RNA, 18 nt, Human
ccagcauccauggccagc

SEQ ID NO: 1127162 - RNA, 22 nt, Human
ccagcauccauggccagccggg

SEQ ID NO: 1127163 - RNA, 22 nt, Human
cccacacagagacucaggagag

SEQ ID NO: 1127164 - RNA, 25 nt, Human
ccccuacagcuguaccgagaggcuc

SEQ ID NO: 1127165 - RNA, 22 nt, Human
cccuuuccccucaacuucuucc

SEQ ID NO: 1127166 - RNA, 22 nt, Human
ccuagccugcaucugagcuccg

SEQ ID NO: 1127167 - RNA, 21 nt, Human
ccucucagggcugugcacucc

SEQ ID NO: 1127168 - RNA, 20 nt, Human
ccuggugacaguggggcugu

SEQ ID NO: 1127169 - RNA, 22 nt, Human
ccuucugccugucagucaggga

SEQ ID NO: 1127170 - RNA, 21 nt, Human
cgcaugcagcggcaguacaug

SEQ ID NO: 1127171 - RNA, 20 nt, Human
cugagacagauacuggcccu

SEQ ID NO: 1127172 - RNA, 23 nt, Human
cuggggcuggggcuggcucaggc

SEQ ID NO: 1127173 - RNA, 20 nt, Human
gaaggagacuggaagacagc

SEQ ID NO: 1127174 - RNA, 23 nt, Human
gaagggccugaagagcugugggg

SEQ ID NO: 1127175 - RNA, 18 nt, Human
gacaccaagaacuacgua

SEQ ID NO: 1127176 - RNA, 23 nt, Human
gaccugccuguuucuuccugccc

SEQ ID NO: 1127177 - RNA, 23 nt, Human
gacgaggaagagcuggagaagga

SEQ ID NO: 1127178 - RNA, 25 nt, Human
gagaaggagguagcucugagaccgg

SEQ ID NO: 1127179 - RNA, 19 nt, Human
gagacagauacuggcccug

SEQ ID NO: 1127180 - RNA, 18 nt, Human
gagcacaggcugaaggag

SEQ ID NO: 1127181 - RNA, 21 nt, Human
gagggcagccaggcacaggaa

SEQ ID NO: 1127182 - RNA, 21 nt, Human
gauagugggacuggagagaga

SEQ ID NO: 1127183 - RNA, 19 nt, Human
gcacuguucccgcagcugc

SEQ ID NO: 1127184 - RNA, 21 nt, Human
gcaggcugagaccugggggua

SEQ ID NO: 1127185 - RNA, 22 nt, Human
gcccuggugacaguggggcugu

SEQ ID NO: 1127186 - RNA, 19 nt, Human
gcgauggaaugaagugaaa

SEQ ID NO: 1127187 - RNA, 23 nt, Human
gcucagaccugccuguuucuucc

SEQ ID NO: 1127188 - RNA, 20 nt, Human
gcugggccagcauguuuucc

SEQ ID NO: 1127189 - RNA, 22 nt, Human
ggaacagggacuggagccuggg

SEQ ID NO: 1127190 - RNA, 21 nt, Human
ggaagaagauacagguucaga

SEQ ID NO: 1127191 - RNA, 21 nt, Human
ggacuggagccugggaaggua

SEQ ID NO: 1127192 - RNA, 21 nt, Human
ggcacugagggaacaagcugg

SEQ ID NO: 1127193 - RNA, 24 nt, Human
ggcgauggaaugaagugaaagaaa

SEQ ID NO: 1127194 - RNA, 19 nt, Human
ggcucuggauaggaggucc

SEQ ID NO: 1127195 - RNA, 23 nt, Human
ggcuggggcuggggcuggcucag

SEQ ID NO: 1127196 - RNA, 24 nt, Human
gggaacacagugucagaaguggga

SEQ ID NO: 1127197 - RNA, 21 nt, Human
gggagcacaggccugaggacg

SEQ ID NO: 1127198 - RNA, 21 nt, Human
gggcagacacccuggccuuca

SEQ ID NO: 1127199 - RNA, 20 nt, Human
gggcagccaggcacaggaag

SEQ ID NO: 1127200 - RNA, 19 nt, Human
gggcuggggcuggcucagg

SEQ ID NO: 1127201 - RNA, 20 nt, Human
ggggaugcugaggaacaggg

SEQ ID NO: 1127202 - RNA, 22 nt, Human
gguaauggguggcuuggaagaa

SEQ ID NO: 1127203 - RNA, 18 nt, Human
ggugggagggcagccagg

SEQ ID NO: 1127204 - RNA, 24 nt, Human
gguucagauggagcagcuggagcu

SEQ ID NO: 1127205 - RNA, 24 nt, Human
guaauggguggcuuggaagaagau

SEQ ID NO: 1127206 - RNA, 20 nt, Human
guagcucugagaccgggggc

SEQ ID NO: 1127207 - RNA, 20 nt, Human
guagggcaggcugagaccug

SEQ ID NO: 1127208 - RNA, 24 nt, Human
guagggcaggcugagaccuggggg

SEQ ID NO: 1127209 - RNA, 20 nt, Human
gucagggagggagaggagca

SEQ ID NO: 1127210 - RNA, 25 nt, Human
guggcagagacacacacaaugucac

SEQ ID NO: 1127211 - RNA, 22 nt, Human
uaaaagccuaaguuccuggccg

SEQ ID NO: 1127212 - RNA, 25 nt, Human
uaaccucucagggcugugcacuccc

SEQ ID NO: 1127213 - RNA, 22 nt, Human
uagaagugacccggaaguggua

SEQ ID NO: 1127214 - RNA, 18 nt, Human
uagaugcaggugacccag

SEQ ID NO: 1127215 - RNA, 20 nt, Human
uaggaggucccugagacaga

SEQ ID NO: 1127216 - RNA, 20 nt, Human
uagggugggagggcagccag

SEQ ID NO: 1127217 - RNA, 22 nt, Human
uagggugggagggcagccaggc

SEQ ID NO: 1127218 - RNA, 20 nt, Human
ucagagguacaaaaggguag

SEQ ID NO: 1127219 - RNA, 21 nt, Human
ucaggagagcauggaggucag

SEQ ID NO: 1127220 - RNA, 23 nt, Human
ucaggcucuggauaggagguccc

SEQ ID NO: 1127221 - RNA, 18 nt, Human
ucccaaagguuaaggacc

SEQ ID NO: 1127222 - RNA, 18 nt, Human
ucccugagacagauacug

SEQ ID NO: 1127223 - RNA, 20 nt, Human
uccguugugcuagcuuugug

SEQ ID NO: 1127224 - RNA, 19 nt, Human
ucucagggcugugcacucc

SEQ ID NO: 1127225 - RNA, 22 nt, Human
ucuuacccccauuccacagggg

SEQ ID NO: 1127226 - RNA, 21 nt, Human
ucuuguuuucagggacuaggu

SEQ ID NO: 1127227 - RNA, 22 nt, Human
ugaaggagacuggaagacagca

SEQ ID NO: 1127228 - RNA, 19 nt, Human
ugaagugaaagaaauagcc

SEQ ID NO: 1127229 - RNA, 23 nt, Human
ugacccagagcaucaaggagcaa

SEQ ID NO: 1127230 - RNA, 22 nt, Human
ugagaugagccccaaggaugcu

SEQ ID NO: 1127231 - RNA, 21 nt, Human
ugaggaacagggacuggagcc

SEQ ID NO: 1127232 - RNA, 19 nt, Human
ugaggacgaggaagagcug

SEQ ID NO: 1127233 - RNA, 20 nt, Human
ugaggacgaggaagagcugg

SEQ ID NO: 1127234 - RNA, 24 nt, Human
ugcuuaggugugaacagagcuuuu

SEQ ID NO: 1127235 - RNA, 23 nt, Human
uggaaagaggauccagauaaaag

SEQ ID NO: 1127236 - RNA, 20 nt, Human
uggaagaagauacagguuca

SEQ ID NO: 1127237 - RNA, 22 nt, Human
uggaagaagauacagguucaga

SEQ ID NO: 1127238 - RNA, 19 nt, Human
uggaaugaagugaaagaaa

SEQ ID NO: 1127239 - RNA, 20 nt, Human
uggagcagcuggagcugggg

SEQ ID NO: 1127240 - RNA, 18 nt, Human
uggagcuggggcuggggc

SEQ ID NO: 1127241 - RNA, 18 nt, Human
uggauggaauguguaugu

SEQ ID NO: 1127242 - RNA, 20 nt, Human
uggcagagacacacacaaug

SEQ ID NO: 1127243 - RNA, 18 nt, Human
uggccaggaaugggagug

SEQ ID NO: 1127244 - RNA, 22 nt, Human
uggcccuggugacaguggggcu

SEQ ID NO: 1127245 - RNA, 19 nt, Human
uggccgcaugcagcggcag

SEQ ID NO: 1127246 - RNA, 21 nt, Human
ugggagggcagccaggcacag

SEQ ID NO: 1127247 - RNA, 19 nt, Human
uggggagcacaggccugag

SEQ ID NO: 1127248 - RNA, 19 nt, Human
uggggcuggcucaggcucu

SEQ ID NO: 1127249 - RNA, 19 nt, Human
uggggcuggggcuggggcu

SEQ ID NO: 1127250 - RNA, 20 nt, Human
uggggcugugcguggggcca

SEQ ID NO: 1127251 - RNA, 22 nt, Human
uggggcugugcguggggccaga

SEQ ID NO: 1127252 - RNA, 18 nt, Human
ugggggaugcugaggaac

SEQ ID NO: 1127253 - RNA, 22 nt, Human
uggggguauggauggaaugugu

SEQ ID NO: 1127254 - RNA, 24 nt, Human
uguaugagaugagccccaaggaug

SEQ ID NO: 1127255 - RNA, 19 nt, Human
ugucugacccugcucucuc

SEQ ID NO: 1127256 - RNA, 18 nt, Human
uguguaugugguaauggu

SEQ ID NO: 1127257 - RNA, 18 nt, Human
uuccuccacagaaguaca

SEQ ID NO: 1127258 - RNA, 20 nt, Human
uuccugaggcauggaccgag

SEQ ID NO: 1127259 - RNA, 18 nt, Human
aacugcuguuucuucucu

SEQ ID NO: 1127260 - RNA, 22 nt, Human
cagcuugcuucagcugcucugc

SEQ ID NO: 1127261 - RNA, 18 nt, Human
ccagcugggggcgcaauu

SEQ ID NO: 1127262 - RNA, 21 nt, Human
ccugacauucaucaugagagg

SEQ ID NO: 1127263 - RNA, 22 nt, Human
ccugagagugaaccaggacuuu

SEQ ID NO: 1127264 - RNA, 22 nt, Human
cggcugauaccaccaugcugac

SEQ ID NO: 1127265 - RNA, 22 nt, Human
cggcugauaccaccaugcugac

SEQ ID NO: 1127266 - RNA, 19 nt, Human
cugcgucagcucucguucc

SEQ ID NO: 1127267 - RNA, 23 nt, Human
cuguuucuucucugccagcuggg

SEQ ID NO: 1127268 - RNA, 22 nt, Human
cuucucgcuggaccaagggccc

SEQ ID NO: 1127269 - RNA, 21 nt, Human
gcucucguuccugagagugaa

SEQ ID NO: 1127270 - RNA, 20 nt, Human
gcucugcaagcuucuccucc

SEQ ID NO: 1127271 - RNA, 20 nt, Human
ucagcauaaauuuuaugagg

SEQ ID NO: 1127272 - RNA, 23 nt, Human
ucucugccuucucgcuggacaaa

SEQ ID NO: 1127273 - RNA, 24 nt, Human
ucugccuucucgcuggacaaaggg

SEQ ID NO: 1127274 - RNA, 24 nt, Human
ucugccuucucgcuggaccaaggg

SEQ ID NO: 1127275 - RNA, 25 nt, Human
ugccugagcuccucagcuugcuuca

SEQ ID NO: 1127276 - RNA, 24 nt, Human
ugcuucagcugcucugcaagcuuc

SEQ ID NO: 1127277 - RNA, 18 nt, Human
uggcagaagagguggggc

SEQ ID NO: 1127278 - RNA, 20 nt, Human
uggcagaagagguggggcca

SEQ ID NO: 1127279 - RNA, 23 nt, Human
uggcagaagagguggggccaggg

SEQ ID NO: 1127280 - RNA, 28 nt, Human
accccaaaaauaccagcuccaggaaaac

SEQ ID NO: 1127281 - RNA, 20 nt, Human
agcuggggaagcagggccag

SEQ ID NO: 1127282 - RNA, 19 nt, Human
aggcccugggaauugcagc

SEQ ID NO: 1127283 - RNA, 22 nt, Human
caccccaaaaauaccagcucca

SEQ ID NO: 1127284 - RNA, 24 nt, Human
caccccaaaaauaccagcuccagg

SEQ ID NO: 1127285 - RNA, 22 nt, Human
cagccucugggcaucagagccc

SEQ ID NO: 1127286 - RNA, 24 nt, Human
caggaaaaccaugguaucucccca

SEQ ID NO: 1127287 - RNA, 18 nt, Human
cagggccaggcccuggga

SEQ ID NO: 1127288 - RNA, 23 nt, Human
caugguaucuccccagcacuuug

SEQ ID NO: 1127289 - RNA, 20 nt, Human
ccaugguaucuccccagcac

SEQ ID NO: 1127290 - RNA, 20 nt, Human
ccccagcacuuugcagggcc

SEQ ID NO: 1127291 - RNA, 24 nt, Human
ccucugggcaucagagcccggccc

SEQ ID NO: 1127292 - RNA, 23 nt, Human
gaagcagggccaggcccugggaa

SEQ ID NO: 1127293 - RNA, 22 nt, Human
gcucaagcacaaaagacuccug

SEQ ID NO: 1127294 - RNA, 20 nt, Human
gcuguaugaaugaaugaguu

SEQ ID NO: 1127295 - RNA, 20 nt, Human
ugcagggccuggcaugugga

SEQ ID NO: 1127296 - RNA, 24 nt, Human
uuagcggaucuaaugauguuuccu

SEQ ID NO: 1127297 - RNA, 22 nt, Human
uuugcagggccuggcaugugga

SEQ ID NO: 1127298 - RNA, 25 nt, Human
aaaccagcuccaaaugcucaccugg

SEQ ID NO: 1127299 - RNA, 23 nt, Human
aaacugcaucuuuguucagagcc

SEQ ID NO: 1127300 - RNA, 23 nt, Human
aaagaaagguccggcucagccaa

SEQ ID NO: 1127301 - RNA, 22 nt, Human
aacaaccaacccauccucaugu

SEQ ID NO: 1127302 - RNA, 21 nt, Human
aacccauuuccucugcagcca

SEQ ID NO: 1127303 - RNA, 23 nt, Human
aagaucgaaccauguaagugcca

SEQ ID NO: 1127304 - RNA, 21 nt, Human
aagcgauuuggggccacggcc

SEQ ID NO: 1127305 - RNA, 21 nt, Human
aagcuacaacagcuuuccaag

SEQ ID NO: 1127306 - RNA, 28 nt, Human
aagugugcccuuaggaggccaaacaucc

SEQ ID NO: 1127307 - RNA, 20 nt, Human
aaguguuaauccucacgaug

SEQ ID NO: 1127308 - RNA, 22 nt, Human
acaagcuacaacagcuuuccaa

SEQ ID NO: 1127309 - RNA, 20 nt, Human
acaucguccccagguccaga

SEQ ID NO: 1127310 - RNA, 24 nt, Human
accacacucgggcugcuuggacag

SEQ ID NO: 1127311 - RNA, 19 nt, Human
acccagcccuguucaguga

SEQ ID NO: 1127312 - RNA, 18 nt, Human
accucuggccaaaucuuc

SEQ ID NO: 1127313 - RNA, 20 nt, Human
accuggcugucagggauggg

SEQ ID NO: 1127314 - RNA, 23 nt, Human
acucucggggaagcgauuugggg

SEQ ID NO: 1127315 - RNA, 18 nt, Human
acuguggagguuguuaau

SEQ ID NO: 1127316 - RNA, 19 nt, Human
agacgcccuucucuccacu

SEQ ID NO: 1127317 - RNA, 18 nt, Human
agagcccuccggagccuc

SEQ ID NO: 1127318 - RNA, 19 nt, Human
agcaagaucgaaccaugua

SEQ ID NO: 1127319 - RNA, 19 nt, Human
agccucgaaaagcagagug

SEQ ID NO: 1127320 - RNA, 22 nt, Human
agcuguggacugcagcuucagg

SEQ ID NO: 1127321 - RNA, 23 nt, Human
aggaagagcccuccggagccucg

SEQ ID NO: 1127322 - RNA, 19 nt, Human
aggcacaagcuacaacagc

SEQ ID NO: 1127323 - RNA, 21 nt, Human
aggcacaagcuacaacagcuu

SEQ ID NO: 1127324 - RNA, 19 nt, Human
aggcccgaaggcuugaguc

SEQ ID NO: 1127325 - RNA, 23 nt, Human
aggcuggauguggcuugggagag

SEQ ID NO: 1127326 - RNA, 19 nt, Human
cacacagcauaacaguggc

SEQ ID NO: 1127327 - RNA, 19 nt, Human
cacagcauaacaguggcag

SEQ ID NO: 1127328 - RNA, 21 nt, Human
caccuggcugucagggauggg

SEQ ID NO: 1127329 - RNA, 22 nt, Human
cacgcuggccgggcuguguaga

SEQ ID NO: 1127330 - RNA, 19 nt, Human
cacuugucuccagcaagau

SEQ ID NO: 1127331 - RNA, 20 nt, Human
cagagccaacccauuuccuc

SEQ ID NO: 1127332 - RNA, 24 nt, Human
cagaugcccacauugcccugcagg

SEQ ID NO: 1127333 - RNA, 21 nt, Human
cagcagacaaagcucacucaa

SEQ ID NO: 1127334 - RNA, 18 nt, Human
cagcaggaagagcccucc

SEQ ID NO: 1127335 - RNA, 25 nt, Human
cagggaccaagaccacacucgggcu

SEQ ID NO: 1127336 - RNA, 18 nt, Human
cagggauggggagccuca

SEQ ID NO: 1127337 - RNA, 21 nt, Human
caguacccagcccuguucagu

SEQ ID NO: 1127338 - RNA, 20 nt, Human
caugggccuucuucucccca

SEQ ID NO: 1127339 - RNA, 24 nt, Human
ccaaacauccaccugucuaccaac

SEQ ID NO: 1127340 - RNA, 22 nt, Human
ccacaggcacaagcuacaacag

SEQ ID NO: 1127341 - RNA, 18 nt, Human
ccacccacaggcacaagc

SEQ ID NO: 1127342 - RNA, 27 nt, Human
ccagaccccaaacucauugccacacuc

SEQ ID NO: 1127343 - RNA, 20 nt, Human
ccagaugcccacauugcccu

SEQ ID NO: 1127344 - RNA, 19 nt, Human
ccaggcuggauguggcuug

SEQ ID NO: 1127345 - RNA, 23 nt, Human
cccacauugcccugcagggacca

SEQ ID NO: 1127346 - RNA, 19 nt, Human
ccccagaccccaaacucau

SEQ ID NO: 1127347 - RNA, 18 nt, Human
ccccagguccagaugccc

SEQ ID NO: 1127348 - RNA, 21 nt, Human
ccccucuguagccugugacaa

SEQ ID NO: 1127349 - RNA, 22 nt, Human
cccugccccagaccccaaacuc

SEQ ID NO: 1127350 - RNA, 19 nt, Human
cccuguuggaggcucuugg

SEQ ID NO: 1127351 - RNA, 19 nt, Human
ccggagccucgaaaagcag

SEQ ID NO: 1127352 - RNA, 19 nt, Human
ccucaugggugaaagaggg

SEQ ID NO: 1127353 - RNA, 22 nt, Human
ccucugcagccacaaaaugccu

SEQ ID NO: 1127354 - RNA, 20 nt, Human
ccugcuggccuccugcugug

SEQ ID NO: 1127355 - RNA, 22 nt, Human
ccuggcugucagggauggggga

SEQ ID NO: 1127356 - RNA, 22 nt, Human
ccuggggcccuccacgcuggcc

SEQ ID NO: 1127357 - RNA, 22 nt, Human
ccuucuguucuucuugccgacc

SEQ ID NO: 1127358 - RNA, 22 nt, Human
cgauuuggggccacggcccuag

SEQ ID NO: 1127359 - RNA, 24 nt, Human
cucauugccacacuccauaccacu

SEQ ID NO: 1127360 - RNA, 18 nt, Human
cucugcauucaagugccc

SEQ ID NO: 1127361 - RNA, 18 nt, Human
cugcagggaccaagacca

SEQ ID NO: 1127362 - RNA, 23 nt, Human
cugcaucuuuguucagagccaac

SEQ ID NO: 1127363 - RNA, 23 nt, Human
cugccaguacccagcccuguuca

SEQ ID NO: 1127364 - RNA, 31 nt, Human
cugcuuggacaggauguagcuggucacuguu

SEQ ID NO: 1127365 - RNA, 20 nt, Human
cuggccaaaucuuccuguuc

SEQ ID NO: 1127366 - RNA, 18 nt, Human
cuggggcccuccacgcug

SEQ ID NO: 1127367 - RNA, 21 nt, Human
cuggucaaugaacugaggccc

SEQ ID NO: 1127368 - RNA, 23 nt, Human
gaaaagcagaguggaaguggugg

SEQ ID NO: 1127369 - RNA, 20 nt, Human
gacaggauguagcuggucac

SEQ ID NO: 1127370 - RNA, 24 nt, Human
gacccccaauuguccacuugucuc

SEQ ID NO: 1127371 - RNA, 21 nt, Human
gaggucaccucuggccaaauc

SEQ ID NO: 1127372 - RNA, 19 nt, Human
gaguuggagcgaacuagcu

SEQ ID NO: 1127373 - RNA, 24 nt, Human
gcacaagcuacaacagcuuuccaa

SEQ ID NO: 1127374 - RNA, 18 nt, Human
gcaggaagagcccuccgg

SEQ ID NO: 1127375 - RNA, 25 nt, Human
gccacacuccauaccacugucacgg

SEQ ID NO: 1127376 - RNA, 18 nt, Human
gccauuggcaagaaugcc

SEQ ID NO: 1127377 - RNA, 18 nt, Human
ggaagagggaggugggcc

SEQ ID NO: 1127378 - RNA, 21 nt, Human
ggacaggauguagcuggucac

SEQ ID NO: 1127379 - RNA, 18 nt, Human
ggagguuguuaauuuaac

SEQ ID NO: 1127380 - RNA, 19 nt, Human
ggccuggaugccccuggag

SEQ ID NO: 1127381 - RNA, 21 nt, Human
gguuaggacauuggugagcua

SEQ ID NO: 1127382 - RNA, 25 nt, Human
guggaagugguggugccccccacug

SEQ ID NO: 1127383 - RNA, 18 nt, Human
guugcuguugcugccucc

SEQ ID NO: 1127384 - RNA, 24 nt, Human
guuucuggggucccaggucaucca

SEQ ID NO: 1127385 - RNA, 24 nt, Human
uaacugccugccugggcacguugc

SEQ ID NO: 1127386 - RNA, 18 nt, Human
uaccaaaugauuuugcuc

SEQ ID NO: 1127387 - RNA, 27 nt, Human
uaugucaccuauguuucaggugaaacg

SEQ ID NO: 1127388 - RNA, 23 nt, Human
ucacucaaucugauacuguggag

SEQ ID NO: 1127389 - RNA, 20 nt, Human
ucagccaaggacaaaggggc

SEQ ID NO: 1127390 - RNA, 22 nt, Human
uccaggcuggauguggcuuggg

SEQ ID NO: 1127391 - RNA, 19 nt, Human
ucccaaacggcaguuucug

SEQ ID NO: 1127392 - RNA, 22 nt, Human
ucccugccccagaccccaaacu

SEQ ID NO: 1127393 - RNA, 21 nt, Human
ucccugggagggaaccagaag

SEQ ID NO: 1127394 - RNA, 19 nt, Human
uccgccuucuguucuucuu

SEQ ID NO: 1127395 - RNA, 21 nt, Human
ucgcagaggcuccuggggguc

SEQ ID NO: 1127396 - RNA, 22 nt, Human
ucgcagaggcuccuggggguca

SEQ ID NO: 1127397 - RNA, 21 nt, Human
ucgcgguugcccguguugccu

SEQ ID NO: 1127398 - RNA, 21 nt, Human
ucuaccaacuagacauuuggu

SEQ ID NO: 1127399 - RNA, 27 nt, Human
ucuaccaggcaggugccuucuccaccc

SEQ ID NO: 1127400 - RNA, 26 nt, Human
ucuccacccacaggcacaagcuacaa

SEQ ID NO: 1127401 - RNA, 23 nt, Human
ucucgguuaggacauuggugagc

SEQ ID NO: 1127402 - RNA, 25 nt, Human
ucugccagugacccccaauugucca

SEQ ID NO: 1127403 - RNA, 19 nt, Human
ucuggagcuggccccucug

SEQ ID NO: 1127404 - RNA, 24 nt, Human
ucuguagccugugacaaucagcuu

SEQ ID NO: 1127405 - RNA, 19 nt, Human
ugacaaucagcuugagucc

SEQ ID NO: 1127406 - RNA, 18 nt, Human
ugcagccuggggucugaa

SEQ ID NO: 1127407 - RNA, 20 nt, Human
ugccaagucuccgccuucug

SEQ ID NO: 1127408 - RNA, 24 nt, Human
ugccaagucuccgccuucuguucu

SEQ ID NO: 1127409 - RNA, 23 nt, Human
ugccagagauucaccaccugggg

SEQ ID NO: 1127410 - RNA, 24 nt, Human
ugccagagauucaccaccugggga

SEQ ID NO: 1127411 - RNA, 25 nt, Human
ugccccagaccccaaacucauugcc

SEQ ID NO: 1127412 - RNA, 20 nt, Human
ugcccguguugccucaggcc

SEQ ID NO: 1127413 - RNA, 21 nt, Human
ugcccugcagggaccaagaca

SEQ ID NO: 1127414 - RNA, 24 nt, Human
ugccuuugugugucagggcucggg

SEQ ID NO: 1127415 - RNA, 20 nt, Human
ugcugccucccaaacggcag

SEQ ID NO: 1127416 - RNA, 21 nt, Human
uggaagugguggugcccagga

SEQ ID NO: 1127417 - RNA, 22 nt, Human
uggaagugguggugcccaggac

SEQ ID NO: 1127418 - RNA, 23 nt, Human
uggaagugguggugcccaggacg

SEQ ID NO: 1127419 - RNA, 24 nt, Human
uggaagugguggugcccaggacgg

SEQ ID NO: 1127420 - RNA, 24 nt, Human
uggaugaggccgaaugucaugaag

SEQ ID NO: 1127421 - RNA, 23 nt, Human
uggcauaauuuaaaccaaaagag

SEQ ID NO: 1127422 - RNA, 19 nt, Human
uggccgggcuguguagaga

SEQ ID NO: 1127423 - RNA, 20 nt, Human
ugggaagaagccacacagca

SEQ ID NO: 1127424 - RNA, 19 nt, Human
ugggagggaaccagaagua

SEQ ID NO: 1127425 - RNA, 18 nt, Human
ugggggucagaaagcugg

SEQ ID NO: 1127426 - RNA, 18 nt, Human
ugucacggagugcagaua

SEQ ID NO: 1127427 - RNA, 18 nt, Human
ugucaugaagauaaugga

SEQ ID NO: 1127428 - RNA, 19 nt, Human
ugucucugccagugacccc

SEQ ID NO: 1127429 - RNA, 21 nt, Human
ugugcucaugggauuuauaug

SEQ ID NO: 1127430 - RNA, 20 nt, Human
uguuggaggcucuuggcagg

SEQ ID NO: 1127431 - RNA, 24 nt, Human
uguuucuugagcccuguuggaggc

SEQ ID NO: 1127432 - RNA, 20 nt, Human
uuaaacauuucuuuucuucc

SEQ ID NO: 1127433 - RNA, 18 nt, Human
uuccaaaagaaagguccg

SEQ ID NO: 1127434 - RNA, 20 nt, Human
uugagcccuguuggaggcuc

SEQ ID NO: 1127435 - RNA, 23 nt, Human
uugcugccucccaaacggcaguu

SEQ ID NO: 1127436 - RNA, 20 nt, Human
uuggucucagacagcaagaa

SEQ ID NO: 1127437 - RNA, 20 nt, Human
aaaggccccaaggagcccuc

SEQ ID NO: 1127438 - RNA, 21 nt, Human
aaggccccaaggagcccucag

SEQ ID NO: 1127439 - RNA, 23 nt, Human
accccauaaaggccccaaggagc

SEQ ID NO: 1127440 - RNA, 24 nt, Human
accccauaaaggccccaaggagcc

SEQ ID NO: 1127441 - RNA, 22 nt, Human
cacuguguggccuugguggagc

SEQ ID NO: 1127442 - RNA, 19 nt, Human
ccacugcagcagacaaggc

SEQ ID NO: 1127443 - RNA, 22 nt, Human
ccauaaaggccccaaggagccc

SEQ ID NO: 1127444 - RNA, 19 nt, Human
cccacuguguggccuuggu

SEQ ID NO: 1127445 - RNA, 24 nt, Human
uaauggagauggaauuaccccaua

SEQ ID NO: 1127446 - RNA, 20 nt, Human
ucagcccuaauggagaugga

SEQ ID NO: 1127447 - RNA, 19 nt, Human
aaagaauucccccuccccu

SEQ ID NO: 1127448 - RNA, 21 nt, Human
aaagaauucccccuccccuca

SEQ ID NO: 1127449 - RNA, 19 nt, Human
aacgucguucuccccgccc

SEQ ID NO: 1127450 - RNA, 22 nt, Human
aggcacugcguagaauguuugc

SEQ ID NO: 1127451 - RNA, 25 nt, Human
agggaagggggaggggucgucccga

SEQ ID NO: 1127452 - RNA, 21 nt, Human
aggggcaacaggguccggagc

SEQ ID NO: 1127453 - RNA, 22 nt, Human
auguuugcucacuaagcccaaa

SEQ ID NO: 1127454 - RNA, 26 nt, Human
cacacgggccccucuccggggggcuu

SEQ ID NO: 1127455 - RNA, 18 nt, Human
ccacacgggccccucucc

SEQ ID NO: 1127456 - RNA, 19 nt, Human
ccaccccuucccgcgccau

SEQ ID NO: 1127457 - RNA, 22 nt, Human
cccacgccgccccgcccagggg

SEQ ID NO: 1127458 - RNA, 19 nt, Human
cccaggcgccccggucuuc

SEQ ID NO: 1127459 - RNA, 22 nt, Human
cccccugcccugccccgcuagc

SEQ ID NO: 1127460 - RNA, 22 nt, Human
cccgggguuacuacgguuuccc

SEQ ID NO: 1127461 - RNA, 22 nt, Human
cccuuugugccccggggaugag

SEQ ID NO: 1127462 - RNA, 27 nt, Human
ccuggccgaaggcuuggggagcucauu

SEQ ID NO: 1127463 - RNA, 22 nt, Human
cggccgcguuagcccgccgccc

SEQ ID NO: 1127464 - RNA, 25 nt, Human
cgggccccucuccggggggcuuuuu

SEQ ID NO: 1127465 - RNA, 23 nt, Human
cuagcgccaacgucguucucccc

SEQ ID NO: 1127466 - RNA, 21 nt, Human
cucccccugcccugccccgcu

SEQ ID NO: 1127467 - RNA, 20 nt, Human
cuggcuugucuuccaccccu

SEQ ID NO: 1127468 - RNA, 24 nt, Human
cuggcuugucuuccaccccuuccc

SEQ ID NO: 1127469 - RNA, 21 nt, Human
cuuccaccccuucccgcgcca

SEQ ID NO: 1127470 - RNA, 19 nt, Human
gagcgcgcgcgcgcucgcc

SEQ ID NO: 1127471 - RNA, 19 nt, Human
gcccacucgcggaaacuag

SEQ ID NO: 1127472 - RNA, 21 nt, Human
gccccucuccggggggcuuuu

SEQ ID NO: 1127473 - RNA, 19 nt, Human
gccgcguuagcccgccgcc

SEQ ID NO: 1127474 - RNA, 18 nt, Human
gcuagucguguuuccgcg

SEQ ID NO: 1127475 - RNA, 25 nt, Human
gcuggcuugucuuccaccccuuccc

SEQ ID NO: 1127476 - RNA, 18 nt, Human
ggaaacuaguuucuugug

SEQ ID NO: 1127477 - RNA, 24 nt, Human
ggcccgggguuacuacgguuuccc

SEQ ID NO: 1127478 - RNA, 18 nt, Human
gggcuuuuucuuaaaggg

SEQ ID NO: 1127479 - RNA, 18 nt, Human
ggggcaacaggguccgga

SEQ ID NO: 1127480 - RNA, 20 nt, Human
ggguggugccugggccggcc

SEQ ID NO: 1127481 - RNA, 18 nt, Human
gguccggagcccgccaac

SEQ ID NO: 1127482 - RNA, 22 nt, Human
ggugucuuuuuuuuuuuuuuuu

SEQ ID NO: 1127483 - RNA, 21 nt, Human
gucuuugcugugaagugcguc

SEQ ID NO: 1127484 - RNA, 18 nt, Human
guggagugugauggagcc

SEQ ID NO: 1127485 - RNA, 18 nt, Human
guggagugugauggagcc

SEQ ID NO: 1127486 - RNA, 21 nt, Human
guggugccugggccggcuuau

SEQ ID NO: 1127487 - RNA, 23 nt, Human
gugucuuuuuuuuuuuuuuuuuu

SEQ ID NO: 1127488 - RNA, 20 nt, Human
uagucguguuuccgcgcgcc

SEQ ID NO: 1127489 - RNA, 21 nt, Human
ucccgugacucccucccccug

SEQ ID NO: 1127490 - RNA, 23 nt, Human
ucccgugacucccucccccugcc

SEQ ID NO: 1127491 - RNA, 18 nt, Human
uccgcgcgccugcgcacg

SEQ ID NO: 1127492 - RNA, 24 nt, Human
uccgcgcgccugcgcacggggccg

SEQ ID NO: 1127493 - RNA, 18 nt, Human
ucgcgcuggcuugucuuc

SEQ ID NO: 1127494 - RNA, 23 nt, Human
ucgucccgaagcgcgcuagucgu

SEQ ID NO: 1127495 - RNA, 20 nt, Human
ucucgcuguguuguccgcga

SEQ ID NO: 1127496 - RNA, 20 nt, Human
ucucuugucauccaggcugu

SEQ ID NO: 1127497 - RNA, 23 nt, Human
ucuuuuuuuuuuuuuuuuugaga

SEQ ID NO: 1127498 - RNA, 19 nt, Human
ugacucccucccccugccc

SEQ ID NO: 1127499 - RNA, 25 nt, Human
ugagggaagggggaggggucguccc

SEQ ID NO: 1127500 - RNA, 21 nt, Human
ugcccugccccgcuagcgcca

SEQ ID NO: 1127501 - RNA, 23 nt, Human
ugcccugccccgcuagcgccaac

SEQ ID NO: 1127502 - RNA, 18 nt, Human
ugcuaaaucccgugacuc

SEQ ID NO: 1127503 - RNA, 21 nt, Human
uggugcgugagcgcgcgcgcg

SEQ ID NO: 1127504 - RNA, 18 nt, Human
ugucuuccaccccuuccc

SEQ ID NO: 1127505 - RNA, 26 nt, Human
ugugauggagccuucucgaaacggga

SEQ ID NO: 1127506 - RNA, 21 nt, Human
uuagcccgccgcccgcggccg

SEQ ID NO: 1127507 - RNA, 21 nt, Human
uuggccuuugagggaaggggg

SEQ ID NO: 1127508 - RNA, 21 nt, Human
uuggguggugccugggccggc

SEQ ID NO: 1127509 - RNA, 23 nt, Human
uugucauccaggcuguagugcag

SEQ ID NO: 1127510 - RNA, 21 nt, Human
uuuacucagccacacgggccc

SEQ ID NO: 1127511 - RNA, 22 nt, Human
uuuuuuuuuuuuuugagacggg

SEQ ID NO: 1127512 - RNA, 24 nt, Human
uuuuuuuuuuuuuuuugagacggg

SEQ ID NO: 1127513 - RNA, 18 nt, Human
uuuuuuuuuuuuuuuuug

SEQ ID NO: 1127514 - RNA, 20 nt, Human
aacaaagcgagacuccaucu

SEQ ID NO: 1127515 - RNA, 21 nt, Human
aacacagcgaaagccugucuc

SEQ ID NO: 1127516 - RNA, 19 nt, Human
aacauggcaaaaccccauc

SEQ ID NO: 1127517 - RNA, 21 nt, Human
aacauggcaaaaccccaucuc

SEQ ID NO: 1127518 - RNA, 21 nt, Human
aacauggcaaaaccccaucuc

SEQ ID NO: 1127519 - RNA, 23 nt, Human
aagcccaccacucuaggccuugg

SEQ ID NO: 1127520 - RNA, 22 nt, Human
aagcuccaguccuggcucugcc

SEQ ID NO: 1127521 - RNA, 24 nt, Human
aagugagguggcucaugccuguaa

SEQ ID NO: 1127522 - RNA, 25 nt, Human
aagugccugccucgugcugcugucu

SEQ ID NO: 1127523 - RNA, 24 nt, Human
aaucacuugaaccugggaggugga

SEQ ID NO: 1127524 - RNA, 21 nt, Human
aaugcccacagggcgggcagc

SEQ ID NO: 1127525 - RNA, 20 nt, Human
aauugcuugaaccuaggagg

SEQ ID NO: 1127526 - RNA, 24 nt, Human
acaaagcgagacuccaucucaaaa

SEQ ID NO: 1127527 - RNA, 24 nt, Human
accccaucucuacuaaagauacaa

SEQ ID NO: 1127528 - RNA, 20 nt, Human
accgagaucgugccacugca

SEQ ID NO: 1127529 - RNA, 18 nt, Human
accgcacuccagccuggg

SEQ ID NO: 1127530 - RNA, 24 nt, Human
accuaggaggccaagguugcagug

SEQ ID NO: 1127531 - RNA, 24 nt, Human
acuccagcuuggguggcagaguga

SEQ ID NO: 1127532 - RNA, 24 nt, Human
acugcacuccagcuuggguggcag

SEQ ID NO: 1127533 - RNA, 26 nt, Human
acugcacuccagcuuggguggcagag

SEQ ID NO: 1127534 - RNA, 22 nt, Human
acugggccuaugccaugugcac

SEQ ID NO: 1127535 - RNA, 24 nt, Human
acuugaggucaggaguucgagacc

SEQ ID NO: 1127536 - RNA, 21 nt, Human
agaaggaagagaacugucugg

SEQ ID NO: 1127537 - RNA, 24 nt, Human
agaaggaagagaacugucuggaaa

SEQ ID NO: 1127538 - RNA, 22 nt, Human
agaaucacuugaaccugggagg

SEQ ID NO: 1127539 - RNA, 22 nt, Human
agaauugcuugaaccuaggagg

SEQ ID NO: 1127540 - RNA, 21 nt, Human
agcauuuugggaggccgaggc

SEQ ID NO: 1127541 - RNA, 24 nt, Human
agcauuuugggaggccgaggcggg

SEQ ID NO: 1127542 - RNA, 24 nt, Human
agccuggccaacacagcgaaagcc

SEQ ID NO: 1127543 - RNA, 24 nt, Human
agccugggcaacaaagcgagacuc

SEQ ID NO: 1127544 - RNA, 24 nt, Human
agcuuggguggcagagugagacuu

SEQ ID NO: 1127545 - RNA, 23 nt, Human
aggaguucgagaccagucuggcc

SEQ ID NO: 1127546 - RNA, 22 nt, Human
aggcaggagaaucacuugaacc

SEQ ID NO: 1127547 - RNA, 24 nt, Human
aggcaggagaaucacuugaaccug

SEQ ID NO: 1127548 - RNA, 24 nt, Human
aggccaagguugcagugaaccgag

SEQ ID NO: 1127549 - RNA, 22 nt, Human
aggccaggcgcgguggcucacg

SEQ ID NO: 1127550 - RNA, 22 nt, Human
aggccaguggaucacuugaggu

SEQ ID NO: 1127551 - RNA, 26 nt, Human
aggccaguggaucacuugaggucagg

SEQ ID NO: 1127552 - RNA, 22 nt, Human
aggccgaggcgggcggcaaggu

SEQ ID NO: 1127553 - RNA, 25 nt, Human
aggccgaggcgggcggcaaggucag

SEQ ID NO: 1127554 - RNA, 24 nt, Human
aggcgcgguggcucacgccuguaa

SEQ ID NO: 1127555 - RNA, 24 nt, Human
aggcugaggcaggagaaucacuug

SEQ ID NO: 1127556 - RNA, 24 nt, Human
aggcuggggcaggagaauugcuug

SEQ ID NO: 1127557 - RNA, 20 nt, Human
aggucggugcggcgcugaga

SEQ ID NO: 1127558 - RNA, 21 nt, Human
agguggagguuguggugagcc

SEQ ID NO: 1127559 - RNA, 24 nt, Human
agguggagguuguggugagccgag

SEQ ID NO: 1127560 - RNA, 18 nt, Human
aguacagagaaggaagag

SEQ ID NO: 1127561 - RNA, 24 nt, Human
agucuggccaacauggcaaaaccc

SEQ ID NO: 1127562 - RNA, 24 nt, Human
aucacuugaggucaggaguucgag

SEQ ID NO: 1127563 - RNA, 24 nt, Human
aucgugccacugcacuccagcuug

SEQ ID NO: 1127564 - RNA, 19 nt, Human
augccuguaaucccagcac

SEQ ID NO: 1127565 - RNA, 22 nt, Human
auucaagaccagccuggccaac

SEQ ID NO: 1127566 - RNA, 24 nt, Human
auugcaccaccgcacuccagccug

SEQ ID NO: 1127567 - RNA, 28 nt, Human
auugcaccaccgcacuccagccugggca

SEQ ID NO: 1127568 - RNA, 19 nt, Human
caaaauuagcugggcaugg

SEQ ID NO: 1127569 - RNA, 22 nt, Human
caaagcccaccacucuaggccu

SEQ ID NO: 1127570 - RNA, 26 nt, Human
caaaugcccacagggcgggcagcugg

SEQ ID NO: 1127571 - RNA, 21 nt, Human
caacucgggaggcugaggcag

SEQ ID NO: 1127572 - RNA, 24 nt, Human
caaggccaguggaucacuugaggu

SEQ ID NO: 1127573 - RNA, 26 nt, Human
caaggccaguggaucacuugagguca

SEQ ID NO: 1127574 - RNA, 22 nt, Human
caaggucaggcauucaagacca

SEQ ID NO: 1127575 - RNA, 19 nt, Human
cacaccuauagucccagca

SEQ ID NO: 1127576 - RNA, 24 nt, Human
cacaccuauagucccagcaacucg

SEQ ID NO: 1127577 - RNA, 19 nt, Human
cacaccuguaaucccagcu

SEQ ID NO: 1127578 - RNA, 25 nt, Human
caccgcacuccagccugggcaacaa

SEQ ID NO: 1127579 - RNA, 21 nt, Human
caccuauagucccagcaacuc

SEQ ID NO: 1127580 - RNA, 24 nt, Human
caccuauagucccagcaacucggg

SEQ ID NO: 1127581 - RNA, 18 nt, Human
caccuggacugaacaaug

SEQ ID NO: 1127582 - RNA, 21 nt, Human
caccuggacugaacaaugggc

SEQ ID NO: 1127583 - RNA, 22 nt, Human
caccuggacugaacaaugggca

SEQ ID NO: 1127584 - RNA, 24 nt, Human
caccuguaaucccagcuacucagg

SEQ ID NO: 1127585 - RNA, 24 nt, Human
cacgccuguaaucccagcauuuug

SEQ ID NO: 1127586 - RNA, 22 nt, Human
cacuccagcuuggguggcagag

SEQ ID NO: 1127587 - RNA, 23 nt, Human
cacuccagcuuggguggcagagu

SEQ ID NO: 1127588 - RNA, 24 nt, Human
cacuccagcuuggguggcagagug

SEQ ID NO: 1127589 - RNA, 19 nt, Human
cacugcacuccagcuuggg

SEQ ID NO: 1127590 - RNA, 21 nt, Human
cacugcacuccagcuugggug

SEQ ID NO: 1127591 - RNA, 23 nt, Human
cacugcacuccagcuuggguggc

SEQ ID NO: 1127592 - RNA, 24 nt, Human
cacugcacuccagcuuggguggca

SEQ ID NO: 1127593 - RNA, 25 nt, Human
cacugcacuccagcuuggguggcag

SEQ ID NO: 1127594 - RNA, 21 nt, Human
cacuugaaccugggaggugga

SEQ ID NO: 1127595 - RNA, 23 nt, Human
cacuugaggucaggaguucgaga

SEQ ID NO: 1127596 - RNA, 23 nt, Human
cagagugagacuucaucucaaaa

SEQ ID NO: 1127597 - RNA, 24 nt, Human
cagcaacucgggaggcugaggcag

SEQ ID NO: 1127598 - RNA, 20 nt, Human
cagcacuuugggaggccaag

SEQ ID NO: 1127599 - RNA, 23 nt, Human
cagcacuuugggaggccaaggcc

SEQ ID NO: 1127600 - RNA, 23 nt, Human
cagcaguccugccccugccaggg

SEQ ID NO: 1127601 - RNA, 24 nt, Human
cagcauuuugggaggccgaggcgg

SEQ ID NO: 1127602 - RNA, 20 nt, Human
cagcuacucaggaggcuggg

SEQ ID NO: 1127603 - RNA, 24 nt, Human
cagcuacucaggaggcuggggcag

SEQ ID NO: 1127604 - RNA, 23 nt, Human
cagggaguuggcauccaucucug

SEQ ID NO: 1127605 - RNA, 23 nt, Human
cagggcgggcagcugggaggccc

SEQ ID NO: 1127606 - RNA, 19 nt, Human
cagggucugcugcuggccc

SEQ ID NO: 1127607 - RNA, 21 nt, Human
caguccugccccugccaggga

SEQ ID NO: 1127608 - RNA, 20 nt, Human
cagucuagagaaaggcccag

SEQ ID NO: 1127609 - RNA, 19 nt, Human
caucucaaaaaaaaagaug

SEQ ID NO: 1127610 - RNA, 20 nt, Human
caugccuguaaucccagcac

SEQ ID NO: 1127611 - RNA, 24 nt, Human
caugccuguaaucccagcacuuug

SEQ ID NO: 1127612 - RNA, 20 nt, Human
ccaccgcacuccagccuggg

SEQ ID NO: 1127613 - RNA, 21 nt, Human
ccaccgcacuccagccugggc

SEQ ID NO: 1127614 - RNA, 24 nt, Human
ccaccgcacuccagccugggcaac

SEQ ID NO: 1127615 - RNA, 18 nt, Human
ccacugcacuccagcuug

SEQ ID NO: 1127616 - RNA, 20 nt, Human
ccacugcacuccagcuuggg

SEQ ID NO: 1127617 - RNA, 20 nt, Human
ccacugcacuccagcuuggg

SEQ ID NO: 1127618 - RNA, 20 nt, Human
ccacugcacuccagcuuggg

SEQ ID NO: 1127619 - RNA, 21 nt, Human
ccacugcacuccagcuugggu

SEQ ID NO: 1127620 - RNA, 22 nt, Human
ccacugcacuccagcuugggug

SEQ ID NO: 1127621 - RNA, 23 nt, Human
ccacugcacuccagcuugggugg

SEQ ID NO: 1127622 - RNA, 24 nt, Human
ccacugcacuccagcuuggguggc

SEQ ID NO: 1127623 - RNA, 24 nt, Human
ccaguggaucacuugaggucagga

SEQ ID NO: 1127624 - RNA, 19 nt, Human
ccccuaugggcaguccggg

SEQ ID NO: 1127625 - RNA, 21 nt, Human
cccgggccucagucccgggaa

SEQ ID NO: 1127626 - RNA, 18 nt, Human
ccugggagguggagguug

SEQ ID NO: 1127627 - RNA, 22 nt, Human
ccuguaaucccagcauuuuggg

SEQ ID NO: 1127628 - RNA, 21 nt, Human
ccuguaaucccagcuacucag

SEQ ID NO: 1127629 - RNA, 22 nt, Human
ccugucucuacuaaaaauacaa

SEQ ID NO: 1127630 - RNA, 21 nt, Human
cgagaccagucuggccaacau

SEQ ID NO: 1127631 - RNA, 23 nt, Human
cgagacuccaucucaaaaaaaaa

SEQ ID NO: 1127632 - RNA, 21 nt, Human
cgcacaccuauagucccagca

SEQ ID NO: 1127633 - RNA, 21 nt, Human
cgggaacaaugggcaccugga

SEQ ID NO: 1127634 - RNA, 24 nt, Human
cgggaggcugaggcaggagaauca

SEQ ID NO: 1127635 - RNA, 18 nt, Human
cucaaaaaaaaaaaaaaa

SEQ ID NO: 1127636 - RNA, 18 nt, Human
cucaaaaaaaaaaaaaaa

SEQ ID NO: 1127637 - RNA, 21 nt, Human
cucacgccuguaaucccagca

SEQ ID NO: 1127638 - RNA, 21 nt, Human
cucacgccuguaaucccagca

SEQ ID NO: 1127639 - RNA, 24 nt, Human
cucaugccuguaaucccagcacuu

SEQ ID NO: 1127640 - RNA, 18 nt, Human
cugccucgugcugcuguc

SEQ ID NO: 1127641 - RNA, 20 nt, Human
cuggccaacacagcgaaagc

SEQ ID NO: 1127642 - RNA, 23 nt, Human
cuggccaacauggcaaaacccca

SEQ ID NO: 1127643 - RNA, 24 nt, Human
cugggaggcccuccgugagagccc

SEQ ID NO: 1127644 - RNA, 21 nt, Human
cuguaaucccagcuacucagg

SEQ ID NO: 1127645 - RNA, 21 nt, Human
cuugaaccugggagguggagg

SEQ ID NO: 1127646 - RNA, 21 nt, Human
gaacugucuggaagacagaau

SEQ ID NO: 1127647 - RNA, 23 nt, Human
gagaucgugccacugcacuccag

SEQ ID NO: 1127648 - RNA, 18 nt, Human
gaggcuggggcaggagaa

SEQ ID NO: 1127649 - RNA, 18 nt, Human
gaucacuugaggucagga

SEQ ID NO: 1127650 - RNA, 24 nt, Human
gaucacuugaggucaggaguucga

SEQ ID NO: 1127651 - RNA, 23 nt, Human
gcacuccagcuuggguggcagag

SEQ ID NO: 1127652 - RNA, 19 nt, Human
gcagcugggaggcccuccg

SEQ ID NO: 1127653 - RNA, 23 nt, Human
gcaggagaaucacuugaaccugg

SEQ ID NO: 1127654 - RNA, 19 nt, Human
gccacugcacuccagcuug

SEQ ID NO: 1127655 - RNA, 24 nt, Human
gccacugcacuccagcuugggugg

SEQ ID NO: 1127656 - RNA, 19 nt, Human
gcccagggucugcugcugg

SEQ ID NO: 1127657 - RNA, 22 nt, Human
gcccagggucugcugcuggccc

SEQ ID NO: 1127658 - RNA, 22 nt, Human
gccgggugugguggcacacacc

SEQ ID NO: 1127659 - RNA, 19 nt, Human
gcucugggauguggugacc

SEQ ID NO: 1127660 - RNA, 19 nt, Human
gcucugggauguggugacc

SEQ ID NO: 1127661 - RNA, 22 nt, Human
ggagguuguggugagccgagau

SEQ ID NO: 1127662 - RNA, 24 nt, Human
ggagguuguggugagccgagauug

SEQ ID NO: 1127663 - RNA, 20 nt, Human
ggaucacuugaggucaggaa

SEQ ID NO: 1127664 - RNA, 22 nt, Human
ggaucacuugaggucaggaguu

SEQ ID NO: 1127665 - RNA, 21 nt, Human
ggcacacaccuguaaucccag

SEQ ID NO: 1127666 - RNA, 24 nt, Human
ggcagagugagacuucaucucaaa

SEQ ID NO: 1127667 - RNA, 21 nt, Human
ggcaggagaauugcuugaacc

SEQ ID NO: 1127668 - RNA, 21 nt, Human
ggcagguggggcugcucggca

SEQ ID NO: 1127669 - RNA, 19 nt, Human
ggccuuggcuuucuaaugg

SEQ ID NO: 1127670 - RNA, 23 nt, Human
gggcaggagaauugcuugaaccu

SEQ ID NO: 1127671 - RNA, 24 nt, Human
gggccaagugagguggcucaugcc

SEQ ID NO: 1127672 - RNA, 24 nt, Human
ggggcaggagaauugcuugaaccu

SEQ ID NO: 1127673 - RNA, 24 nt, Human
ggugacccaguacgcaguacagag

SEQ ID NO: 1127674 - RNA, 24 nt, Human
gguggcacacaccuguaaucccag

SEQ ID NO: 1127675 - RNA, 24 nt, Human
gguggcgcacaccuauagucccag

SEQ ID NO: 1127676 - RNA, 23 nt, Human
gguggcucacgccuguaauccca

SEQ ID NO: 1127677 - RNA, 24 nt, Human
gguggcucacgccuguaaucccag

SEQ ID NO: 1127678 - RNA, 23 nt, Human
gguggcucaugccuguaauccca

SEQ ID NO: 1127679 - RNA, 24 nt, Human
gguggcucaugccuguaaucccag

SEQ ID NO: 1127680 - RNA, 23 nt, Human
ggugugguggcacacaccuguaa

SEQ ID NO: 1127681 - RNA, 20 nt, Human
guaaaagaaguaaaagugcu

SEQ ID NO: 1127682 - RNA, 18 nt, Human
gucugcugcuggcccugc

SEQ ID NO: 1127683 - RNA, 23 nt, Human
guggaucacuugaggucaggagu

SEQ ID NO: 1127684 - RNA, 18 nt, Human
guguggcugggagggcag

SEQ ID NO: 1127685 - RNA, 18 nt, Human
uaaaaauacaaaauuagc

SEQ ID NO: 1127686 - RNA, 19 nt, Human
uaaaaauacaaaauuagcu

SEQ ID NO: 1127687 - RNA, 22 nt, Human
uaaaagaaguaaaagugccugc

SEQ ID NO: 1127688 - RNA, 23 nt, Human
uagagaaaggcccagggucugcu

SEQ ID NO: 1127689 - RNA, 21 nt, Human
ucacgccuguaaucccagcau

SEQ ID NO: 1127690 - RNA, 19 nt, Human
ucacuugaaccugggaggu

SEQ ID NO: 1127691 - RNA, 24 nt, Human
ucacuugaaccugggagguggagg

SEQ ID NO: 1127692 - RNA, 18 nt, Human
ucagucccgggaacaaug

SEQ ID NO: 1127693 - RNA, 22 nt, Human
ucagucuagagaaaggcccagg

SEQ ID NO: 1127694 - RNA, 22 nt, Human
ucaucucaaaaaaaaaaaaaaa

SEQ ID NO: 1127695 - RNA, 24 nt, Human
ucaucucaaaaaaaaaaaaaaaaa

SEQ ID NO: 1127696 - RNA, 22 nt, Human
ucaugccuguaaucccagcacu

SEQ ID NO: 1127697 - RNA, 24 nt, Human
uccagccugggcaacaaagcgaga

SEQ ID NO: 1127698 - RNA, 24 nt, Human
uccagcuuggguggcagagugaga

SEQ ID NO: 1127699 - RNA, 19 nt, Human
ucccgggccucagucccgg

SEQ ID NO: 1127700 - RNA, 25 nt, Human
ucgggaggcugaggcaggagaauca

SEQ ID NO: 1127701 - RNA, 23 nt, Human
ucgugccacugcacuccagcuug

SEQ ID NO: 1127702 - RNA, 20 nt, Human
ucucuacuaaaaauacaaaa

SEQ ID NO: 1127703 - RNA, 21 nt, Human
ucucuacuaaagauacaaaaa

SEQ ID NO: 1127704 - RNA, 26 nt, Human
ucucuacuaaagauacaagacaucgg

SEQ ID NO: 1127705 - RNA, 18 nt, Human
ucugaggccuaagugagc

SEQ ID NO: 1127706 - RNA, 22 nt, Human
ugaaccgagaucgugccacugc

SEQ ID NO: 1127707 - RNA, 27 nt, Human
ugaaccugggagguggagguugugacg

SEQ ID NO: 1127708 - RNA, 21 nt, Human
ugacuguauauggagauaggc

SEQ ID NO: 1127709 - RNA, 26 nt, Human
ugagagcacacccacggggaauggug

SEQ ID NO: 1127710 - RNA, 22 nt, Human
ugagccgagauugcaccaccgc

SEQ ID NO: 1127711 - RNA, 20 nt, Human
ugaggcaggagaaucacuug

SEQ ID NO: 1127712 - RNA, 24 nt, Human
ugaggcaggagaaucacuugaacc

SEQ ID NO: 1127713 - RNA, 25 nt, Human
ugaggcaggagaaucacuugaaccu

SEQ ID NO: 1127714 - RNA, 21 nt, Human
ugcaccaccgcacuccagccu

SEQ ID NO: 1127715 - RNA, 18 nt, Human
ugcagugugaaggucggu

SEQ ID NO: 1127716 - RNA, 24 nt, Human
ugccacugcacuccagcuugggug

SEQ ID NO: 1127717 - RNA, 20 nt, Human
ugccugccucgugcugcugu

SEQ ID NO: 1127718 - RNA, 23 nt, Human
ugccuguaaucccagcacuuugg

SEQ ID NO: 1127719 - RNA, 23 nt, Human
ugccuguaaucccagcacuuugg

SEQ ID NO: 1127720 - RNA, 24 nt, Human
ugccuguaaucccagcacuuuggg

SEQ ID NO: 1127721 - RNA, 18 nt, Human
ugcuauaacugagcaagg

SEQ ID NO: 1127722 - RNA, 24 nt, Human
uggacugaacaaugggcacccgga

SEQ ID NO: 1127723 - RNA, 22 nt, Human
uggaucacuugaggucaggagu

SEQ ID NO: 1127724 - RNA, 24 nt, Human
uggaucacuugaggucaggaguuc

SEQ ID NO: 1127725 - RNA, 26 nt, Human
uggaucacuugaggucaggaguucga

SEQ ID NO: 1127726 - RNA, 18 nt, Human
uggcagagugagacuuca

SEQ ID NO: 1127727 - RNA, 24 nt, Human
uggcucacgccuguaaucccagca

SEQ ID NO: 1127728 - RNA, 22 nt, Human
uggcucaugccuguaaucccag

SEQ ID NO: 1127729 - RNA, 24 nt, Human
uggcucaugccuguaaucccagca

SEQ ID NO: 1127730 - RNA, 19 nt, Human
uggcugaacugcggccccu

SEQ ID NO: 1127731 - RNA, 24 nt, Human
uggcugggagggcaggugggggga

SEQ ID NO: 1127732 - RNA, 24 nt, Human
ugggaggccaaggccaguggauca

SEQ ID NO: 1127733 - RNA, 18 nt, Human
ugggaggccgaggcgggc

SEQ ID NO: 1127734 - RNA, 19 nt, Human
ugggaggccgaggcgggcg

SEQ ID NO: 1127735 - RNA, 21 nt, Human
ugggaggccgaggcgggcggc

SEQ ID NO: 1127736 - RNA, 20 nt, Human
ugggagguggagguuguggu

SEQ ID NO: 1127737 - RNA, 24 nt, Human
ugggagguggagguuguggugagc

SEQ ID NO: 1127738 - RNA, 18 nt, Human
ugggauguggugacccag

SEQ ID NO: 1127739 - RNA, 20 nt, Human
ugggccuaugccaugugcac

SEQ ID NO: 1127740 - RNA, 24 nt, Human
uggggcaggagaauugcuugaacc

SEQ ID NO: 1127741 - RNA, 20 nt, Human
ugggguguggcugggagggc

SEQ ID NO: 1127742 - RNA, 23 nt, Human
ugguggcacacaccuguaauccc

SEQ ID NO: 1127743 - RNA, 24 nt, Human
ugguggcacacaccuguaauccca

SEQ ID NO: 1127744 - RNA, 19 nt, Human
uguggucaaagcccaccac

SEQ ID NO: 1127745 - RNA, 21 nt, Human
uguggucaaagcccaccacuc

SEQ ID NO: 1127746 - RNA, 19 nt, Human
uuacugggccuaugccaug

SEQ ID NO: 1127747 - RNA, 18 nt, Human
uuagcugggcaugguggc

SEQ ID NO: 1127748 - RNA, 20 nt, Human
uuagcugggcaugguggcgc

SEQ ID NO: 1127749 - RNA, 18 nt, Human
uucaagaccagccuggcc

SEQ ID NO: 1127750 - RNA, 24 nt, Human
uucccgggccucagucccgggaac

SEQ ID NO: 1127751 - RNA, 24 nt, Human
uugaaccugggagguggagguugu

SEQ ID NO: 1127752 - RNA, 22 nt, Human
uugcagugaaccgagaucgugc

SEQ ID NO: 1127753 - RNA, 18 nt, Human
uugcuugaaccuaggagg

SEQ ID NO: 1127754 - RNA, 24 nt, Human
uugcuugaaccuaggaggccaagg

SEQ ID NO: 1127755 - RNA, 18 nt, Human
uuguggugagccgagauu

SEQ ID NO: 1127756 - RNA, 22 nt, Human
uuguggugagccgagauugcac

SEQ ID NO: 1127757 - RNA, 20 nt, Human
cagagcuguccacacucucc

SEQ ID NO: 1127758 - RNA, 18 nt, Human
caggcccugugguggugg

SEQ ID NO: 1127759 - RNA, 21 nt, Human
ccaguggccuucugugcccgg

SEQ ID NO: 1127760 - RNA, 19 nt, Human
cccauggcccgccccggga

SEQ ID NO: 1127761 - RNA, 22 nt, Human
ccccgggacagccaguuguccu

SEQ ID NO: 1127762 - RNA, 22 nt, Human
cuguccacacucucccgggacc

SEQ ID NO: 1127763 - RNA, 21 nt, Human
gacagccaguuguccuggagc

SEQ ID NO: 1127764 - RNA, 18 nt, Human
gagcaggcucucacuucc

SEQ ID NO: 1127765 - RNA, 21 nt, Human
gcagggccugggcccauggcc

SEQ ID NO: 1127766 - RNA, 18 nt, Human
ggcacggcacaggcccug

SEQ ID NO: 1127767 - RNA, 20 nt, Human
ggcacggcacaggcccugug

SEQ ID NO: 1127768 - RNA, 21 nt, Human
ggcccgccccgggacagccag

SEQ ID NO: 1127769 - RNA, 20 nt, Human
ggccuccgggccaguggccu

SEQ ID NO: 1127770 - RNA, 20 nt, Human
gggcacggcacaggcccugu

SEQ ID NO: 1127771 - RNA, 21 nt, Human
ggggcugggguuugcagggga

SEQ ID NO: 1127772 - RNA, 19 nt, Human
uccacacucucccgggacc

SEQ ID NO: 1127773 - RNA, 20 nt, Human
uggcagggccugggcccaug

SEQ ID NO: 1127774 - RNA, 24 nt, Human
aaagugcugggauuacaggcguga

SEQ ID NO: 1127775 - RNA, 21 nt, Human
aacaagaauaacaugcuccac

SEQ ID NO: 1127776 - RNA, 23 nt, Human
aaccaagcccacuaccgcuuagc

SEQ ID NO: 1127777 - RNA, 22 nt, Human
aaggaccuucagaaacaagaau

SEQ ID NO: 1127778 - RNA, 19 nt, Human
aagugcugggauuacaggc

SEQ ID NO: 1127779 - RNA, 19 nt, Human
aagugcugggauuacaggc

SEQ ID NO: 1127780 - RNA, 26 nt, Human
aagugcugggauuacaggcgugagcc

SEQ ID NO: 1127781 - RNA, 23 nt, Human
acaagacggccugugccaggucc

SEQ ID NO: 1127782 - RNA, 25 nt, Human
acaggugcucaccaccacgccugac

SEQ ID NO: 1127783 - RNA, 24 nt, Human
accacagucuacuaaacaucauca

SEQ ID NO: 1127784 - RNA, 19 nt, Human
accugcagcuggcgcuugu

SEQ ID NO: 1127785 - RNA, 22 nt, Human
acugcaaccucugccucccagg

SEQ ID NO: 1127786 - RNA, 23 nt, Human
agagaaacagccugagccacagg

SEQ ID NO: 1127787 - RNA, 24 nt, Human
agcaggccggggaggagccucggc

SEQ ID NO: 1127788 - RNA, 21 nt, Human
agcuccaugacccugggccuc

SEQ ID NO: 1127789 - RNA, 18 nt, Human
agcuccuccugggcagcc

SEQ ID NO: 1127790 - RNA, 18 nt, Human
aggagcgccgcggugggg

SEQ ID NO: 1127791 - RNA, 20 nt, Human
aggagcgccgcgguggggaa

SEQ ID NO: 1127792 - RNA, 24 nt, Human
aggcgaucugccugccuuggccuc

SEQ ID NO: 1127793 - RNA, 24 nt, Human
aguacaguggugcgauccuggcug

SEQ ID NO: 1127794 - RNA, 18 nt, Human
aguagcugggauuacagg

SEQ ID NO: 1127795 - RNA, 18 nt, Human
agugcugggauuacaggc

SEQ ID NO: 1127796 - RNA, 18 nt, Human
aucagggcgagcguggag

SEQ ID NO: 1127797 - RNA, 21 nt, Human
aucugaaggguccuggcaggg

SEQ ID NO: 1127798 - RNA, 22 nt, Human
augacccugggccuccguuuuc

SEQ ID NO: 1127799 - RNA, 21 nt, Human
augcugggcuggggaccaggc

SEQ ID NO: 1127800 - RNA, 18 nt, Human
augggucugguuagaaaa

SEQ ID NO: 1127801 - RNA, 21 nt, Human
auucuccugccucagccuccc

SEQ ID NO: 1127802 - RNA, 24 nt, Human
auuuuuguaguuuuaguagagacg

SEQ ID NO: 1127803 - RNA, 21 nt, Human
caaagugcugggauuacaggc

SEQ ID NO: 1127804 - RNA, 24 nt, Human
caaagugcugggauuacaggcgug

SEQ ID NO: 1127805 - RNA, 25 nt, Human
caaccaagcccacuaccgcuuagcu

SEQ ID NO: 1127806 - RNA, 24 nt, Human
caagacggccugugccaggucccu

SEQ ID NO: 1127807 - RNA, 22 nt, Human
caagcaauucuccugccucagc

SEQ ID NO: 1127808 - RNA, 22 nt, Human
cagcgagaugcugggcugggga

SEQ ID NO: 1127809 - RNA, 18 nt, Human
cagcgccucccucaccuc

SEQ ID NO: 1127810 - RNA, 18 nt, Human
cagcuccucggccugcug

SEQ ID NO: 1127811 - RNA, 20 nt, Human
caggacccagugggugucac

SEQ ID NO: 1127812 - RNA, 19 nt, Human
caggugcucaccaccacgc

SEQ ID NO: 1127813 - RNA, 21 nt, Human
cauguccuggaccugcagcug

SEQ ID NO: 1127814 - RNA, 19 nt, Human
ccacguuggucaggcuggu

SEQ ID NO: 1127815 - RNA, 21 nt, Human
ccagcgagaugcugggcuggg

SEQ ID NO: 1127816 - RNA, 23 nt, Human
cccagguucaagcaauucuccug

SEQ ID NO: 1127817 - RNA, 23 nt, Human
cccgaguagcugggauuacaggu

SEQ ID NO: 1127818 - RNA, 24 nt, Human
cccgaguagcugggauuacaggug

SEQ ID NO: 1127819 - RNA, 21 nt, Human
ccgaguagcugggauuacagg

SEQ ID NO: 1127820 - RNA, 20 nt, Human
ccgcagcuccuccugggcag

SEQ ID NO: 1127821 - RNA, 18 nt, Human
ccucacucagcuguuccu

SEQ ID NO: 1127822 - RNA, 22 nt, Human
ccucacucagcuguuccuucuc

SEQ ID NO: 1127823 - RNA, 24 nt, Human
ccucccagguucaagcaauucucc

SEQ ID NO: 1127824 - RNA, 24 nt, Human
ccucgcgcugggcgugcucguggg

SEQ ID NO: 1127825 - RNA, 22 nt, Human
ccucuagggcccgccgcucgcu

SEQ ID NO: 1127826 - RNA, 21 nt, Human
ccugaccucaggcgaucugcc

SEQ ID NO: 1127827 - RNA, 25 nt, Human
ccugcacugcguccuccugcucuuc

SEQ ID NO: 1127828 - RNA, 25 nt, Human
ccugcagcuggcgcuugugcagggc

SEQ ID NO: 1127829 - RNA, 20 nt, Human
ccugcagcuucucccgcucc

SEQ ID NO: 1127830 - RNA, 19 nt, Human
ccugccgcagcuccucggc

SEQ ID NO: 1127831 - RNA, 23 nt, Human
ccugccucagccucccgaguagc

SEQ ID NO: 1127832 - RNA, 24 nt, Human
ccugccucagccucccgaguagcu

SEQ ID NO: 1127833 - RNA, 22 nt, Human
ccugccuuggccucucaaagug

SEQ ID NO: 1127834 - RNA, 21 nt, Human
ccuguagccagcgagaugcug

SEQ ID NO: 1127835 - RNA, 25 nt, Human
ccuguagccgcagggauuccagggc

SEQ ID NO: 1127836 - RNA, 20 nt, Human
ccuuagggucugcuguagcc

SEQ ID NO: 1127837 - RNA, 25 nt, Human
ccuucugccgggccagcagcuccuc

SEQ ID NO: 1127838 - RNA, 23 nt, Human
cuaaccccacggggggcacuguc

SEQ ID NO: 1127839 - RNA, 24 nt, Human
cucagccucccgaguagcugggau

SEQ ID NO: 1127840 - RNA, 19 nt, Human
cuccagggccaccugcucc

SEQ ID NO: 1127841 - RNA, 19 nt, Human
cuccaugacccugggccuc

SEQ ID NO: 1127842 - RNA, 26 nt, Human
cuccugaccucaggcgaucugccugc

SEQ ID NO: 1127843 - RNA, 22 nt, Human
cuccugccucagccucccgagu

SEQ ID NO: 1127844 - RNA, 18 nt, Human
cuccugcugcaggguagc

SEQ ID NO: 1127845 - RNA, 21 nt, Human
cucggccgggcgaggagcgcc

SEQ ID NO: 1127846 - RNA, 23 nt, Human
cucuaguugucuauggcuguggg

SEQ ID NO: 1127847 - RNA, 20 nt, Human
cucugcagcugggcccgcuc

SEQ ID NO: 1127848 - RNA, 19 nt, Human
cucuucugcuaacugugug

SEQ ID NO: 1127849 - RNA, 19 nt, Human
cugacagcgccaucuucuc

SEQ ID NO: 1127850 - RNA, 23 nt, Human
cugcaaccucugccucccagguu

SEQ ID NO: 1127851 - RNA, 24 nt, Human
cugcaaccucugccucccagguuc

SEQ ID NO: 1127852 - RNA, 21 nt, Human
cugcaccucgcgcugggcgug

SEQ ID NO: 1127853 - RNA, 21 nt, Human
cugcagcugggcccgcucggc

SEQ ID NO: 1127854 - RNA, 23 nt, Human
cugccgggccagcagcuccuccu

SEQ ID NO: 1127855 - RNA, 18 nt, Human
cugcuccugccggcucug

SEQ ID NO: 1127856 - RNA, 24 nt, Human
cuggaccugcagcuggcgcuugug

SEQ ID NO: 1127857 - RNA, 22 nt, Human
cuggacgccgcucucagagucu

SEQ ID NO: 1127858 - RNA, 18 nt, Human
cuggcgccgcagcuccuc

SEQ ID NO: 1127859 - RNA, 20 nt, Human
cugggccaccugcaggcugu

SEQ ID NO: 1127860 - RNA, 23 nt, Human
cugggcccgcucggccuccagcu

SEQ ID NO: 1127861 - RNA, 22 nt, Human
cuguagccccucuccguccucu

SEQ ID NO: 1127862 - RNA, 18 nt, Human
cugucacacaggcuggag

SEQ ID NO: 1127863 - RNA, 22 nt, Human
cugugccucaguuuaccaucca

SEQ ID NO: 1127864 - RNA, 20 nt, Human
cuuaaaaugguaucuggcac

SEQ ID NO: 1127865 - RNA, 21 nt, Human
cuucucgcucucggccaggag

SEQ ID NO: 1127866 - RNA, 24 nt, Human
cuuggccucucaaagugcugggau

SEQ ID NO: 1127867 - RNA, 20 nt, Human
gacaagacggccugugccag

SEQ ID NO: 1127868 - RNA, 23 nt, Human
gaccucaggcgaucugccugccu

SEQ ID NO: 1127869 - RNA, 20 nt, Human
gagacgggauuucuccacgu

SEQ ID NO: 1127870 - RNA, 18 nt, Human
gauuacaggcgugagcca

SEQ ID NO: 1127871 - RNA, 22 nt, Human
gauuacaggcgugagccacugc

SEQ ID NO: 1127872 - RNA, 22 nt, Human
gauuacaggcgugagccacugc

SEQ ID NO: 1127873 - RNA, 22 nt, Human
gcaaccucugccucccagguuc

SEQ ID NO: 1127874 - RNA, 19 nt, Human
gcagcugggcccgcucggc

SEQ ID NO: 1127875 - RNA, 19 nt, Human
gccccaguuuccugaaaug

SEQ ID NO: 1127876 - RNA, 22 nt, Human
gccgcugcaccucgcgcugggc

SEQ ID NO: 1127877 - RNA, 18 nt, Human
gccucaguuuaccaucca

SEQ ID NO: 1127878 - RNA, 18 nt, Human
gccucccucaccuccacc

SEQ ID NO: 1127879 - RNA, 22 nt, Human
gccuuggccucucaaagugcug

SEQ ID NO: 1127880 - RNA, 19 nt, Human
gcucaccaccacgccugac

SEQ ID NO: 1127881 - RNA, 29 nt, Human
gcuccuuggccaggacugagcgcuucccc

SEQ ID NO: 1127882 - RNA, 23 nt, Human
gcuggucuggaacuccugaccuc

SEQ ID NO: 1127883 - RNA, 20 nt, Human
ggagaugguggccaggcugu

SEQ ID NO: 1127884 - RNA, 20 nt, Human
ggccugaggcaggaguuugg

SEQ ID NO: 1127885 - RNA, 24 nt, Human
ggccugcugcugggccaccugcag

SEQ ID NO: 1127886 - RNA, 21 nt, Human
ggcucuucugcuaacugugug

SEQ ID NO: 1127887 - RNA, 24 nt, Human
ggcuggucuggaacuccugaccuc

SEQ ID NO: 1127888 - RNA, 21 nt, Human
gguccagacgguaggaggccc

SEQ ID NO: 1127889 - RNA, 19 nt, Human
guuagaaaacccgacauca

SEQ ID NO: 1127890 - RNA, 23 nt, Human
uaacugugugaccuggggcaagu

SEQ ID NO: 1127891 - RNA, 25 nt, Human
uaagugacuauaccucccugagccc

SEQ ID NO: 1127892 - RNA, 24 nt, Human
uaauuuuuguaguuuuaguagaga

SEQ ID NO: 1127893 - RNA, 19 nt, Human
uacaggcgugagccacugc

SEQ ID NO: 1127894 - RNA, 23 nt, Human
uacaggcgugagccacugcgccc

SEQ ID NO: 1127895 - RNA, 22 nt, Human
uacaggugcucaccaccacgcc

SEQ ID NO: 1127896 - RNA, 21 nt, Human
uagcaaucuccucacucagcu

SEQ ID NO: 1127897 - RNA, 22 nt, Human
uagccagcgagaugcugggcug

SEQ ID NO: 1127898 - RNA, 19 nt, Human
uaguagagacgggauuucu

SEQ ID NO: 1127899 - RNA, 24 nt, Human
uaguagagacgggauuucuccacg

SEQ ID NO: 1127900 - RNA, 20 nt, Human
uaucauggaguuaaaugaga

SEQ ID NO: 1127901 - RNA, 25 nt, Human
uaucauggaguuaaaugagagaacu

SEQ ID NO: 1127902 - RNA, 22 nt, Human
ucaaagugcugggauuacaggc

SEQ ID NO: 1127903 - RNA, 24 nt, Human
ucaaagugcugggauuacaggcgu

SEQ ID NO: 1127904 - RNA, 20 nt, Human
ucacaucugcaaaaugaggu

SEQ ID NO: 1127905 - RNA, 23 nt, Human
ucacucagcuguuccuuccucgg

SEQ ID NO: 1127906 - RNA, 20 nt, Human
ucagccucccgaguagcugg

SEQ ID NO: 1127907 - RNA, 20 nt, Human
ucaugcuccugcugcagggu

SEQ ID NO: 1127908 - RNA, 23 nt, Human
uccaccacagucuacuaaacauc

SEQ ID NO: 1127909 - RNA, 22 nt, Human
uccagccggucccgcuggcgcc

SEQ ID NO: 1127910 - RNA, 21 nt, Human
ucccagguucaagcaauucuc

SEQ ID NO: 1127911 - RNA, 24 nt, Human
ucccagguucaagcaauucuccug

SEQ ID NO: 1127912 - RNA, 23 nt, Human
ucccgaguagcugggauuacagg

SEQ ID NO: 1127913 - RNA, 24 nt, Human
ucccgaguagcugggauuacaggu

SEQ ID NO: 1127914 - RNA, 19 nt, Human
ucccgccaugcugccuccu

SEQ ID NO: 1127915 - RNA, 21 nt, Human
ucccgcuggcgccgcagcucc

SEQ ID NO: 1127916 - RNA, 24 nt, Human
uccuccugggcagccugcagcuuc

SEQ ID NO: 1127917 - RNA, 25 nt, Human
ucgcuaagcugcuuccgcagggugc

SEQ ID NO: 1127918 - RNA, 20 nt, Human
ucggcggggugaacggccuc

SEQ ID NO: 1127919 - RNA, 24 nt, Human
ucucaaagugcugggauuacaggc

SEQ ID NO: 1127920 - RNA, 18 nt, Human
ucucugacagcgccaucu

SEQ ID NO: 1127921 - RNA, 23 nt, Human
ucugcagcugggcccgcucggcc

SEQ ID NO: 1127922 - RNA, 24 nt, Human
ucugcuaacugugugaccuggggc

SEQ ID NO: 1127923 - RNA, 19 nt, Human
ucuugcucugucacacagg

SEQ ID NO: 1127924 - RNA, 23 nt, Human
ucuugcucugucacacaggcugg

SEQ ID NO: 1127925 - RNA, 24 nt, Human
ucuugcucugucacacaggcugga

SEQ ID NO: 1127926 - RNA, 18 nt, Human
ugacaagacggccugugc

SEQ ID NO: 1127927 - RNA, 18 nt, Human
ugaccucaggcgaucugc

SEQ ID NO: 1127928 - RNA, 20 nt, Human
ugaccucaggcgaucugccu

SEQ ID NO: 1127929 - RNA, 21 nt, Human
ugaccucaggcgaucugccug

SEQ ID NO: 1127930 - RNA, 24 nt, Human
ugaccucaggcgaucugccugccu

SEQ ID NO: 1127931 - RNA, 19 nt, Human
ugacugcaaccucugccuc

SEQ ID NO: 1127932 - RNA, 24 nt, Human
ugacugcaaccucugccucccagg

SEQ ID NO: 1127933 - RNA, 21 nt, Human
ugaggcaggaguuuggagaga

SEQ ID NO: 1127934 - RNA, 22 nt, Human
ugaggcaggaguuuggagagaa

SEQ ID NO: 1127935 - RNA, 21 nt, Human
ugcacugcguccuccugcucu

SEQ ID NO: 1127936 - RNA, 18 nt, Human
ugcagcuucucccgcucc

SEQ ID NO: 1127937 - RNA, 20 nt, Human
ugccccgaaccuccuguagc

SEQ ID NO: 1127938 - RNA, 23 nt, Human
ugccccgaaccuccuguagccag

SEQ ID NO: 1127939 - RNA, 18 nt, Human
ugccgcuccaucuccagg

SEQ ID NO: 1127940 - RNA, 24 nt, Human
ugccucagccucccgaguagcugg

SEQ ID NO: 1127941 - RNA, 24 nt, Human
ugccugacacaucuccccaaggac

SEQ ID NO: 1127942 - RNA, 21 nt, Human
ugccuuggccucucaaagugc

SEQ ID NO: 1127943 - RNA, 24 nt, Human
ugcugggauuacaggcgugagcca

SEQ ID NO: 1127944 - RNA, 24 nt, Human
uggaguacaguggugcgauccugg

SEQ ID NO: 1127945 - RNA, 20 nt, Human
uggcccgagagcccccgcag

SEQ ID NO: 1127946 - RNA, 23 nt, Human
uggcgccgcagcuccuccugggc

SEQ ID NO: 1127947 - RNA, 18 nt, Human
ugggauuacaggcgugag

SEQ ID NO: 1127948 - RNA, 19 nt, Human
ugggauuacaggcgugagc

SEQ ID NO: 1127949 - RNA, 21 nt, Human
ugggauuacaggcgugagcca

SEQ ID NO: 1127950 - RNA, 22 nt, Human
ugggauuacaggcgugagccac

SEQ ID NO: 1127951 - RNA, 22 nt, Human
ugggauuacaggcgugagccac

SEQ ID NO: 1127952 - RNA, 24 nt, Human
ugggauuacaggcgugagccacug

SEQ ID NO: 1127953 - RNA, 26 nt, Human
ugggauuacaggcgugagccacugcg

SEQ ID NO: 1127954 - RNA, 19 nt, Human
ugggauuacaggugcucac

SEQ ID NO: 1127955 - RNA, 21 nt, Human
ugggauuacaggugcucacca

SEQ ID NO: 1127956 - RNA, 24 nt, Human
ugggauuacaggugcucaccacca

SEQ ID NO: 1127957 - RNA, 19 nt, Human
ugggccugcauggcgccgu

SEQ ID NO: 1127958 - RNA, 21 nt, Human
uggguggguggcccaugucac

SEQ ID NO: 1127959 - RNA, 26 nt, Human
uggguggguggcccauguuguaauga

SEQ ID NO: 1127960 - RNA, 24 nt, Human
uggucaggcuggucuggaacuccu

SEQ ID NO: 1127961 - RNA, 23 nt, Human
uggucuggaacuccugaccucag

SEQ ID NO: 1127962 - RNA, 21 nt, Human
ugguuucugccgcuccaucuc

SEQ ID NO: 1127963 - RNA, 21 nt, Human
ugucacagaguuaucauggag

SEQ ID NO: 1127964 - RNA, 18 nt, Human
uuaguagagacgggauuu

SEQ ID NO: 1127965 - RNA, 21 nt, Human
uucaagcaauucuccugccuc

SEQ ID NO: 1127966 - RNA, 24 nt, Human
uucaagcaauucuccugccucagc

SEQ ID NO: 1127967 - RNA, 22 nt, Human
uuccagggccucaagcuucuca

SEQ ID NO: 1127968 - RNA, 27 nt, Human
uuccugaaaugggucugguuagaaaaa

SEQ ID NO: 1127969 - RNA, 24 nt, Human
uuguuuguuuuuuugagacacagu

SEQ ID NO: 1127970 - RNA, 18 nt, Human
uuuuguaguuuuaguaga

SEQ ID NO: 1127971 - RNA, 20 nt, Human
uuuuuguaguuuuaguagag

SEQ ID NO: 1127972 - RNA, 21 nt, Human
cacugauuaggggugcggagg

SEQ ID NO: 1127973 - RNA, 22 nt, Human
ccucugugaguucagcaaggau

SEQ ID NO: 1127974 - RNA, 18 nt, Human
ugauuugaagcugugauu

SEQ ID NO: 1127975 - RNA, 24 nt, Human
ugugucucaucaugucacacugau

SEQ ID NO: 1127976 - RNA, 19 nt, Human
aaaauucaacuacuaaagg

SEQ ID NO: 1127977 - RNA, 19 nt, Human
aaacgagcugacacaaacc

SEQ ID NO: 1127978 - RNA, 21 nt, Human
aaacgagcugacacaaaccca

SEQ ID NO: 1127979 - RNA, 25 nt, Human
aaacgagcugacacaaaccggaccc

SEQ ID NO: 1127980 - RNA, 21 nt, Human
aaacucacagacaucgcacca

SEQ ID NO: 1127981 - RNA, 21 nt, Human
aaaguccuccucaccaugcuu

SEQ ID NO: 1127982 - RNA, 22 nt, Human
acaagcccggcuauccccaaau

SEQ ID NO: 1127983 - RNA, 24 nt, Human
acccuauacugcuccucgcuccuc

SEQ ID NO: 1127984 - RNA, 24 nt, Human
acugcagcagcaugcugaggccca

SEQ ID NO: 1127985 - RNA, 25 nt, Human
agagcccccucagcccugaugucuc

SEQ ID NO: 1127986 - RNA, 19 nt, Human
agauaacagcaagaugaga

SEQ ID NO: 1127987 - RNA, 21 nt, Human
agauaacagcaagaugagaca

SEQ ID NO: 1127988 - RNA, 20 nt, Human
agcacgugucacgaggaagu

SEQ ID NO: 1127989 - RNA, 21 nt, Human
agcacgugucacgaggaaguu

SEQ ID NO: 1127990 - RNA, 21 nt, Human
agccagagcccccucagcccu

SEQ ID NO: 1127991 - RNA, 19 nt, Human
aggauccauccuccugccu

SEQ ID NO: 1127992 - RNA, 20 nt, Human
aggcagguggagcacaggga

SEQ ID NO: 1127993 - RNA, 21 nt, Human
aggcagguggagcacagggag

SEQ ID NO: 1127994 - RNA, 22 nt, Human
aggcagguggagcacagggagg

SEQ ID NO: 1127995 - RNA, 18 nt, Human
aggccaggcgccugccac

SEQ ID NO: 1127996 - RNA, 19 nt, Human
auccauccuccugccucca

SEQ ID NO: 1127997 - RNA, 19 nt, Human
caaggaugcugcaggcaac

SEQ ID NO: 1127998 - RNA, 24 nt, Human
caaggccaggcgccugccacgcuu

SEQ ID NO: 1127999 - RNA, 23 nt, Human
caaucaaaguccuccucaccaug

SEQ ID NO: 1128000 - RNA, 21 nt, Human
caccaugcuuuagcacguguc

SEQ ID NO: 1128001 - RNA, 22 nt, Human
cacccagggaaacagagaaaga

SEQ ID NO: 1128002 - RNA, 19 nt, Human
caccgcucacaagcccggc

SEQ ID NO: 1128003 - RNA, 21 nt, Human
caccugcaagguccuggcagc

SEQ ID NO: 1128004 - RNA, 22 nt, Human
cacugcagcugcugacucugcc

SEQ ID NO: 1128005 - RNA, 20 nt, Human
cagagaaagaggcuuccuuc

SEQ ID NO: 1128006 - RNA, 19 nt, Human
cagcaagaugagacacgau

SEQ ID NO: 1128007 - RNA, 19 nt, Human
cagcagugaccugaaccgc

SEQ ID NO: 1128008 - RNA, 24 nt, Human
cagcccacacgcugggcaggucaa

SEQ ID NO: 1128009 - RNA, 22 nt, Human
caggaaaugcuccuccuccucc

SEQ ID NO: 1128010 - RNA, 22 nt, Human
cagggccuggagaugcuaaaug

SEQ ID NO: 1128011 - RNA, 20 nt, Human
cauggacccuauacugcucc

SEQ ID NO: 1128012 - RNA, 19 nt, Human
ccacaaagaaggcccgcag

SEQ ID NO: 1128013 - RNA, 21 nt, Human
ccaccugccagcccccucacc

SEQ ID NO: 1128014 - RNA, 24 nt, Human
cccaaucaaaguccuccucaccau

SEQ ID NO: 1128015 - RNA, 22 nt, Human
cccaucuccccccaggccccaa

SEQ ID NO: 1128016 - RNA, 25 nt, Human
ccccaggccccaaggaaaggguccc

SEQ ID NO: 1128017 - RNA, 23 nt, Human
ccccaucuccccccaggccccaa

SEQ ID NO: 1128018 - RNA, 20 nt, Human
cccccaaaacacgccucggg

SEQ ID NO: 1128019 - RNA, 25 nt, Human
cccccaaaacacgccucggggugaa

SEQ ID NO: 1128020 - RNA, 24 nt, Human
cccccaggccccaaggaaaggguc

SEQ ID NO: 1128021 - RNA, 22 nt, Human
ccccuccuccuucucagccucc

SEQ ID NO: 1128022 - RNA, 18 nt, Human
cccuccuccuucucagcc

SEQ ID NO: 1128023 - RNA, 19 nt, Human
ccgacuuugcaauccuguc

SEQ ID NO: 1128024 - RNA, 24 nt, Human
ccgcgcaaguccuggcagcugcgc

SEQ ID NO: 1128025 - RNA, 22 nt, Human
ccuagcggcggugcgcuccucc

SEQ ID NO: 1128026 - RNA, 19 nt, Human
ccucagggagccccuccuc

SEQ ID NO: 1128027 - RNA, 18 nt, Human
ccuccaaccccugcccug

SEQ ID NO: 1128028 - RNA, 22 nt, Human
ccuccagcucugggacugccac

SEQ ID NO: 1128029 - RNA, 20 nt, Human
ccuccuucucagccuccugc

SEQ ID NO: 1128030 - RNA, 22 nt, Human
ccuccuucucagccuccugcag

SEQ ID NO: 1128031 - RNA, 25 nt, Human
ccugcagcagugaccugaaccgcuc

SEQ ID NO: 1128032 - RNA, 18 nt, Human
ccugccagcccccucacc

SEQ ID NO: 1128033 - RNA, 26 nt, Human
cgaagcaaacgagcugacacaaaccc

SEQ ID NO: 1128034 - RNA, 19 nt, Human
cgacuuugcaauccugucc

SEQ ID NO: 1128035 - RNA, 21 nt, Human
cgcaaguccuggcagcugcgc

SEQ ID NO: 1128036 - RNA, 19 nt, Human
cgcccugccugccugcagc

SEQ ID NO: 1128037 - RNA, 19 nt, Human
cgggguggagccccaucuc

SEQ ID NO: 1128038 - RNA, 23 nt, Human
cuaaaugggguuagccaccugcc

SEQ ID NO: 1128039 - RNA, 20 nt, Human
cuauacugcuccucgcuccu

SEQ ID NO: 1128040 - RNA, 22 nt, Human
cucacaagcccggcuaucccca

SEQ ID NO: 1128041 - RNA, 19 nt, Human
cuccaaccccugcccugcu

SEQ ID NO: 1128042 - RNA, 21 nt, Human
cuccuccgccuugauuuuggc

SEQ ID NO: 1128043 - RNA, 20 nt, Human
cugacucugccuggccaugc

SEQ ID NO: 1128044 - RNA, 19 nt, Human
cugcuacaagcuuugcaaa

SEQ ID NO: 1128045 - RNA, 23 nt, Human
cugcuccucgcuccuccaacccc

SEQ ID NO: 1128046 - RNA, 19 nt, Human
cuucccauggagaugagga

SEQ ID NO: 1128047 - RNA, 24 nt, Human
gacacuggaggguggccagggcag

SEQ ID NO: 1128048 - RNA, 19 nt, Human
gaccugaaccgcucagugg

SEQ ID NO: 1128049 - RNA, 18 nt, Human
gagaaagaggcuuccuuc

SEQ ID NO: 1128050 - RNA, 20 nt, Human
gaggagggaaagagcuagag

SEQ ID NO: 1128051 - RNA, 19 nt, Human
gccagggcagggggaagag

SEQ ID NO: 1128052 - RNA, 24 nt, Human
gccccaucuccccccaggccccaa

SEQ ID NO: 1128053 - RNA, 19 nt, Human
gcccccucacccagggaaa

SEQ ID NO: 1128054 - RNA, 24 nt, Human
gcccugccugccugcagcaaggac

SEQ ID NO: 1128055 - RNA, 21 nt, Human
gcgaugcuucuucuccagcuc

SEQ ID NO: 1128056 - RNA, 21 nt, Human
gcuccucgcuccuccaacccc

SEQ ID NO: 1128057 - RNA, 20 nt, Human
gcugaaaggcuucaucugga

SEQ ID NO: 1128058 - RNA, 19 nt, Human
gcuucacucuacugccugc

SEQ ID NO: 1128059 - RNA, 21 nt, Human
ggaaaugggaggagggaaaga

SEQ ID NO: 1128060 - RNA, 20 nt, Human
ggacucugugagguggguuu

SEQ ID NO: 1128061 - RNA, 19 nt, Human
ggcagcggcgcacgucacc

SEQ ID NO: 1128062 - RNA, 21 nt, Human
ggcagggggaagaggccaggu

SEQ ID NO: 1128063 - RNA, 20 nt, Human
ggccaggcgccugccacgcu

SEQ ID NO: 1128064 - RNA, 19 nt, Human
ggccagguggacacacgga

SEQ ID NO: 1128065 - RNA, 19 nt, Human
gucaccgcgcaaguccugg

SEQ ID NO: 1128066 - RNA, 21 nt, Human
gucauucccacccauggaccc

SEQ ID NO: 1128067 - RNA, 21 nt, Human
guccaucacgugucccuucca

SEQ ID NO: 1128068 - RNA, 21 nt, Human
guccccagugcugaguuucug

SEQ ID NO: 1128069 - RNA, 19 nt, Human
guccccgacuuugcaaucc

SEQ ID NO: 1128070 - RNA, 19 nt, Human
gucccuuccacacugcagc

SEQ ID NO: 1128071 - RNA, 19 nt, Human
guggagccccaucuccccc

SEQ ID NO: 1128072 - RNA, 25 nt, Human
uagguccuggccgcggugggcuucu

SEQ ID NO: 1128073 - RNA, 20 nt, Human
uauccccaaaucucaacaac

SEQ ID NO: 1128074 - RNA, 20 nt, Human
ucaauggucccaaucaaagu

SEQ ID NO: 1128075 - RNA, 19 nt, Human
ucacugcagcagcaugcug

SEQ ID NO: 1128076 - RNA, 21 nt, Human
ucagggagccccuccuccuuc

SEQ ID NO: 1128077 - RNA, 19 nt, Human
uccacaaagaaggcccgca

SEQ ID NO: 1128078 - RNA, 21 nt, Human
ucccaaucaaaguccuccuca

SEQ ID NO: 1128079 - RNA, 18 nt, Human
uccccaaaucucaacaac

SEQ ID NO: 1128080 - RNA, 24 nt, Human
ucccuggcagccacacgcugacac

SEQ ID NO: 1128081 - RNA, 20 nt, Human
uccgagaccgccugcagcag

SEQ ID NO: 1128082 - RNA, 21 nt, Human
ugagccagcccacacgcuggg

SEQ ID NO: 1128083 - RNA, 18 nt, Human
ugcccugcuacgucgggg

SEQ ID NO: 1128084 - RNA, 22 nt, Human
ugccuccagcucugggacugcc

SEQ ID NO: 1128085 - RNA, 19 nt, Human
ugcuacaagcuuugcaaaa

SEQ ID NO: 1128086 - RNA, 23 nt, Human
uggcagggccuggagaugcuaaa

SEQ ID NO: 1128087 - RNA, 23 nt, Human
uggggucagccagcucguccucc

SEQ ID NO: 1128088 - RNA, 19 nt, Human
uguagauggacccaaggcc

SEQ ID NO: 1128089 - RNA, 20 nt, Human
uguagauggacccaaggcca

SEQ ID NO: 1128090 - RNA, 20 nt, Human
uguccccgacuuugcaaucc

SEQ ID NO: 1128091 - RNA, 20 nt, Human
uucuccagcuccgagaccgc

SEQ ID NO: 1128092 - RNA, 21 nt, Human
uuugcagcccccaaaacacgc

SEQ ID NO: 1128093 - RNA, 22 nt, Human
aaacaucccggaaaaagaaccc

SEQ ID NO: 1128094 - RNA, 18 nt, Human
aagcauggucaaaaucgc

SEQ ID NO: 1128095 - RNA, 22 nt, Human
aaugacaggggugaagggcaga

SEQ ID NO: 1128096 - RNA, 19 nt, Human
acagaacaccacuaaugaa

SEQ ID NO: 1128097 - RNA, 18 nt, Human
acagacgugugccaccgc

SEQ ID NO: 1128098 - RNA, 20 nt, Human
accucaagcccagcaacagc

SEQ ID NO: 1128099 - RNA, 20 nt, Human
acuccacaaguugagagaag

SEQ ID NO: 1128100 - RNA, 18 nt, Human
acugcuccucucucugcc

SEQ ID NO: 1128101 - RNA, 19 nt, Human
agaaaaugaagagagcagg

SEQ ID NO: 1128102 - RNA, 18 nt, Human
agacagagucucgcuaug

SEQ ID NO: 1128103 - RNA, 18 nt, Human
agagaaggucaacagucc

SEQ ID NO: 1128104 - RNA, 18 nt, Human
agccauccucccaucuca

SEQ ID NO: 1128105 - RNA, 22 nt, Human
agcugugugggucuccgucugg

SEQ ID NO: 1128106 - RNA, 18 nt, Human
aggcagggucugucagug

SEQ ID NO: 1128107 - RNA, 20 nt, Human
aggccccgcagccucugccc

SEQ ID NO: 1128108 - RNA, 20 nt, Human
agggggcuugggcuggucgu

SEQ ID NO: 1128109 - RNA, 23 nt, Human
aguagcugggacuacagacgugu

SEQ ID NO: 1128110 - RNA, 20 nt, Human
agugauaaaaagagcccuua

SEQ ID NO: 1128111 - RNA, 22 nt, Human
agugguggugcuggugccaagg

SEQ ID NO: 1128112 - RNA, 19 nt, Human
auaaaauauacauggaccc

SEQ ID NO: 1128113 - RNA, 18 nt, Human
auaccuuccagaggcacc

SEQ ID NO: 1128114 - RNA, 18 nt, Human
auagugcacugcaaccuc

SEQ ID NO: 1128115 - RNA, 24 nt, Human
aucccaccuccauuuacuccucug

SEQ ID NO: 1128116 - RNA, 22 nt, Human
aucccgccaccaagccagccug

SEQ ID NO: 1128117 - RNA, 21 nt, Human
aucuaucugugagaucuccau

SEQ ID NO: 1128118 - RNA, 23 nt, Human
aucuuacaacccaaccauggacu

SEQ ID NO: 1128119 - RNA, 24 nt, Human
aucuuacaacccaaccauggacua

SEQ ID NO: 1128120 - RNA, 21 nt, Human
auguagcaggaguuucaucca

SEQ ID NO: 1128121 - RNA, 19 nt, Human
auuacacagcuuagauucc

SEQ ID NO: 1128122 - RNA, 19 nt, Human
auuucuuccucuccuaauc

SEQ ID NO: 1128123 - RNA, 21 nt, Human
caaaccugagcaccuaacuag

SEQ ID NO: 1128124 - RNA, 20 nt, Human
caaaguaacccaaaccuucc

SEQ ID NO: 1128125 - RNA, 24 nt, Human
caaccucaaacuccugggcucaag

SEQ ID NO: 1128126 - RNA, 19 nt, Human
caagagcacaaaccugagc

SEQ ID NO: 1128127 - RNA, 21 nt, Human
caagcacacaggugucaccac

SEQ ID NO: 1128128 - RNA, 19 nt, Human
cacaaaccugagcaccuaa

SEQ ID NO: 1128129 - RNA, 22 nt, Human
cacagcuuagauuccuaaaccu

SEQ ID NO: 1128130 - RNA, 19 nt, Human
cacaugguggugggauggc

SEQ ID NO: 1128131 - RNA, 21 nt, Human
cacugcaaccucaaacuccug

SEQ ID NO: 1128132 - RNA, 23 nt, Human
cacugcaaccucaaacuccuggg

SEQ ID NO: 1128133 - RNA, 24 nt, Human
cagagucucgcuauguugcccagg

SEQ ID NO: 1128134 - RNA, 21 nt, Human
cagccucuuuuucuauguccc

SEQ ID NO: 1128135 - RNA, 22 nt, Human
cagcucacaaguggcaaagcca

SEQ ID NO: 1128136 - RNA, 23 nt, Human
cagcuccuggccccagcaggucc

SEQ ID NO: 1128137 - RNA, 21 nt, Human
caggauauagccccccccgcu

SEQ ID NO: 1128138 - RNA, 23 nt, Human
caguggugcuucaggaguuccaa

SEQ ID NO: 1128139 - RNA, 19 nt, Human
ccaagccagccugugaaaa

SEQ ID NO: 1128140 - RNA, 22 nt, Human
ccacagagccaguguagaagca

SEQ ID NO: 1128141 - RNA, 24 nt, Human
ccacuucugggucgcuaaggcgga

SEQ ID NO: 1128142 - RNA, 22 nt, Human
ccaggauauagccccccccgcu

SEQ ID NO: 1128143 - RNA, 21 nt, Human
cccaaaccuuccaccugccaa

SEQ ID NO: 1128144 - RNA, 21 nt, Human
cccacacaggaaguuuuggau

SEQ ID NO: 1128145 - RNA, 27 nt, Human
cccacagccgggugcaggccggggucc

SEQ ID NO: 1128146 - RNA, 19 nt, Human
cccacgugcagggagcagc

SEQ ID NO: 1128147 - RNA, 22 nt, Human
cccgcagccucugcccacagcc

SEQ ID NO: 1128148 - RNA, 24 nt, Human
cccuaccugcuuuuucucucccug

SEQ ID NO: 1128149 - RNA, 20 nt, Human
cccucuuccuccucuucauc

SEQ ID NO: 1128150 - RNA, 24 nt, Human
ccucccaucucagccugcugagua

SEQ ID NO: 1128151 - RNA, 20 nt, Human
ccucccugccuccuuuaauc

SEQ ID NO: 1128152 - RNA, 19 nt, Human
ccuccuccuuccccuccuc

SEQ ID NO: 1128153 - RNA, 19 nt, Human
ccuccucuucaucuuccuc

SEQ ID NO: 1128154 - RNA, 25 nt, Human
ccucucaccucccugccuccuuuaa

SEQ ID NO: 1128155 - RNA, 20 nt, Human
ccucugggcaaaaucuggag

SEQ ID NO: 1128156 - RNA, 20 nt, Human
ccugggcucaagccauccuc

SEQ ID NO: 1128157 - RNA, 25 nt, Human
cgcuauguugcccaggcugcagugc

SEQ ID NO: 1128158 - RNA, 21 nt, Human
cgugugccaccgcacccgagu

SEQ ID NO: 1128159 - RNA, 20 nt, Human
cuauguugcccaggcugcag

SEQ ID NO: 1128160 - RNA, 25 nt, Human
cucaagccauccucccaucucagcc

SEQ ID NO: 1128161 - RNA, 24 nt, Human
cucagccugcugaguagcugggac

SEQ ID NO: 1128162 - RNA, 21 nt, Human
cuccgcgggcuacugcuccuc

SEQ ID NO: 1128163 - RNA, 23 nt, Human
cuccugggcucaagccauccucc

SEQ ID NO: 1128164 - RNA, 20 nt, Human
cucucaccucccugccuccu

SEQ ID NO: 1128165 - RNA, 20 nt, Human
cucucccuucucccucuucc

SEQ ID NO: 1128166 - RNA, 21 nt, Human
cugaagccuggagaguugagg

SEQ ID NO: 1128167 - RNA, 23 nt, Human
cugcaaccucaaacuccugggcu

SEQ ID NO: 1128168 - RNA, 19 nt, Human
cuggccccuaauuugaccc

SEQ ID NO: 1128169 - RNA, 24 nt, Human
gaagcaagcacacaggugucacca

SEQ ID NO: 1128170 - RNA, 24 nt, Human
gagcagccuuuagagccagcagcu

SEQ ID NO: 1128171 - RNA, 25 nt, Human
gaguagcugggacuacagacgugug

SEQ ID NO: 1128172 - RNA, 22 nt, Human
gaguuggggugggugggaggcu

SEQ ID NO: 1128173 - RNA, 21 nt, Human
gaucugcuuucagucuucccc

SEQ ID NO: 1128174 - RNA, 28 nt, Human
gauggugaggguggcgugggggaagucc

SEQ ID NO: 1128175 - RNA, 24 nt, Human
gcacugcaaccucaaacuccuggg

SEQ ID NO: 1128176 - RNA, 19 nt, Human
gcagacacccaaacaaagc

SEQ ID NO: 1128177 - RNA, 18 nt, Human
gccaccgcacccgaguua

SEQ ID NO: 1128178 - RNA, 20 nt, Human
gccacucucccuucucccuc

SEQ ID NO: 1128179 - RNA, 21 nt, Human
gccacucucccuucucccucu

SEQ ID NO: 1128180 - RNA, 22 nt, Human
gcguuugggguuugcccagcug

SEQ ID NO: 1128181 - RNA, 24 nt, Human
gcuacugcuccucucucugccacu

SEQ ID NO: 1128182 - RNA, 19 nt, Human
ggaaauggggaacuuugga

SEQ ID NO: 1128183 - RNA, 22 nt, Human
ggaggaacacccaaguccucgg

SEQ ID NO: 1128184 - RNA, 20 nt, Human
ggaguuucauccaagagcac

SEQ ID NO: 1128185 - RNA, 20 nt, Human
ggcccuccuccuuccccucc

SEQ ID NO: 1128186 - RNA, 24 nt, Human
ggcugaagccuggagaguugaggg

SEQ ID NO: 1128187 - RNA, 19 nt, Human
gggcugaggugcccacgug

SEQ ID NO: 1128188 - RNA, 24 nt, Human
ggggaaauggggaacuuuggaagg

SEQ ID NO: 1128189 - RNA, 24 nt, Human
ggggugggugggaggcucacagaa

SEQ ID NO: 1128190 - RNA, 21 nt, Human
ggugcuucaggaguuccaaag

SEQ ID NO: 1128191 - RNA, 19 nt, Human
guaaagaaaacaucccgga

SEQ ID NO: 1128192 - RNA, 18 nt, Human
guggcauccacaguuaga

SEQ ID NO: 1128193 - RNA, 20 nt, Human
guggcgugggugagaggaga

SEQ ID NO: 1128194 - RNA, 21 nt, Human
gugggugagaggagacuuggc

SEQ ID NO: 1128195 - RNA, 19 nt, Human
gugguggugcuggugccaa

SEQ ID NO: 1128196 - RNA, 20 nt, Human
gugugccaccgcacccgagu

SEQ ID NO: 1128197 - RNA, 22 nt, Human
guucgguucauuuuaggccccg

SEQ ID NO: 1128198 - RNA, 26 nt, Human
guuuuggauuucuuccucuccuaauc

SEQ ID NO: 1128199 - RNA, 23 nt, Human
uagaaugacaggggugaagggca

SEQ ID NO: 1128200 - RNA, 26 nt, Human
uagagagaggaauggaagguggggcc

SEQ ID NO: 1128201 - RNA, 22 nt, Human
uagcaaggaauuucuggaaaag

SEQ ID NO: 1128202 - RNA, 18 nt, Human
uagccccccccgcuguuc

SEQ ID NO: 1128203 - RNA, 21 nt, Human
uaggccccgcagccucugccc

SEQ ID NO: 1128204 - RNA, 23 nt, Human
uauagccccccccgcuguuccaa

SEQ ID NO: 1128205 - RNA, 19 nt, Human
uauguugcccaggcugcag

SEQ ID NO: 1128206 - RNA, 25 nt, Human
ucaagccauccucccaucucagccu

SEQ ID NO: 1128207 - RNA, 19 nt, Human
ucaagcccagcaacagcgg

SEQ ID NO: 1128208 - RNA, 18 nt, Human
ucacaaguggcaaagcca

SEQ ID NO: 1128209 - RNA, 23 nt, Human
ucacaaguggcaaagccagugga

SEQ ID NO: 1128210 - RNA, 21 nt, Human
ucacuccuuacucauucacuc

SEQ ID NO: 1128211 - RNA, 19 nt, Human
ucagaaaaugaagagagca

SEQ ID NO: 1128212 - RNA, 20 nt, Human
ucagccugcugaguagcugg

SEQ ID NO: 1128213 - RNA, 23 nt, Human
ucagccugcugaguagcugggac

SEQ ID NO: 1128214 - RNA, 18 nt, Human
ucaggaaagaaaggccca

SEQ ID NO: 1128215 - RNA, 19 nt, Human
ucaggaaagaaaggcccag

SEQ ID NO: 1128216 - RNA, 24 nt, Human
ucaggccugccaggcagggucugu

SEQ ID NO: 1128217 - RNA, 20 nt, Human
ucaguccacagugagaggcc

SEQ ID NO: 1128218 - RNA, 22 nt, Human
ucauccaagagcacaaaccuga

SEQ ID NO: 1128219 - RNA, 21 nt, Human
uccaaaggacccauccaucca

SEQ ID NO: 1128220 - RNA, 24 nt, Human
uccaagagcacaaaccugagcacc

SEQ ID NO: 1128221 - RNA, 28 nt, Human
uccacaguuagaauaagaaccggggucc

SEQ ID NO: 1128222 - RNA, 30 nt, Human
uccagaggcaccugcccucugacucuggaa

SEQ ID NO: 1128223 - RNA, 18 nt, Human
uccauccucucaguccac

SEQ ID NO: 1128224 - RNA, 19 nt, Human
uccauuuacuccucugggc

SEQ ID NO: 1128225 - RNA, 20 nt, Human
ucccaccuccauuuacuccc

SEQ ID NO: 1128226 - RNA, 20 nt, Human
ucccggauaauuauucugga

SEQ ID NO: 1128227 - RNA, 18 nt, Human
uccuccuuccccuccucu

SEQ ID NO: 1128228 - RNA, 18 nt, Human
uccucucaguccacagug

SEQ ID NO: 1128229 - RNA, 18 nt, Human
uccucugccccucccccu

SEQ ID NO: 1128230 - RNA, 19 nt, Human
uccucugggcaaaaucugg

SEQ ID NO: 1128231 - RNA, 18 nt, Human
uccugggcucaagccauc

SEQ ID NO: 1128232 - RNA, 24 nt, Human
uccugggcucaagccauccuccca

SEQ ID NO: 1128233 - RNA, 20 nt, Human
ucucaaaguaacccaaaccu

SEQ ID NO: 1128234 - RNA, 20 nt, Human
ucucccucuuccuccucuuc

SEQ ID NO: 1128235 - RNA, 19 nt, Human
ucucgcuauguugcccagg

SEQ ID NO: 1128236 - RNA, 23 nt, Human
ucucgcuauguugcccaggcugc

SEQ ID NO: 1128237 - RNA, 24 nt, Human
ucucgcuauguugcccaggcugca

SEQ ID NO: 1128238 - RNA, 18 nt, Human
ucugugagaucuccauca

SEQ ID NO: 1128239 - RNA, 21 nt, Human
ucuuccuccucuucaucuucc

SEQ ID NO: 1128240 - RNA, 24 nt, Human
ugaaaucuaucugugagaucucca

SEQ ID NO: 1128241 - RNA, 19 nt, Human
ugaaaugagccacuucugc

SEQ ID NO: 1128242 - RNA, 18 nt, Human
ugcaggcccuccuccuuc

SEQ ID NO: 1128243 - RNA, 22 nt, Human
ugccaaggggcuggccacagag

SEQ ID NO: 1128244 - RNA, 25 nt, Human
ugcuuggagcucucuggugcuagga

SEQ ID NO: 1128245 - RNA, 19 nt, Human
uggaaaggacuuggggcag

SEQ ID NO: 1128246 - RNA, 23 nt, Human
uggaaaggacuuggggcagcucc

SEQ ID NO: 1128247 - RNA, 21 nt, Human
ugggacuacagacgugugcca

SEQ ID NO: 1128248 - RNA, 23 nt, Human
ugggacuacagacgugugccacc

SEQ ID NO: 1128249 - RNA, 24 nt, Human
ugggacuacagacgugugccaccg

SEQ ID NO: 1128250 - RNA, 19 nt, Human
ugggcuggucguaaacacu

SEQ ID NO: 1128251 - RNA, 19 nt, Human
uggggugggugggaggcuc

SEQ ID NO: 1128252 - RNA, 19 nt, Human
uggugccaaggggcuggcc

SEQ ID NO: 1128253 - RNA, 18 nt, Human
uggugcuggugccaaggg

SEQ ID NO: 1128254 - RNA, 24 nt, Human
uucacagauguggaaccucaagcc

SEQ ID NO: 1128255 - RNA, 19 nt, Human
uuccuuguagagcucuggc

SEQ ID NO: 1128256 - RNA, 19 nt, Human
uuggagcucucuggugcua

SEQ ID NO: 1128257 - RNA, 18 nt, Human
uuugacccacacaggaag

SEQ ID NO: 1128258 - RNA, 21 nt, Human
uuugcccaaggucacgcagcu

SEQ ID NO: 1128259 - RNA, 23 nt, Human
uuuggauuucuuccucuccuaau

SEQ ID NO: 1128260 - RNA, 21 nt, Human
ccugcacaucucaucuaugug

SEQ ID NO: 1128261 - RNA, 21 nt, Human
uguguguuuggucacauugag

SEQ ID NO: 1128262 - RNA, 21 nt, Human
aaggacuagugcaaacugaaa

SEQ ID NO: 1128263 - RNA, 25 nt, Human
agccaaagacacauauaaaaauaag

SEQ ID NO: 1128264 - RNA, 22 nt, Human
aggcugagccuuucgaccacaa

SEQ ID NO: 1128265 - RNA, 22 nt, Human
agggauccaaaucucagacacc

SEQ ID NO: 1128266 - RNA, 23 nt, Human
agguaucaagggagcucaaaggg

SEQ ID NO: 1128267 - RNA, 27 nt, Human
agugauggggaaacagaagggagggcc

SEQ ID NO: 1128268 - RNA, 18 nt, Human
auggagcucugagcccag

SEQ ID NO: 1128269 - RNA, 23 nt, Human
caagacugaagguaaaggacuag

SEQ ID NO: 1128270 - RNA, 21 nt, Human
cauguccacagacuucaugua

SEQ ID NO: 1128271 - RNA, 23 nt, Human
ccuccaaaguccugagaaaucaa

SEQ ID NO: 1128272 - RNA, 20 nt, Human
gacacauauaaaaauaagau

SEQ ID NO: 1128273 - RNA, 18 nt, Human
gcagcagcuucuaaccaa

SEQ ID NO: 1128274 - RNA, 25 nt, Human
guagagguaucaagggagcucaaag

SEQ ID NO: 1128275 - RNA, 24 nt, Human
gucagagcccuccaaaguccugag

SEQ ID NO: 1128276 - RNA, 18 nt, Human
gugauggggaaacagacc

SEQ ID NO: 1128277 - RNA, 18 nt, Human
guugcagcagcuucuaac

SEQ ID NO: 1128278 - RNA, 21 nt, Human
guuuccuaccugugucaccuc

SEQ ID NO: 1128279 - RNA, 19 nt, Human
uaaaaaagcuucccaaugc

SEQ ID NO: 1128280 - RNA, 25 nt, Human
uauaaugaugggagagggcaguugc

SEQ ID NO: 1128281 - RNA, 18 nt, Human
ucaaaauaaagaucaguu

SEQ ID NO: 1128282 - RNA, 19 nt, Human
ucagugcagcgaucccuuc

SEQ ID NO: 1128283 - RNA, 18 nt, Human
uccaaaucucagacacca

SEQ ID NO: 1128284 - RNA, 21 nt, Human
uccaagacugaagguaaagga

SEQ ID NO: 1128285 - RNA, 21 nt, Human
ugaugggagagggcaguugca

SEQ ID NO: 1128286 - RNA, 20 nt, Human
ugggagagggcaguugcagc

SEQ ID NO: 1128287 - RNA, 21 nt, Human
ugggagagggcaguugcagca

SEQ ID NO: 1128288 - RNA, 24 nt, Human
uggugucagagcccuccaaagucc

SEQ ID NO: 1128289 - RNA, 21 nt, Human
uguucuucacaggcugcuguu

SEQ ID NO: 1128290 - RNA, 22 nt, Human
uguuuccuaccugugucaccuc

SEQ ID NO: 1128291 - RNA, 24 nt, Human
uugcagcagcuucuaaccaagugu

SEQ ID NO: 1128292 - RNA, 18 nt, Human
uuggagguaggaugucca

SEQ ID NO: 1128293 - RNA, 22 nt, Human
ccaagccacucauuuccuuugu

SEQ ID NO: 1128294 - RNA, 21 nt, Human
ccuugauuuggaaacucuugg

SEQ ID NO: 1128295 - RNA, 20 nt, Human
gccucccauacuucaguagc

SEQ ID NO: 1128296 - RNA, 24 nt, Human
gccucccauacuucaguagcucca

SEQ ID NO: 1128297 - RNA, 22 nt, Human
gccuugauuuggaaacucuugg

SEQ ID NO: 1128298 - RNA, 25 nt, Human
gccuugauuuggaaacucuuggugu

SEQ ID NO: 1128299 - RNA, 23 nt, Human
guaggcguugcugccggugucag

SEQ ID NO: 1128300 - RNA, 21 nt, Human
uacagaucacauugagguagg

SEQ ID NO: 1128301 - RNA, 22 nt, Human
ucagaagccucccauacuucag

SEQ ID NO: 1128302 - RNA, 23 nt, Human
ucagaagccucccauacuucagu

SEQ ID NO: 1128303 - RNA, 19 nt, Human
uccuuuguaggcauaggga

SEQ ID NO: 1128304 - RNA, 18 nt, Human
ugauuuggaaacucuugg

SEQ ID NO: 1128305 - RNA, 28 nt, Human
aaaagaaagaaguuccuaggaaacagaa

SEQ ID NO: 1128306 - RNA, 23 nt, Human
aaacuccugaccucaggcaaucc

SEQ ID NO: 1128307 - RNA, 26 nt, Human
aaacugaaauacaggauguuauaauc

SEQ ID NO: 1128308 - RNA, 22 nt, Human
aaagaaauauggugugugaaaa

SEQ ID NO: 1128309 - RNA, 22 nt, Human
aaagacaacaagggaaaauggc

SEQ ID NO: 1128310 - RNA, 24 nt, Human
aaagugcugggauuacaggcguga

SEQ ID NO: 1128311 - RNA, 20 nt, Human
aaccuccaccucccugguuc

SEQ ID NO: 1128312 - RNA, 23 nt, Human
aaggagcaugguguaugucagag

SEQ ID NO: 1128313 - RNA, 19 nt, Human
aagugcugggauuacaggc

SEQ ID NO: 1128314 - RNA, 19 nt, Human
aagugcugggauuacaggc

SEQ ID NO: 1128315 - RNA, 26 nt, Human
aagugcugggauuacaggcgugagcc

SEQ ID NO: 1128316 - RNA, 24 nt, Human
acccagcuaauuuuuuuguauuuu

SEQ ID NO: 1128317 - RNA, 23 nt, Human
acccaggcuggagugcaguggug

SEQ ID NO: 1128318 - RNA, 23 nt, Human
acuagucucaaacuccugaccuc

SEQ ID NO: 1128319 - RNA, 21 nt, Human
acuuugaguaggugggaaaga

SEQ ID NO: 1128320 - RNA, 21 nt, Human
agaaaagaaagaaguuccuag

SEQ ID NO: 1128321 - RNA, 20 nt, Human
agaauuacaaacuagcccua

SEQ ID NO: 1128322 - RNA, 18 nt, Human
agcaugguguaugucaga

SEQ ID NO: 1128323 - RNA, 24 nt, Human
aggaaaaaggagcaugguguaugu

SEQ ID NO: 1128324 - RNA, 22 nt, Human
aggauguuauaaucuccugaaa

SEQ ID NO: 1128325 - RNA, 22 nt, Human
aggcaauccaccugccucggcc

SEQ ID NO: 1128326 - RNA, 24 nt, Human
aggcaauccaccugccucggccuc

SEQ ID NO: 1128327 - RNA, 21 nt, Human
aggcguaagccaccauaccca

SEQ ID NO: 1128328 - RNA, 25 nt, Human
aggcuggagugcaguggugcgaucu

SEQ ID NO: 1128329 - RNA, 22 nt, Human
aguagagauaguguuucaccau

SEQ ID NO: 1128330 - RNA, 19 nt, Human
aguagcugggauuauaggc

SEQ ID NO: 1128331 - RNA, 21 nt, Human
agugcaguggugcgaucucag

SEQ ID NO: 1128332 - RNA, 23 nt, Human
agugcaguggugcgaucucagcu

SEQ ID NO: 1128333 - RNA, 24 nt, Human
agugcaguggugcgaucucagcuc

SEQ ID NO: 1128334 - RNA, 18 nt, Human
agugcugggauuacaggc

SEQ ID NO: 1128335 - RNA, 24 nt, Human
aguggugcgaucucagcucacugc

SEQ ID NO: 1128336 - RNA, 22 nt, Human
aguguuucaccauguuggccag

SEQ ID NO: 1128337 - RNA, 24 nt, Human
auaguguuucaccauguuggccag

SEQ ID NO: 1128338 - RNA, 24 nt, Human
auguuauaaucuccugaaaugcua

SEQ ID NO: 1128339 - RNA, 24 nt, Human
caaagugcugggauuacaggcgug

SEQ ID NO: 1128340 - RNA, 21 nt, Human
caacaguaguccagaucuuga

SEQ ID NO: 1128341 - RNA, 21 nt, Human
caccauguuggccagacuagu

SEQ ID NO: 1128342 - RNA, 24 nt, Human
caccauguuggccagacuagucuc

SEQ ID NO: 1128343 - RNA, 27 nt, Human
caccauguuggccagacuagucucaaa

SEQ ID NO: 1128344 - RNA, 21 nt, Human
cacccaggcuggagugcagug

SEQ ID NO: 1128345 - RNA, 23 nt, Human
caccugccucggccucccaaagu

SEQ ID NO: 1128346 - RNA, 20 nt, Human
cagccuccugaguagcuggg

SEQ ID NO: 1128347 - RNA, 24 nt, Human
cauguuggccagacuagucucaaa

SEQ ID NO: 1128348 - RNA, 20 nt, Human
ccaaagugcugggauuacag

SEQ ID NO: 1128349 - RNA, 22 nt, Human
ccaaagugcugggauuacaggc

SEQ ID NO: 1128350 - RNA, 22 nt, Human
ccaaagugcugggauuacaggc

SEQ ID NO: 1128351 - RNA, 24 nt, Human
ccaaagugcugggauuacaggcgu

SEQ ID NO: 1128352 - RNA, 18 nt, Human
ccaugaggcagacacuga

SEQ ID NO: 1128353 - RNA, 20 nt, Human
cccugguucaagcaauuccc

SEQ ID NO: 1128354 - RNA, 23 nt, Human
cccugguucaagcaauuccccug

SEQ ID NO: 1128355 - RNA, 26 nt, Human
ccuaggaaacagaacaccaugaagau

SEQ ID NO: 1128356 - RNA, 21 nt, Human
ccugaccucaggcaauccacc

SEQ ID NO: 1128357 - RNA, 23 nt, Human
ccugaccucaggcaauccaccug

SEQ ID NO: 1128358 - RNA, 23 nt, Human
ccugaguagcugggauuauaggc

SEQ ID NO: 1128359 - RNA, 23 nt, Human
ccugaguagcugggauuauaggc

SEQ ID NO: 1128360 - RNA, 24 nt, Human
ccugccucagccuccugaguagcu

SEQ ID NO: 1128361 - RNA, 24 nt, Human
cgcucugucacccaggcuggagug

SEQ ID NO: 1128362 - RNA, 19 nt, Human
cuaaaggaaaaaggagcau

SEQ ID NO: 1128363 - RNA, 25 nt, Human
cucacugcaaccuccaccucccugg

SEQ ID NO: 1128364 - RNA, 24 nt, Human
cucagccuccugaguagcugggau

SEQ ID NO: 1128365 - RNA, 20 nt, Human
cuccugaaaugcuaagaaaa

SEQ ID NO: 1128366 - RNA, 24 nt, Human
cuccugaaaugcuaagaaaaugaa

SEQ ID NO: 1128367 - RNA, 24 nt, Human
cucgcucugucacccaggcuggag

SEQ ID NO: 1128368 - RNA, 24 nt, Human
cugaguagcugggauuauaggcgu

SEQ ID NO: 1128369 - RNA, 24 nt, Human
cugcaaccuccaccucccugguuc

SEQ ID NO: 1128370 - RNA, 23 nt, Human
cugccucggccucccaaagugcu

SEQ ID NO: 1128371 - RNA, 19 nt, Human
cugucacccaggcuggagu

SEQ ID NO: 1128372 - RNA, 20 nt, Human
cuuagagucacuugacuagu

SEQ ID NO: 1128373 - RNA, 24 nt, Human
gaccucaggcaauccaccugccuc

SEQ ID NO: 1128374 - RNA, 21 nt, Human
gagccacuggguuuucauuuu

SEQ ID NO: 1128375 - RNA, 20 nt, Human
gaguagcugggauuauaggc

SEQ ID NO: 1128376 - RNA, 18 nt, Human
gauuacaggcgugagcca

SEQ ID NO: 1128377 - RNA, 21 nt, Human
gauuacaggcgugagccacug

SEQ ID NO: 1128378 - RNA, 24 nt, Human
gauuacaggcgugagccacugggu

SEQ ID NO: 1128379 - RNA, 18 nt, Human
gauuauaggcguaagcca

SEQ ID NO: 1128380 - RNA, 21 nt, Human
gauuauaggcguaagccacca

SEQ ID NO: 1128381 - RNA, 24 nt, Human
gauuauaggcguaagccaccauac

SEQ ID NO: 1128382 - RNA, 22 nt, Human
gcaaccuccaccucccugguuc

SEQ ID NO: 1128383 - RNA, 24 nt, Human
gcaauccaccugccucggccuccc

SEQ ID NO: 1128384 - RNA, 25 nt, Human
gcucugucacccaggcuggagugca

SEQ ID NO: 1128385 - RNA, 27 nt, Human
ggaaaaaggagcaugguguaugucaga

SEQ ID NO: 1128386 - RNA, 19 nt, Human
ggauuauaggcguaagcca

SEQ ID NO: 1128387 - RNA, 23 nt, Human
gggaaagauaaacacuuauuaac

SEQ ID NO: 1128388 - RNA, 18 nt, Human
guagcugggauuauaggc

SEQ ID NO: 1128389 - RNA, 18 nt, Human
guagcugggauuauaggc

SEQ ID NO: 1128390 - RNA, 21 nt, Human
uaagccaccauacccagcuaa

SEQ ID NO: 1128391 - RNA, 26 nt, Human
uaauuuuuuuguauuuuuaguagaga

SEQ ID NO: 1128392 - RNA, 18 nt, Human
uacaggcgugagccacug

SEQ ID NO: 1128393 - RNA, 24 nt, Human
uacaggcgugagccacuggguuuu

SEQ ID NO: 1128394 - RNA, 22 nt, Human
uagagauaguguuucaccaugu

SEQ ID NO: 1128395 - RNA, 22 nt, Human
uaggaaaugaggauuguuuuga

SEQ ID NO: 1128396 - RNA, 24 nt, Human
uaguagagauaguguuucaccaug

SEQ ID NO: 1128397 - RNA, 19 nt, Human
uaguguuucaccauguugg

SEQ ID NO: 1128398 - RNA, 19 nt, Human
ucaaagacaacaagggaaa

SEQ ID NO: 1128399 - RNA, 24 nt, Human
ucacccaggcuggagugcaguggu

SEQ ID NO: 1128400 - RNA, 19 nt, Human
ucacugcaaccuccaccuc

SEQ ID NO: 1128401 - RNA, 24 nt, Human
ucacugcaaccuccaccucccugg

SEQ ID NO: 1128402 - RNA, 24 nt, Human
ucacugcaaccuccaccucccugg

SEQ ID NO: 1128403 - RNA, 25 nt, Human
ucacugcaaccuccaccucccuggu

SEQ ID NO: 1128404 - RNA, 27 nt, Human
ucacugcaaccuccaccucccugguuc

SEQ ID NO: 1128405 - RNA, 20 nt, Human
ucagccuccugaguagcugg

SEQ ID NO: 1128406 - RNA, 19 nt, Human
ucaguugucauaaacagua

SEQ ID NO: 1128407 - RNA, 24 nt, Human
ucccaaagugcugggauuacaggc

SEQ ID NO: 1128408 - RNA, 18 nt, Human
uccccugccucagccucc

SEQ ID NO: 1128409 - RNA, 24 nt, Human
uccccugccucagccuccugagua

SEQ ID NO: 1128410 - RNA, 19 nt, Human
ucccugguucaagcaauuc

SEQ ID NO: 1128411 - RNA, 24 nt, Human
ucccugguucaagcaauuccccug

SEQ ID NO: 1128412 - RNA, 24 nt, Human
uccugaguagcugggauuauaggc

SEQ ID NO: 1128413 - RNA, 18 nt, Human
ucggccucccaaagugcu

SEQ ID NO: 1128414 - RNA, 22 nt, Human
ucuaagugaggauucccugagg

SEQ ID NO: 1128415 - RNA, 19 nt, Human
ucucgcucugucacccagg

SEQ ID NO: 1128416 - RNA, 22 nt, Human
ucucgcucugucacccaggcug

SEQ ID NO: 1128417 - RNA, 23 nt, Human
ucucgcucugucacccaggcugg

SEQ ID NO: 1128418 - RNA, 24 nt, Human
ucucgcucugucacccaggcugga

SEQ ID NO: 1128419 - RNA, 26 nt, Human
ucucgcucugucacccaggcuggagu

SEQ ID NO: 1128420 - RNA, 27 nt, Human
ucucgcucugucacccaggcuggagug

SEQ ID NO: 1128421 - RNA, 24 nt, Human
ucugucacccaggcuggagugcag

SEQ ID NO: 1128422 - RNA, 19 nt, Human
ugaccucaggcaauccacc

SEQ ID NO: 1128423 - RNA, 22 nt, Human
ugagauggagucucgcucuguc

SEQ ID NO: 1128424 - RNA, 24 nt, Human
ugaggcagacacugaacuaggccc

SEQ ID NO: 1128425 - RNA, 24 nt, Human
ugaguaggugggaaagauaaacac

SEQ ID NO: 1128426 - RNA, 24 nt, Human
ugccucagccuccugaguagcugg

SEQ ID NO: 1128427 - RNA, 21 nt, Human
ugccucggccucccaaagugc

SEQ ID NO: 1128428 - RNA, 24 nt, Human
ugccucggccucccaaagugcugg

SEQ ID NO: 1128429 - RNA, 24 nt, Human
ugcugggauuacaggcgugagcca

SEQ ID NO: 1128430 - RNA, 23 nt, Human
uggagugcaguggugcgaucuca

SEQ ID NO: 1128431 - RNA, 24 nt, Human
uggagugcaguggugcgaucucag

SEQ ID NO: 1128432 - RNA, 18 nt, Human
ugggauuacaggcgugag

SEQ ID NO: 1128433 - RNA, 19 nt, Human
ugggauuacaggcgugagc

SEQ ID NO: 1128434 - RNA, 21 nt, Human
ugggauuacaggcgugagcca

SEQ ID NO: 1128435 - RNA, 22 nt, Human
ugggauuacaggcgugagccac

SEQ ID NO: 1128436 - RNA, 22 nt, Human
ugggauuacaggcgugagccac

SEQ ID NO: 1128437 - RNA, 23 nt, Human
ugggauuacaggcgugagccacu

SEQ ID NO: 1128438 - RNA, 24 nt, Human
ugggauuacaggcgugagccacug

SEQ ID NO: 1128439 - RNA, 18 nt, Human
ugggauuauaggcguaag

SEQ ID NO: 1128440 - RNA, 22 nt, Human
ugggauuauaggcguaagccac

SEQ ID NO: 1128441 - RNA, 24 nt, Human
ugggauuauaggcguaagccacca

SEQ ID NO: 1128442 - RNA, 25 nt, Human
ugggauuauaggcguaagccaccau

SEQ ID NO: 1128443 - RNA, 24 nt, Human
uggugcgaucucagcucacugcaa

SEQ ID NO: 1128444 - RNA, 21 nt, Human
ugucauaaacaguagaaaaga

SEQ ID NO: 1128445 - RNA, 24 nt, Human
uuacugggaauuucuucaacagua

SEQ ID NO: 1128446 - RNA, 24 nt, Human
uuaguagagauaguguuucaccau

SEQ ID NO: 1128447 - RNA, 19 nt, Human
uucaaagacaacaagggaa

SEQ ID NO: 1128448 - RNA, 21 nt, Human
uucaagcaauuccccugccuc

SEQ ID NO: 1128449 - RNA, 24 nt, Human
uucaagcaauuccccugccucagc

SEQ ID NO: 1128450 - RNA, 19 nt, Human
uuccccugccucagccucc

SEQ ID NO: 1128451 - RNA, 20 nt, Human
uucuuagagucacuugacua

SEQ ID NO: 1128452 - RNA, 21 nt, Human
uuucaccauguuggccagacu

SEQ ID NO: 1128453 - RNA, 20 nt, Human
uuuuguauuuuuaguagaga

SEQ ID NO: 1128454 - RNA, 24 nt, Human
uuuuuaguagagauaguguuucac

SEQ ID NO: 1128455 - RNA, 21 nt, Human
uuuuuguauuuuuaguagaga

SEQ ID NO: 1128456 - RNA, 23 nt, Human
uuuuuuauuuugagauggagucu

SEQ ID NO: 1128457 - RNA, 21 nt, Human
uuuuuuguauuuuuaguagag

SEQ ID NO: 1128458 - RNA, 25 nt, Human
uuuuuuuuuuuuuuuuuuacuuuuu

SEQ ID NO: 1128459 - RNA, 21 nt, Human
caccauguuguacaucagagc

SEQ ID NO: 1128460 - RNA, 18 nt, Human
cauuuaaagcccacucuu

SEQ ID NO: 1128461 - RNA, 24 nt, Human
aaaagaagacgggguuauggaaaa

SEQ ID NO: 1128462 - RNA, 19 nt, Human
aacaauguggguacuuuuu

SEQ ID NO: 1128463 - RNA, 19 nt, Human
aacguggcuggcaccuccc

SEQ ID NO: 1128464 - RNA, 22 nt, Human
aagcucauccacaccugaggcc

SEQ ID NO: 1128465 - RNA, 23 nt, Human
aaggaaaaacauuguguaaauaa

SEQ ID NO: 1128466 - RNA, 18 nt, Human
acaucuccgggaggggag

SEQ ID NO: 1128467 - RNA, 19 nt, Human
acccucugggagggacccu

SEQ ID NO: 1128468 - RNA, 22 nt, Human
agccuggggccgugaggugguc

SEQ ID NO: 1128469 - RNA, 20 nt, Human
aggaaggaaaaccauuucau

SEQ ID NO: 1128470 - RNA, 23 nt, Human
aguggagggcggccugggacggc

SEQ ID NO: 1128471 - RNA, 24 nt, Human
auccccuuugaggacgcucuguua

SEQ ID NO: 1128472 - RNA, 22 nt, Human
augaaagcagauacccaaaagc

SEQ ID NO: 1128473 - RNA, 24 nt, Human
cacaagccuccuguaacacggagc

SEQ ID NO: 1128474 - RNA, 22 nt, Human
cacacuugacuuucggaaacuu

SEQ ID NO: 1128475 - RNA, 23 nt, Human
cagcaucaucaccagaagauggg

SEQ ID NO: 1128476 - RNA, 22 nt, Human
cagguccugcagcaccgccucc

SEQ ID NO: 1128477 - RNA, 23 nt, Human
ccagcagcggcggcgccccuuuc

SEQ ID NO: 1128478 - RNA, 22 nt, Human
ccccauuuugcaaacgaggaaa

SEQ ID NO: 1128479 - RNA, 22 nt, Human
ccccuguggcagugccucaccc

SEQ ID NO: 1128480 - RNA, 23 nt, Human
cccgcagacuccgcaccugaggc

SEQ ID NO: 1128481 - RNA, 18 nt, Human
cccucugggagggacccu

SEQ ID NO: 1128482 - RNA, 18 nt, Human
ccuccuguaacacggagc

SEQ ID NO: 1128483 - RNA, 29 nt, Human
ccucgcguugcuguugggcuccccugacu

SEQ ID NO: 1128484 - RNA, 21 nt, Human
cgaggaaacugaggcucggag

SEQ ID NO: 1128485 - RNA, 24 nt, Human
cgagugggcaggagccccaagccc

SEQ ID NO: 1128486 - RNA, 20 nt, Human
cguccuggccguggcuuggg

SEQ ID NO: 1128487 - RNA, 20 nt, Human
cucaccaccucucaaaggca

SEQ ID NO: 1128488 - RNA, 24 nt, Human
cucaccaccucucaaaggcaccuu

SEQ ID NO: 1128489 - RNA, 22 nt, Human
cuccacggugaacccgcccgcc

SEQ ID NO: 1128490 - RNA, 21 nt, Human
cugcaugggguugugggccuu

SEQ ID NO: 1128491 - RNA, 23 nt, Human
cuggagauuccccggauucccag

SEQ ID NO: 1128492 - RNA, 24 nt, Human
cugugcucacaagccuccuguaac

SEQ ID NO: 1128493 - RNA, 20 nt, Human
cuuuguggagugugauugug

SEQ ID NO: 1128494 - RNA, 19 nt, Human
gaagcucagcccccuuccu

SEQ ID NO: 1128495 - RNA, 23 nt, Human
gaagcucauccacaccugaggcc

SEQ ID NO: 1128496 - RNA, 18 nt, Human
gacccgggcgcccuccag

SEQ ID NO: 1128497 - RNA, 24 nt, Human
gagcucaccaccucucaaaggcac

SEQ ID NO: 1128498 - RNA, 19 nt, Human
gaggacaccaccggggggg

SEQ ID NO: 1128499 - RNA, 18 nt, Human
gccccaagcccuggagga

SEQ ID NO: 1128500 - RNA, 21 nt, Human
gcccuggaggaaggaaaacca

SEQ ID NO: 1128501 - RNA, 23 nt, Human
gcucggaggccuggagcaaugug

SEQ ID NO: 1128502 - RNA, 22 nt, Human
ggaaacagaguccaguccugcu

SEQ ID NO: 1128503 - RNA, 19 nt, Human
ggaaggaaaaccauuucau

SEQ ID NO: 1128504 - RNA, 18 nt, Human
ggcagggccgugagcccc

SEQ ID NO: 1128505 - RNA, 20 nt, Human
ggcucggaggccuggagcaa

SEQ ID NO: 1128506 - RNA, 18 nt, Human
gggcuaguuuccagcagc

SEQ ID NO: 1128507 - RNA, 24 nt, Human
ggggguagaauccagacgugaguu

SEQ ID NO: 1128508 - RNA, 18 nt, Human
gugucugcuuccagaagu

SEQ ID NO: 1128509 - RNA, 23 nt, Human
uaacacggagcucaccaccucuc

SEQ ID NO: 1128510 - RNA, 22 nt, Human
ucacaagccuccuguaacacgg

SEQ ID NO: 1128511 - RNA, 21 nt, Human
uccaacagggaguucccucug

SEQ ID NO: 1128512 - RNA, 22 nt, Human
uccacggugaacccgcccgcca

SEQ ID NO: 1128513 - RNA, 23 nt, Human
uccaggugcaggcagagggucgg

SEQ ID NO: 1128514 - RNA, 22 nt, Human
uccccugaccagggaggaugga

SEQ ID NO: 1128515 - RNA, 25 nt, Human
uccuguaacacggagcucaccaccu

SEQ ID NO: 1128516 - RNA, 18 nt, Human
ucugggagggacccucuc

SEQ ID NO: 1128517 - RNA, 25 nt, Human
ugaaaaagaagacgggguuauggaa

SEQ ID NO: 1128518 - RNA, 18 nt, Human
ugaaagcagauacccaaa

SEQ ID NO: 1128519 - RNA, 21 nt, Human
ugaaagcagauacccaaaagc

SEQ ID NO: 1128520 - RNA, 23 nt, Human
ugacuuaucucaggauucacaca

SEQ ID NO: 1128521 - RNA, 21 nt, Human
ugaggacaccaccgggggggu

SEQ ID NO: 1128522 - RNA, 24 nt, Human
ugaggacaccaccggggggguccc

SEQ ID NO: 1128523 - RNA, 19 nt, Human
ugcaggcagagggucgggu

SEQ ID NO: 1128524 - RNA, 19 nt, Human
ugcucccgcagacuccgca

SEQ ID NO: 1128525 - RNA, 23 nt, Human
uggaaaaggcaacgggcuggaga

SEQ ID NO: 1128526 - RNA, 23 nt, Human
uggcagggccgugagccccugug

SEQ ID NO: 1128527 - RNA, 24 nt, Human
ugggaacaauguggguacuuuuuu

SEQ ID NO: 1128528 - RNA, 22 nt, Human
ugggcaggagccccaagcccug

SEQ ID NO: 1128529 - RNA, 18 nt, Human
uggggccgugaggugguc

SEQ ID NO: 1128530 - RNA, 27 nt, Human
uguaacacggagcucaccaccucucaa

SEQ ID NO: 1128531 - RNA, 24 nt, Human
ugucaggaaugaaagcagauaccc

SEQ ID NO: 1128532 - RNA, 27 nt, Human
ugucaggaaugaaagcagauacccaaa

SEQ ID NO: 1128533 - RNA, 18 nt, Human
uuccccggauucccaggc

SEQ ID NO: 1128534 - RNA, 19 nt, Human
uucucgggggcggccgggc

SEQ ID NO: 1128535 - RNA, 24 nt, Human
uuuccagcagcggcggcgccccuu

SEQ ID NO: 1128536 - RNA, 23 nt, Human
uuucucacaagccgcagcaccuc

SEQ ID NO: 1128537 - RNA, 21 nt, Human
acccagcaccauccagcucug

SEQ ID NO: 1128538 - RNA, 21 nt, Human
aguuucuuguugcugguuugc

SEQ ID NO: 1128539 - RNA, 30 nt, Human
cacccccuucagacccucuccuggggcugg

SEQ ID NO: 1128540 - RNA, 23 nt, Human
ccggccgggugcggguccccaca

SEQ ID NO: 1128541 - RNA, 18 nt, Human
gagaccacugcaacagcc

SEQ ID NO: 1128542 - RNA, 22 nt, Human
gagcccgagaccacugcaacag

SEQ ID NO: 1128543 - RNA, 21 nt, Human
gcaggaaggucgggaggaggg

SEQ ID NO: 1128544 - RNA, 24 nt, Human
gcccuggccacccaguuucuuguu

SEQ ID NO: 1128545 - RNA, 23 nt, Human
gggcaggaaggucgggaggaggg

SEQ ID NO: 1128546 - RNA, 20 nt, Human
ucagacccucuccuggggcu

SEQ ID NO: 1128547 - RNA, 23 nt, Human
ucgggaggagggacucacccccu

SEQ ID NO: 1128548 - RNA, 22 nt, Human
ucuccuggggcugagugggagc

SEQ ID NO: 1128549 - RNA, 18 nt, Human
ugagcccagggugagacc

SEQ ID NO: 1128550 - RNA, 19 nt, Human
ugccugggcgugggcagga

SEQ ID NO: 1128551 - RNA, 19 nt, Human
ugccugggcgugggcagga

SEQ ID NO: 1128552 - RNA, 26 nt, Human
uggggucgugcacggacgcccuggcc

SEQ ID NO: 1128553 - RNA, 24 nt, Human
ugucucgcucccuguggggaccca

SEQ ID NO: 1128554 - RNA, 20 nt, Human
ugucucgggucuucaucagc

SEQ ID NO: 1128555 - RNA, 22 nt, Human
uuggaccccucccugaacucau

SEQ ID NO: 1128556 - RNA, 18 nt, Human
caccaaagcggccacggc

SEQ ID NO: 1128557 - RNA, 21 nt, Human
uacaacaccaaagcggccacg

SEQ ID NO: 1128558 - RNA, 24 nt, Human
aaagaaaggcagauuuauuagaga

SEQ ID NO: 1128559 - RNA, 18 nt, Human
aagaagggcagacuuaaa

SEQ ID NO: 1128560 - RNA, 19 nt, Human
aaggagcagggccggugug

SEQ ID NO: 1128561 - RNA, 19 nt, Human
aaggagcagggccggugug

SEQ ID NO: 1128562 - RNA, 19 nt, Human
aaggagcagggccggugug

SEQ ID NO: 1128563 - RNA, 19 nt, Human
aaggagcagggccggugug

SEQ ID NO: 1128564 - RNA, 20 nt, Human
aagggaggagccacugcaaa

SEQ ID NO: 1128565 - RNA, 19 nt, Human
aaugauggaggagccaggu

SEQ ID NO: 1128566 - RNA, 24 nt, Human
acccgcucugcugggcccucacug

SEQ ID NO: 1128567 - RNA, 20 nt, Human
agaggaagcagcgcuugggc

SEQ ID NO: 1128568 - RNA, 20 nt, Human
agcacagaagcaacgggcag

SEQ ID NO: 1128569 - RNA, 26 nt, Human
agcuacacagcaccaagucugcgccu

SEQ ID NO: 1128570 - RNA, 19 nt, Human
aggacggaaggguggaugg

SEQ ID NO: 1128571 - RNA, 22 nt, Human
aggcagguggcccauccgggga

SEQ ID NO: 1128572 - RNA, 20 nt, Human
aggcaguacugauaacgcca

SEQ ID NO: 1128573 - RNA, 18 nt, Human
aggcgggcgccugggccu

SEQ ID NO: 1128574 - RNA, 22 nt, Human
agggaggagccgaagcaagggg

SEQ ID NO: 1128575 - RNA, 22 nt, Human
agggaggagccgaagcaagggg

SEQ ID NO: 1128576 - RNA, 22 nt, Human
agggaggagccgaagcaagggg

SEQ ID NO: 1128577 - RNA, 22 nt, Human
agggaggagccgaagcaagggg

SEQ ID NO: 1128578 - RNA, 18 nt, Human
agggcagacuuaaagcuu

SEQ ID NO: 1128579 - RNA, 19 nt, Human
agggcucggugggagcaga

SEQ ID NO: 1128580 - RNA, 20 nt, Human
auaggacggcgccugugcug

SEQ ID NO: 1128581 - RNA, 24 nt, Human
caaaccaaccgugcgcaggaaaac

SEQ ID NO: 1128582 - RNA, 24 nt, Human
caagggaggagccacugcaaagaa

SEQ ID NO: 1128583 - RNA, 28 nt, Human
caagggaggagccgaagcaaggggcagg

SEQ ID NO: 1128584 - RNA, 28 nt, Human
caagggaggagccgaagcaaggggcagg

SEQ ID NO: 1128585 - RNA, 28 nt, Human
caagggaggagccgaagcaaggggcagg

SEQ ID NO: 1128586 - RNA, 28 nt, Human
caagggaggagccgaagcaaggggcagg

SEQ ID NO: 1128587 - RNA, 24 nt, Human
cacaccccccacccccacauguca

SEQ ID NO: 1128588 - RNA, 20 nt, Human
cacugccugagcaaccagca

SEQ ID NO: 1128589 - RNA, 24 nt, Human
cagcaagggaggagccgaagcaag

SEQ ID NO: 1128590 - RNA, 24 nt, Human
cagcaagggaggagccgaagcaag

SEQ ID NO: 1128591 - RNA, 24 nt, Human
cagcaagggaggagccgaagcaag

SEQ ID NO: 1128592 - RNA, 24 nt, Human
cagcaagggaggagccgaagcaag

SEQ ID NO: 1128593 - RNA, 20 nt, Human
cagcuccacccgcucugcug

SEQ ID NO: 1128594 - RNA, 18 nt, Human
cagcuccuggggccuggg

SEQ ID NO: 1128595 - RNA, 20 nt, Human
caggcaaggugaacauggug

SEQ ID NO: 1128596 - RNA, 22 nt, Human
caggcugggccuggcuccuggg

SEQ ID NO: 1128597 - RNA, 22 nt, Human
caggcugggccuggcuccuggg

SEQ ID NO: 1128598 - RNA, 21 nt, Human
caugugugacacaggcaaggu

SEQ ID NO: 1128599 - RNA, 20 nt, Human
ccagagccucccucuggcag

SEQ ID NO: 1128600 - RNA, 22 nt, Human
ccauggaguuagcgagcaccca

SEQ ID NO: 1128601 - RNA, 21 nt, Human
ccauggcccccuaggcucucu

SEQ ID NO: 1128602 - RNA, 28 nt, Human
cccacccccacaugucagggcacagccg

SEQ ID NO: 1128603 - RNA, 24 nt, Human
cccacccccacaugucagggcacc

SEQ ID NO: 1128604 - RNA, 20 nt, Human
cccauucugcaccugcugug

SEQ ID NO: 1128605 - RNA, 20 nt, Human
ccccccacccccacauguca

SEQ ID NO: 1128606 - RNA, 22 nt, Human
ccucccucuggcagggcaggca

SEQ ID NO: 1128607 - RNA, 21 nt, Human
ccugagcaaccagcaggauuu

SEQ ID NO: 1128608 - RNA, 19 nt, Human
cucccggcugcagggagca

SEQ ID NO: 1128609 - RNA, 21 nt, Human
cuccuggggccugggcccagc

SEQ ID NO: 1128610 - RNA, 18 nt, Human
cucugugcacagcccccc

SEQ ID NO: 1128611 - RNA, 19 nt, Human
cugcaccugcuguguacgc

SEQ ID NO: 1128612 - RNA, 21 nt, Human
cugcugggcccucacugaguc

SEQ ID NO: 1128613 - RNA, 19 nt, Human
cuggagggcucggugggag

SEQ ID NO: 1128614 - RNA, 21 nt, Human
cuggcuccuggggccugggcc

SEQ ID NO: 1128615 - RNA, 21 nt, Human
cuggcuccuggggccugggcc

SEQ ID NO: 1128616 - RNA, 25 nt, Human
cugugugcuggagagggccacaggc

SEQ ID NO: 1128617 - RNA, 22 nt, Human
cuugcuggggauguuauaggac

SEQ ID NO: 1128618 - RNA, 26 nt, Human
cuuugcuucuucuuuuugaggacggc

SEQ ID NO: 1128619 - RNA, 20 nt, Human
gaagaagggcagacuuaaag

SEQ ID NO: 1128620 - RNA, 21 nt, Human
gaaggguggauggaugcgugg

SEQ ID NO: 1128621 - RNA, 24 nt, Human
gagaaaguagaaaaugugcauagc

SEQ ID NO: 1128622 - RNA, 22 nt, Human
gcaagggaggagccacugcaaa

SEQ ID NO: 1128623 - RNA, 18 nt, Human
gcagggccgguguggggg

SEQ ID NO: 1128624 - RNA, 18 nt, Human
gcagggccgguguggggg

SEQ ID NO: 1128625 - RNA, 18 nt, Human
gcagggccgguguggggg

SEQ ID NO: 1128626 - RNA, 21 nt, Human
gccgaagcaaggggcagguca

SEQ ID NO: 1128627 - RNA, 21 nt, Human
gccgaagcaaggggcagguca

SEQ ID NO: 1128628 - RNA, 21 nt, Human
gccgaagcaaggggcagguca

SEQ ID NO: 1128629 - RNA, 21 nt, Human
gccgaagcaaggggcagguca

SEQ ID NO: 1128630 - RNA, 20 nt, Human
gccugagcaaccagcaggau

SEQ ID NO: 1128631 - RNA, 19 nt, Human
gccugggcccagcuccugg

SEQ ID NO: 1128632 - RNA, 25 nt, Human
gccugggccuagaggaggaaggagc

SEQ ID NO: 1128633 - RNA, 19 nt, Human
gcuccuggggccugggccc

SEQ ID NO: 1128634 - RNA, 19 nt, Human
gcuccuggggccugggccc

SEQ ID NO: 1128635 - RNA, 19 nt, Human
gcuccuggggccugggccc

SEQ ID NO: 1128636 - RNA, 18 nt, Human
ggcgcaggcugggccugg

SEQ ID NO: 1128637 - RNA, 18 nt, Human
ggcgcaggcugggccugg

SEQ ID NO: 1128638 - RNA, 18 nt, Human
ggcgcaggcugggccugg

SEQ ID NO: 1128639 - RNA, 18 nt, Human
ggcgcaggcugggccugg

SEQ ID NO: 1128640 - RNA, 20 nt, Human
ggcugggccuggcuccuggg

SEQ ID NO: 1128641 - RNA, 20 nt, Human
ggcugggccuggcuccuggg

SEQ ID NO: 1128642 - RNA, 20 nt, Human
ggcugggccuggcuccuggg

SEQ ID NO: 1128643 - RNA, 18 nt, Human
gggauguuauaggacggc

SEQ ID NO: 1128644 - RNA, 19 nt, Human
gggcgcaggcugggccugg

SEQ ID NO: 1128645 - RNA, 19 nt, Human
gggcgcaggcugggccugg

SEQ ID NO: 1128646 - RNA, 19 nt, Human
gggcgcaggcugggccugg

SEQ ID NO: 1128647 - RNA, 19 nt, Human
gggcgcaggcugggccugg

SEQ ID NO: 1128648 - RNA, 18 nt, Human
gggcuggagggcucggug

SEQ ID NO: 1128649 - RNA, 26 nt, Human
ggggcaauaauugcugugggcgggga

SEQ ID NO: 1128650 - RNA, 18 nt, Human
ggggcaggucagcaaggg

SEQ ID NO: 1128651 - RNA, 18 nt, Human
ggggcaggucagcaaggg

SEQ ID NO: 1128652 - RNA, 18 nt, Human
ggggcaggucagcaaggg

SEQ ID NO: 1128653 - RNA, 18 nt, Human
ggggcaggucagcaaggg

SEQ ID NO: 1128654 - RNA, 19 nt, Human
ggggccugggcccagcucc

SEQ ID NO: 1128655 - RNA, 21 nt, Human
gucccagagccucccucuggc

SEQ ID NO: 1128656 - RNA, 23 nt, Human
gugggcggggagugccagggcug

SEQ ID NO: 1128657 - RNA, 19 nt, Human
uaaauccauuccaaugcaa

SEQ ID NO: 1128658 - RNA, 23 nt, Human
uacacagcaccaagucugcgccu

SEQ ID NO: 1128659 - RNA, 19 nt, Human
ucagaagcugguggcugca

SEQ ID NO: 1128660 - RNA, 26 nt, Human
ucagcaaaucucccgucagaagcugg

SEQ ID NO: 1128661 - RNA, 21 nt, Human
ucagggaggacggaagggugg

SEQ ID NO: 1128662 - RNA, 20 nt, Human
uccaagacaagggggcugga

SEQ ID NO: 1128663 - RNA, 19 nt, Human
uccacaccccccaccccca

SEQ ID NO: 1128664 - RNA, 18 nt, Human
ucccauggaguuagcgag

SEQ ID NO: 1128665 - RNA, 19 nt, Human
uccggggaucacugccuga

SEQ ID NO: 1128666 - RNA, 20 nt, Human
uccugccagcccgacucccc

SEQ ID NO: 1128667 - RNA, 19 nt, Human
ucucaggucccagagccuc

SEQ ID NO: 1128668 - RNA, 21 nt, Human
ucuuugcuucuucuuuuugcc

SEQ ID NO: 1128669 - RNA, 18 nt, Human
ugaaaugauggaggagcc

SEQ ID NO: 1128670 - RNA, 18 nt, Human
ugagcuacacagcaccaa

SEQ ID NO: 1128671 - RNA, 24 nt, Human
ugaggcagguggcccauccgggga

SEQ ID NO: 1128672 - RNA, 22 nt, Human
ugauggaggagccagguguggu

SEQ ID NO: 1128673 - RNA, 23 nt, Human
ugauggaggagccaggugugguc

SEQ ID NO: 1128674 - RNA, 23 nt, Human
ugcaaagaaaugagggcuugcug

SEQ ID NO: 1128675 - RNA, 19 nt, Human
ugcauagcacagaagcaac

SEQ ID NO: 1128676 - RNA, 24 nt, Human
ugccagggcugggccauggccccc

SEQ ID NO: 1128677 - RNA, 22 nt, Human
uggaggugcaggcugggccugg

SEQ ID NO: 1128678 - RNA, 19 nt, Human
uggcaauagccgggcacag

SEQ ID NO: 1128679 - RNA, 22 nt, Human
uggcaauagccgggcacaggaa

SEQ ID NO: 1128680 - RNA, 21 nt, Human
uggcagggcaggcaaugaggc

SEQ ID NO: 1128681 - RNA, 23 nt, Human
uggcuccuggggcaauaauugcu

SEQ ID NO: 1128682 - RNA, 21 nt, Human
uggcuccuggggccuggaccu

SEQ ID NO: 1128683 - RNA, 21 nt, Human
uggcuccuggggccuggaccu

SEQ ID NO: 1128684 - RNA, 21 nt, Human
uggcuccuggggccugggccc

SEQ ID NO: 1128685 - RNA, 21 nt, Human
uggcuccuggggccugggccc

SEQ ID NO: 1128686 - RNA, 19 nt, Human
ugggagcagaggcggggcc

SEQ ID NO: 1128687 - RNA, 22 nt, Human
ugggcggggagugccagggcug

SEQ ID NO: 1128688 - RNA, 20 nt, Human
uggggcaauaauugcugugg

SEQ ID NO: 1128689 - RNA, 23 nt, Human
uggggccugggcccagcuccugg

SEQ ID NO: 1128690 - RNA, 18 nt, Human
ugggggcgcaggcugggc

SEQ ID NO: 1128691 - RNA, 18 nt, Human
ugggggcgcaggcugggc

SEQ ID NO: 1128692 - RNA, 18 nt, Human
ugggggcgcaggcugggc

SEQ ID NO: 1128693 - RNA, 18 nt, Human
ugggggcgcaggcugggc

SEQ ID NO: 1128694 - RNA, 22 nt, Human
uguggucagaauuugccaggga

SEQ ID NO: 1128695 - RNA, 23 nt, Human
uguggucagaauuugccagggaa

SEQ ID NO: 1128696 - RNA, 21 nt, Human
uugcuucuucuuuuugccuuc

SEQ ID NO: 1128697 - RNA, 22 nt, Human
agaaaggacuacaauguacaau

SEQ ID NO: 1128698 - RNA, 23 nt, Human
acacccuagagaccacgcuaaca

SEQ ID NO: 1128699 - RNA, 26 nt, Human
acagcaggggcuacucgcccucccag

SEQ ID NO: 1128700 - RNA, 20 nt, Human
accacgcuaacaagaggccu

SEQ ID NO: 1128701 - RNA, 18 nt, Human
acgcccggcacagcagcc

SEQ ID NO: 1128702 - RNA, 23 nt, Human
acgcccggcacagcagccacgcc

SEQ ID NO: 1128703 - RNA, 21 nt, Human
agaaggaggggagggagagag

SEQ ID NO: 1128704 - RNA, 21 nt, Human
agaggggggccacgcgguccc

SEQ ID NO: 1128705 - RNA, 22 nt, Human
aggaggggagggagagaggggg

SEQ ID NO: 1128706 - RNA, 24 nt, Human
aggaggggagggagagaggggggc

SEQ ID NO: 1128707 - RNA, 20 nt, Human
agggagagaggggggccacg

SEQ ID NO: 1128708 - RNA, 26 nt, Human
agucagcaccggccacgcccggcaca

SEQ ID NO: 1128709 - RNA, 21 nt, Human
cagcagacggcgucagacccc

SEQ ID NO: 1128710 - RNA, 22 nt, Human
cagcaggggcuacucgcccucc

SEQ ID NO: 1128711 - RNA, 19 nt, Human
ccccggggcucaguucucu

SEQ ID NO: 1128712 - RNA, 20 nt, Human
cccggcaccccguaccgcaa

SEQ ID NO: 1128713 - RNA, 23 nt, Human
cccuccagaaggaggggagggag

SEQ ID NO: 1128714 - RNA, 21 nt, Human
cccuggaaaugcucaucgccu

SEQ ID NO: 1128715 - RNA, 18 nt, Human
ccggggcucaguucucuc

SEQ ID NO: 1128716 - RNA, 22 nt, Human
cgcaagucagcaccggccacgc

SEQ ID NO: 1128717 - RNA, 22 nt, Human
cuccagaaggaggggagggagg

SEQ ID NO: 1128718 - RNA, 18 nt, Human
cucccccgaucagcgucc

SEQ ID NO: 1128719 - RNA, 20 nt, Human
cugcaaccagcacauggaga

SEQ ID NO: 1128720 - RNA, 19 nt, Human
gaaggaggggagggagaga

SEQ ID NO: 1128721 - RNA, 18 nt, Human
gaggcccagcccuggaaa

SEQ ID NO: 1128722 - RNA, 21 nt, Human
gaggcccagcccuggaaaugc

SEQ ID NO: 1128723 - RNA, 23 nt, Human
gaggcccagcccuggaaaugcuc

SEQ ID NO: 1128724 - RNA, 20 nt, Human
gagggagagaggggggccac

SEQ ID NO: 1128725 - RNA, 19 nt, Human
gauccccacccggcacccc

SEQ ID NO: 1128726 - RNA, 19 nt, Human
gcgcucccgcacgguguug

SEQ ID NO: 1128727 - RNA, 21 nt, Human
ggagggagagaggggggccac

SEQ ID NO: 1128728 - RNA, 19 nt, Human
ggcaguggacacacaguga

SEQ ID NO: 1128729 - RNA, 21 nt, Human
gggggccacgcggucccgccg

SEQ ID NO: 1128730 - RNA, 19 nt, Human
ugcagaauugccacggccg

SEQ ID NO: 1128731 - RNA, 24 nt, Human
aaagugcugggauuacaggcauga

SEQ ID NO: 1128732 - RNA, 18 nt, Human
aacacacagcuucaggca

SEQ ID NO: 1128733 - RNA, 20 nt, Human
aacacaugccccacggugca

SEQ ID NO: 1128734 - RNA, 23 nt, Human
aacaccccagaauuugagaacag

SEQ ID NO: 1128735 - RNA, 21 nt, Human
aacccggagcagcccagcccc

SEQ ID NO: 1128736 - RNA, 25 nt, Human
aacugcauccaacaggaacccccac

SEQ ID NO: 1128737 - RNA, 18 nt, Human
aagcagggcccccaggga

SEQ ID NO: 1128738 - RNA, 19 nt, Human
aagccaagcucccacccag

SEQ ID NO: 1128739 - RNA, 22 nt, Human
aagcuugcccccaaacucugcc

SEQ ID NO: 1128740 - RNA, 24 nt, Human
aaggaggcugggccagcccaggac

SEQ ID NO: 1128741 - RNA, 19 nt, Human
aagugcugggauuacaggc

SEQ ID NO: 1128742 - RNA, 21 nt, Human
aagugcugggauuacaggcau

SEQ ID NO: 1128743 - RNA, 20 nt, Human
aaugccaggacaagcaacaa

SEQ ID NO: 1128744 - RNA, 23 nt, Human
acacagaugcacagacacacauc

SEQ ID NO: 1128745 - RNA, 21 nt, Human
acaccauccccucuacagccc

SEQ ID NO: 1128746 - RNA, 23 nt, Human
acacccacaccauccccucuaca

SEQ ID NO: 1128747 - RNA, 20 nt, Human
acaccccaagggccacacaa

SEQ ID NO: 1128748 - RNA, 19 nt, Human
acacugagagccccaucug

SEQ ID NO: 1128749 - RNA, 18 nt, Human
acagacacaggccacaca

SEQ ID NO: 1128750 - RNA, 21 nt, Human
acagaugcacagacacacauc

SEQ ID NO: 1128751 - RNA, 19 nt, Human
acagcccagccaagagggu

SEQ ID NO: 1128752 - RNA, 22 nt, Human
accaaugccaggacaagcaaca

SEQ ID NO: 1128753 - RNA, 21 nt, Human
accaggucacccacagaccca

SEQ ID NO: 1128754 - RNA, 26 nt, Human
acccacaccauccccucuacagcccu

SEQ ID NO: 1128755 - RNA, 21 nt, Human
acccacagacccaagcccaag

SEQ ID NO: 1128756 - RNA, 19 nt, Human
accccacacccaggcagac

SEQ ID NO: 1128757 - RNA, 21 nt, Human
accccacacccaggcagacag

SEQ ID NO: 1128758 - RNA, 27 nt, Human
accccacacccaggcagacagacagac

SEQ ID NO: 1128759 - RNA, 21 nt, Human
accccgaggaccucuuuccca

SEQ ID NO: 1128760 - RNA, 19 nt, Human
acccgaagcccagcaucac

SEQ ID NO: 1128761 - RNA, 21 nt, Human
acccgaagcccagcaucaccc

SEQ ID NO: 1128762 - RNA, 19 nt, Human
accugaguccacagcccag

SEQ ID NO: 1128763 - RNA, 21 nt, Human
accugucuguuuuguucucug

SEQ ID NO: 1128764 - RNA, 23 nt, Human
accuuagccucccaaagugcugg

SEQ ID NO: 1128765 - RNA, 18 nt, Human
acgccacccuggcugugg

SEQ ID NO: 1128766 - RNA, 19 nt, Human
acuaaauacagagcuccug

SEQ ID NO: 1128767 - RNA, 24 nt, Human
acuauauuggccaagcuggucucg

SEQ ID NO: 1128768 - RNA, 18 nt, Human
acugggccagggcugcca

SEQ ID NO: 1128769 - RNA, 22 nt, Human
agaaacccggagcagcccagcc

SEQ ID NO: 1128770 - RNA, 22 nt, Human
agaacacaggccugcccccucc

SEQ ID NO: 1128771 - RNA, 21 nt, Human
agaacagcuuccacaucacca

SEQ ID NO: 1128772 - RNA, 19 nt, Human
agaagccuuggggacccuc

SEQ ID NO: 1128773 - RNA, 19 nt, Human
agaagguaggaucugaacu

SEQ ID NO: 1128774 - RNA, 24 nt, Human
agaaugucuggcgccugcucagcc

SEQ ID NO: 1128775 - RNA, 20 nt, Human
agacagacagacacaggcca

SEQ ID NO: 1128776 - RNA, 26 nt, Human
agacagacagacacaggccacacaca

SEQ ID NO: 1128777 - RNA, 24 nt, Human
agacagacagacacaggccggacc

SEQ ID NO: 1128778 - RNA, 22 nt, Human
agacccugacaccacacgacga

SEQ ID NO: 1128779 - RNA, 22 nt, Human
agagcccccuccaccugaaacu

SEQ ID NO: 1128780 - RNA, 23 nt, Human
agaggaccaagcagggcccccag

SEQ ID NO: 1128781 - RNA, 19 nt, Human
agagucccccucaccccac

SEQ ID NO: 1128782 - RNA, 24 nt, Human
agcacaucugcuacccgaagccca

SEQ ID NO: 1128783 - RNA, 23 nt, Human
agcacucccacccccaccagccc

SEQ ID NO: 1128784 - RNA, 22 nt, Human
agcagacagaaggagaccaaga

SEQ ID NO: 1128785 - RNA, 25 nt, Human
agcaggaccccugguccuggaccua

SEQ ID NO: 1128786 - RNA, 18 nt, Human
agcaggaggguccaggcc

SEQ ID NO: 1128787 - RNA, 21 nt, Human
agcauccuuugcggaccucac

SEQ ID NO: 1128788 - RNA, 22 nt, Human
agccaagcucccacccagagcc

SEQ ID NO: 1128789 - RNA, 18 nt, Human
agccagugggggccgggg

SEQ ID NO: 1128790 - RNA, 26 nt, Human
agccggacaccugaguccacagccca

SEQ ID NO: 1128791 - RNA, 20 nt, Human
agcuccugaggagucagaca

SEQ ID NO: 1128792 - RNA, 21 nt, Human
agcugagggagaggggcaggu

SEQ ID NO: 1128793 - RNA, 24 nt, Human
agcuggucucgaacuccugaccuc

SEQ ID NO: 1128794 - RNA, 20 nt, Human
aggaagagguguucagcugu

SEQ ID NO: 1128795 - RNA, 23 nt, Human
aggacagacugaggugggguucc

SEQ ID NO: 1128796 - RNA, 19 nt, Human
aggcaaggcggcugcuggu

SEQ ID NO: 1128797 - RNA, 24 nt, Human
aggcagacagacagacacaggcca

SEQ ID NO: 1128798 - RNA, 26 nt, Human
aggcagcagacagaaggagaccaaga

SEQ ID NO: 1128799 - RNA, 20 nt, Human
agggagaggagcaccucagg

SEQ ID NO: 1128800 - RNA, 22 nt, Human
agggagaggggcagguggcagg

SEQ ID NO: 1128801 - RNA, 19 nt, Human
agggguuucacuauauugg

SEQ ID NO: 1128802 - RNA, 23 nt, Human
agguacaugcccaccacagcaca

SEQ ID NO: 1128803 - RNA, 24 nt, Human
agguaggaucugaacuggagagag

SEQ ID NO: 1128804 - RNA, 24 nt, Human
aggugauccgcccaccuuagccuc

SEQ ID NO: 1128805 - RNA, 23 nt, Human
agguguucagcugugggcagaag

SEQ ID NO: 1128806 - RNA, 18 nt, Human
aguccaggacagacugag

SEQ ID NO: 1128807 - RNA, 20 nt, Human
aguggccagagaagccuugg

SEQ ID NO: 1128808 - RNA, 20 nt, Human
aguggcugggaggucggggg

SEQ ID NO: 1128809 - RNA, 20 nt, Human
aucuggacacugggccaggg

SEQ ID NO: 1128810 - RNA, 24 nt, Human
caaagugcugggauuacaggcaug

SEQ ID NO: 1128811 - RNA, 21 nt, Human
caacaaaaagaaacacacagc

SEQ ID NO: 1128812 - RNA, 24 nt, Human
caacaaaaagaaacacacagcuuc

SEQ ID NO: 1128813 - RNA, 20 nt, Human
caacaccccagaauuugaga

SEQ ID NO: 1128814 - RNA, 23 nt, Human
caacaggaacccccaccuucacc

SEQ ID NO: 1128815 - RNA, 18 nt, Human
caagcaacaaaaagaaac

SEQ ID NO: 1128816 - RNA, 19 nt, Human
caagcaacaaaaagaaaca

SEQ ID NO: 1128817 - RNA, 18 nt, Human
caagcucccacccagagc

SEQ ID NO: 1128818 - RNA, 21 nt, Human
caagcucccacccagagccac

SEQ ID NO: 1128819 - RNA, 22 nt, Human
caaggcccacuaaauacagagc

SEQ ID NO: 1128820 - RNA, 19 nt, Human
caaggcccugggcagccuc

SEQ ID NO: 1128821 - RNA, 22 nt, Human
caaugccaggacaagcaacaaa

SEQ ID NO: 1128822 - RNA, 20 nt, Human
cacacacacacaaacaucac

SEQ ID NO: 1128823 - RNA, 25 nt, Human
cacacacacacacacaaacaucacu

SEQ ID NO: 1128824 - RNA, 22 nt, Human
cacaccauccccucuacagccc

SEQ ID NO: 1128825 - RNA, 19 nt, Human
cacacccacaccauccccu

SEQ ID NO: 1128826 - RNA, 20 nt, Human
cacacccaggcagacagaca

SEQ ID NO: 1128827 - RNA, 23 nt, Human
cacagacccaagcccaagucacc

SEQ ID NO: 1128828 - RNA, 24 nt, Human
cacagacccaagcccaagucacca

SEQ ID NO: 1128829 - RNA, 21 nt, Human
cacagcacaacaccccagaau

SEQ ID NO: 1128830 - RNA, 21 nt, Human
caccaaugccaggacaagcaa

SEQ ID NO: 1128831 - RNA, 21 nt, Human
caccacacgacgacugacacc

SEQ ID NO: 1128832 - RNA, 18 nt, Human
caccacacgacgacuggc

SEQ ID NO: 1128833 - RNA, 22 nt, Human
caccauaauggaagcuucccaa

SEQ ID NO: 1128834 - RNA, 21 nt, Human
cacccacagacccaagcccaa

SEQ ID NO: 1128835 - RNA, 22 nt, Human
cacccacagacccaagcccaag

SEQ ID NO: 1128836 - RNA, 20 nt, Human
caccccaggacaaggcccac

SEQ ID NO: 1128837 - RNA, 28 nt, Human
cacccugugcauucagcacucccacccc

SEQ ID NO: 1128838 - RNA, 22 nt, Human
caccgaguagaagagacccuga

SEQ ID NO: 1128839 - RNA, 22 nt, Human
cacuagagucccccucaccccc

SEQ ID NO: 1128840 - RNA, 21 nt, Human
cacuauauuggccaagcuggu

SEQ ID NO: 1128841 - RNA, 24 nt, Human
cacuauauuggccaagcuggucuc

SEQ ID NO: 1128842 - RNA, 19 nt, Human
cacucccacccccaccagc

SEQ ID NO: 1128843 - RNA, 20 nt, Human
cagaacacaggccugccccc

SEQ ID NO: 1128844 - RNA, 20 nt, Human
cagacacacaucggaugccc

SEQ ID NO: 1128845 - RNA, 20 nt, Human
cagagaagccccuaccccuc

SEQ ID NO: 1128846 - RNA, 18 nt, Human
cagauaggcuccuuccca

SEQ ID NO: 1128847 - RNA, 18 nt, Human
cagcaacacccagggaca

SEQ ID NO: 1128848 - RNA, 24 nt, Human
cagcacagcuggccacacccacac

SEQ ID NO: 1128849 - RNA, 22 nt, Human
cagcagacagaaggagaccaag

SEQ ID NO: 1128850 - RNA, 23 nt, Human
cagcaggcagcaacacccaggga

SEQ ID NO: 1128851 - RNA, 21 nt, Human
cagcaucacccugugcauuca

SEQ ID NO: 1128852 - RNA, 23 nt, Human
cagcaucacccugugcauucagc

SEQ ID NO: 1128853 - RNA, 27 nt, Human
cagcauccuuugcggaccucacucaga

SEQ ID NO: 1128854 - RNA, 19 nt, Human
cagcccaggacaggguagu

SEQ ID NO: 1128855 - RNA, 21 nt, Human
cagccccccagccugcuuccc

SEQ ID NO: 1128856 - RNA, 21 nt, Human
cagcccccuguggcccucgac

SEQ ID NO: 1128857 - RNA, 20 nt, Human
cagccgcaggggcugggcug

SEQ ID NO: 1128858 - RNA, 25 nt, Human
cagccggacaccugaguccacagcc

SEQ ID NO: 1128859 - RNA, 19 nt, Human
caggacagacugagguggg

SEQ ID NO: 1128860 - RNA, 24 nt, Human
caggaccaggucacccacagaccc

SEQ ID NO: 1128861 - RNA, 28 nt, Human
caggaccaggucacccacagacccaagc

SEQ ID NO: 1128862 - RNA, 21 nt, Human
caggaccccugguccuggacc

SEQ ID NO: 1128863 - RNA, 18 nt, Human
caggagcucccagccagu

SEQ ID NO: 1128864 - RNA, 24 nt, Human
cagggaacugcaaauccuucccca

SEQ ID NO: 1128865 - RNA, 25 nt, Human
caggguagucagaguggacacugcc

SEQ ID NO: 1128866 - RNA, 21 nt, Human
cauaauggaagcuucccacag

SEQ ID NO: 1128867 - RNA, 19 nt, Human
caugccuccacggguccca

SEQ ID NO: 1128868 - RNA, 21 nt, Human
caugccuccacgggucccaaa

SEQ ID NO: 1128869 - RNA, 23 nt, Human
ccaaagugcugggauuacaggca

SEQ ID NO: 1128870 - RNA, 24 nt, Human
ccaaagugcugggauuacaggcau

SEQ ID NO: 1128871 - RNA, 24 nt, Human
ccaacacacacacacacacaaaca

SEQ ID NO: 1128872 - RNA, 22 nt, Human
ccaaugccaggacaagcaacaa

SEQ ID NO: 1128873 - RNA, 25 nt, Human
ccacaccauccccucuacagcccug

SEQ ID NO: 1128874 - RNA, 27 nt, Human
ccacaccauccccucuacagcccuggc

SEQ ID NO: 1128875 - RNA, 20 nt, Human
ccacacccacaccauccccu

SEQ ID NO: 1128876 - RNA, 21 nt, Human
ccacacccacaccauccccuc

SEQ ID NO: 1128877 - RNA, 21 nt, Human
ccacacccaggcagacagaca

SEQ ID NO: 1128878 - RNA, 23 nt, Human
ccacacgacgacuggcacaucac

SEQ ID NO: 1128879 - RNA, 26 nt, Human
ccacagacccaagcccaagucaccac

SEQ ID NO: 1128880 - RNA, 20 nt, Human
ccacagcacaucugcuaccc

SEQ ID NO: 1128881 - RNA, 18 nt, Human
ccacccccaccagccccc

SEQ ID NO: 1128882 - RNA, 22 nt, Human
ccagagccgcgccaagccaagc

SEQ ID NO: 1128883 - RNA, 19 nt, Human
ccagaucacgccacccugg

SEQ ID NO: 1128884 - RNA, 24 nt, Human
ccagcccccuguggcccucgaccc

SEQ ID NO: 1128885 - RNA, 22 nt, Human
ccaggcccuggugaccccugac

SEQ ID NO: 1128886 - RNA, 21 nt, Human
ccagggacccuggggaccgga

SEQ ID NO: 1128887 - RNA, 19 nt, Human
ccagggcaggacaccccaa

SEQ ID NO: 1128888 - RNA, 24 nt, Human
cccaaagugcugggauuacaggca

SEQ ID NO: 1128889 - RNA, 21 nt, Human
cccaacacacacacacacaca

SEQ ID NO: 1128890 - RNA, 21 nt, Human
cccacacccaggcagacagac

SEQ ID NO: 1128891 - RNA, 18 nt, Human
cccacagacccaagccca

SEQ ID NO: 1128892 - RNA, 22 nt, Human
cccacuaaauacagagcuccug

SEQ ID NO: 1128893 - RNA, 20 nt, Human
cccagagaagccccuacccc

SEQ ID NO: 1128894 - RNA, 23 nt, Human
cccagagccgcgccaagccaagc

SEQ ID NO: 1128895 - RNA, 21 nt, Human
cccagccaagaggguggguca

SEQ ID NO: 1128896 - RNA, 22 nt, Human
cccagccagugggggccggggc

SEQ ID NO: 1128897 - RNA, 18 nt, Human
cccaggcagacagacaga

SEQ ID NO: 1128898 - RNA, 22 nt, Human
cccaggcagacagacagacaca

SEQ ID NO: 1128899 - RNA, 25 nt, Human
ccccaagggccacacaauggccccc

SEQ ID NO: 1128900 - RNA, 18 nt, Human
ccccacacccaggcagac

SEQ ID NO: 1128901 - RNA, 24 nt, Human
ccccagaacacaggccugcccccu

SEQ ID NO: 1128902 - RNA, 20 nt, Human
ccccagcuggcugucaccaa

SEQ ID NO: 1128903 - RNA, 22 nt, Human
ccccagcuucacauucucccug

SEQ ID NO: 1128904 - RNA, 24 nt, Human
ccccaggcccccuccugcaaggcc

SEQ ID NO: 1128905 - RNA, 25 nt, Human
cccccaacacacacacacacacaaa

SEQ ID NO: 1128906 - RNA, 19 nt, Human
cccccagaacacaggccug

SEQ ID NO: 1128907 - RNA, 26 nt, Human
ccccccaacacacacacacacacaaa

SEQ ID NO: 1128908 - RNA, 24 nt, Human
ccccgacuguccacagcacaucug

SEQ ID NO: 1128909 - RNA, 23 nt, Human
ccccgcccagccccgacucacag

SEQ ID NO: 1128910 - RNA, 24 nt, Human
ccccuccaccugaaacugcaucca

SEQ ID NO: 1128911 - RNA, 19 nt, Human
ccccucuacagcccuggca

SEQ ID NO: 1128912 - RNA, 21 nt, Human
ccccugaggauguucucccuc

SEQ ID NO: 1128913 - RNA, 19 nt, Human
cccuccagccuauguggca

SEQ ID NO: 1128914 - RNA, 26 nt, Human
cccuccagccuauguggcagcccccc

SEQ ID NO: 1128915 - RNA, 21 nt, Human
ccgaagcccagcaucacccug

SEQ ID NO: 1128916 - RNA, 24 nt, Human
ccgaagcccagcaucacccugugc

SEQ ID NO: 1128917 - RNA, 19 nt, Human
ccgcagaugacccgacccc

SEQ ID NO: 1128918 - RNA, 26 nt, Human
ccgcccaccuuagccucccaaagugc

SEQ ID NO: 1128919 - RNA, 25 nt, Human
ccggagugugcuaacacaugccccc

SEQ ID NO: 1128920 - RNA, 21 nt, Human
ccggcccugcagugccccucc

SEQ ID NO: 1128921 - RNA, 21 nt, Human
ccggcccugcagugccccucc

SEQ ID NO: 1128922 - RNA, 19 nt, Human
ccuaaccccuaaaacaggg

SEQ ID NO: 1128923 - RNA, 23 nt, Human
ccucaccccacacccaggcagac

SEQ ID NO: 1128924 - RNA, 24 nt, Human
ccucaccccacacccaggcagaca

SEQ ID NO: 1128925 - RNA, 24 nt, Human
ccuccaaacuucacggagcaggac

SEQ ID NO: 1128926 - RNA, 18 nt, Human
ccucccucagcacagcug

SEQ ID NO: 1128927 - RNA, 23 nt, Human
ccucccugcuguugccucagaaa

SEQ ID NO: 1128928 - RNA, 18 nt, Human
ccugaaacugcauccaac

SEQ ID NO: 1128929 - RNA, 24 nt, Human
ccugaccucaggugauccgcccac

SEQ ID NO: 1128930 - RNA, 19 nt, Human
ccugagcugcaguuuccug

SEQ ID NO: 1128931 - RNA, 20 nt, Human
ccugcagccgcccccagggc

SEQ ID NO: 1128932 - RNA, 20 nt, Human
ccugcagccgcccccagggc

SEQ ID NO: 1128933 - RNA, 24 nt, Human
ccugcagugccccuccguggcugg

SEQ ID NO: 1128934 - RNA, 21 nt, Human
ccugccaucccggcccagagc

SEQ ID NO: 1128935 - RNA, 24 nt, Human
ccugcuucccauggaaccccccca

SEQ ID NO: 1128936 - RNA, 22 nt, Human
ccuggagccgccaccccaggac

SEQ ID NO: 1128937 - RNA, 24 nt, Human
ccuggccccucccugguccccugg

SEQ ID NO: 1128938 - RNA, 22 nt, Human
ccugugcauucagcacucccac

SEQ ID NO: 1128939 - RNA, 23 nt, Human
cgacccagagaagccccuacccc

SEQ ID NO: 1128940 - RNA, 23 nt, Human
cgcagcacagaaugucuggcgcc

SEQ ID NO: 1128941 - RNA, 24 nt, Human
cgccaggcaaggcggcugcuggug

SEQ ID NO: 1128942 - RNA, 21 nt, Human
cgcccagccccgacucacagg

SEQ ID NO: 1128943 - RNA, 21 nt, Human
cggaacuugggcaggagcucc

SEQ ID NO: 1128944 - RNA, 21 nt, Human
cggcuccagaucacgccaccc

SEQ ID NO: 1128945 - RNA, 19 nt, Human
cuccagugacucugggcuc

SEQ ID NO: 1128946 - RNA, 21 nt, Human
cucgcugcucuugcagccgca

SEQ ID NO: 1128947 - RNA, 18 nt, Human
cucugccuuucugacugg

SEQ ID NO: 1128948 - RNA, 25 nt, Human
cucugccuuucugacuggggcuugg

SEQ ID NO: 1128949 - RNA, 19 nt, Human
cucuugcagccgcaggggc

SEQ ID NO: 1128950 - RNA, 28 nt, Human
cugaaacugcauccaacaggaaccccca

SEQ ID NO: 1128951 - RNA, 20 nt, Human
cugcagugccccuccguggc

SEQ ID NO: 1128952 - RNA, 19 nt, Human
cuggacacugggccagggc

SEQ ID NO: 1128953 - RNA, 23 nt, Human
cuggcccuuagcaccgaguagaa

SEQ ID NO: 1128954 - RNA, 23 nt, Human
cugggcucucggggguggcagag

SEQ ID NO: 1128955 - RNA, 20 nt, Human
cuugcagccgcaggggcugg

SEQ ID NO: 1128956 - RNA, 22 nt, Human
gaagccuuggggacccuccaaa

SEQ ID NO: 1128957 - RNA, 19 nt, Human
gacaagcaacaaaaagaaa

SEQ ID NO: 1128958 - RNA, 24 nt, Human
gacaccugaguccacagcccagcc

SEQ ID NO: 1128959 - RNA, 22 nt, Human
gaccaggucacccacagaccca

SEQ ID NO: 1128960 - RNA, 24 nt, Human
gaccucaggugauccgcccaccuu

SEQ ID NO: 1128961 - RNA, 22 nt, Human
gagcaggaccccugguccugga

SEQ ID NO: 1128962 - RNA, 19 nt, Human
gagcccccuccaccugaaa

SEQ ID NO: 1128963 - RNA, 18 nt, Human
gagcucaagcagcugcuc

SEQ ID NO: 1128964 - RNA, 21 nt, Human
gaggcagcagacagaaggaga

SEQ ID NO: 1128965 - RNA, 18 nt, Human
gauuacaggcaugaguca

SEQ ID NO: 1128966 - RNA, 21 nt, Human
gauuacaggcaugagucacca

SEQ ID NO: 1128967 - RNA, 22 nt, Human
gauuacaggcaugagucaccac

SEQ ID NO: 1128968 - RNA, 22 nt, Human
gcaaggcggcugcuggugggug

SEQ ID NO: 1128969 - RNA, 25 nt, Human
gcacagacacacaucggaugccccu

SEQ ID NO: 1128970 - RNA, 22 nt, Human
gcacaggaccaggucacccaca

SEQ ID NO: 1128971 - RNA, 22 nt, Human
gcagcacagaaugucuggcgcc

SEQ ID NO: 1128972 - RNA, 22 nt, Human
gcauccuuugcggaccucacuc

SEQ ID NO: 1128973 - RNA, 22 nt, Human
gccacacacagaugcacagaca

SEQ ID NO: 1128974 - RNA, 21 nt, Human
gccacacccacaccauccccu

SEQ ID NO: 1128975 - RNA, 19 nt, Human
gccagccuccucccugcca

SEQ ID NO: 1128976 - RNA, 22 nt, Human
gcccaagcuggccccaggcccc

SEQ ID NO: 1128977 - RNA, 23 nt, Human
gccccaggcccccuccugcaagg

SEQ ID NO: 1128978 - RNA, 20 nt, Human
gcccccaaacucugccuuuc

SEQ ID NO: 1128979 - RNA, 19 nt, Human
gcccccagaacacaggccu

SEQ ID NO: 1128980 - RNA, 19 nt, Human
gccccucccugcuguugcc

SEQ ID NO: 1128981 - RNA, 24 nt, Human
gcccuggcaaguccccccagcccu

SEQ ID NO: 1128982 - RNA, 22 nt, Human
gcccuggccucugccaugucuc

SEQ ID NO: 1128983 - RNA, 23 nt, Human
gcccuggccucugccaugucuca

SEQ ID NO: 1128984 - RNA, 20 nt, Human
gcccuggugaccccugacug

SEQ ID NO: 1128985 - RNA, 18 nt, Human
gccggggccgcagcacag

SEQ ID NO: 1128986 - RNA, 21 nt, Human
gcugcugguggguguuguggg

SEQ ID NO: 1128987 - RNA, 20 nt, Human
gcuggccccaggcccccucc

SEQ ID NO: 1128988 - RNA, 24 nt, Human
ggagacagaugaccccugaggaug

SEQ ID NO: 1128989 - RNA, 18 nt, Human
ggagaggggcagguggca

SEQ ID NO: 1128990 - RNA, 19 nt, Human
ggagcagcccagcccccca

SEQ ID NO: 1128991 - RNA, 23 nt, Human
ggaggcuccccgcccagccccga

SEQ ID NO: 1128992 - RNA, 23 nt, Human
ggagguggagacaaggguggggc

SEQ ID NO: 1128993 - RNA, 19 nt, Human
ggauuacaggcaugaguca

SEQ ID NO: 1128994 - RNA, 22 nt, Human
ggcaggcaggaggacagugucc

SEQ ID NO: 1128995 - RNA, 18 nt, Human
ggcccagagccgcgccaa

SEQ ID NO: 1128996 - RNA, 20 nt, Human
ggccccaggcccccuccugc

SEQ ID NO: 1128997 - RNA, 19 nt, Human
ggcucucggggguggcaga

SEQ ID NO: 1128998 - RNA, 21 nt, Human
ggcugggcuggugggauccug

SEQ ID NO: 1128999 - RNA, 23 nt, Human
ggcuggugggauccugggagguc

SEQ ID NO: 1129000 - RNA, 21 nt, Human
gggcaggacaccccaagggcc

SEQ ID NO: 1129001 - RNA, 22 nt, Human
gggccggggccgcagcacagaa

SEQ ID NO: 1129002 - RNA, 19 nt, Human
gggggacguggaggcgaug

SEQ ID NO: 1129003 - RNA, 18 nt, Human
gggguuucacuauauugg

SEQ ID NO: 1129004 - RNA, 18 nt, Human
gguagucagaguggacac

SEQ ID NO: 1129005 - RNA, 19 nt, Human
ggucucgaacuccugaccu

SEQ ID NO: 1129006 - RNA, 20 nt, Human
gguggagacaaggguggggc

SEQ ID NO: 1129007 - RNA, 18 nt, Human
guagagagagcuuccgcc

SEQ ID NO: 1129008 - RNA, 24 nt, Human
gugauccgcccaccuuagccuccc

SEQ ID NO: 1129009 - RNA, 25 nt, Human
guggagacaaggguggggccagcgg

SEQ ID NO: 1129010 - RNA, 25 nt, Human
uaacacccuagguacaugcccacca

SEQ ID NO: 1129011 - RNA, 21 nt, Human
uacagcccuggcaaguccccc

SEQ ID NO: 1129012 - RNA, 22 nt, Human
uacaggcaugagucaccacacc

SEQ ID NO: 1129013 - RNA, 24 nt, Human
uauauuggccaagcuggucucgaa

SEQ ID NO: 1129014 - RNA, 22 nt, Human
ucacucagaggccgggguuccu

SEQ ID NO: 1129015 - RNA, 19 nt, Human
ucacuggcuggcgccaggc

SEQ ID NO: 1129016 - RNA, 18 nt, Human
ucagcacagcuggccaca

SEQ ID NO: 1129017 - RNA, 24 nt, Human
ucagcacucccacccccaccagcc

SEQ ID NO: 1129018 - RNA, 22 nt, Human
ucaggaggcuccccgcccagcc

SEQ ID NO: 1129019 - RNA, 21 nt, Human
uccaagcugagggagaggggc

SEQ ID NO: 1129020 - RNA, 21 nt, Human
uccacagcacaucugcuaccc

SEQ ID NO: 1129021 - RNA, 26 nt, Human
uccacagcacaucugcuacccgaagc

SEQ ID NO: 1129022 - RNA, 24 nt, Human
ucccaaagugcugggauuacaggc

SEQ ID NO: 1129023 - RNA, 19 nt, Human
ucccacaggcagggaccug

SEQ ID NO: 1129024 - RNA, 22 nt, Human
ucccaggccgcagugaccagcc

SEQ ID NO: 1129025 - RNA, 21 nt, Human
ucccauggaacccccccaaca

SEQ ID NO: 1129026 - RNA, 19 nt, Human
uccccacgugugagggcua

SEQ ID NO: 1129027 - RNA, 21 nt, Human
uccccccagcccugcggcucc

SEQ ID NO: 1129028 - RNA, 22 nt, Human
ucccuacccccacuuugucccc

SEQ ID NO: 1129029 - RNA, 23 nt, Human
uccguggcugggagacagaugac

SEQ ID NO: 1129030 - RNA, 25 nt, Human
uccuuugcggaccucacucagaggc

SEQ ID NO: 1129031 - RNA, 18 nt, Human
ucucaaggcccugggcag

SEQ ID NO: 1129032 - RNA, 25 nt, Human
ucucccugcccuggccucugccaug

SEQ ID NO: 1129033 - RNA, 23 nt, Human
ucucgaacuccugaccucaggug

SEQ ID NO: 1129034 - RNA, 23 nt, Human
ucugaacuggagagagccggggc

SEQ ID NO: 1129035 - RNA, 21 nt, Human
ugaacuggagagagccgaggu

SEQ ID NO: 1129036 - RNA, 20 nt, Human
ugaccccugacugcaacccu

SEQ ID NO: 1129037 - RNA, 22 nt, Human
ugaccccugaggauguucuccc

SEQ ID NO: 1129038 - RNA, 18 nt, Human
ugaccucaggugauccgc

SEQ ID NO: 1129039 - RNA, 21 nt, Human
ugaccucaggugauccgccca

SEQ ID NO: 1129040 - RNA, 24 nt, Human
ugaccucaggugauccgcccaccu

SEQ ID NO: 1129041 - RNA, 26 nt, Human
ugagcccccagaacacaggccugccc

SEQ ID NO: 1129042 - RNA, 19 nt, Human
ugagcugcaguuuccuggc

SEQ ID NO: 1129043 - RNA, 21 nt, Human
ugaggauguucucccucuccc

SEQ ID NO: 1129044 - RNA, 18 nt, Human
ugaggucaugccggacac

SEQ ID NO: 1129045 - RNA, 19 nt, Human
ugaggucaugccggacacu

SEQ ID NO: 1129046 - RNA, 20 nt, Human
ugaggucaugccggacacug

SEQ ID NO: 1129047 - RNA, 21 nt, Human
ugaggugggguuccagaggca

SEQ ID NO: 1129048 - RNA, 24 nt, Human
ugauccgcccaccuuagccuccca

SEQ ID NO: 1129049 - RNA, 25 nt, Human
ugcacagacacacaucggaugcccc

SEQ ID NO: 1129050 - RNA, 25 nt, Human
ugcagccgcaggggcugggcuggug

SEQ ID NO: 1129051 - RNA, 25 nt, Human
ugccaggacaagcaacaaaaagaaa

SEQ ID NO: 1129052 - RNA, 24 nt, Human
ugccaugucucacuaggccuggag

SEQ ID NO: 1129053 - RNA, 22 nt, Human
ugcccaggccagccccacccuu

SEQ ID NO: 1129054 - RNA, 24 nt, Human
ugcccaggccagccccacccuugu

SEQ ID NO: 1129055 - RNA, 18 nt, Human
ugcccaggcugagccagg

SEQ ID NO: 1129056 - RNA, 22 nt, Human
ugcccaggcugagccaggcccu

SEQ ID NO: 1129057 - RNA, 25 nt, Human
ugcccagugccccuaaaagugggca

SEQ ID NO: 1129058 - RNA, 22 nt, Human
ugccucagaaacccggagcagc

SEQ ID NO: 1129059 - RNA, 26 nt, Human
ugccugcccucuuuuggagaaugcug

SEQ ID NO: 1129060 - RNA, 23 nt, Human
ugcuaacacaugccccacggugc

SEQ ID NO: 1129061 - RNA, 21 nt, Human
ugcuauggccucuggaggaca

SEQ ID NO: 1129062 - RNA, 24 nt, Human
ugcugaggcgucaggcggccucgu

SEQ ID NO: 1129063 - RNA, 24 nt, Human
ugcugggauuacaggcaugaguca

SEQ ID NO: 1129064 - RNA, 18 nt, Human
uggaacccccccaacaca

SEQ ID NO: 1129065 - RNA, 21 nt, Human
uggagaaugcuggggcccaag

SEQ ID NO: 1129066 - RNA, 25 nt, Human
uggagacaaggguggggccagcgga

SEQ ID NO: 1129067 - RNA, 24 nt, Human
uggagagagccgagguucgggagg

SEQ ID NO: 1129068 - RNA, 26 nt, Human
uggcagaggaccaagcagggccccca

SEQ ID NO: 1129069 - RNA, 20 nt, Human
uggcaggggagaaggaggcu

SEQ ID NO: 1129070 - RNA, 23 nt, Human
uggcaggggagaaggaggcuggg

SEQ ID NO: 1129071 - RNA, 24 nt, Human
uggccaagcuggucucgaacuccu

SEQ ID NO: 1129072 - RNA, 22 nt, Human
uggccagagaagccuuggggac

SEQ ID NO: 1129073 - RNA, 19 nt, Human
uggccccaggcccccuccu

SEQ ID NO: 1129074 - RNA, 25 nt, Human
uggcgccaggcaaggcggcugcugg

SEQ ID NO: 1129075 - RNA, 18 nt, Human
ugggaaggccgcacagca

SEQ ID NO: 1129076 - RNA, 24 nt, Human
ugggaaggccgcacagcaggcagc

SEQ ID NO: 1129077 - RNA, 21 nt, Human
ugggaggucugugcccaggca

SEQ ID NO: 1129078 - RNA, 18 nt, Human
ugggauuacaggcaugag

SEQ ID NO: 1129079 - RNA, 18 nt, Human
ugggauuacaggcaugag

SEQ ID NO: 1129080 - RNA, 22 nt, Human
ugggauuacaggcaugagucac

SEQ ID NO: 1129081 - RNA, 23 nt, Human
ugggauuacaggcaugagucacc

SEQ ID NO: 1129082 - RNA, 24 nt, Human
ugggauuacaggcaugagucacca

SEQ ID NO: 1129083 - RNA, 24 nt, Human
ugggcaggagcucccagccagugg

SEQ ID NO: 1129084 - RNA, 19 nt, Human
uggggcuugggggcuacag

SEQ ID NO: 1129085 - RNA, 22 nt, Human
ugggggacguggaggcgaugag

SEQ ID NO: 1129086 - RNA, 27 nt, Human
ugggguuccagaggcagaggaaugccc

SEQ ID NO: 1129087 - RNA, 20 nt, Human
ugguggguguugugggggac

SEQ ID NO: 1129088 - RNA, 21 nt, Human
uguagagaaagcuugccccca

SEQ ID NO: 1129089 - RNA, 23 nt, Human
uguccaagcugagggagaggggc

SEQ ID NO: 1129090 - RNA, 25 nt, Human
ugugcccaggcaguggcugggaggu

SEQ ID NO: 1129091 - RNA, 20 nt, Human
uguggauuuguugauugucu

SEQ ID NO: 1129092 - RNA, 18 nt, Human
ugugggcagaagguagga

SEQ ID NO: 1129093 - RNA, 19 nt, Human
uguugugggggacguggag

SEQ ID NO: 1129094 - RNA, 22 nt, Human
uuagagcagcuccagugacucu

SEQ ID NO: 1129095 - RNA, 25 nt, Human
uuagcaccgaguagaagagacccug

SEQ ID NO: 1129096 - RNA, 18 nt, Human
uuagccucccaaagugcu

SEQ ID NO: 1129097 - RNA, 18 nt, Human
uucagcacucccaccccc

SEQ ID NO: 1129098 - RNA, 19 nt, Human
uuccuguccaagcugaggg

SEQ ID NO: 1129099 - RNA, 22 nt, Human
uugggcaggagcucccagccag

SEQ ID NO: 1129100 - RNA, 21 nt, Human
uuucacuauauuggccaagcu

SEQ ID NO: 1129101 - RNA, 18 nt, Human
uuuccuggccccucccug

SEQ ID NO: 1129102 - RNA, 24 nt, Human
uuuguggauuuguugauugucuga

SEQ ID NO: 1129103 - RNA, 22 nt, Human
aaaccaaaggucccuuccucag

SEQ ID NO: 1129104 - RNA, 19 nt, Human
aaaccaagacaagugagag

SEQ ID NO: 1129105 - RNA, 21 nt, Human
aaaccaggcugagugggaagg

SEQ ID NO: 1129106 - RNA, 23 nt, Human
aaaccccagcuuguagggcccca

SEQ ID NO: 1129107 - RNA, 19 nt, Human
aagcagcagaggaggcucc

SEQ ID NO: 1129108 - RNA, 21 nt, Human
acccucaccaggaaaccaggc

SEQ ID NO: 1129109 - RNA, 18 nt, Human
acugccucagcccuucaa

SEQ ID NO: 1129110 - RNA, 21 nt, Human
agaggaggcuccaaggagggu

SEQ ID NO: 1129111 - RNA, 19 nt, Human
agagguggacaguuggccc

SEQ ID NO: 1129112 - RNA, 18 nt, Human
agcaggagacuugggccc

SEQ ID NO: 1129113 - RNA, 21 nt, Human
aggaagggaggggagcagggc

SEQ ID NO: 1129114 - RNA, 22 nt, Human
aggaagggcagcuucuggcucu

SEQ ID NO: 1129115 - RNA, 21 nt, Human
aggagggugaggaaggagugg

SEQ ID NO: 1129116 - RNA, 18 nt, Human
aggggcagggagagcugg

SEQ ID NO: 1129117 - RNA, 23 nt, Human
agugacaaggcagccagcccuga

SEQ ID NO: 1129118 - RNA, 18 nt, Human
caacuucucuuccucuuc

SEQ ID NO: 1129119 - RNA, 23 nt, Human
caagacaagugagagaggugagc

SEQ ID NO: 1129120 - RNA, 21 nt, Human
cacacagccuuuuguaaaacc

SEQ ID NO: 1129121 - RNA, 23 nt, Human
cacccccucccuggcuggcacca

SEQ ID NO: 1129122 - RNA, 21 nt, Human
cacuccacaagcucuaauuca

SEQ ID NO: 1129123 - RNA, 20 nt, Human
cagccuuuuguaaaaccaag

SEQ ID NO: 1129124 - RNA, 20 nt, Human
cagcuucuggcucucuuccc

SEQ ID NO: 1129125 - RNA, 20 nt, Human
cagggucuucugccuccuga

SEQ ID NO: 1129126 - RNA, 18 nt, Human
caguccccucaggacuug

SEQ ID NO: 1129127 - RNA, 21 nt, Human
ccacuccacaagcucuaauuc

SEQ ID NO: 1129128 - RNA, 21 nt, Human
ccaggaugaggaggaagggca

SEQ ID NO: 1129129 - RNA, 18 nt, Human
ccagucccuccccaggcu

SEQ ID NO: 1129130 - RNA, 23 nt, Human
cccagaccugggccagguuucca

SEQ ID NO: 1129131 - RNA, 20 nt, Human
cccagcuuguagggccccac

SEQ ID NO: 1129132 - RNA, 20 nt, Human
cccagucccuccccaggcuc

SEQ ID NO: 1129133 - RNA, 20 nt, Human
cccaugacugcaggacccuc

SEQ ID NO: 1129134 - RNA, 18 nt, Human
ccccacuccacaagcucu

SEQ ID NO: 1129135 - RNA, 23 nt, Human
ccccaggacucccacccccuccc

SEQ ID NO: 1129136 - RNA, 24 nt, Human
ccccaggcucuacuaauggcuagc

SEQ ID NO: 1129137 - RNA, 26 nt, Human
ccucccaugggccuugcccugggggu

SEQ ID NO: 1129138 - RNA, 22 nt, Human
ccuccugccuccccaggacucc

SEQ ID NO: 1129139 - RNA, 22 nt, Human
ccuuaaaaccccagcuuguagg

SEQ ID NO: 1129140 - RNA, 18 nt, Human
ccuuuugaagacagaagu

SEQ ID NO: 1129141 - RNA, 25 nt, Human
cuagccagucccagucccuccccag

SEQ ID NO: 1129142 - RNA, 24 nt, Human
cuccccaggcucuacuaauggcua

SEQ ID NO: 1129143 - RNA, 18 nt, Human
cucucuucccagcugcug

SEQ ID NO: 1129144 - RNA, 22 nt, Human
cucugagaguggugagguccag

SEQ ID NO: 1129145 - RNA, 22 nt, Human
cugacugccucagcccuucaaa

SEQ ID NO: 1129146 - RNA, 19 nt, Human
gaagacagaaguggaaagg

SEQ ID NO: 1129147 - RNA, 20 nt, Human
gaaguggaaaggagagaaua

SEQ ID NO: 1129148 - RNA, 26 nt, Human
gagaauaguggacaagagagguggac

SEQ ID NO: 1129149 - RNA, 19 nt, Human
gaggaaggaguggcagggc

SEQ ID NO: 1129150 - RNA, 23 nt, Human
gaggaagggcagcuucuggcucu

SEQ ID NO: 1129151 - RNA, 18 nt, Human
gaggaggaggaacugggg

SEQ ID NO: 1129152 - RNA, 20 nt, Human
gaggaggaggaacuggggau

SEQ ID NO: 1129153 - RNA, 22 nt, Human
gagggugaggaaggaguggcag

SEQ ID NO: 1129154 - RNA, 24 nt, Human
gcaauacaagaaccacuggcugag

SEQ ID NO: 1129155 - RNA, 21 nt, Human
gccagcccugacugccucagc

SEQ ID NO: 1129156 - RNA, 18 nt, Human
ggcagcuucuggcucucu

SEQ ID NO: 1129157 - RNA, 20 nt, Human
ggcccagcaucauguccuca

SEQ ID NO: 1129158 - RNA, 20 nt, Human
gggcaugguguccagaaagc

SEQ ID NO: 1129159 - RNA, 21 nt, Human
ggggcagggagagcuggugga

SEQ ID NO: 1129160 - RNA, 19 nt, Human
ggggccaggaugaggagga

SEQ ID NO: 1129161 - RNA, 24 nt, Human
gggggcuggggaggggccaggaug

SEQ ID NO: 1129162 - RNA, 18 nt, Human
gguggggcugcuaaucug

SEQ ID NO: 1129163 - RNA, 19 nt, Human
gugaagggcaggaagggag

SEQ ID NO: 1129164 - RNA, 24 nt, Human
gugaggaaggaguggcagggcugg

SEQ ID NO: 1129165 - RNA, 25 nt, Human
uaaaaccaagacaagugagagaggu

SEQ ID NO: 1129166 - RNA, 29 nt, Human
uagagaaaaccaaaggucccuuccucaau

SEQ ID NO: 1129167 - RNA, 24 nt, Human
ucaacuucucuuccucuuccaaga

SEQ ID NO: 1129168 - RNA, 24 nt, Human
ucagggucuucugccuccugccuc

SEQ ID NO: 1129169 - RNA, 26 nt, Human
ucagggucuucugccuccugccuccc

SEQ ID NO: 1129170 - RNA, 18 nt, Human
ucagugggucuugggugg

SEQ ID NO: 1129171 - RNA, 20 nt, Human
ucccaugggccuugcccugg

SEQ ID NO: 1129172 - RNA, 21 nt, Human
ucccaugggccuugcccuggg

SEQ ID NO: 1129173 - RNA, 22 nt, Human
ucccucuucuugggaaugguuu

SEQ ID NO: 1129174 - RNA, 19 nt, Human
ucccugggguugggaggag

SEQ ID NO: 1129175 - RNA, 23 nt, Human
uccucaguccccucaggacuugg

SEQ ID NO: 1129176 - RNA, 19 nt, Human
ucugaaauaagacacaggg

SEQ ID NO: 1129177 - RNA, 27 nt, Human
ucugccuccugccuccccaggacuccc

SEQ ID NO: 1129178 - RNA, 18 nt, Human
ugacugcaggacccucac

SEQ ID NO: 1129179 - RNA, 19 nt, Human
ugagcaggagacuugggcc

SEQ ID NO: 1129180 - RNA, 20 nt, Human
ugagcaggagacuugggccc

SEQ ID NO: 1129181 - RNA, 18 nt, Human
ugaggaggaagggcagcu

SEQ ID NO: 1129182 - RNA, 23 nt, Human
ugaggaggaagggcagcuucugg

SEQ ID NO: 1129183 - RNA, 18 nt, Human
ugaggucccucuucuugg

SEQ ID NO: 1129184 - RNA, 24 nt, Human
ugcaggacccucaccaggaaacca

SEQ ID NO: 1129185 - RNA, 19 nt, Human
ugccaggacaagcagcucu

SEQ ID NO: 1129186 - RNA, 22 nt, Human
ugcccugggggucccccagggc

SEQ ID NO: 1129187 - RNA, 23 nt, Human
ugcccugggggucccccagggcc

SEQ ID NO: 1129188 - RNA, 23 nt, Human
ugcccuuggucccuucccuccca

SEQ ID NO: 1129189 - RNA, 20 nt, Human
ugcuaaucugcacuucuauc

SEQ ID NO: 1129190 - RNA, 19 nt, Human
uggaaaggagagaauagug

SEQ ID NO: 1129191 - RNA, 20 nt, Human
ugggaggaggaggaacuggg

SEQ ID NO: 1129192 - RNA, 23 nt, Human
ugggaggaggaggaacuggggau

SEQ ID NO: 1129193 - RNA, 18 nt, Human
ugggagggguaaggcaua

SEQ ID NO: 1129194 - RNA, 22 nt, Human
ugggagggguaaggcauagagu

SEQ ID NO: 1129195 - RNA, 21 nt, Human
ugggauagacaagcagcagag

SEQ ID NO: 1129196 - RNA, 20 nt, Human
uggggaggggccaggaugag

SEQ ID NO: 1129197 - RNA, 20 nt, Human
uggguugggagggguaaggc

SEQ ID NO: 1129198 - RNA, 22 nt, Human
ugguguuuuccaccuguucuug

SEQ ID NO: 1129199 - RNA, 20 nt, Human
uguccagaaagcuggugaag

SEQ ID NO: 1129200 - RNA, 21 nt, Human
ugucugaaauaagacacaggg

SEQ ID NO: 1129201 - RNA, 18 nt, Human
uucacaguauuggcgggg

SEQ ID NO: 1129202 - RNA, 22 nt, Human
uugaagacagaaguggaaagga

SEQ ID NO: 1129203 - RNA, 21 nt, Human
uugccagcugaggucccucuu

SEQ ID NO: 1129204 - RNA, 19 nt, Human
uuggccuagccagucccag

SEQ ID NO: 1129205 - RNA, 20 nt, Human
uugggauagacaagcagcag

SEQ ID NO: 1129206 - RNA, 18 nt, Human
uuuuuuggcacugucuac

SEQ ID NO: 1129207 - RNA, 21 nt, Human
aaaagagacuuugcaaauaug

SEQ ID NO: 1129208 - RNA, 20 nt, Human
aaccuccuccucccuacuuc

SEQ ID NO: 1129209 - RNA, 19 nt, Human
aaggaaacugaggcacaga

SEQ ID NO: 1129210 - RNA, 19 nt, Human
aaguaguugggauuacagg

SEQ ID NO: 1129211 - RNA, 20 nt, Human
acagggaaacagaagcagag

SEQ ID NO: 1129212 - RNA, 20 nt, Human
acagggaaacagaagcagag

SEQ ID NO: 1129213 - RNA, 25 nt, Human
acucuguugcccaggcuggagugua

SEQ ID NO: 1129214 - RNA, 21 nt, Human
agaggcuggagugagaugcuu

SEQ ID NO: 1129215 - RNA, 20 nt, Human
aggaaugcagcccugcccaa

SEQ ID NO: 1129216 - RNA, 18 nt, Human
aggcacagagggcugagc

SEQ ID NO: 1129217 - RNA, 25 nt, Human
aggccggaguacuggccacaccuag

SEQ ID NO: 1129218 - RNA, 21 nt, Human
aguguaguggcacaaucucag

SEQ ID NO: 1129219 - RNA, 23 nt, Human
augcuuugauguuggaggaaggg

SEQ ID NO: 1129220 - RNA, 20 nt, Human
caagacagggaaacagaagc

SEQ ID NO: 1129221 - RNA, 21 nt, Human
cacaguagcagcuaggaggcc

SEQ ID NO: 1129222 - RNA, 24 nt, Human
cacaguagcagcuaggaggccgga

SEQ ID NO: 1129223 - RNA, 19 nt, Human
caccuaggacugaaugaag

SEQ ID NO: 1129224 - RNA, 22 nt, Human
cacucuguugcccaggcuggag

SEQ ID NO: 1129225 - RNA, 22 nt, Human
cagaagcagaggcuggagugag

SEQ ID NO: 1129226 - RNA, 22 nt, Human
cagagggcugagccccaugccu

SEQ ID NO: 1129227 - RNA, 23 nt, Human
cagcccugcccaaaccuugauuu

SEQ ID NO: 1129228 - RNA, 22 nt, Human
cagcucacugcaaccuccuccu

SEQ ID NO: 1129229 - RNA, 20 nt, Human
cagcuccucaaucucguccu

SEQ ID NO: 1129230 - RNA, 21 nt, Human
cagggaaacagaagcagaggc

SEQ ID NO: 1129231 - RNA, 18 nt, Human
cauguucacauucccagg

SEQ ID NO: 1129232 - RNA, 19 nt, Human
ccaagacagggaaacagaa

SEQ ID NO: 1129233 - RNA, 26 nt, Human
ccacaugcguuauuccuguugguccu

SEQ ID NO: 1129234 - RNA, 22 nt, Human
cccaaguaguugggauuacagg

SEQ ID NO: 1129235 - RNA, 20 nt, Human
cccuacuucaagcgauucuc

SEQ ID NO: 1129236 - RNA, 21 nt, Human
ccgcagcuccucaaucucguc

SEQ ID NO: 1129237 - RNA, 21 nt, Human
ccucaaucucguccugcggag

SEQ ID NO: 1129238 - RNA, 18 nt, Human
ccuccucccuacuucaag

SEQ ID NO: 1129239 - RNA, 20 nt, Human
ccuccuccucccuacuucaa

SEQ ID NO: 1129240 - RNA, 21 nt, Human
ccucucaaggcaaggaaaagg

SEQ ID NO: 1129241 - RNA, 21 nt, Human
ccucucaaggcaaggaaaagg

SEQ ID NO: 1129242 - RNA, 24 nt, Human
ccuuugaccuccaggaucagaaga

SEQ ID NO: 1129243 - RNA, 24 nt, Human
cggagucucacucuguugcccagg

SEQ ID NO: 1129244 - RNA, 24 nt, Human
cucacucuguugcccaggcuggag

SEQ ID NO: 1129245 - RNA, 24 nt, Human
cucacugcaaccuccuccucccua

SEQ ID NO: 1129246 - RNA, 19 nt, Human
cucccugccuuagccuccc

SEQ ID NO: 1129247 - RNA, 22 nt, Human
cugcaaccuccuccucccuacu

SEQ ID NO: 1129248 - RNA, 24 nt, Human
cugcaaccuccuccucccuacuuc

SEQ ID NO: 1129249 - RNA, 21 nt, Human
cugccuuagccucccaaguag

SEQ ID NO: 1129250 - RNA, 22 nt, Human
cugggcccacaguagcagcuag

SEQ ID NO: 1129251 - RNA, 23 nt, Human
cuuagccucccaaguaguuggga

SEQ ID NO: 1129252 - RNA, 22 nt, Human
gcaaggaaaagguuucuccccu

SEQ ID NO: 1129253 - RNA, 20 nt, Human
gcccaggcuggaguguagug

SEQ ID NO: 1129254 - RNA, 22 nt, Human
gccggaguacuggccacaccua

SEQ ID NO: 1129255 - RNA, 24 nt, Human
gcguuauuccuguugguccucaca

SEQ ID NO: 1129256 - RNA, 22 nt, Human
gcucacugcaaccuccuccucc

SEQ ID NO: 1129257 - RNA, 20 nt, Human
gggaccuggauguggcaggc

SEQ ID NO: 1129258 - RNA, 22 nt, Human
guaaauuaaggaucccaagaca

SEQ ID NO: 1129259 - RNA, 26 nt, Human
uaaggaaacugaggcacagagggcug

SEQ ID NO: 1129260 - RNA, 24 nt, Human
ucacucuguugcccaggcuggagu

SEQ ID NO: 1129261 - RNA, 18 nt, Human
ucacugcaaccuccuccc

SEQ ID NO: 1129262 - RNA, 19 nt, Human
ucacugcaaccuccuccuc

SEQ ID NO: 1129263 - RNA, 27 nt, Human
ucacugcaaccuccuccucccuacuuc

SEQ ID NO: 1129264 - RNA, 23 nt, Human
ucagaagauaauaaucugguguu

SEQ ID NO: 1129265 - RNA, 25 nt, Human
ucagcucacugcaaccuccuccucc

SEQ ID NO: 1129266 - RNA, 18 nt, Human
ucccaggaucugugaaug

SEQ ID NO: 1129267 - RNA, 23 nt, Human
ucccaggaucugugaauguugcc

SEQ ID NO: 1129268 - RNA, 21 nt, Human
ucccuacuucaagcgauucuc

SEQ ID NO: 1129269 - RNA, 20 nt, Human
uccucccacagcggcugugg

SEQ ID NO: 1129270 - RNA, 22 nt, Human
uccugcggagggaaggaaggaa

SEQ ID NO: 1129271 - RNA, 23 nt, Human
ucucacucuguugcccaggcugg

SEQ ID NO: 1129272 - RNA, 24 nt, Human
ucucacucuguugcccaggcugga

SEQ ID NO: 1129273 - RNA, 26 nt, Human
ucucacucuguugcccaggcuggagu

SEQ ID NO: 1129274 - RNA, 27 nt, Human
ucucacucuguugcccaggcuggagug

SEQ ID NO: 1129275 - RNA, 18 nt, Human
ucuguugcccaggcugga

SEQ ID NO: 1129276 - RNA, 24 nt, Human
ucuguugcccaggcuggaguguag

SEQ ID NO: 1129277 - RNA, 18 nt, Human
ugacauuguugcauguuu

SEQ ID NO: 1129278 - RNA, 22 nt, Human
ugagacggagucucacucuguu

SEQ ID NO: 1129279 - RNA, 21 nt, Human
ugcccaggcuggaguguagug

SEQ ID NO: 1129280 - RNA, 22 nt, Human
ugcccaggcuggaguguagugg

SEQ ID NO: 1129281 - RNA, 24 nt, Human
ugcccaggcuggaguguaguggca

SEQ ID NO: 1129282 - RNA, 20 nt, Human
ugccuuagccucccaaguag

SEQ ID NO: 1129283 - RNA, 24 nt, Human
ugcuuugauguuggaggaaggggc

SEQ ID NO: 1129284 - RNA, 18 nt, Human
uggaguguaguggcacaa

SEQ ID NO: 1129285 - RNA, 23 nt, Human
uggaguguaguggcacaaucuca

SEQ ID NO: 1129286 - RNA, 24 nt, Human
uggaguguaguggcacaaucucag

SEQ ID NO: 1129287 - RNA, 25 nt, Human
uggauguggcaggcugaaugacaga

SEQ ID NO: 1129288 - RNA, 24 nt, Human
uggcacaaucucagcucacugcaa

SEQ ID NO: 1129289 - RNA, 20 nt, Human
ugggggaccuggauguggca

SEQ ID NO: 1129290 - RNA, 22 nt, Human
uguaguggcacaaucucagcuc

SEQ ID NO: 1129291 - RNA, 22 nt, Human
uguggcaggcugaaugacagac

SEQ ID NO: 1129292 - RNA, 19 nt, Human
uguucacauucccaggauc

SEQ ID NO: 1129293 - RNA, 24 nt, Human
uucaagcgauucucccugccuuag

SEQ ID NO: 1129294 - RNA, 23 nt, Human
uucauuuuuuuguuguuuuugag

SEQ ID NO: 1129295 - RNA, 19 nt, Human
uugaccuccaggaucagaa

SEQ ID NO: 1129296 - RNA, 21 nt, Human
acucuccccagcucccuccau

SEQ ID NO: 1129297 - RNA, 19 nt, Human
ccaugucaaucccuuggca

SEQ ID NO: 1129298 - RNA, 19 nt, Human
cucuccccagcucccucca

SEQ ID NO: 1129299 - RNA, 22 nt, Human
cuuugagagggaccaaaaggaa

SEQ ID NO: 1129300 - RNA, 27 nt, Human
gaugacagaugcaggcuuugagaggga

SEQ ID NO: 1129301 - RNA, 21 nt, Human
uaaauggaugacagaugcagg

SEQ ID NO: 1129302 - RNA, 25 nt, Human
uccccagcucccuccaugucaaucc

SEQ ID NO: 1129303 - RNA, 19 nt, Human
ucuccacuggggugugggg

SEQ ID NO: 1129304 - RNA, 19 nt, Human
ucugacuccuucacucucc

SEQ ID NO: 1129305 - RNA, 19 nt, Human
ugacuccuucacucucccc

SEQ ID NO: 1129306 - RNA, 18 nt, Human
ugagagggaccaaaagga

SEQ ID NO: 1129307 - RNA, 19 nt, Human
ugggaggggcugacauuag

SEQ ID NO: 1129308 - RNA, 24 nt, Human
ugggaggggcugacauuagagggg

SEQ ID NO: 1129309 - RNA, 18 nt, Human
uggggucagucauccugg

SEQ ID NO: 1129310 - RNA, 18 nt, Human
uucacucuccccagcucc

SEQ ID NO: 1129311 - RNA, 18 nt, Human
aaaacccucacaugccuc

SEQ ID NO: 1129312 - RNA, 21 nt, Human
aaagacauacagggacugugc

SEQ ID NO: 1129313 - RNA, 22 nt, Human
aacaaagccacucuugaugaac

SEQ ID NO: 1129314 - RNA, 20 nt, Human
aacauagggagcccccaucu

SEQ ID NO: 1129315 - RNA, 21 nt, Human
aacauagggagcccccaucuc

SEQ ID NO: 1129316 - RNA, 24 nt, Human
aacauccccacgaggcaagcacug

SEQ ID NO: 1129317 - RNA, 22 nt, Human
aagaaagaggcaggggagagga

SEQ ID NO: 1129318 - RNA, 21 nt, Human
aaggauuuugagcagaggugu

SEQ ID NO: 1129319 - RNA, 25 nt, Human
acaagacaaccacuguacaacaaag

SEQ ID NO: 1129320 - RNA, 23 nt, Human
acagcccagaggccggguuucca

SEQ ID NO: 1129321 - RNA, 20 nt, Human
acugaggugaccaugggugg

SEQ ID NO: 1129322 - RNA, 19 nt, Human
agaaggaacuaggagagcg

SEQ ID NO: 1129323 - RNA, 24 nt, Human
agcacuuugggaggauggcuuggg

SEQ ID NO: 1129324 - RNA, 23 nt, Human
agccugggcaacauagggagccc

SEQ ID NO: 1129325 - RNA, 24 nt, Human
aggaagggcugcagcguuuucuug

SEQ ID NO: 1129326 - RNA, 26 nt, Human
aggaggucuggagaagggggaccucc

SEQ ID NO: 1129327 - RNA, 20 nt, Human
aggaguuugagaccagccug

SEQ ID NO: 1129328 - RNA, 18 nt, Human
aggcaaaagggagaauga

SEQ ID NO: 1129329 - RNA, 21 nt, Human
aggcaaaagggagaaugagca

SEQ ID NO: 1129330 - RNA, 25 nt, Human
aggcaaaagggagaaugaggggacc

SEQ ID NO: 1129331 - RNA, 18 nt, Human
aggcaggggagaggaagg

SEQ ID NO: 1129332 - RNA, 23 nt, Human
aggcaggggagaggaaggccaag

SEQ ID NO: 1129333 - RNA, 18 nt, Human
aggcaguguccugggguc

SEQ ID NO: 1129334 - RNA, 20 nt, Human
aggggccagugagugggagc

SEQ ID NO: 1129335 - RNA, 22 nt, Human
agguggaggcuuucuuccugag

SEQ ID NO: 1129336 - RNA, 20 nt, Human
aguaacugaggugaccaugg

SEQ ID NO: 1129337 - RNA, 18 nt, Human
agucaugguugcuuucug

SEQ ID NO: 1129338 - RNA, 21 nt, Human
aguuggcccagggucacacag

SEQ ID NO: 1129339 - RNA, 23 nt, Human
auggguggcaagagccacaaaag

SEQ ID NO: 1129340 - RNA, 20 nt, Human
auuugauaacguuuggcuag

SEQ ID NO: 1129341 - RNA, 19 nt, Human
caaaacccucacaugccuc

SEQ ID NO: 1129342 - RNA, 20 nt, Human
caaaacccucacaugccucc

SEQ ID NO: 1129343 - RNA, 22 nt, Human
cacaacauccccacgaggcaag

SEQ ID NO: 1129344 - RNA, 24 nt, Human
cacaaguauccacagcccagaggc

SEQ ID NO: 1129345 - RNA, 23 nt, Human
cacacaacauccccacgaggcaa

SEQ ID NO: 1129346 - RNA, 23 nt, Human
cacacacaacauccccacgaggc

SEQ ID NO: 1129347 - RNA, 18 nt, Human
cacacaguuaagugauua

SEQ ID NO: 1129348 - RNA, 24 nt, Human
cacacuuguaaucccagcacuuug

SEQ ID NO: 1129349 - RNA, 18 nt, Human
cacagagcaggugcucaa

SEQ ID NO: 1129350 - RNA, 21 nt, Human
caccaccucucccaucacaag

SEQ ID NO: 1129351 - RNA, 18 nt, Human
cacgaacaugcaugugug

SEQ ID NO: 1129352 - RNA, 23 nt, Human
cacugucuuuauccccauguuca

SEQ ID NO: 1129353 - RNA, 23 nt, Human
cacuuguaaucccagcacuuugg

SEQ ID NO: 1129354 - RNA, 24 nt, Human
cacuuguaaucccagcacuuuggg

SEQ ID NO: 1129355 - RNA, 21 nt, Human
cagaaugccccaaacuugccc

SEQ ID NO: 1129356 - RNA, 19 nt, Human
cagcacuuugggaggaugg

SEQ ID NO: 1129357 - RNA, 22 nt, Human
cagccucugcuggagcccugcc

SEQ ID NO: 1129358 - RNA, 21 nt, Human
caggcuuggcgugguggcuca

SEQ ID NO: 1129359 - RNA, 26 nt, Human
caucucugcuuccaccccagcagggg

SEQ ID NO: 1129360 - RNA, 21 nt, Human
ccacucuugaugaacuccuac

SEQ ID NO: 1129361 - RNA, 20 nt, Human
ccagccaccaagugccuacu

SEQ ID NO: 1129362 - RNA, 25 nt, Human
cccaaccccuagaccugagccugaa

SEQ ID NO: 1129363 - RNA, 22 nt, Human
cccacaugcccugagaugggac

SEQ ID NO: 1129364 - RNA, 20 nt, Human
cccacgaggcaagcacuguc

SEQ ID NO: 1129365 - RNA, 24 nt, Human
ccccagagggcccugccagccacc

SEQ ID NO: 1129366 - RNA, 20 nt, Human
cccccugcccccacucuacc

SEQ ID NO: 1129367 - RNA, 22 nt, Human
cccccugcccccacucuaccug

SEQ ID NO: 1129368 - RNA, 18 nt, Human
ccccuucuuccagucucc

SEQ ID NO: 1129369 - RNA, 22 nt, Human
cccuagaccugagccugaaucu

SEQ ID NO: 1129370 - RNA, 20 nt, Human
cccugugcugcaagcucccc

SEQ ID NO: 1129371 - RNA, 19 nt, Human
ccgaagcugcugccaaucc

SEQ ID NO: 1129372 - RNA, 23 nt, Human
ccgcaccaccucucccaucacaa

SEQ ID NO: 1129373 - RNA, 21 nt, Human
ccgcaggaguccaggcagaga

SEQ ID NO: 1129374 - RNA, 24 nt, Human
ccuccaaagacauacagggacugu

SEQ ID NO: 1129375 - RNA, 19 nt, Human
ccucucuccugcccuccca

SEQ ID NO: 1129376 - RNA, 18 nt, Human
ccucuggagggggcuucu

SEQ ID NO: 1129377 - RNA, 25 nt, Human
ccucuuggccuuccacucauccgca

SEQ ID NO: 1129378 - RNA, 21 nt, Human
ccugaggcugagggcugaaac

SEQ ID NO: 1129379 - RNA, 18 nt, Human
ccugcccccugcccccac

SEQ ID NO: 1129380 - RNA, 24 nt, Human
ccugugcugcaagcuccccaagga

SEQ ID NO: 1129381 - RNA, 23 nt, Human
cgaggcaagcacugucuuuaucc

SEQ ID NO: 1129382 - RNA, 18 nt, Human
cgcaccaccucucccauc

SEQ ID NO: 1129383 - RNA, 23 nt, Human
cguggcucuaagcucuuugcaca

SEQ ID NO: 1129384 - RNA, 24 nt, Human
cguguguaugcauguauacacaca

SEQ ID NO: 1129385 - RNA, 24 nt, Human
cuacuguuuuccaggccagggcug

SEQ ID NO: 1129386 - RNA, 22 nt, Human
cucacacuuguaaucccagcac

SEQ ID NO: 1129387 - RNA, 24 nt, Human
cucacacuuguaaucccagcacuu

SEQ ID NO: 1129388 - RNA, 19 nt, Human
cugcccacuagaaaacaag

SEQ ID NO: 1129389 - RNA, 18 nt, Human
cugcuggagcccugccug

SEQ ID NO: 1129390 - RNA, 21 nt, Human
cuggcuuggccaacucagauc

SEQ ID NO: 1129391 - RNA, 19 nt, Human
cuguugcuugcagcuagga

SEQ ID NO: 1129392 - RNA, 21 nt, Human
cuuacaaaacccucacaugcc

SEQ ID NO: 1129393 - RNA, 25 nt, Human
cuuacaaaacccucacaugccucca

SEQ ID NO: 1129394 - RNA, 18 nt, Human
cuuugcucuggggagacg

SEQ ID NO: 1129395 - RNA, 22 nt, Human
cuuugggaggauggcuuggguc

SEQ ID NO: 1129396 - RNA, 18 nt, Human
gaaggaggucuggagaag

SEQ ID NO: 1129397 - RNA, 20 nt, Human
gaccauggguggcaagagcc

SEQ ID NO: 1129398 - RNA, 21 nt, Human
gagaauuuuucaucuauuugg

SEQ ID NO: 1129399 - RNA, 18 nt, Human
gagagccaggagcauguu

SEQ ID NO: 1129400 - RNA, 21 nt, Human
gaguaacugaggugaccaugg

SEQ ID NO: 1129401 - RNA, 20 nt, Human
gagucgaucuagugggcacc

SEQ ID NO: 1129402 - RNA, 20 nt, Human
gaugcacgaacaugcaugug

SEQ ID NO: 1129403 - RNA, 23 nt, Human
gauuuauucuaagagccuagaac

SEQ ID NO: 1129404 - RNA, 19 nt, Human
gcagaaugaggaagaaaga

SEQ ID NO: 1129405 - RNA, 22 nt, Human
gcagaaugccccaaacuugccc

SEQ ID NO: 1129406 - RNA, 18 nt, Human
gcccugaggcugagggcu

SEQ ID NO: 1129407 - RNA, 20 nt, Human
gccuuguggccucuggaggg

SEQ ID NO: 1129408 - RNA, 18 nt, Human
ggaaacaaaguacugauu

SEQ ID NO: 1129409 - RNA, 21 nt, Human
ggccaagggccugggcuuugc

SEQ ID NO: 1129410 - RNA, 18 nt, Human
ggccccuucuuccagucu

SEQ ID NO: 1129411 - RNA, 23 nt, Human
ggccccuucuuccagucuccugu

SEQ ID NO: 1129412 - RNA, 20 nt, Human
ggccgcguccucuccuggcu

SEQ ID NO: 1129413 - RNA, 23 nt, Human
ggccugggcuuugcucuggggag

SEQ ID NO: 1129414 - RNA, 23 nt, Human
ggcgugguggcucacacuuguaa

SEQ ID NO: 1129415 - RNA, 19 nt, Human
ggguucugggugcagaaug

SEQ ID NO: 1129416 - RNA, 20 nt, Human
gguccaggaguuugagacca

SEQ ID NO: 1129417 - RNA, 18 nt, Human
ggucuguccccaggugcc

SEQ ID NO: 1129418 - RNA, 24 nt, Human
gguggcucacacuuguaaucccag

SEQ ID NO: 1129419 - RNA, 21 nt, Human
gguucugggugcagaaugagg

SEQ ID NO: 1129420 - RNA, 21 nt, Human
guacaagacaaccacuguaca

SEQ ID NO: 1129421 - RNA, 18 nt, Human
gucaggcuuggcguggug

SEQ ID NO: 1129422 - RNA, 21 nt, Human
gugcccagccucugcuggagc

SEQ ID NO: 1129423 - RNA, 22 nt, Human
guguauggauggaguaagauug

SEQ ID NO: 1129424 - RNA, 21 nt, Human
uaagagccuagaacagcagcu

SEQ ID NO: 1129425 - RNA, 25 nt, Human
uaagcucuuugcacacguguguaug

SEQ ID NO: 1129426 - RNA, 19 nt, Human
uacaaaacccucacaugcc

SEQ ID NO: 1129427 - RNA, 18 nt, Human
uacagacaucugaaaugg

SEQ ID NO: 1129428 - RNA, 24 nt, Human
uacucugugcaaggcacaaugcua

SEQ ID NO: 1129429 - RNA, 20 nt, Human
uagaaaacaaggcucaauca

SEQ ID NO: 1129430 - RNA, 22 nt, Human
uaucacaacaauccuccuaaac

SEQ ID NO: 1129431 - RNA, 23 nt, Human
ucagaggaggacccgaggcacag

SEQ ID NO: 1129432 - RNA, 24 nt, Human
ucaggcuuggcgugguggcucaca

SEQ ID NO: 1129433 - RNA, 22 nt, Human
uccacagcccagaggccggguu

SEQ ID NO: 1129434 - RNA, 19 nt, Human
uccaggcagagacaagggg

SEQ ID NO: 1129435 - RNA, 19 nt, Human
ucccaaaauccagccaauc

SEQ ID NO: 1129436 - RNA, 19 nt, Human
ucccaggaagggcugcagc

SEQ ID NO: 1129437 - RNA, 23 nt, Human
uccccaaccccuagaccugagcc

SEQ ID NO: 1129438 - RNA, 21 nt, Human
uccccaggugccugauagucu

SEQ ID NO: 1129439 - RNA, 23 nt, Human
uccuacuguuuuccaggccaggg

SEQ ID NO: 1129440 - RNA, 21 nt, Human
uccucuccuggcuucuccaug

SEQ ID NO: 1129441 - RNA, 23 nt, Human
uccugcccucccaggaagggcug

SEQ ID NO: 1129442 - RNA, 23 nt, Human
uccuggggucuguccccaggugc

SEQ ID NO: 1129443 - RNA, 20 nt, Human
ucuaccuggggaaacaaagu

SEQ ID NO: 1129444 - RNA, 25 nt, Human
ucuacuugugaacaaugagaauuuu

SEQ ID NO: 1129445 - RNA, 30 nt, Human
ucuccugucuuguccacuggauuggcaaaa

SEQ ID NO: 1129446 - RNA, 20 nt, Human
ugaaauggagagccaggagc

SEQ ID NO: 1129447 - RNA, 24 nt, Human
ugaaauggagagccaggagcaugu

SEQ ID NO: 1129448 - RNA, 22 nt, Human
ugaacuccuacuguuuuccagg

SEQ ID NO: 1129449 - RNA, 18 nt, Human
ugaaggugcccagccucu

SEQ ID NO: 1129450 - RNA, 21 nt, Human
ugaggcaaaagggagaaugag

SEQ ID NO: 1129451 - RNA, 24 nt, Human
ugaggcaaaagggagaaugagcac

SEQ ID NO: 1129452 - RNA, 21 nt, Human
ugagugcuggccuacagacaa

SEQ ID NO: 1129453 - RNA, 18 nt, Human
ugaugaacuccuacuguu

SEQ ID NO: 1129454 - RNA, 22 nt, Human
ugauggcugaaggugcccagcc

SEQ ID NO: 1129455 - RNA, 18 nt, Human
ugcagcuaggaacccugg

SEQ ID NO: 1129456 - RNA, 23 nt, Human
ugccccaaacuugcccugcccgu

SEQ ID NO: 1129457 - RNA, 22 nt, Human
ugccccagagggcccugccagc

SEQ ID NO: 1129458 - RNA, 24 nt, Human
ugccccgaagcugcugccaaucca

SEQ ID NO: 1129459 - RNA, 26 nt, Human
ugccuuguggccucuggagggggcuu

SEQ ID NO: 1129460 - RNA, 18 nt, Human
ugcugaggaaguggacag

SEQ ID NO: 1129461 - RNA, 19 nt, Human
uggagcccugccugcugga

SEQ ID NO: 1129462 - RNA, 18 nt, Human
uggcccagggucacacag

SEQ ID NO: 1129463 - RNA, 23 nt, Human
uggccgcguccucuccuggcuuc

SEQ ID NO: 1129464 - RNA, 21 nt, Human
uggcucacacuuguaauccca

SEQ ID NO: 1129465 - RNA, 24 nt, Human
uggcucacacuuguaaucccagca

SEQ ID NO: 1129466 - RNA, 21 nt, Human
uggcuuggccaacucagaucu

SEQ ID NO: 1129467 - RNA, 19 nt, Human
ugggacacaguugcugaug

SEQ ID NO: 1129468 - RNA, 22 nt, Human
uggggagacgucuagaaucuac

SEQ ID NO: 1129469 - RNA, 23 nt, Human
uggggagacgucuagaaucuacu

SEQ ID NO: 1129470 - RNA, 18 nt, Human
uggguuaucacaacaauc

SEQ ID NO: 1129471 - RNA, 24 nt, Human
ugguggcucacacuuguaauccca

SEQ ID NO: 1129472 - RNA, 22 nt, Human
uguacaacaaagccacucuuga

SEQ ID NO: 1129473 - RNA, 19 nt, Human
uguauacacacacaacauc

SEQ ID NO: 1129474 - RNA, 25 nt, Human
uguauacacacacaacauccccacg

SEQ ID NO: 1129475 - RNA, 25 nt, Human
uguaugcauguauacacacacaaca

SEQ ID NO: 1129476 - RNA, 19 nt, Human
uucauggcucugcggguuu

SEQ ID NO: 1129477 - RNA, 18 nt, Human
uuccaccccagcaggggu

SEQ ID NO: 1129478 - RNA, 18 nt, Human
uuggcaaaaaucuuaaag

SEQ ID NO: 1129479 - RNA, 21 nt, Human
uuggcagcugggccaguggcc

SEQ ID NO: 1129480 - RNA, 22 nt, Human
uuggguccaggaguuugagacc

SEQ ID NO: 1129481 - RNA, 26 nt, Human
uuuaauauuccccaaccccuagaccu

SEQ ID NO: 1129482 - RNA, 25 nt, Human
uuuccaggccagggcuggugcuuuc

SEQ ID NO: 1129483 - RNA, 23 nt, Human
uuugagaaauuccuuuucugcuu

SEQ ID NO: 1129484 - RNA, 20 nt, Human
uuugcacacguguguaugca

SEQ ID NO: 1129485 - RNA, 23 nt, Human
uuuguaguccccaguuuacagac

SEQ ID NO: 1129486 - RNA, 22 nt, Human
uuuuccaggccagggcuggugc

SEQ ID NO: 1129487 - RNA, 18 nt, Human
aaaccaggaaagaaaaug

SEQ ID NO: 1129488 - RNA, 26 nt, Human
aaacccacagggaggcagaaccagaa

SEQ ID NO: 1129489 - RNA, 21 nt, Human
aacaacagcaaacccacaggg

SEQ ID NO: 1129490 - RNA, 22 nt, Human
accagaaaaccaggaaagaaaa

SEQ ID NO: 1129491 - RNA, 24 nt, Human
agaugaucaauaacaacagcaaac

SEQ ID NO: 1129492 - RNA, 21 nt, Human
aggcagaaccagaaaaccagg

SEQ ID NO: 1129493 - RNA, 23 nt, Human
agggcugggaccucuggaggcuu

SEQ ID NO: 1129494 - RNA, 23 nt, Human
auggacccacacccuccggccca

SEQ ID NO: 1129495 - RNA, 22 nt, Human
auguguggcuaagcugggccag

SEQ ID NO: 1129496 - RNA, 20 nt, Human
cacacccuccggcccagccc

SEQ ID NO: 1129497 - RNA, 18 nt, Human
cacccuccggcccagccc

SEQ ID NO: 1129498 - RNA, 22 nt, Human
cacccuccggcccagcccugcu

SEQ ID NO: 1129499 - RNA, 19 nt, Human
cacugcucccaugcccucc

SEQ ID NO: 1129500 - RNA, 21 nt, Human
cacugcucccaugcccuccca

SEQ ID NO: 1129501 - RNA, 23 nt, Human
cagcaaacccacagggaggcaga

SEQ ID NO: 1129502 - RNA, 19 nt, Human
ccacacccuccggcccagc

SEQ ID NO: 1129503 - RNA, 22 nt, Human
cccaugggccugcucacugcuc

SEQ ID NO: 1129504 - RNA, 21 nt, Human
cccccggguaugggaagaccc

SEQ ID NO: 1129505 - RNA, 23 nt, Human
ccucugaaucuuggcuaaguaag

SEQ ID NO: 1129506 - RNA, 21 nt, Human
ccugggcugggcuggcagggc

SEQ ID NO: 1129507 - RNA, 25 nt, Human
cucacugcucccaugcccucccaga

SEQ ID NO: 1129508 - RNA, 23 nt, Human
cuggaggucaucugugaugcugg

SEQ ID NO: 1129509 - RNA, 25 nt, Human
gaggcagaaccagaaaaccaggaaa

SEQ ID NO: 1129510 - RNA, 19 nt, Human
gcauguguggcuaagcugg

SEQ ID NO: 1129511 - RNA, 19 nt, Human
gcucccaugcccucccaga

SEQ ID NO: 1129512 - RNA, 18 nt, Human
gggcugggcuggcagggc

SEQ ID NO: 1129513 - RNA, 20 nt, Human
gggcugggcuggcagggcug

SEQ ID NO: 1129514 - RNA, 21 nt, Human
gggcugggcuggcagggcugc

SEQ ID NO: 1129515 - RNA, 24 nt, Human
uaagcugggccagccugggcuggg

SEQ ID NO: 1129516 - RNA, 21 nt, Human
uacuucauggcgcaugugugg

SEQ ID NO: 1129517 - RNA, 24 nt, Human
ucaauaacaacagcaaacccacag

SEQ ID NO: 1129518 - RNA, 24 nt, Human
uccccaugggccugcucacugcuc

SEQ ID NO: 1129519 - RNA, 18 nt, Human
ucccugcagggcuggagg

SEQ ID NO: 1129520 - RNA, 19 nt, Human
ugaugcuggagaagggcug

SEQ ID NO: 1129521 - RNA, 20 nt, Human
ugggccagccugggcugggc

SEQ ID NO: 1129522 - RNA, 18 nt, Human
ugucaggggucccccggg

SEQ ID NO: 1129523 - RNA, 19 nt, Human
ugucaggggucccccgggu

SEQ ID NO: 1129524 - RNA, 19 nt, Human
ugugaugcuggagaagggc

SEQ ID NO: 1129525 - RNA, 22 nt, Human
aaauaaccauuguuuuaaggau

SEQ ID NO: 1129526 - RNA, 20 nt, Human
aacauggugaaacccugucu

SEQ ID NO: 1129527 - RNA, 21 nt, Human
aacauggugaaacccugucuc

SEQ ID NO: 1129528 - RNA, 18 nt, Human
aacugcuugaauccugga

SEQ ID NO: 1129529 - RNA, 19 nt, Human
aaguaugcauugggaacag

SEQ ID NO: 1129530 - RNA, 20 nt, Human
aaguaugcauugggaacagu

SEQ ID NO: 1129531 - RNA, 19 nt, Human
acagagcgagacuccaucu

SEQ ID NO: 1129532 - RNA, 22 nt, Human
acccugucucuacuaaaaauag

SEQ ID NO: 1129533 - RNA, 24 nt, Human
accugaggucaggaguucgagacc

SEQ ID NO: 1129534 - RNA, 24 nt, Human
acugcacuccagccugggugacag

SEQ ID NO: 1129535 - RNA, 26 nt, Human
acugcacuccagccugggugacagag

SEQ ID NO: 1129536 - RNA, 18 nt, Human
agaacagauacugcacau

SEQ ID NO: 1129537 - RNA, 24 nt, Human
agacugaggcaggagaacugcuug

SEQ ID NO: 1129538 - RNA, 20 nt, Human
agagguuacagugagccaag

SEQ ID NO: 1129539 - RNA, 22 nt, Human
agauggcgccacugcacuccag

SEQ ID NO: 1129540 - RNA, 23 nt, Human
agcacuucgggaggccaaggcag

SEQ ID NO: 1129541 - RNA, 20 nt, Human
agcacuuugggaggccgagg

SEQ ID NO: 1129542 - RNA, 24 nt, Human
agccugggugacagagcgagacuc

SEQ ID NO: 1129543 - RNA, 21 nt, Human
agccuggucaacauggugaaa

SEQ ID NO: 1129544 - RNA, 24 nt, Human
aggagcgguggcucaugccuguag

SEQ ID NO: 1129545 - RNA, 21 nt, Human
aggaguucgagaccagccugg

SEQ ID NO: 1129546 - RNA, 24 nt, Human
aggcagagguuacagugagccaag

SEQ ID NO: 1129547 - RNA, 18 nt, Human
aggcaggagaacugcuug

SEQ ID NO: 1129548 - RNA, 26 nt, Human
aggcaggcagaucaccugaggucagg

SEQ ID NO: 1129549 - RNA, 24 nt, Human
aggccgagggcggggguggaucac

SEQ ID NO: 1129550 - RNA, 22 nt, Human
aggccgggcgcaguggcucacg

SEQ ID NO: 1129551 - RNA, 21 nt, Human
aggcuuuuuaaaaaagugauu

SEQ ID NO: 1129552 - RNA, 18 nt, Human
aggucaggacuuugagac

SEQ ID NO: 1129553 - RNA, 22 nt, Human
aggugccuucucagggucuucc

SEQ ID NO: 1129554 - RNA, 24 nt, Human
aguggcucacgccuguaaucuuag

SEQ ID NO: 1129555 - RNA, 24 nt, Human
auggcgccacugcacuccagccug

SEQ ID NO: 1129556 - RNA, 26 nt, Human
caaauacauacauuauuauauuuaca

SEQ ID NO: 1129557 - RNA, 24 nt, Human
caacauggugaaaacucgucucua

SEQ ID NO: 1129558 - RNA, 24 nt, Human
caacauggugaaacccugucucua

SEQ ID NO: 1129559 - RNA, 19 nt, Human
caacucuugcuuuucaggg

SEQ ID NO: 1129560 - RNA, 21 nt, Human
caagaagcaaugagacuugag

SEQ ID NO: 1129561 - RNA, 23 nt, Human
caagauacacaaauacacagaug

SEQ ID NO: 1129562 - RNA, 24 nt, Human
caaggcaggcagaucaccugaggu

SEQ ID NO: 1129563 - RNA, 26 nt, Human
caaggcaggcagaucaccugagguca

SEQ ID NO: 1129564 - RNA, 23 nt, Human
cacaccuguaaucccagcuacuu

SEQ ID NO: 1129565 - RNA, 23 nt, Human
cacagagcggacauauaagacaa

SEQ ID NO: 1129566 - RNA, 26 nt, Human
caccucuagcguugucuaaacaacuc

SEQ ID NO: 1129567 - RNA, 23 nt, Human
caccugaggucaggaguucgaga

SEQ ID NO: 1129568 - RNA, 23 nt, Human
caccuguaaucccagcuacuugg

SEQ ID NO: 1129569 - RNA, 24 nt, Human
caccuguaaucccagcuacuuggg

SEQ ID NO: 1129570 - RNA, 20 nt, Human
cacgccuguaaucuuagcac

SEQ ID NO: 1129571 - RNA, 24 nt, Human
cacgccuguaaucuuagcacuucg

SEQ ID NO: 1129572 - RNA, 22 nt, Human
cacuccagccugggugacagag

SEQ ID NO: 1129573 - RNA, 24 nt, Human
cacuccagccugggugacagagcg

SEQ ID NO: 1129574 - RNA, 19 nt, Human
cacugcacuccagccuggg

SEQ ID NO: 1129575 - RNA, 21 nt, Human
cacugcacuccagccugggug

SEQ ID NO: 1129576 - RNA, 22 nt, Human
cacugcacuccagccuggguga

SEQ ID NO: 1129577 - RNA, 23 nt, Human
cacugcacuccagccugggugac

SEQ ID NO: 1129578 - RNA, 24 nt, Human
cacugcacuccagccugggugaca

SEQ ID NO: 1129579 - RNA, 24 nt, Human
cacugcacuccagccugggugaca

SEQ ID NO: 1129580 - RNA, 22 nt, Human
cacuuuuuuccagacuaccucu

SEQ ID NO: 1129581 - RNA, 22 nt, Human
cagagcaagcuccuauuccauc

SEQ ID NO: 1129582 - RNA, 23 nt, Human
cagaucaccugaggucaggacuu

SEQ ID NO: 1129583 - RNA, 25 nt, Human
cagcacuuugggaggccgagggcgg

SEQ ID NO: 1129584 - RNA, 22 nt, Human
caggagaacugcuugaauccug

SEQ ID NO: 1129585 - RNA, 21 nt, Human
caggugccuucucagggucuu

SEQ ID NO: 1129586 - RNA, 23 nt, Human
caguuaaacagguuuuuucccag

SEQ ID NO: 1129587 - RNA, 24 nt, Human
cauacaaauacauacauuauuaua

SEQ ID NO: 1129588 - RNA, 24 nt, Human
cauauaagacaaacuccaggaagg

SEQ ID NO: 1129589 - RNA, 27 nt, Human
caucccaacccuuauaaaaauaacuag

SEQ ID NO: 1129590 - RNA, 24 nt, Human
caugccuguagugccagcacuuug

SEQ ID NO: 1129591 - RNA, 18 nt, Human
ccaaaaacacuuuuuucc

SEQ ID NO: 1129592 - RNA, 19 nt, Human
ccaacucuugucucccaga

SEQ ID NO: 1129593 - RNA, 23 nt, Human
ccacuaaaagaagagcuccacag

SEQ ID NO: 1129594 - RNA, 20 nt, Human
ccacugcacuccagccuggg

SEQ ID NO: 1129595 - RNA, 20 nt, Human
ccacugcacuccagccuggg

SEQ ID NO: 1129596 - RNA, 20 nt, Human
ccacugcacuccagccuggg

SEQ ID NO: 1129597 - RNA, 21 nt, Human
ccacugcacuccagccugggu

SEQ ID NO: 1129598 - RNA, 21 nt, Human
ccacugcacuccagccugggu

SEQ ID NO: 1129599 - RNA, 23 nt, Human
ccacugcacuccagccuggguga

SEQ ID NO: 1129600 - RNA, 23 nt, Human
ccacugcacuccagccuggguga

SEQ ID NO: 1129601 - RNA, 24 nt, Human
ccacugcacuccagccugggugac

SEQ ID NO: 1129602 - RNA, 19 nt, Human
ccccggacugcaagauuau

SEQ ID NO: 1129603 - RNA, 24 nt, Human
cccggccaggagcgguggcucaug

SEQ ID NO: 1129604 - RNA, 22 nt, Human
ccugaggucaggacuuugagac

SEQ ID NO: 1129605 - RNA, 22 nt, Human
ccugaggucaggaguucgagac

SEQ ID NO: 1129606 - RNA, 22 nt, Human
ccuggccaacauggugaaaccc

SEQ ID NO: 1129607 - RNA, 24 nt, Human
ccuggccaacauggugaaacccug

SEQ ID NO: 1129608 - RNA, 22 nt, Human
ccugggugacagagcgagacuc

SEQ ID NO: 1129609 - RNA, 19 nt, Human
ccuggucaacauggugaaa

SEQ ID NO: 1129610 - RNA, 24 nt, Human
ccuggucaacauggugaaaacucg

SEQ ID NO: 1129611 - RNA, 21 nt, Human
ccuguaaucccagcuacuugg

SEQ ID NO: 1129612 - RNA, 24 nt, Human
cgagaccagccuggucaacauggu

SEQ ID NO: 1129613 - RNA, 25 nt, Human
cgagacuccaucuuggaaaaaaaaa

SEQ ID NO: 1129614 - RNA, 18 nt, Human
cgccuguaaucuuagcac

SEQ ID NO: 1129615 - RNA, 23 nt, Human
cgccuguaaucuuagcacuucgg

SEQ ID NO: 1129616 - RNA, 24 nt, Human
cgccuguaaucuuagcacuucggg

SEQ ID NO: 1129617 - RNA, 24 nt, Human
cggccaggagcgguggcucaugcc

SEQ ID NO: 1129618 - RNA, 24 nt, Human
cgggaggccaaggcaggcagauca

SEQ ID NO: 1129619 - RNA, 20 nt, Human
cgucucuacuaaaauuacaa

SEQ ID NO: 1129620 - RNA, 24 nt, Human
cucacgccuguaaucuuagcacuu

SEQ ID NO: 1129621 - RNA, 24 nt, Human
cucaugccuguagugccagcacuu

SEQ ID NO: 1129622 - RNA, 21 nt, Human
cucccagaacugaacaccucu

SEQ ID NO: 1129623 - RNA, 20 nt, Human
cuccuugcuccaaaaaucua

SEQ ID NO: 1129624 - RNA, 20 nt, Human
cucgucucuacuaaaauuac

SEQ ID NO: 1129625 - RNA, 18 nt, Human
cugcuugaauccuggagg

SEQ ID NO: 1129626 - RNA, 24 nt, Human
cuggccaacauggugaaacccugu

SEQ ID NO: 1129627 - RNA, 21 nt, Human
cuguaaucccagcuacuuggg

SEQ ID NO: 1129628 - RNA, 23 nt, Human
gaaaagagggacauggugugcag

SEQ ID NO: 1129629 - RNA, 19 nt, Human
gaaacccugucucuacuaa

SEQ ID NO: 1129630 - RNA, 23 nt, Human
gagaccugccuggccaacauggu

SEQ ID NO: 1129631 - RNA, 25 nt, Human
gagggugcaccauuccuggagguac

SEQ ID NO: 1129632 - RNA, 24 nt, Human
gaucaccugaggucaggacuuuga

SEQ ID NO: 1129633 - RNA, 21 nt, Human
gaucaccugaggucaggaguu

SEQ ID NO: 1129634 - RNA, 24 nt, Human
gaucaccugaggucaggaguucga

SEQ ID NO: 1129635 - RNA, 24 nt, Human
gcacuccagccugggugacagagc

SEQ ID NO: 1129636 - RNA, 21 nt, Human
gcagaucaccugaggucagga

SEQ ID NO: 1129637 - RNA, 24 nt, Human
gccaacauggugaaacccugucuc

SEQ ID NO: 1129638 - RNA, 19 nt, Human
gccacugcacuccagccug

SEQ ID NO: 1129639 - RNA, 24 nt, Human
gccacugcacuccagccuggguga

SEQ ID NO: 1129640 - RNA, 23 nt, Human
gccuggccaacauggugaaaccc

SEQ ID NO: 1129641 - RNA, 20 nt, Human
gcgcaguggcucacgccugu

SEQ ID NO: 1129642 - RNA, 23 nt, Human
gcugcuacaguuguuuggaccag

SEQ ID NO: 1129643 - RNA, 22 nt, Human
ggagaacugcuugaauccugga

SEQ ID NO: 1129644 - RNA, 21 nt, Human
ggaggcagagguuacagugag

SEQ ID NO: 1129645 - RNA, 23 nt, Human
ggcgcaguggcucacgccuguaa

SEQ ID NO: 1129646 - RNA, 23 nt, Human
ggcggggguggaucaccugaggu

SEQ ID NO: 1129647 - RNA, 23 nt, Human
gggaggccaaggcaggcagauca

SEQ ID NO: 1129648 - RNA, 24 nt, Human
gggcggggguggaucaccugaggu

SEQ ID NO: 1129649 - RNA, 24 nt, Human
gggguggaucaccugaggucagga

SEQ ID NO: 1129650 - RNA, 21 nt, Human
gguggaucaccugaggucagg

SEQ ID NO: 1129651 - RNA, 18 nt, Human
gguggcucaugccuguag

SEQ ID NO: 1129652 - RNA, 24 nt, Human
gguggcucaugccuguagugccag

SEQ ID NO: 1129653 - RNA, 24 nt, Human
gguuacagugagccaagauggcgc

SEQ ID NO: 1129654 - RNA, 19 nt, Human
guaaauccaaaaacacuuu

SEQ ID NO: 1129655 - RNA, 24 nt, Human
guuggcacacaccuguaaucccag

SEQ ID NO: 1129656 - RNA, 19 nt, Human
uaaaaauagaaaaauuagc

SEQ ID NO: 1129657 - RNA, 20 nt, Human
uaaaaauagaaaaauuagcu

SEQ ID NO: 1129658 - RNA, 21 nt, Human
uaaaauuacaaaaauuaggcc

SEQ ID NO: 1129659 - RNA, 23 nt, Human
uaaacugguaagaacagauacug

SEQ ID NO: 1129660 - RNA, 27 nt, Human
uaaaucaagacuguucacucauggacc

SEQ ID NO: 1129661 - RNA, 22 nt, Human
uaagacaaacuccaggaaggcu

SEQ ID NO: 1129662 - RNA, 21 nt, Human
uacacagaugugcugcuacag

SEQ ID NO: 1129663 - RNA, 21 nt, Human
uaccucuugagacuugggcuu

SEQ ID NO: 1129664 - RNA, 20 nt, Human
uacuaaaauuacaaaaauua

SEQ ID NO: 1129665 - RNA, 18 nt, Human
uacugcacaugaucuuag

SEQ ID NO: 1129666 - RNA, 26 nt, Human
uagagagggugcaccauuccuggagg

SEQ ID NO: 1129667 - RNA, 24 nt, Human
uagcacuucgggaggccaaggcag

SEQ ID NO: 1129668 - RNA, 21 nt, Human
uagcaggugaaaacugguagu

SEQ ID NO: 1129669 - RNA, 26 nt, Human
uagcugagcaugguuggcacacaccu

SEQ ID NO: 1129670 - RNA, 18 nt, Human
uauuccaucuccuugcuc

SEQ ID NO: 1129671 - RNA, 18 nt, Human
ucacccaagaucuaguuc

SEQ ID NO: 1129672 - RNA, 20 nt, Human
ucacccaagaucuaguucuu

SEQ ID NO: 1129673 - RNA, 20 nt, Human
ucaccugaggucaggaguuc

SEQ ID NO: 1129674 - RNA, 18 nt, Human
ucagggacccauccaucu

SEQ ID NO: 1129675 - RNA, 22 nt, Human
ucaugccuguagugccagcacu

SEQ ID NO: 1129676 - RNA, 20 nt, Human
uccaaaaacacuuuuuucca

SEQ ID NO: 1129677 - RNA, 23 nt, Human
uccagccugggugacagagcgag

SEQ ID NO: 1129678 - RNA, 24 nt, Human
uccagccugggugacagagcgaga

SEQ ID NO: 1129679 - RNA, 23 nt, Human
uccaucuccuugcuccaaaaauc

SEQ ID NO: 1129680 - RNA, 23 nt, Human
ucccagaacugaacaccucuagc

SEQ ID NO: 1129681 - RNA, 19 nt, Human
ucuagguugucacccaaga

SEQ ID NO: 1129682 - RNA, 21 nt, Human
ucucccagaacugaacaccuc

SEQ ID NO: 1129683 - RNA, 22 nt, Human
ucuccuugcuccaaaaaucuau

SEQ ID NO: 1129684 - RNA, 21 nt, Human
ucucuacuaaaaauagaaaaa

SEQ ID NO: 1129685 - RNA, 21 nt, Human
ucucuacuaaaauuacaaaaa

SEQ ID NO: 1129686 - RNA, 21 nt, Human
ucugauuccgacucucuuagg

SEQ ID NO: 1129687 - RNA, 18 nt, Human
ugaaaugacugaaccuca

SEQ ID NO: 1129688 - RNA, 18 nt, Human
ugacugaaccucaagacu

SEQ ID NO: 1129689 - RNA, 19 nt, Human
ugagaaaaaauaaccauug

SEQ ID NO: 1129690 - RNA, 20 nt, Human
ugagaaaaaauaaccauugu

SEQ ID NO: 1129691 - RNA, 24 nt, Human
ugaggcaggagaacugcuugaauc

SEQ ID NO: 1129692 - RNA, 25 nt, Human
ugaggcaggagaacugcuugaaucc

SEQ ID NO: 1129693 - RNA, 23 nt, Human
ugaggucaggacuuugagaccug

SEQ ID NO: 1129694 - RNA, 19 nt, Human
ugcaagauuauggaggaac

SEQ ID NO: 1129695 - RNA, 23 nt, Human
ugccuguagugccagcacuuugg

SEQ ID NO: 1129696 - RNA, 20 nt, Human
uggacagagcaagcuccuau

SEQ ID NO: 1129697 - RNA, 21 nt, Human
uggaggaacaagauacacaaa

SEQ ID NO: 1129698 - RNA, 25 nt, Human
uggaggaacaagauacacaaauaca

SEQ ID NO: 1129699 - RNA, 24 nt, Human
uggaucaccugaggucaggaguuc

SEQ ID NO: 1129700 - RNA, 27 nt, Human
uggaucaccugaggucaggaguucgag

SEQ ID NO: 1129701 - RNA, 24 nt, Human
uggccaacauggugaaacccuguc

SEQ ID NO: 1129702 - RNA, 18 nt, Human
uggcucacgccuguaauc

SEQ ID NO: 1129703 - RNA, 24 nt, Human
uggcucacgccuguaaucuuagca

SEQ ID NO: 1129704 - RNA, 27 nt, Human
ugggaggccgagggcggggguggauca

SEQ ID NO: 1129705 - RNA, 21 nt, Human
uguuuggaccaggaugggcac

SEQ ID NO: 1129706 - RNA, 22 nt, Human
uuaaaucaagacuguucacuca

SEQ ID NO: 1129707 - RNA, 24 nt, Human
uuugggaggccgagggcgggggug

SEQ ID NO: 1129708 - RNA, 18 nt, Human
uuugggggugguagagag

SEQ ID NO: 1129709 - RNA, 23 nt, Human
aaaagcagcuacacagagaacag

SEQ ID NO: 1129710 - RNA, 21 nt, Human
aagagccaaaaacccacagcc

SEQ ID NO: 1129711 - RNA, 23 nt, Human
aggcgugugcuccuuccucagcu

SEQ ID NO: 1129712 - RNA, 26 nt, Human
auagcagaugcaagagccaaaaaccc

SEQ ID NO: 1129713 - RNA, 22 nt, Human
caaaagcagcuacacagagaac

SEQ ID NO: 1129714 - RNA, 20 nt, Human
caagagccaaaaacccacag

SEQ ID NO: 1129715 - RNA, 22 nt, Human
caagagccaaaaacccacagcc

SEQ ID NO: 1129716 - RNA, 24 nt, Human
gaacagaguuagcaaauggcaccc

SEQ ID NO: 1129717 - RNA, 18 nt, Human
gagacagaacuauagcag

SEQ ID NO: 1129718 - RNA, 20 nt, Human
gagcugccaaaagcagcuac

SEQ ID NO: 1129719 - RNA, 23 nt, Human
gaugcaagagccaaaaacccacu

SEQ ID NO: 1129720 - RNA, 22 nt, Human
gauggaguuguccucugcccag

SEQ ID NO: 1129721 - RNA, 18 nt, Human
ggaguuguccucugccca

SEQ ID NO: 1129722 - RNA, 18 nt, Human
uaagaaggauggaguugu

SEQ ID NO: 1129723 - RNA, 19 nt, Human
ucacugcuagagucuaacg

SEQ ID NO: 1129724 - RNA, 19 nt, Human
uccucugcccaguuuuggc

SEQ ID NO: 1129725 - RNA, 23 nt, Human
ucuguaggugacggucuuaacuu

SEQ ID NO: 1129726 - RNA, 22 nt, Human
ugagugguggauuagaagagag

SEQ ID NO: 1129727 - RNA, 22 nt, Human
uggagaagcccuuuuguaagaa

SEQ ID NO: 1129728 - RNA, 18 nt, Human
ugggauucuguaggugac

SEQ ID NO: 1129729 - RNA, 18 nt, Human
uguccucugcccaguuuu

SEQ ID NO: 1129730 - RNA, 23 nt, Human
uugaugaggcgugugcuccuucc

SEQ ID NO: 1129731 - RNA, 24 nt, Human
aaaaaaaaaaaacaaaacaaaaaa

SEQ ID NO: 1129732 - RNA, 23 nt, Human
aaaaaaaacaaaacaaaacaaaa

SEQ ID NO: 1129733 - RNA, 23 nt, Human
aaaaaaacaaaaaacaaacaaaa

SEQ ID NO: 1129734 - RNA, 25 nt, Human
aaaaaaacaaaaaacaaacaaaaaa

SEQ ID NO: 1129735 - RNA, 31 nt, Human
aaaaaacaaaacaaaacaaaaaaacaaaaaa

SEQ ID NO: 1129736 - RNA, 24 nt, Human
aaaaacaaaacaaaaaacugugug

SEQ ID NO: 1129737 - RNA, 25 nt, Human
aaaaacaaaacaaaaaacugugugg

SEQ ID NO: 1129738 - RNA, 27 nt, Human
aaaacaaaacaaaacaaaaaaacaaaa

SEQ ID NO: 1129739 - RNA, 23 nt, Human
aaacaaaacaaaacaaaaaaaca

SEQ ID NO: 1129740 - RNA, 24 nt, Human
aaacaaaacaaaacaaaaaaacaa

SEQ ID NO: 1129741 - RNA, 25 nt, Human
aaacaaaacaaaacaaaaaaacaaa

SEQ ID NO: 1129742 - RNA, 23 nt, Human
aaacaagugcuccgaggaaacaa

SEQ ID NO: 1129743 - RNA, 26 nt, Human
aaacauucagcaauuauuagaauggu

SEQ ID NO: 1129744 - RNA, 18 nt, Human
aaaugagcuacugaaguc

SEQ ID NO: 1129745 - RNA, 23 nt, Human
aaauggcagaggcugaagaaacc

SEQ ID NO: 1129746 - RNA, 25 nt, Human
aacaaaacaaaaaaacaaaaaacaa

SEQ ID NO: 1129747 - RNA, 25 nt, Human
aacaaaacaaaaaacuguguggucu

SEQ ID NO: 1129748 - RNA, 26 nt, Human
aacaaaacaaaacaaaaaaacaagac

SEQ ID NO: 1129749 - RNA, 20 nt, Human
aacauggcaaaaccccgucu

SEQ ID NO: 1129750 - RNA, 21 nt, Human
aacauggcaaaaccccgucuc

SEQ ID NO: 1129751 - RNA, 22 nt, Human
aagaugacuauaguagaggugc

SEQ ID NO: 1129752 - RNA, 29 nt, Human
acaaaacaaaaaaacaaaaaacaaacaaa

SEQ ID NO: 1129753 - RNA, 18 nt, Human
acaaaacaaaaaacugug

SEQ ID NO: 1129754 - RNA, 26 nt, Human
acaaaacaaaacaaaaaaacaaaaaa

SEQ ID NO: 1129755 - RNA, 19 nt, Human
acaguccuggguccagagc

SEQ ID NO: 1129756 - RNA, 20 nt, Human
acccccaucaaacaggaauu

SEQ ID NO: 1129757 - RNA, 24 nt, Human
accccgucucuacuaaaaauacaa

SEQ ID NO: 1129758 - RNA, 21 nt, Human
acucauuauauagcaaacauu

SEQ ID NO: 1129759 - RNA, 24 nt, Human
acugccacuccagcuugggcagca

SEQ ID NO: 1129760 - RNA, 19 nt, Human
acuugguugaaccuguggc

SEQ ID NO: 1129761 - RNA, 25 nt, Human
agaaaagaaacaagugcuccgagga

SEQ ID NO: 1129762 - RNA, 23 nt, Human
agaccuggaguauagaugccaau

SEQ ID NO: 1129763 - RNA, 19 nt, Human
agaggcugaagaaaccaaa

SEQ ID NO: 1129764 - RNA, 18 nt, Human
agagguugcauuaagcug

SEQ ID NO: 1129765 - RNA, 24 nt, Human
agagguugcauuaagcugagauca

SEQ ID NO: 1129766 - RNA, 24 nt, Human
agcacuuugggaggcugaggcggg

SEQ ID NO: 1129767 - RNA, 20 nt, Human
agcagaccucggggucuagu

SEQ ID NO: 1129768 - RNA, 23 nt, Human
agccggguaugauggcacacgcc

SEQ ID NO: 1129769 - RNA, 18 nt, Human
agccuggccaacauggca

SEQ ID NO: 1129770 - RNA, 24 nt, Human
agccuggccaacauggcaaaaccc

SEQ ID NO: 1129771 - RNA, 24 nt, Human
agcuugggcagcagaacaagacuc

SEQ ID NO: 1129772 - RNA, 22 nt, Human
aggcaugagacucacuugaacc

SEQ ID NO: 1129773 - RNA, 24 nt, Human
aggcaugagacucacuugaaccug

SEQ ID NO: 1129774 - RNA, 24 nt, Human
aggcugaggcaugagacucacuug

SEQ ID NO: 1129775 - RNA, 18 nt, Human
aggcugaggcgggcagau

SEQ ID NO: 1129776 - RNA, 24 nt, Human
aggcugaggcgggcagauaacuug

SEQ ID NO: 1129777 - RNA, 20 nt, Human
aggcugggugcaguggcuca

SEQ ID NO: 1129778 - RNA, 20 nt, Human
agguagagguugcauuaagc

SEQ ID NO: 1129779 - RNA, 24 nt, Human
agguagagguugcauuaagcugag

SEQ ID NO: 1129780 - RNA, 24 nt, Human
aguggcucacgccuguaaucccag

SEQ ID NO: 1129781 - RNA, 19 nt, Human
auagcaaacauucagcaau

SEQ ID NO: 1129782 - RNA, 25 nt, Human
aucaugccacugccacuccagcuug

SEQ ID NO: 1129783 - RNA, 26 nt, Human
aucuucuuugcuuugacccccaucag

SEQ ID NO: 1129784 - RNA, 23 nt, Human
auggcacacgccuguaauuccag

SEQ ID NO: 1129785 - RNA, 21 nt, Human
augugucuuaagaucauggug

SEQ ID NO: 1129786 - RNA, 23 nt, Human
auuguaaucuccaaggacagaag

SEQ ID NO: 1129787 - RNA, 23 nt, Human
caaaaaaaacaaaacaaaacaaa

SEQ ID NO: 1129788 - RNA, 23 nt, Human
caaaaaaacaaaaaacaaacaaa

SEQ ID NO: 1129789 - RNA, 24 nt, Human
caaaaaaacaaaaaacaaacaaaa

SEQ ID NO: 1129790 - RNA, 23 nt, Human
caaaaaaucuucuucugggguuc

SEQ ID NO: 1129791 - RNA, 24 nt, Human
caacauggcaaaaccccgucucua

SEQ ID NO: 1129792 - RNA, 22 nt, Human
caagacucuaucucaaaaaaaa

SEQ ID NO: 1129793 - RNA, 18 nt, Human
cacaauaaaauuggugac

SEQ ID NO: 1129794 - RNA, 24 nt, Human
cacgccuguaaucccagcacuuug

SEQ ID NO: 1129795 - RNA, 23 nt, Human
cacgccuguaauuccagcuacuu

SEQ ID NO: 1129796 - RNA, 24 nt, Human
cacgccuguaauuccagcuacuug

SEQ ID NO: 1129797 - RNA, 18 nt, Human
cacuccagcuugggcagc

SEQ ID NO: 1129798 - RNA, 25 nt, Human
cagaaaaaaaaaaaaaagaaaagaa

SEQ ID NO: 1129799 - RNA, 23 nt, Human
cagaacaagacucuaucucaaaa

SEQ ID NO: 1129800 - RNA, 22 nt, Human
cagaagaaaaaacuaagguuca

SEQ ID NO: 1129801 - RNA, 24 nt, Human
cagauaacuugagauuaggaguuc

SEQ ID NO: 1129802 - RNA, 24 nt, Human
cagcacuuugggaggcugaggcgg

SEQ ID NO: 1129803 - RNA, 23 nt, Human
cauuuuggauuuuuuaaaaguug

SEQ ID NO: 1129804 - RNA, 23 nt, Human
ccagcugugugaccuugggcaag

SEQ ID NO: 1129805 - RNA, 24 nt, Human
ccaggcugggugcaguggcucacg

SEQ ID NO: 1129806 - RNA, 21 nt, Human
ccagggaaugacagaaucagg

SEQ ID NO: 1129807 - RNA, 22 nt, Human
cccaggcugggugcaguggcuc

SEQ ID NO: 1129808 - RNA, 25 nt, Human
ccucggggucuaguugugacucugu

SEQ ID NO: 1129809 - RNA, 23 nt, Human
ccuggccaacauggcaaaacccc

SEQ ID NO: 1129810 - RNA, 24 nt, Human
ccuggccaacauggcaaaaccccg

SEQ ID NO: 1129811 - RNA, 22 nt, Human
ccuguaaucccagcacuuuggg

SEQ ID NO: 1129812 - RNA, 21 nt, Human
ccuguaauuccagcuacuugg

SEQ ID NO: 1129813 - RNA, 27 nt, Human
ccuguggcuaggggaagaccggggucc

SEQ ID NO: 1129814 - RNA, 21 nt, Human
cgagaccagccuggccaacau

SEQ ID NO: 1129815 - RNA, 23 nt, Human
cgccuguaauuccagcuacuugg

SEQ ID NO: 1129816 - RNA, 24 nt, Human
cgccuguaauuccagcuacuuggg

SEQ ID NO: 1129817 - RNA, 18 nt, Human
cucaaaaaaaacaaaaca

SEQ ID NO: 1129818 - RNA, 22 nt, Human
cucacgccuguaaucccagcac

SEQ ID NO: 1129819 - RNA, 24 nt, Human
cucacgccuguaaucccagcacuu

SEQ ID NO: 1129820 - RNA, 23 nt, Human
cucccuggacuuccggugcuucc

SEQ ID NO: 1129821 - RNA, 23 nt, Human
cugaagaaaccaacagccuggga

SEQ ID NO: 1129822 - RNA, 23 nt, Human
cugacagccuuucacugucuccc

SEQ ID NO: 1129823 - RNA, 24 nt, Human
cugccacuccagcuugggcagcag

SEQ ID NO: 1129824 - RNA, 23 nt, Human
cuugagauuaggaguucgagacc

SEQ ID NO: 1129825 - RNA, 20 nt, Human
gaagaaaccaacagccuggg

SEQ ID NO: 1129826 - RNA, 23 nt, Human
gacagccuuucacugucucccac

SEQ ID NO: 1129827 - RNA, 19 nt, Human
gaccuaucucccagagagc

SEQ ID NO: 1129828 - RNA, 24 nt, Human
gagaucaugccacugccacuccag

SEQ ID NO: 1129829 - RNA, 18 nt, Human
gaggacagagggccaggg

SEQ ID NO: 1129830 - RNA, 24 nt, Human
gauggcacacgccuguaauuccag

SEQ ID NO: 1129831 - RNA, 21 nt, Human
gcacauagcagagccucagga

SEQ ID NO: 1129832 - RNA, 18 nt, Human
gcagagccucaguuagag

SEQ ID NO: 1129833 - RNA, 23 nt, Human
gcauagaaaauucguggaaugac

SEQ ID NO: 1129834 - RNA, 21 nt, Human
gccaacauggcaaaaccccgu

SEQ ID NO: 1129835 - RNA, 24 nt, Human
gcuccagaaaaaaaaaaaaaagaa

SEQ ID NO: 1129836 - RNA, 25 nt, Human
gcuccagaaaaaaaaaaaaaagaaa

SEQ ID NO: 1129837 - RNA, 23 nt, Human
gcucuuugguguggugaugcugg

SEQ ID NO: 1129838 - RNA, 21 nt, Human
ggaacccaucccacacaccag

SEQ ID NO: 1129839 - RNA, 22 nt, Human
ggcugucugagauaaauaauau

SEQ ID NO: 1129840 - RNA, 24 nt, Human
ggguaugauggcacacgccuguaa

SEQ ID NO: 1129841 - RNA, 18 nt, Human
ggugaugcuggguggacu

SEQ ID NO: 1129842 - RNA, 23 nt, Human
ggugcaguggcucacgccuguaa

SEQ ID NO: 1129843 - RNA, 18 nt, Human
gguggaugccguggggaa

SEQ ID NO: 1129844 - RNA, 19 nt, Human
guagaggugcauugguggg

SEQ ID NO: 1129845 - RNA, 18 nt, Human
gucugcuggaaggcucca

SEQ ID NO: 1129846 - RNA, 18 nt, Human
guguacauuccacgcaua

SEQ ID NO: 1129847 - RNA, 19 nt, Human
guucucgucaucgcucuga

SEQ ID NO: 1129848 - RNA, 18 nt, Human
guugcauuaagcugagau

SEQ ID NO: 1129849 - RNA, 21 nt, Human
uaaaaauacaaaaacuagccg

SEQ ID NO: 1129850 - RNA, 23 nt, Human
uaacuugagauuaggaguucgag

SEQ ID NO: 1129851 - RNA, 20 nt, Human
uaagaugacuauaguagagg

SEQ ID NO: 1129852 - RNA, 21 nt, Human
uagaacaguccuggguccaga

SEQ ID NO: 1129853 - RNA, 21 nt, Human
uagaaugguugcuucuaucga

SEQ ID NO: 1129854 - RNA, 18 nt, Human
uaggaugugucuuaagau

SEQ ID NO: 1129855 - RNA, 22 nt, Human
ucaaaaaaaacaaaacaaaaca

SEQ ID NO: 1129856 - RNA, 21 nt, Human
ucaaaucacacacccgcacag

SEQ ID NO: 1129857 - RNA, 19 nt, Human
ucacuugaaccugggaggu

SEQ ID NO: 1129858 - RNA, 21 nt, Human
ucaguuagaggcagaggaaga

SEQ ID NO: 1129859 - RNA, 24 nt, Human
ucaugccacugccacuccagcuug

SEQ ID NO: 1129860 - RNA, 23 nt, Human
uccacgcauagaaaauucgugga

SEQ ID NO: 1129861 - RNA, 26 nt, Human
uccacgcauagaaaauucguggaauu

SEQ ID NO: 1129862 - RNA, 23 nt, Human
uccagaaaaaaaaaaaaaagaaa

SEQ ID NO: 1129863 - RNA, 24 nt, Human
uccagaaaaaaaaaaaaaagaaaa

SEQ ID NO: 1129864 - RNA, 25 nt, Human
uccagaaaaaaaaaaaaaagaaaag

SEQ ID NO: 1129865 - RNA, 21 nt, Human
uccagcagaccucggggucua

SEQ ID NO: 1129866 - RNA, 18 nt, Human
uccagcuugggcagcaga

SEQ ID NO: 1129867 - RNA, 21 nt, Human
ucccaggcugggugcaguggc

SEQ ID NO: 1129868 - RNA, 18 nt, Human
ucccuggacuuccggugc

SEQ ID NO: 1129869 - RNA, 19 nt, Human
ucucaaaaaaaacaaaaca

SEQ ID NO: 1129870 - RNA, 21 nt, Human
ucucuacuaaaaauacaaaaa

SEQ ID NO: 1129871 - RNA, 18 nt, Human
ucuucuucugggguucuc

SEQ ID NO: 1129872 - RNA, 23 nt, Human
ugaacagaaggccccacaguguc

SEQ ID NO: 1129873 - RNA, 24 nt, Human
ugaaccugggagguagagguugca

SEQ ID NO: 1129874 - RNA, 24 nt, Human
ugaagaaaccaacagccugggaac

SEQ ID NO: 1129875 - RNA, 23 nt, Human
ugagaaaagaaacaagugcuccg

SEQ ID NO: 1129876 - RNA, 19 nt, Human
ugagaucaugccacugcca

SEQ ID NO: 1129877 - RNA, 24 nt, Human
ugaggcaugagacucacuugaacc

SEQ ID NO: 1129878 - RNA, 24 nt, Human
ugauggcacacgccuguaauucca

SEQ ID NO: 1129879 - RNA, 18 nt, Human
ugccacuccagcuugggc

SEQ ID NO: 1129880 - RNA, 18 nt, Human
uggaaggauccaugagug

SEQ ID NO: 1129881 - RNA, 24 nt, Human
uggaaggcuccagaaaaaaaaaaa

SEQ ID NO: 1129882 - RNA, 20 nt, Human
uggagacaggacuaggaugu

SEQ ID NO: 1129883 - RNA, 21 nt, Human
uggauggaugaauggguuagu

SEQ ID NO: 1129884 - RNA, 19 nt, Human
uggcacacgccuguaauuc

SEQ ID NO: 1129885 - RNA, 21 nt, Human
uggcacacgccuguaauucca

SEQ ID NO: 1129886 - RNA, 18 nt, Human
uggcacauagcagagccu

SEQ ID NO: 1129887 - RNA, 18 nt, Human
uggcacauagcagagccu

SEQ ID NO: 1129888 - RNA, 22 nt, Human
uggcucacgccuguaaucccag

SEQ ID NO: 1129889 - RNA, 24 nt, Human
uggcucacgccuguaaucccagca

SEQ ID NO: 1129890 - RNA, 24 nt, Human
ugggaggcugaggcaugagacuca

SEQ ID NO: 1129891 - RNA, 19 nt, Human
ugggaggcugaggcgggca

SEQ ID NO: 1129892 - RNA, 19 nt, Human
ugggaggcugaggcgggca

SEQ ID NO: 1129893 - RNA, 20 nt, Human
ugggaggcugaggcgggcag

SEQ ID NO: 1129894 - RNA, 22 nt, Human
ugggaggcugaggcgggcagau

SEQ ID NO: 1129895 - RNA, 24 nt, Human
ugggagguagagguugcauuaagc

SEQ ID NO: 1129896 - RNA, 18 nt, Human
ugguguggugaugcuggg

SEQ ID NO: 1129897 - RNA, 23 nt, Human
ugguguggugaugcuggguggac

SEQ ID NO: 1129898 - RNA, 18 nt, Human
uguaaaaugagcuacuga

SEQ ID NO: 1129899 - RNA, 19 nt, Human
ugucacacggcucaacauu

SEQ ID NO: 1129900 - RNA, 25 nt, Human
ugucacacggcucaacauucacgug

SEQ ID NO: 1129901 - RNA, 22 nt, Human
ugugaggaucaaauggaaggau

SEQ ID NO: 1129902 - RNA, 24 nt, Human
ugugaggaucaaauggaaggaucc

SEQ ID NO: 1129903 - RNA, 19 nt, Human
uguucuacuauuaucucuc

SEQ ID NO: 1129904 - RNA, 20 nt, Human
uguugugaggaucaaaugga

SEQ ID NO: 1129905 - RNA, 24 nt, Human
uguugugaggaucaaauggaagga

SEQ ID NO: 1129906 - RNA, 20 nt, Human
uguuuuaucuuuuggggaca

SEQ ID NO: 1129907 - RNA, 23 nt, Human
uguuuuaucuuuuggggacacau

SEQ ID NO: 1129908 - RNA, 21 nt, Human
uucuuugcuuugacccccauc

SEQ ID NO: 1129909 - RNA, 24 nt, Human
uugaaccugggagguagagguugc

SEQ ID NO: 1129910 - RNA, 25 nt, Human
uugggaggcugaggcaugagacuca

SEQ ID NO: 1129911 - RNA, 19 nt, Human
uuugcuuucugagaaaaga

SEQ ID NO: 1129912 - RNA, 21 nt, Human
uuugcuuucugagaaaagaaa

SEQ ID NO: 1129913 - RNA, 19 nt, Human
aaacacaagcucuggagcc

SEQ ID NO: 1129914 - RNA, 22 nt, Human
ccaaagcuuucugggccgggcu

SEQ ID NO: 1129915 - RNA, 22 nt, Human
gauuuccauccuuuauucacuc

SEQ ID NO: 1129916 - RNA, 19 nt, Human
uccaaagcuuucugggccg

SEQ ID NO: 1129917 - RNA, 24 nt, Human
uccaaagcuuucugggccgggcuu

SEQ ID NO: 1129918 - RNA, 26 nt, Human
uucauggaaggccguaucggugcagg

SEQ ID NO: 1129919 - RNA, 24 nt, Human
aaaaagaaaaugcaaggaaaaaaa

SEQ ID NO: 1129920 - RNA, 21 nt, Human
aaacaaaugcgacuggccagg

SEQ ID NO: 1129921 - RNA, 24 nt, Human
aaacugaauuucaguuugaagcaa

SEQ ID NO: 1129922 - RNA, 20 nt, Human
aaacuuuggucaaaacaaac

SEQ ID NO: 1129923 - RNA, 24 nt, Human
aaaguguugggauuacagguguga

SEQ ID NO: 1129924 - RNA, 21 nt, Human
aaauaugaaagaucgaaagcu

SEQ ID NO: 1129925 - RNA, 22 nt, Human
aaccugcugcccagugagauga

SEQ ID NO: 1129926 - RNA, 22 nt, Human
aagaucgaaagcuacuuuugcc

SEQ ID NO: 1129927 - RNA, 19 nt, Human
aagcgaccuuugccaagag

SEQ ID NO: 1129928 - RNA, 25 nt, Human
aaggaaaaaaauuaaaaaauaaagc

SEQ ID NO: 1129929 - RNA, 19 nt, Human
aaguagcugggauuacagg

SEQ ID NO: 1129930 - RNA, 25 nt, Human
aaguagcugggauuacaggcaccca

SEQ ID NO: 1129931 - RNA, 19 nt, Human
aaguaguugggauuacagg

SEQ ID NO: 1129932 - RNA, 24 nt, Human
aaguaguugggauuacaggcacgc

SEQ ID NO: 1129933 - RNA, 21 nt, Human
aagugauucuccugcuucagc

SEQ ID NO: 1129934 - RNA, 21 nt, Human
aaguguugggauuacaggugu

SEQ ID NO: 1129935 - RNA, 26 nt, Human
aaguguugggauuacaggugugagcc

SEQ ID NO: 1129936 - RNA, 22 nt, Human
acagaauauugcuuugucaccc

SEQ ID NO: 1129937 - RNA, 21 nt, Human
acaggcacccaccaccaugcc

SEQ ID NO: 1129938 - RNA, 23 nt, Human
acaugaauccaccauguaucccu

SEQ ID NO: 1129939 - RNA, 23 nt, Human
accaggaauaaaguuuggaguau

SEQ ID NO: 1129940 - RNA, 20 nt, Human
accauguaucccuauacuca

SEQ ID NO: 1129941 - RNA, 18 nt, Human
accauguuggccaggcug

SEQ ID NO: 1129942 - RNA, 18 nt, Human
accauguuggccaggcug

SEQ ID NO: 1129943 - RNA, 19 nt, Human
acccaggcuggagugcaau

SEQ ID NO: 1129944 - RNA, 18 nt, Human
acgggguuucaccauguu

SEQ ID NO: 1129945 - RNA, 23 nt, Human
acgggguuucaccauguuggcca

SEQ ID NO: 1129946 - RNA, 24 nt, Human
acgggguuucaccauguuggccag

SEQ ID NO: 1129947 - RNA, 23 nt, Human
acuaucaucuccauccacaaauc

SEQ ID NO: 1129948 - RNA, 25 nt, Human
acucgucacccaggcuggagugcaa

SEQ ID NO: 1129949 - RNA, 18 nt, Human
acucuagcuuuugcuacc

SEQ ID NO: 1129950 - RNA, 19 nt, Human
acugaaguacaugaaucca

SEQ ID NO: 1129951 - RNA, 22 nt, Human
acugcaaccgcugccucccagg

SEQ ID NO: 1129952 - RNA, 18 nt, Human
acugcaccuggccaagag

SEQ ID NO: 1129953 - RNA, 19 nt, Human
acugcaccuggccaagagc

SEQ ID NO: 1129954 - RNA, 21 nt, Human
acugcaccuggccaagagcag

SEQ ID NO: 1129955 - RNA, 22 nt, Human
agaaaaacagccccaugaaaca

SEQ ID NO: 1129956 - RNA, 21 nt, Human
agaaauucaagacaugaagcc

SEQ ID NO: 1129957 - RNA, 21 nt, Human
agaccuccuaagauaagugac

SEQ ID NO: 1129958 - RNA, 21 nt, Human
aggaaaaaaacuucuaaaaag

SEQ ID NO: 1129959 - RNA, 22 nt, Human
aggaaaaaaacuucuaaaaaga

SEQ ID NO: 1129960 - RNA, 20 nt, Human
aggcacgcaccaccacaccc

SEQ ID NO: 1129961 - RNA, 19 nt, Human
aggcgggagugcaguggca

SEQ ID NO: 1129962 - RNA, 20 nt, Human
agggggaaaaaaaaggaaaa

SEQ ID NO: 1129963 - RNA, 22 nt, Human
aguagagacgggguuucaccau

SEQ ID NO: 1129964 - RNA, 22 nt, Human
aguagagaugggguuucaccau

SEQ ID NO: 1129965 - RNA, 24 nt, Human
agugcaauggcgcgaugucggcuc

SEQ ID NO: 1129966 - RNA, 20 nt, Human
agugcaguggcauagucuug

SEQ ID NO: 1129967 - RNA, 23 nt, Human
agugcaguggcauagucuuggcu

SEQ ID NO: 1129968 - RNA, 24 nt, Human
agugcaguggcauagucuuggcuu

SEQ ID NO: 1129969 - RNA, 18 nt, Human
augaaaagaaaaacagcc

SEQ ID NO: 1129970 - RNA, 19 nt, Human
augaaaagaaaaacagccc

SEQ ID NO: 1129971 - RNA, 22 nt, Human
augggguuucaccauguuggcc

SEQ ID NO: 1129972 - RNA, 24 nt, Human
augggguuucaccauguuggccag

SEQ ID NO: 1129973 - RNA, 18 nt, Human
auugcuuugucacccagg

SEQ ID NO: 1129974 - RNA, 24 nt, Human
auuuacaaaauuaacagaucccaa

SEQ ID NO: 1129975 - RNA, 22 nt, Human
auuucauccagucucuccccca

SEQ ID NO: 1129976 - RNA, 25 nt, Human
auuuuuguacuuuuuaguagagaug

SEQ ID NO: 1129977 - RNA, 20 nt, Human
caaaacaaacacugaaguac

SEQ ID NO: 1129978 - RNA, 19 nt, Human
caaaguguugggauuacag

SEQ ID NO: 1129979 - RNA, 20 nt, Human
caaaguguugggauuacagg

SEQ ID NO: 1129980 - RNA, 20 nt, Human
caaaguguugggauuacagg

SEQ ID NO: 1129981 - RNA, 24 nt, Human
caaaguguugggauuacaggugug

SEQ ID NO: 1129982 - RNA, 25 nt, Human
caaaguucuaggauuacagggcaug

SEQ ID NO: 1129983 - RNA, 22 nt, Human
caagcgauucuccugccucagc

SEQ ID NO: 1129984 - RNA, 27 nt, Human
caagcgauucuccugccucagccuccc

SEQ ID NO: 1129985 - RNA, 24 nt, Human
caauuuuuuguauuuuuaguagag

SEQ ID NO: 1129986 - RNA, 25 nt, Human
caauuuuuuguauuuuuaguagaga

SEQ ID NO: 1129987 - RNA, 24 nt, Human
caccacacccagcuaauuuuugua

SEQ ID NO: 1129988 - RNA, 21 nt, Human
caccauguuggccaggcuggu

SEQ ID NO: 1129989 - RNA, 21 nt, Human
caccauguuggccaggcuggu

SEQ ID NO: 1129990 - RNA, 24 nt, Human
caccauguuggccaggcuggucuc

SEQ ID NO: 1129991 - RNA, 24 nt, Human
caccauguuggccaggcuggucuc

SEQ ID NO: 1129992 - RNA, 27 nt, Human
caccauguuggccaggcuggucucaaa

SEQ ID NO: 1129993 - RNA, 27 nt, Human
caccauguuggccaggcuggucucaaa

SEQ ID NO: 1129994 - RNA, 23 nt, Human
cacccaccucagccgcucaaagu

SEQ ID NO: 1129995 - RNA, 23 nt, Human
caccucccacuccaucagaggcu

SEQ ID NO: 1129996 - RNA, 18 nt, Human
cacgcaccaccacaccca

SEQ ID NO: 1129997 - RNA, 20 nt, Human
cacuaaaccugcugcccagu

SEQ ID NO: 1129998 - RNA, 21 nt, Human
cacuaucaucuccauccacaa

SEQ ID NO: 1129999 - RNA, 21 nt, Human
cacucgucacccaggcuggag

SEQ ID NO: 1130000 - RNA, 24 nt, Human
cagaccuccuaagauaagugacuc

SEQ ID NO: 1130001 - RNA, 20 nt, Human
cagaucccaauacagagagg

SEQ ID NO: 1130002 - RNA, 22 nt, Human
cagcagcagcaucucacugccu

SEQ ID NO: 1130003 - RNA, 21 nt, Human
caggcacccaccaccaugccc

SEQ ID NO: 1130004 - RNA, 21 nt, Human
caggcacgcaccaccacaccc

SEQ ID NO: 1130005 - RNA, 24 nt, Human
caggugauacacccaccccugaag

SEQ ID NO: 1130006 - RNA, 23 nt, Human
cagugccccaagcuggucagaga

SEQ ID NO: 1130007 - RNA, 20 nt, Human
caucacuaucaucuccaucc

SEQ ID NO: 1130008 - RNA, 24 nt, Human
cauguuggccaggcuggucucaaa

SEQ ID NO: 1130009 - RNA, 24 nt, Human
cauguuggccaggcuggucucaaa

SEQ ID NO: 1130010 - RNA, 23 nt, Human
ccaaguagcugggauuacaggca

SEQ ID NO: 1130011 - RNA, 24 nt, Human
ccaccuggguuuaagugauucucc

SEQ ID NO: 1130012 - RNA, 23 nt, Human
cccaaguagcugggauuacaggc

SEQ ID NO: 1130013 - RNA, 24 nt, Human
cccaaguagcugggauuacaggca

SEQ ID NO: 1130014 - RNA, 23 nt, Human
cccaaguaguugggauuacaggc

SEQ ID NO: 1130015 - RNA, 24 nt, Human
cccaaguaguugggauuacaggca

SEQ ID NO: 1130016 - RNA, 20 nt, Human
cccagguucaagcgauucuc

SEQ ID NO: 1130017 - RNA, 23 nt, Human
cccagguucaagcgauucuccug

SEQ ID NO: 1130018 - RNA, 22 nt, Human
cccaugaaggcagaacagggga

SEQ ID NO: 1130019 - RNA, 19 nt, Human
cccccccuucagccuccca

SEQ ID NO: 1130020 - RNA, 21 nt, Human
ccucaaaugauccgccccccc

SEQ ID NO: 1130021 - RNA, 19 nt, Human
ccucacuaaaccugcugcc

SEQ ID NO: 1130022 - RNA, 24 nt, Human
ccucccagguucaagcgauucucc

SEQ ID NO: 1130023 - RNA, 18 nt, Human
ccugaccucaaaugaucc

SEQ ID NO: 1130024 - RNA, 22 nt, Human
ccugcauuaaaacaaaugcgac

SEQ ID NO: 1130025 - RNA, 23 nt, Human
ccuggguuuaagugauucuccug

SEQ ID NO: 1130026 - RNA, 24 nt, Human
cgggguuucaccauguuggccagg

SEQ ID NO: 1130027 - RNA, 20 nt, Human
cgucacccaggcuggagugc

SEQ ID NO: 1130028 - RNA, 22 nt, Human
cuaaaaagagagaguacagugu

SEQ ID NO: 1130029 - RNA, 22 nt, Human
cucaaaguguugggauuacagg

SEQ ID NO: 1130030 - RNA, 21 nt, Human
cucacugcaaccuccgccacc

SEQ ID NO: 1130031 - RNA, 24 nt, Human
cucagccucccaaguaguugggau

SEQ ID NO: 1130032 - RNA, 24 nt, Human
cuccuguugacugugauguuuguu

SEQ ID NO: 1130033 - RNA, 24 nt, Human
cucgucacccaggcuggagugcaa

SEQ ID NO: 1130034 - RNA, 23 nt, Human
cugcaaccgcugccucccagguu

SEQ ID NO: 1130035 - RNA, 24 nt, Human
cugcaaccgcugccucccagguuc

SEQ ID NO: 1130036 - RNA, 24 nt, Human
cugcaaccuccgccaccuggguuu

SEQ ID NO: 1130037 - RNA, 21 nt, Human
cugccucagccucccaaguag

SEQ ID NO: 1130038 - RNA, 23 nt, Human
cugcuucagcuucccaaguagcu

SEQ ID NO: 1130039 - RNA, 23 nt, Human
cuucagccucccaaaguucuagg

SEQ ID NO: 1130040 - RNA, 21 nt, Human
gaaaaacagccccaugaaaca

SEQ ID NO: 1130041 - RNA, 18 nt, Human
gaacaguaggcauguuuc

SEQ ID NO: 1130042 - RNA, 22 nt, Human
gaagccaacuagauaccaggaa

SEQ ID NO: 1130043 - RNA, 21 nt, Human
gaagccaggguggcacuuuug

SEQ ID NO: 1130044 - RNA, 19 nt, Human
gacuccuugugaaaccagg

SEQ ID NO: 1130045 - RNA, 24 nt, Human
gacuucaggugauacacccaccuc

SEQ ID NO: 1130046 - RNA, 24 nt, Human
gagacgggguuucaccauguuggc

SEQ ID NO: 1130047 - RNA, 18 nt, Human
gagaugggguuucaccau

SEQ ID NO: 1130048 - RNA, 24 nt, Human
gagaugggguuucaccauguuggc

SEQ ID NO: 1130049 - RNA, 21 nt, Human
gauaugggggaagaagaggaa

SEQ ID NO: 1130050 - RNA, 24 nt, Human
gauuacaggcacccaccaccaugc

SEQ ID NO: 1130051 - RNA, 24 nt, Human
gauuacagggcaugaacuacugca

SEQ ID NO: 1130052 - RNA, 18 nt, Human
gauuacaggugugagcca

SEQ ID NO: 1130053 - RNA, 21 nt, Human
gauuacaggugugagccaccg

SEQ ID NO: 1130054 - RNA, 22 nt, Human
gauuacaggugugagccaccgc

SEQ ID NO: 1130055 - RNA, 21 nt, Human
gauucuccugccucagccucc

SEQ ID NO: 1130056 - RNA, 24 nt, Human
gauuucauccagucucucccccau

SEQ ID NO: 1130057 - RNA, 20 nt, Human
gcaccaccacacccagcuaa

SEQ ID NO: 1130058 - RNA, 19 nt, Human
gcacgcaccaccacaccca

SEQ ID NO: 1130059 - RNA, 22 nt, Human
gcagaacaggggaagaggcaca

SEQ ID NO: 1130060 - RNA, 20 nt, Human
gccacaccucucauggccac

SEQ ID NO: 1130061 - RNA, 23 nt, Human
gcccagccaauuuuuuguauuuu

SEQ ID NO: 1130062 - RNA, 24 nt, Human
gcgauucuccugccucagccuccc

SEQ ID NO: 1130063 - RNA, 19 nt, Human
gcuggagugcaauggcgcg

SEQ ID NO: 1130064 - RNA, 23 nt, Human
gcuggucucaaacuccugaccuc

SEQ ID NO: 1130065 - RNA, 21 nt, Human
gcuuacugcaaccgcugccuc

SEQ ID NO: 1130066 - RNA, 24 nt, Human
gcuucagcuucccaaguagcuggg

SEQ ID NO: 1130067 - RNA, 24 nt, Human
ggaaaaguuaauuuccaaguguuu

SEQ ID NO: 1130068 - RNA, 22 nt, Human
ggaagaggcacaguuuuccaga

SEQ ID NO: 1130069 - RNA, 23 nt, Human
ggagugcaguggcauagucuugg

SEQ ID NO: 1130070 - RNA, 21 nt, Human
ggaguuucacucgucacccag

SEQ ID NO: 1130071 - RNA, 18 nt, Human
ggcucuuggucagagagg

SEQ ID NO: 1130072 - RNA, 24 nt, Human
ggcuggucucaaacuccugaccuc

SEQ ID NO: 1130073 - RNA, 19 nt, Human
gggaaaaaaaaggaaaaaa

SEQ ID NO: 1130074 - RNA, 24 nt, Human
gggagugcaguggcauagucuugg

SEQ ID NO: 1130075 - RNA, 22 nt, Human
gggguuucaccauguuggccag

SEQ ID NO: 1130076 - RNA, 23 nt, Human
gggguuucaccauguuggccagg

SEQ ID NO: 1130077 - RNA, 18 nt, Human
ggguuucaccauguuggc

SEQ ID NO: 1130078 - RNA, 23 nt, Human
guagagacgggguuucaccaugu

SEQ ID NO: 1130079 - RNA, 23 nt, Human
guagagaugggguuucaccaugu

SEQ ID NO: 1130080 - RNA, 18 nt, Human
guagcugggauuacaggc

SEQ ID NO: 1130081 - RNA, 18 nt, Human
guaguugggauuacaggc

SEQ ID NO: 1130082 - RNA, 24 nt, Human
guuucacucgucacccaggcugga

SEQ ID NO: 1130083 - RNA, 25 nt, Human
uaaaaaauaaagcgaccuuugccaa

SEQ ID NO: 1130084 - RNA, 21 nt, Human
uaaaacaaaugcgacuggcca

SEQ ID NO: 1130085 - RNA, 25 nt, Human
uaaccugacuuacagaccuccuaag

SEQ ID NO: 1130086 - RNA, 27 nt, Human
uaagcaaaccauuucucuaagucagga

SEQ ID NO: 1130087 - RNA, 21 nt, Human
uaagugacuccuugugaaacc

SEQ ID NO: 1130088 - RNA, 20 nt, Human
uaagugauucuccugcuuca

SEQ ID NO: 1130089 - RNA, 22 nt, Human
uaagugauucuccugcuucagc

SEQ ID NO: 1130090 - RNA, 25 nt, Human
uaauuuuuguacuuuuuaguagaga

SEQ ID NO: 1130091 - RNA, 26 nt, Human
uacaaaauuaacagaucccaauacag

SEQ ID NO: 1130092 - RNA, 19 nt, Human
uacagaccuccuaagauaa

SEQ ID NO: 1130093 - RNA, 19 nt, Human
uacaggugugagccaccgc

SEQ ID NO: 1130094 - RNA, 20 nt, Human
uacaggugugagccaccgcu

SEQ ID NO: 1130095 - RNA, 23 nt, Human
uacaggugugagccaccgcuccc

SEQ ID NO: 1130096 - RNA, 18 nt, Human
uacugcaaccgcugccuc

SEQ ID NO: 1130097 - RNA, 21 nt, Human
uacugcaaccgcugccuccca

SEQ ID NO: 1130098 - RNA, 25 nt, Human
uagaauaaaaaagaaaaugcaagga

SEQ ID NO: 1130099 - RNA, 22 nt, Human
uagagacgggguuucaccaugu

SEQ ID NO: 1130100 - RNA, 22 nt, Human
uagagaugggguuucaccaugu

SEQ ID NO: 1130101 - RNA, 25 nt, Human
uagccacaccucucauggccacagg

SEQ ID NO: 1130102 - RNA, 18 nt, Human
uagcuacaagaauccaca

SEQ ID NO: 1130103 - RNA, 22 nt, Human
uagcuacaagaauccacagcag

SEQ ID NO: 1130104 - RNA, 24 nt, Human
uaggauuacagggcaugaacuacu

SEQ ID NO: 1130105 - RNA, 26 nt, Human
uaggauuacagggcaugaacuacugc

SEQ ID NO: 1130106 - RNA, 24 nt, Human
uaguagagacgggguuucaccaug

SEQ ID NO: 1130107 - RNA, 26 nt, Human
uaguagagacgggguuucaccauguu

SEQ ID NO: 1130108 - RNA, 24 nt, Human
uaguagagaugggguuucaccaug

SEQ ID NO: 1130109 - RNA, 26 nt, Human
uaguagagaugggguuucaccauguu

SEQ ID NO: 1130110 - RNA, 19 nt, Human
uaugccaagaagccgaggc

SEQ ID NO: 1130111 - RNA, 19 nt, Human
uauugcuuugucacccagg

SEQ ID NO: 1130112 - RNA, 20 nt, Human
uauugcuuugucacccaggc

SEQ ID NO: 1130113 - RNA, 21 nt, Human
ucaaaguguugggauuacagg

SEQ ID NO: 1130114 - RNA, 24 nt, Human
ucaaaguguugggauuacaggugu

SEQ ID NO: 1130115 - RNA, 21 nt, Human
ucaauuuuuauuuuugagaug

SEQ ID NO: 1130116 - RNA, 22 nt, Human
ucaccagugcgcuccccagugc

SEQ ID NO: 1130117 - RNA, 18 nt, Human
ucacccaggcuggagugc

SEQ ID NO: 1130118 - RNA, 21 nt, Human
ucacucgucacccaggcugga

SEQ ID NO: 1130119 - RNA, 19 nt, Human
ucacugcaaccuccgccac

SEQ ID NO: 1130120 - RNA, 23 nt, Human
ucacugcaaccuccgccaccugg

SEQ ID NO: 1130121 - RNA, 23 nt, Human
ucacugcaaccuccgccaccugg

SEQ ID NO: 1130122 - RNA, 24 nt, Human
ucacugcaaccuccgccaccuggg

SEQ ID NO: 1130123 - RNA, 20 nt, Human
ucagccucccaaaguucuag

SEQ ID NO: 1130124 - RNA, 24 nt, Human
ucccaaguagcugggauuacaggc

SEQ ID NO: 1130125 - RNA, 24 nt, Human
ucccaaguaguugggauuacaggc

SEQ ID NO: 1130126 - RNA, 21 nt, Human
ucccagguucaagcgauucuc

SEQ ID NO: 1130127 - RNA, 24 nt, Human
ucccagguucaagcgauucuccug

SEQ ID NO: 1130128 - RNA, 21 nt, Human
ucccugaaggaacauacuccc

SEQ ID NO: 1130129 - RNA, 23 nt, Human
uccgacaccacacuaucuugaau

SEQ ID NO: 1130130 - RNA, 18 nt, Human
uccugaccucaaaugauc

SEQ ID NO: 1130131 - RNA, 18 nt, Human
ucgcaugaagcaagcucc

SEQ ID NO: 1130132 - RNA, 23 nt, Human
ucgccacagcaauacucuagcuu

SEQ ID NO: 1130133 - RNA, 19 nt, Human
ucuccugccucagccuccc

SEQ ID NO: 1130134 - RNA, 18 nt, Human
ucucuaagucaggagagc

SEQ ID NO: 1130135 - RNA, 21 nt, Human
ugaaaagaaaaacagccccau

SEQ ID NO: 1130136 - RNA, 25 nt, Human
ugaaaagaaaaacagccccaugaaa

SEQ ID NO: 1130137 - RNA, 19 nt, Human
ugaaaggcucaauauaaag

SEQ ID NO: 1130138 - RNA, 20 nt, Human
ugaagcaaggaaugugaccc

SEQ ID NO: 1130139 - RNA, 20 nt, Human
ugaagccaacuagauaccag

SEQ ID NO: 1130140 - RNA, 19 nt, Human
ugaaggaacauacucccag

SEQ ID NO: 1130141 - RNA, 20 nt, Human
ugaaggaacauacucccagu

SEQ ID NO: 1130142 - RNA, 20 nt, Human
ugaaguacaugaauccacca

SEQ ID NO: 1130143 - RNA, 19 nt, Human
ugaccaguggcugaaacag

SEQ ID NO: 1130144 - RNA, 18 nt, Human
ugaccucaaaugauccgc

SEQ ID NO: 1130145 - RNA, 22 nt, Human
ugaccucaaaugauccgccccc

SEQ ID NO: 1130146 - RNA, 18 nt, Human
ugacuuagaaaaugcacu

SEQ ID NO: 1130147 - RNA, 19 nt, Human
ugagggggaaaaaaaagga

SEQ ID NO: 1130148 - RNA, 20 nt, Human
ugcaauggcgcgaugucggc

SEQ ID NO: 1130149 - RNA, 22 nt, Human
ugcaaugggccagaacuucucc

SEQ ID NO: 1130150 - RNA, 21 nt, Human
ugcaguggcauagucuuggcu

SEQ ID NO: 1130151 - RNA, 24 nt, Human
ugccucagccucccaaguaguugg

SEQ ID NO: 1130152 - RNA, 21 nt, Human
ugccuuaauuuuugcagcagc

SEQ ID NO: 1130153 - RNA, 19 nt, Human
ugcugaguaaggcucacug

SEQ ID NO: 1130154 - RNA, 24 nt, Human
ugcuucagcuucccaaguagcugg

SEQ ID NO: 1130155 - RNA, 24 nt, Human
uggagugcaauggcgcgaugucgg

SEQ ID NO: 1130156 - RNA, 23 nt, Human
uggaguuucacucgucacccagg

SEQ ID NO: 1130157 - RNA, 23 nt, Human
uggccaagagcagaagaauuuag

SEQ ID NO: 1130158 - RNA, 21 nt, Human
uggccaggcuggucucaaacu

SEQ ID NO: 1130159 - RNA, 24 nt, Human
uggccaggcuggucucaaacuccu

SEQ ID NO: 1130160 - RNA, 20 nt, Human
uggcgcgaugucggcucacu

SEQ ID NO: 1130161 - RNA, 19 nt, Human
ugggauuacaggcacccac

SEQ ID NO: 1130162 - RNA, 21 nt, Human
ugggauuacaggcacccacca

SEQ ID NO: 1130163 - RNA, 22 nt, Human
ugggauuacaggcacccaccac

SEQ ID NO: 1130164 - RNA, 24 nt, Human
ugggauuacaggcacccaccacca

SEQ ID NO: 1130165 - RNA, 21 nt, Human
ugggauuacaggcacgcacca

SEQ ID NO: 1130166 - RNA, 24 nt, Human
ugggauuacaggcacgcaccacca

SEQ ID NO: 1130167 - RNA, 18 nt, Human
ugggauuacaggugugag

SEQ ID NO: 1130168 - RNA, 19 nt, Human
ugggauuacaggugugagc

SEQ ID NO: 1130169 - RNA, 21 nt, Human
ugggauuacaggugugagcca

SEQ ID NO: 1130170 - RNA, 22 nt, Human
ugggauuacaggugugagccac

SEQ ID NO: 1130171 - RNA, 23 nt, Human
ugggauuacaggugugagccacc

SEQ ID NO: 1130172 - RNA, 24 nt, Human
ugggauuacaggugugagccaccg

SEQ ID NO: 1130173 - RNA, 24 nt, Human
ugggguuucaccauguuggccagg

SEQ ID NO: 1130174 - RNA, 19 nt, Human
uggucaaaacaaacacuga

SEQ ID NO: 1130175 - RNA, 21 nt, Human
uguauuuuuaguagagacggg

SEQ ID NO: 1130176 - RNA, 23 nt, Human
ugugaaaccaggaugaaauauga

SEQ ID NO: 1130177 - RNA, 23 nt, Human
uguggcagugaagccaacuagau

SEQ ID NO: 1130178 - RNA, 22 nt, Human
uguuggcaacuuuaaaauggua

SEQ ID NO: 1130179 - RNA, 23 nt, Human
uuaaaacaaaugcgacuggcccu

SEQ ID NO: 1130180 - RNA, 20 nt, Human
uuaacagaucccaauacaga

SEQ ID NO: 1130181 - RNA, 23 nt, Human
uuacuaaauaagccaauugaggg

SEQ ID NO: 1130182 - RNA, 19 nt, Human
uuacugcaaccgcugccuc

SEQ ID NO: 1130183 - RNA, 24 nt, Human
uuacugcaaccgcugccucccagg

SEQ ID NO: 1130184 - RNA, 19 nt, Human
uuagcucaccucccacucc

SEQ ID NO: 1130185 - RNA, 18 nt, Human
uuaguagagacgggguuu

SEQ ID NO: 1130186 - RNA, 22 nt, Human
uuaguagagacgggguuucacc

SEQ ID NO: 1130187 - RNA, 24 nt, Human
uuaguagagacgggguuucaccau

SEQ ID NO: 1130188 - RNA, 18 nt, Human
uuaguagagaugggguuu

SEQ ID NO: 1130189 - RNA, 22 nt, Human
uuaguagagaugggguuucacc

SEQ ID NO: 1130190 - RNA, 24 nt, Human
uuaguagagaugggguuucaccau

SEQ ID NO: 1130191 - RNA, 21 nt, Human
uucaagcgauucuccugccuc

SEQ ID NO: 1130192 - RNA, 23 nt, Human
uucaagcgauucuccugccucag

SEQ ID NO: 1130193 - RNA, 24 nt, Human
uucaagcgauucuccugccucagc

SEQ ID NO: 1130194 - RNA, 24 nt, Human
uucacucgucacccaggcuggagu

SEQ ID NO: 1130195 - RNA, 24 nt, Human
uucagcuucccaaguagcugggau

SEQ ID NO: 1130196 - RNA, 23 nt, Human
uucaggugauacacccaccucag

SEQ ID NO: 1130197 - RNA, 22 nt, Human
uucaucacuaucaucuccaucc

SEQ ID NO: 1130198 - RNA, 24 nt, Human
uuggaagcuuuuagguaccaauuc

SEQ ID NO: 1130199 - RNA, 21 nt, Human
uugggauuacaggugugagcc

SEQ ID NO: 1130200 - RNA, 23 nt, Human
uuguauuuuuaguagagacgggg

SEQ ID NO: 1130201 - RNA, 23 nt, Human
uuuaagugauucuccugcuucag

SEQ ID NO: 1130202 - RNA, 24 nt, Human
uuucaccauguuggccaggcuggu

SEQ ID NO: 1130203 - RNA, 24 nt, Human
uuucaccauguuggccaggcuggu

SEQ ID NO: 1130204 - RNA, 21 nt, Human
uuucacucgucacccaggcug

SEQ ID NO: 1130205 - RNA, 23 nt, Human
uuucacucgucacccaggcugga

SEQ ID NO: 1130206 - RNA, 23 nt, Human
uuucaucacuaucaucuccaucc

SEQ ID NO: 1130207 - RNA, 24 nt, Human
uuugucacccaggcgggagugcag

SEQ ID NO: 1130208 - RNA, 24 nt, Human
uuuuuaguagagacgggguuucac

SEQ ID NO: 1130209 - RNA, 24 nt, Human
uuuuuaguagagaugggguuucac

SEQ ID NO: 1130210 - RNA, 23 nt, Human
uuuuuauuuuugagauggaguuu

SEQ ID NO: 1130211 - RNA, 21 nt, Human
uuuuuguacuuuuuaguagag

SEQ ID NO: 1130212 - RNA, 21 nt, Human
uuuuuguauuuuuaguagaga

SEQ ID NO: 1130213 - RNA, 24 nt, Human
uuuuuuguauuuuuaguagagacg

SEQ ID NO: 1130214 - RNA, 21 nt, Human
aaaacaaacaggcaaggggcc

SEQ ID NO: 1130215 - RNA, 20 nt, Human
aaacaaacaggcaaggggcc

SEQ ID NO: 1130216 - RNA, 21 nt, Human
aaacccucccucccuaaaggc

SEQ ID NO: 1130217 - RNA, 20 nt, Human
aaacgaacagcagagaaauc

SEQ ID NO: 1130218 - RNA, 24 nt, Human
aaagaaacagggcuccagccccca

SEQ ID NO: 1130219 - RNA, 18 nt, Human
aacacagugggaccucag

SEQ ID NO: 1130220 - RNA, 20 nt, Human
aacccucucccccagaccca

SEQ ID NO: 1130221 - RNA, 22 nt, Human
aagcacaacaggaaggccaggu

SEQ ID NO: 1130222 - RNA, 20 nt, Human
aagccaaaaacuuuaauuuc

SEQ ID NO: 1130223 - RNA, 18 nt, Human
aagggcucaggcugucag

SEQ ID NO: 1130224 - RNA, 28 nt, Human
aauggucccaaaggcccuucaagggggu

SEQ ID NO: 1130225 - RNA, 24 nt, Human
acagcagagaaaucacacugguua

SEQ ID NO: 1130226 - RNA, 22 nt, Human
acaugcucacgaugacacaaag

SEQ ID NO: 1130227 - RNA, 18 nt, Human
accuacuccccaggggcu

SEQ ID NO: 1130228 - RNA, 22 nt, Human
acucuccuccccaaacccccau

SEQ ID NO: 1130229 - RNA, 19 nt, Human
agaaaaacaaacaggcaag

SEQ ID NO: 1130230 - RNA, 21 nt, Human
agaaacagggcuccagccccc

SEQ ID NO: 1130231 - RNA, 18 nt, Human
agaaagaagggaggagga

SEQ ID NO: 1130232 - RNA, 24 nt, Human
agaacaaacaagaaaaucauugag

SEQ ID NO: 1130233 - RNA, 20 nt, Human
agagcccugcuccuuccacc

SEQ ID NO: 1130234 - RNA, 22 nt, Human
agagcccugcuccuuccacccc

SEQ ID NO: 1130235 - RNA, 20 nt, Human
agagggaaugagggaaaggu

SEQ ID NO: 1130236 - RNA, 20 nt, Human
agccuggguguccucaggag

SEQ ID NO: 1130237 - RNA, 19 nt, Human
agcggggacaggaugggcu

SEQ ID NO: 1130238 - RNA, 18 nt, Human
aggcaguagcggggacag

SEQ ID NO: 1130239 - RNA, 21 nt, Human
aggccaccaccuacuccccag

SEQ ID NO: 1130240 - RNA, 23 nt, Human
aggcccccagccuaaggacccag

SEQ ID NO: 1130241 - RNA, 24 nt, Human
aguaauaaacgaacagcagagaaa

SEQ ID NO: 1130242 - RNA, 21 nt, Human
aguucuucccccuuugcaccc

SEQ ID NO: 1130243 - RNA, 21 nt, Human
auaaaggcugugcagacacca

SEQ ID NO: 1130244 - RNA, 23 nt, Human
aucaaggucuagacccaauccug

SEQ ID NO: 1130245 - RNA, 24 nt, Human
augaacacaaugcaacgcgacccc

SEQ ID NO: 1130246 - RNA, 29 nt, Human
auuaggcuucaaagaaagaagggaggagg

SEQ ID NO: 1130247 - RNA, 25 nt, Human
caaagaaacagggcuccagccccca

SEQ ID NO: 1130248 - RNA, 18 nt, Human
caaagaaagaagggagga

SEQ ID NO: 1130249 - RNA, 19 nt, Human
caacaggaaggccaggucu

SEQ ID NO: 1130250 - RNA, 20 nt, Human
caacccucucccccagaccc

SEQ ID NO: 1130251 - RNA, 21 nt, Human
caacccucucccccagaccca

SEQ ID NO: 1130252 - RNA, 20 nt, Human
caacgcgaccccacuccaac

SEQ ID NO: 1130253 - RNA, 18 nt, Human
caagggccccagaaaccc

SEQ ID NO: 1130254 - RNA, 19 nt, Human
caagggccccagaaacccu

SEQ ID NO: 1130255 - RNA, 23 nt, Human
caagggcccuccacccaggcauc

SEQ ID NO: 1130256 - RNA, 22 nt, Human
caaggggccaauucugugccuu

SEQ ID NO: 1130257 - RNA, 22 nt, Human
cacagccccugggaaggggcac

SEQ ID NO: 1130258 - RNA, 22 nt, Human
cacaggccaccaccuacucccc

SEQ ID NO: 1130259 - RNA, 18 nt, Human
caccaccuacuccccagg

SEQ ID NO: 1130260 - RNA, 20 nt, Human
caccaggggaagggcucagg

SEQ ID NO: 1130261 - RNA, 24 nt, Human
caccgcggucccaggaaacucuga

SEQ ID NO: 1130262 - RNA, 22 nt, Human
cacucuccuccccaaaccccca

SEQ ID NO: 1130263 - RNA, 23 nt, Human
cagaaacccucccucccuaaagg

SEQ ID NO: 1130264 - RNA, 26 nt, Human
cagaaacccucccucccuaaaggccu

SEQ ID NO: 1130265 - RNA, 20 nt, Human
cagagcccugcuccuuccac

SEQ ID NO: 1130266 - RNA, 21 nt, Human
cagcccagggcuucgaggcca

SEQ ID NO: 1130267 - RNA, 19 nt, Human
cagccccccaguggccccu

SEQ ID NO: 1130268 - RNA, 22 nt, Human
cagcugcuccaccccuccagga

SEQ ID NO: 1130269 - RNA, 23 nt, Human
caggcaggagcugguguuuccua

SEQ ID NO: 1130270 - RNA, 19 nt, Human
cagggugggaccaaaggca

SEQ ID NO: 1130271 - RNA, 24 nt, Human
ccacccccuaagccaccugcucca

SEQ ID NO: 1130272 - RNA, 22 nt, Human
ccagagcccugcuccuuccacc

SEQ ID NO: 1130273 - RNA, 24 nt, Human
ccagcccccagcugcuccaccccu

SEQ ID NO: 1130274 - RNA, 20 nt, Human
ccagccccccaguggccccu

SEQ ID NO: 1130275 - RNA, 22 nt, Human
ccagccccccaguggccccuag

SEQ ID NO: 1130276 - RNA, 24 nt, Human
ccagggcuucgaggccaggaaucc

SEQ ID NO: 1130277 - RNA, 18 nt, Human
ccauucccucacugcccc

SEQ ID NO: 1130278 - RNA, 20 nt, Human
cccacagcugcucccauucc

SEQ ID NO: 1130279 - RNA, 18 nt, Human
cccagagaagucacuggu

SEQ ID NO: 1130280 - RNA, 19 nt, Human
ccccagaaacccucccucc

SEQ ID NO: 1130281 - RNA, 20 nt, Human
ccccagaaacccucccuccc

SEQ ID NO: 1130282 - RNA, 21 nt, Human
ccccagaaacccucccucccu

SEQ ID NO: 1130283 - RNA, 20 nt, Human
ccccagccccccaguggccc

SEQ ID NO: 1130284 - RNA, 22 nt, Human
ccccagccuaaggacccaggcu

SEQ ID NO: 1130285 - RNA, 25 nt, Human
ccccagccuugggauuccacccacc

SEQ ID NO: 1130286 - RNA, 20 nt, Human
ccccagcugcuccaccccuc

SEQ ID NO: 1130287 - RNA, 21 nt, Human
ccccaggggcucuugugaggg

SEQ ID NO: 1130288 - RNA, 24 nt, Human
ccccagguguuguuauugcuucgg

SEQ ID NO: 1130289 - RNA, 22 nt, Human
cccccaagcugggucuugauuu

SEQ ID NO: 1130290 - RNA, 18 nt, Human
cccccagacccaggccca

SEQ ID NO: 1130291 - RNA, 18 nt, Human
cccccagccuaaggaccc

SEQ ID NO: 1130292 - RNA, 22 nt, Human
cccccagcugcuccaccccucc

SEQ ID NO: 1130293 - RNA, 22 nt, Human
cccccagguguuguuauugcuu

SEQ ID NO: 1130294 - RNA, 20 nt, Human
cccccaguggccccuagugc

SEQ ID NO: 1130295 - RNA, 26 nt, Human
cccccucugccaagguccuacaaccc

SEQ ID NO: 1130296 - RNA, 20 nt, Human
ccccuaagccaccugcucca

SEQ ID NO: 1130297 - RNA, 19 nt, Human
ccccuaguucuucccccuu

SEQ ID NO: 1130298 - RNA, 19 nt, Human
ccccugaacaaccacagcg

SEQ ID NO: 1130299 - RNA, 21 nt, Human
ccccugaacaaccacagcggu

SEQ ID NO: 1130300 - RNA, 19 nt, Human
ccccuggagaccccagccc

SEQ ID NO: 1130301 - RNA, 19 nt, Human
ccccuggagaccccagccc

SEQ ID NO: 1130302 - RNA, 28 nt, Human
cccuccacccaggcaucaaggucuagac

SEQ ID NO: 1130303 - RNA, 18 nt, Human
cccucugccaagguccua

SEQ ID NO: 1130304 - RNA, 21 nt, Human
cccuggcaacccucuccccca

SEQ ID NO: 1130305 - RNA, 23 nt, Human
ccuacaacccuuaggagucccuc

SEQ ID NO: 1130306 - RNA, 18 nt, Human
ccucccuaaaggccuggg

SEQ ID NO: 1130307 - RNA, 23 nt, Human
ccucccucccuaaaggccugggc

SEQ ID NO: 1130308 - RNA, 24 nt, Human
ccuccuggguaaagggggcgucuc

SEQ ID NO: 1130309 - RNA, 21 nt, Human
ccuggcaacccucucccccag

SEQ ID NO: 1130310 - RNA, 20 nt, Human
ccuggcuccggcucagccuc

SEQ ID NO: 1130311 - RNA, 23 nt, Human
ccuggcuccggcucagccucuau

SEQ ID NO: 1130312 - RNA, 21 nt, Human
ccuggugggacugggaccggg

SEQ ID NO: 1130313 - RNA, 23 nt, Human
ccuucccaccacccguccaggaa

SEQ ID NO: 1130314 - RNA, 21 nt, Human
cgcgaccccacuccaacccaa

SEQ ID NO: 1130315 - RNA, 24 nt, Human
cggcacaggccaccaccuacuccc

SEQ ID NO: 1130316 - RNA, 23 nt, Human
cgggaccaggaacagggugggac

SEQ ID NO: 1130317 - RNA, 20 nt, Human
cuaauggagaccaggccccc

SEQ ID NO: 1130318 - RNA, 25 nt, Human
cuauggccccuuacaagggcccucc

SEQ ID NO: 1130319 - RNA, 23 nt, Human
cucauacugcccuggcuccggcu

SEQ ID NO: 1130320 - RNA, 19 nt, Human
cuccaagagagggaaugag

SEQ ID NO: 1130321 - RNA, 23 nt, Human
cucccauucccucacugccccag

SEQ ID NO: 1130322 - RNA, 24 nt, Human
cucccuggcaacccucucccccag

SEQ ID NO: 1130323 - RNA, 21 nt, Human
cuccugccuucccaccacccg

SEQ ID NO: 1130324 - RNA, 19 nt, Human
cucuccuccccaaaccccc

SEQ ID NO: 1130325 - RNA, 18 nt, Human
cucugccaagguccuaca

SEQ ID NO: 1130326 - RNA, 23 nt, Human
cugcugcuccaagagagggaaug

SEQ ID NO: 1130327 - RNA, 27 nt, Human
cuuccacccccagccuugggauuccac

SEQ ID NO: 1130328 - RNA, 19 nt, Human
cuugaagcuucuccgaagc

SEQ ID NO: 1130329 - RNA, 25 nt, Human
gaaaaugucacucuccuccccaaac

SEQ ID NO: 1130330 - RNA, 18 nt, Human
gaaagaagggaggaggag

SEQ ID NO: 1130331 - RNA, 20 nt, Human
gaagcuucuccgaagcuaau

SEQ ID NO: 1130332 - RNA, 25 nt, Human
gaagggcacacucgagauaaaagca

SEQ ID NO: 1130333 - RNA, 22 nt, Human
gagaccaggcccccucugccaa

SEQ ID NO: 1130334 - RNA, 23 nt, Human
gagggaaagguggguggauggag

SEQ ID NO: 1130335 - RNA, 19 nt, Human
gaugaaaaugucacucucc

SEQ ID NO: 1130336 - RNA, 21 nt, Human
gauuucacagaacaaacaaga

SEQ ID NO: 1130337 - RNA, 19 nt, Human
gcaacgcgaccccacucca

SEQ ID NO: 1130338 - RNA, 22 nt, Human
gccccagaaacccucccucccu

SEQ ID NO: 1130339 - RNA, 19 nt, Human
gcccccagccuaaggaccc

SEQ ID NO: 1130340 - RNA, 24 nt, Human
gcccuccacccaggcaucaagguc

SEQ ID NO: 1130341 - RNA, 24 nt, Human
gcgaaucccuccagagcccugcuc

SEQ ID NO: 1130342 - RNA, 19 nt, Human
gcgaccccacuccaaccca

SEQ ID NO: 1130343 - RNA, 18 nt, Human
gcuccugccuucccacca

SEQ ID NO: 1130344 - RNA, 19 nt, Human
gcuccugccuucccaccac

SEQ ID NO: 1130345 - RNA, 18 nt, Human
gcucugcccuguuuuuga

SEQ ID NO: 1130346 - RNA, 21 nt, Human
gcucugggcuguuggagaacc

SEQ ID NO: 1130347 - RNA, 24 nt, Human
gcugggucuugauuuccuugucug

SEQ ID NO: 1130348 - RNA, 20 nt, Human
gcuuuucccccaagcugggu

SEQ ID NO: 1130349 - RNA, 20 nt, Human
ggaccaggaacaggguggga

SEQ ID NO: 1130350 - RNA, 24 nt, Human
ggaccgggaccaggaacagggugg

SEQ ID NO: 1130351 - RNA, 22 nt, Human
ggaccgggaccgggaccaggaa

SEQ ID NO: 1130352 - RNA, 21 nt, Human
ggacugggaccgggaccggga

SEQ ID NO: 1130353 - RNA, 21 nt, Human
gggacccaggcugggggugcc

SEQ ID NO: 1130354 - RNA, 19 nt, Human
gggcaguggcagccccacc

SEQ ID NO: 1130355 - RNA, 24 nt, Human
ggggaggacuugccugaaaugagg

SEQ ID NO: 1130356 - RNA, 22 nt, Human
ggguaagcagcucuguggaggu

SEQ ID NO: 1130357 - RNA, 20 nt, Human
ggguucuggagaaggagagu

SEQ ID NO: 1130358 - RNA, 21 nt, Human
gucacuuccuguuucugggcc

SEQ ID NO: 1130359 - RNA, 23 nt, Human
gucccaggaaacucugaagaccc

SEQ ID NO: 1130360 - RNA, 24 nt, Human
guccucaggagaaaacaacacccu

SEQ ID NO: 1130361 - RNA, 20 nt, Human
gugccuugaaugcgaauccc

SEQ ID NO: 1130362 - RNA, 25 nt, Human
guggauggagagaggcccccagccu

SEQ ID NO: 1130363 - RNA, 22 nt, Human
guuccaguccugcccacccacu

SEQ ID NO: 1130364 - RNA, 21 nt, Human
guuuuugaaaagcuaccccug

SEQ ID NO: 1130365 - RNA, 23 nt, Human
uaaguaauaaacgaacagcagag

SEQ ID NO: 1130366 - RNA, 20 nt, Human
uacccaggguuuccacaggc

SEQ ID NO: 1130367 - RNA, 18 nt, Human
uagaaaaacaaacaggca

SEQ ID NO: 1130368 - RNA, 24 nt, Human
ucaaagaaagaagggaggaggagg

SEQ ID NO: 1130369 - RNA, 19 nt, Human
ucaaggggguucuggagaa

SEQ ID NO: 1130370 - RNA, 20 nt, Human
ucaaggggguucuggagaag

SEQ ID NO: 1130371 - RNA, 21 nt, Human
ucacacugguuagaaaaacaa

SEQ ID NO: 1130372 - RNA, 20 nt, Human
ucacagaacaaacaagaaaa

SEQ ID NO: 1130373 - RNA, 22 nt, Human
ucacucuccuccccaaaccccc

SEQ ID NO: 1130374 - RNA, 21 nt, Human
ucacugaccacccccaggugu

SEQ ID NO: 1130375 - RNA, 23 nt, Human
ucacugaccacccccagguguug

SEQ ID NO: 1130376 - RNA, 22 nt, Human
ucacugcaucugaagguuuggg

SEQ ID NO: 1130377 - RNA, 20 nt, Human
ucacuuccuguuucugggcc

SEQ ID NO: 1130378 - RNA, 18 nt, Human
uccaagagagggaaugag

SEQ ID NO: 1130379 - RNA, 19 nt, Human
uccaagagagggaaugagg

SEQ ID NO: 1130380 - RNA, 25 nt, Human
uccagagcccugcuccuuccacccc

SEQ ID NO: 1130381 - RNA, 22 nt, Human
uccaggaggugagcgggauuuc

SEQ ID NO: 1130382 - RNA, 20 nt, Human
ucccagcagacaugcacugg

SEQ ID NO: 1130383 - RNA, 19 nt, Human
ucccaggaccucagcuccc

SEQ ID NO: 1130384 - RNA, 20 nt, Human
ucccaggaccucagcucccu

SEQ ID NO: 1130385 - RNA, 19 nt, Human
uccccaaacccccaucccu

SEQ ID NO: 1130386 - RNA, 21 nt, Human
ucccccagacccaggcccaga

SEQ ID NO: 1130387 - RNA, 24 nt, Human
uccucaggagaaaacaacacccuc

SEQ ID NO: 1130388 - RNA, 22 nt, Human
uccugcccacccacuaacacag

SEQ ID NO: 1130389 - RNA, 20 nt, Human
ucucccuccaguugguccug

SEQ ID NO: 1130390 - RNA, 22 nt, Human
ucuccuggcucaaaauauucca

SEQ ID NO: 1130391 - RNA, 21 nt, Human
ucugaccucccugaagcgcug

SEQ ID NO: 1130392 - RNA, 23 nt, Human
ucuggagaaggagaguggagaug

SEQ ID NO: 1130393 - RNA, 21 nt, Human
ucuuuuggggggccauuaggc

SEQ ID NO: 1130394 - RNA, 22 nt, Human
ugaaaacaaagucugaaaagca

SEQ ID NO: 1130395 - RNA, 26 nt, Human
ugaaaagcacaacaggaaggccaggu

SEQ ID NO: 1130396 - RNA, 20 nt, Human
ugaaaagcuaccccugaaca

SEQ ID NO: 1130397 - RNA, 21 nt, Human
ugaaaagcuaccccugaacaa

SEQ ID NO: 1130398 - RNA, 21 nt, Human
ugaaaaugucacucuccuccc

SEQ ID NO: 1130399 - RNA, 23 nt, Human
ugaaaaugucacucuccucccca

SEQ ID NO: 1130400 - RNA, 22 nt, Human
ugaaagggcuccagaggugaug

SEQ ID NO: 1130401 - RNA, 22 nt, Human
ugaaauggggaugacggcacag

SEQ ID NO: 1130402 - RNA, 28 nt, Human
ugaacacaaugcaacgcgaccccacucc

SEQ ID NO: 1130403 - RNA, 23 nt, Human
ugaccagaacuuuaaagaauacc

SEQ ID NO: 1130404 - RNA, 20 nt, Human
ugaggggucuugugugaguc

SEQ ID NO: 1130405 - RNA, 20 nt, Human
ugcaggguaagcagcucugu

SEQ ID NO: 1130406 - RNA, 20 nt, Human
ugcccuggcuccggcucagc

SEQ ID NO: 1130407 - RNA, 18 nt, Human
ugcucacagcccuggguu

SEQ ID NO: 1130408 - RNA, 22 nt, Human
ugcugaggggucuugugugagu

SEQ ID NO: 1130409 - RNA, 22 nt, Human
uggaaauggacuaaugguccca

SEQ ID NO: 1130410 - RNA, 19 nt, Human
uggaaggaguugccuggug

SEQ ID NO: 1130411 - RNA, 19 nt, Human
uggaaggaguugccuggug

SEQ ID NO: 1130412 - RNA, 27 nt, Human
uggagaccccagccccccaguggcccc

SEQ ID NO: 1130413 - RNA, 19 nt, Human
uggagcaacggucuccugu

SEQ ID NO: 1130414 - RNA, 19 nt, Human
uggccccuagugccagccu

SEQ ID NO: 1130415 - RNA, 20 nt, Human
uggccccuagugccagccuc

SEQ ID NO: 1130416 - RNA, 25 nt, Human
ugggaaggggcacaugcucacgaug

SEQ ID NO: 1130417 - RNA, 18 nt, Human
ugggccucaguuucccaa

SEQ ID NO: 1130418 - RNA, 23 nt, Human
uggucccaaaggcccuucaaggg

SEQ ID NO: 1130419 - RNA, 19 nt, Human
ugguuuauagagguggagc

SEQ ID NO: 1130420 - RNA, 21 nt, Human
uucacagaacaaacaagaaaa

SEQ ID NO: 1130421 - RNA, 20 nt, Human
uuccacccccagccuuggga

SEQ ID NO: 1130422 - RNA, 20 nt, Human
uuccuugucuguaaaaugga

SEQ ID NO: 1130423 - RNA, 28 nt, Human
uugaaaacagucauccccuggagacccc

SEQ ID NO: 1130424 - RNA, 19 nt, Human
uuuccuaacucucccucca

SEQ ID NO: 1130425 - RNA, 24 nt, Human
aaacaaaacaaacuccagaucaaa

SEQ ID NO: 1130426 - RNA, 24 nt, Human
aaacaaacuccagaucaaaguuca

SEQ ID NO: 1130427 - RNA, 18 nt, Human
aaagcccucugaucugcu

SEQ ID NO: 1130428 - RNA, 19 nt, Human
aaauggagauaaaguaguu

SEQ ID NO: 1130429 - RNA, 20 nt, Human
aacuuauuucuucaacuaca

SEQ ID NO: 1130430 - RNA, 18 nt, Human
aagagccaaggcaagagc

SEQ ID NO: 1130431 - RNA, 21 nt, Human
aagcccugaagacuaacaacu

SEQ ID NO: 1130432 - RNA, 19 nt, Human
acaaaacaaacuccagauc

SEQ ID NO: 1130433 - RNA, 24 nt, Human
acaaaauggagauaaaguaguuaa

SEQ ID NO: 1130434 - RNA, 19 nt, Human
aggcacauucccugccuuu

SEQ ID NO: 1130435 - RNA, 18 nt, Human
agguaaaguugcaggaag

SEQ ID NO: 1130436 - RNA, 22 nt, Human
agucauggcuccccaucugagg

SEQ ID NO: 1130437 - RNA, 18 nt, Human
auccugaggugcaaccca

SEQ ID NO: 1130438 - RNA, 20 nt, Human
augcuuugguuuuuaaaacu

SEQ ID NO: 1130439 - RNA, 26 nt, Human
auucugucacccaggcuagacuggua

SEQ ID NO: 1130440 - RNA, 21 nt, Human
caaagcccucugaucugcuuc

SEQ ID NO: 1130441 - RNA, 22 nt, Human
cacccaggcuagacugguaagc

SEQ ID NO: 1130442 - RNA, 18 nt, Human
cagcugucuuuccaaccu

SEQ ID NO: 1130443 - RNA, 19 nt, Human
cauagcuauuucaguugcc

SEQ ID NO: 1130444 - RNA, 24 nt, Human
cauucugucacccaggcuagacug

SEQ ID NO: 1130445 - RNA, 22 nt, Human
ccaucugagggaaagagguaaa

SEQ ID NO: 1130446 - RNA, 21 nt, Human
cccugaagacuaacaacugcc

SEQ ID NO: 1130447 - RNA, 23 nt, Human
ccugaaacaaaacaaacuccaga

SEQ ID NO: 1130448 - RNA, 24 nt, Human
cuggccacagaagaggcacauucc

SEQ ID NO: 1130449 - RNA, 22 nt, Human
gaagaggcacauucccugccuu

SEQ ID NO: 1130450 - RNA, 25 nt, Human
gagcaaguuucuguuagcaagguuc

SEQ ID NO: 1130451 - RNA, 18 nt, Human
guuguggagcucaaggac

SEQ ID NO: 1130452 - RNA, 27 nt, Human
uacagccaggucaucuacugaagagcc

SEQ ID NO: 1130453 - RNA, 19 nt, Human
uagauguuguggagcucaa

SEQ ID NO: 1130454 - RNA, 21 nt, Human
uauccgccacauagcuauuuc

SEQ ID NO: 1130455 - RNA, 19 nt, Human
ucagcugucuuuccaaccu

SEQ ID NO: 1130456 - RNA, 22 nt, Human
ucagugccugauauauaauagg

SEQ ID NO: 1130457 - RNA, 26 nt, Human
uccguauccgccacauagcuauuuca

SEQ ID NO: 1130458 - RNA, 19 nt, Human
ucucauucugucacccagg

SEQ ID NO: 1130459 - RNA, 23 nt, Human
ucucauucugucacccaggcuag

SEQ ID NO: 1130460 - RNA, 24 nt, Human
ucucauucugucacccaggcuaga

SEQ ID NO: 1130461 - RNA, 24 nt, Human
ucugucacccaggcuagacuggua

SEQ ID NO: 1130462 - RNA, 25 nt, Human
ucugucacccaggcuagacugguaa

SEQ ID NO: 1130463 - RNA, 22 nt, Human
ucuuuuuuuuugagacgggguc

SEQ ID NO: 1130464 - RNA, 23 nt, Human
ucuuuuuuuuugagacggggucu

SEQ ID NO: 1130465 - RNA, 21 nt, Human
ugaaacaaaacaaacuccaga

SEQ ID NO: 1130466 - RNA, 24 nt, Human
ugaaacaaaacaaacuccagauca

SEQ ID NO: 1130467 - RNA, 22 nt, Human
ugagacggggucucauucuguc

SEQ ID NO: 1130468 - RNA, 18 nt, Human
ugcaagaaaaggugguca

SEQ ID NO: 1130469 - RNA, 22 nt, Human
ugccucuugcauuuuuuaaaaa

SEQ ID NO: 1130470 - RNA, 21 nt, Human
ugucacccaggcuagacuggu

SEQ ID NO: 1130471 - RNA, 24 nt, Human
uuaagucacaggguuauugugaag

SEQ ID NO: 1130472 - RNA, 25 nt, Human
uucaggcccgaaaccugccuccaug

SEQ ID NO: 1130473 - RNA, 18 nt, Human
uucccagguuucaggagc

SEQ ID NO: 1130474 - RNA, 24 nt, Human
uucccagguuucaggagcaaaagc

SEQ ID NO: 1130475 - RNA, 20 nt, Human
uuccugaaacaaaacaaacu

SEQ ID NO: 1130476 - RNA, 21 nt, Human
uucuuuuuuuuugagacgggg

SEQ ID NO: 1130477 - RNA, 26 nt, Human
uucuuuuuuuuugagacggggucuca

SEQ ID NO: 1130478 - RNA, 22 nt, Human
uuugcaaagcccucugaucugc

SEQ ID NO: 1130479 - RNA, 20 nt, Human
aguguuagaagagcucagag

SEQ ID NO: 1130480 - RNA, 21 nt, Human
gaagaagagcuuuauuuagug

SEQ ID NO: 1130481 - RNA, 19 nt, Human
ucagaggagaccuguagug

SEQ ID NO: 1130482 - RNA, 19 nt, Human
agacagggccuguggcugc

SEQ ID NO: 1130483 - RNA, 18 nt, Human
aggcaggguuucuccaug

SEQ ID NO: 1130484 - RNA, 18 nt, Human
aggcaggguuucuccaug

SEQ ID NO: 1130485 - RNA, 18 nt, Human
agggaagaucugaggcaa

SEQ ID NO: 1130486 - RNA, 24 nt, Human
aggugauccacccaccucggccuc

SEQ ID NO: 1130487 - RNA, 19 nt, Human
caaagagagagccugucac

SEQ ID NO: 1130488 - RNA, 22 nt, Human
cacccaccucggccucccaaag

SEQ ID NO: 1130489 - RNA, 23 nt, Human
cacccaccucggccucccaaagu

SEQ ID NO: 1130490 - RNA, 24 nt, Human
caggguuucuccauguuggucagg

SEQ ID NO: 1130491 - RNA, 19 nt, Human
ccauguuggucaggcuggu

SEQ ID NO: 1130492 - RNA, 24 nt, Human
ccugaccucaggugauccacccac

SEQ ID NO: 1130493 - RNA, 24 nt, Human
cuccauguuggucaggcuggucuc

SEQ ID NO: 1130494 - RNA, 24 nt, Human
cugaaauagugcagcaccuucucu

SEQ ID NO: 1130495 - RNA, 19 nt, Human
gaagaucugaggcaaagag

SEQ ID NO: 1130496 - RNA, 24 nt, Human
gaccucaggugauccacccaccuc

SEQ ID NO: 1130497 - RNA, 24 nt, Human
gagagccugucaccugugcugccu

SEQ ID NO: 1130498 - RNA, 20 nt, Human
gaggcaggguuucuccaugu

SEQ ID NO: 1130499 - RNA, 23 nt, Human
gagggaagaucugaggcaaagag

SEQ ID NO: 1130500 - RNA, 24 nt, Human
gcaggguuucuccauguuggucag

SEQ ID NO: 1130501 - RNA, 23 nt, Human
gcuggucucgaacuccugaccuc

SEQ ID NO: 1130502 - RNA, 24 nt, Human
ggcuggucucgaacuccugaccuc

SEQ ID NO: 1130503 - RNA, 21 nt, Human
ggguuucuccauguuggucag

SEQ ID NO: 1130504 - RNA, 19 nt, Human
ggucucgaacuccugaccu

SEQ ID NO: 1130505 - RNA, 24 nt, Human
gugauccacccaccucggccuccc

SEQ ID NO: 1130506 - RNA, 18 nt, Human
uaaggcgaggagcagguc

SEQ ID NO: 1130507 - RNA, 24 nt, Human
uccauguuggucaggcuggucucg

SEQ ID NO: 1130508 - RNA, 19 nt, Human
ucucgaacuccugaccuca

SEQ ID NO: 1130509 - RNA, 21 nt, Human
ugaccucaggugauccaccca

SEQ ID NO: 1130510 - RNA, 24 nt, Human
ugaccucaggugauccacccaccu

SEQ ID NO: 1130511 - RNA, 20 nt, Human
ugaggcaaagagagagccuc

SEQ ID NO: 1130512 - RNA, 24 nt, Human
ugauccacccaccucggccuccca

SEQ ID NO: 1130513 - RNA, 24 nt, Human
uggucaggcuggucucgaacuccu

SEQ ID NO: 1130514 - RNA, 21 nt, Human
uuucuccauguuggucaggcu

SEQ ID NO: 1130515 - RNA, 22 nt, Human
aaaaaaaaaaaaaaagaaagaa

SEQ ID NO: 1130516 - RNA, 25 nt, Human
aaaaaaaaaagaaagaaagaaagaa

SEQ ID NO: 1130517 - RNA, 22 nt, Human
aaaaagccaaauauaucaucac

SEQ ID NO: 1130518 - RNA, 19 nt, Human
aaaaaugcugaauugcuau

SEQ ID NO: 1130519 - RNA, 19 nt, Human
aaaaccccacccccauccc

SEQ ID NO: 1130520 - RNA, 18 nt, Human
aaaccagcccaagcccau

SEQ ID NO: 1130521 - RNA, 19 nt, Human
aaacuccgucucacaaaaa

SEQ ID NO: 1130522 - RNA, 20 nt, Human
aaagaaccugaucuagaugc

SEQ ID NO: 1130523 - RNA, 18 nt, Human
aaagagaggcaucaacug

SEQ ID NO: 1130524 - RNA, 24 nt, Human
aaagcgcuaggauuauagguguga

SEQ ID NO: 1130525 - RNA, 23 nt, Human
aaaguagcuagguuucccaauua

SEQ ID NO: 1130526 - RNA, 21 nt, Human
aaauauaccacuagaaagaac

SEQ ID NO: 1130527 - RNA, 19 nt, Human
aaauucaaagaaaugaaga

SEQ ID NO: 1130528 - RNA, 19 nt, Human
aacaugguaaaaccccauc

SEQ ID NO: 1130529 - RNA, 20 nt, Human
aacaugguaaaaccccaucu

SEQ ID NO: 1130530 - RNA, 21 nt, Human
aacaugguaaaaccccaucuc

SEQ ID NO: 1130531 - RNA, 21 nt, Human
aacaugguaaaaccccaucuc

SEQ ID NO: 1130532 - RNA, 22 nt, Human
aaccuaaauuucccacaaacca

SEQ ID NO: 1130533 - RNA, 19 nt, Human
aagaaagaaaaggaaaaag

SEQ ID NO: 1130534 - RNA, 19 nt, Human
aagaaccaauaauauauug

SEQ ID NO: 1130535 - RNA, 21 nt, Human
aagcagagguugcagugagcc

SEQ ID NO: 1130536 - RNA, 24 nt, Human
aagcagagguugcagugagccgag

SEQ ID NO: 1130537 - RNA, 24 nt, Human
aagcagcaagugggaaaagucaga

SEQ ID NO: 1130538 - RNA, 26 nt, Human
aagcgcuaggauuauaggugugagcu

SEQ ID NO: 1130539 - RNA, 20 nt, Human
aaguuuuucaaccaagauga

SEQ ID NO: 1130540 - RNA, 23 nt, Human
aauaccuccucaagugaucuucc

SEQ ID NO: 1130541 - RNA, 24 nt, Human
aaucacuugaacccgggaagcaga

SEQ ID NO: 1130542 - RNA, 24 nt, Human
aaugguacccaggguccccaauua

SEQ ID NO: 1130543 - RNA, 21 nt, Human
acaugagauguuugugagguc

SEQ ID NO: 1130544 - RNA, 25 nt, Human
accaaaauacaaaagaccaaaauuu

SEQ ID NO: 1130545 - RNA, 19 nt, Human
acccaggcuggagugcagu

SEQ ID NO: 1130546 - RNA, 25 nt, Human
accccacccuacucuccaccuccag

SEQ ID NO: 1130547 - RNA, 24 nt, Human
accccaucucuacuaaaaauacaa

SEQ ID NO: 1130548 - RNA, 20 nt, Human
accuuagaaccuuaaagcca

SEQ ID NO: 1130549 - RNA, 25 nt, Human
accuucaccccacccuacucuccac

SEQ ID NO: 1130550 - RNA, 18 nt, Human
acucugucacccaggcug

SEQ ID NO: 1130551 - RNA, 25 nt, Human
acucugucacccaggcuggagugca

SEQ ID NO: 1130552 - RNA, 18 nt, Human
acugcaaauucuacaagg

SEQ ID NO: 1130553 - RNA, 21 nt, Human
acuuuuccaccaaugggcacu

SEQ ID NO: 1130554 - RNA, 20 nt, Human
agaaaaaguagcuagguuuc

SEQ ID NO: 1130555 - RNA, 18 nt, Human
agaaaaccugcagacuau

SEQ ID NO: 1130556 - RNA, 21 nt, Human
agaaagcagcaagugggaaaa

SEQ ID NO: 1130557 - RNA, 19 nt, Human
agaaccaacaagaucagcc

SEQ ID NO: 1130558 - RNA, 22 nt, Human
agaaucacuugaacccgggaag

SEQ ID NO: 1130559 - RNA, 22 nt, Human
agagaaagggggaagagagagg

SEQ ID NO: 1130560 - RNA, 19 nt, Human
agagcauagaaaaaguagc

SEQ ID NO: 1130561 - RNA, 18 nt, Human
agagcuggccugucuaca

SEQ ID NO: 1130562 - RNA, 22 nt, Human
agagguugcagugagccgagau

SEQ ID NO: 1130563 - RNA, 24 nt, Human
agagguugcagugagccgagauug

SEQ ID NO: 1130564 - RNA, 22 nt, Human
agauggcucuucagaucagggu

SEQ ID NO: 1130565 - RNA, 24 nt, Human
agcacuuucggaggcugagguggg

SEQ ID NO: 1130566 - RNA, 19 nt, Human
agcagggagagggauuagu

SEQ ID NO: 1130567 - RNA, 20 nt, Human
agcaugcugggcuuggugcc

SEQ ID NO: 1130568 - RNA, 20 nt, Human
agcugggcaugauggugggc

SEQ ID NO: 1130569 - RNA, 22 nt, Human
agcuuggccaacaugguaaaac

SEQ ID NO: 1130570 - RNA, 24 nt, Human
agcuuggccaacaugguaaaaccc

SEQ ID NO: 1130571 - RNA, 21 nt, Human
aggacauaggugguauuuaaa

SEQ ID NO: 1130572 - RNA, 18 nt, Human
aggauuccugucugcucc

SEQ ID NO: 1130573 - RNA, 19 nt, Human
aggauuccugucugcuccu

SEQ ID NO: 1130574 - RNA, 24 nt, Human
aggcacaguggcucccaccuguga

SEQ ID NO: 1130575 - RNA, 18 nt, Human
aggcaggagaaucacuug

SEQ ID NO: 1130576 - RNA, 24 nt, Human
aggcaggagaaucacuugaacccg

SEQ ID NO: 1130577 - RNA, 21 nt, Human
aggcucuuguccacagcacca

SEQ ID NO: 1130578 - RNA, 24 nt, Human
aggcugaggcaggagaaucacuug

SEQ ID NO: 1130579 - RNA, 24 nt, Human
aggcugagguggguggaucaccug

SEQ ID NO: 1130580 - RNA, 18 nt, Human
aggcuggagugcaguggc

SEQ ID NO: 1130581 - RNA, 23 nt, Human
aggcuguggaagaaugaaauguc

SEQ ID NO: 1130582 - RNA, 24 nt, Human
agggauuagugaggaaagcaugga

SEQ ID NO: 1130583 - RNA, 22 nt, Human
agggggauggagggaguuaggu

SEQ ID NO: 1130584 - RNA, 22 nt, Human
agguggguggaucaccugaggu

SEQ ID NO: 1130585 - RNA, 23 nt, Human
aggugugagcuacugugccuggc

SEQ ID NO: 1130586 - RNA, 19 nt, Human
aguaaauagguggguggaa

SEQ ID NO: 1130587 - RNA, 20 nt, Human
agugaugggauaugugggcc

SEQ ID NO: 1130588 - RNA, 20 nt, Human
agugcaguggcgcaaacuug

SEQ ID NO: 1130589 - RNA, 24 nt, Human
agugcaguggcgcaaacuuggcuc

SEQ ID NO: 1130590 - RNA, 22 nt, Human
aguggauagacauauggaguag

SEQ ID NO: 1130591 - RNA, 24 nt, Human
aguggcucccaccugugaucccag

SEQ ID NO: 1130592 - RNA, 18 nt, Human
aguguggacacuuacucc

SEQ ID NO: 1130593 - RNA, 20 nt, Human
auagaaagccaguagaaaag

SEQ ID NO: 1130594 - RNA, 20 nt, Human
auagagaacaauuuaugcua

SEQ ID NO: 1130595 - RNA, 24 nt, Human
aucuucccagccuccugaguagcu

SEQ ID NO: 1130596 - RNA, 23 nt, Human
augaagaaagcagcaagugggaa

SEQ ID NO: 1130597 - RNA, 22 nt, Human
augcugaauugcuauauuaugu

SEQ ID NO: 1130598 - RNA, 20 nt, Human
auggauggguggaugauugg

SEQ ID NO: 1130599 - RNA, 19 nt, Human
auggauuauggaugggugg

SEQ ID NO: 1130600 - RNA, 23 nt, Human
auggugggcaccuguaaucccag

SEQ ID NO: 1130601 - RNA, 25 nt, Human
caaacuccugggcucaagugauccu

SEQ ID NO: 1130602 - RNA, 24 nt, Human
caaagcgcuaggauuauaggugug

SEQ ID NO: 1130603 - RNA, 20 nt, Human
caacaagaucagccucuacc

SEQ ID NO: 1130604 - RNA, 21 nt, Human
caacaagaucagccucuaccu

SEQ ID NO: 1130605 - RNA, 23 nt, Human
caagucaggucccaggguugccu

SEQ ID NO: 1130606 - RNA, 22 nt, Human
caagugauccucuugccucagc

SEQ ID NO: 1130607 - RNA, 27 nt, Human
caagugauccucuugccucagccuccc

SEQ ID NO: 1130608 - RNA, 27 nt, Human
caagugauccucuugccucagccuccc

SEQ ID NO: 1130609 - RNA, 20 nt, Human
cacaauacaagaagacaaga

SEQ ID NO: 1130610 - RNA, 25 nt, Human
cacaauacaagaagacaagaaaaua

SEQ ID NO: 1130611 - RNA, 22 nt, Human
cacagcaccaugauuccuuaga

SEQ ID NO: 1130612 - RNA, 19 nt, Human
caccacgggaccaccacuc

SEQ ID NO: 1130613 - RNA, 24 nt, Human
cacccaggcuggagugcaguggcg

SEQ ID NO: 1130614 - RNA, 20 nt, Human
caccccacccuacucuccac

SEQ ID NO: 1130615 - RNA, 25 nt, Human
caccccacccuacucuccaccucca

SEQ ID NO: 1130616 - RNA, 19 nt, Human
cacccccaucccaccaccc

SEQ ID NO: 1130617 - RNA, 20 nt, Human
cacccuacccuauccaucuc

SEQ ID NO: 1130618 - RNA, 22 nt, Human
cacccuacccuauccaucucca

SEQ ID NO: 1130619 - RNA, 21 nt, Human
caccuguaaucccagcuacuu

SEQ ID NO: 1130620 - RNA, 23 nt, Human
caccuguaaucccagcuacuugg

SEQ ID NO: 1130621 - RNA, 24 nt, Human
caccuguaaucccagcuacuuggg

SEQ ID NO: 1130622 - RNA, 18 nt, Human
caccugugaucccagcac

SEQ ID NO: 1130623 - RNA, 24 nt, Human
caccugugaucccagcacuuucgg

SEQ ID NO: 1130624 - RNA, 24 nt, Human
cacuaugcugccuaggcuggucuc

SEQ ID NO: 1130625 - RNA, 23 nt, Human
cacuccucauccugcaggcacuu

SEQ ID NO: 1130626 - RNA, 23 nt, Human
cacucugucacccaggcuggagu

SEQ ID NO: 1130627 - RNA, 24 nt, Human
cacucugucacccaggcuggagug

SEQ ID NO: 1130628 - RNA, 21 nt, Human
cagaguaccacagguggcagg

SEQ ID NO: 1130629 - RNA, 24 nt, Human
cagcacuuucggaggcugaggugg

SEQ ID NO: 1130630 - RNA, 20 nt, Human
cagccuccugaguagcuggg

SEQ ID NO: 1130631 - RNA, 24 nt, Human
cagcuacuugggaggcugaggcag

SEQ ID NO: 1130632 - RNA, 24 nt, Human
cagcuuggccaacaugguaaaacc

SEQ ID NO: 1130633 - RNA, 22 nt, Human
caguccacaaugugagcagcac

SEQ ID NO: 1130634 - RNA, 18 nt, Human
caucacuuucagaugaug

SEQ ID NO: 1130635 - RNA, 23 nt, Human
caucccaccacccuucaaagagc

SEQ ID NO: 1130636 - RNA, 23 nt, Human
caugguaaagucccaguccugcu

SEQ ID NO: 1130637 - RNA, 21 nt, Human
cauuaaacaggucugugucuu

SEQ ID NO: 1130638 - RNA, 26 nt, Human
cauucugucuugccuaauuuucaggc

SEQ ID NO: 1130639 - RNA, 21 nt, Human
ccaaagcgcuaggauuauagg

SEQ ID NO: 1130640 - RNA, 24 nt, Human
ccaaagcgcuaggauuauaggugu

SEQ ID NO: 1130641 - RNA, 20 nt, Human
ccaacuguggguccucaggc

SEQ ID NO: 1130642 - RNA, 22 nt, Human
ccaagaucuauuaacauuuucu

SEQ ID NO: 1130643 - RNA, 21 nt, Human
ccaauucucucccaggaacaa

SEQ ID NO: 1130644 - RNA, 18 nt, Human
ccagcccaagcccauuuc

SEQ ID NO: 1130645 - RNA, 20 nt, Human
ccagcccaucuuacaggaua

SEQ ID NO: 1130646 - RNA, 19 nt, Human
ccaggaacaauccugugcu

SEQ ID NO: 1130647 - RNA, 19 nt, Human
ccaggcacaguggcuccca

SEQ ID NO: 1130648 - RNA, 19 nt, Human
ccaggguugccuuggccgu

SEQ ID NO: 1130649 - RNA, 21 nt, Human
ccaggguugccuuggccguuc

SEQ ID NO: 1130650 - RNA, 19 nt, Human
ccaguccugcuacuuggug

SEQ ID NO: 1130651 - RNA, 19 nt, Human
cccacaaaccagcccaagc

SEQ ID NO: 1130652 - RNA, 21 nt, Human
cccacaaaccagcccaagccc

SEQ ID NO: 1130653 - RNA, 23 nt, Human
cccacaaaccagcccaagcccau

SEQ ID NO: 1130654 - RNA, 23 nt, Human
cccacaccacgggaccaccacuc

SEQ ID NO: 1130655 - RNA, 23 nt, Human
cccaccugugaucccagcacuuu

SEQ ID NO: 1130656 - RNA, 23 nt, Human
cccaguccugcuacuuggugagu

SEQ ID NO: 1130657 - RNA, 19 nt, Human
ccccaaauaaacacucagu

SEQ ID NO: 1130658 - RNA, 22 nt, Human
ccccaaauaaacacucaguaca

SEQ ID NO: 1130659 - RNA, 22 nt, Human
ccccaaguaagcucugaacucc

SEQ ID NO: 1130660 - RNA, 22 nt, Human
cccuggccuccucuuccuuguc

SEQ ID NO: 1130661 - RNA, 18 nt, Human
ccuacaguaacaauagac

SEQ ID NO: 1130662 - RNA, 22 nt, Human
ccucaagugaucuucccagccu

SEQ ID NO: 1130663 - RNA, 23 nt, Human
ccucaggcaacuaacuucaccuc

SEQ ID NO: 1130664 - RNA, 24 nt, Human
ccucuugccucagccucccaaagc

SEQ ID NO: 1130665 - RNA, 22 nt, Human
ccugccaacaacucaacgagcu

SEQ ID NO: 1130666 - RNA, 24 nt, Human
ccuggacaaucccugggacuacau

SEQ ID NO: 1130667 - RNA, 21 nt, Human
ccuggcaccuccugcuuuuuc

SEQ ID NO: 1130668 - RNA, 18 nt, Human
ccuggccuccucuuccuu

SEQ ID NO: 1130669 - RNA, 19 nt, Human
ccugggcucaagugauccu

SEQ ID NO: 1130670 - RNA, 20 nt, Human
ccugggcucaagugauccuc

SEQ ID NO: 1130671 - RNA, 22 nt, Human
ccugggcucaagugauccucuu

SEQ ID NO: 1130672 - RNA, 21 nt, Human
ccuguaaucccagcuacuugg

SEQ ID NO: 1130673 - RNA, 19 nt, Human
ccuucaccccacccuacuc

SEQ ID NO: 1130674 - RNA, 22 nt, Human
ccuucaccccacccuacucucc

SEQ ID NO: 1130675 - RNA, 24 nt, Human
cgggaagcagagguugcagugagc

SEQ ID NO: 1130676 - RNA, 27 nt, Human
cucaagugaucuucccagccuccugag

SEQ ID NO: 1130677 - RNA, 24 nt, Human
cucacucugucacccaggcuggag

SEQ ID NO: 1130678 - RNA, 24 nt, Human
cucccaccugugaucccagcacuu

SEQ ID NO: 1130679 - RNA, 23 nt, Human
cuccugggcucaagugauccucu

SEQ ID NO: 1130680 - RNA, 21 nt, Human
cucuccuuucuucauccuuuu

SEQ ID NO: 1130681 - RNA, 19 nt, Human
cucuucaaagcuaguaucc

SEQ ID NO: 1130682 - RNA, 21 nt, Human
cugacugcaaauucuacaagg

SEQ ID NO: 1130683 - RNA, 21 nt, Human
cuguaaucccagcuacuuggg

SEQ ID NO: 1130684 - RNA, 19 nt, Human
cuguuucccaacauugcug

SEQ ID NO: 1130685 - RNA, 20 nt, Human
cuguuugaaugaaaggugga

SEQ ID NO: 1130686 - RNA, 19 nt, Human
cuuaaaacaugaauaggcc

SEQ ID NO: 1130687 - RNA, 26 nt, Human
cuuaaaaccccacccccaucccacca

SEQ ID NO: 1130688 - RNA, 19 nt, Human
cuuagaacaggggacucca

SEQ ID NO: 1130689 - RNA, 20 nt, Human
cuuccaagggggcacaccug

SEQ ID NO: 1130690 - RNA, 19 nt, Human
cuuccuugucuuccuggga

SEQ ID NO: 1130691 - RNA, 23 nt, Human
cuuccuugucuuccugggagagg

SEQ ID NO: 1130692 - RNA, 21 nt, Human
cuuucugcaacuugguucacc

SEQ ID NO: 1130693 - RNA, 19 nt, Human
gaaggaaaggagggauagg

SEQ ID NO: 1130694 - RNA, 18 nt, Human
gaauauaaagauggauag

SEQ ID NO: 1130695 - RNA, 22 nt, Human
gacacuguuucccaacauugcu

SEQ ID NO: 1130696 - RNA, 21 nt, Human
gacaugagggcuuauuaggaa

SEQ ID NO: 1130697 - RNA, 22 nt, Human
gaccaccacucuaucaagucuu

SEQ ID NO: 1130698 - RNA, 18 nt, Human
gacugauucucugucacu

SEQ ID NO: 1130699 - RNA, 19 nt, Human
gagcagauaguggauuuua

SEQ ID NO: 1130700 - RNA, 25 nt, Human
gagcuuauuuuucuguuuuugagac

SEQ ID NO: 1130701 - RNA, 20 nt, Human
gagguucuguuuaagcaagu

SEQ ID NO: 1130702 - RNA, 24 nt, Human
gagucagauuagggcuggagacac

SEQ ID NO: 1130703 - RNA, 19 nt, Human
gauaugguagagagcaugc

SEQ ID NO: 1130704 - RNA, 21 nt, Human
gaucaccugaggucaggaguu

SEQ ID NO: 1130705 - RNA, 23 nt, Human
gaucaccugaggucaggaguuug

SEQ ID NO: 1130706 - RNA, 24 nt, Human
gaucaccugaggucaggaguuugu

SEQ ID NO: 1130707 - RNA, 24 nt, Human
gauggugggcaccuguaaucccag

SEQ ID NO: 1130708 - RNA, 21 nt, Human
gcagagaaagggggaagagag

SEQ ID NO: 1130709 - RNA, 23 nt, Human
gcaggagaaucacuugaacccgg

SEQ ID NO: 1130710 - RNA, 24 nt, Human
gccaacaugguaaaaccccaucuc

SEQ ID NO: 1130711 - RNA, 20 nt, Human
gcccacaccacgggaccacc

SEQ ID NO: 1130712 - RNA, 22 nt, Human
gcccacaccacgggaccaccac

SEQ ID NO: 1130713 - RNA, 19 nt, Human
gccuucaccuucaccccac

SEQ ID NO: 1130714 - RNA, 22 nt, Human
gcgcaaacuuggcucaccaaag

SEQ ID NO: 1130715 - RNA, 22 nt, Human
gcuacuaauguuuuccccagcc

SEQ ID NO: 1130716 - RNA, 19 nt, Human
gcuggagugcaguggcgca

SEQ ID NO: 1130717 - RNA, 20 nt, Human
ggaaagcauggauguuuggg

SEQ ID NO: 1130718 - RNA, 20 nt, Human
ggaagcagagguugcaguga

SEQ ID NO: 1130719 - RNA, 21 nt, Human
ggaggcugagguggguggauc

SEQ ID NO: 1130720 - RNA, 22 nt, Human
ggaggcugagguggguggauca

SEQ ID NO: 1130721 - RNA, 22 nt, Human
ggaucaccugaggucaggaguu

SEQ ID NO: 1130722 - RNA, 18 nt, Human
ggcauggugcccuaccuc

SEQ ID NO: 1130723 - RNA, 21 nt, Human
gggcacuccucauccugcagg

SEQ ID NO: 1130724 - RNA, 24 nt, Human
gggcaugauggugggcaccuguaa

SEQ ID NO: 1130725 - RNA, 22 nt, Human
gggcucaagugauccucuugcc

SEQ ID NO: 1130726 - RNA, 20 nt, Human
gguagaaaaccugcagacua

SEQ ID NO: 1130727 - RNA, 20 nt, Human
ggucuguagaagaaagauga

SEQ ID NO: 1130728 - RNA, 21 nt, Human
gguggaucaccugaggucagg

SEQ ID NO: 1130729 - RNA, 24 nt, Human
guacaugaaugcauggauuaugga

SEQ ID NO: 1130730 - RNA, 24 nt, Human
gugauccucuugccucagccuccc

SEQ ID NO: 1130731 - RNA, 18 nt, Human
gugaucuucccagccucc

SEQ ID NO: 1130732 - RNA, 24 nt, Human
gugaucuucccagccuccugagua

SEQ ID NO: 1130733 - RNA, 23 nt, Human
guggaaacaugaauguacaaaug

SEQ ID NO: 1130734 - RNA, 20 nt, Human
gugugugcaugugugugugu

SEQ ID NO: 1130735 - RNA, 20 nt, Human
gugugugcaugugugugugu

SEQ ID NO: 1130736 - RNA, 19 nt, Human
guugcagugagccgagauu

SEQ ID NO: 1130737 - RNA, 20 nt, Human
guugcuucauuccauucugu

SEQ ID NO: 1130738 - RNA, 24 nt, Human
guuguguuuuuguuuuuguuuuug

SEQ ID NO: 1130739 - RNA, 19 nt, Human
uaaaauauuucagagcaua

SEQ ID NO: 1130740 - RNA, 24 nt, Human
uaacaauagacuggaggaggcaga

SEQ ID NO: 1130741 - RNA, 18 nt, Human
uaacuaacuuaauggaug

SEQ ID NO: 1130742 - RNA, 20 nt, Human
uaagcaaauccucaguauga

SEQ ID NO: 1130743 - RNA, 21 nt, Human
uaagccauuuuaggguauuug

SEQ ID NO: 1130744 - RNA, 23 nt, Human
uaagccccaugguaaagucccag

SEQ ID NO: 1130745 - RNA, 22 nt, Human
uacaaaagaccaaaauuugcag

SEQ ID NO: 1130746 - RNA, 18 nt, Human
uacaagggcuuccccagg

SEQ ID NO: 1130747 - RNA, 25 nt, Human
uaccacagguggcaggaguauuagc

SEQ ID NO: 1130748 - RNA, 21 nt, Human
uaccagauuuaggaucuacuu

SEQ ID NO: 1130749 - RNA, 24 nt, Human
uaccguuuagugagcccacaccac

SEQ ID NO: 1130750 - RNA, 22 nt, Human
uagaaagccaguagaaaaguug

SEQ ID NO: 1130751 - RNA, 19 nt, Human
uagaacgcagugcuuaaaa

SEQ ID NO: 1130752 - RNA, 23 nt, Human
uagagugugauaagugggaagau

SEQ ID NO: 1130753 - RNA, 23 nt, Human
uagcuaaaaagaaccaauaauau

SEQ ID NO: 1130754 - RNA, 22 nt, Human
uaggacauaggugguauuuaaa

SEQ ID NO: 1130755 - RNA, 19 nt, Human
uaggauuauaggugugagc

SEQ ID NO: 1130756 - RNA, 21 nt, Human
uaggauuauaggugugagcua

SEQ ID NO: 1130757 - RNA, 22 nt, Human
uaggauuauaggugugagcuac

SEQ ID NO: 1130758 - RNA, 22 nt, Human
uaggauuauaggugugagcuac

SEQ ID NO: 1130759 - RNA, 24 nt, Human
uaggauuauaggugugagcuacug

SEQ ID NO: 1130760 - RNA, 19 nt, Human
uaggccccaaauaaacacu

SEQ ID NO: 1130761 - RNA, 22 nt, Human
uaggccccaaauaaacacucag

SEQ ID NO: 1130762 - RNA, 22 nt, Human
uagggcuggagacacaacuuug

SEQ ID NO: 1130763 - RNA, 19 nt, Human
uaggugggggggauuggua

SEQ ID NO: 1130764 - RNA, 24 nt, Human
uagguggguggaaacaugaaugua

SEQ ID NO: 1130765 - RNA, 19 nt, Human
uaguagcuauaaauggaua

SEQ ID NO: 1130766 - RNA, 21 nt, Human
uaguaucccuuucugcaacuu

SEQ ID NO: 1130767 - RNA, 22 nt, Human
uaguggauuuuaggagucagau

SEQ ID NO: 1130768 - RNA, 22 nt, Human
uauaaccccagaguaccacagg

SEQ ID NO: 1130769 - RNA, 24 nt, Human
uaugacccaaauagaaaaaacaaa

SEQ ID NO: 1130770 - RNA, 24 nt, Human
uaugcugccuaggcuggucucaaa

SEQ ID NO: 1130771 - RNA, 20 nt, Human
uaugugggccuauugaugga

SEQ ID NO: 1130772 - RNA, 21 nt, Human
uauuuagagggaaaugaguug

SEQ ID NO: 1130773 - RNA, 21 nt, Human
ucaacgaagccucaauuuccc

SEQ ID NO: 1130774 - RNA, 21 nt, Human
ucaagguagaacuaaaauuau

SEQ ID NO: 1130775 - RNA, 24 nt, Human
ucacccaggcuggagugcaguggc

SEQ ID NO: 1130776 - RNA, 20 nt, Human
ucacccuacccuauccaucu

SEQ ID NO: 1130777 - RNA, 20 nt, Human
ucaccuucaccccacccuac

SEQ ID NO: 1130778 - RNA, 24 nt, Human
ucacucugucacccaggcuggagu

SEQ ID NO: 1130779 - RNA, 18 nt, Human
ucaugguuuuggccccuu

SEQ ID NO: 1130780 - RNA, 24 nt, Human
uccaagcaucucacuuuccaagca

SEQ ID NO: 1130781 - RNA, 19 nt, Human
uccaaguaagaagauggcu

SEQ ID NO: 1130782 - RNA, 23 nt, Human
uccacagccuucaccuucacccc

SEQ ID NO: 1130783 - RNA, 24 nt, Human
uccauggaauuaaaauuccaccuc

SEQ ID NO: 1130784 - RNA, 23 nt, Human
ucccaaagcgcuaggauuauagg

SEQ ID NO: 1130785 - RNA, 19 nt, Human
ucccacaaaccagcccaag

SEQ ID NO: 1130786 - RNA, 22 nt, Human
ucccacaaaccagcccaagccc

SEQ ID NO: 1130787 - RNA, 24 nt, Human
ucccacaaaccagcccaagcccau

SEQ ID NO: 1130788 - RNA, 19 nt, Human
ucccaggguugccuuggcc

SEQ ID NO: 1130789 - RNA, 20 nt, Human
ucccaggguugccuuggccg

SEQ ID NO: 1130790 - RNA, 22 nt, Human
uccccagcucaagugaucuuug

SEQ ID NO: 1130791 - RNA, 22 nt, Human
uccccaggucaggcucaggcua

SEQ ID NO: 1130792 - RNA, 24 nt, Human
uccugaguagcugggaccauaggc

SEQ ID NO: 1130793 - RNA, 21 nt, Human
uccugggcucaagugauccuc

SEQ ID NO: 1130794 - RNA, 21 nt, Human
uccugggcucaagugauccuc

SEQ ID NO: 1130795 - RNA, 24 nt, Human
uccugggcucaagugauccucuug

SEQ ID NO: 1130796 - RNA, 24 nt, Human
ucggaggcugagguggguggauca

SEQ ID NO: 1130797 - RNA, 21 nt, Human
ucucaaacuccugggcucaag

SEQ ID NO: 1130798 - RNA, 21 nt, Human
ucucacaaaaaaaaaaaaaaa

SEQ ID NO: 1130799 - RNA, 23 nt, Human
ucucacucugucacccaggcugg

SEQ ID NO: 1130800 - RNA, 24 nt, Human
ucucacucugucacccaggcugga

SEQ ID NO: 1130801 - RNA, 26 nt, Human
ucucacucugucacccaggcuggagu

SEQ ID NO: 1130802 - RNA, 27 nt, Human
ucucacucugucacccaggcuggagug

SEQ ID NO: 1130803 - RNA, 21 nt, Human
ucuccaguaggcuguggaaga

SEQ ID NO: 1130804 - RNA, 22 nt, Human
ucucuacuaaaaauacaaaaaa

SEQ ID NO: 1130805 - RNA, 22 nt, Human
ucucugucacuggcuuccuaug

SEQ ID NO: 1130806 - RNA, 20 nt, Human
ucugacuguguucucccauc

SEQ ID NO: 1130807 - RNA, 24 nt, Human
ucugucacccaggcuggagugcag

SEQ ID NO: 1130808 - RNA, 23 nt, Human
ucuuaaaaccccacccccauccc

SEQ ID NO: 1130809 - RNA, 22 nt, Human
ucuugguacauagcaagggcuu

SEQ ID NO: 1130810 - RNA, 25 nt, Human
ugaaauggggauccaucacacuguu

SEQ ID NO: 1130811 - RNA, 24 nt, Human
ugaauagguagguagcuaugugga

SEQ ID NO: 1130812 - RNA, 22 nt, Human
ugaauggauaggugaguaaagg

SEQ ID NO: 1130813 - RNA, 23 nt, Human
ugaauguacaaaugaaagcauua

SEQ ID NO: 1130814 - RNA, 23 nt, Human
ugagacaaauuugaggaaucuug

SEQ ID NO: 1130815 - RNA, 21 nt, Human
ugagauguuugugagguccag

SEQ ID NO: 1130816 - RNA, 22 nt, Human
ugagccgagauugcgccugggc

SEQ ID NO: 1130817 - RNA, 18 nt, Human
ugaggaaugagucucaga

SEQ ID NO: 1130818 - RNA, 20 nt, Human
ugaggcaggagaaucacuug

SEQ ID NO: 1130819 - RNA, 24 nt, Human
ugaggcaggagaaucacuugaacc

SEQ ID NO: 1130820 - RNA, 25 nt, Human
ugaggcaggagaaucacuugaaccc

SEQ ID NO: 1130821 - RNA, 21 nt, Human
ugaggucaggaguuugugacc

SEQ ID NO: 1130822 - RNA, 18 nt, Human
ugagguccagguggagau

SEQ ID NO: 1130823 - RNA, 20 nt, Human
ugagguggguggaucaccug

SEQ ID NO: 1130824 - RNA, 24 nt, Human
ugagguggguggaucaccugaggu

SEQ ID NO: 1130825 - RNA, 26 nt, Human
ugagguggguggaucaccugagguca

SEQ ID NO: 1130826 - RNA, 19 nt, Human
ugaguugcccaaugccaca

SEQ ID NO: 1130827 - RNA, 23 nt, Human
ugcauggauuauggaugggugga

SEQ ID NO: 1130828 - RNA, 24 nt, Human
ugccuaggcuggucucaaacuccu

SEQ ID NO: 1130829 - RNA, 22 nt, Human
ugccucagccucccaaagcgcu

SEQ ID NO: 1130830 - RNA, 24 nt, Human
ugccucagccucccaaagcgcuag

SEQ ID NO: 1130831 - RNA, 25 nt, Human
ugccuuuauuuucauuauuauuuug

SEQ ID NO: 1130832 - RNA, 18 nt, Human
ugcugccuaggcuggucu

SEQ ID NO: 1130833 - RNA, 24 nt, Human
ugcuggaagagcaagguagguggg

SEQ ID NO: 1130834 - RNA, 20 nt, Human
ugcuggugaugaucauuaua

SEQ ID NO: 1130835 - RNA, 21 nt, Human
uggaagaaugaaaugucucau

SEQ ID NO: 1130836 - RNA, 18 nt, Human
uggaggaggcagaguauc

SEQ ID NO: 1130837 - RNA, 23 nt, Human
uggagugcaguggcgcaaacuug

SEQ ID NO: 1130838 - RNA, 24 nt, Human
uggagugcaguggcgcaaacuugg

SEQ ID NO: 1130839 - RNA, 23 nt, Human
uggaucaccugaggucaggaguu

SEQ ID NO: 1130840 - RNA, 27 nt, Human
uggaucaccugaggucaggaguuugug

SEQ ID NO: 1130841 - RNA, 22 nt, Human
uggccaacaugguaaaacccca

SEQ ID NO: 1130842 - RNA, 22 nt, Human
uggcgcaaacuuggcucaccaa

SEQ ID NO: 1130843 - RNA, 24 nt, Human
uggcucccaccugugaucccagca

SEQ ID NO: 1130844 - RNA, 22 nt, Human
uggcucuucagaucaggguggc

SEQ ID NO: 1130845 - RNA, 24 nt, Human
ugggaccauaggcacgugacacca

SEQ ID NO: 1130846 - RNA, 19 nt, Human
ugggaggcugaggcaggag

SEQ ID NO: 1130847 - RNA, 24 nt, Human
ugggaggcugaggcaggagaauca

SEQ ID NO: 1130848 - RNA, 23 nt, Human
ugggauaaaucaugguuuuggcc

SEQ ID NO: 1130849 - RNA, 20 nt, Human
ugggauaugguagagagcau

SEQ ID NO: 1130850 - RNA, 25 nt, Human
ugggauaugugggccuauugaugga

SEQ ID NO: 1130851 - RNA, 19 nt, Human
ugggcucaagugauccucu

SEQ ID NO: 1130852 - RNA, 24 nt, Human
ugggcucaagugauccucuugccu

SEQ ID NO: 1130853 - RNA, 21 nt, Human
uggggaagaauagagagcaau

SEQ ID NO: 1130854 - RNA, 24 nt, Human
uggguggaucaccugaggucagga

SEQ ID NO: 1130855 - RNA, 24 nt, Human
ugguacauagcaagggcuugcgug

SEQ ID NO: 1130856 - RNA, 20 nt, Human
ugguagagagcaugcugggc

SEQ ID NO: 1130857 - RNA, 18 nt, Human
uggugcccuaccucugcc

SEQ ID NO: 1130858 - RNA, 19 nt, Human
uggugcccuaccucugccu

SEQ ID NO: 1130859 - RNA, 21 nt, Human
uggugggcaccuguaauccca

SEQ ID NO: 1130860 - RNA, 21 nt, Human
ugguugagcagggagagggau

SEQ ID NO: 1130861 - RNA, 21 nt, Human
ugucacccaggcuggagugca

SEQ ID NO: 1130862 - RNA, 20 nt, Human
ugugaaaauauaggaaaaau

SEQ ID NO: 1130863 - RNA, 24 nt, Human
ugugaccagcuuggccaacauggu

SEQ ID NO: 1130864 - RNA, 19 nt, Human
ugugauaagugggaagaug

SEQ ID NO: 1130865 - RNA, 22 nt, Human
uguggacacuuacuccauggga

SEQ ID NO: 1130866 - RNA, 19 nt, Human
ugugugcaugugugugugu

SEQ ID NO: 1130867 - RNA, 20 nt, Human
ugugugcaugugugugugug

SEQ ID NO: 1130868 - RNA, 23 nt, Human
uguuguguuuuuguuuuuguuuu

SEQ ID NO: 1130869 - RNA, 21 nt, Human
uguuguuguguuuuuguuuuu

SEQ ID NO: 1130870 - RNA, 24 nt, Human
uguuuaagcaaguucaacaugaga

SEQ ID NO: 1130871 - RNA, 26 nt, Human
uuaaaaccccacccccaucccaccac

SEQ ID NO: 1130872 - RNA, 21 nt, Human
uuaccaaaauacaaaagacca

SEQ ID NO: 1130873 - RNA, 22 nt, Human
uuagaggaggcaggaaaguugg

SEQ ID NO: 1130874 - RNA, 18 nt, Human
uuagcugggcaugauggu

SEQ ID NO: 1130875 - RNA, 24 nt, Human
uuagcugggcaugauggugggcac

SEQ ID NO: 1130876 - RNA, 23 nt, Human
uucccuggccuccucuuccuugg

SEQ ID NO: 1130877 - RNA, 18 nt, Human
uucuaaaugguacccagg

SEQ ID NO: 1130878 - RNA, 18 nt, Human
uucuuaaaaccccacccc

SEQ ID NO: 1130879 - RNA, 20 nt, Human
uucuuaccuuucccccuaca

SEQ ID NO: 1130880 - RNA, 24 nt, Human
uugaaaaaaagccaaauauaucau

SEQ ID NO: 1130881 - RNA, 24 nt, Human
uugaggaaugagucucagaaaaaa

SEQ ID NO: 1130882 - RNA, 18 nt, Human
uugcagugagccgagauu

SEQ ID NO: 1130883 - RNA, 20 nt, Human
uugcagugagccgagauugc

SEQ ID NO: 1130884 - RNA, 22 nt, Human
uugcagugagccgagauugcgc

SEQ ID NO: 1130885 - RNA, 23 nt, Human
uuggccaacaugguaaaacccca

SEQ ID NO: 1130886 - RNA, 25 nt, Human
uugggaggcugaggcaggagaauca

SEQ ID NO: 1130887 - RNA, 24 nt, Human
uugggucucacuaugcugccuagg

SEQ ID NO: 1130888 - RNA, 18 nt, Human
uugugaaguuuuucaacc

SEQ ID NO: 1130889 - RNA, 22 nt, Human
uuguuguuguguuuuuguuuuu

SEQ ID NO: 1130890 - RNA, 21 nt, Human
uuucggaggcugaggugggug

SEQ ID NO: 1130891 - RNA, 28 nt, Human
uuucugguugcuucauuccauucugucu

SEQ ID NO: 1130892 - RNA, 18 nt, Human
uuucuuggagaaggcugg

SEQ ID NO: 1130893 - RNA, 22 nt, Human
uuucuuuugacuauagauguga

SEQ ID NO: 1130894 - RNA, 20 nt, Human
uuugauaaaauucaguaguc

SEQ ID NO: 1130895 - RNA, 19 nt, Human
uuugccucuccuuucuuca

SEQ ID NO: 1130896 - RNA, 24 nt, Human
uuuucaggcccauccaagcaucuc

SEQ ID NO: 1130897 - RNA, 22 nt, Human
uuuugagacaggguuucccacu

SEQ ID NO: 1130898 - RNA, 22 nt, Human
uuuuuguuguuguguuuuuguu

SEQ ID NO: 1130899 - RNA, 20 nt, Human
uuuuuguuuuugguuuuguu

SEQ ID NO: 1130900 - RNA, 21 nt, Human
uuuuuguuuuuguuuuugguu

SEQ ID NO: 1130901 - RNA, 25 nt, Human
aaagcaccuuuuccuccacacccca

SEQ ID NO: 1130902 - RNA, 22 nt, Human
aacaugcuucucuguucuccca

SEQ ID NO: 1130903 - RNA, 22 nt, Human
aagcaccuuuuccuccacaccc

SEQ ID NO: 1130904 - RNA, 18 nt, Human
aaucauuucaggccuuua

SEQ ID NO: 1130905 - RNA, 22 nt, Human
acacacacacacaccagagaca

SEQ ID NO: 1130906 - RNA, 21 nt, Human
acacagacccaggcuuggaca

SEQ ID NO: 1130907 - RNA, 23 nt, Human
agacacagacccaggcuuggaca

SEQ ID NO: 1130908 - RNA, 21 nt, Human
agccagcucucugagcugccu

SEQ ID NO: 1130909 - RNA, 22 nt, Human
aggaaccuacauggagacaggc

SEQ ID NO: 1130910 - RNA, 22 nt, Human
aggacacacacacacacaccag

SEQ ID NO: 1130911 - RNA, 28 nt, Human
aguggagcugcugauuugugaccugggg

SEQ ID NO: 1130912 - RNA, 19 nt, Human
agugucagcuguugcuauu

SEQ ID NO: 1130913 - RNA, 20 nt, Human
caccuuuuccuccacacccc

SEQ ID NO: 1130914 - RNA, 18 nt, Human
cagcuaggccccucuguc

SEQ ID NO: 1130915 - RNA, 20 nt, Human
cagcuaggccccucugucca

SEQ ID NO: 1130916 - RNA, 20 nt, Human
caggaggugaguggagcugc

SEQ ID NO: 1130917 - RNA, 21 nt, Human
caucauucuugcuguccccag

SEQ ID NO: 1130918 - RNA, 26 nt, Human
caugcucaugcacacgcuggaacgug

SEQ ID NO: 1130919 - RNA, 22 nt, Human
ccaaaagcucagcgaccaguga

SEQ ID NO: 1130920 - RNA, 19 nt, Human
cccagcucugccauccccu

SEQ ID NO: 1130921 - RNA, 22 nt, Human
cccagcucugccauccccugaa

SEQ ID NO: 1130922 - RNA, 22 nt, Human
ccugaagugccuccccuucuca

SEQ ID NO: 1130923 - RNA, 23 nt, Human
ccugaagugccuccccuucucac

SEQ ID NO: 1130924 - RNA, 19 nt, Human
ccugugcagagccguggcg

SEQ ID NO: 1130925 - RNA, 24 nt, Human
cguuuuauccuuauugcaacccua

SEQ ID NO: 1130926 - RNA, 19 nt, Human
cucuguccaucuugcuccc

SEQ ID NO: 1130927 - RNA, 22 nt, Human
cucuguucucccagaaacuuca

SEQ ID NO: 1130928 - RNA, 27 nt, Human
cugaagugccuccccuucucaccaaca

SEQ ID NO: 1130929 - RNA, 23 nt, Human
cugaaucaggaggugggaguuua

SEQ ID NO: 1130930 - RNA, 24 nt, Human
cugggggugggcugugaugacggc

SEQ ID NO: 1130931 - RNA, 21 nt, Human
cuguauguacugcugacgggg

SEQ ID NO: 1130932 - RNA, 23 nt, Human
cuuggacaguggcuagccagcua

SEQ ID NO: 1130933 - RNA, 22 nt, Human
gaccagugacagagcuggccug

SEQ ID NO: 1130934 - RNA, 22 nt, Human
gaucguguauauuauguucaua

SEQ ID NO: 1130935 - RNA, 28 nt, Human
gaugcacauauaccauugcaugugugug

SEQ ID NO: 1130936 - RNA, 18 nt, Human
gcacagcagaugagaagu

SEQ ID NO: 1130937 - RNA, 21 nt, Human
gcaccuuuuccuccacacccc

SEQ ID NO: 1130938 - RNA, 19 nt, Human
gcagagccguggcgugugg

SEQ ID NO: 1130939 - RNA, 22 nt, Human
gccacaugaggacacacacaca

SEQ ID NO: 1130940 - RNA, 22 nt, Human
ggcgcuugaggacuucuacagg

SEQ ID NO: 1130941 - RNA, 20 nt, Human
ggcuagccagcuaggccccu

SEQ ID NO: 1130942 - RNA, 22 nt, Human
ggguagguucugggggucagag

SEQ ID NO: 1130943 - RNA, 20 nt, Human
gguugaguuaggcacauggg

SEQ ID NO: 1130944 - RNA, 20 nt, Human
gugcagagccguggcgugug

SEQ ID NO: 1130945 - RNA, 22 nt, Human
gugcugggccugccuaaagguc

SEQ ID NO: 1130946 - RNA, 20 nt, Human
gugugaaaucauuucaggcc

SEQ ID NO: 1130947 - RNA, 26 nt, Human
gugugcuggacacuguauguacugcu

SEQ ID NO: 1130948 - RNA, 19 nt, Human
guugggcaggcugugcccc

SEQ ID NO: 1130949 - RNA, 23 nt, Human
guugucuggaaguugaggaaccu

SEQ ID NO: 1130950 - RNA, 21 nt, Human
uaaaacaggccuaaugaaagc

SEQ ID NO: 1130951 - RNA, 22 nt, Human
uaaaacaggccuaaugaaagca

SEQ ID NO: 1130952 - RNA, 20 nt, Human
uaaaaugcucaguaaguguc

SEQ ID NO: 1130953 - RNA, 21 nt, Human
uaaaaugcucaguaaguguca

SEQ ID NO: 1130954 - RNA, 22 nt, Human
uagaggaaugagcucucccaga

SEQ ID NO: 1130955 - RNA, 18 nt, Human
uagguucugggggucaga

SEQ ID NO: 1130956 - RNA, 24 nt, Human
uauguucauacacacagaccuaug

SEQ ID NO: 1130957 - RNA, 18 nt, Human
uccaaaagcucagcgacc

SEQ ID NO: 1130958 - RNA, 23 nt, Human
uccaucuugcucccagcucugcc

SEQ ID NO: 1130959 - RNA, 24 nt, Human
ucccaccucccuggugcuugucca

SEQ ID NO: 1130960 - RNA, 23 nt, Human
ucccuggugcuuguccacagcca

SEQ ID NO: 1130961 - RNA, 25 nt, Human
uccucacauguacaaaugcaucuau

SEQ ID NO: 1130962 - RNA, 19 nt, Human
uccugugugcuggacacug

SEQ ID NO: 1130963 - RNA, 18 nt, Human
ucuaggcccugugcagag

SEQ ID NO: 1130964 - RNA, 21 nt, Human
ucuaugggagcaugcguuuga

SEQ ID NO: 1130965 - RNA, 22 nt, Human
ucucccagagcacagacaggga

SEQ ID NO: 1130966 - RNA, 20 nt, Human
ucucgccucagagugagggc

SEQ ID NO: 1130967 - RNA, 21 nt, Human
ucugcgugugggcaucauucu

SEQ ID NO: 1130968 - RNA, 19 nt, Human
ucugugggguugaguuagg

SEQ ID NO: 1130969 - RNA, 25 nt, Human
ugaaagcaccuuuuccuccacaccc

SEQ ID NO: 1130970 - RNA, 18 nt, Human
ugaccugggggugggcug

SEQ ID NO: 1130971 - RNA, 21 nt, Human
ugagaaugagagcaugggguu

SEQ ID NO: 1130972 - RNA, 23 nt, Human
ugagaaugagagcaugggguugu

SEQ ID NO: 1130973 - RNA, 18 nt, Human
ugagcauuuguuggagga

SEQ ID NO: 1130974 - RNA, 18 nt, Human
ugaguuaggcacaugggg

SEQ ID NO: 1130975 - RNA, 19 nt, Human
ugcaggcgcuuagacaccc

SEQ ID NO: 1130976 - RNA, 22 nt, Human
ugcauccacaugauagggaucu

SEQ ID NO: 1130977 - RNA, 25 nt, Human
ugcgugcauacaaaugggcauaugg

SEQ ID NO: 1130978 - RNA, 19 nt, Human
ugcuuguccacagccacau

SEQ ID NO: 1130979 - RNA, 21 nt, Human
uggaggauggcuguuuguuua

SEQ ID NO: 1130980 - RNA, 24 nt, Human
uggcaggaggugaguggagcugcu

SEQ ID NO: 1130981 - RNA, 23 nt, Human
uggcaugcucaugcacacgcugg

SEQ ID NO: 1130982 - RNA, 19 nt, Human
uggcuagccagcuaggccc

SEQ ID NO: 1130983 - RNA, 23 nt, Human
ugggagcaugcguuugaauuugg

SEQ ID NO: 1130984 - RNA, 24 nt, Human
ugggcaggcugugccccagagagg

SEQ ID NO: 1130985 - RNA, 18 nt, Human
ugggcauaugacugagaa

SEQ ID NO: 1130986 - RNA, 18 nt, Human
uguaaaacgagggcugcc

SEQ ID NO: 1130987 - RNA, 22 nt, Human
uguaauggacuguuccugaggu

SEQ ID NO: 1130988 - RNA, 19 nt, Human
uguccacagccacaugagg

SEQ ID NO: 1130989 - RNA, 22 nt, Human
uguccacagccacaugaggaca

SEQ ID NO: 1130990 - RNA, 21 nt, Human
ugugagcccuggguuccucau

SEQ ID NO: 1130991 - RNA, 21 nt, Human
ugugaugacggcuggcugaug

SEQ ID NO: 1130992 - RNA, 20 nt, Human
ugugugcauccacaugauag

SEQ ID NO: 1130993 - RNA, 22 nt, Human
ugugugcuggacacuguaugua

SEQ ID NO: 1130994 - RNA, 21 nt, Human
uuacuuaaccuccuugugccu

SEQ ID NO: 1130995 - RNA, 19 nt, Human
uuauuugucauuugaucuu

SEQ ID NO: 1130996 - RNA, 21 nt, Human
uuggggcuuccugugugcugg

SEQ ID NO: 1130997 - RNA, 19 nt, Human
uuuaaaggcuucaugcccu

SEQ ID NO: 1130998 - RNA, 22 nt, Human
uuucaggccuuuaaaggcuuca

SEQ ID NO: 1130999 - RNA, 20 nt, Human
uuuguuggaggauggcuguu

SEQ ID NO: 1131000 - RNA, 18 nt, Human
uuuuggauacacccaagc

SEQ ID NO: 1131001 - RNA, 24 nt, Human
aaaaaaaaaagauaguacaaaaaa

SEQ ID NO: 1131002 - RNA, 23 nt, Human
aaaaaacaaaagacuaauaucau

SEQ ID NO: 1131003 - RNA, 21 nt, Human
aaaaaacagaaacuccuagag

SEQ ID NO: 1131004 - RNA, 26 nt, Human
aaaacaaaaaacagaaacuccuagag

SEQ ID NO: 1131005 - RNA, 20 nt, Human
aaaacagaaacuccuagagc

SEQ ID NO: 1131006 - RNA, 18 nt, Human
aaaacuugggcaaaggca

SEQ ID NO: 1131007 - RNA, 23 nt, Human
aaacaaaaaacagaaacuccuag

SEQ ID NO: 1131008 - RNA, 24 nt, Human
aaacaaaaaacagaaacuccuaga

SEQ ID NO: 1131009 - RNA, 23 nt, Human
aaacagaaaauauuugggaucua

SEQ ID NO: 1131010 - RNA, 24 nt, Human
aaacagaaaauauuugggaucuag

SEQ ID NO: 1131011 - RNA, 23 nt, Human
aaacaggguugaaacaugccccu

SEQ ID NO: 1131012 - RNA, 19 nt, Human
aaagagcuguaacacaaac

SEQ ID NO: 1131013 - RNA, 28 nt, Human
aacacaaacaggguugaaacaugccccu

SEQ ID NO: 1131014 - RNA, 21 nt, Human
aacaugcuuaucaaaguagga

SEQ ID NO: 1131015 - RNA, 25 nt, Human
aacuuucagaaaaaaaaaacagaaa

SEQ ID NO: 1131016 - RNA, 22 nt, Human
aagaggaaaagggcaaggauga

SEQ ID NO: 1131017 - RNA, 21 nt, Human
aagcaacaccccaaagaucuu

SEQ ID NO: 1131018 - RNA, 22 nt, Human
aagcaacaccccaaagaucuug

SEQ ID NO: 1131019 - RNA, 21 nt, Human
aagcauuucacaaaauaccca

SEQ ID NO: 1131020 - RNA, 18 nt, Human
aagccuccaggcaccacu

SEQ ID NO: 1131021 - RNA, 21 nt, Human
aauaaaacaaaaaacagaaac

SEQ ID NO: 1131022 - RNA, 23 nt, Human
acaaaaaacagaaacuccuagag

SEQ ID NO: 1131023 - RNA, 25 nt, Human
acaaaaugcugaugaaagaaauuuc

SEQ ID NO: 1131024 - RNA, 25 nt, Human
acaccccaaagaucuuguaacacag

SEQ ID NO: 1131025 - RNA, 19 nt, Human
acagaaaaagcauuucaca

SEQ ID NO: 1131026 - RNA, 26 nt, Human
acagugaaagacugaaaggucuacac

SEQ ID NO: 1131027 - RNA, 19 nt, Human
acaguggccagaccccacg

SEQ ID NO: 1131028 - RNA, 24 nt, Human
acuaaaucugauacucaaaccaaa

SEQ ID NO: 1131029 - RNA, 21 nt, Human
acuacauugagggugaagaga

SEQ ID NO: 1131030 - RNA, 19 nt, Human
agaaaaaaaaaacagaaaa

SEQ ID NO: 1131031 - RNA, 19 nt, Human
agaaaaagagaaauagagg

SEQ ID NO: 1131032 - RNA, 22 nt, Human
agaaaaagagaaauagagggaa

SEQ ID NO: 1131033 - RNA, 23 nt, Human
agaaaaagagaaauagagggaau

SEQ ID NO: 1131034 - RNA, 19 nt, Human
agaaaagcaacaccccaaa

SEQ ID NO: 1131035 - RNA, 22 nt, Human
agcccagugagcccaaacaaaa

SEQ ID NO: 1131036 - RNA, 21 nt, Human
aggacaagaacuugggaccca

SEQ ID NO: 1131037 - RNA, 21 nt, Human
aggacacccuggcuguggaaa

SEQ ID NO: 1131038 - RNA, 21 nt, Human
aggaggcagaugggcuccugg

SEQ ID NO: 1131039 - RNA, 22 nt, Human
aggcagaugggcuccugggcag

SEQ ID NO: 1131040 - RNA, 18 nt, Human
aggcugagaagucccaca

SEQ ID NO: 1131041 - RNA, 24 nt, Human
agggggcagguccccagugaggcc

SEQ ID NO: 1131042 - RNA, 18 nt, Human
aguacuaaaucugauacu

SEQ ID NO: 1131043 - RNA, 22 nt, Human
aguccagagacugcuguuaagu

SEQ ID NO: 1131044 - RNA, 23 nt, Human
auaaaacaaaaaacagaaacucc

SEQ ID NO: 1131045 - RNA, 24 nt, Human
auaaaacuuucagaaaaaaaaaac

SEQ ID NO: 1131046 - RNA, 18 nt, Human
auauucagaaaauggcag

SEQ ID NO: 1131047 - RNA, 19 nt, Human
aucuaaagguaacacgggg

SEQ ID NO: 1131048 - RNA, 20 nt, Human
aucuugcucacccuccacuu

SEQ ID NO: 1131049 - RNA, 26 nt, Human
caaaaaacagaaacuccuagagcuga

SEQ ID NO: 1131050 - RNA, 24 nt, Human
caacauaauccaacauacuaacug

SEQ ID NO: 1131051 - RNA, 23 nt, Human
caaguagaauucaacaauguaaa

SEQ ID NO: 1131052 - RNA, 20 nt, Human
cacacaccccuugccacucc

SEQ ID NO: 1131053 - RNA, 21 nt, Human
cacacaggccuuaucuuccuc

SEQ ID NO: 1131054 - RNA, 18 nt, Human
caccacuuuguuccccag

SEQ ID NO: 1131055 - RNA, 19 nt, Human
cacuuuguuccccaguacc

SEQ ID NO: 1131056 - RNA, 19 nt, Human
cagaaaaaaaaaacagaaa

SEQ ID NO: 1131057 - RNA, 20 nt, Human
caggacacccuggcugugga

SEQ ID NO: 1131058 - RNA, 20 nt, Human
caucuugcucacccuccacu

SEQ ID NO: 1131059 - RNA, 20 nt, Human
ccaaacaaaacuugggcaaa

SEQ ID NO: 1131060 - RNA, 19 nt, Human
ccacugcagcagcugacau

SEQ ID NO: 1131061 - RNA, 23 nt, Human
ccagaccccacgcucacucacac

SEQ ID NO: 1131062 - RNA, 21 nt, Human
ccaggcaccacuuuguucccc

SEQ ID NO: 1131063 - RNA, 24 nt, Human
ccaugccugacuugccuuuggcag

SEQ ID NO: 1131064 - RNA, 22 nt, Human
cccacgcucacucacacacccc

SEQ ID NO: 1131065 - RNA, 19 nt, Human
cccacugcggguuuccucc

SEQ ID NO: 1131066 - RNA, 24 nt, Human
cccuugccacuccaugccugacuu

SEQ ID NO: 1131067 - RNA, 21 nt, Human
ccuccaggcaccacuuuguuc

SEQ ID NO: 1131068 - RNA, 19 nt, Human
ccuguaggugccccuugcu

SEQ ID NO: 1131069 - RNA, 19 nt, Human
ccugugccagcaccuggag

SEQ ID NO: 1131070 - RNA, 20 nt, Human
ccuugcugugagcagccugg

SEQ ID NO: 1131071 - RNA, 24 nt, Human
cgaagcuuacugcaggaaugcagg

SEQ ID NO: 1131072 - RNA, 20 nt, Human
cggaaugagcccagugagcc

SEQ ID NO: 1131073 - RNA, 23 nt, Human
cuaguacuaaaucugauacucaa

SEQ ID NO: 1131074 - RNA, 24 nt, Human
cucaaaccaaaaaaaaaagauagu

SEQ ID NO: 1131075 - RNA, 22 nt, Human
cucacacaccccuugccacucc

SEQ ID NO: 1131076 - RNA, 21 nt, Human
cugaaacuuaaaauacaguag

SEQ ID NO: 1131077 - RNA, 19 nt, Human
cugcagcagcugacauguc

SEQ ID NO: 1131078 - RNA, 21 nt, Human
cugcuggguugcuaguagcau

SEQ ID NO: 1131079 - RNA, 23 nt, Human
cuggccagaaaagcaacacccca

SEQ ID NO: 1131080 - RNA, 18 nt, Human
cugggcagaagggggcag

SEQ ID NO: 1131081 - RNA, 18 nt, Human
gaagggggcaggucccca

SEQ ID NO: 1131082 - RNA, 23 nt, Human
gacaugggguccaggcugguagc

SEQ ID NO: 1131083 - RNA, 22 nt, Human
gacucuuucuugggagcccugu

SEQ ID NO: 1131084 - RNA, 21 nt, Human
gagcacagccugccaggccga

SEQ ID NO: 1131085 - RNA, 18 nt, Human
gagcuguaacacaaacag

SEQ ID NO: 1131086 - RNA, 18 nt, Human
gcaguggcaggaggcaga

SEQ ID NO: 1131087 - RNA, 24 nt, Human
gcccuucgggaagcccagaccugg

SEQ ID NO: 1131088 - RNA, 19 nt, Human
gccuuuggcagacaugggg

SEQ ID NO: 1131089 - RNA, 21 nt, Human
ggaaagccuggagagccugga

SEQ ID NO: 1131090 - RNA, 22 nt, Human
ggagcuccccaagccagggcua

SEQ ID NO: 1131091 - RNA, 19 nt, Human
ggaucuagauagugaggca

SEQ ID NO: 1131092 - RNA, 19 nt, Human
gggaagcccagaccugggg

SEQ ID NO: 1131093 - RNA, 20 nt, Human
ggggaggaacuccagaugug

SEQ ID NO: 1131094 - RNA, 19 nt, Human
uaaaacaaaaaacagaaac

SEQ ID NO: 1131095 - RNA, 24 nt, Human
uaaaacaaaaaacagaaacuccua

SEQ ID NO: 1131096 - RNA, 19 nt, Human
uaaaagagcuguaacacaa

SEQ ID NO: 1131097 - RNA, 21 nt, Human
uaaaagagcuguaacacaaac

SEQ ID NO: 1131098 - RNA, 23 nt, Human
uaaaucugauacucaaaccaaaa

SEQ ID NO: 1131099 - RNA, 18 nt, Human
uaacacaaacaggguuga

SEQ ID NO: 1131100 - RNA, 24 nt, Human
uaacacaaacaggguugaaacaug

SEQ ID NO: 1131101 - RNA, 18 nt, Human
uaaguccagagacugcug

SEQ ID NO: 1131102 - RNA, 23 nt, Human
uacagaaaaagcauuucacaaaa

SEQ ID NO: 1131103 - RNA, 24 nt, Human
uaccaaaaauaaaacaaaaaacag

SEQ ID NO: 1131104 - RNA, 25 nt, Human
uaccaaaaauaaaacaaaaaacaga

SEQ ID NO: 1131105 - RNA, 23 nt, Human
uagagcugauaagugacuucagc

SEQ ID NO: 1131106 - RNA, 21 nt, Human
uaggugccccuugcugugagc

SEQ ID NO: 1131107 - RNA, 22 nt, Human
uauggggcuugcaugcugagaa

SEQ ID NO: 1131108 - RNA, 22 nt, Human
ucaauucuucccaaguugauau

SEQ ID NO: 1131109 - RNA, 19 nt, Human
ucagaaccaggaaguugcu

SEQ ID NO: 1131110 - RNA, 27 nt, Human
uccaacauacuaacuggauacaaaaga

SEQ ID NO: 1131111 - RNA, 23 nt, Human
uccagagacugcuguuaaguccu

SEQ ID NO: 1131112 - RNA, 22 nt, Human
uccccaagccagggcuaugacu

SEQ ID NO: 1131113 - RNA, 22 nt, Human
ucuccaagccuccaggcaccac

SEQ ID NO: 1131114 - RNA, 26 nt, Human
ucugauacucaaaccaaaaaaaaaag

SEQ ID NO: 1131115 - RNA, 22 nt, Human
ugaagcuaguacuaaaucugau

SEQ ID NO: 1131116 - RNA, 20 nt, Human
ugagcccaaacaaaacuugg

SEQ ID NO: 1131117 - RNA, 23 nt, Human
ugagcccaaacaaaacuugggca

SEQ ID NO: 1131118 - RNA, 18 nt, Human
ugagcccagugagcccaa

SEQ ID NO: 1131119 - RNA, 25 nt, Human
ugaggauccagggggcugcuguugu

SEQ ID NO: 1131120 - RNA, 21 nt, Human
ugagggugaagagaaagaaag

SEQ ID NO: 1131121 - RNA, 19 nt, Human
ugcccaaaagccucagaac

SEQ ID NO: 1131122 - RNA, 19 nt, Human
ugcucauggaggcugagaa

SEQ ID NO: 1131123 - RNA, 21 nt, Human
uggaaaggagcuacccacugc

SEQ ID NO: 1131124 - RNA, 19 nt, Human
uggaggcugagaaguccca

SEQ ID NO: 1131125 - RNA, 24 nt, Human
uggcaaaggguccugcagcucccg

SEQ ID NO: 1131126 - RNA, 26 nt, Human
uggcaggaggcagaugggaggucgac

SEQ ID NO: 1131127 - RNA, 25 nt, Human
uggcaggaggcagaugggcuccugg

SEQ ID NO: 1131128 - RNA, 23 nt, Human
uggccagaaaagcaacaccccaa

SEQ ID NO: 1131129 - RNA, 23 nt, Human
ugggagcuccccaagccagggcu

SEQ ID NO: 1131130 - RNA, 21 nt, Human
uguauauucagaaaauggcag

SEQ ID NO: 1131131 - RNA, 23 nt, Human
ugugccagcaccuggagcugccc

SEQ ID NO: 1131132 - RNA, 18 nt, Human
uguuagaaguucuaccca

SEQ ID NO: 1131133 - RNA, 19 nt, Human
uuaaagagcaucuauaaca

SEQ ID NO: 1131134 - RNA, 21 nt, Human
uuagcaaguagaauucaacaa

SEQ ID NO: 1131135 - RNA, 24 nt, Human
uuagcaaguagaauucaacaaugu

SEQ ID NO: 1131136 - RNA, 22 nt, Human
uuauuguuaaacaguguuagaa

SEQ ID NO: 1131137 - RNA, 20 nt, Human
uuccuggccaggaauggagg

SEQ ID NO: 1131138 - RNA, 24 nt, Human
uucugcuggaacugcuggguugcu

SEQ ID NO: 1131139 - RNA, 21 nt, Human
uuucagaaaaaaaaaacagaa

SEQ ID NO: 1131140 - RNA, 21 nt, Human
ucagagcccaaugucaccagc

SEQ ID NO: 1131141 - RNA, 18 nt, Human
ucgggucuacacccaaga

SEQ ID NO: 1131142 - RNA, 23 nt, Human
uggggcaaaugccaccaccuguc

SEQ ID NO: 1131143 - RNA, 24 nt, Human
ugucaccagcgacuccugugaaau

SEQ ID NO: 1131144 - RNA, 20 nt, Human
aaaaacccagaaugaggaca

SEQ ID NO: 1131145 - RNA, 24 nt, Human
aaaaacccagaaugaggacacuac

SEQ ID NO: 1131146 - RNA, 20 nt, Human
aacucuacaaaauaugaaaa

SEQ ID NO: 1131147 - RNA, 21 nt, Human
aagcugccauguuaacaggcc

SEQ ID NO: 1131148 - RNA, 19 nt, Human
aaggacaccaggcaaacug

SEQ ID NO: 1131149 - RNA, 23 nt, Human
aaggagcugaggauggcucaugg

SEQ ID NO: 1131150 - RNA, 21 nt, Human
acaaaaacccagaaugaggac

SEQ ID NO: 1131151 - RNA, 26 nt, Human
acacagaagacaaaaacccagaauga

SEQ ID NO: 1131152 - RNA, 27 nt, Human
acagagcaagaccccauucucuuaaaa

SEQ ID NO: 1131153 - RNA, 24 nt, Human
acaucuaugauggcaaaaacacua

SEQ ID NO: 1131154 - RNA, 19 nt, Human
accacugcacuccagccug

SEQ ID NO: 1131155 - RNA, 22 nt, Human
accacugcacuccagccugggu

SEQ ID NO: 1131156 - RNA, 23 nt, Human
accacugcacuccagccugggug

SEQ ID NO: 1131157 - RNA, 25 nt, Human
accacugcacuccagccugggugac

SEQ ID NO: 1131158 - RNA, 20 nt, Human
acggagcugggaaacuuccc

SEQ ID NO: 1131159 - RNA, 21 nt, Human
acuaagaccuggucacuccaa

SEQ ID NO: 1131160 - RNA, 18 nt, Human
acuacacuccagccuggg

SEQ ID NO: 1131161 - RNA, 22 nt, Human
acuacacuccagccugggucac

SEQ ID NO: 1131162 - RNA, 24 nt, Human
acugcacuccagccugggugacag

SEQ ID NO: 1131163 - RNA, 26 nt, Human
acugcacuccagccugggugacagag

SEQ ID NO: 1131164 - RNA, 19 nt, Human
acuugggaggcugaggcag

SEQ ID NO: 1131165 - RNA, 21 nt, Human
acuuucucuuuaaagggggug

SEQ ID NO: 1131166 - RNA, 22 nt, Human
agaaagaagguggauuacaauc

SEQ ID NO: 1131167 - RNA, 22 nt, Human
agccagggauggcagugugugc

SEQ ID NO: 1131168 - RNA, 18 nt, Human
aggaggaucauggaugca

SEQ ID NO: 1131169 - RNA, 20 nt, Human
aggcugaggcaggaggauca

SEQ ID NO: 1131170 - RNA, 22 nt, Human
aggcugaggcaggaggaucaug

SEQ ID NO: 1131171 - RNA, 21 nt, Human
agugggcacagccuuuuaaac

SEQ ID NO: 1131172 - RNA, 21 nt, Human
aucacuuugucauccuuucuu

SEQ ID NO: 1131173 - RNA, 26 nt, Human
auucucuuaaaaacagaaauugggaa

SEQ ID NO: 1131174 - RNA, 21 nt, Human
caaaaacaaaauacuucuaag

SEQ ID NO: 1131175 - RNA, 21 nt, Human
caaaaacccagaaugaggaca

SEQ ID NO: 1131176 - RNA, 21 nt, Human
caaaauaugaaaacauuagcc

SEQ ID NO: 1131177 - RNA, 21 nt, Human
cacagaagacaaaaacccaga

SEQ ID NO: 1131178 - RNA, 26 nt, Human
caccacugcacuccagccugggugac

SEQ ID NO: 1131179 - RNA, 20 nt, Human
cacuccagccugggucacgu

SEQ ID NO: 1131180 - RNA, 22 nt, Human
cacuccagccugggugacagag

SEQ ID NO: 1131181 - RNA, 23 nt, Human
cacuccagccugggugacagagc

SEQ ID NO: 1131182 - RNA, 19 nt, Human
cacugcacuccagccuggg

SEQ ID NO: 1131183 - RNA, 19 nt, Human
cacugcacuccagccuggg

SEQ ID NO: 1131184 - RNA, 20 nt, Human
cacugcacuccagccugggg

SEQ ID NO: 1131185 - RNA, 22 nt, Human
cacugcacuccagccuggguga

SEQ ID NO: 1131186 - RNA, 23 nt, Human
cacugcacuccagccugggugac

SEQ ID NO: 1131187 - RNA, 24 nt, Human
cacugcacuccagccugggugaca

SEQ ID NO: 1131188 - RNA, 25 nt, Human
cacugcacuccagccugggugacag

SEQ ID NO: 1131189 - RNA, 22 nt, Human
cagaaggaaagcauacaaucau

SEQ ID NO: 1131190 - RNA, 24 nt, Human
cagaaugaggacacuaccaguaaa

SEQ ID NO: 1131191 - RNA, 21 nt, Human
cauccaucucugcuaugucuu

SEQ ID NO: 1131192 - RNA, 22 nt, Human
cauccccuuuaucgguacggcc

SEQ ID NO: 1131193 - RNA, 19 nt, Human
ccaaggaaaauuagcucca

SEQ ID NO: 1131194 - RNA, 20 nt, Human
ccacugcacuccagccuggg

SEQ ID NO: 1131195 - RNA, 20 nt, Human
ccacugcacuccagccuggg

SEQ ID NO: 1131196 - RNA, 21 nt, Human
ccacugcacuccagccugggu

SEQ ID NO: 1131197 - RNA, 24 nt, Human
ccacugcacuccagccugggugac

SEQ ID NO: 1131198 - RNA, 25 nt, Human
ccacugcacuccagccugggugaca

SEQ ID NO: 1131199 - RNA, 25 nt, Human
ccacugcacuccagccugggugacc

SEQ ID NO: 1131200 - RNA, 20 nt, Human
ccagaaugaggacacuacca

SEQ ID NO: 1131201 - RNA, 22 nt, Human
ccucauaccuucccacuccuaa

SEQ ID NO: 1131202 - RNA, 20 nt, Human
ccugggugacagagcaagac

SEQ ID NO: 1131203 - RNA, 21 nt, Human
cuacuacacuccagccugggu

SEQ ID NO: 1131204 - RNA, 24 nt, Human
cuacuacacuccagccugggucac

SEQ ID NO: 1131205 - RNA, 19 nt, Human
cucauaccuucccacuccu

SEQ ID NO: 1131206 - RNA, 19 nt, Human
cuccauucuggucuauacc

SEQ ID NO: 1131207 - RNA, 19 nt, Human
cugacugacaugaacuaca

SEQ ID NO: 1131208 - RNA, 21 nt, Human
cugccauguuaacaggcccau

SEQ ID NO: 1131209 - RNA, 22 nt, Human
cugcuguaaaguccagccaugu

SEQ ID NO: 1131210 - RNA, 24 nt, Human
cuucaaacauccaucucugcuaug

SEQ ID NO: 1131211 - RNA, 22 nt, Human
cuuuuaaaggaugagaagcuga

SEQ ID NO: 1131212 - RNA, 19 nt, Human
gacaugaacuacaauuuuu

SEQ ID NO: 1131213 - RNA, 18 nt, Human
gagcaagaccccauucuc

SEQ ID NO: 1131214 - RNA, 25 nt, Human
gauaaacggagcugggaaacuuccc

SEQ ID NO: 1131215 - RNA, 21 nt, Human
gaugaaucuuauaacugaacc

SEQ ID NO: 1131216 - RNA, 20 nt, Human
gaugcaacacaguuauuugg

SEQ ID NO: 1131217 - RNA, 24 nt, Human
gcacuccagccugggugacagagc

SEQ ID NO: 1131218 - RNA, 19 nt, Human
gccagaucuucacuuucau

SEQ ID NO: 1131219 - RNA, 19 nt, Human
gcuacuacacuccagccug

SEQ ID NO: 1131220 - RNA, 25 nt, Human
ggaugagaagcugagcagugggggg

SEQ ID NO: 1131221 - RNA, 25 nt, Human
ggguuugcuuauagacaaagcugcc

SEQ ID NO: 1131222 - RNA, 24 nt, Human
guaagggucauuguuauaugcaag

SEQ ID NO: 1131223 - RNA, 18 nt, Human
guguccccaagggacaca

SEQ ID NO: 1131224 - RNA, 23 nt, Human
uaaaaaagcuucccuguguuagc

SEQ ID NO: 1131225 - RNA, 24 nt, Human
uaacaaggagcugaggauggcuca

SEQ ID NO: 1131226 - RNA, 23 nt, Human
uaacaucuuagacguaaggguca

SEQ ID NO: 1131227 - RNA, 23 nt, Human
uaaccuucaucuaaaaaugacuu

SEQ ID NO: 1131228 - RNA, 21 nt, Human
uaacugaaccucacaagaauu

SEQ ID NO: 1131229 - RNA, 23 nt, Human
uaagaugagucaucacugacuga

SEQ ID NO: 1131230 - RNA, 25 nt, Human
uaaggacaccaggcaaacuggagac

SEQ ID NO: 1131231 - RNA, 22 nt, Human
uaaguaaaaucaauugacuccc

SEQ ID NO: 1131232 - RNA, 20 nt, Human
uacaaaauaugaaaacauua

SEQ ID NO: 1131233 - RNA, 22 nt, Human
uacuacacuccagccuggguca

SEQ ID NO: 1131234 - RNA, 23 nt, Human
uagccagggauggcagugugugc

SEQ ID NO: 1131235 - RNA, 25 nt, Human
ucaucuaaaaaugacuucaugucac

SEQ ID NO: 1131236 - RNA, 21 nt, Human
uccaaaaacaaaauacuucua

SEQ ID NO: 1131237 - RNA, 18 nt, Human
uccagagggcuccucuca

SEQ ID NO: 1131238 - RNA, 24 nt, Human
uccagccugggugacagagcaaga

SEQ ID NO: 1131239 - RNA, 23 nt, Human
uccucauaccuucccacuccuaa

SEQ ID NO: 1131240 - RNA, 22 nt, Human
ucuguccuuuucuuuccagagg

SEQ ID NO: 1131241 - RNA, 21 nt, Human
ucuuauaacugaaccucacaa

SEQ ID NO: 1131242 - RNA, 20 nt, Human
ugaauagcuacuacacucca

SEQ ID NO: 1131243 - RNA, 19 nt, Human
ugacagagcaagaccccau

SEQ ID NO: 1131244 - RNA, 23 nt, Human
ugacaugaacuacaauuuuugag

SEQ ID NO: 1131245 - RNA, 23 nt, Human
ugacugcaccacugcacuccagc

SEQ ID NO: 1131246 - RNA, 18 nt, Human
ugagaagcugagcagugg

SEQ ID NO: 1131247 - RNA, 21 nt, Human
ugaggauauugagggugggag

SEQ ID NO: 1131248 - RNA, 18 nt, Human
ugaggcaggaggaucaug

SEQ ID NO: 1131249 - RNA, 22 nt, Human
ugagucaucacugacugacaug

SEQ ID NO: 1131250 - RNA, 21 nt, Human
ugcaccacugcacuccagccu

SEQ ID NO: 1131251 - RNA, 27 nt, Human
ugcaccacugcacuccagccuggguga

SEQ ID NO: 1131252 - RNA, 31 nt, Human
ugcaccacugcacuccagccugggugacagg

SEQ ID NO: 1131253 - RNA, 22 nt, Human
ugcaguaagccaugacugcacc

SEQ ID NO: 1131254 - RNA, 23 nt, Human
uggcaaaaacacuauacucaaaa

SEQ ID NO: 1131255 - RNA, 20 nt, Human
ugggaggcugaggcaggagg

SEQ ID NO: 1131256 - RNA, 24 nt, Human
ugggaggcugaggcaggaggauca

SEQ ID NO: 1131257 - RNA, 18 nt, Human
ugucacaguaaacacaga

SEQ ID NO: 1131258 - RNA, 21 nt, Human
uguccuuuucuuuccagaggg

SEQ ID NO: 1131259 - RNA, 25 nt, Human
uguccuuuucuuuccagagggcucc

SEQ ID NO: 1131260 - RNA, 18 nt, Human
uucaaacauccaucucug

SEQ ID NO: 1131261 - RNA, 20 nt, Human
uucaaucacuuugucauccu

SEQ ID NO: 1131262 - RNA, 22 nt, Human
uucaugucacaguaaacacaga

SEQ ID NO: 1131263 - RNA, 21 nt, Human
uucccuugaagccaugaguuu

SEQ ID NO: 1131264 - RNA, 19 nt, Human
uucuaagaaagaaggugga

SEQ ID NO: 1131265 - RNA, 25 nt, Human
uugggaggcugaggcaggaggauca

SEQ ID NO: 1131266 - RNA, 20 nt, Human
uuucuaagaaagaaggugga

SEQ ID NO: 1131267 - RNA, 19 nt, Human
caucuucuccgucucugcc

SEQ ID NO: 1131268 - RNA, 21 nt, Human
uucaucuucuccgucucugcc

SEQ ID NO: 1131269 - RNA, 25 nt, Human
uucuuuagcacugguucccuucuga

SEQ ID NO: 1131270 - RNA, 23 nt, Human
ggugagcagagauggggaaggga

SEQ ID NO: 1131271 - RNA, 20 nt, Human
uacaguuugucaacacucaa

SEQ ID NO: 1131272 - RNA, 20 nt, Human
ucuccugacacacaaaucca

SEQ ID NO: 1131273 - RNA, 20 nt, Human
uggaagacugggcaccuggu

SEQ ID NO: 1131274 - RNA, 21 nt, Human
ugggcaccuggugccaggccc

SEQ ID NO: 1131275 - RNA, 18 nt, Human
uggggaagggaguugcuc

SEQ ID NO: 1131276 - RNA, 22 nt, Human
aaaacaaaucuuacacagccuu

SEQ ID NO: 1131277 - RNA, 27 nt, Human
aagaaccugcuuuaaauuuccaugcca

SEQ ID NO: 1131278 - RNA, 18 nt, Human
aagcugcaucagagacaa

SEQ ID NO: 1131279 - RNA, 20 nt, Human
acacuguacaguuuaaaaac

SEQ ID NO: 1131280 - RNA, 18 nt, Human
accaccaggacagggcca

SEQ ID NO: 1131281 - RNA, 23 nt, Human
accaggcaagguuagugacuauu

SEQ ID NO: 1131282 - RNA, 25 nt, Human
acuaccauccccauauauaacuaau

SEQ ID NO: 1131283 - RNA, 23 nt, Human
agacaagaaaaaaaacugcgcua

SEQ ID NO: 1131284 - RNA, 24 nt, Human
agacaagaaaaaaaacugcgcuag

SEQ ID NO: 1131285 - RNA, 26 nt, Human
agacaagaaaaaaaacugcgcuagag

SEQ ID NO: 1131286 - RNA, 26 nt, Human
aucagagacaacugaagaugaaaaaa

SEQ ID NO: 1131287 - RNA, 18 nt, Human
cacuguacaguuuaaaaa

SEQ ID NO: 1131288 - RNA, 21 nt, Human
caugccaauuuacaaccccca

SEQ ID NO: 1131289 - RNA, 21 nt, Human
ccaacaagaaccugcuuuaaa

SEQ ID NO: 1131290 - RNA, 22 nt, Human
ccaggacagggccaucuaaaga

SEQ ID NO: 1131291 - RNA, 19 nt, Human
ccauccccauauauaacua

SEQ ID NO: 1131292 - RNA, 24 nt, Human
ccaucuaaagacacauuugguagu

SEQ ID NO: 1131293 - RNA, 23 nt, Human
ccuuacauuucaauuuuuuucuu

SEQ ID NO: 1131294 - RNA, 23 nt, Human
cugcgcaccaacaagaaccugcu

SEQ ID NO: 1131295 - RNA, 26 nt, Human
gaaccugcuuuaaauuuccaugccaa

SEQ ID NO: 1131296 - RNA, 18 nt, Human
gacacauuugguagugua

SEQ ID NO: 1131297 - RNA, 22 nt, Human
gacacuguacaguuuaaaaacc

SEQ ID NO: 1131298 - RNA, 23 nt, Human
gcauucagaaugucaacaaaaca

SEQ ID NO: 1131299 - RNA, 22 nt, Human
gcugcgcaccaacaagaaccug

SEQ ID NO: 1131300 - RNA, 18 nt, Human
uaaaaggagugaguugug

SEQ ID NO: 1131301 - RNA, 23 nt, Human
uccccauauauaacuaauuugug

SEQ ID NO: 1131302 - RNA, 21 nt, Human
agcacacagggacccuuggag

SEQ ID NO: 1131303 - RNA, 21 nt, Human
agggcucaaagcaccuugaaa

SEQ ID NO: 1131304 - RNA, 19 nt, Human
auugaaggaucugcggggg

SEQ ID NO: 1131305 - RNA, 19 nt, Human
caagucaagacaaugguga

SEQ ID NO: 1131306 - RNA, 22 nt, Human
cccaagucaagacaauggugac

SEQ ID NO: 1131307 - RNA, 27 nt, Human
ccucucaucauugcuucuccuaagggc

SEQ ID NO: 1131308 - RNA, 18 nt, Human
uaggaaaggcagcccagg

SEQ ID NO: 1131309 - RNA, 23 nt, Human
uccuaagggccauugaaucucua

SEQ ID NO: 1131310 - RNA, 23 nt, Human
ugaaucucuagcacacagggacc

SEQ ID NO: 1131311 - RNA, 18 nt, Human
ugaucucuucaucaguag

SEQ ID NO: 1131312 - RNA, 19 nt, Human
uucacuguuucuacugugc

SEQ ID NO: 1131313 - RNA, 20 nt, Human
uucagcaucaugccagacag

SEQ ID NO: 1131314 - RNA, 21 nt, Human
uucagcaucaugccagacagg

SEQ ID NO: 1131315 - RNA, 24 nt, Human
uuccuacagggcucaaagcaccuu

SEQ ID NO: 1131316 - RNA, 21 nt, Human
uugcuucuccuaagggccauu

SEQ ID NO: 1131317 - RNA, 23 nt, Human
aacugugcaaaagucucuugccg

SEQ ID NO: 1131318 - RNA, 19 nt, Human
aagcagcuguccagaccuc

SEQ ID NO: 1131319 - RNA, 22 nt, Human
aagcgcacuauggugacccaug

SEQ ID NO: 1131320 - RNA, 21 nt, Human
accaagcaauccagaaaccga

SEQ ID NO: 1131321 - RNA, 22 nt, Human
acccuuugggaucccccagccu

SEQ ID NO: 1131322 - RNA, 22 nt, Human
accuggccccugcagugcuccg

SEQ ID NO: 1131323 - RNA, 20 nt, Human
agaaaucaauaaauaucgaa

SEQ ID NO: 1131324 - RNA, 22 nt, Human
agacagucgguagacuccaagc

SEQ ID NO: 1131325 - RNA, 21 nt, Human
aggaacacaggcaccuuggcc

SEQ ID NO: 1131326 - RNA, 21 nt, Human
aggagcggggacagacucuga

SEQ ID NO: 1131327 - RNA, 19 nt, Human
agggauggggcuguuggag

SEQ ID NO: 1131328 - RNA, 23 nt, Human
agggauggggcuguuggaggagc

SEQ ID NO: 1131329 - RNA, 22 nt, Human
aggggggcaggaggaggaguug

SEQ ID NO: 1131330 - RNA, 21 nt, Human
agggugccaccagagucccag

SEQ ID NO: 1131331 - RNA, 18 nt, Human
agucccagugccuggguu

SEQ ID NO: 1131332 - RNA, 18 nt, Human
auaaugagugagccaggc

SEQ ID NO: 1131333 - RNA, 22 nt, Human
auccugcacccagugcucaauu

SEQ ID NO: 1131334 - RNA, 22 nt, Human
augcaggugggaacaauccagu

SEQ ID NO: 1131335 - RNA, 22 nt, Human
cacaggcaccuuggccugaaga

SEQ ID NO: 1131336 - RNA, 23 nt, Human
cacccagggugccaccagagucc

SEQ ID NO: 1131337 - RNA, 19 nt, Human
caggagacgaugcgcuuuc

SEQ ID NO: 1131338 - RNA, 20 nt, Human
ccagaaaccgagcaggaaca

SEQ ID NO: 1131339 - RNA, 21 nt, Human
ccagaccucugagacagacag

SEQ ID NO: 1131340 - RNA, 21 nt, Human
cccuguacagccccagcgagu

SEQ ID NO: 1131341 - RNA, 21 nt, Human
cccuuugggaucccccagccu

SEQ ID NO: 1131342 - RNA, 21 nt, Human
ccugccgcguuucuccuccca

SEQ ID NO: 1131343 - RNA, 19 nt, Human
ccuggguugggggcuggag

SEQ ID NO: 1131344 - RNA, 24 nt, Human
ccuuugggaucccccagccugucc

SEQ ID NO: 1131345 - RNA, 21 nt, Human
cgagaaggaggaaaacccgcc

SEQ ID NO: 1131346 - RNA, 23 nt, Human
cucaagaccuccugcaacggucu

SEQ ID NO: 1131347 - RNA, 21 nt, Human
cuccaagcagaaacugugcaa

SEQ ID NO: 1131348 - RNA, 28 nt, Human
cucccaaugccucuggagccagcucugu

SEQ ID NO: 1131349 - RNA, 20 nt, Human
cugagacagacagucgguag

SEQ ID NO: 1131350 - RNA, 21 nt, Human
cuggcccaccgcugaccgcac

SEQ ID NO: 1131351 - RNA, 23 nt, Human
cuggcccaccgcugguccccugg

SEQ ID NO: 1131352 - RNA, 18 nt, Human
cuuccucuaccagacugu

SEQ ID NO: 1131353 - RNA, 25 nt, Human
gagaggcucuggcccaccgcugacc

SEQ ID NO: 1131354 - RNA, 20 nt, Human
gagugauucucuuucucuuc

SEQ ID NO: 1131355 - RNA, 27 nt, Human
gcacagcuucaucccggugauccaugc

SEQ ID NO: 1131356 - RNA, 20 nt, Human
gccccgagggggugggggcu

SEQ ID NO: 1131357 - RNA, 20 nt, Human
gccugccgcguuucuccucc

SEQ ID NO: 1131358 - RNA, 18 nt, Human
gccuggguugggggcugg

SEQ ID NO: 1131359 - RNA, 19 nt, Human
gcucagggcccuguacagc

SEQ ID NO: 1131360 - RNA, 19 nt, Human
gcuccggaaauugccaggg

SEQ ID NO: 1131361 - RNA, 19 nt, Human
gcugccucgcuucugagcu

SEQ ID NO: 1131362 - RNA, 18 nt, Human
ggcccaccgcugaccgcc

SEQ ID NO: 1131363 - RNA, 18 nt, Human
gggagggaggggggcagg

SEQ ID NO: 1131364 - RNA, 26 nt, Human
gggaucccccagccuguccuccgccu

SEQ ID NO: 1131365 - RNA, 19 nt, Human
gucgccaaccacuuugucu

SEQ ID NO: 1131366 - RNA, 24 nt, Human
gugauucucuuucucuucuucauu

SEQ ID NO: 1131367 - RNA, 21 nt, Human
guggcugucgccaaccacuuu

SEQ ID NO: 1131368 - RNA, 21 nt, Human
guucuuuuuuuuuccuucaug

SEQ ID NO: 1131369 - RNA, 23 nt, Human
guuucauuuaaguaccaagcaau

SEQ ID NO: 1131370 - RNA, 30 nt, Human
uaauaagauguuucauuuaaguaccaagcc

SEQ ID NO: 1131371 - RNA, 24 nt, Human
uagaaaucaauaaauaucgaauga

SEQ ID NO: 1131372 - RNA, 20 nt, Human
ucauuuaaguaccaagcaau

SEQ ID NO: 1131373 - RNA, 22 nt, Human
ucccccagccuguccuccgccu

SEQ ID NO: 1131374 - RNA, 21 nt, Human
uccggccugcaggagcgggga

SEQ ID NO: 1131375 - RNA, 26 nt, Human
uccuccguccuccuguccgagcuuca

SEQ ID NO: 1131376 - RNA, 19 nt, Human
uccuccuguccgagcuuca

SEQ ID NO: 1131377 - RNA, 21 nt, Human
ucgcuucugagcugccacccu

SEQ ID NO: 1131378 - RNA, 23 nt, Human
ucucuugccggugcuccggaaau

SEQ ID NO: 1131379 - RNA, 21 nt, Human
ugaccccagaaggcaguugcu

SEQ ID NO: 1131380 - RNA, 21 nt, Human
ugacucacucagaugagauuu

SEQ ID NO: 1131381 - RNA, 24 nt, Human
ugagccaaauguaacaagcagcug

SEQ ID NO: 1131382 - RNA, 19 nt, Human
ugagccaggccugccgcgu

SEQ ID NO: 1131383 - RNA, 21 nt, Human
ugccaccagagucccagugcc

SEQ ID NO: 1131384 - RNA, 20 nt, Human
ugccugccacccagggugcc

SEQ ID NO: 1131385 - RNA, 18 nt, Human
ugccuggguugggggcug

SEQ ID NO: 1131386 - RNA, 19 nt, Human
uggaggagccgagagcuac

SEQ ID NO: 1131387 - RNA, 19 nt, Human
uggauccugcacccagugc

SEQ ID NO: 1131388 - RNA, 23 nt, Human
uggcucaagaccuccugcaacgg

SEQ ID NO: 1131389 - RNA, 23 nt, Human
ugggaucccccagccuguccucc

SEQ ID NO: 1131390 - RNA, 18 nt, Human
ugggggcuggagcgcacc

SEQ ID NO: 1131391 - RNA, 23 nt, Human
uguaaugagauauuuacaugugc

SEQ ID NO: 1131392 - RNA, 18 nt, Human
ugugguuucagggccuca

SEQ ID NO: 1131393 - RNA, 21 nt, Human
uguuuuucuuugcugacuugu

SEQ ID NO: 1131394 - RNA, 25 nt, Human
uuaaguaccaagcaauccagaaacc

SEQ ID NO: 1131395 - RNA, 18 nt, Human
uucauggggaaaguuggg

SEQ ID NO: 1131396 - RNA, 18 nt, Human
uuccaaggcucgugcacu

SEQ ID NO: 1131397 - RNA, 18 nt, Human
uuggccugaagaauuggg

SEQ ID NO: 1131398 - RNA, 30 nt, Human
uuuaggucuuggcaaaaauguggcugucgg

SEQ ID NO: 1131399 - RNA, 26 nt, Human
uuugggagggaggggggcaggaggag

SEQ ID NO: 1131400 - RNA, 22 nt, Human
cuguaugaaacauucuccaccu

SEQ ID NO: 1131401 - RNA, 25 nt, Human
cuuuuuauuccccacuugucaggag

SEQ ID NO: 1131402 - RNA, 18 nt, Human
ggcuuuuuauuccccacu

SEQ ID NO: 1131403 - RNA, 19 nt, Human
acuuguacguuccuucccu

SEQ ID NO: 1131404 - RNA, 20 nt, Human
uuacuuguacguuccuuccc

SEQ ID NO: 1131405 - RNA, 23 nt, Human
aaagaaccgugaaccagcauuuu

SEQ ID NO: 1131406 - RNA, 20 nt, Human
aaagacacacccagggccag

SEQ ID NO: 1131407 - RNA, 22 nt, Human
aaagacacacccagggccagag

SEQ ID NO: 1131408 - RNA, 22 nt, Human
aaagacgucuaugaaaccugag

SEQ ID NO: 1131409 - RNA, 22 nt, Human
aaaugccagaagaguggaugug

SEQ ID NO: 1131410 - RNA, 19 nt, Human
aacacggugaaacuccguc

SEQ ID NO: 1131411 - RNA, 20 nt, Human
aacacggugaaacuccgucu

SEQ ID NO: 1131412 - RNA, 21 nt, Human
aagaaaucugcuuaagaaauc

SEQ ID NO: 1131413 - RNA, 23 nt, Human
aagacacacccagggccagagau

SEQ ID NO: 1131414 - RNA, 24 nt, Human
aauggcgugaaccugggaggcgga

SEQ ID NO: 1131415 - RNA, 19 nt, Human
acacggugaaacuccgucu

SEQ ID NO: 1131416 - RNA, 25 nt, Human
acaggaaaagacacacccagggcca

SEQ ID NO: 1131417 - RNA, 20 nt, Human
acuccccagcacauggggau

SEQ ID NO: 1131418 - RNA, 24 nt, Human
acuccgucuguacuaaaaauacaa

SEQ ID NO: 1131419 - RNA, 23 nt, Human
acucugcauuccaggauucucug

SEQ ID NO: 1131420 - RNA, 24 nt, Human
acuuugggaggucaaggcagguua

SEQ ID NO: 1131421 - RNA, 26 nt, Human
agacacacccagggccagagauucua

SEQ ID NO: 1131422 - RNA, 20 nt, Human
agcacuuugggaggucaagg

SEQ ID NO: 1131423 - RNA, 19 nt, Human
aggaaaagacacacccagg

SEQ ID NO: 1131424 - RNA, 21 nt, Human
aggaaaagacacacccagggc

SEQ ID NO: 1131425 - RNA, 23 nt, Human
aggaaaagacacacccagggcca

SEQ ID NO: 1131426 - RNA, 24 nt, Human
aggcaggugcaucacgaggucagg

SEQ ID NO: 1131427 - RNA, 19 nt, Human
aggcggagcuugcaguggg

SEQ ID NO: 1131428 - RNA, 23 nt, Human
aggcggagcuugcagugggccaa

SEQ ID NO: 1131429 - RNA, 21 nt, Human
aggcgggagaauggcgugaac

SEQ ID NO: 1131430 - RNA, 24 nt, Human
aggcgggagaauggcgugaaccug

SEQ ID NO: 1131431 - RNA, 21 nt, Human
agggagguggguguggacaga

SEQ ID NO: 1131432 - RNA, 19 nt, Human
aggugcaucacgaggucag

SEQ ID NO: 1131433 - RNA, 22 nt, Human
agucuugcugaaggugcuugcg

SEQ ID NO: 1131434 - RNA, 24 nt, Human
aguggcucacgccuguaaucccag

SEQ ID NO: 1131435 - RNA, 20 nt, Human
aucacgaggucaggagaucc

SEQ ID NO: 1131436 - RNA, 19 nt, Human
caagccccucuuuuucuuc

SEQ ID NO: 1131437 - RNA, 24 nt, Human
caaggcaggugcaucacgagguca

SEQ ID NO: 1131438 - RNA, 27 nt, Human
cacacucuucaccacugaccccacccc

SEQ ID NO: 1131439 - RNA, 21 nt, Human
cacaggaagggcaggggcuuc

SEQ ID NO: 1131440 - RNA, 23 nt, Human
cacccccgcuugcacacuaugcc

SEQ ID NO: 1131441 - RNA, 21 nt, Human
caccuguugucccagcucccg

SEQ ID NO: 1131442 - RNA, 24 nt, Human
cacgccuguaaucccagcacuuug

SEQ ID NO: 1131443 - RNA, 20 nt, Human
cacuaugccacaggaagggc

SEQ ID NO: 1131444 - RNA, 19 nt, Human
cacuccccagcacaugggg

SEQ ID NO: 1131445 - RNA, 24 nt, Human
cacugaccccacccccgcuugcac

SEQ ID NO: 1131446 - RNA, 24 nt, Human
cagcacuuugggaggucaaggcag

SEQ ID NO: 1131447 - RNA, 25 nt, Human
cagcacuuugggaggucaaggcagg

SEQ ID NO: 1131448 - RNA, 24 nt, Human
ccacaggaagggcaggggcuucca

SEQ ID NO: 1131449 - RNA, 20 nt, Human
ccagaagaguggaugugaua

SEQ ID NO: 1131450 - RNA, 21 nt, Human
ccaggauucucuguucucugg

SEQ ID NO: 1131451 - RNA, 21 nt, Human
ccaggggaggaucugggcugc

SEQ ID NO: 1131452 - RNA, 20 nt, Human
ccccacccccgcuugcacac

SEQ ID NO: 1131453 - RNA, 24 nt, Human
ccccucuuuuucuucugauauccc

SEQ ID NO: 1131454 - RNA, 19 nt, Human
cccgaggcgggagaauggc

SEQ ID NO: 1131455 - RNA, 23 nt, Human
cccucuuuuucuucugauauccc

SEQ ID NO: 1131456 - RNA, 23 nt, Human
ccuggaggaagcagcucuaacuu

SEQ ID NO: 1131457 - RNA, 23 nt, Human
ccuggcuaacacggugaaacucc

SEQ ID NO: 1131458 - RNA, 24 nt, Human
ccuggcuaacacggugaaacuccg

SEQ ID NO: 1131459 - RNA, 22 nt, Human
ccuguaaucccagcacuuuggg

SEQ ID NO: 1131460 - RNA, 25 nt, Human
ccuguugucccagcucccgaggcgg

SEQ ID NO: 1131461 - RNA, 24 nt, Human
cgagaccauccuggcuaacacggu

SEQ ID NO: 1131462 - RNA, 19 nt, Human
cgaggcacaagucugugcc

SEQ ID NO: 1131463 - RNA, 21 nt, Human
cucaaguuuuggguuagggca

SEQ ID NO: 1131464 - RNA, 22 nt, Human
cucacgccuguaaucccagcac

SEQ ID NO: 1131465 - RNA, 24 nt, Human
cucacgccuguaaucccagcacuu

SEQ ID NO: 1131466 - RNA, 25 nt, Human
cugaccccacccccgcuugcacacu

SEQ ID NO: 1131467 - RNA, 18 nt, Human
cuggcuaacacggugaaa

SEQ ID NO: 1131468 - RNA, 21 nt, Human
gacaaaaaugaacuuaaacua

SEQ ID NO: 1131469 - RNA, 22 nt, Human
gaccccacccccgcuugcacac

SEQ ID NO: 1131470 - RNA, 21 nt, Human
gacgucuaugaaaccugaggu

SEQ ID NO: 1131471 - RNA, 21 nt, Human
gagcucagggaggccaggggg

SEQ ID NO: 1131472 - RNA, 18 nt, Human
gagcuugcagugggccaa

SEQ ID NO: 1131473 - RNA, 22 nt, Human
gcaccaguugcaauuuuaaucc

SEQ ID NO: 1131474 - RNA, 20 nt, Human
gcgcaguggcucacgccugu

SEQ ID NO: 1131475 - RNA, 18 nt, Human
gcuaacacggugaaacuc

SEQ ID NO: 1131476 - RNA, 23 nt, Human
gcugggaagcgaggcacaagucu

SEQ ID NO: 1131477 - RNA, 20 nt, Human
gcuuccaucacaaucacuca

SEQ ID NO: 1131478 - RNA, 18 nt, Human
ggagcuugcagugggcca

SEQ ID NO: 1131479 - RNA, 19 nt, Human
ggaggucaaggcaggugca

SEQ ID NO: 1131480 - RNA, 21 nt, Human
ggccgggcgcaguggcucacg

SEQ ID NO: 1131481 - RNA, 23 nt, Human
ggcgcaguggcucacgccuguaa

SEQ ID NO: 1131482 - RNA, 23 nt, Human
gggcaccuguugucccagcuccc

SEQ ID NO: 1131483 - RNA, 19 nt, Human
gguggguguggacagaggc

SEQ ID NO: 1131484 - RNA, 20 nt, Human
uaaagaaccgugaaccagca

SEQ ID NO: 1131485 - RNA, 21 nt, Human
uaacacggugaaacuccgucu

SEQ ID NO: 1131486 - RNA, 24 nt, Human
uaacagcuacaggaaaagacacac

SEQ ID NO: 1131487 - RNA, 25 nt, Human
uaaucuuuacuaaagaaccgugaac

SEQ ID NO: 1131488 - RNA, 22 nt, Human
uagagaauuuuuucucaaguuu

SEQ ID NO: 1131489 - RNA, 18 nt, Human
uagcuuacaaaaaacugc

SEQ ID NO: 1131490 - RNA, 20 nt, Human
uagcuuacaaaaaacugcga

SEQ ID NO: 1131491 - RNA, 20 nt, Human
ucaccacugaccccaccccc

SEQ ID NO: 1131492 - RNA, 23 nt, Human
ucaccacugaccccacccccgcu

SEQ ID NO: 1131493 - RNA, 18 nt, Human
ucacgaggucaggagauc

SEQ ID NO: 1131494 - RNA, 24 nt, Human
ucacgaggucaggagaucgagacc

SEQ ID NO: 1131495 - RNA, 22 nt, Human
ucagggaggccagggggcuuca

SEQ ID NO: 1131496 - RNA, 21 nt, Human
ucugcauuccaggauucucug

SEQ ID NO: 1131497 - RNA, 24 nt, Human
ucuguacuaaaaauacaaaaaauu

SEQ ID NO: 1131498 - RNA, 18 nt, Human
ugaccccacccccgcuug

SEQ ID NO: 1131499 - RNA, 24 nt, Human
uggcucacgccuguaaucccagca

SEQ ID NO: 1131500 - RNA, 19 nt, Human
ugggaagcgaggcacaagu

SEQ ID NO: 1131501 - RNA, 23 nt, Human
ugggaagcgaggcacaagucugu

SEQ ID NO: 1131502 - RNA, 19 nt, Human
ugggaggcggagcuugcag

SEQ ID NO: 1131503 - RNA, 29 nt, Human
ugggaggcggagcuugcagugacaacggu

SEQ ID NO: 1131504 - RNA, 24 nt, Human
ugggaggcggagcuugcagugggc

SEQ ID NO: 1131505 - RNA, 21 nt, Human
uggguguggacagaggcacug

SEQ ID NO: 1131506 - RNA, 21 nt, Human
ugucccagcucccgaggcggg

SEQ ID NO: 1131507 - RNA, 25 nt, Human
uguggacagaggcacugggcagcug

SEQ ID NO: 1131508 - RNA, 23 nt, Human
uucucuguucucuggcugugggg

SEQ ID NO: 1131509 - RNA, 20 nt, Human
aaccaguggacaagccagaa

SEQ ID NO: 1131510 - RNA, 21 nt, Human
aacuggucucccugcucccuc

SEQ ID NO: 1131511 - RNA, 20 nt, Human
acgaguccucuugucucaaa

SEQ ID NO: 1131512 - RNA, 21 nt, Human
acgaguccucuugucucaaag

SEQ ID NO: 1131513 - RNA, 22 nt, Human
aucagucuuuguucucuguagg

SEQ ID NO: 1131514 - RNA, 20 nt, Human
augcaaucuaucucuaagac

SEQ ID NO: 1131515 - RNA, 19 nt, Human
caaccaguggacaagccag

SEQ ID NO: 1131516 - RNA, 18 nt, Human
caacugaacuguuaacug

SEQ ID NO: 1131517 - RNA, 24 nt, Human
cccaaccaccuaauagagggucau

SEQ ID NO: 1131518 - RNA, 21 nt, Human
cccucucuuacuauccuccca

SEQ ID NO: 1131519 - RNA, 24 nt, Human
cccucucuuacuauccucccagcc

SEQ ID NO: 1131520 - RNA, 21 nt, Human
ccuccauccucaucuccucca

SEQ ID NO: 1131521 - RNA, 18 nt, Human
ccucuugucucaaagcuc

SEQ ID NO: 1131522 - RNA, 24 nt, Human
cgaguccucuugucucaaagcucu

SEQ ID NO: 1131523 - RNA, 22 nt, Human
cuauccucccagcccuccaucc

SEQ ID NO: 1131524 - RNA, 24 nt, Human
cucauggcccucaugcaaucuauc

SEQ ID NO: 1131525 - RNA, 24 nt, Human
cugacaccuugacuacuucagugg

SEQ ID NO: 1131526 - RNA, 19 nt, Human
gaguccucuugucucaaag

SEQ ID NO: 1131527 - RNA, 24 nt, Human
ucaguggcccguaacuggucuccc

SEQ ID NO: 1131528 - RNA, 21 nt, Human
ucccucucuuacuauccuccc

SEQ ID NO: 1131529 - RNA, 22 nt, Human
uccucaucuccuccaguccgca

SEQ ID NO: 1131530 - RNA, 19 nt, Human
uggaagaggcccaaccacc

SEQ ID NO: 1131531 - RNA, 21 nt, Human
ugucugacaccuugacuacuu

SEQ ID NO: 1131532 - RNA, 23 nt, Human
uuacccucauggcccucaugcaa

SEQ ID NO: 1131533 - RNA, 21 nt, Human
uuccuucuugcuggggggaga

SEQ ID NO: 1131534 - RNA, 21 nt, Human
aaaguuaacgggcuuucuagg

SEQ ID NO: 1131535 - RNA, 20 nt, Human
aacaguggaagccuccaccc

SEQ ID NO: 1131536 - RNA, 18 nt, Human
aagcaggaagcaaagggc

SEQ ID NO: 1131537 - RNA, 19 nt, Human
aagccccagguaggcacag

SEQ ID NO: 1131538 - RNA, 22 nt, Human
acaguggaagccuccacccaaa

SEQ ID NO: 1131539 - RNA, 18 nt, Human
acaguggggaugugggca

SEQ ID NO: 1131540 - RNA, 22 nt, Human
agaaguuucuucuggaauuuca

SEQ ID NO: 1131541 - RNA, 21 nt, Human
agaggaagcaggaagcaaagg

SEQ ID NO: 1131542 - RNA, 19 nt, Human
agaugacucuaggugcugg

SEQ ID NO: 1131543 - RNA, 22 nt, Human
agcucuuccaaaucagagcuga

SEQ ID NO: 1131544 - RNA, 24 nt, Human
aggaagguggauuccacgaucagg

SEQ ID NO: 1131545 - RNA, 18 nt, Human
aggccagagcggaagaga

SEQ ID NO: 1131546 - RNA, 24 nt, Human
aggccucccccaucugucugugga

SEQ ID NO: 1131547 - RNA, 22 nt, Human
aguaaggguguaacgaagagga

SEQ ID NO: 1131548 - RNA, 19 nt, Human
auaaacaauaucauagcuc

SEQ ID NO: 1131549 - RNA, 21 nt, Human
augacucuaggugcugggggc

SEQ ID NO: 1131550 - RNA, 26 nt, Human
augcagcuucugcuucgucagguuug

SEQ ID NO: 1131551 - RNA, 18 nt, Human
auuacagaacauuuuucc

SEQ ID NO: 1131552 - RNA, 26 nt, Human
caaacaaauagaggaagcaggaagca

SEQ ID NO: 1131553 - RNA, 22 nt, Human
caagaaguuucuucuggaauuu

SEQ ID NO: 1131554 - RNA, 20 nt, Human
caagaugaggccagagaaug

SEQ ID NO: 1131555 - RNA, 21 nt, Human
caagccccagguaggcacagg

SEQ ID NO: 1131556 - RNA, 23 nt, Human
caagccccagguaggcacaggaa

SEQ ID NO: 1131557 - RNA, 23 nt, Human
caaggagcugcaagcgguccagu

SEQ ID NO: 1131558 - RNA, 22 nt, Human
cacagccugcguuuggucgccu

SEQ ID NO: 1131559 - RNA, 23 nt, Human
cagcauccugccuuagagauggg

SEQ ID NO: 1131560 - RNA, 18 nt, Human
caggaagagccgaggcca

SEQ ID NO: 1131561 - RNA, 18 nt, Human
caggaugggcugcaggca

SEQ ID NO: 1131562 - RNA, 21 nt, Human
caggcagccacagccugcguu

SEQ ID NO: 1131563 - RNA, 23 nt, Human
cauaagcagcauccugccuuaga

SEQ ID NO: 1131564 - RNA, 24 nt, Human
ccagagcggaagagaaauggcaca

SEQ ID NO: 1131565 - RNA, 23 nt, Human
cccgaguaggggugagggagccc

SEQ ID NO: 1131566 - RNA, 22 nt, Human
ccucugggcauuaucucagcuc

SEQ ID NO: 1131567 - RNA, 20 nt, Human
ccugucgugcccaagccaaa

SEQ ID NO: 1131568 - RNA, 18 nt, Human
ccuuccaugcagacaccu

SEQ ID NO: 1131569 - RNA, 18 nt, Human
cuaggugaaagccaagcc

SEQ ID NO: 1131570 - RNA, 24 nt, Human
cucauaagcagcauccugccuuag

SEQ ID NO: 1131571 - RNA, 25 nt, Human
cucauaagcagcauccugccuuaga

SEQ ID NO: 1131572 - RNA, 24 nt, Human
cucccugguuauguugaugcugcu

SEQ ID NO: 1131573 - RNA, 20 nt, Human
cucuaggugcugggggcagg

SEQ ID NO: 1131574 - RNA, 21 nt, Human
gaaaggagcaagaucugcaaa

SEQ ID NO: 1131575 - RNA, 24 nt, Human
gagccgaggccagagcggaagaga

SEQ ID NO: 1131576 - RNA, 24 nt, Human
gaucccucuggcuugccguauguu

SEQ ID NO: 1131577 - RNA, 20 nt, Human
gcagauggcuguuuccagaa

SEQ ID NO: 1131578 - RNA, 22 nt, Human
gccuugcucuccucucugcagc

SEQ ID NO: 1131579 - RNA, 18 nt, Human
ggcaggaugggcugcagg

SEQ ID NO: 1131580 - RNA, 19 nt, Human
ggcugcaggcagccacagc

SEQ ID NO: 1131581 - RNA, 20 nt, Human
gggaggcuauugauggauug

SEQ ID NO: 1131582 - RNA, 20 nt, Human
ggggaugugggcacggaugg

SEQ ID NO: 1131583 - RNA, 23 nt, Human
guucucuugggaagcacuucgca

SEQ ID NO: 1131584 - RNA, 22 nt, Human
uaagcagcauccugccuuagag

SEQ ID NO: 1131585 - RNA, 18 nt, Human
uaggcacaggaagagccg

SEQ ID NO: 1131586 - RNA, 21 nt, Human
ucagcuccuaacuuauguuua

SEQ ID NO: 1131587 - RNA, 21 nt, Human
uccugucgugcccaagccaaa

SEQ ID NO: 1131588 - RNA, 19 nt, Human
uccuuagcuuugggcccac

SEQ ID NO: 1131589 - RNA, 22 nt, Human
ucgccuugcucuccucucugca

SEQ ID NO: 1131590 - RNA, 21 nt, Human
ucgcucucccuuccaugcaga

SEQ ID NO: 1131591 - RNA, 22 nt, Human
ucuaugauguaaauggugaccc

SEQ ID NO: 1131592 - RNA, 23 nt, Human
ucucugcagcuggcacccaaucu

SEQ ID NO: 1131593 - RNA, 20 nt, Human
ucuguggagcccucauaagc

SEQ ID NO: 1131594 - RNA, 24 nt, Human
ugaaaggagcaagaucugcaaaga

SEQ ID NO: 1131595 - RNA, 21 nt, Human
ugaccugcuccagcacaauua

SEQ ID NO: 1131596 - RNA, 23 nt, Human
ugcaaagaucccucuggcuugcc

SEQ ID NO: 1131597 - RNA, 18 nt, Human
ugcccgaguaggggugag

SEQ ID NO: 1131598 - RNA, 26 nt, Human
uggaauuucaaaugugauguggucug

SEQ ID NO: 1131599 - RNA, 24 nt, Human
uggcacacgcaugcauguauaacc

SEQ ID NO: 1131600 - RNA, 24 nt, Human
ugggaucuuggcaaaaugcagcuu

SEQ ID NO: 1131601 - RNA, 22 nt, Human
ugggggcaggaugggcugcagg

SEQ ID NO: 1131602 - RNA, 23 nt, Human
ugggggcaggaugggcugcaggc

SEQ ID NO: 1131603 - RNA, 21 nt, Human
ugguggguuuuccuuagcuuu

SEQ ID NO: 1131604 - RNA, 21 nt, Human
ugucuguggagcccucauaag

SEQ ID NO: 1131605 - RNA, 24 nt, Human
uucaugcuuccacucgacaaacau

SEQ ID NO: 1131606 - RNA, 27 nt, Human
uuccucugggcauuaucucagcucccc

SEQ ID NO: 1131607 - RNA, 20 nt, Human
aaaaacaguuuacuaaaggc

SEQ ID NO: 1131608 - RNA, 23 nt, Human
aaacauguaugcacauucugccu

SEQ ID NO: 1131609 - RNA, 21 nt, Human
aaagccagcauacaagaaccu

SEQ ID NO: 1131610 - RNA, 22 nt, Human
aaaggcauccaaacugcgagga

SEQ ID NO: 1131611 - RNA, 20 nt, Human
aacccagaaggacaggaggg

SEQ ID NO: 1131612 - RNA, 21 nt, Human
aaccgcugucuccuaaucccu

SEQ ID NO: 1131613 - RNA, 21 nt, Human
aauaauccacagucaaaccag

SEQ ID NO: 1131614 - RNA, 22 nt, Human
acacacacgugccccaacuccc

SEQ ID NO: 1131615 - RNA, 21 nt, Human
acagaagacagcccuuggcca

SEQ ID NO: 1131616 - RNA, 24 nt, Human
acagcagcugcuuccuagaaaccc

SEQ ID NO: 1131617 - RNA, 24 nt, Human
accacaacccccuccccggcccag

SEQ ID NO: 1131618 - RNA, 22 nt, Human
acccagaaggacaggagggcuc

SEQ ID NO: 1131619 - RNA, 23 nt, Human
accuagaauccggcagaaauacc

SEQ ID NO: 1131620 - RNA, 21 nt, Human
agaaaaacaguuuacuaaagg

SEQ ID NO: 1131621 - RNA, 19 nt, Human
agaaaagccagcauacaag

SEQ ID NO: 1131622 - RNA, 24 nt, Human
agaaggacaggagggcucgggggc

SEQ ID NO: 1131623 - RNA, 25 nt, Human
agcuaugugcacagaagacagcccu

SEQ ID NO: 1131624 - RNA, 23 nt, Human
agcugcuuccuagaaacccccac

SEQ ID NO: 1131625 - RNA, 22 nt, Human
aggaaauaauccacagucaaac

SEQ ID NO: 1131626 - RNA, 21 nt, Human
aggcaaggcaaacacaaaccc

SEQ ID NO: 1131627 - RNA, 20 nt, Human
aggcauccaaacugcgagga

SEQ ID NO: 1131628 - RNA, 25 nt, Human
aggccagagcccugugcacagagga

SEQ ID NO: 1131629 - RNA, 18 nt, Human
aggcuaggcccugcccaa

SEQ ID NO: 1131630 - RNA, 26 nt, Human
aggugucaaaaaaaggcauccaaacu

SEQ ID NO: 1131631 - RNA, 19 nt, Human
caaacccagaaggacagga

SEQ ID NO: 1131632 - RNA, 27 nt, Human
caaacccagaaggacaggagggcucgg

SEQ ID NO: 1131633 - RNA, 21 nt, Human
caacaacacaaugagggagga

SEQ ID NO: 1131634 - RNA, 23 nt, Human
caacaccauuccuucaaagugag

SEQ ID NO: 1131635 - RNA, 18 nt, Human
caacccccuccccggccc

SEQ ID NO: 1131636 - RNA, 19 nt, Human
cacaaacccagaaggacag

SEQ ID NO: 1131637 - RNA, 19 nt, Human
cacaacccccuccccggcc

SEQ ID NO: 1131638 - RNA, 23 nt, Human
cacagcagcugcuuccuagaaac

SEQ ID NO: 1131639 - RNA, 21 nt, Human
cacaguuucacuagagacaaa

SEQ ID NO: 1131640 - RNA, 24 nt, Human
caccaggcaaggcaaacacaaacc

SEQ ID NO: 1131641 - RNA, 25 nt, Human
cacgugccccaacuccccaccccca

SEQ ID NO: 1131642 - RNA, 18 nt, Human
cacuagagacaaaaucac

SEQ ID NO: 1131643 - RNA, 20 nt, Human
cacuagagacaaaaucacca

SEQ ID NO: 1131644 - RNA, 30 nt, Human
cagcacccaaaggacacucaugaaaacauu

SEQ ID NO: 1131645 - RNA, 22 nt, Human
cagcaguagcgcacaggcacac

SEQ ID NO: 1131646 - RNA, 22 nt, Human
cagugugguggcugacaauccc

SEQ ID NO: 1131647 - RNA, 22 nt, Human
cauucagaaaacuaaguucaag

SEQ ID NO: 1131648 - RNA, 22 nt, Human
ccaaaggacacucaugaaaaca

SEQ ID NO: 1131649 - RNA, 24 nt, Human
ccacccauacagggaacugcugca

SEQ ID NO: 1131650 - RNA, 21 nt, Human
ccacugugagacuccuggccc

SEQ ID NO: 1131651 - RNA, 21 nt, Human
ccaggcaaggcaaacacaaac

SEQ ID NO: 1131652 - RNA, 21 nt, Human
ccccacaaccaucuucuccug

SEQ ID NO: 1131653 - RNA, 26 nt, Human
ccccuccguggcccugguauuccucc

SEQ ID NO: 1131654 - RNA, 18 nt, Human
ccuaaauggugugugaag

SEQ ID NO: 1131655 - RNA, 22 nt, Human
ccucacaucauguguccucaau

SEQ ID NO: 1131656 - RNA, 25 nt, Human
ccuccugcugcugccccuaggaguc

SEQ ID NO: 1131657 - RNA, 19 nt, Human
ccuggacggguucucugag

SEQ ID NO: 1131658 - RNA, 19 nt, Human
ccuggccccuccguggccc

SEQ ID NO: 1131659 - RNA, 21 nt, Human
ccuguuagccaacaccauucc

SEQ ID NO: 1131660 - RNA, 22 nt, Human
ccuuaccacaacccccuccccg

SEQ ID NO: 1131661 - RNA, 18 nt, Human
cgcacaggcacacagcua

SEQ ID NO: 1131662 - RNA, 18 nt, Human
cggaggucaaacuaccag

SEQ ID NO: 1131663 - RNA, 18 nt, Human
cggcccagcaguggaggc

SEQ ID NO: 1131664 - RNA, 22 nt, Human
cuagcgcaggugucaaaaaaag

SEQ ID NO: 1131665 - RNA, 18 nt, Human
cucaggccagccauucuc

SEQ ID NO: 1131666 - RNA, 27 nt, Human
cucccugcccagaguggagguaccacc

SEQ ID NO: 1131667 - RNA, 18 nt, Human
cuccuggccccuccgugg

SEQ ID NO: 1131668 - RNA, 19 nt, Human
cucuucuuggccccugagg

SEQ ID NO: 1131669 - RNA, 21 nt, Human
cugcaggcuccugagcuaugu

SEQ ID NO: 1131670 - RNA, 24 nt, Human
cuuaccacaacccccuccccggcc

SEQ ID NO: 1131671 - RNA, 20 nt, Human
cuuccuagaaacccccacaa

SEQ ID NO: 1131672 - RNA, 20 nt, Human
cuuggccagagcgggaagug

SEQ ID NO: 1131673 - RNA, 21 nt, Human
cuuuaugcaggcaagguccuc

SEQ ID NO: 1131674 - RNA, 18 nt, Human
gaacuucugcacaccccc

SEQ ID NO: 1131675 - RNA, 22 nt, Human
gacuuguucuccugacuccuuu

SEQ ID NO: 1131676 - RNA, 18 nt, Human
gagggaccauuauuucca

SEQ ID NO: 1131677 - RNA, 20 nt, Human
gagggcccuuaccacaaccc

SEQ ID NO: 1131678 - RNA, 22 nt, Human
gagucacagacaggcccucccu

SEQ ID NO: 1131679 - RNA, 18 nt, Human
gauuucugguccccaacu

SEQ ID NO: 1131680 - RNA, 22 nt, Human
gcaaacacaaacccagaaggac

SEQ ID NO: 1131681 - RNA, 22 nt, Human
gcaggcaagguccucugggggc

SEQ ID NO: 1131682 - RNA, 20 nt, Human
gccagagcgggaaguggggu

SEQ ID NO: 1131683 - RNA, 20 nt, Human
gccuccuaaaugguguguga

SEQ ID NO: 1131684 - RNA, 23 nt, Human
ggaagugggguccagagcgaguc

SEQ ID NO: 1131685 - RNA, 24 nt, Human
ggcagaacuucuaggcuuuuaguc

SEQ ID NO: 1131686 - RNA, 19 nt, Human
gggcucgggggcaagccug

SEQ ID NO: 1131687 - RNA, 18 nt, Human
gggcugcaaaaggcuagg

SEQ ID NO: 1131688 - RNA, 21 nt, Human
gggugguggcagugugguggc

SEQ ID NO: 1131689 - RNA, 21 nt, Human
ggugguggcagugugguggcu

SEQ ID NO: 1131690 - RNA, 20 nt, Human
gugguggcagugugguggcu

SEQ ID NO: 1131691 - RNA, 24 nt, Human
uaacccauggcuucaaaucucccu

SEQ ID NO: 1131692 - RNA, 19 nt, Human
uaagaaaagccagcauaca

SEQ ID NO: 1131693 - RNA, 22 nt, Human
uaagaaaagccagcauacaaga

SEQ ID NO: 1131694 - RNA, 26 nt, Human
uaagaacagaacuucugcacaccccc

SEQ ID NO: 1131695 - RNA, 21 nt, Human
uaagacagaaaaacaguuuac

SEQ ID NO: 1131696 - RNA, 22 nt, Human
uacaagaaccuagcgcaggugu

SEQ ID NO: 1131697 - RNA, 19 nt, Human
uaccacaacccccuccccg

SEQ ID NO: 1131698 - RNA, 19 nt, Human
uagagucugcccuccacug

SEQ ID NO: 1131699 - RNA, 22 nt, Human
uagcaaugugcuguuggguccc

SEQ ID NO: 1131700 - RNA, 20 nt, Human
uaggaguccuccagcuggau

SEQ ID NO: 1131701 - RNA, 23 nt, Human
uaggguggccuccuaaauggugu

SEQ ID NO: 1131702 - RNA, 23 nt, Human
uauaaauaagguaaaugcuuucc

SEQ ID NO: 1131703 - RNA, 20 nt, Human
uauuccuccugcugcugccc

SEQ ID NO: 1131704 - RNA, 20 nt, Human
ucaaaaaaaggcauccaaaa

SEQ ID NO: 1131705 - RNA, 20 nt, Human
ucaaaaaaaggcauccaaac

SEQ ID NO: 1131706 - RNA, 23 nt, Human
ucaccagguggcuaacccuucug

SEQ ID NO: 1131707 - RNA, 21 nt, Human
ucacuaagaacagaacuucug

SEQ ID NO: 1131708 - RNA, 22 nt, Human
ucagccccuagcacccagucag

SEQ ID NO: 1131709 - RNA, 21 nt, Human
uccaaacugcgaggacagagg

SEQ ID NO: 1131710 - RNA, 20 nt, Human
uccacugugagacuccuggc

SEQ ID NO: 1131711 - RNA, 23 nt, Human
uccccacccccauucagaaaacu

SEQ ID NO: 1131712 - RNA, 24 nt, Human
uccccacccccauucagaaaacua

SEQ ID NO: 1131713 - RNA, 21 nt, Human
uccccggcccagcaguggagg

SEQ ID NO: 1131714 - RNA, 22 nt, Human
uccccuacaaagcagguuucug

SEQ ID NO: 1131715 - RNA, 19 nt, Human
ucccugcccagaguggagg

SEQ ID NO: 1131716 - RNA, 20 nt, Human
uccuguuagccaacaccauu

SEQ ID NO: 1131717 - RNA, 18 nt, Human
uccuucaaagugaggcag

SEQ ID NO: 1131718 - RNA, 18 nt, Human
ucgggggcaagccuggga

SEQ ID NO: 1131719 - RNA, 21 nt, Human
ucucaggccagccauucucac

SEQ ID NO: 1131720 - RNA, 20 nt, Human
ucucugagcccagauuucug

SEQ ID NO: 1131721 - RNA, 19 nt, Human
ucugcacacccccaugucc

SEQ ID NO: 1131722 - RNA, 20 nt, Human
ucugcacacccccauguccu

SEQ ID NO: 1131723 - RNA, 18 nt, Human
ucuucucuucuuggcccc

SEQ ID NO: 1131724 - RNA, 23 nt, Human
ugaaacagagggaccauuauuuc

SEQ ID NO: 1131725 - RNA, 25 nt, Human
ugaaacagagggaccauuauuucca

SEQ ID NO: 1131726 - RNA, 21 nt, Human
ugacguaagacagaaaaacag

SEQ ID NO: 1131727 - RNA, 19 nt, Human
ugcccagaguggagguacc

SEQ ID NO: 1131728 - RNA, 20 nt, Human
ugccccaacuccccaccccc

SEQ ID NO: 1131729 - RNA, 19 nt, Human
ugcccgggagaccacugca

SEQ ID NO: 1131730 - RNA, 21 nt, Human
ugccuaggucuauucaacaac

SEQ ID NO: 1131731 - RNA, 18 nt, Human
uggaaaaagaaccuacau

SEQ ID NO: 1131732 - RNA, 21 nt, Human
uggcauuaucauuacuucagc

SEQ ID NO: 1131733 - RNA, 26 nt, Human
ugggauuggccugucacagcagcugc

SEQ ID NO: 1131734 - RNA, 23 nt, Human
ugggcagaggaggugagcuggau

SEQ ID NO: 1131735 - RNA, 19 nt, Human
uguaaucagccccuagcac

SEQ ID NO: 1131736 - RNA, 24 nt, Human
uguccucuugccucguuagggugg

SEQ ID NO: 1131737 - RNA, 20 nt, Human
ugucuguucaacucuucccc

SEQ ID NO: 1131738 - RNA, 24 nt, Human
ugugcagggugguggcaguguggu

SEQ ID NO: 1131739 - RNA, 20 nt, Human
uuaaaagaaacagcacccaa

SEQ ID NO: 1131740 - RNA, 24 nt, Human
uuacacacacgugccccaacuccc

SEQ ID NO: 1131741 - RNA, 22 nt, Human
uucaaagugaggcagccucccc

SEQ ID NO: 1131742 - RNA, 26 nt, Human
uucagcuggcaucuguuagagucugc

SEQ ID NO: 1131743 - RNA, 21 nt, Human
uucaugagucacccauuugag

SEQ ID NO: 1131744 - RNA, 21 nt, Human
uuccuagaaacccccacaacc

SEQ ID NO: 1131745 - RNA, 21 nt, Human
uucuauggauacaaggcugcc

SEQ ID NO: 1131746 - RNA, 25 nt, Human
uucuuggccccugaggacauccacc

SEQ ID NO: 1131747 - RNA, 22 nt, Human
uuuaaaagaaacagcacccaaa

SEQ ID NO: 1131748 - RNA, 19 nt, Human
aacuguccccgagugacca

SEQ ID NO: 1131749 - RNA, 18 nt, Human
accccgggacuggggcuu

SEQ ID NO: 1131750 - RNA, 23 nt, Human
agcacccuuugucccuggguggc

SEQ ID NO: 1131751 - RNA, 19 nt, Human
aggaccccgggacuggggc

SEQ ID NO: 1131752 - RNA, 22 nt, Human
aggcagcucagucuagagucua

SEQ ID NO: 1131753 - RNA, 18 nt, Human
cacccuggaauggcugaa

SEQ ID NO: 1131754 - RNA, 19 nt, Human
cagcacccuggaauggcug

SEQ ID NO: 1131755 - RNA, 19 nt, Human
ccagggccuggcgcagaag

SEQ ID NO: 1131756 - RNA, 19 nt, Human
ccccgaguccccaccgcuc

SEQ ID NO: 1131757 - RNA, 23 nt, Human
ccgaccccgaguccccaccgcuc

SEQ ID NO: 1131758 - RNA, 21 nt, Human
ccggcagguggugacuccccu

SEQ ID NO: 1131759 - RNA, 22 nt, Human
cgcucuguccuucuccagggcc

SEQ ID NO: 1131760 - RNA, 21 nt, Human
cggcagguggugacuccccuc

SEQ ID NO: 1131761 - RNA, 21 nt, Human
cgggacuggggcuuugucagu

SEQ ID NO: 1131762 - RNA, 20 nt, Human
cuacagcacccuggaauggc

SEQ ID NO: 1131763 - RNA, 26 nt, Human
cucccugaccacgaauacucugccaa

SEQ ID NO: 1131764 - RNA, 18 nt, Human
gcuggaguucaggugggc

SEQ ID NO: 1131765 - RNA, 24 nt, Human
ggccugauccugcugaccacgggu

SEQ ID NO: 1131766 - RNA, 18 nt, Human
ggcuuugucaguuuaaug

SEQ ID NO: 1131767 - RNA, 23 nt, Human
uaauggauuccaccucuaggaau

SEQ ID NO: 1131768 - RNA, 23 nt, Human
uccagggccuggcgcagaagcac

SEQ ID NO: 1131769 - RNA, 18 nt, Human
uccccgagugaccaaggc

SEQ ID NO: 1131770 - RNA, 28 nt, Human
uccccgagugaccaaggcagcucagucu

SEQ ID NO: 1131771 - RNA, 21 nt, Human
ucccuggguggccugauccug

SEQ ID NO: 1131772 - RNA, 21 nt, Human
ucuggccuccuaaggggcagg

SEQ ID NO: 1131773 - RNA, 22 nt, Human
ugaguacccaggaugaccuaau

SEQ ID NO: 1131774 - RNA, 18 nt, Human
uggaauggcugaaauuaa

SEQ ID NO: 1131775 - RNA, 21 nt, Human
uggccugauccugcugaccac

SEQ ID NO: 1131776 - RNA, 22 nt, Human
ugggaagcugugcauccuacag

SEQ ID NO: 1131777 - RNA, 23 nt, Human
uggguggccugauccugcugacc

SEQ ID NO: 1131778 - RNA, 26 nt, Human
aaaaaugugguauuugcagugcccuc

SEQ ID NO: 1131779 - RNA, 18 nt, Human
aaacaagaaaaaaaugug

SEQ ID NO: 1131780 - RNA, 22 nt, Human
aaacacugaaauuggcugaacc

SEQ ID NO: 1131781 - RNA, 29 nt, Human
aaacagaaguguaaaucagaagggacccc

SEQ ID NO: 1131782 - RNA, 21 nt, Human
aaauggccuugcagagugggc

SEQ ID NO: 1131783 - RNA, 22 nt, Human
aaauucacuucuuggggccaaa

SEQ ID NO: 1131784 - RNA, 24 nt, Human
aacucagagguaagugagauuugg

SEQ ID NO: 1131785 - RNA, 18 nt, Human
aacucccugaauagccaa

SEQ ID NO: 1131786 - RNA, 23 nt, Human
aagaaaccagaauaccaucugug

SEQ ID NO: 1131787 - RNA, 20 nt, Human
aagaagcuaaaauacuauca

SEQ ID NO: 1131788 - RNA, 22 nt, Human
aagcaaaaccccacaccaauaa

SEQ ID NO: 1131789 - RNA, 19 nt, Human
aagcagaaguugcacccca

SEQ ID NO: 1131790 - RNA, 19 nt, Human
aagcaucugauccuccauu

SEQ ID NO: 1131791 - RNA, 21 nt, Human
aagccaggacgagcaggugaa

SEQ ID NO: 1131792 - RNA, 20 nt, Human
aagggcucaagagcgcugau

SEQ ID NO: 1131793 - RNA, 25 nt, Human
aagugagauuugggaagacaguuac

SEQ ID NO: 1131794 - RNA, 22 nt, Human
aaguggaaacuucuguuuuguu

SEQ ID NO: 1131795 - RNA, 20 nt, Human
acacaaucaaucagaaaacu

SEQ ID NO: 1131796 - RNA, 21 nt, Human
accacuguaaagaagacugaa

SEQ ID NO: 1131797 - RNA, 19 nt, Human
accaguaaggccacacgcc

SEQ ID NO: 1131798 - RNA, 25 nt, Human
acccagaaccuccugcaagaaacca

SEQ ID NO: 1131799 - RNA, 18 nt, Human
acccugagguuccugggc

SEQ ID NO: 1131800 - RNA, 18 nt, Human
accugaacuucuagcacc

SEQ ID NO: 1131801 - RNA, 19 nt, Human
accugaacuucuagcacca

SEQ ID NO: 1131802 - RNA, 20 nt, Human
acgccaagagcagauuaaac

SEQ ID NO: 1131803 - RNA, 18 nt, Human
acucgcugcucaggaaca

SEQ ID NO: 1131804 - RNA, 23 nt, Human
acuugcccuucaccucauuccac

SEQ ID NO: 1131805 - RNA, 21 nt, Human
agaaaacagaaguguaaauca

SEQ ID NO: 1131806 - RNA, 19 nt, Human
agaaaagaggcacaaagaa

SEQ ID NO: 1131807 - RNA, 26 nt, Human
agaaaagguaacauucacacuucaca

SEQ ID NO: 1131808 - RNA, 22 nt, Human
agaaagacaggaauacagcaga

SEQ ID NO: 1131809 - RNA, 23 nt, Human
agaacacuuucuagccccugccu

SEQ ID NO: 1131810 - RNA, 21 nt, Human
agaaggcaguagagggagggg

SEQ ID NO: 1131811 - RNA, 23 nt, Human
agaaggcaguagagggagggggc

SEQ ID NO: 1131812 - RNA, 18 nt, Human
agaauaggaugagagggg

SEQ ID NO: 1131813 - RNA, 25 nt, Human
agacaggaauacagcagaagggacc

SEQ ID NO: 1131814 - RNA, 21 nt, Human
agagaaaagaggcacaaagaa

SEQ ID NO: 1131815 - RNA, 19 nt, Human
agagaccuagggccugccu

SEQ ID NO: 1131816 - RNA, 24 nt, Human
agagagaaagacaggaauacagca

SEQ ID NO: 1131817 - RNA, 19 nt, Human
agaggggaagaggaugggc

SEQ ID NO: 1131818 - RNA, 23 nt, Human
agcaaguuggccuuagcaccccc

SEQ ID NO: 1131819 - RNA, 22 nt, Human
agcaccauucucuccucuggcg

SEQ ID NO: 1131820 - RNA, 25 nt, Human
aggaacauaggcuuccacagacaga

SEQ ID NO: 1131821 - RNA, 25 nt, Human
aggaagcuucaccgguguaaacugu

SEQ ID NO: 1131822 - RNA, 26 nt, Human
aggaaggaacauaacauugugaaaaa

SEQ ID NO: 1131823 - RNA, 24 nt, Human
aggaaucccugggagguagcggug

SEQ ID NO: 1131824 - RNA, 18 nt, Human
aggagaggccuaaaaaua

SEQ ID NO: 1131825 - RNA, 23 nt, Human
aggaggucaggcacacagagucc

SEQ ID NO: 1131826 - RNA, 19 nt, Human
aggcaaagcucuccaggca

SEQ ID NO: 1131827 - RNA, 20 nt, Human
aggcacugagguugggcacc

SEQ ID NO: 1131828 - RNA, 22 nt, Human
aggcacugagguugggcaccac

SEQ ID NO: 1131829 - RNA, 22 nt, Human
aggcaguagagggagggggccu

SEQ ID NO: 1131830 - RNA, 19 nt, Human
aggcgggugggacccagaa

SEQ ID NO: 1131831 - RNA, 22 nt, Human
aggcuggaggguggccccagaa

SEQ ID NO: 1131832 - RNA, 22 nt, Human
aggcuuccacagacagagguaa

SEQ ID NO: 1131833 - RNA, 21 nt, Human
aggggcagcaggaacugagag

SEQ ID NO: 1131834 - RNA, 26 nt, Human
aggugcccuuuagaggccuccaauug

SEQ ID NO: 1131835 - RNA, 19 nt, Human
aucuauucagcaucccuca

SEQ ID NO: 1131836 - RNA, 21 nt, Human
augaagcagaaguugcacccc

SEQ ID NO: 1131837 - RNA, 20 nt, Human
auggaggcaaagcucuccag

SEQ ID NO: 1131838 - RNA, 19 nt, Human
auucugaggccucucuccc

SEQ ID NO: 1131839 - RNA, 21 nt, Human
auugguaccaaugauggugcc

SEQ ID NO: 1131840 - RNA, 19 nt, Human
caaaacauagcccuuagca

SEQ ID NO: 1131841 - RNA, 18 nt, Human
caaacagagagaucccac

SEQ ID NO: 1131842 - RNA, 24 nt, Human
caaagcaaaaccccacaccaauaa

SEQ ID NO: 1131843 - RNA, 18 nt, Human
caaagcucuccaggcagc

SEQ ID NO: 1131844 - RNA, 24 nt, Human
caaagcucuccaggcagcagaaga

SEQ ID NO: 1131845 - RNA, 21 nt, Human
caagccaggacgagcagguga

SEQ ID NO: 1131846 - RNA, 24 nt, Human
cacacagaguccuaggcacugagg

SEQ ID NO: 1131847 - RNA, 22 nt, Human
cacacagccagcccaaggccca

SEQ ID NO: 1131848 - RNA, 23 nt, Human
cacacagccagcccaaggcccag

SEQ ID NO: 1131849 - RNA, 21 nt, Human
caccacacucggucaucagag

SEQ ID NO: 1131850 - RNA, 19 nt, Human
caccauggacgccucaggc

SEQ ID NO: 1131851 - RNA, 24 nt, Human
cacccccaccacacucggucauca

SEQ ID NO: 1131852 - RNA, 19 nt, Human
caccucauuccacccucaa

SEQ ID NO: 1131853 - RNA, 19 nt, Human
caccugcuguucuuuugcu

SEQ ID NO: 1131854 - RNA, 21 nt, Human
caccuugucuacuccugccau

SEQ ID NO: 1131855 - RNA, 21 nt, Human
cacucaaaaccuaccacugua

SEQ ID NO: 1131856 - RNA, 18 nt, Human
cacucuguuaccugagcu

SEQ ID NO: 1131857 - RNA, 18 nt, Human
cacuggguggggcuuugg

SEQ ID NO: 1131858 - RNA, 24 nt, Human
cagaaaacagcaacugucccccuu

SEQ ID NO: 1131859 - RNA, 19 nt, Human
cagagccgggaugccuucc

SEQ ID NO: 1131860 - RNA, 18 nt, Human
cagagugauggccaccca

SEQ ID NO: 1131861 - RNA, 22 nt, Human
cagcaaauuguaaggaggagua

SEQ ID NO: 1131862 - RNA, 23 nt, Human
cagcacagcagagucccaggugg

SEQ ID NO: 1131863 - RNA, 20 nt, Human
cagcaggaacugagagaaga

SEQ ID NO: 1131864 - RNA, 22 nt, Human
cagccugguccuguccuguucc

SEQ ID NO: 1131865 - RNA, 24 nt, Human
caggaacgugugcaaaacauagcc

SEQ ID NO: 1131866 - RNA, 23 nt, Human
caggcacacagaguccuaggcac

SEQ ID NO: 1131867 - RNA, 19 nt, Human
caggggacagccugguccu

SEQ ID NO: 1131868 - RNA, 23 nt, Human
caguaaggccacacgccgggcac

SEQ ID NO: 1131869 - RNA, 20 nt, Human
caguagagggagggggccug

SEQ ID NO: 1131870 - RNA, 19 nt, Human
caucaccauggacgccuca

SEQ ID NO: 1131871 - RNA, 24 nt, Human
caucagaccuuaaagcaaguauca

SEQ ID NO: 1131872 - RNA, 19 nt, Human
caucaggagucuccaaauc

SEQ ID NO: 1131873 - RNA, 27 nt, Human
ccaaagcaaaaccccacaccaauaacu

SEQ ID NO: 1131874 - RNA, 24 nt, Human
ccacagaggcgagcucggcugggu

SEQ ID NO: 1131875 - RNA, 20 nt, Human
ccagaauaccaucugugggg

SEQ ID NO: 1131876 - RNA, 21 nt, Human
ccagcaugcaucauccaaagu

SEQ ID NO: 1131877 - RNA, 25 nt, Human
ccagccaggcuggcaaggacugaau

SEQ ID NO: 1131878 - RNA, 21 nt, Human
ccagcccugcauuuacuccuc

SEQ ID NO: 1131879 - RNA, 22 nt, Human
ccaggacgagcaggugaacaca

SEQ ID NO: 1131880 - RNA, 20 nt, Human
ccaggcuggcaaggacugaa

SEQ ID NO: 1131881 - RNA, 22 nt, Human
ccagugccacuugcccacgcag

SEQ ID NO: 1131882 - RNA, 19 nt, Human
ccauuugcucucuuugauc

SEQ ID NO: 1131883 - RNA, 26 nt, Human
cccagagccgggaugccuuccagagc

SEQ ID NO: 1131884 - RNA, 21 nt, Human
cccaggaugaaacaaaaggcu

SEQ ID NO: 1131885 - RNA, 21 nt, Human
ccccacaccaauaacuucauc

SEQ ID NO: 1131886 - RNA, 19 nt, Human
ccccauccacccccaucua

SEQ ID NO: 1131887 - RNA, 23 nt, Human
ccccauccacccccaucuauuca

SEQ ID NO: 1131888 - RNA, 24 nt, Human
cccccauccacccccaucuauuca

SEQ ID NO: 1131889 - RNA, 24 nt, Human
cccccuccccucaggccucaauuu

SEQ ID NO: 1131890 - RNA, 24 nt, Human
ccccuccucauccaucagaugccc

SEQ ID NO: 1131891 - RNA, 18 nt, Human
ccccucugacucgcugcu

SEQ ID NO: 1131892 - RNA, 20 nt, Human
ccccugccucccucccccca

SEQ ID NO: 1131893 - RNA, 28 nt, Human
ccccugccucccuccccccauccacccc

SEQ ID NO: 1131894 - RNA, 20 nt, Human
cccucaggccucaauuuucc

SEQ ID NO: 1131895 - RNA, 23 nt, Human
cccugcauuuacuccucucucca

SEQ ID NO: 1131896 - RNA, 25 nt, Human
cccugucuacccccaccauguuuca

SEQ ID NO: 1131897 - RNA, 25 nt, Human
ccucaaaacagaggguccaggagga

SEQ ID NO: 1131898 - RNA, 21 nt, Human
ccugaacuucuagcaccauuc

SEQ ID NO: 1131899 - RNA, 18 nt, Human
ccuggggcccaagccagg

SEQ ID NO: 1131900 - RNA, 22 nt, Human
ccuguccuguuccggguaggag

SEQ ID NO: 1131901 - RNA, 20 nt, Human
ccuuccagagccggcugcuc

SEQ ID NO: 1131902 - RNA, 19 nt, Human
ccuucuuugccauuugcuc

SEQ ID NO: 1131903 - RNA, 23 nt, Human
ccuuucuacuuauuuuaaaaauc

SEQ ID NO: 1131904 - RNA, 23 nt, Human
cgggugggacccagaaccuccug

SEQ ID NO: 1131905 - RNA, 23 nt, Human
cuagagcuggcugcaccugcugu

SEQ ID NO: 1131906 - RNA, 18 nt, Human
cuagcaccauucucuccu

SEQ ID NO: 1131907 - RNA, 21 nt, Human
cucaaagauucuccccuccuc

SEQ ID NO: 1131908 - RNA, 20 nt, Human
cucaggaacauaggcuucca

SEQ ID NO: 1131909 - RNA, 19 nt, Human
cucauuauccaaacggcau

SEQ ID NO: 1131910 - RNA, 19 nt, Human
cucccaacacuugaaggcc

SEQ ID NO: 1131911 - RNA, 25 nt, Human
cucccaaccugguaaaacuucucca

SEQ ID NO: 1131912 - RNA, 18 nt, Human
cuccccccauccaccccc

SEQ ID NO: 1131913 - RNA, 19 nt, Human
cuccccccauccaccccca

SEQ ID NO: 1131914 - RNA, 24 nt, Human
cuccccccauccacccccaucuau

SEQ ID NO: 1131915 - RNA, 20 nt, Human
cucccuccccccauccaccc

SEQ ID NO: 1131916 - RNA, 19 nt, Human
cuccucuggcgaccccuag

SEQ ID NO: 1131917 - RNA, 18 nt, Human
cuccuucaggcucccuca

SEQ ID NO: 1131918 - RNA, 18 nt, Human
cuccuugcugaacagccc

SEQ ID NO: 1131919 - RNA, 20 nt, Human
cucugcgauucugaccacag

SEQ ID NO: 1131920 - RNA, 22 nt, Human
cucuguuccucagcuccucuga

SEQ ID NO: 1131921 - RNA, 24 nt, Human
cucuuggucugugugauccucauu

SEQ ID NO: 1131922 - RNA, 23 nt, Human
cugaaccccugucuacccccacc

SEQ ID NO: 1131923 - RNA, 22 nt, Human
cugauggccccucugcgauucu

SEQ ID NO: 1131924 - RNA, 22 nt, Human
cugcucauguguccaccuccuu

SEQ ID NO: 1131925 - RNA, 21 nt, Human
cuggcaaggacugaauccaaa

SEQ ID NO: 1131926 - RNA, 19 nt, Human
cuggcccccuccccucagg

SEQ ID NO: 1131927 - RNA, 22 nt, Human
cugucccccuucuuugccauuu

SEQ ID NO: 1131928 - RNA, 21 nt, Human
cuucaucaagagauucucacu

SEQ ID NO: 1131929 - RNA, 23 nt, Human
cuuccagagccggcugcugccaa

SEQ ID NO: 1131930 - RNA, 18 nt, Human
cuuuguaugauugcuuca

SEQ ID NO: 1131931 - RNA, 26 nt, Human
gaacacacacagaaggaacuaaaaga

SEQ ID NO: 1131932 - RNA, 22 nt, Human
gaaggacugggugagccaucag

SEQ ID NO: 1131933 - RNA, 24 nt, Human
gaaugaagcagaaguugcaccccc

SEQ ID NO: 1131934 - RNA, 24 nt, Human
gacccauuggccacaucaaacucu

SEQ ID NO: 1131935 - RNA, 20 nt, Human
gacugaagacaagacugcca

SEQ ID NO: 1131936 - RNA, 24 nt, Human
gagaaagacaggaauacagcagaa

SEQ ID NO: 1131937 - RNA, 20 nt, Human
gaggauggagccaggccugu

SEQ ID NO: 1131938 - RNA, 23 nt, Human
gauccucauuuucaaauuagagg

SEQ ID NO: 1131939 - RNA, 22 nt, Human
gaugguacuucaucuucacuug

SEQ ID NO: 1131940 - RNA, 22 nt, Human
gcaaggguuuuaggaaggaaca

SEQ ID NO: 1131941 - RNA, 24 nt, Human
gcacacagaguccuaggcacugag

SEQ ID NO: 1131942 - RNA, 20 nt, Human
gcacuguaagggaacaaaau

SEQ ID NO: 1131943 - RNA, 18 nt, Human
gcagagugggcguccgag

SEQ ID NO: 1131944 - RNA, 21 nt, Human
gccacacgccgggcacggggc

SEQ ID NO: 1131945 - RNA, 18 nt, Human
gccaccuccucucaaugc

SEQ ID NO: 1131946 - RNA, 26 nt, Human
gccccagaagaacacuuucuagcccc

SEQ ID NO: 1131947 - RNA, 26 nt, Human
gccccugccucccuccccccauccac

SEQ ID NO: 1131948 - RNA, 21 nt, Human
gcucaggaacauaggcuucca

SEQ ID NO: 1131949 - RNA, 20 nt, Human
gcugaacagcccuagucuga

SEQ ID NO: 1131950 - RNA, 19 nt, Human
gcugcugccaagacccuga

SEQ ID NO: 1131951 - RNA, 24 nt, Human
ggacccagaaccuccugcaagaaa

SEQ ID NO: 1131952 - RNA, 18 nt, Human
ggagggagcagccccgcc

SEQ ID NO: 1131953 - RNA, 20 nt, Human
gggaagaggaugggcgggac

SEQ ID NO: 1131954 - RNA, 20 nt, Human
gggacagccugguccugucc

SEQ ID NO: 1131955 - RNA, 18 nt, Human
gggcaaggccaggcuggc

SEQ ID NO: 1131956 - RNA, 22 nt, Human
gggcuuuggaggugaggagguc

SEQ ID NO: 1131957 - RNA, 22 nt, Human
ggguggaaacucccugaauagc

SEQ ID NO: 1131958 - RNA, 20 nt, Human
gguggaaacucccugaauag

SEQ ID NO: 1131959 - RNA, 20 nt, Human
ggugggguuguccuagaagg

SEQ ID NO: 1131960 - RNA, 23 nt, Human
guauucuaaggaaaauccauggu

SEQ ID NO: 1131961 - RNA, 18 nt, Human
gucagagaguucuucuua

SEQ ID NO: 1131962 - RNA, 21 nt, Human
gugugauccucauuuucaaau

SEQ ID NO: 1131963 - RNA, 21 nt, Human
uaaaaaccaaagcaaaacccc

SEQ ID NO: 1131964 - RNA, 19 nt, Human
uaaaaauaugccacaaaau

SEQ ID NO: 1131965 - RNA, 23 nt, Human
uaaacaggaucucaaagauucuc

SEQ ID NO: 1131966 - RNA, 23 nt, Human
uaaagcaaguaucagcccuagug

SEQ ID NO: 1131967 - RNA, 19 nt, Human
uaaauauuuggugagaaaa

SEQ ID NO: 1131968 - RNA, 23 nt, Human
uaaaucagaaaagguaacauuca

SEQ ID NO: 1131969 - RNA, 19 nt, Human
uaacaggagugaggaugug

SEQ ID NO: 1131970 - RNA, 22 nt, Human
uaagaauggaacccguguuuga

SEQ ID NO: 1131971 - RNA, 20 nt, Human
uaaggaaaauccauggugcc

SEQ ID NO: 1131972 - RNA, 21 nt, Human
uaagucuuaggugucagugcc

SEQ ID NO: 1131973 - RNA, 26 nt, Human
uaauuaaaaaccaaagcaaaacccca

SEQ ID NO: 1131974 - RNA, 22 nt, Human
uacaauguucuuuaggguuuua

SEQ ID NO: 1131975 - RNA, 19 nt, Human
uaccagguggacaccugga

SEQ ID NO: 1131976 - RNA, 22 nt, Human
uacccaggaugaaacaaaaggc

SEQ ID NO: 1131977 - RNA, 20 nt, Human
uacuuucaauacuuuugcuc

SEQ ID NO: 1131978 - RNA, 20 nt, Human
uagcagagugugcaggucgc

SEQ ID NO: 1131979 - RNA, 22 nt, Human
uagcaggaacgugugcaaaaca

SEQ ID NO: 1131980 - RNA, 22 nt, Human
uagccccugccucccucccccc

SEQ ID NO: 1131981 - RNA, 23 nt, Human
uaucagcccuagugggaaacaga

SEQ ID NO: 1131982 - RNA, 21 nt, Human
uaugaaggacugggugagcca

SEQ ID NO: 1131983 - RNA, 20 nt, Human
ucaaaaugauuucagaggca

SEQ ID NO: 1131984 - RNA, 19 nt, Human
ucaaacagagagaucccac

SEQ ID NO: 1131985 - RNA, 20 nt, Human
ucaaauaacaccuaagaggc

SEQ ID NO: 1131986 - RNA, 24 nt, Human
ucaaauuagaggcuaaagauggac

SEQ ID NO: 1131987 - RNA, 19 nt, Human
ucaauccacucuccacucc

SEQ ID NO: 1131988 - RNA, 19 nt, Human
ucaauguaauguugccauc

SEQ ID NO: 1131989 - RNA, 22 nt, Human
ucaccucauuccacccucaaaa

SEQ ID NO: 1131990 - RNA, 26 nt, Human
ucagaaaacaucccaaguuuguagga

SEQ ID NO: 1131991 - RNA, 24 nt, Human
ucagaggauggagccaggccuguc

SEQ ID NO: 1131992 - RNA, 23 nt, Human
ucaggccaugugcacuggguggg

SEQ ID NO: 1131993 - RNA, 24 nt, Human
ucauguaugcucugggcaaggcca

SEQ ID NO: 1131994 - RNA, 19 nt, Human
uccacacaugggaauuugc

SEQ ID NO: 1131995 - RNA, 19 nt, Human
uccacacaugggaauuugc

SEQ ID NO: 1131996 - RNA, 22 nt, Human
uccacccccauuccccuuggca

SEQ ID NO: 1131997 - RNA, 20 nt, Human
uccaccuccuucaggcuccc

SEQ ID NO: 1131998 - RNA, 21 nt, Human
uccaccuccuucaggcucccu

SEQ ID NO: 1131999 - RNA, 20 nt, Human
uccacucccagagucuggcc

SEQ ID NO: 1132000 - RNA, 18 nt, Human
uccacucuccacucccag

SEQ ID NO: 1132001 - RNA, 21 nt, Human
uccaggaggacaaggacugcc

SEQ ID NO: 1132002 - RNA, 21 nt, Human
ucccagagucuggcccccucc

SEQ ID NO: 1132003 - RNA, 19 nt, Human
ucccucagaaaacauccca

SEQ ID NO: 1132004 - RNA, 21 nt, Human
ucccucagaaaacaucccaag

SEQ ID NO: 1132005 - RNA, 25 nt, Human
ucccucagaaaacaucccaaguucc

SEQ ID NO: 1132006 - RNA, 19 nt, Human
ucccuccccccauccaccc

SEQ ID NO: 1132007 - RNA, 18 nt, Human
ucccugauggccccucug

SEQ ID NO: 1132008 - RNA, 23 nt, Human
ucccugauggccccucugcgauu

SEQ ID NO: 1132009 - RNA, 20 nt, Human
ucccugccacgguguuuggg

SEQ ID NO: 1132010 - RNA, 18 nt, Human
uccgaggacuuucugcug

SEQ ID NO: 1132011 - RNA, 20 nt, Human
uccugggcucccuggggccc

SEQ ID NO: 1132012 - RNA, 20 nt, Human
ucuagccccugccucccucc

SEQ ID NO: 1132013 - RNA, 19 nt, Human
ucucaaugccauugguacc

SEQ ID NO: 1132014 - RNA, 21 nt, Human
ucuccaggcagcagaagacca

SEQ ID NO: 1132015 - RNA, 25 nt, Human
ucuccagugcuaucucccucuccca

SEQ ID NO: 1132016 - RNA, 28 nt, Human
ucuccagugcuaucucccuucccaaggg

SEQ ID NO: 1132017 - RNA, 20 nt, Human
ucugaagcucccugcucugc

SEQ ID NO: 1132018 - RNA, 22 nt, Human
ucugaggccucucucccaaccu

SEQ ID NO: 1132019 - RNA, 21 nt, Human
ucugcuugaugggggcauaug

SEQ ID NO: 1132020 - RNA, 22 nt, Human
ucuggcccccuccccucaggcc

SEQ ID NO: 1132021 - RNA, 20 nt, Human
ucuuccagguguauggcauc

SEQ ID NO: 1132022 - RNA, 23 nt, Human
ugaaacagccagcaaauaaguuc

SEQ ID NO: 1132023 - RNA, 20 nt, Human
ugaacacacacagaaggaac

SEQ ID NO: 1132024 - RNA, 19 nt, Human
ugaaccccugucuaccccc

SEQ ID NO: 1132025 - RNA, 18 nt, Human
ugaaguggaaacuucugu

SEQ ID NO: 1132026 - RNA, 24 nt, Human
ugaccacaggaugcccgcagcaca

SEQ ID NO: 1132027 - RNA, 21 nt, Human
ugaccauaacuugcuuacacc

SEQ ID NO: 1132028 - RNA, 19 nt, Human
ugacuucaauccacucucc

SEQ ID NO: 1132029 - RNA, 19 nt, Human
ugagagaagaaggguugaa

SEQ ID NO: 1132030 - RNA, 22 nt, Human
ugagcaaccugcacuucagucc

SEQ ID NO: 1132031 - RNA, 24 nt, Human
ugaggaggucagagaguucuucuu

SEQ ID NO: 1132032 - RNA, 24 nt, Human
ugauucaaacagagagaucccaca

SEQ ID NO: 1132033 - RNA, 23 nt, Human
ugcaaacaagaaaaaaauguggu

SEQ ID NO: 1132034 - RNA, 23 nt, Human
ugcaacugucagccucacuacag

SEQ ID NO: 1132035 - RNA, 18 nt, Human
ugcccucauaaacaggau

SEQ ID NO: 1132036 - RNA, 25 nt, Human
ugccuuggaucccugcacauagaac

SEQ ID NO: 1132037 - RNA, 22 nt, Human
ugcugucuagagcuggcugcac

SEQ ID NO: 1132038 - RNA, 19 nt, Human
uggacccaaauccaccccc

SEQ ID NO: 1132039 - RNA, 25 nt, Human
uggcaaggacugaauccaaauccca

SEQ ID NO: 1132040 - RNA, 21 nt, Human
uggcaggagacagggacuuaa

SEQ ID NO: 1132041 - RNA, 18 nt, Human
uggcaguaaugggagaga

SEQ ID NO: 1132042 - RNA, 20 nt, Human
uggccacaucaaacucugau

SEQ ID NO: 1132043 - RNA, 24 nt, Human
uggccagugccacuugcccaccag

SEQ ID NO: 1132044 - RNA, 25 nt, Human
uggcugaaccccugucuacccccac

SEQ ID NO: 1132045 - RNA, 20 nt, Human
ugggaagguccucccugaug

SEQ ID NO: 1132046 - RNA, 22 nt, Human
ugggaauucccaaggugggcac

SEQ ID NO: 1132047 - RNA, 22 nt, Human
ugggaguuuaugcucggccagg

SEQ ID NO: 1132048 - RNA, 18 nt, Human
ugguauuugcagugcccu

SEQ ID NO: 1132049 - RNA, 19 nt, Human
ugguauuugcagugcccuc

SEQ ID NO: 1132050 - RNA, 23 nt, Human
ugguugguuuuaagaaagaggcu

SEQ ID NO: 1132051 - RNA, 18 nt, Human
uguaauguugccauccaa

SEQ ID NO: 1132052 - RNA, 23 nt, Human
uguauggcaucucauaacagagu

SEQ ID NO: 1132053 - RNA, 18 nt, Human
ugucggggcugcucaugu

SEQ ID NO: 1132054 - RNA, 24 nt, Human
uguuccggguaggaggcacugggc

SEQ ID NO: 1132055 - RNA, 21 nt, Human
uguuccucagcuccucugaga

SEQ ID NO: 1132056 - RNA, 18 nt, Human
uuaaagcaaguaucagcc

SEQ ID NO: 1132057 - RNA, 18 nt, Human
uuaauggcagcccucagu

SEQ ID NO: 1132058 - RNA, 23 nt, Human
uuagcacccccaccacacucggu

SEQ ID NO: 1132059 - RNA, 25 nt, Human
uucaagaagcuaaaauacuaucaga

SEQ ID NO: 1132060 - RNA, 19 nt, Human
uucacagguaacaaauggu

SEQ ID NO: 1132061 - RNA, 24 nt, Human
uucagaggauggagccaggccugu

SEQ ID NO: 1132062 - RNA, 24 nt, Human
uucauuggcaauuuuuugcaacaa

SEQ ID NO: 1132063 - RNA, 21 nt, Human
uuccagagccggcugcugcca

SEQ ID NO: 1132064 - RNA, 20 nt, Human
uucccuauucuccucucuca

SEQ ID NO: 1132065 - RNA, 19 nt, Human
uuccuugggagugucccug

SEQ ID NO: 1132066 - RNA, 20 nt, Human
uuccuugggagugucccuga

SEQ ID NO: 1132067 - RNA, 18 nt, Human
uucuuggggccaaacacu

SEQ ID NO: 1132068 - RNA, 22 nt, Human
uugaaggcuguuuguacuccac

SEQ ID NO: 1132069 - RNA, 19 nt, Human
uugaagucucuguuccuca

SEQ ID NO: 1132070 - RNA, 22 nt, Human
uugaccauaacuugcuuacacc

SEQ ID NO: 1132071 - RNA, 19 nt, Human
uugcagagugggcguccga

SEQ ID NO: 1132072 - RNA, 19 nt, Human
uugcccuucaccucauucc

SEQ ID NO: 1132073 - RNA, 18 nt, Human
uugcugccaagcucccaa

SEQ ID NO: 1132074 - RNA, 19 nt, Human
uugcuggugggguuguccu

SEQ ID NO: 1132075 - RNA, 23 nt, Human
uugguugguuuuaagaaagaggc

SEQ ID NO: 1132076 - RNA, 20 nt, Human
uuguuuacccuaauucccua

SEQ ID NO: 1132077 - RNA, 23 nt, Human
agcacccuuugucccuggguggc

SEQ ID NO: 1132078 - RNA, 21 nt, Human
agguggugacuccccauccgc

SEQ ID NO: 1132079 - RNA, 23 nt, Human
auagucccgacuccccgagacag

SEQ ID NO: 1132080 - RNA, 18 nt, Human
auccgcggaggcuccccc

SEQ ID NO: 1132081 - RNA, 19 nt, Human
caacugccgggagauucug

SEQ ID NO: 1132082 - RNA, 24 nt, Human
caacugccuccugagugaccgaga

SEQ ID NO: 1132083 - RNA, 19 nt, Human
cacccuggaauggcugaag

SEQ ID NO: 1132084 - RNA, 26 nt, Human
caccgcucuguccuucuccaaggccc

SEQ ID NO: 1132085 - RNA, 20 nt, Human
cagguggugacuccccaucc

SEQ ID NO: 1132086 - RNA, 22 nt, Human
cagucuagagucucgacuaccc

SEQ ID NO: 1132087 - RNA, 24 nt, Human
ccaacugccuccugagugaccgag

SEQ ID NO: 1132088 - RNA, 19 nt, Human
ccccgcugaccccaagucc

SEQ ID NO: 1132089 - RNA, 21 nt, Human
ccccgcugaccccaagucccc

SEQ ID NO: 1132090 - RNA, 19 nt, Human
cccggugcaggagcacccu

SEQ ID NO: 1132091 - RNA, 20 nt, Human
ccggcagguggugacucccc

SEQ ID NO: 1132092 - RNA, 18 nt, Human
ccgggaaccaacugccgg

SEQ ID NO: 1132093 - RNA, 21 nt, Human
ccuccgggaaccaacugccgg

SEQ ID NO: 1132094 - RNA, 24 nt, Human
ccuccgggaaccaacugccgggag

SEQ ID NO: 1132095 - RNA, 20 nt, Human
cgacuacccggggugaccca

SEQ ID NO: 1132096 - RNA, 23 nt, Human
cgcucuguccuucuccaaggccc

SEQ ID NO: 1132097 - RNA, 21 nt, Human
cggcagguggugacuccccuc

SEQ ID NO: 1132098 - RNA, 26 nt, Human
cucccugaccacgaauacucugccaa

SEQ ID NO: 1132099 - RNA, 20 nt, Human
cuccgggaaccaacugccgg

SEQ ID NO: 1132100 - RNA, 18 nt, Human
cugaccccaaguccccac

SEQ ID NO: 1132101 - RNA, 21 nt, Human
gaggcucccccgcugacccca

SEQ ID NO: 1132102 - RNA, 20 nt, Human
gcccggugcaggagcacccu

SEQ ID NO: 1132103 - RNA, 18 nt, Human
gcuggaguucaggugggc

SEQ ID NO: 1132104 - RNA, 18 nt, Human
ggcuuugucaguuuaaca

SEQ ID NO: 1132105 - RNA, 20 nt, Human
gucuagagucucgacuaccc

SEQ ID NO: 1132106 - RNA, 23 nt, Human
uaacagauucugccuccgggaac

SEQ ID NO: 1132107 - RNA, 19 nt, Human
ucccuggguggccugaccc

SEQ ID NO: 1132108 - RNA, 21 nt, Human
ucccuggguggccugacccug

SEQ ID NO: 1132109 - RNA, 26 nt, Human
uccgcggaggcucccccgcugacccc

SEQ ID NO: 1132110 - RNA, 21 nt, Human
uccggccuccuaaggggcagg

SEQ ID NO: 1132111 - RNA, 22 nt, Human
uccugagugaccgagacagcuc

SEQ ID NO: 1132112 - RNA, 27 nt, Human
uccugagugaccgagacagcucagucu

SEQ ID NO: 1132113 - RNA, 19 nt, Human
ucugccaacugccuccuga

SEQ ID NO: 1132114 - RNA, 18 nt, Human
uggaauggcugaaauuaa

SEQ ID NO: 1132115 - RNA, 21 nt, Human
ugggaagcugugcauccuaua

SEQ ID NO: 1132116 - RNA, 23 nt, Human
uggguggccugacccugcugacc

SEQ ID NO: 1132117 - RNA, 23 nt, Human
uuuucauauaauugcauuuuuca

SEQ ID NO: 1132118 - RNA, 18 nt, Human
auaaaguggcugugcucc

SEQ ID NO: 1132119 - RNA, 22 nt, Human
ccacacagcugacuacgcugcu

SEQ ID NO: 1132120 - RNA, 21 nt, Human
cugagcaaaucucauuacuaa

SEQ ID NO: 1132121 - RNA, 20 nt, Human
cuggaugucugcaucagggc

SEQ ID NO: 1132122 - RNA, 22 nt, Human
ucugcaucagggcugcugaggc

SEQ ID NO: 1132123 - RNA, 18 nt, Human
ugacuacgcugcugagca

SEQ ID NO: 1132124 - RNA, 23 nt, Human
ugagaaugcaccacacagcugac

SEQ ID NO: 1132125 - RNA, 28 nt, Human
aagcacuccagaaaacugaggagaaaag

SEQ ID NO: 1132126 - RNA, 18 nt, Human
aagccccccgacacacuc

SEQ ID NO: 1132127 - RNA, 19 nt, Human
aagccgccaagccccccga

SEQ ID NO: 1132128 - RNA, 19 nt, Human
acucaccauccgcaaccgg

SEQ ID NO: 1132129 - RNA, 20 nt, Human
acuccagaaaacugaggaga

SEQ ID NO: 1132130 - RNA, 24 nt, Human
acuccagaaaacugaggagaaaag

SEQ ID NO: 1132131 - RNA, 21 nt, Human
agaggaaagggagugcuagag

SEQ ID NO: 1132132 - RNA, 20 nt, Human
aggcucccagagacaccagu

SEQ ID NO: 1132133 - RNA, 20 nt, Human
auaaauuacuccucagagaa

SEQ ID NO: 1132134 - RNA, 18 nt, Human
caaagcacuccagaaaac

SEQ ID NO: 1132135 - RNA, 20 nt, Human
caaccggaacgcggaagcaa

SEQ ID NO: 1132136 - RNA, 22 nt, Human
ccaacacugcuggucauggcac

SEQ ID NO: 1132137 - RNA, 18 nt, Human
cccugcacacugcccggc

SEQ ID NO: 1132138 - RNA, 19 nt, Human
cccugcacacugcccggca

SEQ ID NO: 1132139 - RNA, 19 nt, Human
cccugcacacugcccggca

SEQ ID NO: 1132140 - RNA, 22 nt, Human
cccugcuggcucuccauauggg

SEQ ID NO: 1132141 - RNA, 18 nt, Human
cggagaacucccagaccc

SEQ ID NO: 1132142 - RNA, 21 nt, Human
cuccaaagcacuccagaaaac

SEQ ID NO: 1132143 - RNA, 22 nt, Human
gacaccaguaaauaaaugggag

SEQ ID NO: 1132144 - RNA, 18 nt, Human
gacccuaggggaucuggg

SEQ ID NO: 1132145 - RNA, 21 nt, Human
gcaaccggaacgcggaagcaa

SEQ ID NO: 1132146 - RNA, 19 nt, Human
ggaggguagggaaagggau

SEQ ID NO: 1132147 - RNA, 21 nt, Human
ggaucuggguggccaccaaca

SEQ ID NO: 1132148 - RNA, 19 nt, Human
uaaggaaaggcucccagag

SEQ ID NO: 1132149 - RNA, 19 nt, Human
uagcccagucagucagcgg

SEQ ID NO: 1132150 - RNA, 26 nt, Human
uccaaagcacuccagaaaacugagga

SEQ ID NO: 1132151 - RNA, 22 nt, Human
uccgcaaccggaacgcggaagc

SEQ ID NO: 1132152 - RNA, 23 nt, Human
ugaggagaaaagccgccaagccc

SEQ ID NO: 1132153 - RNA, 19 nt, Human
ugaggcaagggagcugggc

SEQ ID NO: 1132154 - RNA, 21 nt, Human
ugaggcaagggagcugggcuc

SEQ ID NO: 1132155 - RNA, 23 nt, Human
ugccagccuuuaaccucaaagca

SEQ ID NO: 1132156 - RNA, 18 nt, Human
uggccaagaggacggaga

SEQ ID NO: 1132157 - RNA, 21 nt, Human
uggcucuccauaugggcugac

SEQ ID NO: 1132158 - RNA, 19 nt, Human
ugggcuuuugacucguagc

SEQ ID NO: 1132159 - RNA, 18 nt, Human
uggucauggcacagcacc

SEQ ID NO: 1132160 - RNA, 18 nt, Human
aaaaagagaggacuugaa

SEQ ID NO: 1132161 - RNA, 21 nt, Human
acaaagcacuaggaaauguca

SEQ ID NO: 1132162 - RNA, 23 nt, Human
agaagaagacaguccagugguga

SEQ ID NO: 1132163 - RNA, 18 nt, Human
agagaucaauuauuguca

SEQ ID NO: 1132164 - RNA, 21 nt, Human
agauagucgagauaggagaac

SEQ ID NO: 1132165 - RNA, 18 nt, Human
agauuauccauucucagc

SEQ ID NO: 1132166 - RNA, 23 nt, Human
agcuguauauuuuucaaagguuu

SEQ ID NO: 1132167 - RNA, 26 nt, Human
caauguuuguuugauauuggaaccug

SEQ ID NO: 1132168 - RNA, 23 nt, Human
cucacaaagcacuaggaaauguc

SEQ ID NO: 1132169 - RNA, 22 nt, Human
gaaaaugguccaagucuccuca

SEQ ID NO: 1132170 - RNA, 20 nt, Human
gaagaagacaguccaguggg

SEQ ID NO: 1132171 - RNA, 22 nt, Human
gaaguagcuaugcgaaaauuua

SEQ ID NO: 1132172 - RNA, 22 nt, Human
ggaauaaaagagcuggaaaaaa

SEQ ID NO: 1132173 - RNA, 20 nt, Human
gguaacaaagauagucgaga

SEQ ID NO: 1132174 - RNA, 18 nt, Human
gucucaaucuggcucugg

SEQ ID NO: 1132175 - RNA, 18 nt, Human
guuucugacauagcaaug

SEQ ID NO: 1132176 - RNA, 23 nt, Human
uaaaagagauuaaaaaugcggua

SEQ ID NO: 1132177 - RNA, 21 nt, Human
uaccuucaacucagguuguuc

SEQ ID NO: 1132178 - RNA, 18 nt, Human
uaggagaaugugggauau

SEQ ID NO: 1132179 - RNA, 19 nt, Human
uaguccagagcaugggcag

SEQ ID NO: 1132180 - RNA, 23 nt, Human
uauuauggaauacugcagugaga

SEQ ID NO: 1132181 - RNA, 22 nt, Human
ucauguuuaggagaauguggga

SEQ ID NO: 1132182 - RNA, 21 nt, Human
ucauuugggauaaugaaagug

SEQ ID NO: 1132183 - RNA, 20 nt, Human
ugaggauaacagguaacaaa

SEQ ID NO: 1132184 - RNA, 19 nt, Human
ugggcaauacauuuuuguu

SEQ ID NO: 1132185 - RNA, 23 nt, Human
uguauacauuaacaguucaugua

SEQ ID NO: 1132186 - RNA, 20 nt, Human
ugugggauauggggaagggg

SEQ ID NO: 1132187 - RNA, 19 nt, Human
uguuuaggagaauguggga

SEQ ID NO: 1132188 - RNA, 18 nt, Human
uuaauccaagccuauuau

SEQ ID NO: 1132189 - RNA, 29 nt, Human
uucucugcuguuacguaaguuuuccgauu

SEQ ID NO: 1132190 - RNA, 19 nt, Human
uugcugcccauugucccug

SEQ ID NO: 1132191 - RNA, 20 nt, Human
uuuuguuugauuuuuagguc

SEQ ID NO: 1132192 - RNA, 24 nt, Human
aaagcaaaagccuguuuuuuuucu

SEQ ID NO: 1132193 - RNA, 26 nt, Human
aaagcaaaagccuguuuuuuuucuug

SEQ ID NO: 1132194 - RNA, 22 nt, Human
accacccccaccaccaccaccc

SEQ ID NO: 1132195 - RNA, 19 nt, Human
acccccaccaccaccccca

SEQ ID NO: 1132196 - RNA, 23 nt, Human
accucuaccuccucgcccuccau

SEQ ID NO: 1132197 - RNA, 18 nt, Human
acugcagaaguaguaucc

SEQ ID NO: 1132198 - RNA, 22 nt, Human
agcagccccacgaccucuggau

SEQ ID NO: 1132199 - RNA, 20 nt, Human
agcagccgccuuuccccuuc

SEQ ID NO: 1132200 - RNA, 19 nt, Human
agccccuaaccuccuccag

SEQ ID NO: 1132201 - RNA, 21 nt, Human
agccccuaaccuccuccagcu

SEQ ID NO: 1132202 - RNA, 18 nt, Human
aggaucagcccauucaac

SEQ ID NO: 1132203 - RNA, 20 nt, Human
auagagcccacaaaaagccu

SEQ ID NO: 1132204 - RNA, 20 nt, Human
aucccccccuuuccuuuccc

SEQ ID NO: 1132205 - RNA, 21 nt, Human
aucccccccuuuccuuucccu

SEQ ID NO: 1132206 - RNA, 23 nt, Human
aucucacucaccaaaaugaauga

SEQ ID NO: 1132207 - RNA, 18 nt, Human
caagaaagcaaaagccug

SEQ ID NO: 1132208 - RNA, 21 nt, Human
caccaccaccacccucugucu

SEQ ID NO: 1132209 - RNA, 26 nt, Human
caccaccacccccaccaccaccaccc

SEQ ID NO: 1132210 - RNA, 20 nt, Human
caccacccccaccaccaccc

SEQ ID NO: 1132211 - RNA, 23 nt, Human
caccacccccaccaccaccccca

SEQ ID NO: 1132212 - RNA, 20 nt, Human
cacccccaccaccaccaccc

SEQ ID NO: 1132213 - RNA, 22 nt, Human
cacccccaccaccacccccacc

SEQ ID NO: 1132214 - RNA, 20 nt, Human
caccccuucucuagcuccaa

SEQ ID NO: 1132215 - RNA, 24 nt, Human
cacucacucacucccucagccccu

SEQ ID NO: 1132216 - RNA, 21 nt, Human
cacucacucccucagccccua

SEQ ID NO: 1132217 - RNA, 23 nt, Human
cacucauuaaccuacgccuugcc

SEQ ID NO: 1132218 - RNA, 21 nt, Human
cacucauuccaguuucccaac

SEQ ID NO: 1132219 - RNA, 22 nt, Human
cacuccccucugcgguagcuca

SEQ ID NO: 1132220 - RNA, 19 nt, Human
cacucccucagccccuaac

SEQ ID NO: 1132221 - RNA, 23 nt, Human
cacuuuuguucugaacacgagag

SEQ ID NO: 1132222 - RNA, 23 nt, Human
cagccccuaaccuccuccagcuc

SEQ ID NO: 1132223 - RNA, 25 nt, Human
cagccccuaaccuccuccagcuccu

SEQ ID NO: 1132224 - RNA, 21 nt, Human
cagcuccuccuucuccccccc

SEQ ID NO: 1132225 - RNA, 21 nt, Human
cagcuccuccuucucccccua

SEQ ID NO: 1132226 - RNA, 19 nt, Human
cauaaccaccucuaccucc

SEQ ID NO: 1132227 - RNA, 21 nt, Human
cauaggaucagcccauucaac

SEQ ID NO: 1132228 - RNA, 20 nt, Human
cauauccauaauaaucugga

SEQ ID NO: 1132229 - RNA, 24 nt, Human
ccaaagaucuccccguuggacuga

SEQ ID NO: 1132230 - RNA, 23 nt, Human
ccaccacccccaccaccaccacc

SEQ ID NO: 1132231 - RNA, 22 nt, Human
ccaccacccccaccaccacccc

SEQ ID NO: 1132232 - RNA, 26 nt, Human
ccaccacccccaccaccacccccacc

SEQ ID NO: 1132233 - RNA, 21 nt, Human
ccacucgucuccgagcgcgcu

SEQ ID NO: 1132234 - RNA, 23 nt, Human
ccagcaucaagcaaugucugaaa

SEQ ID NO: 1132235 - RNA, 21 nt, Human
ccaguuucccaaacugacuaa

SEQ ID NO: 1132236 - RNA, 18 nt, Human
cccaccaccaccacccuc

SEQ ID NO: 1132237 - RNA, 23 nt, Human
cccaccaccaccacccucugucu

SEQ ID NO: 1132238 - RNA, 18 nt, Human
cccaccaccacccccacc

SEQ ID NO: 1132239 - RNA, 26 nt, Human
cccagaccuugacuuuaccacucauu

SEQ ID NO: 1132240 - RNA, 25 nt, Human
ccccaccaccaccacccucugucug

SEQ ID NO: 1132241 - RNA, 20 nt, Human
ccccacuguucccacucccc

SEQ ID NO: 1132242 - RNA, 23 nt, Human
ccccacuguucccacuccccucu

SEQ ID NO: 1132243 - RNA, 18 nt, Human
cccccccccccuuuaccc

SEQ ID NO: 1132244 - RNA, 21 nt, Human
cccccccccccuuuaccccac

SEQ ID NO: 1132245 - RNA, 19 nt, Human
ccccccccccuuuacccca

SEQ ID NO: 1132246 - RNA, 19 nt, Human
cccccccccuuuaccccac

SEQ ID NO: 1132247 - RNA, 22 nt, Human
ccccccuuuaccccacuguucc

SEQ ID NO: 1132248 - RNA, 21 nt, Human
ccccccuuuccuuucccuucc

SEQ ID NO: 1132249 - RNA, 21 nt, Human
ccccuucucuagcuccaacuu

SEQ ID NO: 1132250 - RNA, 18 nt, Human
ccccuugcuccucuacca

SEQ ID NO: 1132251 - RNA, 23 nt, Human
cccuccaagucuuuaccauucau

SEQ ID NO: 1132252 - RNA, 20 nt, Human
ccgaagcucacgccgcugac

SEQ ID NO: 1132253 - RNA, 22 nt, Human
ccgcccccccccccuuuacccc

SEQ ID NO: 1132254 - RNA, 27 nt, Human
ccuccagcuccuccuucucgggccgcc

SEQ ID NO: 1132255 - RNA, 20 nt, Human
ccuccaucucuuguuggagg

SEQ ID NO: 1132256 - RNA, 21 nt, Human
ccuuucuuauucccgcccccc

SEQ ID NO: 1132257 - RNA, 23 nt, Human
cgcuucacucacucacucccuca

SEQ ID NO: 1132258 - RNA, 27 nt, Human
cgugaucccccccuuuccuuucccuuc

SEQ ID NO: 1132259 - RNA, 19 nt, Human
cgugcucgcugcucccugu

SEQ ID NO: 1132260 - RNA, 22 nt, Human
cuaaaugccuuuucuaaaaucu

SEQ ID NO: 1132261 - RNA, 21 nt, Human
cuaccaccccuucucuagcuc

SEQ ID NO: 1132262 - RNA, 23 nt, Human
cucagccccuaaccuccuccagc

SEQ ID NO: 1132263 - RNA, 22 nt, Human
cuccaagucuuuaccauucauu

SEQ ID NO: 1132264 - RNA, 20 nt, Human
cucccccuaccaccaccccc

SEQ ID NO: 1132265 - RNA, 20 nt, Human
cucccccuaccaccaccccc

SEQ ID NO: 1132266 - RNA, 21 nt, Human
cucccccuaccaccaccccca

SEQ ID NO: 1132267 - RNA, 23 nt, Human
cucccccuaccaccacccccacc

SEQ ID NO: 1132268 - RNA, 25 nt, Human
cucccccuaccaccacccccaccac

SEQ ID NO: 1132269 - RNA, 19 nt, Human
cucuaccuccucgcccucc

SEQ ID NO: 1132270 - RNA, 19 nt, Human
cucucggccuuucuuauuc

SEQ ID NO: 1132271 - RNA, 24 nt, Human
cucucugugaauaaccggcucuac

SEQ ID NO: 1132272 - RNA, 19 nt, Human
cugucugccuucucucggc

SEQ ID NO: 1132273 - RNA, 25 nt, Human
cuugcgcgcgccccugcgugauccc

SEQ ID NO: 1132274 - RNA, 20 nt, Human
cuuuaccacucauuaaccua

SEQ ID NO: 1132275 - RNA, 20 nt, Human
cuuuccuuuucugauuuggu

SEQ ID NO: 1132276 - RNA, 23 nt, Human
gaacugccaaugcaccgucuuca

SEQ ID NO: 1132277 - RNA, 18 nt, Human
gagcagcaccccuugcuc

SEQ ID NO: 1132278 - RNA, 21 nt, Human
gagcagccgccuuuccccuuc

SEQ ID NO: 1132279 - RNA, 22 nt, Human
gcccccccccccuuuaccccac

SEQ ID NO: 1132280 - RNA, 24 nt, Human
gcuucacucacucacucccucagc

SEQ ID NO: 1132281 - RNA, 19 nt, Human
gggaagagcagccccacga

SEQ ID NO: 1132282 - RNA, 18 nt, Human
guugggcaccuccucucg

SEQ ID NO: 1132283 - RNA, 19 nt, Human
uaaccuccuccagcuccuc

SEQ ID NO: 1132284 - RNA, 22 nt, Human
uaauaguaguaaucgucauaca

SEQ ID NO: 1132285 - RNA, 23 nt, Human
uaccaccacccccaccaccaccc

SEQ ID NO: 1132286 - RNA, 23 nt, Human
uaccacggggaagagcagcccca

SEQ ID NO: 1132287 - RNA, 21 nt, Human
uagcucaggcacgagcagccg

SEQ ID NO: 1132288 - RNA, 21 nt, Human
uaggaucagcccauucaacag

SEQ ID NO: 1132289 - RNA, 22 nt, Human
uauuuucucccuccaagucuuu

SEQ ID NO: 1132290 - RNA, 19 nt, Human
ucacucacucccucagccc

SEQ ID NO: 1132291 - RNA, 23 nt, Human
ucacucauuccaguuucccaaac

SEQ ID NO: 1132292 - RNA, 20 nt, Human
ucagcaacuuucugugauaa

SEQ ID NO: 1132293 - RNA, 20 nt, Human
ucagcccauucaacaguucc

SEQ ID NO: 1132294 - RNA, 19 nt, Human
ucaggcacgagcagccgcc

SEQ ID NO: 1132295 - RNA, 24 nt, Human
ucauaaccauaguauggaucuuca

SEQ ID NO: 1132296 - RNA, 20 nt, Human
uccaacauucccccagaccu

SEQ ID NO: 1132297 - RNA, 18 nt, Human
uccagcuccuccuucucc

SEQ ID NO: 1132298 - RNA, 23 nt, Human
uccauagccuugacagcaccauc

SEQ ID NO: 1132299 - RNA, 22 nt, Human
ucccaaacugacuaaaugccuu

SEQ ID NO: 1132300 - RNA, 23 nt, Human
ucccccagaccuugacuuuacca

SEQ ID NO: 1132301 - RNA, 19 nt, Human
ucccuccaagucuuuacca

SEQ ID NO: 1132302 - RNA, 25 nt, Human
ucccuccaagucuuuaccauucauu

SEQ ID NO: 1132303 - RNA, 21 nt, Human
uccgaugguaccagguugcaa

SEQ ID NO: 1132304 - RNA, 18 nt, Human
uccuugguuuuaacucuu

SEQ ID NO: 1132305 - RNA, 23 nt, Human
ucuccccguuggacugaggggga

SEQ ID NO: 1132306 - RNA, 19 nt, Human
ucuguaagacccucuguua

SEQ ID NO: 1132307 - RNA, 18 nt, Human
ucugugaauaaccggcuc

SEQ ID NO: 1132308 - RNA, 20 nt, Human
ucuucaguaucauuuccauu

SEQ ID NO: 1132309 - RNA, 24 nt, Human
ucuucauauccaccacgauaguua

SEQ ID NO: 1132310 - RNA, 21 nt, Human
ucuuguuggagggggcauaua

SEQ ID NO: 1132311 - RNA, 19 nt, Human
ugaauggauaacugcagaa

SEQ ID NO: 1132312 - RNA, 24 nt, Human
ugacagcaaacccuauccaguucc

SEQ ID NO: 1132313 - RNA, 23 nt, Human
ugaucuucauauucaagaaagca

SEQ ID NO: 1132314 - RNA, 23 nt, Human
ugccugggcagcuguuuugugau

SEQ ID NO: 1132315 - RNA, 19 nt, Human
ugcuugcgcgcgccccugc

SEQ ID NO: 1132316 - RNA, 18 nt, Human
uggaggauauccauaacc

SEQ ID NO: 1132317 - RNA, 18 nt, Human
ugucuggcgcgaguggag

SEQ ID NO: 1132318 - RNA, 21 nt, Human
uuaaagcuucaauagcucuuu

SEQ ID NO: 1132319 - RNA, 18 nt, Human
uuaacauguucuguagcc

SEQ ID NO: 1132320 - RNA, 22 nt, Human
uuaccccacuguucccacuccc

SEQ ID NO: 1132321 - RNA, 21 nt, Human
uucagcaacuuucugugauaa

SEQ ID NO: 1132322 - RNA, 19 nt, Human
uucauaaccauaguaugga

SEQ ID NO: 1132323 - RNA, 25 nt, Human
uucccgcccccccccccuuuacccc

SEQ ID NO: 1132324 - RNA, 20 nt, Human
uugaaaaucuucauaaccau

SEQ ID NO: 1132325 - RNA, 22 nt, Human
uugcuccucuaccaccccuucu

SEQ ID NO: 1132326 - RNA, 21 nt, Human
uuuuucuugucauccgguugg

SEQ ID NO: 1132327 - RNA, 22 nt, Human
cacaaccugguaucacuauacc

SEQ ID NO: 1132328 - RNA, 22 nt, Human
cacuauaccacacgcuagcucu

SEQ ID NO: 1132329 - RNA, 18 nt, Human
ccacacgcuagcucuugg

SEQ ID NO: 1132330 - RNA, 19 nt, Human
uccccagugcagaagggau

SEQ ID NO: 1132331 - RNA, 21 nt, Human
ucuuucuuucuuuuuuuugaa

SEQ ID NO: 1132332 - RNA, 19 nt, Human
ucuuuuuuuugagacagag

SEQ ID NO: 1132333 - RNA, 22 nt, Human
ugagaaugccucauuuuuucuu

SEQ ID NO: 1132334 - RNA, 23 nt, Human
uucuuucuuucuuuuuuuugaga

SEQ ID NO: 1132335 - RNA, 21 nt, Human
uucuuuuuuuugagacagagg

SEQ ID NO: 1132336 - RNA, 23 nt, Human
uucuuuuuuuugagacagaggug

SEQ ID NO: 1132337 - RNA, 18 nt, Human
uugagacagaggugaauu

SEQ ID NO: 1132338 - RNA, 19 nt, Human
agaagacacugaacucucc

SEQ ID NO: 1132339 - RNA, 19 nt, Human
agggugguggggggcagca

SEQ ID NO: 1132340 - RNA, 23 nt, Human
agggugguggggggcagcaauga

SEQ ID NO: 1132341 - RNA, 19 nt, Human
agucagggggcuccuaaga

SEQ ID NO: 1132342 - RNA, 22 nt, Human
cacugaacucucccggaagaga

SEQ ID NO: 1132343 - RNA, 20 nt, Human
cagaagacacugaacucucc

SEQ ID NO: 1132344 - RNA, 20 nt, Human
ccccagaggguggugggggg

SEQ ID NO: 1132345 - RNA, 23 nt, Human
cggaagagaugaauccaaaggca

SEQ ID NO: 1132346 - RNA, 24 nt, Human
gacacugaacucucccggaagaga

SEQ ID NO: 1132347 - RNA, 23 nt, Human
ggcacugauuuuggaagucaggg

SEQ ID NO: 1132348 - RNA, 21 nt, Human
gugguggggggcagcaaugag

SEQ ID NO: 1132349 - RNA, 23 nt, Human
acagugcugcacauggggguugg

SEQ ID NO: 1132350 - RNA, 18 nt, Human
cagacagugcugcacaug

SEQ ID NO: 1132351 - RNA, 20 nt, Human
ccaagaaugccucagccacc

SEQ ID NO: 1132352 - RNA, 21 nt, Human
cccaagaaugccucagccacc

SEQ ID NO: 1132353 - RNA, 18 nt, Human
gaaaagaugguggagagg

SEQ ID NO: 1132354 - RNA, 25 nt, Human
guccagacagugcugcacauggggg

SEQ ID NO: 1132355 - RNA, 20 nt, Human
gugaaaagaugguggagagg

SEQ ID NO: 1132356 - RNA, 22 nt, Human
gugaaaagaugguggagagggc

SEQ ID NO: 1132357 - RNA, 24 nt, Human
uauugggauuaacacuugugaaaa

SEQ ID NO: 1132358 - RNA, 22 nt, Human
ugcuauguggcccaagaaugcc

SEQ ID NO: 1132359 - RNA, 19 nt, Human
uggcccaagaaugccucag

SEQ ID NO: 1132360 - RNA, 18 nt, Human
aaaauagcauuagaaggc

SEQ ID NO: 1132361 - RNA, 20 nt, Human
aaaguucuagggguaggaug

SEQ ID NO: 1132362 - RNA, 20 nt, Human
aaauaucgauggucaacacu

SEQ ID NO: 1132363 - RNA, 18 nt, Human
aaauuauaaaacauggca

SEQ ID NO: 1132364 - RNA, 24 nt, Human
aacagaacacaagaugguacacca

SEQ ID NO: 1132365 - RNA, 19 nt, Human
aacauuuguugaaccccuu

SEQ ID NO: 1132366 - RNA, 22 nt, Human
acaacauaaaacaaaacauagg

SEQ ID NO: 1132367 - RNA, 21 nt, Human
acaccgaagauaaccagacau

SEQ ID NO: 1132368 - RNA, 25 nt, Human
acacucggcucugugacucugcuuc

SEQ ID NO: 1132369 - RNA, 23 nt, Human
acagaacacaagaugguacacca

SEQ ID NO: 1132370 - RNA, 24 nt, Human
acagaacacaagaugguacaccau

SEQ ID NO: 1132371 - RNA, 24 nt, Human
agaaggcagaacuaauguuuauau

SEQ ID NO: 1132372 - RNA, 25 nt, Human
agacagaaacagaagccacaugugg

SEQ ID NO: 1132373 - RNA, 19 nt, Human
agcucauccucuuccuuca

SEQ ID NO: 1132374 - RNA, 20 nt, Human
aggcacacggugcaggucau

SEQ ID NO: 1132375 - RNA, 22 nt, Human
agggaagaggggucuacgguuc

SEQ ID NO: 1132376 - RNA, 23 nt, Human
auaaaacaaaacauaggcguauu

SEQ ID NO: 1132377 - RNA, 24 nt, Human
auacgacauauaagcauguauaca

SEQ ID NO: 1132378 - RNA, 19 nt, Human
caaaauagcauuagaaggc

SEQ ID NO: 1132379 - RNA, 22 nt, Human
caccaggccaggagacuuggac

SEQ ID NO: 1132380 - RNA, 18 nt, Human
cacggugcaggucauccu

SEQ ID NO: 1132381 - RNA, 25 nt, Human
cagaacuaauguuuauauguacaaa

SEQ ID NO: 1132382 - RNA, 18 nt, Human
cagaagccacauguggga

SEQ ID NO: 1132383 - RNA, 23 nt, Human
caggggaggcugggacgcagaca

SEQ ID NO: 1132384 - RNA, 19 nt, Human
cagguuagaauaaaucugc

SEQ ID NO: 1132385 - RNA, 23 nt, Human
caugugaacaugagggcagagac

SEQ ID NO: 1132386 - RNA, 18 nt, Human
ccacaugugggaggaaau

SEQ ID NO: 1132387 - RNA, 19 nt, Human
ccaggaagugaaugcaaua

SEQ ID NO: 1132388 - RNA, 22 nt, Human
cccacaccuugaucucagacuu

SEQ ID NO: 1132389 - RNA, 19 nt, Human
cccuuaggcugcuggagcu

SEQ ID NO: 1132390 - RNA, 22 nt, Human
ccuacagugguuauauauucuu

SEQ ID NO: 1132391 - RNA, 24 nt, Human
ccuaccucccuccucuccugauuu

SEQ ID NO: 1132392 - RNA, 20 nt, Human
ccuccuaccucccuccucuc

SEQ ID NO: 1132393 - RNA, 24 nt, Human
ccuccuaccucccuccucuccuga

SEQ ID NO: 1132394 - RNA, 18 nt, Human
ccugcaaaccacccggag

SEQ ID NO: 1132395 - RNA, 21 nt, Human
cgacauauaagcauguauaca

SEQ ID NO: 1132396 - RNA, 18 nt, Human
cuaccucccuccucuccu

SEQ ID NO: 1132397 - RNA, 21 nt, Human
cucugcuucagaggauagccc

SEQ ID NO: 1132398 - RNA, 26 nt, Human
cucugcuucagaggauagcccuuagg

SEQ ID NO: 1132399 - RNA, 21 nt, Human
cugcaaaccacccggagcugc

SEQ ID NO: 1132400 - RNA, 20 nt, Human
cugcccagagacagaaacag

SEQ ID NO: 1132401 - RNA, 19 nt, Human
cuuucauccuacagugguu

SEQ ID NO: 1132402 - RNA, 18 nt, Human
gaaauaacuuacaccgaa

SEQ ID NO: 1132403 - RNA, 22 nt, Human
gaaggaaccagcccugcccaca

SEQ ID NO: 1132404 - RNA, 24 nt, Human
gagagccaugugaacaugagggca

SEQ ID NO: 1132405 - RNA, 25 nt, Human
gagagccaugugaacaugagggcag

SEQ ID NO: 1132406 - RNA, 19 nt, Human
gauucugucucccuuuugc

SEQ ID NO: 1132407 - RNA, 19 nt, Human
gcagugagcguuuacugag

SEQ ID NO: 1132408 - RNA, 22 nt, Human
ggagagccugggcagaggcccu

SEQ ID NO: 1132409 - RNA, 21 nt, Human
gggacgcagacacacacacac

SEQ ID NO: 1132410 - RNA, 20 nt, Human
gguacuuuguugcagcagcc

SEQ ID NO: 1132411 - RNA, 22 nt, Human
gugcauuaaaggcacacggugc

SEQ ID NO: 1132412 - RNA, 25 nt, Human
uaaaacaacauuuguugaacccccc

SEQ ID NO: 1132413 - RNA, 20 nt, Human
uaaaacuagaagucaaaacc

SEQ ID NO: 1132414 - RNA, 21 nt, Human
uaacuaaagauucugucuccc

SEQ ID NO: 1132415 - RNA, 23 nt, Human
uaacuuacaccgaagauaaccag

SEQ ID NO: 1132416 - RNA, 23 nt, Human
uacaaaaugucacauacgacaua

SEQ ID NO: 1132417 - RNA, 19 nt, Human
uacaccaucugaauguaag

SEQ ID NO: 1132418 - RNA, 22 nt, Human
uacaccgaagauaaccagacau

SEQ ID NO: 1132419 - RNA, 20 nt, Human
uacacucggcucugugacuc

SEQ ID NO: 1132420 - RNA, 20 nt, Human
uacgguucaguucucaagac

SEQ ID NO: 1132421 - RNA, 19 nt, Human
uaguuaagaugaggcccua

SEQ ID NO: 1132422 - RNA, 18 nt, Human
uauaagcauguauacaua

SEQ ID NO: 1132423 - RNA, 18 nt, Human
uaucagaguaauaguagu

SEQ ID NO: 1132424 - RNA, 26 nt, Human
uauguacaaaaugucacauacggugu

SEQ ID NO: 1132425 - RNA, 26 nt, Human
ucauuuaugcaugguugugcuauuuc

SEQ ID NO: 1132426 - RNA, 25 nt, Human
ucccugcaaaccuaugaguaggauu

SEQ ID NO: 1132427 - RNA, 19 nt, Human
ucuaagugcauuaaaggca

SEQ ID NO: 1132428 - RNA, 22 nt, Human
ucuacgguucaguucucaagac

SEQ ID NO: 1132429 - RNA, 19 nt, Human
ucuagggguaggauggcag

SEQ ID NO: 1132430 - RNA, 21 nt, Human
ucuagggguaggauggcaggg

SEQ ID NO: 1132431 - RNA, 21 nt, Human
ucuagggguaggauggcaggg

SEQ ID NO: 1132432 - RNA, 23 nt, Human
ucuagggguaggauggcaggguc

SEQ ID NO: 1132433 - RNA, 23 nt, Human
ucuccagacagcugcagaggcuu

SEQ ID NO: 1132434 - RNA, 25 nt, Human
ucugucucccuuuugcugacucucc

SEQ ID NO: 1132435 - RNA, 22 nt, Human
ugaacaugagggcagagacugg

SEQ ID NO: 1132436 - RNA, 18 nt, Human
ugaaguaagcaccaggcc

SEQ ID NO: 1132437 - RNA, 19 nt, Human
ugacagggaagaggggucu

SEQ ID NO: 1132438 - RNA, 23 nt, Human
ugaggaaguaaaacaacauuugu

SEQ ID NO: 1132439 - RNA, 19 nt, Human
uggcaaguaaauuguagca

SEQ ID NO: 1132440 - RNA, 22 nt, Human
uggcaaguaaauuguagcauuu

SEQ ID NO: 1132441 - RNA, 22 nt, Human
uggcagugagcguuuacugagg

SEQ ID NO: 1132442 - RNA, 18 nt, Human
ugggaggaaauaucgaug

SEQ ID NO: 1132443 - RNA, 19 nt, Human
uggucaacacugacaggga

SEQ ID NO: 1132444 - RNA, 21 nt, Human
uguauacauaaagcugguaua

SEQ ID NO: 1132445 - RNA, 24 nt, Human
ugucacauacgacauauaagcaug

SEQ ID NO: 1132446 - RNA, 20 nt, Human
ugucagacaauuuuccagug

SEQ ID NO: 1132447 - RNA, 20 nt, Human
uguggaacucaggucugggg

SEQ ID NO: 1132448 - RNA, 26 nt, Human
uguuacauaagaaauaaacaacauaa

SEQ ID NO: 1132449 - RNA, 23 nt, Human
uuacaccgaagauaaccagacau

SEQ ID NO: 1132450 - RNA, 19 nt, Human
uuccccuccaacgugcagc

SEQ ID NO: 1132451 - RNA, 23 nt, Human
uuuaugcaugguugugcuauuuc

SEQ ID NO: 1132452 - RNA, 26 nt, Human
aaacucacaacuaccauccucaucug

SEQ ID NO: 1132453 - RNA, 22 nt, Human
aaagagaccauugacccaggac

SEQ ID NO: 1132454 - RNA, 22 nt, Human
aacccuggcuggccaagugacg

SEQ ID NO: 1132455 - RNA, 23 nt, Human
aagacuucaucccaaacucacaa

SEQ ID NO: 1132456 - RNA, 20 nt, Human
acaggguguguuucugggcc

SEQ ID NO: 1132457 - RNA, 19 nt, Human
accucugucuucgcccucg

SEQ ID NO: 1132458 - RNA, 20 nt, Human
acgggccugcaccuccacac

SEQ ID NO: 1132459 - RNA, 21 nt, Human
acucuucacucacuuagcaaa

SEQ ID NO: 1132460 - RNA, 22 nt, Human
acugccaaacccuggcuggcca

SEQ ID NO: 1132461 - RNA, 21 nt, Human
agacagggaggaggcaacaca

SEQ ID NO: 1132462 - RNA, 22 nt, Human
agacagggaggaggcaacacag

SEQ ID NO: 1132463 - RNA, 25 nt, Human
agacagggaggaggcaacacagggu

SEQ ID NO: 1132464 - RNA, 26 nt, Human
agacagggaggaggcaacacagggug

SEQ ID NO: 1132465 - RNA, 19 nt, Human
agauuccccacggaaccac

SEQ ID NO: 1132466 - RNA, 19 nt, Human
agccccaggucccuguggc

SEQ ID NO: 1132467 - RNA, 19 nt, Human
aggaggggaaagagaccau

SEQ ID NO: 1132468 - RNA, 18 nt, Human
aggcugaggaggaggaug

SEQ ID NO: 1132469 - RNA, 24 nt, Human
agucaugaaaauguggaagcacug

SEQ ID NO: 1132470 - RNA, 24 nt, Human
agugacaggcgacaggaauagaaa

SEQ ID NO: 1132471 - RNA, 22 nt, Human
augaagcccugagugagggcug

SEQ ID NO: 1132472 - RNA, 22 nt, Human
augcugugggcccagacacugc

SEQ ID NO: 1132473 - RNA, 23 nt, Human
augcugugggcccagacacugcu

SEQ ID NO: 1132474 - RNA, 19 nt, Human
caaaguugcagugccuuuc

SEQ ID NO: 1132475 - RNA, 27 nt, Human
caacaucauuuauuugacucuucacuc

SEQ ID NO: 1132476 - RNA, 19 nt, Human
caagagaaggaguaaccau

SEQ ID NO: 1132477 - RNA, 18 nt, Human
cagcuguguccaccacag

SEQ ID NO: 1132478 - RNA, 20 nt, Human
cagguacagaguucaacuga

SEQ ID NO: 1132479 - RNA, 24 nt, Human
caguacugggcacuguucacaguc

SEQ ID NO: 1132480 - RNA, 24 nt, Human
cauccucaucugaaccuuuggaag

SEQ ID NO: 1132481 - RNA, 24 nt, Human
ccaaacccuggcuggccaagugac

SEQ ID NO: 1132482 - RNA, 19 nt, Human
ccacacagguguuggcugc

SEQ ID NO: 1132483 - RNA, 19 nt, Human
ccccacggaaccaccaccu

SEQ ID NO: 1132484 - RNA, 23 nt, Human
ccccacggaaccaccaccuuccu

SEQ ID NO: 1132485 - RNA, 26 nt, Human
ccccuggagauccugcaucccagggg

SEQ ID NO: 1132486 - RNA, 18 nt, Human
ccguucuugccugcuccg

SEQ ID NO: 1132487 - RNA, 20 nt, Human
ccucaugagguggugagugc

SEQ ID NO: 1132488 - RNA, 19 nt, Human
ccugagugagggcuguggc

SEQ ID NO: 1132489 - RNA, 21 nt, Human
cgacaggaauagaaauccaca

SEQ ID NO: 1132490 - RNA, 25 nt, Human
cgacaggaauagaaauccacagaag

SEQ ID NO: 1132491 - RNA, 29 nt, Human
cucagcccuggccuacaguuccgguuccg

SEQ ID NO: 1132492 - RNA, 30 nt, Human
cuccagccccaggucccuguggcugggccu

SEQ ID NO: 1132493 - RNA, 20 nt, Human
cucucuccagccccaggucc

SEQ ID NO: 1132494 - RNA, 19 nt, Human
cugcccaucuugagcagag

SEQ ID NO: 1132495 - RNA, 19 nt, Human
cuggagauccugcauccca

SEQ ID NO: 1132496 - RNA, 20 nt, Human
cuggcuuauuuguuuuguaa

SEQ ID NO: 1132497 - RNA, 21 nt, Human
cugucuucgcccucgcugugg

SEQ ID NO: 1132498 - RNA, 21 nt, Human
cugugggcccagacacugcuc

SEQ ID NO: 1132499 - RNA, 21 nt, Human
cuuacaacauacuccagucac

SEQ ID NO: 1132500 - RNA, 25 nt, Human
cuuauuuguuuuguaaaaaaucugc

SEQ ID NO: 1132501 - RNA, 19 nt, Human
gacccaggacugcccuggc

SEQ ID NO: 1132502 - RNA, 19 nt, Human
gaccucugucuucgcccuc

SEQ ID NO: 1132503 - RNA, 19 nt, Human
gacucuucacucacuuagc

SEQ ID NO: 1132504 - RNA, 18 nt, Human
gagcagguuuaaauucgc

SEQ ID NO: 1132505 - RNA, 27 nt, Human
gaggaagaggaagagucagacagggag

SEQ ID NO: 1132506 - RNA, 19 nt, Human
gaggaggaggaugucacgg

SEQ ID NO: 1132507 - RNA, 21 nt, Human
gaggaggaggaugucacggug

SEQ ID NO: 1132508 - RNA, 18 nt, Human
gaguuuguuugggagcug

SEQ ID NO: 1132509 - RNA, 19 nt, Human
gcagauugccucucagaau

SEQ ID NO: 1132510 - RNA, 21 nt, Human
gcccuggccuacaguucuccu

SEQ ID NO: 1132511 - RNA, 22 nt, Human
gcccuggccuacaguucuccua

SEQ ID NO: 1132512 - RNA, 24 nt, Human
gcuccuaccuuggggacacuggug

SEQ ID NO: 1132513 - RNA, 21 nt, Human
ggaaaagaucuuucuaacaga

SEQ ID NO: 1132514 - RNA, 19 nt, Human
ggacauucacacaucagag

SEQ ID NO: 1132515 - RNA, 20 nt, Human
ggcugggccauaggagucgc

SEQ ID NO: 1132516 - RNA, 21 nt, Human
gggaacuuguuagaaagggaa

SEQ ID NO: 1132517 - RNA, 21 nt, Human
gggagcaggaggaagaggaag

SEQ ID NO: 1132518 - RNA, 18 nt, Human
guccucucucuccagccc

SEQ ID NO: 1132519 - RNA, 23 nt, Human
guugcagugccuuuccucaugaa

SEQ ID NO: 1132520 - RNA, 23 nt, Human
uaccuuggggacacuggugcccu

SEQ ID NO: 1132521 - RNA, 18 nt, Human
uacugggcacuguucaca

SEQ ID NO: 1132522 - RNA, 22 nt, Human
uagaaauccacagaagcucccc

SEQ ID NO: 1132523 - RNA, 19 nt, Human
uagcaaacauuuacugacc

SEQ ID NO: 1132524 - RNA, 22 nt, Human
uaucauugaccaaaguugcagu

SEQ ID NO: 1132525 - RNA, 24 nt, Human
uauuugacucuucacucacuuagc

SEQ ID NO: 1132526 - RNA, 22 nt, Human
ucaugaaaauguggaagcacug

SEQ ID NO: 1132527 - RNA, 23 nt, Human
uccccacggaaccaccaccuucc

SEQ ID NO: 1132528 - RNA, 18 nt, Human
uccucucucuccagcccc

SEQ ID NO: 1132529 - RNA, 19 nt, Human
uccucucucuccagcccca

SEQ ID NO: 1132530 - RNA, 21 nt, Human
uccugcaucccaggugcacuc

SEQ ID NO: 1132531 - RNA, 18 nt, Human
uccugcucaggccucuuc

SEQ ID NO: 1132532 - RNA, 23 nt, Human
ucugucuucgcccucgcuguggg

SEQ ID NO: 1132533 - RNA, 21 nt, Human
ucuugagcagagccgggcccu

SEQ ID NO: 1132534 - RNA, 18 nt, Human
ugagggcuguggcaacuu

SEQ ID NO: 1132535 - RNA, 23 nt, Human
ugauagguccccccuggagaucc

SEQ ID NO: 1132536 - RNA, 24 nt, Human
ugcacuagcuccuaccuuggggac

SEQ ID NO: 1132537 - RNA, 25 nt, Human
ugcacucagcccuggccuacaguuc

SEQ ID NO: 1132538 - RNA, 21 nt, Human
ugcaugaagcccugagugagg

SEQ ID NO: 1132539 - RNA, 19 nt, Human
ugcccuggcgugcaugaag

SEQ ID NO: 1132540 - RNA, 21 nt, Human
ugcuaucaggaagcacagcug

SEQ ID NO: 1132541 - RNA, 21 nt, Human
uggaagcacuggcuggaaguu

SEQ ID NO: 1132542 - RNA, 19 nt, Human
uggaagcauucaagagaag

SEQ ID NO: 1132543 - RNA, 22 nt, Human
uggaagcauucaagagaaggag

SEQ ID NO: 1132544 - RNA, 18 nt, Human
uggcuuauuuguuuugua

SEQ ID NO: 1132545 - RNA, 24 nt, Human
uggcuuauuuguuuuguaaaaaau

SEQ ID NO: 1132546 - RNA, 20 nt, Human
ugggagcuggucccagggag

SEQ ID NO: 1132547 - RNA, 21 nt, Human
ugucacgguguaggugcaggg

SEQ ID NO: 1132548 - RNA, 19 nt, Human
uucaagagaaggaguaacc

SEQ ID NO: 1132549 - RNA, 22 nt, Human
uucagguggugccugcacucag

SEQ ID NO: 1132550 - RNA, 20 nt, Human
uuccuugguugcucaguauu

SEQ ID NO: 1132551 - RNA, 18 nt, Human
uuugacucuucacucacu

SEQ ID NO: 1132552 - RNA, 24 nt, Human
aaaaagaagagggagugagcacag

SEQ ID NO: 1132553 - RNA, 18 nt, Human
aaaacaccaagaaccugg

SEQ ID NO: 1132554 - RNA, 22 nt, Human
aaaacaccaagaaccuggacaa

SEQ ID NO: 1132555 - RNA, 22 nt, Human
aaccuggacaacuugcagucaa

SEQ ID NO: 1132556 - RNA, 18 nt, Human
aagagggagugagcacag

SEQ ID NO: 1132557 - RNA, 18 nt, Human
aagcaggccgccacuuca

SEQ ID NO: 1132558 - RNA, 24 nt, Human
acugucgcccaggcuggagugcag

SEQ ID NO: 1132559 - RNA, 22 nt, Human
agaccaagaccgucuacugaua

SEQ ID NO: 1132560 - RNA, 21 nt, Human
agagacagagguauggggagu

SEQ ID NO: 1132561 - RNA, 25 nt, Human
agagagagacagagguauggggagu

SEQ ID NO: 1132562 - RNA, 18 nt, Human
agaggaaaaaaaagaaga

SEQ ID NO: 1132563 - RNA, 22 nt, Human
agaggaaaaaaaagaagaggga

SEQ ID NO: 1132564 - RNA, 20 nt, Human
agagggagugagcacaggug

SEQ ID NO: 1132565 - RNA, 18 nt, Human
aggaaaaaaaagaagagg

SEQ ID NO: 1132566 - RNA, 21 nt, Human
aggcucauccauugcacaucu

SEQ ID NO: 1132567 - RNA, 18 nt, Human
agggcacagcagagccug

SEQ ID NO: 1132568 - RNA, 20 nt, Human
caaaacaccaagaaccugga

SEQ ID NO: 1132569 - RNA, 22 nt, Human
caagaccaagaccgucuacuga

SEQ ID NO: 1132570 - RNA, 20 nt, Human
caccaaguggccaaugggaa

SEQ ID NO: 1132571 - RNA, 24 nt, Human
cacucaguaccuaccugaagucag

SEQ ID NO: 1132572 - RNA, 20 nt, Human
cacuggggccucacucagcu

SEQ ID NO: 1132573 - RNA, 20 nt, Human
cagcuccuccccaaauaggc

SEQ ID NO: 1132574 - RNA, 21 nt, Human
caggucagauacuucacagcc

SEQ ID NO: 1132575 - RNA, 21 nt, Human
caucaccuucuaugaccuagc

SEQ ID NO: 1132576 - RNA, 22 nt, Human
ccacagagcacuuuccagcaca

SEQ ID NO: 1132577 - RNA, 20 nt, Human
ccagagguuucuauggacuu

SEQ ID NO: 1132578 - RNA, 19 nt, Human
cccaggcuggagugcagca

SEQ ID NO: 1132579 - RNA, 20 nt, Human
cccccugggguagcuugggu

SEQ ID NO: 1132580 - RNA, 19 nt, Human
ccucacucagcuccucccc

SEQ ID NO: 1132581 - RNA, 19 nt, Human
cucacucagcuccucccca

SEQ ID NO: 1132582 - RNA, 18 nt, Human
cucuaaggggcauuugga

SEQ ID NO: 1132583 - RNA, 21 nt, Human
cugaaggcucauccauugcac

SEQ ID NO: 1132584 - RNA, 23 nt, Human
cugagaagacacccauuuuuaca

SEQ ID NO: 1132585 - RNA, 22 nt, Human
cuucauuuacaccgggugaaca

SEQ ID NO: 1132586 - RNA, 22 nt, Human
cuugcugccaacucuggcugca

SEQ ID NO: 1132587 - RNA, 21 nt, Human
cuuugggcaaugcaaucugcc

SEQ ID NO: 1132588 - RNA, 18 nt, Human
gacuugaguuuguucuca

SEQ ID NO: 1132589 - RNA, 29 nt, Human
gagagagaggaaaaaaaagaagagggagu

SEQ ID NO: 1132590 - RNA, 18 nt, Human
gagauagagugucacugu

SEQ ID NO: 1132591 - RNA, 18 nt, Human
gagccagcauuugaacug

SEQ ID NO: 1132592 - RNA, 24 nt, Human
gguauggggaguuggagggagaga

SEQ ID NO: 1132593 - RNA, 24 nt, Human
gucacugucgcccaggcuggagug

SEQ ID NO: 1132594 - RNA, 23 nt, Human
guccauguccucuuuccagcugg

SEQ ID NO: 1132595 - RNA, 23 nt, Human
gucugggacaucuuuaauuguuc

SEQ ID NO: 1132596 - RNA, 23 nt, Human
gugucacugucgcccaggcugga

SEQ ID NO: 1132597 - RNA, 23 nt, Human
uaccuaccugaagucagguacca

SEQ ID NO: 1132598 - RNA, 20 nt, Human
uagagugucacugucgccca

SEQ ID NO: 1132599 - RNA, 22 nt, Human
uagauccugagaagacacccau

SEQ ID NO: 1132600 - RNA, 23 nt, Human
uagauccugagaagacacccauu

SEQ ID NO: 1132601 - RNA, 22 nt, Human
uaggagcguaacuuuguaacuu

SEQ ID NO: 1132602 - RNA, 22 nt, Human
ucacuggggccucacucagcuc

SEQ ID NO: 1132603 - RNA, 20 nt, Human
ucacugucgcccaggcugga

SEQ ID NO: 1132604 - RNA, 18 nt, Human
ucagguaccaugugugca

SEQ ID NO: 1132605 - RNA, 24 nt, Human
ucccagauuaaacgggaggaacau

SEQ ID NO: 1132606 - RNA, 21 nt, Human
uccccaaauaggccuguccau

SEQ ID NO: 1132607 - RNA, 18 nt, Human
uccucugagcccccuggg

SEQ ID NO: 1132608 - RNA, 18 nt, Human
ucgcccaggcuggagugc

SEQ ID NO: 1132609 - RNA, 25 nt, Human
ucugccaccagugacaugcacucag

SEQ ID NO: 1132610 - RNA, 20 nt, Human
ucugggacaucuuuaauugu

SEQ ID NO: 1132611 - RNA, 24 nt, Human
ucuuugcuuucucucauuuggcac

SEQ ID NO: 1132612 - RNA, 18 nt, Human
ugaccuagccugggaacu

SEQ ID NO: 1132613 - RNA, 19 nt, Human
ugagcagagagagacagag

SEQ ID NO: 1132614 - RNA, 21 nt, Human
ugagcagagagagacagaggu

SEQ ID NO: 1132615 - RNA, 21 nt, Human
ugaggcagauuaacuugccca

SEQ ID NO: 1132616 - RNA, 27 nt, Human
ugaggcagauuaacuugcccaagauca

SEQ ID NO: 1132617 - RNA, 19 nt, Human
ugcacucaguaccuaccug

SEQ ID NO: 1132618 - RNA, 19 nt, Human
ugcaucaggucauagcaac

SEQ ID NO: 1132619 - RNA, 23 nt, Human
ugcgaaacugaaaauaccucuga

SEQ ID NO: 1132620 - RNA, 24 nt, Human
uggagugcagcagaugcgaaacug

SEQ ID NO: 1132621 - RNA, 20 nt, Human
uggcagagccagcauuugaa

SEQ ID NO: 1132622 - RNA, 22 nt, Human
uggccuaguccagguuuccuca

SEQ ID NO: 1132623 - RNA, 23 nt, Human
ugucacagcuuagugcuugcugc

SEQ ID NO: 1132624 - RNA, 22 nt, Human
ugucacugucgcccaggcugga

SEQ ID NO: 1132625 - RNA, 24 nt, Human
ugucacugucgcccaggcuggagu

SEQ ID NO: 1132626 - RNA, 19 nt, Human
uguucagacgccuuugggc

SEQ ID NO: 1132627 - RNA, 22 nt, Human
uucaagggugagcagagagaga

SEQ ID NO: 1132628 - RNA, 23 nt, Human
uucauuuucaauaaauaucuguu

SEQ ID NO: 1132629 - RNA, 22 nt, Human
uuccucugagcccccuggggua

SEQ ID NO: 1132630 - RNA, 20 nt, Human
uuccuugcuuugcugugcau

SEQ ID NO: 1132631 - RNA, 21 nt, Human
uugcagucaagaccaagaccg

SEQ ID NO: 1132632 - RNA, 22 nt, Human
uuuuugcucuuucauugcuuca

SEQ ID NO: 1132633 - RNA, 21 nt, Human
cguucugcuuucuguguuuca

SEQ ID NO: 1132634 - RNA, 18 nt, Human
gaacagaaggcguucugc

SEQ ID NO: 1132635 - RNA, 22 nt, Human
uccacaaacccuguguugugga

SEQ ID NO: 1132636 - RNA, 19 nt, Human
uguggaagaacagaaggcg

SEQ ID NO: 1132637 - RNA, 18 nt, Human
uucugcuuucuguguuuc

SEQ ID NO: 1132638 - RNA, 19 nt, Human
aaaauauggaaaacucaaa

SEQ ID NO: 1132639 - RNA, 19 nt, Human
uauggaaaacucaaaaaua

SEQ ID NO: 1132640 - RNA, 24 nt, Human
uauggaaaacucaaaaauaucuuc

SEQ ID NO: 1132641 - RNA, 19 nt, Human
uucaaaauauggaaaacuc

SEQ ID NO: 1132642 - RNA, 23 nt, Human
uucaaaauauggaaaacucaaaa

SEQ ID NO: 1132643 - RNA, 18 nt, Human
aacuagaaggagaagcug

SEQ ID NO: 1132644 - RNA, 22 nt, Human
aagggccccaaaacaucagccc

SEQ ID NO: 1132645 - RNA, 20 nt, Human
acaucugccuucucacucaa

SEQ ID NO: 1132646 - RNA, 20 nt, Human
accacugugaucugcaaagc

SEQ ID NO: 1132647 - RNA, 19 nt, Human
accucuuggagaugucagc

SEQ ID NO: 1132648 - RNA, 22 nt, Human
acucugccauuucaggcugcag

SEQ ID NO: 1132649 - RNA, 24 nt, Human
acugugaagaguaucagccaaaaa

SEQ ID NO: 1132650 - RNA, 19 nt, Human
agcaccagacucugccauu

SEQ ID NO: 1132651 - RNA, 18 nt, Human
agccagcuggaacuggcu

SEQ ID NO: 1132652 - RNA, 18 nt, Human
agcuggaacuggcucaca

SEQ ID NO: 1132653 - RNA, 22 nt, Human
agcuggaacuggcucacagaca

SEQ ID NO: 1132654 - RNA, 22 nt, Human
agcuucaaucagcuucugcagc

SEQ ID NO: 1132655 - RNA, 22 nt, Human
aggccagguucauaaacaggug

SEQ ID NO: 1132656 - RNA, 23 nt, Human
aggccagguucauaaacaggugu

SEQ ID NO: 1132657 - RNA, 28 nt, Human
agggugucacagagagguucccaucagg

SEQ ID NO: 1132658 - RNA, 24 nt, Human
agguguugcaguugaagacuggua

SEQ ID NO: 1132659 - RNA, 24 nt, Human
auuccugcuuccaccacugugauc

SEQ ID NO: 1132660 - RNA, 22 nt, Human
caagaucaccaucaggugccgc

SEQ ID NO: 1132661 - RNA, 18 nt, Human
caccacagcuucuuguag

SEQ ID NO: 1132662 - RNA, 19 nt, Human
cagcagcugggacugcuuc

SEQ ID NO: 1132663 - RNA, 22 nt, Human
cagcagcugggacugcuucagg

SEQ ID NO: 1132664 - RNA, 20 nt, Human
cagcagguccagcuuaggcu

SEQ ID NO: 1132665 - RNA, 23 nt, Human
caggccacagggccaaucaccac

SEQ ID NO: 1132666 - RNA, 24 nt, Human
caucagguucacagggcgcccgcu

SEQ ID NO: 1132667 - RNA, 24 nt, Human
caucuucaucccaauugcugagaa

SEQ ID NO: 1132668 - RNA, 24 nt, Human
ccacaagccaaucgagcagcuugc

SEQ ID NO: 1132669 - RNA, 20 nt, Human
ccacugcucucugggcuaag

SEQ ID NO: 1132670 - RNA, 21 nt, Human
ccagagccuccugcuccucaa

SEQ ID NO: 1132671 - RNA, 19 nt, Human
ccaugauaaccaucuucuc

SEQ ID NO: 1132672 - RNA, 18 nt, Human
ccccuggcaacaccuucu

SEQ ID NO: 1132673 - RNA, 21 nt, Human
ccccuggcaacaccuucugga

SEQ ID NO: 1132674 - RNA, 20 nt, Human
ccuccugcugcuucugcacc

SEQ ID NO: 1132675 - RNA, 21 nt, Human
ccuggauggcagcacugaucu

SEQ ID NO: 1132676 - RNA, 21 nt, Human
cgaugggcaugugcugauggu

SEQ ID NO: 1132677 - RNA, 18 nt, Human
cucaagugccuccugcug

SEQ ID NO: 1132678 - RNA, 18 nt, Human
cucaaguuccaugagcuc

SEQ ID NO: 1132679 - RNA, 21 nt, Human
cucacagacaggacaucugcc

SEQ ID NO: 1132680 - RNA, 21 nt, Human
cuccagagccuccugcuccuc

SEQ ID NO: 1132681 - RNA, 19 nt, Human
cuccagcagcagguccagc

SEQ ID NO: 1132682 - RNA, 22 nt, Human
cuccuuggucuucuccagcagc

SEQ ID NO: 1132683 - RNA, 20 nt, Human
cuggagccuggauuccugcc

SEQ ID NO: 1132684 - RNA, 25 nt, Human
cuggauggcagcacugaucuucucu

SEQ ID NO: 1132685 - RNA, 30 nt, Human
cuuccaacacugacaccaugauaaccaucu

SEQ ID NO: 1132686 - RNA, 22 nt, Human
gaucgucagcaccagacucugc

SEQ ID NO: 1132687 - RNA, 24 nt, Human
gcaugugcugaugguccuccaucu

SEQ ID NO: 1132688 - RNA, 27 nt, Human
gccaaucaccacagcuucuuguagaga

SEQ ID NO: 1132689 - RNA, 18 nt, Human
gccccaaaacaucagccc

SEQ ID NO: 1132690 - RNA, 21 nt, Human
gccccuggcaacaccuucugg

SEQ ID NO: 1132691 - RNA, 18 nt, Human
gcuucaaucagcuucugc

SEQ ID NO: 1132692 - RNA, 21 nt, Human
gcuucaaucagcuucugcagc

SEQ ID NO: 1132693 - RNA, 20 nt, Human
ggagaugucagcuucaauca

SEQ ID NO: 1132694 - RNA, 19 nt, Human
ggcagcacugaucuucucu

SEQ ID NO: 1132695 - RNA, 21 nt, Human
uaacuagaaggagaagcugug

SEQ ID NO: 1132696 - RNA, 19 nt, Human
uagaaggagaagcuguggu

SEQ ID NO: 1132697 - RNA, 25 nt, Human
uagaaggagaagcugugguuuucac

SEQ ID NO: 1132698 - RNA, 21 nt, Human
ucagccaaaaauauuuuucgu

SEQ ID NO: 1132699 - RNA, 20 nt, Human
uccaacacugacaccaugau

SEQ ID NO: 1132700 - RNA, 20 nt, Human
uccacauaccuuggugaggc

SEQ ID NO: 1132701 - RNA, 22 nt, Human
uccugcuuccaccacugugauc

SEQ ID NO: 1132702 - RNA, 24 nt, Human
uccuuggucuucuccagcagcagg

SEQ ID NO: 1132703 - RNA, 18 nt, Human
ucuccagcagcaggucca

SEQ ID NO: 1132704 - RNA, 23 nt, Human
ucugcaccaucagcucuuucuuc

SEQ ID NO: 1132705 - RNA, 20 nt, Human
ucugccauuucaggcugcag

SEQ ID NO: 1132706 - RNA, 19 nt, Human
ucugccuucucacucaacu

SEQ ID NO: 1132707 - RNA, 19 nt, Human
ugacaccaugauaaccauc

SEQ ID NO: 1132708 - RNA, 21 nt, Human
ugagaagaugggcagacaaga

SEQ ID NO: 1132709 - RNA, 18 nt, Human
ugauucugggucucagug

SEQ ID NO: 1132710 - RNA, 24 nt, Human
ugccgcuuccuuccuguggcuuuc

SEQ ID NO: 1132711 - RNA, 22 nt, Human
ugcuuccaccacugugaucugc

SEQ ID NO: 1132712 - RNA, 23 nt, Human
ugggacugcuucagguuuugcug

SEQ ID NO: 1132713 - RNA, 19 nt, Human
ugggccccuggcaacaccu

SEQ ID NO: 1132714 - RNA, 23 nt, Human
ugucagagcaucugggccccugg

SEQ ID NO: 1132715 - RNA, 25 nt, Human
uucaagaagugucagagcaucuggg

SEQ ID NO: 1132716 - RNA, 24 nt, Human
uucaggcugcaguaccuucugucc

SEQ ID NO: 1132717 - RNA, 20 nt, Human
uuccaacacugacaccauga

SEQ ID NO: 1132718 - RNA, 20 nt, Human
uuccagucggccuggucuuu

SEQ ID NO: 1132719 - RNA, 20 nt, Human
uucguggaggccucugugcc

SEQ ID NO: 1132720 - RNA, 20 nt, Human
uugcugagaagaugggcaga

SEQ ID NO: 1132721 - RNA, 22 nt, Human
uugcuggaggaauucagucacu

SEQ ID NO: 1132722 - RNA, 20 nt, Human
uuucaccugacaggccacag

SEQ ID NO: 1132723 - RNA, 18 nt, Human
uuuugcuggaggaauuca

SEQ ID NO: 1132724 - RNA, 22 nt, Human
aaagacgaguuccuuagccucc

SEQ ID NO: 1132725 - RNA, 26 nt, Human
aagacgaguuccuuagccuccaaacc

SEQ ID NO: 1132726 - RNA, 18 nt, Human
aagcuguccugcccauga

SEQ ID NO: 1132727 - RNA, 20 nt, Human
acuuccccaggcccccaaua

SEQ ID NO: 1132728 - RNA, 21 nt, Human
agccccgagucuuguugcaac

SEQ ID NO: 1132729 - RNA, 24 nt, Human
aggcccccaauaaacacacaaucu

SEQ ID NO: 1132730 - RNA, 19 nt, Human
agggcucaguacuucccca

SEQ ID NO: 1132731 - RNA, 24 nt, Human
caacaugcagggugucuuccagga

SEQ ID NO: 1132732 - RNA, 19 nt, Human
caacucccgaagcuguccu

SEQ ID NO: 1132733 - RNA, 21 nt, Human
ccaggguuuuccgguuucugg

SEQ ID NO: 1132734 - RNA, 19 nt, Human
cuuaagucacccaucugac

SEQ ID NO: 1132735 - RNA, 26 nt, Human
gcacagcuuaaagacgaggggaacgc

SEQ ID NO: 1132736 - RNA, 18 nt, Human
uaagaugugaaaaggcag

SEQ ID NO: 1132737 - RNA, 21 nt, Human
uaagcacagcuuaaagacgag

SEQ ID NO: 1132738 - RNA, 22 nt, Human
uagccuccaaacucuugcuccu

SEQ ID NO: 1132739 - RNA, 23 nt, Human
uagccuccaaacucuugcuccug

SEQ ID NO: 1132740 - RNA, 21 nt, Human
ugacaugcaaggagaagagga

SEQ ID NO: 1132741 - RNA, 22 nt, Human
ugcccugucccacugguuuuca

SEQ ID NO: 1132742 - RNA, 18 nt, Human
uggucagggagccccaug

SEQ ID NO: 1132743 - RNA, 21 nt, Human
uguaagcacagcuuaaagacg

SEQ ID NO: 1132744 - RNA, 20 nt, Human
uuccccaggcccccaauaaa

SEQ ID NO: 1132745 - RNA, 22 nt, Human
uuccccaggcccccaauaaaca

SEQ ID NO: 1132746 - RNA, 21 nt, Human
uuuuccgguuucuggcucagc

SEQ ID NO: 1132747 - RNA, 25 nt, Human
aagaagccgcccuucuccgcccuuc

SEQ ID NO: 1132748 - RNA, 25 nt, Human
aagaagccgcccuucuccgcccuuu

SEQ ID NO: 1132749 - RNA, 22 nt, Human
acaaagaaagcagggagagggg

SEQ ID NO: 1132750 - RNA, 18 nt, Human
acuuccggcuggaaaagg

SEQ ID NO: 1132751 - RNA, 19 nt, Human
agggcaaggaacagaauag

SEQ ID NO: 1132752 - RNA, 22 nt, Human
cacagcucaggcacucucaucc

SEQ ID NO: 1132753 - RNA, 25 nt, Human
cagaauagccagcuccugccugccc

SEQ ID NO: 1132754 - RNA, 22 nt, Human
cagcuccugccugcccuuccca

SEQ ID NO: 1132755 - RNA, 21 nt, Human
cagguacuuccggcuggaaaa

SEQ ID NO: 1132756 - RNA, 20 nt, Human
ccagcuccugccugcccuuc

SEQ ID NO: 1132757 - RNA, 18 nt, Human
ccucauggaugagacaga

SEQ ID NO: 1132758 - RNA, 21 nt, Human
ccugccugcccuucccagagg

SEQ ID NO: 1132759 - RNA, 22 nt, Human
ccugccugcccuucccagaggg

SEQ ID NO: 1132760 - RNA, 22 nt, Human
cuccaugccuggcacuguccuc

SEQ ID NO: 1132761 - RNA, 18 nt, Human
cucucagguacuuccggc

SEQ ID NO: 1132762 - RNA, 19 nt, Human
gacaaagaaagcagggaga

SEQ ID NO: 1132763 - RNA, 19 nt, Human
gagacagacaaagaaagca

SEQ ID NO: 1132764 - RNA, 18 nt, Human
gcuggggacagggcaagg

SEQ ID NO: 1132765 - RNA, 22 nt, Human
ggagauauguguuccugagauc

SEQ ID NO: 1132766 - RNA, 22 nt, Human
ggugcuggggacagggcaagga

SEQ ID NO: 1132767 - RNA, 30 nt, Human
gucuuauccaccuucuggggucucucucaa

SEQ ID NO: 1132768 - RNA, 20 nt, Human
uauccaccuucuggggucuc

SEQ ID NO: 1132769 - RNA, 18 nt, Human
ucuccgcccuucucuugc

SEQ ID NO: 1132770 - RNA, 20 nt, Human
ucugcagucuuauccaccuu

SEQ ID NO: 1132771 - RNA, 21 nt, Human
ucugcagucuuauccaccuuc

SEQ ID NO: 1132772 - RNA, 20 nt, Human
ugagacagacaaagaaagca

SEQ ID NO: 1132773 - RNA, 18 nt, Human
ugccuggcacuguccucg

SEQ ID NO: 1132774 - RNA, 21 nt, Human
ugccuggugagaccuugggca

SEQ ID NO: 1132775 - RNA, 18 nt, Human
aacgcagagaccggcaca

SEQ ID NO: 1132776 - RNA, 22 nt, Human
aagcaggccagagugucucucg

SEQ ID NO: 1132777 - RNA, 20 nt, Human
accccagcaucaccugguau

SEQ ID NO: 1132778 - RNA, 24 nt, Human
agcaucaccccagcaucaccuggu

SEQ ID NO: 1132779 - RNA, 20 nt, Human
auggcgcgcgccccagcccc

SEQ ID NO: 1132780 - RNA, 22 nt, Human
caccccagcaucaccugguauu

SEQ ID NO: 1132781 - RNA, 21 nt, Human
caccucugucagggcugagaa

SEQ ID NO: 1132782 - RNA, 18 nt, Human
cagaaggaggcuuuucac

SEQ ID NO: 1132783 - RNA, 22 nt, Human
cagaaggaggcuuuucacgaug

SEQ ID NO: 1132784 - RNA, 22 nt, Human
cagaguagagacuaggucucaa

SEQ ID NO: 1132785 - RNA, 24 nt, Human
cagccuacucgaugccagacacug

SEQ ID NO: 1132786 - RNA, 18 nt, Human
ccacggccuccggcaccg

SEQ ID NO: 1132787 - RNA, 25 nt, Human
ccagaaaucuuuccaccucuuuugg

SEQ ID NO: 1132788 - RNA, 19 nt, Human
ccagaaauguuuaacgcag

SEQ ID NO: 1132789 - RNA, 19 nt, Human
cgccccagccccgcagguu

SEQ ID NO: 1132790 - RNA, 21 nt, Human
cggccuccggcaccggguccu

SEQ ID NO: 1132791 - RNA, 21 nt, Human
cugagccagaaaucuuuccac

SEQ ID NO: 1132792 - RNA, 21 nt, Human
gaacaaagcaggccagagugu

SEQ ID NO: 1132793 - RNA, 19 nt, Human
gcccauggcgcgcgcccca

SEQ ID NO: 1132794 - RNA, 22 nt, Human
gggacagggaagggaacaaagc

SEQ ID NO: 1132795 - RNA, 22 nt, Human
ucagugcagugcaggcggccca

SEQ ID NO: 1132796 - RNA, 20 nt, Human
uccaccucuuuuggcucagu

SEQ ID NO: 1132797 - RNA, 23 nt, Human
ugagaaaaugauggcugggguag

SEQ ID NO: 1132798 - RNA, 26 nt, Human
ugcuauuaucaucaucacuguuacuu

SEQ ID NO: 1132799 - RNA, 20 nt, Human
ugcuauuaucaucaucacuu

SEQ ID NO: 1132800 - RNA, 24 nt, Human
ugcugcgcgcccagcugguucagc

SEQ ID NO: 1132801 - RNA, 18 nt, Human
uggaaccagaaggaggcu

SEQ ID NO: 1132802 - RNA, 18 nt, Human
uggcgcgcgccccagccc

SEQ ID NO: 1132803 - RNA, 23 nt, Human
uuccaccgccgccgccgcccugc

SEQ ID NO: 1132804 - RNA, 18 nt, Human
uuuccaccucuuuuggcu

SEQ ID NO: 1132805 - RNA, 23 nt, Human
aagcagcacuacugugugggaag

SEQ ID NO: 1132806 - RNA, 25 nt, Human
acucuauugcccaggcuggaaugca

SEQ ID NO: 1132807 - RNA, 19 nt, Human
acugugugggaaguugugg

SEQ ID NO: 1132808 - RNA, 18 nt, Human
agacggcagcccaggcca

SEQ ID NO: 1132809 - RNA, 19 nt, Human
agacggcagcccaggccaa

SEQ ID NO: 1132810 - RNA, 19 nt, Human
cacucuauugcccaggcug

SEQ ID NO: 1132811 - RNA, 20 nt, Human
cagcccaggccaagcuuccc

SEQ ID NO: 1132812 - RNA, 23 nt, Human
cagcccaggccaagcuuccccgg

SEQ ID NO: 1132813 - RNA, 18 nt, Human
caggcccacagagcccca

SEQ ID NO: 1132814 - RNA, 26 nt, Human
caggcuggaaugcaaaguuagaaaug

SEQ ID NO: 1132815 - RNA, 18 nt, Human
ccacagagccccaguggg

SEQ ID NO: 1132816 - RNA, 24 nt, Human
cccgggcccccucagauucucggg

SEQ ID NO: 1132817 - RNA, 20 nt, Human
cccucaggcccacagagccc

SEQ ID NO: 1132818 - RNA, 22 nt, Human
cccucaggcccacagagcccca

SEQ ID NO: 1132819 - RNA, 19 nt, Human
ccucaggcccacagagccc

SEQ ID NO: 1132820 - RNA, 19 nt, Human
cggcagcccaggccaagcu

SEQ ID NO: 1132821 - RNA, 20 nt, Human
cucacucuauugcccaggcc

SEQ ID NO: 1132822 - RNA, 20 nt, Human
cucgggcccucccacucccc

SEQ ID NO: 1132823 - RNA, 25 nt, Human
cucgggcccucccacuccccucagg

SEQ ID NO: 1132824 - RNA, 26 nt, Human
gccaagcuuccccgggcccccucaga

SEQ ID NO: 1132825 - RNA, 18 nt, Human
ggggguauggagaugaaa

SEQ ID NO: 1132826 - RNA, 23 nt, Human
uaagacggcagcccaggccaagc

SEQ ID NO: 1132827 - RNA, 24 nt, Human
uaagacggcagcccaggccaagcu

SEQ ID NO: 1132828 - RNA, 21 nt, Human
uauugcccaggcuggaaugca

SEQ ID NO: 1132829 - RNA, 26 nt, Human
ucccagaucgagccccucaggcccac

SEQ ID NO: 1132830 - RNA, 23 nt, Human
ucucacucuauugcccaggcugg

SEQ ID NO: 1132831 - RNA, 24 nt, Human
ucucacucuauugcccaggcugga

SEQ ID NO: 1132832 - RNA, 26 nt, Human
ucucacucuauugcccaggcuggaau

SEQ ID NO: 1132833 - RNA, 21 nt, Human
ugggaaguugugggggguaug

SEQ ID NO: 1132834 - RNA, 21 nt, Human
ugugggaaguuguggggggua

SEQ ID NO: 1132835 - RNA, 21 nt, Human
uuacugacacucaugucacac

SEQ ID NO: 1132836 - RNA, 22 nt, Human
uuccccgggcccccucagauuc

SEQ ID NO: 1132837 - RNA, 19 nt, Human
uugcauagcucaagcuuag

SEQ ID NO: 1132838 - RNA, 24 nt, Human
uugcccaggcuggaaugcaaaguu

SEQ ID NO: 1132839 - RNA, 25 nt, Human
caaaagguccuccaacacgucaaug

SEQ ID NO: 1132840 - RNA, 21 nt, Human
ccuccaacacgucaaugucug

SEQ ID NO: 1132841 - RNA, 21 nt, Human
cucagaauuauggcaggaggc

SEQ ID NO: 1132842 - RNA, 21 nt, Human
aagcuuuuggacacuccagcc

SEQ ID NO: 1132843 - RNA, 22 nt, Human
aagcuuuuggacacuccagccu

SEQ ID NO: 1132844 - RNA, 22 nt, Human
aauuugcucacuucuuuuccuu

SEQ ID NO: 1132845 - RNA, 24 nt, Human
acucauuguacuuaaucuuccccc

SEQ ID NO: 1132846 - RNA, 19 nt, Human
agcugacugaaggggcuug

SEQ ID NO: 1132847 - RNA, 23 nt, Human
agcuuuuggacacuccagccucu

SEQ ID NO: 1132848 - RNA, 21 nt, Human
auugcagagccuucaucagag

SEQ ID NO: 1132849 - RNA, 19 nt, Human
auuugcacaagccucccuc

SEQ ID NO: 1132850 - RNA, 18 nt, Human
cacaggcccaguguagag

SEQ ID NO: 1132851 - RNA, 23 nt, Human
cagagccuucaucagaguugucc

SEQ ID NO: 1132852 - RNA, 24 nt, Human
cagcaccagaaucuaugagaauau

SEQ ID NO: 1132853 - RNA, 24 nt, Human
cagccucuccagggagaaaauggc

SEQ ID NO: 1132854 - RNA, 24 nt, Human
cagcuuccaggcuuggcccgggag

SEQ ID NO: 1132855 - RNA, 22 nt, Human
caguccccgccgcucgcccucg

SEQ ID NO: 1132856 - RNA, 22 nt, Human
cauauuuguucuuugaugagga

SEQ ID NO: 1132857 - RNA, 21 nt, Human
caucauccucuccagcuucca

SEQ ID NO: 1132858 - RNA, 23 nt, Human
ccacaggacagcaauuuugccac

SEQ ID NO: 1132859 - RNA, 24 nt, Human
cccgcacccgcccugacacgacua

SEQ ID NO: 1132860 - RNA, 19 nt, Human
cccgccgcucgcccucgcc

SEQ ID NO: 1132861 - RNA, 19 nt, Human
cccgcugcucgcccuuccc

SEQ ID NO: 1132862 - RNA, 20 nt, Human
ccgccgcucgcccucgcccu

SEQ ID NO: 1132863 - RNA, 20 nt, Human
ccucccgcugcucgcccuuc

SEQ ID NO: 1132864 - RNA, 25 nt, Human
cgcccugacacgacuagcaaucuca

SEQ ID NO: 1132865 - RNA, 24 nt, Human
cgcugcucgcccuuccccaguccc

SEQ ID NO: 1132866 - RNA, 22 nt, Human
cggccaagcuuuuggacacucc

SEQ ID NO: 1132867 - RNA, 22 nt, Human
cuccagggagaaaauggcugcg

SEQ ID NO: 1132868 - RNA, 22 nt, Human
cuuaaucuuccccccucuugaa

SEQ ID NO: 1132869 - RNA, 18 nt, Human
gcagagccuucaucagag

SEQ ID NO: 1132870 - RNA, 27 nt, Human
ggcacuuucuaucuaccagaaguguua

SEQ ID NO: 1132871 - RNA, 22 nt, Human
uaccacaggacagcaauuuugc

SEQ ID NO: 1132872 - RNA, 27 nt, Human
ucagguccauugucgucuucuucauca

SEQ ID NO: 1132873 - RNA, 21 nt, Human
uccaggcuuggcccgggaggc

SEQ ID NO: 1132874 - RNA, 21 nt, Human
uccagggagaaaauggcugcg

SEQ ID NO: 1132875 - RNA, 18 nt, Human
uccccaguccccgccgcu

SEQ ID NO: 1132876 - RNA, 18 nt, Human
ucccucuggcauugcaga

SEQ ID NO: 1132877 - RNA, 22 nt, Human
ucccucuggcauugcagagccu

SEQ ID NO: 1132878 - RNA, 18 nt, Human
ucuaucuaccagaagugu

SEQ ID NO: 1132879 - RNA, 21 nt, Human
ucuccauggcugcagccaccu

SEQ ID NO: 1132880 - RNA, 20 nt, Human
ucuucagucccgcacccgcc

SEQ ID NO: 1132881 - RNA, 24 nt, Human
ugacagcggcggcacagagccucu

SEQ ID NO: 1132882 - RNA, 23 nt, Human
ugagaauauuugcacaagccucc

SEQ ID NO: 1132883 - RNA, 21 nt, Human
uguccuguuuucgccaucaag

SEQ ID NO: 1132884 - RNA, 22 nt, Human
uucacuuuaaugucuguaccac

SEQ ID NO: 1132885 - RNA, 21 nt, Human
uuccuuauggccaauaaaagu

SEQ ID NO: 1132886 - RNA, 24 nt, Human
uuugcacaagccucccucuggcau

SEQ ID NO: 1132887 - RNA, 24 nt, Human
aaaaaccuaguguuuucaacccuc

SEQ ID NO: 1132888 - RNA, 18 nt, Human
aaaacccaggaaagaagc

SEQ ID NO: 1132889 - RNA, 18 nt, Human
aaacaaugcugccacuca

SEQ ID NO: 1132890 - RNA, 20 nt, Human
aaagaagccuuuugucccuu

SEQ ID NO: 1132891 - RNA, 20 nt, Human
aaaggaaccagcgcugcugu

SEQ ID NO: 1132892 - RNA, 19 nt, Human
aaaggagaaugcuggaagg

SEQ ID NO: 1132893 - RNA, 18 nt, Human
aacaccaaaacccaggaa

SEQ ID NO: 1132894 - RNA, 21 nt, Human
aacaccaaaacccaggaaaga

SEQ ID NO: 1132895 - RNA, 24 nt, Human
aaccaaaaacaaaaagauacacaa

SEQ ID NO: 1132896 - RNA, 24 nt, Human
aacccugagcgcccccaaaccacc

SEQ ID NO: 1132897 - RNA, 18 nt, Human
aagaagugggaaggucaa

SEQ ID NO: 1132898 - RNA, 24 nt, Human
aagaggagaagggccccuuccuca

SEQ ID NO: 1132899 - RNA, 21 nt, Human
aagauacacaaauaguaagcc

SEQ ID NO: 1132900 - RNA, 23 nt, Human
aagcagcacagccccagauagca

SEQ ID NO: 1132901 - RNA, 24 nt, Human
aauaguaagccccuaaauucuguu

SEQ ID NO: 1132902 - RNA, 23 nt, Human
acaacacggaggcagcagaacac

SEQ ID NO: 1132903 - RNA, 24 nt, Human
acacacagcuugccaaaaaagcac

SEQ ID NO: 1132904 - RNA, 25 nt, Human
acaccacacaaacuagccaggaaac

SEQ ID NO: 1132905 - RNA, 21 nt, Human
acaccauccauguuuccuuuu

SEQ ID NO: 1132906 - RNA, 26 nt, Human
acagaaccagcagcuucuuacacacc

SEQ ID NO: 1132907 - RNA, 18 nt, Human
acaggggacaccuccuuc

SEQ ID NO: 1132908 - RNA, 21 nt, Human
accacaccacacaaacuagcc

SEQ ID NO: 1132909 - RNA, 22 nt, Human
accaccccuaaccugccccccc

SEQ ID NO: 1132910 - RNA, 24 nt, Human
accaccccuaaccugcccccccca

SEQ ID NO: 1132911 - RNA, 27 nt, Human
accaccccuaaccugccccccccacca

SEQ ID NO: 1132912 - RNA, 22 nt, Human
accccaggcugggccgggcccc

SEQ ID NO: 1132913 - RNA, 23 nt, Human
accccuaaccugccccccccacc

SEQ ID NO: 1132914 - RNA, 18 nt, Human
acccggaccaaaagcagc

SEQ ID NO: 1132915 - RNA, 21 nt, Human
accuggcucagaugccagcag

SEQ ID NO: 1132916 - RNA, 24 nt, Human
acuggaaaaggagacaaaaaccua

SEQ ID NO: 1132917 - RNA, 18 nt, Human
agaacaccaacagaagag

SEQ ID NO: 1132918 - RNA, 20 nt, Human
agaauuauuucauauuucuu

SEQ ID NO: 1132919 - RNA, 25 nt, Human
agaggagaagggccccuuccucaga

SEQ ID NO: 1132920 - RNA, 26 nt, Human
agcaaaagugaucccaaccacaccac

SEQ ID NO: 1132921 - RNA, 26 nt, Human
agcagaacaccaacagaagaguccca

SEQ ID NO: 1132922 - RNA, 26 nt, Human
agcagcacagccccagauagcacccc

SEQ ID NO: 1132923 - RNA, 21 nt, Human
agccaacauagacacauucuc

SEQ ID NO: 1132924 - RNA, 19 nt, Human
agccuggcuuggagcagcu

SEQ ID NO: 1132925 - RNA, 22 nt, Human
agcgcugcugucacccuccaug

SEQ ID NO: 1132926 - RNA, 22 nt, Human
aggcagcagaacaccaacagaa

SEQ ID NO: 1132927 - RNA, 19 nt, Human
aggcaguguaacccugagc

SEQ ID NO: 1132928 - RNA, 25 nt, Human
agugcagccuccccccauaccaccc

SEQ ID NO: 1132929 - RNA, 22 nt, Human
auacuggucuaagccuccccuc

SEQ ID NO: 1132930 - RNA, 19 nt, Human
auggccaccuccacaaccu

SEQ ID NO: 1132931 - RNA, 25 nt, Human
caaaaaagcacccugugucuuacau

SEQ ID NO: 1132932 - RNA, 27 nt, Human
caaacccgcccccaacccggaccaaaa

SEQ ID NO: 1132933 - RNA, 18 nt, Human
caaagcccuccuacuccc

SEQ ID NO: 1132934 - RNA, 18 nt, Human
caaagggugcccagaggc

SEQ ID NO: 1132935 - RNA, 19 nt, Human
caacauagacacauucucc

SEQ ID NO: 1132936 - RNA, 19 nt, Human
caacccggaccaaaagcag

SEQ ID NO: 1132937 - RNA, 18 nt, Human
caagcagccaacauagac

SEQ ID NO: 1132938 - RNA, 24 nt, Human
caagcuagcaagaaaacacagccc

SEQ ID NO: 1132939 - RNA, 24 nt, Human
caagggcucugugguggucagagg

SEQ ID NO: 1132940 - RNA, 19 nt, Human
cacaacaccaaaacccagg

SEQ ID NO: 1132941 - RNA, 19 nt, Human
cacaacaccaaaacccagg

SEQ ID NO: 1132942 - RNA, 22 nt, Human
cacaacaccaaaacccaggaaa

SEQ ID NO: 1132943 - RNA, 22 nt, Human
cacaaccaaaaacaaaaagaua

SEQ ID NO: 1132944 - RNA, 23 nt, Human
cacaaccaaaaacaaaaagauac

SEQ ID NO: 1132945 - RNA, 25 nt, Human
cacaagcagaaguuguucacccucu

SEQ ID NO: 1132946 - RNA, 21 nt, Human
cacaagcuuagcccccggauu

SEQ ID NO: 1132947 - RNA, 24 nt, Human
cacaccacacaaacuagccaggaa

SEQ ID NO: 1132948 - RNA, 22 nt, Human
cacagcagccaccuuccugaga

SEQ ID NO: 1132949 - RNA, 22 nt, Human
cacagcccagguaagcucaucu

SEQ ID NO: 1132950 - RNA, 18 nt, Human
cacagccccagauagcac

SEQ ID NO: 1132951 - RNA, 23 nt, Human
cacagguacccuccuacugcucc

SEQ ID NO: 1132952 - RNA, 21 nt, Human
caccacugucauggccaccuc

SEQ ID NO: 1132953 - RNA, 20 nt, Human
cacccaaccaaccccccgag

SEQ ID NO: 1132954 - RNA, 19 nt, Human
caccccuaaccugcccccc

SEQ ID NO: 1132955 - RNA, 18 nt, Human
cacccuccaugcaccugc

SEQ ID NO: 1132956 - RNA, 27 nt, Human
cacccucuagagccuugaguccaggaa

SEQ ID NO: 1132957 - RNA, 18 nt, Human
cagaacagaaucugcuac

SEQ ID NO: 1132958 - RNA, 22 nt, Human
cagacaaugccagaaaaaccua

SEQ ID NO: 1132959 - RNA, 21 nt, Human
cagcagaacaccaacagaaga

SEQ ID NO: 1132960 - RNA, 24 nt, Human
cagcagaaggagggcacccuccag

SEQ ID NO: 1132961 - RNA, 24 nt, Human
cagcagcuucuuacacaccccagg

SEQ ID NO: 1132962 - RNA, 20 nt, Human
cagcagugcagccucccccc

SEQ ID NO: 1132963 - RNA, 23 nt, Human
cagcccagguaagcucaucucuu

SEQ ID NO: 1132964 - RNA, 23 nt, Human
cagccuccccccauaccaccccu

SEQ ID NO: 1132965 - RNA, 22 nt, Human
cagcuugccaaaaaagcacccu

SEQ ID NO: 1132966 - RNA, 23 nt, Human
caggaggaugccucuuugaugau

SEQ ID NO: 1132967 - RNA, 23 nt, Human
caggggaccugccacagcagcca

SEQ ID NO: 1132968 - RNA, 21 nt, Human
cagguacccuccuacugcucc

SEQ ID NO: 1132969 - RNA, 24 nt, Human
cagugcagccuccccccauaccac

SEQ ID NO: 1132970 - RNA, 20 nt, Human
cauuuagaauagaauuguuc

SEQ ID NO: 1132971 - RNA, 24 nt, Human
ccaacacacagcuugccaaaaaag

SEQ ID NO: 1132972 - RNA, 18 nt, Human
ccaaccaaccccccgacc

SEQ ID NO: 1132973 - RNA, 20 nt, Human
ccaaccaaccccccgacccc

SEQ ID NO: 1132974 - RNA, 24 nt, Human
ccaacccggaccaaaagcagcaca

SEQ ID NO: 1132975 - RNA, 19 nt, Human
ccacagcagccaccuuccu

SEQ ID NO: 1132976 - RNA, 23 nt, Human
ccaccacaagcuuagcccccgga

SEQ ID NO: 1132977 - RNA, 20 nt, Human
ccagagacaacacggaggca

SEQ ID NO: 1132978 - RNA, 19 nt, Human
cccaaagcccuccuacucc

SEQ ID NO: 1132979 - RNA, 23 nt, Human
cccaaccaaccccccgaccccac

SEQ ID NO: 1132980 - RNA, 18 nt, Human
cccacaacaccaaaaccc

SEQ ID NO: 1132981 - RNA, 18 nt, Human
cccauaccaccccuaacc

SEQ ID NO: 1132982 - RNA, 21 nt, Human
cccaucaaacccgcccccaac

SEQ ID NO: 1132983 - RNA, 21 nt, Human
ccccaaagcccuccuacuccc

SEQ ID NO: 1132984 - RNA, 22 nt, Human
ccccaaagcccuccuacucccc

SEQ ID NO: 1132985 - RNA, 23 nt, Human
ccccaccacaagcuuagcccccg

SEQ ID NO: 1132986 - RNA, 20 nt, Human
ccccagauagcaccccaaau

SEQ ID NO: 1132987 - RNA, 21 nt, Human
ccccaggcugggccgggcccc

SEQ ID NO: 1132988 - RNA, 19 nt, Human
ccccaucaaacccgccccc

SEQ ID NO: 1132989 - RNA, 20 nt, Human
ccccaucaaacccgccccca

SEQ ID NO: 1132990 - RNA, 22 nt, Human
ccccaucaaacccgcccccaac

SEQ ID NO: 1132991 - RNA, 21 nt, Human
cccccaccacaagcuuagccc

SEQ ID NO: 1132992 - RNA, 29 nt, Human
cccccauaccaccccuaaccugccccccc

SEQ ID NO: 1132993 - RNA, 21 nt, Human
cccccuuccuggccccuagac

SEQ ID NO: 1132994 - RNA, 19 nt, Human
ccccuaaccugcccccccc

SEQ ID NO: 1132995 - RNA, 19 nt, Human
ccccuaaccugcccccccc

SEQ ID NO: 1132996 - RNA, 22 nt, Human
ccccuaaccugccccccccacc

SEQ ID NO: 1132997 - RNA, 23 nt, Human
ccccuagacuugcugcugcugcc

SEQ ID NO: 1132998 - RNA, 20 nt, Human
cccgcaacacacccagagac

SEQ ID NO: 1132999 - RNA, 21 nt, Human
cccgcaacacacccagagacu

SEQ ID NO: 1133000 - RNA, 22 nt, Human
cccggaccaaaagcagcacagc

SEQ ID NO: 1133001 - RNA, 23 nt, Human
cccuccaacacacagcuugccaa

SEQ ID NO: 1133002 - RNA, 21 nt, Human
cccuccaugcaccugcccacc

SEQ ID NO: 1133003 - RNA, 21 nt, Human
cccuccuacucccccuuccug

SEQ ID NO: 1133004 - RNA, 20 nt, Human
cccucugcacuccaacacaa

SEQ ID NO: 1133005 - RNA, 18 nt, Human
cccuuuucccccacuagg

SEQ ID NO: 1133006 - RNA, 22 nt, Human
ccgcaacacacccagagacugc

SEQ ID NO: 1133007 - RNA, 21 nt, Human
ccuaaccugccccccccacca

SEQ ID NO: 1133008 - RNA, 22 nt, Human
ccuacucccccuuccuggcccc

SEQ ID NO: 1133009 - RNA, 18 nt, Human
ccucaagcuagcaagaaa

SEQ ID NO: 1133010 - RNA, 19 nt, Human
ccucaagcuagcaagaaaa

SEQ ID NO: 1133011 - RNA, 22 nt, Human
ccucagaggccaccacugucau

SEQ ID NO: 1133012 - RNA, 21 nt, Human
ccuccaaggcuccuaccacuu

SEQ ID NO: 1133013 - RNA, 25 nt, Human
ccuccaaggcuccuaccacuuggcc

SEQ ID NO: 1133014 - RNA, 26 nt, Human
ccuccaaggcuccuaccacuuggccu

SEQ ID NO: 1133015 - RNA, 23 nt, Human
ccugccacggguguugcagcacc

SEQ ID NO: 1133016 - RNA, 20 nt, Human
ccugucgcgggcagugaacu

SEQ ID NO: 1133017 - RNA, 19 nt, Human
ccugugguacagaaccagc

SEQ ID NO: 1133018 - RNA, 19 nt, Human
ccuucacacaucugagagu

SEQ ID NO: 1133019 - RNA, 18 nt, Human
ccuuccucagaggccacc

SEQ ID NO: 1133020 - RNA, 18 nt, Human
ccuugaguccaggaagag

SEQ ID NO: 1133021 - RNA, 25 nt, Human
cggaggcagcagaacaccaacagaa

SEQ ID NO: 1133022 - RNA, 18 nt, Human
cucagaugccagcagaag

SEQ ID NO: 1133023 - RNA, 19 nt, Human
cuccagagacugcaggaga

SEQ ID NO: 1133024 - RNA, 23 nt, Human
cuccaugcaccugcccacccucc

SEQ ID NO: 1133025 - RNA, 19 nt, Human
cuccccccauaccaccccu

SEQ ID NO: 1133026 - RNA, 28 nt, Human
cuccccccauaccaccccuaaccugccc

SEQ ID NO: 1133027 - RNA, 18 nt, Human
cucccccuuccuggcccc

SEQ ID NO: 1133028 - RNA, 27 nt, Human
cuggcagcagcagugcagccucccccu

SEQ ID NO: 1133029 - RNA, 20 nt, Human
cugggcagacaaugccagaa

SEQ ID NO: 1133030 - RNA, 21 nt, Human
cuucaggcuccaaccuccagc

SEQ ID NO: 1133031 - RNA, 18 nt, Human
gaacucccuccaacacac

SEQ ID NO: 1133032 - RNA, 19 nt, Human
gaagggggaggacuccucc

SEQ ID NO: 1133033 - RNA, 22 nt, Human
gagacugcaggagaagggggag

SEQ ID NO: 1133034 - RNA, 24 nt, Human
gaggccaccacugucauggccacc

SEQ ID NO: 1133035 - RNA, 25 nt, Human
gcacagccccagauagcaccccaaa

SEQ ID NO: 1133036 - RNA, 22 nt, Human
gcagugcagccuccccccauac

SEQ ID NO: 1133037 - RNA, 22 nt, Human
gccccaaagcccuccuacuccc

SEQ ID NO: 1133038 - RNA, 20 nt, Human
gcccccaacccggaccaaaa

SEQ ID NO: 1133039 - RNA, 21 nt, Human
gccccccccaccacaagcuua

SEQ ID NO: 1133040 - RNA, 25 nt, Human
gccccccccaccacaagcuuagccc

SEQ ID NO: 1133041 - RNA, 21 nt, Human
gcccuccuacucccccuuccu

SEQ ID NO: 1133042 - RNA, 22 nt, Human
gcuccaaccuccagcucaccac

SEQ ID NO: 1133043 - RNA, 24 nt, Human
gcuucuuacacaccccaggcuggg

SEQ ID NO: 1133044 - RNA, 24 nt, Human
ggaggcagcagaacaccaacagaa

SEQ ID NO: 1133045 - RNA, 18 nt, Human
ggcaggugggcugaagaa

SEQ ID NO: 1133046 - RNA, 23 nt, Human
ggccccaaagcccuccuacuccc

SEQ ID NO: 1133047 - RNA, 21 nt, Human
ggccccuagacuugcugcugc

SEQ ID NO: 1133048 - RNA, 19 nt, Human
ggccugagguuccacuuuc

SEQ ID NO: 1133049 - RNA, 25 nt, Human
gucauggccaccuccacaaccugcu

SEQ ID NO: 1133050 - RNA, 22 nt, Human
gugaucccaaccacaccacaca

SEQ ID NO: 1133051 - RNA, 24 nt, Human
gugcccgcaacacacccagagacu

SEQ ID NO: 1133052 - RNA, 18 nt, Human
guggcccaaagggugccc

SEQ ID NO: 1133053 - RNA, 20 nt, Human
uaaaagaagaaugacuaaau

SEQ ID NO: 1133054 - RNA, 23 nt, Human
uaaccugccccccccaccacaag

SEQ ID NO: 1133055 - RNA, 25 nt, Human
uaacucaacuggaaaaggagacaaa

SEQ ID NO: 1133056 - RNA, 27 nt, Human
uaagaacaccauccauguugucguaga

SEQ ID NO: 1133057 - RNA, 18 nt, Human
uaagaugacugucuaagg

SEQ ID NO: 1133058 - RNA, 18 nt, Human
uacacaaauaguaagccc

SEQ ID NO: 1133059 - RNA, 21 nt, Human
uacagaaccagcagcuucuua

SEQ ID NO: 1133060 - RNA, 21 nt, Human
uacugcacccaaccaaccccc

SEQ ID NO: 1133061 - RNA, 21 nt, Human
uagcaccccaaaucugcuccu

SEQ ID NO: 1133062 - RNA, 19 nt, Human
uagcccccggauugugccc

SEQ ID NO: 1133063 - RNA, 20 nt, Human
uagggugccugaggggcaug

SEQ ID NO: 1133064 - RNA, 20 nt, Human
uaucucacugaaaggagaau

SEQ ID NO: 1133065 - RNA, 22 nt, Human
ucauggccaccuccacaaccug

SEQ ID NO: 1133066 - RNA, 19 nt, Human
uccaacacaagcagaaguu

SEQ ID NO: 1133067 - RNA, 18 nt, Human
uccaaggcuccuaccacu

SEQ ID NO: 1133068 - RNA, 22 nt, Human
uccaggaagaggagaagggccc

SEQ ID NO: 1133069 - RNA, 23 nt, Human
uccaggaagaggagaagggcccc

SEQ ID NO: 1133070 - RNA, 22 nt, Human
uccauaacccaucccugccacg

SEQ ID NO: 1133071 - RNA, 25 nt, Human
uccaucaccauggcugccacaacca

SEQ ID NO: 1133072 - RNA, 27 nt, Human
uccaucaccauggcugccacaaccaua

SEQ ID NO: 1133073 - RNA, 20 nt, Human
uccaugcaccugcccacccu

SEQ ID NO: 1133074 - RNA, 21 nt, Human
ucccacaacaccaaaacccag

SEQ ID NO: 1133075 - RNA, 22 nt, Human
ucccacaacaccaaaacccagg

SEQ ID NO: 1133076 - RNA, 23 nt, Human
ucccacaacaccaaaacccagga

SEQ ID NO: 1133077 - RNA, 20 nt, Human
uccccaggugacaccauggg

SEQ ID NO: 1133078 - RNA, 19 nt, Human
uccccccauaccaccccua

SEQ ID NO: 1133079 - RNA, 21 nt, Human
ucccuccaacacacagcuugc

SEQ ID NO: 1133080 - RNA, 19 nt, Human
ucccuuuucccccacuagg

SEQ ID NO: 1133081 - RNA, 21 nt, Human
uccuccuugcccuggcugcac

SEQ ID NO: 1133082 - RNA, 19 nt, Human
uccuggccccuagacuugc

SEQ ID NO: 1133083 - RNA, 26 nt, Human
ucuaaauuuaaaagaagaaugacuaa

SEQ ID NO: 1133084 - RNA, 24 nt, Human
ucugcacuccaacacaagcagaag

SEQ ID NO: 1133085 - RNA, 25 nt, Human
ucuuacacaccccaggcugggccgg

SEQ ID NO: 1133086 - RNA, 20 nt, Human
ugaaaggagaaugcuggaag

SEQ ID NO: 1133087 - RNA, 21 nt, Human
ugaaaggagaaugcuggaagg

SEQ ID NO: 1133088 - RNA, 18 nt, Human
ugaacucccuccaacaca

SEQ ID NO: 1133089 - RNA, 23 nt, Human
ugaaucacagagcugugccaucu

SEQ ID NO: 1133090 - RNA, 18 nt, Human
ugacaccaugggcaggug

SEQ ID NO: 1133091 - RNA, 19 nt, Human
ugagagguucccuuucuuc

SEQ ID NO: 1133092 - RNA, 20 nt, Human
ugagcgcccccaaaccaccc

SEQ ID NO: 1133093 - RNA, 24 nt, Human
ugagcgcccccaaaccaccccugg

SEQ ID NO: 1133094 - RNA, 20 nt, Human
ugcaccugcccacccuccaa

SEQ ID NO: 1133095 - RNA, 22 nt, Human
ugccaccauuagcaccgacgcc

SEQ ID NO: 1133096 - RNA, 19 nt, Human
ugcccacccuccaaggcuc

SEQ ID NO: 1133097 - RNA, 22 nt, Human
ugcccgcaacacacccagagac

SEQ ID NO: 1133098 - RNA, 20 nt, Human
ugccugaggggcauguagca

SEQ ID NO: 1133099 - RNA, 22 nt, Human
ugcuaacaacaagcagccaaca

SEQ ID NO: 1133100 - RNA, 19 nt, Human
uggaaggugcuaguaagau

SEQ ID NO: 1133101 - RNA, 20 nt, Human
uggaaggugcuaguaagaug

SEQ ID NO: 1133102 - RNA, 24 nt, Human
uggccaccuccacaaccugcugcu

SEQ ID NO: 1133103 - RNA, 22 nt, Human
uggccuccacagguacccuccu

SEQ ID NO: 1133104 - RNA, 18 nt, Human
uggcucagaugccagcag

SEQ ID NO: 1133105 - RNA, 19 nt, Human
ugggcagacaaugccagaa

SEQ ID NO: 1133106 - RNA, 22 nt, Human
ugguacagaaccagcagcuucu

SEQ ID NO: 1133107 - RNA, 18 nt, Human
uguaacccugagcgcccc

SEQ ID NO: 1133108 - RNA, 21 nt, Human
ugucuaaggacuccagaacug

SEQ ID NO: 1133109 - RNA, 23 nt, Human
ugugcccgcaacacacccagaga

SEQ ID NO: 1133110 - RNA, 19 nt, Human
uguucagaaauuugcuaac

SEQ ID NO: 1133111 - RNA, 21 nt, Human
uuagcaccgacgccaaaggaa

SEQ ID NO: 1133112 - RNA, 24 nt, Human
uuaucacaaccaaaaacaaaaaga

SEQ ID NO: 1133113 - RNA, 18 nt, Human
uuccuggccauagaagcc

SEQ ID NO: 1133114 - RNA, 22 nt, Human
uuccuggccauagaagcccucc

SEQ ID NO: 1133115 - RNA, 20 nt, Human
uugccaaaaaagcacccugu

SEQ ID NO: 1133116 - RNA, 20 nt, Human
uugcugcugcugccaccauu

SEQ ID NO: 1133117 - RNA, 19 nt, Human
uuguucacccucuagagcc

SEQ ID NO: 1133118 - RNA, 22 nt, Human
uuuuguggcaaugcaugucacu

SEQ ID NO: 1133119 - RNA, 25 nt, Human
uuuuucagaauuauuucauauuucu

SEQ ID NO: 1133120 - RNA, 20 nt, Human
agccaguuuuauggcuucga

SEQ ID NO: 1133121 - RNA, 23 nt, Human
aggggcuggugcugucuacuugg

SEQ ID NO: 1133122 - RNA, 23 nt, Human
cccacacaugugucccgaggagu

SEQ ID NO: 1133123 - RNA, 19 nt, Human
cccucuaccuccgcuccuc

SEQ ID NO: 1133124 - RNA, 18 nt, Human
ggccaugguccuugaggg

SEQ ID NO: 1133125 - RNA, 28 nt, Human
ggccaugguccuugaggggcuggugcug

SEQ ID NO: 1133126 - RNA, 23 nt, Human
ggggaaguucacagagccauuua

SEQ ID NO: 1133127 - RNA, 18 nt, Human
uaccuccgcuccucccug

SEQ ID NO: 1133128 - RNA, 23 nt, Human
uacuuggcccacacauguguccc

SEQ ID NO: 1133129 - RNA, 19 nt, Human
ucagccaguuuuauggcuu

SEQ ID NO: 1133130 - RNA, 18 nt, Human
ucuaccuccgcuccuccc

SEQ ID NO: 1133131 - RNA, 19 nt, Human
ucuccuugggcaaaacggu

SEQ ID NO: 1133132 - RNA, 22 nt, Human
ucuuggccucugcaccucuccu

SEQ ID NO: 1133133 - RNA, 20 nt, Human
ugagccccacaaccgaccag

SEQ ID NO: 1133134 - RNA, 18 nt, Human
ugaggggcuggugcuguc

SEQ ID NO: 1133135 - RNA, 19 nt, Human
uggccucugcaccucuccu

SEQ ID NO: 1133136 - RNA, 18 nt, Human
ugggcaaaacggucuugg

SEQ ID NO: 1133137 - RNA, 19 nt, Human
uggugcugucuacuuggcc

SEQ ID NO: 1133138 - RNA, 21 nt, Human
uuuucugcaaccauugcucac

SEQ ID NO: 1133139 - RNA, 22 nt, Human
aaacagacacaggauauuuuca

SEQ ID NO: 1133140 - RNA, 21 nt, Human
aaagaaaggugaagccaugca

SEQ ID NO: 1133141 - RNA, 24 nt, Human
aacuaauccaaucaccugacacca

SEQ ID NO: 1133142 - RNA, 20 nt, Human
aacugcagcaaccuuggcac

SEQ ID NO: 1133143 - RNA, 19 nt, Human
aagacaggacaccuuugca

SEQ ID NO: 1133144 - RNA, 23 nt, Human
aagugaugggaauuauggaaagc

SEQ ID NO: 1133145 - RNA, 22 nt, Human
aaucaccugacaccaccacaga

SEQ ID NO: 1133146 - RNA, 24 nt, Human
acuggagaacaggagagccacaaa

SEQ ID NO: 1133147 - RNA, 19 nt, Human
agagagcacaacggaauuc

SEQ ID NO: 1133148 - RNA, 22 nt, Human
agagcccagcccccagaggccu

SEQ ID NO: 1133149 - RNA, 18 nt, Human
agagcucccugaaccccc

SEQ ID NO: 1133150 - RNA, 23 nt, Human
agcucccucagucacucccguca

SEQ ID NO: 1133151 - RNA, 22 nt, Human
aggagggagugggaagacagga

SEQ ID NO: 1133152 - RNA, 18 nt, Human
aggagggaguggggaggg

SEQ ID NO: 1133153 - RNA, 20 nt, Human
aggagggaguggggagggag

SEQ ID NO: 1133154 - RNA, 18 nt, Human
aggccccacagcuguuag

SEQ ID NO: 1133155 - RNA, 25 nt, Human
agggaguggggagggaguggggagg

SEQ ID NO: 1133156 - RNA, 23 nt, Human
auagaaacaauuucuuuuuuuau

SEQ ID NO: 1133157 - RNA, 24 nt, Human
augcagccugcugagcugggauug

SEQ ID NO: 1133158 - RNA, 22 nt, Human
caaccccuggggccccacuccc

SEQ ID NO: 1133159 - RNA, 24 nt, Human
caacugccaccaccacugccaggc

SEQ ID NO: 1133160 - RNA, 23 nt, Human
cacaccucagugguggauaccac

SEQ ID NO: 1133161 - RNA, 19 nt, Human
cacagggaacuugcccgga

SEQ ID NO: 1133162 - RNA, 18 nt, Human
caccacagaggacuccca

SEQ ID NO: 1133163 - RNA, 19 nt, Human
caccacugccaggccaagg

SEQ ID NO: 1133164 - RNA, 21 nt, Human
cagaaagagacuguguuccug

SEQ ID NO: 1133165 - RNA, 18 nt, Human
cagaaccauucccccucu

SEQ ID NO: 1133166 - RNA, 23 nt, Human
cagcugcuguugcagugccagga

SEQ ID NO: 1133167 - RNA, 21 nt, Human
cauucccccucucucuaugaa

SEQ ID NO: 1133168 - RNA, 22 nt, Human
cauuuugcuguugccuagcacc

SEQ ID NO: 1133169 - RNA, 20 nt, Human
ccacauggaauuccacaggc

SEQ ID NO: 1133170 - RNA, 19 nt, Human
ccaccaccacugccaggcc

SEQ ID NO: 1133171 - RNA, 26 nt, Human
ccagugauggcaccuguucauucccu

SEQ ID NO: 1133172 - RNA, 21 nt, Human
cccacauggaauuccacaggc

SEQ ID NO: 1133173 - RNA, 26 nt, Human
ccccacagcuguuagcuuucacugcu

SEQ ID NO: 1133174 - RNA, 22 nt, Human
ccccagaggccugcagucugcc

SEQ ID NO: 1133175 - RNA, 23 nt, Human
ccccggggccuccagucuaacac

SEQ ID NO: 1133176 - RNA, 26 nt, Human
ccccggggccuccagucuaacacagg

SEQ ID NO: 1133177 - RNA, 18 nt, Human
ccccuggggccccacucc

SEQ ID NO: 1133178 - RNA, 21 nt, Human
cccugaaccccccggggccuc

SEQ ID NO: 1133179 - RNA, 20 nt, Human
ccuagcccucagaggccugc

SEQ ID NO: 1133180 - RNA, 22 nt, Human
ccucagaggccugcauucugcc

SEQ ID NO: 1133181 - RNA, 18 nt, Human
cgcuaagggggaccugcc

SEQ ID NO: 1133182 - RNA, 24 nt, Human
cucccugaaccccccggggccucc

SEQ ID NO: 1133183 - RNA, 22 nt, Human
cugagcagggcuaccccugccu

SEQ ID NO: 1133184 - RNA, 23 nt, Human
cugcagccugguaccagcugcug

SEQ ID NO: 1133185 - RNA, 24 nt, Human
cugcaggguagaggagcaagcaca

SEQ ID NO: 1133186 - RNA, 22 nt, Human
cugcccuggggcuccugcuuuc

SEQ ID NO: 1133187 - RNA, 21 nt, Human
cuggugccugugcuccucauu

SEQ ID NO: 1133188 - RNA, 22 nt, Human
cuguggccuggcacccuucuga

SEQ ID NO: 1133189 - RNA, 21 nt, Human
gaaaauccauuauagaaacaa

SEQ ID NO: 1133190 - RNA, 22 nt, Human
gaccugccuucccuaggcucac

SEQ ID NO: 1133191 - RNA, 18 nt, Human
gagugggaagacaggaca

SEQ ID NO: 1133192 - RNA, 18 nt, Human
gauacagaaagagacugu

SEQ ID NO: 1133193 - RNA, 19 nt, Human
gcagaaccauucccccucu

SEQ ID NO: 1133194 - RNA, 22 nt, Human
gccaaguacuuuugcacacccc

SEQ ID NO: 1133195 - RNA, 23 nt, Human
gccaugcagccugcugagcuggg

SEQ ID NO: 1133196 - RNA, 21 nt, Human
gcccagcccccagaggccugc

SEQ ID NO: 1133197 - RNA, 23 nt, Human
gcccaggauguggagcuggugga

SEQ ID NO: 1133198 - RNA, 22 nt, Human
gcugagugagcaaccccugggg

SEQ ID NO: 1133199 - RNA, 19 nt, Human
ggaaccugaggauuagggg

SEQ ID NO: 1133200 - RNA, 19 nt, Human
ggagcucccucagucacuc

SEQ ID NO: 1133201 - RNA, 21 nt, Human
ggagggaguggggagggagug

SEQ ID NO: 1133202 - RNA, 23 nt, Human
ggcacugcuucggcccacaugga

SEQ ID NO: 1133203 - RNA, 18 nt, Human
ggccuccagucuaacaca

SEQ ID NO: 1133204 - RNA, 19 nt, Human
ggccuggcacccuucugag

SEQ ID NO: 1133205 - RNA, 19 nt, Human
gggaguggggagggagugg

SEQ ID NO: 1133206 - RNA, 20 nt, Human
gggaguggggagggaguggg

SEQ ID NO: 1133207 - RNA, 20 nt, Human
gggccuccagucuaacacag

SEQ ID NO: 1133208 - RNA, 19 nt, Human
ggggagggaguggggaggc

SEQ ID NO: 1133209 - RNA, 24 nt, Human
guaaggcagaaccauucccccucu

SEQ ID NO: 1133210 - RNA, 22 nt, Human
guggagcugguggagcccccuc

SEQ ID NO: 1133211 - RNA, 21 nt, Human
uacagaaagagacuguguucc

SEQ ID NO: 1133212 - RNA, 23 nt, Human
uagaggagcaagcacauugagca

SEQ ID NO: 1133213 - RNA, 20 nt, Human
uauugagcugagggaagaga

SEQ ID NO: 1133214 - RNA, 20 nt, Human
ucccucuggggucugagguu

SEQ ID NO: 1133215 - RNA, 24 nt, Human
ucccugaaccccccggggccucca

SEQ ID NO: 1133216 - RNA, 20 nt, Human
uccuagcgaugggagagcuc

SEQ ID NO: 1133217 - RNA, 21 nt, Human
uccugcugcuguugcugcaac

SEQ ID NO: 1133218 - RNA, 23 nt, Human
ucuaaacuagauuucacuuaaac

SEQ ID NO: 1133219 - RNA, 21 nt, Human
ucucuaugaagcagcaguguu

SEQ ID NO: 1133220 - RNA, 22 nt, Human
ucugccugagcauuuuggcugu

SEQ ID NO: 1133221 - RNA, 23 nt, Human
ugaaacgcugcagccugguacca

SEQ ID NO: 1133222 - RNA, 24 nt, Human
ugaaagccuagcccucagaggccu

SEQ ID NO: 1133223 - RNA, 22 nt, Human
ugaaauaaacauauauugcaga

SEQ ID NO: 1133224 - RNA, 20 nt, Human
ugaagccaugcagccugcug

SEQ ID NO: 1133225 - RNA, 18 nt, Human
ugaauagaucaucuaaaa

SEQ ID NO: 1133226 - RNA, 19 nt, Human
ugacauggggaagggcuga

SEQ ID NO: 1133227 - RNA, 22 nt, Human
ugagagcccagcccccagaggc

SEQ ID NO: 1133228 - RNA, 20 nt, Human
ugagggaagagauuccaugc

SEQ ID NO: 1133229 - RNA, 19 nt, Human
ugagugagcaaccccuggg

SEQ ID NO: 1133230 - RNA, 19 nt, Human
ugcagaaacagacacagga

SEQ ID NO: 1133231 - RNA, 21 nt, Human
ugcauucugcccuggggcucc

SEQ ID NO: 1133232 - RNA, 20 nt, Human
ugccaccaccacugccaggc

SEQ ID NO: 1133233 - RNA, 20 nt, Human
ugcccuggggauccugcugc

SEQ ID NO: 1133234 - RNA, 22 nt, Human
ugccuagcacccuuuugaaagc

SEQ ID NO: 1133235 - RNA, 23 nt, Human
ugccugaacugagagucaucagc

SEQ ID NO: 1133236 - RNA, 19 nt, Human
ugccugagcauuuuggcug

SEQ ID NO: 1133237 - RNA, 21 nt, Human
ugccugugcuccucauugaag

SEQ ID NO: 1133238 - RNA, 24 nt, Human
ugcugcugcugcaggguagaggag

SEQ ID NO: 1133239 - RNA, 19 nt, Human
ugcuguugcagugccagga

SEQ ID NO: 1133240 - RNA, 19 nt, Human
ugcuguugccuagcacccu

SEQ ID NO: 1133241 - RNA, 18 nt, Human
ugcuguugcugcaacugc

SEQ ID NO: 1133242 - RNA, 19 nt, Human
uggaaagcaaagaaaggug

SEQ ID NO: 1133243 - RNA, 20 nt, Human
uggagaacaggagagccaca

SEQ ID NO: 1133244 - RNA, 25 nt, Human
uggagcugguggagcccccucucca

SEQ ID NO: 1133245 - RNA, 18 nt, Human
uggcacccuucugagagc

SEQ ID NO: 1133246 - RNA, 21 nt, Human
uggggaagggcugagugagca

SEQ ID NO: 1133247 - RNA, 18 nt, Human
uggggagggaguggggag

SEQ ID NO: 1133248 - RNA, 18 nt, Human
uggggagggaguggggag

SEQ ID NO: 1133249 - RNA, 18 nt, Human
uuccagugaagaaucacg

SEQ ID NO: 1133250 - RNA, 18 nt, Human
uucccuaggcucacagua

SEQ ID NO: 1133251 - RNA, 24 nt, Human
uuucaugaugugaauaucaucacu

SEQ ID NO: 1133252 - RNA, 21 nt, Human
aaaaggaaagcucuccacaaa

SEQ ID NO: 1133253 - RNA, 25 nt, Human
aaacaaccagaucucgcuaagaacu

SEQ ID NO: 1133254 - RNA, 28 nt, Human
aaacaaugaggcaggaaaaaaaaggggg

SEQ ID NO: 1133255 - RNA, 26 nt, Human
aaacaucucuuuaaaccauacuuaac

SEQ ID NO: 1133256 - RNA, 18 nt, Human
aaaggcuugagaaccagg

SEQ ID NO: 1133257 - RNA, 23 nt, Human
aacacacucaagacacuucagaa

SEQ ID NO: 1133258 - RNA, 18 nt, Human
aagaaguuuaauuggcuc

SEQ ID NO: 1133259 - RNA, 23 nt, Human
aagaggaaggaggcacguccaca

SEQ ID NO: 1133260 - RNA, 22 nt, Human
acaaggugaagaggaaggaggc

SEQ ID NO: 1133261 - RNA, 23 nt, Human
acuuggcacccauaaacaucucu

SEQ ID NO: 1133262 - RNA, 22 nt, Human
agaggcuguccaggaacccuuc

SEQ ID NO: 1133263 - RNA, 20 nt, Human
agaucucgcuaagaacucac

SEQ ID NO: 1133264 - RNA, 19 nt, Human
agcucaaacaaugaggcag

SEQ ID NO: 1133265 - RNA, 21 nt, Human
aggaacccuucucuauuugcc

SEQ ID NO: 1133266 - RNA, 18 nt, Human
aggcaaaaggaaagcucu

SEQ ID NO: 1133267 - RNA, 21 nt, Human
aggcaggaaaaaaaagggggg

SEQ ID NO: 1133268 - RNA, 24 nt, Human
aucacaugaccagaaaaaauuagg

SEQ ID NO: 1133269 - RNA, 21 nt, Human
augaccagaaaaaauuaggca

SEQ ID NO: 1133270 - RNA, 24 nt, Human
auguccacccaccuuggggauggc

SEQ ID NO: 1133271 - RNA, 19 nt, Human
caaaaggaaagcucuccac

SEQ ID NO: 1133272 - RNA, 23 nt, Human
caauacuaggggauuaaaauuca

SEQ ID NO: 1133273 - RNA, 22 nt, Human
cacacacgagcugaagaggcac

SEQ ID NO: 1133274 - RNA, 21 nt, Human
caccuccuccaauacuagggg

SEQ ID NO: 1133275 - RNA, 22 nt, Human
cacgacaacagcaaggagcaag

SEQ ID NO: 1133276 - RNA, 19 nt, Human
caguguccaugucuauucc

SEQ ID NO: 1133277 - RNA, 18 nt, Human
caucugaggacagaagau

SEQ ID NO: 1133278 - RNA, 24 nt, Human
caucugcaaagucccuaauuccaa

SEQ ID NO: 1133279 - RNA, 22 nt, Human
ccaucugaggacagaagaugag

SEQ ID NO: 1133280 - RNA, 20 nt, Human
ccccaugauccaaucaccuc

SEQ ID NO: 1133281 - RNA, 20 nt, Human
ccccugcauaaggagcaaac

SEQ ID NO: 1133282 - RNA, 22 nt, Human
ccuaggcuugugccugucaccu

SEQ ID NO: 1133283 - RNA, 19 nt, Human
cgacaacagcaaggagcaa

SEQ ID NO: 1133284 - RNA, 22 nt, Human
cgacaacagcaaggagcaaguc

SEQ ID NO: 1133285 - RNA, 19 nt, Human
cgcuaagaacucacuauca

SEQ ID NO: 1133286 - RNA, 26 nt, Human
cuaggcaagucagaggcuguccagga

SEQ ID NO: 1133287 - RNA, 19 nt, Human
cuaucacgacaacagcaag

SEQ ID NO: 1133288 - RNA, 21 nt, Human
cucgcuaagaacucacuauca

SEQ ID NO: 1133289 - RNA, 18 nt, Human
cuuuuaaacaaccagauc

SEQ ID NO: 1133290 - RNA, 22 nt, Human
gaacucacuaucacgacaacag

SEQ ID NO: 1133291 - RNA, 19 nt, Human
gaaucuuucacagugggca

SEQ ID NO: 1133292 - RNA, 21 nt, Human
gagggguccuucaugcagguu

SEQ ID NO: 1133293 - RNA, 18 nt, Human
gcaagccacgugugcaca

SEQ ID NO: 1133294 - RNA, 19 nt, Human
gcaggaaaaaaaagggggg

SEQ ID NO: 1133295 - RNA, 19 nt, Human
ggaaggaggcacguccaca

SEQ ID NO: 1133296 - RNA, 18 nt, Human
ggacagaagaugagaugu

SEQ ID NO: 1133297 - RNA, 19 nt, Human
ggagacccaggaaggccug

SEQ ID NO: 1133298 - RNA, 22 nt, Human
gggaauucuuccuuccucugcc

SEQ ID NO: 1133299 - RNA, 23 nt, Human
gggaauucuuccuuccucugccu

SEQ ID NO: 1133300 - RNA, 19 nt, Human
gggcacaaggugaagagga

SEQ ID NO: 1133301 - RNA, 20 nt, Human
uaacuugauuacaucugcaa

SEQ ID NO: 1133302 - RNA, 21 nt, Human
uacaaccuugucuuaacuuga

SEQ ID NO: 1133303 - RNA, 22 nt, Human
uacacacugaaaggcgaggagg

SEQ ID NO: 1133304 - RNA, 19 nt, Human
uaucacgacaacagcaagg

SEQ ID NO: 1133305 - RNA, 18 nt, Human
ucacagugggcauguuca

SEQ ID NO: 1133306 - RNA, 18 nt, Human
uccacaaaaagagggguc

SEQ ID NO: 1133307 - RNA, 21 nt, Human
uccacccaccuuggggauggc

SEQ ID NO: 1133308 - RNA, 22 nt, Human
uccuuguggcuccaccccaugu

SEQ ID NO: 1133309 - RNA, 24 nt, Human
ugaauccaaaggcuugagaaccag

SEQ ID NO: 1133310 - RNA, 21 nt, Human
ugaccagaaaaaauuaggcac

SEQ ID NO: 1133311 - RNA, 20 nt, Human
ugagaugucacagcucaaac

SEQ ID NO: 1133312 - RNA, 18 nt, Human
ugaggacagaagaugaga

SEQ ID NO: 1133313 - RNA, 23 nt, Human
ugaggacagaagaugagauguca

SEQ ID NO: 1133314 - RNA, 24 nt, Human
ugcacauguguugagaaauggaau

SEQ ID NO: 1133315 - RNA, 19 nt, Human
ugcaccuccuccaauacua

SEQ ID NO: 1133316 - RNA, 18 nt, Human
uggaaucuuucacagugg

SEQ ID NO: 1133317 - RNA, 24 nt, Human
ugugccugucaccuuucucuuuca

SEQ ID NO: 1133318 - RNA, 27 nt, Human
uuaaacaaccagaucucgcuaagaacc

SEQ ID NO: 1133319 - RNA, 19 nt, Human
uucaugcagguuuuacacc

SEQ ID NO: 1133320 - RNA, 21 nt, Human
uuccaaauaggagcauauuca

SEQ ID NO: 1133321 - RNA, 22 nt, Human
uuuaaacagauauuuggcaccc

SEQ ID NO: 1133322 - RNA, 21 nt, Human
uuuaaaccauacuuaacugcc

SEQ ID NO: 1133323 - RNA, 20 nt, Human
uuuacugagucccccaguuc

SEQ ID NO: 1133324 - RNA, 22 nt, Human
agacaggaugggaggaaugggu

SEQ ID NO: 1133325 - RNA, 18 nt, Human
aggaaucagggaugacuu

SEQ ID NO: 1133326 - RNA, 23 nt, Human
cuucccagcucccggggcgaaca

SEQ ID NO: 1133327 - RNA, 18 nt, Human
ggaacauacaucccagcc

SEQ ID NO: 1133328 - RNA, 21 nt, Human
ggguuugggagguuaacaaaa

SEQ ID NO: 1133329 - RNA, 21 nt, Human
gguuuagguuuaucuuccaca

SEQ ID NO: 1133330 - RNA, 22 nt, Human
guuuucaacaagaucaccccgg

SEQ ID NO: 1133331 - RNA, 24 nt, Human
uccacagcgugggcaauucuuuuu

SEQ ID NO: 1133332 - RNA, 21 nt, Human
uggaaucaagguguaaggaac

SEQ ID NO: 1133333 - RNA, 25 nt, Human
ugggagaggguuaagaagaaggagg

SEQ ID NO: 1133334 - RNA, 27 nt, Human
ugggagaggguuaagaagaaggaggaa

SEQ ID NO: 1133335 - RNA, 20 nt, Human
uguaaggaacauacauccca

SEQ ID NO: 1133336 - RNA, 22 nt, Human
uguauggaaucaagguguaagg

SEQ ID NO: 1133337 - RNA, 21 nt, Human
uuaacaaaaauggaugggaga

SEQ ID NO: 1133338 - RNA, 23 nt, Human
uuuuuguuuucaacaagaucacc

SEQ ID NO: 1133339 - RNA, 19 nt, Human
aaaagcccagaguugaagu

SEQ ID NO: 1133340 - RNA, 23 nt, Human
aaacagaugcucgaugcagcaac

SEQ ID NO: 1133341 - RNA, 20 nt, Human
aaaccccaggccccauggca

SEQ ID NO: 1133342 - RNA, 21 nt, Human
aaagcccagaguugaaguguu

SEQ ID NO: 1133343 - RNA, 23 nt, Human
aaauaagagagcaguucagcgag

SEQ ID NO: 1133344 - RNA, 18 nt, Human
aacaugggaaaccccauc

SEQ ID NO: 1133345 - RNA, 20 nt, Human
aagaagaaaauguuaaaggg

SEQ ID NO: 1133346 - RNA, 19 nt, Human
aaggcaggaggaucaccug

SEQ ID NO: 1133347 - RNA, 22 nt, Human
aaucacuugaacccagaggcga

SEQ ID NO: 1133348 - RNA, 21 nt, Human
aaugaacccccacccgugccc

SEQ ID NO: 1133349 - RNA, 25 nt, Human
acagacaguaacacuuuguaggaac

SEQ ID NO: 1133350 - RNA, 24 nt, Human
acaggccaggugcaguggcucaug

SEQ ID NO: 1133351 - RNA, 23 nt, Human
accacaaaccccaggccccaugg

SEQ ID NO: 1133352 - RNA, 22 nt, Human
accacugcacuccagccugggc

SEQ ID NO: 1133353 - RNA, 18 nt, Human
acuagaauacaaaaucua

SEQ ID NO: 1133354 - RNA, 24 nt, Human
acuccagccugggcgacagaguga

SEQ ID NO: 1133355 - RNA, 24 nt, Human
acugcacuccagccugggcgacag

SEQ ID NO: 1133356 - RNA, 26 nt, Human
acugcacuccagccugggcgacagag

SEQ ID NO: 1133357 - RNA, 24 nt, Human
acuuugguggaaccauuuuucuca

SEQ ID NO: 1133358 - RNA, 26 nt, Human
agacaguaacacuuuguaggaacuca

SEQ ID NO: 1133359 - RNA, 22 nt, Human
agaggcgaagguugcagugagc

SEQ ID NO: 1133360 - RNA, 19 nt, Human
agagugagacgaccuaaaa

SEQ ID NO: 1133361 - RNA, 24 nt, Human
agcaagaugccuggaggaccaaaa

SEQ ID NO: 1133362 - RNA, 23 nt, Human
agcccagaguugaaguguugagu

SEQ ID NO: 1133363 - RNA, 23 nt, Human
agccgggcgugguggcauaugcu

SEQ ID NO: 1133364 - RNA, 23 nt, Human
agccuggccaacaugggaaaccc

SEQ ID NO: 1133365 - RNA, 22 nt, Human
agccugggcgacagagugagac

SEQ ID NO: 1133366 - RNA, 24 nt, Human
aggaucaccugaggucauaaguuc

SEQ ID NO: 1133367 - RNA, 18 nt, Human
aggcaggagaaucacuug

SEQ ID NO: 1133368 - RNA, 23 nt, Human
aggcaggagaaucacuugaaccc

SEQ ID NO: 1133369 - RNA, 24 nt, Human
aggcaggagaaucacuugaaccca

SEQ ID NO: 1133370 - RNA, 18 nt, Human
aggcaggaggaucaccug

SEQ ID NO: 1133371 - RNA, 18 nt, Human
aggcaggaggaucaccug

SEQ ID NO: 1133372 - RNA, 19 nt, Human
aggccccauggcauccagc

SEQ ID NO: 1133373 - RNA, 21 nt, Human
aggcgaagguugcagugagcc

SEQ ID NO: 1133374 - RNA, 24 nt, Human
aggcgaagguugcagugagccgag

SEQ ID NO: 1133375 - RNA, 24 nt, Human
aggcugaggcaggagaaucacuug

SEQ ID NO: 1133376 - RNA, 24 nt, Human
aggugcaguggcucaugccuauaa

SEQ ID NO: 1133377 - RNA, 24 nt, Human
aguggcucaugccuauaaucccag

SEQ ID NO: 1133378 - RNA, 22 nt, Human
aguuccuauuuaccugauuaac

SEQ ID NO: 1133379 - RNA, 19 nt, Human
augccuauaaucccagcac

SEQ ID NO: 1133380 - RNA, 24 nt, Human
auggcaccacugcacuccagccug

SEQ ID NO: 1133381 - RNA, 21 nt, Human
auggcauccagccccugcaua

SEQ ID NO: 1133382 - RNA, 24 nt, Human
caaaccccaggccccauggcaucc

SEQ ID NO: 1133383 - RNA, 27 nt, Human
caaaccccaggccccauggcauccagg

SEQ ID NO: 1133384 - RNA, 19 nt, Human
caacaugggaaaccccauc

SEQ ID NO: 1133385 - RNA, 19 nt, Human
caagaagaaaauguuaaag

SEQ ID NO: 1133386 - RNA, 24 nt, Human
caaggcaggaggaucaccugaggu

SEQ ID NO: 1133387 - RNA, 25 nt, Human
caaggcaggaggaucaccugagguc

SEQ ID NO: 1133388 - RNA, 26 nt, Human
caaggcaggaggaucaccugagguca

SEQ ID NO: 1133389 - RNA, 26 nt, Human
caccacugcacuccagccugggcgac

SEQ ID NO: 1133390 - RNA, 22 nt, Human
cacuccagccugggcgacagag

SEQ ID NO: 1133391 - RNA, 22 nt, Human
cacuccagccugggcgacagag

SEQ ID NO: 1133392 - RNA, 24 nt, Human
cacuccagccugggcgacagagug

SEQ ID NO: 1133393 - RNA, 19 nt, Human
cacugcacuccagccuggg

SEQ ID NO: 1133394 - RNA, 21 nt, Human
cacugcacuccagccugggcg

SEQ ID NO: 1133395 - RNA, 22 nt, Human
cacugcacuccagccugggcga

SEQ ID NO: 1133396 - RNA, 23 nt, Human
cacugcacuccagccugggcgac

SEQ ID NO: 1133397 - RNA, 24 nt, Human
cacugcacuccagccugggcgaca

SEQ ID NO: 1133398 - RNA, 24 nt, Human
cagaauaaauagaacaguagaaug

SEQ ID NO: 1133399 - RNA, 22 nt, Human
cagcaagaugccuggaggacca

SEQ ID NO: 1133400 - RNA, 24 nt, Human
cagcacuuugggaggccaaggcag

SEQ ID NO: 1133401 - RNA, 25 nt, Human
cagcacuuugggaggccaaggcagg

SEQ ID NO: 1133402 - RNA, 26 nt, Human
cagcagagauuaagaugagggccaua

SEQ ID NO: 1133403 - RNA, 23 nt, Human
cagcgaggugccugggccacggg

SEQ ID NO: 1133404 - RNA, 24 nt, Human
cagcuacuuggaaggcugaggcag

SEQ ID NO: 1133405 - RNA, 24 nt, Human
caggaacaguucccacaaaacuag

SEQ ID NO: 1133406 - RNA, 24 nt, Human
caugccuauaaucccagcacuuug

SEQ ID NO: 1133407 - RNA, 18 nt, Human
ccaaaagcccagaguuga

SEQ ID NO: 1133408 - RNA, 20 nt, Human
ccacugcacuccagccuggg

SEQ ID NO: 1133409 - RNA, 21 nt, Human
ccacugcacuccagccugggc

SEQ ID NO: 1133410 - RNA, 21 nt, Human
ccacugcacuccagccugggc

SEQ ID NO: 1133411 - RNA, 23 nt, Human
ccacugcacuccagccugggcga

SEQ ID NO: 1133412 - RNA, 24 nt, Human
ccacugcacuccagccugggcgac

SEQ ID NO: 1133413 - RNA, 21 nt, Human
ccaggaacaguucccacaaaa

SEQ ID NO: 1133414 - RNA, 22 nt, Human
ccauacuaucccuuuugcugug

SEQ ID NO: 1133415 - RNA, 21 nt, Human
ccauggcauccagccccugcc

SEQ ID NO: 1133416 - RNA, 19 nt, Human
cccacagcaccacugcagu

SEQ ID NO: 1133417 - RNA, 25 nt, Human
ccccaggccccauggcauccagccc

SEQ ID NO: 1133418 - RNA, 22 nt, Human
cccuaguauuccaggaacaguu

SEQ ID NO: 1133419 - RNA, 23 nt, Human
ccuggccaacaugggaaacccca

SEQ ID NO: 1133420 - RNA, 20 nt, Human
ccugggccacgggagggcuc

SEQ ID NO: 1133421 - RNA, 20 nt, Human
ccugggccacgggagggcuc

SEQ ID NO: 1133422 - RNA, 21 nt, Human
cgagaccagccuggccaacau

SEQ ID NO: 1133423 - RNA, 19 nt, Human
cgguuaaaaauaagagagc

SEQ ID NO: 1133424 - RNA, 24 nt, Human
cucaugccuauaaucccagcacuu

SEQ ID NO: 1133425 - RNA, 21 nt, Human
cuccaguguacaaggucccac

SEQ ID NO: 1133426 - RNA, 23 nt, Human
cuccaguguacaaggucccacaa

SEQ ID NO: 1133427 - RNA, 25 nt, Human
cuggaaaacacaacccuaguauucc

SEQ ID NO: 1133428 - RNA, 21 nt, Human
cugggccacgggagggcucuu

SEQ ID NO: 1133429 - RNA, 20 nt, Human
gaacaauuuuaaauuguugg

SEQ ID NO: 1133430 - RNA, 21 nt, Human
gaacaguucccacaaaacuag

SEQ ID NO: 1133431 - RNA, 18 nt, Human
gaagguugcagugagccg

SEQ ID NO: 1133432 - RNA, 22 nt, Human
gaagguugcagugagccgagau

SEQ ID NO: 1133433 - RNA, 24 nt, Human
gaagguugcagugagccgagaugg

SEQ ID NO: 1133434 - RNA, 22 nt, Human
gagaccagccuggccaacaugg

SEQ ID NO: 1133435 - RNA, 23 nt, Human
gagauggcaccacugcacuccag

SEQ ID NO: 1133436 - RNA, 24 nt, Human
gaucaccugaggucauaaguucga

SEQ ID NO: 1133437 - RNA, 23 nt, Human
gcacuccagccugggcgacagag

SEQ ID NO: 1133438 - RNA, 22 nt, Human
gcaggagaaucacuugaaccca

SEQ ID NO: 1133439 - RNA, 21 nt, Human
gccaacaugggaaaccccauc

SEQ ID NO: 1133440 - RNA, 23 nt, Human
gccacgggagggcucuuugucac

SEQ ID NO: 1133441 - RNA, 18 nt, Human
gcccaaggaugaaagcaa

SEQ ID NO: 1133442 - RNA, 21 nt, Human
gccugggccacgggagggcuc

SEQ ID NO: 1133443 - RNA, 23 nt, Human
ggaucaccugaggucauaaguuc

SEQ ID NO: 1133444 - RNA, 21 nt, Human
gggaaaccccaucccuacuaa

SEQ ID NO: 1133445 - RNA, 23 nt, Human
gugcagauauaaugaacccccac

SEQ ID NO: 1133446 - RNA, 23 nt, Human
guggaaccauuuuucucagcuuu

SEQ ID NO: 1133447 - RNA, 24 nt, Human
guuaaaggggagaacaauuuuaaa

SEQ ID NO: 1133448 - RNA, 18 nt, Human
guugcagugagccgagau

SEQ ID NO: 1133449 - RNA, 26 nt, Human
uaaacagaugcucgaugcagcaacau

SEQ ID NO: 1133450 - RNA, 23 nt, Human
uaacauuuuaugcuagccccaca

SEQ ID NO: 1133451 - RNA, 21 nt, Human
uaagaugagggccauacuauc

SEQ ID NO: 1133452 - RNA, 22 nt, Human
uacaaaguaugaauugccucca

SEQ ID NO: 1133453 - RNA, 22 nt, Human
uacaaggucccacaacauguug

SEQ ID NO: 1133454 - RNA, 26 nt, Human
uacuuucuuuuuacucuuauauguca

SEQ ID NO: 1133455 - RNA, 22 nt, Human
uagccgggcgugguggcauaug

SEQ ID NO: 1133456 - RNA, 21 nt, Human
uauaugucaauucugaaauau

SEQ ID NO: 1133457 - RNA, 18 nt, Human
uaugucaauucugaaaua

SEQ ID NO: 1133458 - RNA, 18 nt, Human
uaugucaauucugaaaua

SEQ ID NO: 1133459 - RNA, 24 nt, Human
ucacuugaacccagaggcgaaggu

SEQ ID NO: 1133460 - RNA, 19 nt, Human
ucagcagagauuaagauga

SEQ ID NO: 1133461 - RNA, 23 nt, Human
ucagcagagauuaagaugagggc

SEQ ID NO: 1133462 - RNA, 24 nt, Human
ucagcagagauuaagaugagggcc

SEQ ID NO: 1133463 - RNA, 22 nt, Human
ucaugccuauaaucccagcacu

SEQ ID NO: 1133464 - RNA, 23 nt, Human
uccagccugggcgacagagugag

SEQ ID NO: 1133465 - RNA, 24 nt, Human
uccagccugggcgacagagugaga

SEQ ID NO: 1133466 - RNA, 18 nt, Human
uccaguguacaagguccc

SEQ ID NO: 1133467 - RNA, 23 nt, Human
uccauuuaccaucauaacugguc

SEQ ID NO: 1133468 - RNA, 23 nt, Human
ucccacaacauguuggaucucug

SEQ ID NO: 1133469 - RNA, 21 nt, Human
ucgaugcagcaacauucauuu

SEQ ID NO: 1133470 - RNA, 20 nt, Human
ucgcucagaaaugcgggcaa

SEQ ID NO: 1133471 - RNA, 19 nt, Human
ucucuggaaaacacaaccc

SEQ ID NO: 1133472 - RNA, 18 nt, Human
ugaacccagaggcgaagg

SEQ ID NO: 1133473 - RNA, 20 nt, Human
ugaggcaggagaaucacuug

SEQ ID NO: 1133474 - RNA, 24 nt, Human
ugaggcaggagaaucacuugaacc

SEQ ID NO: 1133475 - RNA, 25 nt, Human
ugaggcaggagaaucacuugaaccc

SEQ ID NO: 1133476 - RNA, 23 nt, Human
ugccuauaaucccagcacuuugg

SEQ ID NO: 1133477 - RNA, 24 nt, Human
ugccuauaaucccagcacuuuggg

SEQ ID NO: 1133478 - RNA, 21 nt, Human
ugccuggaggaccaaaagccc

SEQ ID NO: 1133479 - RNA, 19 nt, Human
ugccugggccacgggaggg

SEQ ID NO: 1133480 - RNA, 20 nt, Human
ugcuugcgggucaagauaaa

SEQ ID NO: 1133481 - RNA, 23 nt, Human
ugcuuguacucccagcuacuugg

SEQ ID NO: 1133482 - RNA, 20 nt, Human
uggaaggcugaggcaggaga

SEQ ID NO: 1133483 - RNA, 24 nt, Human
uggaaggcugaggcaggagaauca

SEQ ID NO: 1133484 - RNA, 22 nt, Human
uggaggaccaaaagcccagagu

SEQ ID NO: 1133485 - RNA, 23 nt, Human
uggaucucuggaaaacacaaccc

SEQ ID NO: 1133486 - RNA, 20 nt, Human
uggcaccacugcacuccagc

SEQ ID NO: 1133487 - RNA, 21 nt, Human
uggcucaugccuauaauccca

SEQ ID NO: 1133488 - RNA, 24 nt, Human
uggcucaugccuauaaucccagca

SEQ ID NO: 1133489 - RNA, 23 nt, Human
ugggaaaccccaucccuacuaaa

SEQ ID NO: 1133490 - RNA, 19 nt, Human
ugggaggagaaagacagaa

SEQ ID NO: 1133491 - RNA, 24 nt, Human
ugggaggccaaggcaggaggauca

SEQ ID NO: 1133492 - RNA, 25 nt, Human
uuaccacaaaccccaggccccaugg

SEQ ID NO: 1133493 - RNA, 18 nt, Human
uuagccgggcgugguggc

SEQ ID NO: 1133494 - RNA, 20 nt, Human
uuagccgggcgugguggcau

SEQ ID NO: 1133495 - RNA, 24 nt, Human
uuagccgggcgugguggcauaugc

SEQ ID NO: 1133496 - RNA, 18 nt, Human
uugcagugagccgagaug

SEQ ID NO: 1133497 - RNA, 22 nt, Human
uugcagugagccgagauggcac

SEQ ID NO: 1133498 - RNA, 25 nt, Human
uuggaaggcugaggcaggagaauca

SEQ ID NO: 1133499 - RNA, 19 nt, Human
uugguggaaccauuuuucu

SEQ ID NO: 1133500 - RNA, 23 nt, Human
uuuaccacaaaccccaggcccca

SEQ ID NO: 1133501 - RNA, 21 nt, Human
uuuggguuacuuucuuuuuac

SEQ ID NO: 1133502 - RNA, 22 nt, Human
aacaaucaccacaaacuccggc

SEQ ID NO: 1133503 - RNA, 24 nt, Human
aaugugcagguggcaucccugagg

SEQ ID NO: 1133504 - RNA, 21 nt, Human
accacaaacuccggcgaccgc

SEQ ID NO: 1133505 - RNA, 20 nt, Human
acuaaaauagaagguaucug

SEQ ID NO: 1133506 - RNA, 23 nt, Human
acuacaccuacuagaaaaaaaga

SEQ ID NO: 1133507 - RNA, 22 nt, Human
agaauccccccaaaccaggacc

SEQ ID NO: 1133508 - RNA, 27 nt, Human
agaauccccccaaaccaggaccaguau

SEQ ID NO: 1133509 - RNA, 20 nt, Human
agccggggggguggcggcga

SEQ ID NO: 1133510 - RNA, 20 nt, Human
aggaggagauggcagccggg

SEQ ID NO: 1133511 - RNA, 18 nt, Human
aggaggaggaggaagagg

SEQ ID NO: 1133512 - RNA, 19 nt, Human
aggaggaggaggaagagga

SEQ ID NO: 1133513 - RNA, 21 nt, Human
aggaggaggcggcggcccagg

SEQ ID NO: 1133514 - RNA, 22 nt, Human
aggaggaggcggcggcccagga

SEQ ID NO: 1133515 - RNA, 21 nt, Human
aggaggcggcggcccaggagg

SEQ ID NO: 1133516 - RNA, 21 nt, Human
aggaggcggcggcggcggcgg

SEQ ID NO: 1133517 - RNA, 19 nt, Human
aucgugguaaaggcuaggc

SEQ ID NO: 1133518 - RNA, 27 nt, Human
augaggaggcggcggcggcggcggcaa

SEQ ID NO: 1133519 - RNA, 23 nt, Human
augcaauuucuuuauuaaaaagc

SEQ ID NO: 1133520 - RNA, 19 nt, Human
caacauggguaguaauuga

SEQ ID NO: 1133521 - RNA, 20 nt, Human
caccuaagcccggaaagccc

SEQ ID NO: 1133522 - RNA, 21 nt, Human
cagaauccccccaaaccagga

SEQ ID NO: 1133523 - RNA, 21 nt, Human
cagcccaggaggaggcggcag

SEQ ID NO: 1133524 - RNA, 19 nt, Human
ccacggcggccucaccuaa

SEQ ID NO: 1133525 - RNA, 19 nt, Human
ccaggaggaggagauggca

SEQ ID NO: 1133526 - RNA, 18 nt, Human
ccccacggcccccucccc

SEQ ID NO: 1133527 - RNA, 21 nt, Human
cccccacggcccccuccccuc

SEQ ID NO: 1133528 - RNA, 24 nt, Human
ccccggcguccccgcugcugccca

SEQ ID NO: 1133529 - RNA, 18 nt, Human
cccggaaagcccuggccc

SEQ ID NO: 1133530 - RNA, 19 nt, Human
cccggaaagcccuggcccc

SEQ ID NO: 1133531 - RNA, 19 nt, Human
cccuggccccggcccccgg

SEQ ID NO: 1133532 - RNA, 23 nt, Human
ccgccggaagauggggcccacgg

SEQ ID NO: 1133533 - RNA, 21 nt, Human
ccgccuauggugcacgaggau

SEQ ID NO: 1133534 - RNA, 22 nt, Human
ccggcgaccgccggaagauggg

SEQ ID NO: 1133535 - RNA, 24 nt, Human
ccucaccuaagcccggaaagcccc

SEQ ID NO: 1133536 - RNA, 18 nt, Human
ccucccagcuggccuccc

SEQ ID NO: 1133537 - RNA, 19 nt, Human
ccugugccgccuauggugc

SEQ ID NO: 1133538 - RNA, 19 nt, Human
cgcugcugcccagccgggg

SEQ ID NO: 1133539 - RNA, 24 nt, Human
cggcccaggaggaggagauggcag

SEQ ID NO: 1133540 - RNA, 25 nt, Human
cggcggcagcaacaaucaccacaaa

SEQ ID NO: 1133541 - RNA, 22 nt, Human
cguccccgcugcugcccagccg

SEQ ID NO: 1133542 - RNA, 27 nt, Human
cuaagcccggaaagcccuggccccggc

SEQ ID NO: 1133543 - RNA, 22 nt, Human
cugcugcccagccggggcugga

SEQ ID NO: 1133544 - RNA, 24 nt, Human
cuuuacauugucaucuuuuuugau

SEQ ID NO: 1133545 - RNA, 25 nt, Human
cuuuauuagcaacuaaaauagaagg

SEQ ID NO: 1133546 - RNA, 24 nt, Human
gaagaggaggaggcggcggcccag

SEQ ID NO: 1133547 - RNA, 21 nt, Human
gagauggcagccgggggggug

SEQ ID NO: 1133548 - RNA, 26 nt, Human
gaggaggagauggcagccgggggggu

SEQ ID NO: 1133549 - RNA, 19 nt, Human
gcccggacagaguaugaga

SEQ ID NO: 1133550 - RNA, 21 nt, Human
gcccuggccccggcccccggc

SEQ ID NO: 1133551 - RNA, 18 nt, Human
gcggcagcggggagggga

SEQ ID NO: 1133552 - RNA, 21 nt, Human
gcggcagcggggaggggauca

SEQ ID NO: 1133553 - RNA, 18 nt, Human
gcggcggcccaggaggag

SEQ ID NO: 1133554 - RNA, 20 nt, Human
gcggcggcggcggcaggagc

SEQ ID NO: 1133555 - RNA, 23 nt, Human
gcggcggcggcggcggcaggagc

SEQ ID NO: 1133556 - RNA, 19 nt, Human
ggaaagcccuggccccggc

SEQ ID NO: 1133557 - RNA, 23 nt, Human
ggaaagcccuggccccggccccc

SEQ ID NO: 1133558 - RNA, 18 nt, Human
ggaagauggggcccacgg

SEQ ID NO: 1133559 - RNA, 19 nt, Human
ggagauggcagccgggggg

SEQ ID NO: 1133560 - RNA, 23 nt, Human
ggaggagauggcagccggggggg

SEQ ID NO: 1133561 - RNA, 18 nt, Human
ggaggaggaagaggagga

SEQ ID NO: 1133562 - RNA, 18 nt, Human
ggaggaggaggaagagga

SEQ ID NO: 1133563 - RNA, 18 nt, Human
ggaggcggcggcggcggc

SEQ ID NO: 1133564 - RNA, 20 nt, Human
gggggguggcggcggcagca

SEQ ID NO: 1133565 - RNA, 18 nt, Human
ucgugguaaaggcuaggc

SEQ ID NO: 1133566 - RNA, 27 nt, Human
ugcccagccggggcugggagguccucc

SEQ ID NO: 1133567 - RNA, 28 nt, Human
ugcccagccggggcugguuucgaggccg

SEQ ID NO: 1133568 - RNA, 19 nt, Human
uggcagccggggggguggc

SEQ ID NO: 1133569 - RNA, 23 nt, Human
ugggagcccggacagaguaugag

SEQ ID NO: 1133570 - RNA, 18 nt, Human
uguuguacaacaugggua

SEQ ID NO: 1133571 - RNA, 20 nt, Human
uucagccgagccgcccccac

SEQ ID NO: 1133572 - RNA, 23 nt, Human
aaacaaccucaaaagcagauuga

SEQ ID NO: 1133573 - RNA, 21 nt, Human
aaacugaagauaagcacaggg

SEQ ID NO: 1133574 - RNA, 23 nt, Human
aagaaagaauauauuuuaaaaaa

SEQ ID NO: 1133575 - RNA, 22 nt, Human
aagcaaaagagaauuuaacugg

SEQ ID NO: 1133576 - RNA, 19 nt, Human
aagcacaggguucuucaca

SEQ ID NO: 1133577 - RNA, 21 nt, Human
aggcaguccacaaucuccuca

SEQ ID NO: 1133578 - RNA, 24 nt, Human
aucaagaaagcaaaagagaauuua

SEQ ID NO: 1133579 - RNA, 18 nt, Human
auccaucuucugaggucu

SEQ ID NO: 1133580 - RNA, 25 nt, Human
caaacagauccaucuucugaggucu

SEQ ID NO: 1133581 - RNA, 21 nt, Human
ccgcgcuguucccacgacugc

SEQ ID NO: 1133582 - RNA, 22 nt, Human
cuuuuugcugcaucugcuuaau

SEQ ID NO: 1133583 - RNA, 23 nt, Human
gccaacgccgcagcgccggcgcg

SEQ ID NO: 1133584 - RNA, 18 nt, Human
ggcaguccacaaucuccu

SEQ ID NO: 1133585 - RNA, 24 nt, Human
ggucuuuaaaaggauuuaccuuuu

SEQ ID NO: 1133586 - RNA, 22 nt, Human
uaaacugaagauaagcacaggg

SEQ ID NO: 1133587 - RNA, 23 nt, Human
uaauucuccagccuucucuucug

SEQ ID NO: 1133588 - RNA, 23 nt, Human
uagauccuuugcaauaggaaucu

SEQ ID NO: 1133589 - RNA, 23 nt, Human
ucaaaagcagauugaaacaaaca

SEQ ID NO: 1133590 - RNA, 24 nt, Human
uccacaaucuccucacugguguuc

SEQ ID NO: 1133591 - RNA, 21 nt, Human
ucccacgacugcgccaacgcc

SEQ ID NO: 1133592 - RNA, 24 nt, Human
ugaugauaaacugaagauaagcac

SEQ ID NO: 1133593 - RNA, 19 nt, Human
ugucugaugauaaacugaa

SEQ ID NO: 1133594 - RNA, 23 nt, Human
uuugacagguuuuggucucuuuu

SEQ ID NO: 1133595 - RNA, 19 nt, Human
aagagucagcaagcuauga

SEQ ID NO: 1133596 - RNA, 24 nt, Human
caacucucagaaaccauucaccaa

SEQ ID NO: 1133597 - RNA, 18 nt, Human
cacgccugccuacucaca

SEQ ID NO: 1133598 - RNA, 23 nt, Human
cccacaggccaaaucugacccac

SEQ ID NO: 1133599 - RNA, 24 nt, Human
cccauuauggggagagaugaaagu

SEQ ID NO: 1133600 - RNA, 20 nt, Human
cuccccaguuguuacucaac

SEQ ID NO: 1133601 - RNA, 24 nt, Human
cugacccacuccuugguccccugg

SEQ ID NO: 1133602 - RNA, 19 nt, Human
cugguccauggacucuacu

SEQ ID NO: 1133603 - RNA, 21 nt, Human
gcucaguggagcuuggggaag

SEQ ID NO: 1133604 - RNA, 20 nt, Human
uaaaacaagagucagcaagc

SEQ ID NO: 1133605 - RNA, 18 nt, Human
ucaguggagcuuggggaa

SEQ ID NO: 1133606 - RNA, 21 nt, Human
uggaacacgguuacaucuauc

SEQ ID NO: 1133607 - RNA, 22 nt, Human
ugguccauggacucuacucccc

SEQ ID NO: 1133608 - RNA, 24 nt, Human
uugccgcugcguugcagguaugca

SEQ ID NO: 1133609 - RNA, 18 nt, Human
aagcggcccuccagcacc

SEQ ID NO: 1133610 - RNA, 23 nt, Human
aagcuucaucagcugaaccucac

SEQ ID NO: 1133611 - RNA, 21 nt, Human
agaccaggacguacagcacca

SEQ ID NO: 1133612 - RNA, 18 nt, Human
aggcuccagauguccagc

SEQ ID NO: 1133613 - RNA, 19 nt, Human
auagauuuucuccaaauug

SEQ ID NO: 1133614 - RNA, 21 nt, Human
cagauguccagcugggggccu

SEQ ID NO: 1133615 - RNA, 18 nt, Human
cagcaggagguucucggu

SEQ ID NO: 1133616 - RNA, 25 nt, Human
caggagguucucggucuugaggucc

SEQ ID NO: 1133617 - RNA, 24 nt, Human
caggcuccagauguccagcugggg

SEQ ID NO: 1133618 - RNA, 22 nt, Human
ccaaauccaaaaucugccagcu

SEQ ID NO: 1133619 - RNA, 21 nt, Human
cccacaccacguggacagagg

SEQ ID NO: 1133620 - RNA, 20 nt, Human
cgcagaccaggacguacagc

SEQ ID NO: 1133621 - RNA, 20 nt, Human
cgcccaggcuccagaugucc

SEQ ID NO: 1133622 - RNA, 23 nt, Human
cgcccaggcuccagauguccagc

SEQ ID NO: 1133623 - RNA, 23 nt, Human
cuccacggccgacaggauuugcc

SEQ ID NO: 1133624 - RNA, 19 nt, Human
cuccagcacccgcugucuc

SEQ ID NO: 1133625 - RNA, 21 nt, Human
cucccacaccacguggacaga

SEQ ID NO: 1133626 - RNA, 19 nt, Human
cugccagcuugauguccau

SEQ ID NO: 1133627 - RNA, 22 nt, Human
cuuccggggcggcauacggggg

SEQ ID NO: 1133628 - RNA, 18 nt, Human
gccauccagcaggagguu

SEQ ID NO: 1133629 - RNA, 19 nt, Human
gcucccacaccacguggac

SEQ ID NO: 1133630 - RNA, 29 nt, Human
gcucccacaccacguggacagaggcuggg

SEQ ID NO: 1133631 - RNA, 20 nt, Human
uacuccacggccgacaggau

SEQ ID NO: 1133632 - RNA, 18 nt, Human
uaggcccaucgaagggga

SEQ ID NO: 1133633 - RNA, 27 nt, Human
uccacggccgacaggauuugccagaac

SEQ ID NO: 1133634 - RNA, 19 nt, Human
ugacuuguagaaauuccca

SEQ ID NO: 1133635 - RNA, 22 nt, Human
ugaggucccgguggacgaugug

SEQ ID NO: 1133636 - RNA, 18 nt, Human
uggacagaggcucuccug

SEQ ID NO: 1133637 - RNA, 19 nt, Human
uguccagcugggggccuuc

SEQ ID NO: 1133638 - RNA, 24 nt, Human
uucauacuccuuccccucaaagac

SEQ ID NO: 1133639 - RNA, 25 nt, Human
uucauacuccuuccccucaaagacu

SEQ ID NO: 1133640 - RNA, 19 nt, Human
uuccccucaaagacuuccg

SEQ ID NO: 1133641 - RNA, 18 nt, Human
uucucggucuugaggucc

SEQ ID NO: 1133642 - RNA, 24 nt, Human
aaccucugccucccggguucacuc

SEQ ID NO: 1133643 - RNA, 25 nt, Human
aaccucugccucccggguucacucc

SEQ ID NO: 1133644 - RNA, 19 nt, Human
aagagaaggcccggcagug

SEQ ID NO: 1133645 - RNA, 23 nt, Human
acaggcgcccgccaccacgcccg

SEQ ID NO: 1133646 - RNA, 23 nt, Human
accucuucucucuccuggagcag

SEQ ID NO: 1133647 - RNA, 22 nt, Human
acuuacuuucuugauuuucuau

SEQ ID NO: 1133648 - RNA, 18 nt, Human
agccucccgaguagcuag

SEQ ID NO: 1133649 - RNA, 24 nt, Human
aggcaggcgcugggcagcagguug

SEQ ID NO: 1133650 - RNA, 24 nt, Human
aggcuggagugcagugggcaaucu

SEQ ID NO: 1133651 - RNA, 21 nt, Human
agggccucucgagccuuugug

SEQ ID NO: 1133652 - RNA, 24 nt, Human
augggguuucaccguaugagccag

SEQ ID NO: 1133653 - RNA, 19 nt, Human
auucuuuucuuacucauca

SEQ ID NO: 1133654 - RNA, 23 nt, Human
cacaggcgcccgccaccacgccc

SEQ ID NO: 1133655 - RNA, 22 nt, Human
cacagucuggccaugcucaccu

SEQ ID NO: 1133656 - RNA, 18 nt, Human
caccguaugagccaggau

SEQ ID NO: 1133657 - RNA, 24 nt, Human
caccguaugagccaggauggucuc

SEQ ID NO: 1133658 - RNA, 22 nt, Human
cacgcagugccugacacacagc

SEQ ID NO: 1133659 - RNA, 20 nt, Human
cacgcuccuuccugccaccc

SEQ ID NO: 1133660 - RNA, 21 nt, Human
cacuccauucuccugccucag

SEQ ID NO: 1133661 - RNA, 22 nt, Human
cacuccauucuccugccucagc

SEQ ID NO: 1133662 - RNA, 21 nt, Human
cacugcaaccucugccucccg

SEQ ID NO: 1133663 - RNA, 23 nt, Human
cacugcaaccucugccucccggg

SEQ ID NO: 1133664 - RNA, 25 nt, Human
cagagaccuuccacccacaggccuc

SEQ ID NO: 1133665 - RNA, 22 nt, Human
cagccccaagucccugccuccc

SEQ ID NO: 1133666 - RNA, 20 nt, Human
caggacgccucauccuguuu

SEQ ID NO: 1133667 - RNA, 21 nt, Human
caggcgcccgccaccacgccc

SEQ ID NO: 1133668 - RNA, 19 nt, Human
ccacacugcucugugcaca

SEQ ID NO: 1133669 - RNA, 20 nt, Human
ccacugggucugucuuccca

SEQ ID NO: 1133670 - RNA, 21 nt, Human
ccacugggucugucuucccaa

SEQ ID NO: 1133671 - RNA, 24 nt, Human
cccaaucguggccucugcucuucu

SEQ ID NO: 1133672 - RNA, 19 nt, Human
ccccacugggucugucuuc

SEQ ID NO: 1133673 - RNA, 21 nt, Human
ccccacugggucugucuuccc

SEQ ID NO: 1133674 - RNA, 23 nt, Human
cccccaugguccgggcuuggcuu

SEQ ID NO: 1133675 - RNA, 18 nt, Human
ccccucugcugagagccu

SEQ ID NO: 1133676 - RNA, 23 nt, Human
ccccucugcugagagccucugcu

SEQ ID NO: 1133677 - RNA, 23 nt, Human
cccuccauggccacuuuccugcc

SEQ ID NO: 1133678 - RNA, 23 nt, Human
cccugagacggggguccuccucu

SEQ ID NO: 1133679 - RNA, 18 nt, Human
cccugccucccuuucccu

SEQ ID NO: 1133680 - RNA, 20 nt, Human
ccucccuuucccugucaucc

SEQ ID NO: 1133681 - RNA, 19 nt, Human
ccuccucucucccccaugg

SEQ ID NO: 1133682 - RNA, 20 nt, Human
ccuccugccccaugcccccc

SEQ ID NO: 1133683 - RNA, 28 nt, Human
ccuccugccccaugccccccgccggggc

SEQ ID NO: 1133684 - RNA, 23 nt, Human
ccucugccucccggguucacucc

SEQ ID NO: 1133685 - RNA, 19 nt, Human
ccugaccucgugauccuug

SEQ ID NO: 1133686 - RNA, 21 nt, Human
ccugaccucgugauccuuggc

SEQ ID NO: 1133687 - RNA, 23 nt, Human
ccugccucagccucccgaguagc

SEQ ID NO: 1133688 - RNA, 24 nt, Human
ccugccucagccucccgaguagcu

SEQ ID NO: 1133689 - RNA, 20 nt, Human
ccuuuguggacaucuggagg

SEQ ID NO: 1133690 - RNA, 24 nt, Human
cgcucuguugcccaggcuggagug

SEQ ID NO: 1133691 - RNA, 24 nt, Human
cggagucucgcucuguugcccagg

SEQ ID NO: 1133692 - RNA, 22 nt, Human
cucacgcuccuuccugccaccc

SEQ ID NO: 1133693 - RNA, 21 nt, Human
cuccauggccacuuuccugcc

SEQ ID NO: 1133694 - RNA, 24 nt, Human
cucccgaguagcuaggaccacagg

SEQ ID NO: 1133695 - RNA, 18 nt, Human
cuccugaccucgugaucc

SEQ ID NO: 1133696 - RNA, 22 nt, Human
cuccugccucagccucccgagu

SEQ ID NO: 1133697 - RNA, 22 nt, Human
cuccuuccugccacccgcuucc

SEQ ID NO: 1133698 - RNA, 24 nt, Human
cucgcucuguugcccaggcuggag

SEQ ID NO: 1133699 - RNA, 21 nt, Human
cugagauggagggagacccau

SEQ ID NO: 1133700 - RNA, 19 nt, Human
cugcaaccucugccucccg

SEQ ID NO: 1133701 - RNA, 23 nt, Human
cugcaaccucugccucccggguu

SEQ ID NO: 1133702 - RNA, 24 nt, Human
cugcaaccucugccucccggguuc

SEQ ID NO: 1133703 - RNA, 21 nt, Human
cuuccccucugcugagagccu

SEQ ID NO: 1133704 - RNA, 18 nt, Human
cuuggcuucucugggcug

SEQ ID NO: 1133705 - RNA, 22 nt, Human
gaagaaaccugcuuuauaagag

SEQ ID NO: 1133706 - RNA, 21 nt, Human
gaccucgugauccuuggccuc

SEQ ID NO: 1133707 - RNA, 27 nt, Human
gaccugucccuucccacagugaacuuc

SEQ ID NO: 1133708 - RNA, 21 nt, Human
gagacggagucucgcucuguu

SEQ ID NO: 1133709 - RNA, 25 nt, Human
gaguagcuaggaccacaggcgcccg

SEQ ID NO: 1133710 - RNA, 24 nt, Human
gcaaaucccacggagaggcccgga

SEQ ID NO: 1133711 - RNA, 19 nt, Human
gcccaggcuggagugcagu

SEQ ID NO: 1133712 - RNA, 23 nt, Human
gcccggcuaauuuuuuguauuuu

SEQ ID NO: 1133713 - RNA, 25 nt, Human
gcucuguugcccaggcuggagugca

SEQ ID NO: 1133714 - RNA, 23 nt, Human
gcuggagugcagugggcaaucug

SEQ ID NO: 1133715 - RNA, 19 nt, Human
ggaccacaggcgcccgcca

SEQ ID NO: 1133716 - RNA, 22 nt, Human
ggaccacaggcgcccgccacca

SEQ ID NO: 1133717 - RNA, 19 nt, Human
ggagaugggguuucaccgu

SEQ ID NO: 1133718 - RNA, 23 nt, Human
ggagucucgcucuguugcccagg

SEQ ID NO: 1133719 - RNA, 24 nt, Human
ggauggucucgaucuccugaccuc

SEQ ID NO: 1133720 - RNA, 22 nt, Human
gggguuucaccguaugagccag

SEQ ID NO: 1133721 - RNA, 21 nt, Human
gguccgggcuuggcuucucug

SEQ ID NO: 1133722 - RNA, 22 nt, Human
guugcaccgucucaccucucuc

SEQ ID NO: 1133723 - RNA, 19 nt, Human
uaaaaagugaauaagaaaa

SEQ ID NO: 1133724 - RNA, 20 nt, Human
uaagaaaacgucagcuauga

SEQ ID NO: 1133725 - RNA, 22 nt, Human
uaagagaaggcccggcagugga

SEQ ID NO: 1133726 - RNA, 24 nt, Human
uaauuuuuuguauuuuuaguggag

SEQ ID NO: 1133727 - RNA, 23 nt, Human
uagauaaggcuggaaaaggcagg

SEQ ID NO: 1133728 - RNA, 19 nt, Human
uagaugcagcugagaugga

SEQ ID NO: 1133729 - RNA, 21 nt, Human
uaggaccacaggcgcccgcca

SEQ ID NO: 1133730 - RNA, 24 nt, Human
uaggaccacaggcgcccgccacca

SEQ ID NO: 1133731 - RNA, 21 nt, Human
uaguggagaugggguuucacc

SEQ ID NO: 1133732 - RNA, 25 nt, Human
uaguggagaugggguuucaccguau

SEQ ID NO: 1133733 - RNA, 24 nt, Human
ucaccguaugagccaggauggucu

SEQ ID NO: 1133734 - RNA, 25 nt, Human
ucacuccauucuccugccucagccu

SEQ ID NO: 1133735 - RNA, 19 nt, Human
ucacugcaaccucugccuc

SEQ ID NO: 1133736 - RNA, 23 nt, Human
ucacugcaaccucugccucccgg

SEQ ID NO: 1133737 - RNA, 24 nt, Human
ucacugcaaccucugccucccggg

SEQ ID NO: 1133738 - RNA, 25 nt, Human
ucacugcaaccucugccucccgggu

SEQ ID NO: 1133739 - RNA, 24 nt, Human
uccaacagccccaagucccugccu

SEQ ID NO: 1133740 - RNA, 19 nt, Human
ucccacggagaggcccgga

SEQ ID NO: 1133741 - RNA, 19 nt, Human
ucccgaguagcuaggacca

SEQ ID NO: 1133742 - RNA, 21 nt, Human
ucccggguucacuccauucuc

SEQ ID NO: 1133743 - RNA, 24 nt, Human
ucccggguucacuccauucuccug

SEQ ID NO: 1133744 - RNA, 18 nt, Human
ucccugccucccuuuccc

SEQ ID NO: 1133745 - RNA, 20 nt, Human
uccgcaacuggaaccaacgg

SEQ ID NO: 1133746 - RNA, 18 nt, Human
uccuccucucucccccau

SEQ ID NO: 1133747 - RNA, 21 nt, Human
uccuuggccucccaaagugcu

SEQ ID NO: 1133748 - RNA, 24 nt, Human
ucgcucuguugcccaggcuggagu

SEQ ID NO: 1133749 - RNA, 24 nt, Human
ucucaccucucucuggggaccugu

SEQ ID NO: 1133750 - RNA, 18 nt, Human
ucuccuggagcaguuggu

SEQ ID NO: 1133751 - RNA, 19 nt, Human
ucucgcucuguugcccagg

SEQ ID NO: 1133752 - RNA, 22 nt, Human
ucucgcucuguugcccaggcug

SEQ ID NO: 1133753 - RNA, 23 nt, Human
ucucgcucuguugcccaggcugg

SEQ ID NO: 1133754 - RNA, 24 nt, Human
ucucgcucuguugcccaggcugga

SEQ ID NO: 1133755 - RNA, 26 nt, Human
ucucgcucuguugcccaggcuggagu

SEQ ID NO: 1133756 - RNA, 27 nt, Human
ucucgcucuguugcccaggcuggagug

SEQ ID NO: 1133757 - RNA, 18 nt, Human
ucucucuggggaccuguc

SEQ ID NO: 1133758 - RNA, 21 nt, Human
ucugcugagagccucugcuca

SEQ ID NO: 1133759 - RNA, 18 nt, Human
ucuguugcccaggcugga

SEQ ID NO: 1133760 - RNA, 24 nt, Human
ucuguugcccaggcuggagugcag

SEQ ID NO: 1133761 - RNA, 19 nt, Human
ugaccuggcaagacacuuc

SEQ ID NO: 1133762 - RNA, 18 nt, Human
ugacuccgaacucacccu

SEQ ID NO: 1133763 - RNA, 19 nt, Human
ugagacggggguccuccuc

SEQ ID NO: 1133764 - RNA, 18 nt, Human
ugagaugcacaagugaaa

SEQ ID NO: 1133765 - RNA, 22 nt, Human
ugccacaguggaauucuaggca

SEQ ID NO: 1133766 - RNA, 18 nt, Human
ugccagcauucuuuucuu

SEQ ID NO: 1133767 - RNA, 18 nt, Human
ugcccaggcuggagugca

SEQ ID NO: 1133768 - RNA, 21 nt, Human
ugcccaggcuggagugcagug

SEQ ID NO: 1133769 - RNA, 22 nt, Human
ugcccaggcuggagugcagugg

SEQ ID NO: 1133770 - RNA, 24 nt, Human
ugcccaggcuggagugcagugggc

SEQ ID NO: 1133771 - RNA, 23 nt, Human
ugccucagccucccgaguagcua

SEQ ID NO: 1133772 - RNA, 24 nt, Human
ugccucagccucccgaguagcuag

SEQ ID NO: 1133773 - RNA, 20 nt, Human
ugccuccugccccaugcccc

SEQ ID NO: 1133774 - RNA, 21 nt, Human
ugcucaccuguguccacccgc

SEQ ID NO: 1133775 - RNA, 22 nt, Human
uggaaaaggcaggacgccucau

SEQ ID NO: 1133776 - RNA, 23 nt, Human
uggaauucuaggcagacaacuuc

SEQ ID NO: 1133777 - RNA, 19 nt, Human
uggagugcagugggcaauc

SEQ ID NO: 1133778 - RNA, 22 nt, Human
uggagugcagugggcaaucugg

SEQ ID NO: 1133779 - RNA, 24 nt, Human
uggauguggacggcgccaaggacc

SEQ ID NO: 1133780 - RNA, 21 nt, Human
uggcaaaucccacggagaggc

SEQ ID NO: 1133781 - RNA, 27 nt, Human
ugggcagcagguugcagauggauguug

SEQ ID NO: 1133782 - RNA, 24 nt, Human
ugggguuucaccguaugagccagg

SEQ ID NO: 1133783 - RNA, 23 nt, Human
uggguggcugccuccugccccau

SEQ ID NO: 1133784 - RNA, 21 nt, Human
uguauuuuuaguggagauggg

SEQ ID NO: 1133785 - RNA, 18 nt, Human
uuaguggagaugggguuu

SEQ ID NO: 1133786 - RNA, 22 nt, Human
uuaguggagaugggguuucacc

SEQ ID NO: 1133787 - RNA, 24 nt, Human
uuaguggagaugggguuucaccgu

SEQ ID NO: 1133788 - RNA, 21 nt, Human
uuccuagauaaggcuggaaaa

SEQ ID NO: 1133789 - RNA, 24 nt, Human
uucuugauuuucuauggaaccuuu

SEQ ID NO: 1133790 - RNA, 23 nt, Human
uugcccaggcuggagugcagugg

SEQ ID NO: 1133791 - RNA, 24 nt, Human
uuuuuaguggagaugggguuucac

SEQ ID NO: 1133792 - RNA, 21 nt, Human
uuuuuguauuuuuaguggaga

SEQ ID NO: 1133793 - RNA, 24 nt, Human
uuuuuuguauuuuuaguggagaug

SEQ ID NO: 1133794 - RNA, 20 nt, Human
aaaagccuggugagaugcca

SEQ ID NO: 1133795 - RNA, 21 nt, Human
aggacaacccuugccacaggc

SEQ ID NO: 1133796 - RNA, 22 nt, Human
cacucuaguccauugaaaagcc

SEQ ID NO: 1133797 - RNA, 19 nt, Human
cagcaggacaacccuugcc

SEQ ID NO: 1133798 - RNA, 19 nt, Human
cagccccgcacucuagucc

SEQ ID NO: 1133799 - RNA, 22 nt, Human
ccacaggcagagcagccccgca

SEQ ID NO: 1133800 - RNA, 19 nt, Human
ccugugcccagcagcagga

SEQ ID NO: 1133801 - RNA, 20 nt, Human
ccugugcccagcagcaggac

SEQ ID NO: 1133802 - RNA, 18 nt, Human
cuggggcaaucgccgcug

SEQ ID NO: 1133803 - RNA, 23 nt, Human
cuuagcagcgccaaguucuuucu

SEQ ID NO: 1133804 - RNA, 18 nt, Human
gccccgcacucuagucca

SEQ ID NO: 1133805 - RNA, 23 nt, Human
gcgcggagccugguggcgcgugu

SEQ ID NO: 1133806 - RNA, 23 nt, Human
ugagaugccaggccaggccauga

SEQ ID NO: 1133807 - RNA, 23 nt, Human
uuucgggccgccauugccuuagc

SEQ ID NO: 1133808 - RNA, 21 nt, Human
aaaaaccaacccccaaauccc

SEQ ID NO: 1133809 - RNA, 21 nt, Human
acaugggccagcgaggcccug

SEQ ID NO: 1133810 - RNA, 18 nt, Human
accaacccccaaauccca

SEQ ID NO: 1133811 - RNA, 23 nt, Human
acccccaaaucccagggcuucca

SEQ ID NO: 1133812 - RNA, 20 nt, Human
acccgccccacacccgcccc

SEQ ID NO: 1133813 - RNA, 20 nt, Human
acccgccccacacccgcccc

SEQ ID NO: 1133814 - RNA, 19 nt, Human
agcugggccucaggggccu

SEQ ID NO: 1133815 - RNA, 20 nt, Human
auucacaguccaaaaaccaa

SEQ ID NO: 1133816 - RNA, 19 nt, Human
caaaaaccaacccccaaau

SEQ ID NO: 1133817 - RNA, 19 nt, Human
caaaucccagggcuuccag

SEQ ID NO: 1133818 - RNA, 27 nt, Human
caacccccaaaucccagggcuuccagc

SEQ ID NO: 1133819 - RNA, 25 nt, Human
cacaguccaaaaaccaacccccaaa

SEQ ID NO: 1133820 - RNA, 21 nt, Human
cacgcgccccacacccgcccc

SEQ ID NO: 1133821 - RNA, 21 nt, Human
cacgcgccccacacccgcccc

SEQ ID NO: 1133822 - RNA, 21 nt, Human
cacgcgccccacacccgcccc

SEQ ID NO: 1133823 - RNA, 21 nt, Human
cacgcgccccacacccgcucc

SEQ ID NO: 1133824 - RNA, 21 nt, Human
cacgcgccccacacgcgcccc

SEQ ID NO: 1133825 - RNA, 21 nt, Human
cacgcgccccacacgcgcccc

SEQ ID NO: 1133826 - RNA, 22 nt, Human
ccaaaaaccaacccccaaaucc

SEQ ID NO: 1133827 - RNA, 23 nt, Human
ccaaaaaccaacccccaaauccc

SEQ ID NO: 1133828 - RNA, 22 nt, Human
ccaacccccaaaucccagggcu

SEQ ID NO: 1133829 - RNA, 22 nt, Human
ccacacccgccccacacccgcc

SEQ ID NO: 1133830 - RNA, 22 nt, Human
ccacacccgccccacacccgcc

SEQ ID NO: 1133831 - RNA, 22 nt, Human
ccacacgcgccccacacccgcc

SEQ ID NO: 1133832 - RNA, 22 nt, Human
ccacacgcgccccacacccgcc

SEQ ID NO: 1133833 - RNA, 22 nt, Human
ccacacgcgccccacacccgcc

SEQ ID NO: 1133834 - RNA, 26 nt, Human
cccacacacguuccacacgcgcccca

SEQ ID NO: 1133835 - RNA, 28 nt, Human
cccacacacguuccacacgcgccccaca

SEQ ID NO: 1133836 - RNA, 22 nt, Human
cccacacccgccccacacccgc

SEQ ID NO: 1133837 - RNA, 22 nt, Human
cccacacccgccccacacccgc

SEQ ID NO: 1133838 - RNA, 26 nt, Human
cccacacccgcuccacacgcgcccca

SEQ ID NO: 1133839 - RNA, 21 nt, Human
cccacacgcgccccacacccg

SEQ ID NO: 1133840 - RNA, 21 nt, Human
cccacacgcgccccacacccg

SEQ ID NO: 1133841 - RNA, 21 nt, Human
cccacacgcgccccacacccg

SEQ ID NO: 1133842 - RNA, 25 nt, Human
cccacacgcgccccacacccgcccc

SEQ ID NO: 1133843 - RNA, 25 nt, Human
cccacacgcgccccacacccgcccc

SEQ ID NO: 1133844 - RNA, 25 nt, Human
cccacacgcgccccacacccgcccc

SEQ ID NO: 1133845 - RNA, 21 nt, Human
cccacacgcgccccacacgcg

SEQ ID NO: 1133846 - RNA, 26 nt, Human
cccacacgcgccccacacgcgcccca

SEQ ID NO: 1133847 - RNA, 28 nt, Human
cccacacgcgccccacacgcgccccaca

SEQ ID NO: 1133848 - RNA, 26 nt, Human
cccacacgcgccccacacgcgcucca

SEQ ID NO: 1133849 - RNA, 20 nt, Human
ccccacacccgccccacacc

SEQ ID NO: 1133850 - RNA, 20 nt, Human
ccccacacccgccccacacc

SEQ ID NO: 1133851 - RNA, 24 nt, Human
ccccacacccgccccacacccggu

SEQ ID NO: 1133852 - RNA, 24 nt, Human
ccccacacccgccccacacccggu

SEQ ID NO: 1133853 - RNA, 20 nt, Human
ccccacacgcgccccacacc

SEQ ID NO: 1133854 - RNA, 20 nt, Human
ccccacacgcgccccacacc

SEQ ID NO: 1133855 - RNA, 20 nt, Human
ccccacacgcgccccacacc

SEQ ID NO: 1133856 - RNA, 28 nt, Human
cccccaaaucccagggcuuccagcaacc

SEQ ID NO: 1133857 - RNA, 24 nt, Human
cccgccccacacacguuccacacg

SEQ ID NO: 1133858 - RNA, 21 nt, Human
cccgccccacacccgccccac

SEQ ID NO: 1133859 - RNA, 21 nt, Human
cccgccccacacccgccccac

SEQ ID NO: 1133860 - RNA, 20 nt, Human
cccgccccacacccgccccc

SEQ ID NO: 1133861 - RNA, 20 nt, Human
cccgccccacacccgccccc

SEQ ID NO: 1133862 - RNA, 24 nt, Human
cccgcuccacacgcgccccacacg

SEQ ID NO: 1133863 - RNA, 23 nt, Human
cuuuccacaaccugaaaacaagg

SEQ ID NO: 1133864 - RNA, 18 nt, Human
gccccacacgcgcuccac

SEQ ID NO: 1133865 - RNA, 20 nt, Human
gccucaggggccuggggacg

SEQ ID NO: 1133866 - RNA, 22 nt, Human
gggcagggggagccaagcuggg

SEQ ID NO: 1133867 - RNA, 18 nt, Human
gggccucaggggccuggg

SEQ ID NO: 1133868 - RNA, 21 nt, Human
uccacacgcgccccacacccg

SEQ ID NO: 1133869 - RNA, 25 nt, Human
uccacacgcgccccacacccgcucc

SEQ ID NO: 1133870 - RNA, 26 nt, Human
uccacacgcgccccacacccgcucca

SEQ ID NO: 1133871 - RNA, 26 nt, Human
uccacacgcgccccacacgcgcccca

SEQ ID NO: 1133872 - RNA, 28 nt, Human
uccacacgcgccccacacgcgccccaca

SEQ ID NO: 1133873 - RNA, 21 nt, Human
ugggccagcgaggcccugcag

SEQ ID NO: 1133874 - RNA, 19 nt, Human
uucacaguccaaaaaccaa

SEQ ID NO: 1133875 - RNA, 20 nt, Human
uuccacacgcgccccacacc

SEQ ID NO: 1133876 - RNA, 19 nt, Human
aaacucagccugcugcaga

SEQ ID NO: 1133877 - RNA, 21 nt, Human
aagcaggauuccgcagcaagu

SEQ ID NO: 1133878 - RNA, 18 nt, Human
aggcagcuggaggucgug

SEQ ID NO: 1133879 - RNA, 27 nt, Human
caugaaacagagcuuucuuguucuuga

SEQ ID NO: 1133880 - RNA, 20 nt, Human
ccugcggcgcuuugccgccc

SEQ ID NO: 1133881 - RNA, 22 nt, Human
cguguguguguguugugugugu

SEQ ID NO: 1133882 - RNA, 19 nt, Human
gcucugugccugcggcgcu

SEQ ID NO: 1133883 - RNA, 18 nt, Human
ggaauuuuccauguucuu

SEQ ID NO: 1133884 - RNA, 19 nt, Human
ggcucugugccugcggcgc

SEQ ID NO: 1133885 - RNA, 19 nt, Human
ggggggaagccucccagag

SEQ ID NO: 1133886 - RNA, 18 nt, Human
gguugugugagugugcgu

SEQ ID NO: 1133887 - RNA, 23 nt, Human
gugcaugugugagcaugugugca

SEQ ID NO: 1133888 - RNA, 19 nt, Human
gugugcguguguguguguu

SEQ ID NO: 1133889 - RNA, 24 nt, Human
uaaacucagccugcugcagagaug

SEQ ID NO: 1133890 - RNA, 21 nt, Human
ucccagaggaagaugcaggcu

SEQ ID NO: 1133891 - RNA, 19 nt, Human
ucuggggcccgaggcgucc

SEQ ID NO: 1133892 - RNA, 20 nt, Human
ugagugugcgugugugugug

SEQ ID NO: 1133893 - RNA, 20 nt, Human
ugcaugaaacagagcuuucu

SEQ ID NO: 1133894 - RNA, 18 nt, Human
ugcguguguguguguugu

SEQ ID NO: 1133895 - RNA, 22 nt, Human
ugcguguguguguguugugugu

SEQ ID NO: 1133896 - RNA, 25 nt, Human
ugcguguguguguguugugugugug

SEQ ID NO: 1133897 - RNA, 21 nt, Human
uggccaugguugugugagugu

SEQ ID NO: 1133898 - RNA, 22 nt, Human
uggugcccgcggaagcugagca

SEQ ID NO: 1133899 - RNA, 20 nt, Human
ugugagcaugugugcaugcg

SEQ ID NO: 1133900 - RNA, 21 nt, Human
ugugagugugcgugugugugu

SEQ ID NO: 1133901 - RNA, 20 nt, Human
ugugugagugugcgugugug

SEQ ID NO: 1133902 - RNA, 24 nt, Human
ugugugcacguauaagugcaugug

SEQ ID NO: 1133903 - RNA, 20 nt, Human
ugugugcaugcgugagcgug

SEQ ID NO: 1133904 - RNA, 23 nt, Human
ugugugugugugcacguauaagu

SEQ ID NO: 1133905 - RNA, 23 nt, Human
ugugugugugugugcacguauaa

SEQ ID NO: 1133906 - RNA, 21 nt, Human
ugugugugugugugugcacgu

SEQ ID NO: 1133907 - RNA, 22 nt, Human
ugugugugugugugugcacgua

SEQ ID NO: 1133908 - RNA, 22 nt, Human
uguguguguguugugugugugu

SEQ ID NO: 1133909 - RNA, 24 nt, Human
uguguguguguugugugugugugu

SEQ ID NO: 1133910 - RNA, 20 nt, Human
uguguguguugugugugugu

SEQ ID NO: 1133911 - RNA, 20 nt, Human
uguguguguugugugugugu

SEQ ID NO: 1133912 - RNA, 20 nt, Human
uguguguguugugugugugu

SEQ ID NO: 1133913 - RNA, 24 nt, Human
uguguguguugugugugugugugu

SEQ ID NO: 1133914 - RNA, 22 nt, Human
uguguguugugugugugugugu

SEQ ID NO: 1133915 - RNA, 18 nt, Human
uguguugugugugugugu

SEQ ID NO: 1133916 - RNA, 23 nt, Human
uugugugagugugcgugugugug

SEQ ID NO: 1133917 - RNA, 20 nt, Human
uuugcucuuagggaauuuuc

SEQ ID NO: 1133918 - RNA, 19 nt, Human
uuuuccauguucuuccauc

SEQ ID NO: 1133919 - RNA, 24 nt, Human
aaaugcaggaagcugcauugagcc

SEQ ID NO: 1133920 - RNA, 20 nt, Human
aaccugccucccagacuccu

SEQ ID NO: 1133921 - RNA, 18 nt, Human
aaguccucagggccucuc

SEQ ID NO: 1133922 - RNA, 25 nt, Human
aaugcccggcuccuguuccacucac

SEQ ID NO: 1133923 - RNA, 20 nt, Human
accugcguuuguggccaccu

SEQ ID NO: 1133924 - RNA, 20 nt, Human
acgcgucucuucccucuuuu

SEQ ID NO: 1133925 - RNA, 20 nt, Human
acggcgggaaugccuguggc

SEQ ID NO: 1133926 - RNA, 23 nt, Human
agaaggcacugacggcgggaaug

SEQ ID NO: 1133927 - RNA, 19 nt, Human
agagagaggacgaacugau

SEQ ID NO: 1133928 - RNA, 18 nt, Human
agcaaagacccuuagaag

SEQ ID NO: 1133929 - RNA, 22 nt, Human
agcaagggcagcagcuugggga

SEQ ID NO: 1133930 - RNA, 19 nt, Human
agccaagggccacgguugc

SEQ ID NO: 1133931 - RNA, 24 nt, Human
agcugcaggaagcugcacugagcc

SEQ ID NO: 1133932 - RNA, 19 nt, Human
aggaaggagccaagcgcuc

SEQ ID NO: 1133933 - RNA, 24 nt, Human
aggacacuguccuugccaaccauu

SEQ ID NO: 1133934 - RNA, 23 nt, Human
aggaucgugaccgggagggcccc

SEQ ID NO: 1133935 - RNA, 18 nt, Human
aggcuccggucuguuccu

SEQ ID NO: 1133936 - RNA, 21 nt, Human
aggggguuggguauugaugcc

SEQ ID NO: 1133937 - RNA, 21 nt, Human
aggucccccaagccagccucc

SEQ ID NO: 1133938 - RNA, 21 nt, Human
agguggagcugcuggggcagg

SEQ ID NO: 1133939 - RNA, 20 nt, Human
agucccugcuggccacagga

SEQ ID NO: 1133940 - RNA, 20 nt, Human
auugaugccgccugggggcc

SEQ ID NO: 1133941 - RNA, 24 nt, Human
caaaccccuccaggucaccugccu

SEQ ID NO: 1133942 - RNA, 19 nt, Human
caagccagccucccccacc

SEQ ID NO: 1133943 - RNA, 23 nt, Human
caagcugcaggaagcugcacuga

SEQ ID NO: 1133944 - RNA, 23 nt, Human
caagggcagcagcuuggggaggc

SEQ ID NO: 1133945 - RNA, 21 nt, Human
caaguagucccugcuggccaa

SEQ ID NO: 1133946 - RNA, 23 nt, Human
cacagcaagggcagcagcuuggg

SEQ ID NO: 1133947 - RNA, 24 nt, Human
cacagguaaauucuccuucccaca

SEQ ID NO: 1133948 - RNA, 25 nt, Human
caccguccagggcaggaacagaggc

SEQ ID NO: 1133949 - RNA, 22 nt, Human
cacuggaguuccuggacacagc

SEQ ID NO: 1133950 - RNA, 22 nt, Human
cagaggcgugacagucagugcg

SEQ ID NO: 1133951 - RNA, 20 nt, Human
cagccucccccaccaccuug

SEQ ID NO: 1133952 - RNA, 20 nt, Human
caggucccccaagccagccu

SEQ ID NO: 1133953 - RNA, 23 nt, Human
caggucccccaagccagccuccc

SEQ ID NO: 1133954 - RNA, 22 nt, Human
cauggaacagcaaaccccucca

SEQ ID NO: 1133955 - RNA, 19 nt, Human
cauguucugagacaccguc

SEQ ID NO: 1133956 - RNA, 19 nt, Human
ccacgcuucccucccagca

SEQ ID NO: 1133957 - RNA, 18 nt, Human
ccacucuguagcccccaa

SEQ ID NO: 1133958 - RNA, 19 nt, Human
ccagccagccucacaggca

SEQ ID NO: 1133959 - RNA, 18 nt, Human
cccaagccagccuccccc

SEQ ID NO: 1133960 - RNA, 19 nt, Human
cccaagccagccuccccca

SEQ ID NO: 1133961 - RNA, 23 nt, Human
cccacagauccuccuguagccca

SEQ ID NO: 1133962 - RNA, 18 nt, Human
cccacagguuguccccac

SEQ ID NO: 1133963 - RNA, 21 nt, Human
cccacgaugaggaucgugacc

SEQ ID NO: 1133964 - RNA, 20 nt, Human
cccacucuguagcccccaaa

SEQ ID NO: 1133965 - RNA, 19 nt, Human
ccccgcacacccagggcag

SEQ ID NO: 1133966 - RNA, 18 nt, Human
ccccgccgccagcaucug

SEQ ID NO: 1133967 - RNA, 18 nt, Human
ccccugaggacccugugg

SEQ ID NO: 1133968 - RNA, 21 nt, Human
cccuccaugcucucuuucccc

SEQ ID NO: 1133969 - RNA, 24 nt, Human
cccucuuuucuugggugcuggccc

SEQ ID NO: 1133970 - RNA, 24 nt, Human
cccugucuccacgcuucccuccca

SEQ ID NO: 1133971 - RNA, 18 nt, Human
cccuugggcagccucggg

SEQ ID NO: 1133972 - RNA, 23 nt, Human
ccguggagauuggugauggagcu

SEQ ID NO: 1133973 - RNA, 19 nt, Human
ccucccagcauggaugccc

SEQ ID NO: 1133974 - RNA, 24 nt, Human
ccucccccaccaccuugaagggac

SEQ ID NO: 1133975 - RNA, 21 nt, Human
ccucgccaucuccgggccucc

SEQ ID NO: 1133976 - RNA, 22 nt, Human
ccucgccaucuccgggccuccg

SEQ ID NO: 1133977 - RNA, 18 nt, Human
cgagccccgcacacccag

SEQ ID NO: 1133978 - RNA, 26 nt, Human
cgcccuugaacuucagaugcaugcuc

SEQ ID NO: 1133979 - RNA, 26 nt, Human
cgcucagauggcucuggcugcugugg

SEQ ID NO: 1133980 - RNA, 23 nt, Human
cuccuccaggcugcccuugggca

SEQ ID NO: 1133981 - RNA, 21 nt, Human
cucuggaggguccaauuuucc

SEQ ID NO: 1133982 - RNA, 21 nt, Human
cugaaguccauguugucccug

SEQ ID NO: 1133983 - RNA, 23 nt, Human
cugucugagccuguucgcucagg

SEQ ID NO: 1133984 - RNA, 22 nt, Human
cugugugcacgcgucucuuccc

SEQ ID NO: 1133985 - RNA, 23 nt, Human
cuucaggcuccggucuguuccug

SEQ ID NO: 1133986 - RNA, 20 nt, Human
cuuccccgccgccagcaucu

SEQ ID NO: 1133987 - RNA, 19 nt, Human
cuuugcuucagggcguuca

SEQ ID NO: 1133988 - RNA, 20 nt, Human
gaagaugucccacggccccu

SEQ ID NO: 1133989 - RNA, 21 nt, Human
gaccugcguuuguggccaccu

SEQ ID NO: 1133990 - RNA, 27 nt, Human
gaggacccugugguugaguugaccccu

SEQ ID NO: 1133991 - RNA, 21 nt, Human
gaguacucagaggcccauggc

SEQ ID NO: 1133992 - RNA, 28 nt, Human
gauggcucuggcugcugugguugggagg

SEQ ID NO: 1133993 - RNA, 23 nt, Human
gcacgcgucucuucccucuuuuc

SEQ ID NO: 1133994 - RNA, 19 nt, Human
gcacuggaguuccuggaca

SEQ ID NO: 1133995 - RNA, 24 nt, Human
gcagcaaagacccuuagaaggcca

SEQ ID NO: 1133996 - RNA, 23 nt, Human
gcaggaagcugcacugagccuug

SEQ ID NO: 1133997 - RNA, 23 nt, Human
gcauaggucaacacguggccagg

SEQ ID NO: 1133998 - RNA, 19 nt, Human
gccagccucccccaccacc

SEQ ID NO: 1133999 - RNA, 19 nt, Human
gccagcugacucagccaag

SEQ ID NO: 1134000 - RNA, 18 nt, Human
gccaggaagaugucuuug

SEQ ID NO: 1134001 - RNA, 24 nt, Human
gcccugggcauuuggcgguuucca

SEQ ID NO: 1134002 - RNA, 25 nt, Human
ggccccugucuccacgcuucccucc

SEQ ID NO: 1134003 - RNA, 26 nt, Human
ggccugaaggcgcgggggcucagaaa

SEQ ID NO: 1134004 - RNA, 22 nt, Human
ggcugcagggccaagcuggcgu

SEQ ID NO: 1134005 - RNA, 20 nt, Human
ggcugcugugguugggaggg

SEQ ID NO: 1134006 - RNA, 24 nt, Human
ggggccgcuggacuuugcugaagu

SEQ ID NO: 1134007 - RNA, 23 nt, Human
gggugggccugaaggcgcggggg

SEQ ID NO: 1134008 - RNA, 23 nt, Human
ggugggcucugcagcaaagaccc

SEQ ID NO: 1134009 - RNA, 24 nt, Human
ggugguggccaaguccucagggcc

SEQ ID NO: 1134010 - RNA, 21 nt, Human
guaggcagugucacgugcaua

SEQ ID NO: 1134011 - RNA, 24 nt, Human
gucccccaagccagccucccccac

SEQ ID NO: 1134012 - RNA, 24 nt, Human
uagagugguggcccagggcacccc

SEQ ID NO: 1134013 - RNA, 27 nt, Human
uagagugguggcccagggcaccccguu

SEQ ID NO: 1134014 - RNA, 21 nt, Human
ucaacacguggccaggaagau

SEQ ID NO: 1134015 - RNA, 23 nt, Human
ucacaaguagucccugcuggcca

SEQ ID NO: 1134016 - RNA, 19 nt, Human
uccagggcaggaacagagg

SEQ ID NO: 1134017 - RNA, 20 nt, Human
ucccacggccccugucucca

SEQ ID NO: 1134018 - RNA, 21 nt, Human
uccccagcagcacaugggccu

SEQ ID NO: 1134019 - RNA, 18 nt, Human
ucccccaagccagccucc

SEQ ID NO: 1134020 - RNA, 20 nt, Human
ucccccaagccagccucccc

SEQ ID NO: 1134021 - RNA, 21 nt, Human
ucccugcucuuggaaaccugc

SEQ ID NO: 1134022 - RNA, 18 nt, Human
uccugugcuggcugcagg

SEQ ID NO: 1134023 - RNA, 18 nt, Human
uccuucccacagcaaggg

SEQ ID NO: 1134024 - RNA, 18 nt, Human
ucuccacgcuucccuccc

SEQ ID NO: 1134025 - RNA, 18 nt, Human
ucucugaaugcccggcuc

SEQ ID NO: 1134026 - RNA, 21 nt, Human
ucucugaaugcccggcuccug

SEQ ID NO: 1134027 - RNA, 19 nt, Human
ucucuuuccccuuucccaa

SEQ ID NO: 1134028 - RNA, 25 nt, Human
ucugcagcaaagacccuuagaaggc

SEQ ID NO: 1134029 - RNA, 22 nt, Human
ucuggugggcucugcagcaaag

SEQ ID NO: 1134030 - RNA, 21 nt, Human
ucuguagcccccaacauauac

SEQ ID NO: 1134031 - RNA, 23 nt, Human
ucuucgggcggccguccugguuu

SEQ ID NO: 1134032 - RNA, 18 nt, Human
ugaccccuccaugcucuc

SEQ ID NO: 1134033 - RNA, 23 nt, Human
ugaccccuccaugcucucuuucc

SEQ ID NO: 1134034 - RNA, 21 nt, Human
ugacucagccaagggccacgg

SEQ ID NO: 1134035 - RNA, 23 nt, Human
ugaguugaccccuccaugcucuc

SEQ ID NO: 1134036 - RNA, 21 nt, Human
ugcacuggaguuccuggacac

SEQ ID NO: 1134037 - RNA, 21 nt, Human
ugcaugcucagcacccagggg

SEQ ID NO: 1134038 - RNA, 23 nt, Human
ugccguggagauuggugauggag

SEQ ID NO: 1134039 - RNA, 26 nt, Human
ugcuggcugcagggccaagcuggcgu

SEQ ID NO: 1134040 - RNA, 19 nt, Human
ugcuucaggcuccggucug

SEQ ID NO: 1134041 - RNA, 21 nt, Human
uggccaguccaaaguguucug

SEQ ID NO: 1134042 - RNA, 18 nt, Human
uggcugugccaugcagca

SEQ ID NO: 1134043 - RNA, 19 nt, Human
ugggcagccucggggagca

SEQ ID NO: 1134044 - RNA, 23 nt, Human
uggugguggccaaguccucaggg

SEQ ID NO: 1134045 - RNA, 21 nt, Human
ugguugaguugaccccuccau

SEQ ID NO: 1134046 - RNA, 19 nt, Human
ugucugagccuguucgcuc

SEQ ID NO: 1134047 - RNA, 26 nt, Human
ugugcacgcgucucuucccucuuuuc

SEQ ID NO: 1134048 - RNA, 22 nt, Human
uguggaggguggggcagggcug

SEQ ID NO: 1134049 - RNA, 18 nt, Human
uguggcagaggaaaaaug

SEQ ID NO: 1134050 - RNA, 19 nt, Human
uucccucuuuucuugggug

SEQ ID NO: 1134051 - RNA, 18 nt, Human
uugguuuucugaccauug

SEQ ID NO: 1134052 - RNA, 23 nt, Human
aagcggaagaugguuguugagac

SEQ ID NO: 1134053 - RNA, 23 nt, Human
agcagacgcugaccaacucuccc

SEQ ID NO: 1134054 - RNA, 22 nt, Human
cacaacacaagaguuccacaug

SEQ ID NO: 1134055 - RNA, 24 nt, Human
caggacauaguagcuucugcucaa

SEQ ID NO: 1134056 - RNA, 19 nt, Human
cgagggcucuuccuggccc

SEQ ID NO: 1134057 - RNA, 21 nt, Human
gagcacucccagaauuggaau

SEQ ID NO: 1134058 - RNA, 22 nt, Human
ggaaauacacaguguguccuug

SEQ ID NO: 1134059 - RNA, 24 nt, Human
uaaaaacacaacacaagaguucca

SEQ ID NO: 1134060 - RNA, 26 nt, Human
uaaaaacacaacacaagaguuccaca

SEQ ID NO: 1134061 - RNA, 24 nt, Human
uauuucauggguccuucuccccca

SEQ ID NO: 1134062 - RNA, 20 nt, Human
ucaaagggcaggacauagua

SEQ ID NO: 1134063 - RNA, 20 nt, Human
ucacuuauguuuugaauauu

SEQ ID NO: 1134064 - RNA, 27 nt, Human
ucauggguccuucucccccagaggccu

SEQ ID NO: 1134065 - RNA, 19 nt, Human
uccacauggcuggggaggc

SEQ ID NO: 1134066 - RNA, 20 nt, Human
uccuggcccauaucuagcac

SEQ ID NO: 1134067 - RNA, 18 nt, Human
uugcaauaaagcacgaac

SEQ ID NO: 1134068 - RNA, 21 nt, Human
uugcaauaaagcacgaacaag

SEQ ID NO: 1134069 - RNA, 18 nt, Human
aagauaccacagacuggg

SEQ ID NO: 1134070 - RNA, 21 nt, Human
aagcgggccucuggccccagg

SEQ ID NO: 1134071 - RNA, 22 nt, Human
aagcgggccucuggccccaggu

SEQ ID NO: 1134072 - RNA, 22 nt, Human
aaggacaccagucaugcugcac

SEQ ID NO: 1134073 - RNA, 23 nt, Human
accccaccucccuuugucucucc

SEQ ID NO: 1134074 - RNA, 25 nt, Human
accccaccucccuuugucucuccag

SEQ ID NO: 1134075 - RNA, 26 nt, Human
accccaccucccuuugucucuccagc

SEQ ID NO: 1134076 - RNA, 23 nt, Human
acgcauuccugcucugcguuccc

SEQ ID NO: 1134077 - RNA, 21 nt, Human
agaggagaggggagggaagga

SEQ ID NO: 1134078 - RNA, 21 nt, Human
agaggggagggaaggagggaa

SEQ ID NO: 1134079 - RNA, 25 nt, Human
agaggggagggaaggagggaagggg

SEQ ID NO: 1134080 - RNA, 22 nt, Human
agauaccacagacuggguggcu

SEQ ID NO: 1134081 - RNA, 21 nt, Human
agcaagcgggccucuggcccc

SEQ ID NO: 1134082 - RNA, 21 nt, Human
aggaccccaacauaccuguuu

SEQ ID NO: 1134083 - RNA, 18 nt, Human
aggugugucccggauguc

SEQ ID NO: 1134084 - RNA, 18 nt, Human
augaauuaacuccuuguu

SEQ ID NO: 1134085 - RNA, 21 nt, Human
augaucggguguacuauuacc

SEQ ID NO: 1134086 - RNA, 21 nt, Human
auuguuuuucaaaauuccgag

SEQ ID NO: 1134087 - RNA, 18 nt, Human
auuuucagacagccugac

SEQ ID NO: 1134088 - RNA, 22 nt, Human
cacaauucaacccuaacacucc

SEQ ID NO: 1134089 - RNA, 22 nt, Human
caccggcuguguuucugugcgu

SEQ ID NO: 1134090 - RNA, 23 nt, Human
caccucccuuugucucuccagcc

SEQ ID NO: 1134091 - RNA, 18 nt, Human
cacgccuccaucuguggu

SEQ ID NO: 1134092 - RNA, 18 nt, Human
cagcuggcacugccaggc

SEQ ID NO: 1134093 - RNA, 24 nt, Human
caggcucacccagaggggaggggg

SEQ ID NO: 1134094 - RNA, 22 nt, Human
caugaucggguguacuauuacc

SEQ ID NO: 1134095 - RNA, 19 nt, Human
ccaggccucucccugcucc

SEQ ID NO: 1134096 - RNA, 19 nt, Human
ccccacggauugauuuagg

SEQ ID NO: 1134097 - RNA, 20 nt, Human
ccccacggauugauuuaggg

SEQ ID NO: 1134098 - RNA, 23 nt, Human
ccccagcccccagcaagcgggcc

SEQ ID NO: 1134099 - RNA, 24 nt, Human
cccccacccuucaugaauuaacuc

SEQ ID NO: 1134100 - RNA, 19 nt, Human
cccucugagccccagcccc

SEQ ID NO: 1134101 - RNA, 21 nt, Human
cccucugagccccagccccca

SEQ ID NO: 1134102 - RNA, 22 nt, Human
cccugcuccuggugucagcugg

SEQ ID NO: 1134103 - RNA, 22 nt, Human
cccugcuccuggugucagcugg

SEQ ID NO: 1134104 - RNA, 23 nt, Human
ccgcacagcauuuucagacagcc

SEQ ID NO: 1134105 - RNA, 22 nt, Human
ccuccccggcagcaccccaccu

SEQ ID NO: 1134106 - RNA, 19 nt, Human
ccuccuaaauucugugugg

SEQ ID NO: 1134107 - RNA, 25 nt, Human
ccucugagccccagcccccagcaag

SEQ ID NO: 1134108 - RNA, 21 nt, Human
ccugcucugcguucccaggga

SEQ ID NO: 1134109 - RNA, 21 nt, Human
ccuuugucucuccagccagag

SEQ ID NO: 1134110 - RNA, 22 nt, Human
ccuuugucucuccagccagagg

SEQ ID NO: 1134111 - RNA, 19 nt, Human
cgcccugcgcgcaccggcu

SEQ ID NO: 1134112 - RNA, 21 nt, Human
cggcagcaccccaccucccuu

SEQ ID NO: 1134113 - RNA, 20 nt, Human
cuccccggcagcaccccacc

SEQ ID NO: 1134114 - RNA, 22 nt, Human
cuccugaggggcaaggcugagc

SEQ ID NO: 1134115 - RNA, 21 nt, Human
cucugagccccagcccccagc

SEQ ID NO: 1134116 - RNA, 20 nt, Human
cuggcacugccaggcguccc

SEQ ID NO: 1134117 - RNA, 21 nt, Human
cugugaaucccugggagauuc

SEQ ID NO: 1134118 - RNA, 22 nt, Human
cuuugccccucgggccccacgg

SEQ ID NO: 1134119 - RNA, 22 nt, Human
gagggaaggagggaagggggaa

SEQ ID NO: 1134120 - RNA, 19 nt, Human
gaucaggggaggagagugu

SEQ ID NO: 1134121 - RNA, 19 nt, Human
gcagcaccccaccucccuu

SEQ ID NO: 1134122 - RNA, 26 nt, Human
gcauuccugcucugcguucccaggga

SEQ ID NO: 1134123 - RNA, 22 nt, Human
gccaccucuccaucuaagguug

SEQ ID NO: 1134124 - RNA, 21 nt, Human
gccccaggucugggagcggcg

SEQ ID NO: 1134125 - RNA, 22 nt, Human
gcccccagcaagcgggccucug

SEQ ID NO: 1134126 - RNA, 23 nt, Human
gcccccagcaagcgggccucugg

SEQ ID NO: 1134127 - RNA, 24 nt, Human
gcucgcuccccucugagccccagc

SEQ ID NO: 1134128 - RNA, 25 nt, Human
gcuguguuucugugcguugugcuuu

SEQ ID NO: 1134129 - RNA, 18 nt, Human
ggagaccucggcaggagg

SEQ ID NO: 1134130 - RNA, 22 nt, Human
ggagaggggagggaaggaggga

SEQ ID NO: 1134131 - RNA, 19 nt, Human
ggagggaaggagggaaggg

SEQ ID NO: 1134132 - RNA, 19 nt, Human
ggcaggagggagggagaag

SEQ ID NO: 1134133 - RNA, 20 nt, Human
gggccucuggccccaggucu

SEQ ID NO: 1134134 - RNA, 19 nt, Human
gucugggagcggcguggaa

SEQ ID NO: 1134135 - RNA, 22 nt, Human
guuccaggccucucccugcucc

SEQ ID NO: 1134136 - RNA, 20 nt, Human
uacuucaccuucccucagug

SEQ ID NO: 1134137 - RNA, 20 nt, Human
uagaagaggagaggggaggg

SEQ ID NO: 1134138 - RNA, 18 nt, Human
uagcauuugcauuucacu

SEQ ID NO: 1134139 - RNA, 24 nt, Human
uaucauggaauccugaaaucaagg

SEQ ID NO: 1134140 - RNA, 23 nt, Human
uauuguuuuucaaaauuccgagu

SEQ ID NO: 1134141 - RNA, 23 nt, Human
ucacccagaggggagggggaccu

SEQ ID NO: 1134142 - RNA, 21 nt, Human
ucagacagccugacagcagcc

SEQ ID NO: 1134143 - RNA, 18 nt, Human
uccaggccucucccugcu

SEQ ID NO: 1134144 - RNA, 21 nt, Human
uccaggccucucccugcuccu

SEQ ID NO: 1134145 - RNA, 21 nt, Human
ucccagggauccacaaucuuc

SEQ ID NO: 1134146 - RNA, 22 nt, Human
ucccguugcaggccgucuucuc

SEQ ID NO: 1134147 - RNA, 21 nt, Human
ucccuuugucucuccagccag

SEQ ID NO: 1134148 - RNA, 25 nt, Human
ucccuuugucucuccagccagaggu

SEQ ID NO: 1134149 - RNA, 21 nt, Human
uccugaggggcaaggcugagc

SEQ ID NO: 1134150 - RNA, 20 nt, Human
uccuggccucucccugcucc

SEQ ID NO: 1134151 - RNA, 20 nt, Human
uccuggugucagcuggcacu

SEQ ID NO: 1134152 - RNA, 20 nt, Human
uccuggugucagcuggcacu

SEQ ID NO: 1134153 - RNA, 22 nt, Human
ucggcaggagggagggagaagc

SEQ ID NO: 1134154 - RNA, 18 nt, Human
ucuccagggagaaccguu

SEQ ID NO: 1134155 - RNA, 19 nt, Human
ucuccuugccccuuuacuu

SEQ ID NO: 1134156 - RNA, 19 nt, Human
ucucugcaguggacagucu

SEQ ID NO: 1134157 - RNA, 18 nt, Human
ucugcaguggacagucug

SEQ ID NO: 1134158 - RNA, 27 nt, Human
ugaaaacacagaaaugcggcaggaacu

SEQ ID NO: 1134159 - RNA, 19 nt, Human
ugaaaucaagguguguccc

SEQ ID NO: 1134160 - RNA, 22 nt, Human
ugacagcagccgcucgcucccc

SEQ ID NO: 1134161 - RNA, 21 nt, Human
ugcguugugcuuuuguucugc

SEQ ID NO: 1134162 - RNA, 19 nt, Human
ugcuagaaauucggcaaac

SEQ ID NO: 1134163 - RNA, 24 nt, Human
ugcuccuggugucagcuggcacug

SEQ ID NO: 1134164 - RNA, 24 nt, Human
ugcuccuggugucagcuggcacug

SEQ ID NO: 1134165 - RNA, 23 nt, Human
ugcugggcgggcggaacagggug

SEQ ID NO: 1134166 - RNA, 22 nt, Human
uggaaguagaccuuggcucucc

SEQ ID NO: 1134167 - RNA, 23 nt, Human
uggaauccugaaaucaaggugug

SEQ ID NO: 1134168 - RNA, 20 nt, Human
uggcacugccaggcuuccug

SEQ ID NO: 1134169 - RNA, 18 nt, Human
uggcauccaggcucaccc

SEQ ID NO: 1134170 - RNA, 20 nt, Human
ugggagcggcguggaaguag

SEQ ID NO: 1134171 - RNA, 29 nt, Human
ugggauaugcuuauaucaaaaacuuacgu

SEQ ID NO: 1134172 - RNA, 20 nt, Human
ugggcgggcggaacagggug

SEQ ID NO: 1134173 - RNA, 18 nt, Human
ugucccggaugucuccag

SEQ ID NO: 1134174 - RNA, 23 nt, Human
uguuuuacuuuccuagggcggca

SEQ ID NO: 1134175 - RNA, 19 nt, Human
uuccaggccucucccugcu

SEQ ID NO: 1134176 - RNA, 18 nt, Human
uucugugugguaaccgac

SEQ ID NO: 1134177 - RNA, 24 nt, Human
acccugggccuggugucuaguccu

SEQ ID NO: 1134178 - RNA, 21 nt, Human
caaagccaggcccugccccuu

SEQ ID NO: 1134179 - RNA, 20 nt, Human
cuuguagcaaagccaggccc

SEQ ID NO: 1134180 - RNA, 21 nt, Human
gcagacucacacccugggccu

SEQ ID NO: 1134181 - RNA, 19 nt, Human
ucuaucuuguagcaaagcc

SEQ ID NO: 1134182 - RNA, 22 nt, Human
uguagcaaagccaggcccugcc

SEQ ID NO: 1134183 - RNA, 24 nt, Human
aaacagcugggauuacaggcauga

SEQ ID NO: 1134184 - RNA, 25 nt, Human
aaacagcugggauuacaggcaugag

SEQ ID NO: 1134185 - RNA, 19 nt, Human
aacuguuuugguuuagugu

SEQ ID NO: 1134186 - RNA, 25 nt, Human
aagcaauccuccugcgucagccucc

SEQ ID NO: 1134187 - RNA, 24 nt, Human
aauuuuuuaaaacuuuuaguagag

SEQ ID NO: 1134188 - RNA, 19 nt, Human
acacaggcccauaacccgg

SEQ ID NO: 1134189 - RNA, 24 nt, Human
acacggccguggacacacaggccc

SEQ ID NO: 1134190 - RNA, 22 nt, Human
acagaccaccaccuaugcaaac

SEQ ID NO: 1134191 - RNA, 21 nt, Human
acagcucacugaagccucgcu

SEQ ID NO: 1134192 - RNA, 19 nt, Human
accccacgauggcucccuc

SEQ ID NO: 1134193 - RNA, 24 nt, Human
acuccugggcucaagcgauucucc

SEQ ID NO: 1134194 - RNA, 21 nt, Human
agcacccaaggcaggcgucuc

SEQ ID NO: 1134195 - RNA, 19 nt, Human
agccuaaacggugcugcag

SEQ ID NO: 1134196 - RNA, 22 nt, Human
agcugggauuacaggcaugagc

SEQ ID NO: 1134197 - RNA, 19 nt, Human
aggagaaaacugacucuaa

SEQ ID NO: 1134198 - RNA, 21 nt, Human
aggcucccucccuuuucaccc

SEQ ID NO: 1134199 - RNA, 22 nt, Human
aggucucgcuauguugcucagg

SEQ ID NO: 1134200 - RNA, 19 nt, Human
auguugcucaggcuggucu

SEQ ID NO: 1134201 - RNA, 24 nt, Human
caaaacccauguuugaccuaaagc

SEQ ID NO: 1134202 - RNA, 20 nt, Human
caaacagcgcuuaucuggaa

SEQ ID NO: 1134203 - RNA, 22 nt, Human
caaacagcugggauuacaggca

SEQ ID NO: 1134204 - RNA, 27 nt, Human
caagcaauccuccugcgucagccuccc

SEQ ID NO: 1134205 - RNA, 22 nt, Human
caaggcaggcgucucgcugacc

SEQ ID NO: 1134206 - RNA, 21 nt, Human
cacaaucacagcucacugaag

SEQ ID NO: 1134207 - RNA, 24 nt, Human
cacacaggcccauaacccggccag

SEQ ID NO: 1134208 - RNA, 19 nt, Human
caccacgugacagaccacc

SEQ ID NO: 1134209 - RNA, 19 nt, Human
cacccagcgccuuuuucua

SEQ ID NO: 1134210 - RNA, 21 nt, Human
cagccggcauccagcacccaa

SEQ ID NO: 1134211 - RNA, 22 nt, Human
ccaaacagcugggauuacaggc

SEQ ID NO: 1134212 - RNA, 24 nt, Human
ccaaacagcugggauuacaggcau

SEQ ID NO: 1134213 - RNA, 25 nt, Human
ccaccacgugacagaccaccaccua

SEQ ID NO: 1134214 - RNA, 18 nt, Human
ccacgugacagaccacca

SEQ ID NO: 1134215 - RNA, 22 nt, Human
ccagcgccuuuuucuauuuucu

SEQ ID NO: 1134216 - RNA, 23 nt, Human
cccaaacagcugggauuacaggc

SEQ ID NO: 1134217 - RNA, 24 nt, Human
cccaaacagcugggauuacaggca

SEQ ID NO: 1134218 - RNA, 19 nt, Human
cccaccacgugacagacca

SEQ ID NO: 1134219 - RNA, 18 nt, Human
cccauguuugaccuaaag

SEQ ID NO: 1134220 - RNA, 20 nt, Human
cccucccuuuucacccugga

SEQ ID NO: 1134221 - RNA, 26 nt, Human
ccuccugcgucagccucccaaauagc

SEQ ID NO: 1134222 - RNA, 20 nt, Human
ccugggcucaagcgauucuc

SEQ ID NO: 1134223 - RNA, 24 nt, Human
ccuuuguuuagacuuggggccaaa

SEQ ID NO: 1134224 - RNA, 24 nt, Human
cguggacacacaggcccauaaccc

SEQ ID NO: 1134225 - RNA, 24 nt, Human
cucaagcaauccuccugcgucagc

SEQ ID NO: 1134226 - RNA, 24 nt, Human
cucaagcgauucucccgucucugc

SEQ ID NO: 1134227 - RNA, 23 nt, Human
cucacugaagccucgcucuccca

SEQ ID NO: 1134228 - RNA, 18 nt, Human
cucccucccuuuucaccc

SEQ ID NO: 1134229 - RNA, 21 nt, Human
cuccugggcucaagcgauucu

SEQ ID NO: 1134230 - RNA, 25 nt, Human
cuccugggcucaagcgauucucccg

SEQ ID NO: 1134231 - RNA, 21 nt, Human
cucugccacccaaacagcugg

SEQ ID NO: 1134232 - RNA, 23 nt, Human
cucugucacccaggcuggaauac

SEQ ID NO: 1134233 - RNA, 23 nt, Human
gaggucucgcuauguugcucagg

SEQ ID NO: 1134234 - RNA, 22 nt, Human
gauuacaggcaugagccucugc

SEQ ID NO: 1134235 - RNA, 23 nt, Human
gauuacaggcaugagccucugca

SEQ ID NO: 1134236 - RNA, 23 nt, Human
gcccgguuaaauuuuuuaaaacu

SEQ ID NO: 1134237 - RNA, 20 nt, Human
gccuaaacggugcugcagaa

SEQ ID NO: 1134238 - RNA, 20 nt, Human
gcgucagccucccaaauagc

SEQ ID NO: 1134239 - RNA, 19 nt, Human
gcuggaauacaguggcaca

SEQ ID NO: 1134240 - RNA, 19 nt, Human
gcugggauuacaggcauga

SEQ ID NO: 1134241 - RNA, 22 nt, Human
ggauuacaggcaugagccucug

SEQ ID NO: 1134242 - RNA, 19 nt, Human
ggccaaaaaauuccaggca

SEQ ID NO: 1134243 - RNA, 27 nt, Human
ggccguggacacacaggcccauaaccc

SEQ ID NO: 1134244 - RNA, 21 nt, Human
gggccaaaaaauuccaggcac

SEQ ID NO: 1134245 - RNA, 20 nt, Human
gguucuggauucagucagag

SEQ ID NO: 1134246 - RNA, 22 nt, Human
gucguacagccggcauccagca

SEQ ID NO: 1134247 - RNA, 28 nt, Human
uacaggcaaggcaagggccaccaugccc

SEQ ID NO: 1134248 - RNA, 24 nt, Human
uacaggcaugagccucugcaccca

SEQ ID NO: 1134249 - RNA, 24 nt, Human
uaguagagaagaggucucgcuaug

SEQ ID NO: 1134250 - RNA, 24 nt, Human
uaucucucugucacccaggcugga

SEQ ID NO: 1134251 - RNA, 24 nt, Human
uauguugcucaggcuggucuuaaa

SEQ ID NO: 1134252 - RNA, 19 nt, Human
ucacccaggcuggaauaca

SEQ ID NO: 1134253 - RNA, 18 nt, Human
ucagccucccaaauagcu

SEQ ID NO: 1134254 - RNA, 21 nt, Human
uccugggcucaagcgauucuc

SEQ ID NO: 1134255 - RNA, 22 nt, Human
uccugggcucaagcgauucucc

SEQ ID NO: 1134256 - RNA, 24 nt, Human
uccugggcucaagcgauucucccg

SEQ ID NO: 1134257 - RNA, 22 nt, Human
ucucccgucucugccacccaaa

SEQ ID NO: 1134258 - RNA, 19 nt, Human
ucucgcuauguugcucagg

SEQ ID NO: 1134259 - RNA, 23 nt, Human
ucucgcuauguugcucaggcugg

SEQ ID NO: 1134260 - RNA, 24 nt, Human
ucucgcuauguugcucaggcuggu

SEQ ID NO: 1134261 - RNA, 22 nt, Human
ucucucugucacccaggcugga

SEQ ID NO: 1134262 - RNA, 24 nt, Human
ucucucugucacccaggcuggaau

SEQ ID NO: 1134263 - RNA, 24 nt, Human
ucugucacccaggcuggaauacag

SEQ ID NO: 1134264 - RNA, 23 nt, Human
ucuuaaacuccugggcucaagcg

SEQ ID NO: 1134265 - RNA, 23 nt, Human
ugacagaccaccaccuaugcaaa

SEQ ID NO: 1134266 - RNA, 24 nt, Human
ugacagaccaccaccuaugcaaac

SEQ ID NO: 1134267 - RNA, 21 nt, Human
ugaccaagaacugaauagccu

SEQ ID NO: 1134268 - RNA, 23 nt, Human
ugaccaagaacugaauagccugg

SEQ ID NO: 1134269 - RNA, 20 nt, Human
ugauuucaggauuuggcgcu

SEQ ID NO: 1134270 - RNA, 24 nt, Human
ugcccgguuaaauuuuuuaaaacu

SEQ ID NO: 1134271 - RNA, 24 nt, Human
ugcgucagccucccaaauagcuag

SEQ ID NO: 1134272 - RNA, 24 nt, Human
ugcucaggcuggucuuaaacuccu

SEQ ID NO: 1134273 - RNA, 20 nt, Human
uggcacaaucacagcucacu

SEQ ID NO: 1134274 - RNA, 22 nt, Human
uggcacaaucacagcucacuga

SEQ ID NO: 1134275 - RNA, 18 nt, Human
ugggauuacaggcaugag

SEQ ID NO: 1134276 - RNA, 19 nt, Human
ugggauuacaggcaugagc

SEQ ID NO: 1134277 - RNA, 19 nt, Human
ugggauuacaggcaugagc

SEQ ID NO: 1134278 - RNA, 21 nt, Human
ugggauuacaggcaugagccu

SEQ ID NO: 1134279 - RNA, 24 nt, Human
ugggauuacaggcaugagccucug

SEQ ID NO: 1134280 - RNA, 24 nt, Human
ugggauuacaggcaugagccucug

SEQ ID NO: 1134281 - RNA, 25 nt, Human
ugggauuacaggcaugagccucugc

SEQ ID NO: 1134282 - RNA, 24 nt, Human
ugggcucaagcgauucucccgucu

SEQ ID NO: 1134283 - RNA, 22 nt, Human
uuuagacuuggggccaaaaaau

SEQ ID NO: 1134284 - RNA, 18 nt, Human
uuuuuuuuuugagacagg

SEQ ID NO: 1134285 - RNA, 18 nt, Human
ugagaggcggaagcacau

SEQ ID NO: 1134286 - RNA, 21 nt, Human
aaaaagauauguugaagaaaa

SEQ ID NO: 1134287 - RNA, 21 nt, Human
aaaccagguggcugaaaacca

SEQ ID NO: 1134288 - RNA, 18 nt, Human
aaacuaacagagacccca

SEQ ID NO: 1134289 - RNA, 20 nt, Human
aaaggaagggaaacaagggg

SEQ ID NO: 1134290 - RNA, 19 nt, Human
aaagugcugggauucuagg

SEQ ID NO: 1134291 - RNA, 20 nt, Human
aaagugcugggauucuaggc

SEQ ID NO: 1134292 - RNA, 20 nt, Human
aaagugcugggauucuaggc

SEQ ID NO: 1134293 - RNA, 24 nt, Human
aaagugcugggauucuaggcguga

SEQ ID NO: 1134294 - RNA, 22 nt, Human
aaaguucuugaaaaugccuccc

SEQ ID NO: 1134295 - RNA, 19 nt, Human
aaaugaaaggaagaagccc

SEQ ID NO: 1134296 - RNA, 18 nt, Human
aaaugccuccccagccgu

SEQ ID NO: 1134297 - RNA, 23 nt, Human
aacacacucuucaguggcugccc

SEQ ID NO: 1134298 - RNA, 21 nt, Human
aagcagagccggccuccaggg

SEQ ID NO: 1134299 - RNA, 19 nt, Human
aagugcugggauucuaggc

SEQ ID NO: 1134300 - RNA, 19 nt, Human
aauccaggaugaccucauc

SEQ ID NO: 1134301 - RNA, 18 nt, Human
acaaaagaaggcaauaca

SEQ ID NO: 1134302 - RNA, 23 nt, Human
acaaaccagguggcugaaaacca

SEQ ID NO: 1134303 - RNA, 19 nt, Human
acaaaugaaaggaagaagc

SEQ ID NO: 1134304 - RNA, 25 nt, Human
accggagagagcccagcgggaggac

SEQ ID NO: 1134305 - RNA, 20 nt, Human
accgugggaacagcucacac

SEQ ID NO: 1134306 - RNA, 21 nt, Human
accuugcccagcgccccgcgg

SEQ ID NO: 1134307 - RNA, 18 nt, Human
acucugucacccaagcug

SEQ ID NO: 1134308 - RNA, 25 nt, Human
acucugucacccaagcuggagugca

SEQ ID NO: 1134309 - RNA, 19 nt, Human
acugcagccuugacuuccu

SEQ ID NO: 1134310 - RNA, 23 nt, Human
acuuuguugcccaggcuggucuc

SEQ ID NO: 1134311 - RNA, 25 nt, Human
acuuuguugcccaggcuggucucaa

SEQ ID NO: 1134312 - RNA, 21 nt, Human
agaaacacaagaagaugacca

SEQ ID NO: 1134313 - RNA, 19 nt, Human
agacaggcagugauuggag

SEQ ID NO: 1134314 - RNA, 25 nt, Human
agagaccccaaagaaaaggaaggga

SEQ ID NO: 1134315 - RNA, 19 nt, Human
agcagagccggccuccagg

SEQ ID NO: 1134316 - RNA, 22 nt, Human
agcgggaggacaguuggaacag

SEQ ID NO: 1134317 - RNA, 23 nt, Human
aggcuggaagggggcaggaagca

SEQ ID NO: 1134318 - RNA, 22 nt, Human
agggacccuacccuggugccuu

SEQ ID NO: 1134319 - RNA, 19 nt, Human
agggggcaggaagcagagc

SEQ ID NO: 1134320 - RNA, 21 nt, Human
agguggcugaaaaccacagaa

SEQ ID NO: 1134321 - RNA, 21 nt, Human
agugcagcgguuucccugcca

SEQ ID NO: 1134322 - RNA, 26 nt, Human
aguuugggcuucaaucuaccuuucug

SEQ ID NO: 1134323 - RNA, 18 nt, Human
auaaggucacagcauugg

SEQ ID NO: 1134324 - RNA, 24 nt, Human
aucuuacuuuguugcccaggcugg

SEQ ID NO: 1134325 - RNA, 23 nt, Human
augaccucaucugaaccugaaca

SEQ ID NO: 1134326 - RNA, 24 nt, Human
caaaguuccggagaguagaagucc

SEQ ID NO: 1134327 - RNA, 19 nt, Human
caacucaacccuuccacaa

SEQ ID NO: 1134328 - RNA, 19 nt, Human
caagcgauccucccgccuc

SEQ ID NO: 1134329 - RNA, 20 nt, Human
caagcgauccuccugccuca

SEQ ID NO: 1134330 - RNA, 22 nt, Human
caagcgauccuccugccucagc

SEQ ID NO: 1134331 - RNA, 18 nt, Human
caaggagugccgagccuu

SEQ ID NO: 1134332 - RNA, 18 nt, Human
cacaacagccagugcucu

SEQ ID NO: 1134333 - RNA, 19 nt, Human
cacacaccucugugccgcc

SEQ ID NO: 1134334 - RNA, 21 nt, Human
cacacucuucaguggcugccc

SEQ ID NO: 1134335 - RNA, 18 nt, Human
cacaggcucuuucuuaag

SEQ ID NO: 1134336 - RNA, 19 nt, Human
caccacgcccagcuaauuu

SEQ ID NO: 1134337 - RNA, 21 nt, Human
cacccaagcuggagugcagug

SEQ ID NO: 1134338 - RNA, 23 nt, Human
cacuccagcccaugcacugggga

SEQ ID NO: 1134339 - RNA, 23 nt, Human
cacucugucacccaagcuggagu

SEQ ID NO: 1134340 - RNA, 24 nt, Human
cacucugucacccaagcuggagug

SEQ ID NO: 1134341 - RNA, 18 nt, Human
cagcgggaggacaguugg

SEQ ID NO: 1134342 - RNA, 24 nt, Human
caggaaacuaacagagaccccaaa

SEQ ID NO: 1134343 - RNA, 24 nt, Human
caggaucuuacuuuguugcccagg

SEQ ID NO: 1134344 - RNA, 23 nt, Human
caggaugaccucaucugaaccug

SEQ ID NO: 1134345 - RNA, 21 nt, Human
caggcgcgcaucaccacgccc

SEQ ID NO: 1134346 - RNA, 19 nt, Human
caggcucccggguuauucc

SEQ ID NO: 1134347 - RNA, 20 nt, Human
caggcucccggguuauuccc

SEQ ID NO: 1134348 - RNA, 21 nt, Human
caucaacucaacccuuccaca

SEQ ID NO: 1134349 - RNA, 21 nt, Human
caugacauuggcucuuuuucc

SEQ ID NO: 1134350 - RNA, 20 nt, Human
ccacagacuuuuuuuuuuuu

SEQ ID NO: 1134351 - RNA, 22 nt, Human
ccacaugacauuggcucuuuuu

SEQ ID NO: 1134352 - RNA, 21 nt, Human
cccaaagaaaaggaagggaaa

SEQ ID NO: 1134353 - RNA, 25 nt, Human
cccacaaaccagguggcugaaaacc

SEQ ID NO: 1134354 - RNA, 21 nt, Human
cccacagacuuuuuuuuuuuu

SEQ ID NO: 1134355 - RNA, 20 nt, Human
cccaggaagaaucccucugc

SEQ ID NO: 1134356 - RNA, 22 nt, Human
ccccaggaaugcugcgcccucg

SEQ ID NO: 1134357 - RNA, 19 nt, Human
cccccaggaagaaucccuc

SEQ ID NO: 1134358 - RNA, 26 nt, Human
ccucccgccucugccucucauguagc

SEQ ID NO: 1134359 - RNA, 25 nt, Human
ccuccugccucagccucuaaagugc

SEQ ID NO: 1134360 - RNA, 22 nt, Human
ccucugccucucauguagcugg

SEQ ID NO: 1134361 - RNA, 25 nt, Human
ccucugccucucauguagcuggaaa

SEQ ID NO: 1134362 - RNA, 18 nt, Human
ccugggcucaagcgaucc

SEQ ID NO: 1134363 - RNA, 20 nt, Human
ccugggcucaagcgauccuc

SEQ ID NO: 1134364 - RNA, 23 nt, Human
ccugggcucaagcgauccuccug

SEQ ID NO: 1134365 - RNA, 19 nt, Human
ccuugacuuccugggcuca

SEQ ID NO: 1134366 - RNA, 20 nt, Human
ccuugacuuccugggcucaa

SEQ ID NO: 1134367 - RNA, 23 nt, Human
cgcgcaucaccacgcccagcuaa

SEQ ID NO: 1134368 - RNA, 19 nt, Human
cggccuccagggcucugcc

SEQ ID NO: 1134369 - RNA, 21 nt, Human
cggccuccagggcucugccag

SEQ ID NO: 1134370 - RNA, 24 nt, Human
cuaaagugcugggauucuaggcgu

SEQ ID NO: 1134371 - RNA, 25 nt, Human
cuaacagagaccccaaagaaaagga

SEQ ID NO: 1134372 - RNA, 24 nt, Human
cucaagcgauccucccgccucugc

SEQ ID NO: 1134373 - RNA, 24 nt, Human
cucaagcgauccuccugccucagc

SEQ ID NO: 1134374 - RNA, 24 nt, Human
cucacucugucacccaagcuggag

SEQ ID NO: 1134375 - RNA, 22 nt, Human
cuccgcgcccgggcacaggcuc

SEQ ID NO: 1134376 - RNA, 19 nt, Human
cuccucugaagcccccagg

SEQ ID NO: 1134377 - RNA, 21 nt, Human
cucggcccuaauuccuucacu

SEQ ID NO: 1134378 - RNA, 21 nt, Human
cugaacacaucugcaaagacu

SEQ ID NO: 1134379 - RNA, 22 nt, Human
cugccucagccucuaaagugcu

SEQ ID NO: 1134380 - RNA, 22 nt, Human
cugcgcccucgggcugcuccag

SEQ ID NO: 1134381 - RNA, 24 nt, Human
cuguaaaauccugcaccuggauuu

SEQ ID NO: 1134382 - RNA, 24 nt, Human
cuuccugggcucaagcgauccucc

SEQ ID NO: 1134383 - RNA, 23 nt, Human
cuuuuuuuuuuuucagggucuca

SEQ ID NO: 1134384 - RNA, 19 nt, Human
gaaacuaacagagacccca

SEQ ID NO: 1134385 - RNA, 24 nt, Human
gaaacuaacagagaccccaaagaa

SEQ ID NO: 1134386 - RNA, 21 nt, Human
gagagcccagcgggaggacag

SEQ ID NO: 1134387 - RNA, 18 nt, Human
gcaggaagcagagccggc

SEQ ID NO: 1134388 - RNA, 19 nt, Human
gcaggaccacccuccucug

SEQ ID NO: 1134389 - RNA, 21 nt, Human
gccauuaaggaaacgucaccc

SEQ ID NO: 1134390 - RNA, 19 nt, Human
gccguuuucgugagaggug

SEQ ID NO: 1134391 - RNA, 18 nt, Human
gccugccaaggagugccg

SEQ ID NO: 1134392 - RNA, 21 nt, Human
gcuccaggcuggaagggggca

SEQ ID NO: 1134393 - RNA, 21 nt, Human
gcuggagugcaguggugccag

SEQ ID NO: 1134394 - RNA, 23 nt, Human
ggaagggaaacaagggguuugaa

SEQ ID NO: 1134395 - RNA, 22 nt, Human
ggaagggggcaggaagcagagc

SEQ ID NO: 1134396 - RNA, 18 nt, Human
ggacucaacucagcccac

SEQ ID NO: 1134397 - RNA, 18 nt, Human
ggcaggaagcagagccgg

SEQ ID NO: 1134398 - RNA, 22 nt, Human
ggcugccauaacaaauucccac

SEQ ID NO: 1134399 - RNA, 21 nt, Human
gggaggacaguuggaacagag

SEQ ID NO: 1134400 - RNA, 20 nt, Human
gggcaggaccacccuccucu

SEQ ID NO: 1134401 - RNA, 22 nt, Human
gggcucaagcgauccuccugcc

SEQ ID NO: 1134402 - RNA, 19 nt, Human
gggcugccauaacaaauuc

SEQ ID NO: 1134403 - RNA, 19 nt, Human
ggggagaccgaggcacaga

SEQ ID NO: 1134404 - RNA, 24 nt, Human
uaaagugcugggauucuaggcgug

SEQ ID NO: 1134405 - RNA, 24 nt, Human
uaacagagaccccaaagaaaagga

SEQ ID NO: 1134406 - RNA, 20 nt, Human
uaaguaacucacucaagguc

SEQ ID NO: 1134407 - RNA, 24 nt, Human
uaauuuuuuuuauuuuuuguagag

SEQ ID NO: 1134408 - RNA, 23 nt, Human
uacacucaucaacucaacccuuc

SEQ ID NO: 1134409 - RNA, 19 nt, Human
uacgaggagagauacagag

SEQ ID NO: 1134410 - RNA, 21 nt, Human
uacuuuguugcccaggcuggu

SEQ ID NO: 1134411 - RNA, 22 nt, Human
uagagaacccugacaaacaagg

SEQ ID NO: 1134412 - RNA, 22 nt, Human
uagagacaggaucuuacuuugu

SEQ ID NO: 1134413 - RNA, 19 nt, Human
uagccguuuucgugagagg

SEQ ID NO: 1134414 - RNA, 21 nt, Human
uaguggccgacacucagcagc

SEQ ID NO: 1134415 - RNA, 18 nt, Human
uauuuugagauuuuucag

SEQ ID NO: 1134416 - RNA, 23 nt, Human
ucaacucaacccuuccacaaccc

SEQ ID NO: 1134417 - RNA, 22 nt, Human
ucacucaaggucacacaguuga

SEQ ID NO: 1134418 - RNA, 19 nt, Human
ucacugcagccuugacuuc

SEQ ID NO: 1134419 - RNA, 23 nt, Human
ucacugcagccuugacuuccugg

SEQ ID NO: 1134420 - RNA, 24 nt, Human
ucacugcagccuugacuuccuggg

SEQ ID NO: 1134421 - RNA, 19 nt, Human
uccagggcucugccagggg

SEQ ID NO: 1134422 - RNA, 21 nt, Human
ucccugccaggcucccggguu

SEQ ID NO: 1134423 - RNA, 22 nt, Human
uccucugaagcccccaggaaga

SEQ ID NO: 1134424 - RNA, 23 nt, Human
uccucugaagcccccaggaagaa

SEQ ID NO: 1134425 - RNA, 21 nt, Human
uccugggcucaagcgauccuc

SEQ ID NO: 1134426 - RNA, 21 nt, Human
uccugggcucaagcgauccuc

SEQ ID NO: 1134427 - RNA, 22 nt, Human
uccugggcucaagcgauccucc

SEQ ID NO: 1134428 - RNA, 23 nt, Human
uccugggcucaagcgauccuccc

SEQ ID NO: 1134429 - RNA, 24 nt, Human
uccugggcucaagcgauccuccug

SEQ ID NO: 1134430 - RNA, 23 nt, Human
uccuuggcuuggagcagcagugc

SEQ ID NO: 1134431 - RNA, 23 nt, Human
ucucaaauuccugggcucaagcg

SEQ ID NO: 1134432 - RNA, 24 nt, Human
ucucacucugucacccaagcugga

SEQ ID NO: 1134433 - RNA, 26 nt, Human
ucucacucugucacccaagcuggagu

SEQ ID NO: 1134434 - RNA, 27 nt, Human
ucucacucugucacccaagcuggagug

SEQ ID NO: 1134435 - RNA, 24 nt, Human
ucucauguagcuggaaacacaggc

SEQ ID NO: 1134436 - RNA, 24 nt, Human
ucugucacccaagcuggagugcag

SEQ ID NO: 1134437 - RNA, 22 nt, Human
ucuuacuuuguugcccaggcug

SEQ ID NO: 1134438 - RNA, 23 nt, Human
ucuuacuuuguugcccaggcugg

SEQ ID NO: 1134439 - RNA, 22 nt, Human
ucuucaguccuuggugcuccuu

SEQ ID NO: 1134440 - RNA, 19 nt, Human
ugaaaaugccuccccagcc

SEQ ID NO: 1134441 - RNA, 21 nt, Human
ugaaaaugccuccccagccgu

SEQ ID NO: 1134442 - RNA, 18 nt, Human
ugaaaggaagaagcccau

SEQ ID NO: 1134443 - RNA, 22 nt, Human
ugaaauggauacagguaaaaug

SEQ ID NO: 1134444 - RNA, 23 nt, Human
ugaagcccccaggaagaagggag

SEQ ID NO: 1134445 - RNA, 21 nt, Human
ugacauuggcucuuuuuccuu

SEQ ID NO: 1134446 - RNA, 25 nt, Human
ugacuuccugggcucaagcgauccu

SEQ ID NO: 1134447 - RNA, 19 nt, Human
ugagaggugguguucuggg

SEQ ID NO: 1134448 - RNA, 23 nt, Human
ugagccuccgcgcccgggcacag

SEQ ID NO: 1134449 - RNA, 19 nt, Human
ugccauaacaaauucccac

SEQ ID NO: 1134450 - RNA, 24 nt, Human
ugccauaacaaauucccacaaacc

SEQ ID NO: 1134451 - RNA, 23 nt, Human
ugcccagcgccccgcgggcgucu

SEQ ID NO: 1134452 - RNA, 24 nt, Human
ugcccaggcuggucucaaauuccu

SEQ ID NO: 1134453 - RNA, 28 nt, Human
ugcccaggcuggucucaaauuccugggc

SEQ ID NO: 1134454 - RNA, 23 nt, Human
ugccucagccucuaaagugcugg

SEQ ID NO: 1134455 - RNA, 19 nt, Human
ugcugggcaccuggcuguu

SEQ ID NO: 1134456 - RNA, 24 nt, Human
uggaaacacaggcgcgcaucacca

SEQ ID NO: 1134457 - RNA, 23 nt, Human
uggagcacggcuggugccugcca

SEQ ID NO: 1134458 - RNA, 24 nt, Human
uggagugcaguggugccaacaugg

SEQ ID NO: 1134459 - RNA, 22 nt, Human
uggcacagaacaagucugugcc

SEQ ID NO: 1134460 - RNA, 19 nt, Human
ugggauucuaggcgugagc

SEQ ID NO: 1134461 - RNA, 24 nt, Human
ugggauucuaggcgugagccuccg

SEQ ID NO: 1134462 - RNA, 23 nt, Human
ugggcaggaccacccuccucuga

SEQ ID NO: 1134463 - RNA, 24 nt, Human
ugggcucaagcgauccucccgccu

SEQ ID NO: 1134464 - RNA, 24 nt, Human
ugggcucaagcgauccuccugccu

SEQ ID NO: 1134465 - RNA, 21 nt, Human
uggguagcuugugaaccacca

SEQ ID NO: 1134466 - RNA, 21 nt, Human
uggguccugaauccaaugacc

SEQ ID NO: 1134467 - RNA, 24 nt, Human
uggugccaacaugguucacugcag

SEQ ID NO: 1134468 - RNA, 19 nt, Human
uggugccuucagaggcagc

SEQ ID NO: 1134469 - RNA, 24 nt, Human
ugguucacugcagccuugacuucc

SEQ ID NO: 1134470 - RNA, 18 nt, Human
ugugaaagaugcauucug

SEQ ID NO: 1134471 - RNA, 18 nt, Human
uguuccgucccuucacuu

SEQ ID NO: 1134472 - RNA, 22 nt, Human
uguugcccaggcuggucucaaa

SEQ ID NO: 1134473 - RNA, 23 nt, Human
uguugccuguauucguuuucugg

SEQ ID NO: 1134474 - RNA, 18 nt, Human
uuacuuuguugcccaggc

SEQ ID NO: 1134475 - RNA, 24 nt, Human
uuccaacacacucuucaguggcug

SEQ ID NO: 1134476 - RNA, 23 nt, Human
uuccugggcucaagcgauccucc

SEQ ID NO: 1134477 - RNA, 24 nt, Human
uucgugagaggugguguucugggu

SEQ ID NO: 1134478 - RNA, 19 nt, Human
uugcagauguaauuaagug

SEQ ID NO: 1134479 - RNA, 18 nt, Human
uugcccagcgccccgcgg

SEQ ID NO: 1134480 - RNA, 22 nt, Human
uugugcauacacgcucggcccu

SEQ ID NO: 1134481 - RNA, 27 nt, Human
uuuacacucaucaacucaacccuucca

SEQ ID NO: 1134482 - RNA, 21 nt, Human
uuucacaacagccagugcucu

SEQ ID NO: 1134483 - RNA, 24 nt, Human
uuucuggggcugccauaacaaauu

SEQ ID NO: 1134484 - RNA, 23 nt, Human
uuuguugcccaggcuggucucaa

SEQ ID NO: 1134485 - RNA, 24 nt, Human
uuuguugcccaggcuggucucaaa

SEQ ID NO: 1134486 - RNA, 20 nt, Human
uuuucaguggcugacacuuc

SEQ ID NO: 1134487 - RNA, 22 nt, Human
aaaugccagagacccacagagu

SEQ ID NO: 1134488 - RNA, 23 nt, Human
acagcuccaaauagccauaggca

SEQ ID NO: 1134489 - RNA, 21 nt, Human
augaccuucgcaccaguuuuc

SEQ ID NO: 1134490 - RNA, 20 nt, Human
ccacaacugggagcuugauu

SEQ ID NO: 1134491 - RNA, 25 nt, Human
cuccaaauagccauaggcauuguuc

SEQ ID NO: 1134492 - RNA, 18 nt, Human
cuugguggggccucucca

SEQ ID NO: 1134493 - RNA, 24 nt, Human
gacagcuccaaauagccauaggca

SEQ ID NO: 1134494 - RNA, 21 nt, Human
gcauuguuccuugguggggcc

SEQ ID NO: 1134495 - RNA, 22 nt, Human
guguagaaaugccagagaccca

SEQ ID NO: 1134496 - RNA, 27 nt, Human
ucacacaaaugaccuucgcaccaguuu

SEQ ID NO: 1134497 - RNA, 24 nt, Human
ucuacuugcaagauguguagaaau

SEQ ID NO: 1134498 - RNA, 20 nt, Human
ugccuggaggaggaaucugg

SEQ ID NO: 1134499 - RNA, 20 nt, Human
uggaacaaaagggcaguuag

SEQ ID NO: 1134500 - RNA, 23 nt, Human
uguuguggcagcugacgagcuug

SEQ ID NO: 1134501 - RNA, 19 nt, Human
aaaaggccccagcaguuuc

SEQ ID NO: 1134502 - RNA, 19 nt, Human
aacagaaggaaucacugaa

SEQ ID NO: 1134503 - RNA, 18 nt, Human
aagaaacucaaccagaga

SEQ ID NO: 1134504 - RNA, 21 nt, Human
aaucacugaacgaacagccac

SEQ ID NO: 1134505 - RNA, 19 nt, Human
acacuggagggcaagccca

SEQ ID NO: 1134506 - RNA, 20 nt, Human
acacuggagggcaagcccac

SEQ ID NO: 1134507 - RNA, 22 nt, Human
acccccagggccugggacagca

SEQ ID NO: 1134508 - RNA, 18 nt, Human
acuaaggccuuaaugggu

SEQ ID NO: 1134509 - RNA, 21 nt, Human
acucaaccagagaugaaagga

SEQ ID NO: 1134510 - RNA, 18 nt, Human
acugcaacaaccaagccc

SEQ ID NO: 1134511 - RNA, 25 nt, Human
acuucacccacacagggaguuucgg

SEQ ID NO: 1134512 - RNA, 20 nt, Human
acuuugcacaguuacucccc

SEQ ID NO: 1134513 - RNA, 23 nt, Human
agaaagagaggcacaaaaugcuu

SEQ ID NO: 1134514 - RNA, 18 nt, Human
agaggagaagaaagagag

SEQ ID NO: 1134515 - RNA, 24 nt, Human
aggagaagaaagagaggcacaaaa

SEQ ID NO: 1134516 - RNA, 19 nt, Human
aggcaguaaacaaaacagg

SEQ ID NO: 1134517 - RNA, 20 nt, Human
augagcacggcuaagccaag

SEQ ID NO: 1134518 - RNA, 18 nt, Human
auggaagaaacucaacca

SEQ ID NO: 1134519 - RNA, 22 nt, Human
auugcacuuuaugccuuacaaa

SEQ ID NO: 1134520 - RNA, 18 nt, Human
caaaacagggacuucagc

SEQ ID NO: 1134521 - RNA, 24 nt, Human
cacugacugcauaaaacuuugcac

SEQ ID NO: 1134522 - RNA, 20 nt, Human
cagaaggaaucacugaacgg

SEQ ID NO: 1134523 - RNA, 22 nt, Human
cagccagaggagaagaaagaga

SEQ ID NO: 1134524 - RNA, 21 nt, Human
cagcccagugccuggaaacag

SEQ ID NO: 1134525 - RNA, 22 nt, Human
cagcccagugccuggaaacagg

SEQ ID NO: 1134526 - RNA, 21 nt, Human
caggaggcaguaaacaaaaca

SEQ ID NO: 1134527 - RNA, 23 nt, Human
caggaggcaguaaacaaaacagg

SEQ ID NO: 1134528 - RNA, 18 nt, Human
cagugccuggaaacagcc

SEQ ID NO: 1134529 - RNA, 24 nt, Human
cauguaccauuuccugguccugaa

SEQ ID NO: 1134530 - RNA, 19 nt, Human
ccagcaguuucccugaaac

SEQ ID NO: 1134531 - RNA, 21 nt, Human
cccaccacacuggagggcaag

SEQ ID NO: 1134532 - RNA, 20 nt, Human
cccaggugauguaauccaau

SEQ ID NO: 1134533 - RNA, 21 nt, Human
cccccucacccccagggccug

SEQ ID NO: 1134534 - RNA, 21 nt, Human
ccucacccccagggccuggga

SEQ ID NO: 1134535 - RNA, 22 nt, Human
ccuuccuucuaauggaagaaac

SEQ ID NO: 1134536 - RNA, 24 nt, Human
cguccaacaugugaaagauagcac

SEQ ID NO: 1134537 - RNA, 25 nt, Human
cuauacucuucccaucugcaccaca

SEQ ID NO: 1134538 - RNA, 23 nt, Human
cucaaagcuccauguaccauuuc

SEQ ID NO: 1134539 - RNA, 21 nt, Human
cucccccucacccccagggcc

SEQ ID NO: 1134540 - RNA, 23 nt, Human
cuggaaugagagagguuuuucuu

SEQ ID NO: 1134541 - RNA, 18 nt, Human
cugggggaaugacuuuuu

SEQ ID NO: 1134542 - RNA, 27 nt, Human
cuucccacuucacccacacagggaguu

SEQ ID NO: 1134543 - RNA, 29 nt, Human
gaacaggaggcaguaaacaaaagggaccc

SEQ ID NO: 1134544 - RNA, 19 nt, Human
gaccuggaaugagagaggu

SEQ ID NO: 1134545 - RNA, 19 nt, Human
gagaagaaagagaggcaca

SEQ ID NO: 1134546 - RNA, 21 nt, Human
gaggagugggcaggggacagg

SEQ ID NO: 1134547 - RNA, 23 nt, Human
gagugggcaggggacaggggguu

SEQ ID NO: 1134548 - RNA, 19 nt, Human
gccugggacagcaccaggc

SEQ ID NO: 1134549 - RNA, 21 nt, Human
ggacaaaggcaaaaggcccca

SEQ ID NO: 1134550 - RNA, 27 nt, Human
ggacauccagcccagugccuggaaaca

SEQ ID NO: 1134551 - RNA, 25 nt, Human
guccaacugggcuggaaucccaacu

SEQ ID NO: 1134552 - RNA, 20 nt, Human
gugggcaggggacagggggu

SEQ ID NO: 1134553 - RNA, 23 nt, Human
gugggucaguaaggguuugagga

SEQ ID NO: 1134554 - RNA, 23 nt, Human
uccgcuccuuccucguucugggg

SEQ ID NO: 1134555 - RNA, 26 nt, Human
ucuccaguggauauucagccagagga

SEQ ID NO: 1134556 - RNA, 18 nt, Human
ugcaccacagaccuggaa

SEQ ID NO: 1134557 - RNA, 19 nt, Human
ugcaccacagaccuggaau

SEQ ID NO: 1134558 - RNA, 20 nt, Human
ugcaguaaaggcugauugag

SEQ ID NO: 1134559 - RNA, 23 nt, Human
ugccccauggguguggucugucc

SEQ ID NO: 1134560 - RNA, 21 nt, Human
ugccuggaaacagccacgagg

SEQ ID NO: 1134561 - RNA, 21 nt, Human
uggaagaaacucaaccagaga

SEQ ID NO: 1134562 - RNA, 23 nt, Human
uggaagaaacucaaccagagaug

SEQ ID NO: 1134563 - RNA, 18 nt, Human
ugggcaggggacaggggg

SEQ ID NO: 1134564 - RNA, 19 nt, Human
uggguuucuaagaugaguu

SEQ ID NO: 1134565 - RNA, 18 nt, Human
uuaauccuuccuucuaau

SEQ ID NO: 1134566 - RNA, 25 nt, Human
uucaccucuacuaaccaaccccuag

SEQ ID NO: 1134567 - RNA, 23 nt, Human
uucagaagcugguauucuaugga

SEQ ID NO: 1134568 - RNA, 22 nt, Human
uuuuguggguuucuaagaugag

SEQ ID NO: 1134569 - RNA, 24 nt, Human
aacuugauuuauaccgaggaggug

SEQ ID NO: 1134570 - RNA, 26 nt, Human
aaggccccaagggccagcgucagggg

SEQ ID NO: 1134571 - RNA, 19 nt, Human
accccugaggggggaggga

SEQ ID NO: 1134572 - RNA, 20 nt, Human
acccgggauggggaagcucc

SEQ ID NO: 1134573 - RNA, 25 nt, Human
acuccuaggggugccggcgcccagg

SEQ ID NO: 1134574 - RNA, 22 nt, Human
acuggcuuugugguaguauguu

SEQ ID NO: 1134575 - RNA, 21 nt, Human
agccgauggugaguccaaagc

SEQ ID NO: 1134576 - RNA, 21 nt, Human
aggagguuggccuugggcagg

SEQ ID NO: 1134577 - RNA, 22 nt, Human
aggcggagguggaaucggaagg

SEQ ID NO: 1134578 - RNA, 23 nt, Human
aggcggagguggaaucggaaggg

SEQ ID NO: 1134579 - RNA, 22 nt, Human
agggaagggaggggggucaggu

SEQ ID NO: 1134580 - RNA, 19 nt, Human
aggggcaggagcuggagcu

SEQ ID NO: 1134581 - RNA, 20 nt, Human
augggaaacagcuccuuaca

SEQ ID NO: 1134582 - RNA, 24 nt, Human
cacacugccccugguacucagaau

SEQ ID NO: 1134583 - RNA, 19 nt, Human
cagaaucccgaagcaccau

SEQ ID NO: 1134584 - RNA, 20 nt, Human
cagaauccugcgugccccuc

SEQ ID NO: 1134585 - RNA, 18 nt, Human
cagggggagguggaggcg

SEQ ID NO: 1134586 - RNA, 19 nt, Human
caugcccacugggcacacu

SEQ ID NO: 1134587 - RNA, 28 nt, Human
ccccucuguggcagggggagguggaggc

SEQ ID NO: 1134588 - RNA, 23 nt, Human
ccccugaggggggagggaaggga

SEQ ID NO: 1134589 - RNA, 24 nt, Human
cccuccugggaccccaugcccacu

SEQ ID NO: 1134590 - RNA, 22 nt, Human
ccggguugggcaggcagccgca

SEQ ID NO: 1134591 - RNA, 26 nt, Human
ccucagcugcugggguggcggggucc

SEQ ID NO: 1134592 - RNA, 21 nt, Human
ccuccugggaccccaugccca

SEQ ID NO: 1134593 - RNA, 22 nt, Human
ccucggggcgggccuaggcccu

SEQ ID NO: 1134594 - RNA, 18 nt, Human
ccucugccccuagugcuc

SEQ ID NO: 1134595 - RNA, 18 nt, Human
ccugcauccuugugcugg

SEQ ID NO: 1134596 - RNA, 23 nt, Human
ccugggaccccaugcccacuggg

SEQ ID NO: 1134597 - RNA, 21 nt, Human
ccuugugcuggccugaaaauc

SEQ ID NO: 1134598 - RNA, 21 nt, Human
cucaacguuaacguugccaac

SEQ ID NO: 1134599 - RNA, 20 nt, Human
cuccagcguggcacccacga

SEQ ID NO: 1134600 - RNA, 23 nt, Human
cuccugggaccccaugcccacuu

SEQ ID NO: 1134601 - RNA, 23 nt, Human
cugaggggggagggaagggaggg

SEQ ID NO: 1134602 - RNA, 21 nt, Human
cugcauccuugugcuggccug

SEQ ID NO: 1134603 - RNA, 20 nt, Human
cugcccccucggggcgggcc

SEQ ID NO: 1134604 - RNA, 21 nt, Human
cugcccccucggggcgggccu

SEQ ID NO: 1134605 - RNA, 19 nt, Human
cuggccgccucugccccua

SEQ ID NO: 1134606 - RNA, 21 nt, Human
cugguacucagaaucccgaag

SEQ ID NO: 1134607 - RNA, 27 nt, Human
cuuugaagaggagguuggccuugggca

SEQ ID NO: 1134608 - RNA, 19 nt, Human
gaccccaugcccacugggc

SEQ ID NO: 1134609 - RNA, 18 nt, Human
gagcuggagcuucuucuc

SEQ ID NO: 1134610 - RNA, 19 nt, Human
gaggauggggacgccagga

SEQ ID NO: 1134611 - RNA, 18 nt, Human
gauggugaguccaaagcc

SEQ ID NO: 1134612 - RNA, 25 nt, Human
gccccaagggccagcgucaggggca

SEQ ID NO: 1134613 - RNA, 22 nt, Human
gcgggccuaggcccuuuggagg

SEQ ID NO: 1134614 - RNA, 20 nt, Human
gcucagaauccugcgugccc

SEQ ID NO: 1134615 - RNA, 22 nt, Human
gcuggagcuucuucuccagcgu

SEQ ID NO: 1134616 - RNA, 19 nt, Human
ggaaagugggcggggcagg

SEQ ID NO: 1134617 - RNA, 18 nt, Human
ggaagggaggggggucag

SEQ ID NO: 1134618 - RNA, 19 nt, Human
ggaaucccuccugggaccc

SEQ ID NO: 1134619 - RNA, 23 nt, Human
ggaggugggaaagugggcggggc

SEQ ID NO: 1134620 - RNA, 21 nt, Human
ggcgagggcggagguggcggc

SEQ ID NO: 1134621 - RNA, 22 nt, Human
ggcgguugcagccccggggguc

SEQ ID NO: 1134622 - RNA, 20 nt, Human
gggaaagugggcggggcagg

SEQ ID NO: 1134623 - RNA, 20 nt, Human
gggaaagugggcggggcagg

SEQ ID NO: 1134624 - RNA, 22 nt, Human
gggcaggagcuggagcuucuuc

SEQ ID NO: 1134625 - RNA, 21 nt, Human
gggcaggcagccgcaggcccc

SEQ ID NO: 1134626 - RNA, 21 nt, Human
ggggagggaagggaggggggu

SEQ ID NO: 1134627 - RNA, 18 nt, Human
gggggagggaagggaggg

SEQ ID NO: 1134628 - RNA, 23 nt, Human
gguugggcaggcagccgcaggcc

SEQ ID NO: 1134629 - RNA, 20 nt, Human
guggaaggcgggggccagga

SEQ ID NO: 1134630 - RNA, 21 nt, Human
uacaccuccgguggcacuccu

SEQ ID NO: 1134631 - RNA, 19 nt, Human
uacucagaaucccgaagca

SEQ ID NO: 1134632 - RNA, 24 nt, Human
uauccugcauccuugugcuggccu

SEQ ID NO: 1134633 - RNA, 18 nt, Human
ucagaaucccgaagcacc

SEQ ID NO: 1134634 - RNA, 24 nt, Human
uccacacccaccugcaacugguca

SEQ ID NO: 1134635 - RNA, 18 nt, Human
ucgcugcccccucggggc

SEQ ID NO: 1134636 - RNA, 18 nt, Human
ucuggccgccucugcccc

SEQ ID NO: 1134637 - RNA, 19 nt, Human
ucuucuccagcguggcacc

SEQ ID NO: 1134638 - RNA, 21 nt, Human
ugaaugggaaacagcuccuua

SEQ ID NO: 1134639 - RNA, 20 nt, Human
ugcccacugggcacacugcc

SEQ ID NO: 1134640 - RNA, 21 nt, Human
uggaaggcgggggccaggagg

SEQ ID NO: 1134641 - RNA, 24 nt, Human
uggaaugugcccggguugggcagg

SEQ ID NO: 1134642 - RNA, 24 nt, Human
uggaggcggagguggaaucggaag

SEQ ID NO: 1134643 - RNA, 21 nt, Human
uggccugaaaauccacaccca

SEQ ID NO: 1134644 - RNA, 22 nt, Human
uggggaagcuccucucgcugcc

SEQ ID NO: 1134645 - RNA, 20 nt, Human
ugguacucagaaucccgaag

SEQ ID NO: 1134646 - RNA, 22 nt, Human
uuccgaugucccccccaacccc

SEQ ID NO: 1134647 - RNA, 22 nt, Human
uugcgugcaugcccgccuggcu

SEQ ID NO: 1134648 - RNA, 21 nt, Human
uuguuuuuuuuuuuuucuguu

SEQ ID NO: 1134649 - RNA, 24 nt, Human
aaaaaacacaugaagggcauucau

SEQ ID NO: 1134650 - RNA, 18 nt, Human
aaaaaaccagcuccugga

SEQ ID NO: 1134651 - RNA, 21 nt, Human
aaaaauguauauucuguugau

SEQ ID NO: 1134652 - RNA, 20 nt, Human
aaagcagcacccagagcuug

SEQ ID NO: 1134653 - RNA, 20 nt, Human
aacaaagcagcacccagagc

SEQ ID NO: 1134654 - RNA, 21 nt, Human
aagaaaaaaacacaugaaggg

SEQ ID NO: 1134655 - RNA, 22 nt, Human
aagaaaaaaacacaugaagggc

SEQ ID NO: 1134656 - RNA, 20 nt, Human
aagguugggggacacugggc

SEQ ID NO: 1134657 - RNA, 18 nt, Human
acaaagcagcacccagag

SEQ ID NO: 1134658 - RNA, 19 nt, Human
acuguggucugagagacag

SEQ ID NO: 1134659 - RNA, 19 nt, Human
agagaaccuggcucugucc

SEQ ID NO: 1134660 - RNA, 21 nt, Human
agcagucugaaggggccaugg

SEQ ID NO: 1134661 - RNA, 19 nt, Human
agcuguggaaaccaggacc

SEQ ID NO: 1134662 - RNA, 20 nt, Human
aggagcagguuguucgguuu

SEQ ID NO: 1134663 - RNA, 22 nt, Human
aggcagggccuggcucucugug

SEQ ID NO: 1134664 - RNA, 22 nt, Human
aggccuccagcccugccgguuu

SEQ ID NO: 1134665 - RNA, 21 nt, Human
agggcaggugagcccuggggc

SEQ ID NO: 1134666 - RNA, 19 nt, Human
agguccugggugugaggug

SEQ ID NO: 1134667 - RNA, 23 nt, Human
auggcaugugccgucuuccuccc

SEQ ID NO: 1134668 - RNA, 22 nt, Human
auucugggccuuuuccugggca

SEQ ID NO: 1134669 - RNA, 19 nt, Human
caaaaaaccagcuccugga

SEQ ID NO: 1134670 - RNA, 18 nt, Human
caaagcagcacccagagc

SEQ ID NO: 1134671 - RNA, 23 nt, Human
caaagcagcacccagagcuuguu

SEQ ID NO: 1134672 - RNA, 19 nt, Human
caauacugaaaaucaagca

SEQ ID NO: 1134673 - RNA, 21 nt, Human
caccccauccaacacugcacu

SEQ ID NO: 1134674 - RNA, 18 nt, Human
cacugcacugccaggggc

SEQ ID NO: 1134675 - RNA, 21 nt, Human
cacugcuuuaaauguguccca

SEQ ID NO: 1134676 - RNA, 18 nt, Human
cagagcucagguccaugc

SEQ ID NO: 1134677 - RNA, 21 nt, Human
cagcggaccuauggcaugugc

SEQ ID NO: 1134678 - RNA, 18 nt, Human
cagggccuggcucucugu

SEQ ID NO: 1134679 - RNA, 20 nt, Human
cagguccaugcucaggcucu

SEQ ID NO: 1134680 - RNA, 18 nt, Human
cagugcuugcucacauuc

SEQ ID NO: 1134681 - RNA, 21 nt, Human
caucugugcuccugaugcagg

SEQ ID NO: 1134682 - RNA, 20 nt, Human
caugguaucaguuccucuga

SEQ ID NO: 1134683 - RNA, 21 nt, Human
ccaacacugcacugccagggg

SEQ ID NO: 1134684 - RNA, 25 nt, Human
ccagagcucagguccaugcucaggc

SEQ ID NO: 1134685 - RNA, 25 nt, Human
ccagcccugccgguuucccccaucu

SEQ ID NO: 1134686 - RNA, 27 nt, Human
ccagcccugccgguuucccccaucugu

SEQ ID NO: 1134687 - RNA, 18 nt, Human
ccaugcucaggcucuggg

SEQ ID NO: 1134688 - RNA, 20 nt, Human
cccaaguaaaugaauccaau

SEQ ID NO: 1134689 - RNA, 20 nt, Human
cccugggggagggucagggg

SEQ ID NO: 1134690 - RNA, 20 nt, Human
ccuagcucaugacccuggcc

SEQ ID NO: 1134691 - RNA, 26 nt, Human
ccucagagguccugggugugaggugg

SEQ ID NO: 1134692 - RNA, 24 nt, Human
ccugccgguuucccccaucugugc

SEQ ID NO: 1134693 - RNA, 27 nt, Human
cggggcccggggaaggcguaggugcug

SEQ ID NO: 1134694 - RNA, 23 nt, Human
cgugcagccucuugauggccccg

SEQ ID NO: 1134695 - RNA, 18 nt, Human
cuaccuggugggaccagg

SEQ ID NO: 1134696 - RNA, 24 nt, Human
cuagucaaagaaaaaaacacauga

SEQ ID NO: 1134697 - RNA, 18 nt, Human
cuggagcucacgugcagc

SEQ ID NO: 1134698 - RNA, 21 nt, Human
cugucuagaagccccacagcu

SEQ ID NO: 1134699 - RNA, 18 nt, Human
cuugcuucucuaguucuu

SEQ ID NO: 1134700 - RNA, 23 nt, Human
cuuuauuuguuucuuuguucagu

SEQ ID NO: 1134701 - RNA, 22 nt, Human
cuuucuauaaaccgucccggag

SEQ ID NO: 1134702 - RNA, 21 nt, Human
gaaaaaaacacaugaagggca

SEQ ID NO: 1134703 - RNA, 24 nt, Human
gaaaggcaagcucaucccugcagg

SEQ ID NO: 1134704 - RNA, 24 nt, Human
gaagguugggggacacugggcuuc

SEQ ID NO: 1134705 - RNA, 28 nt, Human
gaauaggugugguguggugacgaccucg

SEQ ID NO: 1134706 - RNA, 22 nt, Human
gagcagucugaaggggccaugg

SEQ ID NO: 1134707 - RNA, 22 nt, Human
gagcgugugugugcugugacca

SEQ ID NO: 1134708 - RNA, 21 nt, Human
gagcuguugcggggcccgggg

SEQ ID NO: 1134709 - RNA, 24 nt, Human
gagcuuguuuuuuuuagagaaccu

SEQ ID NO: 1134710 - RNA, 19 nt, Human
gagugaguuucuuaauccu

SEQ ID NO: 1134711 - RNA, 22 nt, Human
gaugcagggggaggacuguauu

SEQ ID NO: 1134712 - RNA, 20 nt, Human
gcaauacugaaaaucaagcc

SEQ ID NO: 1134713 - RNA, 20 nt, Human
gcagaacuuucuauaaaccg

SEQ ID NO: 1134714 - RNA, 21 nt, Human
gccugaagcugccaguguuug

SEQ ID NO: 1134715 - RNA, 19 nt, Human
gcugugcagcucuggagcu

SEQ ID NO: 1134716 - RNA, 19 nt, Human
ggaacagaagcauccuguc

SEQ ID NO: 1134717 - RNA, 22 nt, Human
ggaccuauggcaugugccgucu

SEQ ID NO: 1134718 - RNA, 24 nt, Human
ggcaggugagcccuggggcugacc

SEQ ID NO: 1134719 - RNA, 18 nt, Human
ggcccugggggaggguca

SEQ ID NO: 1134720 - RNA, 21 nt, Human
ggccuccagcccugccgguuu

SEQ ID NO: 1134721 - RNA, 21 nt, Human
gggagcagcugugcagcucug

SEQ ID NO: 1134722 - RNA, 18 nt, Human
ggggaaggcguaggugcu

SEQ ID NO: 1134723 - RNA, 24 nt, Human
ggugucaugugaggucucguccug

SEQ ID NO: 1134724 - RNA, 20 nt, Human
ggugugagguggaagguugg

SEQ ID NO: 1134725 - RNA, 21 nt, Human
gugcaguugucccagccuggc

SEQ ID NO: 1134726 - RNA, 21 nt, Human
guggagcgcgcagccugggcc

SEQ ID NO: 1134727 - RNA, 25 nt, Human
guucuuuuccauuugcugaggagug

SEQ ID NO: 1134728 - RNA, 21 nt, Human
uaaaccacauguggagagcuu

SEQ ID NO: 1134729 - RNA, 20 nt, Human
uaaaccgucccguggccccu

SEQ ID NO: 1134730 - RNA, 23 nt, Human
uaaaugcaacccuguucuuccca

SEQ ID NO: 1134731 - RNA, 24 nt, Human
uagugcuauaaauuucccucuaca

SEQ ID NO: 1134732 - RNA, 19 nt, Human
uauaaucaaagcucagagc

SEQ ID NO: 1134733 - RNA, 23 nt, Human
uauaaucaaagcucagagccaag

SEQ ID NO: 1134734 - RNA, 18 nt, Human
ucaaagaaaaaaacacau

SEQ ID NO: 1134735 - RNA, 21 nt, Human
ucaaagcucagagccaaggcc

SEQ ID NO: 1134736 - RNA, 24 nt, Human
ucacccagacacuguguccuccca

SEQ ID NO: 1134737 - RNA, 25 nt, Human
ucacgugcagccucuugauggcccc

SEQ ID NO: 1134738 - RNA, 19 nt, Human
ucagggccuggugcaguug

SEQ ID NO: 1134739 - RNA, 23 nt, Human
ucaugacccuggcaaagggcagg

SEQ ID NO: 1134740 - RNA, 19 nt, Human
ucauugaggagcagguugu

SEQ ID NO: 1134741 - RNA, 21 nt, Human
uccaagcaccugugacuccca

SEQ ID NO: 1134742 - RNA, 24 nt, Human
uccacaguaaaccacauguggaga

SEQ ID NO: 1134743 - RNA, 24 nt, Human
ucccagagauucugguauguugug

SEQ ID NO: 1134744 - RNA, 19 nt, Human
ucccagccuggcaggcagu

SEQ ID NO: 1134745 - RNA, 19 nt, Human
ucccauugccacaucuucu

SEQ ID NO: 1134746 - RNA, 21 nt, Human
ucccucuacacacugcuuuaa

SEQ ID NO: 1134747 - RNA, 27 nt, Human
ucccugcagguuuaguuguuucuguua

SEQ ID NO: 1134748 - RNA, 20 nt, Human
ucuguucuuuuccauuugcu

SEQ ID NO: 1134749 - RNA, 20 nt, Human
ucuugcuucucuaguucuuu

SEQ ID NO: 1134750 - RNA, 21 nt, Human
ucuuuguucucauugguuuca

SEQ ID NO: 1134751 - RNA, 18 nt, Human
ugaagggagcagucugaa

SEQ ID NO: 1134752 - RNA, 18 nt, Human
ugaaggguuuuuuguguc

SEQ ID NO: 1134753 - RNA, 19 nt, Human
ugaccagcggaccuauggc

SEQ ID NO: 1134754 - RNA, 22 nt, Human
ugacucccaggccuccagcccu

SEQ ID NO: 1134755 - RNA, 21 nt, Human
ugagauccaugagccagagcu

SEQ ID NO: 1134756 - RNA, 21 nt, Human
ugagugaguuucuuaauccug

SEQ ID NO: 1134757 - RNA, 20 nt, Human
ugaugcagggggaggacugu

SEQ ID NO: 1134758 - RNA, 23 nt, Human
ugaugcagggggaggacuguauu

SEQ ID NO: 1134759 - RNA, 23 nt, Human
ugauggugucaugugaggucucg

SEQ ID NO: 1134760 - RNA, 21 nt, Human
ugauuuggagcaggggcgggg

SEQ ID NO: 1134761 - RNA, 20 nt, Human
ugcacagaccacuagacccc

SEQ ID NO: 1134762 - RNA, 18 nt, Human
ugcaccccauccaacacu

SEQ ID NO: 1134763 - RNA, 24 nt, Human
ugcucacuguguuaaaggcuuuau

SEQ ID NO: 1134764 - RNA, 18 nt, Human
ugcuuuucucuccccucc

SEQ ID NO: 1134765 - RNA, 20 nt, Human
uggaaaccaggaccuccugc

SEQ ID NO: 1134766 - RNA, 22 nt, Human
uggaaaccaggaccuccugcuu

SEQ ID NO: 1134767 - RNA, 18 nt, Human
uggcaccugagccacacu

SEQ ID NO: 1134768 - RNA, 20 nt, Human
uggcaggcagucguccccuu

SEQ ID NO: 1134769 - RNA, 18 nt, Human
ugggaccaggcagcuagc

SEQ ID NO: 1134770 - RNA, 23 nt, Human
ugggauuuguaggcagggccugg

SEQ ID NO: 1134771 - RNA, 25 nt, Human
ugggcagaacuuucuauaaaccguc

SEQ ID NO: 1134772 - RNA, 23 nt, Human
ugggccuagcucaugacccuggc

SEQ ID NO: 1134773 - RNA, 20 nt, Human
uggguggaaauggaaaauag

SEQ ID NO: 1134774 - RNA, 23 nt, Human
ugguauguugugucuuuguucuc

SEQ ID NO: 1134775 - RNA, 18 nt, Human
uguaggcagggccuggcu

SEQ ID NO: 1134776 - RNA, 21 nt, Human
ugucuagaagccccacagcug

SEQ ID NO: 1134777 - RNA, 25 nt, Human
ugucugguuuuucaaaggugaaggg

SEQ ID NO: 1134778 - RNA, 22 nt, Human
uguggagcgcgcagccugggcc

SEQ ID NO: 1134779 - RNA, 24 nt, Human
uguggugcugaaaaaaauguauau

SEQ ID NO: 1134780 - RNA, 23 nt, Human
uguguccucccacauccugaccu

SEQ ID NO: 1134781 - RNA, 19 nt, Human
uguugauuuugguggagag

SEQ ID NO: 1134782 - RNA, 23 nt, Human
uuacacaguucugggacaaaacu

SEQ ID NO: 1134783 - RNA, 21 nt, Human
uuagagaaccuggcucugucc

SEQ ID NO: 1134784 - RNA, 21 nt, Human
uucaaaaaaccagcuccugga

SEQ ID NO: 1134785 - RNA, 20 nt, Human
uuccaggaacagaagcaucc

SEQ ID NO: 1134786 - RNA, 21 nt, Human
uucccaggagcgugugugugc

SEQ ID NO: 1134787 - RNA, 19 nt, Human
uuccccagggggugcaccc

SEQ ID NO: 1134788 - RNA, 19 nt, Human
uugauuuggagcaggggcg

SEQ ID NO: 1134789 - RNA, 24 nt, Human
uugcacuguggucugagagacagu

SEQ ID NO: 1134790 - RNA, 21 nt, Human
uugcuagcggucuaucaauau

SEQ ID NO: 1134791 - RNA, 24 nt, Human
uugcugaggagugcuuuacuucca

SEQ ID NO: 1134792 - RNA, 18 nt, Human
uugcuucucuaguucuuu

SEQ ID NO: 1134793 - RNA, 19 nt, Human
uuuccaggaacagaagcau

SEQ ID NO: 1134794 - RNA, 23 nt, Human
uuucuguucuuuuccauuugcuc

SEQ ID NO: 1134795 - RNA, 23 nt, Human
aaaaauaucccauacagucguaa

SEQ ID NO: 1134796 - RNA, 18 nt, Human
aaaaugcuacugucauca

SEQ ID NO: 1134797 - RNA, 18 nt, Human
aacuaaaaccagcaaagc

SEQ ID NO: 1134798 - RNA, 18 nt, Human
acaaggaauccucucuuc

SEQ ID NO: 1134799 - RNA, 20 nt, Human
acacagccuguacuguagcu

SEQ ID NO: 1134800 - RNA, 22 nt, Human
agaaacacacauagucaaaaca

SEQ ID NO: 1134801 - RNA, 19 nt, Human
agacuaauacauacguucc

SEQ ID NO: 1134802 - RNA, 20 nt, Human
agccagaggaccuaacacag

SEQ ID NO: 1134803 - RNA, 19 nt, Human
agccuguacuguagcuuug

SEQ ID NO: 1134804 - RNA, 22 nt, Human
agcuccauuuggagcugugauc

SEQ ID NO: 1134805 - RNA, 19 nt, Human
aggaaaagacuaugcucaa

SEQ ID NO: 1134806 - RNA, 19 nt, Human
aggaauccucucuucaaug

SEQ ID NO: 1134807 - RNA, 22 nt, Human
agggacaacaacagcaggagag

SEQ ID NO: 1134808 - RNA, 23 nt, Human
caaaaaaucccaaaacauuccug

SEQ ID NO: 1134809 - RNA, 21 nt, Human
caacagauaugccaacaauau

SEQ ID NO: 1134810 - RNA, 23 nt, Human
cacaucaauagauaugugguuaa

SEQ ID NO: 1134811 - RNA, 22 nt, Human
cacuuggaaaauaucgaacaaa

SEQ ID NO: 1134812 - RNA, 23 nt, Human
cagaaugcccauaaguagagcuc

SEQ ID NO: 1134813 - RNA, 24 nt, Human
cagcaccaucauguaagggacaac

SEQ ID NO: 1134814 - RNA, 25 nt, Human
cauuccugccagcagacuaauacau

SEQ ID NO: 1134815 - RNA, 22 nt, Human
cauuuuaggccccagaaugccc

SEQ ID NO: 1134816 - RNA, 18 nt, Human
ccaaaacauuccugccag

SEQ ID NO: 1134817 - RNA, 21 nt, Human
ccacccaggugggcagggugg

SEQ ID NO: 1134818 - RNA, 25 nt, Human
ccucaacaccauauccauuuucuug

SEQ ID NO: 1134819 - RNA, 23 nt, Human
cgggagcggcccaggagcccagu

SEQ ID NO: 1134820 - RNA, 19 nt, Human
cuaaaaccagcaaagcaca

SEQ ID NO: 1134821 - RNA, 21 nt, Human
cuaaaaccagcaaagcacauc

SEQ ID NO: 1134822 - RNA, 20 nt, Human
cuccauuuggagcugugauc

SEQ ID NO: 1134823 - RNA, 21 nt, Human
cugcaaugaaacucaacaccc

SEQ ID NO: 1134824 - RNA, 19 nt, Human
gaacaaaaaaucccaaaac

SEQ ID NO: 1134825 - RNA, 23 nt, Human
gaacaaaaaaucccaaaacauuc

SEQ ID NO: 1134826 - RNA, 18 nt, Human
gagacucuugcuguuucu

SEQ ID NO: 1134827 - RNA, 21 nt, Human
gaggaaaagacuaugcucaag

SEQ ID NO: 1134828 - RNA, 22 nt, Human
gaucaagauggcuaaaaaugcu

SEQ ID NO: 1134829 - RNA, 24 nt, Human
ggaaugccuuccucaacaccauau

SEQ ID NO: 1134830 - RNA, 19 nt, Human
gggacaacaacagcaggag

SEQ ID NO: 1134831 - RNA, 24 nt, Human
uaaauauuuucuccuuaaaacuaa

SEQ ID NO: 1134832 - RNA, 24 nt, Human
uaaguauaccaccugaggaaaaga

SEQ ID NO: 1134833 - RNA, 26 nt, Human
uaaugccaaacuuagaguggcaacag

SEQ ID NO: 1134834 - RNA, 18 nt, Human
uagccagaaugucauccu

SEQ ID NO: 1134835 - RNA, 25 nt, Human
ucacauccuucgcauaugguuccaa

SEQ ID NO: 1134836 - RNA, 18 nt, Human
ucccaaaacauuccugcc

SEQ ID NO: 1134837 - RNA, 19 nt, Human
ucuugcagcaccaucaugu

SEQ ID NO: 1134838 - RNA, 18 nt, Human
uuccaaguggggugcgga

SEQ ID NO: 1134839 - RNA, 18 nt, Human
uuccugccagcagacuaa

SEQ ID NO: 1134840 - RNA, 18 nt, Human
uuucuggucuucacuugg

SEQ ID NO: 1134841 - RNA, 22 nt, Human
agacaggcauaauuagguccuc

SEQ ID NO: 1134842 - RNA, 19 nt, Human
ucccacaugaaaauaugau

SEQ ID NO: 1134843 - RNA, 28 nt, Human
uggauggcagugcagguugauucuucuc

SEQ ID NO: 1134844 - RNA, 18 nt, Human
uguggauggcagugcagg

SEQ ID NO: 1134845 - RNA, 21 nt, Human
aaaaaaccaaaacacaacaaa

SEQ ID NO: 1134846 - RNA, 24 nt, Human
aaaaaaccaaaacacaacaaaagc

SEQ ID NO: 1134847 - RNA, 18 nt, Human
aaacaaaaaaccaaaaca

SEQ ID NO: 1134848 - RNA, 18 nt, Human
aaacacaacaaaagcaag

SEQ ID NO: 1134849 - RNA, 23 nt, Human
aaaccaaaacacaacaaaagcaa

SEQ ID NO: 1134850 - RNA, 27 nt, Human
aaaccaaaacacaacaaaagcaagaaa

SEQ ID NO: 1134851 - RNA, 20 nt, Human
aaagcaagaaagaaguauag

SEQ ID NO: 1134852 - RNA, 19 nt, Human
aacauggugaaaccccauu

SEQ ID NO: 1134853 - RNA, 20 nt, Human
aacauggugaaaccccauuu

SEQ ID NO: 1134854 - RNA, 20 nt, Human
aacauggugaaaccccauuu

SEQ ID NO: 1134855 - RNA, 21 nt, Human
aacauggugaaaccccauuuc

SEQ ID NO: 1134856 - RNA, 24 nt, Human
aagaaagaaguauauccaucauac

SEQ ID NO: 1134857 - RNA, 22 nt, Human
aagcaagaaagaaguauaucca

SEQ ID NO: 1134858 - RNA, 24 nt, Human
aagcaagaaagaaguauauccauc

SEQ ID NO: 1134859 - RNA, 20 nt, Human
aagcaggcguuucacucagg

SEQ ID NO: 1134860 - RNA, 19 nt, Human
aagcaggcuggugccacuc

SEQ ID NO: 1134861 - RNA, 20 nt, Human
aaggacuccagggggaggug

SEQ ID NO: 1134862 - RNA, 18 nt, Human
aaguacuuccugagcucc

SEQ ID NO: 1134863 - RNA, 18 nt, Human
acaaaagcaagaaagaag

SEQ ID NO: 1134864 - RNA, 19 nt, Human
acaaaagcaagaaagaagu

SEQ ID NO: 1134865 - RNA, 18 nt, Human
acacagccccucucugug

SEQ ID NO: 1134866 - RNA, 28 nt, Human
acacagccccucucuguguugugacccu

SEQ ID NO: 1134867 - RNA, 22 nt, Human
acagccuggugacagagagacc

SEQ ID NO: 1134868 - RNA, 24 nt, Human
acccuaaacaccuucaaggaccuu

SEQ ID NO: 1134869 - RNA, 18 nt, Human
agaacaacguaggaccau

SEQ ID NO: 1134870 - RNA, 22 nt, Human
agacaggagacugcauguuccu

SEQ ID NO: 1134871 - RNA, 22 nt, Human
agcaagaaagaaguauauccau

SEQ ID NO: 1134872 - RNA, 19 nt, Human
agcacagaggcagccagua

SEQ ID NO: 1134873 - RNA, 20 nt, Human
agcacuuugggaggaugagg

SEQ ID NO: 1134874 - RNA, 22 nt, Human
agccaaguacuuccugagcucc

SEQ ID NO: 1134875 - RNA, 22 nt, Human
agccuggacaacauggugaaac

SEQ ID NO: 1134876 - RNA, 24 nt, Human
agccuggacaacauggugaaaccc

SEQ ID NO: 1134877 - RNA, 21 nt, Human
agccuggugacagagagaccc

SEQ ID NO: 1134878 - RNA, 21 nt, Human
agccuggugacagagagaccc

SEQ ID NO: 1134879 - RNA, 20 nt, Human
agcuugugcaauggguuuag

SEQ ID NO: 1134880 - RNA, 18 nt, Human
aggaugaggcgggcagau

SEQ ID NO: 1134881 - RNA, 24 nt, Human
aggcagaagagggcccugcauaca

SEQ ID NO: 1134882 - RNA, 20 nt, Human
aggcguuucacucagggcag

SEQ ID NO: 1134883 - RNA, 21 nt, Human
aggcguuucacucagggcagc

SEQ ID NO: 1134884 - RNA, 24 nt, Human
aggcugagguggaaagauggcuug

SEQ ID NO: 1134885 - RNA, 20 nt, Human
agggcagcccgggaggcaag

SEQ ID NO: 1134886 - RNA, 19 nt, Human
agggggaggugggcugggc

SEQ ID NO: 1134887 - RNA, 24 nt, Human
aggucgaggcugcagugagccaug

SEQ ID NO: 1134888 - RNA, 24 nt, Human
aggugccccgggccuugcuggagu

SEQ ID NO: 1134889 - RNA, 24 nt, Human
aguggugcacgccuguaguucuag

SEQ ID NO: 1134890 - RNA, 19 nt, Human
augcagaaaagagaaacug

SEQ ID NO: 1134891 - RNA, 24 nt, Human
auugcaccacuguaauacagccug

SEQ ID NO: 1134892 - RNA, 25 nt, Human
caaaaaaccaaaacacaacaaaagc

SEQ ID NO: 1134893 - RNA, 21 nt, Human
caaaacacaacaaaagcaaga

SEQ ID NO: 1134894 - RNA, 24 nt, Human
caaacaccggaggaagagagcaau

SEQ ID NO: 1134895 - RNA, 19 nt, Human
caacauggugaaaccccau

SEQ ID NO: 1134896 - RNA, 24 nt, Human
caacauggugaaaccccauuucua

SEQ ID NO: 1134897 - RNA, 20 nt, Human
cacaacaaaagcaagaaaga

SEQ ID NO: 1134898 - RNA, 21 nt, Human
caccuaggccuugccugaguc

SEQ ID NO: 1134899 - RNA, 21 nt, Human
cacucuguccucaggugcccc

SEQ ID NO: 1134900 - RNA, 23 nt, Human
cacuguaauacagccuggugaca

SEQ ID NO: 1134901 - RNA, 19 nt, Human
cagagaccgaacaccaccc

SEQ ID NO: 1134902 - RNA, 23 nt, Human
cagagcccaaaggcuauagaguu

SEQ ID NO: 1134903 - RNA, 24 nt, Human
cagcacuuugggaggaugaggcgg

SEQ ID NO: 1134904 - RNA, 21 nt, Human
cagcccccaacccugcugccu

SEQ ID NO: 1134905 - RNA, 21 nt, Human
caggaaaggccaggcacggug

SEQ ID NO: 1134906 - RNA, 18 nt, Human
caggagcaaucacagggc

SEQ ID NO: 1134907 - RNA, 18 nt, Human
caugagacaggagacugc

SEQ ID NO: 1134908 - RNA, 19 nt, Human
ccagcccccaacccugcug

SEQ ID NO: 1134909 - RNA, 22 nt, Human
ccagggggaggugggcugggcc

SEQ ID NO: 1134910 - RNA, 24 nt, Human
ccccagaagcaggcuggugccucg

SEQ ID NO: 1134911 - RNA, 22 nt, Human
ccccaugaggugggaacuccug

SEQ ID NO: 1134912 - RNA, 23 nt, Human
cccuaaacaccuucaaggaccuu

SEQ ID NO: 1134913 - RNA, 20 nt, Human
ccuaccuggucacuguguac

SEQ ID NO: 1134914 - RNA, 20 nt, Human
ccuauaaucccagcacuuug

SEQ ID NO: 1134915 - RNA, 19 nt, Human
ccucaggugccccgggccu

SEQ ID NO: 1134916 - RNA, 24 nt, Human
ccucccacaggcaagacuggccca

SEQ ID NO: 1134917 - RNA, 19 nt, Human
ccuccuccuaccuggucac

SEQ ID NO: 1134918 - RNA, 23 nt, Human
ccucuccuccuccuaccugguca

SEQ ID NO: 1134919 - RNA, 24 nt, Human
ccuggacaacauggugaaacccca

SEQ ID NO: 1134920 - RNA, 18 nt, Human
ccuggagcggauguaaaa

SEQ ID NO: 1134921 - RNA, 22 nt, Human
cgccuguaguucuagccacugg

SEQ ID NO: 1134922 - RNA, 21 nt, Human
cgcuaaggcagaagagggccc

SEQ ID NO: 1134923 - RNA, 18 nt, Human
cggcugcuggagcagcgg

SEQ ID NO: 1134924 - RNA, 22 nt, Human
cguguaggcaaugcccagccca

SEQ ID NO: 1134925 - RNA, 22 nt, Human
cuaaauggacagggcgagagug

SEQ ID NO: 1134926 - RNA, 21 nt, Human
cuacucccucuccuccuccua

SEQ ID NO: 1134927 - RNA, 23 nt, Human
cucacucuguccucaggugcccc

SEQ ID NO: 1134928 - RNA, 24 nt, Human
cucaggccuauaaucccagcacuu

SEQ ID NO: 1134929 - RNA, 20 nt, Human
cuccuccuccuaccugguca

SEQ ID NO: 1134930 - RNA, 24 nt, Human
cugacuuaaaaacaaacaaaaaac

SEQ ID NO: 1134931 - RNA, 22 nt, Human
cugcagugagccaugauugcac

SEQ ID NO: 1134932 - RNA, 18 nt, Human
cugcauguuccucccaca

SEQ ID NO: 1134933 - RNA, 21 nt, Human
cuggagcagcggcccuccauc

SEQ ID NO: 1134934 - RNA, 24 nt, Human
cuucauauucuucuauaaaauaua

SEQ ID NO: 1134935 - RNA, 25 nt, Human
cuuccugagcuccugagagacgcca

SEQ ID NO: 1134936 - RNA, 19 nt, Human
cuucuucucucuuaugccc

SEQ ID NO: 1134937 - RNA, 26 nt, Human
gaaaggccaggcacggugggcucagg

SEQ ID NO: 1134938 - RNA, 24 nt, Human
gaacaaaauuuacauagaaaauaa

SEQ ID NO: 1134939 - RNA, 19 nt, Human
gagagacccugacuuaaaa

SEQ ID NO: 1134940 - RNA, 18 nt, Human
gagcucucucugccucuc

SEQ ID NO: 1134941 - RNA, 24 nt, Human
gauggcuugagccugggaggucga

SEQ ID NO: 1134942 - RNA, 18 nt, Human
gcaauaccuaauagcagg

SEQ ID NO: 1134943 - RNA, 22 nt, Human
gccaggcauaucagaaggcacu

SEQ ID NO: 1134944 - RNA, 22 nt, Human
gcccaggaguucgugaccagcc

SEQ ID NO: 1134945 - RNA, 23 nt, Human
gcccgggaggcaaggucugagag

SEQ ID NO: 1134946 - RNA, 24 nt, Human
gccugggaggucgaggcugcagug

SEQ ID NO: 1134947 - RNA, 22 nt, Human
ggaacuccugccccacccacuu

SEQ ID NO: 1134948 - RNA, 20 nt, Human
ggaaggacuccagggggagg

SEQ ID NO: 1134949 - RNA, 22 nt, Human
ggcacaguggugcacgccugua

SEQ ID NO: 1134950 - RNA, 22 nt, Human
gggaaggacuccagggggaggu

SEQ ID NO: 1134951 - RNA, 21 nt, Human
gggcggacgagcagcuggcca

SEQ ID NO: 1134952 - RNA, 20 nt, Human
gguggagggcaagauggacc

SEQ ID NO: 1134953 - RNA, 18 nt, Human
guggugcacgccuguagu

SEQ ID NO: 1134954 - RNA, 26 nt, Human
uaaaaacaaacaaaaaaccaaaacac

SEQ ID NO: 1134955 - RNA, 23 nt, Human
uaaaacaggagcaaucacagggc

SEQ ID NO: 1134956 - RNA, 23 nt, Human
uacacacaaauuagccgggcacc

SEQ ID NO: 1134957 - RNA, 24 nt, Human
uacauagaaaauaauuacagaaca

SEQ ID NO: 1134958 - RNA, 19 nt, Human
uagaguuaaaaccacccac

SEQ ID NO: 1134959 - RNA, 25 nt, Human
uaggcaaugcccagcccccugaaag

SEQ ID NO: 1134960 - RNA, 24 nt, Human
uauauaauuguaacaaggaacaaa

SEQ ID NO: 1134961 - RNA, 21 nt, Human
uaugcagaaaagagaaacugg

SEQ ID NO: 1134962 - RNA, 23 nt, Human
uaugcagaaaagagaaacugguu

SEQ ID NO: 1134963 - RNA, 18 nt, Human
ucacucagggcagcccgg

SEQ ID NO: 1134964 - RNA, 18 nt, Human
ucagagaccgaacaccac

SEQ ID NO: 1134965 - RNA, 22 nt, Human
uccacaauggacauguucacuc

SEQ ID NO: 1134966 - RNA, 21 nt, Human
uccagggggaggugggcuggg

SEQ ID NO: 1134967 - RNA, 26 nt, Human
uccucaggugccccgggccuugcugg

SEQ ID NO: 1134968 - RNA, 22 nt, Human
uccucccacaggcaagacuggc

SEQ ID NO: 1134969 - RNA, 22 nt, Human
uccugccccacccacuuuacag

SEQ ID NO: 1134970 - RNA, 20 nt, Human
uccugggaaggacuccaggg

SEQ ID NO: 1134971 - RNA, 24 nt, Human
ucuauaaucugaaaaggccggggc

SEQ ID NO: 1134972 - RNA, 20 nt, Human
ucucuguguugugacccuag

SEQ ID NO: 1134973 - RNA, 19 nt, Human
ugacagagagacccugacu

SEQ ID NO: 1134974 - RNA, 20 nt, Human
ugacagagagacccugacuu

SEQ ID NO: 1134975 - RNA, 20 nt, Human
ugacuuaaaaacaaacaaaa

SEQ ID NO: 1134976 - RNA, 21 nt, Human
ugacuugugggaugcaggccc

SEQ ID NO: 1134977 - RNA, 21 nt, Human
ugagacaggagacugcauguu

SEQ ID NO: 1134978 - RNA, 21 nt, Human
ugagagacgccaaauauggga

SEQ ID NO: 1134979 - RNA, 23 nt, Human
ugagagacgccaaauaugggaac

SEQ ID NO: 1134980 - RNA, 24 nt, Human
ugagagacgccaaauaugggaaca

SEQ ID NO: 1134981 - RNA, 18 nt, Human
ugagaguggaagcuccug

SEQ ID NO: 1134982 - RNA, 20 nt, Human
ugagaguggaagcuccuggg

SEQ ID NO: 1134983 - RNA, 24 nt, Human
ugagaguggaagcuccugggagcc

SEQ ID NO: 1134984 - RNA, 23 nt, Human
ugagcccaggaguucgugaccag

SEQ ID NO: 1134985 - RNA, 18 nt, Human
ugagccugggaggucgag

SEQ ID NO: 1134986 - RNA, 24 nt, Human
ugagccugggaggucgaggcugca

SEQ ID NO: 1134987 - RNA, 25 nt, Human
ugaggcgggcagauggcuugagccc

SEQ ID NO: 1134988 - RNA, 19 nt, Human
ugaggggaggccccguggg

SEQ ID NO: 1134989 - RNA, 22 nt, Human
ugcaccacuguaauacagccug

SEQ ID NO: 1134990 - RNA, 23 nt, Human
ugcaggcccggcugcuggagcag

SEQ ID NO: 1134991 - RNA, 22 nt, Human
ugcagugagccaugauugcacc

SEQ ID NO: 1134992 - RNA, 22 nt, Human
ugccugagucuggccaugcagu

SEQ ID NO: 1134993 - RNA, 22 nt, Human
uggacaacauggugaaacccca

SEQ ID NO: 1134994 - RNA, 20 nt, Human
uggcugugccaaaugcuaag

SEQ ID NO: 1134995 - RNA, 22 nt, Human
uggcugugccaaaugcuaagca

SEQ ID NO: 1134996 - RNA, 21 nt, Human
uggcuugagcccaggaguucg

SEQ ID NO: 1134997 - RNA, 23 nt, Human
uggcuugagccugggaggucgag

SEQ ID NO: 1134998 - RNA, 24 nt, Human
ugggaacuccugccccacccacuu

SEQ ID NO: 1134999 - RNA, 19 nt, Human
ugggagaggcgauggggca

SEQ ID NO: 1135000 - RNA, 19 nt, Human
ugggaggaugaggcgggca

SEQ ID NO: 1135001 - RNA, 24 nt, Human
ugggaggucgaggcugcagugagc

SEQ ID NO: 1135002 - RNA, 18 nt, Human
ugggccaggcuuccuggc

SEQ ID NO: 1135003 - RNA, 23 nt, Human
uggguuuagggguagcugcuuuu

SEQ ID NO: 1135004 - RNA, 18 nt, Human
uggugcacgccuguaguu

SEQ ID NO: 1135005 - RNA, 20 nt, Human
uggugcacgccuguaguucu

SEQ ID NO: 1135006 - RNA, 24 nt, Human
uguaaaauaaggugauugauuuga

SEQ ID NO: 1135007 - RNA, 19 nt, Human
uguggugagaaucacauga

SEQ ID NO: 1135008 - RNA, 24 nt, Human
uuagccgggcacaguggugcacgc

SEQ ID NO: 1135009 - RNA, 20 nt, Human
uucaaaccaugagacaggag

SEQ ID NO: 1135010 - RNA, 19 nt, Human
uucaaagauaaacaggaaa

SEQ ID NO: 1135011 - RNA, 19 nt, Human
uuguugccauuuuuccaca

SEQ ID NO: 1135012 - RNA, 25 nt, Human
uuucuacaaaauauauacacacaaa

SEQ ID NO: 1135013 - RNA, 20 nt, Human
aaaagacucuagacauggga

SEQ ID NO: 1135014 - RNA, 21 nt, Human
aaaaggacccaaacaaugcug

SEQ ID NO: 1135015 - RNA, 21 nt, Human
aaauauccggaacacacagga

SEQ ID NO: 1135016 - RNA, 23 nt, Human
aaccccgcauggaugggcugaag

SEQ ID NO: 1135017 - RNA, 21 nt, Human
acaaugcugaugacaaugauc

SEQ ID NO: 1135018 - RNA, 23 nt, Human
acagcaaaacagcauauccugaa

SEQ ID NO: 1135019 - RNA, 22 nt, Human
acauauuucuccuaauugugga

SEQ ID NO: 1135020 - RNA, 22 nt, Human
agcauauccugaagugcucagc

SEQ ID NO: 1135021 - RNA, 19 nt, Human
agggugugaugggagaaca

SEQ ID NO: 1135022 - RNA, 21 nt, Human
augaaaaucaaauguaaacca

SEQ ID NO: 1135023 - RNA, 24 nt, Human
cacauguaaaaucacuaaggcgga

SEQ ID NO: 1135024 - RNA, 20 nt, Human
cacuccagccacugccucca

SEQ ID NO: 1135025 - RNA, 18 nt, Human
cagcaaaacagcauaucc

SEQ ID NO: 1135026 - RNA, 23 nt, Human
cagcagugaccugcuucaacacc

SEQ ID NO: 1135027 - RNA, 22 nt, Human
cagcucgacagcgggcacucag

SEQ ID NO: 1135028 - RNA, 18 nt, Human
ccacugccuccaucugca

SEQ ID NO: 1135029 - RNA, 18 nt, Human
ccaucugcacacagcaaa

SEQ ID NO: 1135030 - RNA, 21 nt, Human
cccaugcacauauuucuccua

SEQ ID NO: 1135031 - RNA, 20 nt, Human
cccguguggacagacagaau

SEQ ID NO: 1135032 - RNA, 24 nt, Human
ccuccaucugcacacagcaaaaca

SEQ ID NO: 1135033 - RNA, 22 nt, Human
cggacuuccagaguucccacau

SEQ ID NO: 1135034 - RNA, 20 nt, Human
cuaaaaggacccaaacaaug

SEQ ID NO: 1135035 - RNA, 23 nt, Human
cucuugguuguugacaagauacu

SEQ ID NO: 1135036 - RNA, 21 nt, Human
gaagucagaaguugaacucuu

SEQ ID NO: 1135037 - RNA, 25 nt, Human
gagaacagugagaaguaccgguacc

SEQ ID NO: 1135038 - RNA, 22 nt, Human
gcacauauuucuccuaauugug

SEQ ID NO: 1135039 - RNA, 18 nt, Human
gcuugucagcucgacagc

SEQ ID NO: 1135040 - RNA, 19 nt, Human
ggaaaagcaaaggaacccc

SEQ ID NO: 1135041 - RNA, 22 nt, Human
gggaaaagcaaaggaaccccgc

SEQ ID NO: 1135042 - RNA, 24 nt, Human
uaaaaggacccaaacaaugcugau

SEQ ID NO: 1135043 - RNA, 18 nt, Human
uaaaauagauagguacuu

SEQ ID NO: 1135044 - RNA, 22 nt, Human
uaaaauagauagguacuuccaa

SEQ ID NO: 1135045 - RNA, 24 nt, Human
uaaaauagauagguacuuccaaau

SEQ ID NO: 1135046 - RNA, 21 nt, Human
uaaaauauccggaacacacag

SEQ ID NO: 1135047 - RNA, 25 nt, Human
uaggugucuccacuguuucaguucu

SEQ ID NO: 1135048 - RNA, 23 nt, Human
uaguagcuaagcuuaaucaccgu

SEQ ID NO: 1135049 - RNA, 19 nt, Human
uauuuuacauaaaagacuc

SEQ ID NO: 1135050 - RNA, 18 nt, Human
ucacuaaggcggacuucc

SEQ ID NO: 1135051 - RNA, 23 nt, Human
ucaucggaagucagaaguugaac

SEQ ID NO: 1135052 - RNA, 19 nt, Human
ucccacaugaaaaucaaau

SEQ ID NO: 1135053 - RNA, 23 nt, Human
ucugcacacagcaaaacagcaua

SEQ ID NO: 1135054 - RNA, 22 nt, Human
ugaagggugugaugggagaaca

SEQ ID NO: 1135055 - RNA, 21 nt, Human
ugcuaaaaggacccaaacaau

SEQ ID NO: 1135056 - RNA, 22 nt, Human
uggacagacagaaugauggaca

SEQ ID NO: 1135057 - RNA, 22 nt, Human
ugggaaaagcaaaggaaccccg

SEQ ID NO: 1135058 - RNA, 24 nt, Human
ugggaagacaacaaaaugauuuag

SEQ ID NO: 1135059 - RNA, 25 nt, Human
ugggaagacaacaaaaugauuuaga

SEQ ID NO: 1135060 - RNA, 20 nt, Human
ugggaguaaaaauagggagu

SEQ ID NO: 1135061 - RNA, 25 nt, Human
uguaaggugggaaaagcaaaggaac

SEQ ID NO: 1135062 - RNA, 22 nt, Human
uguuauggaguuacccauuuug

SEQ ID NO: 1135063 - RNA, 24 nt, Human
uguuauggaguuacccauuuugag

SEQ ID NO: 1135064 - RNA, 25 nt, Human
uguuauggaguuacccauuuugaga

SEQ ID NO: 1135065 - RNA, 24 nt, Human
uuaaucacaaucuaucaaaaggga

SEQ ID NO: 1135066 - RNA, 23 nt, Human
uucccacaugaaaaucaaaugua

SEQ ID NO: 1135067 - RNA, 18 nt, Human
uucguaagcuuccaacug

SEQ ID NO: 1135068 - RNA, 22 nt, Human
uucuauucuaucaaaacaccgc

SEQ ID NO: 1135069 - RNA, 27 nt, Human
uugagaaaucugugcuaaaaggaccca

SEQ ID NO: 1135070 - RNA, 18 nt, Human
uuuuguuuguuuugucuu

SEQ ID NO: 1135071 - RNA, 23 nt, Human
aaaaagcaggggaccaaaacuga

SEQ ID NO: 1135072 - RNA, 22 nt, Human
aaacagcacccucugcuucggu

SEQ ID NO: 1135073 - RNA, 25 nt, Human
aaaucacauccuacucaucagcaag

SEQ ID NO: 1135074 - RNA, 22 nt, Human
aaccugagcugugcuuccucug

SEQ ID NO: 1135075 - RNA, 19 nt, Human
aagcaugguuucaaacaug

SEQ ID NO: 1135076 - RNA, 20 nt, Human
aaggaggccgcugcauuucc

SEQ ID NO: 1135077 - RNA, 22 nt, Human
acaccgggucugaccucccagc

SEQ ID NO: 1135078 - RNA, 21 nt, Human
acagagucucacucuguugac

SEQ ID NO: 1135079 - RNA, 20 nt, Human
acaggcugcucaccccaggc

SEQ ID NO: 1135080 - RNA, 20 nt, Human
acaugcaaugaggacagagc

SEQ ID NO: 1135081 - RNA, 25 nt, Human
accucaaaaagcaggggaccaaaac

SEQ ID NO: 1135082 - RNA, 20 nt, Human
acgagccccucagucuuggg

SEQ ID NO: 1135083 - RNA, 25 nt, Human
acucuguugaccaggcuggagugua

SEQ ID NO: 1135084 - RNA, 18 nt, Human
agaacucaaguuaaggcc

SEQ ID NO: 1135085 - RNA, 21 nt, Human
agaaggcucugugugcagccc

SEQ ID NO: 1135086 - RNA, 18 nt, Human
agagagguccaaggugcc

SEQ ID NO: 1135087 - RNA, 22 nt, Human
agcacucugggagggcuguggg

SEQ ID NO: 1135088 - RNA, 23 nt, Human
agcacucugggagggcugugggc

SEQ ID NO: 1135089 - RNA, 18 nt, Human
agcagcugcucuagcggc

SEQ ID NO: 1135090 - RNA, 18 nt, Human
agccuuuccaccaccucc

SEQ ID NO: 1135091 - RNA, 19 nt, Human
agcugcccugggcuggaga

SEQ ID NO: 1135092 - RNA, 19 nt, Human
agcugccucccgccuuggc

SEQ ID NO: 1135093 - RNA, 22 nt, Human
agcugccucccgccuuggcuuc

SEQ ID NO: 1135094 - RNA, 18 nt, Human
agcugugcuuccucugcc

SEQ ID NO: 1135095 - RNA, 23 nt, Human
aggaaggaaggcagggcuugcag

SEQ ID NO: 1135096 - RNA, 18 nt, Human
aggaaggcagggcuugca

SEQ ID NO: 1135097 - RNA, 19 nt, Human
aggcauggaggaggugggc

SEQ ID NO: 1135098 - RNA, 22 nt, Human
agggcuaaacacuggugcccag

SEQ ID NO: 1135099 - RNA, 22 nt, Human
agggcugugggcaugagcagcg

SEQ ID NO: 1135100 - RNA, 20 nt, Human
agggggugguggcaggaguu

SEQ ID NO: 1135101 - RNA, 19 nt, Human
aggucugccucccgggccc

SEQ ID NO: 1135102 - RNA, 19 nt, Human
agugcuccacggcccaggc

SEQ ID NO: 1135103 - RNA, 19 nt, Human
aguggcugagcuggaggau

SEQ ID NO: 1135104 - RNA, 19 nt, Human
augagcagcgaggacucca

SEQ ID NO: 1135105 - RNA, 19 nt, Human
auuugcuuccucaggaugg

SEQ ID NO: 1135106 - RNA, 21 nt, Human
caaauugaaggcaggauccca

SEQ ID NO: 1135107 - RNA, 22 nt, Human
caaccucaaaaagcaggggacc

SEQ ID NO: 1135108 - RNA, 21 nt, Human
caaucuugaacccuuugucac

SEQ ID NO: 1135109 - RNA, 22 nt, Human
cacagcacguggguggcaggac

SEQ ID NO: 1135110 - RNA, 27 nt, Human
cacagcacguggguggcaggaccaaca

SEQ ID NO: 1135111 - RNA, 19 nt, Human
cacagccccucugccucuc

SEQ ID NO: 1135112 - RNA, 21 nt, Human
cacaugcaaugaggacagagc

SEQ ID NO: 1135113 - RNA, 19 nt, Human
caccacgccccacccccaa

SEQ ID NO: 1135114 - RNA, 22 nt, Human
caccauuguaaaaaaaaauaaa

SEQ ID NO: 1135115 - RNA, 19 nt, Human
caccccaggccuggaaucu

SEQ ID NO: 1135116 - RNA, 28 nt, Human
cacccccaacugcacggcagccacucgc

SEQ ID NO: 1135117 - RNA, 20 nt, Human
cacccucugcuucgguccuc

SEQ ID NO: 1135118 - RNA, 18 nt, Human
cacggcagccacucgcau

SEQ ID NO: 1135119 - RNA, 24 nt, Human
cacucuguugaccaggcuggagug

SEQ ID NO: 1135120 - RNA, 21 nt, Human
cagaggagaaaagcacuuagc

SEQ ID NO: 1135121 - RNA, 20 nt, Human
cagagggcaucggugagcac

SEQ ID NO: 1135122 - RNA, 18 nt, Human
cagcagcucccccacaug

SEQ ID NO: 1135123 - RNA, 20 nt, Human
cagugcguggaggagaucgg

SEQ ID NO: 1135124 - RNA, 24 nt, Human
caucagcaaggcggguagacauca

SEQ ID NO: 1135125 - RNA, 22 nt, Human
ccaaaacaaaacaaaaaaaauc

SEQ ID NO: 1135126 - RNA, 24 nt, Human
ccaaaacaaaacaaaaaaaaucug

SEQ ID NO: 1135127 - RNA, 19 nt, Human
ccaaaacugagccuauccu

SEQ ID NO: 1135128 - RNA, 21 nt, Human
ccaaaacugagccuauccugg

SEQ ID NO: 1135129 - RNA, 20 nt, Human
ccaacuucgcagagggcauc

SEQ ID NO: 1135130 - RNA, 19 nt, Human
ccaagugggugaaaugguc

SEQ ID NO: 1135131 - RNA, 24 nt, Human
ccaccgcucuggcacgagccccuc

SEQ ID NO: 1135132 - RNA, 18 nt, Human
ccacgugcacugcugccc

SEQ ID NO: 1135133 - RNA, 23 nt, Human
ccaggugcucuugccaugggucc

SEQ ID NO: 1135134 - RNA, 19 nt, Human
ccagucaaucagaagcaaa

SEQ ID NO: 1135135 - RNA, 22 nt, Human
ccaugcugagccuccccugccu

SEQ ID NO: 1135136 - RNA, 20 nt, Human
ccccaaggcuggagucagcu

SEQ ID NO: 1135137 - RNA, 26 nt, Human
cccuguccccccccccccuuuuuuuu

SEQ ID NO: 1135138 - RNA, 18 nt, Human
ccucccacuucccaccuc

SEQ ID NO: 1135139 - RNA, 19 nt, Human
ccuccugcugcuguuugcc

SEQ ID NO: 1135140 - RNA, 21 nt, Human
ccuccugcugcuguuugccgg

SEQ ID NO: 1135141 - RNA, 25 nt, Human
ccugcagaccagggcuaaacacugg

SEQ ID NO: 1135142 - RNA, 23 nt, Human
ccuggaaggccuugcccaucccc

SEQ ID NO: 1135143 - RNA, 24 nt, Human
ccuggcagcauuuggucuuccucu

SEQ ID NO: 1135144 - RNA, 20 nt, Human
ccuuccugcagaccagggcu

SEQ ID NO: 1135145 - RNA, 20 nt, Human
ccuugggcucccuggggagg

SEQ ID NO: 1135146 - RNA, 20 nt, Human
ccuugugucccucacucccc

SEQ ID NO: 1135147 - RNA, 22 nt, Human
cggcagccacucgcauagcacu

SEQ ID NO: 1135148 - RNA, 19 nt, Human
cuaaacaccacgccccacc

SEQ ID NO: 1135149 - RNA, 23 nt, Human
cuaaacaccacgccccaccccca

SEQ ID NO: 1135150 - RNA, 24 nt, Human
cucacucuguugaccaggcuggag

SEQ ID NO: 1135151 - RNA, 20 nt, Human
cucacugcaaccuccacccc

SEQ ID NO: 1135152 - RNA, 21 nt, Human
cuccaaaacaaaacaaaaaaa

SEQ ID NO: 1135153 - RNA, 19 nt, Human
cuccccugccuugggcucc

SEQ ID NO: 1135154 - RNA, 23 nt, Human
cuccgcaugggcuguggguguug

SEQ ID NO: 1135155 - RNA, 25 nt, Human
cuccuccacgugcacugcugcccuc

SEQ ID NO: 1135156 - RNA, 24 nt, Human
cucuaucugggcccggugggcucc

SEQ ID NO: 1135157 - RNA, 19 nt, Human
cugcuguccuccuuccugc

SEQ ID NO: 1135158 - RNA, 23 nt, Human
cuggaggaugcccuggaacucgg

SEQ ID NO: 1135159 - RNA, 21 nt, Human
cugggguggccgcagacaucc

SEQ ID NO: 1135160 - RNA, 22 nt, Human
cuggugguggcguugaaacagc

SEQ ID NO: 1135161 - RNA, 20 nt, Human
cuguccccccccccccuuuu

SEQ ID NO: 1135162 - RNA, 18 nt, Human
cuguugaccaggcuggag

SEQ ID NO: 1135163 - RNA, 19 nt, Human
cuucuuagaguugucuuga

SEQ ID NO: 1135164 - RNA, 19 nt, Human
cuugguggggcugggaccc

SEQ ID NO: 1135165 - RNA, 19 nt, Human
gaacaucccugauuaagaa

SEQ ID NO: 1135166 - RNA, 20 nt, Human
gaaccugagcugugcuuccu

SEQ ID NO: 1135167 - RNA, 19 nt, Human
gaacucggagcacgcagca

SEQ ID NO: 1135168 - RNA, 18 nt, Human
gacgggauggaggugugg

SEQ ID NO: 1135169 - RNA, 24 nt, Human
gaggacucuagcacggcacagccc

SEQ ID NO: 1135170 - RNA, 19 nt, Human
gagggggugguggcaggag

SEQ ID NO: 1135171 - RNA, 19 nt, Human
gagggggugguggcaggag

SEQ ID NO: 1135172 - RNA, 24 nt, Human
gaguccagccuuuccaccaccucc

SEQ ID NO: 1135173 - RNA, 22 nt, Human
gaucuccgcucacugcaaccuc

SEQ ID NO: 1135174 - RNA, 27 nt, Human
gcaaaacagaacucaaguuaaggccuc

SEQ ID NO: 1135175 - RNA, 19 nt, Human
gcacagccagggucgaggu

SEQ ID NO: 1135176 - RNA, 22 nt, Human
gcagcucccccacaugagcccu

SEQ ID NO: 1135177 - RNA, 18 nt, Human
gcccgagggcagcucugc

SEQ ID NO: 1135178 - RNA, 20 nt, Human
gccuccccugccuugggcuc

SEQ ID NO: 1135179 - RNA, 19 nt, Human
gcgccagugcguggaggag

SEQ ID NO: 1135180 - RNA, 24 nt, Human
gcuuccucugccauggucggaauu

SEQ ID NO: 1135181 - RNA, 22 nt, Human
gcuugcaggaucacggaaaacc

SEQ ID NO: 1135182 - RNA, 21 nt, Human
ggacaggcaugcagaaggcuc

SEQ ID NO: 1135183 - RNA, 20 nt, Human
ggacugggucaauggccaug

SEQ ID NO: 1135184 - RNA, 24 nt, Human
ggaggacaggcaugcagaaggcuc

SEQ ID NO: 1135185 - RNA, 22 nt, Human
ggaggaugcccuggaacucgga

SEQ ID NO: 1135186 - RNA, 22 nt, Human
ggcaacccuucauucauucguc

SEQ ID NO: 1135187 - RNA, 23 nt, Human
ggcacaggcugcucaccccaggc

SEQ ID NO: 1135188 - RNA, 21 nt, Human
ggcccccuucuccgcuuucgu

SEQ ID NO: 1135189 - RNA, 26 nt, Human
ggcucuccaaaacaaaacaaaaaaaa

SEQ ID NO: 1135190 - RNA, 21 nt, Human
ggcugugggcaugagcagcga

SEQ ID NO: 1135191 - RNA, 18 nt, Human
gggaaccugagcugugcu

SEQ ID NO: 1135192 - RNA, 22 nt, Human
gggaaccugagcugugcuuccu

SEQ ID NO: 1135193 - RNA, 22 nt, Human
gggacccucccacuucccaccu

SEQ ID NO: 1135194 - RNA, 19 nt, Human
gggcagugguguccgcgau

SEQ ID NO: 1135195 - RNA, 23 nt, Human
ggucuguguuucaggaacugagg

SEQ ID NO: 1135196 - RNA, 22 nt, Human
ggugugcacauagggagcaggu

SEQ ID NO: 1135197 - RNA, 22 nt, Human
guccccauccauauuucucaag

SEQ ID NO: 1135198 - RNA, 23 nt, Human
gugcagcaccuguagccugugca

SEQ ID NO: 1135199 - RNA, 25 nt, Human
gugcagccccagaccuggguaccuu

SEQ ID NO: 1135200 - RNA, 20 nt, Human
gugcugcugaccccaaggcu

SEQ ID NO: 1135201 - RNA, 19 nt, Human
gugguggcguugaaacagc

SEQ ID NO: 1135202 - RNA, 18 nt, Human
guugaccaggcuggagug

SEQ ID NO: 1135203 - RNA, 22 nt, Human
uaaacaccacgccccaccccca

SEQ ID NO: 1135204 - RNA, 23 nt, Human
uaaagaauuuacuuuuccaggac

SEQ ID NO: 1135205 - RNA, 20 nt, Human
uaagcgccuggcuccgcugu

SEQ ID NO: 1135206 - RNA, 19 nt, Human
uacugccucccuguccccc

SEQ ID NO: 1135207 - RNA, 25 nt, Human
uagaggcucuccaaaacaaaacaaa

SEQ ID NO: 1135208 - RNA, 23 nt, Human
uagcacggcacagccccucugcc

SEQ ID NO: 1135209 - RNA, 27 nt, Human
uagcacggcacagccccucugccucuc

SEQ ID NO: 1135210 - RNA, 19 nt, Human
uagcacucugggagggcug

SEQ ID NO: 1135211 - RNA, 22 nt, Human
uagcacucugggagggcugugg

SEQ ID NO: 1135212 - RNA, 24 nt, Human
uagcacucugggagggcugugggc

SEQ ID NO: 1135213 - RNA, 25 nt, Human
ucaaaaagcaggggaccaaaacuga

SEQ ID NO: 1135214 - RNA, 18 nt, Human
ucacugcaaccuccaccc

SEQ ID NO: 1135215 - RNA, 21 nt, Human
ucacugcaaccuccaccccaa

SEQ ID NO: 1135216 - RNA, 20 nt, Human
ucagaugcccuucccgugcu

SEQ ID NO: 1135217 - RNA, 19 nt, Human
ucagugcaguggcugagcu

SEQ ID NO: 1135218 - RNA, 21 nt, Human
ucauucauucgucggaugugu

SEQ ID NO: 1135219 - RNA, 23 nt, Human
uccaaaacaaaacaaaaaaaauc

SEQ ID NO: 1135220 - RNA, 24 nt, Human
uccaccauuguaaaaaaaaauaaa

SEQ ID NO: 1135221 - RNA, 23 nt, Human
uccagcauuuuaaugaacauccc

SEQ ID NO: 1135222 - RNA, 26 nt, Human
uccagccaagcaugguuucaaacaug

SEQ ID NO: 1135223 - RNA, 24 nt, Human
uccaucagcagcucccccacauga

SEQ ID NO: 1135224 - RNA, 18 nt, Human
uccaugcugagccucccc

SEQ ID NO: 1135225 - RNA, 18 nt, Human
ucccaccuccuugugucc

SEQ ID NO: 1135226 - RNA, 19 nt, Human
ucccagccgggggcacagg

SEQ ID NO: 1135227 - RNA, 24 nt, Human
ucccucacuccccuguuucauucc

SEQ ID NO: 1135228 - RNA, 22 nt, Human
ucccuccucccgcaggagagag

SEQ ID NO: 1135229 - RNA, 21 nt, Human
ucccugggcaauccguguccu

SEQ ID NO: 1135230 - RNA, 21 nt, Human
ucccuggggaggggguggugg

SEQ ID NO: 1135231 - RNA, 19 nt, Human
ucccugucccccccccccc

SEQ ID NO: 1135232 - RNA, 26 nt, Human
uccgcuguucucaggaguggguucug

SEQ ID NO: 1135233 - RNA, 19 nt, Human
uccuccugcugcuguuugc

SEQ ID NO: 1135234 - RNA, 20 nt, Human
uccucuaagcgccuggcucc

SEQ ID NO: 1135235 - RNA, 24 nt, Human
ucucacucuguugaccaggcugga

SEQ ID NO: 1135236 - RNA, 22 nt, Human
ucucccagccugcaggugcccc

SEQ ID NO: 1135237 - RNA, 24 nt, Human
ucucccagccugcaggugccccug

SEQ ID NO: 1135238 - RNA, 18 nt, Human
ucugggcccggugggcuc

SEQ ID NO: 1135239 - RNA, 24 nt, Human
ucuguugaccaggcuggaguguag

SEQ ID NO: 1135240 - RNA, 24 nt, Human
ucuugggugguuuuugccuggucc

SEQ ID NO: 1135241 - RNA, 22 nt, Human
ugaaacagcacccucugcuucg

SEQ ID NO: 1135242 - RNA, 21 nt, Human
ugaccugacccuuagucaacc

SEQ ID NO: 1135243 - RNA, 25 nt, Human
ugagaaagcacaugcaaugaggaca

SEQ ID NO: 1135244 - RNA, 18 nt, Human
ugagaacauucccuccuc

SEQ ID NO: 1135245 - RNA, 21 nt, Human
ugagaacauucccuccucccg

SEQ ID NO: 1135246 - RNA, 22 nt, Human
ugagacagagucucacucuguu

SEQ ID NO: 1135247 - RNA, 20 nt, Human
ugaugaugagcgagauggac

SEQ ID NO: 1135248 - RNA, 22 nt, Human
ugcaaaacagaacucaaguuaa

SEQ ID NO: 1135249 - RNA, 20 nt, Human
ugcccuggaacucggagcac

SEQ ID NO: 1135250 - RNA, 19 nt, Human
ugcugagccuccccugccu

SEQ ID NO: 1135251 - RNA, 18 nt, Human
ugcugcugaccccaaggc

SEQ ID NO: 1135252 - RNA, 22 nt, Human
ugcuggaauguaaucccugggc

SEQ ID NO: 1135253 - RNA, 22 nt, Human
uggaggugugggcagugguguc

SEQ ID NO: 1135254 - RNA, 19 nt, Human
uggcagcauuuggucuucc

SEQ ID NO: 1135255 - RNA, 23 nt, Human
uggcaggaccaacaccgggucug

SEQ ID NO: 1135256 - RNA, 20 nt, Human
uggcagugggaugaggcugg

SEQ ID NO: 1135257 - RNA, 22 nt, Human
uggcagugggaugaggcuggga

SEQ ID NO: 1135258 - RNA, 27 nt, Human
uggcauccagauuugcauaagauggac

SEQ ID NO: 1135259 - RNA, 21 nt, Human
uggccaggccacuagccaguc

SEQ ID NO: 1135260 - RNA, 21 nt, Human
uggccgcagacauccaggcac

SEQ ID NO: 1135261 - RNA, 23 nt, Human
uggcugggccucugaccuugcug

SEQ ID NO: 1135262 - RNA, 19 nt, Human
uggcuuccaucucugucuc

SEQ ID NO: 1135263 - RNA, 24 nt, Human
ugggaaugacuucuucuuuuuuuu

SEQ ID NO: 1135264 - RNA, 20 nt, Human
ugggcagugguguccgcgau

SEQ ID NO: 1135265 - RNA, 22 nt, Human
ugggcaugagcagcgaggacuc

SEQ ID NO: 1135266 - RNA, 19 nt, Human
uggggagggggugguggca

SEQ ID NO: 1135267 - RNA, 24 nt, Human
ugggguccuaaagucugcuguccu

SEQ ID NO: 1135268 - RNA, 23 nt, Human
uggugucugguuuuucaccuuua

SEQ ID NO: 1135269 - RNA, 18 nt, Human
ugucugguuuuucaccuu

SEQ ID NO: 1135270 - RNA, 20 nt, Human
uguugcugcugaguccagcc

SEQ ID NO: 1135271 - RNA, 19 nt, Human
uuccagauaacaaggacgu

SEQ ID NO: 1135272 - RNA, 21 nt, Human
uuccaggaccuacugccuccc

SEQ ID NO: 1135273 - RNA, 21 nt, Human
uuccucaggauggaaucuggc

SEQ ID NO: 1135274 - RNA, 23 nt, Human
uucucaaggaggccaagugggug

SEQ ID NO: 1135275 - RNA, 18 nt, Human
uugcagagggaggacagg

SEQ ID NO: 1135276 - RNA, 25 nt, Human
uugggcucccuggggaggggguggu

SEQ ID NO: 1135277 - RNA, 20 nt, Human
uugguuugagagcaguucau

SEQ ID NO: 1135278 - RNA, 24 nt, Human
uuuaacccaaccucaaaaagcagg

SEQ ID NO: 1135279 - RNA, 21 nt, Human
uuugcauaagauggacugggu

SEQ ID NO: 1135280 - RNA, 22 nt, Human
uuuguugguuugagagcaguuc

SEQ ID NO: 1135281 - RNA, 20 nt, Human
aaaagacucuagacauggga

SEQ ID NO: 1135282 - RNA, 21 nt, Human
aaaaggacccaaacaaugcug

SEQ ID NO: 1135283 - RNA, 21 nt, Human
aaauauccggaacacacagga

SEQ ID NO: 1135284 - RNA, 23 nt, Human
aaccccgcauggaugggcugaag

SEQ ID NO: 1135285 - RNA, 21 nt, Human
acaaugcugaugacaaugauc

SEQ ID NO: 1135286 - RNA, 23 nt, Human
acagcaaaacagcguauccugaa

SEQ ID NO: 1135287 - RNA, 22 nt, Human
acauauuucuccuaauugugga

SEQ ID NO: 1135288 - RNA, 19 nt, Human
agggugugaugggagaaca

SEQ ID NO: 1135289 - RNA, 21 nt, Human
augaaaaucaaauguaaacca

SEQ ID NO: 1135290 - RNA, 24 nt, Human
cacauguaaaaucacuaaggcgga

SEQ ID NO: 1135291 - RNA, 20 nt, Human
cacuccagccacugccucca

SEQ ID NO: 1135292 - RNA, 18 nt, Human
cagcaaaacagcguaucc

SEQ ID NO: 1135293 - RNA, 23 nt, Human
cagcagugaccugcuucaacacc

SEQ ID NO: 1135294 - RNA, 23 nt, Human
cagcguauccugaagugcucaac

SEQ ID NO: 1135295 - RNA, 22 nt, Human
cagcucgacagcgggcacucag

SEQ ID NO: 1135296 - RNA, 18 nt, Human
ccacugccuccaucugca

SEQ ID NO: 1135297 - RNA, 18 nt, Human
ccaucugcacacagcaaa

SEQ ID NO: 1135298 - RNA, 21 nt, Human
cccaugcacauauuucuccua

SEQ ID NO: 1135299 - RNA, 20 nt, Human
cccguguggacagacagaau

SEQ ID NO: 1135300 - RNA, 24 nt, Human
ccuccaucugcacacagcaaaaca

SEQ ID NO: 1135301 - RNA, 18 nt, Human
cgaaugaugcccgugugg

SEQ ID NO: 1135302 - RNA, 20 nt, Human
cuaaaaggacccaaacaaug

SEQ ID NO: 1135303 - RNA, 23 nt, Human
cucuugguuguugacaagauacu

SEQ ID NO: 1135304 - RNA, 19 nt, Human
cugugcuaaaaggacccaa

SEQ ID NO: 1135305 - RNA, 21 nt, Human
gaagucagaaguugaacucuu

SEQ ID NO: 1135306 - RNA, 25 nt, Human
gagaacagugagaaguaccgguacc

SEQ ID NO: 1135307 - RNA, 22 nt, Human
gcacauauuucuccuaauugug

SEQ ID NO: 1135308 - RNA, 18 nt, Human
gcuugucagcucgacagc

SEQ ID NO: 1135309 - RNA, 19 nt, Human
ggaaaagcaaaggaacccc

SEQ ID NO: 1135310 - RNA, 21 nt, Human
ggacuuccagaguucccacau

SEQ ID NO: 1135311 - RNA, 22 nt, Human
gggaaaagcaaaggaaccccgc

SEQ ID NO: 1135312 - RNA, 24 nt, Human
uaaaaggacccaaacaaugcugau

SEQ ID NO: 1135313 - RNA, 21 nt, Human
uaaaauagauagguacuucca

SEQ ID NO: 1135314 - RNA, 22 nt, Human
uaaaauagauagguacuuccaa

SEQ ID NO: 1135315 - RNA, 24 nt, Human
uaaaauagauagguacuuccaaau

SEQ ID NO: 1135316 - RNA, 21 nt, Human
uaaaauauccggaacacacag

SEQ ID NO: 1135317 - RNA, 25 nt, Human
uaggugucuccacuguuucaguucu

SEQ ID NO: 1135318 - RNA, 23 nt, Human
uaguagcuaagcuuaaucaccgu

SEQ ID NO: 1135319 - RNA, 19 nt, Human
uauuuuacauaaaagacuc

SEQ ID NO: 1135320 - RNA, 18 nt, Human
ucacuaaggcggacuucc

SEQ ID NO: 1135321 - RNA, 23 nt, Human
ucaucggaagucagaaguugaac

SEQ ID NO: 1135322 - RNA, 19 nt, Human
ucccacaugaaaaucaaau

SEQ ID NO: 1135323 - RNA, 23 nt, Human
ucugcacacagcaaaacagcgua

SEQ ID NO: 1135324 - RNA, 22 nt, Human
ugaagggugugaugggagaaca

SEQ ID NO: 1135325 - RNA, 23 nt, Human
ugccuccaucugcacacagcaaa

SEQ ID NO: 1135326 - RNA, 21 nt, Human
ugcuaaaaggacccaaacaau

SEQ ID NO: 1135327 - RNA, 22 nt, Human
uggacagacagaaugauggaca

SEQ ID NO: 1135328 - RNA, 22 nt, Human
ugggaaaagcaaaggaaccccg

SEQ ID NO: 1135329 - RNA, 24 nt, Human
ugggaagacaacaaaaugauuuag

SEQ ID NO: 1135330 - RNA, 25 nt, Human
ugggaagacaacaaaaugauuuaga

SEQ ID NO: 1135331 - RNA, 20 nt, Human
ugggaguaaaaauagggagu

SEQ ID NO: 1135332 - RNA, 25 nt, Human
uguaaggugggaaaagcaaaggaac

SEQ ID NO: 1135333 - RNA, 22 nt, Human
uguuauggaguuacccauuuug

SEQ ID NO: 1135334 - RNA, 24 nt, Human
uguuauggaguuacccauuuugag

SEQ ID NO: 1135335 - RNA, 25 nt, Human
uguuauggaguuacccauuuugaga

SEQ ID NO: 1135336 - RNA, 24 nt, Human
uuaaucacaaucuaucaaaaggga

SEQ ID NO: 1135337 - RNA, 23 nt, Human
uucccacaugaaaaucaaaugua

SEQ ID NO: 1135338 - RNA, 18 nt, Human
uucguaagcuuccaacug

SEQ ID NO: 1135339 - RNA, 22 nt, Human
uucuauucuaucaaaacaccgc

SEQ ID NO: 1135340 - RNA, 27 nt, Human
uugagaaaucugugcuaaaaggaccca

SEQ ID NO: 1135341 - RNA, 18 nt, Human
uuuuguuuguuuugucuu

SEQ ID NO: 1135342 - RNA, 27 nt, Human
aaggcaccugcagguuugguguccagu

SEQ ID NO: 1135343 - RNA, 20 nt, Human
acccacggggcagaaaagac

SEQ ID NO: 1135344 - RNA, 22 nt, Human
acggggcagaaaagacgggggc

SEQ ID NO: 1135345 - RNA, 22 nt, Human
aggggagucccgcauccugacc

SEQ ID NO: 1135346 - RNA, 18 nt, Human
auggcgguggaggggagu

SEQ ID NO: 1135347 - RNA, 18 nt, Human
caaccucuggguuacuug

SEQ ID NO: 1135348 - RNA, 19 nt, Human
cagccaggacgcuuggcag

SEQ ID NO: 1135349 - RNA, 19 nt, Human
ccaagaucaaggcaccugc

SEQ ID NO: 1135350 - RNA, 28 nt, Human
ccacccacggggcagaaaagacgggggc

SEQ ID NO: 1135351 - RNA, 22 nt, Human
ccgcauccugacccccggccgc

SEQ ID NO: 1135352 - RNA, 20 nt, Human
ccgcgcacuggggggcccuc

SEQ ID NO: 1135353 - RNA, 18 nt, Human
cgagaucauggcggugga

SEQ ID NO: 1135354 - RNA, 20 nt, Human
gaaaagacgggggcggucaa

SEQ ID NO: 1135355 - RNA, 21 nt, Human
ggggcggucaacuuucuccac

SEQ ID NO: 1135356 - RNA, 18 nt, Human
gggggcccucaaccucug

SEQ ID NO: 1135357 - RNA, 19 nt, Human
ugcuugccaggcaccaguc

SEQ ID NO: 1135358 - RNA, 19 nt, Human
ugggaaguccaagaucaag

SEQ ID NO: 1135359 - RNA, 24 nt, Human
ugggaaguccaagaucaaggcacc

SEQ ID NO: 1135360 - RNA, 19 nt, Human
uguccagugauggcucgcu

SEQ ID NO: 1135361 - RNA, 22 nt, Human
uugccaggcaccagucucuuuc

SEQ ID NO: 1135362 - RNA, 20 nt, Human
uuucuccacuccagccgccu

SEQ ID NO: 1135363 - RNA, 20 nt, Human
acccacggggcagaaaagac

SEQ ID NO: 1135364 - RNA, 22 nt, Human
acggggcagaaaagacgggggc

SEQ ID NO: 1135365 - RNA, 20 nt, Human
agcaauaauaacaucaaaac

SEQ ID NO: 1135366 - RNA, 22 nt, Human
aggggagucccgcauccugacc

SEQ ID NO: 1135367 - RNA, 18 nt, Human
auggcgguggaggggagu

SEQ ID NO: 1135368 - RNA, 18 nt, Human
caaccucuggguuacuug

SEQ ID NO: 1135369 - RNA, 19 nt, Human
cagccaggacgcuuggcag

SEQ ID NO: 1135370 - RNA, 22 nt, Human
cagcucuaauaaaaacagcaau

SEQ ID NO: 1135371 - RNA, 19 nt, Human
cauccugacccccggccgc

SEQ ID NO: 1135372 - RNA, 28 nt, Human
ccacccacggggcagaaaagacgggggc

SEQ ID NO: 1135373 - RNA, 20 nt, Human
ccgcgcacuggggggcccuc

SEQ ID NO: 1135374 - RNA, 18 nt, Human
cgagaucauggcggugga

SEQ ID NO: 1135375 - RNA, 20 nt, Human
gaaaagacgggggcggucaa

SEQ ID NO: 1135376 - RNA, 20 nt, Human
gccaggcaccagucucuuuc

SEQ ID NO: 1135377 - RNA, 21 nt, Human
ggggcggucaacuuucuccac

SEQ ID NO: 1135378 - RNA, 18 nt, Human
gggggcccucaaccucug

SEQ ID NO: 1135379 - RNA, 26 nt, Human
uaaaaacagcaauaauaacaucaaaa

SEQ ID NO: 1135380 - RNA, 23 nt, Human
uacacacagcucuaauaaaaaca

SEQ ID NO: 1135381 - RNA, 20 nt, Human
uccaggguaacaggaaaagg

SEQ ID NO: 1135382 - RNA, 23 nt, Human
uccaggguaacaggaaaaggcuc

SEQ ID NO: 1135383 - RNA, 18 nt, Human
ugcccugacucacuaauu

SEQ ID NO: 1135384 - RNA, 19 nt, Human
ugcuugccaggcaccaguc

SEQ ID NO: 1135385 - RNA, 20 nt, Human
uuucuccacuccagccgccu

SEQ ID NO: 1135386 - RNA, 19 nt, Human
aacuccaacuagcuuugcc

SEQ ID NO: 1135387 - RNA, 21 nt, Human
aagcagacauccaaucaggga

SEQ ID NO: 1135388 - RNA, 21 nt, Human
aaguguugggauuacaggcau

SEQ ID NO: 1135389 - RNA, 23 nt, Human
aaguguugggauuacaggcauga

SEQ ID NO: 1135390 - RNA, 26 nt, Human
aaguguugggauuacaggcaugagcc

SEQ ID NO: 1135391 - RNA, 20 nt, Human
aaucugcccgccuuggccuc

SEQ ID NO: 1135392 - RNA, 24 nt, Human
aaugacagggaagcccccugaaga

SEQ ID NO: 1135393 - RNA, 19 nt, Human
acaagcaaugacagggaag

SEQ ID NO: 1135394 - RNA, 22 nt, Human
acagcaauaauaacaucaaaac

SEQ ID NO: 1135395 - RNA, 23 nt, Human
accauguuggucaggcuggucuc

SEQ ID NO: 1135396 - RNA, 24 nt, Human
accauguuggucaggcuggucucg

SEQ ID NO: 1135397 - RNA, 20 nt, Human
acccacggggcagaaaagac

SEQ ID NO: 1135398 - RNA, 23 nt, Human
acccaggcuggagugcaguggug

SEQ ID NO: 1135399 - RNA, 24 nt, Human
acccaggcuggagugcaguggugu

SEQ ID NO: 1135400 - RNA, 18 nt, Human
acccuguuggcuuuagua

SEQ ID NO: 1135401 - RNA, 24 nt, Human
accucguaaucugcccgccuuggc

SEQ ID NO: 1135402 - RNA, 22 nt, Human
acggggcagaaaagacgggggc

SEQ ID NO: 1135403 - RNA, 21 nt, Human
acgggguucuaccauguuggu

SEQ ID NO: 1135404 - RNA, 24 nt, Human
acgggguucuaccauguuggucag

SEQ ID NO: 1135405 - RNA, 19 nt, Human
agauuucuucaaagccagg

SEQ ID NO: 1135406 - RNA, 21 nt, Human
agcaagcucacacuguccaag

SEQ ID NO: 1135407 - RNA, 24 nt, Human
agccugaggguagggugguggugg

SEQ ID NO: 1135408 - RNA, 21 nt, Human
aggcaucugaagucauuaugg

SEQ ID NO: 1135409 - RNA, 25 nt, Human
aggcuggagugcaguggugugaucu

SEQ ID NO: 1135410 - RNA, 22 nt, Human
aggggagucccgcauccugacc

SEQ ID NO: 1135411 - RNA, 22 nt, Human
aguagagacgggguucuaccau

SEQ ID NO: 1135412 - RNA, 23 nt, Human
aguagaugggauuacaggcaagu

SEQ ID NO: 1135413 - RNA, 19 nt, Human
agugcaguggugugaucuc

SEQ ID NO: 1135414 - RNA, 20 nt, Human
agugcaguggugugaucucg

SEQ ID NO: 1135415 - RNA, 23 nt, Human
agugcaguggugugaucucggcu

SEQ ID NO: 1135416 - RNA, 24 nt, Human
agugcaguggugugaucucggcuc

SEQ ID NO: 1135417 - RNA, 18 nt, Human
auggcgguggaggggagu

SEQ ID NO: 1135418 - RNA, 24 nt, Human
auuuuuguauuuuuaguagagacg

SEQ ID NO: 1135419 - RNA, 22 nt, Human
caaccuccuucacucccaacuc

SEQ ID NO: 1135420 - RNA, 18 nt, Human
caaccucuggguuacuug

SEQ ID NO: 1135421 - RNA, 22 nt, Human
caagcaauucuccugccucagc

SEQ ID NO: 1135422 - RNA, 22 nt, Human
caagcagacauccaaucaggga

SEQ ID NO: 1135423 - RNA, 24 nt, Human
caccacgccuggcuaauuuuugua

SEQ ID NO: 1135424 - RNA, 21 nt, Human
cacccaggcuggagugcagug

SEQ ID NO: 1135425 - RNA, 24 nt, Human
caccgcacccucccuauuucugcc

SEQ ID NO: 1135426 - RNA, 27 nt, Human
caccuuugugcccugacucacuaauuc

SEQ ID NO: 1135427 - RNA, 21 nt, Human
cacugcaaccucugccuccug

SEQ ID NO: 1135428 - RNA, 23 nt, Human
cacugcaaccucugccuccuggg

SEQ ID NO: 1135429 - RNA, 22 nt, Human
cagcacaagcaaugacagggaa

SEQ ID NO: 1135430 - RNA, 19 nt, Human
cagccaggacgcuuggcag

SEQ ID NO: 1135431 - RNA, 22 nt, Human
cagcucuaauaaaaacagcaau

SEQ ID NO: 1135432 - RNA, 23 nt, Human
cauguaaguuuuuccaaaggcuc

SEQ ID NO: 1135433 - RNA, 20 nt, Human
ccaccacgccuggcuaauuu

SEQ ID NO: 1135434 - RNA, 28 nt, Human
ccacccacggggcagaaaagacgggggc

SEQ ID NO: 1135435 - RNA, 19 nt, Human
ccaccgcgcccagccccac

SEQ ID NO: 1135436 - RNA, 24 nt, Human
cccacugaccuucuuucaugggga

SEQ ID NO: 1135437 - RNA, 19 nt, Human
cccgccccaucccuccccc

SEQ ID NO: 1135438 - RNA, 22 nt, Human
cccgccuuggccuccugaagug

SEQ ID NO: 1135439 - RNA, 18 nt, Human
cccugaagacccuugccc

SEQ ID NO: 1135440 - RNA, 18 nt, Human
ccgcacccucccuauuuc

SEQ ID NO: 1135441 - RNA, 22 nt, Human
ccgcauccugacccccggccgc

SEQ ID NO: 1135442 - RNA, 20 nt, Human
ccgcgcacuggggggcccuc

SEQ ID NO: 1135443 - RNA, 18 nt, Human
ccuaguggauguggucug

SEQ ID NO: 1135444 - RNA, 18 nt, Human
ccucccgccccaucccuc

SEQ ID NO: 1135445 - RNA, 21 nt, Human
ccucccgccccaucccucccc

SEQ ID NO: 1135446 - RNA, 24 nt, Human
ccuccuggguucaagcaauucucc

SEQ ID NO: 1135447 - RNA, 19 nt, Human
ccucugccuccuggguuca

SEQ ID NO: 1135448 - RNA, 23 nt, Human
ccugaaguguugggauuacaggc

SEQ ID NO: 1135449 - RNA, 24 nt, Human
ccugaaguguugggauuacaggca

SEQ ID NO: 1135450 - RNA, 23 nt, Human
ccugaguagaugggauuacaggc

SEQ ID NO: 1135451 - RNA, 24 nt, Human
ccugaguagaugggauuacaggca

SEQ ID NO: 1135452 - RNA, 24 nt, Human
ccugccucagccuccugaguagau

SEQ ID NO: 1135453 - RNA, 23 nt, Human
ccuggguucaagcaauucuccug

SEQ ID NO: 1135454 - RNA, 18 nt, Human
cgagaucauggcggugga

SEQ ID NO: 1135455 - RNA, 25 nt, Human
cgccccaucccucccccguugucca

SEQ ID NO: 1135456 - RNA, 23 nt, Human
cgccuuggccuccugaaguguug

SEQ ID NO: 1135457 - RNA, 24 nt, Human
cgcucugucacccaggcuggagug

SEQ ID NO: 1135458 - RNA, 24 nt, Human
cuagauuucuucaaagccagguau

SEQ ID NO: 1135459 - RNA, 22 nt, Human
cuagcucaaccuccuucacucc

SEQ ID NO: 1135460 - RNA, 23 nt, Human
cuagcucaaccuccuucacuccc

SEQ ID NO: 1135461 - RNA, 23 nt, Human
cucaaccuccuucacucccaacu

SEQ ID NO: 1135462 - RNA, 24 nt, Human
cucacugcaaccucugccuccugg

SEQ ID NO: 1135463 - RNA, 23 nt, Human
cucccuauugcuguuugcuccac

SEQ ID NO: 1135464 - RNA, 24 nt, Human
cuccugaaguguugggauuacagg

SEQ ID NO: 1135465 - RNA, 24 nt, Human
cuccugaccucguaaucugcccgc

SEQ ID NO: 1135466 - RNA, 21 nt, Human
cuccuggguucaagcaauucu

SEQ ID NO: 1135467 - RNA, 24 nt, Human
cucgcucugucacccaggcuggag

SEQ ID NO: 1135468 - RNA, 23 nt, Human
cucugucacccaggcuggagugc

SEQ ID NO: 1135469 - RNA, 20 nt, Human
cugaagucauuaugguaacu

SEQ ID NO: 1135470 - RNA, 23 nt, Human
cugaaguguugggauuacaggca

SEQ ID NO: 1135471 - RNA, 24 nt, Human
cugaaguguugggauuacaggcau

SEQ ID NO: 1135472 - RNA, 19 nt, Human
cugcaaccucugccuccug

SEQ ID NO: 1135473 - RNA, 23 nt, Human
cugcaaccucugccuccuggguu

SEQ ID NO: 1135474 - RNA, 24 nt, Human
cugcaaccucugccuccuggguuc

SEQ ID NO: 1135475 - RNA, 20 nt, Human
gaaaagacgggggcggucaa

SEQ ID NO: 1135476 - RNA, 21 nt, Human
gagacggagucucgcucuguc

SEQ ID NO: 1135477 - RNA, 24 nt, Human
gagacgggguucuaccauguuggu

SEQ ID NO: 1135478 - RNA, 22 nt, Human
gagcuacacccuguuggcuuua

SEQ ID NO: 1135479 - RNA, 18 nt, Human
gauuacaggcaugagcca

SEQ ID NO: 1135480 - RNA, 22 nt, Human
gauuacaggcaugagccaccgc

SEQ ID NO: 1135481 - RNA, 22 nt, Human
gauuacaggcaugagccaccgc

SEQ ID NO: 1135482 - RNA, 19 nt, Human
gcaucugaagucauuaugg

SEQ ID NO: 1135483 - RNA, 25 nt, Human
gccccaucccucccccguuguccag

SEQ ID NO: 1135484 - RNA, 22 nt, Human
gcccucuaacaauaagcucugg

SEQ ID NO: 1135485 - RNA, 23 nt, Human
gcuggucucgaacuccugaccuc

SEQ ID NO: 1135486 - RNA, 22 nt, Human
ggauuacaggcaugagccaccg

SEQ ID NO: 1135487 - RNA, 22 nt, Human
ggcagggcuggcucuucagccc

SEQ ID NO: 1135488 - RNA, 22 nt, Human
ggcuggagugcaguggugugau

SEQ ID NO: 1135489 - RNA, 24 nt, Human
ggcuggucucgaacuccugaccuc

SEQ ID NO: 1135490 - RNA, 21 nt, Human
ggggcggucaacuuucuccac

SEQ ID NO: 1135491 - RNA, 18 nt, Human
gggggcccucaaccucug

SEQ ID NO: 1135492 - RNA, 23 nt, Human
gggguucuaccauguuggucagg

SEQ ID NO: 1135493 - RNA, 22 nt, Human
ggguucuaccauguuggucagg

SEQ ID NO: 1135494 - RNA, 19 nt, Human
ggucucgaacuccugaccu

SEQ ID NO: 1135495 - RNA, 23 nt, Human
ggugcugccauguugugcugccu

SEQ ID NO: 1135496 - RNA, 23 nt, Human
guagagacgggguucuaccaugu

SEQ ID NO: 1135497 - RNA, 24 nt, Human
gucucgcucugucacccaggcugg

SEQ ID NO: 1135498 - RNA, 19 nt, Human
guguugggauuacaggcau

SEQ ID NO: 1135499 - RNA, 26 nt, Human
uaaaaacagcaauaauaacaucaaaa

SEQ ID NO: 1135500 - RNA, 24 nt, Human
uaauuuuuguauuuuuaguagaga

SEQ ID NO: 1135501 - RNA, 23 nt, Human
uacacacagcucuaauaaaaaca

SEQ ID NO: 1135502 - RNA, 22 nt, Human
uacaggcaagugccaccacgcc

SEQ ID NO: 1135503 - RNA, 24 nt, Human
uacaggcaugagccaccgcgccca

SEQ ID NO: 1135504 - RNA, 19 nt, Human
uacagugugggauacugaa

SEQ ID NO: 1135505 - RNA, 21 nt, Human
uaccauguuggucaggcuggu

SEQ ID NO: 1135506 - RNA, 24 nt, Human
uaccauguuggucaggcuggucuc

SEQ ID NO: 1135507 - RNA, 22 nt, Human
uagagacgggguucuaccaugu

SEQ ID NO: 1135508 - RNA, 18 nt, Human
uagcaccgcacccucccu

SEQ ID NO: 1135509 - RNA, 24 nt, Human
uaguagagacgggguucuaccaug

SEQ ID NO: 1135510 - RNA, 24 nt, Human
ucaaccuccuucacucccaacucc

SEQ ID NO: 1135511 - RNA, 19 nt, Human
ucaagcaauucuccugccu

SEQ ID NO: 1135512 - RNA, 22 nt, Human
ucacccaggcuggagugcagug

SEQ ID NO: 1135513 - RNA, 23 nt, Human
ucacugcaaccucugccuccugg

SEQ ID NO: 1135514 - RNA, 24 nt, Human
ucacugcaaccucugccuccuggg

SEQ ID NO: 1135515 - RNA, 26 nt, Human
ucacugcaaccucugccuccuggguu

SEQ ID NO: 1135516 - RNA, 18 nt, Human
uccaagcagacauccaau

SEQ ID NO: 1135517 - RNA, 20 nt, Human
uccaggguaacaggaaaagg

SEQ ID NO: 1135518 - RNA, 23 nt, Human
uccaggguaacaggaaaaggcuc

SEQ ID NO: 1135519 - RNA, 24 nt, Human
uccugaaguguugggauuacaggc

SEQ ID NO: 1135520 - RNA, 24 nt, Human
uccugaguagaugggauuacaggc

SEQ ID NO: 1135521 - RNA, 21 nt, Human
uccuggguucaagcaauucuc

SEQ ID NO: 1135522 - RNA, 24 nt, Human
uccuggguucaagcaauucuccug

SEQ ID NO: 1135523 - RNA, 24 nt, Human
ucgcucugucacccaggcuggagu

SEQ ID NO: 1135524 - RNA, 22 nt, Human
ucuaccauguuggucaggcugg

SEQ ID NO: 1135525 - RNA, 18 nt, Human
ucuccugccucagccucc

SEQ ID NO: 1135526 - RNA, 19 nt, Human
ucucgaacuccugaccucg

SEQ ID NO: 1135527 - RNA, 19 nt, Human
ucucgcucugucacccagg

SEQ ID NO: 1135528 - RNA, 23 nt, Human
ucucgcucugucacccaggcugg

SEQ ID NO: 1135529 - RNA, 24 nt, Human
ucucgcucugucacccaggcugga

SEQ ID NO: 1135530 - RNA, 26 nt, Human
ucucgcucugucacccaggcuggagu

SEQ ID NO: 1135531 - RNA, 27 nt, Human
ucucgcucugucacccaggcuggagug

SEQ ID NO: 1135532 - RNA, 21 nt, Human
ucugauaugggaaacgagcuc

SEQ ID NO: 1135533 - RNA, 24 nt, Human
ucugauaugggaaacgagcucuag

SEQ ID NO: 1135534 - RNA, 24 nt, Human
ucugccuccuggguucaagcaauu

SEQ ID NO: 1135535 - RNA, 24 nt, Human
ucugucacccaggcuggagugcag

SEQ ID NO: 1135536 - RNA, 23 nt, Human
ucuucaguauagaguguucugau

SEQ ID NO: 1135537 - RNA, 21 nt, Human
ugaagacccuugcccagaggu

SEQ ID NO: 1135538 - RNA, 21 nt, Human
ugagcuacacccuguuggcuu

SEQ ID NO: 1135539 - RNA, 22 nt, Human
ugcaguggugugaucucggcuc

SEQ ID NO: 1135540 - RNA, 24 nt, Human
ugccucagccuccugaguagaugg

SEQ ID NO: 1135541 - RNA, 18 nt, Human
ugccuuuacaguguggga

SEQ ID NO: 1135542 - RNA, 19 nt, Human
ugcuugccaggcaccaguc

SEQ ID NO: 1135543 - RNA, 19 nt, Human
uggagugcaguggugugau

SEQ ID NO: 1135544 - RNA, 23 nt, Human
uggagugcaguggugugaucucg

SEQ ID NO: 1135545 - RNA, 24 nt, Human
uggagugcaguggugugaucucgg

SEQ ID NO: 1135546 - RNA, 21 nt, Human
ugggauuacaggcaagugcca

SEQ ID NO: 1135547 - RNA, 22 nt, Human
ugggauuacaggcaagugccac

SEQ ID NO: 1135548 - RNA, 24 nt, Human
ugggauuacaggcaagugccacca

SEQ ID NO: 1135549 - RNA, 18 nt, Human
ugggauuacaggcaugag

SEQ ID NO: 1135550 - RNA, 19 nt, Human
ugggauuacaggcaugagc

SEQ ID NO: 1135551 - RNA, 21 nt, Human
ugggauuacaggcaugagcca

SEQ ID NO: 1135552 - RNA, 22 nt, Human
ugggauuacaggcaugagccac

SEQ ID NO: 1135553 - RNA, 23 nt, Human
ugggauuacaggcaugagccacc

SEQ ID NO: 1135554 - RNA, 24 nt, Human
ugggauuacaggcaugagccaccg

SEQ ID NO: 1135555 - RNA, 24 nt, Human
ugggauuacaggcaugagccaccg

SEQ ID NO: 1135556 - RNA, 26 nt, Human
ugggauuacaggcaugagccaccgcg

SEQ ID NO: 1135557 - RNA, 21 nt, Human
uggguucaagcaauucuccug

SEQ ID NO: 1135558 - RNA, 23 nt, Human
uggguucaagcaauucuccugcc

SEQ ID NO: 1135559 - RNA, 24 nt, Human
uggguucaagcaauucuccugccu

SEQ ID NO: 1135560 - RNA, 24 nt, Human
uggucaggcuggucucgaacuccu

SEQ ID NO: 1135561 - RNA, 21 nt, Human
uguauuuuuaguagagacggg

SEQ ID NO: 1135562 - RNA, 18 nt, Human
uuaguagagacgggguuc

SEQ ID NO: 1135563 - RNA, 24 nt, Human
uuaguagagacgggguucuaccau

SEQ ID NO: 1135564 - RNA, 21 nt, Human
uucaagcaauucuccugccuc

SEQ ID NO: 1135565 - RNA, 24 nt, Human
uucaagcaauucuccugccucagc

SEQ ID NO: 1135566 - RNA, 21 nt, Human
uucuaccauguuggucaggcu

SEQ ID NO: 1135567 - RNA, 23 nt, Human
uuguauuuuuaguagagacgggg

SEQ ID NO: 1135568 - RNA, 20 nt, Human
uuucuccacuccagccgccu

SEQ ID NO: 1135569 - RNA, 24 nt, Human
uuuuuaguagagacgggguucuac

SEQ ID NO: 1135570 - RNA, 20 nt, Human
uuuuuguauuuuuaguagag

SEQ ID NO: 1135571 - RNA, 19 nt, Human
aacaaguguucauugaaaa

SEQ ID NO: 1135572 - RNA, 24 nt, Human
aagcaggaguggacgggaggucgc

SEQ ID NO: 1135573 - RNA, 21 nt, Human
aaucccaaauuggauuaguug

SEQ ID NO: 1135574 - RNA, 18 nt, Human
acccccagcuccugggac

SEQ ID NO: 1135575 - RNA, 26 nt, Human
accuucuccagcaugggcuccugcug

SEQ ID NO: 1135576 - RNA, 22 nt, Human
agaagccaggucagggcuggcc

SEQ ID NO: 1135577 - RNA, 23 nt, Human
agagaacuuuuauuucagaagag

SEQ ID NO: 1135578 - RNA, 23 nt, Human
agagcccacccauggggcccucc

SEQ ID NO: 1135579 - RNA, 23 nt, Human
aggaaaacccaacacgaugacug

SEQ ID NO: 1135580 - RNA, 27 nt, Human
aggccccacagccaggccccacccccu

SEQ ID NO: 1135581 - RNA, 28 nt, Human
aggcucagcagauuacccugggccaaga

SEQ ID NO: 1135582 - RNA, 23 nt, Human
agggagguccccgagugcuggcc

SEQ ID NO: 1135583 - RNA, 18 nt, Human
agggggauuugaggagga

SEQ ID NO: 1135584 - RNA, 19 nt, Human
agugcuggccaggggagga

SEQ ID NO: 1135585 - RNA, 18 nt, Human
augggggcucucugccuc

SEQ ID NO: 1135586 - RNA, 21 nt, Human
augggucuggggugauggggg

SEQ ID NO: 1135587 - RNA, 22 nt, Human
caaauaaacaaauccuuccuuc

SEQ ID NO: 1135588 - RNA, 20 nt, Human
caaaucccaaauuggauuag

SEQ ID NO: 1135589 - RNA, 18 nt, Human
caacacgaugacugcccc

SEQ ID NO: 1135590 - RNA, 24 nt, Human
caacuugccgugacuccccacccc

SEQ ID NO: 1135591 - RNA, 19 nt, Human
caccauguagccgcagugc

SEQ ID NO: 1135592 - RNA, 20 nt, Human
caccauguagccgcagugcc

SEQ ID NO: 1135593 - RNA, 23 nt, Human
caccauguagccgcagugccccg

SEQ ID NO: 1135594 - RNA, 24 nt, Human
cacccccagcuccugggaccugcu

SEQ ID NO: 1135595 - RNA, 23 nt, Human
cacgaugacugccccucgcaggc

SEQ ID NO: 1135596 - RNA, 23 nt, Human
cagaagagugcaaauaaacaaau

SEQ ID NO: 1135597 - RNA, 24 nt, Human
cagagcccacccauggggcccucc

SEQ ID NO: 1135598 - RNA, 23 nt, Human
cagccagucccuggccuccuguu

SEQ ID NO: 1135599 - RNA, 21 nt, Human
cagccgggcccuccaccugcc

SEQ ID NO: 1135600 - RNA, 24 nt, Human
cagccgggcccuccaccugcccca

SEQ ID NO: 1135601 - RNA, 23 nt, Human
cagcuccugggaccugcuggccu

SEQ ID NO: 1135602 - RNA, 22 nt, Human
cagcucugggcagucaggucug

SEQ ID NO: 1135603 - RNA, 23 nt, Human
caggaaugagcuggcacuggagg

SEQ ID NO: 1135604 - RNA, 23 nt, Human
cauaaagagcccggcuggcuuua

SEQ ID NO: 1135605 - RNA, 21 nt, Human
caucugaggcccagugcugcc

SEQ ID NO: 1135606 - RNA, 22 nt, Human
caucugaggcccagugcugccc

SEQ ID NO: 1135607 - RNA, 22 nt, Human
ccaccagguggccccagggccc

SEQ ID NO: 1135608 - RNA, 22 nt, Human
ccacccauggggcccucccaac

SEQ ID NO: 1135609 - RNA, 22 nt, Human
ccacuuuaauccaucaguucca

SEQ ID NO: 1135610 - RNA, 23 nt, Human
ccaguggagguguuugcccuggg

SEQ ID NO: 1135611 - RNA, 19 nt, Human
ccauaacaccuucuccagc

SEQ ID NO: 1135612 - RNA, 19 nt, Human
cccacagccaggccccacc

SEQ ID NO: 1135613 - RNA, 23 nt, Human
cccacagccaggccccaccccca

SEQ ID NO: 1135614 - RNA, 23 nt, Human
cccacccugccuggcucuuccug

SEQ ID NO: 1135615 - RNA, 21 nt, Human
cccagcucccaagcugcgagc

SEQ ID NO: 1135616 - RNA, 23 nt, Human
cccagugcugcccaccucgaauc

SEQ ID NO: 1135617 - RNA, 21 nt, Human
ccccacccccagcuccuggga

SEQ ID NO: 1135618 - RNA, 21 nt, Human
ccccacccugccuggcucuuc

SEQ ID NO: 1135619 - RNA, 21 nt, Human
ccccaccugccagggccugga

SEQ ID NO: 1135620 - RNA, 19 nt, Human
ccccagggccccacccugc

SEQ ID NO: 1135621 - RNA, 21 nt, Human
cccccagcuccugggaccugc

SEQ ID NO: 1135622 - RNA, 21 nt, Human
cccguagugugaaggaugggg

SEQ ID NO: 1135623 - RNA, 22 nt, Human
cccguagugugaaggaugggga

SEQ ID NO: 1135624 - RNA, 20 nt, Human
cccugagcccaccagguggc

SEQ ID NO: 1135625 - RNA, 22 nt, Human
cccugagcccaccagguggccc

SEQ ID NO: 1135626 - RNA, 23 nt, Human
cccugagcccaccagguggcccc

SEQ ID NO: 1135627 - RNA, 25 nt, Human
ccuggcccugagcccaccagguggc

SEQ ID NO: 1135628 - RNA, 26 nt, Human
ccuggcuccuagggguccagccaguc

SEQ ID NO: 1135629 - RNA, 19 nt, Human
cuccagcaugggcuccugc

SEQ ID NO: 1135630 - RNA, 19 nt, Human
cuccugcugcugcugggac

SEQ ID NO: 1135631 - RNA, 19 nt, Human
cuccugggaccugcuggcc

SEQ ID NO: 1135632 - RNA, 19 nt, Human
cuccugggaccugcuggcc

SEQ ID NO: 1135633 - RNA, 23 nt, Human
cugcccaccucgaauccccaaau

SEQ ID NO: 1135634 - RNA, 18 nt, Human
cugcggcugccaggcugg

SEQ ID NO: 1135635 - RNA, 18 nt, Human
cuggccccaccugccagg

SEQ ID NO: 1135636 - RNA, 18 nt, Human
cuuccugcaugggucugg

SEQ ID NO: 1135637 - RNA, 22 nt, Human
cuugguuccacuuuaauccauc

SEQ ID NO: 1135638 - RNA, 23 nt, Human
gaagggcagaaggggacacuggg

SEQ ID NO: 1135639 - RNA, 21 nt, Human
gaaggggacacugggccaccc

SEQ ID NO: 1135640 - RNA, 18 nt, Human
gagagagacccguggagc

SEQ ID NO: 1135641 - RNA, 20 nt, Human
gcaaauaaacaaauccuucc

SEQ ID NO: 1135642 - RNA, 21 nt, Human
gcaggaaaacccaacacgaug

SEQ ID NO: 1135643 - RNA, 23 nt, Human
gccaggccccacccccagcuccu

SEQ ID NO: 1135644 - RNA, 18 nt, Human
gcccugagcccaccaggu

SEQ ID NO: 1135645 - RNA, 22 nt, Human
gcccuggcccugagcccaccuu

SEQ ID NO: 1135646 - RNA, 18 nt, Human
gcccuggggggccggcuc

SEQ ID NO: 1135647 - RNA, 19 nt, Human
gcggcugccaggcugggcu

SEQ ID NO: 1135648 - RNA, 22 nt, Human
ggaaaacccaacacgaugacug

SEQ ID NO: 1135649 - RNA, 21 nt, Human
ggaagccccguagugugaagg

SEQ ID NO: 1135650 - RNA, 18 nt, Human
ggagguguuugcccuggg

SEQ ID NO: 1135651 - RNA, 23 nt, Human
ggccaggggaggaaucugcagug

SEQ ID NO: 1135652 - RNA, 19 nt, Human
ggggaagggcagaagggga

SEQ ID NO: 1135653 - RNA, 24 nt, Human
gggugaugggggcucaucugaggc

SEQ ID NO: 1135654 - RNA, 18 nt, Human
uacaaguaaagaauccag

SEQ ID NO: 1135655 - RNA, 23 nt, Human
uagaaagcagcaaagcugcuaua

SEQ ID NO: 1135656 - RNA, 22 nt, Human
uaggucagggcagccagggcga

SEQ ID NO: 1135657 - RNA, 23 nt, Human
uagugugaaggauggggacaucg

SEQ ID NO: 1135658 - RNA, 18 nt, Human
ucacuuggggcguguaaa

SEQ ID NO: 1135659 - RNA, 24 nt, Human
ucagagcccacccauggggcccuc

SEQ ID NO: 1135660 - RNA, 23 nt, Human
ucagagcccagcucuggccccac

SEQ ID NO: 1135661 - RNA, 22 nt, Human
ucauugaaaagaaacuuggggg

SEQ ID NO: 1135662 - RNA, 24 nt, Human
uccagguaauuuugugguuucugc

SEQ ID NO: 1135663 - RNA, 22 nt, Human
ucccaaauuggauuaguugugu

SEQ ID NO: 1135664 - RNA, 22 nt, Human
ucccaaauuggauuaguugugu

SEQ ID NO: 1135665 - RNA, 18 nt, Human
ucccagcacuuuacaugg

SEQ ID NO: 1135666 - RNA, 18 nt, Human
uccccaccccucuuccca

SEQ ID NO: 1135667 - RNA, 19 nt, Human
uccccaccccucuucccag

SEQ ID NO: 1135668 - RNA, 18 nt, Human
uccugggaccugcuggcc

SEQ ID NO: 1135669 - RNA, 22 nt, Human
ucucagcaggcaagguaggggg

SEQ ID NO: 1135670 - RNA, 22 nt, Human
ucucaggaaugagcuggcacug

SEQ ID NO: 1135671 - RNA, 21 nt, Human
ugacuccccaccccucuuccc

SEQ ID NO: 1135672 - RNA, 23 nt, Human
ugagcccaccagguggccccagg

SEQ ID NO: 1135673 - RNA, 25 nt, Human
ugaggcccagugcugcccaccucga

SEQ ID NO: 1135674 - RNA, 21 nt, Human
ugcaaauaaacaaauccuucc

SEQ ID NO: 1135675 - RNA, 28 nt, Human
ugcaaauaaacaaauccuuccuuccccc

SEQ ID NO: 1135676 - RNA, 21 nt, Human
ugccagggccuggaugagccc

SEQ ID NO: 1135677 - RNA, 24 nt, Human
ugccccauaacaccuucuccagca

SEQ ID NO: 1135678 - RNA, 18 nt, Human
ugcccuggggggccggcu

SEQ ID NO: 1135679 - RNA, 21 nt, Human
ugcuggagucaccauguagcc

SEQ ID NO: 1135680 - RNA, 22 nt, Human
ugcugggacaaccaagcaggag

SEQ ID NO: 1135681 - RNA, 21 nt, Human
uggaauugaauugaaucuguc

SEQ ID NO: 1135682 - RNA, 18 nt, Human
uggccaggggaggaaucu

SEQ ID NO: 1135683 - RNA, 21 nt, Human
uggccaggggaggaaucugca

SEQ ID NO: 1135684 - RNA, 21 nt, Human
uggccccagggccccacccug

SEQ ID NO: 1135685 - RNA, 23 nt, Human
ugggcagucaggucugcccagug

SEQ ID NO: 1135686 - RNA, 23 nt, Human
uggggcaagccuggacccucaac

SEQ ID NO: 1135687 - RNA, 20 nt, Human
uggguacagaggucagagcc

SEQ ID NO: 1135688 - RNA, 20 nt, Human
ugguugccggcuaaggaggg

SEQ ID NO: 1135689 - RNA, 21 nt, Human
ugugugagggggauuugagga

SEQ ID NO: 1135690 - RNA, 22 nt, Human
uuccauuucugauaaauguccc

SEQ ID NO: 1135691 - RNA, 25 nt, Human
uugccgugacuccccaccccucuuc

SEQ ID NO: 1135692 - RNA, 22 nt, Human
accugaaucaaggaguuaaggc

SEQ ID NO: 1135693 - RNA, 21 nt, Human
ccugaaucaaggaguuaaggc

SEQ ID NO: 1135694 - RNA, 25 nt, Human
ccugaaucaaggaguuaaggcagcc

SEQ ID NO: 1135695 - RNA, 21 nt, Human
aacucugcuucugaucccaca

SEQ ID NO: 1135696 - RNA, 23 nt, Human
aauagguccuuggauucugcaac

SEQ ID NO: 1135697 - RNA, 20 nt, Human
aauugcauagagucuccccc

SEQ ID NO: 1135698 - RNA, 20 nt, Human
acaaaaauagguccuuggau

SEQ ID NO: 1135699 - RNA, 21 nt, Human
accaucaaaucuccccaccac

SEQ ID NO: 1135700 - RNA, 20 nt, Human
aggcagucaaaccuuggaug

SEQ ID NO: 1135701 - RNA, 20 nt, Human
aguacaaucaucacugcacu

SEQ ID NO: 1135702 - RNA, 19 nt, Human
auagagucucccccgaagc

SEQ ID NO: 1135703 - RNA, 20 nt, Human
auagagucucccccgaagca

SEQ ID NO: 1135704 - RNA, 23 nt, Human
aucaaaucuccccaccacauaaa

SEQ ID NO: 1135705 - RNA, 18 nt, Human
augauaggguuguaacau

SEQ ID NO: 1135706 - RNA, 20 nt, Human
augcuccucuggucaauguu

SEQ ID NO: 1135707 - RNA, 22 nt, Human
auguacuguuuccguguacaca

SEQ ID NO: 1135708 - RNA, 24 nt, Human
auucaaugcuacuuagcagggacu

SEQ ID NO: 1135709 - RNA, 20 nt, Human
caaagccuccagagacauag

SEQ ID NO: 1135710 - RNA, 23 nt, Human
caccagcaucacagcgcuggguu

SEQ ID NO: 1135711 - RNA, 18 nt, Human
cagcacaaucucaugggc

SEQ ID NO: 1135712 - RNA, 20 nt, Human
caggaggagccgaagcgucg

SEQ ID NO: 1135713 - RNA, 25 nt, Human
cauaaagcagugcggagaaagaaca

SEQ ID NO: 1135714 - RNA, 23 nt, Human
caucaaaucuccccaccacauaa

SEQ ID NO: 1135715 - RNA, 24 nt, Human
caucaaaucuccccaccacauaaa

SEQ ID NO: 1135716 - RNA, 18 nt, Human
caucacagcgcuggguuc

SEQ ID NO: 1135717 - RNA, 18 nt, Human
cauguacuguuuccgugu

SEQ ID NO: 1135718 - RNA, 20 nt, Human
ccagcacaaucucaugggca

SEQ ID NO: 1135719 - RNA, 21 nt, Human
ccagggccuguccccagccug

SEQ ID NO: 1135720 - RNA, 20 nt, Human
ccaguguccuguaugagggu

SEQ ID NO: 1135721 - RNA, 21 nt, Human
cccacacagccgcgccagggc

SEQ ID NO: 1135722 - RNA, 20 nt, Human
cccagccuguggggauggag

SEQ ID NO: 1135723 - RNA, 23 nt, Human
cccccgaagcacuguggccccua

SEQ ID NO: 1135724 - RNA, 26 nt, Human
cccuacauagcaucguggagugguca

SEQ ID NO: 1135725 - RNA, 24 nt, Human
cugcuucugaucccacacagccgc

SEQ ID NO: 1135726 - RNA, 24 nt, Human
cugucugcauaucucccagcaugc

SEQ ID NO: 1135727 - RNA, 18 nt, Human
cuguggggauggaguggg

SEQ ID NO: 1135728 - RNA, 24 nt, Human
gcaacucugcuucugaucccacac

SEQ ID NO: 1135729 - RNA, 22 nt, Human
gcaccagaacgcuugguggcca

SEQ ID NO: 1135730 - RNA, 20 nt, Human
gccuguaaucacccugugca

SEQ ID NO: 1135731 - RNA, 20 nt, Human
ggcaggaaagucuuucugcu

SEQ ID NO: 1135732 - RNA, 20 nt, Human
guccuuggauucugcaacuc

SEQ ID NO: 1135733 - RNA, 19 nt, Human
gugcuccaacaauggucac

SEQ ID NO: 1135734 - RNA, 20 nt, Human
uaaaauuuccaugguagagg

SEQ ID NO: 1135735 - RNA, 22 nt, Human
uaaagcagugcggagaaagaac

SEQ ID NO: 1135736 - RNA, 24 nt, Human
uaaagcagugcggagaaagaacaa

SEQ ID NO: 1135737 - RNA, 24 nt, Human
uagaaaggauucuugauucuccca

SEQ ID NO: 1135738 - RNA, 19 nt, Human
uagcucuggauggugcucc

SEQ ID NO: 1135739 - RNA, 23 nt, Human
uagguccuuggauucugcaacuc

SEQ ID NO: 1135740 - RNA, 18 nt, Human
ucacuucuuguggagaac

SEQ ID NO: 1135741 - RNA, 21 nt, Human
uccaucaaagccuccagagac

SEQ ID NO: 1135742 - RNA, 22 nt, Human
ucccagggugguggcuccagca

SEQ ID NO: 1135743 - RNA, 21 nt, Human
ucucccagcaugcuccucugg

SEQ ID NO: 1135744 - RNA, 23 nt, Human
ucucccagcaugcuccucugguc

SEQ ID NO: 1135745 - RNA, 18 nt, Human
ucucccagggugguggcu

SEQ ID NO: 1135746 - RNA, 21 nt, Human
ucuggucaauguuuggaucau

SEQ ID NO: 1135747 - RNA, 21 nt, Human
ugcauagagucucccccgaag

SEQ ID NO: 1135748 - RNA, 19 nt, Human
uggggugcggguccagcag

SEQ ID NO: 1135749 - RNA, 23 nt, Human
uguggggauggaguggggugcgg

SEQ ID NO: 1135750 - RNA, 22 nt, Human
uucugaucccacacagccgcgc

SEQ ID NO: 1135751 - RNA, 21 nt, Human
uucugcaacucugcuucugau

SEQ ID NO: 1135752 - RNA, 21 nt, Human
uuguaugcuucaacggaagaa

SEQ ID NO: 1135753 - RNA, 21 nt, Human
uuugggggccauaaugccucc

SEQ ID NO: 1135754 - RNA, 20 nt, Human
agcucugggccuagguuccu

SEQ ID NO: 1135755 - RNA, 19 nt, Human
aggaacgggacacaucccc

SEQ ID NO: 1135756 - RNA, 19 nt, Human
aggccgcccggggguccac

SEQ ID NO: 1135757 - RNA, 19 nt, Human
aggcggcgucgaugucggc

SEQ ID NO: 1135758 - RNA, 21 nt, Human
agguuccuggugcgcagggcc

SEQ ID NO: 1135759 - RNA, 18 nt, Human
auccccaguggaggcccu

SEQ ID NO: 1135760 - RNA, 23 nt, Human
cacagccccugggucggggcagg

SEQ ID NO: 1135761 - RNA, 21 nt, Human
cacaugcagccccuggggggc

SEQ ID NO: 1135762 - RNA, 23 nt, Human
cagcccagcccuaccaccugcua

SEQ ID NO: 1135763 - RNA, 18 nt, Human
ccacaugcagccccuggg

SEQ ID NO: 1135764 - RNA, 24 nt, Human
ccagcccagcccuaccaccugcua

SEQ ID NO: 1135765 - RNA, 18 nt, Human
ccaguggaggcccugggc

SEQ ID NO: 1135766 - RNA, 23 nt, Human
cccccagcugccaccuggauguc

SEQ ID NO: 1135767 - RNA, 22 nt, Human
ccccuaggccgcccgggggucc

SEQ ID NO: 1135768 - RNA, 19 nt, Human
ccccuggggggccggcgcg

SEQ ID NO: 1135769 - RNA, 21 nt, Human
cccugggcaugcucuggccuc

SEQ ID NO: 1135770 - RNA, 19 nt, Human
cccugggucggggcagggu

SEQ ID NO: 1135771 - RNA, 22 nt, Human
ccuaggccgcccggggguccac

SEQ ID NO: 1135772 - RNA, 20 nt, Human
cgggggccgccuuauugcug

SEQ ID NO: 1135773 - RNA, 23 nt, Human
cgggggccgccuuauugcugagg

SEQ ID NO: 1135774 - RNA, 23 nt, Human
cggggugagguccgggggccgcc

SEQ ID NO: 1135775 - RNA, 22 nt, Human
cugagguccggccgguuggggc

SEQ ID NO: 1135776 - RNA, 24 nt, Human
cugccaccuggaugucaccacuca

SEQ ID NO: 1135777 - RNA, 18 nt, Human
gagguccggccgguuggg

SEQ ID NO: 1135778 - RNA, 20 nt, Human
gcagccccuggggggccggc

SEQ ID NO: 1135779 - RNA, 23 nt, Human
gcugagguccggccgguuggggc

SEQ ID NO: 1135780 - RNA, 18 nt, Human
ggucggggcagggucccc

SEQ ID NO: 1135781 - RNA, 18 nt, Human
guugcaguggaggcggga

SEQ ID NO: 1135782 - RNA, 24 nt, Human
uacagucaggagcccccagcugcc

SEQ ID NO: 1135783 - RNA, 24 nt, Human
uccccaguggaggcccugggcaug

SEQ ID NO: 1135784 - RNA, 18 nt, Human
uccccuaggccgcccggg

SEQ ID NO: 1135785 - RNA, 25 nt, Human
uccccuaggccgcccggggguccac

SEQ ID NO: 1135786 - RNA, 21 nt, Human
ucggggcaggguccccuaggc

SEQ ID NO: 1135787 - RNA, 21 nt, Human
ucuguuuucacauauuuucuu

SEQ ID NO: 1135788 - RNA, 18 nt, Human
ugagguccgggggccgcc

SEQ ID NO: 1135789 - RNA, 25 nt, Human
ugcucuggccucccccucacagcuc

SEQ ID NO: 1135790 - RNA, 22 nt, Human
uggggggccggcgcggggugag

SEQ ID NO: 1135791 - RNA, 20 nt, Human
aaaaacccaaccugcuacuu

SEQ ID NO: 1135792 - RNA, 19 nt, Human
aaaauaaaacaagcuauga

SEQ ID NO: 1135793 - RNA, 18 nt, Human
aagacaucaaauacauua

SEQ ID NO: 1135794 - RNA, 23 nt, Human
aagcuagcacagcgccagggaca

SEQ ID NO: 1135795 - RNA, 21 nt, Human
aaggccacuguuccuccugua

SEQ ID NO: 1135796 - RNA, 21 nt, Human
aaggcuuuuagaggaaaacca

SEQ ID NO: 1135797 - RNA, 20 nt, Human
aaggggcugugcacauagca

SEQ ID NO: 1135798 - RNA, 21 nt, Human
acaaaauaaaacaagcuauga

SEQ ID NO: 1135799 - RNA, 18 nt, Human
acacagcacagacauggc

SEQ ID NO: 1135800 - RNA, 22 nt, Human
acagaguaucccugccucauua

SEQ ID NO: 1135801 - RNA, 19 nt, Human
acagcacagacauggcuga

SEQ ID NO: 1135802 - RNA, 18 nt, Human
acaggguucccagaauuc

SEQ ID NO: 1135803 - RNA, 23 nt, Human
accaaaguccucaaacggcagcc

SEQ ID NO: 1135804 - RNA, 20 nt, Human
accaggguccacaagggaga

SEQ ID NO: 1135805 - RNA, 22 nt, Human
acccaaaauaagccaaccugac

SEQ ID NO: 1135806 - RNA, 18 nt, Human
accuaaccagaagcggca

SEQ ID NO: 1135807 - RNA, 20 nt, Human
acuaaaacacuaagacauca

SEQ ID NO: 1135808 - RNA, 21 nt, Human
agagcucagugguguccacag

SEQ ID NO: 1135809 - RNA, 21 nt, Human
agaugaucaguaaaugaaagc

SEQ ID NO: 1135810 - RNA, 24 nt, Human
agauuccuuuaguuacagcagcuu

SEQ ID NO: 1135811 - RNA, 21 nt, Human
auaaaacaagcuaugaucccc

SEQ ID NO: 1135812 - RNA, 24 nt, Human
augaccauuaauucugucucagga

SEQ ID NO: 1135813 - RNA, 18 nt, Human
caaaguaauccaaggggc

SEQ ID NO: 1135814 - RNA, 21 nt, Human
caaaguccucaaacggcagcc

SEQ ID NO: 1135815 - RNA, 26 nt, Human
caaaguccucaaacggcagccgguca

SEQ ID NO: 1135816 - RNA, 25 nt, Human
caagugcccuccaacccacugcucu

SEQ ID NO: 1135817 - RNA, 18 nt, Human
caaguuuuuaaccaguca

SEQ ID NO: 1135818 - RNA, 25 nt, Human
cacacagcacagacauggcugacuc

SEQ ID NO: 1135819 - RNA, 25 nt, Human
cacagcagaugaucaguaaaugaaa

SEQ ID NO: 1135820 - RNA, 21 nt, Human
cacgaagcugagcugaggcag

SEQ ID NO: 1135821 - RNA, 23 nt, Human
cacuaucauaaaaacccaaccug

SEQ ID NO: 1135822 - RNA, 19 nt, Human
cacuggccaaagggcaaac

SEQ ID NO: 1135823 - RNA, 21 nt, Human
cagaaccagcacagcguccac

SEQ ID NO: 1135824 - RNA, 25 nt, Human
cagcacagacauggcugacuccugu

SEQ ID NO: 1135825 - RNA, 21 nt, Human
cagcguccacaccgacagcag

SEQ ID NO: 1135826 - RNA, 18 nt, Human
cagggacacaugagcucc

SEQ ID NO: 1135827 - RNA, 21 nt, Human
caggugaaaaaccauagugag

SEQ ID NO: 1135828 - RNA, 20 nt, Human
cauaaaaacccaaccugcua

SEQ ID NO: 1135829 - RNA, 23 nt, Human
cauaaaaacccaaccugcuacuu

SEQ ID NO: 1135830 - RNA, 23 nt, Human
ccacaacugcauuauuuugugug

SEQ ID NO: 1135831 - RNA, 22 nt, Human
ccauggcgauaguuuucccaaa

SEQ ID NO: 1135832 - RNA, 19 nt, Human
cccaggugaaaaaccauag

SEQ ID NO: 1135833 - RNA, 22 nt, Human
ccccaaaaauaauuuuaaaagc

SEQ ID NO: 1135834 - RNA, 22 nt, Human
ccuaaaguacccccaacucuga

SEQ ID NO: 1135835 - RNA, 21 nt, Human
ccugaacccaaaauaagccaa

SEQ ID NO: 1135836 - RNA, 22 nt, Human
ccuguaccgcagguccuucccg

SEQ ID NO: 1135837 - RNA, 24 nt, Human
ccuguccuucugcuccuuuagaaa

SEQ ID NO: 1135838 - RNA, 20 nt, Human
ccuucccaggugaaaaacca

SEQ ID NO: 1135839 - RNA, 23 nt, Human
cucccuagucacuaaaacacuaa

SEQ ID NO: 1135840 - RNA, 18 nt, Human
cugaggcuuuucuuuacc

SEQ ID NO: 1135841 - RNA, 22 nt, Human
cugccucauuaaaaaaacugac

SEQ ID NO: 1135842 - RNA, 19 nt, Human
cugcuacauggcaaaacaa

SEQ ID NO: 1135843 - RNA, 21 nt, Human
cugcuacauggcaaaacaagg

SEQ ID NO: 1135844 - RNA, 21 nt, Human
cuggccaagugcccuccaacc

SEQ ID NO: 1135845 - RNA, 21 nt, Human
cugggcuucagugaguggagg

SEQ ID NO: 1135846 - RNA, 22 nt, Human
gaaaacuggccaagugcccucc

SEQ ID NO: 1135847 - RNA, 21 nt, Human
gaacccaaaauaagccaaccu

SEQ ID NO: 1135848 - RNA, 20 nt, Human
gacacaugagcucccaggag

SEQ ID NO: 1135849 - RNA, 18 nt, Human
gaccaguggggaacccag

SEQ ID NO: 1135850 - RNA, 20 nt, Human
gaccuguccuucugcuccuu

SEQ ID NO: 1135851 - RNA, 19 nt, Human
gaggcagcagugcugcauu

SEQ ID NO: 1135852 - RNA, 23 nt, Human
gcacagcgccagggacacaugag

SEQ ID NO: 1135853 - RNA, 24 nt, Human
gcacgaagcugagcugaggcagca

SEQ ID NO: 1135854 - RNA, 19 nt, Human
gccugaacccaaaauaagc

SEQ ID NO: 1135855 - RNA, 22 nt, Human
gccugaacccaaaauaagccaa

SEQ ID NO: 1135856 - RNA, 23 nt, Human
ggaguugaggcagagcucagugg

SEQ ID NO: 1135857 - RNA, 25 nt, Human
ggcaaaacaagguaagcaaagguuu

SEQ ID NO: 1135858 - RNA, 18 nt, Human
ggucucccuagucacuaa

SEQ ID NO: 1135859 - RNA, 22 nt, Human
guacauucacugaaaagcugaa

SEQ ID NO: 1135860 - RNA, 20 nt, Human
gugcagagcaggaggcgguc

SEQ ID NO: 1135861 - RNA, 19 nt, Human
guucuuuucagauuccuuu

SEQ ID NO: 1135862 - RNA, 18 nt, Human
uaaaacaaaguaauccaa

SEQ ID NO: 1135863 - RNA, 19 nt, Human
uaaaacacuaagacaucaa

SEQ ID NO: 1135864 - RNA, 19 nt, Human
uaaaauguucauauuccuc

SEQ ID NO: 1135865 - RNA, 22 nt, Human
uaaacaccuggcaaaaaaccac

SEQ ID NO: 1135866 - RNA, 23 nt, Human
uaaacaccuggcaaaaaaccaca

SEQ ID NO: 1135867 - RNA, 19 nt, Human
uaaacagcuguaaaggaaa

SEQ ID NO: 1135868 - RNA, 23 nt, Human
uaaacuaguuaauggucucccua

SEQ ID NO: 1135869 - RNA, 24 nt, Human
uaaagaaaaauugaaaaauggcug

SEQ ID NO: 1135870 - RNA, 21 nt, Human
uaaaggauuaauuauaaacac

SEQ ID NO: 1135871 - RNA, 23 nt, Human
uaaaucucaaaaccuaggaaccu

SEQ ID NO: 1135872 - RNA, 24 nt, Human
uaaaucucaaaaccuaggaaccuc

SEQ ID NO: 1135873 - RNA, 23 nt, Human
uaaccagucaaugcccucuagua

SEQ ID NO: 1135874 - RNA, 20 nt, Human
uaagacaucaaauacauuaa

SEQ ID NO: 1135875 - RNA, 18 nt, Human
uaagagguuaauaaccau

SEQ ID NO: 1135876 - RNA, 21 nt, Human
uaagccaaccugacacaccua

SEQ ID NO: 1135877 - RNA, 18 nt, Human
uacagcaguuaucugccu

SEQ ID NO: 1135878 - RNA, 23 nt, Human
uacuaggggcauaguccuccggu

SEQ ID NO: 1135879 - RNA, 19 nt, Human
uagcacagcgccagggaca

SEQ ID NO: 1135880 - RNA, 24 nt, Human
uagcauggcacaccacaacugcau

SEQ ID NO: 1135881 - RNA, 21 nt, Human
uaggaaccuccagacagggcc

SEQ ID NO: 1135882 - RNA, 23 nt, Human
uauaaacaccuggcaaaaaacca

SEQ ID NO: 1135883 - RNA, 22 nt, Human
uauauaccaguuggcuuguaug

SEQ ID NO: 1135884 - RNA, 23 nt, Human
ucacuggccaaagggcaaacacu

SEQ ID NO: 1135885 - RNA, 18 nt, Human
ucagugaguggaguugaa

SEQ ID NO: 1135886 - RNA, 22 nt, Human
uccaaacaugagcacagaaggu

SEQ ID NO: 1135887 - RNA, 19 nt, Human
uccacaccgacagcaguua

SEQ ID NO: 1135888 - RNA, 19 nt, Human
uccacagaaagcauuaguc

SEQ ID NO: 1135889 - RNA, 21 nt, Human
uccagacagggccacagucac

SEQ ID NO: 1135890 - RNA, 23 nt, Human
ucccaaaugaccauuaauucugu

SEQ ID NO: 1135891 - RNA, 21 nt, Human
ucccaggagggcacagcuguc

SEQ ID NO: 1135892 - RNA, 23 nt, Human
ucccaggagggcacagcuguccu

SEQ ID NO: 1135893 - RNA, 21 nt, Human
ucccuaaaguacccccaacuc

SEQ ID NO: 1135894 - RNA, 23 nt, Human
ucccugccucauuaaaaaaacug

SEQ ID NO: 1135895 - RNA, 21 nt, Human
uccuguaccgcagguccuucc

SEQ ID NO: 1135896 - RNA, 19 nt, Human
ucuaggucugcuguguucc

SEQ ID NO: 1135897 - RNA, 24 nt, Human
ucugcuccuuuagaaaacagaacc

SEQ ID NO: 1135898 - RNA, 18 nt, Human
ugaacgauucauuaauga

SEQ ID NO: 1135899 - RNA, 22 nt, Human
ugacuccuguaccgcagguccu

SEQ ID NO: 1135900 - RNA, 18 nt, Human
ugagcaaacaucacaaga

SEQ ID NO: 1135901 - RNA, 24 nt, Human
ugagcucccaggagggcacagcug

SEQ ID NO: 1135902 - RNA, 22 nt, Human
ugaggcagagcucagugguguc

SEQ ID NO: 1135903 - RNA, 23 nt, Human
ugaguuaauuuaacauccaaaua

SEQ ID NO: 1135904 - RNA, 24 nt, Human
ugcacuaucauaaaaacccaaccu

SEQ ID NO: 1135905 - RNA, 19 nt, Human
ugccgcagaccgugcagag

SEQ ID NO: 1135906 - RNA, 22 nt, Human
ugcuacauggcaaaacaaggua

SEQ ID NO: 1135907 - RNA, 21 nt, Human
ugcuacgccaggccugaaccc

SEQ ID NO: 1135908 - RNA, 23 nt, Human
ugcucuaaaucucaaaaccuagg

SEQ ID NO: 1135909 - RNA, 21 nt, Human
uggaugaaccacacguauaua

SEQ ID NO: 1135910 - RNA, 20 nt, Human
ugguguccacagaaagcauu

SEQ ID NO: 1135911 - RNA, 20 nt, Human
ugugcacauagcauggcaca

SEQ ID NO: 1135912 - RNA, 21 nt, Human
uuaauggucucccuagucacu

SEQ ID NO: 1135913 - RNA, 21 nt, Human
uuaauucugucucaggaacac

SEQ ID NO: 1135914 - RNA, 24 nt, Human
uuagucuuagguacuguguuaaaa

SEQ ID NO: 1135915 - RNA, 19 nt, Human
uuaugaacacccacccucu

SEQ ID NO: 1135916 - RNA, 19 nt, Human
uucagugaguggaguugaa

SEQ ID NO: 1135917 - RNA, 20 nt, Human
uuccucugagcaaacaucac

SEQ ID NO: 1135918 - RNA, 18 nt, Human
uucucuggcagccugacg

SEQ ID NO: 1135919 - RNA, 23 nt, Human
uuuccuucccaggugaaaaacca

SEQ ID NO: 1135920 - RNA, 22 nt, Human
uuuguguguugucugcuacaug

SEQ ID NO: 1135921 - RNA, 21 nt, Human
agggaagcccugugacuguga

SEQ ID NO: 1135922 - RNA, 20 nt, Human
gaaccggggucuagggaagc

SEQ ID NO: 1135923 - RNA, 27 nt, Human
ggaagcccugugacuguggugaccuca

SEQ ID NO: 1135924 - RNA, 19 nt, Human
gucuagggaagcccuguga

SEQ ID NO: 1135925 - RNA, 21 nt, Human
ucaguucggggagguuaaggg

SEQ ID NO: 1135926 - RNA, 23 nt, Human
ugacugugacucagucacagaug

SEQ ID NO: 1135927 - RNA, 21 nt, Human
acacagccacuauggccacac

SEQ ID NO: 1135928 - RNA, 20 nt, Human
acacagccacuauggccacc

SEQ ID NO: 1135929 - RNA, 19 nt, Human
acaugcaccaggcucugcc

SEQ ID NO: 1135930 - RNA, 21 nt, Human
agacagaaugcucuggugagg

SEQ ID NO: 1135931 - RNA, 24 nt, Human
agcacuuugggaggcugaggcagg

SEQ ID NO: 1135932 - RNA, 20 nt, Human
aggcugaggcaggaagacug

SEQ ID NO: 1135933 - RNA, 22 nt, Human
cacaggucucuauguaacaacg

SEQ ID NO: 1135934 - RNA, 24 nt, Human
cagcacuuugggaggcugaggcag

SEQ ID NO: 1135935 - RNA, 24 nt, Human
cagcacuuugggaggcugaggcag

SEQ ID NO: 1135936 - RNA, 19 nt, Human
cagccacuauggccacacu

SEQ ID NO: 1135937 - RNA, 18 nt, Human
cagcgucugguugacccg

SEQ ID NO: 1135938 - RNA, 18 nt, Human
cauugcauuuauccacug

SEQ ID NO: 1135939 - RNA, 21 nt, Human
cccaagaguucaaggccagca

SEQ ID NO: 1135940 - RNA, 18 nt, Human
cccaggcucagggcuccc

SEQ ID NO: 1135941 - RNA, 24 nt, Human
cccaugacuguaauuccagcacuu

SEQ ID NO: 1135942 - RNA, 22 nt, Human
cccggaggcccaggcccaggcu

SEQ ID NO: 1135943 - RNA, 19 nt, Human
ccuggaggucaaagcagcu

SEQ ID NO: 1135944 - RNA, 19 nt, Human
cuguaauuccagcacuuug

SEQ ID NO: 1135945 - RNA, 20 nt, Human
gacccggaggcccaggccca

SEQ ID NO: 1135946 - RNA, 19 nt, Human
gaguucaaggccagcagga

SEQ ID NO: 1135947 - RNA, 23 nt, Human
gcccaggcccaggcucagggcuc

SEQ ID NO: 1135948 - RNA, 24 nt, Human
gcucagaaggugucuccaucagau

SEQ ID NO: 1135949 - RNA, 19 nt, Human
ggagacugucucucauguu

SEQ ID NO: 1135950 - RNA, 21 nt, Human
uacccuggaggucaaagcagc

SEQ ID NO: 1135951 - RNA, 24 nt, Human
uauaggaaucacaggucucuaugu

SEQ ID NO: 1135952 - RNA, 22 nt, Human
uauauacccuggaggucaaagc

SEQ ID NO: 1135953 - RNA, 24 nt, Human
uauccacuggugggcauuuucacu

SEQ ID NO: 1135954 - RNA, 22 nt, Human
ucuauguaacaacgaugaacuc

SEQ ID NO: 1135955 - RNA, 18 nt, Human
ucugccggagaugcuuua

SEQ ID NO: 1135956 - RNA, 20 nt, Human
ucugccggagaugcuuuauu

SEQ ID NO: 1135957 - RNA, 25 nt, Human
ucuuucaaguauauacccuggaggu

SEQ ID NO: 1135958 - RNA, 21 nt, Human
ugauuggagaugaggaagcca

SEQ ID NO: 1135959 - RNA, 18 nt, Human
ugggaggcugaggcagga

SEQ ID NO: 1135960 - RNA, 20 nt, Human
ugggaggcugaggcaggaag

SEQ ID NO: 1135961 - RNA, 22 nt, Human
uucagcccaagaguucaaggcc

SEQ ID NO: 1135962 - RNA, 24 nt, Human
uuccagcacuuugggaggcugagg

SEQ ID NO: 1135963 - RNA, 24 nt, Human
uugccaaauaauauuccacuguau

SEQ ID NO: 1135964 - RNA, 23 nt, Human
aaaaagcaggggaccaaaacuga

SEQ ID NO: 1135965 - RNA, 25 nt, Human
aaaucacauccuacucaucagcaag

SEQ ID NO: 1135966 - RNA, 23 nt, Human
aacaaucuugaacccuuugucac

SEQ ID NO: 1135967 - RNA, 21 nt, Human
aacagcacccucugcuucggu

SEQ ID NO: 1135968 - RNA, 26 nt, Human
aaccucaaaaagcaggggaccaaaac

SEQ ID NO: 1135969 - RNA, 19 nt, Human
aagcaugguuucaaacaug

SEQ ID NO: 1135970 - RNA, 20 nt, Human
aaggaggccgcugcauuucc

SEQ ID NO: 1135971 - RNA, 19 nt, Human
aaucugucagaugcccuuc

SEQ ID NO: 1135972 - RNA, 22 nt, Human
acaccgggucugaccucccagc

SEQ ID NO: 1135973 - RNA, 21 nt, Human
acagagucucacucuguugac

SEQ ID NO: 1135974 - RNA, 20 nt, Human
acaggcugcuaaccccaggc

SEQ ID NO: 1135975 - RNA, 20 nt, Human
acgagccccucagucuuggg

SEQ ID NO: 1135976 - RNA, 25 nt, Human
acucuguugaccaggcuggagugua

SEQ ID NO: 1135977 - RNA, 18 nt, Human
agaacucaaguuaaggcc

SEQ ID NO: 1135978 - RNA, 21 nt, Human
agaaggcucugugugcagccc

SEQ ID NO: 1135979 - RNA, 18 nt, Human
agagagguccaaggugcc

SEQ ID NO: 1135980 - RNA, 22 nt, Human
agcacucugggagggcuguggg

SEQ ID NO: 1135981 - RNA, 23 nt, Human
agcacucugggagggcugugggc

SEQ ID NO: 1135982 - RNA, 18 nt, Human
agcagcugcucuagcggc

SEQ ID NO: 1135983 - RNA, 18 nt, Human
agccuuuccaccaccucc

SEQ ID NO: 1135984 - RNA, 19 nt, Human
agcugcccugggcuggaga

SEQ ID NO: 1135985 - RNA, 19 nt, Human
agcugccucccgccuuggc

SEQ ID NO: 1135986 - RNA, 22 nt, Human
agcugccucccgccuuggcuuc

SEQ ID NO: 1135987 - RNA, 23 nt, Human
aggaaggaaggcagggcuugcag

SEQ ID NO: 1135988 - RNA, 18 nt, Human
aggaaggcagggcuugca

SEQ ID NO: 1135989 - RNA, 19 nt, Human
aggcauggaggaggugggc

SEQ ID NO: 1135990 - RNA, 22 nt, Human
agggcuaaacacuggugcccag

SEQ ID NO: 1135991 - RNA, 22 nt, Human
agggcugugggcaugagcagcg

SEQ ID NO: 1135992 - RNA, 20 nt, Human
agggggugguggcaggaguu

SEQ ID NO: 1135993 - RNA, 19 nt, Human
aggucugccucccgggccc

SEQ ID NO: 1135994 - RNA, 19 nt, Human
agugcuccauggcccaggc

SEQ ID NO: 1135995 - RNA, 19 nt, Human
augagcagcgaggacucca

SEQ ID NO: 1135996 - RNA, 21 nt, Human
caaauugaaggcaggauccca

SEQ ID NO: 1135997 - RNA, 22 nt, Human
caaccucaaaaagcaggggacc

SEQ ID NO: 1135998 - RNA, 22 nt, Human
cacagcacguggguggcaggac

SEQ ID NO: 1135999 - RNA, 27 nt, Human
cacagcacguggguggcaggaccaaca

SEQ ID NO: 1136000 - RNA, 19 nt, Human
cacagccccucugccucuc

SEQ ID NO: 1136001 - RNA, 19 nt, Human
caccacgccccacccccaa

SEQ ID NO: 1136002 - RNA, 21 nt, Human
caccauuguaaaaaaaauaaa

SEQ ID NO: 1136003 - RNA, 28 nt, Human
cacccccaacugcacggcagccacucgc

SEQ ID NO: 1136004 - RNA, 20 nt, Human
cacccucugcuucgguccuc

SEQ ID NO: 1136005 - RNA, 18 nt, Human
cacggcagccacucgcau

SEQ ID NO: 1136006 - RNA, 24 nt, Human
cacucuguugaccaggcuggagug

SEQ ID NO: 1136007 - RNA, 21 nt, Human
cagaggagaaaagcacuuagc

SEQ ID NO: 1136008 - RNA, 20 nt, Human
cagagggcaucggugagcac

SEQ ID NO: 1136009 - RNA, 18 nt, Human
cagcagcucccccacaua

SEQ ID NO: 1136010 - RNA, 20 nt, Human
cagugcguggaggagaucgg

SEQ ID NO: 1136011 - RNA, 24 nt, Human
caucagcaaggcggguagacauca

SEQ ID NO: 1136012 - RNA, 22 nt, Human
ccaaaacaaaacaaaaaaaauc

SEQ ID NO: 1136013 - RNA, 24 nt, Human
ccaaaacaaaacaaaaaaaaucug

SEQ ID NO: 1136014 - RNA, 19 nt, Human
ccaaaacugagccuauccu

SEQ ID NO: 1136015 - RNA, 21 nt, Human
ccaaaacugagccuauccugg

SEQ ID NO: 1136016 - RNA, 20 nt, Human
ccaacuucgcagagggcauc

SEQ ID NO: 1136017 - RNA, 19 nt, Human
ccaagugggugaaaugguc

SEQ ID NO: 1136018 - RNA, 24 nt, Human
ccaccgcucuggcacgagccccuc

SEQ ID NO: 1136019 - RNA, 18 nt, Human
ccacgugcacugcugccc

SEQ ID NO: 1136020 - RNA, 23 nt, Human
ccaggugcucuugccaugggucc

SEQ ID NO: 1136021 - RNA, 19 nt, Human
ccagucaaucagaagcaaa

SEQ ID NO: 1136022 - RNA, 22 nt, Human
ccaugcugagccuccccugccu

SEQ ID NO: 1136023 - RNA, 19 nt, Human
cccaggauggaaucuggcu

SEQ ID NO: 1136024 - RNA, 20 nt, Human
cccagggcaggggucaggga

SEQ ID NO: 1136025 - RNA, 20 nt, Human
ccccaaggcuggagucagcu

SEQ ID NO: 1136026 - RNA, 18 nt, Human
ccccaauacuuucauuuu

SEQ ID NO: 1136027 - RNA, 21 nt, Human
cccugggcuggagaugggcau

SEQ ID NO: 1136028 - RNA, 18 nt, Human
ccucccacuucccaccuc

SEQ ID NO: 1136029 - RNA, 21 nt, Human
ccuccugcugcuguuugccgg

SEQ ID NO: 1136030 - RNA, 25 nt, Human
ccugcagaccagggcuaaacacugg

SEQ ID NO: 1136031 - RNA, 23 nt, Human
ccuggaaggccuugcccaucccc

SEQ ID NO: 1136032 - RNA, 24 nt, Human
ccuggcagcauuuggucuuccucu

SEQ ID NO: 1136033 - RNA, 20 nt, Human
ccuuccugcagaccagggcu

SEQ ID NO: 1136034 - RNA, 20 nt, Human
ccuugggcucccuggggagg

SEQ ID NO: 1136035 - RNA, 20 nt, Human
ccuugugucccucacucccc

SEQ ID NO: 1136036 - RNA, 22 nt, Human
cggcagccacucgcauagcacu

SEQ ID NO: 1136037 - RNA, 24 nt, Human
cgugcagcaccuguagccugugca

SEQ ID NO: 1136038 - RNA, 23 nt, Human
cuaaacaccacgccccaccccca

SEQ ID NO: 1136039 - RNA, 20 nt, Human
cuaaacaccacgccccaccu

SEQ ID NO: 1136040 - RNA, 24 nt, Human
cucacucuguugaccaggcuggag

SEQ ID NO: 1136041 - RNA, 20 nt, Human
cucacugcaaccuccacccc

SEQ ID NO: 1136042 - RNA, 21 nt, Human
cuccaaaacaaaacaaaaaaa

SEQ ID NO: 1136043 - RNA, 19 nt, Human
cuccccugccuugggcucc

SEQ ID NO: 1136044 - RNA, 23 nt, Human
cuccgcaugggcuguggguguug

SEQ ID NO: 1136045 - RNA, 27 nt, Human
cuccuccacgugcacugcugcccucag

SEQ ID NO: 1136046 - RNA, 24 nt, Human
cucuaucugggcccggugggcucc

SEQ ID NO: 1136047 - RNA, 19 nt, Human
cugcuguccuccuuccugc

SEQ ID NO: 1136048 - RNA, 23 nt, Human
cuggaggacgcccuggaacucgg

SEQ ID NO: 1136049 - RNA, 21 nt, Human
cugggguggccgcagacaucc

SEQ ID NO: 1136050 - RNA, 22 nt, Human
cuggugguggcguugaaacagc

SEQ ID NO: 1136051 - RNA, 19 nt, Human
cuucuuagaguugucuuga

SEQ ID NO: 1136052 - RNA, 19 nt, Human
cuugguggggcugggaccc

SEQ ID NO: 1136053 - RNA, 19 nt, Human
gaacaucccugauuaagaa

SEQ ID NO: 1136054 - RNA, 19 nt, Human
gaacccgagcugugcuucc

SEQ ID NO: 1136055 - RNA, 20 nt, Human
gaacccgagcugugcuuccu

SEQ ID NO: 1136056 - RNA, 19 nt, Human
gaacucggagcacacagca

SEQ ID NO: 1136057 - RNA, 18 nt, Human
gacgggauggaggugugg

SEQ ID NO: 1136058 - RNA, 24 nt, Human
gaggacucuagcacggcacagccc

SEQ ID NO: 1136059 - RNA, 19 nt, Human
gagggggugguggcaggag

SEQ ID NO: 1136060 - RNA, 19 nt, Human
gagggggugguggcaggag

SEQ ID NO: 1136061 - RNA, 24 nt, Human
gaguccagccuuuccaccaccucc

SEQ ID NO: 1136062 - RNA, 22 nt, Human
gaucuccgcucacugcaaccuc

SEQ ID NO: 1136063 - RNA, 27 nt, Human
gcaaaacagaacucaaguuaaggccuc

SEQ ID NO: 1136064 - RNA, 19 nt, Human
gcacagccagggucgaggu

SEQ ID NO: 1136065 - RNA, 21 nt, Human
gcacaggcugcuaaccccagg

SEQ ID NO: 1136066 - RNA, 22 nt, Human
gcagccccagaccuggguaccu

SEQ ID NO: 1136067 - RNA, 22 nt, Human
gcagcucccccacauaagcccu

SEQ ID NO: 1136068 - RNA, 21 nt, Human
gcaggcuucaacgucagugag

SEQ ID NO: 1136069 - RNA, 21 nt, Human
gcaggucugccucccgggccc

SEQ ID NO: 1136070 - RNA, 18 nt, Human
gcccgagggcagcucugc

SEQ ID NO: 1136071 - RNA, 21 nt, Human
gcccuggaacucggagcacac

SEQ ID NO: 1136072 - RNA, 20 nt, Human
gccuccccugccuugggcuc

SEQ ID NO: 1136073 - RNA, 23 nt, Human
gcuccccauccauauuucucaag

SEQ ID NO: 1136074 - RNA, 24 nt, Human
gcuuccucugccauggucggaauu

SEQ ID NO: 1136075 - RNA, 22 nt, Human
gcuugcaggaucacggaaaacc

SEQ ID NO: 1136076 - RNA, 21 nt, Human
ggacaggcaugcagaaggcuc

SEQ ID NO: 1136077 - RNA, 21 nt, Human
ggacccucccacuucccaccu

SEQ ID NO: 1136078 - RNA, 20 nt, Human
ggacugggucaauggccaug

SEQ ID NO: 1136079 - RNA, 24 nt, Human
ggaggacaggcaugcagaaggcuc

SEQ ID NO: 1136080 - RNA, 22 nt, Human
ggaggacgcccuggaacucgga

SEQ ID NO: 1136081 - RNA, 21 nt, Human
ggaugggaccuggaagucuuu

SEQ ID NO: 1136082 - RNA, 22 nt, Human
ggcaacccuucauucauucguc

SEQ ID NO: 1136083 - RNA, 23 nt, Human
ggcacaggcugcuaaccccaggc

SEQ ID NO: 1136084 - RNA, 21 nt, Human
ggcccccuucuccgcuuucgu

SEQ ID NO: 1136085 - RNA, 21 nt, Human
ggcugugggcaugagcagcga

SEQ ID NO: 1136086 - RNA, 18 nt, Human
gggaacccgagcugugcu

SEQ ID NO: 1136087 - RNA, 22 nt, Human
gggaacccgagcugugcuuccu

SEQ ID NO: 1136088 - RNA, 23 nt, Human
ggucuguguuucaggaacugagg

SEQ ID NO: 1136089 - RNA, 21 nt, Human
gugcgucagugcguggaggag

SEQ ID NO: 1136090 - RNA, 19 nt, Human
gugguggcguugaaacagc

SEQ ID NO: 1136091 - RNA, 24 nt, Human
gugguguccaggaugucgaggggg

SEQ ID NO: 1136092 - RNA, 18 nt, Human
guugaccaggcuggagug

SEQ ID NO: 1136093 - RNA, 22 nt, Human
uaaacaccacgccccaccccca

SEQ ID NO: 1136094 - RNA, 23 nt, Human
uaaagaauuuacuuuuccaggac

SEQ ID NO: 1136095 - RNA, 20 nt, Human
uaagcgccuggcuccgcugu

SEQ ID NO: 1136096 - RNA, 20 nt, Human
uaaguucugcaaauucaguu

SEQ ID NO: 1136097 - RNA, 21 nt, Human
uacaugcaaugaggacagagc

SEQ ID NO: 1136098 - RNA, 25 nt, Human
uagaggcucuccaaaacaaaacaaa

SEQ ID NO: 1136099 - RNA, 23 nt, Human
uagcacggcacagccccucugcc

SEQ ID NO: 1136100 - RNA, 27 nt, Human
uagcacggcacagccccucugccucuc

SEQ ID NO: 1136101 - RNA, 19 nt, Human
uagcacucugggagggcug

SEQ ID NO: 1136102 - RNA, 22 nt, Human
uagcacucugggagggcugugg

SEQ ID NO: 1136103 - RNA, 24 nt, Human
uagcacucugggagggcugugggc

SEQ ID NO: 1136104 - RNA, 18 nt, Human
uagggcaggucugccucc

SEQ ID NO: 1136105 - RNA, 25 nt, Human
ucaaaaagcaggggaccaaaacuga

SEQ ID NO: 1136106 - RNA, 18 nt, Human
ucacugcaaccuccaccc

SEQ ID NO: 1136107 - RNA, 21 nt, Human
ucacugcaaccuccaccccaa

SEQ ID NO: 1136108 - RNA, 20 nt, Human
ucagaugcccuucccgugcu

SEQ ID NO: 1136109 - RNA, 19 nt, Human
ucagugcaguggcugagcu

SEQ ID NO: 1136110 - RNA, 21 nt, Human
ucauucauucgucggaugugu

SEQ ID NO: 1136111 - RNA, 23 nt, Human
uccaaaacaaaacaaaaaaaauc

SEQ ID NO: 1136112 - RNA, 23 nt, Human
uccaccauuguaaaaaaaauaaa

SEQ ID NO: 1136113 - RNA, 21 nt, Human
uccacgugcacugcugcccuc

SEQ ID NO: 1136114 - RNA, 23 nt, Human
uccagcauuuuaaugaacauccc

SEQ ID NO: 1136115 - RNA, 26 nt, Human
uccagccaagcaugguuucaaacaug

SEQ ID NO: 1136116 - RNA, 24 nt, Human
uccaucagcagcucccccacauaa

SEQ ID NO: 1136117 - RNA, 18 nt, Human
ucccaccuccuugugucc

SEQ ID NO: 1136118 - RNA, 19 nt, Human
ucccagccgggggcacagg

SEQ ID NO: 1136119 - RNA, 24 nt, Human
ucccucacuccccuguuucauucc

SEQ ID NO: 1136120 - RNA, 22 nt, Human
ucccuccucccgcaggagagag

SEQ ID NO: 1136121 - RNA, 21 nt, Human
ucccuggacaauccguguccu

SEQ ID NO: 1136122 - RNA, 21 nt, Human
ucccuggggaggggguggugg

SEQ ID NO: 1136123 - RNA, 26 nt, Human
uccgcuguucucaggaguggguucug

SEQ ID NO: 1136124 - RNA, 19 nt, Human
uccuccugcugcuguuugc

SEQ ID NO: 1136125 - RNA, 20 nt, Human
uccucuaagcgccuggcucc

SEQ ID NO: 1136126 - RNA, 24 nt, Human
ucucacucuguugaccaggcugga

SEQ ID NO: 1136127 - RNA, 23 nt, Human
ucuccaaaacaaaacaaaaaaaa

SEQ ID NO: 1136128 - RNA, 22 nt, Human
ucucccagccugcaggugcccc

SEQ ID NO: 1136129 - RNA, 24 nt, Human
ucucccagccugcaggugccccug

SEQ ID NO: 1136130 - RNA, 19 nt, Human
ucuguugaccaggcuggag

SEQ ID NO: 1136131 - RNA, 24 nt, Human
ucuguugaccaggcuggaguguag

SEQ ID NO: 1136132 - RNA, 24 nt, Human
ucuugggugguuucugccuggucc

SEQ ID NO: 1136133 - RNA, 22 nt, Human
ugaaacagcacccucugcuucg

SEQ ID NO: 1136134 - RNA, 21 nt, Human
ugaccugacccuuagucaacc

SEQ ID NO: 1136135 - RNA, 18 nt, Human
ugacuucuuccuuuuuuu

SEQ ID NO: 1136136 - RNA, 18 nt, Human
ugagaacauucccuccuc

SEQ ID NO: 1136137 - RNA, 21 nt, Human
ugagaacauucccuccucccg

SEQ ID NO: 1136138 - RNA, 22 nt, Human
ugagacagagucucacucuguu

SEQ ID NO: 1136139 - RNA, 20 nt, Human
ugaugaugagcgagauggac

SEQ ID NO: 1136140 - RNA, 22 nt, Human
ugcaaaacagaacucaaguuaa

SEQ ID NO: 1136141 - RNA, 18 nt, Human
ugcugcugaccccaaggc

SEQ ID NO: 1136142 - RNA, 22 nt, Human
uggaggugugggcagugguguc

SEQ ID NO: 1136143 - RNA, 19 nt, Human
uggcagcauuuggucuucc

SEQ ID NO: 1136144 - RNA, 23 nt, Human
uggcaggaccaacaccgggucug

SEQ ID NO: 1136145 - RNA, 20 nt, Human
uggcagugggaugaggcugg

SEQ ID NO: 1136146 - RNA, 22 nt, Human
uggcagugggaugaggcuggga

SEQ ID NO: 1136147 - RNA, 27 nt, Human
uggcauccagauuugcauaagauggac

SEQ ID NO: 1136148 - RNA, 21 nt, Human
uggccaggccacuagccaguc

SEQ ID NO: 1136149 - RNA, 21 nt, Human
uggccgcagacauccaggcac

SEQ ID NO: 1136150 - RNA, 23 nt, Human
uggcugggccucugaccuugcug

SEQ ID NO: 1136151 - RNA, 19 nt, Human
uggcuuccaucucugucuc

SEQ ID NO: 1136152 - RNA, 18 nt, Human
ugggaaugacuucuuccu

SEQ ID NO: 1136153 - RNA, 25 nt, Human
ugggaaugacuucuuccuuuuuuuu

SEQ ID NO: 1136154 - RNA, 20 nt, Human
ugggcagugguguccacgau

SEQ ID NO: 1136155 - RNA, 22 nt, Human
ugggcaugagcagcgaggacuc

SEQ ID NO: 1136156 - RNA, 24 nt, Human
ugggguccuaaagucugcuguccu

SEQ ID NO: 1136157 - RNA, 23 nt, Human
uggugucugguuuuucaccuuua

SEQ ID NO: 1136158 - RNA, 18 nt, Human
ugucugguuuuucaccuu

SEQ ID NO: 1136159 - RNA, 20 nt, Human
uguugcugcugaguccagcc

SEQ ID NO: 1136160 - RNA, 19 nt, Human
uuccagauaacaaggacgu

SEQ ID NO: 1136161 - RNA, 21 nt, Human
uuccaggaccuacugccuccc

SEQ ID NO: 1136162 - RNA, 19 nt, Human
uuccaugcugagccucccc

SEQ ID NO: 1136163 - RNA, 23 nt, Human
uucucaaggaggccaagugggug

SEQ ID NO: 1136164 - RNA, 18 nt, Human
uugcagagggaggacagg

SEQ ID NO: 1136165 - RNA, 25 nt, Human
uugggcucccuggggaggggguggu

SEQ ID NO: 1136166 - RNA, 20 nt, Human
uugguuugagagcaguucau

SEQ ID NO: 1136167 - RNA, 24 nt, Human
uuuaacccaaccucaaaaagcagg

SEQ ID NO: 1136168 - RNA, 21 nt, Human
uuugcauaagauggacugggu

SEQ ID NO: 1136169 - RNA, 22 nt, Human
uuuguugguuugagagcaguuc

SEQ ID NO: 1136170 - RNA, 20 nt, Human
aaaagacucuagacauggga

SEQ ID NO: 1136171 - RNA, 21 nt, Human
aaaaggacccaaacaaugcug

SEQ ID NO: 1136172 - RNA, 21 nt, Human
aaauauccggaacacacagga

SEQ ID NO: 1136173 - RNA, 23 nt, Human
aaccccgcauggaugggcugaag

SEQ ID NO: 1136174 - RNA, 21 nt, Human
acaaugcugaugacaaugauc

SEQ ID NO: 1136175 - RNA, 23 nt, Human
acagcaaaacagcguauccugaa

SEQ ID NO: 1136176 - RNA, 22 nt, Human
acauauuucuccuaauugugga

SEQ ID NO: 1136177 - RNA, 22 nt, Human
agcguauccugaagugcucaac

SEQ ID NO: 1136178 - RNA, 21 nt, Human
agcucgacagcgggcacucag

SEQ ID NO: 1136179 - RNA, 19 nt, Human
agggugugaugggagaaca

SEQ ID NO: 1136180 - RNA, 24 nt, Human
cacauguaaaaucacuaaggcgga

SEQ ID NO: 1136181 - RNA, 20 nt, Human
cacuccagccacugccucca

SEQ ID NO: 1136182 - RNA, 18 nt, Human
cagcaaaacagcguaucc

SEQ ID NO: 1136183 - RNA, 23 nt, Human
cagcagugaccugcuucaacacc

SEQ ID NO: 1136184 - RNA, 18 nt, Human
ccacugccuccaucugca

SEQ ID NO: 1136185 - RNA, 22 nt, Human
ccauacugcaaacagcuuguca

SEQ ID NO: 1136186 - RNA, 18 nt, Human
ccaucugcacacagcaaa

SEQ ID NO: 1136187 - RNA, 21 nt, Human
cccaugcacauauuucuccua

SEQ ID NO: 1136188 - RNA, 19 nt, Human
ccguguggacagacagaau

SEQ ID NO: 1136189 - RNA, 24 nt, Human
ccuccaucugcacacagcaaaaca

SEQ ID NO: 1136190 - RNA, 18 nt, Human
cgaaugaugcccgugugg

SEQ ID NO: 1136191 - RNA, 20 nt, Human
cuaaaaggacccaaacaaug

SEQ ID NO: 1136192 - RNA, 23 nt, Human
cucuugguuguugacaagauacu

SEQ ID NO: 1136193 - RNA, 19 nt, Human
cugugcuaaaaggacccaa

SEQ ID NO: 1136194 - RNA, 21 nt, Human
gaagucagaaguugaacucuu

SEQ ID NO: 1136195 - RNA, 25 nt, Human
gagaacagugagaaguaccgguacc

SEQ ID NO: 1136196 - RNA, 22 nt, Human
gcacauauuucuccuaauugug

SEQ ID NO: 1136197 - RNA, 18 nt, Human
gcuugucagcucgacagc

SEQ ID NO: 1136198 - RNA, 19 nt, Human
ggaaaagcaaaggaacccc

SEQ ID NO: 1136199 - RNA, 21 nt, Human
ggacuuccagaguucccacau

SEQ ID NO: 1136200 - RNA, 22 nt, Human
gggaaaagcaaaggaaccccgc

SEQ ID NO: 1136201 - RNA, 24 nt, Human
uaaaaggacccaaacaaugcugau

SEQ ID NO: 1136202 - RNA, 21 nt, Human
uaaaauagauagguacuccca

SEQ ID NO: 1136203 - RNA, 24 nt, Human
uaaaauagauagguacucccaaau

SEQ ID NO: 1136204 - RNA, 21 nt, Human
uaaaauauccggaacacacag

SEQ ID NO: 1136205 - RNA, 25 nt, Human
uaggugucuccacuguuucaguucu

SEQ ID NO: 1136206 - RNA, 20 nt, Human
uaguagcuaagcuuaaucac

SEQ ID NO: 1136207 - RNA, 19 nt, Human
uauuuuacauaaaagacuc

SEQ ID NO: 1136208 - RNA, 18 nt, Human
ucacuaaggcggacuucc

SEQ ID NO: 1136209 - RNA, 23 nt, Human
ucaucggaagucagaaguugaac

SEQ ID NO: 1136210 - RNA, 19 nt, Human
ucccacaugaaaaucaaau

SEQ ID NO: 1136211 - RNA, 23 nt, Human
ucugcacacagcaaaacagcgua

SEQ ID NO: 1136212 - RNA, 22 nt, Human
ugaagggugugaugggagaaca

SEQ ID NO: 1136213 - RNA, 21 nt, Human
ugcuaaaaggacccaaacaau

SEQ ID NO: 1136214 - RNA, 22 nt, Human
uggacagacagaaugauggaca

SEQ ID NO: 1136215 - RNA, 22 nt, Human
ugggaaaagcaaaggaaccccg

SEQ ID NO: 1136216 - RNA, 24 nt, Human
ugggaagacaacaaaaugauuuag

SEQ ID NO: 1136217 - RNA, 25 nt, Human
ugggaagacaacaaaaugauuuaga

SEQ ID NO: 1136218 - RNA, 20 nt, Human
ugggaguaaaaauagggagu

SEQ ID NO: 1136219 - RNA, 25 nt, Human
uguaaggugggaaaagcaaaggaac

SEQ ID NO: 1136220 - RNA, 22 nt, Human
uguuauggaguuacccauuuug

SEQ ID NO: 1136221 - RNA, 24 nt, Human
uguuauggaguuacccauuuugag

SEQ ID NO: 1136222 - RNA, 25 nt, Human
uguuauggaguuacccauuuugaga

SEQ ID NO: 1136223 - RNA, 24 nt, Human
uuaaucacaaucuaucaaaaggga

SEQ ID NO: 1136224 - RNA, 23 nt, Human
uucccacaugaaaaucaaaugua

SEQ ID NO: 1136225 - RNA, 18 nt, Human
uucguaagcuuccaacug

SEQ ID NO: 1136226 - RNA, 22 nt, Human
uucuauucuaucaaaacaccgc

SEQ ID NO: 1136227 - RNA, 27 nt, Human
uugagaaaucugugcuaaaaggaccca

SEQ ID NO: 1136228 - RNA, 24 nt, Human
uuuaaaauagauagguacucccaa

SEQ ID NO: 1136229 - RNA, 20 nt, Human
aaaagacucuagacauggga

SEQ ID NO: 1136230 - RNA, 18 nt, Human
aaaaggacccaaacaaug

SEQ ID NO: 1136231 - RNA, 21 nt, Human
aaaaggacccaaacaaugcug

SEQ ID NO: 1136232 - RNA, 21 nt, Human
aaauauccggaacacacagga

SEQ ID NO: 1136233 - RNA, 23 nt, Human
aaccccgcauggaugggcugaag

SEQ ID NO: 1136234 - RNA, 21 nt, Human
acaaugcugaugacaaugauc

SEQ ID NO: 1136235 - RNA, 23 nt, Human
acagcaaaacagcguauccugaa

SEQ ID NO: 1136236 - RNA, 22 nt, Human
acauauuucuccuaauugugga

SEQ ID NO: 1136237 - RNA, 19 nt, Human
agggugugaugggagaaca

SEQ ID NO: 1136238 - RNA, 21 nt, Human
augaaaaucaaauguaaacca

SEQ ID NO: 1136239 - RNA, 24 nt, Human
cacauguaaaaucacuaaggcgga

SEQ ID NO: 1136240 - RNA, 20 nt, Human
cacuccagccacugccucca

SEQ ID NO: 1136241 - RNA, 18 nt, Human
cagcaaaacagcguaucc

SEQ ID NO: 1136242 - RNA, 23 nt, Human
cagcagugaccugcuucaacacc

SEQ ID NO: 1136243 - RNA, 23 nt, Human
cagcguauccugaagugcucaac

SEQ ID NO: 1136244 - RNA, 22 nt, Human
cagcucgacagcgggcacucag

SEQ ID NO: 1136245 - RNA, 18 nt, Human
ccacugccuccaucugca

SEQ ID NO: 1136246 - RNA, 18 nt, Human
ccaucugcacacagcaaa

SEQ ID NO: 1136247 - RNA, 21 nt, Human
cccaugcacauauuucuccua

SEQ ID NO: 1136248 - RNA, 20 nt, Human
cccguguggacagacagaau

SEQ ID NO: 1136249 - RNA, 24 nt, Human
ccuccaucugcacacagcaaaaca

SEQ ID NO: 1136250 - RNA, 18 nt, Human
cgaaugaugcccgugugg

SEQ ID NO: 1136251 - RNA, 23 nt, Human
cucuugguuguugacaagauacu

SEQ ID NO: 1136252 - RNA, 21 nt, Human
gaagucagaaguugaacucuu

SEQ ID NO: 1136253 - RNA, 25 nt, Human
gagaacagugagaaguaccgguacc

SEQ ID NO: 1136254 - RNA, 22 nt, Human
gcacauauuucuccuaauugug

SEQ ID NO: 1136255 - RNA, 18 nt, Human
gcuugucagcucgacagc

SEQ ID NO: 1136256 - RNA, 19 nt, Human
ggaaaagcaaaggaacccc

SEQ ID NO: 1136257 - RNA, 21 nt, Human
ggacuuccagaguucccacau

SEQ ID NO: 1136258 - RNA, 22 nt, Human
gggaaaagcaaaggaaccccgc

SEQ ID NO: 1136259 - RNA, 24 nt, Human
uaaaaggacccaaacaaugcugau

SEQ ID NO: 1136260 - RNA, 18 nt, Human
uaaaauagauagguacuc

SEQ ID NO: 1136261 - RNA, 24 nt, Human
uaaaauagauagguacucccaaau

SEQ ID NO: 1136262 - RNA, 20 nt, Human
uaaaauauccggaacacaca

SEQ ID NO: 1136263 - RNA, 25 nt, Human
uaggugucuccacuguuucaguucu

SEQ ID NO: 1136264 - RNA, 20 nt, Human
uaguagcuaagcuuaaucac

SEQ ID NO: 1136265 - RNA, 19 nt, Human
uauuuuacauaaaagacuc

SEQ ID NO: 1136266 - RNA, 18 nt, Human
ucacuaaggcggacuucc

SEQ ID NO: 1136267 - RNA, 23 nt, Human
ucaucggaagucagaaguugaac

SEQ ID NO: 1136268 - RNA, 19 nt, Human
ucccacaugaaaaucaaau

SEQ ID NO: 1136269 - RNA, 23 nt, Human
ucugcacacagcaaaacagcgua

SEQ ID NO: 1136270 - RNA, 22 nt, Human
ugaagggugugaugggagaaca

SEQ ID NO: 1136271 - RNA, 23 nt, Human
ugccuccaucugcacacagcaaa

SEQ ID NO: 1136272 - RNA, 21 nt, Human
ugcuaaaaggacccaaacaau

SEQ ID NO: 1136273 - RNA, 22 nt, Human
uggacagacagaaugauggaca

SEQ ID NO: 1136274 - RNA, 22 nt, Human
ugggaaaagcaaaggaaccccg

SEQ ID NO: 1136275 - RNA, 24 nt, Human
ugggaagacaacaaaaugauuuag

SEQ ID NO: 1136276 - RNA, 25 nt, Human
ugggaagacaacaaaaugauuuaga

SEQ ID NO: 1136277 - RNA, 20 nt, Human
ugggaguaaaaauagggagu

SEQ ID NO: 1136278 - RNA, 25 nt, Human
uguaaggugggaaaagcaaaggaac

SEQ ID NO: 1136279 - RNA, 21 nt, Human
ugucugggagaggagguaaaa

SEQ ID NO: 1136280 - RNA, 22 nt, Human
uguuauggaguuacccauuuug

SEQ ID NO: 1136281 - RNA, 24 nt, Human
uguuauggaguuacccauuuugag

SEQ ID NO: 1136282 - RNA, 25 nt, Human
uguuauggaguuacccauuuugaga

SEQ ID NO: 1136283 - RNA, 24 nt, Human
uuaaucacaaucuaucaaaaggga

SEQ ID NO: 1136284 - RNA, 23 nt, Human
uucccacaugaaaaucaaaugua

SEQ ID NO: 1136285 - RNA, 18 nt, Human
uucguaagcuuccaacug

SEQ ID NO: 1136286 - RNA, 22 nt, Human
uucuauuccaucaaaacaccgc

SEQ ID NO: 1136287 - RNA, 27 nt, Human
uugagaaaucugugcuaaaaggaccca

SEQ ID NO: 1136288 - RNA, 24 nt, Human
uuuaaaauagauagguacucccaa

SEQ ID NO: 1136289 - RNA, 23 nt, Human
aaacacacauuggccacagaaaa

SEQ ID NO: 1136290 - RNA, 23 nt, Human
acagaaaaaggcgcuucuccgua

SEQ ID NO: 1136291 - RNA, 22 nt, Human
acagauaaccuuaaccucccag

SEQ ID NO: 1136292 - RNA, 22 nt, Human
agacagaaaaauaacauucuga

SEQ ID NO: 1136293 - RNA, 23 nt, Human
agagaaaacacacauuggccaca

SEQ ID NO: 1136294 - RNA, 25 nt, Human
agcgcagcuacucuuaaccccuugg

SEQ ID NO: 1136295 - RNA, 23 nt, Human
augguggugaggaggggugcugg

SEQ ID NO: 1136296 - RNA, 23 nt, Human
caaggcaauggacagauaaccuu

SEQ ID NO: 1136297 - RNA, 22 nt, Human
cagagccuaggggacacuuaag

SEQ ID NO: 1136298 - RNA, 18 nt, Human
cagcugccgccgcucccc

SEQ ID NO: 1136299 - RNA, 22 nt, Human
ccacagaaaaaggcgcuucucc

SEQ ID NO: 1136300 - RNA, 21 nt, Human
ccagaucagccgaaucaaccc

SEQ ID NO: 1136301 - RNA, 25 nt, Human
cccagagaaaacacacauuggccac

SEQ ID NO: 1136302 - RNA, 21 nt, Human
ccucacaucccaaaaauaaca

SEQ ID NO: 1136303 - RNA, 20 nt, Human
ccucuugcagcugccgcaac

SEQ ID NO: 1136304 - RNA, 18 nt, Human
cgcagccagaucacccuc

SEQ ID NO: 1136305 - RNA, 22 nt, Human
cggcugcgcugugccucccacu

SEQ ID NO: 1136306 - RNA, 23 nt, Human
cggcugcgcugugccucccacuu

SEQ ID NO: 1136307 - RNA, 24 nt, Human
cugccgccgcucccgcucggccuc

SEQ ID NO: 1136308 - RNA, 20 nt, Human
cuugcuucuccucuggcagg

SEQ ID NO: 1136309 - RNA, 21 nt, Human
gaaaaauaacauucugagagc

SEQ ID NO: 1136310 - RNA, 19 nt, Human
gacagauaaccuuaaccuc

SEQ ID NO: 1136311 - RNA, 23 nt, Human
gacagauaaccuuaaccucccag

SEQ ID NO: 1136312 - RNA, 26 nt, Human
gcacagcuucuggagggagggaacgc

SEQ ID NO: 1136313 - RNA, 26 nt, Human
gccagaucacccucacaucccaaaaa

SEQ ID NO: 1136314 - RNA, 20 nt, Human
gccgccgcucccgcucggcc

SEQ ID NO: 1136315 - RNA, 20 nt, Human
guagacuuuucuugagacuu

SEQ ID NO: 1136316 - RNA, 25 nt, Human
gucgcagccagaucacccucacauc

SEQ ID NO: 1136317 - RNA, 19 nt, Human
uaacacaguggcacuugga

SEQ ID NO: 1136318 - RNA, 22 nt, Human
uaaccucccagagaaaacacac

SEQ ID NO: 1136319 - RNA, 22 nt, Human
uaaccuuaaccucccagagaaa

SEQ ID NO: 1136320 - RNA, 21 nt, Human
uaagacagaaaaauaacauuc

SEQ ID NO: 1136321 - RNA, 23 nt, Human
uaucagcaacuuugaaauggcuu

SEQ ID NO: 1136322 - RNA, 20 nt, Human
uaugguggugaggaggggug

SEQ ID NO: 1136323 - RNA, 22 nt, Human
ucacgcagcuggcgcucccggg

SEQ ID NO: 1136324 - RNA, 18 nt, Human
ucagccgaaucaacccug

SEQ ID NO: 1136325 - RNA, 19 nt, Human
uccucuugcagcugccgca

SEQ ID NO: 1136326 - RNA, 23 nt, Human
ugaggaggggugcuggugugagg

SEQ ID NO: 1136327 - RNA, 19 nt, Human
ugccauaguuaucagcaac

SEQ ID NO: 1136328 - RNA, 21 nt, Human
ugccgcaacucccggcugcgc

SEQ ID NO: 1136329 - RNA, 20 nt, Human
uggcagggugugagcagcca

SEQ ID NO: 1136330 - RNA, 19 nt, Human
uggugaggaggggugcugg

SEQ ID NO: 1136331 - RNA, 20 nt, Human
ugguggugaggaggggugcu

SEQ ID NO: 1136332 - RNA, 18 nt, Human
aggcuaggccugccugca

SEQ ID NO: 1136333 - RNA, 22 nt, Human
agguguuugcauugcaacaugg

SEQ ID NO: 1136334 - RNA, 22 nt, Human
augaggaccugagcccagaggu

SEQ ID NO: 1136335 - RNA, 22 nt, Human
caggucccagcucugggcuggg

SEQ ID NO: 1136336 - RNA, 21 nt, Human
cccagggaagucaacagaucg

SEQ ID NO: 1136337 - RNA, 21 nt, Human
ccugcagccaagaaggcugcu

SEQ ID NO: 1136338 - RNA, 18 nt, Human
ccuggcuccccuuucuug

SEQ ID NO: 1136339 - RNA, 20 nt, Human
cgccuggguccaccgcucgc

SEQ ID NO: 1136340 - RNA, 25 nt, Human
cgugcuccaggucccagcucugggc

SEQ ID NO: 1136341 - RNA, 20 nt, Human
cuacccagggaagucaacag

SEQ ID NO: 1136342 - RNA, 19 nt, Human
cugccugcagccaagaagg

SEQ ID NO: 1136343 - RNA, 19 nt, Human
gacuaaauccuggcucccc

SEQ ID NO: 1136344 - RNA, 19 nt, Human
guggcaguguccuacccag

SEQ ID NO: 1136345 - RNA, 18 nt, Human
guuugcauugcaacaugg

SEQ ID NO: 1136346 - RNA, 25 nt, Human
uccaggucccagcucugggcugggc

SEQ ID NO: 1136347 - RNA, 21 nt, Human
ugccccaguggugaagguguu

SEQ ID NO: 1136348 - RNA, 24 nt, Human
aaaaauauaaaaaaaaucacaaag

SEQ ID NO: 1136349 - RNA, 21 nt, Human
aaaaguauuauggaaggaccc

SEQ ID NO: 1136350 - RNA, 27 nt, Human
aaacagcacaagaaaaggcaacaagcu

SEQ ID NO: 1136351 - RNA, 24 nt, Human
aaagugcugcaauuacagguguga

SEQ ID NO: 1136352 - RNA, 22 nt, Human
aacacagcgaacuggccagccu

SEQ ID NO: 1136353 - RNA, 21 nt, Human
aacagcacaagaaaaggcaac

SEQ ID NO: 1136354 - RNA, 23 nt, Human
aagaaggcaccaacaguacaaag

SEQ ID NO: 1136355 - RNA, 19 nt, Human
aagcaaauaaagagaaaac

SEQ ID NO: 1136356 - RNA, 24 nt, Human
aagcaauccaccugccucagccuc

SEQ ID NO: 1136357 - RNA, 20 nt, Human
aagccccccugcagcuccuc

SEQ ID NO: 1136358 - RNA, 21 nt, Human
aaggcaaguaauauugcuucc

SEQ ID NO: 1136359 - RNA, 20 nt, Human
aaguagcugggacuacaggc

SEQ ID NO: 1136360 - RNA, 20 nt, Human
aaguagcugggacuacaggc

SEQ ID NO: 1136361 - RNA, 24 nt, Human
aaguauuauggaaggacccaaagc

SEQ ID NO: 1136362 - RNA, 24 nt, Human
aaucaucugaggucaggaguuuga

SEQ ID NO: 1136363 - RNA, 22 nt, Human
aaucuuuaccauauacaaggca

SEQ ID NO: 1136364 - RNA, 23 nt, Human
aauuacaggugugaaccacugca

SEQ ID NO: 1136365 - RNA, 18 nt, Human
acaaagcagauacaaagc

SEQ ID NO: 1136366 - RNA, 22 nt, Human
acaaauauaaaaguauuaugga

SEQ ID NO: 1136367 - RNA, 22 nt, Human
acacaaccuuaucucacaaggg

SEQ ID NO: 1136368 - RNA, 20 nt, Human
acacagcccagcacaucacg

SEQ ID NO: 1136369 - RNA, 19 nt, Human
acaccacaugcucagccac

SEQ ID NO: 1136370 - RNA, 26 nt, Human
acacccccgcaccccuucuucacaca

SEQ ID NO: 1136371 - RNA, 24 nt, Human
acagagcaagacucuaucucaaaa

SEQ ID NO: 1136372 - RNA, 20 nt, Human
acaggaggguuucuucucug

SEQ ID NO: 1136373 - RNA, 18 nt, Human
acaguucugcaggcugca

SEQ ID NO: 1136374 - RNA, 24 nt, Human
acaugcagagcaaaucuggaagac

SEQ ID NO: 1136375 - RNA, 18 nt, Human
acauggugaaaccgucuc

SEQ ID NO: 1136376 - RNA, 20 nt, Human
acauggugaaaccgucucua

SEQ ID NO: 1136377 - RNA, 18 nt, Human
accaaaucacaaauaccc

SEQ ID NO: 1136378 - RNA, 18 nt, Human
accccacagaaacaucac

SEQ ID NO: 1136379 - RNA, 22 nt, Human
accccacuaucacccaccaacc

SEQ ID NO: 1136380 - RNA, 21 nt, Human
accgcacacccccgcaccccu

SEQ ID NO: 1136381 - RNA, 19 nt, Human
accggugucauguuuccag

SEQ ID NO: 1136382 - RNA, 22 nt, Human
acgccacugcacuccagccuga

SEQ ID NO: 1136383 - RNA, 24 nt, Human
acgccacugcacuccagccugagc

SEQ ID NO: 1136384 - RNA, 24 nt, Human
acgcccaggcuggagugcaguggc

SEQ ID NO: 1136385 - RNA, 18 nt, Human
acugcacuccagccugag

SEQ ID NO: 1136386 - RNA, 24 nt, Human
acugcacuccagccugagcgacag

SEQ ID NO: 1136387 - RNA, 18 nt, Human
acuggccccucugcgcac

SEQ ID NO: 1136388 - RNA, 19 nt, Human
acuugcuuccacagccuag

SEQ ID NO: 1136389 - RNA, 23 nt, Human
agaaggcaccaacaguacaaagc

SEQ ID NO: 1136390 - RNA, 20 nt, Human
agaauuuugggguacaauac

SEQ ID NO: 1136391 - RNA, 21 nt, Human
agagaagagccggacacacug

SEQ ID NO: 1136392 - RNA, 21 nt, Human
agagaccuugucucccaccuu

SEQ ID NO: 1136393 - RNA, 21 nt, Human
agcaauccaccugccucagcc

SEQ ID NO: 1136394 - RNA, 19 nt, Human
agcacuuugggaggcugaa

SEQ ID NO: 1136395 - RNA, 19 nt, Human
agcaugugugcguauguau

SEQ ID NO: 1136396 - RNA, 23 nt, Human
agccucagccuccugaguaguug

SEQ ID NO: 1136397 - RNA, 24 nt, Human
agccugagcgacagagcaagacuc

SEQ ID NO: 1136398 - RNA, 22 nt, Human
agccuggccgacauggugaaac

SEQ ID NO: 1136399 - RNA, 23 nt, Human
agccuggccgacauggugaaacc

SEQ ID NO: 1136400 - RNA, 21 nt, Human
agcuggccucacaguucccca

SEQ ID NO: 1136401 - RNA, 23 nt, Human
agcugggugugguggcgugugcc

SEQ ID NO: 1136402 - RNA, 20 nt, Human
aggaguuugagaccagccug

SEQ ID NO: 1136403 - RNA, 19 nt, Human
aggccagcucugaacgugu

SEQ ID NO: 1136404 - RNA, 19 nt, Human
aggcggaaguugcagugag

SEQ ID NO: 1136405 - RNA, 19 nt, Human
aggcggaaguugcagugag

SEQ ID NO: 1136406 - RNA, 20 nt, Human
aggcguuaacagucaucugu

SEQ ID NO: 1136407 - RNA, 22 nt, Human
aggcuccucugcugaacaagga

SEQ ID NO: 1136408 - RNA, 21 nt, Human
aggcugaggcagaacugcuug

SEQ ID NO: 1136409 - RNA, 23 nt, Human
aggcugcagaggaagcauggcac

SEQ ID NO: 1136410 - RNA, 27 nt, Human
aggcugcagaggaagcauggcacuagc

SEQ ID NO: 1136411 - RNA, 25 nt, Human
aggcuggagugcaguggcgccaucu

SEQ ID NO: 1136412 - RNA, 20 nt, Human
aggcugggugcaguggcuca

SEQ ID NO: 1136413 - RNA, 19 nt, Human
aggucaggaguuugagacc

SEQ ID NO: 1136414 - RNA, 19 nt, Human
aggugugaaccacugcacc

SEQ ID NO: 1136415 - RNA, 20 nt, Human
agugcaguggcacaauuaug

SEQ ID NO: 1136416 - RNA, 20 nt, Human
agugcaguggcgccaucucg

SEQ ID NO: 1136417 - RNA, 24 nt, Human
agugcaguggcgccaucucggcuc

SEQ ID NO: 1136418 - RNA, 18 nt, Human
agugccuuccuccuccuu

SEQ ID NO: 1136419 - RNA, 24 nt, Human
aguggcucacaccuguaaucccag

SEQ ID NO: 1136420 - RNA, 19 nt, Human
auaaaaucuuccuuuaaca

SEQ ID NO: 1136421 - RNA, 23 nt, Human
auauguugcccaggcuggucucg

SEQ ID NO: 1136422 - RNA, 24 nt, Human
aucacgccacugcacuccagccug

SEQ ID NO: 1136423 - RNA, 22 nt, Human
aucagccauugccugccccucc

SEQ ID NO: 1136424 - RNA, 20 nt, Human
aucaucugaggucaggaguu

SEQ ID NO: 1136425 - RNA, 24 nt, Human
aucugaggucaggaguuugagacc

SEQ ID NO: 1136426 - RNA, 23 nt, Human
auuagcugggugugguggcgugu

SEQ ID NO: 1136427 - RNA, 26 nt, Human
auugcaaacucccaguuuagguguga

SEQ ID NO: 1136428 - RNA, 18 nt, Human
auuugcucuccucucagu

SEQ ID NO: 1136429 - RNA, 18 nt, Human
caacagggaagacuguua

SEQ ID NO: 1136430 - RNA, 24 nt, Human
caacaucaaaagaauuaagaugaa

SEQ ID NO: 1136431 - RNA, 25 nt, Human
caacaucaaaagaauuaagaugaaa

SEQ ID NO: 1136432 - RNA, 20 nt, Human
caauaccaagaaggcaccaa

SEQ ID NO: 1136433 - RNA, 23 nt, Human
cacacacacauuuguggaacccc

SEQ ID NO: 1136434 - RNA, 24 nt, Human
cacaccuguaaucccagcacuuug

SEQ ID NO: 1136435 - RNA, 21 nt, Human
cacagaugaaacugcaauuaa

SEQ ID NO: 1136436 - RNA, 21 nt, Human
cacaguuccccaggcagcccc

SEQ ID NO: 1136437 - RNA, 18 nt, Human
caccaaccaaacagugac

SEQ ID NO: 1136438 - RNA, 25 nt, Human
cacccucuuuuccacuuucaucgcu

SEQ ID NO: 1136439 - RNA, 21 nt, Human
caccgcacacccccgcacccc

SEQ ID NO: 1136440 - RNA, 22 nt, Human
caccugcucacccucuuuucca

SEQ ID NO: 1136441 - RNA, 23 nt, Human
caccuguaaucccagcacuuugg

SEQ ID NO: 1136442 - RNA, 24 nt, Human
caccuguaaucccagcacuuuggg

SEQ ID NO: 1136443 - RNA, 22 nt, Human
cacucugacgcccaggcuggag

SEQ ID NO: 1136444 - RNA, 21 nt, Human
cacugcaaccuccgccucccg

SEQ ID NO: 1136445 - RNA, 23 nt, Human
cacugcaaccuccgccucccggg

SEQ ID NO: 1136446 - RNA, 19 nt, Human
cacugcacuccagccugag

SEQ ID NO: 1136447 - RNA, 20 nt, Human
cacugcacuccagccugagc

SEQ ID NO: 1136448 - RNA, 22 nt, Human
cacugcacuccagccugagcga

SEQ ID NO: 1136449 - RNA, 27 nt, Human
cacugcacuccagccugagcgacagag

SEQ ID NO: 1136450 - RNA, 22 nt, Human
cacuggagccuugaccucccag

SEQ ID NO: 1136451 - RNA, 23 nt, Human
cacugugaccccacuaucaccca

SEQ ID NO: 1136452 - RNA, 18 nt, Human
cagagcaaaucuggaaga

SEQ ID NO: 1136453 - RNA, 19 nt, Human
cagagcagagaaaguucua

SEQ ID NO: 1136454 - RNA, 21 nt, Human
cagcacaagaaaaggcaacaa

SEQ ID NO: 1136455 - RNA, 18 nt, Human
cagcacuuugggaggcug

SEQ ID NO: 1136456 - RNA, 19 nt, Human
cagccaagccccccugcag

SEQ ID NO: 1136457 - RNA, 21 nt, Human
cagccaagccccccugcagcu

SEQ ID NO: 1136458 - RNA, 19 nt, Human
cagccauugccugccccuc

SEQ ID NO: 1136459 - RNA, 18 nt, Human
cagccucagccuccugag

SEQ ID NO: 1136460 - RNA, 20 nt, Human
cagccuccugaguaguugag

SEQ ID NO: 1136461 - RNA, 24 nt, Human
cagcuacucgggaggcugaggcag

SEQ ID NO: 1136462 - RNA, 19 nt, Human
caggcugaaggaauuauga

SEQ ID NO: 1136463 - RNA, 23 nt, Human
cagggaccagcagcuccaggcau

SEQ ID NO: 1136464 - RNA, 19 nt, Human
cagggcaugaucucccucc

SEQ ID NO: 1136465 - RNA, 22 nt, Human
caggugccauaaacauucaaau

SEQ ID NO: 1136466 - RNA, 23 nt, Human
cauauguugcccaggcuggucuc

SEQ ID NO: 1136467 - RNA, 26 nt, Human
cauauguugcccaggcuggucucgaa

SEQ ID NO: 1136468 - RNA, 20 nt, Human
caucacagggcaugaucucc

SEQ ID NO: 1136469 - RNA, 22 nt, Human
caucccaccuggucuccccacu

SEQ ID NO: 1136470 - RNA, 23 nt, Human
caucugaggucaggaguuugaga

SEQ ID NO: 1136471 - RNA, 20 nt, Human
caugacaccacgccuggcua

SEQ ID NO: 1136472 - RNA, 24 nt, Human
caugacaccacgccuggcuaauuu

SEQ ID NO: 1136473 - RNA, 19 nt, Human
caugcccagccacucaguc

SEQ ID NO: 1136474 - RNA, 22 nt, Human
caugcugccagcucucuguccu

SEQ ID NO: 1136475 - RNA, 24 nt, Human
caugcugccagcucucuguccuuu

SEQ ID NO: 1136476 - RNA, 21 nt, Human
ccaaagugcugcaauuacagg

SEQ ID NO: 1136477 - RNA, 24 nt, Human
ccaaagugcugcaauuacaggugu

SEQ ID NO: 1136478 - RNA, 18 nt, Human
ccaacacuggggacuaca

SEQ ID NO: 1136479 - RNA, 23 nt, Human
ccaacaguacaaagcagauacaa

SEQ ID NO: 1136480 - RNA, 18 nt, Human
ccacucccaaacccugcc

SEQ ID NO: 1136481 - RNA, 20 nt, Human
ccacugcacuccagccugag

SEQ ID NO: 1136482 - RNA, 20 nt, Human
ccacugcacuccagccugag

SEQ ID NO: 1136483 - RNA, 21 nt, Human
ccacugcacuccagccugagc

SEQ ID NO: 1136484 - RNA, 24 nt, Human
ccacugcacuccagccugagcgac

SEQ ID NO: 1136485 - RNA, 26 nt, Human
ccacugcccacaccacaugcucagcc

SEQ ID NO: 1136486 - RNA, 24 nt, Human
ccagaggguccuucugauacccag

SEQ ID NO: 1136487 - RNA, 19 nt, Human
ccagccucagccuccugag

SEQ ID NO: 1136488 - RNA, 22 nt, Human
ccagccucagccuccugaguag

SEQ ID NO: 1136489 - RNA, 20 nt, Human
ccaucaggccccaccuccaa

SEQ ID NO: 1136490 - RNA, 21 nt, Human
ccaucaggccccaccuccaac

SEQ ID NO: 1136491 - RNA, 19 nt, Human
ccauccccuccacuguuuc

SEQ ID NO: 1136492 - RNA, 23 nt, Human
cccacaccacaugcucagccaca

SEQ ID NO: 1136493 - RNA, 28 nt, Human
cccacaccacaugcucagccacaacaca

SEQ ID NO: 1136494 - RNA, 20 nt, Human
cccacagaaacaucacaggc

SEQ ID NO: 1136495 - RNA, 24 nt, Human
cccacuaucacccaccaaccaaac

SEQ ID NO: 1136496 - RNA, 20 nt, Human
cccagguucaagcgauccuc

SEQ ID NO: 1136497 - RNA, 19 nt, Human
cccauauguugcccaggcu

SEQ ID NO: 1136498 - RNA, 19 nt, Human
cccccugcagcuccuccuu

SEQ ID NO: 1136499 - RNA, 19 nt, Human
ccccgcuccuggcuucugg

SEQ ID NO: 1136500 - RNA, 18 nt, Human
ccccuauuuguaugaccu

SEQ ID NO: 1136501 - RNA, 20 nt, Human
cccggguucaagcgauucuc

SEQ ID NO: 1136502 - RNA, 19 nt, Human
cccuaacacaaguuaccac

SEQ ID NO: 1136503 - RNA, 19 nt, Human
cccuaguguccuagggcac

SEQ ID NO: 1136504 - RNA, 20 nt, Human
cccuggaggacuugcucugg

SEQ ID NO: 1136505 - RNA, 22 nt, Human
cccuguuucccagcaacacuga

SEQ ID NO: 1136506 - RNA, 19 nt, Human
ccgcacacccccgcacccc

SEQ ID NO: 1136507 - RNA, 20 nt, Human
ccgccaccacaccgggccaa

SEQ ID NO: 1136508 - RNA, 22 nt, Human
ccgccaccacaccgggccaaau

SEQ ID NO: 1136509 - RNA, 24 nt, Human
ccucccagguucaagcgauccucc

SEQ ID NO: 1136510 - RNA, 22 nt, Human
ccucccggguucaagcgauucu

SEQ ID NO: 1136511 - RNA, 18 nt, Human
ccuccuauuacaacuuuc

SEQ ID NO: 1136512 - RNA, 22 nt, Human
ccugagcgacagagcaagacuc

SEQ ID NO: 1136513 - RNA, 24 nt, Human
ccugaguaguugagaccacaggcu

SEQ ID NO: 1136514 - RNA, 19 nt, Human
ccugcagcuccuccuugcc

SEQ ID NO: 1136515 - RNA, 20 nt, Human
ccugccugcugauuccacuu

SEQ ID NO: 1136516 - RNA, 21 nt, Human
ccuggccgacauggugaaacc

SEQ ID NO: 1136517 - RNA, 22 nt, Human
ccuggccgacauggugaaaccg

SEQ ID NO: 1136518 - RNA, 21 nt, Human
ccuggguucaagcaauccacc

SEQ ID NO: 1136519 - RNA, 23 nt, Human
ccuggguucaagcaauccaccug

SEQ ID NO: 1136520 - RNA, 21 nt, Human
ccuguaaucccagcuacucgg

SEQ ID NO: 1136521 - RNA, 18 nt, Human
ccuugaccucccagguuc

SEQ ID NO: 1136522 - RNA, 21 nt, Human
ccuuggcuucagggccggggg

SEQ ID NO: 1136523 - RNA, 19 nt, Human
cgaccagacagugaugccc

SEQ ID NO: 1136524 - RNA, 26 nt, Human
cgccacugcacuccagccugagcgac

SEQ ID NO: 1136525 - RNA, 24 nt, Human
cgcccaggcuggagugcaguggcg

SEQ ID NO: 1136526 - RNA, 19 nt, Human
cgggggcuuuuacuccugg

SEQ ID NO: 1136527 - RNA, 20 nt, Human
cuacugaauggaucuggagc

SEQ ID NO: 1136528 - RNA, 22 nt, Human
cucacaccuguaaucccagcac

SEQ ID NO: 1136529 - RNA, 24 nt, Human
cucacaccuguaaucccagcacuu

SEQ ID NO: 1136530 - RNA, 19 nt, Human
cucacucugacgcccaggc

SEQ ID NO: 1136531 - RNA, 24 nt, Human
cucacugcaaccuccgccucccgg

SEQ ID NO: 1136532 - RNA, 23 nt, Human
cucagccuccaaguagcugggac

SEQ ID NO: 1136533 - RNA, 19 nt, Human
cucagggagagggccagug

SEQ ID NO: 1136534 - RNA, 24 nt, Human
cuccaaguagcugggacuacaggc

SEQ ID NO: 1136535 - RNA, 24 nt, Human
cuccagccucagccuccugaguag

SEQ ID NO: 1136536 - RNA, 23 nt, Human
cucccacagugcuucaaauaccc

SEQ ID NO: 1136537 - RNA, 20 nt, Human
cucccaucaggccccaccuc

SEQ ID NO: 1136538 - RNA, 23 nt, Human
cucccuccacucucuccucucca

SEQ ID NO: 1136539 - RNA, 21 nt, Human
cuccucagaauucacuuuggc

SEQ ID NO: 1136540 - RNA, 24 nt, Human
cuccugaguaguugagaccacagg

SEQ ID NO: 1136541 - RNA, 23 nt, Human
cuccugccugcugauuccacuug

SEQ ID NO: 1136542 - RNA, 20 nt, Human
cucuccucuccaccugaaaa

SEQ ID NO: 1136543 - RNA, 23 nt, Human
cucugcgcacggacugcuaacuc

SEQ ID NO: 1136544 - RNA, 23 nt, Human
cugcaaccuccgccucccggguu

SEQ ID NO: 1136545 - RNA, 24 nt, Human
cugcaaccuccgccucccggguuc

SEQ ID NO: 1136546 - RNA, 20 nt, Human
cugcagcuccuccuugcccu

SEQ ID NO: 1136547 - RNA, 23 nt, Human
cugccucagccucccaaagugcu

SEQ ID NO: 1136548 - RNA, 24 nt, Human
cugccucagccucccaaagugcug

SEQ ID NO: 1136549 - RNA, 19 nt, Human
cuucagcuguccuuggcac

SEQ ID NO: 1136550 - RNA, 20 nt, Human
cuucccucucuccuugcucc

SEQ ID NO: 1136551 - RNA, 19 nt, Human
cuugcucuggauuuccauu

SEQ ID NO: 1136552 - RNA, 20 nt, Human
cuuuaaacacugugcuccca

SEQ ID NO: 1136553 - RNA, 18 nt, Human
gaaaaacucagacucuaa

SEQ ID NO: 1136554 - RNA, 20 nt, Human
gaaaagcaaccaggguuggc

SEQ ID NO: 1136555 - RNA, 25 nt, Human
gaaccccacagaaacaucacaggcu

SEQ ID NO: 1136556 - RNA, 23 nt, Human
gaaggacccaaagcaugugugcg

SEQ ID NO: 1136557 - RNA, 23 nt, Human
gacaguuccagagcauggaaccg

SEQ ID NO: 1136558 - RNA, 19 nt, Human
gagcagucucguuuguuuu

SEQ ID NO: 1136559 - RNA, 21 nt, Human
gauucucacgccucagccucc

SEQ ID NO: 1136560 - RNA, 20 nt, Human
gcaagcuguuuggcgggauc

SEQ ID NO: 1136561 - RNA, 18 nt, Human
gcaauccaccugccucag

SEQ ID NO: 1136562 - RNA, 24 nt, Human
gcaauccaccugccucagccuccc

SEQ ID NO: 1136563 - RNA, 19 nt, Human
gcacaagaaaaggcaacaa

SEQ ID NO: 1136564 - RNA, 20 nt, Human
gcacaugugugggccaccug

SEQ ID NO: 1136565 - RNA, 24 nt, Human
gcacuccagccugagcgacagagc

SEQ ID NO: 1136566 - RNA, 21 nt, Human
gcagcacuggaggcacaugug

SEQ ID NO: 1136567 - RNA, 22 nt, Human
gccacugcacuccagccugagc

SEQ ID NO: 1136568 - RNA, 19 nt, Human
gcccagcacaucacaggug

SEQ ID NO: 1136569 - RNA, 19 nt, Human
gcccaggcuggagugcagu

SEQ ID NO: 1136570 - RNA, 20 nt, Human
gcccaggcuggagugcagug

SEQ ID NO: 1136571 - RNA, 21 nt, Human
gcccugugcucccuucuuggg

SEQ ID NO: 1136572 - RNA, 18 nt, Human
gcccuguuucccagcaac

SEQ ID NO: 1136573 - RNA, 19 nt, Human
gccgacauggugaaaccgu

SEQ ID NO: 1136574 - RNA, 22 nt, Human
gccucagccuccaaguagcugg

SEQ ID NO: 1136575 - RNA, 19 nt, Human
gccucagccuccugaguag

SEQ ID NO: 1136576 - RNA, 23 nt, Human
gcgauccuccagccucagccucc

SEQ ID NO: 1136577 - RNA, 22 nt, Human
gcgugugccuguaaucccagcu

SEQ ID NO: 1136578 - RNA, 20 nt, Human
gcucacaguucugcaggcuu

SEQ ID NO: 1136579 - RNA, 18 nt, Human
gcucucuguccuuucuug

SEQ ID NO: 1136580 - RNA, 20 nt, Human
gcuggagugcaguggcgcca

SEQ ID NO: 1136581 - RNA, 23 nt, Human
ggaaguugcagugaguggagauc

SEQ ID NO: 1136582 - RNA, 24 nt, Human
ggaaguugcagugaguggagauca

SEQ ID NO: 1136583 - RNA, 24 nt, Human
ggagaucacgccacugcacuccag

SEQ ID NO: 1136584 - RNA, 19 nt, Human
ggaucauccaaacuuguca

SEQ ID NO: 1136585 - RNA, 21 nt, Human
ggccgggggugggggucugca

SEQ ID NO: 1136586 - RNA, 24 nt, Human
gggaggcugaaucaucugagguca

SEQ ID NO: 1136587 - RNA, 20 nt, Human
gggccgggggugggggucug

SEQ ID NO: 1136588 - RNA, 24 nt, Human
ggggugucccauauguugcccagg

SEQ ID NO: 1136589 - RNA, 24 nt, Human
gggugcaguggcucacaccuguaa

SEQ ID NO: 1136590 - RNA, 24 nt, Human
gggugugguggcgugugccuguaa

SEQ ID NO: 1136591 - RNA, 24 nt, Human
ggguucaagcaauccaccugccuc

SEQ ID NO: 1136592 - RNA, 19 nt, Human
ggucaggaguuugagacca

SEQ ID NO: 1136593 - RNA, 24 nt, Human
gguggcgugugccuguaaucccag

SEQ ID NO: 1136594 - RNA, 19 nt, Human
ggugggggucugcacuugc

SEQ ID NO: 1136595 - RNA, 18 nt, Human
guccuuggcaccagacuc

SEQ ID NO: 1136596 - RNA, 21 nt, Human
gugaaauaaagcagcauuuaa

SEQ ID NO: 1136597 - RNA, 24 nt, Human
gugacaccucacaacaaaauuuag

SEQ ID NO: 1136598 - RNA, 18 nt, Human
gugcaguggcucacaccu

SEQ ID NO: 1136599 - RNA, 23 nt, Human
guggcgugugccuguaaucccag

SEQ ID NO: 1136600 - RNA, 24 nt, Human
guucaagcaauccaccugccucag

SEQ ID NO: 1136601 - RNA, 21 nt, Human
uaaagcagcauuuaaaaagac

SEQ ID NO: 1136602 - RNA, 21 nt, Human
uaacauacuguuaccauacua

SEQ ID NO: 1136603 - RNA, 24 nt, Human
uaacauauaagcaaauaaagagaa

SEQ ID NO: 1136604 - RNA, 18 nt, Human
uaaccaaaucacaaauac

SEQ ID NO: 1136605 - RNA, 20 nt, Human
uaagagaaaccacauauuca

SEQ ID NO: 1136606 - RNA, 21 nt, Human
uaagcaaauaaagagaaaaca

SEQ ID NO: 1136607 - RNA, 24 nt, Human
uaaguaaacacagcgaacuggcca

SEQ ID NO: 1136608 - RNA, 22 nt, Human
uacaaaaauauuucccuuaaac

SEQ ID NO: 1136609 - RNA, 21 nt, Human
uacaaagcagauacaaagcag

SEQ ID NO: 1136610 - RNA, 26 nt, Human
uacaacaucaaaagaauuaagaugaa

SEQ ID NO: 1136611 - RNA, 19 nt, Human
uacagaaucuggacaacag

SEQ ID NO: 1136612 - RNA, 24 nt, Human
uacagaguucucacucugacgccc

SEQ ID NO: 1136613 - RNA, 24 nt, Human
uacaggugugaaccacugcaccca

SEQ ID NO: 1136614 - RNA, 25 nt, Human
uaccccauugcaaacucccaguuua

SEQ ID NO: 1136615 - RNA, 19 nt, Human
uagaugcccuuuaaacacu

SEQ ID NO: 1136616 - RNA, 21 nt, Human
uagcacagucacgcucacccu

SEQ ID NO: 1136617 - RNA, 22 nt, Human
uagcugggugugguggcgugug

SEQ ID NO: 1136618 - RNA, 18 nt, Human
uaguauuuuaaaggaagu

SEQ ID NO: 1136619 - RNA, 19 nt, Human
uagugccuuccuccuccuu

SEQ ID NO: 1136620 - RNA, 24 nt, Human
uauaaaaguauuauggaaggaccc

SEQ ID NO: 1136621 - RNA, 20 nt, Human
uaucugaaaaaaaaaaccuu

SEQ ID NO: 1136622 - RNA, 19 nt, Human
uauggaaggacccaaagca

SEQ ID NO: 1136623 - RNA, 23 nt, Human
uauguguugggagagcagucucg

SEQ ID NO: 1136624 - RNA, 24 nt, Human
uauguugcccaggcuggucucgaa

SEQ ID NO: 1136625 - RNA, 24 nt, Human
uauuauacgaaaaacucagacucu

SEQ ID NO: 1136626 - RNA, 22 nt, Human
ucaccauuuuuuggcuccucua

SEQ ID NO: 1136627 - RNA, 18 nt, Human
ucacccaccaaccaaaca

SEQ ID NO: 1136628 - RNA, 23 nt, Human
ucacgccacugcacuccagccug

SEQ ID NO: 1136629 - RNA, 21 nt, Human
ucacgccucagccuccaagua

SEQ ID NO: 1136630 - RNA, 24 nt, Human
ucacucugacgcccaggcuggagu

SEQ ID NO: 1136631 - RNA, 23 nt, Human
ucacugcaaccuccgccucccgg

SEQ ID NO: 1136632 - RNA, 24 nt, Human
ucacugcaaccuccgccucccggg

SEQ ID NO: 1136633 - RNA, 25 nt, Human
ucacugcaaccuccgccucccgggu

SEQ ID NO: 1136634 - RNA, 26 nt, Human
ucacugcaaccuccgccucccggguu

SEQ ID NO: 1136635 - RNA, 24 nt, Human
ucacuggagccuugaccucccagg

SEQ ID NO: 1136636 - RNA, 18 nt, Human
ucagaacuggccccucug

SEQ ID NO: 1136637 - RNA, 19 nt, Human
ucagcuguccuuggcacca

SEQ ID NO: 1136638 - RNA, 24 nt, Human
ucagggaccagcagcuccaggcau

SEQ ID NO: 1136639 - RNA, 19 nt, Human
ucaucugaggucaggaguu

SEQ ID NO: 1136640 - RNA, 21 nt, Human
uccaaaacauugauuuacaaa

SEQ ID NO: 1136641 - RNA, 23 nt, Human
uccaaguagcugggacuacaggc

SEQ ID NO: 1136642 - RNA, 24 nt, Human
uccaaguagcugggacuacaggcg

SEQ ID NO: 1136643 - RNA, 20 nt, Human
uccaggccagcucugaacgu

SEQ ID NO: 1136644 - RNA, 21 nt, Human
uccaugcugcucucauuccug

SEQ ID NO: 1136645 - RNA, 23 nt, Human
ucccaaagugcugcaauuacagg

SEQ ID NO: 1136646 - RNA, 21 nt, Human
ucccagguucaagcgauccuc

SEQ ID NO: 1136647 - RNA, 18 nt, Human
ucccauauguugcccagg

SEQ ID NO: 1136648 - RNA, 21 nt, Human
uccccggggccuggcugaugg

SEQ ID NO: 1136649 - RNA, 24 nt, Human
uccccugcuucacccaccacuuuc

SEQ ID NO: 1136650 - RNA, 21 nt, Human
ucccggguucaagcgauucuc

SEQ ID NO: 1136651 - RNA, 21 nt, Human
ucccggguucaagcgauucuc

SEQ ID NO: 1136652 - RNA, 21 nt, Human
ucccuaggaaaacccaucccu

SEQ ID NO: 1136653 - RNA, 18 nt, Human
ucccuccacucucuccuc

SEQ ID NO: 1136654 - RNA, 24 nt, Human
ucccugcugaguuauguguuggga

SEQ ID NO: 1136655 - RNA, 22 nt, Human
ucccuuaaacuugggauugcuc

SEQ ID NO: 1136656 - RNA, 19 nt, Human
uccuccagccucagccucc

SEQ ID NO: 1136657 - RNA, 23 nt, Human
uccuccuccuuguguagaugguu

SEQ ID NO: 1136658 - RNA, 24 nt, Human
uccugaguaguugagaccacaggc

SEQ ID NO: 1136659 - RNA, 18 nt, Human
uccuggguucaagcaauc

SEQ ID NO: 1136660 - RNA, 19 nt, Human
uccuggguucaagcaaucc

SEQ ID NO: 1136661 - RNA, 24 nt, Human
uccuggguucaagcaauccaccug

SEQ ID NO: 1136662 - RNA, 22 nt, Human
uccuguuccccucagauggucc

SEQ ID NO: 1136663 - RNA, 22 nt, Human
ucgcccaggcugcagugcagug

SEQ ID NO: 1136664 - RNA, 19 nt, Human
ucucaaaaauaaauaaaua

SEQ ID NO: 1136665 - RNA, 22 nt, Human
ucucacucugacgcccaggcug

SEQ ID NO: 1136666 - RNA, 23 nt, Human
ucucacucugacgcccaggcugg

SEQ ID NO: 1136667 - RNA, 24 nt, Human
ucucacucugacgcccaggcugga

SEQ ID NO: 1136668 - RNA, 19 nt, Human
ucucgaacuccuggguuca

SEQ ID NO: 1136669 - RNA, 23 nt, Human
ucucgaacuccuggguucaagca

SEQ ID NO: 1136670 - RNA, 23 nt, Human
ucucuacuaaaaacacaaaaauu

SEQ ID NO: 1136671 - RNA, 24 nt, Human
ucucucagggagagggccagugga

SEQ ID NO: 1136672 - RNA, 20 nt, Human
ucucugggauuaaagaggag

SEQ ID NO: 1136673 - RNA, 22 nt, Human
ucucuuuggccacucccaaacc

SEQ ID NO: 1136674 - RNA, 24 nt, Human
ucugacgcccaggcuggagugcag

SEQ ID NO: 1136675 - RNA, 21 nt, Human
ucugcaucgagcugaaacugc

SEQ ID NO: 1136676 - RNA, 20 nt, Human
ucuguagucuuagugccuuc

SEQ ID NO: 1136677 - RNA, 23 nt, Human
ucuguccuuucuugguccacugu

SEQ ID NO: 1136678 - RNA, 21 nt, Human
ucugugcagccugcauaucgu

SEQ ID NO: 1136679 - RNA, 24 nt, Human
ucuguggucuuguuuuguuuucuc

SEQ ID NO: 1136680 - RNA, 23 nt, Human
ugaagguuucugacaggaggguu

SEQ ID NO: 1136681 - RNA, 23 nt, Human
ugaaucaucugaggucaggaguu

SEQ ID NO: 1136682 - RNA, 24 nt, Human
ugaaucaucugaggucaggaguuu

SEQ ID NO: 1136683 - RNA, 20 nt, Human
ugaccccaggaggcggaagu

SEQ ID NO: 1136684 - RNA, 20 nt, Human
ugacgugucuuucccaagcc

SEQ ID NO: 1136685 - RNA, 23 nt, Human
ugagaaaacagaaauaagaaacg

SEQ ID NO: 1136686 - RNA, 24 nt, Human
ugagaccacaggcucaugacacca

SEQ ID NO: 1136687 - RNA, 19 nt, Human
ugagagcgucagugugggg

SEQ ID NO: 1136688 - RNA, 18 nt, Human
ugaggucaggaguuugag

SEQ ID NO: 1136689 - RNA, 22 nt, Human
ugaguaguugagaccacaggcu

SEQ ID NO: 1136690 - RNA, 18 nt, Human
ugaucucccuccacucuc

SEQ ID NO: 1136691 - RNA, 24 nt, Human
ugcaauuacaggugugaaccacug

SEQ ID NO: 1136692 - RNA, 23 nt, Human
ugcacugcuucucuuuggccacu

SEQ ID NO: 1136693 - RNA, 21 nt, Human
ugcagugcaguggcacaauua

SEQ ID NO: 1136694 - RNA, 24 nt, Human
ugcagugcaguggcacaauuaugg

SEQ ID NO: 1136695 - RNA, 24 nt, Human
ugcccaggcuggucucgaacuccu

SEQ ID NO: 1136696 - RNA, 25 nt, Human
ugcccaggcuggucucgaacuccug

SEQ ID NO: 1136697 - RNA, 26 nt, Human
ugcccaugcugccagcucucuguccu

SEQ ID NO: 1136698 - RNA, 19 nt, Human
ugcccugugcucccuucuu

SEQ ID NO: 1136699 - RNA, 24 nt, Human
ugccucagccucccaaagugcugc

SEQ ID NO: 1136700 - RNA, 23 nt, Human
ugccuguaaucccagcuacucgg

SEQ ID NO: 1136701 - RNA, 24 nt, Human
ugccuguaaucccagcuacucggg

SEQ ID NO: 1136702 - RNA, 23 nt, Human
ugcguacggcugaaagauguuuu

SEQ ID NO: 1136703 - RNA, 21 nt, Human
ugcuuuaaaaauguauaagca

SEQ ID NO: 1136704 - RNA, 21 nt, Human
uggagcagauaagaaagccag

SEQ ID NO: 1136705 - RNA, 20 nt, Human
uggaggcacaugugugggcc

SEQ ID NO: 1136706 - RNA, 28 nt, Human
uggagugcaguggcgccauccuagcacg

SEQ ID NO: 1136707 - RNA, 23 nt, Human
uggagugcaguggcgccaucucg

SEQ ID NO: 1136708 - RNA, 24 nt, Human
uggagugcaguggcgccaucucgg

SEQ ID NO: 1136709 - RNA, 20 nt, Human
uggaucuggagcagauaaga

SEQ ID NO: 1136710 - RNA, 21 nt, Human
uggaugacguaagagaaacca

SEQ ID NO: 1136711 - RNA, 20 nt, Human
uggauuuccauuuguuucug

SEQ ID NO: 1136712 - RNA, 19 nt, Human
uggcagaaggggaaguggg

SEQ ID NO: 1136713 - RNA, 21 nt, Human
uggcagcagaucuuccuccag

SEQ ID NO: 1136714 - RNA, 27 nt, Human
uggcagccaagccccccugcagcuccu

SEQ ID NO: 1136715 - RNA, 18 nt, Human
uggccaaugggucacugc

SEQ ID NO: 1136716 - RNA, 20 nt, Human
uggccagagcaggggugaga

SEQ ID NO: 1136717 - RNA, 19 nt, Human
uggcggggucuaggaccac

SEQ ID NO: 1136718 - RNA, 21 nt, Human
uggcgugugccuguaauccca

SEQ ID NO: 1136719 - RNA, 21 nt, Human
uggcucacaccuguaauccca

SEQ ID NO: 1136720 - RNA, 22 nt, Human
uggcucacaccuguaaucccag

SEQ ID NO: 1136721 - RNA, 24 nt, Human
uggcucacaccuguaaucccagca

SEQ ID NO: 1136722 - RNA, 24 nt, Human
uggcucccuccccggggccuggcu

SEQ ID NO: 1136723 - RNA, 21 nt, Human
uggcuucagggccgggggugg

SEQ ID NO: 1136724 - RNA, 18 nt, Human
ugggacuacaggcguccg

SEQ ID NO: 1136725 - RNA, 19 nt, Human
ugggacuacaggcguccgc

SEQ ID NO: 1136726 - RNA, 21 nt, Human
ugggacuacaggcguccgcca

SEQ ID NO: 1136727 - RNA, 24 nt, Human
ugggacuacaggcguccgccacca

SEQ ID NO: 1136728 - RNA, 27 nt, Human
ugggaggcugaaucaucugaggucaac

SEQ ID NO: 1136729 - RNA, 18 nt, Human
ugggugugguggcgugug

SEQ ID NO: 1136730 - RNA, 21 nt, Human
uggguucaagcaauccaccug

SEQ ID NO: 1136731 - RNA, 19 nt, Human
uggugcaacccuggaggac

SEQ ID NO: 1136732 - RNA, 24 nt, Human
ugguggcgugugccuguaauccca

SEQ ID NO: 1136733 - RNA, 18 nt, Human
ugguuaaaccaaugccug

SEQ ID NO: 1136734 - RNA, 24 nt, Human
ugguucacuggagccuugaccucc

SEQ ID NO: 1136735 - RNA, 19 nt, Human
ugugaucagcucacuuccc

SEQ ID NO: 1136736 - RNA, 19 nt, Human
ugugcguauguaugugugu

SEQ ID NO: 1136737 - RNA, 20 nt, Human
ugugcguauguaugugugua

SEQ ID NO: 1136738 - RNA, 20 nt, Human
ugugcguauguaugugugua

SEQ ID NO: 1136739 - RNA, 20 nt, Human
ugugugcguauguaugugug

SEQ ID NO: 1136740 - RNA, 21 nt, Human
ugugugcguauguaugugugu

SEQ ID NO: 1136741 - RNA, 22 nt, Human
uguucugugcagccugcauauc

SEQ ID NO: 1136742 - RNA, 22 nt, Human
uuaaaugguuaaaccaaugccu

SEQ ID NO: 1136743 - RNA, 24 nt, Human
uuaacauacuguuaccauacuaua

SEQ ID NO: 1136744 - RNA, 23 nt, Human
uuagaaaacaaauugucgcccag

SEQ ID NO: 1136745 - RNA, 22 nt, Human
uuagcaguuacguuuguuugca

SEQ ID NO: 1136746 - RNA, 19 nt, Human
uuagcugggugugguggcg

SEQ ID NO: 1136747 - RNA, 24 nt, Human
uuagcugggugugguggcgugugc

SEQ ID NO: 1136748 - RNA, 21 nt, Human
uucaagcaauccaccugccuc

SEQ ID NO: 1136749 - RNA, 18 nt, Human
uucaagcgauccuccagc

SEQ ID NO: 1136750 - RNA, 23 nt, Human
uucaagcgauucucacgccucag

SEQ ID NO: 1136751 - RNA, 19 nt, Human
uucacagaugaaacugcaa

SEQ ID NO: 1136752 - RNA, 23 nt, Human
uucacuggagccuugaccuccca

SEQ ID NO: 1136753 - RNA, 24 nt, Human
uucacuggagccuugaccucccag

SEQ ID NO: 1136754 - RNA, 19 nt, Human
uuccauuuguuucugaccc

SEQ ID NO: 1136755 - RNA, 22 nt, Human
uugauuuacaaauauaaaagua

SEQ ID NO: 1136756 - RNA, 28 nt, Human
uugcagagccgggggcgguggggugucc

SEQ ID NO: 1136757 - RNA, 20 nt, Human
uugcagugaguggagaucac

SEQ ID NO: 1136758 - RNA, 21 nt, Human
uugcagugaguggagaucacg

SEQ ID NO: 1136759 - RNA, 20 nt, Human
uugucaucagcgagcaacaa

SEQ ID NO: 1136760 - RNA, 22 nt, Human
uugucaucagcgagcaacaaag

SEQ ID NO: 1136761 - RNA, 23 nt, Human
uugucgcccaggcugcagugcag

SEQ ID NO: 1136762 - RNA, 20 nt, Human
uuuccauuuguuucugaccc

SEQ ID NO: 1136763 - RNA, 25 nt, Human
uuuugugacuaaagcuggacggggu

SEQ ID NO: 1136764 - RNA, 22 nt, Human
uuuuuccaggcauuggugauua

SEQ ID NO: 1136765 - RNA, 20 nt, Human
uuuuuuuuacaagucaggug

SEQ ID NO: 1136766 - RNA, 22 nt, Human
uuuuuuuuuuuuacaagucagg

SEQ ID NO: 1136767 - RNA, 25 nt, Human
aaaucacauccuacucaucagcaag

SEQ ID NO: 1136768 - RNA, 21 nt, Human
aacagcacccucugcuucggu

SEQ ID NO: 1136769 - RNA, 26 nt, Human
aaccucaaaaagcaggggaccaaaac

SEQ ID NO: 1136770 - RNA, 18 nt, Human
aacucucgagagcugggc

SEQ ID NO: 1136771 - RNA, 23 nt, Human
aagcacuuagcaucgcaggacuu

SEQ ID NO: 1136772 - RNA, 20 nt, Human
aagcaggggaccaaaacuga

SEQ ID NO: 1136773 - RNA, 19 nt, Human
aagcaugguuucaaacaug

SEQ ID NO: 1136774 - RNA, 20 nt, Human
aaggaggccgcugcauuucc

SEQ ID NO: 1136775 - RNA, 19 nt, Human
aaucugucagaugcccuuc

SEQ ID NO: 1136776 - RNA, 22 nt, Human
acaccgggucugaccucccagc

SEQ ID NO: 1136777 - RNA, 21 nt, Human
acagagucucacucuguugac

SEQ ID NO: 1136778 - RNA, 20 nt, Human
acaggcugcuaaccccaggc

SEQ ID NO: 1136779 - RNA, 25 nt, Human
acucuguugaccaggcuggagugua

SEQ ID NO: 1136780 - RNA, 18 nt, Human
agaacucaaguuaaggcc

SEQ ID NO: 1136781 - RNA, 21 nt, Human
agaaggcucugugugcagccc

SEQ ID NO: 1136782 - RNA, 22 nt, Human
agcacucugggagggcuguggg

SEQ ID NO: 1136783 - RNA, 23 nt, Human
agcacucugggagggcugugggc

SEQ ID NO: 1136784 - RNA, 18 nt, Human
agcagcugcucuagcggc

SEQ ID NO: 1136785 - RNA, 24 nt, Human
agcaggggaccaaaacugagccua

SEQ ID NO: 1136786 - RNA, 23 nt, Human
aggaaggaaggcagggcuugcag

SEQ ID NO: 1136787 - RNA, 19 nt, Human
aggaaggaggggcacagag

SEQ ID NO: 1136788 - RNA, 21 nt, Human
aggaaggaggggcacagagug

SEQ ID NO: 1136789 - RNA, 18 nt, Human
aggaaggcagggcuugca

SEQ ID NO: 1136790 - RNA, 18 nt, Human
aggcaacugagcccuacu

SEQ ID NO: 1136791 - RNA, 22 nt, Human
agggcuaaacacuggugcccag

SEQ ID NO: 1136792 - RNA, 22 nt, Human
agggcugugggcaugagcagcg

SEQ ID NO: 1136793 - RNA, 20 nt, Human
agggggugguggcaggaguu

SEQ ID NO: 1136794 - RNA, 19 nt, Human
aggucugccucccgggccc

SEQ ID NO: 1136795 - RNA, 19 nt, Human
augagcagcgaggacucca

SEQ ID NO: 1136796 - RNA, 21 nt, Human
caaauugaaggcaggauccca

SEQ ID NO: 1136797 - RNA, 22 nt, Human
caaccucaaaaagcaggggacc

SEQ ID NO: 1136798 - RNA, 21 nt, Human
caaucuugaacccuuugucac

SEQ ID NO: 1136799 - RNA, 18 nt, Human
cacacgccccacccccaa

SEQ ID NO: 1136800 - RNA, 22 nt, Human
cacagcacguggguggcaggac

SEQ ID NO: 1136801 - RNA, 27 nt, Human
cacagcacguggguggcaggaccaaca

SEQ ID NO: 1136802 - RNA, 19 nt, Human
cacagccccucugccucuc

SEQ ID NO: 1136803 - RNA, 21 nt, Human
caccauuguaaaaaaaauaaa

SEQ ID NO: 1136804 - RNA, 28 nt, Human
cacccccaacugcacggcagccacucgc

SEQ ID NO: 1136805 - RNA, 20 nt, Human
cacccucugcuucgguccuc

SEQ ID NO: 1136806 - RNA, 18 nt, Human
cacggcagccacucgcau

SEQ ID NO: 1136807 - RNA, 24 nt, Human
cacucuguugaccaggcuggagug

SEQ ID NO: 1136808 - RNA, 21 nt, Human
cagaggagaaaagcacuuagc

SEQ ID NO: 1136809 - RNA, 20 nt, Human
cagagggcaucggugagcac

SEQ ID NO: 1136810 - RNA, 18 nt, Human
cagcagcucccccacaua

SEQ ID NO: 1136811 - RNA, 18 nt, Human
caggcaacugagcccuac

SEQ ID NO: 1136812 - RNA, 24 nt, Human
caucagcaaggcggguagacauca

SEQ ID NO: 1136813 - RNA, 19 nt, Human
ccaaaacugagccuauccu

SEQ ID NO: 1136814 - RNA, 21 nt, Human
ccaaaacugagccuauccugg

SEQ ID NO: 1136815 - RNA, 20 nt, Human
ccaacuucgcagagggcauc

SEQ ID NO: 1136816 - RNA, 19 nt, Human
ccaagugggugaaaugguc

SEQ ID NO: 1136817 - RNA, 18 nt, Human
ccacgugcacugcugccc

SEQ ID NO: 1136818 - RNA, 23 nt, Human
ccaggugcucuugccaugggucc

SEQ ID NO: 1136819 - RNA, 22 nt, Human
ccaugcugagccuccccugccu

SEQ ID NO: 1136820 - RNA, 18 nt, Human
cccaggauggaaucuggc

SEQ ID NO: 1136821 - RNA, 20 nt, Human
ccccaaggcuggagucagcu

SEQ ID NO: 1136822 - RNA, 18 nt, Human
ccccaauacuuucauuuu

SEQ ID NO: 1136823 - RNA, 19 nt, Human
ccccagagggcuccccauc

SEQ ID NO: 1136824 - RNA, 18 nt, Human
cccuguuccccccccccu

SEQ ID NO: 1136825 - RNA, 18 nt, Human
cccuuuuuuuuuuuucaa

SEQ ID NO: 1136826 - RNA, 21 nt, Human
ccuccacgugcacugcugccc

SEQ ID NO: 1136827 - RNA, 20 nt, Human
ccuccgcacagcacugcguu

SEQ ID NO: 1136828 - RNA, 25 nt, Human
ccugcagaccagggcuaaacacugg

SEQ ID NO: 1136829 - RNA, 23 nt, Human
ccuggaaggccuugcccaucccc

SEQ ID NO: 1136830 - RNA, 21 nt, Human
ccuguagccugugcaucaccc

SEQ ID NO: 1136831 - RNA, 20 nt, Human
ccuuccugcagaccagggcu

SEQ ID NO: 1136832 - RNA, 20 nt, Human
ccuugggcucccuggggagg

SEQ ID NO: 1136833 - RNA, 20 nt, Human
ccuugugucccucacucccc

SEQ ID NO: 1136834 - RNA, 24 nt, Human
cuaaacacacgccccacccccaac

SEQ ID NO: 1136835 - RNA, 24 nt, Human
cucacucuguugaccaggcuggag

SEQ ID NO: 1136836 - RNA, 22 nt, Human
cucacugcaaccuccaccccaa

SEQ ID NO: 1136837 - RNA, 19 nt, Human
cuccccugccuugggcucc

SEQ ID NO: 1136838 - RNA, 27 nt, Human
cuccuccacgugcacugcugcccucag

SEQ ID NO: 1136839 - RNA, 23 nt, Human
cugaacgggcuccaggcaacuga

SEQ ID NO: 1136840 - RNA, 23 nt, Human
cugagcccuacuggcagguccuc

SEQ ID NO: 1136841 - RNA, 19 nt, Human
cugcuguccuccuuccugc

SEQ ID NO: 1136842 - RNA, 23 nt, Human
cuggcagguccucggccugggcc

SEQ ID NO: 1136843 - RNA, 22 nt, Human
cuggugguggcguugaaacagc

SEQ ID NO: 1136844 - RNA, 22 nt, Human
cuguucgccgggugcugcugac

SEQ ID NO: 1136845 - RNA, 19 nt, Human
cuucuuagaguugucuuga

SEQ ID NO: 1136846 - RNA, 19 nt, Human
cuugguggggcugggaccc

SEQ ID NO: 1136847 - RNA, 19 nt, Human
gaacccgagcugugcuucc

SEQ ID NO: 1136848 - RNA, 20 nt, Human
gaacccgagcugugcuuccu

SEQ ID NO: 1136849 - RNA, 23 nt, Human
gaccuacugccucccuguucccc

SEQ ID NO: 1136850 - RNA, 19 nt, Human
gagcaguggggaaccgucg

SEQ ID NO: 1136851 - RNA, 24 nt, Human
gaggacucuagcacggcacagccc

SEQ ID NO: 1136852 - RNA, 19 nt, Human
gagggggugguggcaggag

SEQ ID NO: 1136853 - RNA, 19 nt, Human
gagggggugguggcaggag

SEQ ID NO: 1136854 - RNA, 23 nt, Human
gagucagcuugcagcacagccag

SEQ ID NO: 1136855 - RNA, 22 nt, Human
gaucuccgcucacugcaaccuc

SEQ ID NO: 1136856 - RNA, 27 nt, Human
gcaaaacagaacucaaguuaaggccuc

SEQ ID NO: 1136857 - RNA, 19 nt, Human
gcacagccagggucgaggu

SEQ ID NO: 1136858 - RNA, 21 nt, Human
gcacaggcugcuaaccccagg

SEQ ID NO: 1136859 - RNA, 20 nt, Human
gcagccacucgcauagcacu

SEQ ID NO: 1136860 - RNA, 22 nt, Human
gcagcucccccacauaagcccu

SEQ ID NO: 1136861 - RNA, 21 nt, Human
gcagguccucggccugggccc

SEQ ID NO: 1136862 - RNA, 18 nt, Human
gcccgagggcagcucugc

SEQ ID NO: 1136863 - RNA, 20 nt, Human
gccuccccugccuugggcuc

SEQ ID NO: 1136864 - RNA, 23 nt, Human
gcuccccauccauauuucucaag

SEQ ID NO: 1136865 - RNA, 24 nt, Human
gcuuccucugccauggucggaauu

SEQ ID NO: 1136866 - RNA, 22 nt, Human
gcuugcaggaucacggaaaacc

SEQ ID NO: 1136867 - RNA, 26 nt, Human
ggaaggaggggcacagagugcccagg

SEQ ID NO: 1136868 - RNA, 21 nt, Human
ggacaggcaugcagaaggcuc

SEQ ID NO: 1136869 - RNA, 20 nt, Human
ggacugggucaauggccaug

SEQ ID NO: 1136870 - RNA, 24 nt, Human
ggaggacaggcaugcagaaggcuc

SEQ ID NO: 1136871 - RNA, 22 nt, Human
ggcaacccuucauucauucguc

SEQ ID NO: 1136872 - RNA, 23 nt, Human
ggcacaggcugcuaaccccaggc

SEQ ID NO: 1136873 - RNA, 27 nt, Human
ggcagguccucggccugggcccgaaca

SEQ ID NO: 1136874 - RNA, 21 nt, Human
ggcugugggcaugagcagcga

SEQ ID NO: 1136875 - RNA, 18 nt, Human
gggaacccgagcugugcu

SEQ ID NO: 1136876 - RNA, 22 nt, Human
gggaacccgagcugugcuuccu

SEQ ID NO: 1136877 - RNA, 22 nt, Human
gggacccucccacuucccaccu

SEQ ID NO: 1136878 - RNA, 18 nt, Human
gggaugggcugaacgggc

SEQ ID NO: 1136879 - RNA, 18 nt, Human
gggcaggggucaggguuu

SEQ ID NO: 1136880 - RNA, 19 nt, Human
gggcuccaggcaacugagc

SEQ ID NO: 1136881 - RNA, 23 nt, Human
gugcagcaccuguagccugugca

SEQ ID NO: 1136882 - RNA, 25 nt, Human
gugcagccccagaccuggguaccuu

SEQ ID NO: 1136883 - RNA, 19 nt, Human
gugguggcguugaaacagc

SEQ ID NO: 1136884 - RNA, 18 nt, Human
guugaccaggcuggagug

SEQ ID NO: 1136885 - RNA, 21 nt, Human
uaaacacacgccccaccccca

SEQ ID NO: 1136886 - RNA, 23 nt, Human
uaaagaauuuacuuuuccaggac

SEQ ID NO: 1136887 - RNA, 20 nt, Human
uaaguucugcaaauucaguu

SEQ ID NO: 1136888 - RNA, 21 nt, Human
uacaugcaaugaggacagagc

SEQ ID NO: 1136889 - RNA, 23 nt, Human
uagcacggcacagccccucugcc

SEQ ID NO: 1136890 - RNA, 27 nt, Human
uagcacggcacagccccucugccucuc

SEQ ID NO: 1136891 - RNA, 19 nt, Human
uagcacucugggagggcug

SEQ ID NO: 1136892 - RNA, 22 nt, Human
uagcacucugggagggcugugg

SEQ ID NO: 1136893 - RNA, 24 nt, Human
uagcacucugggagggcugugggc

SEQ ID NO: 1136894 - RNA, 18 nt, Human
uagggcaggucugccucc

SEQ ID NO: 1136895 - RNA, 25 nt, Human
ucaaaaagcaggggaccaaaacuga

SEQ ID NO: 1136896 - RNA, 18 nt, Human
ucacugcaaccuccaccc

SEQ ID NO: 1136897 - RNA, 21 nt, Human
ucacugcaaccuccaccccaa

SEQ ID NO: 1136898 - RNA, 20 nt, Human
ucagaugcccuucccgugcu

SEQ ID NO: 1136899 - RNA, 21 nt, Human
ucauucauucgucggaugugu

SEQ ID NO: 1136900 - RNA, 23 nt, Human
uccaccauuguaaaaaaaauaaa

SEQ ID NO: 1136901 - RNA, 20 nt, Human
uccacgggcaggagcaacgg

SEQ ID NO: 1136902 - RNA, 26 nt, Human
uccagccaagcaugguuucaaacaug

SEQ ID NO: 1136903 - RNA, 18 nt, Human
uccaggaugucgaggggg

SEQ ID NO: 1136904 - RNA, 24 nt, Human
uccaucagcagcucccccacauaa

SEQ ID NO: 1136905 - RNA, 18 nt, Human
uccaugcugagccucccc

SEQ ID NO: 1136906 - RNA, 18 nt, Human
ucccaccuccuugugucc

SEQ ID NO: 1136907 - RNA, 19 nt, Human
ucccagccgggggcacagg

SEQ ID NO: 1136908 - RNA, 24 nt, Human
ucccucacuccccuguuucauucc

SEQ ID NO: 1136909 - RNA, 21 nt, Human
ucccuggggaggggguggugg

SEQ ID NO: 1136910 - RNA, 18 nt, Human
ucccuguucccccccccc

SEQ ID NO: 1136911 - RNA, 24 nt, Human
ucucacucuguugaccaggcugga

SEQ ID NO: 1136912 - RNA, 22 nt, Human
ucucccagccugcaggugcccc

SEQ ID NO: 1136913 - RNA, 24 nt, Human
ucucccagccugcaggugccccug

SEQ ID NO: 1136914 - RNA, 23 nt, Human
ucugugcaaucaaauugaaggca

SEQ ID NO: 1136915 - RNA, 19 nt, Human
ucuguugaccaggcuggag

SEQ ID NO: 1136916 - RNA, 24 nt, Human
ucuguugaccaggcuggaguguag

SEQ ID NO: 1136917 - RNA, 22 nt, Human
ugaaacagcacccucugcuucg

SEQ ID NO: 1136918 - RNA, 18 nt, Human
ugaacugggggaugggcu

SEQ ID NO: 1136919 - RNA, 21 nt, Human
ugaccugacccuuagucaacc

SEQ ID NO: 1136920 - RNA, 18 nt, Human
ugagacagagucucacuc

SEQ ID NO: 1136921 - RNA, 22 nt, Human
ugagacagagucucacucuguu

SEQ ID NO: 1136922 - RNA, 20 nt, Human
ugaugaugagcgagauggac

SEQ ID NO: 1136923 - RNA, 22 nt, Human
ugcaaaacagaacucaaguuaa

SEQ ID NO: 1136924 - RNA, 25 nt, Human
ugcccagguaaccgcuccugggagc

SEQ ID NO: 1136925 - RNA, 18 nt, Human
ugcugcugaccccaaggc

SEQ ID NO: 1136926 - RNA, 23 nt, Human
ugcuucgguccucugugcaauca

SEQ ID NO: 1136927 - RNA, 23 nt, Human
uggcaggaccaacaccgggucug

SEQ ID NO: 1136928 - RNA, 27 nt, Human
uggcauccagauuugcauaagauggac

SEQ ID NO: 1136929 - RNA, 23 nt, Human
uggcugggccucugaccuugcug

SEQ ID NO: 1136930 - RNA, 22 nt, Human
ugggcaugagcagcgaggacuc

SEQ ID NO: 1136931 - RNA, 24 nt, Human
ugggguccuaaagucugcuguccu

SEQ ID NO: 1136932 - RNA, 19 nt, Human
uuccagauaacaaggacgu

SEQ ID NO: 1136933 - RNA, 21 nt, Human
uuccaggaccuacugccuccc

SEQ ID NO: 1136934 - RNA, 23 nt, Human
uucucaaggaggccaagugggug

SEQ ID NO: 1136935 - RNA, 18 nt, Human
uugaacucucgagagcug

SEQ ID NO: 1136936 - RNA, 18 nt, Human
uugcagagggaggacagg

SEQ ID NO: 1136937 - RNA, 25 nt, Human
uugggcucccuggggaggggguggu

SEQ ID NO: 1136938 - RNA, 20 nt, Human
uugguuugagagcaguucau

SEQ ID NO: 1136939 - RNA, 24 nt, Human
uuuaacccaaccucaaaaagcagg

SEQ ID NO: 1136940 - RNA, 21 nt, Human
uuugcauaagauggacugggu

SEQ ID NO: 1136941 - RNA, 22 nt, Human
uuuguugguuugagagcaguuc

SEQ ID NO: 1136942 - RNA, 22 nt, Human
uuuuuuuuuuuucaaacaaucu

SEQ ID NO: 1136943 - RNA, 23 nt, Human
aagggcuuccugccucagcuucc

SEQ ID NO: 1136944 - RNA, 24 nt, Human
acaaagcaaugagaaggcaucaga

SEQ ID NO: 1136945 - RNA, 25 nt, Human
acaaagcaaugagaaggcaucagag

SEQ ID NO: 1136946 - RNA, 25 nt, Human
acaaagcaaugagaaggcaucagag

SEQ ID NO: 1136947 - RNA, 26 nt, Human
acaaagcaaugagaaggcaucagagg

SEQ ID NO: 1136948 - RNA, 19 nt, Human
acacaaaguccaggcuaug

SEQ ID NO: 1136949 - RNA, 19 nt, Human
acagggcacucucuccagc

SEQ ID NO: 1136950 - RNA, 22 nt, Human
agaaggaggacacgggcacagg

SEQ ID NO: 1136951 - RNA, 19 nt, Human
agagagcaggagggaacgg

SEQ ID NO: 1136952 - RNA, 19 nt, Human
agcaggagggaacgggccu

SEQ ID NO: 1136953 - RNA, 20 nt, Human
agcaggagggaacgggccug

SEQ ID NO: 1136954 - RNA, 23 nt, Human
aggaccgaaagucgcuuuggggc

SEQ ID NO: 1136955 - RNA, 25 nt, Human
aggagggaacgggccuggggcguga

SEQ ID NO: 1136956 - RNA, 18 nt, Human
aggcgcugagcggugggg

SEQ ID NO: 1136957 - RNA, 24 nt, Human
aggcgcugagcgguggggauggca

SEQ ID NO: 1136958 - RNA, 23 nt, Human
aggcgugcagggcgagggcggcg

SEQ ID NO: 1136959 - RNA, 19 nt, Human
agggagcacaaagcaauga

SEQ ID NO: 1136960 - RNA, 24 nt, Human
augagugcucuucggccgcccaaa

SEQ ID NO: 1136961 - RNA, 21 nt, Human
caccagagagcaggagggaac

SEQ ID NO: 1136962 - RNA, 22 nt, Human
cacggcaaacucugccucccag

SEQ ID NO: 1136963 - RNA, 20 nt, Human
cacucucuccagcagacgcc

SEQ ID NO: 1136964 - RNA, 23 nt, Human
cccauagucagggaaguccaggc

SEQ ID NO: 1136965 - RNA, 22 nt, Human
cccauggguaacagcguggccu

SEQ ID NO: 1136966 - RNA, 18 nt, Human
ccccaggauaagggaauc

SEQ ID NO: 1136967 - RNA, 24 nt, Human
ccccgcagccagguccacauccag

SEQ ID NO: 1136968 - RNA, 19 nt, Human
ccggcgcccgucuccccgc

SEQ ID NO: 1136969 - RNA, 25 nt, Human
cgcuuuggggccggcgcccgucucc

SEQ ID NO: 1136970 - RNA, 24 nt, Human
cggcaagugacuaaagggcuuccu

SEQ ID NO: 1136971 - RNA, 20 nt, Human
cggcucgacacaaaguccag

SEQ ID NO: 1136972 - RNA, 23 nt, Human
cgugcagggcgagggcggcgcgg

SEQ ID NO: 1136973 - RNA, 18 nt, Human
cuccggccgggccuggcc

SEQ ID NO: 1136974 - RNA, 24 nt, Human
cucgcucugucgcccaggcuggag

SEQ ID NO: 1136975 - RNA, 19 nt, Human
cucugucgcccaggcugga

SEQ ID NO: 1136976 - RNA, 20 nt, Human
cucugucgcccaggcuggag

SEQ ID NO: 1136977 - RNA, 20 nt, Human
cuuaggacccgugagccggg

SEQ ID NO: 1136978 - RNA, 23 nt, Human
gagcaggagggaacgggccuggu

SEQ ID NO: 1136979 - RNA, 24 nt, Human
gauggcagguaggcugcgugcagg

SEQ ID NO: 1136980 - RNA, 18 nt, Human
gcccugccggcuugaggc

SEQ ID NO: 1136981 - RNA, 21 nt, Human
ggaugcugucgucccccagga

SEQ ID NO: 1136982 - RNA, 20 nt, Human
ggccuggggcgugaauccgg

SEQ ID NO: 1136983 - RNA, 21 nt, Human
ggccuggggcgugaauccggc

SEQ ID NO: 1136984 - RNA, 21 nt, Human
ggccuugaggcucagggagca

SEQ ID NO: 1136985 - RNA, 20 nt, Human
gggccggcgcccgucucccc

SEQ ID NO: 1136986 - RNA, 21 nt, Human
gggccuggggcgugaauccgg

SEQ ID NO: 1136987 - RNA, 18 nt, Human
gggcggcgcgggccuccg

SEQ ID NO: 1136988 - RNA, 20 nt, Human
ggggcaaagaugcuacggug

SEQ ID NO: 1136989 - RNA, 23 nt, Human
gugcaguggcacaaucucggcuc

SEQ ID NO: 1136990 - RNA, 19 nt, Human
uacauggcaggcgucgggg

SEQ ID NO: 1136991 - RNA, 23 nt, Human
uaggacccgugagccggccuaaa

SEQ ID NO: 1136992 - RNA, 21 nt, Human
uccugccucagcuuccccacc

SEQ ID NO: 1136993 - RNA, 18 nt, Human
ucgcccaggcuggagugc

SEQ ID NO: 1136994 - RNA, 24 nt, Human
ucgcucugucgcccaggcuggagu

SEQ ID NO: 1136995 - RNA, 22 nt, Human
ucuccagcagacgcccucuuca

SEQ ID NO: 1136996 - RNA, 26 nt, Human
ucuccagcagacgcccucuucaucgg

SEQ ID NO: 1136997 - RNA, 19 nt, Human
ucucgcucugucgcccagg

SEQ ID NO: 1136998 - RNA, 23 nt, Human
ucucgcucugucgcccaggcugg

SEQ ID NO: 1136999 - RNA, 24 nt, Human
ucucgcucugucgcccaggcugga

SEQ ID NO: 1137000 - RNA, 23 nt, Human
ucugucgcccaggcuggagugcg

SEQ ID NO: 1137001 - RNA, 22 nt, Human
ugagauggggucucgcucuguc

SEQ ID NO: 1137002 - RNA, 24 nt, Human
ugcagggcgagggcggcgcgggcc

SEQ ID NO: 1137003 - RNA, 22 nt, Human
ugcaguggcacaaucucggcuc

SEQ ID NO: 1137004 - RNA, 21 nt, Human
ugccucagcuuccccaccuga

SEQ ID NO: 1137005 - RNA, 19 nt, Human
ugccuuaggacccgugagc

SEQ ID NO: 1137006 - RNA, 24 nt, Human
uggcacaaucucggcucacggcaa

SEQ ID NO: 1137007 - RNA, 20 nt, Human
uggggcaugggaggcccacc

SEQ ID NO: 1137008 - RNA, 24 nt, Human
uggggucucgcucugucgcccagg

SEQ ID NO: 1137009 - RNA, 22 nt, Human
uuugagauggggucucgcucug

SEQ ID NO: 1137010 - RNA, 24 nt, Human
uuuuugagauggggucucgcucug

SEQ ID NO: 1137011 - RNA, 22 nt, Human
aaagucacaaaaaagucacaaa

SEQ ID NO: 1137012 - RNA, 22 nt, Human
aaagucacaaaaaagucacaaa

SEQ ID NO: 1137013 - RNA, 21 nt, Human
aacagaggaacucgaaagaga

SEQ ID NO: 1137014 - RNA, 28 nt, Human
aagaagaguaggggaauugccgguaccc

SEQ ID NO: 1137015 - RNA, 23 nt, Human
aagaguaggggaauugcccuucc

SEQ ID NO: 1137016 - RNA, 18 nt, Human
aagcagacacaaggacaa

SEQ ID NO: 1137017 - RNA, 24 nt, Human
aagcgauccuuuugccuuggcuuc

SEQ ID NO: 1137018 - RNA, 21 nt, Human
aaguguugggauuaccggugu

SEQ ID NO: 1137019 - RNA, 23 nt, Human
aaguguugggauuaccgguguga

SEQ ID NO: 1137020 - RNA, 26 nt, Human
aaguguugggauuaccggugugagcc

SEQ ID NO: 1137021 - RNA, 21 nt, Human
aauuauuuuaaaaaagaaauc

SEQ ID NO: 1137022 - RNA, 22 nt, Human
acaccgacacaccucucugagc

SEQ ID NO: 1137023 - RNA, 24 nt, Human
acaggcuaaagaauaaacaacaua

SEQ ID NO: 1137024 - RNA, 20 nt, Human
accaccucccagccaccacc

SEQ ID NO: 1137025 - RNA, 19 nt, Human
accaggcuggagaguggcc

SEQ ID NO: 1137026 - RNA, 19 nt, Human
acccacagacguguccagg

SEQ ID NO: 1137027 - RNA, 23 nt, Human
acccaggcuggagugcaguggug

SEQ ID NO: 1137028 - RNA, 24 nt, Human
acccaggcuggagugcaguggugu

SEQ ID NO: 1137029 - RNA, 22 nt, Human
accccgggccaugaggacggca

SEQ ID NO: 1137030 - RNA, 21 nt, Human
accucccagccaccaccacac

SEQ ID NO: 1137031 - RNA, 19 nt, Human
accuccccucuuacaccac

SEQ ID NO: 1137032 - RNA, 18 nt, Human
agaacgccacggccacag

SEQ ID NO: 1137033 - RNA, 19 nt, Human
agaagacuaacaaagucag

SEQ ID NO: 1137034 - RNA, 23 nt, Human
agaguggccugggcacagaggcc

SEQ ID NO: 1137035 - RNA, 25 nt, Human
agcaaggugcaugaggauggggugu

SEQ ID NO: 1137036 - RNA, 21 nt, Human
aggaaaacggcagguaguuag

SEQ ID NO: 1137037 - RNA, 19 nt, Human
aggcagagcucugacacuc

SEQ ID NO: 1137038 - RNA, 21 nt, Human
aggcagagcucugacacuccu

SEQ ID NO: 1137039 - RNA, 21 nt, Human
aggcuggucuccaacuccugg

SEQ ID NO: 1137040 - RNA, 22 nt, Human
agggagagcgggaagcaaggga

SEQ ID NO: 1137041 - RNA, 18 nt, Human
aggggccagugcacagaa

SEQ ID NO: 1137042 - RNA, 18 nt, Human
aggugcaugaggaugggg

SEQ ID NO: 1137043 - RNA, 23 nt, Human
agugcagugguguggucuuggcu

SEQ ID NO: 1137044 - RNA, 24 nt, Human
agugcagugguguggucuuggcuc

SEQ ID NO: 1137045 - RNA, 25 nt, Human
aucuuuuuuuuuuuuuuuuuuuugg

SEQ ID NO: 1137046 - RNA, 24 nt, Human
auggcuggggcagcgcuggagggg

SEQ ID NO: 1137047 - RNA, 25 nt, Human
auucuaaaauguauauggaaagcca

SEQ ID NO: 1137048 - RNA, 25 nt, Human
auucugucacccaggcuggagugca

SEQ ID NO: 1137049 - RNA, 18 nt, Human
caaagcacaauccauaga

SEQ ID NO: 1137050 - RNA, 18 nt, Human
caacaccuccccucuuac

SEQ ID NO: 1137051 - RNA, 24 nt, Human
caacuccugggcucaagcgauccu

SEQ ID NO: 1137052 - RNA, 19 nt, Human
caagcgauccuuuugccuu

SEQ ID NO: 1137053 - RNA, 22 nt, Human
caagcgauccuuuugccuuggc

SEQ ID NO: 1137054 - RNA, 27 nt, Human
caagcgauccuuuugccuuggcuuccc

SEQ ID NO: 1137055 - RNA, 21 nt, Human
cacaaaaaagucacaaaggug

SEQ ID NO: 1137056 - RNA, 23 nt, Human
caccaggaagcugcgugacccug

SEQ ID NO: 1137057 - RNA, 21 nt, Human
cacccaggcuggagugcagug

SEQ ID NO: 1137058 - RNA, 22 nt, Human
caccucccagccaccaccacac

SEQ ID NO: 1137059 - RNA, 19 nt, Human
caccucgcugcagcaggac

SEQ ID NO: 1137060 - RNA, 18 nt, Human
cagcaucuuuuuuuuuuu

SEQ ID NO: 1137061 - RNA, 21 nt, Human
cagccaccaccacacacccuc

SEQ ID NO: 1137062 - RNA, 20 nt, Human
cagccucaagcaaucuuccu

SEQ ID NO: 1137063 - RNA, 22 nt, Human
cagggcaaggcccacaucuguc

SEQ ID NO: 1137064 - RNA, 18 nt, Human
cauggcuggggcagcgcu

SEQ ID NO: 1137065 - RNA, 23 nt, Human
ccaacaccuccccucuuacacca

SEQ ID NO: 1137066 - RNA, 23 nt, Human
ccaaguguugggauuaccggugu

SEQ ID NO: 1137067 - RNA, 24 nt, Human
ccaaguguugggauuaccggugug

SEQ ID NO: 1137068 - RNA, 21 nt, Human
ccacagaggaccccagcaccc

SEQ ID NO: 1137069 - RNA, 21 nt, Human
ccaccaugccuggccagcauc

SEQ ID NO: 1137070 - RNA, 19 nt, Human
ccagaacagacuucaccag

SEQ ID NO: 1137071 - RNA, 20 nt, Human
ccaggcuggucuccaacucc

SEQ ID NO: 1137072 - RNA, 19 nt, Human
cccaacaccuccccucuua

SEQ ID NO: 1137073 - RNA, 18 nt, Human
cccaaguguugggauuac

SEQ ID NO: 1137074 - RNA, 18 nt, Human
cccacagggcaaggccca

SEQ ID NO: 1137075 - RNA, 18 nt, Human
ccccaacaccuccccucu

SEQ ID NO: 1137076 - RNA, 24 nt, Human
ccccaacaccuccccucuuacacc

SEQ ID NO: 1137077 - RNA, 26 nt, Human
cccgugcccuggccccacagggccgg

SEQ ID NO: 1137078 - RNA, 23 nt, Human
ccgaaaccucacaucucauauaa

SEQ ID NO: 1137079 - RNA, 23 nt, Human
ccuacaucagacagacauggcug

SEQ ID NO: 1137080 - RNA, 19 nt, Human
ccugcagcuggguccugac

SEQ ID NO: 1137081 - RNA, 19 nt, Human
ccugggcucaagcgauccu

SEQ ID NO: 1137082 - RNA, 18 nt, Human
ccuguguugcccaggcug

SEQ ID NO: 1137083 - RNA, 23 nt, Human
ccuguguugcccaggcuggucuc

SEQ ID NO: 1137084 - RNA, 21 nt, Human
cgaaagagacccacagacgug

SEQ ID NO: 1137085 - RNA, 24 nt, Human
cgacgucgggggcuuucacaccca

SEQ ID NO: 1137086 - RNA, 19 nt, Human
cgagaagacuaacaaaguc

SEQ ID NO: 1137087 - RNA, 21 nt, Human
cggcuuggccaccaggaagcu

SEQ ID NO: 1137088 - RNA, 25 nt, Human
cucaagcaaucuuccugccucaacg

SEQ ID NO: 1137089 - RNA, 25 nt, Human
cucccagccaccaccacacacccuc

SEQ ID NO: 1137090 - RNA, 20 nt, Human
cucccggccuuguccccacc

SEQ ID NO: 1137091 - RNA, 25 nt, Human
cuccuacaucagacagacauggcug

SEQ ID NO: 1137092 - RNA, 18 nt, Human
cuccugggccuaggcacu

SEQ ID NO: 1137093 - RNA, 24 nt, Human
cugcccgugcccuggccccacagg

SEQ ID NO: 1137094 - RNA, 21 nt, Human
cugccggccccaacaccuccc

SEQ ID NO: 1137095 - RNA, 21 nt, Human
cuguacagcuacagcacagcg

SEQ ID NO: 1137096 - RNA, 24 nt, Human
cuuauucugucacccaggcuggag

SEQ ID NO: 1137097 - RNA, 22 nt, Human
cuugagcacugccggccccaac

SEQ ID NO: 1137098 - RNA, 21 nt, Human
gaacgccacggccacagagga

SEQ ID NO: 1137099 - RNA, 23 nt, Human
gagauggggucucccuguguugc

SEQ ID NO: 1137100 - RNA, 18 nt, Human
gauuaccggugugagcca

SEQ ID NO: 1137101 - RNA, 21 nt, Human
gauuaccggugugagccacca

SEQ ID NO: 1137102 - RNA, 22 nt, Human
gauuaccggugugagccaccau

SEQ ID NO: 1137103 - RNA, 24 nt, Human
gccaaguagcuguaacuacaggug

SEQ ID NO: 1137104 - RNA, 18 nt, Human
gccagugcacagaacccg

SEQ ID NO: 1137105 - RNA, 20 nt, Human
gccccaacaccuccccucuu

SEQ ID NO: 1137106 - RNA, 19 nt, Human
gcuggggcagcgcuggagg

SEQ ID NO: 1137107 - RNA, 24 nt, Human
ggauuaccggugugagccaccaug

SEQ ID NO: 1137108 - RNA, 18 nt, Human
ggcagagcucugacacuc

SEQ ID NO: 1137109 - RNA, 18 nt, Human
ggcagcgcuggaggggag

SEQ ID NO: 1137110 - RNA, 19 nt, Human
ggccccaacaccuccccuc

SEQ ID NO: 1137111 - RNA, 20 nt, Human
ggcuaaagaauaaacaacau

SEQ ID NO: 1137112 - RNA, 20 nt, Human
ggcuggagugcaguggugug

SEQ ID NO: 1137113 - RNA, 24 nt, Human
ggcuggggcagcgcuggaggggag

SEQ ID NO: 1137114 - RNA, 22 nt, Human
gggagauguggagaccagcgga

SEQ ID NO: 1137115 - RNA, 23 nt, Human
gggcagcgcuggaggggagaugu

SEQ ID NO: 1137116 - RNA, 21 nt, Human
gggccuaggcacugcaggaaa

SEQ ID NO: 1137117 - RNA, 23 nt, Human
gguguacgaggcuagcuugguau

SEQ ID NO: 1137118 - RNA, 19 nt, Human
guaaaacacagaauuauuu

SEQ ID NO: 1137119 - RNA, 21 nt, Human
guguuuuuuucauagagaugg

SEQ ID NO: 1137120 - RNA, 18 nt, Human
uaaaaaagaaaucuucag

SEQ ID NO: 1137121 - RNA, 22 nt, Human
uaaccccaagugggauuccuuc

SEQ ID NO: 1137122 - RNA, 18 nt, Human
uacaccaccugcuugugu

SEQ ID NO: 1137123 - RNA, 24 nt, Human
uaccggugugagccaccaugccug

SEQ ID NO: 1137124 - RNA, 19 nt, Human
uaugccgugaccaaguggg

SEQ ID NO: 1137125 - RNA, 22 nt, Human
ucacccaggcuggagugcagug

SEQ ID NO: 1137126 - RNA, 18 nt, Human
ucaccgggcucaggggag

SEQ ID NO: 1137127 - RNA, 22 nt, Human
ucauagagauggggucucccug

SEQ ID NO: 1137128 - RNA, 21 nt, Human
uccagauagacggcucgaucc

SEQ ID NO: 1137129 - RNA, 23 nt, Human
uccccaaguguugggauuaccgg

SEQ ID NO: 1137130 - RNA, 18 nt, Human
ucccggccuuguccccac

SEQ ID NO: 1137131 - RNA, 19 nt, Human
ucccggccuuguccccacc

SEQ ID NO: 1137132 - RNA, 21 nt, Human
ucccuguguugcccaggcugg

SEQ ID NO: 1137133 - RNA, 20 nt, Human
uccugggcucaagcgauccu

SEQ ID NO: 1137134 - RNA, 20 nt, Human
uccugggcucaagcgauccu

SEQ ID NO: 1137135 - RNA, 21 nt, Human
uccugggcucaagcgauccuu

SEQ ID NO: 1137136 - RNA, 24 nt, Human
uccugggcucaagcgauccuuuug

SEQ ID NO: 1137137 - RNA, 23 nt, Human
ucuccaacuccugggcucaagcg

SEQ ID NO: 1137138 - RNA, 19 nt, Human
ucucccuguguugcccagg

SEQ ID NO: 1137139 - RNA, 23 nt, Human
ucucccuguguugcccaggcugg

SEQ ID NO: 1137140 - RNA, 24 nt, Human
ucucccuguguugcccaggcuggu

SEQ ID NO: 1137141 - RNA, 19 nt, Human
ucugucacccaggcuggag

SEQ ID NO: 1137142 - RNA, 24 nt, Human
ucugucacccaggcuggagugcag

SEQ ID NO: 1137143 - RNA, 23 nt, Human
ucuuauucugucacccaggcugg

SEQ ID NO: 1137144 - RNA, 24 nt, Human
ucuuauucugucacccaggcugga

SEQ ID NO: 1137145 - RNA, 19 nt, Human
ucuugcuucucucuuuucc

SEQ ID NO: 1137146 - RNA, 26 nt, Human
ucuuuuuuuuuuuuuuuuuuuugggg

SEQ ID NO: 1137147 - RNA, 22 nt, Human
ugaacuuacauguaaaacacag

SEQ ID NO: 1137148 - RNA, 19 nt, Human
ugacuugagcacugccggc

SEQ ID NO: 1137149 - RNA, 21 nt, Human
ugaggaugggguguccugcag

SEQ ID NO: 1137150 - RNA, 24 nt, Human
ugcccaggcuggucuccaacuccu

SEQ ID NO: 1137151 - RNA, 28 nt, Human
ugcccaggcuggucuccaacuccugggc

SEQ ID NO: 1137152 - RNA, 21 nt, Human
ugcccuggugccaucggaugg

SEQ ID NO: 1137153 - RNA, 24 nt, Human
ugccucaacgugccaaguagcugu

SEQ ID NO: 1137154 - RNA, 19 nt, Human
ugccuuggcuuccccaagu

SEQ ID NO: 1137155 - RNA, 19 nt, Human
ugccuuggcuuccccaagu

SEQ ID NO: 1137156 - RNA, 23 nt, Human
ugcgugacccugggcacaccgac

SEQ ID NO: 1137157 - RNA, 19 nt, Human
ugcucccucuccugggccu

SEQ ID NO: 1137158 - RNA, 22 nt, Human
uggaggggagauguggagacca

SEQ ID NO: 1137159 - RNA, 23 nt, Human
uggaggggagauguggagaccag

SEQ ID NO: 1137160 - RNA, 20 nt, Human
uggagugcaguggugugguc

SEQ ID NO: 1137161 - RNA, 23 nt, Human
uggagugcagugguguggucuug

SEQ ID NO: 1137162 - RNA, 24 nt, Human
uggagugcagugguguggucuugg

SEQ ID NO: 1137163 - RNA, 22 nt, Human
uggcaucagcagccaucgugag

SEQ ID NO: 1137164 - RNA, 27 nt, Human
uggccagcaucuuuuuuuuuuuuuuuu

SEQ ID NO: 1137165 - RNA, 21 nt, Human
uggccugggcacagaggccgg

SEQ ID NO: 1137166 - RNA, 18 nt, Human
ugggauuaccggugugag

SEQ ID NO: 1137167 - RNA, 22 nt, Human
ugggauuaccggugugagccac

SEQ ID NO: 1137168 - RNA, 24 nt, Human
ugggauuaccggugugagccacca

SEQ ID NO: 1137169 - RNA, 25 nt, Human
ugggauuaccggugugagccaccau

SEQ ID NO: 1137170 - RNA, 20 nt, Human
ugggauuccugcccgugccc

SEQ ID NO: 1137171 - RNA, 19 nt, Human
ugggcacaccgacacaccu

SEQ ID NO: 1137172 - RNA, 21 nt, Human
ugggcacagaggccggggcug

SEQ ID NO: 1137173 - RNA, 23 nt, Human
ugggcauugccgagaagacuaac

SEQ ID NO: 1137174 - RNA, 19 nt, Human
ugggcucaagcgauccuuu

SEQ ID NO: 1137175 - RNA, 24 nt, Human
ugggcucaagcgauccuuuugccu

SEQ ID NO: 1137176 - RNA, 24 nt, Human
uggggucucccuguguugcccagg

SEQ ID NO: 1137177 - RNA, 26 nt, Human
uggggucucccuguguugcccaggcc

SEQ ID NO: 1137178 - RNA, 21 nt, Human
ugggguguccugcagcugggu

SEQ ID NO: 1137179 - RNA, 24 nt, Human
ugguguggucuuggcucacugcag

SEQ ID NO: 1137180 - RNA, 24 nt, Human
uguaacuacaggugcgcaccacca

SEQ ID NO: 1137181 - RNA, 21 nt, Human
uguaucaugaacuuacaugua

SEQ ID NO: 1137182 - RNA, 20 nt, Human
uguccaggccacuuucuaac

SEQ ID NO: 1137183 - RNA, 21 nt, Human
ugucuugcuucucucuuuucc

SEQ ID NO: 1137184 - RNA, 20 nt, Human
ugucuuugcuacagcuggag

SEQ ID NO: 1137185 - RNA, 24 nt, Human
uguggggggagggagagcgggaag

SEQ ID NO: 1137186 - RNA, 19 nt, Human
uguugcccaggcuggucuc

SEQ ID NO: 1137187 - RNA, 22 nt, Human
uguugcccaggcuggucuccaa

SEQ ID NO: 1137188 - RNA, 24 nt, Human
uuauucugucacccaggcuggagu

SEQ ID NO: 1137189 - RNA, 23 nt, Human
uucauagagauggggucucccug

SEQ ID NO: 1137190 - RNA, 20 nt, Human
uuguccccaccucgcugcag

SEQ ID NO: 1137191 - RNA, 20 nt, Human
uuuuuuuuuuuuuuuuuggu

SEQ ID NO: 1137192 - RNA, 22 nt, Human
uuuuuuuuuuuuuuuuugguag

SEQ ID NO: 1137193 - RNA, 21 nt, Human
acagaucaggcaaaccaacca

SEQ ID NO: 1137194 - RNA, 22 nt, Human
agauacagaucaggcaaaccaa

SEQ ID NO: 1137195 - RNA, 23 nt, Human
agaucaggcaaaccaaccaaggg

SEQ ID NO: 1137196 - RNA, 19 nt, Human
cagaucaggcaaaccaacc

SEQ ID NO: 1137197 - RNA, 20 nt, Human
cagaucaggcaaaccaacca

SEQ ID NO: 1137198 - RNA, 22 nt, Human
cagcuguagaugaagcccccag

SEQ ID NO: 1137199 - RNA, 18 nt, Human
gagaagaaaucauaagcc

SEQ ID NO: 1137200 - RNA, 19 nt, Human
cagggagcucccuggcuga

SEQ ID NO: 1137201 - RNA, 18 nt, Human
ccuggcugaugagguggg

SEQ ID NO: 1137202 - RNA, 22 nt, Human
uauuuuagaccacagccuguug

SEQ ID NO: 1137203 - RNA, 22 nt, Human
ucagguccuccuccaggcucac

SEQ ID NO: 1137204 - RNA, 19 nt, Human
ucccuggcugaugaggugg

SEQ ID NO: 1137205 - RNA, 20 nt, Human
ucccuggcugaugagguggg

SEQ ID NO: 1137206 - RNA, 19 nt, Human
uccuccaggcucacuaggu

SEQ ID NO: 1137207 - RNA, 19 nt, Human
uccuccaggcucacuaggu

SEQ ID NO: 1137208 - RNA, 18 nt, Human
ucugggcccgggaagccc

SEQ ID NO: 1137209 - RNA, 24 nt, Human
ugagguggggucaggauggauguc

SEQ ID NO: 1137210 - RNA, 22 nt, Human
ugugugccucucucgauggccc

SEQ ID NO: 1137211 - RNA, 26 nt, Human
uguugugugccucucucgauggccug

SEQ ID NO: 1137212 - RNA, 18 nt, Human
aaagaugcuucucagugu

SEQ ID NO: 1137213 - RNA, 24 nt, Human
aaaggacuccagccagcggcaccc

SEQ ID NO: 1137214 - RNA, 22 nt, Human
aaagggcccccagacccagaca

SEQ ID NO: 1137215 - RNA, 18 nt, Human
aaaugcaucuaaagucac

SEQ ID NO: 1137216 - RNA, 26 nt, Human
aacagcagaaugugacccaggagaaa

SEQ ID NO: 1137217 - RNA, 18 nt, Human
aacaggugugaagaggau

SEQ ID NO: 1137218 - RNA, 20 nt, Human
aacccuaagucuauacuccc

SEQ ID NO: 1137219 - RNA, 25 nt, Human
aacugagaagagaagggcugguuca

SEQ ID NO: 1137220 - RNA, 22 nt, Human
aacugggggagccccugcaagc

SEQ ID NO: 1137221 - RNA, 22 nt, Human
aagaccagagaaugaccacuaa

SEQ ID NO: 1137222 - RNA, 25 nt, Human
aagacccucucuuuucaggggaguc

SEQ ID NO: 1137223 - RNA, 18 nt, Human
aagcgccucccaucucaa

SEQ ID NO: 1137224 - RNA, 20 nt, Human
aaggugccaccugcaagcca

SEQ ID NO: 1137225 - RNA, 25 nt, Human
aaugcaucuaaagucacaguguuaa

SEQ ID NO: 1137226 - RNA, 23 nt, Human
acagagaaaaggccaugugagga

SEQ ID NO: 1137227 - RNA, 22 nt, Human
acaggcaagcacauuccuucca

SEQ ID NO: 1137228 - RNA, 20 nt, Human
accaaggaagucccccacaa

SEQ ID NO: 1137229 - RNA, 18 nt, Human
acccauuuccccucccac

SEQ ID NO: 1137230 - RNA, 22 nt, Human
accucucugcuccuccucccca

SEQ ID NO: 1137231 - RNA, 23 nt, Human
acugucuccucuggagggagcug

SEQ ID NO: 1137232 - RNA, 21 nt, Human
agaagaccagagaaugaccac

SEQ ID NO: 1137233 - RNA, 23 nt, Human
agaagaggaggagacaccagagc

SEQ ID NO: 1137234 - RNA, 23 nt, Human
agacacuuacacugagaaaaaug

SEQ ID NO: 1137235 - RNA, 22 nt, Human
agaccagaagagggcaggcugg

SEQ ID NO: 1137236 - RNA, 25 nt, Human
agacccagacaauagggcccagcag

SEQ ID NO: 1137237 - RNA, 18 nt, Human
agauccugacugucuccu

SEQ ID NO: 1137238 - RNA, 22 nt, Human
agccuccuucuaauagcaguuc

SEQ ID NO: 1137239 - RNA, 20 nt, Human
aggcacugugcuaggcacac

SEQ ID NO: 1137240 - RNA, 19 nt, Human
agggagucacccagcgggc

SEQ ID NO: 1137241 - RNA, 19 nt, Human
aggguuguagcccaggccc

SEQ ID NO: 1137242 - RNA, 25 nt, Human
agguucccuucacucacucccuguu

SEQ ID NO: 1137243 - RNA, 21 nt, Human
agucacaguguuaacucuuca

SEQ ID NO: 1137244 - RNA, 18 nt, Human
agugcagagggcucuuug

SEQ ID NO: 1137245 - RNA, 21 nt, Human
agugcugaaacugagaagaga

SEQ ID NO: 1137246 - RNA, 18 nt, Human
aucacccuuucugggacc

SEQ ID NO: 1137247 - RNA, 18 nt, Human
aucccaacaggugugaag

SEQ ID NO: 1137248 - RNA, 20 nt, Human
auggagacaaaggacuccag

SEQ ID NO: 1137249 - RNA, 23 nt, Human
caaaaaaaaaaaaaaauagauaa

SEQ ID NO: 1137250 - RNA, 25 nt, Human
caaagagaaguccaggccaggaguc

SEQ ID NO: 1137251 - RNA, 23 nt, Human
caacaacagcagaaugugaccca

SEQ ID NO: 1137252 - RNA, 23 nt, Human
caacuggcagaccugagucagga

SEQ ID NO: 1137253 - RNA, 26 nt, Human
caccagaaaccaagucuuaacaccuu

SEQ ID NO: 1137254 - RNA, 27 nt, Human
caccagaaaccaagucuuaacaccuuc

SEQ ID NO: 1137255 - RNA, 21 nt, Human
cacccgggagugggggcacga

SEQ ID NO: 1137256 - RNA, 24 nt, Human
caccuugaucuggacuuuccagcc

SEQ ID NO: 1137257 - RNA, 26 nt, Human
cacucuucaccuauauuucccccaaa

SEQ ID NO: 1137258 - RNA, 27 nt, Human
cacuguggccagaauccaaggucaccc

SEQ ID NO: 1137259 - RNA, 21 nt, Human
cagaaaccaagucuuaacacc

SEQ ID NO: 1137260 - RNA, 21 nt, Human
cagcacagggggaaggcucca

SEQ ID NO: 1137261 - RNA, 19 nt, Human
cagcacccgggaguggggg

SEQ ID NO: 1137262 - RNA, 24 nt, Human
cagcagcccucucuggggucucuc

SEQ ID NO: 1137263 - RNA, 23 nt, Human
cagcaggcagggcccgagcaggu

SEQ ID NO: 1137264 - RNA, 23 nt, Human
cagcaugguaccugccacucucc

SEQ ID NO: 1137265 - RNA, 23 nt, Human
cagccuccagaacuggcagaaaa

SEQ ID NO: 1137266 - RNA, 21 nt, Human
cagccucccucccucuggucc

SEQ ID NO: 1137267 - RNA, 21 nt, Human
cagcggcacccgaggagcugc

SEQ ID NO: 1137268 - RNA, 24 nt, Human
cagcuugcuaggaagcuguuccag

SEQ ID NO: 1137269 - RNA, 21 nt, Human
cagggggaaggcuccagcucc

SEQ ID NO: 1137270 - RNA, 28 nt, Human
cagguucccuucacucacucccuguuuc

SEQ ID NO: 1137271 - RNA, 21 nt, Human
cagugcaacuagaagcagcga

SEQ ID NO: 1137272 - RNA, 25 nt, Human
caugaaaugcugccaccuccccaag

SEQ ID NO: 1137273 - RNA, 20 nt, Human
ccacaaaaugacaauuacgc

SEQ ID NO: 1137274 - RNA, 25 nt, Human
ccacaaaaugacaauuacgcacuga

SEQ ID NO: 1137275 - RNA, 20 nt, Human
ccacagagaaaaggccaugu

SEQ ID NO: 1137276 - RNA, 23 nt, Human
ccaccaaggaagucccccacaaa

SEQ ID NO: 1137277 - RNA, 21 nt, Human
ccaccugcaagccaaggagag

SEQ ID NO: 1137278 - RNA, 24 nt, Human
ccaccugcaagccaaggagagagg

SEQ ID NO: 1137279 - RNA, 21 nt, Human
ccagacccagacaauagggcc

SEQ ID NO: 1137280 - RNA, 21 nt, Human
ccagagagccaaaaaaaaaaa

SEQ ID NO: 1137281 - RNA, 22 nt, Human
ccagccagcggcacccgaggag

SEQ ID NO: 1137282 - RNA, 21 nt, Human
ccagcucugcuccugccacac

SEQ ID NO: 1137283 - RNA, 22 nt, Human
ccaggcacucagaacuugugcc

SEQ ID NO: 1137284 - RNA, 23 nt, Human
cccaacaacagcagaaugugacc

SEQ ID NO: 1137285 - RNA, 21 nt, Human
cccaagcugauuaaagaguga

SEQ ID NO: 1137286 - RNA, 21 nt, Human
cccacaaaaugacaauuacgc

SEQ ID NO: 1137287 - RNA, 21 nt, Human
cccagauccugacugucuccu

SEQ ID NO: 1137288 - RNA, 20 nt, Human
ccccacaaaaugacaauuac

SEQ ID NO: 1137289 - RNA, 24 nt, Human
ccccagacccagacaauagggccc

SEQ ID NO: 1137290 - RNA, 23 nt, Human
ccccagcaugguaccugccacuc

SEQ ID NO: 1137291 - RNA, 24 nt, Human
cccccagacccagacaauagggcc

SEQ ID NO: 1137292 - RNA, 24 nt, Human
cccgaggagcugcaucugcccucu

SEQ ID NO: 1137293 - RNA, 19 nt, Human
cccuccuucuccccugccc

SEQ ID NO: 1137294 - RNA, 21 nt, Human
cccucguucuguggaccuugg

SEQ ID NO: 1137295 - RNA, 20 nt, Human
cccucuggcugccccuccca

SEQ ID NO: 1137296 - RNA, 22 nt, Human
cccucuggcugccccucccaga

SEQ ID NO: 1137297 - RNA, 24 nt, Human
cccugcacugagcccugccaguuc

SEQ ID NO: 1137298 - RNA, 21 nt, Human
cccuucugucuccucuguccc

SEQ ID NO: 1137299 - RNA, 22 nt, Human
ccucaccagaaaccaagucuua

SEQ ID NO: 1137300 - RNA, 23 nt, Human
ccuccagaacuggcagaaaauaa

SEQ ID NO: 1137301 - RNA, 25 nt, Human
ccucccaucucaaacuccuccccgc

SEQ ID NO: 1137302 - RNA, 18 nt, Human
ccucccucccucuggucc

SEQ ID NO: 1137303 - RNA, 19 nt, Human
ccucccucccucugguccc

SEQ ID NO: 1137304 - RNA, 23 nt, Human
ccugcaagccaaggagagaggcc

SEQ ID NO: 1137305 - RNA, 21 nt, Human
ccugcaagcgccucccaucuc

SEQ ID NO: 1137306 - RNA, 22 nt, Human
ccugccaccuucuguuccccaa

SEQ ID NO: 1137307 - RNA, 20 nt, Human
ccugcccuuuccugaugccc

SEQ ID NO: 1137308 - RNA, 23 nt, Human
ccuggaaauucccuucugucucc

SEQ ID NO: 1137309 - RNA, 25 nt, Human
ccuguccccauccuguaggguccuu

SEQ ID NO: 1137310 - RNA, 19 nt, Human
ccuuuggguaagacugguu

SEQ ID NO: 1137311 - RNA, 19 nt, Human
cggcucucccagggccucc

SEQ ID NO: 1137312 - RNA, 24 nt, Human
cucagccccucuggcugccccucc

SEQ ID NO: 1137313 - RNA, 22 nt, Human
cucccagggccuccgccucccu

SEQ ID NO: 1137314 - RNA, 23 nt, Human
cucccucauaccccuggagcugu

SEQ ID NO: 1137315 - RNA, 19 nt, Human
cucugccugacagccccuc

SEQ ID NO: 1137316 - RNA, 19 nt, Human
cugcccuuuccugaugccc

SEQ ID NO: 1137317 - RNA, 20 nt, Human
cugcccuuuccugaugcccc

SEQ ID NO: 1137318 - RNA, 24 nt, Human
cuguuccccaagaacagaauccag

SEQ ID NO: 1137319 - RNA, 22 nt, Human
cuuaacaccuugaucuggacuu

SEQ ID NO: 1137320 - RNA, 19 nt, Human
cuucaccuauauuuccccc

SEQ ID NO: 1137321 - RNA, 18 nt, Human
cuucagggagucacccag

SEQ ID NO: 1137322 - RNA, 21 nt, Human
cuuccugccuugacauucacu

SEQ ID NO: 1137323 - RNA, 23 nt, Human
gaaaagccccaccaaggaagucc

SEQ ID NO: 1137324 - RNA, 18 nt, Human
gaaauggaagggacccuu

SEQ ID NO: 1137325 - RNA, 20 nt, Human
gaacuugugccucaguagac

SEQ ID NO: 1137326 - RNA, 19 nt, Human
gaagaggaggagacaccag

SEQ ID NO: 1137327 - RNA, 21 nt, Human
gaauagcagcugaacggagag

SEQ ID NO: 1137328 - RNA, 23 nt, Human
gacagccccuccccgacucccau

SEQ ID NO: 1137329 - RNA, 19 nt, Human
gaccacuaauccugaccua

SEQ ID NO: 1137330 - RNA, 19 nt, Human
gacccagacaauagggccc

SEQ ID NO: 1137331 - RNA, 20 nt, Human
gacuaggacucuuuuaagac

SEQ ID NO: 1137332 - RNA, 18 nt, Human
gaugggaaauggaaggga

SEQ ID NO: 1137333 - RNA, 19 nt, Human
gauuguggggccuguccug

SEQ ID NO: 1137334 - RNA, 19 nt, Human
gcaagcacauuccuuccau

SEQ ID NO: 1137335 - RNA, 21 nt, Human
gcacuccugagccaccccagc

SEQ ID NO: 1137336 - RNA, 26 nt, Human
gcagcagcccucucuggggucucucu

SEQ ID NO: 1137337 - RNA, 25 nt, Human
gcaggaaagggcccccagacccaga

SEQ ID NO: 1137338 - RNA, 23 nt, Human
gcauggugcuguggcagcccaag

SEQ ID NO: 1137339 - RNA, 22 nt, Human
gccagaauccaaggucacccgg

SEQ ID NO: 1137340 - RNA, 23 nt, Human
gccccaugcaccagaggaaauuc

SEQ ID NO: 1137341 - RNA, 19 nt, Human
gccucccugcacugagccc

SEQ ID NO: 1137342 - RNA, 18 nt, Human
gccuuggggaaagugugg

SEQ ID NO: 1137343 - RNA, 20 nt, Human
gcgggcuagaaaaccaccgg

SEQ ID NO: 1137344 - RNA, 19 nt, Human
gcuccagcuccucccagau

SEQ ID NO: 1137345 - RNA, 22 nt, Human
gcugaugaauaguacacaccac

SEQ ID NO: 1137346 - RNA, 22 nt, Human
ggaagggacccuucugcccagc

SEQ ID NO: 1137347 - RNA, 21 nt, Human
ggagcucucucagcauaucuu

SEQ ID NO: 1137348 - RNA, 23 nt, Human
ggagcugcaucugcccucugccu

SEQ ID NO: 1137349 - RNA, 21 nt, Human
ggagcuggaauugcagauugu

SEQ ID NO: 1137350 - RNA, 18 nt, Human
ggcauggugcuguggcag

SEQ ID NO: 1137351 - RNA, 20 nt, Human
ggcccagauggagccacccc

SEQ ID NO: 1137352 - RNA, 19 nt, Human
gggaaaaaggacaucuggc

SEQ ID NO: 1137353 - RNA, 23 nt, Human
gggacugucuccucuggagggag

SEQ ID NO: 1137354 - RNA, 22 nt, Human
gggcaggcugguaggcuauggg

SEQ ID NO: 1137355 - RNA, 24 nt, Human
gggcaggcugguaggcuaugggcu

SEQ ID NO: 1137356 - RNA, 21 nt, Human
guccuggagaugcggcccaga

SEQ ID NO: 1137357 - RNA, 22 nt, Human
gugcugucuucaucaacuggca

SEQ ID NO: 1137358 - RNA, 23 nt, Human
gugugaagaggaugagaucuuca

SEQ ID NO: 1137359 - RNA, 21 nt, Human
uaaacccuaagucuauacucc

SEQ ID NO: 1137360 - RNA, 19 nt, Human
uaacucagccuucaaaagu

SEQ ID NO: 1137361 - RNA, 24 nt, Human
uaacucagccuucaaaaguuccag

SEQ ID NO: 1137362 - RNA, 22 nt, Human
uagaaaagagaaugagcuacau

SEQ ID NO: 1137363 - RNA, 19 nt, Human
uagccuaaaucuuaucucu

SEQ ID NO: 1137364 - RNA, 20 nt, Human
uagcugaauagcagcugaac

SEQ ID NO: 1137365 - RNA, 18 nt, Human
uaggauacuacacuuucc

SEQ ID NO: 1137366 - RNA, 20 nt, Human
uaguacacaccacuccgcau

SEQ ID NO: 1137367 - RNA, 21 nt, Human
uaguacacaccacuccgcauu

SEQ ID NO: 1137368 - RNA, 23 nt, Human
ucacagagcaucggaggcucaga

SEQ ID NO: 1137369 - RNA, 22 nt, Human
ucacagcgcagaacugggggag

SEQ ID NO: 1137370 - RNA, 21 nt, Human
ucaccagucuggagaagacca

SEQ ID NO: 1137371 - RNA, 21 nt, Human
ucaccagucuggagaagacca

SEQ ID NO: 1137372 - RNA, 19 nt, Human
ucacccauuuccccuccca

SEQ ID NO: 1137373 - RNA, 23 nt, Human
ucagccccucuggcugccccucc

SEQ ID NO: 1137374 - RNA, 21 nt, Human
ucagugugguugugaacgucc

SEQ ID NO: 1137375 - RNA, 18 nt, Human
ucaugcucucugucccuc

SEQ ID NO: 1137376 - RNA, 22 nt, Human
uccaaagagaaguccaggccag

SEQ ID NO: 1137377 - RNA, 20 nt, Human
uccaaggucacccgaggucc

SEQ ID NO: 1137378 - RNA, 27 nt, Human
uccagagagccaaaaaaaaaaaaaaaa

SEQ ID NO: 1137379 - RNA, 21 nt, Human
uccaugggaggcuccauccca

SEQ ID NO: 1137380 - RNA, 23 nt, Human
ucccagauccugacugucuccuc

SEQ ID NO: 1137381 - RNA, 22 nt, Human
ucccagguucccuucacucacu

SEQ ID NO: 1137382 - RNA, 20 nt, Human
ucccauaccucucugcuccc

SEQ ID NO: 1137383 - RNA, 21 nt, Human
ucccauaccucucugcuccuc

SEQ ID NO: 1137384 - RNA, 21 nt, Human
ucccauucucugauucuccau

SEQ ID NO: 1137385 - RNA, 19 nt, Human
uccccaagaacagaaucca

SEQ ID NO: 1137386 - RNA, 18 nt, Human
uccgcagccucccucccu

SEQ ID NO: 1137387 - RNA, 22 nt, Human
uccuggagaugcggcccagaug

SEQ ID NO: 1137388 - RNA, 18 nt, Human
ucuaaggccaaggagccc

SEQ ID NO: 1137389 - RNA, 19 nt, Human
ucucuggggucucucuacc

SEQ ID NO: 1137390 - RNA, 18 nt, Human
ucucugucccucuccaca

SEQ ID NO: 1137391 - RNA, 21 nt, Human
ucugccagguuuuguuuuugg

SEQ ID NO: 1137392 - RNA, 21 nt, Human
ucugcuccuccuccccauccc

SEQ ID NO: 1137393 - RNA, 22 nt, Human
ucuguuccccaagaacagaauc

SEQ ID NO: 1137394 - RNA, 24 nt, Human
ugaaacugagaagagaagggcugg

SEQ ID NO: 1137395 - RNA, 24 nt, Human
ugaaauccuaaagguucaaacccc

SEQ ID NO: 1137396 - RNA, 18 nt, Human
ugaaaugcugccaccucc

SEQ ID NO: 1137397 - RNA, 20 nt, Human
ugaaaugcugccaccucccc

SEQ ID NO: 1137398 - RNA, 21 nt, Human
ugaacggagagucaggaaucc

SEQ ID NO: 1137399 - RNA, 21 nt, Human
ugacauucacucaaggugcac

SEQ ID NO: 1137400 - RNA, 23 nt, Human
ugacccaggagaaaguaggacaa

SEQ ID NO: 1137401 - RNA, 19 nt, Human
ugaggagggaguagugggc

SEQ ID NO: 1137402 - RNA, 23 nt, Human
ugaggagggaguagugggcugcc

SEQ ID NO: 1137403 - RNA, 21 nt, Human
ugauccacagugacccuuucc

SEQ ID NO: 1137404 - RNA, 23 nt, Human
ugauccacagugacccuuucccc

SEQ ID NO: 1137405 - RNA, 18 nt, Human
ugcaccagaggaaauucg

SEQ ID NO: 1137406 - RNA, 18 nt, Human
ugcaccagaggaaauucg

SEQ ID NO: 1137407 - RNA, 22 nt, Human
ugccaggccucccucauacccc

SEQ ID NO: 1137408 - RNA, 21 nt, Human
ugcccucugccugacagcccc

SEQ ID NO: 1137409 - RNA, 25 nt, Human
ugccuccaacucggguccgcggucc

SEQ ID NO: 1137410 - RNA, 21 nt, Human
ugcggugaccacccuguuaag

SEQ ID NO: 1137411 - RNA, 18 nt, Human
uggaaaagccccaccaag

SEQ ID NO: 1137412 - RNA, 21 nt, Human
uggaaauucccuucugucucc

SEQ ID NO: 1137413 - RNA, 18 nt, Human
uggaagggacccuucugc

SEQ ID NO: 1137414 - RNA, 23 nt, Human
uggaagggacccuucugcccagc

SEQ ID NO: 1137415 - RNA, 22 nt, Human
uggaccuugguuaccccuguga

SEQ ID NO: 1137416 - RNA, 18 nt, Human
uggagccacccccuugcc

SEQ ID NO: 1137417 - RNA, 24 nt, Human
uggaugggaaauggaagggacccu

SEQ ID NO: 1137418 - RNA, 20 nt, Human
uggcagcccaagcugaugaa

SEQ ID NO: 1137419 - RNA, 21 nt, Human
uggcagcccaagcugaugaau

SEQ ID NO: 1137420 - RNA, 23 nt, Human
uggcagcccaagcugaugaauag

SEQ ID NO: 1137421 - RNA, 21 nt, Human
uggcauggugcuguggcagcc

SEQ ID NO: 1137422 - RNA, 19 nt, Human
uggcugccccucccagagu

SEQ ID NO: 1137423 - RNA, 22 nt, Human
uggcugccccucccagaguuca

SEQ ID NO: 1137424 - RNA, 22 nt, Human
ugguugugaacguccugaagaa

SEQ ID NO: 1137425 - RNA, 18 nt, Human
ugucccaggaacuugcug

SEQ ID NO: 1137426 - RNA, 21 nt, Human
ugucccauucucugauucucc

SEQ ID NO: 1137427 - RNA, 25 nt, Human
uguccccauccuguaggguccuuug

SEQ ID NO: 1137428 - RNA, 19 nt, Human
uguccuccgaagcacuccu

SEQ ID NO: 1137429 - RNA, 21 nt, Human
uguccugccaccuucuguucc

SEQ ID NO: 1137430 - RNA, 23 nt, Human
ugucuggaaccacauggguggac

SEQ ID NO: 1137431 - RNA, 22 nt, Human
ugugccucaguagacuguuuug

SEQ ID NO: 1137432 - RNA, 23 nt, Human
uguggccagaauccaaggucacc

SEQ ID NO: 1137433 - RNA, 21 nt, Human
uguggucaguggggacuuggc

SEQ ID NO: 1137434 - RNA, 18 nt, Human
uucacaucaucagggagu

SEQ ID NO: 1137435 - RNA, 26 nt, Human
uuccugcacagaccagaagagggcag

SEQ ID NO: 1137436 - RNA, 23 nt, Human
uucuccaugugagcugguuuuau

SEQ ID NO: 1137437 - RNA, 20 nt, Human
uucugaaggggagaaggcuc

SEQ ID NO: 1137438 - RNA, 21 nt, Human
uucugcucccccuccuucucc

SEQ ID NO: 1137439 - RNA, 19 nt, Human
uuguagcugcugcagcgcc

SEQ ID NO: 1137440 - RNA, 22 nt, Human
uuuaaacuugccuaagggaggc

SEQ ID NO: 1137441 - RNA, 23 nt, Human
uuuuaagaccacccugugucacc

SEQ ID NO: 1137442 - RNA, 19 nt, Human
acuagaaaacauuuuccuu

SEQ ID NO: 1137443 - RNA, 24 nt, Human
auaaaacagcaauaacuggccgag

SEQ ID NO: 1137444 - RNA, 21 nt, Human
cagcaauaacuggccgaggug

SEQ ID NO: 1137445 - RNA, 23 nt, Human
cagcaauaacuggccgagguggg

SEQ ID NO: 1137446 - RNA, 19 nt, Human
cauggccccuaaaugcaag

SEQ ID NO: 1137447 - RNA, 18 nt, Human
ccagggagacaagugugg

SEQ ID NO: 1137448 - RNA, 18 nt, Human
cccuccuucuucuauccc

SEQ ID NO: 1137449 - RNA, 23 nt, Human
cccugccucccuacuuccuuccc

SEQ ID NO: 1137450 - RNA, 24 nt, Human
ccuacuuccuucccuccuucuucu

SEQ ID NO: 1137451 - RNA, 22 nt, Human
ccuucccuccuucuucuauccc

SEQ ID NO: 1137452 - RNA, 22 nt, Human
cgaggugggcggaucaggaggu

SEQ ID NO: 1137453 - RNA, 24 nt, Human
cuacuuccuucccuccuucuucua

SEQ ID NO: 1137454 - RNA, 23 nt, Human
gaggugggcggaucaggagguca

SEQ ID NO: 1137455 - RNA, 20 nt, Human
gaucaggaggucaggagaga

SEQ ID NO: 1137456 - RNA, 21 nt, Human
ggcggaucaggaggucaggag

SEQ ID NO: 1137457 - RNA, 23 nt, Human
uaaaacagcaauaacuggccgag

SEQ ID NO: 1137458 - RNA, 21 nt, Human
ucccugccucccuacuucccc

SEQ ID NO: 1137459 - RNA, 22 nt, Human
ucucuaaacaucauggccccua

SEQ ID NO: 1137460 - RNA, 18 nt, Human
uggagagggggccagggc

SEQ ID NO: 1137461 - RNA, 19 nt, Human
uggccccuaaaugcaagcc

SEQ ID NO: 1137462 - RNA, 18 nt, Human
uggccgaggugggcggau

SEQ ID NO: 1137463 - RNA, 22 nt, Human
ugggcggaucaggaggucagga

SEQ ID NO: 1137464 - RNA, 25 nt, Human
uuauaaaacagcaauaacuggccga

SEQ ID NO: 1137465 - RNA, 23 nt, Human
agccacagcuacugccaaaaccc

SEQ ID NO: 1137466 - RNA, 24 nt, Human
agccacagcuacugccaaaacccg

SEQ ID NO: 1137467 - RNA, 18 nt, Human
agcuacugccaaaacccg

SEQ ID NO: 1137468 - RNA, 19 nt, Human
ccgcguccccaggcccggc

SEQ ID NO: 1137469 - RNA, 22 nt, Human
ccucggaucccgcucucgaccc

SEQ ID NO: 1137470 - RNA, 18 nt, Human
ccucggccgcccgcgucc

SEQ ID NO: 1137471 - RNA, 25 nt, Human
cgcagccacagcuacugccaaaacc

SEQ ID NO: 1137472 - RNA, 19 nt, Human
cggccgcccgcguccccag

SEQ ID NO: 1137473 - RNA, 20 nt, Human
cggccgcccgcguccccagg

SEQ ID NO: 1137474 - RNA, 25 nt, Human
cugccaaaacccgccagccucggau

SEQ ID NO: 1137475 - RNA, 19 nt, Human
gaucccgcucucgacccca

SEQ ID NO: 1137476 - RNA, 23 nt, Human
gccacagcuacugccaaaacccg

SEQ ID NO: 1137477 - RNA, 22 nt, Human
gcccgcguccccaggcccggca

SEQ ID NO: 1137478 - RNA, 20 nt, Human
ucggaucccgcucucgaccc

SEQ ID NO: 1137479 - RNA, 18 nt, Human
aaaauacaauucaaauac

SEQ ID NO: 1137480 - RNA, 23 nt, Human
aaauccugcaacagcaccuucaa

SEQ ID NO: 1137481 - RNA, 23 nt, Human
aaauggucaccgaggcuacagca

SEQ ID NO: 1137482 - RNA, 20 nt, Human
aacaacuuucuggaaaaugu

SEQ ID NO: 1137483 - RNA, 27 nt, Human
aagaacaacaggcagaagccgguaccc

SEQ ID NO: 1137484 - RNA, 21 nt, Human
aagacgcccuuccccugccca

SEQ ID NO: 1137485 - RNA, 23 nt, Human
aauggcaauguaaaacaaauuuc

SEQ ID NO: 1137486 - RNA, 21 nt, Human
acagagaacugccuuucucca

SEQ ID NO: 1137487 - RNA, 21 nt, Human
acgcccuuccuaggccaugcc

SEQ ID NO: 1137488 - RNA, 25 nt, Human
acuccugccacauuauccaaaaguc

SEQ ID NO: 1137489 - RNA, 19 nt, Human
agaggcuuagaggggucag

SEQ ID NO: 1137490 - RNA, 21 nt, Human
agaggggucagcucugaacua

SEQ ID NO: 1137491 - RNA, 21 nt, Human
agcaagcuggccuugcccaca

SEQ ID NO: 1137492 - RNA, 23 nt, Human
agcucaaagucacaguucaugcc

SEQ ID NO: 1137493 - RNA, 19 nt, Human
agcugcagcccuggggaca

SEQ ID NO: 1137494 - RNA, 22 nt, Human
aggcuacugguaucugcacaca

SEQ ID NO: 1137495 - RNA, 18 nt, Human
auggcaauguaaaacaaa

SEQ ID NO: 1137496 - RNA, 19 nt, Human
auuuaaaaaccugguaacu

SEQ ID NO: 1137497 - RNA, 24 nt, Human
caaauucccucuacagccugaagc

SEQ ID NO: 1137498 - RNA, 21 nt, Human
caacuuucuggaaaaugugac

SEQ ID NO: 1137499 - RNA, 19 nt, Human
caagaacaacaggcagaag

SEQ ID NO: 1137500 - RNA, 19 nt, Human
cacacucaugguuuucaca

SEQ ID NO: 1137501 - RNA, 20 nt, Human
caccgaggcuacagcagaac

SEQ ID NO: 1137502 - RNA, 24 nt, Human
cacucaugguuuucacaacuucau

SEQ ID NO: 1137503 - RNA, 19 nt, Human
cagacugggcugccuggcg

SEQ ID NO: 1137504 - RNA, 22 nt, Human
cagaggcuuagaggggucagcu

SEQ ID NO: 1137505 - RNA, 18 nt, Human
cagcugcagcccugggga

SEQ ID NO: 1137506 - RNA, 22 nt, Human
cagcugcagcccuggggacagg

SEQ ID NO: 1137507 - RNA, 18 nt, Human
cagcugggacuccugcca

SEQ ID NO: 1137508 - RNA, 20 nt, Human
cagcugggacuccugccaca

SEQ ID NO: 1137509 - RNA, 23 nt, Human
cagcuguaacuuguuuuggacug

SEQ ID NO: 1137510 - RNA, 19 nt, Human
cagguccuccagcaccuuc

SEQ ID NO: 1137511 - RNA, 25 nt, Human
caucuuggcucuucaucucccuacc

SEQ ID NO: 1137512 - RNA, 21 nt, Human
caugcagaugagcucuacacc

SEQ ID NO: 1137513 - RNA, 18 nt, Human
cccccagagaagcuuucc

SEQ ID NO: 1137514 - RNA, 19 nt, Human
cccccagagaagcuuucca

SEQ ID NO: 1137515 - RNA, 23 nt, Human
cccugcccagaccuucaugccuc

SEQ ID NO: 1137516 - RNA, 20 nt, Human
ccucugaacaccugccuagc

SEQ ID NO: 1137517 - RNA, 22 nt, Human
ccucugaacaccugccuagccu

SEQ ID NO: 1137518 - RNA, 24 nt, Human
cuacaccagccgagaggaacaagg

SEQ ID NO: 1137519 - RNA, 22 nt, Human
cucacauaucugguccugcccu

SEQ ID NO: 1137520 - RNA, 19 nt, Human
cucacugcaccugcuucac

SEQ ID NO: 1137521 - RNA, 24 nt, Human
cuccagcaccuucuguucauucuc

SEQ ID NO: 1137522 - RNA, 21 nt, Human
cugccacauuauccaaaaguc

SEQ ID NO: 1137523 - RNA, 21 nt, Human
cugguaucugcacacaacaug

SEQ ID NO: 1137524 - RNA, 19 nt, Human
cuguucauucuccuuuaga

SEQ ID NO: 1137525 - RNA, 18 nt, Human
cuucuguucauucuccuu

SEQ ID NO: 1137526 - RNA, 20 nt, Human
gagaagcuuuccauuuagga

SEQ ID NO: 1137527 - RNA, 20 nt, Human
gagaggccuguucaagcagg

SEQ ID NO: 1137528 - RNA, 18 nt, Human
gagcucgcaacgcccuuc

SEQ ID NO: 1137529 - RNA, 21 nt, Human
gcaagcaggcaaguauaucag

SEQ ID NO: 1137530 - RNA, 20 nt, Human
gcaccugcuucaccagcauc

SEQ ID NO: 1137531 - RNA, 18 nt, Human
gggaagcuguuaaaggcc

SEQ ID NO: 1137532 - RNA, 22 nt, Human
gugugcuggggacagcaggacu

SEQ ID NO: 1137533 - RNA, 20 nt, Human
guuuaacagguccuccagca

SEQ ID NO: 1137534 - RNA, 24 nt, Human
uaaaacaaauuucacugaaaauac

SEQ ID NO: 1137535 - RNA, 19 nt, Human
uaagaaaaacugacuaguu

SEQ ID NO: 1137536 - RNA, 20 nt, Human
uacagccugaagcaagcugg

SEQ ID NO: 1137537 - RNA, 23 nt, Human
uaccacaguaacauucuaauuca

SEQ ID NO: 1137538 - RNA, 21 nt, Human
uagaaaagaccuuaaauggua

SEQ ID NO: 1137539 - RNA, 22 nt, Human
uagaagucucucacauaucugg

SEQ ID NO: 1137540 - RNA, 22 nt, Human
uagcagcauuuaaaaaccuggu

SEQ ID NO: 1137541 - RNA, 18 nt, Human
uagcccacaggaacaaua

SEQ ID NO: 1137542 - RNA, 21 nt, Human
uaggagaggccuguucaagca

SEQ ID NO: 1137543 - RNA, 20 nt, Human
uaugcagccaccucccucag

SEQ ID NO: 1137544 - RNA, 19 nt, Human
uauuacaggaaaacuuuuc

SEQ ID NO: 1137545 - RNA, 24 nt, Human
ucacugaaaauacaauucaaauac

SEQ ID NO: 1137546 - RNA, 22 nt, Human
ucacugcaccugcuucaccagc

SEQ ID NO: 1137547 - RNA, 18 nt, Human
ucagugcaguugugugcu

SEQ ID NO: 1137548 - RNA, 21 nt, Human
ucccucuacagccugaagcaa

SEQ ID NO: 1137549 - RNA, 21 nt, Human
uccugccacauuauccaaaag

SEQ ID NO: 1137550 - RNA, 24 nt, Human
ucgcaacgcccuuccuaggccaug

SEQ ID NO: 1137551 - RNA, 19 nt, Human
ucuacagccugaagcaagc

SEQ ID NO: 1137552 - RNA, 23 nt, Human
ucuacagccugaagcaagcuggc

SEQ ID NO: 1137553 - RNA, 23 nt, Human
ucuccauaugcagccaccucccu

SEQ ID NO: 1137554 - RNA, 18 nt, Human
ucuccuuccacuccccga

SEQ ID NO: 1137555 - RNA, 19 nt, Human
ucugcacacaacaugcaga

SEQ ID NO: 1137556 - RNA, 21 nt, Human
ucuggaaaaugugacuagaaa

SEQ ID NO: 1137557 - RNA, 22 nt, Human
ucuguucauucuccuuuagauc

SEQ ID NO: 1137558 - RNA, 23 nt, Human
ucuucaucucccuacccccagag

SEQ ID NO: 1137559 - RNA, 28 nt, Human
ucuuguuuucaaacgccugcuggguggc

SEQ ID NO: 1137560 - RNA, 24 nt, Human
ugagaugaagacaaccuggcagcu

SEQ ID NO: 1137561 - RNA, 19 nt, Human
ugcacacaacaugcagaug

SEQ ID NO: 1137562 - RNA, 19 nt, Human
ugccacauuauccaaaagu

SEQ ID NO: 1137563 - RNA, 20 nt, Human
ugccacauuauccaaaaguc

SEQ ID NO: 1137564 - RNA, 23 nt, Human
ugccuuuaauucucaucuugaug

SEQ ID NO: 1137565 - RNA, 20 nt, Human
ugcuggguggcacuuacggc

SEQ ID NO: 1137566 - RNA, 23 nt, Human
uggcucuucaucucccuaccccc

SEQ ID NO: 1137567 - RNA, 19 nt, Human
ugggaagcuguuaaaggcc

SEQ ID NO: 1137568 - RNA, 21 nt, Human
uguaaaacaaauuucacugaa

SEQ ID NO: 1137569 - RNA, 22 nt, Human
uguaagaaaaacugacuaguua

SEQ ID NO: 1137570 - RNA, 21 nt, Human
ugucagaggcuuagagggguc

SEQ ID NO: 1137571 - RNA, 19 nt, Human
ugucaguaaucucaacuua

SEQ ID NO: 1137572 - RNA, 20 nt, Human
uuaaauggcaauguaaaaca

SEQ ID NO: 1137573 - RNA, 22 nt, Human
uucaagcagggaggcuacuggu

SEQ ID NO: 1137574 - RNA, 20 nt, Human
uucaugcccuguugcuucag

SEQ ID NO: 1137575 - RNA, 23 nt, Human
uucucacccccaccccacaucuc

SEQ ID NO: 1137576 - RNA, 19 nt, Human
uugucaguaaucucaacuu

SEQ ID NO: 1137577 - RNA, 19 nt, Human
uuugcuggagacuagccca

SEQ ID NO: 1137578 - RNA, 24 nt, Human
uuuucuguacauccucauagagaa

SEQ ID NO: 1137579 - RNA, 19 nt, Human
aaaacauuucacaguaguc

SEQ ID NO: 1137580 - RNA, 22 nt, Human
aaauggcguucuccauaagagc

SEQ ID NO: 1137581 - RNA, 21 nt, Human
aagagcucucuggaaacaggc

SEQ ID NO: 1137582 - RNA, 19 nt, Human
aaggagggaacuaauagca

SEQ ID NO: 1137583 - RNA, 21 nt, Human
acaaaaaaaauugagcaaaaa

SEQ ID NO: 1137584 - RNA, 21 nt, Human
agagagccagacuccugaauu

SEQ ID NO: 1137585 - RNA, 22 nt, Human
agcaaaaaauuuagaaaaaggu

SEQ ID NO: 1137586 - RNA, 23 nt, Human
agcaguggccauuguaggaaugu

SEQ ID NO: 1137587 - RNA, 26 nt, Human
agccagacuccugaauugguccgggg

SEQ ID NO: 1137588 - RNA, 23 nt, Human
agcugaagaguuuaauuaugcaa

SEQ ID NO: 1137589 - RNA, 19 nt, Human
auaaaucacaccuggauaa

SEQ ID NO: 1137590 - RNA, 22 nt, Human
auuguaggaauguaucaggauu

SEQ ID NO: 1137591 - RNA, 23 nt, Human
caacugacaaaaaaaauugagca

SEQ ID NO: 1137592 - RNA, 20 nt, Human
cacaccuggauaagcaccuc

SEQ ID NO: 1137593 - RNA, 19 nt, Human
cagguuacaacaagucaaa

SEQ ID NO: 1137594 - RNA, 23 nt, Human
cagguuacagacugauaaacuga

SEQ ID NO: 1137595 - RNA, 22 nt, Human
cccuauugacccgcuuuccuua

SEQ ID NO: 1137596 - RNA, 21 nt, Human
gaaagcugagcaguggccauu

SEQ ID NO: 1137597 - RNA, 22 nt, Human
gaagugcuucuugggaaauauu

SEQ ID NO: 1137598 - RNA, 22 nt, Human
gccagaguugaggcagggcaca

SEQ ID NO: 1137599 - RNA, 19 nt, Human
gggccagaguugaggcagg

SEQ ID NO: 1137600 - RNA, 23 nt, Human
uaacagaacagggccuggggcca

SEQ ID NO: 1137601 - RNA, 18 nt, Human
uaacaggaauguacuuuc

SEQ ID NO: 1137602 - RNA, 22 nt, Human
uaagaagagagccagacuccug

SEQ ID NO: 1137603 - RNA, 24 nt, Human
uaagagcucucuggaaacaggccc

SEQ ID NO: 1137604 - RNA, 20 nt, Human
uauccaaauucuuccagaau

SEQ ID NO: 1137605 - RNA, 18 nt, Human
ucaccauuuucaaugacu

SEQ ID NO: 1137606 - RNA, 20 nt, Human
uccaaaauagcugcuguggu

SEQ ID NO: 1137607 - RNA, 20 nt, Human
ucuuccagaauaaggaggga

SEQ ID NO: 1137608 - RNA, 21 nt, Human
ucuucucggaggauuuuuaaa

SEQ ID NO: 1137609 - RNA, 20 nt, Human
ugacucaugcucauuaguga

SEQ ID NO: 1137610 - RNA, 18 nt, Human
ugagaaagcugagcagug

SEQ ID NO: 1137611 - RNA, 19 nt, Human
ugagaacaacagcuucuuu

SEQ ID NO: 1137612 - RNA, 20 nt, Human
ugcaaaaaaauccuucuuuc

SEQ ID NO: 1137613 - RNA, 23 nt, Human
uggaaguagcaaaaaguuucuuc

SEQ ID NO: 1137614 - RNA, 19 nt, Human
uggcaaaguggacucgcgu

SEQ ID NO: 1137615 - RNA, 23 nt, Human
uggggccagaguugaggcagggc

SEQ ID NO: 1137616 - RNA, 21 nt, Human
uguaucaggauuauuucaaca

SEQ ID NO: 1137617 - RNA, 20 nt, Human
ugugaugcagugagaaagcu

SEQ ID NO: 1137618 - RNA, 19 nt, Human
uuuccaaaauagcugcugu

SEQ ID NO: 1137619 - RNA, 21 nt, Human
aaaagagaaacaaauccggua

SEQ ID NO: 1137620 - RNA, 25 nt, Human
aaacaacccaaauguccuuuaacag

SEQ ID NO: 1137621 - RNA, 18 nt, Human
aaaugacagcccugaucc

SEQ ID NO: 1137622 - RNA, 19 nt, Human
aacauggugaaacgccauc

SEQ ID NO: 1137623 - RNA, 20 nt, Human
aacauggugaaacgccaucu

SEQ ID NO: 1137624 - RNA, 21 nt, Human
aacauggugaaacgccaucuc

SEQ ID NO: 1137625 - RNA, 18 nt, Human
aagaaaaagccacuggug

SEQ ID NO: 1137626 - RNA, 24 nt, Human
aagcggccagggucccaguggggc

SEQ ID NO: 1137627 - RNA, 22 nt, Human
acaaaugacagcccugauccca

SEQ ID NO: 1137628 - RNA, 18 nt, Human
acaacccaaauguccuuu

SEQ ID NO: 1137629 - RNA, 19 nt, Human
acauggugaaacgccaucu

SEQ ID NO: 1137630 - RNA, 19 nt, Human
acucacugcagauuucagc

SEQ ID NO: 1137631 - RNA, 18 nt, Human
agaaggaaaaggcuuccg

SEQ ID NO: 1137632 - RNA, 24 nt, Human
agaaggaaaaggcuuccggucaaa

SEQ ID NO: 1137633 - RNA, 19 nt, Human
agaaggaaggcagaacaau

SEQ ID NO: 1137634 - RNA, 22 nt, Human
agacaaaucacaguggguucuc

SEQ ID NO: 1137635 - RNA, 26 nt, Human
agagaaacaaauccgguaguucugag

SEQ ID NO: 1137636 - RNA, 22 nt, Human
agagacaccaaggaaacucagg

SEQ ID NO: 1137637 - RNA, 24 nt, Human
agcacuuuggggggcugaggcagg

SEQ ID NO: 1137638 - RNA, 23 nt, Human
agccgggcacgguggcucaugcc

SEQ ID NO: 1137639 - RNA, 19 nt, Human
agccuggccaacaugguga

SEQ ID NO: 1137640 - RNA, 20 nt, Human
aggcaggaggcacggaggac

SEQ ID NO: 1137641 - RNA, 18 nt, Human
aggcagguggaucaccug

SEQ ID NO: 1137642 - RNA, 22 nt, Human
aggcagguggaucaccugaggu

SEQ ID NO: 1137643 - RNA, 26 nt, Human
aggcagguggaucaccugaggucagg

SEQ ID NO: 1137644 - RNA, 22 nt, Human
agguggaucaccugaggucagg

SEQ ID NO: 1137645 - RNA, 20 nt, Human
agguggggcucccagggaug

SEQ ID NO: 1137646 - RNA, 28 nt, Human
auaauacagccgggcacgguggcucaug

SEQ ID NO: 1137647 - RNA, 19 nt, Human
augccuguaaucccagcac

SEQ ID NO: 1137648 - RNA, 24 nt, Human
caacauggugaaacgccaucucua

SEQ ID NO: 1137649 - RNA, 21 nt, Human
cacagaacaagcauauacaga

SEQ ID NO: 1137650 - RNA, 22 nt, Human
caccaccuggaggaagugcccu

SEQ ID NO: 1137651 - RNA, 23 nt, Human
caccuggaggaagugcccuggga

SEQ ID NO: 1137652 - RNA, 20 nt, Human
cacgcucacacaugugcaua

SEQ ID NO: 1137653 - RNA, 21 nt, Human
cagaacguucuguuggugcca

SEQ ID NO: 1137654 - RNA, 24 nt, Human
cagcacuuuggggggcugaggcag

SEQ ID NO: 1137655 - RNA, 26 nt, Human
cagcacuuuggggggcugaggcaggu

SEQ ID NO: 1137656 - RNA, 22 nt, Human
caggcuagauguggaggauaaa

SEQ ID NO: 1137657 - RNA, 18 nt, Human
caguggguucucagucuu

SEQ ID NO: 1137658 - RNA, 20 nt, Human
caugccuguaaucccagcac

SEQ ID NO: 1137659 - RNA, 24 nt, Human
caugccuguaaucccagcacuuug

SEQ ID NO: 1137660 - RNA, 19 nt, Human
cccacugugugugcugggc

SEQ ID NO: 1137661 - RNA, 22 nt, Human
ccuccacagucaagaaggcaga

SEQ ID NO: 1137662 - RNA, 21 nt, Human
ccuggccaacauggugaaacg

SEQ ID NO: 1137663 - RNA, 24 nt, Human
ccuggccaacauggugaaacgcca

SEQ ID NO: 1137664 - RNA, 22 nt, Human
ccuguaaucccagcacuuuggg

SEQ ID NO: 1137665 - RNA, 19 nt, Human
ccuguagucccagcuacuc

SEQ ID NO: 1137666 - RNA, 21 nt, Human
ccuguagucccagcuacucag

SEQ ID NO: 1137667 - RNA, 24 nt, Human
cgaaaggugaaaacaacccaaaug

SEQ ID NO: 1137668 - RNA, 24 nt, Human
cgccuguagucccagcuacucagg

SEQ ID NO: 1137669 - RNA, 21 nt, Human
cggccagggucccaguggggc

SEQ ID NO: 1137670 - RNA, 22 nt, Human
cucacugcagauuucagcacuu

SEQ ID NO: 1137671 - RNA, 24 nt, Human
cucaugccuguaaucccagcacuu

SEQ ID NO: 1137672 - RNA, 19 nt, Human
gagaaggaaaaggcuuccg

SEQ ID NO: 1137673 - RNA, 23 nt, Human
gaucaccugaggucaggaguuca

SEQ ID NO: 1137674 - RNA, 24 nt, Human
gaucaccugaggucaggaguucaa

SEQ ID NO: 1137675 - RNA, 26 nt, Human
gcaaaaccucagagucuuugcccaac

SEQ ID NO: 1137676 - RNA, 24 nt, Human
gcaccgaaugucuuuuuauagcca

SEQ ID NO: 1137677 - RNA, 19 nt, Human
gccaacauggugaaacgcc

SEQ ID NO: 1137678 - RNA, 24 nt, Human
gccaacauggugaaacgccaucuc

SEQ ID NO: 1137679 - RNA, 20 nt, Human
gccagggccaggucacucug

SEQ ID NO: 1137680 - RNA, 21 nt, Human
ggacagggaggaaguugguca

SEQ ID NO: 1137681 - RNA, 22 nt, Human
ggaucaccugaggucaggaguu

SEQ ID NO: 1137682 - RNA, 21 nt, Human
ggcacggaggacagggaggaa

SEQ ID NO: 1137683 - RNA, 21 nt, Human
ggccagggucccaguggggcu

SEQ ID NO: 1137684 - RNA, 18 nt, Human
ggcgugguggcgggcgcc

SEQ ID NO: 1137685 - RNA, 22 nt, Human
ggcgugguggcgggcgccugua

SEQ ID NO: 1137686 - RNA, 21 nt, Human
ggcucaugccuguaaucccag

SEQ ID NO: 1137687 - RNA, 20 nt, Human
ggcugaggcagguggaucac

SEQ ID NO: 1137688 - RNA, 24 nt, Human
gggcacgguggcucaugccuguaa

SEQ ID NO: 1137689 - RNA, 18 nt, Human
gggccugcugguggccau

SEQ ID NO: 1137690 - RNA, 24 nt, Human
gggcugaggcagguggaucaccug

SEQ ID NO: 1137691 - RNA, 24 nt, Human
gguggcgggcgccuguagucccag

SEQ ID NO: 1137692 - RNA, 23 nt, Human
gguggcucaugccuguaauccca

SEQ ID NO: 1137693 - RNA, 24 nt, Human
gguggcucaugccuguaaucccag

SEQ ID NO: 1137694 - RNA, 21 nt, Human
gugcugggcgccuccacaguc

SEQ ID NO: 1137695 - RNA, 21 nt, Human
guggaucaccugaggucagga

SEQ ID NO: 1137696 - RNA, 28 nt, Human
uaaacgcacacgcucacacaugugcaua

SEQ ID NO: 1137697 - RNA, 22 nt, Human
uaaagggaaaucaaaaucugcu

SEQ ID NO: 1137698 - RNA, 20 nt, Human
uaaaucagagagaaggaaaa

SEQ ID NO: 1137699 - RNA, 18 nt, Human
uaacagauaauacagccg

SEQ ID NO: 1137700 - RNA, 22 nt, Human
uaaggcaagagaaucucuugaa

SEQ ID NO: 1137701 - RNA, 21 nt, Human
uacagaaggaaggcagaacaa

SEQ ID NO: 1137702 - RNA, 21 nt, Human
uacagaaggaaggcagaacaa

SEQ ID NO: 1137703 - RNA, 22 nt, Human
uagaggcaggaggcacggagga

SEQ ID NO: 1137704 - RNA, 20 nt, Human
uagauguggaggauaaauca

SEQ ID NO: 1137705 - RNA, 23 nt, Human
uauacagaaggaaggcagaacaa

SEQ ID NO: 1137706 - RNA, 21 nt, Human
ucaaaaucagccuggccaaca

SEQ ID NO: 1137707 - RNA, 19 nt, Human
ucaaaugaaucugcaccga

SEQ ID NO: 1137708 - RNA, 18 nt, Human
ucagccuggccaacaugg

SEQ ID NO: 1137709 - RNA, 23 nt, Human
ucagcgcuugcuccauccaaggg

SEQ ID NO: 1137710 - RNA, 22 nt, Human
ucaugccuguaaucccagcacu

SEQ ID NO: 1137711 - RNA, 22 nt, Human
uccaagggccugcugguggcca

SEQ ID NO: 1137712 - RNA, 23 nt, Human
uccaagggccugcugguggccau

SEQ ID NO: 1137713 - RNA, 22 nt, Human
uccacagucaagaaggcagagc

SEQ ID NO: 1137714 - RNA, 21 nt, Human
uccccgucuuauucucggaga

SEQ ID NO: 1137715 - RNA, 23 nt, Human
ucuacaaaugacagcccugaucc

SEQ ID NO: 1137716 - RNA, 18 nt, Human
ucucaacccaggccacag

SEQ ID NO: 1137717 - RNA, 21 nt, Human
ucucuacuaaaaauacaaaaa

SEQ ID NO: 1137718 - RNA, 25 nt, Human
ugaaaacaacccaaauguccuuuaa

SEQ ID NO: 1137719 - RNA, 20 nt, Human
ugaaacgccaucucuacuaa

SEQ ID NO: 1137720 - RNA, 20 nt, Human
ugaggcagguggaucaccug

SEQ ID NO: 1137721 - RNA, 24 nt, Human
ugaggcagguggaucaccugaggu

SEQ ID NO: 1137722 - RNA, 26 nt, Human
ugaggcagguggaucaccugagguca

SEQ ID NO: 1137723 - RNA, 28 nt, Human
ugaggggagagaaggccaucagcgcuug

SEQ ID NO: 1137724 - RNA, 21 nt, Human
ugcaaggguagcuuuccuccc

SEQ ID NO: 1137725 - RNA, 23 nt, Human
ugccuguaaucccagcacuuugg

SEQ ID NO: 1137726 - RNA, 23 nt, Human
ugccuguaaucccagcacuuugg

SEQ ID NO: 1137727 - RNA, 23 nt, Human
uggaagggucuggaaaacccacu

SEQ ID NO: 1137728 - RNA, 23 nt, Human
uggaagggucuggaaaacccacu

SEQ ID NO: 1137729 - RNA, 24 nt, Human
uggaucaccugaggucaggaguuc

SEQ ID NO: 1137730 - RNA, 27 nt, Human
uggaucaccugaggucaggaguucaaa

SEQ ID NO: 1137731 - RNA, 18 nt, Human
uggccaacauggugaaac

SEQ ID NO: 1137732 - RNA, 22 nt, Human
uggcucaugccuguaaucccag

SEQ ID NO: 1137733 - RNA, 24 nt, Human
uggcucaugccuguaaucccagca

SEQ ID NO: 1137734 - RNA, 18 nt, Human
uggggggcugaggcaggu

SEQ ID NO: 1137735 - RNA, 24 nt, Human
uggggggcugaggcagguggauca

SEQ ID NO: 1137736 - RNA, 24 nt, Human
ugguggcgggcgccuguaguccca

SEQ ID NO: 1137737 - RNA, 23 nt, Human
ugugugugcugggcacaggcuag

SEQ ID NO: 1137738 - RNA, 22 nt, Human
uuaaguacccacugugugugcu

SEQ ID NO: 1137739 - RNA, 18 nt, Human
uuagccgggcgugguggc

SEQ ID NO: 1137740 - RNA, 24 nt, Human
uuagccgggcgugguggcgggcgc

SEQ ID NO: 1137741 - RNA, 23 nt, Human
uucccggaaaauugacuaaaaaa

SEQ ID NO: 1137742 - RNA, 25 nt, Human
uuggggggcugaggcagguggauca

SEQ ID NO: 1137743 - RNA, 19 nt, Human
uuucucaacccaggccaca

SEQ ID NO: 1137744 - RNA, 18 nt, Human
uuuggggggcugaggcag

SEQ ID NO: 1137745 - RNA, 23 nt, Human
aaaaagccugggguuuuugcuga

SEQ ID NO: 1137746 - RNA, 18 nt, Human
agcaggucauagugggga

SEQ ID NO: 1137747 - RNA, 20 nt, Human
aggguguggggaccaugagg

SEQ ID NO: 1137748 - RNA, 24 nt, Human
aggguguggggaccaugagguuca

SEQ ID NO: 1137749 - RNA, 19 nt, Human
augcauaggcugugaccug

SEQ ID NO: 1137750 - RNA, 20 nt, Human
cacagcaggucauagugggg

SEQ ID NO: 1137751 - RNA, 22 nt, Human
cagcaggucauaguggggaugg

SEQ ID NO: 1137752 - RNA, 24 nt, Human
caggucauaguggggauggagugu

SEQ ID NO: 1137753 - RNA, 20 nt, Human
caucgggccaccacuaggac

SEQ ID NO: 1137754 - RNA, 19 nt, Human
uccugaggagugggccagc

SEQ ID NO: 1137755 - RNA, 18 nt, Human
ugaacagggucuggccag

SEQ ID NO: 1137756 - RNA, 19 nt, Human
ugaggagugggccagcugu

SEQ ID NO: 1137757 - RNA, 24 nt, Human
ugagguucaccuagaauuucucca

SEQ ID NO: 1137758 - RNA, 26 nt, Human
ugguugauagaaaaaagccugggguu

SEQ ID NO: 1137759 - RNA, 21 nt, Human
uguagaaucccuguuccugag

SEQ ID NO: 1137760 - RNA, 20 nt, Human
uuccugaggagugggccagc

SEQ ID NO: 1137761 - RNA, 21 nt, Human
aaaacucucuccuucaggcgg

SEQ ID NO: 1137762 - RNA, 22 nt, Human
aaaguuaaaagcuacagcaacu

SEQ ID NO: 1137763 - RNA, 20 nt, Human
aacaauaaagugcugugcac

SEQ ID NO: 1137764 - RNA, 28 nt, Human
aacaauaaagugcugugcacagaaagga

SEQ ID NO: 1137765 - RNA, 18 nt, Human
aacacuuugggaggcuga

SEQ ID NO: 1137766 - RNA, 20 nt, Human
aacacuuugggaggcugagg

SEQ ID NO: 1137767 - RNA, 21 nt, Human
aagaggaggugacagggcugg

SEQ ID NO: 1137768 - RNA, 21 nt, Human
aagccaaggccugugagagga

SEQ ID NO: 1137769 - RNA, 27 nt, Human
aaguacaaucuagaaaaccagaacugg

SEQ ID NO: 1137770 - RNA, 22 nt, Human
acagagcaggacaguuucaaaa

SEQ ID NO: 1137771 - RNA, 21 nt, Human
acagcaacucuuuuuugugcu

SEQ ID NO: 1137772 - RNA, 19 nt, Human
acauaguaaaaucucaucu

SEQ ID NO: 1137773 - RNA, 18 nt, Human
acugcacucuaggauggg

SEQ ID NO: 1137774 - RNA, 18 nt, Human
acugcacucuaggauggg

SEQ ID NO: 1137775 - RNA, 22 nt, Human
acugcacucuaggaugggugac

SEQ ID NO: 1137776 - RNA, 24 nt, Human
acugcacucuaggaugggugacag

SEQ ID NO: 1137777 - RNA, 20 nt, Human
agaaaggaauagccugugcc

SEQ ID NO: 1137778 - RNA, 20 nt, Human
agcgaagcacgaaggcugcg

SEQ ID NO: 1137779 - RNA, 20 nt, Human
aggaguuugagaccagucug

SEQ ID NO: 1137780 - RNA, 24 nt, Human
aggauugcuugaggccaggaguuu

SEQ ID NO: 1137781 - RNA, 19 nt, Human
aggccaggaguuugagacc

SEQ ID NO: 1137782 - RNA, 24 nt, Human
aggcgggcaugguggcaaacaucu

SEQ ID NO: 1137783 - RNA, 23 nt, Human
aggcgugaggauugcuugaggcc

SEQ ID NO: 1137784 - RNA, 21 nt, Human
aggcugaggcgugaggauugc

SEQ ID NO: 1137785 - RNA, 24 nt, Human
aggcugaggcgugaggauugcuug

SEQ ID NO: 1137786 - RNA, 23 nt, Human
agggcugcaggauuccaggccug

SEQ ID NO: 1137787 - RNA, 24 nt, Human
agguaagaggaucacuugagccug

SEQ ID NO: 1137788 - RNA, 24 nt, Human
agucugggcgacauaguaaaaucu

SEQ ID NO: 1137789 - RNA, 25 nt, Human
agucugggcgacauaguaaaaucuc

SEQ ID NO: 1137790 - RNA, 19 nt, Human
agugaagguggaagcagag

SEQ ID NO: 1137791 - RNA, 22 nt, Human
aguggucagcagucagcgaagc

SEQ ID NO: 1137792 - RNA, 20 nt, Human
aucacacuacugcacucuag

SEQ ID NO: 1137793 - RNA, 23 nt, Human
caacacuuugggaggcugaggcg

SEQ ID NO: 1137794 - RNA, 19 nt, Human
cacacaccaugugccaggc

SEQ ID NO: 1137795 - RNA, 25 nt, Human
cacagggcagaaaauuuaucuucac

SEQ ID NO: 1137796 - RNA, 23 nt, Human
caccgcaccccacuccauccagc

SEQ ID NO: 1137797 - RNA, 25 nt, Human
caccgcaccccacuccauccagccc

SEQ ID NO: 1137798 - RNA, 21 nt, Human
cacgcaggaggcuaagguaag

SEQ ID NO: 1137799 - RNA, 23 nt, Human
cacgccccugagcagccccaccc

SEQ ID NO: 1137800 - RNA, 22 nt, Human
cacuccauccagcccugcccau

SEQ ID NO: 1137801 - RNA, 25 nt, Human
caggaaguagccgcuuggggaagcc

SEQ ID NO: 1137802 - RNA, 24 nt, Human
caggaggcuaagguaagaggauca

SEQ ID NO: 1137803 - RNA, 18 nt, Human
caggauuccuggagcacu

SEQ ID NO: 1137804 - RNA, 18 nt, Human
cagggcugcagccgagag

SEQ ID NO: 1137805 - RNA, 21 nt, Human
caucuguagucccagccacgc

SEQ ID NO: 1137806 - RNA, 24 nt, Human
caucuguagucccagccacgcagg

SEQ ID NO: 1137807 - RNA, 22 nt, Human
caugaucccgcagccucaaucc

SEQ ID NO: 1137808 - RNA, 20 nt, Human
cauuggacagaugaggacac

SEQ ID NO: 1137809 - RNA, 23 nt, Human
cauuggacagaugaggacacucc

SEQ ID NO: 1137810 - RNA, 23 nt, Human
ccacuuauagugaagguggaagc

SEQ ID NO: 1137811 - RNA, 20 nt, Human
ccccaggauuccuggagcac

SEQ ID NO: 1137812 - RNA, 19 nt, Human
ccccguggcgaagcagggu

SEQ ID NO: 1137813 - RNA, 27 nt, Human
ccccugagcagccccacccuggcucaa

SEQ ID NO: 1137814 - RNA, 22 nt, Human
cccguggcgaagcagggucagc

SEQ ID NO: 1137815 - RNA, 19 nt, Human
cccuggagaaggggacuaa

SEQ ID NO: 1137816 - RNA, 20 nt, Human
ccgcaccccacuccauccag

SEQ ID NO: 1137817 - RNA, 24 nt, Human
ccgcagccucaauccccgcuggcc

SEQ ID NO: 1137818 - RNA, 19 nt, Human
ccugagcagccccacccug

SEQ ID NO: 1137819 - RNA, 21 nt, Human
ccugugccgggucuucagaga

SEQ ID NO: 1137820 - RNA, 20 nt, Human
cgaccugggaccagcagggu

SEQ ID NO: 1137821 - RNA, 19 nt, Human
cgcaccagggcugcagccg

SEQ ID NO: 1137822 - RNA, 19 nt, Human
cgccccugagcagccccac

SEQ ID NO: 1137823 - RNA, 20 nt, Human
cuaagcacacaccaugugcc

SEQ ID NO: 1137824 - RNA, 21 nt, Human
cuacugcacucuaggaugggu

SEQ ID NO: 1137825 - RNA, 23 nt, Human
cuaugccaagaaauuguugaauc

SEQ ID NO: 1137826 - RNA, 19 nt, Human
cucuacggcaacgggccgg

SEQ ID NO: 1137827 - RNA, 23 nt, Human
cugcagccgagagacagucucac

SEQ ID NO: 1137828 - RNA, 19 nt, Human
cuggagcacugccugaagg

SEQ ID NO: 1137829 - RNA, 18 nt, Human
cugggcgacauaguaaaa

SEQ ID NO: 1137830 - RNA, 21 nt, Human
cuguagucccagccacgcagg

SEQ ID NO: 1137831 - RNA, 23 nt, Human
cuucaccaucucacaauuaguuu

SEQ ID NO: 1137832 - RNA, 20 nt, Human
cuuucugcuaggcugugucc

SEQ ID NO: 1137833 - RNA, 20 nt, Human
cuuugguuuccauagcaaug

SEQ ID NO: 1137834 - RNA, 20 nt, Human
gacuaacaccaucuuuugcc

SEQ ID NO: 1137835 - RNA, 18 nt, Human
gagcagccccacccuggc

SEQ ID NO: 1137836 - RNA, 24 nt, Human
gagcaggacaguuucaaaaaaaga

SEQ ID NO: 1137837 - RNA, 21 nt, Human
gaucccgcagccucaaucccc

SEQ ID NO: 1137838 - RNA, 24 nt, Human
gauugcuugaggccaggaguuuga

SEQ ID NO: 1137839 - RNA, 24 nt, Human
gcacucuaggaugggugacagagc

SEQ ID NO: 1137840 - RNA, 24 nt, Human
gccauuauggggaugugugugccg

SEQ ID NO: 1137841 - RNA, 21 nt, Human
gccuguuuuucucaugugccc

SEQ ID NO: 1137842 - RNA, 18 nt, Human
gcucuggcucugggugug

SEQ ID NO: 1137843 - RNA, 22 nt, Human
ggauugcuugaggccaggaguu

SEQ ID NO: 1137844 - RNA, 23 nt, Human
ggauugcuugaggccaggaguuu

SEQ ID NO: 1137845 - RNA, 19 nt, Human
ggccaggaguuugagacca

SEQ ID NO: 1137846 - RNA, 24 nt, Human
ggccuugguccgaagcuccagccu

SEQ ID NO: 1137847 - RNA, 20 nt, Human
ggugcugcccucuuucuucu

SEQ ID NO: 1137848 - RNA, 23 nt, Human
guggcucaucaacacuuugggag

SEQ ID NO: 1137849 - RNA, 20 nt, Human
guguaagaucaacaauagau

SEQ ID NO: 1137850 - RNA, 18 nt, Human
uaaaaggcaucaucuguu

SEQ ID NO: 1137851 - RNA, 19 nt, Human
uaaaaggcaucaucuguuu

SEQ ID NO: 1137852 - RNA, 21 nt, Human
uaaaaggcaucaucuguuuuu

SEQ ID NO: 1137853 - RNA, 21 nt, Human
uaagcacacaccaugugccag

SEQ ID NO: 1137854 - RNA, 20 nt, Human
uacaaucuagaaaaccagaa

SEQ ID NO: 1137855 - RNA, 26 nt, Human
uaccucugacuccaaugcaggggcuc

SEQ ID NO: 1137856 - RNA, 23 nt, Human
uacugcacucuaggaugggugac

SEQ ID NO: 1137857 - RNA, 24 nt, Human
uacugcacucuaggaugggugaca

SEQ ID NO: 1137858 - RNA, 25 nt, Human
uacugcacucuaggaugggugacag

SEQ ID NO: 1137859 - RNA, 23 nt, Human
uacuuuguaacaauaaagugcug

SEQ ID NO: 1137860 - RNA, 23 nt, Human
ucacacuacugcacucuaggaug

SEQ ID NO: 1137861 - RNA, 20 nt, Human
ucacaugaagaggaggugac

SEQ ID NO: 1137862 - RNA, 25 nt, Human
ucacugcaguccccgugggggcccc

SEQ ID NO: 1137863 - RNA, 25 nt, Human
ucacugcaguccccguggggguccc

SEQ ID NO: 1137864 - RNA, 26 nt, Human
ucacugcaguccccguggggguccuc

SEQ ID NO: 1137865 - RNA, 19 nt, Human
ucacuugagccugagaggu

SEQ ID NO: 1137866 - RNA, 26 nt, Human
ucaucucuauaaaaaaagaaaaaaaa

SEQ ID NO: 1137867 - RNA, 19 nt, Human
uccccgcuggccuaacgcu

SEQ ID NO: 1137868 - RNA, 20 nt, Human
uccuucaggcgggugggcgg

SEQ ID NO: 1137869 - RNA, 22 nt, Human
ucucuauaaaaaaagaaaaaaa

SEQ ID NO: 1137870 - RNA, 20 nt, Human
ucugggcaccaucugccuca

SEQ ID NO: 1137871 - RNA, 24 nt, Human
ucugggcgacauaguaaaaucuca

SEQ ID NO: 1137872 - RNA, 20 nt, Human
ucugugagaaaagggcuguc

SEQ ID NO: 1137873 - RNA, 21 nt, Human
ugaaagaaugagguggaauug

SEQ ID NO: 1137874 - RNA, 24 nt, Human
ugaaagagucuaucauucaugaug

SEQ ID NO: 1137875 - RNA, 18 nt, Human
ugagcagccccacccugg

SEQ ID NO: 1137876 - RNA, 22 nt, Human
ugagccugagagguuguggcua

SEQ ID NO: 1137877 - RNA, 20 nt, Human
ugauguuaggccuguuuuuc

SEQ ID NO: 1137878 - RNA, 23 nt, Human
ugcacagaaaggagaaaugcccu

SEQ ID NO: 1137879 - RNA, 19 nt, Human
ugcaggauuccaggccugc

SEQ ID NO: 1137880 - RNA, 18 nt, Human
ugccgggucuucagagaa

SEQ ID NO: 1137881 - RNA, 20 nt, Human
ugcugcccucuuucuucugg

SEQ ID NO: 1137882 - RNA, 18 nt, Human
ugcuugaggccaggaguu

SEQ ID NO: 1137883 - RNA, 20 nt, Human
uggaagaguacuuuguaaca

SEQ ID NO: 1137884 - RNA, 18 nt, Human
uggaagcagagguggccu

SEQ ID NO: 1137885 - RNA, 20 nt, Human
uggaagcagagguggccugg

SEQ ID NO: 1137886 - RNA, 19 nt, Human
uggaaugcuuucuuuaaaa

SEQ ID NO: 1137887 - RNA, 21 nt, Human
uggaaugcuuucuuuaaaaac

SEQ ID NO: 1137888 - RNA, 21 nt, Human
uggagcacugccugaaggcca

SEQ ID NO: 1137889 - RNA, 22 nt, Human
ugggaggcugaggcgugaggau

SEQ ID NO: 1137890 - RNA, 24 nt, Human
ugggaggcugaggcgugaggauug

SEQ ID NO: 1137891 - RNA, 21 nt, Human
ugguccgaagcuccagccuuc

SEQ ID NO: 1137892 - RNA, 23 nt, Human
ugguggcaaacaucuguaguccc

SEQ ID NO: 1137893 - RNA, 24 nt, Human
ugguggcaaacaucuguaguccca

SEQ ID NO: 1137894 - RNA, 23 nt, Human
uguccauggaaaacucucuccuu

SEQ ID NO: 1137895 - RNA, 25 nt, Human
uguccauggaaaacucucuccuuca

SEQ ID NO: 1137896 - RNA, 24 nt, Human
uguuaggccuguuuuucucaugug

SEQ ID NO: 1137897 - RNA, 24 nt, Human
uuaaucuuaaaaaaaauggauuau

SEQ ID NO: 1137898 - RNA, 25 nt, Human
uuaaucuuaaaaaaaauggauuaua

SEQ ID NO: 1137899 - RNA, 22 nt, Human
uuccugggucaaucuguuuuug

SEQ ID NO: 1137900 - RNA, 21 nt, Human
uucuguaucaacaaaaguaga

SEQ ID NO: 1137901 - RNA, 21 nt, Human
uugcuugaggccaggaguuug

SEQ ID NO: 1137902 - RNA, 23 nt, Human
uugcuugaggccaggaguuugag

SEQ ID NO: 1137903 - RNA, 20 nt, Human
uugggaggcugaggcgugag

SEQ ID NO: 1137904 - RNA, 18 nt, Human
uugguuuccauagcaaug

SEQ ID NO: 1137905 - RNA, 18 nt, Human
uuucaaaaaaagacaaaa

SEQ ID NO: 1137906 - RNA, 24 nt, Human
uuucaaaaaaagacaaaaaaaaau

SEQ ID NO: 1137907 - RNA, 22 nt, Human
acccugcuccucugaggucagc

SEQ ID NO: 1137908 - RNA, 20 nt, Human
acgcucgaggcggaagcgac

SEQ ID NO: 1137909 - RNA, 19 nt, Human
agagacccuggccucuucu

SEQ ID NO: 1137910 - RNA, 21 nt, Human
agcuggugauuccucugccau

SEQ ID NO: 1137911 - RNA, 20 nt, Human
aggcggaagcgacaagacgc

SEQ ID NO: 1137912 - RNA, 20 nt, Human
auccugcucucucucuucau

SEQ ID NO: 1137913 - RNA, 20 nt, Human
augaacuguggagggcuucc

SEQ ID NO: 1137914 - RNA, 23 nt, Human
auuccuccucaucaccuccauug

SEQ ID NO: 1137915 - RNA, 18 nt, Human
cacacauguaaucgaaac

SEQ ID NO: 1137916 - RNA, 19 nt, Human
cagcagaagacugggaagc

SEQ ID NO: 1137917 - RNA, 25 nt, Human
cauccugcucucucucuucaucuca

SEQ ID NO: 1137918 - RNA, 22 nt, Human
ccauuggaagagucugguucag

SEQ ID NO: 1137919 - RNA, 21 nt, Human
cccagaucagcaauggccacc

SEQ ID NO: 1137920 - RNA, 23 nt, Human
ccccuuaacauccacagaaacag

SEQ ID NO: 1137921 - RNA, 20 nt, Human
ccuucccagacuacaucucu

SEQ ID NO: 1137922 - RNA, 21 nt, Human
cgcucgaggcggaagcgacaa

SEQ ID NO: 1137923 - RNA, 25 nt, Human
cuaacccagaucagcaauggccacc

SEQ ID NO: 1137924 - RNA, 21 nt, Human
cucaggcagcaugggguccac

SEQ ID NO: 1137925 - RNA, 24 nt, Human
cugguggguuuuggaccuucccag

SEQ ID NO: 1137926 - RNA, 21 nt, Human
gcagaagacugggaagcagag

SEQ ID NO: 1137927 - RNA, 21 nt, Human
gcagaagacugggaagcagag

SEQ ID NO: 1137928 - RNA, 20 nt, Human
ggaagacuguccaagucuug

SEQ ID NO: 1137929 - RNA, 24 nt, Human
gggaagcagaggugagggaugcag

SEQ ID NO: 1137930 - RNA, 22 nt, Human
gggguccacuuuuguccccaaa

SEQ ID NO: 1137931 - RNA, 25 nt, Human
ggguguguuucuggcaucucccuaa

SEQ ID NO: 1137932 - RNA, 24 nt, Human
uaacauccacagaaacagacugga

SEQ ID NO: 1137933 - RNA, 25 nt, Human
uaggagaggccuguuuggaguagua

SEQ ID NO: 1137934 - RNA, 18 nt, Human
uauuccuccucaucaccu

SEQ ID NO: 1137935 - RNA, 19 nt, Human
ucaaguuauuccuccucau

SEQ ID NO: 1137936 - RNA, 20 nt, Human
ucacacacauguaaucgaaa

SEQ ID NO: 1137937 - RNA, 25 nt, Human
ucaguuuuucccaacucucuuccca

SEQ ID NO: 1137938 - RNA, 18 nt, Human
uccacagaaacagacugg

SEQ ID NO: 1137939 - RNA, 21 nt, Human
uccgcaaucccgccacacgcu

SEQ ID NO: 1137940 - RNA, 23 nt, Human
uccuccucaucaccuccauuguu

SEQ ID NO: 1137941 - RNA, 22 nt, Human
uccucugccauccugcucucuc

SEQ ID NO: 1137942 - RNA, 18 nt, Human
ugagagacccuggccucu

SEQ ID NO: 1137943 - RNA, 21 nt, Human
uggaagacuguccaagucuug

SEQ ID NO: 1137944 - RNA, 19 nt, Human
uguggagggcuuccgcaau

SEQ ID NO: 1137945 - RNA, 22 nt, Human
uguggcuuuaaacugucuucaa

SEQ ID NO: 1137946 - RNA, 21 nt, Human
uuaaaauucacacacauguaa

SEQ ID NO: 1137947 - RNA, 21 nt, Human
uucaaguuauuccuccucauc

SEQ ID NO: 1137948 - RNA, 20 nt, Human
uucauucuuuguaucacugu

SEQ ID NO: 1137949 - RNA, 23 nt, Human
uuggaagagucugguucaguuuu

SEQ ID NO: 1137950 - RNA, 21 nt, Human
uuggaguaguacacugagaga

SEQ ID NO: 1137951 - RNA, 24 nt, Human
uuucccaacucucuucccacucgu

SEQ ID NO: 1137952 - RNA, 24 nt, Human
uuuucuuaguaaaauccagcaccu

SEQ ID NO: 1137953 - RNA, 24 nt, Human
aaaacagaacaagggaauuacaga

SEQ ID NO: 1137954 - RNA, 19 nt, Human
aaaaggaacugcaggggca

SEQ ID NO: 1137955 - RNA, 19 nt, Human
aaacagaaaaggaacugca

SEQ ID NO: 1137956 - RNA, 22 nt, Human
aaacagaaaaggaacugcaggg

SEQ ID NO: 1137957 - RNA, 25 nt, Human
aaagcaccaacugcauacucccccc

SEQ ID NO: 1137958 - RNA, 21 nt, Human
aaccagaccuccuguagcucu

SEQ ID NO: 1137959 - RNA, 23 nt, Human
aagaauucaaauccaauucagca

SEQ ID NO: 1137960 - RNA, 23 nt, Human
aagacacacaaucaacaaacaug

SEQ ID NO: 1137961 - RNA, 23 nt, Human
aagggaccuagcuagaggguagg

SEQ ID NO: 1137962 - RNA, 25 nt, Human
aagggaccuagcuagaggguagguc

SEQ ID NO: 1137963 - RNA, 22 nt, Human
aauuccagccuggagacggagc

SEQ ID NO: 1137964 - RNA, 22 nt, Human
acauaacaguggaaaucuuaga

SEQ ID NO: 1137965 - RNA, 25 nt, Human
accaacuccaccccagaaccagacc

SEQ ID NO: 1137966 - RNA, 22 nt, Human
acugcaucuauacuggcaacag

SEQ ID NO: 1137967 - RNA, 20 nt, Human
agacacacaaucaacaaaca

SEQ ID NO: 1137968 - RNA, 20 nt, Human
agacagguguggcugagcga

SEQ ID NO: 1137969 - RNA, 19 nt, Human
agagcuggcaaacagggcu

SEQ ID NO: 1137970 - RNA, 18 nt, Human
aggcaaaauugugacaaa

SEQ ID NO: 1137971 - RNA, 20 nt, Human
aggcagcuauuuuuacuggc

SEQ ID NO: 1137972 - RNA, 20 nt, Human
agugggaucuggaauggacc

SEQ ID NO: 1137973 - RNA, 22 nt, Human
augucaggcagcuauuuuuacu

SEQ ID NO: 1137974 - RNA, 21 nt, Human
caacuccaccccagaaccaga

SEQ ID NO: 1137975 - RNA, 22 nt, Human
caacugcauacuccccccaccc

SEQ ID NO: 1137976 - RNA, 21 nt, Human
cacaacaacuccucuccuaca

SEQ ID NO: 1137977 - RNA, 21 nt, Human
cacacugcacuagauggccag

SEQ ID NO: 1137978 - RNA, 20 nt, Human
caccaagaauucaaauccaa

SEQ ID NO: 1137979 - RNA, 20 nt, Human
caccccagaaccagaccucc

SEQ ID NO: 1137980 - RNA, 24 nt, Human
cagaaacaaaacagaacaagggaa

SEQ ID NO: 1137981 - RNA, 24 nt, Human
cagaaccagaccuccuguagcucu

SEQ ID NO: 1137982 - RNA, 28 nt, Human
cagguaaguaauuucaaguuugcagugg

SEQ ID NO: 1137983 - RNA, 23 nt, Human
caguggggcccccuucucaacuu

SEQ ID NO: 1137984 - RNA, 25 nt, Human
caguggggcccccuucucaacuuug

SEQ ID NO: 1137985 - RNA, 22 nt, Human
caugacaccaggggaaaagcuu

SEQ ID NO: 1137986 - RNA, 22 nt, Human
caugucccaucgugguuaggga

SEQ ID NO: 1137987 - RNA, 20 nt, Human
ccaacugcauacucccccca

SEQ ID NO: 1137988 - RNA, 21 nt, Human
ccaacugcauacuccccccac

SEQ ID NO: 1137989 - RNA, 22 nt, Human
ccaacugcauacuccccccacc

SEQ ID NO: 1137990 - RNA, 23 nt, Human
ccagcagccgauuaccauguccc

SEQ ID NO: 1137991 - RNA, 23 nt, Human
cccagaccagcccaaggagaugc

SEQ ID NO: 1137992 - RNA, 22 nt, Human
ccucacaacaacuccucuccua

SEQ ID NO: 1137993 - RNA, 23 nt, Human
ccuccuguagcucugggcaggug

SEQ ID NO: 1137994 - RNA, 21 nt, Human
ccuguacgcucccugcugcuc

SEQ ID NO: 1137995 - RNA, 18 nt, Human
cuauacuggcaacagagc

SEQ ID NO: 1137996 - RNA, 20 nt, Human
cuccaccccagaaccagacc

SEQ ID NO: 1137997 - RNA, 18 nt, Human
cuccucaggcuccgaaua

SEQ ID NO: 1137998 - RNA, 20 nt, Human
cucugggcagguggugugcc

SEQ ID NO: 1137999 - RNA, 19 nt, Human
cugcugcucuuggcucagu

SEQ ID NO: 1138000 - RNA, 24 nt, Human
cuguaccaacuccaccccagaacc

SEQ ID NO: 1138001 - RNA, 18 nt, Human
cugugcccacuguugucu

SEQ ID NO: 1138002 - RNA, 23 nt, Human
cuuacagaaacaaaacagaacaa

SEQ ID NO: 1138003 - RNA, 23 nt, Human
cuuagagucacaaacuaccaaac

SEQ ID NO: 1138004 - RNA, 19 nt, Human
gaacaagggaauuacagaa

SEQ ID NO: 1138005 - RNA, 23 nt, Human
gaauuccagccuggagacggagc

SEQ ID NO: 1138006 - RNA, 18 nt, Human
gacgggcagggcuggccu

SEQ ID NO: 1138007 - RNA, 20 nt, Human
gcaacagagcuggcaaacag

SEQ ID NO: 1138008 - RNA, 22 nt, Human
gcaaggaaggagccacggggga

SEQ ID NO: 1138009 - RNA, 20 nt, Human
gcaguggggcccccuucuca

SEQ ID NO: 1138010 - RNA, 18 nt, Human
gcauacuccccccacccc

SEQ ID NO: 1138011 - RNA, 19 nt, Human
gcucuguuucuuccagucc

SEQ ID NO: 1138012 - RNA, 20 nt, Human
ggaaggagccacgggggagg

SEQ ID NO: 1138013 - RNA, 19 nt, Human
ggaauuacagaaagcacca

SEQ ID NO: 1138014 - RNA, 22 nt, Human
ggacagggaaggagcccagcuc

SEQ ID NO: 1138015 - RNA, 21 nt, Human
ggcucagugggcaaggaagga

SEQ ID NO: 1138016 - RNA, 18 nt, Human
gggcaaggaaggagccac

SEQ ID NO: 1138017 - RNA, 22 nt, Human
gggcagguggugugccagcagc

SEQ ID NO: 1138018 - RNA, 21 nt, Human
gggcuggccucacaacaacuc

SEQ ID NO: 1138019 - RNA, 19 nt, Human
uaagaaguccuuuccauga

SEQ ID NO: 1138020 - RNA, 20 nt, Human
uaagacagguguggcugagc

SEQ ID NO: 1138021 - RNA, 21 nt, Human
uaaguucaguuguggcaagga

SEQ ID NO: 1138022 - RNA, 22 nt, Human
uaccaaaaauguacaaauuuca

SEQ ID NO: 1138023 - RNA, 24 nt, Human
uaccaaacagaaaaggaacugcag

SEQ ID NO: 1138024 - RNA, 26 nt, Human
uaccaauguuaccaaaaauguacaaa

SEQ ID NO: 1138025 - RNA, 18 nt, Human
uagcuuagaguaagguca

SEQ ID NO: 1138026 - RNA, 19 nt, Human
uagcuuuugcugcuugauu

SEQ ID NO: 1138027 - RNA, 19 nt, Human
ucaacaaacauggaaucug

SEQ ID NO: 1138028 - RNA, 20 nt, Human
ucacagcucuugaggagcgc

SEQ ID NO: 1138029 - RNA, 21 nt, Human
ucaggacagggaaggagccca

SEQ ID NO: 1138030 - RNA, 19 nt, Human
ucaggcagcuauuuuuacu

SEQ ID NO: 1138031 - RNA, 21 nt, Human
ucagugccgaaacugaauguu

SEQ ID NO: 1138032 - RNA, 20 nt, Human
uccagccuggagacggagcg

SEQ ID NO: 1138033 - RNA, 25 nt, Human
uccuucgagugccacaccuguaaca

SEQ ID NO: 1138034 - RNA, 22 nt, Human
ucugccauguuggugacacuau

SEQ ID NO: 1138035 - RNA, 23 nt, Human
ucuggccaauuauuuaaacuuug

SEQ ID NO: 1138036 - RNA, 19 nt, Human
ugacaccaggggaaaagcu

SEQ ID NO: 1138037 - RNA, 22 nt, Human
ugacacgaauccaggaaaggau

SEQ ID NO: 1138038 - RNA, 20 nt, Human
ugacacuauagcugugccca

SEQ ID NO: 1138039 - RNA, 19 nt, Human
ugccaaagacccuuucagg

SEQ ID NO: 1138040 - RNA, 22 nt, Human
ugccgaaacugaauguuaagac

SEQ ID NO: 1138041 - RNA, 23 nt, Human
ugccgaaacugaauguuaagaca

SEQ ID NO: 1138042 - RNA, 20 nt, Human
ugcucccguccuguacgcuc

SEQ ID NO: 1138043 - RNA, 22 nt, Human
uggcaaacagggcucuguugac

SEQ ID NO: 1138044 - RNA, 25 nt, Human
uggcaaacagggcucuguugacuca

SEQ ID NO: 1138045 - RNA, 22 nt, Human
uggcaacagagcuggcaaacag

SEQ ID NO: 1138046 - RNA, 18 nt, Human
uggcaaggagcccuuuuc

SEQ ID NO: 1138047 - RNA, 19 nt, Human
uggcugcaccgcggccuug

SEQ ID NO: 1138048 - RNA, 22 nt, Human
ugucaggacagggaaggagccc

SEQ ID NO: 1138049 - RNA, 22 nt, Human
ugucuucaccguaccucccuca

SEQ ID NO: 1138050 - RNA, 23 nt, Human
ugucuucaccguaccucccucag

SEQ ID NO: 1138051 - RNA, 23 nt, Human
uuaccaugucccaucgugguuag

SEQ ID NO: 1138052 - RNA, 24 nt, Human
uucaccguaccucccucagcuacu

SEQ ID NO: 1138053 - RNA, 20 nt, Human
uucaucaucaaaauagcuuu

SEQ ID NO: 1138054 - RNA, 23 nt, Human
uugggauucacagcauggguuuc

SEQ ID NO: 1138055 - RNA, 23 nt, Human
uuuaagaaguccuuuccaugaca

SEQ ID NO: 1138056 - RNA, 19 nt, Human
uuuucugacacgaauccag

SEQ ID NO: 1138057 - RNA, 23 nt, Human
aaaaaguccaagaggcacaagga

SEQ ID NO: 1138058 - RNA, 18 nt, Human
aaacacacaaaaaagucc

SEQ ID NO: 1138059 - RNA, 19 nt, Human
aaacacacaaaaaagucca

SEQ ID NO: 1138060 - RNA, 21 nt, Human
aagaggcacaaggacagaaug

SEQ ID NO: 1138061 - RNA, 22 nt, Human
acccugugaauauaguaaaaac

SEQ ID NO: 1138062 - RNA, 18 nt, Human
auaaagcuguuuaaaaaa

SEQ ID NO: 1138063 - RNA, 21 nt, Human
cuuugagggggaauaaagagg

SEQ ID NO: 1138064 - RNA, 18 nt, Human
gaauguagucggagcucc

SEQ ID NO: 1138065 - RNA, 19 nt, Human
ggugugggaguugggaaag

SEQ ID NO: 1138066 - RNA, 22 nt, Human
gugugggaguugggaaagacag

SEQ ID NO: 1138067 - RNA, 18 nt, Human
uaaaaacgcugaaucacu

SEQ ID NO: 1138068 - RNA, 23 nt, Human
uaaacacacaaaaaaguccaaga

SEQ ID NO: 1138069 - RNA, 23 nt, Human
uaguaaaaacgcugaaucacuua

SEQ ID NO: 1138070 - RNA, 24 nt, Human
uccaagaggcacaaggacagaagg

SEQ ID NO: 1138071 - RNA, 22 nt, Human
ucuacggccagcuaccgacuga

SEQ ID NO: 1138072 - RNA, 18 nt, Human
ugggaaagacagaggagu

SEQ ID NO: 1138073 - RNA, 19 nt, Human
ugggaaagacagaggagug

SEQ ID NO: 1138074 - RNA, 18 nt, Human
uugagggggaauaaagag

SEQ ID NO: 1138075 - RNA, 24 nt, Human
aaagugcugagguuacaggcauga

SEQ ID NO: 1138076 - RNA, 26 nt, Human
aagugcugagguuacaggcaugagcc

SEQ ID NO: 1138077 - RNA, 26 nt, Human
acagagcuucagagaggagggaacgc

SEQ ID NO: 1138078 - RNA, 22 nt, Human
acaggagcuuucucugccccau

SEQ ID NO: 1138079 - RNA, 24 nt, Human
accauguuggccaggauggucuug

SEQ ID NO: 1138080 - RNA, 18 nt, Human
acuccuggccgggcgcgg

SEQ ID NO: 1138081 - RNA, 19 nt, Human
acugcagcacacccguagc

SEQ ID NO: 1138082 - RNA, 21 nt, Human
agaggagcugggcaggucccg

SEQ ID NO: 1138083 - RNA, 21 nt, Human
agauauccuuuggaugcugag

SEQ ID NO: 1138084 - RNA, 20 nt, Human
agcgauucuccugcuucagc

SEQ ID NO: 1138085 - RNA, 24 nt, Human
agcgauucuccugcuucagccucc

SEQ ID NO: 1138086 - RNA, 22 nt, Human
aggaauaugggagaauuuaggc

SEQ ID NO: 1138087 - RNA, 23 nt, Human
aggaccucaugguuacacccugc

SEQ ID NO: 1138088 - RNA, 26 nt, Human
aggaguggguucguagcugcguugga

SEQ ID NO: 1138089 - RNA, 24 nt, Human
agguuacaggcaugagccgcugcg

SEQ ID NO: 1138090 - RNA, 18 nt, Human
aguagcugggacuacagg

SEQ ID NO: 1138091 - RNA, 19 nt, Human
aguccgacaugaagcuuca

SEQ ID NO: 1138092 - RNA, 20 nt, Human
agugccguggugcgaucucg

SEQ ID NO: 1138093 - RNA, 18 nt, Human
augagguuucaccauguu

SEQ ID NO: 1138094 - RNA, 23 nt, Human
augguuauaaaaaucaggaugcc

SEQ ID NO: 1138095 - RNA, 24 nt, Human
auuuuuguauuuuuaguagagaug

SEQ ID NO: 1138096 - RNA, 24 nt, Human
caaagugcugagguuacaggcaug

SEQ ID NO: 1138097 - RNA, 22 nt, Human
cacauagaacaaagauuugauu

SEQ ID NO: 1138098 - RNA, 24 nt, Human
caccaugcccagcuaauuuuugua

SEQ ID NO: 1138099 - RNA, 18 nt, Human
caccauguuggccaggau

SEQ ID NO: 1138100 - RNA, 22 nt, Human
caccauguuggccaggaugguc

SEQ ID NO: 1138101 - RNA, 24 nt, Human
caccauguuggccaggauggucuu

SEQ ID NO: 1138102 - RNA, 24 nt, Human
caccucagccucccaaagugcuga

SEQ ID NO: 1138103 - RNA, 21 nt, Human
cacugcgaccucugccuccug

SEQ ID NO: 1138104 - RNA, 23 nt, Human
cacugcgaccucugccuccuggg

SEQ ID NO: 1138105 - RNA, 24 nt, Human
cagagaggagcugggcaggucccg

SEQ ID NO: 1138106 - RNA, 21 nt, Human
cagagcccagcucagguuugc

SEQ ID NO: 1138107 - RNA, 19 nt, Human
cagagcuucagagaggagc

SEQ ID NO: 1138108 - RNA, 22 nt, Human
cagagcuucagagaggagcugg

SEQ ID NO: 1138109 - RNA, 20 nt, Human
cagccuccugaguagcuggg

SEQ ID NO: 1138110 - RNA, 26 nt, Human
cagcgauucuccugcuucagccuccu

SEQ ID NO: 1138111 - RNA, 19 nt, Human
caggugcccgccaccaugc

SEQ ID NO: 1138112 - RNA, 21 nt, Human
cagugcuccuuuggguagucu

SEQ ID NO: 1138113 - RNA, 21 nt, Human
caugcaguggcuuucccacag

SEQ ID NO: 1138114 - RNA, 20 nt, Human
ccaaaggacagaauauagga

SEQ ID NO: 1138115 - RNA, 23 nt, Human
ccaaagugcugagguuacaggca

SEQ ID NO: 1138116 - RNA, 24 nt, Human
ccaaagugcugagguuacaggcau

SEQ ID NO: 1138117 - RNA, 24 nt, Human
ccagcucagguuugcuggccaccg

SEQ ID NO: 1138118 - RNA, 25 nt, Human
ccagcucagguuugcuggccaccug

SEQ ID NO: 1138119 - RNA, 26 nt, Human
cccacagagcccagcucagcggaccc

SEQ ID NO: 1138120 - RNA, 21 nt, Human
cccguagcaguacuguuucuc

SEQ ID NO: 1138121 - RNA, 24 nt, Human
ccuccuggguuccagcgauucucc

SEQ ID NO: 1138122 - RNA, 23 nt, Human
ccucugccuccuggguuccagcg

SEQ ID NO: 1138123 - RNA, 21 nt, Human
ccucuuuuauuaacaggagcu

SEQ ID NO: 1138124 - RNA, 23 nt, Human
ccugaguagcugggacuacaggu

SEQ ID NO: 1138125 - RNA, 24 nt, Human
ccugaguagcugggacuacaggug

SEQ ID NO: 1138126 - RNA, 23 nt, Human
ccugauuuggagcuuggaaggag

SEQ ID NO: 1138127 - RNA, 25 nt, Human
ccuggccgggcgcgguggggaaauu

SEQ ID NO: 1138128 - RNA, 21 nt, Human
ccugugaccagaaauucggac

SEQ ID NO: 1138129 - RNA, 24 nt, Human
cucacugcgaccucugccuccugg

SEQ ID NO: 1138130 - RNA, 22 nt, Human
cucaugcaguggcuuucccaca

SEQ ID NO: 1138131 - RNA, 21 nt, Human
cucaugguuacacccugccuu

SEQ ID NO: 1138132 - RNA, 21 nt, Human
cuccuggguuccagcgauucu

SEQ ID NO: 1138133 - RNA, 23 nt, Human
cuccuggguuccagcgauucucc

SEQ ID NO: 1138134 - RNA, 22 nt, Human
cucuugaccucgugaucugccc

SEQ ID NO: 1138135 - RNA, 24 nt, Human
cugcgaccucugccuccuggguuc

SEQ ID NO: 1138136 - RNA, 23 nt, Human
cugcuucagccuccugaguagcu

SEQ ID NO: 1138137 - RNA, 21 nt, Human
cugggcaggucccggugcucu

SEQ ID NO: 1138138 - RNA, 25 nt, Human
cuuuaguccgacaugaagcuucauc

SEQ ID NO: 1138139 - RNA, 21 nt, Human
gaagucugacucuuccuuggu

SEQ ID NO: 1138140 - RNA, 22 nt, Human
gaccucgugaucugcccaccuc

SEQ ID NO: 1138141 - RNA, 24 nt, Human
gaccucgugaucugcccaccucag

SEQ ID NO: 1138142 - RNA, 24 nt, Human
gacuacaggugcccgccaccaugc

SEQ ID NO: 1138143 - RNA, 21 nt, Human
gagauggagucuugcucuguc

SEQ ID NO: 1138144 - RNA, 23 nt, Human
gaggugugucugaggccaaagga

SEQ ID NO: 1138145 - RNA, 18 nt, Human
gagguuucaccauguugg

SEQ ID NO: 1138146 - RNA, 22 nt, Human
gagguuucaccauguuggccag

SEQ ID NO: 1138147 - RNA, 20 nt, Human
gagucuugcucugucgccag

SEQ ID NO: 1138148 - RNA, 18 nt, Human
gcaguacuguuucucaug

SEQ ID NO: 1138149 - RNA, 20 nt, Human
gccauguggucauuguucac

SEQ ID NO: 1138150 - RNA, 22 nt, Human
gcccagcuaauuuuuguauuuu

SEQ ID NO: 1138151 - RNA, 24 nt, Human
gcgauucuccugcuucagccuccu

SEQ ID NO: 1138152 - RNA, 19 nt, Human
gcuucagagaggagcuggg

SEQ ID NO: 1138153 - RNA, 22 nt, Human
gguuacaggcaugagccgcugc

SEQ ID NO: 1138154 - RNA, 24 nt, Human
gguuucaccauguuggccaggaug

SEQ ID NO: 1138155 - RNA, 22 nt, Human
guagaagguguggaguggauaa

SEQ ID NO: 1138156 - RNA, 24 nt, Human
gucuugcucugucgccaggcugga

SEQ ID NO: 1138157 - RNA, 24 nt, Human
gugaucugcccaccucagccuccc

SEQ ID NO: 1138158 - RNA, 20 nt, Human
gugccguggugcgaucucga

SEQ ID NO: 1138159 - RNA, 18 nt, Human
guucacggggccacuagu

SEQ ID NO: 1138160 - RNA, 22 nt, Human
guuucacucacuaaaggagugg

SEQ ID NO: 1138161 - RNA, 23 nt, Human
uaaaaaucaggaugccuggccug

SEQ ID NO: 1138162 - RNA, 24 nt, Human
uaauuuuuguauuuuuaguagaga

SEQ ID NO: 1138163 - RNA, 22 nt, Human
uagagaugagguuucaccaugu

SEQ ID NO: 1138164 - RNA, 24 nt, Human
uagcugccugauuacagagcuuca

SEQ ID NO: 1138165 - RNA, 24 nt, Human
uaguagagaugagguuucaccaug

SEQ ID NO: 1138166 - RNA, 26 nt, Human
uaguagagaugagguuucaccauguu

SEQ ID NO: 1138167 - RNA, 19 nt, Human
ucacaucaaagugcauuca

SEQ ID NO: 1138168 - RNA, 24 nt, Human
ucaccauguuggccaggauggucu

SEQ ID NO: 1138169 - RNA, 24 nt, Human
ucacugcgaccucugccuccuggg

SEQ ID NO: 1138170 - RNA, 25 nt, Human
ucacugcgaccucugccuccugggu

SEQ ID NO: 1138171 - RNA, 18 nt, Human
ucagccucccaaagugcu

SEQ ID NO: 1138172 - RNA, 23 nt, Human
ucagccuccugaguagcugggac

SEQ ID NO: 1138173 - RNA, 24 nt, Human
ucccaaagugcugagguuacaggc

SEQ ID NO: 1138174 - RNA, 18 nt, Human
ucccggugcucugcugug

SEQ ID NO: 1138175 - RNA, 22 nt, Human
uccugaaacuugaggaccucau

SEQ ID NO: 1138176 - RNA, 24 nt, Human
uccugaguagcugggacuacaggu

SEQ ID NO: 1138177 - RNA, 21 nt, Human
uccuggguuccagcgauucuc

SEQ ID NO: 1138178 - RNA, 24 nt, Human
uccuggguuccagcgauucuccug

SEQ ID NO: 1138179 - RNA, 21 nt, Human
ucugcccaccucagccuccca

SEQ ID NO: 1138180 - RNA, 18 nt, Human
ucugccccauucccccca

SEQ ID NO: 1138181 - RNA, 18 nt, Human
ucugucgccaggcuggag

SEQ ID NO: 1138182 - RNA, 21 nt, Human
ucugucgccaggcuggagugc

SEQ ID NO: 1138183 - RNA, 21 nt, Human
ucuugcucugucgccaggcug

SEQ ID NO: 1138184 - RNA, 22 nt, Human
ucuugcucugucgccaggcugg

SEQ ID NO: 1138185 - RNA, 23 nt, Human
ucuugcucugucgccaggcugga

SEQ ID NO: 1138186 - RNA, 18 nt, Human
ugaccagaaauucggacu

SEQ ID NO: 1138187 - RNA, 21 nt, Human
ugaccagaaauucggacuccu

SEQ ID NO: 1138188 - RNA, 19 nt, Human
ugacuguagaaggugugga

SEQ ID NO: 1138189 - RNA, 24 nt, Human
ugaggugugucugaggccaaagga

SEQ ID NO: 1138190 - RNA, 20 nt, Human
ugagguuacaggcaugagcc

SEQ ID NO: 1138191 - RNA, 20 nt, Human
ugagguuacaggcaugagcc

SEQ ID NO: 1138192 - RNA, 22 nt, Human
ugagguuacaggcaugagccgc

SEQ ID NO: 1138193 - RNA, 24 nt, Human
ugagguuacaggcaugagccgcug

SEQ ID NO: 1138194 - RNA, 24 nt, Human
ugagguuacaggcaugagccgcug

SEQ ID NO: 1138195 - RNA, 24 nt, Human
ugagguuucaccauguuggccagg

SEQ ID NO: 1138196 - RNA, 24 nt, Human
ugaucugcccaccucagccuccca

SEQ ID NO: 1138197 - RNA, 23 nt, Human
ugauuuggagcuuggaaggaggu

SEQ ID NO: 1138198 - RNA, 19 nt, Human
ugccccauuccccccauuu

SEQ ID NO: 1138199 - RNA, 21 nt, Human
ugccccauuccccccauuuau

SEQ ID NO: 1138200 - RNA, 18 nt, Human
ugccguggugcgaucucg

SEQ ID NO: 1138201 - RNA, 28 nt, Human
ugccuccuggguuccagcgauucuccuu

SEQ ID NO: 1138202 - RNA, 23 nt, Human
ugcucugucgccaggcuggagug

SEQ ID NO: 1138203 - RNA, 24 nt, Human
ugcuucagccuccugaguagcugg

SEQ ID NO: 1138204 - RNA, 23 nt, Human
uggaagguguccuuccaacuuaa

SEQ ID NO: 1138205 - RNA, 18 nt, Human
uggagucuugcucugucg

SEQ ID NO: 1138206 - RNA, 19 nt, Human
uggagugccguggugcgau

SEQ ID NO: 1138207 - RNA, 24 nt, Human
uggccaggauggucuugaucucuu

SEQ ID NO: 1138208 - RNA, 19 nt, Human
uggccgggcgcggugggga

SEQ ID NO: 1138209 - RNA, 23 nt, Human
uggccgggcgcgguggggaaauu

SEQ ID NO: 1138210 - RNA, 22 nt, Human
uggccugauuuggagcuuggaa

SEQ ID NO: 1138211 - RNA, 21 nt, Human
ugggacuacaggugcccgcca

SEQ ID NO: 1138212 - RNA, 22 nt, Human
ugggacuacaggugcccgccac

SEQ ID NO: 1138213 - RNA, 24 nt, Human
ugggacuacaggugcccgccacca

SEQ ID NO: 1138214 - RNA, 25 nt, Human
ugggacuacaggugcccgccaccau

SEQ ID NO: 1138215 - RNA, 22 nt, Human
uggguccugugaccagaaauuc

SEQ ID NO: 1138216 - RNA, 19 nt, Human
uggguuccagcgauucucc

SEQ ID NO: 1138217 - RNA, 20 nt, Human
uggguuccagcgauucuccu

SEQ ID NO: 1138218 - RNA, 22 nt, Human
ugugaccagaaauucggacucc

SEQ ID NO: 1138219 - RNA, 18 nt, Human
uguugaagucugacucuu

SEQ ID NO: 1138220 - RNA, 18 nt, Human
uuaguagagaugagguuu

SEQ ID NO: 1138221 - RNA, 22 nt, Human
uuaguagagaugagguuucacc

SEQ ID NO: 1138222 - RNA, 24 nt, Human
uuaguagagaugagguuucaccau

SEQ ID NO: 1138223 - RNA, 24 nt, Human
uucagccuccugaguagcugggac

SEQ ID NO: 1138224 - RNA, 18 nt, Human
uuccagcgauucuccugc

SEQ ID NO: 1138225 - RNA, 19 nt, Human
uuucaccauguuggccagg

SEQ ID NO: 1138226 - RNA, 20 nt, Human
uuucaccauguuggccagga

SEQ ID NO: 1138227 - RNA, 18 nt, Human
uuucacucacuaaaggag

SEQ ID NO: 1138228 - RNA, 24 nt, Human
uuucacucacuaaaggaguggguu

SEQ ID NO: 1138229 - RNA, 24 nt, Human
uuuuuaguagagaugagguuucac

SEQ ID NO: 1138230 - RNA, 20 nt, Human
uuuuuguauuuuuaguagag

SEQ ID NO: 1138231 - RNA, 22 nt, Human
aaacaccacgaccccuucccca

SEQ ID NO: 1138232 - RNA, 19 nt, Human
aaacaccaucccuggaaau

SEQ ID NO: 1138233 - RNA, 21 nt, Human
aaagaacucagcuacuacagc

SEQ ID NO: 1138234 - RNA, 24 nt, Human
aaagaucuaacuacuccgaccuuc

SEQ ID NO: 1138235 - RNA, 19 nt, Human
aaagcaaguaugaaggaag

SEQ ID NO: 1138236 - RNA, 23 nt, Human
aaauacaagaaaaugacuaagcu

SEQ ID NO: 1138237 - RNA, 22 nt, Human
aacagagaaucaaguuucacug

SEQ ID NO: 1138238 - RNA, 24 nt, Human
aacucauucuccuauucuccccug

SEQ ID NO: 1138239 - RNA, 22 nt, Human
aacuguaacuggcuacaguuuc

SEQ ID NO: 1138240 - RNA, 22 nt, Human
aagaacucagcuacuacagcca

SEQ ID NO: 1138241 - RNA, 24 nt, Human
aagcagcggagaacuggcugaacu

SEQ ID NO: 1138242 - RNA, 29 nt, Human
aaggaaguacauaggaaaaggaaagggaa

SEQ ID NO: 1138243 - RNA, 18 nt, Human
aaggaugauggugauagu

SEQ ID NO: 1138244 - RNA, 19 nt, Human
aauaauaggaguaacccaa

SEQ ID NO: 1138245 - RNA, 23 nt, Human
aauacagccaaaaugagcugcca

SEQ ID NO: 1138246 - RNA, 19 nt, Human
aaucacaauggcugaucug

SEQ ID NO: 1138247 - RNA, 21 nt, Human
acaagcagugcugcuucgagc

SEQ ID NO: 1138248 - RNA, 25 nt, Human
acagaaaaauacaagaaaaugacua

SEQ ID NO: 1138249 - RNA, 20 nt, Human
accauggcugaauugaucua

SEQ ID NO: 1138250 - RNA, 23 nt, Human
acccaaugaauacuguauggucu

SEQ ID NO: 1138251 - RNA, 20 nt, Human
accguacggagucucaaagu

SEQ ID NO: 1138252 - RNA, 20 nt, Human
acgaccccuuccccaccccc

SEQ ID NO: 1138253 - RNA, 19 nt, Human
acuucaggaacccccucca

SEQ ID NO: 1138254 - RNA, 19 nt, Human
agaaaaaccaaaccaaaaa

SEQ ID NO: 1138255 - RNA, 22 nt, Human
agaaaaaccaaaccaaaaacau

SEQ ID NO: 1138256 - RNA, 20 nt, Human
agaaaggugccagggacucu

SEQ ID NO: 1138257 - RNA, 22 nt, Human
agagcaguuuagccccugagga

SEQ ID NO: 1138258 - RNA, 18 nt, Human
aggaaaaaagaagagaaa

SEQ ID NO: 1138259 - RNA, 22 nt, Human
aggaaagggagggaagaggcuu

SEQ ID NO: 1138260 - RNA, 23 nt, Human
aguacauaggaaaaggaaaggga

SEQ ID NO: 1138261 - RNA, 22 nt, Human
aguccccagaaaaaccaaacca

SEQ ID NO: 1138262 - RNA, 18 nt, Human
auaauucuaagcuaagag

SEQ ID NO: 1138263 - RNA, 20 nt, Human
aucuaccguuuuccugagua

SEQ ID NO: 1138264 - RNA, 24 nt, Human
auggaaaagaacucagcuacuaca

SEQ ID NO: 1138265 - RNA, 21 nt, Human
caaaaaaauaaggaauaaaag

SEQ ID NO: 1138266 - RNA, 25 nt, Human
caaaaaaauaaggaauaaaagcuaa

SEQ ID NO: 1138267 - RNA, 18 nt, Human
caaaaugagcugccaaaa

SEQ ID NO: 1138268 - RNA, 18 nt, Human
caaagaaaggugccaggg

SEQ ID NO: 1138269 - RNA, 19 nt, Human
caaagaaaggugccaggga

SEQ ID NO: 1138270 - RNA, 23 nt, Human
caaccagcacuaccauggcugaa

SEQ ID NO: 1138271 - RNA, 19 nt, Human
caagaaaaugacuaagcug

SEQ ID NO: 1138272 - RNA, 30 nt, Human
caagagcaugacaaaauaaaaacacacaaa

SEQ ID NO: 1138273 - RNA, 27 nt, Human
caagagccccaauucucaguguugacc

SEQ ID NO: 1138274 - RNA, 22 nt, Human
caagcacacacacaaauacugu

SEQ ID NO: 1138275 - RNA, 23 nt, Human
caagcacacacacaaauacugug

SEQ ID NO: 1138276 - RNA, 25 nt, Human
cacaaauacugugaacagaaaaaua

SEQ ID NO: 1138277 - RNA, 19 nt, Human
cacaauuccagcuacuuga

SEQ ID NO: 1138278 - RNA, 22 nt, Human
caccggcauguacacaaguacc

SEQ ID NO: 1138279 - RNA, 19 nt, Human
cacgaccccuuccccaccc

SEQ ID NO: 1138280 - RNA, 22 nt, Human
cacgaccccuuccccacccccc

SEQ ID NO: 1138281 - RNA, 23 nt, Human
cacgaccccuuccccacccccca

SEQ ID NO: 1138282 - RNA, 20 nt, Human
cacuaaaccagagggcacac

SEQ ID NO: 1138283 - RNA, 19 nt, Human
cacugaaaaccaaagaccc

SEQ ID NO: 1138284 - RNA, 19 nt, Human
cacuggaaagcacagagcu

SEQ ID NO: 1138285 - RNA, 23 nt, Human
cagacuccucugacucucuuuuu

SEQ ID NO: 1138286 - RNA, 22 nt, Human
cagccagcauccucuaacaaac

SEQ ID NO: 1138287 - RNA, 33 nt, Human
cagccugucagggacaaguacacuccaccgggg

SEQ ID NO: 1138288 - RNA, 24 nt, Human
caggaugguagugauuaacccacu

SEQ ID NO: 1138289 - RNA, 26 nt, Human
cagguaacuuaugcuuuuaaaacacc

SEQ ID NO: 1138290 - RNA, 26 nt, Human
caguccccagaaaaaccaaaccaaaa

SEQ ID NO: 1138291 - RNA, 18 nt, Human
caucaguaaguuuucugg

SEQ ID NO: 1138292 - RNA, 20 nt, Human
ccacuuaucugcuagaucuc

SEQ ID NO: 1138293 - RNA, 20 nt, Human
ccagaaaaaccaaaccaaaa

SEQ ID NO: 1138294 - RNA, 23 nt, Human
ccagaaaaaccaaaccaaaaaca

SEQ ID NO: 1138295 - RNA, 19 nt, Human
cccaccccccaaagucccu

SEQ ID NO: 1138296 - RNA, 20 nt, Human
ccccagaaaaaccaaaccaa

SEQ ID NO: 1138297 - RNA, 22 nt, Human
ccccagaaaaaccaaaccaaaa

SEQ ID NO: 1138298 - RNA, 18 nt, Human
ccccccaaagucccuuuc

SEQ ID NO: 1138299 - RNA, 21 nt, Human
cccugccaaccagcacuacca

SEQ ID NO: 1138300 - RNA, 21 nt, Human
cccuguuugaugucucccuca

SEQ ID NO: 1138301 - RNA, 19 nt, Human
ccuagugcaucugauugag

SEQ ID NO: 1138302 - RNA, 22 nt, Human
ccucugcugguggccuccuaaa

SEQ ID NO: 1138303 - RNA, 24 nt, Human
ccuuaccucuuucuaggaaaaaag

SEQ ID NO: 1138304 - RNA, 21 nt, Human
ccuuagggaaaaaagaggauc

SEQ ID NO: 1138305 - RNA, 18 nt, Human
ccuucucuaccuuuccca

SEQ ID NO: 1138306 - RNA, 23 nt, Human
cgaccccuuccccaccccccaaa

SEQ ID NO: 1138307 - RNA, 22 nt, Human
cgcuagagguugcaagcagcgg

SEQ ID NO: 1138308 - RNA, 18 nt, Human
cggggagguugauacugu

SEQ ID NO: 1138309 - RNA, 21 nt, Human
cuagagguugcaagcagcgga

SEQ ID NO: 1138310 - RNA, 24 nt, Human
cuauaguaaagcugaaaaagaauc

SEQ ID NO: 1138311 - RNA, 21 nt, Human
cuaugggcagcucucugggcu

SEQ ID NO: 1138312 - RNA, 19 nt, Human
cucauucuccuauucuccc

SEQ ID NO: 1138313 - RNA, 23 nt, Human
cucuucucgcuuugcagcccuag

SEQ ID NO: 1138314 - RNA, 23 nt, Human
cuuaaagcacuuaucagucccca

SEQ ID NO: 1138315 - RNA, 23 nt, Human
cuucaggaacccccuccaucccu

SEQ ID NO: 1138316 - RNA, 25 nt, Human
cuugcauauccuugggguugcuucc

SEQ ID NO: 1138317 - RNA, 19 nt, Human
gaacccccuccaucccugg

SEQ ID NO: 1138318 - RNA, 19 nt, Human
gaccccuuccccacccccc

SEQ ID NO: 1138319 - RNA, 19 nt, Human
gagaaucaaguuucacugu

SEQ ID NO: 1138320 - RNA, 21 nt, Human
gagccccaauucucaguguug

SEQ ID NO: 1138321 - RNA, 27 nt, Human
gaugacuucuauugucuagauuuccac

SEQ ID NO: 1138322 - RNA, 21 nt, Human
gaugcacucaaggugccucaa

SEQ ID NO: 1138323 - RNA, 21 nt, Human
gcaaagaaaggugccagggac

SEQ ID NO: 1138324 - RNA, 18 nt, Human
gccagacuccucugacuc

SEQ ID NO: 1138325 - RNA, 19 nt, Human
gcccagcuuccaagaguac

SEQ ID NO: 1138326 - RNA, 19 nt, Human
gccuaugggcagcucucug

SEQ ID NO: 1138327 - RNA, 18 nt, Human
gccuucucuaccuuuccc

SEQ ID NO: 1138328 - RNA, 20 nt, Human
ggaacccccuccaucccugg

SEQ ID NO: 1138329 - RNA, 24 nt, Human
ggaacccccuccaucccugggcuc

SEQ ID NO: 1138330 - RNA, 21 nt, Human
ggacauggagauaaagguguu

SEQ ID NO: 1138331 - RNA, 18 nt, Human
ggcaggggguggggagag

SEQ ID NO: 1138332 - RNA, 23 nt, Human
gggguugcuuccaucccuguuug

SEQ ID NO: 1138333 - RNA, 22 nt, Human
ggguauggacauugcuuaaagc

SEQ ID NO: 1138334 - RNA, 30 nt, Human
gguaacaaagggcaggggguggggagagaa

SEQ ID NO: 1138335 - RNA, 21 nt, Human
gguggggagagaaaagagaau

SEQ ID NO: 1138336 - RNA, 19 nt, Human
guaacauggaaaagaacuc

SEQ ID NO: 1138337 - RNA, 21 nt, Human
guggggagagaaaagagaauc

SEQ ID NO: 1138338 - RNA, 19 nt, Human
uaaaaagcagaacuccauu

SEQ ID NO: 1138339 - RNA, 20 nt, Human
uaaacaucuaagugcuuucc

SEQ ID NO: 1138340 - RNA, 22 nt, Human
uaaagcugaaaaagaaucaugc

SEQ ID NO: 1138341 - RNA, 20 nt, Human
uaaagguguucacuagaggc

SEQ ID NO: 1138342 - RNA, 24 nt, Human
uaaagguguucacuagaggccucc

SEQ ID NO: 1138343 - RNA, 30 nt, Human
uaacacaagaaaaacaauucauaucccuuu

SEQ ID NO: 1138344 - RNA, 18 nt, Human
uaacuacuccgaccuuca

SEQ ID NO: 1138345 - RNA, 23 nt, Human
uaagagggacauggagauaaagg

SEQ ID NO: 1138346 - RNA, 18 nt, Human
uaagcuaagagcaguuua

SEQ ID NO: 1138347 - RNA, 23 nt, Human
uacauaggaaaaggaaagggagg

SEQ ID NO: 1138348 - RNA, 24 nt, Human
uaccaugugcaaaggcugaggcag

SEQ ID NO: 1138349 - RNA, 18 nt, Human
uacuuggaaagggcccug

SEQ ID NO: 1138350 - RNA, 21 nt, Human
uagagguugcaagcagcggag

SEQ ID NO: 1138351 - RNA, 22 nt, Human
uauacacauggagaguaauaca

SEQ ID NO: 1138352 - RNA, 20 nt, Human
uauggauaaaaccauuuaga

SEQ ID NO: 1138353 - RNA, 22 nt, Human
ucaguaaagcaaguaugaagga

SEQ ID NO: 1138354 - RNA, 20 nt, Human
uccaagaguacagaaagucc

SEQ ID NO: 1138355 - RNA, 21 nt, Human
uccccaccccccaaagucccc

SEQ ID NO: 1138356 - RNA, 25 nt, Human
uccccaccccccaaagucccuuucc

SEQ ID NO: 1138357 - RNA, 18 nt, Human
uccccagaaaaaccaaac

SEQ ID NO: 1138358 - RNA, 24 nt, Human
uccccagaaaaaccaaaccaaaaa

SEQ ID NO: 1138359 - RNA, 27 nt, Human
uccccagaaaaaccaaaccaaaaacau

SEQ ID NO: 1138360 - RNA, 20 nt, Human
ucccugggcuccucacuccu

SEQ ID NO: 1138361 - RNA, 21 nt, Human
ucccuuagggaaaaaagagga

SEQ ID NO: 1138362 - RNA, 21 nt, Human
ucccuuagggaaaaaagagga

SEQ ID NO: 1138363 - RNA, 23 nt, Human
ucgcuuugcagcccuagcuuacg

SEQ ID NO: 1138364 - RNA, 19 nt, Human
ucgguaacauggaaaagaa

SEQ ID NO: 1138365 - RNA, 21 nt, Human
ucuaggaaaaaagaagagaaa

SEQ ID NO: 1138366 - RNA, 23 nt, Human
ucuauuacacucacuaaaccaga

SEQ ID NO: 1138367 - RNA, 22 nt, Human
ucuccuauucuccccugcuaug

SEQ ID NO: 1138368 - RNA, 20 nt, Human
ucucuuaaaaggucuguggg

SEQ ID NO: 1138369 - RNA, 21 nt, Human
ugaaaagcucagagacucagg

SEQ ID NO: 1138370 - RNA, 23 nt, Human
ugaaggaaguacauaggaaaagg

SEQ ID NO: 1138371 - RNA, 22 nt, Human
ugacaaaauaaaaacacacaaa

SEQ ID NO: 1138372 - RNA, 18 nt, Human
ugacaugaggaauucugg

SEQ ID NO: 1138373 - RNA, 21 nt, Human
ugagaaccagagucaggaaca

SEQ ID NO: 1138374 - RNA, 26 nt, Human
ugaggaaaagcugcuaucgaugacuu

SEQ ID NO: 1138375 - RNA, 18 nt, Human
ugaggcagugcuccuccu

SEQ ID NO: 1138376 - RNA, 26 nt, Human
ugcaaacagguaacuuaugcuuuuaa

SEQ ID NO: 1138377 - RNA, 25 nt, Human
ugcaagcagcggagaacuggcugaa

SEQ ID NO: 1138378 - RNA, 19 nt, Human
ugccagacuccucugacuc

SEQ ID NO: 1138379 - RNA, 18 nt, Human
ugccagagggaagggggu

SEQ ID NO: 1138380 - RNA, 19 nt, Human
ugccuuuggaggccucagc

SEQ ID NO: 1138381 - RNA, 18 nt, Human
uggaaaagaacucagcua

SEQ ID NO: 1138382 - RNA, 25 nt, Human
uggaaaagaacucagcuacuacagc

SEQ ID NO: 1138383 - RNA, 21 nt, Human
uggaaauugaacuaggugaca

SEQ ID NO: 1138384 - RNA, 21 nt, Human
uggcaaaaggcaaggacuggu

SEQ ID NO: 1138385 - RNA, 18 nt, Human
uggcugaauugaucuacc

SEQ ID NO: 1138386 - RNA, 21 nt, Human
uucacaagcagaauauaacac

SEQ ID NO: 1138387 - RNA, 23 nt, Human
uuccaaaaaaauauaguguuuua

SEQ ID NO: 1138388 - RNA, 23 nt, Human
uucuuucuuagaaaagggagcug

SEQ ID NO: 1138389 - RNA, 21 nt, Human
uugacacugaaaaccaaagac

SEQ ID NO: 1138390 - RNA, 18 nt, Human
uugaggaaucugauaacu

SEQ ID NO: 1138391 - RNA, 22 nt, Human
uugauaauaauaggaguaaccc

SEQ ID NO: 1138392 - RNA, 21 nt, Human
uugcaaagaaaggugccaggg

SEQ ID NO: 1138393 - RNA, 22 nt, Human
uugcaaagauuuggacugaaaa

SEQ ID NO: 1138394 - RNA, 24 nt, Human
aaagugcugggauuacaggcauga

SEQ ID NO: 1138395 - RNA, 25 nt, Human
aagaagaaaggggugucagccacag

SEQ ID NO: 1138396 - RNA, 19 nt, Human
aagggaggcggaggcagag

SEQ ID NO: 1138397 - RNA, 19 nt, Human
aagugcugggauuacaggc

SEQ ID NO: 1138398 - RNA, 21 nt, Human
aagugcugggauuacaggcau

SEQ ID NO: 1138399 - RNA, 26 nt, Human
aagugcugggauuacaggcaugagcc

SEQ ID NO: 1138400 - RNA, 19 nt, Human
acaucagccugcugaagcc

SEQ ID NO: 1138401 - RNA, 23 nt, Human
agaagaggagacuggggcuuaga

SEQ ID NO: 1138402 - RNA, 21 nt, Human
agaagggaggcggaggcagag

SEQ ID NO: 1138403 - RNA, 18 nt, Human
agacaggguuucuccaug

SEQ ID NO: 1138404 - RNA, 22 nt, Human
agacuccugucucccagcuccc

SEQ ID NO: 1138405 - RNA, 23 nt, Human
agaggcuguuugggcagccuugc

SEQ ID NO: 1138406 - RNA, 23 nt, Human
agcaggcccugugguggcaggag

SEQ ID NO: 1138407 - RNA, 23 nt, Human
agcccagggcaacugccaagcag

SEQ ID NO: 1138408 - RNA, 21 nt, Human
agccuugggcuccaaccaugu

SEQ ID NO: 1138409 - RNA, 24 nt, Human
agcgguucuccugccucagccucc

SEQ ID NO: 1138410 - RNA, 24 nt, Human
agcuggucucaaacucuugaccuc

SEQ ID NO: 1138411 - RNA, 21 nt, Human
aggaggauggagaagugccag

SEQ ID NO: 1138412 - RNA, 19 nt, Human
aggcagaggggcaggugcg

SEQ ID NO: 1138413 - RNA, 21 nt, Human
aggcaugagccaccgugcccg

SEQ ID NO: 1138414 - RNA, 23 nt, Human
aggcaugagccaccgugcccggc

SEQ ID NO: 1138415 - RNA, 19 nt, Human
aggcggaggcagagugggg

SEQ ID NO: 1138416 - RNA, 21 nt, Human
aggcggaggcagagugggggc

SEQ ID NO: 1138417 - RNA, 27 nt, Human
aggggcaggugcgacccuagcaggggu

SEQ ID NO: 1138418 - RNA, 21 nt, Human
agggguaagggugggcagagc

SEQ ID NO: 1138419 - RNA, 22 nt, Human
aggucuaucgcuaccaggugac

SEQ ID NO: 1138420 - RNA, 19 nt, Human
agguggcauagacuccugu

SEQ ID NO: 1138421 - RNA, 24 nt, Human
agguguuccguccgccucagccuc

SEQ ID NO: 1138422 - RNA, 21 nt, Human
aguaacugggauuacaggcau

SEQ ID NO: 1138423 - RNA, 23 nt, Human
aguaacugggauuacaggcaugu

SEQ ID NO: 1138424 - RNA, 21 nt, Human
aguccuuucuccuuucccccu

SEQ ID NO: 1138425 - RNA, 20 nt, Human
agugcaauggcgcgaucucg

SEQ ID NO: 1138426 - RNA, 24 nt, Human
agugcaauggcgcgaucucggcuc

SEQ ID NO: 1138427 - RNA, 20 nt, Human
aguggggaugauccaguggg

SEQ ID NO: 1138428 - RNA, 18 nt, Human
aucucacuucugcccuug

SEQ ID NO: 1138429 - RNA, 20 nt, Human
auggcaggaggauggagaag

SEQ ID NO: 1138430 - RNA, 19 nt, Human
augugccaccacacccagc

SEQ ID NO: 1138431 - RNA, 24 nt, Human
caaagugcugggauuacaggcaug

SEQ ID NO: 1138432 - RNA, 22 nt, Human
caagcgguucuccugccucagc

SEQ ID NO: 1138433 - RNA, 19 nt, Human
caagggcaagaaggaugcc

SEQ ID NO: 1138434 - RNA, 22 nt, Human
cacacccagcccuucugccucc

SEQ ID NO: 1138435 - RNA, 20 nt, Human
cacaggaccugugcagcgag

SEQ ID NO: 1138436 - RNA, 22 nt, Human
cacaugggcuuuggucgggggc

SEQ ID NO: 1138437 - RNA, 18 nt, Human
caccaugaaccccacaga

SEQ ID NO: 1138438 - RNA, 21 nt, Human
cacccagucaauucccaacag

SEQ ID NO: 1138439 - RNA, 18 nt, Human
caccccuacuuuacagaa

SEQ ID NO: 1138440 - RNA, 24 nt, Human
caccccuacuuuacagaagaggag

SEQ ID NO: 1138441 - RNA, 18 nt, Human
cagaagaggagacugggg

SEQ ID NO: 1138442 - RNA, 19 nt, Human
cagaagggaggcggaggca

SEQ ID NO: 1138443 - RNA, 21 nt, Human
cagacaggguuucuccauguu

SEQ ID NO: 1138444 - RNA, 23 nt, Human
cagcccuucugccucccaauucu

SEQ ID NO: 1138445 - RNA, 20 nt, Human
cagccuccugaguaacuggg

SEQ ID NO: 1138446 - RNA, 19 nt, Human
caggguuucuccauguugg

SEQ ID NO: 1138447 - RNA, 21 nt, Human
caggugggaauauccgggaag

SEQ ID NO: 1138448 - RNA, 20 nt, Human
caugugccaccacacccagc

SEQ ID NO: 1138449 - RNA, 23 nt, Human
ccaaagugcugggauuacaggca

SEQ ID NO: 1138450 - RNA, 24 nt, Human
ccaaagugcugggauuacaggcau

SEQ ID NO: 1138451 - RNA, 22 nt, Human
ccaauucucucuccuccguccc

SEQ ID NO: 1138452 - RNA, 27 nt, Human
ccacacccagcccuucugccucccccc

SEQ ID NO: 1138453 - RNA, 20 nt, Human
ccaccacacccagcuaauuu

SEQ ID NO: 1138454 - RNA, 25 nt, Human
ccaggcccacacccagcccuucugc

SEQ ID NO: 1138455 - RNA, 19 nt, Human
ccaucagcaacgcucugca

SEQ ID NO: 1138456 - RNA, 22 nt, Human
ccauguuggucaagcuggucuc

SEQ ID NO: 1138457 - RNA, 24 nt, Human
cccaaagugcugggauuacaggca

SEQ ID NO: 1138458 - RNA, 21 nt, Human
cccaauucucucuccuccguc

SEQ ID NO: 1138459 - RNA, 22 nt, Human
cccaucagcaacgcucugcaga

SEQ ID NO: 1138460 - RNA, 24 nt, Human
cccaucagcaacgcucugcagaaa

SEQ ID NO: 1138461 - RNA, 20 nt, Human
ccccuccucccggguucaag

SEQ ID NO: 1138462 - RNA, 19 nt, Human
ccccugaggacccaggccc

SEQ ID NO: 1138463 - RNA, 19 nt, Human
ccccugcaaagcagggccc

SEQ ID NO: 1138464 - RNA, 23 nt, Human
ccccugcaaagcagggcccaccu

SEQ ID NO: 1138465 - RNA, 23 nt, Human
cccggguucaagcgguucuccug

SEQ ID NO: 1138466 - RNA, 22 nt, Human
cccuugaccacggacaggcccc

SEQ ID NO: 1138467 - RNA, 20 nt, Human
ccgcaucacaggugugauca

SEQ ID NO: 1138468 - RNA, 24 nt, Human
ccgccucagccucccaaagugcug

SEQ ID NO: 1138469 - RNA, 19 nt, Human
ccgggaaggauauuccagg

SEQ ID NO: 1138470 - RNA, 19 nt, Human
ccucccauccucccagcaa

SEQ ID NO: 1138471 - RNA, 21 nt, Human
ccuccucccggguucaagcgg

SEQ ID NO: 1138472 - RNA, 20 nt, Human
ccugaccccaggagcagugg

SEQ ID NO: 1138473 - RNA, 19 nt, Human
ccugaguaacugggauuac

SEQ ID NO: 1138474 - RNA, 23 nt, Human
ccugaguaacugggauuacaggc

SEQ ID NO: 1138475 - RNA, 24 nt, Human
ccugaguaacugggauuacaggca

SEQ ID NO: 1138476 - RNA, 20 nt, Human
ccugcugaagccucccaucc

SEQ ID NO: 1138477 - RNA, 23 nt, Human
ccugcugaagccucccauccucc

SEQ ID NO: 1138478 - RNA, 20 nt, Human
ccugcuucaguccuuucucc

SEQ ID NO: 1138479 - RNA, 22 nt, Human
ccuggcuccugaccccaggagc

SEQ ID NO: 1138480 - RNA, 19 nt, Human
ccugucaggugaguccccc

SEQ ID NO: 1138481 - RNA, 21 nt, Human
ccuuucuccuuucccccuuuc

SEQ ID NO: 1138482 - RNA, 20 nt, Human
cgguucuccugccucagccu

SEQ ID NO: 1138483 - RNA, 23 nt, Human
cuccagugauggcaggaggaugg

SEQ ID NO: 1138484 - RNA, 21 nt, Human
cucccggguucaagcgguucu

SEQ ID NO: 1138485 - RNA, 22 nt, Human
cuccugccucagccuccugagu

SEQ ID NO: 1138486 - RNA, 20 nt, Human
cuccuggacucagagagccc

SEQ ID NO: 1138487 - RNA, 22 nt, Human
cucggaucccccuccucccggg

SEQ ID NO: 1138488 - RNA, 26 nt, Human
cucuugaccucagguguuccguccgc

SEQ ID NO: 1138489 - RNA, 22 nt, Human
cucuuguugcccaggcuggagu

SEQ ID NO: 1138490 - RNA, 24 nt, Human
cugagaucucacuucugcccuuga

SEQ ID NO: 1138491 - RNA, 23 nt, Human
cugaguaacugggauuacaggca

SEQ ID NO: 1138492 - RNA, 24 nt, Human
cugaguaacugggauuacaggcau

SEQ ID NO: 1138493 - RNA, 24 nt, Human
cugccccccugcaaagcagggccc

SEQ ID NO: 1138494 - RNA, 23 nt, Human
cugccucagccuccugaguaacu

SEQ ID NO: 1138495 - RNA, 19 nt, Human
cuggcuugggcucucucca

SEQ ID NO: 1138496 - RNA, 25 nt, Human
cuuccuccacugcugccuaaugcaa

SEQ ID NO: 1138497 - RNA, 24 nt, Human
cuuguugcccaggcuggagugcaa

SEQ ID NO: 1138498 - RNA, 18 nt, Human
gaaaggaugcugcccaca

SEQ ID NO: 1138499 - RNA, 21 nt, Human
gaaccccacagagaaagagcu

SEQ ID NO: 1138500 - RNA, 19 nt, Human
gaagccucccauccucccg

SEQ ID NO: 1138501 - RNA, 21 nt, Human
gaauaaagccuugggcuccaa

SEQ ID NO: 1138502 - RNA, 24 nt, Human
gaccucagguguuccguccgccuc

SEQ ID NO: 1138503 - RNA, 24 nt, Human
gaccuggcuccugaccccaggagc

SEQ ID NO: 1138504 - RNA, 19 nt, Human
gacugaacgugacucuggc

SEQ ID NO: 1138505 - RNA, 20 nt, Human
gagagagcaggcccuguggu

SEQ ID NO: 1138506 - RNA, 19 nt, Human
gagagcaggcccuguggug

SEQ ID NO: 1138507 - RNA, 19 nt, Human
gagccacagaucagaagag

SEQ ID NO: 1138508 - RNA, 22 nt, Human
gaguaacugggauuacaggcau

SEQ ID NO: 1138509 - RNA, 25 nt, Human
gaguaacugggauuacaggcaugug

SEQ ID NO: 1138510 - RNA, 24 nt, Human
gaucucacuucugcccuugaccac

SEQ ID NO: 1138511 - RNA, 18 nt, Human
gauuacaggcaugagcca

SEQ ID NO: 1138512 - RNA, 20 nt, Human
gauuacaggcaugagccacc

SEQ ID NO: 1138513 - RNA, 21 nt, Human
gauuacaggcaugagccaccg

SEQ ID NO: 1138514 - RNA, 18 nt, Human
gauuacaggcaugugcca

SEQ ID NO: 1138515 - RNA, 19 nt, Human
gcaggaggauggagaagug

SEQ ID NO: 1138516 - RNA, 21 nt, Human
gcaggcgaggggaaagcagag

SEQ ID NO: 1138517 - RNA, 26 nt, Human
gccacaguuccaggaggucccaggcu

SEQ ID NO: 1138518 - RNA, 19 nt, Human
gcccaggcuggagugcaau

SEQ ID NO: 1138519 - RNA, 23 nt, Human
gccucagccucccaaagugcugg

SEQ ID NO: 1138520 - RNA, 24 nt, Human
gcucuuguugcccaggcuggagug

SEQ ID NO: 1138521 - RNA, 21 nt, Human
ggagacuggggcuuagaaagg

SEQ ID NO: 1138522 - RNA, 19 nt, Human
ggaggaaacugaggcucag

SEQ ID NO: 1138523 - RNA, 25 nt, Human
ggaggccggggagggcuggcuuggg

SEQ ID NO: 1138524 - RNA, 24 nt, Human
ggauuacaggcaugagccaccgug

SEQ ID NO: 1138525 - RNA, 19 nt, Human
ggauuacaggcaugugcca

SEQ ID NO: 1138526 - RNA, 19 nt, Human
ggccacaggggugaaggac

SEQ ID NO: 1138527 - RNA, 23 nt, Human
gggaaagcagagcuuuaagacug

SEQ ID NO: 1138528 - RNA, 19 nt, Human
gggaugauccagugggaag

SEQ ID NO: 1138529 - RNA, 18 nt, Human
gggcaggugcgacccuag

SEQ ID NO: 1138530 - RNA, 20 nt, Human
gggcaugggagggagagagg

SEQ ID NO: 1138531 - RNA, 24 nt, Human
gggcuggucagcuggggccugggc

SEQ ID NO: 1138532 - RNA, 18 nt, Human
ggggcuggucagcugggg

SEQ ID NO: 1138533 - RNA, 18 nt, Human
gggggagagagcaggccc

SEQ ID NO: 1138534 - RNA, 20 nt, Human
guaacugggauuacaggcau

SEQ ID NO: 1138535 - RNA, 25 nt, Human
guccagugcgacacucccuuccuuu

SEQ ID NO: 1138536 - RNA, 18 nt, Human
gugauggccaccccuacu

SEQ ID NO: 1138537 - RNA, 23 nt, Human
gugggggagagagcaggcccugu

SEQ ID NO: 1138538 - RNA, 20 nt, Human
gugggggcguggggacacag

SEQ ID NO: 1138539 - RNA, 24 nt, Human
guguuccguccgccucagccuccc

SEQ ID NO: 1138540 - RNA, 19 nt, Human
guuaggcucaaacccaguu

SEQ ID NO: 1138541 - RNA, 20 nt, Human
guucuccugccucagccucc

SEQ ID NO: 1138542 - RNA, 23 nt, Human
uaauuuuguauuuuuaguacaga

SEQ ID NO: 1138543 - RNA, 25 nt, Human
uaauuuuguauuuuuaguacagaca

SEQ ID NO: 1138544 - RNA, 23 nt, Human
uacaggcaugagccaccgugccc

SEQ ID NO: 1138545 - RNA, 24 nt, Human
uacaggcaugugccaccacaccca

SEQ ID NO: 1138546 - RNA, 19 nt, Human
uagcaggcgaggggaaagc

SEQ ID NO: 1138547 - RNA, 18 nt, Human
uaggaggaaacugaggcu

SEQ ID NO: 1138548 - RNA, 19 nt, Human
uaggaggaaacugaggcuc

SEQ ID NO: 1138549 - RNA, 24 nt, Human
uaguacagacaggguuucuccaug

SEQ ID NO: 1138550 - RNA, 23 nt, Human
ucaagacguccccugaggaccca

SEQ ID NO: 1138551 - RNA, 18 nt, Human
ucagaggugguccaggug

SEQ ID NO: 1138552 - RNA, 22 nt, Human
ucaggucagagggaugugagga

SEQ ID NO: 1138553 - RNA, 20 nt, Human
ucaguggccgcugguuccug

SEQ ID NO: 1138554 - RNA, 24 nt, Human
ucaguggccgcugguuccuggcgg

SEQ ID NO: 1138555 - RNA, 23 nt, Human
uccagugggaaggggccggaggg

SEQ ID NO: 1138556 - RNA, 19 nt, Human
uccauguuggucaagcugg

SEQ ID NO: 1138557 - RNA, 24 nt, Human
ucccaaagugcugggauuacaggc

SEQ ID NO: 1138558 - RNA, 21 nt, Human
ucccacaggaccugugcagcg

SEQ ID NO: 1138559 - RNA, 22 nt, Human
uccccugaggacccaggcccac

SEQ ID NO: 1138560 - RNA, 19 nt, Human
ucccggguucaagcgguuc

SEQ ID NO: 1138561 - RNA, 21 nt, Human
ucccggguucaagcgguucuc

SEQ ID NO: 1138562 - RNA, 24 nt, Human
ucccggguucaagcgguucuccug

SEQ ID NO: 1138563 - RNA, 21 nt, Human
uccguccgccucagccuccca

SEQ ID NO: 1138564 - RNA, 24 nt, Human
uccugaguaacugggauuacaggc

SEQ ID NO: 1138565 - RNA, 22 nt, Human
ucgcucuuguugcccaggcugg

SEQ ID NO: 1138566 - RNA, 23 nt, Human
ucgcucuuguugcccaggcugga

SEQ ID NO: 1138567 - RNA, 19 nt, Human
ucugccucccaauucucuc

SEQ ID NO: 1138568 - RNA, 18 nt, Human
ucuguacagaggcuguuu

SEQ ID NO: 1138569 - RNA, 22 nt, Human
ucuuguugcccaggcuggagug

SEQ ID NO: 1138570 - RNA, 23 nt, Human
ugaaggaccuggcuccugacccc

SEQ ID NO: 1138571 - RNA, 19 nt, Human
ugaauaaagccuugggcuc

SEQ ID NO: 1138572 - RNA, 19 nt, Human
ugaccucagguguuccguc

SEQ ID NO: 1138573 - RNA, 24 nt, Human
ugaccucagguguuccguccgccu

SEQ ID NO: 1138574 - RNA, 23 nt, Human
ugagacagaguuucgcucuuguu

SEQ ID NO: 1138575 - RNA, 24 nt, Human
ugagaugcaaagggaauaauguua

SEQ ID NO: 1138576 - RNA, 18 nt, Human
ugaggagcuugcccaagg

SEQ ID NO: 1138577 - RNA, 18 nt, Human
ugaggcucagagaggcgg

SEQ ID NO: 1138578 - RNA, 22 nt, Human
ugauggcaggaggauggagaag

SEQ ID NO: 1138579 - RNA, 21 nt, Human
ugaugggcagguguuaggcuc

SEQ ID NO: 1138580 - RNA, 20 nt, Human
ugcauggaagaagaaagggg

SEQ ID NO: 1138581 - RNA, 18 nt, Human
ugcccaggcuggagugca

SEQ ID NO: 1138582 - RNA, 21 nt, Human
ugcccaggcuggagugcaaug

SEQ ID NO: 1138583 - RNA, 21 nt, Human
ugcccaggcuggagugcaaug

SEQ ID NO: 1138584 - RNA, 24 nt, Human
ugcccaggcuggagugcaauggcg

SEQ ID NO: 1138585 - RNA, 23 nt, Human
ugcccuugaccacggacaggccc

SEQ ID NO: 1138586 - RNA, 24 nt, Human
ugccucagccuccugaguaacugg

SEQ ID NO: 1138587 - RNA, 22 nt, Human
uggaaccuuaggaggaaacuga

SEQ ID NO: 1138588 - RNA, 23 nt, Human
uggagugcaauggcgcgaucucg

SEQ ID NO: 1138589 - RNA, 24 nt, Human
uggagugcaauggcgcgaucucgg

SEQ ID NO: 1138590 - RNA, 19 nt, Human
uggcauagacuccugucuc

SEQ ID NO: 1138591 - RNA, 21 nt, Human
uggcauagacuccugucuccc

SEQ ID NO: 1138592 - RNA, 24 nt, Human
uggcggggcuggucagcuggggcc

SEQ ID NO: 1138593 - RNA, 20 nt, Human
uggcuggaggccggggaggg

SEQ ID NO: 1138594 - RNA, 21 nt, Human
uggcuggaggccggggagggc

SEQ ID NO: 1138595 - RNA, 18 nt, Human
ugggagggagagaggagg

SEQ ID NO: 1138596 - RNA, 18 nt, Human
ugggauuacaggcaugag

SEQ ID NO: 1138597 - RNA, 21 nt, Human
ugggauuacaggcaugagcca

SEQ ID NO: 1138598 - RNA, 22 nt, Human
ugggauuacaggcaugagccac

SEQ ID NO: 1138599 - RNA, 23 nt, Human
ugggauuacaggcaugagccacc

SEQ ID NO: 1138600 - RNA, 23 nt, Human
ugggauuacaggcaugagccacc

SEQ ID NO: 1138601 - RNA, 24 nt, Human
ugggauuacaggcaugagccaccg

SEQ ID NO: 1138602 - RNA, 18 nt, Human
ugggauuacaggcaugug

SEQ ID NO: 1138603 - RNA, 21 nt, Human
ugggauuacaggcaugugcca

SEQ ID NO: 1138604 - RNA, 22 nt, Human
ugggauuacaggcaugugccac

SEQ ID NO: 1138605 - RNA, 24 nt, Human
ugggauuacaggcaugugccacca

SEQ ID NO: 1138606 - RNA, 19 nt, Human
ugggcuuuggucgggggcu

SEQ ID NO: 1138607 - RNA, 22 nt, Human
ugggggagagagcaggcccugu

SEQ ID NO: 1138608 - RNA, 24 nt, Human
ugggggcguggggacacagccaca

SEQ ID NO: 1138609 - RNA, 24 nt, Human
uggucaagcuggucucaaacucuu

SEQ ID NO: 1138610 - RNA, 21 nt, Human
uggucagcuggggccugggcu

SEQ ID NO: 1138611 - RNA, 19 nt, Human
ugugguggcaggagguggc

SEQ ID NO: 1138612 - RNA, 19 nt, Human
ugugguggcaggagguggc

SEQ ID NO: 1138613 - RNA, 21 nt, Human
ugugguggcaggagguggcau

SEQ ID NO: 1138614 - RNA, 24 nt, Human
uguuccguccgccucagccuccca

SEQ ID NO: 1138615 - RNA, 20 nt, Human
uguugcccaggcuggagugc

SEQ ID NO: 1138616 - RNA, 24 nt, Human
uuaguacagacaggguuucuccau

SEQ ID NO: 1138617 - RNA, 18 nt, Human
uucaagcgguucuccugc

SEQ ID NO: 1138618 - RNA, 21 nt, Human
uucaagcgguucuccugccuc

SEQ ID NO: 1138619 - RNA, 23 nt, Human
uucaagcgguucuccugccucag

SEQ ID NO: 1138620 - RNA, 23 nt, Human
uucagaggugguccaggugggaa

SEQ ID NO: 1138621 - RNA, 24 nt, Human
uucgcucuuguugcccaggcugga

SEQ ID NO: 1138622 - RNA, 22 nt, Human
uucuuugagccacugaauaaag

SEQ ID NO: 1138623 - RNA, 24 nt, Human
uuucgcucuuguugcccaggcugg

SEQ ID NO: 1138624 - RNA, 21 nt, Human
uuucuccauguuggucaagcu

SEQ ID NO: 1138625 - RNA, 20 nt, Human
uuuguuuuuuugagacagag

SEQ ID NO: 1138626 - RNA, 20 nt, Human
uuuuguauuuuuaguacaga

SEQ ID NO: 1138627 - RNA, 24 nt, Human
uuuuuguuuuuuugagacagaguu

SEQ ID NO: 1138628 - RNA, 22 nt, Human
aaagacagcaaaauuuucccgg

SEQ ID NO: 1138629 - RNA, 19 nt, Human
aagacagcaaaauuuuccc

SEQ ID NO: 1138630 - RNA, 24 nt, Human
acagcaaaauuuucccggcacaag

SEQ ID NO: 1138631 - RNA, 21 nt, Human
caaagacagcaaaauuuuccc

SEQ ID NO: 1138632 - RNA, 22 nt, Human
uaaaauuacaaagacagcaaaa

SEQ ID NO: 1138633 - RNA, 21 nt, Human
aaauacucgaagaagaacauc

SEQ ID NO: 1138634 - RNA, 21 nt, Human
aagaagaacauccaugagaaa

SEQ ID NO: 1138635 - RNA, 22 nt, Human
aauggugauggugaugauggag

SEQ ID NO: 1138636 - RNA, 23 nt, Human
agaagaacauccaugagaaaaaa

SEQ ID NO: 1138637 - RNA, 24 nt, Human
agaggaggaggaaucucuggcucu

SEQ ID NO: 1138638 - RNA, 19 nt, Human
agcagcugcugcgcccucc

SEQ ID NO: 1138639 - RNA, 24 nt, Human
aggaaucucuggcucuccugcuga

SEQ ID NO: 1138640 - RNA, 22 nt, Human
aggaggaggaaucucuggcucu

SEQ ID NO: 1138641 - RNA, 22 nt, Human
auaauggugauggugaugauuu

SEQ ID NO: 1138642 - RNA, 22 nt, Human
cagggagcagcugcugcgcccu

SEQ ID NO: 1138643 - RNA, 26 nt, Human
cgcaggugccuccucgguugcuccuu

SEQ ID NO: 1138644 - RNA, 24 nt, Human
cugucagugaaaauuaggucggcc

SEQ ID NO: 1138645 - RNA, 18 nt, Human
gaggaggaaucucuggcu

SEQ ID NO: 1138646 - RNA, 19 nt, Human
gcaggcgcggggggggucc

SEQ ID NO: 1138647 - RNA, 27 nt, Human
ggaaaacuccaaauagucuuuuacuga

SEQ ID NO: 1138648 - RNA, 19 nt, Human
ggaggaggaaucucuggcu

SEQ ID NO: 1138649 - RNA, 24 nt, Human
ggugaugauggagaggaggaggaa

SEQ ID NO: 1138650 - RNA, 24 nt, Human
gugacggugauggugaugagaauu

SEQ ID NO: 1138651 - RNA, 21 nt, Human
uaagugcaggcgcgggggggg

SEQ ID NO: 1138652 - RNA, 19 nt, Human
uagaacgauacuccaaagg

SEQ ID NO: 1138653 - RNA, 25 nt, Human
uagagaaauagaacgauacuccaaa

SEQ ID NO: 1138654 - RNA, 20 nt, Human
uccaugagaaaaaauaaggc

SEQ ID NO: 1138655 - RNA, 19 nt, Human
ucgaagaagaacauccaug

SEQ ID NO: 1138656 - RNA, 21 nt, Human
ucuccugcugaugucuuucuc

SEQ ID NO: 1138657 - RNA, 25 nt, Human
ucuccugcugaugucuuucucugac

SEQ ID NO: 1138658 - RNA, 21 nt, Human
ugaccaguacagucuccuucu

SEQ ID NO: 1138659 - RNA, 18 nt, Human
ugagaaaaaauaaggcaa

SEQ ID NO: 1138660 - RNA, 18 nt, Human
ugaugauggagaggagga

SEQ ID NO: 1138661 - RNA, 24 nt, Human
ugccuccucgguugcuccuuuaaa

SEQ ID NO: 1138662 - RNA, 22 nt, Human
uggagaggaggaggaaucucug

SEQ ID NO: 1138663 - RNA, 24 nt, Human
uggagaggaggaggaaucucuggc

SEQ ID NO: 1138664 - RNA, 18 nt, Human
uggugaugagaauaaugg

SEQ ID NO: 1138665 - RNA, 19 nt, Human
uggugaugauggagaggag

SEQ ID NO: 1138666 - RNA, 24 nt, Human
ugugggcuuucuuucgcaggugcc

SEQ ID NO: 1138667 - RNA, 24 nt, Human
uguugggucagaaaguguucaggg

SEQ ID NO: 1138668 - RNA, 22 nt, Human
uuaggucggcaaggacgagagu

SEQ ID NO: 1138669 - RNA, 24 nt, Human
uucagggagcagcugcugcgcccu

SEQ ID NO: 1138670 - RNA, 24 nt, Human
ucaggggugcucguggucuuuucc

SEQ ID NO: 1138671 - RNA, 21 nt, Human
ucaguauacguuggggugcag

SEQ ID NO: 1138672 - RNA, 24 nt, Human
ugacaucaguauacguuggggugc

SEQ ID NO: 1138673 - RNA, 19 nt, Human
ugcucguggucuuuucccu

SEQ ID NO: 1138674 - RNA, 24 nt, Human
aaacagauaaaaaucccagcucuc

SEQ ID NO: 1138675 - RNA, 25 nt, Human
aaaccuaccagccgagugacuuugg

SEQ ID NO: 1138676 - RNA, 24 nt, Human
aaagugcugggauuacaggcguga

SEQ ID NO: 1138677 - RNA, 18 nt, Human
aaauaaucuuaucaucag

SEQ ID NO: 1138678 - RNA, 18 nt, Human
aaauuccacggcuugaaa

SEQ ID NO: 1138679 - RNA, 23 nt, Human
aagccaguuugcaaaauuccuga

SEQ ID NO: 1138680 - RNA, 24 nt, Human
aagugauccaccugccucggccuc

SEQ ID NO: 1138681 - RNA, 19 nt, Human
aagugcugggauuacaggc

SEQ ID NO: 1138682 - RNA, 19 nt, Human
aagugcugggauuacaggc

SEQ ID NO: 1138683 - RNA, 26 nt, Human
aagugcugggauuacaggcgugagcc

SEQ ID NO: 1138684 - RNA, 23 nt, Human
acaggcagcagcaggggcggagc

SEQ ID NO: 1138685 - RNA, 24 nt, Human
accauguuggccaggcuggucuug

SEQ ID NO: 1138686 - RNA, 24 nt, Human
acuggguuccaccauguuggccag

SEQ ID NO: 1138687 - RNA, 21 nt, Human
acuuucaccuccaaccccagu

SEQ ID NO: 1138688 - RNA, 22 nt, Human
agaaagcccacgccugcaaaaa

SEQ ID NO: 1138689 - RNA, 22 nt, Human
aggcagcagcaggggcggagcu

SEQ ID NO: 1138690 - RNA, 24 nt, Human
aggcagcagcaggggcggagcuca

SEQ ID NO: 1138691 - RNA, 22 nt, Human
aguagagacuggguuccaccau

SEQ ID NO: 1138692 - RNA, 18 nt, Human
agugcugggauuacaggc

SEQ ID NO: 1138693 - RNA, 24 nt, Human
auacagcaaaacagauaaaaaucc

SEQ ID NO: 1138694 - RNA, 22 nt, Human
caaaacagauaaaaaucccagc

SEQ ID NO: 1138695 - RNA, 24 nt, Human
caaagugcugggauuacaggcgug

SEQ ID NO: 1138696 - RNA, 19 nt, Human
caaauuccacggcuugaaa

SEQ ID NO: 1138697 - RNA, 22 nt, Human
caagugauccaccugccucggc

SEQ ID NO: 1138698 - RNA, 21 nt, Human
caccauguuggccaggcuggu

SEQ ID NO: 1138699 - RNA, 23 nt, Human
caccauguuggccaggcuggucu

SEQ ID NO: 1138700 - RNA, 24 nt, Human
caccauguuggccaggcuggucuu

SEQ ID NO: 1138701 - RNA, 27 nt, Human
caccauguuggccaggcuggucuugaa

SEQ ID NO: 1138702 - RNA, 23 nt, Human
caccugccucggccucccaaagu

SEQ ID NO: 1138703 - RNA, 21 nt, Human
cacugcuggggagacagugac

SEQ ID NO: 1138704 - RNA, 24 nt, Human
cagcaaaacagauaaaaaucccag

SEQ ID NO: 1138705 - RNA, 20 nt, Human
cagcagcaagaaacgauucc

SEQ ID NO: 1138706 - RNA, 28 nt, Human
cagcagcaggggcggagcucaugccgag

SEQ ID NO: 1138707 - RNA, 18 nt, Human
cagcucacccagacccuc

SEQ ID NO: 1138708 - RNA, 21 nt, Human
caggaagguccagaccgggug

SEQ ID NO: 1138709 - RNA, 25 nt, Human
cauacagcaaaacagauaaaaaucc

SEQ ID NO: 1138710 - RNA, 24 nt, Human
cauguuggccaggcuggucuugaa

SEQ ID NO: 1138711 - RNA, 20 nt, Human
ccaaagugcugggauuacag

SEQ ID NO: 1138712 - RNA, 22 nt, Human
ccaaagugcugggauuacaggc

SEQ ID NO: 1138713 - RNA, 22 nt, Human
ccaaagugcugggauuacaggc

SEQ ID NO: 1138714 - RNA, 24 nt, Human
ccaaagugcugggauuacaggcgu

SEQ ID NO: 1138715 - RNA, 23 nt, Human
ccagcugguccgccacaccuccc

SEQ ID NO: 1138716 - RNA, 25 nt, Human
ccagucauucucccuugcuaagccu

SEQ ID NO: 1138717 - RNA, 27 nt, Human
cccaugccaaccuggcacacccagaag

SEQ ID NO: 1138718 - RNA, 22 nt, Human
ccccacugucuaccugcugcuu

SEQ ID NO: 1138719 - RNA, 22 nt, Human
ccccgaacuacccacuuggccc

SEQ ID NO: 1138720 - RNA, 23 nt, Human
ccccgaacuacccacuuggcccc

SEQ ID NO: 1138721 - RNA, 25 nt, Human
cccucaucuacuucauacagcaaaa

SEQ ID NO: 1138722 - RNA, 18 nt, Human
cccugccccaggcuccug

SEQ ID NO: 1138723 - RNA, 23 nt, Human
ccgcagcugucaccagccccacu

SEQ ID NO: 1138724 - RNA, 23 nt, Human
ccucccagaacucuggauccccg

SEQ ID NO: 1138725 - RNA, 21 nt, Human
ccugaccucaagugauccacc

SEQ ID NO: 1138726 - RNA, 23 nt, Human
ccugaccucaagugauccaccug

SEQ ID NO: 1138727 - RNA, 23 nt, Human
ccugaccucaagugauccaccug

SEQ ID NO: 1138728 - RNA, 24 nt, Human
ccugccucggccucccaaagugcu

SEQ ID NO: 1138729 - RNA, 21 nt, Human
ccugcugcuuaagguaaaagc

SEQ ID NO: 1138730 - RNA, 18 nt, Human
ccugggcccagcuggucc

SEQ ID NO: 1138731 - RNA, 25 nt, Human
cggccagcucaauaguacucaaauu

SEQ ID NO: 1138732 - RNA, 23 nt, Human
cgggagagugguuacccuugggg

SEQ ID NO: 1138733 - RNA, 21 nt, Human
cucaagugauccaccugccuc

SEQ ID NO: 1138734 - RNA, 23 nt, Human
cucagcgccaggccugcuuccuc

SEQ ID NO: 1138735 - RNA, 18 nt, Human
cuccugugacucagcgcc

SEQ ID NO: 1138736 - RNA, 19 nt, Human
cucugucuugaucuuggag

SEQ ID NO: 1138737 - RNA, 24 nt, Human
cuggguuccaccauguuggccagg

SEQ ID NO: 1138738 - RNA, 21 nt, Human
cuuggcccccgccucagcuug

SEQ ID NO: 1138739 - RNA, 24 nt, Human
gaccucaagugauccaccugccuc

SEQ ID NO: 1138740 - RNA, 18 nt, Human
gauuacaggcgugagcca

SEQ ID NO: 1138741 - RNA, 21 nt, Human
gauuacaggcgugagccacca

SEQ ID NO: 1138742 - RNA, 24 nt, Human
gauuacaggcgugagccaccaugc

SEQ ID NO: 1138743 - RNA, 21 nt, Human
gcacacccagaaggcagugca

SEQ ID NO: 1138744 - RNA, 19 nt, Human
gccgagugcagaaagccca

SEQ ID NO: 1138745 - RNA, 24 nt, Human
gccucagcuugccugguccuccag

SEQ ID NO: 1138746 - RNA, 25 nt, Human
gccucagcuugccugguccuccagc

SEQ ID NO: 1138747 - RNA, 23 nt, Human
gcuggucuugaacuccugaccuc

SEQ ID NO: 1138748 - RNA, 24 nt, Human
ggagacagugacuucagguggggg

SEQ ID NO: 1138749 - RNA, 24 nt, Human
ggauuacaggcgugagccaccaug

SEQ ID NO: 1138750 - RNA, 19 nt, Human
ggcagcagcaggggcggag

SEQ ID NO: 1138751 - RNA, 19 nt, Human
ggccauuggccgcugaugg

SEQ ID NO: 1138752 - RNA, 24 nt, Human
ggcuggucuugaacuccugaccuc

SEQ ID NO: 1138753 - RNA, 19 nt, Human
gggaggagcguguugggga

SEQ ID NO: 1138754 - RNA, 21 nt, Human
ggguuccaccauguuggccag

SEQ ID NO: 1138755 - RNA, 19 nt, Human
gguccgccacaccucccag

SEQ ID NO: 1138756 - RNA, 19 nt, Human
ggucuugaacuccugaccu

SEQ ID NO: 1138757 - RNA, 24 nt, Human
gugauccaccugccucggccuccc

SEQ ID NO: 1138758 - RNA, 21 nt, Human
gugcucccucccccuccacca

SEQ ID NO: 1138759 - RNA, 25 nt, Human
uaagguaaaagcccacuggucaccu

SEQ ID NO: 1138760 - RNA, 23 nt, Human
uacagcaaaacagauaaaaaucc

SEQ ID NO: 1138761 - RNA, 22 nt, Human
uacaggcgugagccaccaugcc

SEQ ID NO: 1138762 - RNA, 22 nt, Human
uacaggcgugagccaccaugcc

SEQ ID NO: 1138763 - RNA, 23 nt, Human
uacaggcgugagccaccaugccu

SEQ ID NO: 1138764 - RNA, 23 nt, Human
uacccuugggggcaggggugggu

SEQ ID NO: 1138765 - RNA, 20 nt, Human
uacccuugggggcagggguu

SEQ ID NO: 1138766 - RNA, 22 nt, Human
uagagacuggguuccaccaugu

SEQ ID NO: 1138767 - RNA, 20 nt, Human
uagaggccauuggccgcuga

SEQ ID NO: 1138768 - RNA, 24 nt, Human
uaguagagacuggguuccaccaug

SEQ ID NO: 1138769 - RNA, 21 nt, Human
ucaagugauccaccugccucg

SEQ ID NO: 1138770 - RNA, 22 nt, Human
ucacacgcuggucucacugaca

SEQ ID NO: 1138771 - RNA, 25 nt, Human
ucaugccgagugcagaaagcccacg

SEQ ID NO: 1138772 - RNA, 19 nt, Human
uccaaccccaguccugggc

SEQ ID NO: 1138773 - RNA, 19 nt, Human
uccaucaguggcacggcca

SEQ ID NO: 1138774 - RNA, 24 nt, Human
ucccaaagugcugggauuacaggc

SEQ ID NO: 1138775 - RNA, 22 nt, Human
ucccagaacucuggauccccgc

SEQ ID NO: 1138776 - RNA, 23 nt, Human
ucccagcucacccagacccucac

SEQ ID NO: 1138777 - RNA, 21 nt, Human
uccccaugccaaccuggcaca

SEQ ID NO: 1138778 - RNA, 25 nt, Human
ucccucaucuacuucauacagcaaa

SEQ ID NO: 1138779 - RNA, 18 nt, Human
ucggccucccaaagugcu

SEQ ID NO: 1138780 - RNA, 18 nt, Human
ucugaguugugcucccuc

SEQ ID NO: 1138781 - RNA, 21 nt, Human
ucuugaacuccugaccucaag

SEQ ID NO: 1138782 - RNA, 24 nt, Human
ugaccucaagugauccaccugccu

SEQ ID NO: 1138783 - RNA, 18 nt, Human
ugacucagcgccaggccu

SEQ ID NO: 1138784 - RNA, 23 nt, Human
ugacucagcgccaggccugcuuc

SEQ ID NO: 1138785 - RNA, 23 nt, Human
ugacuuugggccagucauucucc

SEQ ID NO: 1138786 - RNA, 19 nt, Human
ugaggagauaggacugugg

SEQ ID NO: 1138787 - RNA, 21 nt, Human
ugaguucugaguugugcuccc

SEQ ID NO: 1138788 - RNA, 19 nt, Human
ugaguugugcucccucccc

SEQ ID NO: 1138789 - RNA, 19 nt, Human
ugccccaggcuccugugac

SEQ ID NO: 1138790 - RNA, 25 nt, Human
ugccccaggcuccugugacucagcc

SEQ ID NO: 1138791 - RNA, 19 nt, Human
ugccgagugcagaaagccc

SEQ ID NO: 1138792 - RNA, 21 nt, Human
ugccucggccucccaaagugc

SEQ ID NO: 1138793 - RNA, 24 nt, Human
ugccucggccucccaaagugcugg

SEQ ID NO: 1138794 - RNA, 22 nt, Human
ugcugaggcgccagcuccuggg

SEQ ID NO: 1138795 - RNA, 24 nt, Human
ugcugggauuacaggcgugagcca

SEQ ID NO: 1138796 - RNA, 24 nt, Human
uggccaggcuggucuugaacuccu

SEQ ID NO: 1138797 - RNA, 18 nt, Human
ugggauuacaggcgugag

SEQ ID NO: 1138798 - RNA, 22 nt, Human
ugggauuacaggcgugagccac

SEQ ID NO: 1138799 - RNA, 23 nt, Human
ugggauuacaggcgugagccacc

SEQ ID NO: 1138800 - RNA, 24 nt, Human
ugggauuacaggcgugagccacca

SEQ ID NO: 1138801 - RNA, 25 nt, Human
ugggauuacaggcgugagccaccau

SEQ ID NO: 1138802 - RNA, 23 nt, Human
uggguuccaccauguuggccagg

SEQ ID NO: 1138803 - RNA, 24 nt, Human
uggugaggagauaggacuguggga

SEQ ID NO: 1138804 - RNA, 19 nt, Human
uguuggggaggaagaugag

SEQ ID NO: 1138805 - RNA, 24 nt, Human
uuaagguaaaagcccacuggucac

SEQ ID NO: 1138806 - RNA, 24 nt, Human
uuaguagagacuggguuccaccau

SEQ ID NO: 1138807 - RNA, 21 nt, Human
uuccaccauguuggccaggcu

SEQ ID NO: 1138808 - RNA, 21 nt, Human
uucucccuugcuaagccucaa

SEQ ID NO: 1138809 - RNA, 19 nt, Human
uucuucccucaucuacuuc

SEQ ID NO: 1138810 - RNA, 19 nt, Human
uugccugguccuccagcug

SEQ ID NO: 1138811 - RNA, 22 nt, Human
uugccugguccuccagcuguau

SEQ ID NO: 1138812 - RNA, 21 nt, Human
uuuccaaaccaguccuucaag

SEQ ID NO: 1138813 - RNA, 19 nt, Human
uuuuuaguagagacugggu

SEQ ID NO: 1138814 - RNA, 18 nt, Human
acaaugcauccaugcccc

SEQ ID NO: 1138815 - RNA, 22 nt, Human
acaaugcauccaugccccaugc

SEQ ID NO: 1138816 - RNA, 20 nt, Human
acaccugauggaagguugga

SEQ ID NO: 1138817 - RNA, 22 nt, Human
acauccgggacccucugaccac

SEQ ID NO: 1138818 - RNA, 23 nt, Human
agaguggagggggggacauccgg

SEQ ID NO: 1138819 - RNA, 23 nt, Human
aggaagcuccgcaggcacagccc

SEQ ID NO: 1138820 - RNA, 19 nt, Human
aggcacagccccugcccag

SEQ ID NO: 1138821 - RNA, 19 nt, Human
caccugauggaagguugga

SEQ ID NO: 1138822 - RNA, 19 nt, Human
cauccaugccccaugcccg

SEQ ID NO: 1138823 - RNA, 18 nt, Human
ccacaucucgggccacac

SEQ ID NO: 1138824 - RNA, 22 nt, Human
ccccagagucacugcagaccaa

SEQ ID NO: 1138825 - RNA, 19 nt, Human
cccuggcggcucggcuggg

SEQ ID NO: 1138826 - RNA, 20 nt, Human
ccgggacccucugaccacac

SEQ ID NO: 1138827 - RNA, 18 nt, Human
cuggaaggaagcuccgca

SEQ ID NO: 1138828 - RNA, 21 nt, Human
gcccagugucacaaacacugc

SEQ ID NO: 1138829 - RNA, 18 nt, Human
gccccgugcagggugcug

SEQ ID NO: 1138830 - RNA, 18 nt, Human
uaaccaggaaccccagag

SEQ ID NO: 1138831 - RNA, 23 nt, Human
uaaccaggaaccccagagucacu

SEQ ID NO: 1138832 - RNA, 19 nt, Human
uccaugccccaugcccagg

SEQ ID NO: 1138833 - RNA, 21 nt, Human
uccaugccccaugcccagggc

SEQ ID NO: 1138834 - RNA, 18 nt, Human
uccgcaggcacagccccu

SEQ ID NO: 1138835 - RNA, 23 nt, Human
ugcauccaugccccaugcccagg

SEQ ID NO: 1138836 - RNA, 18 nt, Human
ugcccagggccacccaca

SEQ ID NO: 1138837 - RNA, 21 nt, Human
uggaaggaagcuccgcaggca

SEQ ID NO: 1138838 - RNA, 21 nt, Human
uguuccuaagcagaugcacug

SEQ ID NO: 1138839 - RNA, 18 nt, Human
aaaagauuucuggcccuu

SEQ ID NO: 1138840 - RNA, 18 nt, Human
aaauguauacccccaaac

SEQ ID NO: 1138841 - RNA, 22 nt, Human
aacucaauccuccuaggucacc

SEQ ID NO: 1138842 - RNA, 26 nt, Human
aaucuccuucacucggucaaauauuu

SEQ ID NO: 1138843 - RNA, 23 nt, Human
acuagcaucuggaagaaagaaaa

SEQ ID NO: 1138844 - RNA, 21 nt, Human
agaaccuaaaacuugcaaaag

SEQ ID NO: 1138845 - RNA, 24 nt, Human
agagagacagaguguuucuacaga

SEQ ID NO: 1138846 - RNA, 18 nt, Human
aucuccuucacucgguca

SEQ ID NO: 1138847 - RNA, 23 nt, Human
aucuggaagaaagaaaagauuuc

SEQ ID NO: 1138848 - RNA, 22 nt, Human
ccccauguccuucuuguuucca

SEQ ID NO: 1138849 - RNA, 23 nt, Human
cccuugguugcagaaccuaaaac

SEQ ID NO: 1138850 - RNA, 21 nt, Human
cuaacguaagucuuggggaag

SEQ ID NO: 1138851 - RNA, 21 nt, Human
cuccuaggucaccucagaggc

SEQ ID NO: 1138852 - RNA, 23 nt, Human
cuccuucacucggucaaauauuu

SEQ ID NO: 1138853 - RNA, 21 nt, Human
cugccuccuuauccaaaagcu

SEQ ID NO: 1138854 - RNA, 18 nt, Human
cuuccugccuccuuaucc

SEQ ID NO: 1138855 - RNA, 23 nt, Human
uaaaacuugcaaaagaaugugug

SEQ ID NO: 1138856 - RNA, 24 nt, Human
uaaaccacccaaaugaaaguauua

SEQ ID NO: 1138857 - RNA, 27 nt, Human
uacccccaaacucaauccuccuagguc

SEQ ID NO: 1138858 - RNA, 23 nt, Human
uaucaaaaauagauauugugaug

SEQ ID NO: 1138859 - RNA, 19 nt, Human
uauccaaaagcucuugaau

SEQ ID NO: 1138860 - RNA, 18 nt, Human
ucaaaaauagauauugug

SEQ ID NO: 1138861 - RNA, 22 nt, Human
uccuaggucaccucagaggcuu

SEQ ID NO: 1138862 - RNA, 19 nt, Human
uccuccuaggucaccucag

SEQ ID NO: 1138863 - RNA, 18 nt, Human
uccugccuccuuauccaa

SEQ ID NO: 1138864 - RNA, 21 nt, Human
uccuucacucggucaaauauu

SEQ ID NO: 1138865 - RNA, 19 nt, Human
ucuuccugccuccuuaucc

SEQ ID NO: 1138866 - RNA, 22 nt, Human
ugaaagauaaagagcuucuucc

SEQ ID NO: 1138867 - RNA, 21 nt, Human
ugaaaguauuaguuugaaaga

SEQ ID NO: 1138868 - RNA, 22 nt, Human
ugaaauguauacccccaaacuc

SEQ ID NO: 1138869 - RNA, 22 nt, Human
ugaaauuaucaaaggugacauc

SEQ ID NO: 1138870 - RNA, 24 nt, Human
ugaauuuauacaaugcuaacguaa

SEQ ID NO: 1138871 - RNA, 22 nt, Human
ugugugaaauguauacccccaa

SEQ ID NO: 1138872 - RNA, 24 nt, Human
uuugccccauguccuucuuguuuc

SEQ ID NO: 1138873 - RNA, 21 nt, Human
aaacagaagcagggacauuga

SEQ ID NO: 1138874 - RNA, 19 nt, Human
aaagaagccuaugacuuga

SEQ ID NO: 1138875 - RNA, 20 nt, Human
aagcagggacauugaggccc

SEQ ID NO: 1138876 - RNA, 21 nt, Human
aagcagggacauugaggccca

SEQ ID NO: 1138877 - RNA, 27 nt, Human
acuucaaggcggcgguauucagagaag

SEQ ID NO: 1138878 - RNA, 20 nt, Human
caaaggccggcgcacggccu

SEQ ID NO: 1138879 - RNA, 26 nt, Human
cagaaggcuuccucucaaauaagucu

SEQ ID NO: 1138880 - RNA, 19 nt, Human
cccgagcgggcugcgaccg

SEQ ID NO: 1138881 - RNA, 21 nt, Human
gaagcagggacauugaggccc

SEQ ID NO: 1138882 - RNA, 24 nt, Human
gacguggccgacaggacgggcgcg

SEQ ID NO: 1138883 - RNA, 19 nt, Human
gcagcgcgcccgccacccc

SEQ ID NO: 1138884 - RNA, 21 nt, Human
ggaauaacaaacagaagcagg

SEQ ID NO: 1138885 - RNA, 30 nt, Human
gggaauaacaaacagaagcagggaccggua

SEQ ID NO: 1138886 - RNA, 22 nt, Human
uaaaacuucaaggcggcgguau

SEQ ID NO: 1138887 - RNA, 20 nt, Human
uaacagugcuuaacaguggc

SEQ ID NO: 1138888 - RNA, 22 nt, Human
uaagugaaugccugaaaguauu

SEQ ID NO: 1138889 - RNA, 21 nt, Human
uaggagaaaccuuuccuagga

SEQ ID NO: 1138890 - RNA, 19 nt, Human
uauucagagaagucaggca

SEQ ID NO: 1138891 - RNA, 21 nt, Human
ucuccugaggugacauaaaga

SEQ ID NO: 1138892 - RNA, 24 nt, Human
ugacauaaagacugaaagaagccu

SEQ ID NO: 1138893 - RNA, 18 nt, Human
uggcagcauaugcgacac

SEQ ID NO: 1138894 - RNA, 20 nt, Human
uugaagacuucguacuaucu

SEQ ID NO: 1138895 - RNA, 24 nt, Human
uugcaaauacaucaucaauucuua

SEQ ID NO: 1138896 - RNA, 25 nt, Human
uuugcaaauacaucaucaauucuua

SEQ ID NO: 1138897 - RNA, 22 nt, Human
aaagacagcagcugcagccuuc

SEQ ID NO: 1138898 - RNA, 18 nt, Human
aagcugguucuucugcag

SEQ ID NO: 1138899 - RNA, 20 nt, Human
acccuucuccuuccccaccu

SEQ ID NO: 1138900 - RNA, 19 nt, Human
acucaccccuccaugccgc

SEQ ID NO: 1138901 - RNA, 19 nt, Human
agacagggguccaagaagc

SEQ ID NO: 1138902 - RNA, 24 nt, Human
agagacgacccuucuccuucccca

SEQ ID NO: 1138903 - RNA, 24 nt, Human
aggcaggaccagccugcuccgugg

SEQ ID NO: 1138904 - RNA, 18 nt, Human
aggccugaaaaggcccca

SEQ ID NO: 1138905 - RNA, 21 nt, Human
agggcaggcagggcccgaagc

SEQ ID NO: 1138906 - RNA, 21 nt, Human
aucugcuccacacugucuucc

SEQ ID NO: 1138907 - RNA, 21 nt, Human
aucugcuccaggccacugcug

SEQ ID NO: 1138908 - RNA, 19 nt, Human
caccuuaucugcuccacac

SEQ ID NO: 1138909 - RNA, 23 nt, Human
cacuaagacgcgaccccucagac

SEQ ID NO: 1138910 - RNA, 24 nt, Human
cagguggcccccacccgcagguuc

SEQ ID NO: 1138911 - RNA, 18 nt, Human
ccaccugugcagcggaag

SEQ ID NO: 1138912 - RNA, 18 nt, Human
ccaggaagaucucgucgg

SEQ ID NO: 1138913 - RNA, 19 nt, Human
cccaaagacucaccccucc

SEQ ID NO: 1138914 - RNA, 25 nt, Human
cccaaagacucaccccuccaugccg

SEQ ID NO: 1138915 - RNA, 19 nt, Human
cccacaggcuggaaggcuc

SEQ ID NO: 1138916 - RNA, 18 nt, Human
ccccacccgcagguucag

SEQ ID NO: 1138917 - RNA, 19 nt, Human
ccccacccgcagguucagc

SEQ ID NO: 1138918 - RNA, 20 nt, Human
cccgaagcugguucuucugc

SEQ ID NO: 1138919 - RNA, 24 nt, Human
cgacccuucuccuuccccaccuua

SEQ ID NO: 1138920 - RNA, 24 nt, Human
cuccgugcucagagacgacccuuc

SEQ ID NO: 1138921 - RNA, 18 nt, Human
cugcccacaggcuggaag

SEQ ID NO: 1138922 - RNA, 24 nt, Human
cugcuccacacugucuuccuuuga

SEQ ID NO: 1138923 - RNA, 21 nt, Human
cugcuccaggccacugcuguu

SEQ ID NO: 1138924 - RNA, 18 nt, Human
cuggaggacgacccucag

SEQ ID NO: 1138925 - RNA, 21 nt, Human
cuuucuggcagcccagcccgg

SEQ ID NO: 1138926 - RNA, 23 nt, Human
gaaaagaaucccgcccacuaaga

SEQ ID NO: 1138927 - RNA, 18 nt, Human
gacugggcagggcaggca

SEQ ID NO: 1138928 - RNA, 20 nt, Human
gagacgacccuucuccuucc

SEQ ID NO: 1138929 - RNA, 20 nt, Human
gaggcugguguccgcuuggc

SEQ ID NO: 1138930 - RNA, 18 nt, Human
gauggggguucuccuggc

SEQ ID NO: 1138931 - RNA, 19 nt, Human
gcacugggccuggaggcug

SEQ ID NO: 1138932 - RNA, 28 nt, Human
gcccgggccccaggccugaaaaggcccc

SEQ ID NO: 1138933 - RNA, 22 nt, Human
gcggaagcagcuggcagucaca

SEQ ID NO: 1138934 - RNA, 22 nt, Human
gcuccaggccacugcuguucag

SEQ ID NO: 1138935 - RNA, 18 nt, Human
ggaagaggugcugcagcg

SEQ ID NO: 1138936 - RNA, 22 nt, Human
ggcacugggccuggaggcuggu

SEQ ID NO: 1138937 - RNA, 24 nt, Human
ggcagggcaggcagggcccgaagc

SEQ ID NO: 1138938 - RNA, 20 nt, Human
ggccccaggccugaaaaggc

SEQ ID NO: 1138939 - RNA, 20 nt, Human
ggcucuggagcccgggcccc

SEQ ID NO: 1138940 - RNA, 25 nt, Human
gggcaggcagggcccgaagcugguu

SEQ ID NO: 1138941 - RNA, 19 nt, Human
gggccuggaggcugguguc

SEQ ID NO: 1138942 - RNA, 23 nt, Human
gugcaggcucuggagcccgggcc

SEQ ID NO: 1138943 - RNA, 20 nt, Human
ucaccccuccaugccgccug

SEQ ID NO: 1138944 - RNA, 18 nt, Human
ucagcccaguaagccacc

SEQ ID NO: 1138945 - RNA, 20 nt, Human
ucuccuggcacugggccugg

SEQ ID NO: 1138946 - RNA, 21 nt, Human
ucugcuccacacugucuuccu

SEQ ID NO: 1138947 - RNA, 20 nt, Human
ucugcuccaggccacugcug

SEQ ID NO: 1138948 - RNA, 21 nt, Human
ugcuccacacugucuuccuuu

SEQ ID NO: 1138949 - RNA, 23 nt, Human
ugcuccgugcucagagacgaccc

SEQ ID NO: 1138950 - RNA, 19 nt, Human
uggcacugggccuggaggc

SEQ ID NO: 1138951 - RNA, 19 nt, Human
uggcagcccagcccgggca

SEQ ID NO: 1138952 - RNA, 20 nt, Human
uggcagcccagcccgggcag

SEQ ID NO: 1138953 - RNA, 19 nt, Human
uggcugagacugggcaggg

SEQ ID NO: 1138954 - RNA, 20 nt, Human
ugggagggguggcgcaggug

SEQ ID NO: 1138955 - RNA, 21 nt, Human
ugggccuggaggcuggugucc

SEQ ID NO: 1138956 - RNA, 18 nt, Human
ugggucaaggcaggacca

SEQ ID NO: 1138957 - RNA, 23 nt, Human
ugguguccgcuuggccuuucugg

SEQ ID NO: 1138958 - RNA, 23 nt, Human
uucaaagggaaaagaaucccgcc

SEQ ID NO: 1138959 - RNA, 19 nt, Human
uuccuggcgagaguaagag

SEQ ID NO: 1138960 - RNA, 24 nt, Human
aaagugcugggauuacaggcauga

SEQ ID NO: 1138961 - RNA, 24 nt, Human
aaagugcugggauuauaggcauga

SEQ ID NO: 1138962 - RNA, 19 nt, Human
aagugcugggauuacaggc

SEQ ID NO: 1138963 - RNA, 21 nt, Human
aagugcugggauuacaggcau

SEQ ID NO: 1138964 - RNA, 26 nt, Human
aagugcugggauuacaggcaugagcc

SEQ ID NO: 1138965 - RNA, 19 nt, Human
aagugcugggauuauaggc

SEQ ID NO: 1138966 - RNA, 21 nt, Human
aagugcugggauuauaggcau

SEQ ID NO: 1138967 - RNA, 20 nt, Human
aaugcaguggcgcgaucucg

SEQ ID NO: 1138968 - RNA, 24 nt, Human
aaugcaguggcgcgaucucggcuc

SEQ ID NO: 1138969 - RNA, 23 nt, Human
acaggugcccaccaccacacccg

SEQ ID NO: 1138970 - RNA, 24 nt, Human
accauguuggccaggcuggucucg

SEQ ID NO: 1138971 - RNA, 24 nt, Human
accuugugauccgcccaacucggc

SEQ ID NO: 1138972 - RNA, 18 nt, Human
acgggguaucaccauguu

SEQ ID NO: 1138973 - RNA, 20 nt, Human
acgggguaucaccauguugg

SEQ ID NO: 1138974 - RNA, 24 nt, Human
acgggguaucaccauguuggccag

SEQ ID NO: 1138975 - RNA, 18 nt, Human
acgggguuucacuguguu

SEQ ID NO: 1138976 - RNA, 19 nt, Human
acgggguuucacuguguua

SEQ ID NO: 1138977 - RNA, 20 nt, Human
acgggguuucacuguguuag

SEQ ID NO: 1138978 - RNA, 24 nt, Human
acgggguuucacuguguuagccag

SEQ ID NO: 1138979 - RNA, 22 nt, Human
acuucacucucugagacuugaa

SEQ ID NO: 1138980 - RNA, 24 nt, Human
agcgauucuccugccucagccucc

SEQ ID NO: 1138981 - RNA, 19 nt, Human
aggcaugagccaccacgcc

SEQ ID NO: 1138982 - RNA, 21 nt, Human
agggagaagacacagggguca

SEQ ID NO: 1138983 - RNA, 18 nt, Human
aguaccugggauuacagg

SEQ ID NO: 1138984 - RNA, 18 nt, Human
aguagcugggacuacagg

SEQ ID NO: 1138985 - RNA, 21 nt, Human
aucuuugauccauccacucug

SEQ ID NO: 1138986 - RNA, 21 nt, Human
augagccaccacgccuggccc

SEQ ID NO: 1138987 - RNA, 19 nt, Human
augcuacuaacacugggga

SEQ ID NO: 1138988 - RNA, 23 nt, Human
auguucuuuuauuauuauuuucu

SEQ ID NO: 1138989 - RNA, 24 nt, Human
caaagugcugggauuacaggcaug

SEQ ID NO: 1138990 - RNA, 24 nt, Human
caaagugcugggauuauaggcaug

SEQ ID NO: 1138991 - RNA, 23 nt, Human
caaccuccaccucccagguucaa

SEQ ID NO: 1138992 - RNA, 20 nt, Human
caagcgauucuccugccuca

SEQ ID NO: 1138993 - RNA, 22 nt, Human
caagcgauucuccugccucagc

SEQ ID NO: 1138994 - RNA, 21 nt, Human
caccauguuggccaggcuggu

SEQ ID NO: 1138995 - RNA, 24 nt, Human
caccauguuggccaggcuggucuc

SEQ ID NO: 1138996 - RNA, 27 nt, Human
caccauguuggccaggcuggucucgaa

SEQ ID NO: 1138997 - RNA, 21 nt, Human
caccgcaaccuccaccuccca

SEQ ID NO: 1138998 - RNA, 21 nt, Human
caccgcaaccuccaccuccca

SEQ ID NO: 1138999 - RNA, 24 nt, Human
caccucggccucccaaagugcugg

SEQ ID NO: 1139000 - RNA, 19 nt, Human
cacgccuggccccucauca

SEQ ID NO: 1139001 - RNA, 24 nt, Human
cacuacacccagcuaauuuuugua

SEQ ID NO: 1139002 - RNA, 23 nt, Human
cacugcaaacucugccucccggg

SEQ ID NO: 1139003 - RNA, 18 nt, Human
cacuguguuagccaggau

SEQ ID NO: 1139004 - RNA, 19 nt, Human
cacuguguuagccaggaug

SEQ ID NO: 1139005 - RNA, 24 nt, Human
cacuguguuagccaggauggucuc

SEQ ID NO: 1139006 - RNA, 20 nt, Human
cagccuccugaguaccuggg

SEQ ID NO: 1139007 - RNA, 21 nt, Human
caggugcccaccaccacaccc

SEQ ID NO: 1139008 - RNA, 24 nt, Human
caggugcccaccaccacacccggc

SEQ ID NO: 1139009 - RNA, 20 nt, Human
caucuuugauccauccacuc

SEQ ID NO: 1139010 - RNA, 26 nt, Human
caucuuugauccauccacucugggag

SEQ ID NO: 1139011 - RNA, 22 nt, Human
caugccauucuucugccucagc

SEQ ID NO: 1139012 - RNA, 24 nt, Human
cauguuggccaggcuggucucgaa

SEQ ID NO: 1139013 - RNA, 23 nt, Human
ccaaagugcugggauuacaggca

SEQ ID NO: 1139014 - RNA, 24 nt, Human
ccaaagugcugggauuacaggcau

SEQ ID NO: 1139015 - RNA, 24 nt, Human
ccaaagugcugggauuauaggcau

SEQ ID NO: 1139016 - RNA, 18 nt, Human
ccaacucuagaacccaca

SEQ ID NO: 1139017 - RNA, 24 nt, Human
ccaccucccagguucaagcgauuc

SEQ ID NO: 1139018 - RNA, 24 nt, Human
cccaaagugcugggauuacaggca

SEQ ID NO: 1139019 - RNA, 21 nt, Human
cccaggcuagagugcaauggc

SEQ ID NO: 1139020 - RNA, 23 nt, Human
cccagguucaagcgauucuccug

SEQ ID NO: 1139021 - RNA, 23 nt, Human
ccgcaaccuccaccucccagguu

SEQ ID NO: 1139022 - RNA, 24 nt, Human
ccgcaaccuccaccucccagguuc

SEQ ID NO: 1139023 - RNA, 24 nt, Human
ccuccaggaagccuccuuuggccc

SEQ ID NO: 1139024 - RNA, 24 nt, Human
ccucccagguucaagcgauucucc

SEQ ID NO: 1139025 - RNA, 19 nt, Human
ccugaguaccugggauuac

SEQ ID NO: 1139026 - RNA, 22 nt, Human
ccugaguaccugggauuacagg

SEQ ID NO: 1139027 - RNA, 24 nt, Human
cgcucugucgcccaggcuggaaug

SEQ ID NO: 1139028 - RNA, 23 nt, Human
cuaauuuuuguauuuuuaauaga

SEQ ID NO: 1139029 - RNA, 23 nt, Human
cuaauuuuuuguauuuuuaguag

SEQ ID NO: 1139030 - RNA, 24 nt, Human
cucaccgcaaccuccaccucccag

SEQ ID NO: 1139031 - RNA, 23 nt, Human
cucacugcaaacucugccucccg

SEQ ID NO: 1139032 - RNA, 24 nt, Human
cucacugcaaacucugccucccgg

SEQ ID NO: 1139033 - RNA, 24 nt, Human
cucagccucgcgaguagcugggac

SEQ ID NO: 1139034 - RNA, 21 nt, Human
cucccggguucaugccauucu

SEQ ID NO: 1139035 - RNA, 19 nt, Human
cuccucugggcagggagaa

SEQ ID NO: 1139036 - RNA, 22 nt, Human
cuccugaccuugugauccgccc

SEQ ID NO: 1139037 - RNA, 20 nt, Human
cuccugaccuugugaucugc

SEQ ID NO: 1139038 - RNA, 21 nt, Human
cucgcucugucgcccaggcug

SEQ ID NO: 1139039 - RNA, 21 nt, Human
cugaguaccugggauuacagg

SEQ ID NO: 1139040 - RNA, 23 nt, Human
cugaguaccugggauuacaggug

SEQ ID NO: 1139041 - RNA, 24 nt, Human
cugaguaccugggauuacaggugu

SEQ ID NO: 1139042 - RNA, 23 nt, Human
cugccucagccuccugaguaccu

SEQ ID NO: 1139043 - RNA, 23 nt, Human
cugccucagccucgcgaguagcu

SEQ ID NO: 1139044 - RNA, 18 nt, Human
cuggagaccagggaugcu

SEQ ID NO: 1139045 - RNA, 18 nt, Human
gaaguccccuccgugccc

SEQ ID NO: 1139046 - RNA, 22 nt, Human
gaccuugugauccgcccaacuc

SEQ ID NO: 1139047 - RNA, 24 nt, Human
gaccuugugauccgcccaacucgg

SEQ ID NO: 1139048 - RNA, 22 nt, Human
gaccuugugaucugcacaccuc

SEQ ID NO: 1139049 - RNA, 24 nt, Human
gaccuugugaucugcacaccucgg

SEQ ID NO: 1139050 - RNA, 19 nt, Human
gaguaccugggauuacagg

SEQ ID NO: 1139051 - RNA, 18 nt, Human
gauuacaggcaugagcca

SEQ ID NO: 1139052 - RNA, 22 nt, Human
gauuacaggcaugagccaccgc

SEQ ID NO: 1139053 - RNA, 22 nt, Human
gauuacaggcaugagccaccgc

SEQ ID NO: 1139054 - RNA, 18 nt, Human
gauuacagguguccgcca

SEQ ID NO: 1139055 - RNA, 21 nt, Human
gauuauaggcaugagccacca

SEQ ID NO: 1139056 - RNA, 22 nt, Human
gauuauaggcaugagccaccac

SEQ ID NO: 1139057 - RNA, 23 nt, Human
gcacgaggugaucaucuuugauc

SEQ ID NO: 1139058 - RNA, 20 nt, Human
gcccaggcuggaaugcagug

SEQ ID NO: 1139059 - RNA, 21 nt, Human
gcccugaggcugagugaaguc

SEQ ID NO: 1139060 - RNA, 25 nt, Human
gccucccggguucaugccauucuuc

SEQ ID NO: 1139061 - RNA, 24 nt, Human
gcgauucuccugccucagccuccu

SEQ ID NO: 1139062 - RNA, 19 nt, Human
gcuagagugcaauggcgug

SEQ ID NO: 1139063 - RNA, 22 nt, Human
gcucucagcucaccgcaaccuc

SEQ ID NO: 1139064 - RNA, 21 nt, Human
gcucuggcucugaggcgugag

SEQ ID NO: 1139065 - RNA, 25 nt, Human
gcucugucgcccaggcuggaaugca

SEQ ID NO: 1139066 - RNA, 21 nt, Human
gcucuuguugcccaggcuaga

SEQ ID NO: 1139067 - RNA, 24 nt, Human
gcucuuguugcccaggcuagagug

SEQ ID NO: 1139068 - RNA, 24 nt, Human
ggauggucucaaucuccugaccuu

SEQ ID NO: 1139069 - RNA, 22 nt, Human
ggauuacaggcaugagccaccg

SEQ ID NO: 1139070 - RNA, 19 nt, Human
ggauuauaggcaugagcca

SEQ ID NO: 1139071 - RNA, 19 nt, Human
ggcagggagaagacacagg

SEQ ID NO: 1139072 - RNA, 23 nt, Human
ggcuggucucgaacuccugaccu

SEQ ID NO: 1139073 - RNA, 21 nt, Human
gggcaguggugcccucugugu

SEQ ID NO: 1139074 - RNA, 22 nt, Human
ggggaaugcagugccuuacccc

SEQ ID NO: 1139075 - RNA, 23 nt, Human
gggguaucaccauguuggccagg

SEQ ID NO: 1139076 - RNA, 23 nt, Human
gggguuucacuguguuagccagg

SEQ ID NO: 1139077 - RNA, 22 nt, Human
ggguaucaccauguuggccagg

SEQ ID NO: 1139078 - RNA, 22 nt, Human
ggguuucacuguguuagccagg

SEQ ID NO: 1139079 - RNA, 20 nt, Human
ggucucgaacuccugaccuu

SEQ ID NO: 1139080 - RNA, 23 nt, Human
guagagacgggguuucacugugu

SEQ ID NO: 1139081 - RNA, 24 nt, Human
uaauagagacgggguaucaccaug

SEQ ID NO: 1139082 - RNA, 24 nt, Human
uaauuuuuguauuuuuaauagaga

SEQ ID NO: 1139083 - RNA, 24 nt, Human
uaauuuuuuguauuuuuaguagag

SEQ ID NO: 1139084 - RNA, 25 nt, Human
uaauuuuuuguauuuuuaguagaga

SEQ ID NO: 1139085 - RNA, 23 nt, Human
uacaggcaugagccaccgcgccc

SEQ ID NO: 1139086 - RNA, 23 nt, Human
uacaggugcccaccaccacaccc

SEQ ID NO: 1139087 - RNA, 22 nt, Human
uagagacgggguaucaccaugu

SEQ ID NO: 1139088 - RNA, 23 nt, Human
uagagugcaauggcgugcucuca

SEQ ID NO: 1139089 - RNA, 20 nt, Human
uaguagagacgggguuucac

SEQ ID NO: 1139090 - RNA, 24 nt, Human
uaguagagacgggguuucacugug

SEQ ID NO: 1139091 - RNA, 19 nt, Human
ucaaucuccugaccuugug

SEQ ID NO: 1139092 - RNA, 20 nt, Human
ucaaucuccugaccuuguga

SEQ ID NO: 1139093 - RNA, 22 nt, Human
ucaccauguuggccaggcuggu

SEQ ID NO: 1139094 - RNA, 24 nt, Human
ucaccgcaaccuccaccucccagg

SEQ ID NO: 1139095 - RNA, 26 nt, Human
ucaccgcaaccuccaccucccagguu

SEQ ID NO: 1139096 - RNA, 18 nt, Human
ucacugcaaacucugccu

SEQ ID NO: 1139097 - RNA, 24 nt, Human
ucacugcaaacucugccucccggg

SEQ ID NO: 1139098 - RNA, 24 nt, Human
ucacuguguuagccaggauggucu

SEQ ID NO: 1139099 - RNA, 26 nt, Human
ucagcucaccgcaaccuccaccuccc

SEQ ID NO: 1139100 - RNA, 18 nt, Human
ucaggaccggacugaguc

SEQ ID NO: 1139101 - RNA, 18 nt, Human
ucaugccauucuucugcc

SEQ ID NO: 1139102 - RNA, 24 nt, Human
ucccaaagugcugggauuacaggc

SEQ ID NO: 1139103 - RNA, 24 nt, Human
ucccaaagugcugggauuauaggc

SEQ ID NO: 1139104 - RNA, 21 nt, Human
ucccagguucaagcgauucuc

SEQ ID NO: 1139105 - RNA, 24 nt, Human
ucccagguucaagcgauucuccug

SEQ ID NO: 1139106 - RNA, 19 nt, Human
uccccaacucuagaaccca

SEQ ID NO: 1139107 - RNA, 20 nt, Human
ucccggguucaugccauucu

SEQ ID NO: 1139108 - RNA, 24 nt, Human
ucccggguucaugccauucuucug

SEQ ID NO: 1139109 - RNA, 24 nt, Human
uccugaguaccugggauuacaggu

SEQ ID NO: 1139110 - RNA, 24 nt, Human
ucgcccaggcuggaaugcaguggc

SEQ ID NO: 1139111 - RNA, 24 nt, Human
ucgcgaguagcugggacuacaggu

SEQ ID NO: 1139112 - RNA, 18 nt, Human
ucggccucccaaagugcu

SEQ ID NO: 1139113 - RNA, 18 nt, Human
ucggccucccaaagugcu

SEQ ID NO: 1139114 - RNA, 23 nt, Human
ucuccucugggcagggagaagac

SEQ ID NO: 1139115 - RNA, 24 nt, Human
ucuccugccucagccuccugagua

SEQ ID NO: 1139116 - RNA, 19 nt, Human
ucucgaacuccugaccuug

SEQ ID NO: 1139117 - RNA, 19 nt, Human
ucucgcucugucgcccagg

SEQ ID NO: 1139118 - RNA, 22 nt, Human
ucucgcucugucgcccaggcug

SEQ ID NO: 1139119 - RNA, 23 nt, Human
ucucgcucugucgcccaggcugg

SEQ ID NO: 1139120 - RNA, 24 nt, Human
ucucgcucugucgcccaggcugga

SEQ ID NO: 1139121 - RNA, 26 nt, Human
ucucgcucugucgcccaggcuggaau

SEQ ID NO: 1139122 - RNA, 24 nt, Human
ucugucgcccaggcuggaaugcag

SEQ ID NO: 1139123 - RNA, 20 nt, Human
ucuuccaucagacaagggcu

SEQ ID NO: 1139124 - RNA, 18 nt, Human
ucuuguugcccaggcuag

SEQ ID NO: 1139125 - RNA, 18 nt, Human
ucuuuuuuuugagacgga

SEQ ID NO: 1139126 - RNA, 23 nt, Human
ugaccuugugaucugcacaccuc

SEQ ID NO: 1139127 - RNA, 22 nt, Human
ugagacggagucucgcucuguc

SEQ ID NO: 1139128 - RNA, 19 nt, Human
ugcagagggcucauucccc

SEQ ID NO: 1139129 - RNA, 22 nt, Human
ugcaguggcgcgaucucggcuc

SEQ ID NO: 1139130 - RNA, 21 nt, Human
ugcccaccaccacacccggcu

SEQ ID NO: 1139131 - RNA, 21 nt, Human
ugcccaggcuagagugcaaug

SEQ ID NO: 1139132 - RNA, 24 nt, Human
ugccucagccuccugaguaccugg

SEQ ID NO: 1139133 - RNA, 24 nt, Human
ugccucagccucgcgaguagcugg

SEQ ID NO: 1139134 - RNA, 19 nt, Human
ugccucccggguucaugcc

SEQ ID NO: 1139135 - RNA, 18 nt, Human
ugccuuaccccaugcaga

SEQ ID NO: 1139136 - RNA, 24 nt, Human
uggaaugcaguggcgcgaucucgg

SEQ ID NO: 1139137 - RNA, 24 nt, Human
uggccaggcuggucucgaacuccu

SEQ ID NO: 1139138 - RNA, 24 nt, Human
uggcgugcucucagcucaccgcaa

SEQ ID NO: 1139139 - RNA, 21 nt, Human
ugggacuacaggugcccacca

SEQ ID NO: 1139140 - RNA, 24 nt, Human
ugggacuacaggugcccaccacca

SEQ ID NO: 1139141 - RNA, 18 nt, Human
ugggauuacaggcaugag

SEQ ID NO: 1139142 - RNA, 19 nt, Human
ugggauuacaggcaugagc

SEQ ID NO: 1139143 - RNA, 21 nt, Human
ugggauuacaggcaugagcca

SEQ ID NO: 1139144 - RNA, 22 nt, Human
ugggauuacaggcaugagccac

SEQ ID NO: 1139145 - RNA, 23 nt, Human
ugggauuacaggcaugagccacc

SEQ ID NO: 1139146 - RNA, 24 nt, Human
ugggauuacaggcaugagccaccg

SEQ ID NO: 1139147 - RNA, 24 nt, Human
ugggauuacaggcaugagccaccg

SEQ ID NO: 1139148 - RNA, 21 nt, Human
ugggauuacagguguccgcca

SEQ ID NO: 1139149 - RNA, 22 nt, Human
ugggauuacagguguccgccac

SEQ ID NO: 1139150 - RNA, 22 nt, Human
ugggauuacagguguccgccac

SEQ ID NO: 1139151 - RNA, 24 nt, Human
ugggauuacagguguccgccacua

SEQ ID NO: 1139152 - RNA, 18 nt, Human
ugggauuauaggcaugag

SEQ ID NO: 1139153 - RNA, 19 nt, Human
ugggauuauaggcaugagc

SEQ ID NO: 1139154 - RNA, 22 nt, Human
ugggauuauaggcaugagccac

SEQ ID NO: 1139155 - RNA, 23 nt, Human
ugggauuauaggcaugagccacc

SEQ ID NO: 1139156 - RNA, 24 nt, Human
ugggauuauaggcaugagccacca

SEQ ID NO: 1139157 - RNA, 26 nt, Human
uggucuccucugggcagggagaagac

SEQ ID NO: 1139158 - RNA, 22 nt, Human
uggugaggaagggcacgaggug

SEQ ID NO: 1139159 - RNA, 21 nt, Human
uguauuuuuaguagagacggg

SEQ ID NO: 1139160 - RNA, 20 nt, Human
uguugcccaggcuagagugc

SEQ ID NO: 1139161 - RNA, 22 nt, Human
uguugcccaggcuagagugcaa

SEQ ID NO: 1139162 - RNA, 24 nt, Human
uuaauagagacgggguaucaccau

SEQ ID NO: 1139163 - RNA, 18 nt, Human
uuaguagagacgggguuu

SEQ ID NO: 1139164 - RNA, 21 nt, Human
uuaguagagacgggguuucac

SEQ ID NO: 1139165 - RNA, 21 nt, Human
uuaguagagacgggguuucac

SEQ ID NO: 1139166 - RNA, 24 nt, Human
uuaguagagacgggguuucacugu

SEQ ID NO: 1139167 - RNA, 21 nt, Human
uucaagcgauucuccugccuc

SEQ ID NO: 1139168 - RNA, 23 nt, Human
uucaagcgauucuccugccucag

SEQ ID NO: 1139169 - RNA, 24 nt, Human
uucaagcgauucuccugccucagc

SEQ ID NO: 1139170 - RNA, 21 nt, Human
uucacuguguuagccaggaug

SEQ ID NO: 1139171 - RNA, 19 nt, Human
uucaugccauucuucugcc

SEQ ID NO: 1139172 - RNA, 18 nt, Human
uugcccaggcuagagugc

SEQ ID NO: 1139173 - RNA, 18 nt, Human
uugcucuuguugcccagg

SEQ ID NO: 1139174 - RNA, 21 nt, Human
uuggcccugaggcugagugaa

SEQ ID NO: 1139175 - RNA, 22 nt, Human
uuggcccugaggcugagugaag

SEQ ID NO: 1139176 - RNA, 23 nt, Human
uuguauuuuuaguagagacgggg

SEQ ID NO: 1139177 - RNA, 19 nt, Human
uuucacuguguuagccagg

SEQ ID NO: 1139178 - RNA, 25 nt, Human
uuucuuuuuuuugagacggagucuc

SEQ ID NO: 1139179 - RNA, 23 nt, Human
uuuugcucuuguugcccaggcua

SEQ ID NO: 1139180 - RNA, 24 nt, Human
uuuuuaguagagacgggguuucac

SEQ ID NO: 1139181 - RNA, 20 nt, Human
uuuuuguauuuuuaauagag

SEQ ID NO: 1139182 - RNA, 23 nt, Human
uuuuuguauuuuuaauagagacg

SEQ ID NO: 1139183 - RNA, 21 nt, Human
uuuuuguauuuuuaguagaga

SEQ ID NO: 1139184 - RNA, 24 nt, Human
uuuuuuguauuuuuaguagagacg

SEQ ID NO: 1139185 - RNA, 24 nt, Human
aaacaaaacaaguaugagucacac

SEQ ID NO: 1139186 - RNA, 23 nt, Human
aaacaaacagaggaucauccuga

SEQ ID NO: 1139187 - RNA, 18 nt, Human
aagaugaaaaaguugaga

SEQ ID NO: 1139188 - RNA, 22 nt, Human
aagcucagguuauuagagccag

SEQ ID NO: 1139189 - RNA, 20 nt, Human
aaggaccuuaugaccaccag

SEQ ID NO: 1139190 - RNA, 19 nt, Human
accaccagccacacacaca

SEQ ID NO: 1139191 - RNA, 19 nt, Human
accuuaugaccaccagcca

SEQ ID NO: 1139192 - RNA, 18 nt, Human
caaaacaaguaugaguca

SEQ ID NO: 1139193 - RNA, 21 nt, Human
cacacaacccuauuuguuuuu

SEQ ID NO: 1139194 - RNA, 25 nt, Human
cacagacugcccagcacucuucacu

SEQ ID NO: 1139195 - RNA, 22 nt, Human
cacuauggugcuuagcaccuga

SEQ ID NO: 1139196 - RNA, 21 nt, Human
cagaggaucauccugaggcuc

SEQ ID NO: 1139197 - RNA, 18 nt, Human
caggagcacugcagcagc

SEQ ID NO: 1139198 - RNA, 25 nt, Human
caggagcacugcagcagcugucggg

SEQ ID NO: 1139199 - RNA, 21 nt, Human
cugaggcucuaagggucccag

SEQ ID NO: 1139200 - RNA, 23 nt, Human
cugcagcagcugucggggguggg

SEQ ID NO: 1139201 - RNA, 22 nt, Human
cugcucaggagcacugcagcag

SEQ ID NO: 1139202 - RNA, 18 nt, Human
gggaauggaaggcuggag

SEQ ID NO: 1139203 - RNA, 18 nt, Human
gggucccagcuucauaac

SEQ ID NO: 1139204 - RNA, 22 nt, Human
uaaaagaauuaaacaaaacaag

SEQ ID NO: 1139205 - RNA, 18 nt, Human
ucaggagcacugcagcag

SEQ ID NO: 1139206 - RNA, 20 nt, Human
ugcagcagcugucgggggug

SEQ ID NO: 1139207 - RNA, 23 nt, Human
ugcccagcacucuucacuguccc

SEQ ID NO: 1139208 - RNA, 25 nt, Human
uggaaggguguugcucccucuaauc

SEQ ID NO: 1139209 - RNA, 22 nt, Human
uggagcaggaggguggaagggu

SEQ ID NO: 1139210 - RNA, 21 nt, Human
aaagggcccuacccagacugc

SEQ ID NO: 1139211 - RNA, 20 nt, Human
aacaggccgggcgcccgccu

SEQ ID NO: 1139212 - RNA, 22 nt, Human
aagaggcucagagccuaccccu

SEQ ID NO: 1139213 - RNA, 25 nt, Human
aagaguagcaaggagagguccuggc

SEQ ID NO: 1139214 - RNA, 20 nt, Human
aaguacacccugggugacaa

SEQ ID NO: 1139215 - RNA, 23 nt, Human
acaauaaauccacuuucucugac

SEQ ID NO: 1139216 - RNA, 24 nt, Human
accccagcacucugagcagaauaa

SEQ ID NO: 1139217 - RNA, 20 nt, Human
acuuugggaagaguagcaag

SEQ ID NO: 1139218 - RNA, 18 nt, Human
agacagaguacaggaggg

SEQ ID NO: 1139219 - RNA, 25 nt, Human
agacuuuucccagggagccacacua

SEQ ID NO: 1139220 - RNA, 19 nt, Human
agaggauggaaggaauggu

SEQ ID NO: 1139221 - RNA, 22 nt, Human
agccacacugccuccccaccuc

SEQ ID NO: 1139222 - RNA, 21 nt, Human
agccgauacugcagccuaccu

SEQ ID NO: 1139223 - RNA, 21 nt, Human
agcucagcccuucgaccaccu

SEQ ID NO: 1139224 - RNA, 19 nt, Human
agggggugucucuucccgg

SEQ ID NO: 1139225 - RNA, 26 nt, Human
aguucccaggugauuucucgagcagc

SEQ ID NO: 1139226 - RNA, 25 nt, Human
aucucucuucacuggccgaagaccc

SEQ ID NO: 1139227 - RNA, 21 nt, Human
caaagcaacagacuuuuccca

SEQ ID NO: 1139228 - RNA, 24 nt, Human
cacagcucagcccuucgaccaccu

SEQ ID NO: 1139229 - RNA, 19 nt, Human
caccaucuguuaacagggc

SEQ ID NO: 1139230 - RNA, 23 nt, Human
caccucuucuuuaaccccucacu

SEQ ID NO: 1139231 - RNA, 22 nt, Human
cagccgcuuugccucccgacuu

SEQ ID NO: 1139232 - RNA, 23 nt, Human
caggccgggcgcccgccuugggc

SEQ ID NO: 1139233 - RNA, 19 nt, Human
cauuucauuaacauccccu

SEQ ID NO: 1139234 - RNA, 23 nt, Human
ccagggagaaaggaugggacccc

SEQ ID NO: 1139235 - RNA, 22 nt, Human
cccaaucuucccaccccucuca

SEQ ID NO: 1139236 - RNA, 23 nt, Human
cccaccccucucaggaagagcug

SEQ ID NO: 1139237 - RNA, 20 nt, Human
cccagaaacuccuaugacac

SEQ ID NO: 1139238 - RNA, 18 nt, Human
cccgcagucccuuccaga

SEQ ID NO: 1139239 - RNA, 20 nt, Human
cccucacuuggcagcuccag

SEQ ID NO: 1139240 - RNA, 23 nt, Human
cccucugccucaaagggcccuac

SEQ ID NO: 1139241 - RNA, 24 nt, Human
cccuucgaccaccugguucccagg

SEQ ID NO: 1139242 - RNA, 23 nt, Human
ccgccgaucgcaccgaagcccaa

SEQ ID NO: 1139243 - RNA, 18 nt, Human
ccggccucugcgucuucc

SEQ ID NO: 1139244 - RNA, 19 nt, Human
ccucccgccgccgaucgca

SEQ ID NO: 1139245 - RNA, 20 nt, Human
ccucccgccgccgaucgcac

SEQ ID NO: 1139246 - RNA, 23 nt, Human
ccucucaggaagagcuggguccc

SEQ ID NO: 1139247 - RNA, 21 nt, Human
ccucugcgucuucccccugga

SEQ ID NO: 1139248 - RNA, 19 nt, Human
ccuggcaaguacacccugg

SEQ ID NO: 1139249 - RNA, 22 nt, Human
cgaagacccucugccucaaagg

SEQ ID NO: 1139250 - RNA, 20 nt, Human
cggccucugcgucuuccccc

SEQ ID NO: 1139251 - RNA, 26 nt, Human
cggggcaagguccagcaccaucuguu

SEQ ID NO: 1139252 - RNA, 21 nt, Human
cggguggaucucgaaccugga

SEQ ID NO: 1139253 - RNA, 19 nt, Human
cucaggaagagcugggucc

SEQ ID NO: 1139254 - RNA, 20 nt, Human
cucccgccgccgaucgcacc

SEQ ID NO: 1139255 - RNA, 19 nt, Human
cuccuagaauacccaggac

SEQ ID NO: 1139256 - RNA, 18 nt, Human
cucuucccggccucugcg

SEQ ID NO: 1139257 - RNA, 24 nt, Human
cugagcagaauaaaucucucuuca

SEQ ID NO: 1139258 - RNA, 21 nt, Human
cugcugaagacagaguacagg

SEQ ID NO: 1139259 - RNA, 18 nt, Human
cuggagaaugccuaaaua

SEQ ID NO: 1139260 - RNA, 20 nt, Human
cugguucccagggaaccucc

SEQ ID NO: 1139261 - RNA, 20 nt, Human
cuguuaacagggcagccagg

SEQ ID NO: 1139262 - RNA, 26 nt, Human
cuuccggggcaagguccagcaccauc

SEQ ID NO: 1139263 - RNA, 19 nt, Human
gaacagcagggcucacugg

SEQ ID NO: 1139264 - RNA, 20 nt, Human
gaacccauguccccucccaa

SEQ ID NO: 1139265 - RNA, 23 nt, Human
gacguaaaaaagcuacaagcccc

SEQ ID NO: 1139266 - RNA, 19 nt, Human
gagcagcuucaguuuaccg

SEQ ID NO: 1139267 - RNA, 19 nt, Human
gaggggagccgaggcuagg

SEQ ID NO: 1139268 - RNA, 22 nt, Human
gcaguggcugcggggcuuccag

SEQ ID NO: 1139269 - RNA, 18 nt, Human
gcccugguuuccugacuc

SEQ ID NO: 1139270 - RNA, 19 nt, Human
gcccugguuuccugacuca

SEQ ID NO: 1139271 - RNA, 20 nt, Human
gccgccgaucgcaccgaagc

SEQ ID NO: 1139272 - RNA, 20 nt, Human
gcuaucuguguuuaaacaaa

SEQ ID NO: 1139273 - RNA, 19 nt, Human
gcugaagacagaguacagg

SEQ ID NO: 1139274 - RNA, 20 nt, Human
ggaaacgcaaucccgugucc

SEQ ID NO: 1139275 - RNA, 23 nt, Human
ggaaauaaagaggauggaaggaa

SEQ ID NO: 1139276 - RNA, 20 nt, Human
ggaaggaauggucccgcagu

SEQ ID NO: 1139277 - RNA, 21 nt, Human
gggagaaaggaugggacccca

SEQ ID NO: 1139278 - RNA, 18 nt, Human
ggucuugcucuguggcug

SEQ ID NO: 1139279 - RNA, 22 nt, Human
gugacauuccccacuuccuuca

SEQ ID NO: 1139280 - RNA, 19 nt, Human
uaaagaggauggaaggaau

SEQ ID NO: 1139281 - RNA, 25 nt, Human
uaacagggcagccagggagaaagga

SEQ ID NO: 1139282 - RNA, 23 nt, Human
uaaccccucacuuggcagcucca

SEQ ID NO: 1139283 - RNA, 19 nt, Human
uacaaaacacuguagcaau

SEQ ID NO: 1139284 - RNA, 23 nt, Human
uacccaggacugagaaccaaagc

SEQ ID NO: 1139285 - RNA, 18 nt, Human
uaccggagcccagccagg

SEQ ID NO: 1139286 - RNA, 19 nt, Human
uaccggagcccagccagga

SEQ ID NO: 1139287 - RNA, 22 nt, Human
uagcaauaagagaaaggcccgu

SEQ ID NO: 1139288 - RNA, 21 nt, Human
uauggucaggcucuggugacc

SEQ ID NO: 1139289 - RNA, 18 nt, Human
ucagagcuucaagccgau

SEQ ID NO: 1139290 - RNA, 20 nt, Human
ucccaaaacgcaaccuugga

SEQ ID NO: 1139291 - RNA, 18 nt, Human
ucccagggaaccucccgc

SEQ ID NO: 1139292 - RNA, 21 nt, Human
ucccauccccaaucuucccac

SEQ ID NO: 1139293 - RNA, 24 nt, Human
ucccauccccaaucuucccacccc

SEQ ID NO: 1139294 - RNA, 24 nt, Human
uccccaaucuucccaccccucuca

SEQ ID NO: 1139295 - RNA, 21 nt, Human
uccccaccucuucuuuaaccc

SEQ ID NO: 1139296 - RNA, 24 nt, Human
uccccaccucuucuuuaaccccuc

SEQ ID NO: 1139297 - RNA, 18 nt, Human
uccccugggagggggcag

SEQ ID NO: 1139298 - RNA, 21 nt, Human
uccuggcaaguacacccuggg

SEQ ID NO: 1139299 - RNA, 19 nt, Human
ucgguccugcccaaggccc

SEQ ID NO: 1139300 - RNA, 21 nt, Human
ucucaggaagagcuggguccc

SEQ ID NO: 1139301 - RNA, 22 nt, Human
ucuggugacccagccgcuuugc

SEQ ID NO: 1139302 - RNA, 23 nt, Human
ucuuuaaccccucacuuggcagc

SEQ ID NO: 1139303 - RNA, 27 nt, Human
ugaaaaagaacuggcccugguuuccug

SEQ ID NO: 1139304 - RNA, 19 nt, Human
ugacacaauaaauccacuu

SEQ ID NO: 1139305 - RNA, 22 nt, Human
ugacguaaaaaagcuacaagcc

SEQ ID NO: 1139306 - RNA, 21 nt, Human
ugcaguggcugcggggcuucc

SEQ ID NO: 1139307 - RNA, 23 nt, Human
ugcaguggcugcggggcuuccag

SEQ ID NO: 1139308 - RNA, 19 nt, Human
uggccgaagacccucugcc

SEQ ID NO: 1139309 - RNA, 18 nt, Human
ugggagggggcagucagg

SEQ ID NO: 1139310 - RNA, 19 nt, Human
ugggagggggcagucaggc

SEQ ID NO: 1139311 - RNA, 21 nt, Human
uucauuucauuaacauccccu

SEQ ID NO: 1139312 - RNA, 19 nt, Human
uuccugacucaaagggccc

SEQ ID NO: 1139313 - RNA, 18 nt, Human
uucuuuaaccccucacuu

SEQ ID NO: 1139314 - RNA, 24 nt, Human
uugggcgcaucuccgccucuuagg

SEQ ID NO: 1139315 - RNA, 18 nt, Human
aacuuccuuuugaaccuu

SEQ ID NO: 1139316 - RNA, 21 nt, Human
aagaagagggauccagcagug

SEQ ID NO: 1139317 - RNA, 19 nt, Human
agaagagggauccagcagu

SEQ ID NO: 1139318 - RNA, 19 nt, Human
agcaggaauggggcuaggu

SEQ ID NO: 1139319 - RNA, 20 nt, Human
agcccccacacuggccugac

SEQ ID NO: 1139320 - RNA, 24 nt, Human
agggcagacugggcagaaaggccu

SEQ ID NO: 1139321 - RNA, 18 nt, Human
aggugcuuccuccccugg

SEQ ID NO: 1139322 - RNA, 21 nt, Human
auggggcuaggugcuuccucc

SEQ ID NO: 1139323 - RNA, 21 nt, Human
cacagccgccccacuccaggg

SEQ ID NO: 1139324 - RNA, 18 nt, Human
caccucauccuccuguuc

SEQ ID NO: 1139325 - RNA, 20 nt, Human
cagcagcaacucuuggauuu

SEQ ID NO: 1139326 - RNA, 19 nt, Human
caggaggaauaagagggca

SEQ ID NO: 1139327 - RNA, 21 nt, Human
caggaggaauaagagggcaga

SEQ ID NO: 1139328 - RNA, 19 nt, Human
cagggccaggcuggcgcug

SEQ ID NO: 1139329 - RNA, 18 nt, Human
ccagcagugagaucaggc

SEQ ID NO: 1139330 - RNA, 20 nt, Human
ccagcagugagaucaggcag

SEQ ID NO: 1139331 - RNA, 18 nt, Human
cccacacuggccugacca

SEQ ID NO: 1139332 - RNA, 18 nt, Human
ccccaaccaagggcaggg

SEQ ID NO: 1139333 - RNA, 22 nt, Human
ccccacacuggccugaccaucu

SEQ ID NO: 1139334 - RNA, 26 nt, Human
ccccacacuggccugaccaucucccc

SEQ ID NO: 1139335 - RNA, 23 nt, Human
ccccugggauggcagcuuggccu

SEQ ID NO: 1139336 - RNA, 24 nt, Human
ccccuugggccccuccagagacaa

SEQ ID NO: 1139337 - RNA, 23 nt, Human
ccuccagcacugccucccugccc

SEQ ID NO: 1139338 - RNA, 21 nt, Human
ccucccagucugggguaccug

SEQ ID NO: 1139339 - RNA, 18 nt, Human
ccucucagcucugcacag

SEQ ID NO: 1139340 - RNA, 21 nt, Human
ccuggcagcaguuccgccagc

SEQ ID NO: 1139341 - RNA, 20 nt, Human
ccuugggccccuccagagac

SEQ ID NO: 1139342 - RNA, 20 nt, Human
ccuuugcucuuugcuguccu

SEQ ID NO: 1139343 - RNA, 19 nt, Human
ccuuuugaaccuuuuuauu

SEQ ID NO: 1139344 - RNA, 19 nt, Human
cgcagcaacuuccuuuuga

SEQ ID NO: 1139345 - RNA, 21 nt, Human
cgguggggccaggaugaggcc

SEQ ID NO: 1139346 - RNA, 18 nt, Human
cucauccuccuguucuca

SEQ ID NO: 1139347 - RNA, 21 nt, Human
cuccagcacugccucccugcc

SEQ ID NO: 1139348 - RNA, 20 nt, Human
cuccauggcugcucaguugg

SEQ ID NO: 1139349 - RNA, 25 nt, Human
cucugcacagacguccucgcucccc

SEQ ID NO: 1139350 - RNA, 19 nt, Human
cugcucucccuccugggau

SEQ ID NO: 1139351 - RNA, 21 nt, Human
cugcugccucccacucugcag

SEQ ID NO: 1139352 - RNA, 19 nt, Human
cugggcugggcacacaggc

SEQ ID NO: 1139353 - RNA, 22 nt, Human
cuuggauuuauuggaaagauuu

SEQ ID NO: 1139354 - RNA, 21 nt, Human
gaagugcuguuccugcagcug

SEQ ID NO: 1139355 - RNA, 19 nt, Human
gacccuacagccucccugg

SEQ ID NO: 1139356 - RNA, 20 nt, Human
gaggagccaccugaggccuc

SEQ ID NO: 1139357 - RNA, 26 nt, Human
gaggcccagucuguuccccgggcccg

SEQ ID NO: 1139358 - RNA, 20 nt, Human
gcagacugggcagaaaggcc

SEQ ID NO: 1139359 - RNA, 24 nt, Human
gcagcaguuccgccagcauuucuu

SEQ ID NO: 1139360 - RNA, 18 nt, Human
gcagugcccaagaguuuc

SEQ ID NO: 1139361 - RNA, 23 nt, Human
gccagcauuucuguaaaugcccu

SEQ ID NO: 1139362 - RNA, 19 nt, Human
gccccgggcuguccuuacc

SEQ ID NO: 1139363 - RNA, 22 nt, Human
gcucuuugcuguccucagaggc

SEQ ID NO: 1139364 - RNA, 21 nt, Human
gcugggcacacaggcagugcc

SEQ ID NO: 1139365 - RNA, 21 nt, Human
gcuguggcccuugcuggccug

SEQ ID NO: 1139366 - RNA, 21 nt, Human
gcuuggccugcuggucuuggg

SEQ ID NO: 1139367 - RNA, 24 nt, Human
ggaagaggagugccagcccuuacc

SEQ ID NO: 1139368 - RNA, 22 nt, Human
ggcaggaagaagagggauccag

SEQ ID NO: 1139369 - RNA, 21 nt, Human
gggaaacaggcucuguccaca

SEQ ID NO: 1139370 - RNA, 19 nt, Human
gggcagaccuucuuaggga

SEQ ID NO: 1139371 - RNA, 23 nt, Human
gggccccuccagagacaauccac

SEQ ID NO: 1139372 - RNA, 20 nt, Human
gggguugagccagccuccag

SEQ ID NO: 1139373 - RNA, 19 nt, Human
guggggccaggaugaggcc

SEQ ID NO: 1139374 - RNA, 18 nt, Human
uaccugaguccugggcag

SEQ ID NO: 1139375 - RNA, 21 nt, Human
uagcccccacacuggccugac

SEQ ID NO: 1139376 - RNA, 21 nt, Human
uccacacaaagucgguggggc

SEQ ID NO: 1139377 - RNA, 19 nt, Human
uccagccagagcucuguca

SEQ ID NO: 1139378 - RNA, 22 nt, Human
ucccccuuacugugucugccaa

SEQ ID NO: 1139379 - RNA, 18 nt, Human
uccuccaggucuccuggg

SEQ ID NO: 1139380 - RNA, 19 nt, Human
uccugcucugccuucuggg

SEQ ID NO: 1139381 - RNA, 19 nt, Human
ucgaagccccgggcugucc

SEQ ID NO: 1139382 - RNA, 21 nt, Human
ucgaagccccgggcuguccuu

SEQ ID NO: 1139383 - RNA, 20 nt, Human
ucuguaaaugcccucaugcc

SEQ ID NO: 1139384 - RNA, 22 nt, Human
ucuguaaaugcccucaugccag

SEQ ID NO: 1139385 - RNA, 22 nt, Human
ucuuccugcucugccuucuggg

SEQ ID NO: 1139386 - RNA, 18 nt, Human
ucuugggguugagccagc

SEQ ID NO: 1139387 - RNA, 19 nt, Human
ugaguccugggcagaccuu

SEQ ID NO: 1139388 - RNA, 24 nt, Human
ugccaagggugccagcacagccgc

SEQ ID NO: 1139389 - RNA, 25 nt, Human
ugccaagggugccagcacagccgcc

SEQ ID NO: 1139390 - RNA, 22 nt, Human
ugcccaagaguuucuaaugagc

SEQ ID NO: 1139391 - RNA, 20 nt, Human
ugccucccugcccugcugcc

SEQ ID NO: 1139392 - RNA, 22 nt, Human
ugccuucuggggcuguggcccu

SEQ ID NO: 1139393 - RNA, 19 nt, Human
ugcucucccuccugggaua

SEQ ID NO: 1139394 - RNA, 23 nt, Human
ugcuuccuccccuggggacuuca

SEQ ID NO: 1139395 - RNA, 19 nt, Human
uggcagccuggccuauagc

SEQ ID NO: 1139396 - RNA, 23 nt, Human
uggcaggaagugcuguuccugca

SEQ ID NO: 1139397 - RNA, 20 nt, Human
ugggauggcagcuuggccug

SEQ ID NO: 1139398 - RNA, 21 nt, Human
uguggaugaagccaggcuggg

SEQ ID NO: 1139399 - RNA, 18 nt, Human
uguggcccuugcuggccu

SEQ ID NO: 1139400 - RNA, 18 nt, Human
uguuagaggcucagaacc

SEQ ID NO: 1139401 - RNA, 22 nt, Human
uuggauuuauuggaaagauuuu

SEQ ID NO: 1139402 - RNA, 23 nt, Human
uugggggcagcagcauucagucc

SEQ ID NO: 1139403 - RNA, 21 nt, Human
uuuugccagaggacccuacag

SEQ ID NO: 1139404 - RNA, 21 nt, Human
aaacaaagcucaaauucuccu

SEQ ID NO: 1139405 - RNA, 18 nt, Human
acaucgauggcgaaagaa

SEQ ID NO: 1139406 - RNA, 21 nt, Human
cacacauuuugcgauaacauc

SEQ ID NO: 1139407 - RNA, 24 nt, Human
cacgccuguuacuacagcuggagg

SEQ ID NO: 1139408 - RNA, 18 nt, Human
cccggccgagaccccgcg

SEQ ID NO: 1139409 - RNA, 18 nt, Human
ccgcacccucacgcuccc

SEQ ID NO: 1139410 - RNA, 19 nt, Human
ccguaugcggcgaaaccgc

SEQ ID NO: 1139411 - RNA, 20 nt, Human
cgccggggcugcuuaccugg

SEQ ID NO: 1139412 - RNA, 22 nt, Human
cggcgaaaccgccggggcugcu

SEQ ID NO: 1139413 - RNA, 23 nt, Human
cggggcugcuuaccuggcccgca

SEQ ID NO: 1139414 - RNA, 26 nt, Human
cuacagcuggagggaaaccggggucc

SEQ ID NO: 1139415 - RNA, 19 nt, Human
cucaaauucuccugacuuc

SEQ ID NO: 1139416 - RNA, 20 nt, Human
gagccgcugcgcguggcugg

SEQ ID NO: 1139417 - RNA, 20 nt, Human
ggccgagaccccgcggagcc

SEQ ID NO: 1139418 - RNA, 24 nt, Human
uaaaauaaaaugauguccaaaagg

SEQ ID NO: 1139419 - RNA, 25 nt, Human
uaaaaugauguccaaaagguuugcu

SEQ ID NO: 1139420 - RNA, 25 nt, Human
uccuucagagcgcggacccggccga

SEQ ID NO: 1139421 - RNA, 21 nt, Human
uguccaaaagguuugcuuguu

SEQ ID NO: 1139422 - RNA, 24 nt, Human
uguccaaaagguuugcuuguuuuu

SEQ ID NO: 1139423 - RNA, 20 nt, Human
uguuguaaauccuccugcgg

SEQ ID NO: 1139424 - RNA, 23 nt, Human
uuaguuucauaaaacucagcauu

SEQ ID NO: 1139425 - RNA, 20 nt, Human
uuauuuauuuauuuauuuuu

SEQ ID NO: 1139426 - RNA, 23 nt, Human
uucucucacacauuuugcgauaa

SEQ ID NO: 1139427 - RNA, 22 nt, Human
uuuauuuauuuauuuauuuauu

SEQ ID NO: 1139428 - RNA, 21 nt, Human
aaaaaagagagagagagagaa

SEQ ID NO: 1139429 - RNA, 22 nt, Human
aaauccagccucugggagcagg

SEQ ID NO: 1139430 - RNA, 19 nt, Human
aacccaggcuccccugucu

SEQ ID NO: 1139431 - RNA, 19 nt, Human
aagaaguccaugggcccuc

SEQ ID NO: 1139432 - RNA, 19 nt, Human
aaggccccaagaugggaaa

SEQ ID NO: 1139433 - RNA, 24 nt, Human
aagugauccacccgccucggccuc

SEQ ID NO: 1139434 - RNA, 19 nt, Human
aaguucccugccaccccuc

SEQ ID NO: 1139435 - RNA, 21 nt, Human
aaucccagaggcaucuuuaga

SEQ ID NO: 1139436 - RNA, 21 nt, Human
acaaaacacacgccaacacca

SEQ ID NO: 1139437 - RNA, 24 nt, Human
acacacacaaaacacacgccaaca

SEQ ID NO: 1139438 - RNA, 23 nt, Human
acacagcacugcuaggcgccccu

SEQ ID NO: 1139439 - RNA, 21 nt, Human
acaccaggcuaauuuuuguau

SEQ ID NO: 1139440 - RNA, 19 nt, Human
acacuggguggccaaagag

SEQ ID NO: 1139441 - RNA, 21 nt, Human
acacuggguggccaaagagca

SEQ ID NO: 1139442 - RNA, 21 nt, Human
acagagcaguaguaggugcca

SEQ ID NO: 1139443 - RNA, 20 nt, Human
acagagcgugcucuguagcc

SEQ ID NO: 1139444 - RNA, 20 nt, Human
acaggacagccaguggccuc

SEQ ID NO: 1139445 - RNA, 19 nt, Human
accagaggggugauggguc

SEQ ID NO: 1139446 - RNA, 19 nt, Human
accagguuaaguucgccau

SEQ ID NO: 1139447 - RNA, 20 nt, Human
acccugaaguucccugccac

SEQ ID NO: 1139448 - RNA, 19 nt, Human
accgaguggcaaggccccu

SEQ ID NO: 1139449 - RNA, 18 nt, Human
accucucugcuuaccuuc

SEQ ID NO: 1139450 - RNA, 18 nt, Human
acgggguuucaccacguu

SEQ ID NO: 1139451 - RNA, 20 nt, Human
acgggguuucaccacguugg

SEQ ID NO: 1139452 - RNA, 24 nt, Human
acgggguuucaccacguuggccag

SEQ ID NO: 1139453 - RNA, 19 nt, Human
acuacaggugcgugccacc

SEQ ID NO: 1139454 - RNA, 21 nt, Human
acucaagccaccccauccccc

SEQ ID NO: 1139455 - RNA, 20 nt, Human
agaccuaggagggcagggca

SEQ ID NO: 1139456 - RNA, 20 nt, Human
agagaaagaaaaaggaaaag

SEQ ID NO: 1139457 - RNA, 21 nt, Human
agagacagggcugcccugcug

SEQ ID NO: 1139458 - RNA, 25 nt, Human
agaggggagguugggaagaccuagg

SEQ ID NO: 1139459 - RNA, 21 nt, Human
agauucuccugccuuagccuc

SEQ ID NO: 1139460 - RNA, 19 nt, Human
agcaagugcugacagagca

SEQ ID NO: 1139461 - RNA, 20 nt, Human
agcacgccaaggaggagccg

SEQ ID NO: 1139462 - RNA, 23 nt, Human
agcaggggaggccaaggccaggu

SEQ ID NO: 1139463 - RNA, 21 nt, Human
agccagggaguccccuucugu

SEQ ID NO: 1139464 - RNA, 21 nt, Human
agccucucgaguagcugggac

SEQ ID NO: 1139465 - RNA, 19 nt, Human
aggaagggccuugaaugug

SEQ ID NO: 1139466 - RNA, 23 nt, Human
aggagauagcuguguuggccagg

SEQ ID NO: 1139467 - RNA, 21 nt, Human
aggaggagccagggggcugcg

SEQ ID NO: 1139468 - RNA, 19 nt, Human
aggcagggaugccuggggg

SEQ ID NO: 1139469 - RNA, 22 nt, Human
aggcagggaugccugggggugc

SEQ ID NO: 1139470 - RNA, 21 nt, Human
aggcagugagcagggcucugg

SEQ ID NO: 1139471 - RNA, 23 nt, Human
aggcugcccuacuggcugaggug

SEQ ID NO: 1139472 - RNA, 18 nt, Human
agggaggccaugaugggc

SEQ ID NO: 1139473 - RNA, 18 nt, Human
agggcgugggaggccugg

SEQ ID NO: 1139474 - RNA, 22 nt, Human
agggcuccucugucccuggaga

SEQ ID NO: 1139475 - RNA, 21 nt, Human
aggggcaggggccugcagggg

SEQ ID NO: 1139476 - RNA, 25 nt, Human
agggggcugcggggagcccaggagg

SEQ ID NO: 1139477 - RNA, 19 nt, Human
aggugccaguggccgaugc

SEQ ID NO: 1139478 - RNA, 18 nt, Human
aguagcugggacuacagg

SEQ ID NO: 1139479 - RNA, 18 nt, Human
aguagcugggacuacagg

SEQ ID NO: 1139480 - RNA, 21 nt, Human
aguaggugccaguggccgaug

SEQ ID NO: 1139481 - RNA, 21 nt, Human
aguccaggguggcaguuuguu

SEQ ID NO: 1139482 - RNA, 25 nt, Human
aucccagaggcaucuuuagaaugga

SEQ ID NO: 1139483 - RNA, 25 nt, Human
aucccccuuagcuuuuccccuccaa

SEQ ID NO: 1139484 - RNA, 21 nt, Human
auggagcauggacuuuacauu

SEQ ID NO: 1139485 - RNA, 22 nt, Human
augggcaggccgguguggguca

SEQ ID NO: 1139486 - RNA, 22 nt, Human
auuuucucaagcaagugcugac

SEQ ID NO: 1139487 - RNA, 24 nt, Human
auuuuuguauuuuuaguagagacg

SEQ ID NO: 1139488 - RNA, 21 nt, Human
caaauccagccucugggagca

SEQ ID NO: 1139489 - RNA, 24 nt, Human
caacaugcugggauuacaggcaua

SEQ ID NO: 1139490 - RNA, 20 nt, Human
caacucagaucaaguccuuu

SEQ ID NO: 1139491 - RNA, 22 nt, Human
caagagauucuccugccuuagc

SEQ ID NO: 1139492 - RNA, 20 nt, Human
caagccaccccaucccccuu

SEQ ID NO: 1139493 - RNA, 19 nt, Human
cacacacaaaacacacgcc

SEQ ID NO: 1139494 - RNA, 20 nt, Human
cacacacaaaacacacgcca

SEQ ID NO: 1139495 - RNA, 24 nt, Human
cacacacaaaacacacgccaacac

SEQ ID NO: 1139496 - RNA, 19 nt, Human
cacaccggguucagcgcag

SEQ ID NO: 1139497 - RNA, 19 nt, Human
cacacguggcaaggagggc

SEQ ID NO: 1139498 - RNA, 20 nt, Human
cacagcacugcuaggcgccc

SEQ ID NO: 1139499 - RNA, 21 nt, Human
cacaggcugguucuccaucug

SEQ ID NO: 1139500 - RNA, 24 nt, Human
caccacaccaggcuaauuuuugua

SEQ ID NO: 1139501 - RNA, 21 nt, Human
caccacguuggccaggcuggu

SEQ ID NO: 1139502 - RNA, 24 nt, Human
caccacguuggccaggcuggucuc

SEQ ID NO: 1139503 - RNA, 27 nt, Human
caccacguuggccaggcuggucucaaa

SEQ ID NO: 1139504 - RNA, 21 nt, Human
cacccacauaugucaccucca

SEQ ID NO: 1139505 - RNA, 18 nt, Human
cacccacugagcuucugc

SEQ ID NO: 1139506 - RNA, 18 nt, Human
cacccacugccucccagc

SEQ ID NO: 1139507 - RNA, 20 nt, Human
cacccuaacuccaguccccg

SEQ ID NO: 1139508 - RNA, 19 nt, Human
caccuccccaaacaggccc

SEQ ID NO: 1139509 - RNA, 24 nt, Human
cacguuggccaggcuggucucaaa

SEQ ID NO: 1139510 - RNA, 18 nt, Human
cacugcaaccucugucuc

SEQ ID NO: 1139511 - RNA, 20 nt, Human
cagaaggaacagccugggca

SEQ ID NO: 1139512 - RNA, 25 nt, Human
cagcacccuccuucccucaccucuc

SEQ ID NO: 1139513 - RNA, 21 nt, Human
cagcagcagcacgccaaggag

SEQ ID NO: 1139514 - RNA, 19 nt, Human
cagccacaccggguucagc

SEQ ID NO: 1139515 - RNA, 21 nt, Human
cagccauguccugggccucca

SEQ ID NO: 1139516 - RNA, 22 nt, Human
cagccauguccugggccuccag

SEQ ID NO: 1139517 - RNA, 20 nt, Human
cagccccugcucccacccug

SEQ ID NO: 1139518 - RNA, 22 nt, Human
cagccccugcucccacccugcc

SEQ ID NO: 1139519 - RNA, 21 nt, Human
cagccugggcaaaggccccaa

SEQ ID NO: 1139520 - RNA, 23 nt, Human
cagccugggugggucucaaaagc

SEQ ID NO: 1139521 - RNA, 19 nt, Human
caggaagggccuugaaugg

SEQ ID NO: 1139522 - RNA, 19 nt, Human
caggagucaagcgggggug

SEQ ID NO: 1139523 - RNA, 20 nt, Human
caggcccagugagguggccc

SEQ ID NO: 1139524 - RNA, 18 nt, Human
caggggaggccaaggcca

SEQ ID NO: 1139525 - RNA, 24 nt, Human
caggggaggccaaggccaggugug

SEQ ID NO: 1139526 - RNA, 22 nt, Human
caggguccucccucagcucaga

SEQ ID NO: 1139527 - RNA, 24 nt, Human
caguaguaggugccaguggccgau

SEQ ID NO: 1139528 - RNA, 22 nt, Human
caugaugggcaggccggugugg

SEQ ID NO: 1139529 - RNA, 25 nt, Human
caugcaccucccacccugaaguucc

SEQ ID NO: 1139530 - RNA, 23 nt, Human
ccaacaugcugggauuacaggca

SEQ ID NO: 1139531 - RNA, 24 nt, Human
ccaacaugcugggauuacaggcau

SEQ ID NO: 1139532 - RNA, 20 nt, Human
ccacccucccuugggccaaa

SEQ ID NO: 1139533 - RNA, 22 nt, Human
ccacugcaaguucuggacuggu

SEQ ID NO: 1139534 - RNA, 18 nt, Human
ccagcacauguucccaug

SEQ ID NO: 1139535 - RNA, 21 nt, Human
ccaggagcucccauucauacc

SEQ ID NO: 1139536 - RNA, 19 nt, Human
ccaggcccauucauucagc

SEQ ID NO: 1139537 - RNA, 23 nt, Human
ccagggaguccccuucuguccuu

SEQ ID NO: 1139538 - RNA, 25 nt, Human
ccaugggcccucugcuaggguggca

SEQ ID NO: 1139539 - RNA, 24 nt, Human
cccaacaugcugggauuacaggca

SEQ ID NO: 1139540 - RNA, 20 nt, Human
cccacacagcacugcuaggc

SEQ ID NO: 1139541 - RNA, 21 nt, Human
cccacacagcacugcuaggcg

SEQ ID NO: 1139542 - RNA, 25 nt, Human
cccacacagcacugcuaggcgcccc

SEQ ID NO: 1139543 - RNA, 23 nt, Human
cccacauaugucaccuccagaca

SEQ ID NO: 1139544 - RNA, 23 nt, Human
cccacccuaacuccaguccccac

SEQ ID NO: 1139545 - RNA, 23 nt, Human
cccagccuugcccugaaccaagc

SEQ ID NO: 1139546 - RNA, 22 nt, Human
cccagcucugggcagcccuggc

SEQ ID NO: 1139547 - RNA, 22 nt, Human
cccaggcuccccugucuacccc

SEQ ID NO: 1139548 - RNA, 21 nt, Human
cccagguucaagagauucucc

SEQ ID NO: 1139549 - RNA, 22 nt, Human
ccccacccucccuugggccaaa

SEQ ID NO: 1139550 - RNA, 27 nt, Human
ccccaggagcucccauucauacccucu

SEQ ID NO: 1139551 - RNA, 22 nt, Human
ccccaucccccuuagcuuuucc

SEQ ID NO: 1139552 - RNA, 18 nt, Human
cccccaccuccuuggcug

SEQ ID NO: 1139553 - RNA, 20 nt, Human
ccccucucuguucuuccucc

SEQ ID NO: 1139554 - RNA, 24 nt, Human
ccccucucuguucuuccuccuccc

SEQ ID NO: 1139555 - RNA, 22 nt, Human
ccccugaaaaagacuggaaaau

SEQ ID NO: 1139556 - RNA, 22 nt, Human
cccgccugcaagcacacguggc

SEQ ID NO: 1139557 - RNA, 20 nt, Human
cccugaaaaagacuggaaaa

SEQ ID NO: 1139558 - RNA, 21 nt, Human
cccugaaaaagacuggaaaau

SEQ ID NO: 1139559 - RNA, 27 nt, Human
cccugaaccaagcacagacgaccacca

SEQ ID NO: 1139560 - RNA, 20 nt, Human
cccugacccuugcccccacc

SEQ ID NO: 1139561 - RNA, 18 nt, Human
cccugaggccacccagcc

SEQ ID NO: 1139562 - RNA, 24 nt, Human
cccugcugcgguagggcccagggg

SEQ ID NO: 1139563 - RNA, 19 nt, Human
cccugugccagcuugucuc

SEQ ID NO: 1139564 - RNA, 25 nt, Human
ccgccugcaagcacacguggcaagg

SEQ ID NO: 1139565 - RNA, 20 nt, Human
ccucacaggcugguucucca

SEQ ID NO: 1139566 - RNA, 20 nt, Human
ccuccagacacacacaaaac

SEQ ID NO: 1139567 - RNA, 23 nt, Human
ccuccagacacacacaaaacaca

SEQ ID NO: 1139568 - RNA, 20 nt, Human
ccucccacgccagccccugc

SEQ ID NO: 1139569 - RNA, 21 nt, Human
ccucccagccuugcccugaac

SEQ ID NO: 1139570 - RNA, 21 nt, Human
ccuccuagcuuaguucugggc

SEQ ID NO: 1139571 - RNA, 20 nt, Human
ccuccuccucccugccucuc

SEQ ID NO: 1139572 - RNA, 18 nt, Human
ccucucacuuagacuccu

SEQ ID NO: 1139573 - RNA, 20 nt, Human
ccucucuguccccucucugu

SEQ ID NO: 1139574 - RNA, 23 nt, Human
ccucucuguccccucucuguucu

SEQ ID NO: 1139575 - RNA, 18 nt, Human
ccugaaccaagcacagac

SEQ ID NO: 1139576 - RNA, 27 nt, Human
ccugacccuugcccccaccuccuuggc

SEQ ID NO: 1139577 - RNA, 18 nt, Human
ccugcaagcacacguggc

SEQ ID NO: 1139578 - RNA, 21 nt, Human
ccugcaccccaggagcuccca

SEQ ID NO: 1139579 - RNA, 21 nt, Human
ccugcagcugaaggagauagc

SEQ ID NO: 1139580 - RNA, 23 nt, Human
ccuggaagguccacagcuccccu

SEQ ID NO: 1139581 - RNA, 20 nt, Human
ccuggcagcuucaccucccc

SEQ ID NO: 1139582 - RNA, 18 nt, Human
ccuggccucaagugaucc

SEQ ID NO: 1139583 - RNA, 22 nt, Human
ccuggccucaagugauccaccc

SEQ ID NO: 1139584 - RNA, 23 nt, Human
ccuggccucaagugauccacccg

SEQ ID NO: 1139585 - RNA, 21 nt, Human
ccuggccugagcugucuugac

SEQ ID NO: 1139586 - RNA, 19 nt, Human
ccuggucuugcuggcuucg

SEQ ID NO: 1139587 - RNA, 21 nt, Human
ccuuccccacccuaacuccag

SEQ ID NO: 1139588 - RNA, 19 nt, Human
ccuugaaugugagggugaa

SEQ ID NO: 1139589 - RNA, 23 nt, Human
ccuugcucacugaagaccucagc

SEQ ID NO: 1139590 - RNA, 19 nt, Human
ccuuucugagacacugagu

SEQ ID NO: 1139591 - RNA, 21 nt, Human
cgcugcagagcuguguagaca

SEQ ID NO: 1139592 - RNA, 24 nt, Human
cgggguuucaccacguuggccagg

SEQ ID NO: 1139593 - RNA, 20 nt, Human
cuagagauuuucauagaccg

SEQ ID NO: 1139594 - RNA, 23 nt, Human
cucacugaagaccucagcaccca

SEQ ID NO: 1139595 - RNA, 24 nt, Human
cucacugcaaccucugucucccag

SEQ ID NO: 1139596 - RNA, 24 nt, Human
cucacugcaaccucugucucccag

SEQ ID NO: 1139597 - RNA, 21 nt, Human
cucagcacccacugccuccca

SEQ ID NO: 1139598 - RNA, 20 nt, Human
cuccacucaagccaccccau

SEQ ID NO: 1139599 - RNA, 21 nt, Human
cuccaggcccauucauucagc

SEQ ID NO: 1139600 - RNA, 19 nt, Human
cucccacgccagccccugc

SEQ ID NO: 1139601 - RNA, 22 nt, Human
cucccagaagcugguuucccag

SEQ ID NO: 1139602 - RNA, 23 nt, Human
cucccagccuugcccugaaccuu

SEQ ID NO: 1139603 - RNA, 21 nt, Human
cucccgccugccccaugcacc

SEQ ID NO: 1139604 - RNA, 23 nt, Human
cucccgccugccccaugcaccuc

SEQ ID NO: 1139605 - RNA, 20 nt, Human
cuccuccauaccucggcucc

SEQ ID NO: 1139606 - RNA, 23 nt, Human
cuccugcauaagcugucugccaa

SEQ ID NO: 1139607 - RNA, 23 nt, Human
cuccugcuaagccagcacccucc

SEQ ID NO: 1139608 - RNA, 23 nt, Human
cucgaguagcugggacuacaggu

SEQ ID NO: 1139609 - RNA, 18 nt, Human
cucucagccauguccugg

SEQ ID NO: 1139610 - RNA, 19 nt, Human
cucugcuuaccuugcuccc

SEQ ID NO: 1139611 - RNA, 18 nt, Human
cucugggcagcccuggcc

SEQ ID NO: 1139612 - RNA, 25 nt, Human
cucuguccccucucuguucuuccuc

SEQ ID NO: 1139613 - RNA, 24 nt, Human
cugacuguccuccugccagucgca

SEQ ID NO: 1139614 - RNA, 19 nt, Human
cugcaaccucugucuccca

SEQ ID NO: 1139615 - RNA, 23 nt, Human
cugcaaccucugucucccagguu

SEQ ID NO: 1139616 - RNA, 24 nt, Human
cugcaaccucugucucccagguuc

SEQ ID NO: 1139617 - RNA, 23 nt, Human
cugccuuagccucucgaguagcu

SEQ ID NO: 1139618 - RNA, 21 nt, Human
cugggggccugcuugucugcg

SEQ ID NO: 1139619 - RNA, 24 nt, Human
cugugaagggaaccccagccacac

SEQ ID NO: 1139620 - RNA, 24 nt, Human
cuuagccucucgaguagcugggac

SEQ ID NO: 1139621 - RNA, 24 nt, Human
cuucaccuaggccucaccuacucc

SEQ ID NO: 1139622 - RNA, 22 nt, Human
cuugccucugagggguccauca

SEQ ID NO: 1139623 - RNA, 20 nt, Human
cuuggggcugcuggcagauc

SEQ ID NO: 1139624 - RNA, 21 nt, Human
gaaaguagcugacugugaaaa

SEQ ID NO: 1139625 - RNA, 23 nt, Human
gaacagccugggcaaaggcccca

SEQ ID NO: 1139626 - RNA, 18 nt, Human
gaacaggugcucaguccu

SEQ ID NO: 1139627 - RNA, 20 nt, Human
gacagagcgugcucuguagc

SEQ ID NO: 1139628 - RNA, 19 nt, Human
gaccccgcauccgcuucuc

SEQ ID NO: 1139629 - RNA, 22 nt, Human
gagaaagaaaaaggaaaagcag

SEQ ID NO: 1139630 - RNA, 24 nt, Human
gagacgggguuucaccacguuggc

SEQ ID NO: 1139631 - RNA, 19 nt, Human
gagacuggggaagcccccu

SEQ ID NO: 1139632 - RNA, 21 nt, Human
gagcaguaguaggugccagug

SEQ ID NO: 1139633 - RNA, 22 nt, Human
gagcuucugccugagccaggga

SEQ ID NO: 1139634 - RNA, 24 nt, Human
gaggcagugagcagggcucugggc

SEQ ID NO: 1139635 - RNA, 23 nt, Human
gaggggcgcuuugcugguugggc

SEQ ID NO: 1139636 - RNA, 18 nt, Human
gauuacaggcauaagcca

SEQ ID NO: 1139637 - RNA, 19 nt, Human
gauuacaggcauaagccac

SEQ ID NO: 1139638 - RNA, 21 nt, Human
gauuacaggcauaagccacua

SEQ ID NO: 1139639 - RNA, 22 nt, Human
gcaaccucugucucccagguuc

SEQ ID NO: 1139640 - RNA, 19 nt, Human
gcaaggccccugcucccag

SEQ ID NO: 1139641 - RNA, 18 nt, Human
gcaccagacuucccuggu

SEQ ID NO: 1139642 - RNA, 21 nt, Human
gccacuacgccuggccugagc

SEQ ID NO: 1139643 - RNA, 18 nt, Human
gcccaggagggcguggga

SEQ ID NO: 1139644 - RNA, 18 nt, Human
gccccugcucccagaagc

SEQ ID NO: 1139645 - RNA, 23 nt, Human
gccucggccucccaacaugcugg

SEQ ID NO: 1139646 - RNA, 20 nt, Human
gccuuagccucucgaguagc

SEQ ID NO: 1139647 - RNA, 19 nt, Human
gcucccacccccagcucuu

SEQ ID NO: 1139648 - RNA, 28 nt, Human
gcucuguagcccaggcuggugugcagug

SEQ ID NO: 1139649 - RNA, 18 nt, Human
gcugcgguagggcccagg

SEQ ID NO: 1139650 - RNA, 18 nt, Human
gcugcucugucagcauga

SEQ ID NO: 1139651 - RNA, 23 nt, Human
gcuggucucaaacuccuggccuc

SEQ ID NO: 1139652 - RNA, 21 nt, Human
gcuucccuuccccacccuaac

SEQ ID NO: 1139653 - RNA, 20 nt, Human
gcuucuuagggcuccucugu

SEQ ID NO: 1139654 - RNA, 19 nt, Human
ggaaagcccuugaagacug

SEQ ID NO: 1139655 - RNA, 18 nt, Human
ggaaaugcacacccacug

SEQ ID NO: 1139656 - RNA, 24 nt, Human
ggaaaugcacacccacugagcuuc

SEQ ID NO: 1139657 - RNA, 22 nt, Human
ggaagaccuaggagggcagggc

SEQ ID NO: 1139658 - RNA, 18 nt, Human
ggaagggccugccuggca

SEQ ID NO: 1139659 - RNA, 21 nt, Human
ggagccugggaggccccugug

SEQ ID NO: 1139660 - RNA, 23 nt, Human
ggagccugggaggccccugugac

SEQ ID NO: 1139661 - RNA, 19 nt, Human
ggauuacaggcauaagcca

SEQ ID NO: 1139662 - RNA, 22 nt, Human
ggcacagugguaaaguuuaacc

SEQ ID NO: 1139663 - RNA, 20 nt, Human
ggcaggggcugccccggucc

SEQ ID NO: 1139664 - RNA, 19 nt, Human
ggcccagcucccagggagg

SEQ ID NO: 1139665 - RNA, 24 nt, Human
ggccucaagugauccacccgccuc

SEQ ID NO: 1139666 - RNA, 19 nt, Human
ggccuccagaucugucccu

SEQ ID NO: 1139667 - RNA, 24 nt, Human
ggcuggucucaaacuccuggccuc

SEQ ID NO: 1139668 - RNA, 21 nt, Human
gggaagaccuaggagggcagg

SEQ ID NO: 1139669 - RNA, 24 nt, Human
gggaagcaucagcugagacccaga

SEQ ID NO: 1139670 - RNA, 18 nt, Human
gggcagcccuggccuguc

SEQ ID NO: 1139671 - RNA, 22 nt, Human
gggcaguggggccggccaagac

SEQ ID NO: 1139672 - RNA, 24 nt, Human
gggccaaagcccuuuagggucccg

SEQ ID NO: 1139673 - RNA, 18 nt, Human
gggcgugggaggccuggc

SEQ ID NO: 1139674 - RNA, 19 nt, Human
gggcucugcuuggcggugg

SEQ ID NO: 1139675 - RNA, 18 nt, Human
ggggcauagaaugggggg

SEQ ID NO: 1139676 - RNA, 19 nt, Human
gggggugggguuggaggcu

SEQ ID NO: 1139677 - RNA, 23 nt, Human
gggguuucaccacguuggccagg

SEQ ID NO: 1139678 - RNA, 22 nt, Human
ggguguggcucugguucucugu

SEQ ID NO: 1139679 - RNA, 25 nt, Human
ggucagagaggcccaggaggugggg

SEQ ID NO: 1139680 - RNA, 20 nt, Human
gguccagggucuaggagcug

SEQ ID NO: 1139681 - RNA, 19 nt, Human
guauagagcaggggaggcc

SEQ ID NO: 1139682 - RNA, 21 nt, Human
gugaagggaaccccagccaca

SEQ ID NO: 1139683 - RNA, 24 nt, Human
gugauccacccgccucggccuccc

SEQ ID NO: 1139684 - RNA, 18 nt, Human
gugcaggcuggugccaag

SEQ ID NO: 1139685 - RNA, 23 nt, Human
gugcaguggugccacuucggcuc

SEQ ID NO: 1139686 - RNA, 23 nt, Human
guggaaagcaagccugcacccca

SEQ ID NO: 1139687 - RNA, 20 nt, Human
guggaguguggccaguggac

SEQ ID NO: 1139688 - RNA, 18 nt, Human
uaacuccaguccccacuc

SEQ ID NO: 1139689 - RNA, 24 nt, Human
uaauuuuuguauuuuuaguagaga

SEQ ID NO: 1139690 - RNA, 22 nt, Human
uacaggcauaagccacuacgcc

SEQ ID NO: 1139691 - RNA, 23 nt, Human
uacauaaaaauccaucccugaaa

SEQ ID NO: 1139692 - RNA, 23 nt, Human
uacccuggccgaggccaccaggc

SEQ ID NO: 1139693 - RNA, 20 nt, Human
uaccucggcuccccacacag

SEQ ID NO: 1139694 - RNA, 21 nt, Human
uaccucggcuccccacacagc

SEQ ID NO: 1139695 - RNA, 21 nt, Human
uaccuugcucccacccccagc

SEQ ID NO: 1139696 - RNA, 22 nt, Human
uacuggcugaggugcaggcugg

SEQ ID NO: 1139697 - RNA, 22 nt, Human
uagagacgggguuucaccacgu

SEQ ID NO: 1139698 - RNA, 26 nt, Human
uagaggcaggcagggaugccuggggg

SEQ ID NO: 1139699 - RNA, 20 nt, Human
uagggcuccucugucccugg

SEQ ID NO: 1139700 - RNA, 22 nt, Human
uagggcuccucugucccuggag

SEQ ID NO: 1139701 - RNA, 18 nt, Human
uaggugccaguggccgau

SEQ ID NO: 1139702 - RNA, 24 nt, Human
uaguagagacgggguuucaccacg

SEQ ID NO: 1139703 - RNA, 19 nt, Human
uaguucugggcccccgccu

SEQ ID NO: 1139704 - RNA, 21 nt, Human
uaguucugggcccccgccugc

SEQ ID NO: 1139705 - RNA, 22 nt, Human
ucacaggcugguucuccaucug

SEQ ID NO: 1139706 - RNA, 18 nt, Human
ucaccuccagacacacac

SEQ ID NO: 1139707 - RNA, 24 nt, Human
ucaccuccagacacacacaaaaca

SEQ ID NO: 1139708 - RNA, 22 nt, Human
ucacugcaaacugaggcucagg

SEQ ID NO: 1139709 - RNA, 19 nt, Human
ucacugcaaccucugucuc

SEQ ID NO: 1139710 - RNA, 24 nt, Human
ucacugcaaccucugucucccagg

SEQ ID NO: 1139711 - RNA, 23 nt, Human
ucagagaggcccaggaggugggg

SEQ ID NO: 1139712 - RNA, 19 nt, Human
ucagaggcugcccuacugg

SEQ ID NO: 1139713 - RNA, 20 nt, Human
ucaguccugggggcuggaga

SEQ ID NO: 1139714 - RNA, 26 nt, Human
ucaguuccugcaauauuggcugugaa

SEQ ID NO: 1139715 - RNA, 19 nt, Human
ucauacccucucugucccc

SEQ ID NO: 1139716 - RNA, 22 nt, Human
ucauagaccagguuaaguucgc

SEQ ID NO: 1139717 - RNA, 22 nt, Human
ucauaguggaaagcaagccugc

SEQ ID NO: 1139718 - RNA, 18 nt, Human
ucauucaaauccagccuc

SEQ ID NO: 1139719 - RNA, 22 nt, Human
ucauucaaauccagccucuggg

SEQ ID NO: 1139720 - RNA, 21 nt, Human
ucauucagcuccugcuuccuc

SEQ ID NO: 1139721 - RNA, 21 nt, Human
uccaccagaggggugauggga

SEQ ID NO: 1139722 - RNA, 24 nt, Human
uccacccgccucggccucccaaca

SEQ ID NO: 1139723 - RNA, 18 nt, Human
uccaggaaagcccuugaa

SEQ ID NO: 1139724 - RNA, 23 nt, Human
uccaucccugaaaucccagaggc

SEQ ID NO: 1139725 - RNA, 24 nt, Human
ucccaacaugcugggauuacaggc

SEQ ID NO: 1139726 - RNA, 24 nt, Human
ucccacgccagccccugcucccac

SEQ ID NO: 1139727 - RNA, 24 nt, Human
ucccagccuugcccugaaccaagc

SEQ ID NO: 1139728 - RNA, 21 nt, Human
ucccagguucaagagauucuc

SEQ ID NO: 1139729 - RNA, 24 nt, Human
ucccagguucaagagauucuccug

SEQ ID NO: 1139730 - RNA, 26 nt, Human
uccccacacagcacugcuaggcgccc

SEQ ID NO: 1139731 - RNA, 25 nt, Human
uccccagcuccuccauaccucggcu

SEQ ID NO: 1139732 - RNA, 19 nt, Human
ucccucaccucucugcuua

SEQ ID NO: 1139733 - RNA, 22 nt, Human
ucccucagcucagaggcugccc

SEQ ID NO: 1139734 - RNA, 25 nt, Human
ucccucagcucagaggcugcccuac

SEQ ID NO: 1139735 - RNA, 22 nt, Human
ucccugauccuagucuugccuc

SEQ ID NO: 1139736 - RNA, 19 nt, Human
ucccugccaccccucgccc

SEQ ID NO: 1139737 - RNA, 25 nt, Human
ucccugccucucuccuugcucacug

SEQ ID NO: 1139738 - RNA, 23 nt, Human
ucccugggggccuuacucccaac

SEQ ID NO: 1139739 - RNA, 24 nt, Human
uccuccuccucccugccucucccc

SEQ ID NO: 1139740 - RNA, 23 nt, Human
uccugggccuccagaucuguccc

SEQ ID NO: 1139741 - RNA, 19 nt, Human
ucucagccauguccugggc

SEQ ID NO: 1139742 - RNA, 18 nt, Human
ucuccaucugggggccug

SEQ ID NO: 1139743 - RNA, 24 nt, Human
ucucccagguucaagagauucucc

SEQ ID NO: 1139744 - RNA, 24 nt, Human
ucuccugccuuagccucucgagua

SEQ ID NO: 1139745 - RNA, 23 nt, Human
ucucgaguagcugggacuacagg

SEQ ID NO: 1139746 - RNA, 24 nt, Human
ucucgaguagcugggacuacaggu

SEQ ID NO: 1139747 - RNA, 19 nt, Human
ucucugaccaggaugaagg

SEQ ID NO: 1139748 - RNA, 19 nt, Human
ucucuguccccucucuguu

SEQ ID NO: 1139749 - RNA, 19 nt, Human
ucugaccacaggucaggga

SEQ ID NO: 1139750 - RNA, 23 nt, Human
ucugccaagaaaacuauugaacu

SEQ ID NO: 1139751 - RNA, 24 nt, Human
ucuguagcccaggcuggugugcag

SEQ ID NO: 1139752 - RNA, 19 nt, Human
ucuguccccucucuguucu

SEQ ID NO: 1139753 - RNA, 20 nt, Human
ucuguccccucucuguucuu

SEQ ID NO: 1139754 - RNA, 22 nt, Human
ucuguccccucucuguucuucc

SEQ ID NO: 1139755 - RNA, 19 nt, Human
ucugucccugauccuaguc

SEQ ID NO: 1139756 - RNA, 22 nt, Human
ucuguucuuccuccucccgccu

SEQ ID NO: 1139757 - RNA, 21 nt, Human
ucuuagggcuccucugucccu

SEQ ID NO: 1139758 - RNA, 21 nt, Human
ucuuagggcuccucugucccu

SEQ ID NO: 1139759 - RNA, 18 nt, Human
ucuucucuucccuccucc

SEQ ID NO: 1139760 - RNA, 21 nt, Human
ucuugcuggcuucgguuuucc

SEQ ID NO: 1139761 - RNA, 21 nt, Human
ugaaaugauggggugucccug

SEQ ID NO: 1139762 - RNA, 19 nt, Human
ugaaggagauagcuguguu

SEQ ID NO: 1139763 - RNA, 28 nt, Human
ugaaugugagggugaaaugauggggugu

SEQ ID NO: 1139764 - RNA, 18 nt, Human
ugaccaggaugaaggugc

SEQ ID NO: 1139765 - RNA, 21 nt, Human
ugacccagggcaagcucuaug

SEQ ID NO: 1139766 - RNA, 27 nt, Human
ugacccagggcaagcucuaugagcggg

SEQ ID NO: 1139767 - RNA, 19 nt, Human
ugacugugaaaaccuugaa

SEQ ID NO: 1139768 - RNA, 22 nt, Human
ugaggcaaaaaccaugcaaggu

SEQ ID NO: 1139769 - RNA, 18 nt, Human
ugaggggcgcuuugcugg

SEQ ID NO: 1139770 - RNA, 21 nt, Human
ugagggguccaucauccuugu

SEQ ID NO: 1139771 - RNA, 19 nt, Human
ugagggugaaaugaugggg

SEQ ID NO: 1139772 - RNA, 18 nt, Human
ugagguggcccucuccug

SEQ ID NO: 1139773 - RNA, 19 nt, Human
ugagguggcccucuccugg

SEQ ID NO: 1139774 - RNA, 23 nt, Human
ugaguucagguuugugacacugg

SEQ ID NO: 1139775 - RNA, 18 nt, Human
ugauggggugucccuggg

SEQ ID NO: 1139776 - RNA, 21 nt, Human
ugcaaggaauggagugacgcc

SEQ ID NO: 1139777 - RNA, 18 nt, Human
ugcacacccacugagcuu

SEQ ID NO: 1139778 - RNA, 22 nt, Human
ugcaguggugccacuucggcuc

SEQ ID NO: 1139779 - RNA, 23 nt, Human
ugccgcugccucucaccguggag

SEQ ID NO: 1139780 - RNA, 20 nt, Human
ugccucgugccucuggccca

SEQ ID NO: 1139781 - RNA, 20 nt, Human
ugcggggagcccaggagggc

SEQ ID NO: 1139782 - RNA, 24 nt, Human
ugcgugccaccacaccaggcuaau

SEQ ID NO: 1139783 - RNA, 18 nt, Human
ugcucccacccccagcuc

SEQ ID NO: 1139784 - RNA, 24 nt, Human
ugcugggauuacaggcauaagcca

SEQ ID NO: 1139785 - RNA, 19 nt, Human
uggaaagcaagccugcacc

SEQ ID NO: 1139786 - RNA, 27 nt, Human
uggacuggugguagaggcugggccgga

SEQ ID NO: 1139787 - RNA, 21 nt, Human
uggagcauggacuuuacauua

SEQ ID NO: 1139788 - RNA, 22 nt, Human
uggaguguggccaguggacaga

SEQ ID NO: 1139789 - RNA, 18 nt, Human
uggauaggugauccugca

SEQ ID NO: 1139790 - RNA, 21 nt, Human
uggcaaggagggcuucagcag

SEQ ID NO: 1139791 - RNA, 23 nt, Human
uggcaaggagggcuucagcaggc

SEQ ID NO: 1139792 - RNA, 26 nt, Human
uggcaaggccccugcucccagaagcu

SEQ ID NO: 1139793 - RNA, 21 nt, Human
uggcagaaggaacagccuggg

SEQ ID NO: 1139794 - RNA, 23 nt, Human
uggcagaaggaacagccugggca

SEQ ID NO: 1139795 - RNA, 22 nt, Human
uggccaaagagcacugccuacu

SEQ ID NO: 1139796 - RNA, 24 nt, Human
uggccaggcuggucucaaacuccu

SEQ ID NO: 1139797 - RNA, 22 nt, Human
uggccgaugcucccggcagcac

SEQ ID NO: 1139798 - RNA, 24 nt, Human
uggccucaagugauccacccgccu

SEQ ID NO: 1139799 - RNA, 19 nt, Human
uggcucugguucucugugc

SEQ ID NO: 1139800 - RNA, 19 nt, Human
uggcugaggugcaggcugg

SEQ ID NO: 1139801 - RNA, 23 nt, Human
uggcuucgguuuucccagggggg

SEQ ID NO: 1139802 - RNA, 19 nt, Human
uggcuucuuagggcuccuu

SEQ ID NO: 1139803 - RNA, 21 nt, Human
ugggacuacaggugcgugcca

SEQ ID NO: 1139804 - RNA, 22 nt, Human
ugggacuacaggugcgugccac

SEQ ID NO: 1139805 - RNA, 24 nt, Human
ugggacuacaggugcgugccacca

SEQ ID NO: 1139806 - RNA, 18 nt, Human
ugggauuacaggcauaag

SEQ ID NO: 1139807 - RNA, 21 nt, Human
ugggauuacaggcauaagcca

SEQ ID NO: 1139808 - RNA, 22 nt, Human
ugggauuacaggcauaagccac

SEQ ID NO: 1139809 - RNA, 22 nt, Human
ugggauuacaggcauaagccac

SEQ ID NO: 1139810 - RNA, 23 nt, Human
ugggauuacaggcauaagccacu

SEQ ID NO: 1139811 - RNA, 24 nt, Human
ugggauuacaggcauaagccacua

SEQ ID NO: 1139812 - RNA, 24 nt, Human
ugggauuacaggcauaagccacua

SEQ ID NO: 1139813 - RNA, 20 nt, Human
ugggcaaaggccccaagaug

SEQ ID NO: 1139814 - RNA, 24 nt, Human
ugggcaaggguggcauccaggaaa

SEQ ID NO: 1139815 - RNA, 19 nt, Human
ugggcaggccggugugggu

SEQ ID NO: 1139816 - RNA, 22 nt, Human
ugggcaggccggugugggucac

SEQ ID NO: 1139817 - RNA, 23 nt, Human
ugggcccucugcuaggguggcac

SEQ ID NO: 1139818 - RNA, 24 nt, Human
ugggguuggaggcugaaacccauu

SEQ ID NO: 1139819 - RNA, 20 nt, Human
ugggugagcugccauccuca

SEQ ID NO: 1139820 - RNA, 22 nt, Human
uggugguagaggcugggcacag

SEQ ID NO: 1139821 - RNA, 26 nt, Human
uggugguuggggcauagaaugggggg

SEQ ID NO: 1139822 - RNA, 24 nt, Human
uggugugcaguggugccacuucgg

SEQ ID NO: 1139823 - RNA, 24 nt, Human
ugguucuccaucugggggccugcu

SEQ ID NO: 1139824 - RNA, 23 nt, Human
ugguugggccaagggaggaaggg

SEQ ID NO: 1139825 - RNA, 20 nt, Human
ugugaagggaaccccagcca

SEQ ID NO: 1139826 - RNA, 18 nt, Human
uuaguagagacgggguuu

SEQ ID NO: 1139827 - RNA, 22 nt, Human
uuaguagagacgggguuucacc

SEQ ID NO: 1139828 - RNA, 24 nt, Human
uuaguagagacgggguuucaccac

SEQ ID NO: 1139829 - RNA, 25 nt, Human
uuaguagagacgggguuucaccacg

SEQ ID NO: 1139830 - RNA, 24 nt, Human
uuaguucugggcccccgccugcaa

SEQ ID NO: 1139831 - RNA, 23 nt, Human
uucagguuugugacacugggugg

SEQ ID NO: 1139832 - RNA, 23 nt, Human
uucucugugcccaguccagggug

SEQ ID NO: 1139833 - RNA, 24 nt, Human
uugcccaaguccacaaggcugugg

SEQ ID NO: 1139834 - RNA, 22 nt, Human
uugcucccacccccagcucugg

SEQ ID NO: 1139835 - RNA, 19 nt, Human
uuggcugguggagccagga

SEQ ID NO: 1139836 - RNA, 23 nt, Human
uuguauuuuuaguagagacgggg

SEQ ID NO: 1139837 - RNA, 21 nt, Human
uuucaccacguuggccaggcu

SEQ ID NO: 1139838 - RNA, 20 nt, Human
uuucuucucuucccuccucc

SEQ ID NO: 1139839 - RNA, 24 nt, Human
uuuuuaguagagacgggguuucac

SEQ ID NO: 1139840 - RNA, 20 nt, Human
uuuuuguauuuuuaguagag

SEQ ID NO: 1139841 - RNA, 30 nt, Human
aaagguccccccacgccugggucccaccuu

SEQ ID NO: 1139842 - RNA, 27 nt, Human
aagguccccccacgccugggucccacc

SEQ ID NO: 1139843 - RNA, 22 nt, Human
acagucgaggaggggcuaugcc

SEQ ID NO: 1139844 - RNA, 21 nt, Human
acagugaguacccuguccgcc

SEQ ID NO: 1139845 - RNA, 25 nt, Human
acccagugggcacugagugagcguc

SEQ ID NO: 1139846 - RNA, 21 nt, Human
acccuuggauuagaugggcuu

SEQ ID NO: 1139847 - RNA, 18 nt, Human
accuuucccuucuuccug

SEQ ID NO: 1139848 - RNA, 18 nt, Human
acgccugggucccaccug

SEQ ID NO: 1139849 - RNA, 22 nt, Human
acguggauccguccuaccuggc

SEQ ID NO: 1139850 - RNA, 22 nt, Human
acuccaaaaauguaaauuaagc

SEQ ID NO: 1139851 - RNA, 19 nt, Human
acuccaccgccagggcuga

SEQ ID NO: 1139852 - RNA, 19 nt, Human
acuuggggggaaugccagg

SEQ ID NO: 1139853 - RNA, 20 nt, Human
agacacccggcaucggucag

SEQ ID NO: 1139854 - RNA, 18 nt, Human
agaggguugagcccagag

SEQ ID NO: 1139855 - RNA, 19 nt, Human
agagguaggggaaauggcu

SEQ ID NO: 1139856 - RNA, 22 nt, Human
agaguuccucugguucccuggg

SEQ ID NO: 1139857 - RNA, 21 nt, Human
agcagaugcugggagggcacg

SEQ ID NO: 1139858 - RNA, 24 nt, Human
agccugggccaccauggagguggg

SEQ ID NO: 1139859 - RNA, 23 nt, Human
agggaucugugggugcugugggg

SEQ ID NO: 1139860 - RNA, 21 nt, Human
aggggggccauucagacagaa

SEQ ID NO: 1139861 - RNA, 26 nt, Human
agguccccccacgccugggucccacc

SEQ ID NO: 1139862 - RNA, 22 nt, Human
auccucacuccaccccucauua

SEQ ID NO: 1139863 - RNA, 23 nt, Human
augaaaaggggggccauucagac

SEQ ID NO: 1139864 - RNA, 20 nt, Human
augggcuugaguuugauucc

SEQ ID NO: 1139865 - RNA, 22 nt, Human
auguuuuggcccguguuucagc

SEQ ID NO: 1139866 - RNA, 22 nt, Human
caaggcaggugggaucaggcca

SEQ ID NO: 1139867 - RNA, 22 nt, Human
cacagugaguacccuguccgcc

SEQ ID NO: 1139868 - RNA, 21 nt, Human
cacauccucacuccaccccuc

SEQ ID NO: 1139869 - RNA, 23 nt, Human
caccccucauuacauccucugcc

SEQ ID NO: 1139870 - RNA, 23 nt, Human
caccuccaucuugaaccaggugg

SEQ ID NO: 1139871 - RNA, 23 nt, Human
cacuccaccccucauuacauccu

SEQ ID NO: 1139872 - RNA, 24 nt, Human
cacuucccuuuucucuacaccucc

SEQ ID NO: 1139873 - RNA, 20 nt, Human
cagacagaaaacuacgcucg

SEQ ID NO: 1139874 - RNA, 22 nt, Human
cagaggagccuggagaccgggc

SEQ ID NO: 1139875 - RNA, 18 nt, Human
cagcgugcggcgcugggg

SEQ ID NO: 1139876 - RNA, 25 nt, Human
cagcucccucuuccuccuccugcuu

SEQ ID NO: 1139877 - RNA, 21 nt, Human
caggcgccuccgucccggcca

SEQ ID NO: 1139878 - RNA, 19 nt, Human
cagggcaccaacucccugu

SEQ ID NO: 1139879 - RNA, 19 nt, Human
caggggacuggagaggccu

SEQ ID NO: 1139880 - RNA, 19 nt, Human
ccaaaaauguaaauuaagc

SEQ ID NO: 1139881 - RNA, 20 nt, Human
ccaccgccagggcugaccug

SEQ ID NO: 1139882 - RNA, 20 nt, Human
ccacuugcaggcagagucgu

SEQ ID NO: 1139883 - RNA, 19 nt, Human
ccaugccuuucuucacaga

SEQ ID NO: 1139884 - RNA, 21 nt, Human
ccccaagagcaguggggacac

SEQ ID NO: 1139885 - RNA, 19 nt, Human
ccccaccuuucccuucuuc

SEQ ID NO: 1139886 - RNA, 20 nt, Human
ccccaccuuucccuucuucc

SEQ ID NO: 1139887 - RNA, 18 nt, Human
ccccacuucccuuuucuc

SEQ ID NO: 1139888 - RNA, 21 nt, Human
ccccccacgccugggucccac

SEQ ID NO: 1139889 - RNA, 18 nt, Human
cccucacaggagccagaa

SEQ ID NO: 1139890 - RNA, 24 nt, Human
cccucacaggagccagaagugaag

SEQ ID NO: 1139891 - RNA, 19 nt, Human
cccugcagccugggccacc

SEQ ID NO: 1139892 - RNA, 22 nt, Human
ccucacaggagccagaagugaa

SEQ ID NO: 1139893 - RNA, 22 nt, Human
ccucagacagcaugggggccuc

SEQ ID NO: 1139894 - RNA, 23 nt, Human
ccuccugcuuucugccacccauc

SEQ ID NO: 1139895 - RNA, 21 nt, Human
ccuccuguucucuccccuccc

SEQ ID NO: 1139896 - RNA, 21 nt, Human
ccugcagccugggccaccauu

SEQ ID NO: 1139897 - RNA, 22 nt, Human
ccugcagccuucucucugucuc

SEQ ID NO: 1139898 - RNA, 25 nt, Human
ccugccguggacaagcccaggggac

SEQ ID NO: 1139899 - RNA, 20 nt, Human
ccuggggugccaugcuccau

SEQ ID NO: 1139900 - RNA, 19 nt, Human
ccugggucccaccugacuc

SEQ ID NO: 1139901 - RNA, 18 nt, Human
ccuguguugucugggcuu

SEQ ID NO: 1139902 - RNA, 20 nt, Human
cgccugggucccaccugacu

SEQ ID NO: 1139903 - RNA, 18 nt, Human
cggcauggacaccuugug

SEQ ID NO: 1139904 - RNA, 23 nt, Human
cgguagaauaggaggcgcucucu

SEQ ID NO: 1139905 - RNA, 20 nt, Human
cuccaaaaauguaaauuaag

SEQ ID NO: 1139906 - RNA, 21 nt, Human
cucccagagccuucauuucca

SEQ ID NO: 1139907 - RNA, 23 nt, Human
cucccugcagccuucucucuguc

SEQ ID NO: 1139908 - RNA, 22 nt, Human
cucuuccuccuccugcuuucug

SEQ ID NO: 1139909 - RNA, 23 nt, Human
cugaggccuccaccgugggccca

SEQ ID NO: 1139910 - RNA, 24 nt, Human
cugcagccugggccaccauggagg

SEQ ID NO: 1139911 - RNA, 18 nt, Human
cuggcccgggauccuccu

SEQ ID NO: 1139912 - RNA, 25 nt, Human
cugggcacucucuuacuuggcacug

SEQ ID NO: 1139913 - RNA, 18 nt, Human
cugggggugguggaggca

SEQ ID NO: 1139914 - RNA, 23 nt, Human
cuucuuccuguuggggcuugggg

SEQ ID NO: 1139915 - RNA, 24 nt, Human
cuugaaccagguggaauagccacc

SEQ ID NO: 1139916 - RNA, 22 nt, Human
gacacucggcaagggcacuuga

SEQ ID NO: 1139917 - RNA, 19 nt, Human
gagcaaggcaggugggauc

SEQ ID NO: 1139918 - RNA, 22 nt, Human
gagcaauguggccugcgucugc

SEQ ID NO: 1139919 - RNA, 24 nt, Human
gaggagccuggagaccgggcaggc

SEQ ID NO: 1139920 - RNA, 18 nt, Human
gauauuagaggguugagc

SEQ ID NO: 1139921 - RNA, 20 nt, Human
gcagcaggugaggccaccug

SEQ ID NO: 1139922 - RNA, 20 nt, Human
gcagccuucucucugucucu

SEQ ID NO: 1139923 - RNA, 19 nt, Human
gcccaccgugagcccugca

SEQ ID NO: 1139924 - RNA, 19 nt, Human
gcccaguccuuguucccca

SEQ ID NO: 1139925 - RNA, 19 nt, Human
gcccgggauccuccuguuc

SEQ ID NO: 1139926 - RNA, 25 nt, Human
gccggggccuccccaagagcagugg

SEQ ID NO: 1139927 - RNA, 20 nt, Human
gccugggucccaccugacuc

SEQ ID NO: 1139928 - RNA, 19 nt, Human
gcugcuugagaggagggag

SEQ ID NO: 1139929 - RNA, 20 nt, Human
gcugcuugagaggagggagg

SEQ ID NO: 1139930 - RNA, 19 nt, Human
gcuggggggauggaaugug

SEQ ID NO: 1139931 - RNA, 19 nt, Human
gcuuggggggugcagacaa

SEQ ID NO: 1139932 - RNA, 21 nt, Human
ggaucaggccaaccccagcuc

SEQ ID NO: 1139933 - RNA, 19 nt, Human
ggcacugagugagcgucag

SEQ ID NO: 1139934 - RNA, 19 nt, Human
ggcauguuggagguucuga

SEQ ID NO: 1139935 - RNA, 24 nt, Human
gggaaagauggggagaggcucugg

SEQ ID NO: 1139936 - RNA, 23 nt, Human
gggcaggcgccuccgucccggcc

SEQ ID NO: 1139937 - RNA, 19 nt, Human
gggggcagaggcagccgcg

SEQ ID NO: 1139938 - RNA, 21 nt, Human
gggugcagacaauuccagggg

SEQ ID NO: 1139939 - RNA, 22 nt, Human
gucagcuuccccaccuuucccu

SEQ ID NO: 1139940 - RNA, 23 nt, Human
guggcuguggcugugaggcucug

SEQ ID NO: 1139941 - RNA, 22 nt, Human
uacagugcccucacaggagcca

SEQ ID NO: 1139942 - RNA, 26 nt, Human
uacccuguccgccugguagggaaggc

SEQ ID NO: 1139943 - RNA, 19 nt, Human
uacccuuggggauccagcg

SEQ ID NO: 1139944 - RNA, 20 nt, Human
uacccuuggggauccagcgu

SEQ ID NO: 1139945 - RNA, 23 nt, Human
uauuugccacuugcaggcagagu

SEQ ID NO: 1139946 - RNA, 20 nt, Human
uauuuuuucugcugggggug

SEQ ID NO: 1139947 - RNA, 18 nt, Human
ucauuacauccucugccc

SEQ ID NO: 1139948 - RNA, 22 nt, Human
ucauuacauccucugcccuugg

SEQ ID NO: 1139949 - RNA, 19 nt, Human
uccagggacuaccaacucu

SEQ ID NO: 1139950 - RNA, 23 nt, Human
ucccaaauccagggacuaccaac

SEQ ID NO: 1139951 - RNA, 18 nt, Human
uccccaagagcagugggg

SEQ ID NO: 1139952 - RNA, 19 nt, Human
uccccacuucccuuuucuc

SEQ ID NO: 1139953 - RNA, 23 nt, Human
uccccacuucccuuuucucuaca

SEQ ID NO: 1139954 - RNA, 22 nt, Human
uccccccacgccugggucccac

SEQ ID NO: 1139955 - RNA, 20 nt, Human
uccccgagcaauguggccug

SEQ ID NO: 1139956 - RNA, 22 nt, Human
uccccucagacagcaugggggc

SEQ ID NO: 1139957 - RNA, 18 nt, Human
ucccuggggugccaugcu

SEQ ID NO: 1139958 - RNA, 25 nt, Human
ucggucagcucccucuuuccucggg

SEQ ID NO: 1139959 - RNA, 19 nt, Human
ucucugcucucucuccaca

SEQ ID NO: 1139960 - RNA, 18 nt, Human
ucuguaagcuucagauug

SEQ ID NO: 1139961 - RNA, 19 nt, Human
ucuuccuccuccugcuuuc

SEQ ID NO: 1139962 - RNA, 24 nt, Human
ucuuccuccuccugcuuucugcca

SEQ ID NO: 1139963 - RNA, 19 nt, Human
ugaaccagguggaauagcc

SEQ ID NO: 1139964 - RNA, 23 nt, Human
ugaaccagguggaauagccaccu

SEQ ID NO: 1139965 - RNA, 19 nt, Human
ugaauauuuguggcaacua

SEQ ID NO: 1139966 - RNA, 21 nt, Human
ugacucaacuuauuucaguau

SEQ ID NO: 1139967 - RNA, 21 nt, Human
ugagcccagagccuggcaccc

SEQ ID NO: 1139968 - RNA, 23 nt, Human
ugagcccagagccuggcacccag

SEQ ID NO: 1139969 - RNA, 24 nt, Human
ugagcccucaaucacggagggccu

SEQ ID NO: 1139970 - RNA, 27 nt, Human
ugaggcuggggagcguaggcugauucu

SEQ ID NO: 1139971 - RNA, 21 nt, Human
ugaguggcauggugcagcagg

SEQ ID NO: 1139972 - RNA, 27 nt, Human
ugcccuuggccugaaugaugucggcuc

SEQ ID NO: 1139973 - RNA, 21 nt, Human
ugccggggccuccccaagagc

SEQ ID NO: 1139974 - RNA, 23 nt, Human
ugccugaggccuccaccgugggc

SEQ ID NO: 1139975 - RNA, 23 nt, Human
ugcgggagacaccccgguuuucc

SEQ ID NO: 1139976 - RNA, 24 nt, Human
ugcugcagguuccuucccuucccg

SEQ ID NO: 1139977 - RNA, 18 nt, Human
ugcugggagggcacgcag

SEQ ID NO: 1139978 - RNA, 23 nt, Human
ugcugggagggcacgcaggccau

SEQ ID NO: 1139979 - RNA, 20 nt, Human
ugcugggggugguggaggcc

SEQ ID NO: 1139980 - RNA, 22 nt, Human
uggaauguguggauauuagagg

SEQ ID NO: 1139981 - RNA, 19 nt, Human
uggacaauacagugcccuc

SEQ ID NO: 1139982 - RNA, 18 nt, Human
uggaggugggggaggacu

SEQ ID NO: 1139983 - RNA, 18 nt, Human
ugggaucaggccaacccc

SEQ ID NO: 1139984 - RNA, 18 nt, Human
uggggagaggcucuggca

SEQ ID NO: 1139985 - RNA, 21 nt, Human
uggggcuggggggauggaaug

SEQ ID NO: 1139986 - RNA, 24 nt, Human
uggggcuggggggauggaaugugu

SEQ ID NO: 1139987 - RNA, 23 nt, Human
ugggggaggacugggccacacug

SEQ ID NO: 1139988 - RNA, 21 nt, Human
ugggggcagaggcagccgcgg

SEQ ID NO: 1139989 - RNA, 24 nt, Human
uggggggaaugccaggaauguggg

SEQ ID NO: 1139990 - RNA, 18 nt, Human
uggggggauggaaugugu

SEQ ID NO: 1139991 - RNA, 20 nt, Human
ugguagggaaggcagaagcu

SEQ ID NO: 1139992 - RNA, 20 nt, Human
ugguagggaaggcagaagcu

SEQ ID NO: 1139993 - RNA, 23 nt, Human
ugguguggcuguggcugugaggc

SEQ ID NO: 1139994 - RNA, 24 nt, Human
ugguguggcuguggcugugaggcu

SEQ ID NO: 1139995 - RNA, 20 nt, Human
ugucacugaagucacccugg

SEQ ID NO: 1139996 - RNA, 21 nt, Human
uguccuguuccccgagcaaug

SEQ ID NO: 1139997 - RNA, 20 nt, Human
ugugggugcugugggggcag

SEQ ID NO: 1139998 - RNA, 18 nt, Human
uguuggggcuuggggggu

SEQ ID NO: 1139999 - RNA, 22 nt, Human
uucccuggggugccaugcucca

SEQ ID NO: 1140000 - RNA, 21 nt, Human
uucucucccaaggccuucaaa

SEQ ID NO: 1140001 - RNA, 21 nt, Human
uucucuccccucccugcagcc

SEQ ID NO: 1140002 - RNA, 21 nt, Human
uugguguggcuguggcugugg

SEQ ID NO: 1140003 - RNA, 18 nt, Human
uuuuucuugggccucguu

SEQ ID NO: 1140004 - RNA, 19 nt, Human
acaagguggggagggcagg

SEQ ID NO: 1140005 - RNA, 20 nt, Human
agucugggucacaagguggg

SEQ ID NO: 1140006 - RNA, 24 nt, Human
agucugggucacaagguggggagg

SEQ ID NO: 1140007 - RNA, 19 nt, Human
cagccugaaccccgcccug

SEQ ID NO: 1140008 - RNA, 22 nt, Human
caggaaagaaucggggguggca

SEQ ID NO: 1140009 - RNA, 22 nt, Human
cugggucacaagguggggaggg

SEQ ID NO: 1140010 - RNA, 21 nt, Human
gcaacuacaucauuaaaaaua

SEQ ID NO: 1140011 - RNA, 20 nt, Human
ggcaggaaagaaucgggggu

SEQ ID NO: 1140012 - RNA, 27 nt, Human
uacuuuuaaccucaaaggcguguacuu

SEQ ID NO: 1140013 - RNA, 24 nt, Human
uggggagggcaggaaagaaucggg

SEQ ID NO: 1140014 - RNA, 25 nt, Human
uuaaaaauaccccagccugaacccc

SEQ ID NO: 1140015 - RNA, 27 nt, Human
uuaucugaaaacauucuuaauucaagc

SEQ ID NO: 1140016 - RNA, 21 nt, Human
aagcagacauuccagagcuca

SEQ ID NO: 1140017 - RNA, 18 nt, Human
aagcucaguucccucauc

SEQ ID NO: 1140018 - RNA, 22 nt, Human
agcaguuccugccucucagaau

SEQ ID NO: 1140019 - RNA, 22 nt, Human
caccagcugcuacccuggaagc

SEQ ID NO: 1140020 - RNA, 21 nt, Human
cccaccagcugcuacccugga

SEQ ID NO: 1140021 - RNA, 19 nt, Human
ccuggcccacccagccucu

SEQ ID NO: 1140022 - RNA, 22 nt, Human
ccuuggguuuacagcuacccag

SEQ ID NO: 1140023 - RNA, 18 nt, Human
cucacagaucaguguccc

SEQ ID NO: 1140024 - RNA, 21 nt, Human
gccucucagaauucuaagcag

SEQ ID NO: 1140025 - RNA, 24 nt, Human
uccugccucucagaauucuaagca

SEQ ID NO: 1140026 - RNA, 23 nt, Human
ucuaagcagacauuccagagcuc

SEQ ID NO: 1140027 - RNA, 19 nt, Human
aaaaacucuuuauucauuc

SEQ ID NO: 1140028 - RNA, 18 nt, Human
aagcaccacauaaggaua

SEQ ID NO: 1140029 - RNA, 21 nt, Human
aagcagacauuccagagcuca

SEQ ID NO: 1140030 - RNA, 22 nt, Human
aagcagugggauggucuugagg

SEQ ID NO: 1140031 - RNA, 22 nt, Human
acagagucugagggaacuggag

SEQ ID NO: 1140032 - RNA, 19 nt, Human
acucagcuucccaggagac

SEQ ID NO: 1140033 - RNA, 19 nt, Human
agaacggaggggcccgagc

SEQ ID NO: 1140034 - RNA, 20 nt, Human
agaaggagcugcugucagug

SEQ ID NO: 1140035 - RNA, 19 nt, Human
agacagaacggaggggccc

SEQ ID NO: 1140036 - RNA, 22 nt, Human
agacagaacggaggggcccgag

SEQ ID NO: 1140037 - RNA, 20 nt, Human
agaggcuagaagccagcacu

SEQ ID NO: 1140038 - RNA, 22 nt, Human
agcaguuccugccucucagaau

SEQ ID NO: 1140039 - RNA, 22 nt, Human
aggcacccagggcugagugcga

SEQ ID NO: 1140040 - RNA, 23 nt, Human
aggggggugcugcaggaaccccc

SEQ ID NO: 1140041 - RNA, 22 nt, Human
cacacgcaccugcacgcagccu

SEQ ID NO: 1140042 - RNA, 22 nt, Human
caccagcugcuacccuggaagc

SEQ ID NO: 1140043 - RNA, 19 nt, Human
cacccagggcugagugcga

SEQ ID NO: 1140044 - RNA, 21 nt, Human
cacccagggcugagugcgaga

SEQ ID NO: 1140045 - RNA, 28 nt, Human
cagcacucagcuucccaggagaccccaa

SEQ ID NO: 1140046 - RNA, 19 nt, Human
cagucacaucugagcagca

SEQ ID NO: 1140047 - RNA, 18 nt, Human
cagugcaccauggccccg

SEQ ID NO: 1140048 - RNA, 19 nt, Human
caucuccccccacacgcac

SEQ ID NO: 1140049 - RNA, 19 nt, Human
ccagaaggagcugcuguca

SEQ ID NO: 1140050 - RNA, 20 nt, Human
cccacacgcaccugcacgca

SEQ ID NO: 1140051 - RNA, 21 nt, Human
cccaccagcugcuacccugga

SEQ ID NO: 1140052 - RNA, 23 nt, Human
ccccaacuauugccgggccaagu

SEQ ID NO: 1140053 - RNA, 19 nt, Human
cccccggcaggcagugggg

SEQ ID NO: 1140054 - RNA, 19 nt, Human
cccucgucccacggcuccg

SEQ ID NO: 1140055 - RNA, 19 nt, Human
cccuggaagcuucagggag

SEQ ID NO: 1140056 - RNA, 24 nt, Human
ccucuagaccuuccagacuggguc

SEQ ID NO: 1140057 - RNA, 26 nt, Human
ccucuagaccuuccagacugggucca

SEQ ID NO: 1140058 - RNA, 18 nt, Human
cgcccucgucccacggcu

SEQ ID NO: 1140059 - RNA, 19 nt, Human
cggaggggcccgagcugaa

SEQ ID NO: 1140060 - RNA, 23 nt, Human
cggcaggcaguggggccaggcuu

SEQ ID NO: 1140061 - RNA, 18 nt, Human
cucacagaucaguguccc

SEQ ID NO: 1140062 - RNA, 21 nt, Human
cuggaguaggggggugcugca

SEQ ID NO: 1140063 - RNA, 21 nt, Human
gagauggcagggggcaagcag

SEQ ID NO: 1140064 - RNA, 23 nt, Human
gagggagacagaacggaggggcc

SEQ ID NO: 1140065 - RNA, 24 nt, Human
gccccgacacaguguggcaucucc

SEQ ID NO: 1140066 - RNA, 21 nt, Human
gccucucagaauucuaagcag

SEQ ID NO: 1140067 - RNA, 24 nt, Human
gcugcaggaacccccggcaggcag

SEQ ID NO: 1140068 - RNA, 21 nt, Human
ggagacagaacggaggggccc

SEQ ID NO: 1140069 - RNA, 22 nt, Human
ggagccuggaguaggggggugc

SEQ ID NO: 1140070 - RNA, 22 nt, Human
ggcaagcaggcaagcaguggga

SEQ ID NO: 1140071 - RNA, 20 nt, Human
ucacaggcacccagggcuga

SEQ ID NO: 1140072 - RNA, 21 nt, Human
ucagggagauggggagccugg

SEQ ID NO: 1140073 - RNA, 20 nt, Human
ucaucccucucagucacauc

SEQ ID NO: 1140074 - RNA, 33 nt, Human
ucccaggagaccccaacuauugccgggccaaga

SEQ ID NO: 1140075 - RNA, 24 nt, Human
uccugccucucagaauucuaagca

SEQ ID NO: 1140076 - RNA, 23 nt, Human
ucuaagcagacauuccagagcuc

SEQ ID NO: 1140077 - RNA, 19 nt, Human
ucuugagguguggggugag

SEQ ID NO: 1140078 - RNA, 19 nt, Human
ugagggaacuggagaggcc

SEQ ID NO: 1140079 - RNA, 19 nt, Human
ugagggaacuggagaggcu

SEQ ID NO: 1140080 - RNA, 21 nt, Human
ugcuacccuggaagcuucagg

SEQ ID NO: 1140081 - RNA, 19 nt, Human
ugcugcaggaacccccggc

SEQ ID NO: 1140082 - RNA, 19 nt, Human
uggaguaggggggugcugc

SEQ ID NO: 1140083 - RNA, 22 nt, Human
uggaguaggggggugcugcagg

SEQ ID NO: 1140084 - RNA, 25 nt, Human
uucuuuggguuuuuaauuauaaaca

SEQ ID NO: 1140085 - RNA, 28 nt, Human
aaacucuuuccaagcuguuugaccacac

SEQ ID NO: 1140086 - RNA, 22 nt, Human
aaguugcugcccacugacccgu

SEQ ID NO: 1140087 - RNA, 23 nt, Human
aauuacuucccaccaggccccac

SEQ ID NO: 1140088 - RNA, 23 nt, Human
acauccccaggaugagcugaggg

SEQ ID NO: 1140089 - RNA, 20 nt, Human
acaugcacuccccaaggcag

SEQ ID NO: 1140090 - RNA, 19 nt, Human
acccaauuacuucccacca

SEQ ID NO: 1140091 - RNA, 18 nt, Human
acucaucaccaaggggau

SEQ ID NO: 1140092 - RNA, 22 nt, Human
aggaguaagagagaaggggagg

SEQ ID NO: 1140093 - RNA, 22 nt, Human
aggcuccaucaccgggccccag

SEQ ID NO: 1140094 - RNA, 22 nt, Human
aggucuuagacucuuaaauaac

SEQ ID NO: 1140095 - RNA, 24 nt, Human
aucccgcuuagugacacuuugccg

SEQ ID NO: 1140096 - RNA, 18 nt, Human
aucgacacccuuagaugg

SEQ ID NO: 1140097 - RNA, 21 nt, Human
caaugagucucccucaggucu

SEQ ID NO: 1140098 - RNA, 19 nt, Human
cacaggcugugcagcuccg

SEQ ID NO: 1140099 - RNA, 21 nt, Human
cacccuuagauggcaguuuua

SEQ ID NO: 1140100 - RNA, 23 nt, Human
caccgggccccagccccuggcuc

SEQ ID NO: 1140101 - RNA, 19 nt, Human
cagccccuggcucucuccu

SEQ ID NO: 1140102 - RNA, 24 nt, Human
caggccccacuuccaacauuggga

SEQ ID NO: 1140103 - RNA, 21 nt, Human
ccaccaggccccacuuccaac

SEQ ID NO: 1140104 - RNA, 24 nt, Human
ccaucaccgggccccagccccugg

SEQ ID NO: 1140105 - RNA, 21 nt, Human
cccaccaggccccacuuccaa

SEQ ID NO: 1140106 - RNA, 20 nt, Human
cccagccccuggcucucucc

SEQ ID NO: 1140107 - RNA, 19 nt, Human
cccucugccauucucccau

SEQ ID NO: 1140108 - RNA, 21 nt, Human
ccgccacgcccucggcggucc

SEQ ID NO: 1140109 - RNA, 21 nt, Human
ccgccacgcccucggcggucc

SEQ ID NO: 1140110 - RNA, 20 nt, Human
ccgggccccagccccuggcc

SEQ ID NO: 1140111 - RNA, 20 nt, Human
cgcagcuccccagccggccu

SEQ ID NO: 1140112 - RNA, 24 nt, Human
cgccccagugcgugccucgggggc

SEQ ID NO: 1140113 - RNA, 18 nt, Human
cuccuccaacgcagcucc

SEQ ID NO: 1140114 - RNA, 18 nt, Human
cuccuccaacgcagcucc

SEQ ID NO: 1140115 - RNA, 24 nt, Human
cucuccaacacaugcacuccccaa

SEQ ID NO: 1140116 - RNA, 18 nt, Human
cucuuaaauaaccagauc

SEQ ID NO: 1140117 - RNA, 21 nt, Human
cuucccaccaggccccacuuc

SEQ ID NO: 1140118 - RNA, 21 nt, Human
gacuguuggggaucccucugc

SEQ ID NO: 1140119 - RNA, 20 nt, Human
gaguaagagagaaggggagg

SEQ ID NO: 1140120 - RNA, 22 nt, Human
gaucccucugccauucucccau

SEQ ID NO: 1140121 - RNA, 20 nt, Human
gccccuggcucucuccucca

SEQ ID NO: 1140122 - RNA, 23 nt, Human
gccccuggcucucuccuccaacg

SEQ ID NO: 1140123 - RNA, 20 nt, Human
gcucacaguucugcaggcuu

SEQ ID NO: 1140124 - RNA, 18 nt, Human
gcugcuucacagcaggug

SEQ ID NO: 1140125 - RNA, 23 nt, Human
ggacaggcucccgccacgcccuc

SEQ ID NO: 1140126 - RNA, 24 nt, Human
ggacaggcucccgccacgcccucg

SEQ ID NO: 1140127 - RNA, 18 nt, Human
ggccuguaaaaccgagga

SEQ ID NO: 1140128 - RNA, 18 nt, Human
gggagccaguauaucaca

SEQ ID NO: 1140129 - RNA, 18 nt, Human
gugacacuuugccguggg

SEQ ID NO: 1140130 - RNA, 24 nt, Human
uaccucguucgcaggcaaaggcug

SEQ ID NO: 1140131 - RNA, 24 nt, Human
uauaucacauagugagagcaggag

SEQ ID NO: 1140132 - RNA, 20 nt, Human
ucaccgggccccagccccug

SEQ ID NO: 1140133 - RNA, 21 nt, Human
ucaccgggccccagccccugg

SEQ ID NO: 1140134 - RNA, 21 nt, Human
uccaaacuacagcaaauccua

SEQ ID NO: 1140135 - RNA, 22 nt, Human
uccaacacaugcacuccccaag

SEQ ID NO: 1140136 - RNA, 19 nt, Human
uccaacgcagcuccccagc

SEQ ID NO: 1140137 - RNA, 18 nt, Human
ucccucaggucucugggu

SEQ ID NO: 1140138 - RNA, 22 nt, Human
ucccucaggucucugggucagc

SEQ ID NO: 1140139 - RNA, 23 nt, Human
uccucaggccuuggcgguugggg

SEQ ID NO: 1140140 - RNA, 27 nt, Human
ucucccaugagcagacauccccaggau

SEQ ID NO: 1140141 - RNA, 22 nt, Human
ucucugggucagccggcgcccc

SEQ ID NO: 1140142 - RNA, 24 nt, Human
ucucugggucagccggcgccccag

SEQ ID NO: 1140143 - RNA, 25 nt, Human
ucucugggucagccggcgccccagu

SEQ ID NO: 1140144 - RNA, 21 nt, Human
ucugcuucccaccucucucca

SEQ ID NO: 1140145 - RNA, 28 nt, Human
ugaaccauucauaagggaucugcccucc

SEQ ID NO: 1140146 - RNA, 22 nt, Human
ugacaugauacagggagaggag

SEQ ID NO: 1140147 - RNA, 21 nt, Human
ugcaaugagcaggccaaacuc

SEQ ID NO: 1140148 - RNA, 22 nt, Human
ugggggcagaaaugaaucugcc

SEQ ID NO: 1140149 - RNA, 20 nt, Human
ugggucagccggcgccccag

SEQ ID NO: 1140150 - RNA, 23 nt, Human
uucagagcggguccucccagacu

SEQ ID NO: 1140151 - RNA, 22 nt, Human
uuccugcauccuccuccauccc

SEQ ID NO: 1140152 - RNA, 21 nt, Human
uuuucaggaaguauggugcug

SEQ ID NO: 1140153 - RNA, 23 nt, Human
aaacagacaaaucauguugcagg

SEQ ID NO: 1140154 - RNA, 20 nt, Human
aacacggugaaacugcgucu

SEQ ID NO: 1140155 - RNA, 21 nt, Human
aacacggugaaacugcgucuc

SEQ ID NO: 1140156 - RNA, 21 nt, Human
aacagugacucccuaccacuc

SEQ ID NO: 1140157 - RNA, 21 nt, Human
aacaugcucugugauacagga

SEQ ID NO: 1140158 - RNA, 22 nt, Human
aaccaauucuucuuucggcacu

SEQ ID NO: 1140159 - RNA, 23 nt, Human
aaccuggacgacagagugggauu

SEQ ID NO: 1140160 - RNA, 24 nt, Human
aaucgcuugaacccgggaggcgga

SEQ ID NO: 1140161 - RNA, 19 nt, Human
acacggugaaacugcgucu

SEQ ID NO: 1140162 - RNA, 21 nt, Human
accucauaucccugaaggcug

SEQ ID NO: 1140163 - RNA, 24 nt, Human
accugaggucagggguucaagacc

SEQ ID NO: 1140164 - RNA, 24 nt, Human
acugcgucucuacuaaaaauauaa

SEQ ID NO: 1140165 - RNA, 22 nt, Human
agaaaucccauggauacaaugc

SEQ ID NO: 1140166 - RNA, 22 nt, Human
agaacagccuggaggaaaagca

SEQ ID NO: 1140167 - RNA, 20 nt, Human
agaacaugcucugugauaca

SEQ ID NO: 1140168 - RNA, 24 nt, Human
agacugaggcaggagaaucgcuug

SEQ ID NO: 1140169 - RNA, 18 nt, Human
agagacacagacccccac

SEQ ID NO: 1140170 - RNA, 23 nt, Human
agcacgguggcucacgccuguaa

SEQ ID NO: 1140171 - RNA, 18 nt, Human
agccagucgugguggcgg

SEQ ID NO: 1140172 - RNA, 19 nt, Human
agccuggucaacacgguga

SEQ ID NO: 1140173 - RNA, 22 nt, Human
aggagucagcgcacaagccacg

SEQ ID NO: 1140174 - RNA, 24 nt, Human
aggcaggagaaucgcuugaacccg

SEQ ID NO: 1140175 - RNA, 18 nt, Human
aggcaggcggaucaccug

SEQ ID NO: 1140176 - RNA, 22 nt, Human
aggcaggcggaucaccugaggu

SEQ ID NO: 1140177 - RNA, 26 nt, Human
aggcaggcggaucaccugaggucagg

SEQ ID NO: 1140178 - RNA, 21 nt, Human
aggcggagguugcaaugagcc

SEQ ID NO: 1140179 - RNA, 24 nt, Human
aggcggagguugcaaugagccgag

SEQ ID NO: 1140180 - RNA, 21 nt, Human
aggucagggguucaagaccag

SEQ ID NO: 1140181 - RNA, 24 nt, Human
aucaccugaggucagggguucaag

SEQ ID NO: 1140182 - RNA, 20 nt, Human
aucuccugcaggcuccugcg

SEQ ID NO: 1140183 - RNA, 24 nt, Human
auugcacucuaaccuggacgacag

SEQ ID NO: 1140184 - RNA, 22 nt, Human
caacacggugaaacugcgucuc

SEQ ID NO: 1140185 - RNA, 23 nt, Human
caccugaggucagggguucaaga

SEQ ID NO: 1140186 - RNA, 20 nt, Human
caccuggugccccagacccu

SEQ ID NO: 1140187 - RNA, 24 nt, Human
cacgccuguaaucccagcacuuug

SEQ ID NO: 1140188 - RNA, 23 nt, Human
cacucuaaccuggacgacagagu

SEQ ID NO: 1140189 - RNA, 24 nt, Human
cagagcccggucccugcagccugu

SEQ ID NO: 1140190 - RNA, 24 nt, Human
cagcacuuugggagaccgaggcag

SEQ ID NO: 1140191 - RNA, 25 nt, Human
cagcacuuugggagaccgaggcagg

SEQ ID NO: 1140192 - RNA, 27 nt, Human
caggcggaucaccugaggucagggguu

SEQ ID NO: 1140193 - RNA, 19 nt, Human
cauugcacucuaaccugga

SEQ ID NO: 1140194 - RNA, 21 nt, Human
cauugcacucuaaccuggacg

SEQ ID NO: 1140195 - RNA, 22 nt, Human
cauugcacucuaaccuggacga

SEQ ID NO: 1140196 - RNA, 24 nt, Human
cauugcacucuaaccuggacgaca

SEQ ID NO: 1140197 - RNA, 21 nt, Human
ccacgguccccuggccccggc

SEQ ID NO: 1140198 - RNA, 23 nt, Human
ccaucuagagcucccugcuggca

SEQ ID NO: 1140199 - RNA, 18 nt, Human
ccauugcacucuaaccug

SEQ ID NO: 1140200 - RNA, 19 nt, Human
ccauugcacucuaaccugg

SEQ ID NO: 1140201 - RNA, 24 nt, Human
ccauugcacucuaaccuggacgac

SEQ ID NO: 1140202 - RNA, 18 nt, Human
cccucccuuuccuuuucc

SEQ ID NO: 1140203 - RNA, 21 nt, Human
cccugaaggcugccauggucu

SEQ ID NO: 1140204 - RNA, 24 nt, Human
ccuaagaaauaaaaccuugcaaau

SEQ ID NO: 1140205 - RNA, 21 nt, Human
ccuauaaucccagcuacucgg

SEQ ID NO: 1140206 - RNA, 22 nt, Human
ccuauaaucccagcuacucggg

SEQ ID NO: 1140207 - RNA, 23 nt, Human
ccucccucccuuuccuuuuccca

SEQ ID NO: 1140208 - RNA, 22 nt, Human
ccugaggucagggguucaagac

SEQ ID NO: 1140209 - RNA, 18 nt, Human
ccugcagccuguggggag

SEQ ID NO: 1140210 - RNA, 20 nt, Human
ccuggucaacacggugaaac

SEQ ID NO: 1140211 - RNA, 22 nt, Human
cgagaucaagccauugcacucc

SEQ ID NO: 1140212 - RNA, 20 nt, Human
cgaggcaggcggaucaccug

SEQ ID NO: 1140213 - RNA, 26 nt, Human
cgaggcaggcggaucaccugagguca

SEQ ID NO: 1140214 - RNA, 23 nt, Human
cgccuauaaucccagcuacucgg

SEQ ID NO: 1140215 - RNA, 24 nt, Human
cgccuauaaucccagcuacucggg

SEQ ID NO: 1140216 - RNA, 23 nt, Human
cgccuguaaucccagcacuuugg

SEQ ID NO: 1140217 - RNA, 24 nt, Human
cgccuguaaucccagcacuuuggg

SEQ ID NO: 1140218 - RNA, 24 nt, Human
cggaucaccugaggucagggguuc

SEQ ID NO: 1140219 - RNA, 23 nt, Human
cgucaacaacggguauuguggaa

SEQ ID NO: 1140220 - RNA, 19 nt, Human
cgugcgguggccucuccuc

SEQ ID NO: 1140221 - RNA, 22 nt, Human
cucacgccuguaaucccagcac

SEQ ID NO: 1140222 - RNA, 24 nt, Human
cucacgccuguaaucccagcacuu

SEQ ID NO: 1140223 - RNA, 22 nt, Human
cuggccacgcggcgcuccaagu

SEQ ID NO: 1140224 - RNA, 21 nt, Human
gaaaagcagccucguucuguu

SEQ ID NO: 1140225 - RNA, 23 nt, Human
gagaaucgcuugaacccgggagg

SEQ ID NO: 1140226 - RNA, 19 nt, Human
gagcacgcccuuaccgagc

SEQ ID NO: 1140227 - RNA, 22 nt, Human
gagguugcaaugagccgagauc

SEQ ID NO: 1140228 - RNA, 23 nt, Human
gaucaccugaggucagggguuca

SEQ ID NO: 1140229 - RNA, 24 nt, Human
gaucaccugaggucagggguucaa

SEQ ID NO: 1140230 - RNA, 23 nt, Human
gaucuguggcuuucauuuuccuc

SEQ ID NO: 1140231 - RNA, 19 nt, Human
gcaaugagccgagaucaag

SEQ ID NO: 1140232 - RNA, 19 nt, Human
gcccagcacgguggcucac

SEQ ID NO: 1140233 - RNA, 22 nt, Human
gcccagcacgguggcucacgcc

SEQ ID NO: 1140234 - RNA, 24 nt, Human
gccggccucccucccuuuccuuuu

SEQ ID NO: 1140235 - RNA, 20 nt, Human
gcgggcgccuauaaucccag

SEQ ID NO: 1140236 - RNA, 25 nt, Human
gcuguguauguuuugaauaugaguu

SEQ ID NO: 1140237 - RNA, 18 nt, Human
ggagguugcaaugagccg

SEQ ID NO: 1140238 - RNA, 24 nt, Human
ggagguugcaaugagccgagauca

SEQ ID NO: 1140239 - RNA, 22 nt, Human
ggaucaccugaggucagggguu

SEQ ID NO: 1140240 - RNA, 23 nt, Human
ggaucaccugaggucagggguuc

SEQ ID NO: 1140241 - RNA, 20 nt, Human
ggggaugggguguucugaga

SEQ ID NO: 1140242 - RNA, 23 nt, Human
gguggcucacgccuguaauccca

SEQ ID NO: 1140243 - RNA, 24 nt, Human
gguggcucacgccuguaaucccag

SEQ ID NO: 1140244 - RNA, 22 nt, Human
gucaacaacggguauuguggaa

SEQ ID NO: 1140245 - RNA, 18 nt, Human
guccuuguccuucacuca

SEQ ID NO: 1140246 - RNA, 23 nt, Human
guggcucacgccuguaaucccag

SEQ ID NO: 1140247 - RNA, 18 nt, Human
guugcaaugagccgagau

SEQ ID NO: 1140248 - RNA, 20 nt, Human
uaaccuggacgacagagugg

SEQ ID NO: 1140249 - RNA, 24 nt, Human
uaccuucugcugguuacccagagc

SEQ ID NO: 1140250 - RNA, 22 nt, Human
ucaggagucagcgcacaagccg

SEQ ID NO: 1140251 - RNA, 18 nt, Human
ucaggcuccuguagagga

SEQ ID NO: 1140252 - RNA, 19 nt, Human
uccaaaauguccuugcaca

SEQ ID NO: 1140253 - RNA, 27 nt, Human
ucccugaaggcugccauggucuccacc

SEQ ID NO: 1140254 - RNA, 18 nt, Human
ucccuuuccuuuucccaa

SEQ ID NO: 1140255 - RNA, 19 nt, Human
uccuucacucaggcuccug

SEQ ID NO: 1140256 - RNA, 19 nt, Human
uccuucacucaggcuccug

SEQ ID NO: 1140257 - RNA, 19 nt, Human
uccuuguccuucacucagg

SEQ ID NO: 1140258 - RNA, 24 nt, Human
ucgcuugaacccgggaggcggagg

SEQ ID NO: 1140259 - RNA, 22 nt, Human
ucgugcgguggccucuccucuc

SEQ ID NO: 1140260 - RNA, 24 nt, Human
ucuaaccuggacgacagaguggga

SEQ ID NO: 1140261 - RNA, 23 nt, Human
ucuccaccacgguccccuggccc

SEQ ID NO: 1140262 - RNA, 23 nt, Human
ucuccaucgcuucuuccguucgu

SEQ ID NO: 1140263 - RNA, 18 nt, Human
ucuccugcaggcuccugc

SEQ ID NO: 1140264 - RNA, 21 nt, Human
ucuccugcaggcuccugcggu

SEQ ID NO: 1140265 - RNA, 23 nt, Human
ucucuacuaaaaauauaaaaauu

SEQ ID NO: 1140266 - RNA, 18 nt, Human
ucugcugguuacccagag

SEQ ID NO: 1140267 - RNA, 18 nt, Human
ucuggguuucuguuuucu

SEQ ID NO: 1140268 - RNA, 20 nt, Human
ugaggcaggagaaucgcuug

SEQ ID NO: 1140269 - RNA, 24 nt, Human
ugaggcaggagaaucgcuugaacc

SEQ ID NO: 1140270 - RNA, 25 nt, Human
ugaggcaggagaaucgcuugaaccc

SEQ ID NO: 1140271 - RNA, 22 nt, Human
ugcaaugagccgagaucaagcc

SEQ ID NO: 1140272 - RNA, 24 nt, Human
ugcacucuaaccuggacgacagag

SEQ ID NO: 1140273 - RNA, 20 nt, Human
ugccccagacccucugagau

SEQ ID NO: 1140274 - RNA, 19 nt, Human
ugcgguuucccugcuccgu

SEQ ID NO: 1140275 - RNA, 22 nt, Human
uggcucacgccuguaaucccag

SEQ ID NO: 1140276 - RNA, 24 nt, Human
uggcucacgccuguaaucccagca

SEQ ID NO: 1140277 - RNA, 24 nt, Human
ugggagaccgaggcaggcggauca

SEQ ID NO: 1140278 - RNA, 22 nt, Human
uggggagagacacagaccccca

SEQ ID NO: 1140279 - RNA, 24 nt, Human
uguccuucacucaggcuccuguag

SEQ ID NO: 1140280 - RNA, 23 nt, Human
uguccuugcacauuuacaaucuc

SEQ ID NO: 1140281 - RNA, 20 nt, Human
uucucuggccacgcggcgcu

SEQ ID NO: 1140282 - RNA, 24 nt, Human
uucucuggccacgcggcgcuccaa

SEQ ID NO: 1140283 - RNA, 21 nt, Human
uucuguuaccuucugcugguu

SEQ ID NO: 1140284 - RNA, 18 nt, Human
uucuguuuucuuuaugac

SEQ ID NO: 1140285 - RNA, 24 nt, Human
uugaacccgggaggcggagguugc

SEQ ID NO: 1140286 - RNA, 25 nt, Human
uugcaaugagccgagaucaagccau

SEQ ID NO: 1140287 - RNA, 18 nt, Human
uuggcccagcacgguggc

SEQ ID NO: 1140288 - RNA, 19 nt, Human
uuuaaaauugauuuuuggc

SEQ ID NO: 1140289 - RNA, 24 nt, Human
aaacaugacgcagccacaaaagau

SEQ ID NO: 1140290 - RNA, 19 nt, Human
aaauggaagaaagaaaucu

SEQ ID NO: 1140291 - RNA, 24 nt, Human
aacacgcccaccuuuaaggaacaa

SEQ ID NO: 1140292 - RNA, 20 nt, Human
aagaaagaaaucucaaaaga

SEQ ID NO: 1140293 - RNA, 19 nt, Human
aauuuguccuccuugucac

SEQ ID NO: 1140294 - RNA, 23 nt, Human
acacacacacacacacacacaca

SEQ ID NO: 1140295 - RNA, 23 nt, Human
acacacacacacacacacacaca

SEQ ID NO: 1140296 - RNA, 23 nt, Human
acacacacacacacacacacaca

SEQ ID NO: 1140297 - RNA, 23 nt, Human
acacacacacacacacacacaca

SEQ ID NO: 1140298 - RNA, 23 nt, Human
acacacacacacacacacacaca

SEQ ID NO: 1140299 - RNA, 23 nt, Human
acacacacacacacacacacaca

SEQ ID NO: 1140300 - RNA, 23 nt, Human
acacacacacacacacacacaca

SEQ ID NO: 1140301 - RNA, 23 nt, Human
acacacacacacacacacacaca

SEQ ID NO: 1140302 - RNA, 23 nt, Human
acacacacacacacacacacaca

SEQ ID NO: 1140303 - RNA, 23 nt, Human
acacacacacacacacacacaca

SEQ ID NO: 1140304 - RNA, 24 nt, Human
acacacacacacacacacacaccc

SEQ ID NO: 1140305 - RNA, 23 nt, Human
acacuggaaccuucuggaagaua

SEQ ID NO: 1140306 - RNA, 25 nt, Human
accacugccccccauuuugcaccag

SEQ ID NO: 1140307 - RNA, 26 nt, Human
agaaagaaaucucaaaagauuacaga

SEQ ID NO: 1140308 - RNA, 20 nt, Human
agacacaaccacugcccccc

SEQ ID NO: 1140309 - RNA, 27 nt, Human
auguacaaacacacacacacacacaca

SEQ ID NO: 1140310 - RNA, 18 nt, Human
caaguaguaagaaggaua

SEQ ID NO: 1140311 - RNA, 20 nt, Human
cacacacacacacacacaca

SEQ ID NO: 1140312 - RNA, 20 nt, Human
cacacacacacacacacaca

SEQ ID NO: 1140313 - RNA, 20 nt, Human
cacacacacacacacacaca

SEQ ID NO: 1140314 - RNA, 20 nt, Human
cacacacacacacacacaca

SEQ ID NO: 1140315 - RNA, 20 nt, Human
cacacacacacacacacaca

SEQ ID NO: 1140316 - RNA, 20 nt, Human
cacacacacacacacacaca

SEQ ID NO: 1140317 - RNA, 20 nt, Human
cacacacacacacacacaca

SEQ ID NO: 1140318 - RNA, 20 nt, Human
cacacacacacacacacaca

SEQ ID NO: 1140319 - RNA, 20 nt, Human
cacacacacacacacacaca

SEQ ID NO: 1140320 - RNA, 20 nt, Human
cacacacacacacacacaca

SEQ ID NO: 1140321 - RNA, 20 nt, Human
cacacacacacacacacaca

SEQ ID NO: 1140322 - RNA, 20 nt, Human
cacacacacacacacacaca

SEQ ID NO: 1140323 - RNA, 20 nt, Human
cacacacacacacacacaca

SEQ ID NO: 1140324 - RNA, 20 nt, Human
cacacacacacacacacaca

SEQ ID NO: 1140325 - RNA, 22 nt, Human
cacacacacacacacacacaca

SEQ ID NO: 1140326 - RNA, 22 nt, Human
cacacacacacacacacacaca

SEQ ID NO: 1140327 - RNA, 22 nt, Human
cacacacacacacacacacaca

SEQ ID NO: 1140328 - RNA, 22 nt, Human
cacacacacacacacacacaca

SEQ ID NO: 1140329 - RNA, 22 nt, Human
cacacacacacacacacacaca

SEQ ID NO: 1140330 - RNA, 26 nt, Human
cacacacacacacacacacacacaca

SEQ ID NO: 1140331 - RNA, 26 nt, Human
cacacacacacacacacacacacaca

SEQ ID NO: 1140332 - RNA, 26 nt, Human
cacacacacacacacacacacacaca

SEQ ID NO: 1140333 - RNA, 26 nt, Human
cacacacacacacacacacacacaca

SEQ ID NO: 1140334 - RNA, 26 nt, Human
cacacacacacacacacacacacaca

SEQ ID NO: 1140335 - RNA, 26 nt, Human
cacacacacacacacacacacacaca

SEQ ID NO: 1140336 - RNA, 26 nt, Human
cacacacacacacacacacacacaca

SEQ ID NO: 1140337 - RNA, 26 nt, Human
cacacacacacacacacacacacaca

SEQ ID NO: 1140338 - RNA, 30 nt, Human; identical to SEQ ID NO: 326474

SEQ ID NO: 1140339 - RNA, 28 nt, Human
cacacacacacacacacacacacaccca

SEQ ID NO: 1140340 - RNA, 27 nt, Human
cacacacacacacacccauaucuuuuc

SEQ ID NO: 1140341 - RNA, 23 nt, Human
cacgcccaccuuuaaggaacaag

SEQ ID NO: 1140342 - RNA, 24 nt, Human
cacgcccaccuuuaaggaacaagg

SEQ ID NO: 1140343 - RNA, 18 nt, Human
cacugcucuccagaaugg

SEQ ID NO: 1140344 - RNA, 19 nt, Human
cagaaacuuggccccagac

SEQ ID NO: 1140345 - RNA, 18 nt, Human
caggacagaaacuuggcc

SEQ ID NO: 1140346 - RNA, 19 nt, Human
cauguuguuucugauauuc

SEQ ID NO: 1140347 - RNA, 20 nt, Human
ccacaacacgcccaccuuua

SEQ ID NO: 1140348 - RNA, 22 nt, Human
ccacugccccccauuuugcacc

SEQ ID NO: 1140349 - RNA, 23 nt, Human
cccaagaaaaggcaaggaggagg

SEQ ID NO: 1140350 - RNA, 21 nt, Human
cccacacaacccucagaccca

SEQ ID NO: 1140351 - RNA, 23 nt, Human
ccccauuuugcaccagccaaaaa

SEQ ID NO: 1140352 - RNA, 24 nt, Human
cccccgcuacauaaccaucucuag

SEQ ID NO: 1140353 - RNA, 20 nt, Human
ccucagacccauacuggccg

SEQ ID NO: 1140354 - RNA, 19 nt, Human
ccuccaguuacaaucuagc

SEQ ID NO: 1140355 - RNA, 20 nt, Human
cucacaaguaguaagaagga

SEQ ID NO: 1140356 - RNA, 18 nt, Human
cucagggaggggaaacgg

SEQ ID NO: 1140357 - RNA, 23 nt, Human
cugaaccaaugcccacacaaccc

SEQ ID NO: 1140358 - RNA, 19 nt, Human
cuuccacaacacgcccacc

SEQ ID NO: 1140359 - RNA, 22 nt, Human
cuugaaaacaugacgcagccac

SEQ ID NO: 1140360 - RNA, 24 nt, Human
cuuuccugugcuuccacaacacgc

SEQ ID NO: 1140361 - RNA, 21 nt, Human
gacacaaccacugccccccau

SEQ ID NO: 1140362 - RNA, 18 nt, Human
gagcuagacccaaaaagu

SEQ ID NO: 1140363 - RNA, 21 nt, Human
gagguggauuugguucggcuu

SEQ ID NO: 1140364 - RNA, 22 nt, Human
gauaccuguaccuccaguuaca

SEQ ID NO: 1140365 - RNA, 24 nt, Human
gcacagcccaagaaaaggcaagga

SEQ ID NO: 1140366 - RNA, 19 nt, Human
ggacagaaacuuggcccca

SEQ ID NO: 1140367 - RNA, 19 nt, Human
ggagguggauuugguucgg

SEQ ID NO: 1140368 - RNA, 24 nt, Human
guauguacaaacacacacacacac

SEQ ID NO: 1140369 - RNA, 29 nt, Human
guauguacaaacacacacacacacacaca

SEQ ID NO: 1140370 - RNA, 28 nt, Human
guggagcccaggccuuacauggguggcg

SEQ ID NO: 1140371 - RNA, 25 nt, Human
guuacaaucuagcauggaguugauu

SEQ ID NO: 1140372 - RNA, 24 nt, Human
guuuuucucacuucagaauucagg

SEQ ID NO: 1140373 - RNA, 21 nt, Human
uaagaaggauacuuccuggca

SEQ ID NO: 1140374 - RNA, 24 nt, Human
uaagacaaaacccuucuucuuuga

SEQ ID NO: 1140375 - RNA, 31 nt, Human
uacaaacacacacacacacacacacacacag

SEQ ID NO: 1140376 - RNA, 19 nt, Human
uaguaagaaggauacuucc

SEQ ID NO: 1140377 - RNA, 26 nt, Human
uauguacaaacacacacacacacaca

SEQ ID NO: 1140378 - RNA, 19 nt, Human
ucagacccauacuggccgg

SEQ ID NO: 1140379 - RNA, 21 nt, Human
ucagacccauacuggccgggc

SEQ ID NO: 1140380 - RNA, 22 nt, Human
uccacaacacgcccaccuuuaa

SEQ ID NO: 1140381 - RNA, 24 nt, Human
uccacaacacgcccaccuuuaagg

SEQ ID NO: 1140382 - RNA, 23 nt, Human
uccguuuacaugaaaugcccaga

SEQ ID NO: 1140383 - RNA, 21 nt, Human
ucuacauaacuaucuaugccu

SEQ ID NO: 1140384 - RNA, 24 nt, Human
ugaaagcacagcccaagaaaaggc

SEQ ID NO: 1140385 - RNA, 19 nt, Human
ugaaaugcccagaauaagc

SEQ ID NO: 1140386 - RNA, 23 nt, Human
ugaaaugcccagaauaagcaaau

SEQ ID NO: 1140387 - RNA, 23 nt, Human
ugacgcagccacaaaagaucaca

SEQ ID NO: 1140388 - RNA, 21 nt, Human
ugcacacacacaggucccgcg

SEQ ID NO: 1140389 - RNA, 21 nt, Human
ugcauuguugcaguagaaauu

SEQ ID NO: 1140390 - RNA, 24 nt, Human
uggagcccaggccuuacaugggug

SEQ ID NO: 1140391 - RNA, 24 nt, Human
uggcaggccaagagccauggcaga

SEQ ID NO: 1140392 - RNA, 23 nt, Human
ugucaccaggauauaaucagagg

SEQ ID NO: 1140393 - RNA, 31 nt, Human
ugugcugaaccaaugcccacacaacccucag

SEQ ID NO: 1140394 - RNA, 20 nt, Human
uugauucuacccuccucugu

SEQ ID NO: 1140395 - RNA, 19 nt, Human
uuugagaauaacuuuccug

SEQ ID NO: 1140396 - RNA, 21 nt, Human
aaacaagccagcacaacuaac

SEQ ID NO: 1140397 - RNA, 18 nt, Human
aaaccgucucugcccucc

SEQ ID NO: 1140398 - RNA, 18 nt, Human
aacaaagucagaaggagc

SEQ ID NO: 1140399 - RNA, 24 nt, Human
aacaaagucagaaggagcaaaauc

SEQ ID NO: 1140400 - RNA, 19 nt, Human
aaccaugucagugcagccu

SEQ ID NO: 1140401 - RNA, 22 nt, Human
aagauacuuuuguaagcuguga

SEQ ID NO: 1140402 - RNA, 21 nt, Human
aagcugcaaccacagacccag

SEQ ID NO: 1140403 - RNA, 22 nt, Human
aagcuucggcugacuuucucaa

SEQ ID NO: 1140404 - RNA, 24 nt, Human
aaugaggaaacaaagucagaagga

SEQ ID NO: 1140405 - RNA, 19 nt, Human
aaugaggggacugugggug

SEQ ID NO: 1140406 - RNA, 21 nt, Human
acaaugacaacaacaaaacaa

SEQ ID NO: 1140407 - RNA, 25 nt, Human
acagagcaagauccucucucuuaaa

SEQ ID NO: 1140408 - RNA, 23 nt, Human
accaacaaugacaacaacaaaac

SEQ ID NO: 1140409 - RNA, 19 nt, Human
acccaguccggcacucugc

SEQ ID NO: 1140410 - RNA, 24 nt, Human
acccgguagcugugcgcuuguucc

SEQ ID NO: 1140411 - RNA, 29 nt, Human
accuugccucuccguucagaaccccagcc

SEQ ID NO: 1140412 - RNA, 24 nt, Human
acugcacucuagccuggacaacag

SEQ ID NO: 1140413 - RNA, 24 nt, Human
acugcacucuagccuggacaacag

SEQ ID NO: 1140414 - RNA, 20 nt, Human
acuugggaggcagagggagg

SEQ ID NO: 1140415 - RNA, 19 nt, Human
acuugggcagcauuugaaa

SEQ ID NO: 1140416 - RNA, 24 nt, Human
acuuguuuaaaauuuccauugaaa

SEQ ID NO: 1140417 - RNA, 18 nt, Human
agaaaacaggcauauucu

SEQ ID NO: 1140418 - RNA, 19 nt, Human
agagcccauacuugggcag

SEQ ID NO: 1140419 - RNA, 24 nt, Human
agaugcgguggcucacgccuguaa

SEQ ID NO: 1140420 - RNA, 24 nt, Human
agcacuuugggaggcugagguggg

SEQ ID NO: 1140421 - RNA, 23 nt, Human
agccagguuugguagugcaugcc

SEQ ID NO: 1140422 - RNA, 19 nt, Human
agccauucccaccuugccu

SEQ ID NO: 1140423 - RNA, 24 nt, Human
aggacugcuugaggccaggaguuc

SEQ ID NO: 1140424 - RNA, 20 nt, Human
aggagccggugggcagcccu

SEQ ID NO: 1140425 - RNA, 24 nt, Human
aggauuacuugagcccaggaguuu

SEQ ID NO: 1140426 - RNA, 19 nt, Human
aggcagagggaggaggauu

SEQ ID NO: 1140427 - RNA, 24 nt, Human
aggcugaggugggaggacugcuug

SEQ ID NO: 1140428 - RNA, 23 nt, Human
aggugggaggacugcuugaggcc

SEQ ID NO: 1140429 - RNA, 24 nt, Human
aguacuuugggaggcugagguggg

SEQ ID NO: 1140430 - RNA, 23 nt, Human
aguggcuuauguuuguaauccca

SEQ ID NO: 1140431 - RNA, 24 nt, Human
aguggcuuauguuuguaaucccag

SEQ ID NO: 1140432 - RNA, 24 nt, Human
aucacaccacugcacucuagccug

SEQ ID NO: 1140433 - RNA, 24 nt, Human
auuacuugagcccaggaguuugag

SEQ ID NO: 1140434 - RNA, 19 nt, Human
caaaacaagccagcacaac

SEQ ID NO: 1140435 - RNA, 18 nt, Human
caaacagggcugaaaaua

SEQ ID NO: 1140436 - RNA, 19 nt, Human
caaaccgucucugcccucc

SEQ ID NO: 1140437 - RNA, 23 nt, Human
caauguaagcuccaucaagauca

SEQ ID NO: 1140438 - RNA, 22 nt, Human
cacacgacucucacuacuugaa

SEQ ID NO: 1140439 - RNA, 24 nt, Human
cacaggcccacugaaagggacaaa

SEQ ID NO: 1140440 - RNA, 24 nt, Human
caccacugcacucuagccuggaca

SEQ ID NO: 1140441 - RNA, 24 nt, Human
cacgccuguaaucccagcacuuug

SEQ ID NO: 1140442 - RNA, 18 nt, Human
cacugcacucuagccugg

SEQ ID NO: 1140443 - RNA, 19 nt, Human
cacugcacucuagccugga

SEQ ID NO: 1140444 - RNA, 21 nt, Human
cacugcacucuagccuggaca

SEQ ID NO: 1140445 - RNA, 24 nt, Human
cacugcacucuagccuggacaaca

SEQ ID NO: 1140446 - RNA, 24 nt, Human
cagcacuuugggaggcugaggugg

SEQ ID NO: 1140447 - RNA, 18 nt, Human
cagcagcccuggccagug

SEQ ID NO: 1140448 - RNA, 21 nt, Human
caggagccggugggcagcccu

SEQ ID NO: 1140449 - RNA, 24 nt, Human
caggagccggugggcagcccugag

SEQ ID NO: 1140450 - RNA, 24 nt, Human
caguacuuugggaggcugaggugg

SEQ ID NO: 1140451 - RNA, 19 nt, Human
ccacugcacucuagccugg

SEQ ID NO: 1140452 - RNA, 19 nt, Human
ccacugcacucuagccugg

SEQ ID NO: 1140453 - RNA, 21 nt, Human
ccacugcacucuagccuggac

SEQ ID NO: 1140454 - RNA, 18 nt, Human
ccauggcccacccaucuc

SEQ ID NO: 1140455 - RNA, 23 nt, Human
cccgugaggcugcagaggaggug

SEQ ID NO: 1140456 - RNA, 19 nt, Human
ccguucagaaccccagcug

SEQ ID NO: 1140457 - RNA, 20 nt, Human
ccucuugguagccauugcuu

SEQ ID NO: 1140458 - RNA, 20 nt, Human
ccugcuuccagagugcccag

SEQ ID NO: 1140459 - RNA, 21 nt, Human
ccuguagucccagcuacuugg

SEQ ID NO: 1140460 - RNA, 18 nt, Human
ccuugacuaggccacuuc

SEQ ID NO: 1140461 - RNA, 23 nt, Human
cgccuguaaucccagcacuuugg

SEQ ID NO: 1140462 - RNA, 24 nt, Human
cgccuguaaucccagcacuuuggg

SEQ ID NO: 1140463 - RNA, 19 nt, Human
cguggacacagucucuagu

SEQ ID NO: 1140464 - RNA, 24 nt, Human
cuaaagcuucggcugacuuucuca

SEQ ID NO: 1140465 - RNA, 23 nt, Human
cuagaaaauauguugauucuuag

SEQ ID NO: 1140466 - RNA, 26 nt, Human
cuagagcccauacuugggcagcauug

SEQ ID NO: 1140467 - RNA, 22 nt, Human
cucacgccuguaaucccagcac

SEQ ID NO: 1140468 - RNA, 24 nt, Human
cucacgccuguaaucccagcacuu

SEQ ID NO: 1140469 - RNA, 20 nt, Human
cucauacauucccuucauuu

SEQ ID NO: 1140470 - RNA, 20 nt, Human
cuccaaaacaagccagcaca

SEQ ID NO: 1140471 - RNA, 18 nt, Human
cugcuguauuuuuaguug

SEQ ID NO: 1140472 - RNA, 19 nt, Human
cugcuuccagagugcccag

SEQ ID NO: 1140473 - RNA, 23 nt, Human
cuuauguuuguaaucccaguacu

SEQ ID NO: 1140474 - RNA, 21 nt, Human
cuucagggucuugaugccacu

SEQ ID NO: 1140475 - RNA, 21 nt, Human
gaaugguaauauccuuagaau

SEQ ID NO: 1140476 - RNA, 24 nt, Human
gacugcuugaggccaggaguucaa

SEQ ID NO: 1140477 - RNA, 20 nt, Human
gagaugucuguggucuuggc

SEQ ID NO: 1140478 - RNA, 18 nt, Human
gagcccaggaguuugagg

SEQ ID NO: 1140479 - RNA, 21 nt, Human
gaggaaacaaagucagaagga

SEQ ID NO: 1140480 - RNA, 18 nt, Human
gaggcagagggaggagga

SEQ ID NO: 1140481 - RNA, 19 nt, Human
gagguugcagugagcuggc

SEQ ID NO: 1140482 - RNA, 23 nt, Human
gagguugcagugagcugugauca

SEQ ID NO: 1140483 - RNA, 21 nt, Human
gaucauggccauggugaugac

SEQ ID NO: 1140484 - RNA, 22 nt, Human
gauuacuugagcccaggaguuu

SEQ ID NO: 1140485 - RNA, 24 nt, Human
gauuacuugagcccaggaguuuga

SEQ ID NO: 1140486 - RNA, 24 nt, Human
gauuuucucuccaaaacaagccag

SEQ ID NO: 1140487 - RNA, 24 nt, Human
gcacucuagccuggacaacagagc

SEQ ID NO: 1140488 - RNA, 18 nt, Human
gccacuucuaccucuugg

SEQ ID NO: 1140489 - RNA, 21 nt, Human
gccagaaugcaggagccggug

SEQ ID NO: 1140490 - RNA, 18 nt, Human
gcucuugucugcagcuga

SEQ ID NO: 1140491 - RNA, 20 nt, Human
gcugugaucacaccacugca

SEQ ID NO: 1140492 - RNA, 25 nt, Human
gcuuauguuuguaaucccaguacuu

SEQ ID NO: 1140493 - RNA, 27 nt, Human
ggaggugggguccauggcccacccauc

SEQ ID NO: 1140494 - RNA, 19 nt, Human
ggaguucaagaaauuagcc

SEQ ID NO: 1140495 - RNA, 22 nt, Human
ggaguuugagguugcagugagc

SEQ ID NO: 1140496 - RNA, 22 nt, Human
ggauuacuugagcccaggaguu

SEQ ID NO: 1140497 - RNA, 23 nt, Human
ggcacaguggcuuauguuuguaa

SEQ ID NO: 1140498 - RNA, 21 nt, Human
ggccagaugcgguggcucacg

SEQ ID NO: 1140499 - RNA, 21 nt, Human
ggcucacgccuguaaucccag

SEQ ID NO: 1140500 - RNA, 24 nt, Human
ggcuuauguuuguaaucccaguac

SEQ ID NO: 1140501 - RNA, 23 nt, Human
gguggcucacgccuguaauccca

SEQ ID NO: 1140502 - RNA, 24 nt, Human
gguggcucacgccuguaaucccag

SEQ ID NO: 1140503 - RNA, 24 nt, Human
guccacgauuggcaagcugcaacc

SEQ ID NO: 1140504 - RNA, 18 nt, Human
uaaaaccaccaacaauga

SEQ ID NO: 1140505 - RNA, 28 nt, Human
uaaaaccaccaacaaugacuggagaccc

SEQ ID NO: 1140506 - RNA, 21 nt, Human
uaagaaaacaggcauauucuu

SEQ ID NO: 1140507 - RNA, 20 nt, Human
uaagauguuauuguggccag

SEQ ID NO: 1140508 - RNA, 19 nt, Human
uaagauuguauuuggaaug

SEQ ID NO: 1140509 - RNA, 18 nt, Human
uaagcugugacaccagcc

SEQ ID NO: 1140510 - RNA, 20 nt, Human
uauguuuguaaucccaguac

SEQ ID NO: 1140511 - RNA, 24 nt, Human
uauguuuguaaucccaguacuuug

SEQ ID NO: 1140512 - RNA, 19 nt, Human
ucaacagaaaauauggccc

SEQ ID NO: 1140513 - RNA, 23 nt, Human
ucaauguaagcuccaucaagauc

SEQ ID NO: 1140514 - RNA, 23 nt, Human
ucacaccacugcacucuagccug

SEQ ID NO: 1140515 - RNA, 23 nt, Human
ucagaaccccagcugcgagcugu

SEQ ID NO: 1140516 - RNA, 25 nt, Human
uccacgauuggcaagcugcaaccac

SEQ ID NO: 1140517 - RNA, 19 nt, Human
uccagaauagcaaguuugc

SEQ ID NO: 1140518 - RNA, 21 nt, Human
uccagggccugggcuaguucc

SEQ ID NO: 1140519 - RNA, 22 nt, Human
uccauuaucuagagcccauacu

SEQ ID NO: 1140520 - RNA, 22 nt, Human
ucccaccuugccucuccguuca

SEQ ID NO: 1140521 - RNA, 24 nt, Human
ucucagauaauaaaaagcucuuug

SEQ ID NO: 1140522 - RNA, 19 nt, Human
ugaaagcucugcucuuguc

SEQ ID NO: 1140523 - RNA, 22 nt, Human
ugaaagggacaaacagggcuga

SEQ ID NO: 1140524 - RNA, 19 nt, Human
ugaaauuuucuuggaauac

SEQ ID NO: 1140525 - RNA, 22 nt, Human
ugaauaguugugacagagacca

SEQ ID NO: 1140526 - RNA, 22 nt, Human
ugagcccaggaguuugagguug

SEQ ID NO: 1140527 - RNA, 19 nt, Human
ugaggaaacaaagucagaa

SEQ ID NO: 1140528 - RNA, 24 nt, Human
ugaggugggaggacugcuugaggc

SEQ ID NO: 1140529 - RNA, 26 nt, Human
ugaggugggaggacugcuugaggcca

SEQ ID NO: 1140530 - RNA, 23 nt, Human
ugagguugcagugagcugugauc

SEQ ID NO: 1140531 - RNA, 25 nt, Human
ugcaaccacagacccaguccggcac

SEQ ID NO: 1140532 - RNA, 19 nt, Human
ugcaacuagaaaauauguu

SEQ ID NO: 1140533 - RNA, 19 nt, Human
ugcagaggagguggggucc

SEQ ID NO: 1140534 - RNA, 18 nt, Human
ugcaggaagauggacaag

SEQ ID NO: 1140535 - RNA, 23 nt, Human
ugcccucccuuuuccagggccug

SEQ ID NO: 1140536 - RNA, 23 nt, Human
ugccuguagucccagcuacuugg

SEQ ID NO: 1140537 - RNA, 24 nt, Human
ugccuguagucccagcuacuuggg

SEQ ID NO: 1140538 - RNA, 18 nt, Human
ugcuuuacucaacagaaa

SEQ ID NO: 1140539 - RNA, 22 nt, Human
uggaaugcaacagagauuuccg

SEQ ID NO: 1140540 - RNA, 26 nt, Human
uggaaugguaauauccuuagaauuuu

SEQ ID NO: 1140541 - RNA, 22 nt, Human
uggacauuuguugaaaccggca

SEQ ID NO: 1140542 - RNA, 24 nt, Human
uggccagaugcgguggcucacgcc

SEQ ID NO: 1140543 - RNA, 25 nt, Human
uggcccacccaucucucccucgcca

SEQ ID NO: 1140544 - RNA, 22 nt, Human
uggcucacgccuguaaucccag

SEQ ID NO: 1140545 - RNA, 24 nt, Human
uggcucacgccuguaaucccagca

SEQ ID NO: 1140546 - RNA, 22 nt, Human
uggcuuauguuuguaaucccag

SEQ ID NO: 1140547 - RNA, 24 nt, Human
uggcuuauguuuguaaucccagua

SEQ ID NO: 1140548 - RNA, 20 nt, Human
ugggaggacugcuugaggcc

SEQ ID NO: 1140549 - RNA, 20 nt, Human
ugggaggcagagggaggagg

SEQ ID NO: 1140550 - RNA, 22 nt, Human
ugggaggcagagggaggaggau

SEQ ID NO: 1140551 - RNA, 19 nt, Human
ugggaggcugaggugggag

SEQ ID NO: 1140552 - RNA, 18 nt, Human
ugggaggcugaggugggc

SEQ ID NO: 1140553 - RNA, 19 nt, Human
ugggaggcugaggugggcg

SEQ ID NO: 1140554 - RNA, 24 nt, Human
uggguguguuuuugcuaaagcuuc

SEQ ID NO: 1140555 - RNA, 24 nt, Human
ugguagugcaugccuguaguccca

SEQ ID NO: 1140556 - RNA, 22 nt, Human
uguaagcugugacaccagccau

SEQ ID NO: 1140557 - RNA, 19 nt, Human
uguaaucccaguacuuugg

SEQ ID NO: 1140558 - RNA, 24 nt, Human
ugugcacgcucuuccugguguccu

SEQ ID NO: 1140559 - RNA, 24 nt, Human
uguuuguaaucccaguacuuuggg

SEQ ID NO: 1140560 - RNA, 24 nt, Human
uuacuugagcccaggaguuugagg

SEQ ID NO: 1140561 - RNA, 20 nt, Human
uuccagaauagcaaguuugc

SEQ ID NO: 1140562 - RNA, 23 nt, Human
uuccagggccugggcuaguuccu

SEQ ID NO: 1140563 - RNA, 18 nt, Human
uuccuggguguguuuuug

SEQ ID NO: 1140564 - RNA, 19 nt, Human
uugaaaccggcacucaaug

SEQ ID NO: 1140565 - RNA, 19 nt, Human
uugcagaaaaaaaugaggg

SEQ ID NO: 1140566 - RNA, 19 nt, Human
uugcagugagcugugauca

SEQ ID NO: 1140567 - RNA, 20 nt, Human
uugcagugagcugugaucac

SEQ ID NO: 1140568 - RNA, 19 nt, Human
uugggaggcagagggagga

SEQ ID NO: 1140569 - RNA, 18 nt, Human
uuuaaaauuuccauugaa

SEQ ID NO: 1140570 - RNA, 25 nt, Human
uuuuccagggccugggcuaguuccu

SEQ ID NO: 1140571 - RNA, 23 nt, Human
uuuuguuuguuuuuuuaagcuuu

SEQ ID NO: 1140572 - RNA, 20 nt, Human
aaaaacuggugaaagcuuga

SEQ ID NO: 1140573 - RNA, 18 nt, Human
aaaacaagcauaaauucc

SEQ ID NO: 1140574 - RNA, 18 nt, Human
aaacaagcauaaauuccu

SEQ ID NO: 1140575 - RNA, 23 nt, Human
aauguuucuuaaguuaacaugau

SEQ ID NO: 1140576 - RNA, 21 nt, Human
acaaaucaggguggugaccuu

SEQ ID NO: 1140577 - RNA, 21 nt, Human
acccacagccaggagccccag

SEQ ID NO: 1140578 - RNA, 21 nt, Human
agccaggagccccagucccgc

SEQ ID NO: 1140579 - RNA, 22 nt, Human
agccucgguaccacacccacag

SEQ ID NO: 1140580 - RNA, 24 nt, Human
agccugucugaucuggugcuuguu

SEQ ID NO: 1140581 - RNA, 18 nt, Human
aggaccggguuccucucc

SEQ ID NO: 1140582 - RNA, 18 nt, Human
aucaggguggugaccuug

SEQ ID NO: 1140583 - RNA, 27 nt, Human
auccacuucucucccuucacuguccag

SEQ ID NO: 1140584 - RNA, 18 nt, Human
caagucgagaaaauugcu

SEQ ID NO: 1140585 - RNA, 19 nt, Human
cacccacagccaggagccc

SEQ ID NO: 1140586 - RNA, 23 nt, Human
cagcaugacuucugcaugugugu

SEQ ID NO: 1140587 - RNA, 23 nt, Human
ccaaauccacuucucucccuuca

SEQ ID NO: 1140588 - RNA, 24 nt, Human
ccaaauccacuucucucccuucac

SEQ ID NO: 1140589 - RNA, 18 nt, Human
ccaccccugacgugcuca

SEQ ID NO: 1140590 - RNA, 21 nt, Human
ccccugacgugcucaccgcuc

SEQ ID NO: 1140591 - RNA, 22 nt, Human
ccucccugcuucgaguuguccc

SEQ ID NO: 1140592 - RNA, 22 nt, Human
ccuccgcgcaggacguaaagau

SEQ ID NO: 1140593 - RNA, 18 nt, Human
ccuggaagcccccucccu

SEQ ID NO: 1140594 - RNA, 20 nt, Human
ccuggaagcccccucccugc

SEQ ID NO: 1140595 - RNA, 21 nt, Human
cuaaaugucucccaaauccac

SEQ ID NO: 1140596 - RNA, 21 nt, Human
cuagucguaggcucucuguga

SEQ ID NO: 1140597 - RNA, 23 nt, Human
cugaagccucgguaccacaccca

SEQ ID NO: 1140598 - RNA, 19 nt, Human
cugcgccccccaccccuga

SEQ ID NO: 1140599 - RNA, 18 nt, Human
gaccugcgccccccaccc

SEQ ID NO: 1140600 - RNA, 25 nt, Human
gacuucugcauguguguagcagccu

SEQ ID NO: 1140601 - RNA, 22 nt, Human
gcaugacuucugcaugugugua

SEQ ID NO: 1140602 - RNA, 20 nt, Human
gccucgguaccacacccaca

SEQ ID NO: 1140603 - RNA, 19 nt, Human
gcgccccccaccccugacg

SEQ ID NO: 1140604 - RNA, 18 nt, Human
gcucaccgcuccacuccc

SEQ ID NO: 1140605 - RNA, 24 nt, Human
gcugaagccucgguaccacaccca

SEQ ID NO: 1140606 - RNA, 23 nt, Human
gggcggcacccgcugaagccucg

SEQ ID NO: 1140607 - RNA, 18 nt, Human
gguggugaccuuggccac

SEQ ID NO: 1140608 - RNA, 22 nt, Human
uaaaacaagcauaaauuccuau

SEQ ID NO: 1140609 - RNA, 18 nt, Human
uaucaggacaaaucaggg

SEQ ID NO: 1140610 - RNA, 19 nt, Human
ucaaauuuaccccaucaaa

SEQ ID NO: 1140611 - RNA, 22 nt, Human
ucauuauugaauauaaaacaag

SEQ ID NO: 1140612 - RNA, 19 nt, Human
uccaggccaccagcaugac

SEQ ID NO: 1140613 - RNA, 21 nt, Human
ucccugcugggcuguguggag

SEQ ID NO: 1140614 - RNA, 18 nt, Human
uccgcgcaggacguaaag

SEQ ID NO: 1140615 - RNA, 21 nt, Human
ucgguaccacacccacagcca

SEQ ID NO: 1140616 - RNA, 22 nt, Human
ucguaggcucucugugaccugg

SEQ ID NO: 1140617 - RNA, 20 nt, Human
ucuaggcgggcggcacccgc

SEQ ID NO: 1140618 - RNA, 19 nt, Human
ugaccugcgccccccaccc

SEQ ID NO: 1140619 - RNA, 21 nt, Human
ugaccugcgccccccaccccu

SEQ ID NO: 1140620 - RNA, 18 nt, Human
ugaccuggaagcccccuc

SEQ ID NO: 1140621 - RNA, 18 nt, Human
ugccuuguucuccuuauc

SEQ ID NO: 1140622 - RNA, 18 nt, Human
uggagaggaccggguucc

SEQ ID NO: 1140623 - RNA, 24 nt, Human
ugucauagagcuucuucacagccu

SEQ ID NO: 1140624 - RNA, 23 nt, Human
uguccaggccaccagcaugacuu

SEQ ID NO: 1140625 - RNA, 25 nt, Human
ugucucccaaauccacuucucuccc

SEQ ID NO: 1140626 - RNA, 21 nt, Human
uuucccgagggaaccaacguu

SEQ ID NO: 1140627 - RNA, 24 nt, Human
uuugauucuaauuaaguugucauu

SEQ ID NO: 1140628 - RNA, 18 nt, Human
aaggaggaugcugggaac

SEQ ID NO: 1140629 - RNA, 20 nt, Human
aauccaaagggagagaauuc

SEQ ID NO: 1140630 - RNA, 24 nt, Human
acacucaagacccuccauacccag

SEQ ID NO: 1140631 - RNA, 20 nt, Human
agagaaaaacugaaguaaau

SEQ ID NO: 1140632 - RNA, 21 nt, Human
agagggaacgguugcuguggg

SEQ ID NO: 1140633 - RNA, 21 nt, Human
aucaggugugcgucaggagcc

SEQ ID NO: 1140634 - RNA, 21 nt, Human
cacccgcagccccaaaggggc

SEQ ID NO: 1140635 - RNA, 20 nt, Human
caccgugccccuggcauccu

SEQ ID NO: 1140636 - RNA, 21 nt, Human
cacgcggaggguccugagggc

SEQ ID NO: 1140637 - RNA, 19 nt, Human
cacucaagacccuccauac

SEQ ID NO: 1140638 - RNA, 22 nt, Human
cagagagaaaaacugaaguaaa

SEQ ID NO: 1140639 - RNA, 18 nt, Human
caggacacagcccgugca

SEQ ID NO: 1140640 - RNA, 20 nt, Human
ccaccgugccccuggcaucc

SEQ ID NO: 1140641 - RNA, 20 nt, Human
ccaccgugccccuggcaucc

SEQ ID NO: 1140642 - RNA, 21 nt, Human
cccgugcuccagugcagcggg

SEQ ID NO: 1140643 - RNA, 21 nt, Human
cccuggcauccuggcccuggc

SEQ ID NO: 1140644 - RNA, 19 nt, Human
ccgcagccccaaaggggca

SEQ ID NO: 1140645 - RNA, 24 nt, Human
ccugcugacacucaagacccucca

SEQ ID NO: 1140646 - RNA, 27 nt, Human
ccuggcccuggccgccaccucccuggc

SEQ ID NO: 1140647 - RNA, 19 nt, Human
ccuggggaauggggagggg

SEQ ID NO: 1140648 - RNA, 22 nt, Human
ccugucccgcucaggcccccug

SEQ ID NO: 1140649 - RNA, 22 nt, Human
ccugugggacccuucucaccca

SEQ ID NO: 1140650 - RNA, 19 nt, Human
ccuguuuugugacguguga

SEQ ID NO: 1140651 - RNA, 21 nt, Human
cucaagacccuccauacccag

SEQ ID NO: 1140652 - RNA, 24 nt, Human
cucaagacccuccauacccagucc

SEQ ID NO: 1140653 - RNA, 26 nt, Human
cuccaugcugaccugugggacccuuc

SEQ ID NO: 1140654 - RNA, 22 nt, Human
cucuggguccaggcguggccuc

SEQ ID NO: 1140655 - RNA, 28 nt, Human
cugacacucaagacccuccauacccagu

SEQ ID NO: 1140656 - RNA, 19 nt, Human
gaccucaccacauuauccc

SEQ ID NO: 1140657 - RNA, 24 nt, Human
gccggggggagggggcugcugaag

SEQ ID NO: 1140658 - RNA, 19 nt, Human
gccuggggcaucuuggccc

SEQ ID NO: 1140659 - RNA, 18 nt, Human
gcggggccucccuccugg

SEQ ID NO: 1140660 - RNA, 21 nt, Human
gcggggccucccuccuggcug

SEQ ID NO: 1140661 - RNA, 21 nt, Human
ggacacagcccgugcagcccc

SEQ ID NO: 1140662 - RNA, 18 nt, Human
ggagggcccagggccugg

SEQ ID NO: 1140663 - RNA, 23 nt, Human
ggccggggggagggggcugcuga

SEQ ID NO: 1140664 - RNA, 26 nt, Human
gggaaggaaccugccugguuuccagc

SEQ ID NO: 1140665 - RNA, 19 nt, Human
ggggagggguaacaccugc

SEQ ID NO: 1140666 - RNA, 19 nt, Human
gggggagggggcugcugaa

SEQ ID NO: 1140667 - RNA, 20 nt, Human
ggguaacaccugccaaggag

SEQ ID NO: 1140668 - RNA, 21 nt, Human
gggucccuccaugcugaccuu

SEQ ID NO: 1140669 - RNA, 18 nt, Human
ggucgaggagacagaucc

SEQ ID NO: 1140670 - RNA, 20 nt, Human
gugcagccccagccuggacc

SEQ ID NO: 1140671 - RNA, 20 nt, Human
ucagagagaaaaacugaagu

SEQ ID NO: 1140672 - RNA, 18 nt, Human
ucaggagggcccagggcc

SEQ ID NO: 1140673 - RNA, 19 nt, Human
ucccugccucuucccccgu

SEQ ID NO: 1140674 - RNA, 21 nt, Human
ucgggucccuccaugcugacc

SEQ ID NO: 1140675 - RNA, 28 nt, Human
ucucugggcagacaaugugacguaaacg

SEQ ID NO: 1140676 - RNA, 20 nt, Human
ucucugguugugucugugcc

SEQ ID NO: 1140677 - RNA, 26 nt, Human
ugcagccaaacaucagcucugggucc

SEQ ID NO: 1140678 - RNA, 25 nt, Human
ugcagcggguacucguggcccugcc

SEQ ID NO: 1140679 - RNA, 18 nt, Human
ugccaaggaggaugcugg

SEQ ID NO: 1140680 - RNA, 19 nt, Human
ugccaaggaggaugcuggg

SEQ ID NO: 1140681 - RNA, 18 nt, Human
ugcccaacgcacgcggag

SEQ ID NO: 1140682 - RNA, 19 nt, Human
ugccccuggcauccuggcc

SEQ ID NO: 1140683 - RNA, 23 nt, Human
uggcauccuggcccuggccgccc

SEQ ID NO: 1140684 - RNA, 21 nt, Human
uggggagggguaacaccugcc

SEQ ID NO: 1140685 - RNA, 21 nt, Human
uggggccccagggggucgagg

SEQ ID NO: 1140686 - RNA, 23 nt, Human
ugggggaaggaaccugccugguu

SEQ ID NO: 1140687 - RNA, 19 nt, Human
uguccugagcccccggagc

SEQ ID NO: 1140688 - RNA, 19 nt, Human
ugugccgacucgguguuga

SEQ ID NO: 1140689 - RNA, 23 nt, Human
ugugcggggccucccuccuggcu

SEQ ID NO: 1140690 - RNA, 22 nt, Human
uguggaaggccaaggacauggg

SEQ ID NO: 1140691 - RNA, 21 nt, Human
uguggccaggccugucccgcu

SEQ ID NO: 1140692 - RNA, 21 nt, Human
uuccagcagaagagacagagu

SEQ ID NO: 1140693 - RNA, 19 nt, Human
aagagccaauaaagagagg

SEQ ID NO: 1140694 - RNA, 20 nt, Human
aagagcuuguccggguuuug

SEQ ID NO: 1140695 - RNA, 21 nt, Human
aggagaugggcugugcguuca

SEQ ID NO: 1140696 - RNA, 22 nt, Human
auuccucagcaucuucuugucg

SEQ ID NO: 1140697 - RNA, 21 nt, Human
cacacacagcgcacacagggu

SEQ ID NO: 1140698 - RNA, 19 nt, Human
cacacaggguuuacagcag

SEQ ID NO: 1140699 - RNA, 18 nt, Human
cacagcgcacacaggguu

SEQ ID NO: 1140700 - RNA, 21 nt, Human
cacaggguuuacagcaggucc

SEQ ID NO: 1140701 - RNA, 19 nt, Human
caccuuguuuuucuugcuc

SEQ ID NO: 1140702 - RNA, 22 nt, Human
cacgaaccccaaggcaucuccu

SEQ ID NO: 1140703 - RNA, 24 nt, Human
cagcagaauuaaacagagcagacu

SEQ ID NO: 1140704 - RNA, 20 nt, Human
cagcauuauuucagaaauau

SEQ ID NO: 1140705 - RNA, 30 nt, Human; identical to SEQ ID NO: 1008247

SEQ ID NO: 1140706 - RNA, 18 nt, Human
ccuacaaagcggacacug

SEQ ID NO: 1140707 - RNA, 20 nt, Human
cgaaccccaaggcaucuccu

SEQ ID NO: 1140708 - RNA, 21 nt, Human
cgggaaagcaaccaaugccug

SEQ ID NO: 1140709 - RNA, 23 nt, Human
cuagcccauuuuugcaaagggag

SEQ ID NO: 1140710 - RNA, 19 nt, Human
cugaaggagagaucuucau

SEQ ID NO: 1140711 - RNA, 23 nt, Human
cugcaaugucuauguaagcaguu

SEQ ID NO: 1140712 - RNA, 21 nt, Human
cugggcucacacacagcgcac

SEQ ID NO: 1140713 - RNA, 18 nt, Human
gaaagugagugugaggug

SEQ ID NO: 1140714 - RNA, 22 nt, Human
gaaugaagccuaaguauuccuc

SEQ ID NO: 1140715 - RNA, 19 nt, Human
gcagacagcagaauuaaac

SEQ ID NO: 1140716 - RNA, 23 nt, Human
gcagacagcagaauuaaacagag

SEQ ID NO: 1140717 - RNA, 18 nt, Human
gcggaaagugagugugag

SEQ ID NO: 1140718 - RNA, 27 nt, Human
guaaauucauucauuagccaaacaaag

SEQ ID NO: 1140719 - RNA, 19 nt, Human
gugacaacuuuauacuccu

SEQ ID NO: 1140720 - RNA, 23 nt, Human
gugguguccuacaaagcggacac

SEQ ID NO: 1140721 - RNA, 23 nt, Human
guuucaaccaaaugauuuugauu

SEQ ID NO: 1140722 - RNA, 19 nt, Human
uaaacagagcagacugaag

SEQ ID NO: 1140723 - RNA, 23 nt, Human
uaaacagagcagacugaaggaga

SEQ ID NO: 1140724 - RNA, 20 nt, Human
uagccaaacaaagcugucua

SEQ ID NO: 1140725 - RNA, 18 nt, Human
uaucucaggaaucagcau

SEQ ID NO: 1140726 - RNA, 22 nt, Human
ucacacacagcgcacacagggu

SEQ ID NO: 1140727 - RNA, 21 nt, Human
ucagcauuauuucagaaauau

SEQ ID NO: 1140728 - RNA, 19 nt, Human
ucccucagcacaauuacua

SEQ ID NO: 1140729 - RNA, 22 nt, Human
ucgcuuccuucaccuuguuuuu

SEQ ID NO: 1140730 - RNA, 20 nt, Human
ucugcaaugucuauguaagc

SEQ ID NO: 1140731 - RNA, 21 nt, Human
ucuucuuugauaacuggcuca

SEQ ID NO: 1140732 - RNA, 23 nt, Human
ucuugcucuucuucauugacugg

SEQ ID NO: 1140733 - RNA, 25 nt, Human
ucuugcucuucuucauugacugguu

SEQ ID NO: 1140734 - RNA, 24 nt, Human
ugaaggagagaucuucauuauuug

SEQ ID NO: 1140735 - RNA, 20 nt, Human
ugacugguuuuuggggccau

SEQ ID NO: 1140736 - RNA, 21 nt, Human
ugagacuggggaucaaaucca

SEQ ID NO: 1140737 - RNA, 23 nt, Human
ugagacuggggaucaaauccacu

SEQ ID NO: 1140738 - RNA, 20 nt, Human
ugaucaccuugacugucugg

SEQ ID NO: 1140739 - RNA, 23 nt, Human
ugcucuucuucauugacugguuu

SEQ ID NO: 1140740 - RNA, 23 nt, Human
uggaauacagaggaaugaacuuc

SEQ ID NO: 1140741 - RNA, 18 nt, Human
uguccauuuuucauuaug

SEQ ID NO: 1140742 - RNA, 23 nt, Human
ugucuauguaagcaguuucccuc

SEQ ID NO: 1140743 - RNA, 18 nt, Human
uguguacacagaagcaug

SEQ ID NO: 1140744 - RNA, 24 nt, Human
uucaccuuguuuuucuugcucuuc

SEQ ID NO: 1140745 - RNA, 24 nt, Human
uuucacaaauuuacaaguguugcu

SEQ ID NO: 1140746 - RNA, 19 nt, Human
auuugcacaagccucccuc

SEQ ID NO: 1140747 - RNA, 24 nt, Human
cagcaccagaaucuaugagaauau

SEQ ID NO: 1140748 - RNA, 21 nt, Human
caucacuucgaugucugcacc

SEQ ID NO: 1140749 - RNA, 21 nt, Human
caucauccucuccagcuucca

SEQ ID NO: 1140750 - RNA, 27 nt, Human
ucagguccauugucgucuucuucauca

SEQ ID NO: 1140751 - RNA, 22 nt, Human
uccaggcuuggccacgggaggc

SEQ ID NO: 1140752 - RNA, 18 nt, Human
ucccucuggcauugcaga

SEQ ID NO: 1140753 - RNA, 22 nt, Human
ucccucuggcauugcagagccu

SEQ ID NO: 1140754 - RNA, 23 nt, Human
ucccucuggcauugcagagccug

SEQ ID NO: 1140755 - RNA, 23 nt, Human
ugagaauauuugcacaagccucc

SEQ ID NO: 1140756 - RNA, 22 nt, Human
uuccaggcuuggccacgggagg

SEQ ID NO: 1140757 - RNA, 24 nt, Human
uuugcacaagccucccucuggcau

SEQ ID NO: 1140758 - RNA, 23 nt, Human
agacccaacaugcucuuggcaga

SEQ ID NO: 1140759 - RNA, 21 nt, Human
augcucuuggcagauacugga

SEQ ID NO: 1140760 - RNA, 20 nt, Human
cuuucuggagcuaaaugggg

SEQ ID NO: 1140761 - RNA, 24 nt, Human
ugaggcagcagucacgggagaccc

SEQ ID NO: 1140762 - RNA, 21 nt, Human
ugcuuggucuugaugauucuu

SEQ ID NO: 1140763 - RNA, 20 nt, Human
aaaaccuuccuuaaagauuc

SEQ ID NO: 1140764 - RNA, 20 nt, Human
aaaagucacccucaaccacc

SEQ ID NO: 1140765 - RNA, 20 nt, Human
aacacugaacuggggaacau

SEQ ID NO: 1140766 - RNA, 20 nt, Human
aacaguucagguccccaagc

SEQ ID NO: 1140767 - RNA, 21 nt, Human
aagcagagcaugcagccggga

SEQ ID NO: 1140768 - RNA, 25 nt, Human
aagggaccagagcgacauacugaug

SEQ ID NO: 1140769 - RNA, 21 nt, Human
accuauuauacaugcaacacu

SEQ ID NO: 1140770 - RNA, 21 nt, Human
agauuaacaauuugaugaccc

SEQ ID NO: 1140771 - RNA, 24 nt, Human
aggcagaggcaaccaaucuuuuuu

SEQ ID NO: 1140772 - RNA, 19 nt, Human
agugacaucaccauaaaac

SEQ ID NO: 1140773 - RNA, 18 nt, Human
auaaaggccaggcagcag

SEQ ID NO: 1140774 - RNA, 23 nt, Human
augaccccaucacaguaccaaaa

SEQ ID NO: 1140775 - RNA, 21 nt, Human
caacacugaacuggggaacau

SEQ ID NO: 1140776 - RNA, 30 nt, Human
cacaguaccaaaauaucccccaaaaugaag

SEQ ID NO: 1140777 - RNA, 23 nt, Human
cacucucccuccugcuucuucca

SEQ ID NO: 1140778 - RNA, 24 nt, Human
cacuguagaccugguuuuuucccc

SEQ ID NO: 1140779 - RNA, 19 nt, Human
cagagcgacauacugaugc

SEQ ID NO: 1140780 - RNA, 26 nt, Human
cagaggcaaccaaucuuuuuuuuuuu

SEQ ID NO: 1140781 - RNA, 20 nt, Human
cagcagcgccacucucccuc

SEQ ID NO: 1140782 - RNA, 19 nt, Human
caggaucacaaaggcagag

SEQ ID NO: 1140783 - RNA, 22 nt, Human
caguaccaaaauaucccccaaa

SEQ ID NO: 1140784 - RNA, 21 nt, Human
caucacaguaccaaaauaucc

SEQ ID NO: 1140785 - RNA, 18 nt, Human
cauggagagcucagcaca

SEQ ID NO: 1140786 - RNA, 23 nt, Human
ccaaaauaucccccaaaaugaag

SEQ ID NO: 1140787 - RNA, 24 nt, Human
cccucaaccaccaucugacugguc

SEQ ID NO: 1140788 - RNA, 21 nt, Human
cggcaacagcgacauggagag

SEQ ID NO: 1140789 - RNA, 23 nt, Human
cgggcggcaacagcgacauggag

SEQ ID NO: 1140790 - RNA, 22 nt, Human
cugaugccuauugaggcaucug

SEQ ID NO: 1140791 - RNA, 19 nt, Human
cuuggggccuccagaacag

SEQ ID NO: 1140792 - RNA, 22 nt, Human
gaucaaaacauaaaucagagug

SEQ ID NO: 1140793 - RNA, 19 nt, Human
gauugcucuuuaaagggac

SEQ ID NO: 1140794 - RNA, 22 nt, Human
gcaacacugaacuggggaacau

SEQ ID NO: 1140795 - RNA, 18 nt, Human
gccagccucugguugucu

SEQ ID NO: 1140796 - RNA, 18 nt, Human
gccuccagaacaguucag

SEQ ID NO: 1140797 - RNA, 19 nt, Human
ggcaggaagaggagaaacc

SEQ ID NO: 1140798 - RNA, 25 nt, Human
ggccaagcagagcaugcagccggga

SEQ ID NO: 1140799 - RNA, 23 nt, Human
ggccaugucccaacaacagcagc

SEQ ID NO: 1140800 - RNA, 21 nt, Human
ggcggcaacagcgacauggag

SEQ ID NO: 1140801 - RNA, 21 nt, Human
ggggaacauggcuuggggccu

SEQ ID NO: 1140802 - RNA, 26 nt, Human
gggggcaggaagaggagaaaccuauu

SEQ ID NO: 1140803 - RNA, 24 nt, Human
ggggggcaggaagaggagaaaccu

SEQ ID NO: 1140804 - RNA, 21 nt, Human
gucacccucaaccaccaucug

SEQ ID NO: 1140805 - RNA, 19 nt, Human
ucaggucucaccugugcca

SEQ ID NO: 1140806 - RNA, 23 nt, Human
ucccaacaacagcagcgccacuc

SEQ ID NO: 1140807 - RNA, 21 nt, Human
ucccaagcugucagcgagcgc

SEQ ID NO: 1140808 - RNA, 20 nt, Human
ucccccaaaaugaaguucaa

SEQ ID NO: 1140809 - RNA, 24 nt, Human
ugagugacaucaccauaaaaacac

SEQ ID NO: 1140810 - RNA, 25 nt, Human
ugagugaguaaaauuauaaaggcca

SEQ ID NO: 1140811 - RNA, 24 nt, Human
uuauaaaggccaggcagcaggaaa

SEQ ID NO: 1140812 - RNA, 23 nt, Human
uucuuccaggauugcucuuuaaa

SEQ ID NO: 1140813 - RNA, 20 nt, Human
uugaugcuuugcucuaucac

SEQ ID NO: 1140814 - RNA, 23 nt, Human
uuuaaaaccuuccuuaaagauuc

SEQ ID NO: 1140815 - RNA, 22 nt, Human
uuucccccuaguuuuuucuuuu

SEQ ID NO: 1140816 - RNA, 25 nt, Human
uuuuacauucuggguugcuauuuuc

SEQ ID NO: 1140817 - RNA, 18 nt, Human
aaagugcugggauuacaa

SEQ ID NO: 1140818 - RNA, 24 nt, Human
aaagugcugggauuacaagcauga

SEQ ID NO: 1140819 - RNA, 19 nt, Human
aagugcugggauuacaagc

SEQ ID NO: 1140820 - RNA, 21 nt, Human
aagugcugggauuacaagcau

SEQ ID NO: 1140821 - RNA, 26 nt, Human
aagugcugggauuacaagcaugagcu

SEQ ID NO: 1140822 - RNA, 23 nt, Human
accugucuuggccucccaaagug

SEQ ID NO: 1140823 - RNA, 24 nt, Human
aggcggccgagaaggcggcucagc

SEQ ID NO: 1140824 - RNA, 24 nt, Human
agugcugggauuacaagcaugagc

SEQ ID NO: 1140825 - RNA, 18 nt, Human
auagaguccucccaaggg

SEQ ID NO: 1140826 - RNA, 24 nt, Human
caaagugcugggauuacaagcaug

SEQ ID NO: 1140827 - RNA, 21 nt, Human
cagccgccgcagggaccaggc

SEQ ID NO: 1140828 - RNA, 20 nt, Human
cagcgcggaccccgcccggg

SEQ ID NO: 1140829 - RNA, 19 nt, Human
ccaaagugcugggauuaca

SEQ ID NO: 1140830 - RNA, 24 nt, Human
ccaaagugcugggauuacaagcau

SEQ ID NO: 1140831 - RNA, 21 nt, Human
ccaagggucuccuaucacugu

SEQ ID NO: 1140832 - RNA, 21 nt, Human
ccaggcugcccaggcuggucu

SEQ ID NO: 1140833 - RNA, 24 nt, Human
ccaggcuggucuugaacuccuggg

SEQ ID NO: 1140834 - RNA, 20 nt, Human
cccacuuguaaaaacacaau

SEQ ID NO: 1140835 - RNA, 21 nt, Human
ccccgccgcccgcgccggcua

SEQ ID NO: 1140836 - RNA, 21 nt, Human
cccgccgcccgcgccggcuac

SEQ ID NO: 1140837 - RNA, 22 nt, Human
cccgccgggugccggagaggaa

SEQ ID NO: 1140838 - RNA, 19 nt, Human
ccgagaaggcggcucagcg

SEQ ID NO: 1140839 - RNA, 20 nt, Human
ccgcccgcgccggcuaccgc

SEQ ID NO: 1140840 - RNA, 19 nt, Human
ccgccgcggcccggccccc

SEQ ID NO: 1140841 - RNA, 26 nt, Human
ccgccgcggcccggcccccgccgccc

SEQ ID NO: 1140842 - RNA, 18 nt, Human
ccgcgcccgggcgcccgc

SEQ ID NO: 1140843 - RNA, 20 nt, Human
ccgcgcgcccgggccgccgg

SEQ ID NO: 1140844 - RNA, 22 nt, Human
cgaagcgccgcgcgcccgggcc

SEQ ID NO: 1140845 - RNA, 22 nt, Human
cgccgcccgcgccggcuaccgc

SEQ ID NO: 1140846 - RNA, 25 nt, Human
cgcgcccgggcgcccgccgggugcc

SEQ ID NO: 1140847 - RNA, 18 nt, Human
cggcccccgccgcccgcg

SEQ ID NO: 1140848 - RNA, 19 nt, Human
cuccugggcucagacaguc

SEQ ID NO: 1140849 - RNA, 19 nt, Human
cuggucuugaacuccuggg

SEQ ID NO: 1140850 - RNA, 23 nt, Human
cugucuuggccucccaaagugcu

SEQ ID NO: 1140851 - RNA, 23 nt, Human
gacagucuaccugucuuggccuc

SEQ ID NO: 1140852 - RNA, 18 nt, Human
gaccaggcggccgagaag

SEQ ID NO: 1140853 - RNA, 20 nt, Human
gagaugggguuuugccaggc

SEQ ID NO: 1140854 - RNA, 19 nt, Human
gauuacaagcaugagcuac

SEQ ID NO: 1140855 - RNA, 18 nt, Human
gcaaagcccccugccaga

SEQ ID NO: 1140856 - RNA, 18 nt, Human
gcaaagcccccugccaga

SEQ ID NO: 1140857 - RNA, 21 nt, Human
gcaaagcccccugccagauag

SEQ ID NO: 1140858 - RNA, 18 nt, Human
gccaggcugcccaggcug

SEQ ID NO: 1140859 - RNA, 18 nt, Human
gccgcagggaccaggcgg

SEQ ID NO: 1140860 - RNA, 21 nt, Human
gcugcccaggcuggucuugaa

SEQ ID NO: 1140861 - RNA, 19 nt, Human
ggauuacaagcaugagcua

SEQ ID NO: 1140862 - RNA, 27 nt, Human
ggcugcccaggcuggucuugaacuccu

SEQ ID NO: 1140863 - RNA, 18 nt, Human
ggcuggucuugaacuccu

SEQ ID NO: 1140864 - RNA, 20 nt, Human
gucuccuaucacuguggcau

SEQ ID NO: 1140865 - RNA, 22 nt, Human
gucuuggccucccaaagugcug

SEQ ID NO: 1140866 - RNA, 24 nt, Human
guuuugccaggcugcccaggcugg

SEQ ID NO: 1140867 - RNA, 23 nt, Human
uaccugucuuggccucccaaagu

SEQ ID NO: 1140868 - RNA, 22 nt, Human
uagaguccucccaagggucucc

SEQ ID NO: 1140869 - RNA, 18 nt, Human
ucccaaagugcugggauu

SEQ ID NO: 1140870 - RNA, 24 nt, Human
ucccaaagugcugggauuacaagc

SEQ ID NO: 1140871 - RNA, 19 nt, Human
ucccucacagcagucaaag

SEQ ID NO: 1140872 - RNA, 19 nt, Human
ucuugaacuccugggcuca

SEQ ID NO: 1140873 - RNA, 24 nt, Human
ucuugaacuccugggcucagacag

SEQ ID NO: 1140874 - RNA, 20 nt, Human
ucuuggccucccaaagugcu

SEQ ID NO: 1140875 - RNA, 24 nt, Human
ugaacuccugggcucagacagucu

SEQ ID NO: 1140876 - RNA, 24 nt, Human
ugccaggcugcccaggcuggucuu

SEQ ID NO: 1140877 - RNA, 27 nt, Human
ugccaggcugcccaggcuggucuugaa

SEQ ID NO: 1140878 - RNA, 28 nt, Human
ugcccaggcuggucuugaacuccugggc

SEQ ID NO: 1140879 - RNA, 27 nt, Human
ugcugggauuacaagcaugagcuacca

SEQ ID NO: 1140880 - RNA, 22 nt, Human
ugggauuacaagcaugagcuac

SEQ ID NO: 1140881 - RNA, 23 nt, Human
ugggauuacaagcaugagcuacc

SEQ ID NO: 1140882 - RNA, 24 nt, Human
ugggauuacaagcaugagcuacca

SEQ ID NO: 1140883 - RNA, 30 nt, Human
ugggauuacaagcaugagcuaccacacugg

SEQ ID NO: 1140884 - RNA, 24 nt, Human
ugggguuuugccaggcugcccagg

SEQ ID NO: 1140885 - RNA, 22 nt, Human
uguaaaaacacaaugacgugca

SEQ ID NO: 1140886 - RNA, 20 nt, Human
uuacaagcaugagcuaccac

SEQ ID NO: 1140887 - RNA, 22 nt, Human
uuugccaggcugcccaggcugg

SEQ ID NO: 1140888 - RNA, 22 nt, Human
uuuugccaggcugcccaggcug

SEQ ID NO: 1140889 - RNA, 21 nt, Human
aacuuggaguccaaagucugu

SEQ ID NO: 1140890 - RNA, 19 nt, Human
aagaaaaagcaaccuacaa

SEQ ID NO: 1140891 - RNA, 19 nt, Human
aagcaaagauuuucccaug

SEQ ID NO: 1140892 - RNA, 19 nt, Human
aaugcaaaacuagguuuga

SEQ ID NO: 1140893 - RNA, 20 nt, Human
acuuggaguccaaagucugu

SEQ ID NO: 1140894 - RNA, 19 nt, Human
agcaaagaacugaagaagc

SEQ ID NO: 1140895 - RNA, 18 nt, Human
agcaaguguccacucccc

SEQ ID NO: 1140896 - RNA, 19 nt, Human
auauuuacauaaugacuaa

SEQ ID NO: 1140897 - RNA, 20 nt, Human
auccucugcuguugccuucu

SEQ ID NO: 1140898 - RNA, 27 nt, Human
auccucugcuguugccuucuuuuuaau

SEQ ID NO: 1140899 - RNA, 26 nt, Human
caaggauacugugaugaaagucaaag

SEQ ID NO: 1140900 - RNA, 24 nt, Human
cacuccccaccccucuccccugcc

SEQ ID NO: 1140901 - RNA, 20 nt, Human
cagccuuuuucaacuuggag

SEQ ID NO: 1140902 - RNA, 18 nt, Human
cagcuauacccuagcuga

SEQ ID NO: 1140903 - RNA, 23 nt, Human
cagcuauacccuagcugagcaaa

SEQ ID NO: 1140904 - RNA, 21 nt, Human
caggaggaagaaaaagcaacc

SEQ ID NO: 1140905 - RNA, 22 nt, Human
ccaccccucuccccugcccccc

SEQ ID NO: 1140906 - RNA, 23 nt, Human
ccacuccccaccccucuccccug

SEQ ID NO: 1140907 - RNA, 20 nt, Human
ccaggaggaagaaaaagcaa

SEQ ID NO: 1140908 - RNA, 18 nt, Human
ccaggucacuuggacaag

SEQ ID NO: 1140909 - RNA, 24 nt, Human
ccccaccccucuccccugcccccc

SEQ ID NO: 1140910 - RNA, 23 nt, Human
cccccuuuuguuacuugaagugu

SEQ ID NO: 1140911 - RNA, 26 nt, Human
cccucuccccugccccccuuuuguua

SEQ ID NO: 1140912 - RNA, 23 nt, Human
cugagguauacaaacuuggcugg

SEQ ID NO: 1140913 - RNA, 18 nt, Human
gaggaagaaaaagcaacc

SEQ ID NO: 1140914 - RNA, 23 nt, Human
gcccaggaggaagaaaaagcaac

SEQ ID NO: 1140915 - RNA, 20 nt, Human
ggagaccuggcauagaaaaa

SEQ ID NO: 1140916 - RNA, 23 nt, Human
guguccacuccccaccccucucc

SEQ ID NO: 1140917 - RNA, 22 nt, Human
uaaaaugagggguuuugacuug

SEQ ID NO: 1140918 - RNA, 25 nt, Human
uaacaaaugcaaaacuagguuugaa

SEQ ID NO: 1140919 - RNA, 22 nt, Human
uaagguaaaaccuuuccacaaa

SEQ ID NO: 1140920 - RNA, 20 nt, Human
uaagguggaugcagaaagaa

SEQ ID NO: 1140921 - RNA, 25 nt, Human
uacacaauuauauuuacauaaugac

SEQ ID NO: 1140922 - RNA, 19 nt, Human
uacauaaugacuaagguaa

SEQ ID NO: 1140923 - RNA, 19 nt, Human
uaggccucuggcuuauggc

SEQ ID NO: 1140924 - RNA, 23 nt, Human
uccccaccccucuccccugcccc

SEQ ID NO: 1140925 - RNA, 22 nt, Human
uccugagcguccauaaucugca

SEQ ID NO: 1140926 - RNA, 19 nt, Human
ucucaggccagcuauaccc

SEQ ID NO: 1140927 - RNA, 23 nt, Human
ucucaggccagcuauacccuagc

SEQ ID NO: 1140928 - RNA, 21 nt, Human
ucucuggggcuugcacugccu

SEQ ID NO: 1140929 - RNA, 22 nt, Human
ucucuggggcuugcacugccuu

SEQ ID NO: 1140930 - RNA, 24 nt, Human
ucugaaacaccuuuuuuaaaaaaa

SEQ ID NO: 1140931 - RNA, 22 nt, Human
ucuucuaguuguuuccuucgau

SEQ ID NO: 1140932 - RNA, 21 nt, Human
ugaaagaacuugcccucugcu

SEQ ID NO: 1140933 - RNA, 22 nt, Human
ugaauauaaaagcuagacgacc

SEQ ID NO: 1140934 - RNA, 24 nt, Human
ugagcaaagaacugaagaagcaag

SEQ ID NO: 1140935 - RNA, 23 nt, Human
ugagcguccauaaucugcaucca

SEQ ID NO: 1140936 - RNA, 21 nt, Human
ugaggagaccuggcauagaaa

SEQ ID NO: 1140937 - RNA, 23 nt, Human
ugcccaggaggaagaaaaagcaa

SEQ ID NO: 1140938 - RNA, 18 nt, Human
uggcauagaaaaaacaag

SEQ ID NO: 1140939 - RNA, 21 nt, Human
ugggaccaaccuucugauaua

SEQ ID NO: 1140940 - RNA, 19 nt, Human
uguaaaaugagggguuuug

SEQ ID NO: 1140941 - RNA, 21 nt, Human
uguuuauuaccacugguucca

SEQ ID NO: 1140942 - RNA, 24 nt, Human
uuaaauauuaagaaagcuaaaauu

SEQ ID NO: 1140943 - RNA, 23 nt, Human
uuauagguuuuucccuuagauuu

SEQ ID NO: 1140944 - RNA, 23 nt, Human
uucugaaacaccuuuuuuaaaaa

SEQ ID NO: 1140945 - RNA, 25 nt, Human
uugaauauaaaagcuagacgaccau

SEQ ID NO: 1140946 - RNA, 18 nt, Human
uugacuuggccaucuguc

SEQ ID NO: 1140947 - RNA, 19 nt, Human
uugcacugccuucucaggc

SEQ ID NO: 1140948 - RNA, 20 nt, Human
uuuuccaggucacuuggaca

SEQ ID NO: 1140949 - RNA, 18 nt, Human
caacacgccguaccgcag

SEQ ID NO: 1140950 - RNA, 20 nt, Human
caauccuuuugauaagaaau

SEQ ID NO: 1140951 - RNA, 23 nt, Human
ccgcugggaccaacacgccguac

SEQ ID NO: 1140952 - RNA, 19 nt, Human
ccuacagcacgucccuacc

SEQ ID NO: 1140953 - RNA, 21 nt, Human
ccucagcugaaccgcugggac

SEQ ID NO: 1140954 - RNA, 19 nt, Human
cugggaccaacacgccgua

SEQ ID NO: 1140955 - RNA, 18 nt, Human
cuguaaaacaaauaccau

SEQ ID NO: 1140956 - RNA, 22 nt, Human
gaaguucuaagaaaaaaugaca

SEQ ID NO: 1140957 - RNA, 21 nt, Human
gcugaaccgcugggaccaaca

SEQ ID NO: 1140958 - RNA, 25 nt, Human
uaaacuccaaagccaauuucaaaag

SEQ ID NO: 1140959 - RNA, 23 nt, Human
uaaauaaaugcuugaaauauacc

SEQ ID NO: 1140960 - RNA, 21 nt, Human
uauccaauccuuuugauaaga

SEQ ID NO: 1140961 - RNA, 20 nt, Human
ucaaaagacauuuuugugaa

SEQ ID NO: 1140962 - RNA, 23 nt, Human
ugaaauauacccaguagaaacuu

SEQ ID NO: 1140963 - RNA, 18 nt, Human
uuucaugucauaaaaugg

SEQ ID NO: 1140964 - RNA, 22 nt, Human
cccuggcucagcuuccaccccc

SEQ ID NO: 1140965 - RNA, 21 nt, Human
ccuguguccccaguccagagc

SEQ ID NO: 1140966 - RNA, 21 nt, Human
cucagccucugccuugggggc

SEQ ID NO: 1140967 - RNA, 22 nt, Human
cugaaaugucuucugauucuca

SEQ ID NO: 1140968 - RNA, 20 nt, Human
cuggcucagcuuccaccccc

SEQ ID NO: 1140969 - RNA, 22 nt, Human
cugucccuggcucagcuuccac

SEQ ID NO: 1140970 - RNA, 22 nt, Human
cuuccacccccagcuggggcuc

SEQ ID NO: 1140971 - RNA, 23 nt, Human
cuucugauucucagccucugccu

SEQ ID NO: 1140972 - RNA, 21 nt, Human
gcuuccacccccagcuggggc

SEQ ID NO: 1140973 - RNA, 20 nt, Human
ucuccugaaaugucuucuga

SEQ ID NO: 1140974 - RNA, 18 nt, Human
ugcuuuauuggggaaggg

SEQ ID NO: 1140975 - RNA, 25 nt, Human
uggcucagcuuccacccccagcugg

SEQ ID NO: 1140976 - RNA, 25 nt, Human
uugcuuuauuggggaagggauggga

SEQ ID NO: 1140977 - RNA, 23 nt, Human
aaaaaggacaccccccaccacaa

SEQ ID NO: 1140978 - RNA, 25 nt, Human
aaaggcagagcccagugcauccacu

SEQ ID NO: 1140979 - RNA, 24 nt, Human
aaagugcugggauuacagguguga

SEQ ID NO: 1140980 - RNA, 24 nt, Human
aaaguggagaauggccgcugcgga

SEQ ID NO: 1140981 - RNA, 24 nt, Human
aaccacaggaggcccccaggaagu

SEQ ID NO: 1140982 - RNA, 24 nt, Human
aaccucaccuuaccauguccccac

SEQ ID NO: 1140983 - RNA, 23 nt, Human
aacucagacucagcacauccaug

SEQ ID NO: 1140984 - RNA, 22 nt, Human
aagaaaaaaaaaaucuagaaga

SEQ ID NO: 1140985 - RNA, 18 nt, Human
aagugcugggauuacagg

SEQ ID NO: 1140986 - RNA, 19 nt, Human
aagugcugggauuacaggu

SEQ ID NO: 1140987 - RNA, 26 nt, Human
aagugcugggauuacaggugugaacc

SEQ ID NO: 1140988 - RNA, 24 nt, Human
aaugcagugaugcgaucuuggcuc

SEQ ID NO: 1140989 - RNA, 21 nt, Human
acaaaugagaagaccaaggcc

SEQ ID NO: 1140990 - RNA, 18 nt, Human
acaggguuucaccauguu

SEQ ID NO: 1140991 - RNA, 21 nt, Human
acaggguuucaccauguuggc

SEQ ID NO: 1140992 - RNA, 24 nt, Human
acaggguuucaccauguuggccag

SEQ ID NO: 1140993 - RNA, 23 nt, Human
accacaauacccugcucugucuc

SEQ ID NO: 1140994 - RNA, 20 nt, Human
accagcgcguguguuccugg

SEQ ID NO: 1140995 - RNA, 24 nt, Human
accauguuggccaggauggucucg

SEQ ID NO: 1140996 - RNA, 19 nt, Human
acccagggcccuggucagc

SEQ ID NO: 1140997 - RNA, 21 nt, Human
acccugcucugucuccuccuc

SEQ ID NO: 1140998 - RNA, 24 nt, Human
accucauucaggaagccccgccag

SEQ ID NO: 1140999 - RNA, 24 nt, Human
accuccagaacgaagcccagccuc

SEQ ID NO: 1141000 - RNA, 24 nt, Human
accucgugauccacccaccuuggc

SEQ ID NO: 1141001 - RNA, 20 nt, Human
accugggccccuccccaagc

SEQ ID NO: 1141002 - RNA, 18 nt, Human
acucacuccugcucccca

SEQ ID NO: 1141003 - RNA, 24 nt, Human
acugauucuuaaaaggggagguga

SEQ ID NO: 1141004 - RNA, 27 nt, Human
agaaaaacucaaaggaaugggccuggg

SEQ ID NO: 1141005 - RNA, 22 nt, Human
agaacucggggaagggaagaac

SEQ ID NO: 1141006 - RNA, 19 nt, Human
agacagggccugcacacag

SEQ ID NO: 1141007 - RNA, 20 nt, Human
agacauagcccuagagcucc

SEQ ID NO: 1141008 - RNA, 22 nt, Human
agacgucucaguacagucucca

SEQ ID NO: 1141009 - RNA, 18 nt, Human
agagggugggggagcucc

SEQ ID NO: 1141010 - RNA, 24 nt, Human
agcaguucucccgccucaaccucc

SEQ ID NO: 1141011 - RNA, 25 nt, Human
agccacaggacaucggcaguggccc

SEQ ID NO: 1141012 - RNA, 21 nt, Human
agcucuuccccauucuccccc

SEQ ID NO: 1141013 - RNA, 23 nt, Human
aggaaacacccccaacccagggc

SEQ ID NO: 1141014 - RNA, 23 nt, Human
aggaagaagaaagaggagcccaa

SEQ ID NO: 1141015 - RNA, 18 nt, Human
agggguggagggcagggg

SEQ ID NO: 1141016 - RNA, 23 nt, Human
agggugggggagcuccaaggcuu

SEQ ID NO: 1141017 - RNA, 19 nt, Human
aggugugaaccaccacgcc

SEQ ID NO: 1141018 - RNA, 24 nt, Human
agugcagcucccagccccaaaaag

SEQ ID NO: 1141019 - RNA, 24 nt, Human
auaaagcacagaacauauacagaa

SEQ ID NO: 1141020 - RNA, 21 nt, Human
aucuauaacaagcauucucaa

SEQ ID NO: 1141021 - RNA, 22 nt, Human
augccaugggacacccugauga

SEQ ID NO: 1141022 - RNA, 26 nt, Human
auuaaacugcagcccucaaaggcaga

SEQ ID NO: 1141023 - RNA, 24 nt, Human
auuauuguauuuuuaguagagaca

SEQ ID NO: 1141024 - RNA, 19 nt, Human
caaaaaugccagcuguagc

SEQ ID NO: 1141025 - RNA, 22 nt, Human
caaagccagccccccaccaguc

SEQ ID NO: 1141026 - RNA, 24 nt, Human
caaagugcugggauuacaggugug

SEQ ID NO: 1141027 - RNA, 19 nt, Human
caaccacaggaggccccca

SEQ ID NO: 1141028 - RNA, 22 nt, Human
caacccagggcccuggucagcc

SEQ ID NO: 1141029 - RNA, 21 nt, Human
caaccucugcagcugcuuccc

SEQ ID NO: 1141030 - RNA, 21 nt, Human
caacuaagccccacugggguc

SEQ ID NO: 1141031 - RNA, 22 nt, Human
caagucccauaggcaacucaga

SEQ ID NO: 1141032 - RNA, 23 nt, Human
cacaauacccugcucugucuccu

SEQ ID NO: 1141033 - RNA, 19 nt, Human
cacaccuuuuuccaccccc

SEQ ID NO: 1141034 - RNA, 21 nt, Human
cacaggacaucggcaguggcc

SEQ ID NO: 1141035 - RNA, 23 nt, Human
cacaggacaucggcaguggccca

SEQ ID NO: 1141036 - RNA, 20 nt, Human
cacaucaccccccaccccuc

SEQ ID NO: 1141037 - RNA, 25 nt, Human
caccaggaagaagaaagaggagccc

SEQ ID NO: 1141038 - RNA, 18 nt, Human
caccauguuggccaggau

SEQ ID NO: 1141039 - RNA, 22 nt, Human
caccauguuggccaggaugguc

SEQ ID NO: 1141040 - RNA, 24 nt, Human
caccauguuggccaggauggucuc

SEQ ID NO: 1141041 - RNA, 22 nt, Human
cacccaccuuggccucccaaag

SEQ ID NO: 1141042 - RNA, 23 nt, Human
cacccaccuuggccucccaaagu

SEQ ID NO: 1141043 - RNA, 19 nt, Human
caccccaagccccacugcc

SEQ ID NO: 1141044 - RNA, 23 nt, Human
caccccaagccccacugccucca

SEQ ID NO: 1141045 - RNA, 19 nt, Human
caccccacccaaccucugc

SEQ ID NO: 1141046 - RNA, 22 nt, Human
caccccaguucccagggcauga

SEQ ID NO: 1141047 - RNA, 24 nt, Human
caccccccaccacaauacccugcu

SEQ ID NO: 1141048 - RNA, 22 nt, Human
caccccccaccccucaacacac

SEQ ID NO: 1141049 - RNA, 23 nt, Human
caccccccaccccucaacacaca

SEQ ID NO: 1141050 - RNA, 18 nt, Human
caccccucaacacacagg

SEQ ID NO: 1141051 - RNA, 22 nt, Human
caccuuaccauguccccaccuc

SEQ ID NO: 1141052 - RNA, 21 nt, Human
cacugcaaccuccgccuccca

SEQ ID NO: 1141053 - RNA, 21 nt, Human
cacugccuccaagccucccac

SEQ ID NO: 1141054 - RNA, 22 nt, Human
cacuuaauauucacagcaacac

SEQ ID NO: 1141055 - RNA, 26 nt, Human
cagaacgaagcccagccuccucugcc

SEQ ID NO: 1141056 - RNA, 22 nt, Human
cagacccaagcccaccagcagg

SEQ ID NO: 1141057 - RNA, 22 nt, Human
cagagcccagugcauccacugc

SEQ ID NO: 1141058 - RNA, 22 nt, Human
cagccccaaaaaggacaccccc

SEQ ID NO: 1141059 - RNA, 21 nt, Human
cagcucaccugggccccuccc

SEQ ID NO: 1141060 - RNA, 24 nt, Human
cagcucaccugggccccuccccaa

SEQ ID NO: 1141061 - RNA, 25 nt, Human
cagcuggagcauccuggucagccaa

SEQ ID NO: 1141062 - RNA, 24 nt, Human
caggguuucaccauguuggccagg

SEQ ID NO: 1141063 - RNA, 26 nt, Human
caguaccugaagaccuguuugcccca

SEQ ID NO: 1141064 - RNA, 19 nt, Human
cagugaugcgaucuuggcu

SEQ ID NO: 1141065 - RNA, 20 nt, Human
caguguauguaucuguuccc

SEQ ID NO: 1141066 - RNA, 25 nt, Human
caugagcaaugacaggaaccauggg

SEQ ID NO: 1141067 - RNA, 23 nt, Human
ccaaaaccgcccuuccuuccccc

SEQ ID NO: 1141068 - RNA, 20 nt, Human
ccaaagugcugggauuacag

SEQ ID NO: 1141069 - RNA, 21 nt, Human
ccaaagugcugggauuacagg

SEQ ID NO: 1141070 - RNA, 21 nt, Human
ccaaagugcugggauuacagg

SEQ ID NO: 1141071 - RNA, 24 nt, Human
ccaaagugcugggauuacaggugu

SEQ ID NO: 1141072 - RNA, 21 nt, Human
ccaagccucccacucugcacu

SEQ ID NO: 1141073 - RNA, 20 nt, Human
ccacaaugucaugugaucag

SEQ ID NO: 1141074 - RNA, 26 nt, Human
ccacccgaaaaguggagaauggccgc

SEQ ID NO: 1141075 - RNA, 23 nt, Human
ccaccuccagaacgaagcccagc

SEQ ID NO: 1141076 - RNA, 24 nt, Human
ccacuggggucccagaaaugaggu

SEQ ID NO: 1141077 - RNA, 20 nt, Human
ccacuucugagcuccagacc

SEQ ID NO: 1141078 - RNA, 24 nt, Human
ccagccccccaccagucagcuacg

SEQ ID NO: 1141079 - RNA, 22 nt, Human
ccaggagggaagcccaaccaca

SEQ ID NO: 1141080 - RNA, 25 nt, Human
ccagugcauccacugcgcaucccca

SEQ ID NO: 1141081 - RNA, 20 nt, Human
cccaaaaaggacacccccca

SEQ ID NO: 1141082 - RNA, 21 nt, Human
cccaaaaaggacaccccccac

SEQ ID NO: 1141083 - RNA, 22 nt, Human
cccaaaaaggacaccccccacc

SEQ ID NO: 1141084 - RNA, 21 nt, Human
cccaagcuggaaacuggaagc

SEQ ID NO: 1141085 - RNA, 19 nt, Human
cccaccacaauacccugcu

SEQ ID NO: 1141086 - RNA, 22 nt, Human
cccaccccacccaaccucugca

SEQ ID NO: 1141087 - RNA, 23 nt, Human
cccaccccacccaaccucugcag

SEQ ID NO: 1141088 - RNA, 19 nt, Human
cccaccuccagaacgaagc

SEQ ID NO: 1141089 - RNA, 20 nt, Human
cccaccuccagaacgaagcc

SEQ ID NO: 1141090 - RNA, 24 nt, Human
cccacuccauccaaauggaaccca

SEQ ID NO: 1141091 - RNA, 19 nt, Human
cccacugccuccaagccuc

SEQ ID NO: 1141092 - RNA, 21 nt, Human
cccagccuccucugcccaucc

SEQ ID NO: 1141093 - RNA, 23 nt, Human
cccaggccaccugggggcucugc

SEQ ID NO: 1141094 - RNA, 21 nt, Human
cccauaggcaacucagacuca

SEQ ID NO: 1141095 - RNA, 25 nt, Human
cccaucuccaccauuuccagcaucc

SEQ ID NO: 1141096 - RNA, 20 nt, Human
ccccaaaaaggacacccccc

SEQ ID NO: 1141097 - RNA, 23 nt, Human
ccccaaaaaggacaccccccacc

SEQ ID NO: 1141098 - RNA, 24 nt, Human
ccccaagccccacugccuccaagg

SEQ ID NO: 1141099 - RNA, 24 nt, Human
ccccaccccacccaaccucugcag

SEQ ID NO: 1141100 - RNA, 22 nt, Human
ccccacugccuccaagccuccc

SEQ ID NO: 1141101 - RNA, 21 nt, Human
ccccaggccaccugggggcuc

SEQ ID NO: 1141102 - RNA, 27 nt, Human
ccccauucucccccuggggcaccccag

SEQ ID NO: 1141103 - RNA, 18 nt, Human
cccccaccccacccaacc

SEQ ID NO: 1141104 - RNA, 27 nt, Human
cccccaccccucaacacacaggagcuc

SEQ ID NO: 1141105 - RNA, 19 nt, Human
ccccuggggcaccccaguu

SEQ ID NO: 1141106 - RNA, 23 nt, Human
ccccuggggcaccccaguuccca

SEQ ID NO: 1141107 - RNA, 23 nt, Human
cccgaauagcugggacuacaguu

SEQ ID NO: 1141108 - RNA, 23 nt, Human
cccuagagcuccuggaagaaccc

SEQ ID NO: 1141109 - RNA, 23 nt, Human
cccucaacacacaggagcuccac

SEQ ID NO: 1141110 - RNA, 18 nt, Human
cccucacccacuccaucc

SEQ ID NO: 1141111 - RNA, 18 nt, Human
cccuggagcccuuggagg

SEQ ID NO: 1141112 - RNA, 19 nt, Human
cccuuccuucccccuugcc

SEQ ID NO: 1141113 - RNA, 21 nt, Human
cccuuggaggccuaugaggcc

SEQ ID NO: 1141114 - RNA, 20 nt, Human
ccucaacacacaggagcucc

SEQ ID NO: 1141115 - RNA, 23 nt, Human
ccucacaucaccccccaccccuc

SEQ ID NO: 1141116 - RNA, 21 nt, Human
ccuccaagccucccacucugc

SEQ ID NO: 1141117 - RNA, 22 nt, Human
ccuccagaacgaagcccagccu

SEQ ID NO: 1141118 - RNA, 24 nt, Human
ccucccagguucaagcaguucucc

SEQ ID NO: 1141119 - RNA, 22 nt, Human
ccuccuggccuuggcucagagg

SEQ ID NO: 1141120 - RNA, 22 nt, Human
ccucugggaagccuccuggccu

SEQ ID NO: 1141121 - RNA, 22 nt, Human
ccuggccccccaccccacccaa

SEQ ID NO: 1141122 - RNA, 19 nt, Human
ccuggccuuggcucagagg

SEQ ID NO: 1141123 - RNA, 19 nt, Human
ccuguacauuguacuucuc

SEQ ID NO: 1141124 - RNA, 25 nt, Human
ccuugugccgugcccccgacccucc

SEQ ID NO: 1141125 - RNA, 22 nt, Human
ccuuucaccaaaaccgcccuuc

SEQ ID NO: 1141126 - RNA, 19 nt, Human
cgccacaaugucaugugau

SEQ ID NO: 1141127 - RNA, 18 nt, Human
cgcccuuccuucccccuu

SEQ ID NO: 1141128 - RNA, 27 nt, Human
cgccucaaccucccgaauagcugggac

SEQ ID NO: 1141129 - RNA, 20 nt, Human
cuacauccacaaagccauga

SEQ ID NO: 1141130 - RNA, 18 nt, Human
cucacaucaccccccacc

SEQ ID NO: 1141131 - RNA, 21 nt, Human
cucaccugggccccuccccaa

SEQ ID NO: 1141132 - RNA, 19 nt, Human
cucaccuuaccaugucccc

SEQ ID NO: 1141133 - RNA, 24 nt, Human
cucacugcaaccuccgccucccag

SEQ ID NO: 1141134 - RNA, 20 nt, Human
cuccccaagccacaggacau

SEQ ID NO: 1141135 - RNA, 20 nt, Human
cucuuccccauucucccccu

SEQ ID NO: 1141136 - RNA, 18 nt, Human
cucuugaccucgugaucc

SEQ ID NO: 1141137 - RNA, 25 nt, Human
cucuugaccucgugauccacccacc

SEQ ID NO: 1141138 - RNA, 23 nt, Human
cugcaaccuccgccucccagguu

SEQ ID NO: 1141139 - RNA, 24 nt, Human
cugcaaccuccgccucccagguuc

SEQ ID NO: 1141140 - RNA, 23 nt, Human
cugcuccugggucaucacuuccc

SEQ ID NO: 1141141 - RNA, 20 nt, Human
cuggagggacucccugcugg

SEQ ID NO: 1141142 - RNA, 22 nt, Human
cuguacauuguacuucucgggu

SEQ ID NO: 1141143 - RNA, 21 nt, Human
cuguaucuguacuggccuggg

SEQ ID NO: 1141144 - RNA, 20 nt, Human
cuguggcagcucaccugggc

SEQ ID NO: 1141145 - RNA, 18 nt, Human
cuugggcuaagacauagc

SEQ ID NO: 1141146 - RNA, 25 nt, Human
gaaaaucccucauucuguuucuguc

SEQ ID NO: 1141147 - RNA, 19 nt, Human
gaacauauacagaacauaa

SEQ ID NO: 1141148 - RNA, 20 nt, Human
gaacccaggagggaagccca

SEQ ID NO: 1141149 - RNA, 21 nt, Human
gaagcccagccuccucugccc

SEQ ID NO: 1141150 - RNA, 26 nt, Human
gaauagcugggacuacaguugugugc

SEQ ID NO: 1141151 - RNA, 21 nt, Human
gaccucgugauccacccaccu

SEQ ID NO: 1141152 - RNA, 24 nt, Human
gaccucgugauccacccaccuugg

SEQ ID NO: 1141153 - RNA, 25 nt, Human
gaccucgugauccacccaccuuggc

SEQ ID NO: 1141154 - RNA, 19 nt, Human
gagaagaccaaggcccaga

SEQ ID NO: 1141155 - RNA, 25 nt, Human
gagcacuuacucugagcuagaaacg

SEQ ID NO: 1141156 - RNA, 20 nt, Human
gagggcagggggagggguac

SEQ ID NO: 1141157 - RNA, 21 nt, Human
gauccuggccccccaccccac

SEQ ID NO: 1141158 - RNA, 21 nt, Human
gauuacaggugugaaccacca

SEQ ID NO: 1141159 - RNA, 22 nt, Human
gcaaccuccgccucccagguuc

SEQ ID NO: 1141160 - RNA, 21 nt, Human
gcagcucaccugggccccucc

SEQ ID NO: 1141161 - RNA, 18 nt, Human
gccuccucugcccauccc

SEQ ID NO: 1141162 - RNA, 24 nt, Human
gcugccccucacaucaccccccac

SEQ ID NO: 1141163 - RNA, 19 nt, Human
gcuggggggcgggucccgg

SEQ ID NO: 1141164 - RNA, 19 nt, Human
ggacaccccccaccacaau

SEQ ID NO: 1141165 - RNA, 18 nt, Human
ggauccuggccccccacc

SEQ ID NO: 1141166 - RNA, 19 nt, Human
ggcaccccaguucccaggg

SEQ ID NO: 1141167 - RNA, 24 nt, Human
ggcagggggagggguaccgggggc

SEQ ID NO: 1141168 - RNA, 23 nt, Human
ggcccaagcuggaaacuggaagc

SEQ ID NO: 1141169 - RNA, 19 nt, Human
ggccccccaccccacccaa

SEQ ID NO: 1141170 - RNA, 20 nt, Human
ggccccccaccccacccaac

SEQ ID NO: 1141171 - RNA, 18 nt, Human
gggaagcccaaccacagg

SEQ ID NO: 1141172 - RNA, 24 nt, Human
gggaaggcacuaaugaaaaaaggc

SEQ ID NO: 1141173 - RNA, 19 nt, Human
gggcccuggucagccucag

SEQ ID NO: 1141174 - RNA, 21 nt, Human
ggguggagggcagggggaggg

SEQ ID NO: 1141175 - RNA, 22 nt, Human
ggguuucaccauguuggccagg

SEQ ID NO: 1141176 - RNA, 21 nt, Human
ggugaugcugccuucugagcc

SEQ ID NO: 1141177 - RNA, 24 nt, Human
gguuucaccauguuggccaggaug

SEQ ID NO: 1141178 - RNA, 22 nt, Human
guaaagugcagcucccagcccc

SEQ ID NO: 1141179 - RNA, 24 nt, Human
gucuugcucugucaccaggcugga

SEQ ID NO: 1141180 - RNA, 24 nt, Human
gugagcucucccaccccaagcccc

SEQ ID NO: 1141181 - RNA, 24 nt, Human
gugauccacccaccuuggccuccc

SEQ ID NO: 1141182 - RNA, 21 nt, Human
gugauggugaagagacacagc

SEQ ID NO: 1141183 - RNA, 21 nt, Human
gugccuggcugcugcuccugg

SEQ ID NO: 1141184 - RNA, 22 nt, Human
uaaaaaauucugaucuaccuuc

SEQ ID NO: 1141185 - RNA, 25 nt, Human
uaaaaaauucugaucuaccuucuug

SEQ ID NO: 1141186 - RNA, 23 nt, Human
uaaagcacagaacauauacagaa

SEQ ID NO: 1141187 - RNA, 23 nt, Human
uaauuauuguauuuuuaguagag

SEQ ID NO: 1141188 - RNA, 24 nt, Human
uaauuauuguauuuuuaguagaga

SEQ ID NO: 1141189 - RNA, 20 nt, Human
uaauuuuugcuauuguagag

SEQ ID NO: 1141190 - RNA, 24 nt, Human
uacaggugugaaccaccacgccca

SEQ ID NO: 1141191 - RNA, 20 nt, Human
uaccauguccccaccuccag

SEQ ID NO: 1141192 - RNA, 21 nt, Human
uaccccaggaaacacccccaa

SEQ ID NO: 1141193 - RNA, 22 nt, Human
uagagacaggguuucaccaugu

SEQ ID NO: 1141194 - RNA, 18 nt, Human
uaggugccuggcugcugc

SEQ ID NO: 1141195 - RNA, 24 nt, Human
uaguagagacaggguuucaccaug

SEQ ID NO: 1141196 - RNA, 26 nt, Human
uaguagagacaggguuucaccauguu

SEQ ID NO: 1141197 - RNA, 27 nt, Human
uauacagaacauaaacagauauauagu

SEQ ID NO: 1141198 - RNA, 19 nt, Human
ucaagaucacacaccuuuu

SEQ ID NO: 1141199 - RNA, 27 nt, Human
ucaaucccggcccucgucuccacgcug

SEQ ID NO: 1141200 - RNA, 20 nt, Human
ucacacaccuuuuuccaccc

SEQ ID NO: 1141201 - RNA, 22 nt, Human
ucaccaggcuggaaugcaguga

SEQ ID NO: 1141202 - RNA, 24 nt, Human
ucaccauguuggccaggauggucu

SEQ ID NO: 1141203 - RNA, 18 nt, Human
ucacccacuccauccaaa

SEQ ID NO: 1141204 - RNA, 19 nt, Human
ucacugcaaccuccgccuc

SEQ ID NO: 1141205 - RNA, 23 nt, Human
ucacugcaaccuccgccucccag

SEQ ID NO: 1141206 - RNA, 24 nt, Human
ucacugcaaccuccgccucccagg

SEQ ID NO: 1141207 - RNA, 27 nt, Human
ucacugcaaccuccgccucccagguuc

SEQ ID NO: 1141208 - RNA, 22 nt, Human
ucagccacuccugaggagcaga

SEQ ID NO: 1141209 - RNA, 24 nt, Human
ucaggauccccucaaauuauuucc

SEQ ID NO: 1141210 - RNA, 19 nt, Human
uccaaagccagccccccac

SEQ ID NO: 1141211 - RNA, 23 nt, Human
uccaccauuuccagcauccuaca

SEQ ID NO: 1141212 - RNA, 21 nt, Human
uccagugucucuugaccaccu

SEQ ID NO: 1141213 - RNA, 23 nt, Human
ucccaaagugcugggauuacagg

SEQ ID NO: 1141214 - RNA, 22 nt, Human
ucccaccccaagccccacugcc

SEQ ID NO: 1141215 - RNA, 20 nt, Human
ucccacucugcacucaccuu

SEQ ID NO: 1141216 - RNA, 19 nt, Human
ucccagggcaugaaagacu

SEQ ID NO: 1141217 - RNA, 21 nt, Human
ucccagguucaagcaguucuc

SEQ ID NO: 1141218 - RNA, 24 nt, Human
ucccagguucaagcaguucucccg

SEQ ID NO: 1141219 - RNA, 22 nt, Human
uccccaggccaccugggggcuc

SEQ ID NO: 1141220 - RNA, 23 nt, Human
uccccaggccaccugggggcucu

SEQ ID NO: 1141221 - RNA, 18 nt, Human
uccccaggcccaagcugg

SEQ ID NO: 1141222 - RNA, 21 nt, Human
uccccaggcccaagcuggaaa

SEQ ID NO: 1141223 - RNA, 25 nt, Human
uccccaguguccagacagggccugc

SEQ ID NO: 1141224 - RNA, 19 nt, Human
uccccauucucccccuggg

SEQ ID NO: 1141225 - RNA, 22 nt, Human
ucccugcuggcucuguccugag

SEQ ID NO: 1141226 - RNA, 19 nt, Human
uccugggucaucacuuccc

SEQ ID NO: 1141227 - RNA, 22 nt, Human
uccuuauaauuaccugucgccc

SEQ ID NO: 1141228 - RNA, 20 nt, Human
ucucaguacagucuccaucc

SEQ ID NO: 1141229 - RNA, 23 nt, Human
ucuccaaaccauuuccucacuug

SEQ ID NO: 1141230 - RNA, 26 nt, Human
ucucccgccucaaccucccgaauagc

SEQ ID NO: 1141231 - RNA, 19 nt, Human
ucugacuccucccucuccc

SEQ ID NO: 1141232 - RNA, 18 nt, Human
ucugagcuagaaacgauu

SEQ ID NO: 1141233 - RNA, 22 nt, Human
ucugcagcugcuucccuggagc

SEQ ID NO: 1141234 - RNA, 19 nt, Human
ucugggaagccuccuggcc

SEQ ID NO: 1141235 - RNA, 23 nt, Human
ucuguaucuguacuggccugggg

SEQ ID NO: 1141236 - RNA, 23 nt, Human
ucuguccugagggguggagggca

SEQ ID NO: 1141237 - RNA, 24 nt, Human
ucugucuccuccucugggaagccu

SEQ ID NO: 1141238 - RNA, 21 nt, Human
ucuugcucugucaccaggcug

SEQ ID NO: 1141239 - RNA, 22 nt, Human
ucuugcucugucaccaggcugg

SEQ ID NO: 1141240 - RNA, 23 nt, Human
ucuugcucugucaccaggcugga

SEQ ID NO: 1141241 - RNA, 22 nt, Human
ucuuugcaggcccaucuccacc

SEQ ID NO: 1141242 - RNA, 22 nt, Human
ugaaaaaaggcuaaaaaauucu

SEQ ID NO: 1141243 - RNA, 22 nt, Human
ugaaaaucccucauucuguuuc

SEQ ID NO: 1141244 - RNA, 27 nt, Human
ugaagaugcuggggggcgggucccggg

SEQ ID NO: 1141245 - RNA, 19 nt, Human
ugaaggugaagaugcuggg

SEQ ID NO: 1141246 - RNA, 20 nt, Human
ugaccucgugauccacccac

SEQ ID NO: 1141247 - RNA, 23 nt, Human
ugaccucgugauccacccaccuu

SEQ ID NO: 1141248 - RNA, 23 nt, Human
ugacuccucccucucccucaccc

SEQ ID NO: 1141249 - RNA, 22 nt, Human
ugacuucacaaaacccugucuu

SEQ ID NO: 1141250 - RNA, 19 nt, Human
ugagaagaccaaggcccag

SEQ ID NO: 1141251 - RNA, 22 nt, Human
ugagaagaccaaggcccagaag

SEQ ID NO: 1141252 - RNA, 28 nt, Human
ugagcuagaaacgauucucaacauuuua

SEQ ID NO: 1141253 - RNA, 23 nt, Human
ugagcucucccaccccaagcccc

SEQ ID NO: 1141254 - RNA, 22 nt, Human
ugaggcaccucaccucuacacc

SEQ ID NO: 1141255 - RNA, 24 nt, Human
ugauccacccaccuuggccuccca

SEQ ID NO: 1141256 - RNA, 22 nt, Human
ugccuggccccagggucagugg

SEQ ID NO: 1141257 - RNA, 25 nt, Human
ugccuggcugcugcuccuggguccu

SEQ ID NO: 1141258 - RNA, 19 nt, Human
ugccuucugagccccaggc

SEQ ID NO: 1141259 - RNA, 23 nt, Human
ugcucaagaucacacaccuuuuu

SEQ ID NO: 1141260 - RNA, 23 nt, Human
ugcugggauuacaggugugaacc

SEQ ID NO: 1141261 - RNA, 21 nt, Human
ugcuguggcagcucaccuggg

SEQ ID NO: 1141262 - RNA, 18 nt, Human
ugcuuuauuggggaaggg

SEQ ID NO: 1141263 - RNA, 24 nt, Human
uggaaugcagugaugcgaucuugg

SEQ ID NO: 1141264 - RNA, 20 nt, Human
uggagggacucccugcuggc

SEQ ID NO: 1141265 - RNA, 19 nt, Human
uggauccuggccccccacc

SEQ ID NO: 1141266 - RNA, 24 nt, Human
uggccaggauggucucgaucucuu

SEQ ID NO: 1141267 - RNA, 24 nt, Human
uggccccccaccccacccaaccuc

SEQ ID NO: 1141268 - RNA, 18 nt, Human
uggccuuggcucagaggc

SEQ ID NO: 1141269 - RNA, 19 nt, Human
uggcucaggugugcuuucu

SEQ ID NO: 1141270 - RNA, 19 nt, Human
ugggacuacaguugugugc

SEQ ID NO: 1141271 - RNA, 22 nt, Human
ugggauuacaggugugaaccac

SEQ ID NO: 1141272 - RNA, 23 nt, Human
ugggauuacaggugugaaccacc

SEQ ID NO: 1141273 - RNA, 24 nt, Human
ugggauuacaggugugaaccacca

SEQ ID NO: 1141274 - RNA, 24 nt, Human
ugggauuacaggugugaaccacca

SEQ ID NO: 1141275 - RNA, 23 nt, Human
ugggggagcuccaaggcuuuuuu

SEQ ID NO: 1141276 - RNA, 19 nt, Human
uggugaagagacacagcug

SEQ ID NO: 1141277 - RNA, 19 nt, Human
uguaaagugcagcucccag

SEQ ID NO: 1141278 - RNA, 22 nt, Human
ugucauucuuucaucucaccuu

SEQ ID NO: 1141279 - RNA, 20 nt, Human
uguccugucuaucuggaggg

SEQ ID NO: 1141280 - RNA, 19 nt, Human
ugugccauaacacccagcu

SEQ ID NO: 1141281 - RNA, 18 nt, Human
uguggauggacauuuggg

SEQ ID NO: 1141282 - RNA, 19 nt, Human
uuaauauucacagcaacac

SEQ ID NO: 1141283 - RNA, 22 nt, Human
uuacuccacacucuagcuacau

SEQ ID NO: 1141284 - RNA, 24 nt, Human
uuaguagagacaggguuucaccau

SEQ ID NO: 1141285 - RNA, 22 nt, Human
uuccaagucccauaggcaacuc

SEQ ID NO: 1141286 - RNA, 25 nt, Human
uucccuggagcccuuggaggccuau

SEQ ID NO: 1141287 - RNA, 21 nt, Human
uuccugugucuucauguguuc

SEQ ID NO: 1141288 - RNA, 21 nt, Human
uucuaaaccucaccuuaccau

SEQ ID NO: 1141289 - RNA, 23 nt, Human
uucugacuccucccucucccuca

SEQ ID NO: 1141290 - RNA, 18 nt, Human
uuggccucccaaagugcu

SEQ ID NO: 1141291 - RNA, 21 nt, Human
uugugccgugcccccgacccu

SEQ ID NO: 1141292 - RNA, 19 nt, Human
uuucaccauguuggccagg

SEQ ID NO: 1141293 - RNA, 20 nt, Human
uuucaccauguuggccagga

SEQ ID NO: 1141294 - RNA, 18 nt, Human
uuuccuauuccuucaugu

SEQ ID NO: 1141295 - RNA, 21 nt, Human
uuuuccaccccccauuccaag

SEQ ID NO: 1141296 - RNA, 24 nt, Human
uuuuuaguagagacaggguuucac

SEQ ID NO: 1141297 - RNA, 18 nt, Human
aauggaauuauacaguau

SEQ ID NO: 1141298 - RNA, 24 nt, Human
acaagacacagcaauacacuucaa

SEQ ID NO: 1141299 - RNA, 21 nt, Human
accggcucuugagcgggggca

SEQ ID NO: 1141300 - RNA, 23 nt, Human
acuaaaauacauaaaaagcuagu

SEQ ID NO: 1141301 - RNA, 22 nt, Human
caaaguaaacuauaaauaccag

SEQ ID NO: 1141302 - RNA, 24 nt, Human
caacuaaaauacauaaaaagcuag

SEQ ID NO: 1141303 - RNA, 22 nt, Human
caagacacagcaauacacuuca

SEQ ID NO: 1141304 - RNA, 18 nt, Human
caccccccucccccgacc

SEQ ID NO: 1141305 - RNA, 22 nt, Human
caccuuuucaccaccccccucc

SEQ ID NO: 1141306 - RNA, 19 nt, Human
cacuucaauucaucugggg

SEQ ID NO: 1141307 - RNA, 21 nt, Human
cagcuuccagccccagccccu

SEQ ID NO: 1141308 - RNA, 20 nt, Human
ccaccccccucccccgaccc

SEQ ID NO: 1141309 - RNA, 21 nt, Human
ccaccccccucccccgacccc

SEQ ID NO: 1141310 - RNA, 20 nt, Human
cccccgaccccggccgaccc

SEQ ID NO: 1141311 - RNA, 18 nt, Human
cccggccgacccagcccc

SEQ ID NO: 1141312 - RNA, 23 nt, Human
cccugucaccuuuucaccacccc

SEQ ID NO: 1141313 - RNA, 21 nt, Human
cuaaauuaugauuuuauaaca

SEQ ID NO: 1141314 - RNA, 22 nt, Human
cucccccgaccccggccgaccc

SEQ ID NO: 1141315 - RNA, 20 nt, Human
cuucauguaaauggaauuau

SEQ ID NO: 1141316 - RNA, 20 nt, Human
cuuccagccccagccccuuu

SEQ ID NO: 1141317 - RNA, 19 nt, Human
cuugcaaacauuaaucuac

SEQ ID NO: 1141318 - RNA, 19 nt, Human
gcgggggcagcucccuguc

SEQ ID NO: 1141319 - RNA, 20 nt, Human
gcucuugagcgggggcagcu

SEQ ID NO: 1141320 - RNA, 25 nt, Human
gcuuccagccccagccccuugcaaa

SEQ ID NO: 1141321 - RNA, 21 nt, Human
uaaaaagcuaguuaaagcaag

SEQ ID NO: 1141322 - RNA, 20 nt, Human
uaaaauuucauaggugacac

SEQ ID NO: 1141323 - RNA, 21 nt, Human
uaaauaccagugggaagacua

SEQ ID NO: 1141324 - RNA, 22 nt, Human
uaaauggaauuauacaguaugg

SEQ ID NO: 1141325 - RNA, 22 nt, Human
uaacaaguaggugccuuuaaaa

SEQ ID NO: 1141326 - RNA, 21 nt, Human
uaagccgauauaguaaacaac

SEQ ID NO: 1141327 - RNA, 20 nt, Human
uaccuuaaaauaugacucug

SEQ ID NO: 1141328 - RNA, 22 nt, Human
uagaaaugaggcauguuucuaa

SEQ ID NO: 1141329 - RNA, 21 nt, Human
uagaauguaucuguuuugacu

SEQ ID NO: 1141330 - RNA, 20 nt, Human
uauaacaaguaggugccuuu

SEQ ID NO: 1141331 - RNA, 25 nt, Human
ucacuguaagauuccucaugcccau

SEQ ID NO: 1141332 - RNA, 20 nt, Human
ucagacccccaaccaccggc

SEQ ID NO: 1141333 - RNA, 24 nt, Human
ucccugucaccuuuucaccacccc

SEQ ID NO: 1141334 - RNA, 21 nt, Human
ucuacaauccaacuuuagagc

SEQ ID NO: 1141335 - RNA, 25 nt, Human
ucugugccuaauaaaauuucauagg

SEQ ID NO: 1141336 - RNA, 19 nt, Human
ugaaauauaauuuacauac

SEQ ID NO: 1141337 - RNA, 24 nt, Human
ugaaauauaauuuacauacuauag

SEQ ID NO: 1141338 - RNA, 26 nt, Human
ugaaauauaauuuacauacuauagaa

SEQ ID NO: 1141339 - RNA, 18 nt, Human
ugaccuaauuauuaauau

SEQ ID NO: 1141340 - RNA, 25 nt, Human
uuauacaguaugguaaacacacuuu

SEQ ID NO: 1141341 - RNA, 24 nt, Human
uucuggaugcuucauguaaaugga

SEQ ID NO: 1141342 - RNA, 23 nt, Human
uuucuaagccgauauaguaaaca

SEQ ID NO: 1141343 - RNA, 18 nt, Human
uuuucaccaccccccucc

SEQ ID NO: 1141344 - RNA, 20 nt, Human
aaaaaaaaaaaaacagggaa

SEQ ID NO: 1141345 - RNA, 21 nt, Human
aaaaaaaaaaaacagggaagg

SEQ ID NO: 1141346 - RNA, 24 nt, Human
aaaaaaacagggaaggaaccuaaa

SEQ ID NO: 1141347 - RNA, 19 nt, Human
aaaaagccuccaugcaguc

SEQ ID NO: 1141348 - RNA, 22 nt, Human
aaagucagauuuggugguucuc

SEQ ID NO: 1141349 - RNA, 21 nt, Human
aaauccacagaaauucacucu

SEQ ID NO: 1141350 - RNA, 21 nt, Human
aacauuuuuuacagcaaaacc

SEQ ID NO: 1141351 - RNA, 23 nt, Human
aaccaucucaggcuaacacccaa

SEQ ID NO: 1141352 - RNA, 20 nt, Human
aacucccuccccaaacgacc

SEQ ID NO: 1141353 - RNA, 22 nt, Human
aacucccuccccaaacgaccug

SEQ ID NO: 1141354 - RNA, 22 nt, Human
aagaauugaacaggcaugcagg

SEQ ID NO: 1141355 - RNA, 21 nt, Human
aaggaaccuaaauucugagac

SEQ ID NO: 1141356 - RNA, 22 nt, Human
aaugcugaaaaagccuccaugc

SEQ ID NO: 1141357 - RNA, 23 nt, Human
accuagaagucuaauggcuuuca

SEQ ID NO: 1141358 - RNA, 19 nt, Human
agaagaaacaaagaauuga

SEQ ID NO: 1141359 - RNA, 21 nt, Human
agaccaaauguaaaagucaga

SEQ ID NO: 1141360 - RNA, 19 nt, Human
aggaggggaggaaugaggg

SEQ ID NO: 1141361 - RNA, 24 nt, Human
agggggaaggagaagaaacaaaga

SEQ ID NO: 1141362 - RNA, 18 nt, Human
auggggaggagggggugg

SEQ ID NO: 1141363 - RNA, 20 nt, Human
auggggaggagggggugguc

SEQ ID NO: 1141364 - RNA, 24 nt, Human
auugguauaaaauacaguuuaaac

SEQ ID NO: 1141365 - RNA, 21 nt, Human
caacucccuccccaaacgacc

SEQ ID NO: 1141366 - RNA, 22 nt, Human
caccuucaacgcuaaccugcuu

SEQ ID NO: 1141367 - RNA, 18 nt, Human
cacucuugccuuuaagaa

SEQ ID NO: 1141368 - RNA, 28 nt, Human
cacucuugccuuuaagaacuuuugaaaa

SEQ ID NO: 1141369 - RNA, 23 nt, Human
cagcagggucugcgugacugaug

SEQ ID NO: 1141370 - RNA, 22 nt, Human
caguggcuccagcagggucugc

SEQ ID NO: 1141371 - RNA, 22 nt, Human
caguuugaaacauuuuuuacag

SEQ ID NO: 1141372 - RNA, 24 nt, Human
cauaccaccuucaacggggaagcc

SEQ ID NO: 1141373 - RNA, 22 nt, Human
caugcaggcuuuuccauaccac

SEQ ID NO: 1141374 - RNA, 20 nt, Human
cauuacaacucccuccccaa

SEQ ID NO: 1141375 - RNA, 21 nt, Human
cccuccccaaacgaccuguaa

SEQ ID NO: 1141376 - RNA, 21 nt, Human
cgaccuguaaccaucucaggc

SEQ ID NO: 1141377 - RNA, 24 nt, Human
gaacaggcaugcaggcuuuuccau

SEQ ID NO: 1141378 - RNA, 18 nt, Human
gacugauggaaguggaua

SEQ ID NO: 1141379 - RNA, 22 nt, Human
gaggggaaggagguagugggag

SEQ ID NO: 1141380 - RNA, 19 nt, Human
gaggggaggaaugagggga

SEQ ID NO: 1141381 - RNA, 18 nt, Human
gagguagugggaggggga

SEQ ID NO: 1141382 - RNA, 23 nt, Human
gagguagugggagggggaaggag

SEQ ID NO: 1141383 - RNA, 20 nt, Human
gcgaaggaggggaggaauga

SEQ ID NO: 1141384 - RNA, 22 nt, Human
ggaaccuaaauucugagaccaa

SEQ ID NO: 1141385 - RNA, 19 nt, Human
ggaaggagguagugggagg

SEQ ID NO: 1141386 - RNA, 24 nt, Human
ggagaguaaaguaggcaagaauga

SEQ ID NO: 1141387 - RNA, 18 nt, Human
ggauggggaggagggggu

SEQ ID NO: 1141388 - RNA, 20 nt, Human
gggaaggagguagugggagg

SEQ ID NO: 1141389 - RNA, 18 nt, Human
gggaguuuccaaggggug

SEQ ID NO: 1141390 - RNA, 18 nt, Human
gggauggggaggaggggg

SEQ ID NO: 1141391 - RNA, 20 nt, Human
ggggaggaaugaggggaagg

SEQ ID NO: 1141392 - RNA, 21 nt, Human
ggggaggaaugaggggaagga

SEQ ID NO: 1141393 - RNA, 19 nt, Human
gguagugggagggggaagg

SEQ ID NO: 1141394 - RNA, 20 nt, Human
ggugggauggggaggagggg

SEQ ID NO: 1141395 - RNA, 19 nt, Human
gguggucagagaugguuuc

SEQ ID NO: 1141396 - RNA, 20 nt, Human
guaaccaucucaggcuaaca

SEQ ID NO: 1141397 - RNA, 18 nt, Human
guuuuuuuaaaaaaaaaa

SEQ ID NO: 1141398 - RNA, 21 nt, Human
guuuuuuuaaaaaaaaaaaaa

SEQ ID NO: 1141399 - RNA, 20 nt, Human
uaaaagagauugagcgagcg

SEQ ID NO: 1141400 - RNA, 18 nt, Human
uaaagaaccuaaaagcug

SEQ ID NO: 1141401 - RNA, 25 nt, Human
uaaaguaggcaagaaugagcagcca

SEQ ID NO: 1141402 - RNA, 24 nt, Human
uaaguuuaaugcuaauuccaugcu

SEQ ID NO: 1141403 - RNA, 21 nt, Human
uaccuagaagucuaauggcuu

SEQ ID NO: 1141404 - RNA, 25 nt, Human
ucagugacaauggggaguuuccaag

SEQ ID NO: 1141405 - RNA, 20 nt, Human
uccaaggggugggaugggga

SEQ ID NO: 1141406 - RNA, 22 nt, Human
uccccaaacgaccuguaaccau

SEQ ID NO: 1141407 - RNA, 19 nt, Human
ucuaauggcuuucaaaugu

SEQ ID NO: 1141408 - RNA, 19 nt, Human
ucugcgugacugauggaag

SEQ ID NO: 1141409 - RNA, 23 nt, Human
ugagcgagcgaaggaggggagga

SEQ ID NO: 1141410 - RNA, 24 nt, Human
ugagcgagcgaaggaggggaggaa

SEQ ID NO: 1141411 - RNA, 21 nt, Human
ugaggggaaggagguagugga

SEQ ID NO: 1141412 - RNA, 22 nt, Human
ugaggggaaggagguaguggga

SEQ ID NO: 1141413 - RNA, 20 nt, Human
ugcauuaccuagaagucuaa

SEQ ID NO: 1141414 - RNA, 20 nt, Human
ugggauggggaggagggggu

SEQ ID NO: 1141415 - RNA, 25 nt, Human
ugggauggggaggagggggugguca

SEQ ID NO: 1141416 - RNA, 20 nt, Human
uggggaggagggggugguca

SEQ ID NO: 1141417 - RNA, 24 nt, Human
uguuaucggcaccaugcuuuucag

SEQ ID NO: 1141418 - RNA, 19 nt, Human
uucagcaacauuucagcac

SEQ ID NO: 1141419 - RNA, 21 nt, Human
aaacuuaucugacugauccca

SEQ ID NO: 1141420 - RNA, 22 nt, Human
acaucacaguucccaaaaggac

SEQ ID NO: 1141421 - RNA, 19 nt, Human
acugaucccauccucuucu

SEQ ID NO: 1141422 - RNA, 25 nt, Human
aucaaaugaccucucugugaaaugc

SEQ ID NO: 1141423 - RNA, 23 nt, Human
cagcucaccaauauucccuuacu

SEQ ID NO: 1141424 - RNA, 18 nt, Human
cccgagcugcagccgugc

SEQ ID NO: 1141425 - RNA, 23 nt, Human
cccgagcugcagccgugcagagg

SEQ ID NO: 1141426 - RNA, 22 nt, Human
ccucuucugaagccaugggggc

SEQ ID NO: 1141427 - RNA, 20 nt, Human
cugcagccgugcagaggaag

SEQ ID NO: 1141428 - RNA, 19 nt, Human
ggaaacgccgcgccaagcc

SEQ ID NO: 1141429 - RNA, 23 nt, Human
ggccgaaggcccgagcugcagcc

SEQ ID NO: 1141430 - RNA, 21 nt, Human
gggcugggucaggccgaaggc

SEQ ID NO: 1141431 - RNA, 18 nt, Human
uaccaaaagaucaaauga

SEQ ID NO: 1141432 - RNA, 22 nt, Human
uaccaaaagaucaaaugaccuu

SEQ ID NO: 1141433 - RNA, 24 nt, Human
uauuuuauuuaaauaaauccucca

SEQ ID NO: 1141434 - RNA, 22 nt, Human
uccacaucacaucacaguuccc

SEQ ID NO: 1141435 - RNA, 22 nt, Human
ugaaaugcaccugcacauucuc

SEQ ID NO: 1141436 - RNA, 27 nt, Human
uuccacaucacaucacaguucccaaaa

SEQ ID NO: 1141437 - RNA, 22 nt, Human
uuuuuuuuuuuuuuuuuuguuu

SEQ ID NO: 1141438 - RNA, 24 nt, Human
uuuuuuuuuuuuuuuuuuuuuggg

SEQ ID NO: 1141439 - RNA, 21 nt, Human
aaacuuaucugacugauccca

SEQ ID NO: 1141440 - RNA, 18 nt, Human
aaccgagcgcagaggccu

SEQ ID NO: 1141441 - RNA, 22 nt, Human
acaucacaguucccaaaaggac

SEQ ID NO: 1141442 - RNA, 22 nt, Human
accgagcgcagaggccuacccg

SEQ ID NO: 1141443 - RNA, 25 nt, Human
auuucuguugcaacuuguucuugau

SEQ ID NO: 1141444 - RNA, 21 nt, Human
caagcccucaaaccgagcgca

SEQ ID NO: 1141445 - RNA, 21 nt, Human
caagcccucaaaccgagcgca

SEQ ID NO: 1141446 - RNA, 22 nt, Human
caccuuuaccucuucuagaucu

SEQ ID NO: 1141447 - RNA, 20 nt, Human
cagcaacaccuuuaccucuu

SEQ ID NO: 1141448 - RNA, 26 nt, Human
cagcaacaccuuuaccucuucuagau

SEQ ID NO: 1141449 - RNA, 23 nt, Human
cagcucaccaauauucccuuacu

SEQ ID NO: 1141450 - RNA, 22 nt, Human
ccaagcccucaaaccgagcgca

SEQ ID NO: 1141451 - RNA, 18 nt, Human
cccgagcugcagccgugc

SEQ ID NO: 1141452 - RNA, 23 nt, Human
cccgagcugcagccgugcagagg

SEQ ID NO: 1141453 - RNA, 21 nt, Human
cccgcacgagucgcagcgccg

SEQ ID NO: 1141454 - RNA, 23 nt, Human
cccgcacgagucgcagcgccgca

SEQ ID NO: 1141455 - RNA, 21 nt, Human
cgcgcacaccgacccugugcg

SEQ ID NO: 1141456 - RNA, 25 nt, Human
cuaguagccuuuuccagcaacaccu

SEQ ID NO: 1141457 - RNA, 20 nt, Human
cugcagccgugcagaggaag

SEQ ID NO: 1141458 - RNA, 19 nt, Human
ggaaacgccgcgccaagcc

SEQ ID NO: 1141459 - RNA, 23 nt, Human
ggccgaaggcccgagcugcagcc

SEQ ID NO: 1141460 - RNA, 18 nt, Human
gggagcaaccacagcagc

SEQ ID NO: 1141461 - RNA, 21 nt, Human
gggcugggucaggccgaaggc

SEQ ID NO: 1141462 - RNA, 18 nt, Human
uaccaaaagaucaaauga

SEQ ID NO: 1141463 - RNA, 20 nt, Human
uaccaaaagaucaaaugacc

SEQ ID NO: 1141464 - RNA, 21 nt, Human
uaccucuucuagaucuuucug

SEQ ID NO: 1141465 - RNA, 24 nt, Human
uauuuuauuuaaauaaauccucca

SEQ ID NO: 1141466 - RNA, 26 nt, Human
ucaaaccgagcgcagaggccuacccg

SEQ ID NO: 1141467 - RNA, 24 nt, Human
ucaaaugaccucucugugaaaugc

SEQ ID NO: 1141468 - RNA, 22 nt, Human
uccacaucacaucacaguuccc

SEQ ID NO: 1141469 - RNA, 18 nt, Human
uccagcaacaccuuuacc

SEQ ID NO: 1141470 - RNA, 22 nt, Human
ugaaaugcaccugcacauucuc

SEQ ID NO: 1141471 - RNA, 23 nt, Human
ugcgcgcacaccgacccugugcg

SEQ ID NO: 1141472 - RNA, 19 nt, Human
uguaaugggagcaaccaca

SEQ ID NO: 1141473 - RNA, 22 nt, Human
uucauuaucaagaaguucugcu

SEQ ID NO: 1141474 - RNA, 27 nt, Human
uuccacaucacaucacaguucccaaaa

SEQ ID NO: 1141475 - RNA, 25 nt, Human
aaaauacacaccaccacgagugcaa

SEQ ID NO: 1141476 - RNA, 20 nt, Human
aaacccaggcgguucuccca

SEQ ID NO: 1141477 - RNA, 22 nt, Human
aaauacacaccaccacgagugc

SEQ ID NO: 1141478 - RNA, 23 nt, Human
aaauacacaccaccacgagugca

SEQ ID NO: 1141479 - RNA, 19 nt, Human
aaggagccuuugccuuugg

SEQ ID NO: 1141480 - RNA, 18 nt, Human
aaggucccaaaauacaca

SEQ ID NO: 1141481 - RNA, 24 nt, Human
accacgagugcaaaaacccaggcg

SEQ ID NO: 1141482 - RNA, 20 nt, Human
agcugcacaguaaagguccc

SEQ ID NO: 1141483 - RNA, 23 nt, Human
agcugccccucgcccccggcccc

SEQ ID NO: 1141484 - RNA, 23 nt, Human
agggucugccggcucccgggccc

SEQ ID NO: 1141485 - RNA, 22 nt, Human
auuucugugcuccuaccugcag

SEQ ID NO: 1141486 - RNA, 21 nt, Human
caaaaacccaggcgguucucc

SEQ ID NO: 1141487 - RNA, 20 nt, Human
cacaccaccacgagugcaaa

SEQ ID NO: 1141488 - RNA, 19 nt, Human
cacaguaaaggucccaaaa

SEQ ID NO: 1141489 - RNA, 20 nt, Human
caccaccacgagugcaaaaa

SEQ ID NO: 1141490 - RNA, 23 nt, Human
caccacgagugcaaaaacccagg

SEQ ID NO: 1141491 - RNA, 21 nt, Human
cagccgccaccgcuccggcuc

SEQ ID NO: 1141492 - RNA, 25 nt, Human
cagcgaaucuccgauaagaaggucu

SEQ ID NO: 1141493 - RNA, 27 nt, Human
ccaaaauacacaccaccacgagugcaa

SEQ ID NO: 1141494 - RNA, 19 nt, Human
cccagccuccccacagccg

SEQ ID NO: 1141495 - RNA, 22 nt, Human
ccccacagccgccaccgcuccg

SEQ ID NO: 1141496 - RNA, 18 nt, Human
ccccucgcccccggcccc

SEQ ID NO: 1141497 - RNA, 18 nt, Human
cccggcccccucccaggc

SEQ ID NO: 1141498 - RNA, 23 nt, Human
cccggcccccucccaggcgcucc

SEQ ID NO: 1141499 - RNA, 21 nt, Human
ccgagcugccccucgcccccg

SEQ ID NO: 1141500 - RNA, 22 nt, Human
ccucgcccccggcccccuccca

SEQ ID NO: 1141501 - RNA, 22 nt, Human
cgagggcaccaaggagccuuug

SEQ ID NO: 1141502 - RNA, 24 nt, Human
cgagggcaccaaggagcuggagac

SEQ ID NO: 1141503 - RNA, 21 nt, Human
cgcccccggcccccucccagg

SEQ ID NO: 1141504 - RNA, 22 nt, Human
cgcccccggcccccucccaggc

SEQ ID NO: 1141505 - RNA, 21 nt, Human
cuauaaucaugaaaggcuuuu

SEQ ID NO: 1141506 - RNA, 18 nt, Human
gcgaaucuccgauaagaa

SEQ ID NO: 1141507 - RNA, 24 nt, Human
ggucugugcagauuucugugcucc

SEQ ID NO: 1141508 - RNA, 21 nt, Human
uccccacagccgccaccgcuc

SEQ ID NO: 1141509 - RNA, 24 nt, Human
ucgcccccggcccccucccaggcg

SEQ ID NO: 1141510 - RNA, 18 nt, Human
ugaaaggcuuuugcuuca

SEQ ID NO: 1141511 - RNA, 22 nt, Human
ugaaaggcuuuugcuucacuug

SEQ ID NO: 1141512 - RNA, 20 nt, Human
uucugugcuccuaccugcag

SEQ ID NO: 1141513 - RNA, 19 nt, Human
augaaaaacuaaugaaaga

SEQ ID NO: 1141514 - RNA, 18 nt, Human
uacaacugaaugaaaaac

SEQ ID NO: 1141515 - RNA, 25 nt, Human
ugaaauaaaaauuaaauaaauacaa

SEQ ID NO: 1141516 - RNA, 23 nt, Human
ugagguuaccagauguacagugg

SEQ ID NO: 1141517 - RNA, 22 nt, Human
aaacagauauaagugaguagac

SEQ ID NO: 1141518 - RNA, 20 nt, Human
aacccuccuucaucaugccu

SEQ ID NO: 1141519 - RNA, 20 nt, Human
aaucaugucuccccugacac

SEQ ID NO: 1141520 - RNA, 22 nt, Human
acagggcuggauggccuggggc

SEQ ID NO: 1141521 - RNA, 21 nt, Human
accauacauguaaugacauaa

SEQ ID NO: 1141522 - RNA, 18 nt, Human
accccgaagcccccggcg

SEQ ID NO: 1141523 - RNA, 20 nt, Human
accuggaugguuaguguccc

SEQ ID NO: 1141524 - RNA, 18 nt, Human
agcccgaggccaggggaa

SEQ ID NO: 1141525 - RNA, 20 nt, Human
agcuggguggugacagccgc

SEQ ID NO: 1141526 - RNA, 22 nt, Human
auccaugccuucuuccaauccu

SEQ ID NO: 1141527 - RNA, 23 nt, Human
augucacagugugcccucagaau

SEQ ID NO: 1141528 - RNA, 21 nt, Human
auugugucucuuccuucucuu

SEQ ID NO: 1141529 - RNA, 20 nt, Human
auuucccacaaaucuuacug

SEQ ID NO: 1141530 - RNA, 22 nt, Human
caaaccaacccauuucccacaa

SEQ ID NO: 1141531 - RNA, 21 nt, Human
caacaaaccaacccauuuccc

SEQ ID NO: 1141532 - RNA, 19 nt, Human
cacacagcuggguggugac

SEQ ID NO: 1141533 - RNA, 20 nt, Human
cacacaggccuggacaaagc

SEQ ID NO: 1141534 - RNA, 27 nt, Human
cacaggaugcaaaaacaaaggacauac

SEQ ID NO: 1141535 - RNA, 22 nt, Human
cacaggaugcaaaaacaaaucc

SEQ ID NO: 1141536 - RNA, 20 nt, Human
cacagugugcccucagaauc

SEQ ID NO: 1141537 - RNA, 18 nt, Human
cagcacacugcguucccu

SEQ ID NO: 1141538 - RNA, 22 nt, Human
caggaugcaaaaacaaauccug

SEQ ID NO: 1141539 - RNA, 22 nt, Human
cauacauguaaugacauaauca

SEQ ID NO: 1141540 - RNA, 21 nt, Human
ccacauccuuccugucacuuc

SEQ ID NO: 1141541 - RNA, 30 nt, Human
ccauacaacaaaccaacccauuucccacaa

SEQ ID NO: 1141542 - RNA, 21 nt, Human
cccauaaucacaauguuuucu

SEQ ID NO: 1141543 - RNA, 20 nt, Human
cccaucacuaccauacaugu

SEQ ID NO: 1141544 - RNA, 21 nt, Human
ccccgaagcccccggcgaccc

SEQ ID NO: 1141545 - RNA, 19 nt, Human
ccccgccgucugcguccua

SEQ ID NO: 1141546 - RNA, 21 nt, Human
ccccggcgaccccgccgucug

SEQ ID NO: 1141547 - RNA, 28 nt, Human
cccguaccgcaagcgccgccugcaggag

SEQ ID NO: 1141548 - RNA, 21 nt, Human
cccugcgccgagcccgaggcc

SEQ ID NO: 1141549 - RNA, 18 nt, Human
ccggucuugaauacugac

SEQ ID NO: 1141550 - RNA, 18 nt, Human
ccuaacugaacuuuguuc

SEQ ID NO: 1141551 - RNA, 23 nt, Human
ccucaacagcgugugggacucca

SEQ ID NO: 1141552 - RNA, 21 nt, Human
ccucugauuucuucauucauc

SEQ ID NO: 1141553 - RNA, 23 nt, Human
ccuggggccgaggccaccccgaa

SEQ ID NO: 1141554 - RNA, 25 nt, Human
ccuggggccgaggccaccccgaagc

SEQ ID NO: 1141555 - RNA, 19 nt, Human
ccuggugccuccuuggcuc

SEQ ID NO: 1141556 - RNA, 24 nt, Human
ccuuauaaaggggcuaacacagag

SEQ ID NO: 1141557 - RNA, 22 nt, Human
cgaggccaggggaacccaugac

SEQ ID NO: 1141558 - RNA, 19 nt, Human
cucacagaauacauaauga

SEQ ID NO: 1141559 - RNA, 18 nt, Human
cuccaaauuuggacaaac

SEQ ID NO: 1141560 - RNA, 21 nt, Human
cucuuccuucucuuuccuaac

SEQ ID NO: 1141561 - RNA, 23 nt, Human
cugcaggagcgcugacccugcgc

SEQ ID NO: 1141562 - RNA, 20 nt, Human
cuuccaauccugacauauuu

SEQ ID NO: 1141563 - RNA, 21 nt, Human
gagaaagaagauguccuaugu

SEQ ID NO: 1141564 - RNA, 20 nt, Human
gaggccaggggaacccauga

SEQ ID NO: 1141565 - RNA, 21 nt, Human
gccagcccguaccgcaagcgc

SEQ ID NO: 1141566 - RNA, 18 nt, Human
gccauaaguucuuccuuc

SEQ ID NO: 1141567 - RNA, 23 nt, Human
gcccuggugccuccuuggcucuu

SEQ ID NO: 1141568 - RNA, 19 nt, Human
gcuccaaauuuggacaaac

SEQ ID NO: 1141569 - RNA, 21 nt, Human
gggccgaggccaccccgaagc

SEQ ID NO: 1141570 - RNA, 22 nt, Human
guaaaaacaaacauggguuaug

SEQ ID NO: 1141571 - RNA, 25 nt, Human
gucuccucuaaacccuccuucauca

SEQ ID NO: 1141572 - RNA, 18 nt, Human
guuaugagcuccaaauuu

SEQ ID NO: 1141573 - RNA, 24 nt, Human
guuuucuuuucacuuugcucaaga

SEQ ID NO: 1141574 - RNA, 21 nt, Human
ucaagugagacagagaaagaa

SEQ ID NO: 1141575 - RNA, 21 nt, Human
ucaucaugccuaccuugagga

SEQ ID NO: 1141576 - RNA, 22 nt, Human
ucaugucacagugugcccucag

SEQ ID NO: 1141577 - RNA, 21 nt, Human
ucccagcacagcaaaacauuc

SEQ ID NO: 1141578 - RNA, 23 nt, Human
ucccguacaaauauuuuccccau

SEQ ID NO: 1141579 - RNA, 22 nt, Human
uccuagcugaguauacuaaggc

SEQ ID NO: 1141580 - RNA, 26 nt, Human
ucucuaaguagcaguaaauccggucu

SEQ ID NO: 1141581 - RNA, 20 nt, Human
ucuggcaugcacagguccca

SEQ ID NO: 1141582 - RNA, 24 nt, Human
ugaauacugacuuugacacucagc

SEQ ID NO: 1141583 - RNA, 22 nt, Human
ugaccaccacuuaugcaaauuu

SEQ ID NO: 1141584 - RNA, 20 nt, Human
ugacuuugacacucagcuuu

SEQ ID NO: 1141585 - RNA, 19 nt, Human
ugaguauacuaaggcuuuc

SEQ ID NO: 1141586 - RNA, 19 nt, Human
ugauuucuucauucaucuc

SEQ ID NO: 1141587 - RNA, 19 nt, Human
ugcaauaccauggcuaugg

SEQ ID NO: 1141588 - RNA, 19 nt, Human
ugcccuggugccuccuugg

SEQ ID NO: 1141589 - RNA, 21 nt, Human
uggcaugcacaggucccagca

SEQ ID NO: 1141590 - RNA, 23 nt, Human
uggggccgaggccaccccgaagc

SEQ ID NO: 1141591 - RNA, 24 nt, Human
uggguuuucuucuuuuccuaucuu

SEQ ID NO: 1141592 - RNA, 24 nt, Human
ugucacacagcuggguggugacag

SEQ ID NO: 1141593 - RNA, 21 nt, Human
ugucacagugugcccucagaa

SEQ ID NO: 1141594 - RNA, 18 nt, Human
ugucuccucuaaacccuc

SEQ ID NO: 1141595 - RNA, 23 nt, Human
ugucuccucuaaacccuccuuca

SEQ ID NO: 1141596 - RNA, 19 nt, Human
uuaacugauuuuugugggg

SEQ ID NO: 1141597 - RNA, 20 nt, Human
uuagaguguugcacaaagga

SEQ ID NO: 1141598 - RNA, 19 nt, Human
uucaucaugccuaccuuga

SEQ ID NO: 1141599 - RNA, 26 nt, Human
uugugucugugucuccucuaaacccu

SEQ ID NO: 1141600 - RNA, 20 nt, Human
uuucacuuugcucaagaacu

SEQ ID NO: 1141601 - RNA, 22 nt, Human
uuugacacucagcuuucuccac

SEQ ID NO: 1141602 - RNA, 22 nt, Human
uuuucuuuucacuuugcucaag

SEQ ID NO: 1141603 - RNA, 22 nt, Human
aacagccuucuuaagucuggcu

SEQ ID NO: 1141604 - RNA, 21 nt, Human
acgcgcagcggcaggaggauu

SEQ ID NO: 1141605 - RNA, 25 nt, Human
agcggcaggaggauuggccagagga

SEQ ID NO: 1141606 - RNA, 20 nt, Human
agugcgcagugcccccgccg

SEQ ID NO: 1141607 - RNA, 20 nt, Human
cacaacacauggaggccugg

SEQ ID NO: 1141608 - RNA, 20 nt, Human
cacugccuucucgccuccac

SEQ ID NO: 1141609 - RNA, 23 nt, Human
caggguaacuucaguuucuccaa

SEQ ID NO: 1141610 - RNA, 24 nt, Human
caguauuguggccugggguccucc

SEQ ID NO: 1141611 - RNA, 20 nt, Human
ccauccuccauucccagcua

SEQ ID NO: 1141612 - RNA, 19 nt, Human
ccccauccuccauucccag

SEQ ID NO: 1141613 - RNA, 18 nt, Human
ccucccuugccacugacc

SEQ ID NO: 1141614 - RNA, 19 nt, Human
ccugcagaucuguucuguu

SEQ ID NO: 1141615 - RNA, 30 nt, Human
cucccagccuuuccguagcaccacucacuu

SEQ ID NO: 1141616 - RNA, 20 nt, Human
cuggccugagcgcucugccc

SEQ ID NO: 1141617 - RNA, 20 nt, Human
gcacaacacauggaggccug

SEQ ID NO: 1141618 - RNA, 20 nt, Human
gcagagagggacgaggugga

SEQ ID NO: 1141619 - RNA, 20 nt, Human
gcagcggcaggaggauuggc

SEQ ID NO: 1141620 - RNA, 18 nt, Human
gccggcccuggccugagc

SEQ ID NO: 1141621 - RNA, 21 nt, Human
gcggcaggaggauuggccaga

SEQ ID NO: 1141622 - RNA, 20 nt, Human
gcucugccccugcuucccuc

SEQ ID NO: 1141623 - RNA, 25 nt, Human
ggccugagcgcucugccccugcuuc

SEQ ID NO: 1141624 - RNA, 24 nt, Human
guaacuucaguuucuccaagauuu

SEQ ID NO: 1141625 - RNA, 24 nt, Human
guaggaacaugccugcugcagaga

SEQ ID NO: 1141626 - RNA, 21 nt, Human
uaacuucaguuucuccaagau

SEQ ID NO: 1141627 - RNA, 23 nt, Human
ucaguauuguggccugggguccu

SEQ ID NO: 1141628 - RNA, 23 nt, Human
ucaguuucuccaagauuuucuca

SEQ ID NO: 1141629 - RNA, 22 nt, Human
uccaagauuuucucacugauuu

SEQ ID NO: 1141630 - RNA, 20 nt, Human
uccauucccagcuacagccg

SEQ ID NO: 1141631 - RNA, 22 nt, Human
uccauucccagcuacagccgcc

SEQ ID NO: 1141632 - RNA, 23 nt, Human
ugaugucaguauuguggccuggg

SEQ ID NO: 1141633 - RNA, 19 nt, Human
uggagccccugacgauggg

SEQ ID NO: 1141634 - RNA, 18 nt, Human
uggccugggguccucccu

SEQ ID NO: 1141635 - RNA, 18 nt, Human
uggcuccuggcugccccu

SEQ ID NO: 1141636 - RNA, 20 nt, Human
uguucuguucccugauguca

SEQ ID NO: 1141637 - RNA, 21 nt, Human
uuguggccugggguccucccu

SEQ ID NO: 1141638 - RNA, 20 nt, Human
aaaacacuguuagccacugu

SEQ ID NO: 1141639 - RNA, 22 nt, Human
aaaggggagaggaggaagggau

SEQ ID NO: 1141640 - RNA, 18 nt, Human
aaaugaaagccuguaaac

SEQ ID NO: 1141641 - RNA, 22 nt, Human
aacaacggggaauuaggaggga

SEQ ID NO: 1141642 - RNA, 23 nt, Human
aaggggguaaaggggagaggagg

SEQ ID NO: 1141643 - RNA, 22 nt, Human
acaccauuuguucccgaaugaa

SEQ ID NO: 1141644 - RNA, 19 nt, Human
acaggaagacagggugcca

SEQ ID NO: 1141645 - RNA, 19 nt, Human
accacugcuauacacauac

SEQ ID NO: 1141646 - RNA, 23 nt, Human
acccgccaccaggcuucuugccc

SEQ ID NO: 1141647 - RNA, 20 nt, Human
accuuacccagcugaggagc

SEQ ID NO: 1141648 - RNA, 19 nt, Human
agaaaauaauagggugaag

SEQ ID NO: 1141649 - RNA, 21 nt, Human
agagucccggccgcuggcagc

SEQ ID NO: 1141650 - RNA, 20 nt, Human
agcagguggaguccucccga

SEQ ID NO: 1141651 - RNA, 21 nt, Human
agcccgucgccuccgugcccc

SEQ ID NO: 1141652 - RNA, 21 nt, Human
aggagggagcuuggccgucug

SEQ ID NO: 1141653 - RNA, 19 nt, Human
aggaggugaucucaccuac

SEQ ID NO: 1141654 - RNA, 18 nt, Human
agggagcuuggccgucug

SEQ ID NO: 1141655 - RNA, 24 nt, Human
aggggguaaaggggagaggaggaa

SEQ ID NO: 1141656 - RNA, 21 nt, Human
agggugccauacagcugaaga

SEQ ID NO: 1141657 - RNA, 23 nt, Human
agggugccauacagcugaagaaa

SEQ ID NO: 1141658 - RNA, 23 nt, Human
aguccggagcagcgccgauggcu

SEQ ID NO: 1141659 - RNA, 25 nt, Human
agugaaggaaggggguaaaggggag

SEQ ID NO: 1141660 - RNA, 18 nt, Human
caaaggaggugaucucac

SEQ ID NO: 1141661 - RNA, 19 nt, Human
caaauaaacaucugaaacg

SEQ ID NO: 1141662 - RNA, 21 nt, Human
caagcuccagggagucggggg

SEQ ID NO: 1141663 - RNA, 21 nt, Human
caagcuccucaccaguaaacu

SEQ ID NO: 1141664 - RNA, 19 nt, Human
caagugcccaccgcacgcc

SEQ ID NO: 1141665 - RNA, 19 nt, Human
caccaagcgcuccccgagu

SEQ ID NO: 1141666 - RNA, 21 nt, Human
cacgggagacugugacgaccu

SEQ ID NO: 1141667 - RNA, 19 nt, Human
cagaacacaauccggccug

SEQ ID NO: 1141668 - RNA, 19 nt, Human
cagagcggaagcgcuccgc

SEQ ID NO: 1141669 - RNA, 23 nt, Human
cagcacaagaaauuaguugcaaa

SEQ ID NO: 1141670 - RNA, 19 nt, Human
cagcaucuuccuggggauc

SEQ ID NO: 1141671 - RNA, 18 nt, Human
cagccgcccgcuccuugg

SEQ ID NO: 1141672 - RNA, 20 nt, Human
caggagagguaaacgaccau

SEQ ID NO: 1141673 - RNA, 26 nt, Human
cauacguauauauaugggcaaacaca

SEQ ID NO: 1141674 - RNA, 19 nt, Human
ccagacuuucuugcccgac

SEQ ID NO: 1141675 - RNA, 21 nt, Human
ccagccacacaaucuugauuc

SEQ ID NO: 1141676 - RNA, 21 nt, Human
cccaaguuggcaucccgagac

SEQ ID NO: 1141677 - RNA, 18 nt, Human
ccccaccaagcgcucccc

SEQ ID NO: 1141678 - RNA, 21 nt, Human
ccccgaggccagaacacaauc

SEQ ID NO: 1141679 - RNA, 21 nt, Human
cccgcggcggcucccccuacc

SEQ ID NO: 1141680 - RNA, 18 nt, Human
cccgucgccuccgugccc

SEQ ID NO: 1141681 - RNA, 22 nt, Human
cccugcccgguaucugcgcgug

SEQ ID NO: 1141682 - RNA, 22 nt, Human
ccgccccgaggccagaacacaa

SEQ ID NO: 1141683 - RNA, 18 nt, Human
ccgccgggccggaccgcg

SEQ ID NO: 1141684 - RNA, 22 nt, Human
ccgucgccuccgugccccaagu

SEQ ID NO: 1141685 - RNA, 23 nt, Human
ccuaugcugggaucaccuaaaac

SEQ ID NO: 1141686 - RNA, 19 nt, Human
ccucucccagccgcccgcu

SEQ ID NO: 1141687 - RNA, 23 nt, Human
ccugggauacccggacccaggag

SEQ ID NO: 1141688 - RNA, 22 nt, Human
ccugucugcuuucuucucucug

SEQ ID NO: 1141689 - RNA, 22 nt, Human
cgcacaacccuccccagcuccg

SEQ ID NO: 1141690 - RNA, 25 nt, Human
cgccuccgugccccaaguuggcauc

SEQ ID NO: 1141691 - RNA, 19 nt, Human
cggagcagcccgucgccuc

SEQ ID NO: 1141692 - RNA, 21 nt, Human
cggcaggggcugcgaccugug

SEQ ID NO: 1141693 - RNA, 18 nt, Human
cguacauauuuacauaug

SEQ ID NO: 1141694 - RNA, 26 nt, Human
cguuauggggcucucaggcaacaaga

SEQ ID NO: 1141695 - RNA, 23 nt, Human
cucagaagcugugcuguuacaga

SEQ ID NO: 1141696 - RNA, 22 nt, Human
cucucaggcaacaagauuccac

SEQ ID NO: 1141697 - RNA, 23 nt, Human
cucugcaacaacggggaauuagg

SEQ ID NO: 1141698 - RNA, 22 nt, Human
cucuuccgcaggccgagggcag

SEQ ID NO: 1141699 - RNA, 23 nt, Human
cugaacccgagcacagagacugg

SEQ ID NO: 1141700 - RNA, 19 nt, Human
cugacccaagcagaaaccc

SEQ ID NO: 1141701 - RNA, 20 nt, Human
cugagcuccuaugcucagcu

SEQ ID NO: 1141702 - RNA, 20 nt, Human
cugggccugggaaggagcca

SEQ ID NO: 1141703 - RNA, 19 nt, Human
cuggggauccuccgcggca

SEQ ID NO: 1141704 - RNA, 21 nt, Human
cuggugucuucccagccacac

SEQ ID NO: 1141705 - RNA, 23 nt, Human
cuuagcccuuuccguuauggggc

SEQ ID NO: 1141706 - RNA, 25 nt, Human
gaaaauaauagggugaagguuugac

SEQ ID NO: 1141707 - RNA, 21 nt, Human
gaacacaauccggccuggcgc

SEQ ID NO: 1141708 - RNA, 26 nt, Human
gaacacaauccggccuggcgcccggc

SEQ ID NO: 1141709 - RNA, 19 nt, Human
gaacacggagcccuucuuc

SEQ ID NO: 1141710 - RNA, 24 nt, Human
gaacccgagcacagagacuggugg

SEQ ID NO: 1141711 - RNA, 18 nt, Human
gacuuggaaaauacagug

SEQ ID NO: 1141712 - RNA, 20 nt, Human
gagcuccuaugcucagcucc

SEQ ID NO: 1141713 - RNA, 18 nt, Human
gcacaacccuccccagcu

SEQ ID NO: 1141714 - RNA, 18 nt, Human
gcacaaccucucccagcc

SEQ ID NO: 1141715 - RNA, 21 nt, Human
gccagaacacaauccggccug

SEQ ID NO: 1141716 - RNA, 19 nt, Human
gcggggccguggggguggu

SEQ ID NO: 1141717 - RNA, 20 nt, Human
gcuuucuucucucugccuuc

SEQ ID NO: 1141718 - RNA, 20 nt, Human
ggagcccuucuucccugccc

SEQ ID NO: 1141719 - RNA, 18 nt, Human
ggaguccucccgagcucu

SEQ ID NO: 1141720 - RNA, 22 nt, Human
ggccugggaaggagccaggggu

SEQ ID NO: 1141721 - RNA, 20 nt, Human
ggcggggccguggggguggu

SEQ ID NO: 1141722 - RNA, 21 nt, Human
ggcggggccguggggguggug

SEQ ID NO: 1141723 - RNA, 19 nt, Human
gggaucaccuaaaacucuu

SEQ ID NO: 1141724 - RNA, 19 nt, Human
gggccgugggggugguggg

SEQ ID NO: 1141725 - RNA, 22 nt, Human
ggggccgugggggugguggggg

SEQ ID NO: 1141726 - RNA, 19 nt, Human
gggggugagaaugguggga

SEQ ID NO: 1141727 - RNA, 18 nt, Human
ggguaaaggggagaggag

SEQ ID NO: 1141728 - RNA, 18 nt, Human
ggugcaguggaguggucu

SEQ ID NO: 1141729 - RNA, 24 nt, Human
ggugcaguggaguggucugcaggu

SEQ ID NO: 1141730 - RNA, 19 nt, Human
ggugucuucccagccacac

SEQ ID NO: 1141731 - RNA, 18 nt, Human
guagggguggaugcaggg

SEQ ID NO: 1141732 - RNA, 21 nt, Human
gugcaguggaguggucugcag

SEQ ID NO: 1141733 - RNA, 25 nt, Human
gugcaguggaguggucugcagguuc

SEQ ID NO: 1141734 - RNA, 23 nt, Human
uaaaauauuaaaagggcucaaaa

SEQ ID NO: 1141735 - RNA, 20 nt, Human
uaaaaugaaagccuguaaac

SEQ ID NO: 1141736 - RNA, 24 nt, Human
uaaaccaagugcccaccgcacgcc

SEQ ID NO: 1141737 - RNA, 21 nt, Human
uacccggacccaggagagagc

SEQ ID NO: 1141738 - RNA, 21 nt, Human
uagaccuagagaauauaauua

SEQ ID NO: 1141739 - RNA, 22 nt, Human
uagggugaagguuugacccgcc

SEQ ID NO: 1141740 - RNA, 26 nt, Human
uauacacauacauacacacucguaca

SEQ ID NO: 1141741 - RNA, 24 nt, Human
uauauauaugggcaaacacaugua

SEQ ID NO: 1141742 - RNA, 27 nt, Human
uauuuacauauggcauacguauauaua

SEQ ID NO: 1141743 - RNA, 21 nt, Human
ucaagcuccucaccaguaaac

SEQ ID NO: 1141744 - RNA, 18 nt, Human
uccccagcaucuuccugg

SEQ ID NO: 1141745 - RNA, 19 nt, Human
ucccucugacccaagcaga

SEQ ID NO: 1141746 - RNA, 22 nt, Human
ucccucugacccaagcagaaac

SEQ ID NO: 1141747 - RNA, 18 nt, Human
uccgcacaacccucccca

SEQ ID NO: 1141748 - RNA, 18 nt, Human
ucgccuccgugccccaag

SEQ ID NO: 1141749 - RNA, 18 nt, Human
ucuacucaguucaagcuc

SEQ ID NO: 1141750 - RNA, 19 nt, Human
ucucaucugagcuccuaug

SEQ ID NO: 1141751 - RNA, 19 nt, Human
ucucccagccgcccgcucc

SEQ ID NO: 1141752 - RNA, 20 nt, Human
ucucccagccgcccgcuccu

SEQ ID NO: 1141753 - RNA, 22 nt, Human
ucugagcuccuaugcucagcuc

SEQ ID NO: 1141754 - RNA, 22 nt, Human
ucugggacuguaugaugaaaag

SEQ ID NO: 1141755 - RNA, 18 nt, Human
ucuguucccuucucugcu

SEQ ID NO: 1141756 - RNA, 20 nt, Human
ucuucccugcccgguaucug

SEQ ID NO: 1141757 - RNA, 19 nt, Human
ucuuccgcaggccgagggc

SEQ ID NO: 1141758 - RNA, 19 nt, Human
ucuugcccgacugggcuga

SEQ ID NO: 1141759 - RNA, 19 nt, Human
ugaaacgccgguucuguaa

SEQ ID NO: 1141760 - RNA, 19 nt, Human
ugaaagacuagagaacaca

SEQ ID NO: 1141761 - RNA, 28 nt, Human
ugaaggaaggggguaaaggggagaggag

SEQ ID NO: 1141762 - RNA, 22 nt, Human
ugagacuaauucuaaaccacug

SEQ ID NO: 1141763 - RNA, 22 nt, Human
ugauguuguuggacugagagua

SEQ ID NO: 1141764 - RNA, 20 nt, Human
ugcacacaucuccccuuccc

SEQ ID NO: 1141765 - RNA, 18 nt, Human
ugccauacagcugaagaa

SEQ ID NO: 1141766 - RNA, 19 nt, Human
ugccauacagcugaagaaa

SEQ ID NO: 1141767 - RNA, 19 nt, Human
ugcugagagucccggccgc

SEQ ID NO: 1141768 - RNA, 23 nt, Human
ugcuuaauaaaauccagagacag

SEQ ID NO: 1141769 - RNA, 21 nt, Human
uggaaaauacagugagaaggu

SEQ ID NO: 1141770 - RNA, 22 nt, Human
uggaacacggagcccuucuucc

SEQ ID NO: 1141771 - RNA, 21 nt, Human
uggccucucagcauauacucc

SEQ ID NO: 1141772 - RNA, 22 nt, Human
uggccucucagcauauacuccu

SEQ ID NO: 1141773 - RNA, 19 nt, Human
ugggaaggagccaggggua

SEQ ID NO: 1141774 - RNA, 18 nt, Human
ugggccugggaaggagcc

SEQ ID NO: 1141775 - RNA, 19 nt, Human
uguacaggaagacagggug

SEQ ID NO: 1141776 - RNA, 23 nt, Human
uguggaacugagacuaauucuaa

SEQ ID NO: 1141777 - RNA, 22 nt, Human
uguuuuuuaugauucucuuuca

SEQ ID NO: 1141778 - RNA, 21 nt, Human
uuaagucuauagagucagaaa

SEQ ID NO: 1141779 - RNA, 23 nt, Human
uuacugcagcaaaacuggcaagu

SEQ ID NO: 1141780 - RNA, 19 nt, Human
uuaguugcaaauaaacauc

SEQ ID NO: 1141781 - RNA, 20 nt, Human
uucccagccacacaaucuug

SEQ ID NO: 1141782 - RNA, 18 nt, Human
uuuccugucugcuuucuu

SEQ ID NO: 1141783 - RNA, 19 nt, Human
aagucagaucuaggaccaa

SEQ ID NO: 1141784 - RNA, 25 nt, Human
agcugcauggccucaaucaagucac

SEQ ID NO: 1141785 - RNA, 18 nt, Human
agguaacauaaaucaacu

SEQ ID NO: 1141786 - RNA, 18 nt, Human
aucaagucacuuaguuuu

SEQ ID NO: 1141787 - RNA, 27 nt, Human
caguaaacgcuucuucuccaaaugucu

SEQ ID NO: 1141788 - RNA, 21 nt, Human
ccacaucucugcuaaucugga

SEQ ID NO: 1141789 - RNA, 20 nt, Human
ccacuggaucccagucaugc

SEQ ID NO: 1141790 - RNA, 18 nt, Human
ccaggacccaggaacuuc

SEQ ID NO: 1141791 - RNA, 21 nt, Human
ccgugaacaggaaggaggugu

SEQ ID NO: 1141792 - RNA, 18 nt, Human
ccugguccuccccucgcc

SEQ ID NO: 1141793 - RNA, 19 nt, Human
ccuuauuaccacaucucug

SEQ ID NO: 1141794 - RNA, 20 nt, Human
cgcaaaggacugccgugaac

SEQ ID NO: 1141795 - RNA, 22 nt, Human
cuagcauaauguaaaacugaag

SEQ ID NO: 1141796 - RNA, 25 nt, Human
cugcacuguccccagauuggguuuc

SEQ ID NO: 1141797 - RNA, 22 nt, Human
cugguucugucggcugagacaa

SEQ ID NO: 1141798 - RNA, 22 nt, Human
cuucauucccuuucuggcuugc

SEQ ID NO: 1141799 - RNA, 20 nt, Human
cuucuaucugcagagguaga

SEQ ID NO: 1141800 - RNA, 27 nt, Human
cuugcuuuggagucugucagaccuggc

SEQ ID NO: 1141801 - RNA, 20 nt, Human
gcaaaggacugccgugaaca

SEQ ID NO: 1141802 - RNA, 26 nt, Human
gcagugccugaugaggugaggccagg

SEQ ID NO: 1141803 - RNA, 23 nt, Human
gcuccuuuuuucuagcauaaugu

SEQ ID NO: 1141804 - RNA, 23 nt, Human
gcugguucugucggcugagacaa

SEQ ID NO: 1141805 - RNA, 21 nt, Human
gcuuuggagucugucagaccu

SEQ ID NO: 1141806 - RNA, 21 nt, Human
ggauuucuagggaagcaguuu

SEQ ID NO: 1141807 - RNA, 18 nt, Human
gugaacaggaaggaggug

SEQ ID NO: 1141808 - RNA, 22 nt, Human
uaacauaaaucaacuauauucu

SEQ ID NO: 1141809 - RNA, 24 nt, Human
uagcauaauguaaaacugaagaau

SEQ ID NO: 1141810 - RNA, 24 nt, Human
ucacguagagugacggcuccuuuu

SEQ ID NO: 1141811 - RNA, 20 nt, Human
ucaggaacaguaaguguucu

SEQ ID NO: 1141812 - RNA, 19 nt, Human
ucgcaaaggacugccguga

SEQ ID NO: 1141813 - RNA, 22 nt, Human
ucguccacuggaucccagucau

SEQ ID NO: 1141814 - RNA, 27 nt, Human
ugaggccaggacccaggaacuucuauu

SEQ ID NO: 1141815 - RNA, 18 nt, Human
ugaggugaggccaggacc

SEQ ID NO: 1141816 - RNA, 22 nt, Human
ugaggugaggccaggacccagg

SEQ ID NO: 1141817 - RNA, 24 nt, Human
ugcuuagcacaucguggguacuuc

SEQ ID NO: 1141818 - RNA, 21 nt, Human
uggaaugcuuccuauuggaua

SEQ ID NO: 1141819 - RNA, 18 nt, Human
uggcaagaaugcuggaga

SEQ ID NO: 1141820 - RNA, 19 nt, Human
uggcagugccugaugaggu

SEQ ID NO: 1141821 - RNA, 19 nt, Human
ugucaacaugaacuguaga

SEQ ID NO: 1141822 - RNA, 22 nt, Human
uguccuuauuaccacaucucug

SEQ ID NO: 1141823 - RNA, 21 nt, Human
aaaaggccaaaggcaaagauc

SEQ ID NO: 1141824 - RNA, 23 nt, Human
aaaaggccaaaggcaaagaucug

SEQ ID NO: 1141825 - RNA, 21 nt, Human
aaacagaugaacgccauaauc

SEQ ID NO: 1141826 - RNA, 24 nt, Human
aaacagaugaacgccauaaucccu

SEQ ID NO: 1141827 - RNA, 24 nt, Human
aaagaagcucaguguggacuugag

SEQ ID NO: 1141828 - RNA, 19 nt, Human
aaagugcugggauuacaga

SEQ ID NO: 1141829 - RNA, 24 nt, Human
aaagugcugggauuacagagguga

SEQ ID NO: 1141830 - RNA, 24 nt, Human
aaauuacacaaaauguugacguaa

SEQ ID NO: 1141831 - RNA, 20 nt, Human
aaccuccucuucuccacccu

SEQ ID NO: 1141832 - RNA, 23 nt, Human
aagcaacccugaccccugacccc

SEQ ID NO: 1141833 - RNA, 21 nt, Human
aagcugcucuuaccccuucca

SEQ ID NO: 1141834 - RNA, 24 nt, Human
aagugauccucuugccuuggccuc

SEQ ID NO: 1141835 - RNA, 25 nt, Human
aagugauccucuugccuuggccucc

SEQ ID NO: 1141836 - RNA, 18 nt, Human
aagugcugggauuacaga

SEQ ID NO: 1141837 - RNA, 21 nt, Human
aagugcugggauuacagaggu

SEQ ID NO: 1141838 - RNA, 26 nt, Human
aagugcugggauuacagaggugagcc

SEQ ID NO: 1141839 - RNA, 19 nt, Human
aaguuuuuauagagauggg

SEQ ID NO: 1141840 - RNA, 22 nt, Human
acaaaaggccaaaggcaaagau

SEQ ID NO: 1141841 - RNA, 22 nt, Human
acagaaugaggccaaauguuga

SEQ ID NO: 1141842 - RNA, 18 nt, Human
acccgcagcaucuucccu

SEQ ID NO: 1141843 - RNA, 22 nt, Human
accuuggugaccauugacguug

SEQ ID NO: 1141844 - RNA, 18 nt, Human
acucugucauccaggcug

SEQ ID NO: 1141845 - RNA, 24 nt, Human
acucugucauccaggcuggagugc

SEQ ID NO: 1141846 - RNA, 23 nt, Human
acuguucugcugugugaccuggg

SEQ ID NO: 1141847 - RNA, 21 nt, Human
agaaagaagcucaguguggaa

SEQ ID NO: 1141848 - RNA, 24 nt, Human
agagaaagaggcugaaggagggug

SEQ ID NO: 1141849 - RNA, 23 nt, Human
agagagagagagagaaagaggcu

SEQ ID NO: 1141850 - RNA, 18 nt, Human
agaggcugaaggagggug

SEQ ID NO: 1141851 - RNA, 22 nt, Human
agcaacccugaccccugacccc

SEQ ID NO: 1141852 - RNA, 19 nt, Human
agcagaaugaccccaacaa

SEQ ID NO: 1141853 - RNA, 18 nt, Human
agccgagacaaauuacac

SEQ ID NO: 1141854 - RNA, 20 nt, Human
agccgagacaaauuacacaa

SEQ ID NO: 1141855 - RNA, 23 nt, Human
aggcauucgguaaaggcauggac

SEQ ID NO: 1141856 - RNA, 18 nt, Human
agguacuggcagggccau

SEQ ID NO: 1141857 - RNA, 23 nt, Human
agucugagguuuaggguuuugcu

SEQ ID NO: 1141858 - RNA, 23 nt, Human
agugcagugguacgaugguggcu

SEQ ID NO: 1141859 - RNA, 24 nt, Human
agugcugggauuacagaggugagc

SEQ ID NO: 1141860 - RNA, 21 nt, Human
auaacaaaaggccaaaggcaa

SEQ ID NO: 1141861 - RNA, 21 nt, Human
auagagaugggguuuugccau

SEQ ID NO: 1141862 - RNA, 22 nt, Human
auagagaugggguuuugccaug

SEQ ID NO: 1141863 - RNA, 24 nt, Human
aucagagaaaugcaaauuaaaaca

SEQ ID NO: 1141864 - RNA, 31 nt, Human
augaagggagugugugugugugugugugugg

SEQ ID NO: 1141865 - RNA, 22 nt, Human
augagacaggcacuaugacccu

SEQ ID NO: 1141866 - RNA, 19 nt, Human
augaggccaaauguugacu

SEQ ID NO: 1141867 - RNA, 18 nt, Human
auggcccaaauccagggc

SEQ ID NO: 1141868 - RNA, 24 nt, Human
caaagugaacacgugcaucacccc

SEQ ID NO: 1141869 - RNA, 24 nt, Human
caaagugcugggauuacagaggug

SEQ ID NO: 1141870 - RNA, 24 nt, Human
caaauuaaaacaacaaugagacac

SEQ ID NO: 1141871 - RNA, 22 nt, Human
caagugauccucuugccuuggc

SEQ ID NO: 1141872 - RNA, 27 nt, Human
caagugauccucuugccuuggccuccc

SEQ ID NO: 1141873 - RNA, 21 nt, Human
cacaucauaugucaucagaga

SEQ ID NO: 1141874 - RNA, 18 nt, Human
caccagguugcgcugagg

SEQ ID NO: 1141875 - RNA, 24 nt, Human
caccucagccuccugaguagcugg

SEQ ID NO: 1141876 - RNA, 20 nt, Human
caccucccucaccuucacug

SEQ ID NO: 1141877 - RNA, 22 nt, Human
cacucugucauccaggcuggag

SEQ ID NO: 1141878 - RNA, 23 nt, Human
cacucugucauccaggcuggagu

SEQ ID NO: 1141879 - RNA, 20 nt, Human
cacugcagucucaaccuucu

SEQ ID NO: 1141880 - RNA, 18 nt, Human
cagagagucaccuuguca

SEQ ID NO: 1141881 - RNA, 19 nt, Human
cagagcccaaauguccuuu

SEQ ID NO: 1141882 - RNA, 22 nt, Human
cagaugaacgccauaaucccua

SEQ ID NO: 1141883 - RNA, 26 nt, Human
cagcaaaugcggugaggacguggagc

SEQ ID NO: 1141884 - RNA, 22 nt, Human
cagcagaaugaccccaacaaag

SEQ ID NO: 1141885 - RNA, 21 nt, Human
cagccacaggucugcccccag

SEQ ID NO: 1141886 - RNA, 20 nt, Human
cagccuccugaguagcuggg

SEQ ID NO: 1141887 - RNA, 18 nt, Human
cagcgcggggaagcugcu

SEQ ID NO: 1141888 - RNA, 18 nt, Human
caggaagaaauucaggaa

SEQ ID NO: 1141889 - RNA, 23 nt, Human
caggagaaggaauguacuaagga

SEQ ID NO: 1141890 - RNA, 22 nt, Human
caggcacaugccaccacaccca

SEQ ID NO: 1141891 - RNA, 24 nt, Human
caggccagaugucagagcccaaau

SEQ ID NO: 1141892 - RNA, 22 nt, Human
cagggaagcaacccugaccccu

SEQ ID NO: 1141893 - RNA, 24 nt, Human
caggguuucacucugucauccagg

SEQ ID NO: 1141894 - RNA, 18 nt, Human
cauccaugaccuuuucac

SEQ ID NO: 1141895 - RNA, 18 nt, Human
caugacucuaugagacag

SEQ ID NO: 1141896 - RNA, 24 nt, Human
caugccaccacacccagcuaaguu

SEQ ID NO: 1141897 - RNA, 25 nt, Human
caugccaccacacccagcuaaguuu

SEQ ID NO: 1141898 - RNA, 20 nt, Human
cauguauucauucacuuuau

SEQ ID NO: 1141899 - RNA, 21 nt, Human
ccaaagugcugggauuacaga

SEQ ID NO: 1141900 - RNA, 24 nt, Human
ccaaagugcugggauuacagaggu

SEQ ID NO: 1141901 - RNA, 23 nt, Human
ccaccucagccuccugaguagcu

SEQ ID NO: 1141902 - RNA, 21 nt, Human
ccagcacaucacauguauuca

SEQ ID NO: 1141903 - RNA, 23 nt, Human
ccagcacaucacauguauucauu

SEQ ID NO: 1141904 - RNA, 22 nt, Human
ccaggcacaugccaccacaccc

SEQ ID NO: 1141905 - RNA, 21 nt, Human
ccagggaagcaacccugaccc

SEQ ID NO: 1141906 - RNA, 28 nt, Human
ccaguaucuuccaaugggaaugucuucc

SEQ ID NO: 1141907 - RNA, 23 nt, Human
cccaccucagccuccugaguagc

SEQ ID NO: 1141908 - RNA, 22 nt, Human
cccucugcacagucccuuugag

SEQ ID NO: 1141909 - RNA, 21 nt, Human
ccugaccccugacccccucca

SEQ ID NO: 1141910 - RNA, 23 nt, Human
ccugaccccugacccccuccaac

SEQ ID NO: 1141911 - RNA, 23 nt, Human
ccugagccuccucuugcaggugu

SEQ ID NO: 1141912 - RNA, 24 nt, Human
ccuggacagacaauguguucaaga

SEQ ID NO: 1141913 - RNA, 20 nt, Human
ccugggcucaagugauccuc

SEQ ID NO: 1141914 - RNA, 20 nt, Human
ccugggcucaagugauccuc

SEQ ID NO: 1141915 - RNA, 22 nt, Human
ccugggcucaagugauccucuu

SEQ ID NO: 1141916 - RNA, 18 nt, Human
cgguaaaggcauggacca

SEQ ID NO: 1141917 - RNA, 18 nt, Human
cucacugcagucucaacc

SEQ ID NO: 1141918 - RNA, 19 nt, Human
cucacugcagucucaaccu

SEQ ID NO: 1141919 - RNA, 24 nt, Human
cucagccuccugaguagcugggac

SEQ ID NO: 1141920 - RNA, 23 nt, Human
cuccucauuuugcagauggggaa

SEQ ID NO: 1141921 - RNA, 23 nt, Human
cuccucuucuccacccuaugaac

SEQ ID NO: 1141922 - RNA, 18 nt, Human
cugacccccuccaacagg

SEQ ID NO: 1141923 - RNA, 19 nt, Human
cugaccccugacccccucc

SEQ ID NO: 1141924 - RNA, 21 nt, Human
cugcauguuaaccugucucuc

SEQ ID NO: 1141925 - RNA, 19 nt, Human
cugggcccuagggagucuc

SEQ ID NO: 1141926 - RNA, 22 nt, Human
cuggucuuuccagagcuccagg

SEQ ID NO: 1141927 - RNA, 22 nt, Human
cuucaggaccuuggugaccauu

SEQ ID NO: 1141928 - RNA, 21 nt, Human
cuuccagcuucuggugguugu

SEQ ID NO: 1141929 - RNA, 24 nt, Human
cuucccaccucagccuccugagua

SEQ ID NO: 1141930 - RNA, 22 nt, Human
cuucccagcagaaugaccccaa

SEQ ID NO: 1141931 - RNA, 24 nt, Human
cuugccuuggccucccaaagugcu

SEQ ID NO: 1141932 - RNA, 18 nt, Human
gaauguacuaagggagga

SEQ ID NO: 1141933 - RNA, 24 nt, Human
gacacaccuaccggauaccacaca

SEQ ID NO: 1141934 - RNA, 23 nt, Human
gacaggguuucacucugucaucc

SEQ ID NO: 1141935 - RNA, 19 nt, Human
gaccccugacccccuccaa

SEQ ID NO: 1141936 - RNA, 18 nt, Human
gagaugggguuuugccau

SEQ ID NO: 1141937 - RNA, 23 nt, Human
gagcagaugaaaagauaauccac

SEQ ID NO: 1141938 - RNA, 20 nt, Human
gaguagcugggacuccaggc

SEQ ID NO: 1141939 - RNA, 25 nt, Human
gaguagcugggacuccaggcacaug

SEQ ID NO: 1141940 - RNA, 18 nt, Human
gauuacagaggugagcca

SEQ ID NO: 1141941 - RNA, 22 nt, Human
gauuacagaggugagccacugc

SEQ ID NO: 1141942 - RNA, 25 nt, Human
gcagcgaucccucugcacagucccu

SEQ ID NO: 1141943 - RNA, 22 nt, Human
gccuuggccucccaaagugcug

SEQ ID NO: 1141944 - RNA, 20 nt, Human
gcgggggcagcagggagagg

SEQ ID NO: 1141945 - RNA, 20 nt, Human
gcucacugcagucucaaccu

SEQ ID NO: 1141946 - RNA, 20 nt, Human
ggaaaacuauuucuauucac

SEQ ID NO: 1141947 - RNA, 20 nt, Human
ggagggugaaggaagggcug

SEQ ID NO: 1141948 - RNA, 18 nt, Human
ggaggugggugugaagug

SEQ ID NO: 1141949 - RNA, 19 nt, Human
ggcagcagggagaggcaaa

SEQ ID NO: 1141950 - RNA, 22 nt, Human
gggcucaagugauccucuugcc

SEQ ID NO: 1141951 - RNA, 21 nt, Human
ggggcagcagggagaggcaaa

SEQ ID NO: 1141952 - RNA, 20 nt, Human
gugauucuccaaucucugcc

SEQ ID NO: 1141953 - RNA, 21 nt, Human
guggagcaauaggaacucuca

SEQ ID NO: 1141954 - RNA, 21 nt, Human
gugugugugugugugugugag

SEQ ID NO: 1141955 - RNA, 20 nt, Human
gugugugugugugugugugu

SEQ ID NO: 1141956 - RNA, 20 nt, Human
guuccuuucuuuuccuggac

SEQ ID NO: 1141957 - RNA, 18 nt, Human
uaacaaaaggccaaaggc

SEQ ID NO: 1141958 - RNA, 18 nt, Human
uaacgcacccugcaccgc

SEQ ID NO: 1141959 - RNA, 22 nt, Human
uacagaggugagccacugcgcc

SEQ ID NO: 1141960 - RNA, 22 nt, Human
uacagaggugagccacugcgcc

SEQ ID NO: 1141961 - RNA, 23 nt, Human
uacagaggugagccacugcgccu

SEQ ID NO: 1141962 - RNA, 18 nt, Human
uaccccuuccagcuucug

SEQ ID NO: 1141963 - RNA, 25 nt, Human
uagaacauaaacugcagcucgacag

SEQ ID NO: 1141964 - RNA, 22 nt, Human
uagagaugggguuuugccaugu

SEQ ID NO: 1141965 - RNA, 24 nt, Human
uauagaacauaaacugcagcucga

SEQ ID NO: 1141966 - RNA, 24 nt, Human
uauagagaugggguuuugccaugu

SEQ ID NO: 1141967 - RNA, 23 nt, Human
uauauagauggcaaaugagcagu

SEQ ID NO: 1141968 - RNA, 22 nt, Human
uaucucacaacuguggaagcca

SEQ ID NO: 1141969 - RNA, 18 nt, Human
uaugaacuggauccaaug

SEQ ID NO: 1141970 - RNA, 22 nt, Human
uaugagacaggcacuaugaccc

SEQ ID NO: 1141971 - RNA, 19 nt, Human
ucaagaggaguuuugggau

SEQ ID NO: 1141972 - RNA, 21 nt, Human
ucacucugucauccaggcugg

SEQ ID NO: 1141973 - RNA, 22 nt, Human
ucacucugucauccaggcugga

SEQ ID NO: 1141974 - RNA, 24 nt, Human
ucacucugucauccaggcuggagu

SEQ ID NO: 1141975 - RNA, 24 nt, Human
ucacugcagucucaaccuucuggg

SEQ ID NO: 1141976 - RNA, 22 nt, Human
ucacuggucuuuccagagcucc

SEQ ID NO: 1141977 - RNA, 27 nt, Human
ucagccaggccagaugucagagcccaa

SEQ ID NO: 1141978 - RNA, 23 nt, Human
ucagccuccugaguagcugggac

SEQ ID NO: 1141979 - RNA, 24 nt, Human
ucauccaggcuggagugcaguggu

SEQ ID NO: 1141980 - RNA, 25 nt, Human
uccaaaaucaagguacuggcagggc

SEQ ID NO: 1141981 - RNA, 23 nt, Human
uccagggcacagauagcagcaaa

SEQ ID NO: 1141982 - RNA, 22 nt, Human
uccaugaccuuuucacuguucu

SEQ ID NO: 1141983 - RNA, 18 nt, Human
ucccaaagugcugggauu

SEQ ID NO: 1141984 - RNA, 23 nt, Human
ucccaaagugcugggauuacaga

SEQ ID NO: 1141985 - RNA, 19 nt, Human
ucccaaugcuccaguuuuc

SEQ ID NO: 1141986 - RNA, 19 nt, Human
ucccaucucauugaaauuc

SEQ ID NO: 1141987 - RNA, 22 nt, Human
ucccaucucauugaaauucagg

SEQ ID NO: 1141988 - RNA, 22 nt, Human
uccgcgacuaucucagcaaacc

SEQ ID NO: 1141989 - RNA, 24 nt, Human
uccugaguagcugggacuccaggc

SEQ ID NO: 1141990 - RNA, 18 nt, Human
ucuagaaacagcgcgggg

SEQ ID NO: 1141991 - RNA, 18 nt, Human
ucucaaccuucugggcuu

SEQ ID NO: 1141992 - RNA, 23 nt, Human
ucucgaacgccugggcucaagug

SEQ ID NO: 1141993 - RNA, 23 nt, Human
ucucguggaaauaauuccuuuau

SEQ ID NO: 1141994 - RNA, 24 nt, Human
ucucugagaagcagucauuggucu

SEQ ID NO: 1141995 - RNA, 24 nt, Human
ucugucauccaggcuggagugcag

SEQ ID NO: 1141996 - RNA, 23 nt, Human
ugaagugaaagccuuugaggucc

SEQ ID NO: 1141997 - RNA, 24 nt, Human
ugaagugaaagccuuugagguccc

SEQ ID NO: 1141998 - RNA, 21 nt, Human
ugaccccaacaaaggaggcau

SEQ ID NO: 1141999 - RNA, 18 nt, Human
ugagacaggcacuaugac

SEQ ID NO: 1142000 - RNA, 19 nt, Human
ugagacaggcacuaugacc

SEQ ID NO: 1142001 - RNA, 20 nt, Human
ugagacaggcacuaugaccc

SEQ ID NO: 1142002 - RNA, 20 nt, Human
ugcaucaccagguugcgcug

SEQ ID NO: 1142003 - RNA, 20 nt, Human
ugcugugugaccugggcccg

SEQ ID NO: 1142004 - RNA, 19 nt, Human
uggagugcagugguacgau

SEQ ID NO: 1142005 - RNA, 24 nt, Human
uggagugcagugguacgauggugg

SEQ ID NO: 1142006 - RNA, 23 nt, Human
uggcuggcgugcuugucucgugg

SEQ ID NO: 1142007 - RNA, 24 nt, Human
ugggacuccaggcacaugccacca

SEQ ID NO: 1142008 - RNA, 21 nt, Human
ugggauaguggggaucccugg

SEQ ID NO: 1142009 - RNA, 22 nt, Human
ugggauuacagaggugagccac

SEQ ID NO: 1142010 - RNA, 22 nt, Human
ugggauuacagaggugagccac

SEQ ID NO: 1142011 - RNA, 24 nt, Human
ugggauuacagaggugagccacug

SEQ ID NO: 1142012 - RNA, 18 nt, Human
ugggcucaagugauccuc

SEQ ID NO: 1142013 - RNA, 24 nt, Human
ugggcucaagugauccucuugccu

SEQ ID NO: 1142014 - RNA, 22 nt, Human
ugggcuuagaugaucuucccac

SEQ ID NO: 1142015 - RNA, 24 nt, Human
ugggcuuagaugaucuucccaccu

SEQ ID NO: 1142016 - RNA, 21 nt, Human
ugguggcucacugcagucuca

SEQ ID NO: 1142017 - RNA, 22 nt, Human
ugucucguggaaauaauuccuu

SEQ ID NO: 1142018 - RNA, 19 nt, Human
ugugaagugaaagccuuug

SEQ ID NO: 1142019 - RNA, 23 nt, Human
ugugcgggggcagcagggagagg

SEQ ID NO: 1142020 - RNA, 19 nt, Human
uguggaagccagaagucca

SEQ ID NO: 1142021 - RNA, 18 nt, Human
ugugugugugugugugug

SEQ ID NO: 1142022 - RNA, 18 nt, Human
ugugugugugugugugug

SEQ ID NO: 1142023 - RNA, 21 nt, Human
ugugugugugugugugugugu

SEQ ID NO: 1142024 - RNA, 21 nt, Human
ugugugugugugugugugugu

SEQ ID NO: 1142025 - RNA, 22 nt, Human
ugugugugugugugugugugug

SEQ ID NO: 1142026 - RNA, 18 nt, Human
uguucagucagcaccuga

SEQ ID NO: 1142027 - RNA, 20 nt, Human
uuagaugaucuucccaccuu

SEQ ID NO: 1142028 - RNA, 21 nt, Human
uuaguucaccacucugaaccu

SEQ ID NO: 1142029 - RNA, 24 nt, Human
uuauagagaugggguuuugccaug

SEQ ID NO: 1142030 - RNA, 18 nt, Human
uucacaggaucuucuccu

SEQ ID NO: 1142031 - RNA, 24 nt, Human
uucacucugucauccaggcuggag

SEQ ID NO: 1142032 - RNA, 23 nt, Human
uucccaccucagccuccugagua

SEQ ID NO: 1142033 - RNA, 21 nt, Human
uuccuggacagacgauggcau

SEQ ID NO: 1142034 - RNA, 27 nt, Human
uugauuggaucagacaugcuggaagag

SEQ ID NO: 1142035 - RNA, 23 nt, Human
uugcagcgaucccucugcacagu

SEQ ID NO: 1142036 - RNA, 24 nt, Human
uugccuuggccucccaaagugcug

SEQ ID NO: 1142037 - RNA, 24 nt, Human
uuuauagagaugggguuuugccau

SEQ ID NO: 1142038 - RNA, 22 nt, Human
uuucacucugucauccaggcug

SEQ ID NO: 1142039 - RNA, 24 nt, Human
uuucacucugucauccaggcugga

SEQ ID NO: 1142040 - RNA, 24 nt, Human
uuuccuaaaagggagacaugaaaa

SEQ ID NO: 1142041 - RNA, 20 nt, Human
uuugaggucccugcccaugg

SEQ ID NO: 1142042 - RNA, 20 nt, Human
uuuuuauagagaugggguuu

SEQ ID NO: 1142043 - RNA, 20 nt, Human
aacaacuuuucacaagccga

SEQ ID NO: 1142044 - RNA, 22 nt, Human
aacucucuucuucaauggacua

SEQ ID NO: 1142045 - RNA, 19 nt, Human
aagucuucaucucaugcuc

SEQ ID NO: 1142046 - RNA, 19 nt, Human
acaacaacuuucaaacucu

SEQ ID NO: 1142047 - RNA, 22 nt, Human
acuaccagaaaucagaaagcca

SEQ ID NO: 1142048 - RNA, 24 nt, Human
agaaagccacuauaaaacccaaug

SEQ ID NO: 1142049 - RNA, 20 nt, Human
ccacaaucuagaaauggaac

SEQ ID NO: 1142050 - RNA, 22 nt, Human
uacaacaacuuucaaacucucu

SEQ ID NO: 1142051 - RNA, 22 nt, Human
uaccagaaaucagaaagccacu

SEQ ID NO: 1142052 - RNA, 25 nt, Human
uagaaauggaaccacugcucuuuug

SEQ ID NO: 1142053 - RNA, 22 nt, Human
uauacaacaacuuucaaacucu

SEQ ID NO: 1142054 - RNA, 23 nt, Human
ucagaaagugaaaugaaaauggu

SEQ ID NO: 1142055 - RNA, 22 nt, Human
ucaggcaggacaugggcagaca

SEQ ID NO: 1142056 - RNA, 20 nt, Human
ugaaaaugguagaauuuauc

SEQ ID NO: 1142057 - RNA, 21 nt, Human
ugaaaaugguagaauuuaucu

SEQ ID NO: 1142058 - RNA, 23 nt, Human
uggaaccacugcucuuuugacag

SEQ ID NO: 1142059 - RNA, 20 nt, Human
uuaucugaagauccacaauc

SEQ ID NO: 1142060 - RNA, 21 nt, Human
uucaaacucucuucuucaaug

SEQ ID NO: 1142061 - RNA, 22 nt, Human
uucaaacucucuucuucaaugg

SEQ ID NO: 1142062 - RNA, 19 nt, Human
aaaaggaacaaguuaugaa

SEQ ID NO: 1142063 - RNA, 21 nt, Human
aacauagugagacccccaucu

SEQ ID NO: 1142064 - RNA, 21 nt, Human
aaccaaaccaacaacaacagc

SEQ ID NO: 1142065 - RNA, 19 nt, Human
aagguauuucaacuugaaa

SEQ ID NO: 1142066 - RNA, 21 nt, Human
aauauauauguauaugcuacu

SEQ ID NO: 1142067 - RNA, 24 nt, Human
acaacaacagcaguaacaacaaaa

SEQ ID NO: 1142068 - RNA, 21 nt, Human
acacaagaaagguauuucaac

SEQ ID NO: 1142069 - RNA, 24 nt, Human
acagagccagacccggucucaaaa

SEQ ID NO: 1142070 - RNA, 21 nt, Human
acauagugagacccccaucuc

SEQ ID NO: 1142071 - RNA, 24 nt, Human
accgcauuccagcuugggcuacag

SEQ ID NO: 1142072 - RNA, 19 nt, Human
acugcuaaagucucuuggg

SEQ ID NO: 1142073 - RNA, 23 nt, Human
agccgggugugguggcacgugcc

SEQ ID NO: 1142074 - RNA, 22 nt, Human
agccugggcaacauagugagac

SEQ ID NO: 1142075 - RNA, 23 nt, Human
agccugggcaacauagugagacc

SEQ ID NO: 1142076 - RNA, 24 nt, Human
agccugggcaacauagugagaccc

SEQ ID NO: 1142077 - RNA, 22 nt, Human
aggaauauaccuggaccggggc

SEQ ID NO: 1142078 - RNA, 20 nt, Human
aggaguuugagaccagccug

SEQ ID NO: 1142079 - RNA, 24 nt, Human
aggaucgcuugagcccaggaguuu

SEQ ID NO: 1142080 - RNA, 24 nt, Human
aggauugcuugagcccaggaguuu

SEQ ID NO: 1142081 - RNA, 21 nt, Human
aggcagaagggacaaccaggg

SEQ ID NO: 1142082 - RNA, 19 nt, Human
aggcagacauguuuaaucc

SEQ ID NO: 1142083 - RNA, 23 nt, Human
aggcaggaggauugcuugagccc

SEQ ID NO: 1142084 - RNA, 24 nt, Human
aggcaggaggauugcuugagccca

SEQ ID NO: 1142085 - RNA, 19 nt, Human
aggcaugguggcucaugca

SEQ ID NO: 1142086 - RNA, 24 nt, Human
aggccgaggccaaaggaucgcuug

SEQ ID NO: 1142087 - RNA, 25 nt, Human
aggccgaggccaaaggaucgcuuga

SEQ ID NO: 1142088 - RNA, 21 nt, Human
aggcugaggcaggaggauugc

SEQ ID NO: 1142089 - RNA, 24 nt, Human
aggcugaggcaggaggauugcuug

SEQ ID NO: 1142090 - RNA, 22 nt, Human
aguaacaacaaaacuaaguaaa

SEQ ID NO: 1142091 - RNA, 24 nt, Human
aucgcgccaccgcauuccagcuug

SEQ ID NO: 1142092 - RNA, 20 nt, Human
augacuuucacaagcaacaa

SEQ ID NO: 1142093 - RNA, 24 nt, Human
auugcuugagcccaggaguuugag

SEQ ID NO: 1142094 - RNA, 21 nt, Human
caaaaccaaccaaaccaacaa

SEQ ID NO: 1142095 - RNA, 24 nt, Human
caaaaccaaccaaaccaacaacaa

SEQ ID NO: 1142096 - RNA, 21 nt, Human
caacaacaacagcaguaacaa

SEQ ID NO: 1142097 - RNA, 25 nt, Human
caacagcaguaacaacaaaacuaag

SEQ ID NO: 1142098 - RNA, 18 nt, Human
caaccaaaccaacaacaa

SEQ ID NO: 1142099 - RNA, 19 nt, Human
caaguuuccauuugcaauu

SEQ ID NO: 1142100 - RNA, 18 nt, Human
caccgcauuccagcuugg

SEQ ID NO: 1142101 - RNA, 33 nt, Human
cagcaguaacaacaaaacuaaguaaaaggaaag

SEQ ID NO: 1142102 - RNA, 20 nt, Human
cagccugggcaacauaguga

SEQ ID NO: 1142103 - RNA, 24 nt, Human
cagcugcuugggaggcugaggcag

SEQ ID NO: 1142104 - RNA, 23 nt, Human
caggccaggcaugguggcucaug

SEQ ID NO: 1142105 - RNA, 24 nt, Human
caucucuacaaaaaaaauaaagaa

SEQ ID NO: 1142106 - RNA, 22 nt, Human
cauuagauuguggguuucaagu

SEQ ID NO: 1142107 - RNA, 27 nt, Human
ccaacaacaacagcaguaacaacaaaa

SEQ ID NO: 1142108 - RNA, 23 nt, Human
ccaaccaaaccaacaacaacagc

SEQ ID NO: 1142109 - RNA, 20 nt, Human
ccaccgcauuccagcuuggg

SEQ ID NO: 1142110 - RNA, 20 nt, Human
ccaccgcauuccagcuuggg

SEQ ID NO: 1142111 - RNA, 21 nt, Human
ccaccgcauuccagcuugggc

SEQ ID NO: 1142112 - RNA, 23 nt, Human
ccagaaaucucugucuuaaccaa

SEQ ID NO: 1142113 - RNA, 22 nt, Human
ccuaucuucccagcugcuuggg

SEQ ID NO: 1142114 - RNA, 22 nt, Human
ccucaguccuccaaaaaaauga

SEQ ID NO: 1142115 - RNA, 21 nt, Human
cucaaaaccaaccaaaccaac

SEQ ID NO: 1142116 - RNA, 22 nt, Human
cucaaaaccaaccaaaccaaca

SEQ ID NO: 1142117 - RNA, 22 nt, Human
cuuaaccaaaccucucucucca

SEQ ID NO: 1142118 - RNA, 20 nt, Human
cuuccaaguugaugcgaaca

SEQ ID NO: 1142119 - RNA, 20 nt, Human
gaacaaagccucaguccucc

SEQ ID NO: 1142120 - RNA, 19 nt, Human
gagccaugaucgcgccacc

SEQ ID NO: 1142121 - RNA, 18 nt, Human
gagcccaggaguuugagg

SEQ ID NO: 1142122 - RNA, 24 nt, Human
gaucgcuugagcccaggaguuuga

SEQ ID NO: 1142123 - RNA, 22 nt, Human
gauugcuugagcccaggaguuu

SEQ ID NO: 1142124 - RNA, 24 nt, Human
gauugcuugagcccaggaguuuga

SEQ ID NO: 1142125 - RNA, 18 nt, Human
gcacuuugggaggccgag

SEQ ID NO: 1142126 - RNA, 19 nt, Human
gccaugaucgcgccaccgc

SEQ ID NO: 1142127 - RNA, 22 nt, Human
gcccaggaguuugagaccagcc

SEQ ID NO: 1142128 - RNA, 22 nt, Human
ggaucgcuugagcccaggaguu

SEQ ID NO: 1142129 - RNA, 22 nt, Human
ggauugcuugagcccaggaguu

SEQ ID NO: 1142130 - RNA, 26 nt, Human
gguagaacaaagccucaguccuccaa

SEQ ID NO: 1142131 - RNA, 22 nt, Human
gguggcucaugcacuuugggag

SEQ ID NO: 1142132 - RNA, 22 nt, Human
gucucaaaaccaaccaaaccaa

SEQ ID NO: 1142133 - RNA, 24 nt, Human
gugaaaaauguuauuuaaaaauau

SEQ ID NO: 1142134 - RNA, 23 nt, Human
gugguugucucaggcagaaggga

SEQ ID NO: 1142135 - RNA, 22 nt, Human
uaaaaggaacaaguuaugaaug

SEQ ID NO: 1142136 - RNA, 19 nt, Human
uaagucacaauaauauccu

SEQ ID NO: 1142137 - RNA, 25 nt, Human
uacacacaucauuguuguacauaug

SEQ ID NO: 1142138 - RNA, 22 nt, Human
uagaacaaagccucaguccucc

SEQ ID NO: 1142139 - RNA, 22 nt, Human
uagccgggugugguggcacgug

SEQ ID NO: 1142140 - RNA, 20 nt, Human
uagugagacccccaucucua

SEQ ID NO: 1142141 - RNA, 26 nt, Human
uauaauacacacaucauuguuguaca

SEQ ID NO: 1142142 - RNA, 25 nt, Human
uauauaauacacacaucauuguugu

SEQ ID NO: 1142143 - RNA, 24 nt, Human
uccagcuugggcuacagagccaga

SEQ ID NO: 1142144 - RNA, 18 nt, Human
ucgcgccaccgcauucca

SEQ ID NO: 1142145 - RNA, 19 nt, Human
ucgcuugagcccaggaguu

SEQ ID NO: 1142146 - RNA, 19 nt, Human
ucucaaaaccaaccaaacc

SEQ ID NO: 1142147 - RNA, 23 nt, Human
ucucaaaaccaaccaaaccaaca

SEQ ID NO: 1142148 - RNA, 24 nt, Human
ucucuccaggcacgauucugcaca

SEQ ID NO: 1142149 - RNA, 25 nt, Human
ucugcacaugagucugaucugugua

SEQ ID NO: 1142150 - RNA, 24 nt, Human
ugagaccagccugggcaacauagu

SEQ ID NO: 1142151 - RNA, 23 nt, Human
ugagcccaggaguuugagaccag

SEQ ID NO: 1142152 - RNA, 22 nt, Human
ugagcccaggaguuugaggcug

SEQ ID NO: 1142153 - RNA, 24 nt, Human
ugaggcaggaggauugcuugagcc

SEQ ID NO: 1142154 - RNA, 25 nt, Human
ugaggcaggaggauugcuugagccc

SEQ ID NO: 1142155 - RNA, 23 nt, Human
ugcauugcauuccauguguucaa

SEQ ID NO: 1142156 - RNA, 24 nt, Human
ugccuaucuucccagcugcuuggg

SEQ ID NO: 1142157 - RNA, 18 nt, Human
ugcuugagcccaggaguu

SEQ ID NO: 1142158 - RNA, 21 nt, Human
ugggaggccgaggccaaagga

SEQ ID NO: 1142159 - RNA, 23 nt, Human
ugggaggccgaggccaaaggauc

SEQ ID NO: 1142160 - RNA, 20 nt, Human
ugggaggcugaggcaggagg

SEQ ID NO: 1142161 - RNA, 22 nt, Human
ugggaggcugaggcaggaggau

SEQ ID NO: 1142162 - RNA, 21 nt, Human
uguacacaucacuguuauaua

SEQ ID NO: 1142163 - RNA, 20 nt, Human
uguacauaugaggauaaguu

SEQ ID NO: 1142164 - RNA, 24 nt, Human
uguguugaacuuuggaggcaaaug

SEQ ID NO: 1142165 - RNA, 23 nt, Human
uuacugcacuuccaaguugaugc

SEQ ID NO: 1142166 - RNA, 18 nt, Human
uuagaaaggcagacaugu

SEQ ID NO: 1142167 - RNA, 20 nt, Human
uuagccgggugugguggcac

SEQ ID NO: 1142168 - RNA, 20 nt, Human
uuagccgggugugguggcac

SEQ ID NO: 1142169 - RNA, 24 nt, Human
uuagccgggugugguggcacgugc

SEQ ID NO: 1142170 - RNA, 20 nt, Human
uuaggcacuaguaauauccu

SEQ ID NO: 1142171 - RNA, 22 nt, Human
uugagcccaggaguuugagacc

SEQ ID NO: 1142172 - RNA, 24 nt, Human
uugcuuaaauuugagagucucugg

SEQ ID NO: 1142173 - RNA, 24 nt, Human
uugcuugagcccaggaguuugagg

SEQ ID NO: 1142174 - RNA, 24 nt, Human
uugggaggccgaggccaaaggauc

SEQ ID NO: 1142175 - RNA, 20 nt, Human
uugggaggcugaggcaggag

SEQ ID NO: 1142176 - RNA, 25 nt, Human
uuugaucaggaauauaccuggacua

SEQ ID NO: 1142177 - RNA, 27 nt, Human
uuugaucaggaauauaccuggacuacu

SEQ ID NO: 1142178 - RNA, 23 nt, Human
uuuuacaaugaguagauauuacu

SEQ ID NO: 1142179 - RNA, 23 nt, Human
aaccuaugcacuauacuucccuu

SEQ ID NO: 1142180 - RNA, 22 nt, Human
aacuuucucuccaccucucagc

SEQ ID NO: 1142181 - RNA, 22 nt, Human
aagaacagaggggcaaacuaac

SEQ ID NO: 1142182 - RNA, 25 nt, Human
acucccagggauguaguuugaagag

SEQ ID NO: 1142183 - RNA, 20 nt, Human
agaaaaguugguugaccuaa

SEQ ID NO: 1142184 - RNA, 18 nt, Human
agaacagaggggcaaacu

SEQ ID NO: 1142185 - RNA, 20 nt, Human
aggaacugugguuaucaaca

SEQ ID NO: 1142186 - RNA, 20 nt, Human
aggaauaaacucuuaagaac

SEQ ID NO: 1142187 - RNA, 20 nt, Human
auaaguauccauccuguagu

SEQ ID NO: 1142188 - RNA, 22 nt, Human
caacauuguuucuagaugaugg

SEQ ID NO: 1142189 - RNA, 19 nt, Human
caccucauaacucaucauc

SEQ ID NO: 1142190 - RNA, 19 nt, Human
cauugcugcugagucaucc

SEQ ID NO: 1142191 - RNA, 21 nt, Human
cccugccaaacuuccuucccu

SEQ ID NO: 1142192 - RNA, 25 nt, Human
ccuuaagagcaaugccaggaauaaa

SEQ ID NO: 1142193 - RNA, 20 nt, Human
gauccucaacagugaaguuu

SEQ ID NO: 1142194 - RNA, 19 nt, Human
uaacaagcccaaguucagg

SEQ ID NO: 1142195 - RNA, 23 nt, Human
uaagaacagaggggcaaacuaac

SEQ ID NO: 1142196 - RNA, 22 nt, Human
uaagagcaaugccaggaauaaa

SEQ ID NO: 1142197 - RNA, 19 nt, Human
uaagcaacuuucucuccac

SEQ ID NO: 1142198 - RNA, 23 nt, Human
uaagcugagucuuaagggacuaa

SEQ ID NO: 1142199 - RNA, 22 nt, Human
uaaguauccauccuguaguuuc

SEQ ID NO: 1142200 - RNA, 21 nt, Human
uauaaguauccauccuguagu

SEQ ID NO: 1142201 - RNA, 20 nt, Human
uaugacaucacuaacacucc

SEQ ID NO: 1142202 - RNA, 23 nt, Human
ucccuuaagagcaaugccaggaa

SEQ ID NO: 1142203 - RNA, 22 nt, Human
ucuuggcccugccaaacuuccu

SEQ ID NO: 1142204 - RNA, 27 nt, Human
ugauccucaacagugaaguuuuaauau

SEQ ID NO: 1142205 - RNA, 19 nt, Human
ugauggcuucuuuugcucc

SEQ ID NO: 1142206 - RNA, 21 nt, Human
ugcuuaagcugagucuuaagg

SEQ ID NO: 1142207 - RNA, 22 nt, Human
uggagcuggcacauugcugcug

SEQ ID NO: 1142208 - RNA, 19 nt, Human
uggcccugccaaacuuccu

SEQ ID NO: 1142209 - RNA, 19 nt, Human
uguuguuaguguuuagaga

SEQ ID NO: 1142210 - RNA, 22 nt, Human
uugcuauguaugcuagcugugu

SEQ ID NO: 1142211 - RNA, 23 nt, Human
uugcuauguaugcuagcuguguu

SEQ ID NO: 1142212 - RNA, 26 nt, Human
uuguuaguguuuagagagaaaggucu

SEQ ID NO: 1142213 - RNA, 24 nt, Human
uuucuagaucucgagaccugauug

SEQ ID NO: 1142214 - RNA, 20 nt, Human
aaaaaagagaagcagcuugc

SEQ ID NO: 1142215 - RNA, 21 nt, Human
aaacaggcccugggcccuuca

SEQ ID NO: 1142216 - RNA, 22 nt, Human
aaacagugccauggggagcuca

SEQ ID NO: 1142217 - RNA, 23 nt, Human
aaggggccaaaacagcugguggg

SEQ ID NO: 1142218 - RNA, 19 nt, Human
acaggcaugugacacuggu

SEQ ID NO: 1142219 - RNA, 19 nt, Human
acccagagcgcacccccuc

SEQ ID NO: 1142220 - RNA, 19 nt, Human
acccccuccccucgcccca

SEQ ID NO: 1142221 - RNA, 22 nt, Human
acuuccugcacugcccagaaac

SEQ ID NO: 1142222 - RNA, 19 nt, Human
aggcauggggcugggacuu

SEQ ID NO: 1142223 - RNA, 21 nt, Human
aggccucugguuuagauccag

SEQ ID NO: 1142224 - RNA, 22 nt, Human
aggggccaaaacagcuggcggg

SEQ ID NO: 1142225 - RNA, 26 nt, Human
aggggcugugaugcacccguuggugg

SEQ ID NO: 1142226 - RNA, 19 nt, Human
augaauuuuuaaaaaagag

SEQ ID NO: 1142227 - RNA, 20 nt, Human
caccggagagggaggccccc

SEQ ID NO: 1142228 - RNA, 19 nt, Human
cagagcgcacccccucccc

SEQ ID NO: 1142229 - RNA, 21 nt, Human
cagaguggggaaagggaaaga

SEQ ID NO: 1142230 - RNA, 19 nt, Human
cagauacauuaagcugucc

SEQ ID NO: 1142231 - RNA, 25 nt, Human
cagcuccaccucagugugcugaggg

SEQ ID NO: 1142232 - RNA, 20 nt, Human
caggaccacgaucucugcca

SEQ ID NO: 1142233 - RNA, 20 nt, Human
caggaccacgaucucugccg

SEQ ID NO: 1142234 - RNA, 19 nt, Human
caggccacagcagggugcu

SEQ ID NO: 1142235 - RNA, 23 nt, Human
caggcccugggcccuucacaccu

SEQ ID NO: 1142236 - RNA, 21 nt, Human
caguguccaggaggagaaagu

SEQ ID NO: 1142237 - RNA, 19 nt, Human
ccacaggccacagcagggu

SEQ ID NO: 1142238 - RNA, 20 nt, Human
ccacaggccacagcagggug

SEQ ID NO: 1142239 - RNA, 19 nt, Human
cccagagcgcacccccucc

SEQ ID NO: 1142240 - RNA, 23 nt, Human
ccccaaggggucugcuggccucu

SEQ ID NO: 1142241 - RNA, 22 nt, Human
cccccuccccucgccccagcuc

SEQ ID NO: 1142242 - RNA, 20 nt, Human
ccccgugccuuuugaggaug

SEQ ID NO: 1142243 - RNA, 19 nt, Human
ccugcacugcccagaaaca

SEQ ID NO: 1142244 - RNA, 22 nt, Human
ccugggcuccaguguccaggag

SEQ ID NO: 1142245 - RNA, 25 nt, Human
ccuucaguuacccagagcgcacccc

SEQ ID NO: 1142246 - RNA, 19 nt, Human
cuacaggggaucucaccac

SEQ ID NO: 1142247 - RNA, 24 nt, Human
cucgccagaacaggccucugguuu

SEQ ID NO: 1142248 - RNA, 22 nt, Human
cugcccagaaacaggcccuggg

SEQ ID NO: 1142249 - RNA, 19 nt, Human
cugggacuuccugcacugc

SEQ ID NO: 1142250 - RNA, 23 nt, Human
gaaucacagagaugcacaggcau

SEQ ID NO: 1142251 - RNA, 19 nt, Human
gaggaugggaaacagcaug

SEQ ID NO: 1142252 - RNA, 19 nt, Human
gcccugggcccuucacacc

SEQ ID NO: 1142253 - RNA, 21 nt, Human
gcuugcagaguggggaaaggg

SEQ ID NO: 1142254 - RNA, 25 nt, Human
gcuugcccuccagcaacauucccac

SEQ ID NO: 1142255 - RNA, 22 nt, Human
gggccaaaacagcugcuagaga

SEQ ID NO: 1142256 - RNA, 24 nt, Human
ggggaggguugggaaggaguuggg

SEQ ID NO: 1142257 - RNA, 20 nt, Human
ggguugggaaggaguugggu

SEQ ID NO: 1142258 - RNA, 21 nt, Human
guugggaaggaguuggguggc

SEQ ID NO: 1142259 - RNA, 21 nt, Human
uaaaaaagagaagcagcuugc

SEQ ID NO: 1142260 - RNA, 18 nt, Human
ucacagagaugcacaggc

SEQ ID NO: 1142261 - RNA, 19 nt, Human
ucagugugcugaggggucc

SEQ ID NO: 1142262 - RNA, 22 nt, Human
uccccaaggggucugcuggccu

SEQ ID NO: 1142263 - RNA, 22 nt, Human
ucccccagugugugagaggugc

SEQ ID NO: 1142264 - RNA, 18 nt, Human
uccccucgccccagcucc

SEQ ID NO: 1142265 - RNA, 25 nt, Human
uccuuuauaagcagaaucauugaac

SEQ ID NO: 1142266 - RNA, 21 nt, Human
ucucaccacaggcauggggcu

SEQ ID NO: 1142267 - RNA, 22 nt, Human
ucugaugaaggcuuugguuacu

SEQ ID NO: 1142268 - RNA, 20 nt, Human
ugagaugaagucaguuaacc

SEQ ID NO: 1142269 - RNA, 23 nt, Human
ugagggguccugugugcccagga

SEQ ID NO: 1142270 - RNA, 22 nt, Human
ugcccagaaacaggcccugggc

SEQ ID NO: 1142271 - RNA, 21 nt, Human
ugcugagggguccugugugcc

SEQ ID NO: 1142272 - RNA, 21 nt, Human
ugcuugcagaguggggaaagg

SEQ ID NO: 1142273 - RNA, 21 nt, Human
ugugagaggugcgcgggcacc

SEQ ID NO: 1142274 - RNA, 21 nt, Human
uucaguuacccagagcgcacc

SEQ ID NO: 1142275 - RNA, 18 nt, Human
uugaacucacaguguauu

SEQ ID NO: 1142276 - RNA, 18 nt, Human
uugggaaggaguugggug

SEQ ID NO: 1142277 - RNA, 18 nt, Human
aaaaagcagacacuggag

SEQ ID NO: 1142278 - RNA, 19 nt, Human
aaaacucugaacaacaaca

SEQ ID NO: 1142279 - RNA, 24 nt, Human
aaaacucugaacaacaacaacaac

SEQ ID NO: 1142280 - RNA, 20 nt, Human
aaaagacaacugucaaauac

SEQ ID NO: 1142281 - RNA, 23 nt, Human
aaaagacaacugucaaauacuac

SEQ ID NO: 1142282 - RNA, 19 nt, Human
aaagggcuggagaggagua

SEQ ID NO: 1142283 - RNA, 19 nt, Human
aagaaggagagagucccac

SEQ ID NO: 1142284 - RNA, 18 nt, Human
aagcacacucuacacaua

SEQ ID NO: 1142285 - RNA, 23 nt, Human
aagcauccccaaaacagugguaa

SEQ ID NO: 1142286 - RNA, 22 nt, Human
aauacuacaacgacaaaaagga

SEQ ID NO: 1142287 - RNA, 22 nt, Human
aaucuagcuccuaaucaaacua

SEQ ID NO: 1142288 - RNA, 22 nt, Human
acaaaacuauggacaacacacc

SEQ ID NO: 1142289 - RNA, 21 nt, Human
acaacaacaacaaaacuaugg

SEQ ID NO: 1142290 - RNA, 25 nt, Human
acaacaacaacaacaaaacuaugga

SEQ ID NO: 1142291 - RNA, 19 nt, Human
acaacaacaacaacaacaa

SEQ ID NO: 1142292 - RNA, 19 nt, Human
acaacaacaacaacaacaa

SEQ ID NO: 1142293 - RNA, 19 nt, Human
acaacaacaacaacaacaa

SEQ ID NO: 1142294 - RNA, 21 nt, Human
acaacaacaacaacaacaaaa

SEQ ID NO: 1142295 - RNA, 24 nt, Human
acaacaacaacaacaacaacaaaa

SEQ ID NO: 1142296 - RNA, 23 nt, Human
acacacacacacacacacacaca

SEQ ID NO: 1142297 - RNA, 24 nt, Human
acacacacacgaacagaaggauuc

SEQ ID NO: 1142298 - RNA, 22 nt, Human
acacacacgaacagaaggauuc

SEQ ID NO: 1142299 - RNA, 19 nt, Human
acacacugacuuucccaca

SEQ ID NO: 1142300 - RNA, 20 nt, Human
acacagggucugcucauaug

SEQ ID NO: 1142301 - RNA, 26 nt, Human
acacugggcguaagaugcugccuaac

SEQ ID NO: 1142302 - RNA, 25 nt, Human
acaggcagagccaugcaaauaaagc

SEQ ID NO: 1142303 - RNA, 18 nt, Human
accagcuuuugcuucccu

SEQ ID NO: 1142304 - RNA, 21 nt, Human
agaaaaaaagcauccccaaaa

SEQ ID NO: 1142305 - RNA, 21 nt, Human
agaaggagagagucccacagg

SEQ ID NO: 1142306 - RNA, 19 nt, Human
agaauaucugggagaacac

SEQ ID NO: 1142307 - RNA, 23 nt, Human
agagagucccacaggagaggaga

SEQ ID NO: 1142308 - RNA, 19 nt, Human
aggagaggagaccggaggg

SEQ ID NO: 1142309 - RNA, 18 nt, Human
aggcaaaagugaagaccu

SEQ ID NO: 1142310 - RNA, 18 nt, Human
aggcaaaagugaagaccu

SEQ ID NO: 1142311 - RNA, 31 nt, Human
agggaacacacacacacacacacacacacag

SEQ ID NO: 1142312 - RNA, 19 nt, Human
aguacaaauacaauaagga

SEQ ID NO: 1142313 - RNA, 19 nt, Human
agugaagaccucccugggg

SEQ ID NO: 1142314 - RNA, 18 nt, Human
agugcagcugugccuaag

SEQ ID NO: 1142315 - RNA, 21 nt, Human
aguuagaggagaacagcucca

SEQ ID NO: 1142316 - RNA, 31 nt, Human
auagggaacacacacacacacacacacacag

SEQ ID NO: 1142317 - RNA, 23 nt, Human
augccagaaacagacuugcacac

SEQ ID NO: 1142318 - RNA, 19 nt, Human
caaaaagcagacacuggag

SEQ ID NO: 1142319 - RNA, 24 nt, Human
caaacacacacauacagaaaagga

SEQ ID NO: 1142320 - RNA, 24 nt, Human
caaaguggagaccgacucuccacu

SEQ ID NO: 1142321 - RNA, 25 nt, Human
caacaacaaaacuauggacaacaca

SEQ ID NO: 1142322 - RNA, 22 nt, Human
cacaacagucagguagaugccc

SEQ ID NO: 1142323 - RNA, 20 nt, Human
cacacacacacacacacaca

SEQ ID NO: 1142324 - RNA, 20 nt, Human
cacacacacacacacacaca

SEQ ID NO: 1142325 - RNA, 20 nt, Human
cacacacacacacacacaca

SEQ ID NO: 1142326 - RNA, 22 nt, Human
cacacacacacacacacacaca

SEQ ID NO: 1142327 - RNA, 26 nt, Human
cacacacacacacacacacacacacg

SEQ ID NO: 1142328 - RNA, 26 nt, Human
cacacacacacacacacacacacgaa

SEQ ID NO: 1142329 - RNA, 19 nt, Human
cacacacgaacagaaggau

SEQ ID NO: 1142330 - RNA, 19 nt, Human
cacacauacagaaaaggau

SEQ ID NO: 1142331 - RNA, 20 nt, Human
cacagggucugcucauaugg

SEQ ID NO: 1142332 - RNA, 21 nt, Human
cacauacacacugacuuuccc

SEQ ID NO: 1142333 - RNA, 19 nt, Human
caccagaaugcacucuuca

SEQ ID NO: 1142334 - RNA, 18 nt, Human
caccuagccaggaggccu

SEQ ID NO: 1142335 - RNA, 21 nt, Human
cacggcucagggacgucccuu

SEQ ID NO: 1142336 - RNA, 24 nt, Human
cacuaaaucacucuugucauagcc

SEQ ID NO: 1142337 - RNA, 21 nt, Human
cacuggauuacaauucuaagu

SEQ ID NO: 1142338 - RNA, 20 nt, Human
cagaggcccauggaguaaaa

SEQ ID NO: 1142339 - RNA, 25 nt, Human
cagcacacauuugcucauacacaua

SEQ ID NO: 1142340 - RNA, 24 nt, Human
caugcaaauaaagccauccagcaa

SEQ ID NO: 1142341 - RNA, 22 nt, Human
cauucugguuacguuggcccug

SEQ ID NO: 1142342 - RNA, 20 nt, Human
ccaaauaucugcucucuuug

SEQ ID NO: 1142343 - RNA, 21 nt, Human
ccacacacacaacagucaggu

SEQ ID NO: 1142344 - RNA, 20 nt, Human
ccacugcagacaggcagagc

SEQ ID NO: 1142345 - RNA, 24 nt, Human
ccagaaacagacuugcacacaggc

SEQ ID NO: 1142346 - RNA, 18 nt, Human
ccagaaugcacucuucau

SEQ ID NO: 1142347 - RNA, 21 nt, Human
ccagcuuuugcuucccuuccu

SEQ ID NO: 1142348 - RNA, 21 nt, Human
ccccugagugugagagacaga

SEQ ID NO: 1142349 - RNA, 22 nt, Human
cccugagugugagagacagagg

SEQ ID NO: 1142350 - RNA, 23 nt, Human
ccuagccaggaggccugaccacu

SEQ ID NO: 1142351 - RNA, 22 nt, Human
ccucccauccauuucggacaaa

SEQ ID NO: 1142352 - RNA, 18 nt, Human
cgacucuucacucuccuc

SEQ ID NO: 1142353 - RNA, 23 nt, Human
cuaaaucacucuugucauagccu

SEQ ID NO: 1142354 - RNA, 19 nt, Human
cucacauucugguacugug

SEQ ID NO: 1142355 - RNA, 21 nt, Human
cucauaugauuucucugagac

SEQ ID NO: 1142356 - RNA, 18 nt, Human
cucugaugagugacuggu

SEQ ID NO: 1142357 - RNA, 24 nt, Human
cuggaggccucccauccauuucgg

SEQ ID NO: 1142358 - RNA, 24 nt, Human
cuucaaagacagccuuugcucucc

SEQ ID NO: 1142359 - RNA, 25 nt, Human
cuugcacacaggcucugcucauaug

SEQ ID NO: 1142360 - RNA, 18 nt, Human
gaaaaaaagcauccccaa

SEQ ID NO: 1142361 - RNA, 20 nt, Human
gaaaacaugagcagcucuag

SEQ ID NO: 1142362 - RNA, 20 nt, Human
gauacaaaauccuggacagu

SEQ ID NO: 1142363 - RNA, 19 nt, Human
gaucuucuuaucugaucua

SEQ ID NO: 1142364 - RNA, 21 nt, Human
gcaauggaaggacuggcugga

SEQ ID NO: 1142365 - RNA, 21 nt, Human
gcaguagauaauugcucugaa

SEQ ID NO: 1142366 - RNA, 22 nt, Human
gcuagaucuucuuaucugaucu

SEQ ID NO: 1142367 - RNA, 23 nt, Human
ggaaaaugauuucagucacaguc

SEQ ID NO: 1142368 - RNA, 18 nt, Human
ggacaaacacacacauac

SEQ ID NO: 1142369 - RNA, 21 nt, Human
ggacaacacaccuagccagga

SEQ ID NO: 1142370 - RNA, 26 nt, Human
ggagaacacugggcguaagaugcugc

SEQ ID NO: 1142371 - RNA, 20 nt, Human
ggcuggagaggaguaggggc

SEQ ID NO: 1142372 - RNA, 22 nt, Human
ggcuggagaggaguaggggccc

SEQ ID NO: 1142373 - RNA, 21 nt, Human
ggggccaauuucaaacagaaa

SEQ ID NO: 1142374 - RNA, 21 nt, Human
ggggccaauuucaaacagaaa

SEQ ID NO: 1142375 - RNA, 23 nt, Human
guacugcagucuuugcucacaag

SEQ ID NO: 1142376 - RNA, 19 nt, Human
gucaccuuuuccucagaug

SEQ ID NO: 1142377 - RNA, 18 nt, Human
uaaaaauagaugaaaaga

SEQ ID NO: 1142378 - RNA, 19 nt, Human
uaaagcaugccugcagcag

SEQ ID NO: 1142379 - RNA, 20 nt, Human
uaaagucagcgaugcuggag

SEQ ID NO: 1142380 - RNA, 23 nt, Human
uaacaggcauaaccccuugcucu

SEQ ID NO: 1142381 - RNA, 21 nt, Human
uaaccagcuuuugcuucccuu

SEQ ID NO: 1142382 - RNA, 21 nt, Human
uaaccgugccacaucucagca

SEQ ID NO: 1142383 - RNA, 22 nt, Human
uaaccgugccacaucucagcau

SEQ ID NO: 1142384 - RNA, 20 nt, Human
uaauaggccuggcaauaacc

SEQ ID NO: 1142385 - RNA, 26 nt, Human
uacacauacacacugacuuucccaca

SEQ ID NO: 1142386 - RNA, 21 nt, Human
uagaagcaccucccuuuuggc

SEQ ID NO: 1142387 - RNA, 18 nt, Human
uagaugcccaaaggaggg

SEQ ID NO: 1142388 - RNA, 26 nt, Human
uauugccacugccaguaucauaggga

SEQ ID NO: 1142389 - RNA, 18 nt, Human
ucaaacagaaaacccagc

SEQ ID NO: 1142390 - RNA, 21 nt, Human
ucaaacagaaaacccagcaaa

SEQ ID NO: 1142391 - RNA, 21 nt, Human
ucaaacagaaaacccaguaaa

SEQ ID NO: 1142392 - RNA, 20 nt, Human
ucacuccuaagcacacucuu

SEQ ID NO: 1142393 - RNA, 31 nt, Human
ucauagggaacacacacacacacacacacag

SEQ ID NO: 1142394 - RNA, 20 nt, Human
uccacuggcaaauacuugga

SEQ ID NO: 1142395 - RNA, 25 nt, Human
uccauuucggacaaacacacacaua

SEQ ID NO: 1142396 - RNA, 21 nt, Human
ucccacacacacaacagucag

SEQ ID NO: 1142397 - RNA, 19 nt, Human
ucccacaggagaggagacc

SEQ ID NO: 1142398 - RNA, 19 nt, Human
uccccugagugugagagac

SEQ ID NO: 1142399 - RNA, 18 nt, Human
ucccucuaagcugccuca

SEQ ID NO: 1142400 - RNA, 26 nt, Human
ucccuggggucuucaaagacagccuu

SEQ ID NO: 1142401 - RNA, 27 nt, Human
uccgcuuuauaaagucagcgaugcugg

SEQ ID NO: 1142402 - RNA, 19 nt, Human
uccguccuccaggaaugag

SEQ ID NO: 1142403 - RNA, 21 nt, Human
uccuggaguuuaaaucacugc

SEQ ID NO: 1142404 - RNA, 27 nt, Human
ucuacacauacacacugacuuucccaa

SEQ ID NO: 1142405 - RNA, 21 nt, Human
ucuagcggaauccguccucca

SEQ ID NO: 1142406 - RNA, 22 nt, Human
ucuagcuccuaaucaaacuaga

SEQ ID NO: 1142407 - RNA, 23 nt, Human
ucucugaugagugacuggucauu

SEQ ID NO: 1142408 - RNA, 18 nt, Human
ucuggagucagaucaccc

SEQ ID NO: 1142409 - RNA, 21 nt, Human
ugaaaagaccucucaagcuag

SEQ ID NO: 1142410 - RNA, 20 nt, Human
ugaacaacaacaacaacaac

SEQ ID NO: 1142411 - RNA, 27 nt, Human
ugaacaacaacaacaacaacaacaaaa

SEQ ID NO: 1142412 - RNA, 20 nt, Human
ugacacacagggucugcuca

SEQ ID NO: 1142413 - RNA, 19 nt, Human
ugacuggucauuuuuaaag

SEQ ID NO: 1142414 - RNA, 18 nt, Human
ugaugaggacucaaccac

SEQ ID NO: 1142415 - RNA, 21 nt, Human
ugcaaaaggagagcgcacggc

SEQ ID NO: 1142416 - RNA, 24 nt, Human
ugccagaaacagacuugguccagg

SEQ ID NO: 1142417 - RNA, 22 nt, Human
ugccucagugaaaccagugaga

SEQ ID NO: 1142418 - RNA, 20 nt, Human
ugccugggcaucacaaucag

SEQ ID NO: 1142419 - RNA, 18 nt, Human
uggcuggaggccucccau

SEQ ID NO: 1142420 - RNA, 19 nt, Human
uguaauagaagcaccuccc

SEQ ID NO: 1142421 - RNA, 21 nt, Human
uguaguacaaauacaauaagg

SEQ ID NO: 1142422 - RNA, 18 nt, Human
uguccccugagugugaga

SEQ ID NO: 1142423 - RNA, 23 nt, Human
uuauauuugccgagcccuucaca

SEQ ID NO: 1142424 - RNA, 19 nt, Human
uucaaaaagcagacacugg

SEQ ID NO: 1142425 - RNA, 21 nt, Human
uucugguuacguuggcccugg

SEQ ID NO: 1142426 - RNA, 27 nt, Human
uucuuucagaaaaaaagcauccccaaa

SEQ ID NO: 1142427 - RNA, 20 nt, Human
uugauggaaaagacaacugu

SEQ ID NO: 1142428 - RNA, 18 nt, Human
uuucccacacacacaaca

SEQ ID NO: 1142429 - RNA, 23 nt, Human
uuuggaaaaauagaggguuuaga

SEQ ID NO: 1142430 - RNA, 23 nt, Human
uuuuaaagcaugccugcagcagu

SEQ ID NO: 1142431 - RNA, 18 nt, Human
aaaaagaauaagaccugg

SEQ ID NO: 1142432 - RNA, 20 nt, Human
aaaacacaguccagaauacc

SEQ ID NO: 1142433 - RNA, 24 nt, Human
aaaguguugggauuacaggcguga

SEQ ID NO: 1142434 - RNA, 26 nt, Human
aacacauucauauaaucaaaucagca

SEQ ID NO: 1142435 - RNA, 25 nt, Human
aagcaaauacuaguguucaagaaau

SEQ ID NO: 1142436 - RNA, 21 nt, Human
aaguguugggauuacaggcgu

SEQ ID NO: 1142437 - RNA, 26 nt, Human
aaguguugggauuacaggcgugagcc

SEQ ID NO: 1142438 - RNA, 19 nt, Human
acaaacagugucugguuac

SEQ ID NO: 1142439 - RNA, 20 nt, Human
acaagaaagacugaccuaaa

SEQ ID NO: 1142440 - RNA, 18 nt, Human
acggggucucaccauggu

SEQ ID NO: 1142441 - RNA, 20 nt, Human
acggggucucaccauggugg

SEQ ID NO: 1142442 - RNA, 24 nt, Human
acggggucucaccaugguggccag

SEQ ID NO: 1142443 - RNA, 23 nt, Human
agaaagccagacacaacuccuga

SEQ ID NO: 1142444 - RNA, 23 nt, Human
agaacaacucuugacagugccca

SEQ ID NO: 1142445 - RNA, 21 nt, Human
agaagguguaacguacaagaa

SEQ ID NO: 1142446 - RNA, 20 nt, Human
agaggauggauuaguuaggg

SEQ ID NO: 1142447 - RNA, 20 nt, Human
agauuccagcucauauagcc

SEQ ID NO: 1142448 - RNA, 19 nt, Human
agcaacuggcagagcugaa

SEQ ID NO: 1142449 - RNA, 21 nt, Human
agcaggugauaccuggguacu

SEQ ID NO: 1142450 - RNA, 19 nt, Human
agccagcaacuggcagagc

SEQ ID NO: 1142451 - RNA, 24 nt, Human
agcuccacugcccaggccaaaccc

SEQ ID NO: 1142452 - RNA, 21 nt, Human
agcugagauuacaaguaccca

SEQ ID NO: 1142453 - RNA, 20 nt, Human
aggugaggccagggaaacug

SEQ ID NO: 1142454 - RNA, 24 nt, Human
aggugauccgccugccucggccuc

SEQ ID NO: 1142455 - RNA, 23 nt, Human
agugcaauggcgcaaucuuggcu

SEQ ID NO: 1142456 - RNA, 24 nt, Human
agugcaauggcgcaaucuuggcuc

SEQ ID NO: 1142457 - RNA, 18 nt, Human
aguuguuuucuccccaag

SEQ ID NO: 1142458 - RNA, 20 nt, Human
auacaaggccugccucugug

SEQ ID NO: 1142459 - RNA, 26 nt, Human
auauaaucaaaucagcauaauuggga

SEQ ID NO: 1142460 - RNA, 18 nt, Human
auccggacagccauagaa

SEQ ID NO: 1142461 - RNA, 22 nt, Human
augcacuucaagaaugugaccc

SEQ ID NO: 1142462 - RNA, 18 nt, Human
augccuggugccugggcu

SEQ ID NO: 1142463 - RNA, 26 nt, Human
auggaacauacacauuugaaaccccc

SEQ ID NO: 1142464 - RNA, 21 nt, Human
caaaguacugggccugcccca

SEQ ID NO: 1142465 - RNA, 24 nt, Human
caaaguguugggauuacaggcgug

SEQ ID NO: 1142466 - RNA, 19 nt, Human
caacuccugacuuccuccu

SEQ ID NO: 1142467 - RNA, 27 nt, Human
caagaaagacugaccuaaaaguggcag

SEQ ID NO: 1142468 - RNA, 21 nt, Human
caaguacccaccaccacgccc

SEQ ID NO: 1142469 - RNA, 21 nt, Human
caccaugguggccaggcuggu

SEQ ID NO: 1142470 - RNA, 22 nt, Human
caccaugguggccaggcugguc

SEQ ID NO: 1142471 - RNA, 24 nt, Human
caccaugguggccaggcuggucuc

SEQ ID NO: 1142472 - RNA, 21 nt, Human
cacugcaaccuccgccuccug

SEQ ID NO: 1142473 - RNA, 23 nt, Human
cacugcaaccuccgccuccuggg

SEQ ID NO: 1142474 - RNA, 21 nt, Human
cagacgacauugcuuggaugc

SEQ ID NO: 1142475 - RNA, 20 nt, Human
cagccagcaacuggcagagc

SEQ ID NO: 1142476 - RNA, 20 nt, Human
cagguaaagaagggugugga

SEQ ID NO: 1142477 - RNA, 19 nt, Human
caggugacaucagaggaug

SEQ ID NO: 1142478 - RNA, 22 nt, Human
caggugauccgccugccucggc

SEQ ID NO: 1142479 - RNA, 20 nt, Human
cauguggccuggacauggcc

SEQ ID NO: 1142480 - RNA, 22 nt, Human
ccaaaguguugggauuacaggc

SEQ ID NO: 1142481 - RNA, 22 nt, Human
ccaaaguguugggauuacaggc

SEQ ID NO: 1142482 - RNA, 24 nt, Human
ccaaaguguugggauuacaggcgu

SEQ ID NO: 1142483 - RNA, 21 nt, Human
ccagcagaugcucagaaacuu

SEQ ID NO: 1142484 - RNA, 26 nt, Human
ccagggaaacuggcucagcaggugau

SEQ ID NO: 1142485 - RNA, 24 nt, Human
cccagccuugacucagauuccagc

SEQ ID NO: 1142486 - RNA, 18 nt, Human
cccauguggccuggacau

SEQ ID NO: 1142487 - RNA, 21 nt, Human
ccccaagaucugcgccuuucc

SEQ ID NO: 1142488 - RNA, 22 nt, Human
ccccugcaggugaggccaggga

SEQ ID NO: 1142489 - RNA, 23 nt, Human
cccggguagcugagauuacaagu

SEQ ID NO: 1142490 - RNA, 24 nt, Human
ccgccuccuggguucaagcgauuc

SEQ ID NO: 1142491 - RNA, 25 nt, Human
ccuccaaguucugggauauuguggg

SEQ ID NO: 1142492 - RNA, 19 nt, Human
ccuccgccuccuggguuca

SEQ ID NO: 1142493 - RNA, 24 nt, Human
ccuccuggguucaagcgauucucc

SEQ ID NO: 1142494 - RNA, 18 nt, Human
ccugaccucaggugaucc

SEQ ID NO: 1142495 - RNA, 21 nt, Human
ccugaccucaggugauccgcc

SEQ ID NO: 1142496 - RNA, 23 nt, Human
ccugaccucaggugauccgccug

SEQ ID NO: 1142497 - RNA, 24 nt, Human
ccugcauuagccucccggguagcu

SEQ ID NO: 1142498 - RNA, 24 nt, Human
ccuggguacuccaacaucugagaa

SEQ ID NO: 1142499 - RNA, 23 nt, Human
ccuggguucaagcgauucuccug

SEQ ID NO: 1142500 - RNA, 19 nt, Human
ccuggugccugggcugggg

SEQ ID NO: 1142501 - RNA, 20 nt, Human
cuagaacucaggucuuaggg

SEQ ID NO: 1142502 - RNA, 24 nt, Human
cucacugcaaccuccgccuccugg

SEQ ID NO: 1142503 - RNA, 26 nt, Human
cuccugaccucaggugauccgccugc

SEQ ID NO: 1142504 - RNA, 21 nt, Human
cuccuggguucaagcgauucu

SEQ ID NO: 1142505 - RNA, 23 nt, Human
cugcaaccuccgccuccuggguu

SEQ ID NO: 1142506 - RNA, 24 nt, Human
cugcaaccuccgccuccuggguuc

SEQ ID NO: 1142507 - RNA, 18 nt, Human
cugccucggccucccaaa

SEQ ID NO: 1142508 - RNA, 22 nt, Human
cuuguucaguuucaaucagcca

SEQ ID NO: 1142509 - RNA, 24 nt, Human
cuuguugcccaggcuggagugcaa

SEQ ID NO: 1142510 - RNA, 23 nt, Human
gaaaugcuuuuguccugaaggug

SEQ ID NO: 1142511 - RNA, 18 nt, Human
gaacauacacauuugaac

SEQ ID NO: 1142512 - RNA, 21 nt, Human
gaccaccagguucagaaacac

SEQ ID NO: 1142513 - RNA, 24 nt, Human
gaccucaggugauccgccugccuc

SEQ ID NO: 1142514 - RNA, 26 nt, Human
gagaaaccccgagauaagaccuccaa

SEQ ID NO: 1142515 - RNA, 19 nt, Human
gagaagagacagucucagg

SEQ ID NO: 1142516 - RNA, 20 nt, Human
gauaagaccuccaaguucug

SEQ ID NO: 1142517 - RNA, 18 nt, Human
gauuacaggcgugagcca

SEQ ID NO: 1142518 - RNA, 21 nt, Human
gauuacaggcgugagccacca

SEQ ID NO: 1142519 - RNA, 22 nt, Human
gauuacaggcgugagccaccac

SEQ ID NO: 1142520 - RNA, 21 nt, Human
gcaaaguacugggccugcccc

SEQ ID NO: 1142521 - RNA, 19 nt, Human
gcccaggcuggagugcaau

SEQ ID NO: 1142522 - RNA, 21 nt, Human
gccucuaaggcaugcaguccu

SEQ ID NO: 1142523 - RNA, 20 nt, Human
gcuccacugcccaggccaaa

SEQ ID NO: 1142524 - RNA, 26 nt, Human
gcuccacugcccaggccaaaccccuc

SEQ ID NO: 1142525 - RNA, 25 nt, Human
gcuccaguucuguaacucauccauc

SEQ ID NO: 1142526 - RNA, 21 nt, Human
gcucuuguugcccaggcugga

SEQ ID NO: 1142527 - RNA, 24 nt, Human
gcucuuguugcccaggcuggagug

SEQ ID NO: 1142528 - RNA, 20 nt, Human
gcugcaaaugggcuacuggu

SEQ ID NO: 1142529 - RNA, 19 nt, Human
gcuggagugcaauggcgca

SEQ ID NO: 1142530 - RNA, 23 nt, Human
gcuggucucaaacuccugaccuc

SEQ ID NO: 1142531 - RNA, 22 nt, Human
gcugugaaggaaugcauccgga

SEQ ID NO: 1142532 - RNA, 19 nt, Human
ggagaacucaccagaccaa

SEQ ID NO: 1142533 - RNA, 19 nt, Human
ggauuacaggcgugagcca

SEQ ID NO: 1142534 - RNA, 21 nt, Human
ggcuccuuccugcagcagucc

SEQ ID NO: 1142535 - RNA, 24 nt, Human
ggcuggucucaaacuccugaccuc

SEQ ID NO: 1142536 - RNA, 19 nt, Human
gggauauuguggggcucug

SEQ ID NO: 1142537 - RNA, 20 nt, Human
gggcagcugcuccucggaag

SEQ ID NO: 1142538 - RNA, 22 nt, Human
gggucucaccaugguggccagg

SEQ ID NO: 1142539 - RNA, 20 nt, Human
guccugaagguggagaacuc

SEQ ID NO: 1142540 - RNA, 22 nt, Human
gugaacuccuuucaccagccca

SEQ ID NO: 1142541 - RNA, 23 nt, Human
guguggaugucagagaagaacaa

SEQ ID NO: 1142542 - RNA, 23 nt, Human
guguguuuuuaguagagacgggg

SEQ ID NO: 1142543 - RNA, 24 nt, Human
uaaaaaccaacaacauuacuaccg

SEQ ID NO: 1142544 - RNA, 23 nt, Human
uaaaacacaguccagaauaccug

SEQ ID NO: 1142545 - RNA, 25 nt, Human
uaaaacacaguccagaauaccugcu

SEQ ID NO: 1142546 - RNA, 18 nt, Human
uaaacaaaacuuaaaugu

SEQ ID NO: 1142547 - RNA, 26 nt, Human
uaauuuuuuguguguuuuuaguagag

SEQ ID NO: 1142548 - RNA, 27 nt, Human
uaauuuuuuguguguuuuuaguagaga

SEQ ID NO: 1142549 - RNA, 23 nt, Human
uacaaguacccaccaccacgccc

SEQ ID NO: 1142550 - RNA, 19 nt, Human
uacaggcgugagccaccac

SEQ ID NO: 1142551 - RNA, 22 nt, Human
uacaggcgugagccaccacgcu

SEQ ID NO: 1142552 - RNA, 20 nt, Human
uagagacggggucucaccau

SEQ ID NO: 1142553 - RNA, 22 nt, Human
uagcaggugacaucagaggaug

SEQ ID NO: 1142554 - RNA, 19 nt, Human
uagcaugugcccauguggc

SEQ ID NO: 1142555 - RNA, 22 nt, Human
uagcucacaagcuccacugccc

SEQ ID NO: 1142556 - RNA, 21 nt, Human
uagggcuccaguucuguaacu

SEQ ID NO: 1142557 - RNA, 22 nt, Human
uagggcuccaguucuguaacuc

SEQ ID NO: 1142558 - RNA, 24 nt, Human
uaguagagacggggucucaccaug

SEQ ID NO: 1142559 - RNA, 26 nt, Human
uaguagagacggggucucaccauggu

SEQ ID NO: 1142560 - RNA, 19 nt, Human
uauuguggggcucuguuga

SEQ ID NO: 1142561 - RNA, 23 nt, Human
ucacugcaaccuccgccuccugg

SEQ ID NO: 1142562 - RNA, 24 nt, Human
ucacugcaaccuccgccuccuggg

SEQ ID NO: 1142563 - RNA, 25 nt, Human
ucacugcaaccuccgccuccugggu

SEQ ID NO: 1142564 - RNA, 27 nt, Human
ucacugcaaccuccgccuccuggguuc

SEQ ID NO: 1142565 - RNA, 21 nt, Human
ucaggugauccgccugccucg

SEQ ID NO: 1142566 - RNA, 20 nt, Human
uccacugcccaggccaaacc

SEQ ID NO: 1142567 - RNA, 20 nt, Human
uccagcucauauagcucaca

SEQ ID NO: 1142568 - RNA, 19 nt, Human
uccagcugugaaggaaugc

SEQ ID NO: 1142569 - RNA, 24 nt, Human
ucccaaaguguugggauuacaggc

SEQ ID NO: 1142570 - RNA, 25 nt, Human
uccccagacugagucaggaucuccg

SEQ ID NO: 1142571 - RNA, 22 nt, Human
uccggacagccauagaaggccc

SEQ ID NO: 1142572 - RNA, 19 nt, Human
uccugcauuagccucccgg

SEQ ID NO: 1142573 - RNA, 21 nt, Human
uccuggguucaagcgauucuc

SEQ ID NO: 1142574 - RNA, 24 nt, Human
uccuggguucaagcgauucuccug

SEQ ID NO: 1142575 - RNA, 25 nt, Human
ucuaagcaaauacuaguguucaaga

SEQ ID NO: 1142576 - RNA, 21 nt, Human
ucugugcucagcucccagaga

SEQ ID NO: 1142577 - RNA, 20 nt, Human
ucuuagggcuccaguucugu

SEQ ID NO: 1142578 - RNA, 22 nt, Human
ucuuguugcccaggcuggagug

SEQ ID NO: 1142579 - RNA, 23 nt, Human
ugaaacccagcuggcagccucua

SEQ ID NO: 1142580 - RNA, 18 nt, Human
ugaaccgagagacaggag

SEQ ID NO: 1142581 - RNA, 26 nt, Human
ugaacuccuuucaccagcccagccuu

SEQ ID NO: 1142582 - RNA, 18 nt, Human
ugaagaaucaucaauuga

SEQ ID NO: 1142583 - RNA, 19 nt, Human
ugaccuaaaaguggcauca

SEQ ID NO: 1142584 - RNA, 24 nt, Human
ugaccucaauggauguaacagaaa

SEQ ID NO: 1142585 - RNA, 18 nt, Human
ugaccucaggugauccgc

SEQ ID NO: 1142586 - RNA, 24 nt, Human
ugaccucaggugauccgccugccu

SEQ ID NO: 1142587 - RNA, 19 nt, Human
ugacucagagccccugcag

SEQ ID NO: 1142588 - RNA, 19 nt, Human
ugacuuccucaaaaugcac

SEQ ID NO: 1142589 - RNA, 23 nt, Human
ugagacccacugccucuaaggca

SEQ ID NO: 1142590 - RNA, 24 nt, Human
ugagauuacaaguacccaccacca

SEQ ID NO: 1142591 - RNA, 23 nt, Human
ugcaauggcgcaaucuuggcuca

SEQ ID NO: 1142592 - RNA, 22 nt, Human
ugcauacagacccaauuuugua

SEQ ID NO: 1142593 - RNA, 24 nt, Human
ugccacaggggaaguuguuagcag

SEQ ID NO: 1142594 - RNA, 18 nt, Human
ugcccaggcuggagugca

SEQ ID NO: 1142595 - RNA, 21 nt, Human
ugcccaggcuggagugcaaug

SEQ ID NO: 1142596 - RNA, 21 nt, Human
ugcccaggcuggagugcaaug

SEQ ID NO: 1142597 - RNA, 24 nt, Human
ugcccaggcuggagugcaauggcg

SEQ ID NO: 1142598 - RNA, 24 nt, Human
ugccucggccucccaaaguguugg

SEQ ID NO: 1142599 - RNA, 19 nt, Human
ugccucugugcucagcucc

SEQ ID NO: 1142600 - RNA, 19 nt, Human
ugccugggcugggguaugu

SEQ ID NO: 1142601 - RNA, 24 nt, Human
ugcucuuguugcccaggcuggagu

SEQ ID NO: 1142602 - RNA, 23 nt, Human
uggagugcaauggcgcaaucuug

SEQ ID NO: 1142603 - RNA, 24 nt, Human
uggagugcaauggcgcaaucuugg

SEQ ID NO: 1142604 - RNA, 20 nt, Human
uggauguaacagaaagaacc

SEQ ID NO: 1142605 - RNA, 24 nt, Human
uggauguaacagaaagaaccugcu

SEQ ID NO: 1142606 - RNA, 24 nt, Human
uggccaggcuggucucaaacuccu

SEQ ID NO: 1142607 - RNA, 19 nt, Human
uggccuggacauggccugu

SEQ ID NO: 1142608 - RNA, 25 nt, Human
ugggaacagaagucaacaagccaac

SEQ ID NO: 1142609 - RNA, 20 nt, Human
ugggauauuguggggcucug

SEQ ID NO: 1142610 - RNA, 18 nt, Human
ugggauuacaggcgugag

SEQ ID NO: 1142611 - RNA, 19 nt, Human
ugggauuacaggcgugagc

SEQ ID NO: 1142612 - RNA, 22 nt, Human
ugggauuacaggcgugagccac

SEQ ID NO: 1142613 - RNA, 23 nt, Human
ugggauuacaggcgugagccacc

SEQ ID NO: 1142614 - RNA, 24 nt, Human
ugggauuacaggcgugagccacca

SEQ ID NO: 1142615 - RNA, 20 nt, Human
uguaaaagcuuuaauuuuug

SEQ ID NO: 1142616 - RNA, 20 nt, Human
uguugcccaggcuggagugc

SEQ ID NO: 1142617 - RNA, 18 nt, Human
uuacucuuggcuaaggug

SEQ ID NO: 1142618 - RNA, 24 nt, Human
uuaguagagacggggucucaccau

SEQ ID NO: 1142619 - RNA, 19 nt, Human
uucacaggagaagagacag

SEQ ID NO: 1142620 - RNA, 19 nt, Human
uucuagagaguuguuuucu

SEQ ID NO: 1142621 - RNA, 18 nt, Human
uugcccaggcuggagugc

SEQ ID NO: 1142622 - RNA, 23 nt, Human
uugcucuuguugcccaggcugga

SEQ ID NO: 1142623 - RNA, 22 nt, Human
uuguuuguuuauuugaaagagu

SEQ ID NO: 1142624 - RNA, 18 nt, Human
uuucauugaagaaucauc

SEQ ID NO: 1142625 - RNA, 24 nt, Human
uuugcucuuguugcccaggcugga

SEQ ID NO: 1142626 - RNA, 20 nt, Human
uuuugcacaaagaacucuga

SEQ ID NO: 1142627 - RNA, 23 nt, Human
uuuugcucuuguugcccaggcug

SEQ ID NO: 1142628 - RNA, 24 nt, Human
uuuugcucuuguugcccaggcugg

SEQ ID NO: 1142629 - RNA, 24 nt, Human
uuuuguguguuuuuaguagagacg

SEQ ID NO: 1142630 - RNA, 24 nt, Human
uuuuuaguagagacggggucucac

SEQ ID NO: 1142631 - RNA, 23 nt, Human
uuuuuguguguuuuuaguagaga

SEQ ID NO: 1142632 - RNA, 19 nt, Human
aaacucuuggcaacaauga

SEQ ID NO: 1142633 - RNA, 24 nt, Human
aaagugcugggauuacaggcauga

SEQ ID NO: 1142634 - RNA, 21 nt, Human
aaagugcugggcuuacaggug

SEQ ID NO: 1142635 - RNA, 23 nt, Human
aaagugcugggcuuacaggugua

SEQ ID NO: 1142636 - RNA, 24 nt, Human
aaccucaggugaucugccugccuc

SEQ ID NO: 1142637 - RNA, 23 nt, Human
aagaacucauacauacuauugcc

SEQ ID NO: 1142638 - RNA, 24 nt, Human
aagcaguccuccugccuuggccuc

SEQ ID NO: 1142639 - RNA, 25 nt, Human
aagcaguccuccugccuuggccucc

SEQ ID NO: 1142640 - RNA, 19 nt, Human
aagugcugggauuacaggc

SEQ ID NO: 1142641 - RNA, 21 nt, Human
aagugcugggauuacaggcau

SEQ ID NO: 1142642 - RNA, 26 nt, Human
aagugcugggauuacaggcaugagcc

SEQ ID NO: 1142643 - RNA, 24 nt, Human
aauuuuguauuuuuaacagagaca

SEQ ID NO: 1142644 - RNA, 19 nt, Human
acagcccucugggggagau

SEQ ID NO: 1142645 - RNA, 24 nt, Human
acccccucucuacuaaaaauacaa

SEQ ID NO: 1142646 - RNA, 25 nt, Human
acucugcugcccaggcuggagugca

SEQ ID NO: 1142647 - RNA, 24 nt, Human
acuggccgggcgcgguggcucacg

SEQ ID NO: 1142648 - RNA, 22 nt, Human
agacagacuuuccuugcgaggg

SEQ ID NO: 1142649 - RNA, 21 nt, Human
agacagggguuucuccauguu

SEQ ID NO: 1142650 - RNA, 24 nt, Human
agacccaacaaacuucuuguugga

SEQ ID NO: 1142651 - RNA, 21 nt, Human
agagcaggacuggagcccagg

SEQ ID NO: 1142652 - RNA, 18 nt, Human
agaggauuucacucagua

SEQ ID NO: 1142653 - RNA, 24 nt, Human
agcacuuugggaggcugaggcggg

SEQ ID NO: 1142654 - RNA, 20 nt, Human
agccaccacacccagccccu

SEQ ID NO: 1142655 - RNA, 18 nt, Human
agccucccgaguagcugg

SEQ ID NO: 1142656 - RNA, 24 nt, Human
agcuucuauggggaguggcagaag

SEQ ID NO: 1142657 - RNA, 19 nt, Human
aggcaugugccaccacgcc

SEQ ID NO: 1142658 - RNA, 21 nt, Human
aggcauuagaaggcaagugcu

SEQ ID NO: 1142659 - RNA, 24 nt, Human
aggcgggcggaucacgaggucagg

SEQ ID NO: 1142660 - RNA, 19 nt, Human
aggcugaggcaggagaaug

SEQ ID NO: 1142661 - RNA, 21 nt, Human
aggcugaggcgggcggaucac

SEQ ID NO: 1142662 - RNA, 22 nt, Human
aggcugaggcgggcggaucacg

SEQ ID NO: 1142663 - RNA, 23 nt, Human
agggguuucuccauguuggucag

SEQ ID NO: 1142664 - RNA, 24 nt, Human
agggguuucuccauguuggucagg

SEQ ID NO: 1142665 - RNA, 24 nt, Human
aggugaucugccugccucggccuc

SEQ ID NO: 1142666 - RNA, 23 nt, Human
aguagcugggauuauaggcaugu

SEQ ID NO: 1142667 - RNA, 21 nt, Human
agucgccagccugcuucgcau

SEQ ID NO: 1142668 - RNA, 23 nt, Human
agugcagugaugcaaacacagcu

SEQ ID NO: 1142669 - RNA, 20 nt, Human
agugcaguggugcgaucucg

SEQ ID NO: 1142670 - RNA, 23 nt, Human
agugcaguggugcgaucucggcu

SEQ ID NO: 1142671 - RNA, 24 nt, Human
agugcaguggugcgaucucggcuc

SEQ ID NO: 1142672 - RNA, 24 nt, Human
aguggcgggcgccuguagucccag

SEQ ID NO: 1142673 - RNA, 24 nt, Human
augggacagcccucugggggagau

SEQ ID NO: 1142674 - RNA, 23 nt, Human
caaaaaauuagccgggcgcagug

SEQ ID NO: 1142675 - RNA, 24 nt, Human
caaagugcugggauuacaggcaug

SEQ ID NO: 1142676 - RNA, 24 nt, Human
caaagugcugggcuuacaggugua

SEQ ID NO: 1142677 - RNA, 22 nt, Human
caagcaguccuccugccuuggc

SEQ ID NO: 1142678 - RNA, 27 nt, Human
caagcaguccuccugccuuggccuccc

SEQ ID NO: 1142679 - RNA, 20 nt, Human
caagcgauucuccugccuua

SEQ ID NO: 1142680 - RNA, 22 nt, Human
caagcgauucuccugccuuagc

SEQ ID NO: 1142681 - RNA, 26 nt, Human
caaugaguguccuuuacaaugggcuc

SEQ ID NO: 1142682 - RNA, 19 nt, Human
cacacccagccccuugucu

SEQ ID NO: 1142683 - RNA, 19 nt, Human
cacagcucaacgccgguuc

SEQ ID NO: 1142684 - RNA, 25 nt, Human
cacagcucaacgccgguucgcgccc

SEQ ID NO: 1142685 - RNA, 24 nt, Human
cacgccuguaaucccagcacuuug

SEQ ID NO: 1142686 - RNA, 18 nt, Human
cacggugaaacccccucu

SEQ ID NO: 1142687 - RNA, 19 nt, Human
cacggugaaacccccucuc

SEQ ID NO: 1142688 - RNA, 18 nt, Human
cacucaguauuuauugag

SEQ ID NO: 1142689 - RNA, 21 nt, Human
cacucaguauuuauugagcac

SEQ ID NO: 1142690 - RNA, 24 nt, Human
cacucugcugcccaggcuggagug

SEQ ID NO: 1142691 - RNA, 21 nt, Human
cagaccccuuuauugugggga

SEQ ID NO: 1142692 - RNA, 21 nt, Human
cagaccugaguaaggggcugg

SEQ ID NO: 1142693 - RNA, 22 nt, Human
cagcacuuugggaggcugaggc

SEQ ID NO: 1142694 - RNA, 24 nt, Human
cagcacuuugggaggcugaggcgg

SEQ ID NO: 1142695 - RNA, 20 nt, Human
cagccuugaccuccugggcu

SEQ ID NO: 1142696 - RNA, 21 nt, Human
cagccuugaccuccugggcuc

SEQ ID NO: 1142697 - RNA, 23 nt, Human
cagccuugaccuccugggcucaa

SEQ ID NO: 1142698 - RNA, 24 nt, Human
cagccuugaccuccugggcucaag

SEQ ID NO: 1142699 - RNA, 24 nt, Human
cagcuacucgggaggcugaggcag

SEQ ID NO: 1142700 - RNA, 22 nt, Human
cagcucaacgccgguucgcgcc

SEQ ID NO: 1142701 - RNA, 24 nt, Human
cagcucacuucagccuugaccucc

SEQ ID NO: 1142702 - RNA, 22 nt, Human
caggugaucugccugccucggc

SEQ ID NO: 1142703 - RNA, 21 nt, Human
cauacauacuauugccaccuc

SEQ ID NO: 1142704 - RNA, 21 nt, Human
caucucacagccgccccagcg

SEQ ID NO: 1142705 - RNA, 24 nt, Human
cauguuggucaggcuggucuugaa

SEQ ID NO: 1142706 - RNA, 23 nt, Human
ccaaagugcugggauuacaggca

SEQ ID NO: 1142707 - RNA, 24 nt, Human
ccaaagugcugggauuacaggcau

SEQ ID NO: 1142708 - RNA, 21 nt, Human
ccaaagugcugggcuuacagg

SEQ ID NO: 1142709 - RNA, 24 nt, Human
ccaaagugcugggcuuacaggugu

SEQ ID NO: 1142710 - RNA, 20 nt, Human
ccaccacgccuggcuaauuu

SEQ ID NO: 1142711 - RNA, 24 nt, Human
ccaccugugcauccccugaauccu

SEQ ID NO: 1142712 - RNA, 19 nt, Human
ccauguuggucaggcuggu

SEQ ID NO: 1142713 - RNA, 21 nt, Human
ccauguuggucaggcuggucu

SEQ ID NO: 1142714 - RNA, 21 nt, Human
ccauguuggucaggcuggucu

SEQ ID NO: 1142715 - RNA, 24 nt, Human
cccaaagugcugggauuacaggca

SEQ ID NO: 1142716 - RNA, 24 nt, Human
cccaaccucaggugaucugccugc

SEQ ID NO: 1142717 - RNA, 21 nt, Human
cccagauguccauuccaccuu

SEQ ID NO: 1142718 - RNA, 21 nt, Human
cccagcucggacacgggaggu

SEQ ID NO: 1142719 - RNA, 23 nt, Human
cccagcucggacacgggaggugu

SEQ ID NO: 1142720 - RNA, 20 nt, Human
cccaggcuggagugcaguga

SEQ ID NO: 1142721 - RNA, 18 nt, Human
cccauugugcauuuuucu

SEQ ID NO: 1142722 - RNA, 23 nt, Human
cccgaguagcugggauuauaggc

SEQ ID NO: 1142723 - RNA, 24 nt, Human
cccgaguagcugggauuauaggca

SEQ ID NO: 1142724 - RNA, 24 nt, Human
ccgaguagcugggauuauaggcau

SEQ ID NO: 1142725 - RNA, 24 nt, Human
ccgcaaccucugccucugggguuc

SEQ ID NO: 1142726 - RNA, 26 nt, Human
ccuccugccuuggccucccaaagugc

SEQ ID NO: 1142727 - RNA, 24 nt, Human
ccuccugggcucaagcaguccucc

SEQ ID NO: 1142728 - RNA, 21 nt, Human
ccucugggggagaugggccag

SEQ ID NO: 1142729 - RNA, 24 nt, Human
ccucugggguucaagcgauucucc

SEQ ID NO: 1142730 - RNA, 24 nt, Human
ccugccucggccucccaaagugcu

SEQ ID NO: 1142731 - RNA, 23 nt, Human
ccugccuuagccucccgaguagc

SEQ ID NO: 1142732 - RNA, 20 nt, Human
ccugggcucaagcaguccuc

SEQ ID NO: 1142733 - RNA, 23 nt, Human
ccugggcucaagcaguccuccug

SEQ ID NO: 1142734 - RNA, 19 nt, Human
ccuguagucccagcuacuc

SEQ ID NO: 1142735 - RNA, 21 nt, Human
ccuguagucccagcuacucgg

SEQ ID NO: 1142736 - RNA, 19 nt, Human
ccuugaccuccugggcuca

SEQ ID NO: 1142737 - RNA, 24 nt, Human
ccuugaccuccugggcucaagcag

SEQ ID NO: 1142738 - RNA, 23 nt, Human
cgcaaccucugccucugggguuc

SEQ ID NO: 1142739 - RNA, 23 nt, Human
cgcaguggcgggcgccuguaguc

SEQ ID NO: 1142740 - RNA, 24 nt, Human
cgccuguaaucccagcacuuuggg

SEQ ID NO: 1142741 - RNA, 24 nt, Human
cgccuguagucccagcuacucggg

SEQ ID NO: 1142742 - RNA, 23 nt, Human
cuaagcaucagaaagugaaugcc

SEQ ID NO: 1142743 - RNA, 24 nt, Human
cucacagccgccccagcgaggguc

SEQ ID NO: 1142744 - RNA, 22 nt, Human
cucacgccuguaaucccagcac

SEQ ID NO: 1142745 - RNA, 24 nt, Human
cucacgccuguaaucccagcacuu

SEQ ID NO: 1142746 - RNA, 19 nt, Human
cucaggaaggcucugggcu

SEQ ID NO: 1142747 - RNA, 23 nt, Human
cucauacauacuauugccaccuc

SEQ ID NO: 1142748 - RNA, 24 nt, Human
cuccauguuggucaggcuggucuu

SEQ ID NO: 1142749 - RNA, 25 nt, Human
cuccugggcucaagcaguccuccug

SEQ ID NO: 1142750 - RNA, 24 nt, Human
cugcccaggcuggagugcagugau

SEQ ID NO: 1142751 - RNA, 23 nt, Human
cugccuuagccucccgaguagcu

SEQ ID NO: 1142752 - RNA, 23 nt, Human
cugccuuggccucccaaagugcu

SEQ ID NO: 1142753 - RNA, 24 nt, Human
cuggagcccagggcgcagcugcac

SEQ ID NO: 1142754 - RNA, 19 nt, Human
cugggucaccccuucuuuc

SEQ ID NO: 1142755 - RNA, 21 nt, Human
cugguuuacagcguugggcug

SEQ ID NO: 1142756 - RNA, 23 nt, Human
cugguuuacagcguugggcuggg

SEQ ID NO: 1142757 - RNA, 22 nt, Human
cuguguguucccucgguguagg

SEQ ID NO: 1142758 - RNA, 23 nt, Human
cuuagccucccgaguagcuggga

SEQ ID NO: 1142759 - RNA, 22 nt, Human
cuucagccuugaccuccugggc

SEQ ID NO: 1142760 - RNA, 22 nt, Human
gaacacagcacaacgucugugc

SEQ ID NO: 1142761 - RNA, 18 nt, Human
gaacuaggacagcugcuc

SEQ ID NO: 1142762 - RNA, 19 nt, Human
gaacuggccgggcgcggug

SEQ ID NO: 1142763 - RNA, 24 nt, Human
gagacagggguuucuccauguugg

SEQ ID NO: 1142764 - RNA, 23 nt, Human
gagccaccacacccagccccuug

SEQ ID NO: 1142765 - RNA, 18 nt, Human
gauuacaggcaugagcca

SEQ ID NO: 1142766 - RNA, 21 nt, Human
gauuacaggcaugagccacca

SEQ ID NO: 1142767 - RNA, 22 nt, Human
gauuacaggcaugagccaccac

SEQ ID NO: 1142768 - RNA, 18 nt, Human
gauuauaggcaugugcca

SEQ ID NO: 1142769 - RNA, 20 nt, Human
gcaggugcuggcuccggugg

SEQ ID NO: 1142770 - RNA, 19 nt, Human
gcccaggcuggagugcagu

SEQ ID NO: 1142771 - RNA, 24 nt, Human
gccccuugucuaauuuuuuaaaaa

SEQ ID NO: 1142772 - RNA, 22 nt, Human
gccgguucgcgcccugguuuac

SEQ ID NO: 1142773 - RNA, 23 nt, Human
gccuguagucccagcuacucggg

SEQ ID NO: 1142774 - RNA, 22 nt, Human
gccuuggccucccaaagugcug

SEQ ID NO: 1142775 - RNA, 24 nt, Human
gcgauucuccugccuuagccuccc

SEQ ID NO: 1142776 - RNA, 23 nt, Human
gcuggucuugaacucccaaccuc

SEQ ID NO: 1142777 - RNA, 19 nt, Human
ggauuacaggcaugagcca

SEQ ID NO: 1142778 - RNA, 19 nt, Human
ggauuauaggcaugugcca

SEQ ID NO: 1142779 - RNA, 21 nt, Human
ggcucacgccuguaaucccag

SEQ ID NO: 1142780 - RNA, 24 nt, Human
ggcuggucuugaacucccaaccuc

SEQ ID NO: 1142781 - RNA, 21 nt, Human
ggcuuacagguguaagccaug

SEQ ID NO: 1142782 - RNA, 28 nt, Human
gggaauauguagaaaaaugccgguaccc

SEQ ID NO: 1142783 - RNA, 24 nt, Human
gggcgcaguggcgggcgccuguag

SEQ ID NO: 1142784 - RNA, 24 nt, Human
gggcgcgguggcucacgccuguaa

SEQ ID NO: 1142785 - RNA, 24 nt, Human
gggcggaucacgaggucaggagau

SEQ ID NO: 1142786 - RNA, 18 nt, Human
ggggucugcggcagagca

SEQ ID NO: 1142787 - RNA, 22 nt, Human
gggguuucuccauguuggucag

SEQ ID NO: 1142788 - RNA, 23 nt, Human
gggguuucuccauguuggucagg

SEQ ID NO: 1142789 - RNA, 20 nt, Human
ggguucaagcgauucuccug

SEQ ID NO: 1142790 - RNA, 24 nt, Human
ggucaggagaucgagaccacggug

SEQ ID NO: 1142791 - RNA, 23 nt, Human
gguggcucacgccuguaauccca

SEQ ID NO: 1142792 - RNA, 24 nt, Human
gguggcucacgccuguaaucccag

SEQ ID NO: 1142793 - RNA, 18 nt, Human
guagcugggauuauaggc

SEQ ID NO: 1142794 - RNA, 20 nt, Human
guagcugggauuauaggcau

SEQ ID NO: 1142795 - RNA, 22 nt, Human
gugaugcaaacacagcucaccg

SEQ ID NO: 1142796 - RNA, 23 nt, Human
gugcuggcuccgguggggucugc

SEQ ID NO: 1142797 - RNA, 23 nt, Human
guggcucacgccuguaaucccag

SEQ ID NO: 1142798 - RNA, 19 nt, Human
uaaaaagaaucugaaacug

SEQ ID NO: 1142799 - RNA, 24 nt, Human
uaaaaagaaucugaaacugaggca

SEQ ID NO: 1142800 - RNA, 25 nt, Human
uaacagagacagggguuucuccaug

SEQ ID NO: 1142801 - RNA, 22 nt, Human
uaacuugcuuaauggcuaguag

SEQ ID NO: 1142802 - RNA, 21 nt, Human
uaaguguggcagaugccauga

SEQ ID NO: 1142803 - RNA, 23 nt, Human
uaauuuuguauuuuuaacagaga

SEQ ID NO: 1142804 - RNA, 18 nt, Human
uacaaugggcucuauggg

SEQ ID NO: 1142805 - RNA, 24 nt, Human
uacaggcaugagccaccacaccca

SEQ ID NO: 1142806 - RNA, 18 nt, Human
uagauuccaacaagcugg

SEQ ID NO: 1142807 - RNA, 23 nt, Human
uagcagaagacaaauuaugcaga

SEQ ID NO: 1142808 - RNA, 24 nt, Human
uagcagaagacaaauuaugcagag

SEQ ID NO: 1142809 - RNA, 18 nt, Human
uauaaagauguaugugua

SEQ ID NO: 1142810 - RNA, 21 nt, Human
uauaugcacaucugacguaua

SEQ ID NO: 1142811 - RNA, 23 nt, Human
uauuuaccagaauaacuucucaa

SEQ ID NO: 1142812 - RNA, 23 nt, Human
ucaccgcaaccucugccucuggg

SEQ ID NO: 1142813 - RNA, 18 nt, Human
ucacgaggucaggagauc

SEQ ID NO: 1142814 - RNA, 24 nt, Human
ucacgaggucaggagaucgagacc

SEQ ID NO: 1142815 - RNA, 24 nt, Human
ucacucugcugcccaggcuggagu

SEQ ID NO: 1142816 - RNA, 24 nt, Human
ucacuucagccuugaccuccuggg

SEQ ID NO: 1142817 - RNA, 24 nt, Human
ucccaaagugcugggauuacaggc

SEQ ID NO: 1142818 - RNA, 23 nt, Human
ucccaaagugcugggcuuacagg

SEQ ID NO: 1142819 - RNA, 24 nt, Human
ucccgaguagcugggauuauaggc

SEQ ID NO: 1142820 - RNA, 18 nt, Human
ucccggggggcccucuuu

SEQ ID NO: 1142821 - RNA, 24 nt, Human
uccugggcucaagcaguccuccug

SEQ ID NO: 1142822 - RNA, 18 nt, Human
ucggccucccaaagugcu

SEQ ID NO: 1142823 - RNA, 22 nt, Human
ucuauggggaguggcagaagau

SEQ ID NO: 1142824 - RNA, 23 nt, Human
ucucacucugcugcccaggcugg

SEQ ID NO: 1142825 - RNA, 24 nt, Human
ucucacucugcugcccaggcugga

SEQ ID NO: 1142826 - RNA, 26 nt, Human
ucucacucugcugcccaggcuggagu

SEQ ID NO: 1142827 - RNA, 27 nt, Human
ucucacucugcugcccaggcuggagug

SEQ ID NO: 1142828 - RNA, 24 nt, Human
ucuccugccuuagccucccgagua

SEQ ID NO: 1142829 - RNA, 22 nt, Human
ucucuacuaaaaauacaaaaaa

SEQ ID NO: 1142830 - RNA, 24 nt, Human
ucugaaacugaggcauuagaaggc

SEQ ID NO: 1142831 - RNA, 24 nt, Human
ucugcggcagagcaggacuggagc

SEQ ID NO: 1142832 - RNA, 24 nt, Human
ucugcugcccaggcuggagugcag

SEQ ID NO: 1142833 - RNA, 24 nt, Human
ucugggguucaagcgauucuccug

SEQ ID NO: 1142834 - RNA, 26 nt, Human
ucuucauccuucaagacaaggauugg

SEQ ID NO: 1142835 - RNA, 23 nt, Human
ucuucguaggcaggucucaggau

SEQ ID NO: 1142836 - RNA, 22 nt, Human
ucuuggcaacaaugaguguccu

SEQ ID NO: 1142837 - RNA, 25 nt, Human
ugaauuuagaccacacaguguggag

SEQ ID NO: 1142838 - RNA, 25 nt, Human
ugaccuccugggcucaagcaguccu

SEQ ID NO: 1142839 - RNA, 19 nt, Human
ugaggcaggagaauggcgu

SEQ ID NO: 1142840 - RNA, 24 nt, Human
ugaggcgggcggaucacgagguca

SEQ ID NO: 1142841 - RNA, 18 nt, Human
ugaguaaggggcuggacu

SEQ ID NO: 1142842 - RNA, 23 nt, Human
ugagucauacugcauuggcacaa

SEQ ID NO: 1142843 - RNA, 24 nt, Human
ugaguguccuuuacaaugggcucu

SEQ ID NO: 1142844 - RNA, 23 nt, Human
ugaucaacacagacaaagacuaa

SEQ ID NO: 1142845 - RNA, 22 nt, Human
ugaugcaaacacagcucacuuc

SEQ ID NO: 1142846 - RNA, 24 nt, Human
ugcagugcaguggugcgaucucgg

SEQ ID NO: 1142847 - RNA, 19 nt, Human
ugcaguggugcgaucucgg

SEQ ID NO: 1142848 - RNA, 23 nt, Human
ugcaguggugcgaucucggcucc

SEQ ID NO: 1142849 - RNA, 18 nt, Human
ugcauuugcagucaccca

SEQ ID NO: 1142850 - RNA, 23 nt, Human
ugccaggcugcagugcaguggug

SEQ ID NO: 1142851 - RNA, 18 nt, Human
ugcccaggcuggagugca

SEQ ID NO: 1142852 - RNA, 22 nt, Human
ugcccaggcuggagugcaguga

SEQ ID NO: 1142853 - RNA, 24 nt, Human
ugcccaggcuggagugcagugaug

SEQ ID NO: 1142854 - RNA, 21 nt, Human
ugccucggccucccaaagugc

SEQ ID NO: 1142855 - RNA, 24 nt, Human
ugccucggccucccaaagugcugg

SEQ ID NO: 1142856 - RNA, 24 nt, Human
ugccuuagccucccgaguagcugg

SEQ ID NO: 1142857 - RNA, 24 nt, Human
ugcucagaggcaaagcucagagua

SEQ ID NO: 1142858 - RNA, 21 nt, Human
uggaagcacgaagaccuuaau

SEQ ID NO: 1142859 - RNA, 18 nt, Human
uggagugcagugaugcaa

SEQ ID NO: 1142860 - RNA, 22 nt, Human
uggcacaaacucuuggcaacaa

SEQ ID NO: 1142861 - RNA, 21 nt, Human
uggccuauuugacuuguuuaa

SEQ ID NO: 1142862 - RNA, 22 nt, Human
uggccuauuugacuuguuuaau

SEQ ID NO: 1142863 - RNA, 21 nt, Human
uggcgggcgccuguaguccca

SEQ ID NO: 1142864 - RNA, 24 nt, Human
uggcucacgccuguaaucccagca

SEQ ID NO: 1142865 - RNA, 18 nt, Human
uggcucaggaaggcucug

SEQ ID NO: 1142866 - RNA, 19 nt, Human
ugggaggcugaggcgggcg

SEQ ID NO: 1142867 - RNA, 20 nt, Human
ugggaggcugaggcgggcgg

SEQ ID NO: 1142868 - RNA, 24 nt, Human
ugggaggcugaggcgggcggauca

SEQ ID NO: 1142869 - RNA, 18 nt, Human
ugggauuacaggcaugag

SEQ ID NO: 1142870 - RNA, 19 nt, Human
ugggauuacaggcaugagc

SEQ ID NO: 1142871 - RNA, 22 nt, Human
ugggauuacaggcaugagccac

SEQ ID NO: 1142872 - RNA, 23 nt, Human
ugggauuacaggcaugagccacc

SEQ ID NO: 1142873 - RNA, 24 nt, Human
ugggauuacaggcaugagccacca

SEQ ID NO: 1142874 - RNA, 24 nt, Human
ugggauuacaggcaugagccacca

SEQ ID NO: 1142875 - RNA, 18 nt, Human
ugggauuauaggcaugug

SEQ ID NO: 1142876 - RNA, 21 nt, Human
ugggauuauaggcaugugcca

SEQ ID NO: 1142877 - RNA, 22 nt, Human
ugggauuauaggcaugugccac

SEQ ID NO: 1142878 - RNA, 24 nt, Human
ugggauuauaggcaugugccacca

SEQ ID NO: 1142879 - RNA, 24 nt, Human
ugggcucaagcaguccuccugccu

SEQ ID NO: 1142880 - RNA, 19 nt, Human
ugggcucuaugggacagcc

SEQ ID NO: 1142881 - RNA, 23 nt, Human
ugggcugggucaccccuucuuuc

SEQ ID NO: 1142882 - RNA, 21 nt, Human
ugggcuuacagguguaagcca

SEQ ID NO: 1142883 - RNA, 22 nt, Human
ugggcuuacagguguaagccau

SEQ ID NO: 1142884 - RNA, 27 nt, Human
uggggaacacagcacaacgucugugca

SEQ ID NO: 1142885 - RNA, 24 nt, Human
ugggguucaagcgauucuccugcc

SEQ ID NO: 1142886 - RNA, 23 nt, Human
uggucaggcuggucuugaacucc

SEQ ID NO: 1142887 - RNA, 23 nt, Human
ugucuagaagagaagugucagaa

SEQ ID NO: 1142888 - RNA, 21 nt, Human
uuaaaauccauugaacuggcc

SEQ ID NO: 1142889 - RNA, 23 nt, Human
uucaagcgauucuccugccuuag

SEQ ID NO: 1142890 - RNA, 24 nt, Human
uucaagcgauucuccugccuuagc

SEQ ID NO: 1142891 - RNA, 27 nt, Human
uucaaugagugaagggugagucauacu

SEQ ID NO: 1142892 - RNA, 19 nt, Human
uucauccuucaagacaagg

SEQ ID NO: 1142893 - RNA, 20 nt, Human
uucugggccauuugcugcag

SEQ ID NO: 1142894 - RNA, 18 nt, Human
uuggccucccaaagugcu

SEQ ID NO: 1142895 - RNA, 25 nt, Human
uugggaggcugaggcgggcggauca

SEQ ID NO: 1142896 - RNA, 22 nt, Human
uuguugccaggcugcagugcag

SEQ ID NO: 1142897 - RNA, 19 nt, Human
uuucgcucuuguugccagg

SEQ ID NO: 1142898 - RNA, 21 nt, Human
uuucuccauguuggucaggcu

SEQ ID NO: 1142899 - RNA, 20 nt, Human
uuuuguauuuuuaacagaga

SEQ ID NO: 1142900 - RNA, 22 nt, Human
agguuuuugcggggacuccaug

SEQ ID NO: 1142901 - RNA, 21 nt, Human
cggggacuccaugccugugga

SEQ ID NO: 1142902 - RNA, 24 nt, Human
gcagccuggcggggugggcgggca

SEQ ID NO: 1142903 - RNA, 23 nt, Human
uuugcggggacuccaugccugug

SEQ ID NO: 1142904 - RNA, 21 nt, Human
ggagcugcagaccagucuucc

SEQ ID NO: 1142905 - RNA, 23 nt, Human
ucccuuuaaguuacgaugggaau

SEQ ID NO: 1142906 - RNA, 20 nt, Human
ugagcagugggagcugcaga

SEQ ID NO: 1142907 - RNA, 24 nt, Human
ugagcagugggagcugcagaccag

SEQ ID NO: 1142908 - RNA, 19 nt, Human
ugggaauccagaacaacgc

SEQ ID NO: 1142909 - RNA, 20 nt, Human
ugggagcugcagaccagucu

SEQ ID NO: 1142910 - RNA, 20 nt, Human
aagcagguaggucuguccuc

SEQ ID NO: 1142911 - RNA, 27 nt, Human
auaguaggcuccuccuccacccaaccc

SEQ ID NO: 1142912 - RNA, 23 nt, Human
caacagccaggagaaaucuuuga

SEQ ID NO: 1142913 - RNA, 20 nt, Human
cacagcucuggccuccuggu

SEQ ID NO: 1142914 - RNA, 23 nt, Human
cagcugcugccaagguagccaca

SEQ ID NO: 1142915 - RNA, 24 nt, Human
ccagccagaaaaacagcagcuuca

SEQ ID NO: 1142916 - RNA, 22 nt, Human
cccagccagaaaaacagcagcu

SEQ ID NO: 1142917 - RNA, 21 nt, Human
cgcugaugagaagaacggagc

SEQ ID NO: 1142918 - RNA, 18 nt, Human
cuccuccuccacccaacc

SEQ ID NO: 1142919 - RNA, 21 nt, Human
ggggcucacacggaggaggca

SEQ ID NO: 1142920 - RNA, 22 nt, Human
gggggcugcugcuguggugggg

SEQ ID NO: 1142921 - RNA, 21 nt, Human
uagcagggacucuggcaggug

SEQ ID NO: 1142922 - RNA, 20 nt, Human
uaggcuccuccuccacccaa

SEQ ID NO: 1142923 - RNA, 19 nt, Human
ucagagaaaugaggagagc

SEQ ID NO: 1142924 - RNA, 22 nt, Human
ucuggcagguggcaggcagcuc

SEQ ID NO: 1142925 - RNA, 18 nt, Human
ugacugcagcucggaagc

SEQ ID NO: 1142926 - RNA, 19 nt, Human
ugagaagaacggagcucuu

SEQ ID NO: 1142927 - RNA, 22 nt, Human
ugaguaauaguaggcuccuccu

SEQ ID NO: 1142928 - RNA, 25 nt, Human
ugaguaauaguaggcuccuccuccc

SEQ ID NO: 1142929 - RNA, 24 nt, Human
ugccaagguagccacagcucuggc

SEQ ID NO: 1142930 - RNA, 24 nt, Human
uuggcccuccccagccagaaaaac

SEQ ID NO: 1142931 - RNA, 24 nt, Human
uuugaguaauaguaggcuccuccu

SEQ ID NO: 1142932 - RNA, 24 nt, Human
aaaacaaacaaacaaacaaaaaca

SEQ ID NO: 1142933 - RNA, 24 nt, Human
aaaacaaacaacacagacacuccc

SEQ ID NO: 1142934 - RNA, 22 nt, Human
aaacaaaaacaaacaacacaga

SEQ ID NO: 1142935 - RNA, 24 nt, Human
aaacaaacaaacaaacaaaaacaa

SEQ ID NO: 1142936 - RNA, 23 nt, Human
aaacaaacaacacagaccggacc

SEQ ID NO: 1142937 - RNA, 24 nt, Human
aaacaacacagacacucccugaaa

SEQ ID NO: 1142938 - RNA, 26 nt, Human
aaacaacacagacacucccugaaacc

SEQ ID NO: 1142939 - RNA, 28 nt, Human
aaacccagcagaccacaaucuuaaagga

SEQ ID NO: 1142940 - RNA, 22 nt, Human
aacaaacaaacaaacaaaaaca

SEQ ID NO: 1142941 - RNA, 26 nt, Human
aacaaacaacacagacacucccugaa

SEQ ID NO: 1142942 - RNA, 26 nt, Human
aacaacacagacacucccugaaaccc

SEQ ID NO: 1142943 - RNA, 23 nt, Human
aacacagacacucccugaaaccc

SEQ ID NO: 1142944 - RNA, 20 nt, Human
aacauggcaaaaccccgucu

SEQ ID NO: 1142945 - RNA, 21 nt, Human
aacauggcaaaaccccgucuc

SEQ ID NO: 1142946 - RNA, 20 nt, Human
aagcaaaaaaaaaaccucua

SEQ ID NO: 1142947 - RNA, 21 nt, Human
aagcaaaaaaaaaaccucuag

SEQ ID NO: 1142948 - RNA, 18 nt, Human
aaggacccagaaccaagu

SEQ ID NO: 1142949 - RNA, 24 nt, Human
aaucgcuugagcccaggaggugga

SEQ ID NO: 1142950 - RNA, 20 nt, Human
aauucccaguagaaaacuug

SEQ ID NO: 1142951 - RNA, 20 nt, Human
acaaaaacaaacaacacaga

SEQ ID NO: 1142952 - RNA, 24 nt, Human
acaaacaaaaacaaacaacacaga

SEQ ID NO: 1142953 - RNA, 27 nt, Human
acaaacaacacagacacucccugaaac

SEQ ID NO: 1142954 - RNA, 24 nt, Human
acacuccagccugggugacagagc

SEQ ID NO: 1142955 - RNA, 19 nt, Human
acagagcgagaccccgucu

SEQ ID NO: 1142956 - RNA, 24 nt, Human
acagagcgagaccccgucucaaaa

SEQ ID NO: 1142957 - RNA, 20 nt, Human
acagguuugggucccugagc

SEQ ID NO: 1142958 - RNA, 19 nt, Human
acccagcagaccacaaucu

SEQ ID NO: 1142959 - RNA, 18 nt, Human
acuacacuccagccuggg

SEQ ID NO: 1142960 - RNA, 24 nt, Human
acuacacuccagccugggugacag

SEQ ID NO: 1142961 - RNA, 21 nt, Human
acugagcauuuguuuugugcc

SEQ ID NO: 1142962 - RNA, 24 nt, Human
agccugggcaacauggcaaaaccc

SEQ ID NO: 1142963 - RNA, 28 nt, Human
aggaaaccugguuuuaaggacccagaac

SEQ ID NO: 1142964 - RNA, 18 nt, Human
aggcaugagaaucgcuug

SEQ ID NO: 1142965 - RNA, 24 nt, Human
aggcugaggcaugagaaucgcuug

SEQ ID NO: 1142966 - RNA, 19 nt, Human
aggggcucaggcucaggag

SEQ ID NO: 1142967 - RNA, 21 nt, Human
aggggcucaggcucaggaggg

SEQ ID NO: 1142968 - RNA, 19 nt, Human
agguggaggcugcagugag

SEQ ID NO: 1142969 - RNA, 24 nt, Human
agguggaggcugcagugagccaag

SEQ ID NO: 1142970 - RNA, 21 nt, Human
auaaacacucauuaaacacca

SEQ ID NO: 1142971 - RNA, 19 nt, Human
aucucuucucucuccucuu

SEQ ID NO: 1142972 - RNA, 24 nt, Human
caacauggcaaaaccccgucucua

SEQ ID NO: 1142973 - RNA, 23 nt, Human
caacccuuugaggaggcugugac

SEQ ID NO: 1142974 - RNA, 21 nt, Human
caagcccagggcaggccauac

SEQ ID NO: 1142975 - RNA, 19 nt, Human
cacaccugcagucccagcu

SEQ ID NO: 1142976 - RNA, 26 nt, Human
caccacuacacuccagccugggugac

SEQ ID NO: 1142977 - RNA, 28 nt, Human
caccacuacacuccagccugggugacag

SEQ ID NO: 1142978 - RNA, 18 nt, Human
caccauucuaauucccag

SEQ ID NO: 1142979 - RNA, 23 nt, Human
caccugcagucccagcuacucgg

SEQ ID NO: 1142980 - RNA, 24 nt, Human
caccugcagucccagcuacucggg

SEQ ID NO: 1142981 - RNA, 18 nt, Human
cacucagggcugacacag

SEQ ID NO: 1142982 - RNA, 22 nt, Human
cacuccagccugggugacagag

SEQ ID NO: 1142983 - RNA, 24 nt, Human
cacuccagccugggugacagagcg

SEQ ID NO: 1142984 - RNA, 23 nt, Human
cagacacucccugaaacccagca

SEQ ID NO: 1142985 - RNA, 22 nt, Human
caggaagguaaggggcucaggc

SEQ ID NO: 1142986 - RNA, 18 nt, Human
caggagggaacagacaag

SEQ ID NO: 1142987 - RNA, 20 nt, Human
caggagguggaggcugcagu

SEQ ID NO: 1142988 - RNA, 28 nt, Human
caggcucccaggcugggacccacucccu

SEQ ID NO: 1142989 - RNA, 19 nt, Human
ccaccagaucacucccaca

SEQ ID NO: 1142990 - RNA, 20 nt, Human
ccacuacacuccagccuggg

SEQ ID NO: 1142991 - RNA, 21 nt, Human
ccacuacacuccagccugggu

SEQ ID NO: 1142992 - RNA, 23 nt, Human
ccacuacacuccagccuggguga

SEQ ID NO: 1142993 - RNA, 24 nt, Human
ccacuacacuccagccugggugac

SEQ ID NO: 1142994 - RNA, 25 nt, Human
ccacuacacuccagccugggugaca

SEQ ID NO: 1142995 - RNA, 21 nt, Human
ccucuaggaaaagcaaaaaga

SEQ ID NO: 1142996 - RNA, 18 nt, Human
ccugacagcaggcuccca

SEQ ID NO: 1142997 - RNA, 22 nt, Human
ccugcagucccagcuacuccuc

SEQ ID NO: 1142998 - RNA, 21 nt, Human
ccugcagucccagcuacucgg

SEQ ID NO: 1142999 - RNA, 23 nt, Human
ccugggcaacauggcaaaacccc

SEQ ID NO: 1143000 - RNA, 24 nt, Human
ccugggcaacauggcaaaaccccg

SEQ ID NO: 1143001 - RNA, 20 nt, Human
ccugggugacagagcgagac

SEQ ID NO: 1143002 - RNA, 22 nt, Human
cggcccagagcagucauggcaa

SEQ ID NO: 1143003 - RNA, 23 nt, Human
cucaaaaccugcccgacagguuu

SEQ ID NO: 1143004 - RNA, 21 nt, Human
cuccacagcucucaaaaccug

SEQ ID NO: 1143005 - RNA, 18 nt, Human
cuccagccucugucccuc

SEQ ID NO: 1143006 - RNA, 19 nt, Human
cucccugaaacccagcaga

SEQ ID NO: 1143007 - RNA, 19 nt, Human
cucucaaaaccugcccgac

SEQ ID NO: 1143008 - RNA, 20 nt, Human
cucuccauaaacacucauua

SEQ ID NO: 1143009 - RNA, 21 nt, Human
cucucuccacagcucucaaaa

SEQ ID NO: 1143010 - RNA, 18 nt, Human
cugaaacccagcagacca

SEQ ID NO: 1143011 - RNA, 21 nt, Human
cugcagucccagcuacucggg

SEQ ID NO: 1143012 - RNA, 22 nt, Human
cugcagugagccaagacugcac

SEQ ID NO: 1143013 - RNA, 19 nt, Human
cuuagaacucuccucucca

SEQ ID NO: 1143014 - RNA, 24 nt, Human
gacccagaaccaagucucagggaa

SEQ ID NO: 1143015 - RNA, 22 nt, Human
gagcagucauggcaaacaacaa

SEQ ID NO: 1143016 - RNA, 18 nt, Human
gaggcugcagugagccaa

SEQ ID NO: 1143017 - RNA, 19 nt, Human
gaggcugcagugagccaag

SEQ ID NO: 1143018 - RNA, 21 nt, Human
gaguccaggucugccugcucc

SEQ ID NO: 1143019 - RNA, 18 nt, Human
gaugcaguuaaacauaga

SEQ ID NO: 1143020 - RNA, 19 nt, Human
gcaaaaaaaaaaccucuag

SEQ ID NO: 1143021 - RNA, 19 nt, Human
gcaaaaaaaaaaccucuag

SEQ ID NO: 1143022 - RNA, 23 nt, Human
gccauacauccuucuccagccuc

SEQ ID NO: 1143023 - RNA, 24 nt, Human
gcccaggagguggaggcugcagug

SEQ ID NO: 1143024 - RNA, 18 nt, Human
ggaggcugcagugagcca

SEQ ID NO: 1143025 - RNA, 20 nt, Human
ggaggcugcagugagccaag

SEQ ID NO: 1143026 - RNA, 22 nt, Human
gggaacagacaagcccagggca

SEQ ID NO: 1143027 - RNA, 18 nt, Human
gucucagggaagugagaa

SEQ ID NO: 1143028 - RNA, 23 nt, Human
uaaggacccagaaccaagucuca

SEQ ID NO: 1143029 - RNA, 24 nt, Human
uacaaaaaacacaaaaauuagcca

SEQ ID NO: 1143030 - RNA, 21 nt, Human
uacccccggcccagagcaguc

SEQ ID NO: 1143031 - RNA, 24 nt, Human
uagacacuuccagccugggcaaca

SEQ ID NO: 1143032 - RNA, 21 nt, Human
uaggaaaagcaaaaagaggca

SEQ ID NO: 1143033 - RNA, 19 nt, Human
uaggcagcuuccauccacu

SEQ ID NO: 1143034 - RNA, 23 nt, Human
uaguggcacacaccugcaguccc

SEQ ID NO: 1143035 - RNA, 25 nt, Human
ucaaaacaaacaaacaaacaaaaac

SEQ ID NO: 1143036 - RNA, 20 nt, Human
ucaacagaugaguaacaagc

SEQ ID NO: 1143037 - RNA, 19 nt, Human
ucacagccaggcugugagu

SEQ ID NO: 1143038 - RNA, 19 nt, Human
ucaggagggaacagacaag

SEQ ID NO: 1143039 - RNA, 23 nt, Human
uccagccugggugacagagcgag

SEQ ID NO: 1143040 - RNA, 24 nt, Human
uccagccugggugacagagcgaga

SEQ ID NO: 1143041 - RNA, 18 nt, Human
uccaggucugccugcucc

SEQ ID NO: 1143042 - RNA, 20 nt, Human
uccauaaacacucauuaaac

SEQ ID NO: 1143043 - RNA, 20 nt, Human
uccauccacugagcauuugu

SEQ ID NO: 1143044 - RNA, 22 nt, Human
ucccaggcugggacccacuccc

SEQ ID NO: 1143045 - RNA, 20 nt, Human
ucccuaccugcagauugcug

SEQ ID NO: 1143046 - RNA, 19 nt, Human
ucccucguacaugcccgga

SEQ ID NO: 1143047 - RNA, 18 nt, Human
ucccucucuccacagcuc

SEQ ID NO: 1143048 - RNA, 24 nt, Human
ucgcuugagcccaggagguggagg

SEQ ID NO: 1143049 - RNA, 24 nt, Human
ucgggaggcugaggcaugagaauc

SEQ ID NO: 1143050 - RNA, 20 nt, Human
ucuaggaaaagcaaaaagag

SEQ ID NO: 1143051 - RNA, 18 nt, Human
ucucucuccucuuccuca

SEQ ID NO: 1143052 - RNA, 22 nt, Human
ucugccugcuccugacagcagg

SEQ ID NO: 1143053 - RNA, 19 nt, Human
ugaccuuagaacucuccuc

SEQ ID NO: 1143054 - RNA, 19 nt, Human
ugaguaacaagcaaaaaaa

SEQ ID NO: 1143055 - RNA, 21 nt, Human
ugccaggccacugcuaagggc

SEQ ID NO: 1143056 - RNA, 19 nt, Human
ugccuuugaauagaggccu

SEQ ID NO: 1143057 - RNA, 20 nt, Human
uggaugccugcagccagagg

SEQ ID NO: 1143058 - RNA, 19 nt, Human
uggcaaacaacaacaacga

SEQ ID NO: 1143059 - RNA, 22 nt, Human
uggcacacaccugcagucccag

SEQ ID NO: 1143060 - RNA, 22 nt, Human
ugucccucucuccacagcucuc

SEQ ID NO: 1143061 - RNA, 25 nt, Human
uguucuggccaccagaucacuccca

SEQ ID NO: 1143062 - RNA, 22 nt, Human
uguuuugugccaggccacugcu

SEQ ID NO: 1143063 - RNA, 19 nt, Human
uuccucauuucuggaacgc

SEQ ID NO: 1143064 - RNA, 23 nt, Human
uugcuggaauaaucccuggaugc

SEQ ID NO: 1143065 - RNA, 22 nt, Human
uuugaggaggcugugacuauuc

SEQ ID NO: 1143066 - RNA, 23 nt, Human
caacuucugauauaaacauuccu

SEQ ID NO: 1143067 - RNA, 26 nt, Human
uaacaaauauaaagaugccaaagggu

SEQ ID NO: 1143068 - RNA, 19 nt, Human
uacuuuuuuuuuuauaaug

SEQ ID NO: 1143069 - RNA, 20 nt, Human
uagaauaugucacuuucugg

SEQ ID NO: 1143070 - RNA, 20 nt, Human
uauaaagaugccaaagggua

SEQ ID NO: 1143071 - RNA, 19 nt, Human
uccucauaaguuuggaauu

SEQ ID NO: 1143072 - RNA, 23 nt, Human
ugauaaaugccacuaucagcuau

SEQ ID NO: 1143073 - RNA, 23 nt, Human
aaaccccauagucuuagccccaa

SEQ ID NO: 1143074 - RNA, 24 nt, Human
aaagcuccuucugcugauaaacuu

SEQ ID NO: 1143075 - RNA, 28 nt, Human
aaaguuccucucccuggauccucuuuuu

SEQ ID NO: 1143076 - RNA, 24 nt, Human
aagaaaucagagaagacacaaaca

SEQ ID NO: 1143077 - RNA, 22 nt, Human
aagaguucaagaccagccuggu

SEQ ID NO: 1143078 - RNA, 24 nt, Human
aagcaauccucagcaaaaagaaca

SEQ ID NO: 1143079 - RNA, 19 nt, Human
aaggcucuccuacccucca

SEQ ID NO: 1143080 - RNA, 22 nt, Human
aaggcucuccuacccuccauca

SEQ ID NO: 1143081 - RNA, 23 nt, Human
aagggcauccaaauagaggaggg

SEQ ID NO: 1143082 - RNA, 20 nt, Human
aaguuccucucccuggaucc

SEQ ID NO: 1143083 - RNA, 26 nt, Human
aaguuccucucccuggauccucuuuu

SEQ ID NO: 1143084 - RNA, 20 nt, Human
aaucagaauacaaaaacaaa

SEQ ID NO: 1143085 - RNA, 20 nt, Human
aauuuccauuugugcauccc

SEQ ID NO: 1143086 - RNA, 23 nt, Human
acaaaaacaaccaccaacaacau

SEQ ID NO: 1143087 - RNA, 21 nt, Human
acacaaacaaauggaaaaaca

SEQ ID NO: 1143088 - RNA, 22 nt, Human
acacagccaaaaaccaucacau

SEQ ID NO: 1143089 - RNA, 23 nt, Human
agaaaaccccauagucuuagccc

SEQ ID NO: 1143090 - RNA, 24 nt, Human
agaaaucagagaagacacaaacaa

SEQ ID NO: 1143091 - RNA, 21 nt, Human
agaauacaaaaacaaccacca

SEQ ID NO: 1143092 - RNA, 23 nt, Human
agccaaaaaccaucacauagucc

SEQ ID NO: 1143093 - RNA, 19 nt, Human
agccauggcaaacccacag

SEQ ID NO: 1143094 - RNA, 21 nt, Human
agccauggcaaacccacagcc

SEQ ID NO: 1143095 - RNA, 21 nt, Human
agcccuaccccaguccucaga

SEQ ID NO: 1143096 - RNA, 19 nt, Human
agccuggucaacauaguga

SEQ ID NO: 1143097 - RNA, 24 nt, Human
agccuggucaacauagugagauuc

SEQ ID NO: 1143098 - RNA, 24 nt, Human
agugcccgguugcccaagucaaaa

SEQ ID NO: 1143099 - RNA, 22 nt, Human
aguuguuccuucucugucuucu

SEQ ID NO: 1143100 - RNA, 20 nt, Human
auaaaaaguaauuacaauga

SEQ ID NO: 1143101 - RNA, 24 nt, Human
auaaauuuugucuuuaaaacagag

SEQ ID NO: 1143102 - RNA, 21 nt, Human
aucagaauacaaaaacaacca

SEQ ID NO: 1143103 - RNA, 23 nt, Human
aucuugaaauguccucucccuca

SEQ ID NO: 1143104 - RNA, 25 nt, Human
auucuggaucuccuuuucuucuccu

SEQ ID NO: 1143105 - RNA, 24 nt, Human
caaaaacagcucaucacuuugagc

SEQ ID NO: 1143106 - RNA, 23 nt, Human
caaaaagaacaaagcuggaggca

SEQ ID NO: 1143107 - RNA, 24 nt, Human
caaacccacagccaacauuacacu

SEQ ID NO: 1143108 - RNA, 23 nt, Human
caaacuauacuacagggcuacag

SEQ ID NO: 1143109 - RNA, 21 nt, Human
caaacuuccuuagaaagaggc

SEQ ID NO: 1143110 - RNA, 18 nt, Human
caaauagaggagggaaga

SEQ ID NO: 1143111 - RNA, 22 nt, Human
caacaacaucagcccaacuuuc

SEQ ID NO: 1143112 - RNA, 22 nt, Human
caacauagugagauucuaucuc

SEQ ID NO: 1143113 - RNA, 24 nt, Human
caagaccagccuggucaacauagu

SEQ ID NO: 1143114 - RNA, 21 nt, Human
caagaugauguuggccucaua

SEQ ID NO: 1143115 - RNA, 21 nt, Human
cacaacuuuaaccucagcuuc

SEQ ID NO: 1143116 - RNA, 20 nt, Human
cacaguuacucagcagcacu

SEQ ID NO: 1143117 - RNA, 19 nt, Human
cagaauacaaaaacaacca

SEQ ID NO: 1143118 - RNA, 21 nt, Human
cagaauacaaaaacaaccacc

SEQ ID NO: 1143119 - RNA, 23 nt, Human
cagaauacaaaaacaaccaccaa

SEQ ID NO: 1143120 - RNA, 24 nt, Human
cagaauacaaaaacaaccaccaac

SEQ ID NO: 1143121 - RNA, 25 nt, Human
cagaauacaaaaacaaccaccaaca

SEQ ID NO: 1143122 - RNA, 21 nt, Human
cagcaaaaagaacaaagcugg

SEQ ID NO: 1143123 - RNA, 26 nt, Human
cagcaaaaagaacaaagcuggaggca

SEQ ID NO: 1143124 - RNA, 20 nt, Human
caguaaccaaaacagcauga

SEQ ID NO: 1143125 - RNA, 24 nt, Human
caguaaccaaaacagcaugauacu

SEQ ID NO: 1143126 - RNA, 19 nt, Human
caucauguuacccaacuuc

SEQ ID NO: 1143127 - RNA, 24 nt, Human
caucccaugcccagcccacccucc

SEQ ID NO: 1143128 - RNA, 23 nt, Human
cauggcaaacccacagccaacau

SEQ ID NO: 1143129 - RNA, 18 nt, Human
cauucauaauugcuacac

SEQ ID NO: 1143130 - RNA, 21 nt, Human
ccaccaacaacaucagcccaa

SEQ ID NO: 1143131 - RNA, 23 nt, Human
ccagcuagucuauccuucagcca

SEQ ID NO: 1143132 - RNA, 22 nt, Human
cccaacuucaaacuauacuaca

SEQ ID NO: 1143133 - RNA, 18 nt, Human
ccccaaagcuccuucugc

SEQ ID NO: 1143134 - RNA, 24 nt, Human
ccccacacagccagcaugugucca

SEQ ID NO: 1143135 - RNA, 23 nt, Human
ccccacugucuuccacaacuuua

SEQ ID NO: 1143136 - RNA, 18 nt, Human
ccuccaucauuccucccu

SEQ ID NO: 1143137 - RNA, 24 nt, Human
ccucccucuaccccacacagccag

SEQ ID NO: 1143138 - RNA, 24 nt, Human
ccucuuuuuccuucuugagugccc

SEQ ID NO: 1143139 - RNA, 20 nt, Human
cucaaaauacaguucuguaa

SEQ ID NO: 1143140 - RNA, 18 nt, Human
cucccucuaccccacaca

SEQ ID NO: 1143141 - RNA, 23 nt, Human
cucugcaguucacucugcugcuu

SEQ ID NO: 1143142 - RNA, 23 nt, Human
cugaaaucagacaaugauuagaa

SEQ ID NO: 1143143 - RNA, 28 nt, Human
cugaaguuugugugugugugugugugug

SEQ ID NO: 1143144 - RNA, 24 nt, Human
cugcuaaauguaucucaauuguau

SEQ ID NO: 1143145 - RNA, 19 nt, Human
cuggguucugguuucuuuc

SEQ ID NO: 1143146 - RNA, 22 nt, Human
cugugacagugaaagauggcug

SEQ ID NO: 1143147 - RNA, 18 nt, Human
cuguugugacuuccuaug

SEQ ID NO: 1143148 - RNA, 23 nt, Human
cuucugcugauaaacuuuagcaa

SEQ ID NO: 1143149 - RNA, 21 nt, Human
gaagacacaaacaaauggaaa

SEQ ID NO: 1143150 - RNA, 19 nt, Human
gaaucacaguuacucagca

SEQ ID NO: 1143151 - RNA, 22 nt, Human
gagcuagccauggcaaacccac

SEQ ID NO: 1143152 - RNA, 22 nt, Human
gcaaaaagaacaaagcuggagg

SEQ ID NO: 1143153 - RNA, 19 nt, Human
gcauccaaauagaggaggg

SEQ ID NO: 1143154 - RNA, 22 nt, Human
gccauggcaaacccacagccaa

SEQ ID NO: 1143155 - RNA, 20 nt, Human
gccccaaagcuccuucugcu

SEQ ID NO: 1143156 - RNA, 22 nt, Human
gcccuaauagccaagcaauccu

SEQ ID NO: 1143157 - RNA, 23 nt, Human
gcuagccauggcaaacccacagc

SEQ ID NO: 1143158 - RNA, 25 nt, Human
ggcuucucccucuaguuguuccuuc

SEQ ID NO: 1143159 - RNA, 22 nt, Human
ggggaaucacaguuacucagca

SEQ ID NO: 1143160 - RNA, 21 nt, Human
ggucaugccuaugugugagcu

SEQ ID NO: 1143161 - RNA, 21 nt, Human
gugcaucccaugcccagccca

SEQ ID NO: 1143162 - RNA, 21 nt, Human
gugugugugugugugugugug

SEQ ID NO: 1143163 - RNA, 21 nt, Human
gugugugugugugugugugug

SEQ ID NO: 1143164 - RNA, 23 nt, Human
guuccuguaaaaaugguaccagc

SEQ ID NO: 1143165 - RNA, 24 nt, Human
guuccuguaaaaaugguaccagcu

SEQ ID NO: 1143166 - RNA, 24 nt, Human
guuuuguccuaccucucugugaca

SEQ ID NO: 1143167 - RNA, 24 nt, Human
uaaauuuugucuuuaaaacagagc

SEQ ID NO: 1143168 - RNA, 19 nt, Human
uaaccaaaacagcaugaua

SEQ ID NO: 1143169 - RNA, 20 nt, Human
uaaucccauucauaauugcu

SEQ ID NO: 1143170 - RNA, 25 nt, Human
uaauuuacagaugcaaguuaucccu

SEQ ID NO: 1143171 - RNA, 21 nt, Human
uacaaaaacaaccaccaacaa

SEQ ID NO: 1143172 - RNA, 24 nt, Human
uaccuaggaauacagcuaaccagg

SEQ ID NO: 1143173 - RNA, 21 nt, Human
uaccucacugucccuacccau

SEQ ID NO: 1143174 - RNA, 21 nt, Human
uagaaagaggccuuaccucac

SEQ ID NO: 1143175 - RNA, 18 nt, Human
uagacaggaagucaaacu

SEQ ID NO: 1143176 - RNA, 18 nt, Human
uagacaggaagucaaacu

SEQ ID NO: 1143177 - RNA, 19 nt, Human
uagacaggaagucaaacug

SEQ ID NO: 1143178 - RNA, 19 nt, Human
uagaggagggaagagagga

SEQ ID NO: 1143179 - RNA, 19 nt, Human
uagcauacaaaaucaaugu

SEQ ID NO: 1143180 - RNA, 22 nt, Human
uagugucuguggagaaacuuuu

SEQ ID NO: 1143181 - RNA, 23 nt, Human
uagugucuguggagaaacuuuuu

SEQ ID NO: 1143182 - RNA, 23 nt, Human
uaguuguuccuucucugucuucu

SEQ ID NO: 1143183 - RNA, 18 nt, Human
uauacugcccaaaguaau

SEQ ID NO: 1143184 - RNA, 23 nt, Human
uauaucuucuucuucacugcauu

SEQ ID NO: 1143185 - RNA, 18 nt, Human
ucacucugcugcuucaga

SEQ ID NO: 1143186 - RNA, 19 nt, Human
ucacugcauuuuugugggc

SEQ ID NO: 1143187 - RNA, 22 nt, Human
ucaguuauccccacugucuucc

SEQ ID NO: 1143188 - RNA, 18 nt, Human
uccacaacuuuaaccuca

SEQ ID NO: 1143189 - RNA, 22 nt, Human
ucccaugcccagcccacccucc

SEQ ID NO: 1143190 - RNA, 21 nt, Human
ucccuggauccucuuuuuccu

SEQ ID NO: 1143191 - RNA, 22 nt, Human
ucccuggauccucuuuuuccuu

SEQ ID NO: 1143192 - RNA, 21 nt, Human
uccucuuuuuccuucuugagu

SEQ ID NO: 1143193 - RNA, 20 nt, Human
ucgcuugggugccaagaguu

SEQ ID NO: 1143194 - RNA, 24 nt, Human
ucgcuugggugccaagaguucaag

SEQ ID NO: 1143195 - RNA, 20 nt, Human
ucuagucggaagugccaaaa

SEQ ID NO: 1143196 - RNA, 20 nt, Human
ucucucugucaugauucugg

SEQ ID NO: 1143197 - RNA, 22 nt, Human
ucuuccacaacuuuaaccucag

SEQ ID NO: 1143198 - RNA, 18 nt, Human
ugaaaauuuucaggucug

SEQ ID NO: 1143199 - RNA, 19 nt, Human
ugaaagccuuuucugcaua

SEQ ID NO: 1143200 - RNA, 18 nt, Human
ugaagaacauaaucccau

SEQ ID NO: 1143201 - RNA, 24 nt, Human
ugaagaacauaaucccauucauaa

SEQ ID NO: 1143202 - RNA, 18 nt, Human
ugagauaaucacaugguu

SEQ ID NO: 1143203 - RNA, 21 nt, Human
ugaugccaucaccuggggaau

SEQ ID NO: 1143204 - RNA, 21 nt, Human
ugcccagcccacccuccacca

SEQ ID NO: 1143205 - RNA, 22 nt, Human
ugccuuggcuucucccucuagu

SEQ ID NO: 1143206 - RNA, 22 nt, Human
uggaaccaaaaaaaaaaagagc

SEQ ID NO: 1143207 - RNA, 19 nt, Human
uggacacagccaaaaacca

SEQ ID NO: 1143208 - RNA, 18 nt, Human
uggcaaacccacagccaa

SEQ ID NO: 1143209 - RNA, 20 nt, Human
uggcaaaggucaucucucug

SEQ ID NO: 1143210 - RNA, 25 nt, Human
uggccugaaguuugugugugugugu

SEQ ID NO: 1143211 - RNA, 23 nt, Human
ugucccuacccaucuccucucug

SEQ ID NO: 1143212 - RNA, 21 nt, Human
ugugacuuccuauggacacag

SEQ ID NO: 1143213 - RNA, 19 nt, Human
ugugcaaaacuggaagggc

SEQ ID NO: 1143214 - RNA, 18 nt, Human
ugugugugugugugugug

SEQ ID NO: 1143215 - RNA, 18 nt, Human
ugugugugugugugugug

SEQ ID NO: 1143216 - RNA, 18 nt, Human
ugugugugugugugugug

SEQ ID NO: 1143217 - RNA, 18 nt, Human
ugugugugugugugugug

SEQ ID NO: 1143218 - RNA, 18 nt, Human
ugugugugugugugugug

SEQ ID NO: 1143219 - RNA, 18 nt, Human
ugugugugugugugugug

SEQ ID NO: 1143220 - RNA, 18 nt, Human
ugugugugugugugugug

SEQ ID NO: 1143221 - RNA, 18 nt, Human
ugugugugugugugugug

SEQ ID NO: 1143222 - RNA, 18 nt, Human
ugugugugugugugugug

SEQ ID NO: 1143223 - RNA, 18 nt, Human
ugugugugugugugugug

SEQ ID NO: 1143224 - RNA, 18 nt, Human
ugugugugugugugugug

SEQ ID NO: 1143225 - RNA, 18 nt, Human
ugugugugugugugugug

SEQ ID NO: 1143226 - RNA, 19 nt, Human
ugugugugugugugugugc

SEQ ID NO: 1143227 - RNA, 21 nt, Human
ugugugugugugugugugugu

SEQ ID NO: 1143228 - RNA, 21 nt, Human
ugugugugugugugugugugu

SEQ ID NO: 1143229 - RNA, 21 nt, Human
ugugugugugugugugugugu

SEQ ID NO: 1143230 - RNA, 21 nt, Human
ugugugugugugugugugugu

SEQ ID NO: 1143231 - RNA, 21 nt, Human
ugugugugugugugugugugu

SEQ ID NO: 1143232 - RNA, 21 nt, Human
ugugugugugugugugugugu

SEQ ID NO: 1143233 - RNA, 21 nt, Human
ugugugugugugugugugugu

SEQ ID NO: 1143234 - RNA, 21 nt, Human
ugugugugugugugugugugu

SEQ ID NO: 1143235 - RNA, 21 nt, Human
ugugugugugugugugugugu

SEQ ID NO: 1143236 - RNA, 21 nt, Human
ugugugugugugugugugugu

SEQ ID NO: 1143237 - RNA, 21 nt, Human
ugugugugugugugugugugu

SEQ ID NO: 1143238 - RNA, 21 nt, Human
ugugugugugugugugugugu

SEQ ID NO: 1143239 - RNA, 21 nt, Human
ugugugugugugugugugugu

SEQ ID NO: 1143240 - RNA, 21 nt, Human
ugugugugugugugugugugu

SEQ ID NO: 1143241 - RNA, 21 nt, Human
ugugugugugugugugugugu

SEQ ID NO: 1143242 - RNA, 21 nt, Human
ugugugugugugugugugugu

SEQ ID NO: 1143243 - RNA, 21 nt, Human
ugugugugugugugugugugu

SEQ ID NO: 1143244 - RNA, 21 nt, Human
ugugugugugugugugugugu

SEQ ID NO: 1143245 - RNA, 21 nt, Human
ugugugugugugugugugugu

SEQ ID NO: 1143246 - RNA, 21 nt, Human
ugugugugugugugugugugu

SEQ ID NO: 1143247 - RNA, 21 nt, Human
ugugugugugugugugugugu

SEQ ID NO: 1143248 - RNA, 21 nt, Human
ugugugugugugugugugugu

SEQ ID NO: 1143249 - RNA, 22 nt, Human
ugugugugugugugugugugug

SEQ ID NO: 1143250 - RNA, 22 nt, Human
ugugugugugugugugugugug

SEQ ID NO: 1143251 - RNA, 22 nt, Human
ugugugugugugugugugugug

SEQ ID NO: 1143252 - RNA, 22 nt, Human
ugugugugugugugugugugug

SEQ ID NO: 1143253 - RNA, 22 nt, Human
ugugugugugugugugugugug

SEQ ID NO: 1143254 - RNA, 22 nt, Human
ugugugugugugugugugugug

SEQ ID NO: 1143255 - RNA, 22 nt, Human
ugugugugugugugugugugug

SEQ ID NO: 1143256 - RNA, 22 nt, Human
ugugugugugugugugugugug

SEQ ID NO: 1143257 - RNA, 18 nt, Human
uuaaaacagagcucuuga

SEQ ID NO: 1143258 - RNA, 23 nt, Human
uuccauuugugcaucccaugccc

SEQ ID NO: 1143259 - RNA, 24 nt, Human
uuccucccucuaccccacacagcc

SEQ ID NO: 1143260 - RNA, 21 nt, Human
uuccuucuugagugcccgguu

SEQ ID NO: 1143261 - RNA, 19 nt, Human
uugaaauguccucucccuc

SEQ ID NO: 1143262 - RNA, 20 nt, Human
uugaauuuuuuuuucuucau

SEQ ID NO: 1143263 - RNA, 25 nt, Human
uugacguguauguugaggcaaccuu

SEQ ID NO: 1143264 - RNA, 18 nt, Human
uugugggcugcacuuacc

SEQ ID NO: 1143265 - RNA, 24 nt, Human
uuuccauuugugcaucccaugccc

SEQ ID NO: 1143266 - RNA, 24 nt, Human
uuugugugugugugugugugugug

SEQ ID NO: 1143267 - RNA, 20 nt, Human
aacucccgccaaagcagcag

SEQ ID NO: 1143268 - RNA, 22 nt, Human
caaagcagcagcuccgcaaagc

SEQ ID NO: 1143269 - RNA, 23 nt, Human
caaagcagcagcuccgcaaagcc

SEQ ID NO: 1143270 - RNA, 22 nt, Human
ccucacaccagcuuccaacucc

SEQ ID NO: 1143271 - RNA, 21 nt, Human
cucccgccaaagcagcagcuc

SEQ ID NO: 1143272 - RNA, 21 nt, Human
ucccgccaaagcagcagcucc

SEQ ID NO: 1143273 - RNA, 19 nt, Human
uccgcaaagccgccacaag

SEQ ID NO: 1143274 - RNA, 22 nt, Human
uccgcaaagccgccacaaggcg

SEQ ID NO: 1143275 - RNA, 26 nt, Human
aaccaugggcaccagauaugaccugg

SEQ ID NO: 1143276 - RNA, 19 nt, Human
ccaaggaauuagaaauacc

SEQ ID NO: 1143277 - RNA, 24 nt, Human
ccacugauauaucugaaaaguaaa

SEQ ID NO: 1143278 - RNA, 20 nt, Human
cccaaggaauuagaaauacc

SEQ ID NO: 1143279 - RNA, 21 nt, Human
cucaugaccaccucacacgcu

SEQ ID NO: 1143280 - RNA, 23 nt, Human
gcccccacuggcaaggugaaggu

SEQ ID NO: 1143281 - RNA, 19 nt, Human
uccuugacuaggcccugca

SEQ ID NO: 1143282 - RNA, 21 nt, Human
ucugaaaaguaaacacuuuug

SEQ ID NO: 1143283 - RNA, 21 nt, Human
ugaccugcugaucccagaggc

SEQ ID NO: 1143284 - RNA, 23 nt, Human
ugauauaucugaaaaguaaacac

SEQ ID NO: 1143285 - RNA, 19 nt, Human
ugggcaccagauaugaccu

SEQ ID NO: 1143286 - RNA, 23 nt, Human
uuagaaauaccuuccucuguuuu

SEQ ID NO: 1143287 - RNA, 22 nt, Human
aaaaacauuaaagcaaaccccc

SEQ ID NO: 1143288 - RNA, 22 nt, Human
aacauuaaagcaaacccccaaa

SEQ ID NO: 1143289 - RNA, 25 nt, Human
aacccccaaaaccccacaccgaaaa

SEQ ID NO: 1143290 - RNA, 19 nt, Human
aagaccccgugcugguuuc

SEQ ID NO: 1143291 - RNA, 18 nt, Human
aagcaaacccccaaaacc

SEQ ID NO: 1143292 - RNA, 20 nt, Human
aagcaaacccccaaaacccc

SEQ ID NO: 1143293 - RNA, 23 nt, Human
aagcaaacccccaaaaccccaca

SEQ ID NO: 1143294 - RNA, 22 nt, Human
acagagcguggcuguugagccc

SEQ ID NO: 1143295 - RNA, 23 nt, Human
acagagcguggcuguugagcccu

SEQ ID NO: 1143296 - RNA, 24 nt, Human
acccacucugccuaccucaaggcc

SEQ ID NO: 1143297 - RNA, 18 nt, Human
accgaaaacaaaggcuug

SEQ ID NO: 1143298 - RNA, 18 nt, Human
accguguucccuccugga

SEQ ID NO: 1143299 - RNA, 22 nt, Human
agaaacuggcagaauccgaccc

SEQ ID NO: 1143300 - RNA, 19 nt, Human
agcccugguagccacuccu

SEQ ID NO: 1143301 - RNA, 19 nt, Human
aggccaggcccaggcggcu

SEQ ID NO: 1143302 - RNA, 20 nt, Human
aggccccgagagcuggcuug

SEQ ID NO: 1143303 - RNA, 21 nt, Human
agugaagaaucaggagagcca

SEQ ID NO: 1143304 - RNA, 23 nt, Human
caaaauacaaagcccaacauuua

SEQ ID NO: 1143305 - RNA, 26 nt, Human
caacgccugaggaccagcacccaucu

SEQ ID NO: 1143306 - RNA, 19 nt, Human
cacuggaaaaaaggccccg

SEQ ID NO: 1143307 - RNA, 24 nt, Human
cacuggaaaaaaggccccgagagc

SEQ ID NO: 1143308 - RNA, 22 nt, Human
cagaagccugaggaugaccgug

SEQ ID NO: 1143309 - RNA, 19 nt, Human
cagaguagccaaaugggca

SEQ ID NO: 1143310 - RNA, 21 nt, Human
cagcagaguagccaaaugggc

SEQ ID NO: 1143311 - RNA, 25 nt, Human
caggcuggcucccaagcuuggugca

SEQ ID NO: 1143312 - RNA, 21 nt, Human
caugucuuugagcacuugaug

SEQ ID NO: 1143313 - RNA, 18 nt, Human
ccaaggguggggcugugu

SEQ ID NO: 1143314 - RNA, 21 nt, Human
ccaaggguggggcuguguggc

SEQ ID NO: 1143315 - RNA, 26 nt, Human
ccagcaguguccccaacgccugagga

SEQ ID NO: 1143316 - RNA, 22 nt, Human
cccaaaaccccacaccgaaaac

SEQ ID NO: 1143317 - RNA, 21 nt, Human
cccaacugccuuccuuucuug

SEQ ID NO: 1143318 - RNA, 20 nt, Human
cccacacagagagaggaggc

SEQ ID NO: 1143319 - RNA, 18 nt, Human
cccacaccgaaaacaaag

SEQ ID NO: 1143320 - RNA, 20 nt, Human
cccacaccgaaaacaaaggc

SEQ ID NO: 1143321 - RNA, 21 nt, Human
ccccacaccgaaaacaaaggc

SEQ ID NO: 1143322 - RNA, 24 nt, Human
ccccaucgacccagcagugucccc

SEQ ID NO: 1143323 - RNA, 23 nt, Human
cccccaaaaccccacaccgaaaa

SEQ ID NO: 1143324 - RNA, 24 nt, Human
cccccaaaaccccacaccgaaaac

SEQ ID NO: 1143325 - RNA, 28 nt, Human
cccccaaaaccccacaccgaaaacaaag

SEQ ID NO: 1143326 - RNA, 27 nt, Human
ccucucagcccaaggguggggcugugu

SEQ ID NO: 1143327 - RNA, 20 nt, Human
ccucugcggcugcaggaacu

SEQ ID NO: 1143328 - RNA, 18 nt, Human
cgcaccccagagugaaga

SEQ ID NO: 1143329 - RNA, 21 nt, Human
cgccacaacccacucugccua

SEQ ID NO: 1143330 - RNA, 22 nt, Human
cggcgcugagcucugcgcuguc

SEQ ID NO: 1143331 - RNA, 18 nt, Human
cuaaaaugccauuauucu

SEQ ID NO: 1143332 - RNA, 25 nt, Human
cucugcggcugcaggaaccccgcuc

SEQ ID NO: 1143333 - RNA, 21 nt, Human
cugcggugaagcaccugggcu

SEQ ID NO: 1143334 - RNA, 20 nt, Human
cuggaggggcuucccagguc

SEQ ID NO: 1143335 - RNA, 21 nt, Human
cuuggccaugaguccuuggcc

SEQ ID NO: 1143336 - RNA, 25 nt, Human
gaccccaucgacccagcaguguccc

SEQ ID NO: 1143337 - RNA, 18 nt, Human
gcaaacccccaaaacccc

SEQ ID NO: 1143338 - RNA, 19 nt, Human
gcaaacccccaaaacccca

SEQ ID NO: 1143339 - RNA, 21 nt, Human
gcagagcagaaacuggcagaa

SEQ ID NO: 1143340 - RNA, 20 nt, Human
gcagcagaguagccaaaugg

SEQ ID NO: 1143341 - RNA, 18 nt, Human
gcaggcuggcucccaagc

SEQ ID NO: 1143342 - RNA, 19 nt, Human
gucugcggugaagcaccug

SEQ ID NO: 1143343 - RNA, 23 nt, Human
gugaagcaccugggcucugggag

SEQ ID NO: 1143344 - RNA, 18 nt, Human
gugcucaauggcuugcgg

SEQ ID NO: 1143345 - RNA, 22 nt, Human
uaaagcaaacccccaaaacccc

SEQ ID NO: 1143346 - RNA, 23 nt, Human
uaagccaccguccuggucccaca

SEQ ID NO: 1143347 - RNA, 21 nt, Human
uccucucagcccaaggguggg

SEQ ID NO: 1143348 - RNA, 23 nt, Human
uccuuugcuggggcccaacugcc

SEQ ID NO: 1143349 - RNA, 18 nt, Human
ucgacccagcaguguccc

SEQ ID NO: 1143350 - RNA, 23 nt, Human
ucgccuguggggugaaugaaggu

SEQ ID NO: 1143351 - RNA, 21 nt, Human
ucuacggcccagucuuggaac

SEQ ID NO: 1143352 - RNA, 20 nt, Human
ucugcggugaagcaccuggg

SEQ ID NO: 1143353 - RNA, 18 nt, Human
ucugguuuucucacaacu

SEQ ID NO: 1143354 - RNA, 18 nt, Human
ucugugacaaggcacagg

SEQ ID NO: 1143355 - RNA, 22 nt, Human
ucuuuggcugcagagcagaaac

SEQ ID NO: 1143356 - RNA, 22 nt, Human
ugaagaacgcaccccagaguga

SEQ ID NO: 1143357 - RNA, 22 nt, Human
ugaauacuuaaguaccacugaa

SEQ ID NO: 1143358 - RNA, 18 nt, Human
ugagaugcuguucucccu

SEQ ID NO: 1143359 - RNA, 25 nt, Human
ugcagcagaguagccaaaugggcac

SEQ ID NO: 1143360 - RNA, 21 nt, Human
ugcggucugcggugaagcacc

SEQ ID NO: 1143361 - RNA, 18 nt, Human
ugcuggggcccaacugcc

SEQ ID NO: 1143362 - RNA, 23 nt, Human
ugcuggggcccaacugccuuccu

SEQ ID NO: 1143363 - RNA, 21 nt, Human
uggaaaaaaggccccgagagc

SEQ ID NO: 1143364 - RNA, 19 nt, Human
uggcagaauccgaccccau

SEQ ID NO: 1143365 - RNA, 22 nt, Human
uggcagagggagggaaaggccg

SEQ ID NO: 1143366 - RNA, 25 nt, Human
uggcaggcuggcucccaagcuuggu

SEQ ID NO: 1143367 - RNA, 22 nt, Human
uggccacugcuuugggugaugu

SEQ ID NO: 1143368 - RNA, 20 nt, Human
uggcugcagagcagaaacug

SEQ ID NO: 1143369 - RNA, 21 nt, Human
uuaaagcaaacccccaaaacc

SEQ ID NO: 1143370 - RNA, 25 nt, Human
uuaaagcaaacccccaaaaccccac

SEQ ID NO: 1143371 - RNA, 24 nt, Human
uucaaaaacauuaaagcaaacccc

SEQ ID NO: 1143372 - RNA, 21 nt, Human
uucuugguuguguuuccucca

SEQ ID NO: 1143373 - RNA, 21 nt, Human
uugcuggggcccaacugccuu

SEQ ID NO: 1143374 - RNA, 22 nt, Human
uugggugaugugcucaauggcu

SEQ ID NO: 1143375 - RNA, 19 nt, Human
aacaaggccucuguccaaa

SEQ ID NO: 1143376 - RNA, 21 nt, Human
aaccgaaggaaaagccuuagc

SEQ ID NO: 1143377 - RNA, 26 nt, Human
accgaaggaaaagccuuagccuuagc

SEQ ID NO: 1143378 - RNA, 23 nt, Human
agagggggaaagggagaacgaau

SEQ ID NO: 1143379 - RNA, 20 nt, Human
agcaaggagaguuggccuca

SEQ ID NO: 1143380 - RNA, 25 nt, Human
aggaaagcaaggaggcccaacuggc

SEQ ID NO: 1143381 - RNA, 24 nt, Human
aggcccaacuggccuggucuguaa

SEQ ID NO: 1143382 - RNA, 19 nt, Human
ccaacccggcccuggccac

SEQ ID NO: 1143383 - RNA, 18 nt, Human
ccagcagagaaggaaccg

SEQ ID NO: 1143384 - RNA, 19 nt, Human
cccagaucccccuccccaa

SEQ ID NO: 1143385 - RNA, 19 nt, Human
ccccagaucccccucccca

SEQ ID NO: 1143386 - RNA, 20 nt, Human
ccccagaucccccuccccaa

SEQ ID NO: 1143387 - RNA, 26 nt, Human
cccggcccuggccacgcgccgguucc

SEQ ID NO: 1143388 - RNA, 20 nt, Human
ccggcccuggccacgcgcgc

SEQ ID NO: 1143389 - RNA, 18 nt, Human
ccuuagccuuagccccag

SEQ ID NO: 1143390 - RNA, 18 nt, Human
cuguccaaaagggcagau

SEQ ID NO: 1143391 - RNA, 21 nt, Human
gaaaagccuuagccuuagccc

SEQ ID NO: 1143392 - RNA, 22 nt, Human
gaaacagaaaaauccagguacc

SEQ ID NO: 1143393 - RNA, 26 nt, Human
gagaaggaaccgaaggaaaagccuua

SEQ ID NO: 1143394 - RNA, 19 nt, Human
gcaaaugccccagccagga

SEQ ID NO: 1143395 - RNA, 24 nt, Human
gcagauccaacccggcccuggcca

SEQ ID NO: 1143396 - RNA, 19 nt, Human
gccccagaucccccucccc

SEQ ID NO: 1143397 - RNA, 18 nt, Human
ggagagagggggaaaggg

SEQ ID NO: 1143398 - RNA, 19 nt, Human
ggagcaagaaugagcggug

SEQ ID NO: 1143399 - RNA, 20 nt, Human
uagccccagaucccccuccc

SEQ ID NO: 1143400 - RNA, 24 nt, Human
uagccccagaucccccuccccaaa

SEQ ID NO: 1143401 - RNA, 22 nt, Human
uccaacccggcccuggccacgc

SEQ ID NO: 1143402 - RNA, 22 nt, Human
ucccccaacguggaagccuuaa

SEQ ID NO: 1143403 - RNA, 22 nt, Human
ucccucaggaggccuuccacuc

SEQ ID NO: 1143404 - RNA, 21 nt, Human
ucucuugguggcuucuggggc

SEQ ID NO: 1143405 - RNA, 22 nt, Human
ucucuugguggcuucuggggcc

SEQ ID NO: 1143406 - RNA, 21 nt, Human
ucugagcccuaacuaggcgac

SEQ ID NO: 1143407 - RNA, 20 nt, Human
ugcacugguacuuccgcacg

SEQ ID NO: 1143408 - RNA, 19 nt, Human
ugguacuuccgcacguuuc

SEQ ID NO: 1143409 - RNA, 23 nt, Human
ugguggcuucuggggccagcaga

SEQ ID NO: 1143410 - RNA, 22 nt, Human
uuccgcacguuucucacgggcu

SEQ ID NO: 1143411 - RNA, 24 nt, Human
uuccgcacguuucucacgggcuuc

SEQ ID NO: 1143412 - RNA, 22 nt, Human
aaaaaaaacagacuucugccca

SEQ ID NO: 1143413 - RNA, 25 nt, Human
aaaaaaaacagacuucugcccagaa

SEQ ID NO: 1143414 - RNA, 19 nt, Human
aaaacguauacccacggga

SEQ ID NO: 1143415 - RNA, 21 nt, Human
aaaccugcaguaaguuuccaa

SEQ ID NO: 1143416 - RNA, 22 nt, Human
aaauggaaugaaaaccaacacc

SEQ ID NO: 1143417 - RNA, 20 nt, Human
aacacagcuuuaaaaauaag

SEQ ID NO: 1143418 - RNA, 23 nt, Human
aacaugcucgucgaaauggaaug

SEQ ID NO: 1143419 - RNA, 24 nt, Human
aaccugcaguaaguuuccaaaaag

SEQ ID NO: 1143420 - RNA, 19 nt, Human
aagaaggggaaacggcaga

SEQ ID NO: 1143421 - RNA, 23 nt, Human
aagacgcaaaaauagucugaaau

SEQ ID NO: 1143422 - RNA, 23 nt, Human
aagccugcaaccagaaaagccag

SEQ ID NO: 1143423 - RNA, 18 nt, Human
aaugaaaaaaaacagacu

SEQ ID NO: 1143424 - RNA, 25 nt, Human
aaugaaaaaaaacagacuucugccc

SEQ ID NO: 1143425 - RNA, 28 nt, Human
acacagcuuuaaaaauaaggggaacgcc

SEQ ID NO: 1143426 - RNA, 20 nt, Human
acacuggaccaaaucuaugc

SEQ ID NO: 1143427 - RNA, 23 nt, Human
acuaaaaugcaggaggccaagca

SEQ ID NO: 1143428 - RNA, 18 nt, Human
agacauccagucaucgcu

SEQ ID NO: 1143429 - RNA, 19 nt, Human
agacauuuggcucaguuga

SEQ ID NO: 1143430 - RNA, 18 nt, Human
agcuggaugcugcagcug

SEQ ID NO: 1143431 - RNA, 21 nt, Human
aggaaaaagugaauaugcaau

SEQ ID NO: 1143432 - RNA, 20 nt, Human
aggccaagcaaauggccauc

SEQ ID NO: 1143433 - RNA, 23 nt, Human
agugaugaggaaagacgcaaaaa

SEQ ID NO: 1143434 - RNA, 22 nt, Human
aguuacagaguucacagaauug

SEQ ID NO: 1143435 - RNA, 19 nt, Human
aucugcugccucugaaaug

SEQ ID NO: 1143436 - RNA, 25 nt, Human
caaaaagugaugaggaaagacgcaa

SEQ ID NO: 1143437 - RNA, 24 nt, Human
caaaaccugcaguaaguuuccaaa

SEQ ID NO: 1143438 - RNA, 23 nt, Human
caaccagaaaagccagcagcaca

SEQ ID NO: 1143439 - RNA, 20 nt, Human
caagauacaggcagauauua

SEQ ID NO: 1143440 - RNA, 23 nt, Human
cacaaaaccugcaguaaguuucc

SEQ ID NO: 1143441 - RNA, 25 nt, Human
cacagaauugucuucccuccucacu

SEQ ID NO: 1143442 - RNA, 18 nt, Human
caccaaaugcuucccagu

SEQ ID NO: 1143443 - RNA, 24 nt, Human
cacuacauggcuggggucacaagu

SEQ ID NO: 1143444 - RNA, 22 nt, Human
cacugcacucauaaggagcagg

SEQ ID NO: 1143445 - RNA, 19 nt, Human
cacuggaccaaaucuaugc

SEQ ID NO: 1143446 - RNA, 24 nt, Human
cagaagcccugccccaggccugug

SEQ ID NO: 1143447 - RNA, 19 nt, Human
cagcagcacaaaggggcgu

SEQ ID NO: 1143448 - RNA, 18 nt, Human
caguguguggcuuccuuc

SEQ ID NO: 1143449 - RNA, 20 nt, Human
cauuaagaaggggaaacggc

SEQ ID NO: 1143450 - RNA, 21 nt, Human
ccaaggagauucuuggggaaa

SEQ ID NO: 1143451 - RNA, 21 nt, Human
ccacugcacucauaaggagca

SEQ ID NO: 1143452 - RNA, 22 nt, Human
ccagaaaagccagcagcacaaa

SEQ ID NO: 1143453 - RNA, 24 nt, Human
ccaucagaagcccugccccaggcc

SEQ ID NO: 1143454 - RNA, 24 nt, Human
cccugccccaggccugugccaauu

SEQ ID NO: 1143455 - RNA, 20 nt, Human
ccgcaacccccacccccaaa

SEQ ID NO: 1143456 - RNA, 21 nt, Human
ccugcaaccagaaaagccagc

SEQ ID NO: 1143457 - RNA, 19 nt, Human
ccugugaccaugggaaagc

SEQ ID NO: 1143458 - RNA, 19 nt, Human
cuccgcaacccccaccccc

SEQ ID NO: 1143459 - RNA, 22 nt, Human
cugcugccucugaaaugacuga

SEQ ID NO: 1143460 - RNA, 23 nt, Human
cuggaaaaaugaaaaaaaacaga

SEQ ID NO: 1143461 - RNA, 21 nt, Human
cuggaugcugcagcuggacuc

SEQ ID NO: 1143462 - RNA, 23 nt, Human
cuggugccaacagccuggucuuu

SEQ ID NO: 1143463 - RNA, 21 nt, Human
gaaaagccagcagcacaaagg

SEQ ID NO: 1143464 - RNA, 21 nt, Human
gaauuuuaaacuugauuucuc

SEQ ID NO: 1143465 - RNA, 23 nt, Human
gacacuuuuuacaaaccucacau

SEQ ID NO: 1143466 - RNA, 22 nt, Human
gaccaugggaaagccugcaacc

SEQ ID NO: 1143467 - RNA, 25 nt, Human
gagcuccaacacagcuuuaaaaaua

SEQ ID NO: 1143468 - RNA, 18 nt, Human
gcacaaaaccugcaguaa

SEQ ID NO: 1143469 - RNA, 18 nt, Human
gcacagagaaagagcacc

SEQ ID NO: 1143470 - RNA, 18 nt, Human
gccuggaggccgccaggc

SEQ ID NO: 1143471 - RNA, 22 nt, Human
ggaaaaagugaauaugcaauau

SEQ ID NO: 1143472 - RNA, 21 nt, Human
ggacuaaaaugcaggaggcca

SEQ ID NO: 1143473 - RNA, 19 nt, Human
ggagauucuuggggaaagg

SEQ ID NO: 1143474 - RNA, 21 nt, Human
gggcaaaacacuaguuggugg

SEQ ID NO: 1143475 - RNA, 19 nt, Human
guucugacucaauuucacu

SEQ ID NO: 1143476 - RNA, 19 nt, Human
uaaaggaaacacaauugca

SEQ ID NO: 1143477 - RNA, 18 nt, Human
uaagaguauuuggauuga

SEQ ID NO: 1143478 - RNA, 25 nt, Human
uaaggagcaggcacagagaaagagc

SEQ ID NO: 1143479 - RNA, 21 nt, Human
uaaguaauaugaccuacgaau

SEQ ID NO: 1143480 - RNA, 22 nt, Human
uaaguucuggugccaacagccu

SEQ ID NO: 1143481 - RNA, 19 nt, Human
uacauggcuggggucacaa

SEQ ID NO: 1143482 - RNA, 22 nt, Human
uacauuaagaaggggaaacggc

SEQ ID NO: 1143483 - RNA, 24 nt, Human
uacauuaagaaggggaaacggcca

SEQ ID NO: 1143484 - RNA, 19 nt, Human
uaugcaauauauacauaua

SEQ ID NO: 1143485 - RNA, 23 nt, Human
uauucuucuauggugcuggugga

SEQ ID NO: 1143486 - RNA, 20 nt, Human
ucccugggcaucugcugccu

SEQ ID NO: 1143487 - RNA, 23 nt, Human
ucccugggcaucugcugccucug

SEQ ID NO: 1143488 - RNA, 20 nt, Human
uccgcaacccccacccccaa

SEQ ID NO: 1143489 - RNA, 22 nt, Human
uccgcaacccccacccccaaaa

SEQ ID NO: 1143490 - RNA, 22 nt, Human
uccuggaaaaaugaaaaaaaac

SEQ ID NO: 1143491 - RNA, 23 nt, Human
ucgaaauggaaugaaaaccaaca

SEQ ID NO: 1143492 - RNA, 23 nt, Human
ucuucuauggugcugguggaagu

SEQ ID NO: 1143493 - RNA, 24 nt, Human
ugaaaaaaaacagacuucugccca

SEQ ID NO: 1143494 - RNA, 19 nt, Human
ugacaauauccaacugucc

SEQ ID NO: 1143495 - RNA, 18 nt, Human
ugacagugcauccuguga

SEQ ID NO: 1143496 - RNA, 20 nt, Human
ugagcuggaugcugcagcug

SEQ ID NO: 1143497 - RNA, 20 nt, Human
ugauaaguaauaugaccuac

SEQ ID NO: 1143498 - RNA, 18 nt, Human
ugauuucuccgcaacccc

SEQ ID NO: 1143499 - RNA, 22 nt, Human
uggaaaaaugaaaaaaaacaga

SEQ ID NO: 1143500 - RNA, 19 nt, Human
uggaaugaaaaccaacacc

SEQ ID NO: 1143501 - RNA, 22 nt, Human
uggcucaguugauaaguaauau

SEQ ID NO: 1143502 - RNA, 19 nt, Human
ugucaaggcacaaaaccug

SEQ ID NO: 1143503 - RNA, 23 nt, Human
uguccuggaaaaaugaaaaaaaa

SEQ ID NO: 1143504 - RNA, 18 nt, Human
uuaauacuccuacaauuc

SEQ ID NO: 1143505 - RNA, 20 nt, Human
uuacaagguaaaggaaacac

SEQ ID NO: 1143506 - RNA, 25 nt, Human
uucacuuuaucaugaaaauacacug

SEQ ID NO: 1143507 - RNA, 18 nt, Human
uugucaaggcacaaaacc

SEQ ID NO: 1143508 - RNA, 19 nt, Human
uuuaaaaauaagucaaagu

SEQ ID NO: 1143509 - RNA, 21 nt, Human
uuuaaacuugauuucuccgca

SEQ ID NO: 1143510 - RNA, 20 nt, Human
uuuaauacuccuacaauuca

SEQ ID NO: 1143511 - RNA, 21 nt, Human
uuucuugggucucccugggca

SEQ ID NO: 1143512 - RNA, 25 nt, Human
uuuuaaacuugauuucuccgcaacc

SEQ ID NO: 1143513 - RNA, 19 nt, Human
aagcagacagaaagaaucu

SEQ ID NO: 1143514 - RNA, 20 nt, Human
acagaaagaaucuuuuugau

SEQ ID NO: 1143515 - RNA, 19 nt, Human
cuuuuugaugucgauguuc

SEQ ID NO: 1143516 - RNA, 23 nt, Human
ggaggucuguguuucuccuuucu

SEQ ID NO: 1143517 - RNA, 24 nt, Human
uaugcuguauuguuuuuauuugua

SEQ ID NO: 1143518 - RNA, 24 nt, Human
uggauacagagggccaacuguauu

SEQ ID NO: 1143519 - RNA, 20 nt, Human
uggauguggaacccauggau

SEQ ID NO: 1143520 - RNA, 24 nt, Human
ugugaauaagcagacagaaagaau

SEQ ID NO: 1143521 - RNA, 24 nt, Human
accuuccacauagaaagcuuugac

SEQ ID NO: 1143522 - RNA, 19 nt, Human
agagacauauauggucccu

SEQ ID NO: 1143523 - RNA, 18 nt, Human
agaggguggcacuggugu

SEQ ID NO: 1143524 - RNA, 23 nt, Human
agcugucaucuggccccagccuc

SEQ ID NO: 1143525 - RNA, 18 nt, Human
aggugguucuugcucagg

SEQ ID NO: 1143526 - RNA, 21 nt, Human
caaagugucugucgaacccuu

SEQ ID NO: 1143527 - RNA, 23 nt, Human
caaguucuugucauagcaaaaca

SEQ ID NO: 1143528 - RNA, 19 nt, Human
cacgcagacuagagaugcu

SEQ ID NO: 1143529 - RNA, 18 nt, Human
cagagaugauauuuuucc

SEQ ID NO: 1143530 - RNA, 18 nt, Human
caggaaugcugcaguggu

SEQ ID NO: 1143531 - RNA, 26 nt, Human
cagucaccuuccacauagaaagcuuu

SEQ ID NO: 1143532 - RNA, 18 nt, Human
cauguuacucaagcuaug

SEQ ID NO: 1143533 - RNA, 24 nt, Human
cucaaagugucugucgaacccuua

SEQ ID NO: 1143534 - RNA, 23 nt, Human
cuggaguccaagcucacaugucu

SEQ ID NO: 1143535 - RNA, 20 nt, Human
gaagagaggcugacagagug

SEQ ID NO: 1143536 - RNA, 18 nt, Human
gauuucacaaaucacaug

SEQ ID NO: 1143537 - RNA, 20 nt, Human
gcagacuagagaugcucucu

SEQ ID NO: 1143538 - RNA, 24 nt, Human
ggagagaagcuguccaaugcaacg

SEQ ID NO: 1143539 - RNA, 21 nt, Human
uacuugcucaauuaggaugga

SEQ ID NO: 1143540 - RNA, 25 nt, Human
uagguuuuuacauaguuugaaguuc

SEQ ID NO: 1143541 - RNA, 18 nt, Human
uauuagucacggggugag

SEQ ID NO: 1143542 - RNA, 21 nt, Human
ucacaggcucgccuugucuug

SEQ ID NO: 1143543 - RNA, 22 nt, Human
ucacauucuugagagggggaag

SEQ ID NO: 1143544 - RNA, 22 nt, Human
ucccucacuagcugucaucugg

SEQ ID NO: 1143545 - RNA, 20 nt, Human
ucgaagagaggcugacagag

SEQ ID NO: 1143546 - RNA, 21 nt, Human
ucgaagagaggcugacagagu

SEQ ID NO: 1143547 - RNA, 20 nt, Human
ucucgcucugucacaggcuc

SEQ ID NO: 1143548 - RNA, 18 nt, Human
ucugcucccucacuagcu

SEQ ID NO: 1143549 - RNA, 22 nt, Human
ugagacagggucucgcucuguc

SEQ ID NO: 1143550 - RNA, 21 nt, Human
ugagagggggaaggacuacag

SEQ ID NO: 1143551 - RNA, 21 nt, Human
ugucacaggcucgccuugucu

SEQ ID NO: 1143552 - RNA, 20 nt, Human
ugucuugucucugcucccuc

SEQ ID NO: 1143553 - RNA, 21 nt, Human
uguggagagcgaagccucauu

SEQ ID NO: 1143554 - RNA, 22 nt, Human
uguuacucaagcuauggccaug

SEQ ID NO: 1143555 - RNA, 19 nt, Human
uuagucacggggugaguga

SEQ ID NO: 1143556 - RNA, 21 nt, Human
uuagucacggggugagugagu

SEQ ID NO: 1143557 - RNA, 20 nt, Human
uuccaaguuccauaauguca

SEQ ID NO: 1143558 - RNA, 22 nt, Human
uugagacagggucucgcucugu

SEQ ID NO: 1143559 - RNA, 23 nt, Human
uugucauagcaaaacauguuacu

SEQ ID NO: 1143560 - RNA, 19 nt, Human
uuuccuagguucacaaugc

SEQ ID NO: 1143561 - RNA, 23 nt, Human
uuuuguuuuuugagacagggucu

SEQ ID NO: 1143562 - RNA, 21 nt, Human
uuuuuguuuuuugagacaggg

SEQ ID NO: 1143563 - RNA, 24 nt, Human
uuuuuguuuuuugagacagggucu

SEQ ID NO: 1143564 - RNA, 23 nt, Human
aaccacaaggcaggggucaagac

SEQ ID NO: 1143565 - RNA, 23 nt, Human
agcugucaucuggccccagccuc

SEQ ID NO: 1143566 - RNA, 20 nt, Human
caggaagaacccaggcagag

SEQ ID NO: 1143567 - RNA, 21 nt, Human
cccccaggacagaccgaagug

SEQ ID NO: 1143568 - RNA, 23 nt, Human
cccccaggacagaccgaaguggg

SEQ ID NO: 1143569 - RNA, 20 nt, Human
ccccccaggacagaccgaag

SEQ ID NO: 1143570 - RNA, 21 nt, Human
ccccccaggacagaccgaagu

SEQ ID NO: 1143571 - RNA, 22 nt, Human
ccuaucccacaucaaccacaag

SEQ ID NO: 1143572 - RNA, 20 nt, Human
ccugaggcuucacgggaagg

SEQ ID NO: 1143573 - RNA, 23 nt, Human
cuggaguccaagcucacaugucu

SEQ ID NO: 1143574 - RNA, 20 nt, Human
cuggccccagccuccucacc

SEQ ID NO: 1143575 - RNA, 23 nt, Human
ggacaggggcgugagacccccca

SEQ ID NO: 1143576 - RNA, 24 nt, Human
ggccccagccuccucaccugcugg

SEQ ID NO: 1143577 - RNA, 20 nt, Human
gggagcuuucucuugugucu

SEQ ID NO: 1143578 - RNA, 19 nt, Human
ucacaggcucgccuugucu

SEQ ID NO: 1143579 - RNA, 21 nt, Human
ucaucuggccccagccuccuc

SEQ ID NO: 1143580 - RNA, 22 nt, Human
ucccucacuagcugucaucugg

SEQ ID NO: 1143581 - RNA, 21 nt, Human
ucucgcucugucacaggcucg

SEQ ID NO: 1143582 - RNA, 19 nt, Human
ucucuaggaggacaggggc

SEQ ID NO: 1143583 - RNA, 22 nt, Human
ugagacagggucucgcucuguc

SEQ ID NO: 1143584 - RNA, 21 nt, Human
ugucacaggcucgccuugucu

SEQ ID NO: 1143585 - RNA, 20 nt, Human
ugucuugucucugcucccuc

SEQ ID NO: 1143586 - RNA, 20 nt, Human
uuagaaucaccccuccucau

SEQ ID NO: 1143587 - RNA, 22 nt, Human
uugagacagggucucgcucugu

SEQ ID NO: 1143588 - RNA, 23 nt, Human
uuuuguuuuuugagacagggucu

SEQ ID NO: 1143589 - RNA, 21 nt, Human
uuuuuguuuuuugagacaggg

SEQ ID NO: 1143590 - RNA, 24 nt, Human
uuuuuguuuuuugagacagggucu

SEQ ID NO: 1143591 - RNA, 24 nt, Human
aaaaaaaaauuaacuuagacaaaa

SEQ ID NO: 1143592 - RNA, 23 nt, Human
aaaaaaagaaaaaaggaauagaa

SEQ ID NO: 1143593 - RNA, 24 nt, Human
aaaaaagaaaaaaggaauagaagg

SEQ ID NO: 1143594 - RNA, 18 nt, Human
aaaaacaaaaagagagag

SEQ ID NO: 1143595 - RNA, 19 nt, Human
aaaaagaaaaaaggaauag

SEQ ID NO: 1143596 - RNA, 20 nt, Human
aaaaaugaaaaccauaucug

SEQ ID NO: 1143597 - RNA, 22 nt, Human
aaaacaacaacaacaacaaaac

SEQ ID NO: 1143598 - RNA, 18 nt, Human
aaaacacccagaacacau

SEQ ID NO: 1143599 - RNA, 22 nt, Human
aaaaccacaagacacucagaac

SEQ ID NO: 1143600 - RNA, 20 nt, Human
aaaagcccaggaaaucccag

SEQ ID NO: 1143601 - RNA, 23 nt, Human
aaaaugaaaauacaaaggaaagg

SEQ ID NO: 1143602 - RNA, 23 nt, Human
aaaauugcagaaaauuuuccuga

SEQ ID NO: 1143603 - RNA, 25 nt, Human
aaacaacaacaacaacaacaacaac

SEQ ID NO: 1143604 - RNA, 20 nt, Human
aaacacccagaacacauuca

SEQ ID NO: 1143605 - RNA, 23 nt, Human
aaacaggcaagaaaaagacaaaa

SEQ ID NO: 1143606 - RNA, 18 nt, Human
aaacauauccaaauacaa

SEQ ID NO: 1143607 - RNA, 22 nt, Human
aaacugaaaagcucuuagauau

SEQ ID NO: 1143608 - RNA, 21 nt, Human
aaagauugaaaccugggauaa

SEQ ID NO: 1143609 - RNA, 18 nt, Human
aaaggaagccaaugaaua

SEQ ID NO: 1143610 - RNA, 19 nt, Human
aacaacaacaaaaccagcc

SEQ ID NO: 1143611 - RNA, 22 nt, Human
aacaacaacaacaaaaccagcc

SEQ ID NO: 1143612 - RNA, 24 nt, Human
aacaacaacaacaaaaccagccuu

SEQ ID NO: 1143613 - RNA, 24 nt, Human
aacaacaacaacaacaacaacaac

SEQ ID NO: 1143614 - RNA, 24 nt, Human
aacaacaacaacaacaacaacaac

SEQ ID NO: 1143615 - RNA, 27 nt, Human
aacaacaacaacaacaacaacaacaac

SEQ ID NO: 1143616 - RNA, 20 nt, Human
aaccauauuuccaaacaucg

SEQ ID NO: 1143617 - RNA, 20 nt, Human
aagauaccaaaguaguuaca

SEQ ID NO: 1143618 - RNA, 19 nt, Human
aagcacagaagaaaaucua

SEQ ID NO: 1143619 - RNA, 20 nt, Human
aagcaguagaacuaaauuuu

SEQ ID NO: 1143620 - RNA, 19 nt, Human
aagcccaggaaaucccaga

SEQ ID NO: 1143621 - RNA, 18 nt, Human
aaggaaaauguaaaaaga

SEQ ID NO: 1143622 - RNA, 22 nt, Human
aagguaccauucucagccaaaa

SEQ ID NO: 1143623 - RNA, 19 nt, Human
aaggugagauuauugaaaa

SEQ ID NO: 1143624 - RNA, 20 nt, Human
aagugacccaucuccacacc

SEQ ID NO: 1143625 - RNA, 24 nt, Human
aauaaaagcccaggaaaucccaga

SEQ ID NO: 1143626 - RNA, 24 nt, Human
aauaacauaaugaaaaauugagaa

SEQ ID NO: 1143627 - RNA, 19 nt, Human
aaucauucuucugagauuu

SEQ ID NO: 1143628 - RNA, 25 nt, Human
aauuccauuccuucaguaauuuaca

SEQ ID NO: 1143629 - RNA, 23 nt, Human
aauuuguaguaagaguuccccuu

SEQ ID NO: 1143630 - RNA, 20 nt, Human
acaaaugacaaugaagucau

SEQ ID NO: 1143631 - RNA, 18 nt, Human
acaacaacaaaaccagcc

SEQ ID NO: 1143632 - RNA, 21 nt, Human
acaacaacaacaacaaaacca

SEQ ID NO: 1143633 - RNA, 22 nt, Human
acaacaacaacaacaaaaccag

SEQ ID NO: 1143634 - RNA, 19 nt, Human
acaacaacaacaacaacaa

SEQ ID NO: 1143635 - RNA, 19 nt, Human
acaacaacaacaacaacaa

SEQ ID NO: 1143636 - RNA, 19 nt, Human
acaacaacaacaacaacaa

SEQ ID NO: 1143637 - RNA, 19 nt, Human
acaacaacaacaacaacaa

SEQ ID NO: 1143638 - RNA, 21 nt, Human
acaacaacaacaacaacaaaa

SEQ ID NO: 1143639 - RNA, 22 nt, Human
acaacaacaacaacaacaacaa

SEQ ID NO: 1143640 - RNA, 22 nt, Human
acaacaacaacaacaacaacaa

SEQ ID NO: 1143641 - RNA, 22 nt, Human
acaacaacaacaacaacaacaa

SEQ ID NO: 1143642 - RNA, 24 nt, Human
acaacaacaacaacaacaacaaaa

SEQ ID NO: 1143643 - RNA, 21 nt, Human
acauuuauaaaacucugucuu

SEQ ID NO: 1143644 - RNA, 21 nt, Human
accaaaaacaacaacaacaac

SEQ ID NO: 1143645 - RNA, 22 nt, Human
acccaaacugggcaggagccca

SEQ ID NO: 1143646 - RNA, 23 nt, Human
acccgugccuguugccaaaacag

SEQ ID NO: 1143647 - RNA, 18 nt, Human
accugggauaaaaagcuc

SEQ ID NO: 1143648 - RNA, 19 nt, Human
acugaaaacucacuagggu

SEQ ID NO: 1143649 - RNA, 24 nt, Human
agaaaaagacaaaaucugucuuca

SEQ ID NO: 1143650 - RNA, 19 nt, Human
agaaaagagaaauagccaa

SEQ ID NO: 1143651 - RNA, 20 nt, Human
agaaaagagaaauagccaau

SEQ ID NO: 1143652 - RNA, 24 nt, Human
agaagaaaaaacacauaaaacggu

SEQ ID NO: 1143653 - RNA, 21 nt, Human
agaagaaaaucuagaggcaau

SEQ ID NO: 1143654 - RNA, 21 nt, Human
agacaaacauauccaaauaca

SEQ ID NO: 1143655 - RNA, 22 nt, Human
agagagaagcacagaagaaaau

SEQ ID NO: 1143656 - RNA, 23 nt, Human
agagagaagcacagaagaaaauc

SEQ ID NO: 1143657 - RNA, 20 nt, Human
agaguuccccuugacuuucc

SEQ ID NO: 1143658 - RNA, 20 nt, Human
agauuauaucugugaaaccu

SEQ ID NO: 1143659 - RNA, 19 nt, Human
agcaaucucagaggaaaac

SEQ ID NO: 1143660 - RNA, 22 nt, Human
agcauuaucgccugagcucugc

SEQ ID NO: 1143661 - RNA, 21 nt, Human
aggagaaaggaaauugacugg

SEQ ID NO: 1143662 - RNA, 25 nt, Human
aggcaagaaaaagacaaaagggacc

SEQ ID NO: 1143663 - RNA, 23 nt, Human
aggcaagaaaaagacaaaaucug

SEQ ID NO: 1143664 - RNA, 19 nt, Human
agggaaaaaugaaaauaca

SEQ ID NO: 1143665 - RNA, 23 nt, Human
agguagccauuugcacuaauagg

SEQ ID NO: 1143666 - RNA, 20 nt, Human
aggugcuuucucuaaaacag

SEQ ID NO: 1143667 - RNA, 24 nt, Human
auagaauacuaaggcuaauguggg

SEQ ID NO: 1143668 - RNA, 20 nt, Human
auaggccgcccaaaugucaa

SEQ ID NO: 1143669 - RNA, 19 nt, Human
auauauuugugccugagau

SEQ ID NO: 1143670 - RNA, 20 nt, Human
aucacucuuguuccucuccu

SEQ ID NO: 1143671 - RNA, 21 nt, Human
auccaaauacaaaauauuucu

SEQ ID NO: 1143672 - RNA, 18 nt, Human
auccaccuccucccuguu

SEQ ID NO: 1143673 - RNA, 23 nt, Human
aucugaaaaccauucccccaccc

SEQ ID NO: 1143674 - RNA, 21 nt, Human
aucuugggcaggauguagauu

SEQ ID NO: 1143675 - RNA, 23 nt, Human
augacaaugaagucauugcgguc

SEQ ID NO: 1143676 - RNA, 24 nt, Human
augagaaucagagaguauuaaaac

SEQ ID NO: 1143677 - RNA, 18 nt, Human
auuuuuuuguuuguuugu

SEQ ID NO: 1143678 - RNA, 26 nt, Human
caaaaagaaauuaaaaacguuuauac

SEQ ID NO: 1143679 - RNA, 20 nt, Human
caaaaauagauauaaaaaua

SEQ ID NO: 1143680 - RNA, 21 nt, Human
caaacacagaacuaagaauuu

SEQ ID NO: 1143681 - RNA, 21 nt, Human
caacaacaacaaaaccagccu

SEQ ID NO: 1143682 - RNA, 20 nt, Human
caacaacaacaacaaaacca

SEQ ID NO: 1143683 - RNA, 23 nt, Human
caacaacaacaacaacaacaaca

SEQ ID NO: 1143684 - RNA, 20 nt, Human
caaccccugggccacugacc

SEQ ID NO: 1143685 - RNA, 26 nt, Human
caagcaauaaucacuagcaauaacau

SEQ ID NO: 1143686 - RNA, 20 nt, Human
cacaguacccaaacugggca

SEQ ID NO: 1143687 - RNA, 22 nt, Human
cacaguacccaaacugggcagg

SEQ ID NO: 1143688 - RNA, 21 nt, Human
caccaaaaacaacaacaacaa

SEQ ID NO: 1143689 - RNA, 22 nt, Human
caccaaaaacaacaacaacaac

SEQ ID NO: 1143690 - RNA, 20 nt, Human
cacccagaacacauucacuc

SEQ ID NO: 1143691 - RNA, 26 nt, Human
cacccagaacacauucacucauccau

SEQ ID NO: 1143692 - RNA, 19 nt, Human
caccuggugucuuuuacug

SEQ ID NO: 1143693 - RNA, 23 nt, Human
cacuccccaccuaagacagucuc

SEQ ID NO: 1143694 - RNA, 21 nt, Human
cacucuaguuuuggcccugcu

SEQ ID NO: 1143695 - RNA, 22 nt, Human
cagagcagugguccccaacccc

SEQ ID NO: 1143696 - RNA, 20 nt, Human
cagcauaguuccuggaacaa

SEQ ID NO: 1143697 - RNA, 25 nt, Human
cagccaagaaugauuucucagauau

SEQ ID NO: 1143698 - RNA, 20 nt, Human
cagcuuccuaguccuucuca

SEQ ID NO: 1143699 - RNA, 22 nt, Human
caggaguucuuucuaucagcuu

SEQ ID NO: 1143700 - RNA, 27 nt, Human
caguuuuacccuccaauuuuaaucuua

SEQ ID NO: 1143701 - RNA, 18 nt, Human
caucaaaaaaagugugac

SEQ ID NO: 1143702 - RNA, 24 nt, Human
caucguccucaaggccagaaaucu

SEQ ID NO: 1143703 - RNA, 19 nt, Human
cauucuauaaaauuuagcu

SEQ ID NO: 1143704 - RNA, 21 nt, Human
ccaaccauauuuccaaacauc

SEQ ID NO: 1143705 - RNA, 21 nt, Human
ccaaccccugggccacugacc

SEQ ID NO: 1143706 - RNA, 21 nt, Human
ccagaacuuugggugccccua

SEQ ID NO: 1143707 - RNA, 25 nt, Human
ccagagcagauagagagaagcacag

SEQ ID NO: 1143708 - RNA, 20 nt, Human
ccaggaaaucccagaaaaga

SEQ ID NO: 1143709 - RNA, 20 nt, Human
cccaaccccugggccacuga

SEQ ID NO: 1143710 - RNA, 23 nt, Human
cccaaccccugggccacugacca

SEQ ID NO: 1143711 - RNA, 19 nt, Human
ccccacccucacccgugcc

SEQ ID NO: 1143712 - RNA, 19 nt, Human
ccccacccucacccgugcc

SEQ ID NO: 1143713 - RNA, 21 nt, Human
ccccacccucacccgugccug

SEQ ID NO: 1143714 - RNA, 19 nt, Human
ccccauauauauuugugcc

SEQ ID NO: 1143715 - RNA, 22 nt, Human
ccucaccaaaaacaacaacaac

SEQ ID NO: 1143716 - RNA, 23 nt, Human
ccucacccgugccuguugccaaa

SEQ ID NO: 1143717 - RNA, 23 nt, Human
ccuggaacaaaguacgcucugaa

SEQ ID NO: 1143718 - RNA, 22 nt, Human
ccuguugccaaaacaguugggg

SEQ ID NO: 1143719 - RNA, 19 nt, Human
cuaaucauucuucugagau

SEQ ID NO: 1143720 - RNA, 22 nt, Human
cuaccucuagauuuguggcccu

SEQ ID NO: 1143721 - RNA, 18 nt, Human
cuauaaaaacaaaaagag

SEQ ID NO: 1143722 - RNA, 22 nt, Human
cucuaaaacagaaaaauaagga

SEQ ID NO: 1143723 - RNA, 19 nt, Human
cugaaaaccauucccccac

SEQ ID NO: 1143724 - RNA, 25 nt, Human
cugaaauaaagauugaaaccuggga

SEQ ID NO: 1143725 - RNA, 26 nt, Human
cugagcaauuuuggagccugaggcag

SEQ ID NO: 1143726 - RNA, 24 nt, Human
cugggauuccccuauagaaacuaa

SEQ ID NO: 1143727 - RNA, 25 nt, Human
cugggugguagaauuuugagauugu

SEQ ID NO: 1143728 - RNA, 23 nt, Human
cuuucagccuuaaaauguguuga

SEQ ID NO: 1143729 - RNA, 27 nt, Human
gaaaagcucuuagauauuacauaaucc

SEQ ID NO: 1143730 - RNA, 22 nt, Human
gaaauaaagauugaaaccuggg

SEQ ID NO: 1143731 - RNA, 21 nt, Human
gaagaaaaaacacauaaaacg

SEQ ID NO: 1143732 - RNA, 21 nt, Human
gaagagaagaccauuaagaac

SEQ ID NO: 1143733 - RNA, 24 nt, Human
gaaucaauuuuaaauugggggguu

SEQ ID NO: 1143734 - RNA, 23 nt, Human
gaaucagagaguauuaaaacuga

SEQ ID NO: 1143735 - RNA, 18 nt, Human
gacccaucuccacaccug

SEQ ID NO: 1143736 - RNA, 19 nt, Human
gaggaaaacucugggauuc

SEQ ID NO: 1143737 - RNA, 19 nt, Human
gcaagaaaaagacaaaauc

SEQ ID NO: 1143738 - RNA, 22 nt, Human
gcauucacccuuaccuccaaac

SEQ ID NO: 1143739 - RNA, 18 nt, Human
gccaauuaacuacuauca

SEQ ID NO: 1143740 - RNA, 23 nt, Human
gccacaaauaaauuguuuaugcu

SEQ ID NO: 1143741 - RNA, 23 nt, Human
gcucugacucucuaaaucucuug

SEQ ID NO: 1143742 - RNA, 21 nt, Human
ggaacaauuucaucugaaaac

SEQ ID NO: 1143743 - RNA, 21 nt, Human
ggaauaccuagaaagacagcc

SEQ ID NO: 1143744 - RNA, 19 nt, Human
ggaguucuuucuaucagcu

SEQ ID NO: 1143745 - RNA, 20 nt, Human
ggccaauagauuagcaaaga

SEQ ID NO: 1143746 - RNA, 21 nt, Human
ggccagaaaucuauucacauu

SEQ ID NO: 1143747 - RNA, 19 nt, Human
gggaagggggugggacuac

SEQ ID NO: 1143748 - RNA, 19 nt, Human
guaaagcccaagagggaaa

SEQ ID NO: 1143749 - RNA, 27 nt, Human
guagcaguuaguggccaacauggaaga

SEQ ID NO: 1143750 - RNA, 20 nt, Human
gucuuagagagguuaagaga

SEQ ID NO: 1143751 - RNA, 19 nt, Human
gugacucuacucucuaccu

SEQ ID NO: 1143752 - RNA, 23 nt, Human
gugaguggcacccauugagcauu

SEQ ID NO: 1143753 - RNA, 19 nt, Human
guggccaacauggacugca

SEQ ID NO: 1143754 - RNA, 23 nt, Human
gugggaauggaggcuauaagaac

SEQ ID NO: 1143755 - RNA, 18 nt, Human
guuuaaugcuugauucca

SEQ ID NO: 1143756 - RNA, 20 nt, Human
guuuccagcauaguuccugg

SEQ ID NO: 1143757 - RNA, 18 nt, Human
uaaaacacccagaacaca

SEQ ID NO: 1143758 - RNA, 23 nt, Human
uaaaacacccagaacacauucac

SEQ ID NO: 1143759 - RNA, 21 nt, Human
uaaaagaguuauauaaaggua

SEQ ID NO: 1143760 - RNA, 21 nt, Human
uaaacaggcaagaaaaagacu

SEQ ID NO: 1143761 - RNA, 22 nt, Human
uaaagaaaguaaaacagagagu

SEQ ID NO: 1143762 - RNA, 22 nt, Human
uaacauaaagaaaguaaaacag

SEQ ID NO: 1143763 - RNA, 19 nt, Human
uaaccagaacuuugggugc

SEQ ID NO: 1143764 - RNA, 19 nt, Human
uaaguagguagccauuugc

SEQ ID NO: 1143765 - RNA, 20 nt, Human
uaaguagguagccauuugca

SEQ ID NO: 1143766 - RNA, 21 nt, Human
uaagugacccaucuccacacc

SEQ ID NO: 1143767 - RNA, 24 nt, Human
uaauaaauuaacauugggauagaa

SEQ ID NO: 1143768 - RNA, 18 nt, Human
uaauguggggaagggggu

SEQ ID NO: 1143769 - RNA, 23 nt, Human
uaauuuacacaaaacucuuccua

SEQ ID NO: 1143770 - RNA, 22 nt, Human
uacaaaauauuucugauuucug

SEQ ID NO: 1143771 - RNA, 19 nt, Human
uacacaaaacucuuccuaa

SEQ ID NO: 1143772 - RNA, 21 nt, Human
uacacgacugaaaaguaaagc

SEQ ID NO: 1143773 - RNA, 19 nt, Human
uaccucuagauuuguggcc

SEQ ID NO: 1143774 - RNA, 26 nt, Human
uacuaccaaggaaaauguaaaaagaa

SEQ ID NO: 1143775 - RNA, 18 nt, Human
uacuauauacuuccgaau

SEQ ID NO: 1143776 - RNA, 22 nt, Human
uagaaggcaaaguuuaagacag

SEQ ID NO: 1143777 - RNA, 24 nt, Human
uagaauaaucacaacugaaaacuc

SEQ ID NO: 1143778 - RNA, 21 nt, Human
uagauuagcaaagaguaagag

SEQ ID NO: 1143779 - RNA, 23 nt, Human
uagcaaagaguaagaguuccuca

SEQ ID NO: 1143780 - RNA, 21 nt, Human
uaggagggcaugcaagguugu

SEQ ID NO: 1143781 - RNA, 22 nt, Human
uaggccaauagauuagcaaaga

SEQ ID NO: 1143782 - RNA, 21 nt, Human
uagggaaaccuuaguuugaag

SEQ ID NO: 1143783 - RNA, 21 nt, Human
uauagagacaaaagggauuug

SEQ ID NO: 1143784 - RNA, 20 nt, Human
uauauacauauauacaggug

SEQ ID NO: 1143785 - RNA, 23 nt, Human
uaucauuauccugcgauguuuca

SEQ ID NO: 1143786 - RNA, 30 nt, Human
uauccugcgauguuucaaacaaagauuggg

SEQ ID NO: 1143787 - RNA, 27 nt, Human
uaugagaaucagagaguauuaaaacug

SEQ ID NO: 1143788 - RNA, 25 nt, Human
uauggaauaccuagaaagacagcca

SEQ ID NO: 1143789 - RNA, 20 nt, Human
uauguauaugcacaagugca

SEQ ID NO: 1143790 - RNA, 23 nt, Human
uauuaaauauauacauauauaca

SEQ ID NO: 1143791 - RNA, 20 nt, Human
uauuucugauuucugggugg

SEQ ID NO: 1143792 - RNA, 23 nt, Human
ucacuuuuacaaaugacaaugaa

SEQ ID NO: 1143793 - RNA, 21 nt, Human
ucagcacaguacccaaacugg

SEQ ID NO: 1143794 - RNA, 19 nt, Human
ucagguaucaaaaacaacc

SEQ ID NO: 1143795 - RNA, 23 nt, Human
ucaucugaaaaccauucccccac

SEQ ID NO: 1143796 - RNA, 19 nt, Human
uccaaaaauaacauaauga

SEQ ID NO: 1143797 - RNA, 18 nt, Human
uccaaacacagaacuaag

SEQ ID NO: 1143798 - RNA, 20 nt, Human
uccaaauacaaaauauuucu

SEQ ID NO: 1143799 - RNA, 19 nt, Human
uccaccucuaucuagauca

SEQ ID NO: 1143800 - RNA, 20 nt, Human
uccagagcagauagagagaa

SEQ ID NO: 1143801 - RNA, 21 nt, Human
ucccagaaaagagaaauagcc

SEQ ID NO: 1143802 - RNA, 23 nt, Human
uccccuauagaaacuaaagaagc

SEQ ID NO: 1143803 - RNA, 21 nt, Human
uccucaaggccagaaaucuau

SEQ ID NO: 1143804 - RNA, 18 nt, Human
uccucaucucuucuccug

SEQ ID NO: 1143805 - RNA, 24 nt, Human
ucguccucaaggccagaaaucuau

SEQ ID NO: 1143806 - RNA, 19 nt, Human
ucuaaaacagaaaaauaag

SEQ ID NO: 1143807 - RNA, 25 nt, Human
ucuaaaacagaaaaauaaggauguu

SEQ ID NO: 1143808 - RNA, 22 nt, Human
ucuacaaugucuaucuuuaaca

SEQ ID NO: 1143809 - RNA, 19 nt, Human
ucuagguuuaaugcuugau

SEQ ID NO: 1143810 - RNA, 21 nt, Human
ucucuaaaacagaaaaauaag

SEQ ID NO: 1143811 - RNA, 18 nt, Human
ucucuugcuuuaaagaag

SEQ ID NO: 1143812 - RNA, 21 nt, Human
ucugauagacuauauuugaga

SEQ ID NO: 1143813 - RNA, 18 nt, Human
ucuguccuuucucauucu

SEQ ID NO: 1143814 - RNA, 22 nt, Human
ucugugaaaccuucucugcuau

SEQ ID NO: 1143815 - RNA, 25 nt, Human
ucuuaaaaaaaaaaaauuaacuuag

SEQ ID NO: 1143816 - RNA, 21 nt, Human
ucuuuaaagaauacagucuuc

SEQ ID NO: 1143817 - RNA, 22 nt, Human
ugaaaaggggucacuuuuaagg

SEQ ID NO: 1143818 - RNA, 24 nt, Human
ugaauaaccaaauaauuauuucuu

SEQ ID NO: 1143819 - RNA, 19 nt, Human
ugacauaauuggcauuucu

SEQ ID NO: 1143820 - RNA, 24 nt, Human
ugagauggaacaauuucaucugaa

SEQ ID NO: 1143821 - RNA, 23 nt, Human
ugagauuauugaaaaaugaccuu

SEQ ID NO: 1143822 - RNA, 25 nt, Human
ugagauuauugaaaaaugaccuuuc

SEQ ID NO: 1143823 - RNA, 24 nt, Human
ugauguauuuuuaaaccuucauau

SEQ ID NO: 1143824 - RNA, 22 nt, Human
ugauuccagugacaucugauau

SEQ ID NO: 1143825 - RNA, 21 nt, Human
ugcagaaaauuuuccugaaau

SEQ ID NO: 1143826 - RNA, 18 nt, Human
ugcauuaauuuugaguuu

SEQ ID NO: 1143827 - RNA, 25 nt, Human
ugcauucacccuuaccuccaaacac

SEQ ID NO: 1143828 - RNA, 22 nt, Human
ugcggucaaaaaaagaaaaaag

SEQ ID NO: 1143829 - RNA, 23 nt, Human
uggaacaaaguacgcucugaaua

SEQ ID NO: 1143830 - RNA, 23 nt, Human
uggcauuucuuaaaaaaaaaaaa

SEQ ID NO: 1143831 - RNA, 19 nt, Human
ugggaagauagaaauaaug

SEQ ID NO: 1143832 - RNA, 18 nt, Human
ugggauaaaaagcucuga

SEQ ID NO: 1143833 - RNA, 19 nt, Human
uggggaggugggcuugaaa

SEQ ID NO: 1143834 - RNA, 21 nt, Human
uggggaggugggcuugaaacc

SEQ ID NO: 1143835 - RNA, 22 nt, Human
ugggugccccuaaucauucuuu

SEQ ID NO: 1143836 - RNA, 19 nt, Human
uguaaacaggcaagaaaaa

SEQ ID NO: 1143837 - RNA, 20 nt, Human
uguaaacaggcaagaaaaag

SEQ ID NO: 1143838 - RNA, 23 nt, Human
uguaaacaggcaagaaaaagaca

SEQ ID NO: 1143839 - RNA, 21 nt, Human
ugucauguaacuucucuguga

SEQ ID NO: 1143840 - RNA, 21 nt, Human
ugugaacuacauaggccgccc

SEQ ID NO: 1143841 - RNA, 24 nt, Human
ugugaacuacauaggccgcccaaa

SEQ ID NO: 1143842 - RNA, 26 nt, Human
uguuccucuccuucaacaauguaauu

SEQ ID NO: 1143843 - RNA, 19 nt, Human
uuaaaaccacaagacacuc

SEQ ID NO: 1143844 - RNA, 18 nt, Human
uuaacauugggauagaaa

SEQ ID NO: 1143845 - RNA, 22 nt, Human
uucaugaaauaauuuaugauaa

SEQ ID NO: 1143846 - RNA, 23 nt, Human
uucccuggggaagaauauacuuu

SEQ ID NO: 1143847 - RNA, 21 nt, Human
uuccugaaauaaagauugaaa

SEQ ID NO: 1143848 - RNA, 20 nt, Human
uucuaucagcuuccuagucc

SEQ ID NO: 1143849 - RNA, 19 nt, Human
uucucugugacucauuuca

SEQ ID NO: 1143850 - RNA, 20 nt, Human
uugaaggacaggaaaauaua

SEQ ID NO: 1143851 - RNA, 26 nt, Human
uugaaggacaggaaaauauaaacagu

SEQ ID NO: 1143852 - RNA, 21 nt, Human
uuggaaguuacaaaauagaau

SEQ ID NO: 1143853 - RNA, 28 nt, Human
uugugguucaaaguauucaguguuuuuc

SEQ ID NO: 1143854 - RNA, 21 nt, Human
uuuaaaaauuuuccauuaaau

SEQ ID NO: 1143855 - RNA, 20 nt, Human
uuuaucuaaauggagagaug

SEQ ID NO: 1143856 - RNA, 18 nt, Human
uuucucauucuuuggcca

SEQ ID NO: 1143857 - RNA, 18 nt, Human
uuugaagguagggaaacc

SEQ ID NO: 1143858 - RNA, 23 nt, Human
uuuuugaagguagggaaaccuua

SEQ ID NO: 1143859 - RNA, 22 nt, Human
aaaaugcuucagagaguuacug

SEQ ID NO: 1143860 - RNA, 22 nt, Human
accagaaagacaucccaacaac

SEQ ID NO: 1143861 - RNA, 25 nt, Human
agaaagacaucccaacaacaugugu

SEQ ID NO: 1143862 - RNA, 18 nt, Human
agaagugcugaagguaug

SEQ ID NO: 1143863 - RNA, 18 nt, Human
agggcagcuucgcccaca

SEQ ID NO: 1143864 - RNA, 20 nt, Human
cagcaaagaccaguauggca

SEQ ID NO: 1143865 - RNA, 19 nt, Human
cccaggaggcugcacaggc

SEQ ID NO: 1143866 - RNA, 20 nt, Human
gcaaagaccaguauggcaca

SEQ ID NO: 1143867 - RNA, 20 nt, Human
gccgacaugguggggacugu

SEQ ID NO: 1143868 - RNA, 19 nt, Human
gccugagaaagaugcaagg

SEQ ID NO: 1143869 - RNA, 21 nt, Human
ggcugcagguccgguucgucu

SEQ ID NO: 1143870 - RNA, 22 nt, Human
uacuccaaauuaaaggaagauc

SEQ ID NO: 1143871 - RNA, 20 nt, Human
ucaaagacuuaaaggagauu

SEQ ID NO: 1143872 - RNA, 21 nt, Human
ucagggacgguuaucuuuucc

SEQ ID NO: 1143873 - RNA, 29 nt, Human
ucccaggaggcugcacaggcuagguuggg

SEQ ID NO: 1143874 - RNA, 20 nt, Human
uccuuagggcagcuucgccc

SEQ ID NO: 1143875 - RNA, 20 nt, Human
ugagaagugcugaagguaug

SEQ ID NO: 1143876 - RNA, 24 nt, Human
uggggcaccagaaagacuggagac

SEQ ID NO: 1143877 - RNA, 24 nt, Human
uugcuguucaugguggcugcaggu

SEQ ID NO: 1143878 - RNA, 20 nt, Human
ccgggagccuguugauuugg

SEQ ID NO: 1143879 - RNA, 22 nt, Human
ccuuccacgcuauuccggaacc

SEQ ID NO: 1143880 - RNA, 22 nt, Human
agaaaguugcaccuuggccucc

SEQ ID NO: 1143881 - RNA, 28 nt, Human
caaaugauccuuuauugaaauauuuucc

SEQ ID NO: 1143882 - RNA, 18 nt, Human
cgaccgaagaaaguugca

SEQ ID NO: 1143883 - RNA, 24 nt, Human
aaacagaaacuuauuucuucuagu

SEQ ID NO: 1143884 - RNA, 21 nt, Human
aaacugggucauguagaaaaa

SEQ ID NO: 1143885 - RNA, 19 nt, Human
aacccaugacaaaagucca

SEQ ID NO: 1143886 - RNA, 18 nt, Human
aaccugaucauaucugca

SEQ ID NO: 1143887 - RNA, 24 nt, Human
aaguuuugacagaagcauucaaac

SEQ ID NO: 1143888 - RNA, 18 nt, Human
acaucccugggaggggag

SEQ ID NO: 1143889 - RNA, 21 nt, Human
aggacaauuaaagaaagcauc

SEQ ID NO: 1143890 - RNA, 20 nt, Human
aggaggggcaaaaaggggug

SEQ ID NO: 1143891 - RNA, 21 nt, Human
aggggcaggaggggcaaaaag

SEQ ID NO: 1143892 - RNA, 24 nt, Human
auguagaaaaaacagaaacuuauu

SEQ ID NO: 1143893 - RNA, 23 nt, Human
caaaaguccacacauacuuccug

SEQ ID NO: 1143894 - RNA, 22 nt, Human
caaaccacagcggucacauuca

SEQ ID NO: 1143895 - RNA, 18 nt, Human
cacuucagucuccgcccc

SEQ ID NO: 1143896 - RNA, 23 nt, Human
cagauaaugcagccucggcgucc

SEQ ID NO: 1143897 - RNA, 23 nt, Human
cagcacgcuuuucugucuaaccu

SEQ ID NO: 1143898 - RNA, 21 nt, Human
caggaggggcaaaaaggggug

SEQ ID NO: 1143899 - RNA, 21 nt, Human
cauguagaaaaaacagaaacu

SEQ ID NO: 1143900 - RNA, 26 nt, Human
cauguagaaaaaacagaaacuuauuu

SEQ ID NO: 1143901 - RNA, 21 nt, Human
cauucaaaccacagcggucac

SEQ ID NO: 1143902 - RNA, 25 nt, Human
ccgcccccaucuucgcacgguggcc

SEQ ID NO: 1143903 - RNA, 21 nt, Human
ccucugcuaccuuuauugcuu

SEQ ID NO: 1143904 - RNA, 23 nt, Human
cgcccccaucuucgcacgguggc

SEQ ID NO: 1143905 - RNA, 19 nt, Human
cucuaaaaaauaucugaaa

SEQ ID NO: 1143906 - RNA, 26 nt, Human
cugacagcagaggcccagguccucuu

SEQ ID NO: 1143907 - RNA, 27 nt, Human
cuggcggacacaucccugggaggggag

SEQ ID NO: 1143908 - RNA, 18 nt, Human
cugucuaaccucugcuac

SEQ ID NO: 1143909 - RNA, 23 nt, Human
gaaggggcaggaggggcaaaaag

SEQ ID NO: 1143910 - RNA, 18 nt, Human
gacaaaaguccacacaua

SEQ ID NO: 1143911 - RNA, 20 nt, Human
gaggcccagguccucuuggc

SEQ ID NO: 1143912 - RNA, 22 nt, Human
gaggcccagguccucuuggcuc

SEQ ID NO: 1143913 - RNA, 22 nt, Human
gcgagggacacuauucaaccca

SEQ ID NO: 1143914 - RNA, 25 nt, Human
ggaaggggcaggaggggcaaaaagg

SEQ ID NO: 1143915 - RNA, 24 nt, Human
ggcaaaaaggggugagcucccuca

SEQ ID NO: 1143916 - RNA, 21 nt, Human
ggcaggaggggcaaaaagggg

SEQ ID NO: 1143917 - RNA, 22 nt, Human
guccacacauacuuccugagca

SEQ ID NO: 1143918 - RNA, 19 nt, Human
uagguaaaacaugacuuca

SEQ ID NO: 1143919 - RNA, 25 nt, Human
uaucugaaacugggucauguagaag

SEQ ID NO: 1143920 - RNA, 18 nt, Human
ucacuucagucuccgccc

SEQ ID NO: 1143921 - RNA, 24 nt, Human
uccacagaauuaauuucuuaagcg

SEQ ID NO: 1143922 - RNA, 18 nt, Human
uccacagccgguguggga

SEQ ID NO: 1143923 - RNA, 26 nt, Human
ucuaaaaaauaucugaaacuggguca

SEQ ID NO: 1143924 - RNA, 22 nt, Human
ucucaguucacccagcacgcuu

SEQ ID NO: 1143925 - RNA, 22 nt, Human
ucuccugguuauuuuuaacugc

SEQ ID NO: 1143926 - RNA, 21 nt, Human
ucuuugcuggaaaguccaagg

SEQ ID NO: 1143927 - RNA, 22 nt, Human
ugacagaagcauucaaaccaca

SEQ ID NO: 1143928 - RNA, 24 nt, Human
ugacagcagaggcccagguccucu

SEQ ID NO: 1143929 - RNA, 18 nt, Human
ugagaacuucuuuguggg

SEQ ID NO: 1143930 - RNA, 24 nt, Human
ugauguugggaucuggcggacaca

SEQ ID NO: 1143931 - RNA, 24 nt, Human
ugcaaucaugaaaaauaaaaauau

SEQ ID NO: 1143932 - RNA, 20 nt, Human
uggaaaguccaaggugaaga

SEQ ID NO: 1143933 - RNA, 18 nt, Human
uggaaggggcaggagggg

SEQ ID NO: 1143934 - RNA, 20 nt, Human
uggaaggggcaggaggggca

SEQ ID NO: 1143935 - RNA, 21 nt, Human
uggcuccacagccgguguggg

SEQ ID NO: 1143936 - RNA, 21 nt, Human
ugggaggggagcguguugggc

SEQ ID NO: 1143937 - RNA, 24 nt, Human
ugggaggggagcguguugggcuga

SEQ ID NO: 1143938 - RNA, 19 nt, Human
uuccacagaauuaauuucu

SEQ ID NO: 1143939 - RNA, 20 nt, Human
uuccauguggacgugaacuu

SEQ ID NO: 1143940 - RNA, 22 nt, Human
uucuuuguauuguugcauuggg

SEQ ID NO: 1143941 - RNA, 21 nt, Human
uugaugcagcaguaucucuuu

SEQ ID NO: 1143942 - RNA, 23 nt, Human
uugcauuggggauuaaguuuuga

SEQ ID NO: 1143943 - RNA, 18 nt, Human
uuggcuccacagccggug

SEQ ID NO: 1143944 - RNA, 21 nt, Human
uuggcuccacagccggugugg

SEQ ID NO: 1143945 - RNA, 24 nt, Human
uuuauugcuuagguaaaacaugac

SEQ ID NO: 1143946 - RNA, 25 nt, Human
aaacagauguucuuaauuuuaaugc

SEQ ID NO: 1143947 - RNA, 24 nt, Human
aaagugcugggauuacaggcauga

SEQ ID NO: 1143948 - RNA, 22 nt, Human
aacauccuagcacagcaugaga

SEQ ID NO: 1143949 - RNA, 21 nt, Human
aaccacaguuaauagccacug

SEQ ID NO: 1143950 - RNA, 20 nt, Human
aaccauaagggcaccaaccc

SEQ ID NO: 1143951 - RNA, 19 nt, Human
aagaaauucucccaccucc

SEQ ID NO: 1143952 - RNA, 19 nt, Human
aagugcugggauuacaggc

SEQ ID NO: 1143953 - RNA, 21 nt, Human
aagugcugggauuacaggcau

SEQ ID NO: 1143954 - RNA, 26 nt, Human
aagugcugggauuacaggcaugagcc

SEQ ID NO: 1143955 - RNA, 23 nt, Human
aauuuuuguauuuuuaguagaga

SEQ ID NO: 1143956 - RNA, 23 nt, Human
acacaggcauucaguccacagug

SEQ ID NO: 1143957 - RNA, 21 nt, Human
acagugcuccacccugugggc

SEQ ID NO: 1143958 - RNA, 18 nt, Human
accaggccuccuccauuc

SEQ ID NO: 1143959 - RNA, 18 nt, Human
accccagcaugggucucc

SEQ ID NO: 1143960 - RNA, 23 nt, Human
accuccgcuucccauguagcugg

SEQ ID NO: 1143961 - RNA, 22 nt, Human
agaagaugcacacccacgaggg

SEQ ID NO: 1143962 - RNA, 21 nt, Human
agcugggauuacaagugcaca

SEQ ID NO: 1143963 - RNA, 21 nt, Human
aggcagugggugugauugaaa

SEQ ID NO: 1143964 - RNA, 25 nt, Human
aggcuggagugcaguggcacgaucu

SEQ ID NO: 1143965 - RNA, 21 nt, Human
agugcaguggcacgaucucag

SEQ ID NO: 1143966 - RNA, 23 nt, Human
agugcaguggcacgaucucagcu

SEQ ID NO: 1143967 - RNA, 24 nt, Human
agugcaguggcacgaucucagcuc

SEQ ID NO: 1143968 - RNA, 18 nt, Human
agugcugggauuacaggc

SEQ ID NO: 1143969 - RNA, 21 nt, Human
augaacccaggggacacaggc

SEQ ID NO: 1143970 - RNA, 19 nt, Human
augggagaaccauaagggc

SEQ ID NO: 1143971 - RNA, 24 nt, Human
auuuuuguauuuuuaguagagaug

SEQ ID NO: 1143972 - RNA, 24 nt, Human
caaagugcugggauuacaggcaug

SEQ ID NO: 1143973 - RNA, 24 nt, Human
caaauuuuuguauuuuuaguagag

SEQ ID NO: 1143974 - RNA, 23 nt, Human
caacauaugaacccaggggacac

SEQ ID NO: 1143975 - RNA, 24 nt, Human
cacaccaccaagcccagcaaauuu

SEQ ID NO: 1143976 - RNA, 19 nt, Human
caccaaccccagcaugggu

SEQ ID NO: 1143977 - RNA, 24 nt, Human
caccaagcccagcaaauuuuugua

SEQ ID NO: 1143978 - RNA, 19 nt, Human
caccaugugcccagaccuc

SEQ ID NO: 1143979 - RNA, 19 nt, Human
cacccugugggcucacauc

SEQ ID NO: 1143980 - RNA, 23 nt, Human
caccuccgcuucccauguagcug

SEQ ID NO: 1143981 - RNA, 18 nt, Human
cacggccuaaccaccucc

SEQ ID NO: 1143982 - RNA, 21 nt, Human
cacggccuaaccaccucccaa

SEQ ID NO: 1143983 - RNA, 19 nt, Human
cacucugucccgcaggcug

SEQ ID NO: 1143984 - RNA, 24 nt, Human
cacucugucccgcaggcuggagug

SEQ ID NO: 1143985 - RNA, 23 nt, Human
cacugcaaagucugccucccggg

SEQ ID NO: 1143986 - RNA, 23 nt, Human
cauguuggccaggcugaucuugg

SEQ ID NO: 1143987 - RNA, 23 nt, Human
cauucaguccacagugcuccacc

SEQ ID NO: 1143988 - RNA, 22 nt, Human
cauucuugacuccaagaccaga

SEQ ID NO: 1143989 - RNA, 23 nt, Human
ccaaagugcugggauuacaggca

SEQ ID NO: 1143990 - RNA, 24 nt, Human
ccaaagugcugggauuacaggcau

SEQ ID NO: 1143991 - RNA, 24 nt, Human
ccacccucacggccuaaccaccuc

SEQ ID NO: 1143992 - RNA, 18 nt, Human
ccacugcaccuggccugg

SEQ ID NO: 1143993 - RNA, 20 nt, Human
ccacugcaccuggccuggau

SEQ ID NO: 1143994 - RNA, 22 nt, Human
ccacuguccaccaccaugugcc

SEQ ID NO: 1143995 - RNA, 24 nt, Human
ccaggggacacaggcauucagucc

SEQ ID NO: 1143996 - RNA, 24 nt, Human
cccaaagugcugggauuacaggca

SEQ ID NO: 1143997 - RNA, 21 nt, Human
cccaggugauccaccggccuc

SEQ ID NO: 1143998 - RNA, 23 nt, Human
cccauguagcugggauuacaagu

SEQ ID NO: 1143999 - RNA, 18 nt, Human
cccggguucaagaaauuc

SEQ ID NO: 1144000 - RNA, 22 nt, Human
cccuggccugcaggcuuugcgg

SEQ ID NO: 1144001 - RNA, 24 nt, Human
ccucccggguucaagaaauucucc

SEQ ID NO: 1144002 - RNA, 22 nt, Human
ccuccgcuucccauguagcugg

SEQ ID NO: 1144003 - RNA, 24 nt, Human
ccucucuucuuggcuuguagaugg

SEQ ID NO: 1144004 - RNA, 20 nt, Human
ccugaucccaggugauccac

SEQ ID NO: 1144005 - RNA, 24 nt, Human
ccugaucccaggugauccaccggc

SEQ ID NO: 1144006 - RNA, 24 nt, Human
cgacauguuggccaggcugaucuu

SEQ ID NO: 1144007 - RNA, 23 nt, Human
cucacggccuaaccaccucccaa

SEQ ID NO: 1144008 - RNA, 24 nt, Human
cucacucugucccgcaggcuggag

SEQ ID NO: 1144009 - RNA, 23 nt, Human
cucacugcaaagucugccucccg

SEQ ID NO: 1144010 - RNA, 24 nt, Human
cucacugcaaagucugccucccgg

SEQ ID NO: 1144011 - RNA, 21 nt, Human
cucaggucagauuucuccucc

SEQ ID NO: 1144012 - RNA, 21 nt, Human
cucuggcuucucacgcucuuc

SEQ ID NO: 1144013 - RNA, 19 nt, Human
cuuguagauggcugcccuc

SEQ ID NO: 1144014 - RNA, 21 nt, Human
gaaauucucccaccuccgcuu

SEQ ID NO: 1144015 - RNA, 21 nt, Human
gacaccaucacauugggaguu

SEQ ID NO: 1144016 - RNA, 21 nt, Human
gagaaccauaagggcaccaac

SEQ ID NO: 1144017 - RNA, 21 nt, Human
gagaggcagugggugugauug

SEQ ID NO: 1144018 - RNA, 18 nt, Human
gauuacaggcaugagcca

SEQ ID NO: 1144019 - RNA, 22 nt, Human
gauuacaggcaugagccacugc

SEQ ID NO: 1144020 - RNA, 23 nt, Human
gauuacaggcaugagccacugca

SEQ ID NO: 1144021 - RNA, 22 nt, Human
gcaaggugccggcagguuuggu

SEQ ID NO: 1144022 - RNA, 19 nt, Human
gcacaccaccaagcccagc

SEQ ID NO: 1144023 - RNA, 21 nt, Human
gcagugaccaaggaugcagaa

SEQ ID NO: 1144024 - RNA, 18 nt, Human
gccaaucuguaucuacag

SEQ ID NO: 1144025 - RNA, 23 nt, Human
gccucagccucccaaagugcugg

SEQ ID NO: 1144026 - RNA, 19 nt, Human
gcuggagugcaguggcacg

SEQ ID NO: 1144027 - RNA, 22 nt, Human
ggauuacaggcaugagccacug

SEQ ID NO: 1144028 - RNA, 21 nt, Human
ggcuuguagauggcugcccuc

SEQ ID NO: 1144029 - RNA, 18 nt, Human
gggcuacuguaacaaaau

SEQ ID NO: 1144030 - RNA, 18 nt, Human
ggugaggccucucuucuu

SEQ ID NO: 1144031 - RNA, 18 nt, Human
guagcugggauuacaagu

SEQ ID NO: 1144032 - RNA, 24 nt, Human
gugauccaccggccucagccuccc

SEQ ID NO: 1144033 - RNA, 23 nt, Human
uaaccaccucccaaaggcuccac

SEQ ID NO: 1144034 - RNA, 22 nt, Human
uacaggcaugagccacugcacc

SEQ ID NO: 1144035 - RNA, 21 nt, Human
uagcacagcaugagaugcgug

SEQ ID NO: 1144036 - RNA, 24 nt, Human
uaguagagauggcacuucgacaug

SEQ ID NO: 1144037 - RNA, 22 nt, Human
ucaacauaugaacccaggggac

SEQ ID NO: 1144038 - RNA, 23 nt, Human
ucacggccuaaccaccucccaaa

SEQ ID NO: 1144039 - RNA, 24 nt, Human
ucacugcaaagucugccucccggg

SEQ ID NO: 1144040 - RNA, 18 nt, Human
ucagccucccaaagugcu

SEQ ID NO: 1144041 - RNA, 23 nt, Human
uccacagugcuccacccuguggg

SEQ ID NO: 1144042 - RNA, 21 nt, Human
uccaccaccaugugcccagac

SEQ ID NO: 1144043 - RNA, 22 nt, Human
uccaccaccaugugcccagacc

SEQ ID NO: 1144044 - RNA, 24 nt, Human
ucccaaagugcugggauuacaggc

SEQ ID NO: 1144045 - RNA, 19 nt, Human
ucccacccucccuggccug

SEQ ID NO: 1144046 - RNA, 22 nt, Human
ucccacccucccuggccugcag

SEQ ID NO: 1144047 - RNA, 20 nt, Human
ucccacucugcacucuggcu

SEQ ID NO: 1144048 - RNA, 21 nt, Human
ucccggguucaagaaauucuc

SEQ ID NO: 1144049 - RNA, 23 nt, Human
ucccggguucaagaaauucuccc

SEQ ID NO: 1144050 - RNA, 18 nt, Human
uccgugugaucuuggaau

SEQ ID NO: 1144051 - RNA, 24 nt, Human
ucucacucugucccgcaggcugga

SEQ ID NO: 1144052 - RNA, 19 nt, Human
ucucccaccuccgcuuccc

SEQ ID NO: 1144053 - RNA, 24 nt, Human
ucugucccgcaggcuggagugcag

SEQ ID NO: 1144054 - RNA, 19 nt, Human
ugaggccucucuucuuggc

SEQ ID NO: 1144055 - RNA, 24 nt, Human
ugaucccaggugauccaccggccu

SEQ ID NO: 1144056 - RNA, 20 nt, Human
ugcccguccuccucucggcu

SEQ ID NO: 1144057 - RNA, 18 nt, Human
ugcgugucagugagcgua

SEQ ID NO: 1144058 - RNA, 20 nt, Human
ugcuggcagugaccaaggau

SEQ ID NO: 1144059 - RNA, 23 nt, Human
uggagugcaguggcacgaucuca

SEQ ID NO: 1144060 - RNA, 24 nt, Human
uggagugcaguggcacgaucucag

SEQ ID NO: 1144061 - RNA, 24 nt, Human
uggcacgaucucagcucacugcaa

SEQ ID NO: 1144062 - RNA, 24 nt, Human
uggccaggcugaucuuggacuccu

SEQ ID NO: 1144063 - RNA, 20 nt, Human
uggccuggauaucucuucug

SEQ ID NO: 1144064 - RNA, 19 nt, Human
uggcuuuuauguacggcau

SEQ ID NO: 1144065 - RNA, 24 nt, Human
ugggauuacaagugcacaccacca

SEQ ID NO: 1144066 - RNA, 18 nt, Human
ugggauuacaggcaugag

SEQ ID NO: 1144067 - RNA, 19 nt, Human
ugggauuacaggcaugagc

SEQ ID NO: 1144068 - RNA, 21 nt, Human
ugggauuacaggcaugagcca

SEQ ID NO: 1144069 - RNA, 22 nt, Human
ugggauuacaggcaugagccac

SEQ ID NO: 1144070 - RNA, 22 nt, Human
ugggauuacaggcaugagccac

SEQ ID NO: 1144071 - RNA, 24 nt, Human
ugggauuacaggcaugagccacug

SEQ ID NO: 1144072 - RNA, 24 nt, Human
ugggauuacaggcaugagccacug

SEQ ID NO: 1144073 - RNA, 18 nt, Human
uguagauggcugcccucu

SEQ ID NO: 1144074 - RNA, 25 nt, Human
uguagcugggauuacaagugcacac

SEQ ID NO: 1144075 - RNA, 24 nt, Human
uucaagaaauucucccaccuccgc

SEQ ID NO: 1144076 - RNA, 24 nt, Human
uucuugacuccaagaccagacacc

SEQ ID NO: 1144077 - RNA, 22 nt, Human
uuggugucuggugaggccucuc

SEQ ID NO: 1144078 - RNA, 25 nt, Human
aaaaagaaagcgagaguucagggac

SEQ ID NO: 1144079 - RNA, 28 nt, Human
aaauacaaacaaauuuccuuuuuaaagu

SEQ ID NO: 1144080 - RNA, 22 nt, Human
acaaauuuccuuuuuaaaguac

SEQ ID NO: 1144081 - RNA, 22 nt, Human
aggaggcgcguggcggaggcgg

SEQ ID NO: 1144082 - RNA, 23 nt, Human
cacaccacaaguaaagucagaag

SEQ ID NO: 1144083 - RNA, 18 nt, Human
gaacauggucacaccacc

SEQ ID NO: 1144084 - RNA, 19 nt, Human
gaaggcugguuuggucauc

SEQ ID NO: 1144085 - RNA, 19 nt, Human
gaguccgcggcggcggagg

SEQ ID NO: 1144086 - RNA, 18 nt, Human
gcggcggcggaggaggcg

SEQ ID NO: 1144087 - RNA, 24 nt, Human
gcugguuuggucaucggagaucau

SEQ ID NO: 1144088 - RNA, 24 nt, Human
ggucaucggagaucauuaaaaaug

SEQ ID NO: 1144089 - RNA, 19 nt, Human
guaggacagagaacgcucc

SEQ ID NO: 1144090 - RNA, 23 nt, Human
guaggacagagaacgcuccgaag

SEQ ID NO: 1144091 - RNA, 21 nt, Human
guggcggaggcggcugcggcg

SEQ ID NO: 1144092 - RNA, 21 nt, Human
uaaaaagaaagcgagaguuca

SEQ ID NO: 1144093 - RNA, 22 nt, Human
uaaauaaaaaauacaaacaaau

SEQ ID NO: 1144094 - RNA, 26 nt, Human
uacaaacaaauuuccuuuuuaaagua

SEQ ID NO: 1144095 - RNA, 18 nt, Human
ucacaccacaaguaaagu

SEQ ID NO: 1144096 - RNA, 24 nt, Human
uccgaaggcugguuuggucaucgg

SEQ ID NO: 1144097 - RNA, 19 nt, Human
ugccggaguccgcggcggc

SEQ ID NO: 1144098 - RNA, 19 nt, Human
ugccggaguccgcggcggc

SEQ ID NO: 1144099 - RNA, 27 nt, Human
uguaaauaaaaaauacaaacaaauuuc

SEQ ID NO: 1144100 - RNA, 25 nt, Human
aaaacaacuuuaguacacaaacugg

SEQ ID NO: 1144101 - RNA, 20 nt, Human
aaaauaugcauuuccaucug

SEQ ID NO: 1144102 - RNA, 26 nt, Human
aaacaaccccaagaagaggggaacgc

SEQ ID NO: 1144103 - RNA, 28 nt, Human
aaacagguacaaucacagauuacccaag

SEQ ID NO: 1144104 - RNA, 22 nt, Human
aaauacuugcuuagcaucuacc

SEQ ID NO: 1144105 - RNA, 24 nt, Human
aacaacaaacauauauacauauca

SEQ ID NO: 1144106 - RNA, 23 nt, Human
aacagacauaaguuuaaaagacc

SEQ ID NO: 1144107 - RNA, 21 nt, Human
aagcagaaaugagguauguga

SEQ ID NO: 1144108 - RNA, 22 nt, Human
aagccuccuaucagagucccag

SEQ ID NO: 1144109 - RNA, 19 nt, Human
aagccuucagcccacacag

SEQ ID NO: 1144110 - RNA, 20 nt, Human
aagcugaagggaguauugcc

SEQ ID NO: 1144111 - RNA, 27 nt, Human
aagucacagacaaccuacuuaacagac

SEQ ID NO: 1144112 - RNA, 22 nt, Human
acaaacuggaacacuuugguau

SEQ ID NO: 1144113 - RNA, 18 nt, Human
acacuacugcuuccccgc

SEQ ID NO: 1144114 - RNA, 25 nt, Human
accccauuuccugugacugaaaugg

SEQ ID NO: 1144115 - RNA, 21 nt, Human
acucugcaacggugcgacuuc

SEQ ID NO: 1144116 - RNA, 22 nt, Human
acugcaacccccuucgcugccu

SEQ ID NO: 1144117 - RNA, 21 nt, Human
agaaaaacaacuuuaguacac

SEQ ID NO: 1144118 - RNA, 21 nt, Human
agaaguuguucgaggaggaaa

SEQ ID NO: 1144119 - RNA, 20 nt, Human
agaaucccaggaagaaacag

SEQ ID NO: 1144120 - RNA, 20 nt, Human
agacggcccuauagcugagg

SEQ ID NO: 1144121 - RNA, 19 nt, Human
agaggugggcuucggcaug

SEQ ID NO: 1144122 - RNA, 23 nt, Human
agcugggcugccuccugucucug

SEQ ID NO: 1144123 - RNA, 19 nt, Human
aggaaccauaaugccucuc

SEQ ID NO: 1144124 - RNA, 18 nt, Human
aggaagaaacagguacaa

SEQ ID NO: 1144125 - RNA, 23 nt, Human
aucacagauuacccaagccaugc

SEQ ID NO: 1144126 - RNA, 19 nt, Human
aucccauacucucugcuuc

SEQ ID NO: 1144127 - RNA, 24 nt, Human
auggccacaagaauauggaaggug

SEQ ID NO: 1144128 - RNA, 19 nt, Human
auuuccaucugcauauccc

SEQ ID NO: 1144129 - RNA, 19 nt, Human
caaccccaagaagagcugg

SEQ ID NO: 1144130 - RNA, 22 nt, Human
caagaaaacacggaaugaagca

SEQ ID NO: 1144131 - RNA, 23 nt, Human
caagucacagacaaccuacuuaa

SEQ ID NO: 1144132 - RNA, 24 nt, Human
caauugcugcauuuuuuaaaaagc

SEQ ID NO: 1144133 - RNA, 23 nt, Human
cacacaaggucauccccuugaaa

SEQ ID NO: 1144134 - RNA, 24 nt, Human
cacagacaaccuacuuaacagaca

SEQ ID NO: 1144135 - RNA, 25 nt, Human
cacagacaaccuacuuaacagacau

SEQ ID NO: 1144136 - RNA, 21 nt, Human
cacagaccuggccaaacaauc

SEQ ID NO: 1144137 - RNA, 23 nt, Human
caccccuccucaguggcugggag

SEQ ID NO: 1144138 - RNA, 20 nt, Human
cagaaggcagaaagcucaga

SEQ ID NO: 1144139 - RNA, 19 nt, Human
cagcagccacacaagguca

SEQ ID NO: 1144140 - RNA, 22 nt, Human
cagcagccacacaaggucaucc

SEQ ID NO: 1144141 - RNA, 24 nt, Human
cagcaucuuccagcugcuccagga

SEQ ID NO: 1144142 - RNA, 19 nt, Human
caggcugccagaaaaacaa

SEQ ID NO: 1144143 - RNA, 23 nt, Human
cauuuuagacuugagcccagcug

SEQ ID NO: 1144144 - RNA, 19 nt, Human
ccacaauuucucuauccca

SEQ ID NO: 1144145 - RNA, 19 nt, Human
ccacacaaggucauccccu

SEQ ID NO: 1144146 - RNA, 21 nt, Human
ccacgaagagcaguucucacc

SEQ ID NO: 1144147 - RNA, 18 nt, Human
ccagguggucgcuuugau

SEQ ID NO: 1144148 - RNA, 20 nt, Human
ccaguggagcaaugaacauc

SEQ ID NO: 1144149 - RNA, 22 nt, Human
ccauccaggaacacuggaucau

SEQ ID NO: 1144150 - RNA, 22 nt, Human
ccaucuuggauuaggacuacag

SEQ ID NO: 1144151 - RNA, 23 nt, Human
cccagcagcagccacacaagguc

SEQ ID NO: 1144152 - RNA, 22 nt, Human
ccccuacugcaacccccuucgc

SEQ ID NO: 1144153 - RNA, 19 nt, Human
cccucaaaauaaaggcaag

SEQ ID NO: 1144154 - RNA, 23 nt, Human
cccuggucaccaagccuucagcc

SEQ ID NO: 1144155 - RNA, 18 nt, Human
ccuacaggcagcugauga

SEQ ID NO: 1144156 - RNA, 25 nt, Human
ccuacugcaacccccuucgcugccu

SEQ ID NO: 1144157 - RNA, 23 nt, Human
ccucccucccucaaaauaaaggc

SEQ ID NO: 1144158 - RNA, 18 nt, Human
ccucugccaccccuccuc

SEQ ID NO: 1144159 - RNA, 25 nt, Human
ccuggcacgucggguuccaaguugg

SEQ ID NO: 1144160 - RNA, 20 nt, Human
ccuggccaaacaauccucug

SEQ ID NO: 1144161 - RNA, 22 nt, Human
ccuucugccaguuaccacuggg

SEQ ID NO: 1144162 - RNA, 20 nt, Human
cgaagauggcugaauacccu

SEQ ID NO: 1144163 - RNA, 22 nt, Human
cucaaaauaaaggcaagaugaa

SEQ ID NO: 1144164 - RNA, 21 nt, Human
cucacccuuaauguugacuca

SEQ ID NO: 1144165 - RNA, 23 nt, Human
cucagagguggagaaaacaacaa

SEQ ID NO: 1144166 - RNA, 19 nt, Human
cuccucaguggcugggagc

SEQ ID NO: 1144167 - RNA, 23 nt, Human
cucuuuaauacuguggugucucc

SEQ ID NO: 1144168 - RNA, 18 nt, Human
cugcagcaagagcgcccc

SEQ ID NO: 1144169 - RNA, 23 nt, Human
cuucaggaacaacaaaaaucaac

SEQ ID NO: 1144170 - RNA, 19 nt, Human
cuugccccucccucccuca

SEQ ID NO: 1144171 - RNA, 24 nt, Human
cuuuucaccugcugaagcugaagg

SEQ ID NO: 1144172 - RNA, 19 nt, Human
gaaaaacaacuuuaguaca

SEQ ID NO: 1144173 - RNA, 21 nt, Human
gaacagcagcagguagagggg

SEQ ID NO: 1144174 - RNA, 24 nt, Human
gaacagcagcagguagagggguag

SEQ ID NO: 1144175 - RNA, 26 nt, Human
gaagaaacagguacaaucacagauua

SEQ ID NO: 1144176 - RNA, 20 nt, Human
gacaaccuacuuaacagaca

SEQ ID NO: 1144177 - RNA, 22 nt, Human
gagcaaugaacaucuggcuggg

SEQ ID NO: 1144178 - RNA, 21 nt, Human
gcaaggaugggcguaaacaac

SEQ ID NO: 1144179 - RNA, 21 nt, Human
gccagggugccagacaggaaa

SEQ ID NO: 1144180 - RNA, 22 nt, Human
gcugccuccugucucugcauuc

SEQ ID NO: 1144181 - RNA, 24 nt, Human
guggagagcagacucuagaugaga

SEQ ID NO: 1144182 - RNA, 21 nt, Human
uaaaacacuucugcacauuuu

SEQ ID NO: 1144183 - RNA, 21 nt, Human
uaaagaagguggcucaagcca

SEQ ID NO: 1144184 - RNA, 21 nt, Human
uaacagacauaaguuuaaaag

SEQ ID NO: 1144185 - RNA, 22 nt, Human
uaccucaccuccuacaggcagc

SEQ ID NO: 1144186 - RNA, 25 nt, Human
uaccucaccuccuacaggcagcuga

SEQ ID NO: 1144187 - RNA, 23 nt, Human
uagaggugggcuucggcauggcc

SEQ ID NO: 1144188 - RNA, 22 nt, Human
uagaugagaauguaacacagca

SEQ ID NO: 1144189 - RNA, 18 nt, Human
uauaaaacacuucugcac

SEQ ID NO: 1144190 - RNA, 20 nt, Human
uauaaaacacuucugcacau

SEQ ID NO: 1144191 - RNA, 21 nt, Human
uaugcaaagcgaagauggcug

SEQ ID NO: 1144192 - RNA, 22 nt, Human
ucaacuucauugagaaccacac

SEQ ID NO: 1144193 - RNA, 19 nt, Human
ucaccugcugaagcugaag

SEQ ID NO: 1144194 - RNA, 23 nt, Human
ucacugggcagcuuuucuggccu

SEQ ID NO: 1144195 - RNA, 23 nt, Human
ucagauaccguggguagugugau

SEQ ID NO: 1144196 - RNA, 21 nt, Human
ucaggaacaacaaaaaucaac

SEQ ID NO: 1144197 - RNA, 19 nt, Human
ucaggagaucuaagaguuc

SEQ ID NO: 1144198 - RNA, 22 nt, Human
ucaucugaacagaaagagcaaa

SEQ ID NO: 1144199 - RNA, 21 nt, Human
ucauggagugcaaugacagcc

SEQ ID NO: 1144200 - RNA, 18 nt, Human
ucugcagcaagagcgccc

SEQ ID NO: 1144201 - RNA, 31 nt, Human
ucuggccucuacaaugggaacacuacugcuu

SEQ ID NO: 1144202 - RNA, 24 nt, Human
ucuucucauaugcaaagcgaagau

SEQ ID NO: 1144203 - RNA, 23 nt, Human
ugaccaccucccuaauguuaccc

SEQ ID NO: 1144204 - RNA, 23 nt, Human
ugacucgagacagacggcccuau

SEQ ID NO: 1144205 - RNA, 24 nt, Human
ugcaaagcgaagauggcugaauac

SEQ ID NO: 1144206 - RNA, 21 nt, Human
ugcagcaagagcgccccuacu

SEQ ID NO: 1144207 - RNA, 18 nt, Human
ugcagggacugggcccug

SEQ ID NO: 1144208 - RNA, 20 nt, Human
uggccaaacaauccucugcc

SEQ ID NO: 1144209 - RNA, 20 nt, Human
uggccacaagaauauggaag

SEQ ID NO: 1144210 - RNA, 18 nt, Human
uggcgcuccccugccagg

SEQ ID NO: 1144211 - RNA, 20 nt, Human
uggcucaagccagcucacag

SEQ ID NO: 1144212 - RNA, 26 nt, Human
uggcugcagggacuggggggacccgc

SEQ ID NO: 1144213 - RNA, 20 nt, Human
uggggagaggagaauccuac

SEQ ID NO: 1144214 - RNA, 21 nt, Human
ugguaucaggcaacccagcac

SEQ ID NO: 1144215 - RNA, 18 nt, Human
uguagaaggagaccuggc

SEQ ID NO: 1144216 - RNA, 20 nt, Human
ugugaaaagugagauggcug

SEQ ID NO: 1144217 - RNA, 22 nt, Human
ugugcagaaucccaggaagaaa

SEQ ID NO: 1144218 - RNA, 25 nt, Human
uuaaaagacccacuuaaugcccuaa

SEQ ID NO: 1144219 - RNA, 23 nt, Human
uuaauguugacucaacauuuccu

SEQ ID NO: 1144220 - RNA, 18 nt, Human
uuccccgccaggguccuu

SEQ ID NO: 1144221 - RNA, 27 nt, Human
uucucauaugcaaagcgaagauggcug

SEQ ID NO: 1144222 - RNA, 22 nt, Human
uugaaaguccuguggaaggagg

SEQ ID NO: 1144223 - RNA, 22 nt, Human
uugagauugucuucucauaugc

SEQ ID NO: 1144224 - RNA, 21 nt, Human
aaacgaagacuggaaccugag

SEQ ID NO: 1144225 - RNA, 19 nt, Human
aaagcgcugggauuacagg

SEQ ID NO: 1144226 - RNA, 24 nt, Human
aaagcgcugggauuacaggcauga

SEQ ID NO: 1144227 - RNA, 18 nt, Human
aaaguucuccaagucccc

SEQ ID NO: 1144228 - RNA, 22 nt, Human
aaaguucuccaaguccccaccu

SEQ ID NO: 1144229 - RNA, 22 nt, Human
aacagacucggggcuugcuuca

SEQ ID NO: 1144230 - RNA, 20 nt, Human
aacagggaggggguguggcu

SEQ ID NO: 1144231 - RNA, 24 nt, Human
aacugguugcagaaccaguugccc

SEQ ID NO: 1144232 - RNA, 24 nt, Human
aacuucccuucccugcugucccca

SEQ ID NO: 1144233 - RNA, 22 nt, Human
aagacaaaagaacagaccugag

SEQ ID NO: 1144234 - RNA, 20 nt, Human
aagcaccucccccuucacgc

SEQ ID NO: 1144235 - RNA, 23 nt, Human
aagcagcagcaagauuuauaauc

SEQ ID NO: 1144236 - RNA, 19 nt, Human
aagcgcugggauuacaggc

SEQ ID NO: 1144237 - RNA, 26 nt, Human
aagcgcugggauuacaggcaugagcc

SEQ ID NO: 1144238 - RNA, 19 nt, Human
aagcuggcaguggccagcu

SEQ ID NO: 1144239 - RNA, 23 nt, Human
acacaacauuucacgguuucccc

SEQ ID NO: 1144240 - RNA, 21 nt, Human
acagaacagaugcuuucuaaa

SEQ ID NO: 1144241 - RNA, 19 nt, Human
acagagcacugauuggucc

SEQ ID NO: 1144242 - RNA, 24 nt, Human
acauaguaaaaccaaaagccaaca

SEQ ID NO: 1144243 - RNA, 24 nt, Human
accaaaaggaccaccccagcucca

SEQ ID NO: 1144244 - RNA, 22 nt, Human
accaccccagcuccaugcagaa

SEQ ID NO: 1144245 - RNA, 18 nt, Human
accauguuggccaggcug

SEQ ID NO: 1144246 - RNA, 19 nt, Human
acccuggguugcugggccc

SEQ ID NO: 1144247 - RNA, 20 nt, Human
accgaaagagcaagcagcag

SEQ ID NO: 1144248 - RNA, 23 nt, Human
accgaaagagcaagcagcagcaa

SEQ ID NO: 1144249 - RNA, 23 nt, Human
accucggccucccaaagcgcugg

SEQ ID NO: 1144250 - RNA, 21 nt, Human
acgcacgaagagacuggcaac

SEQ ID NO: 1144251 - RNA, 18 nt, Human
acgggguuucaccauguu

SEQ ID NO: 1144252 - RNA, 23 nt, Human
acgggguuucaccauguuggcca

SEQ ID NO: 1144253 - RNA, 24 nt, Human
acgggguuucaccauguuggccag

SEQ ID NO: 1144254 - RNA, 22 nt, Human
acuccagcucacugaccacacc

SEQ ID NO: 1144255 - RNA, 26 nt, Human
acugacccauaguccuggcucccaag

SEQ ID NO: 1144256 - RNA, 21 nt, Human
acuucccuucccugcuguccc

SEQ ID NO: 1144257 - RNA, 25 nt, Human
acuuucauguucuagaugaagaggu

SEQ ID NO: 1144258 - RNA, 18 nt, Human
agaauuucagcccccacc

SEQ ID NO: 1144259 - RNA, 19 nt, Human
agacaaaagaacagaccug

SEQ ID NO: 1144260 - RNA, 23 nt, Human
agacaaaagaacagaccugagca

SEQ ID NO: 1144261 - RNA, 21 nt, Human
agacaaaccauuuucccaggc

SEQ ID NO: 1144262 - RNA, 22 nt, Human
agacgaauggauacaacgagcu

SEQ ID NO: 1144263 - RNA, 20 nt, Human
agacuggaaccugagccagc

SEQ ID NO: 1144264 - RNA, 21 nt, Human
agacuggaaccugagccagca

SEQ ID NO: 1144265 - RNA, 24 nt, Human
agagaaguuaacuuuaacacucau

SEQ ID NO: 1144266 - RNA, 21 nt, Human
agagagagaggugccaguggg

SEQ ID NO: 1144267 - RNA, 27 nt, Human
agagagaggugccaguggggaccuggu

SEQ ID NO: 1144268 - RNA, 18 nt, Human
agcgcugggauuacaggc

SEQ ID NO: 1144269 - RNA, 19 nt, Human
aggcaggagaaggauguga

SEQ ID NO: 1144270 - RNA, 24 nt, Human
aggugauccgcccaccucggccuc

SEQ ID NO: 1144271 - RNA, 19 nt, Human
aggugccaguggggaccug

SEQ ID NO: 1144272 - RNA, 19 nt, Human
aguccccaccugacccaga

SEQ ID NO: 1144273 - RNA, 18 nt, Human
agucuggcuagaguuggg

SEQ ID NO: 1144274 - RNA, 19 nt, Human
agucuuguugagaacacag

SEQ ID NO: 1144275 - RNA, 20 nt, Human
caaaagaacagaccugagca

SEQ ID NO: 1144276 - RNA, 24 nt, Human
caaagcgcugggauuacaggcaug

SEQ ID NO: 1144277 - RNA, 25 nt, Human
caagaacgcaaccacagacccucgc

SEQ ID NO: 1144278 - RNA, 24 nt, Human
caagacaaaagaacagaccugagc

SEQ ID NO: 1144279 - RNA, 22 nt, Human
caaguccccaccugacccagaa

SEQ ID NO: 1144280 - RNA, 19 nt, Human
caauggauccauuuucuaa

SEQ ID NO: 1144281 - RNA, 19 nt, Human
cacagaacagaugcuuucu

SEQ ID NO: 1144282 - RNA, 22 nt, Human
caccagguacuagaacccuggg

SEQ ID NO: 1144283 - RNA, 21 nt, Human
caccauguuggccaggcuggu

SEQ ID NO: 1144284 - RNA, 24 nt, Human
caccauguuggccaggcugguuuc

SEQ ID NO: 1144285 - RNA, 31 nt, Human; identical to SEQ ID NO: 466129

SEQ ID NO: 1144286 - RNA, 24 nt, Human
caccugacccagaagcacagcugg

SEQ ID NO: 1144287 - RNA, 18 nt, Human
cacgcuucuucucaccag

SEQ ID NO: 1144288 - RNA, 23 nt, Human
cacgguuuccccgggccuuggcc

SEQ ID NO: 1144289 - RNA, 19 nt, Human
cagagcacugauuggucca

SEQ ID NO: 1144290 - RNA, 19 nt, Human
cagauaacuucaaaguuca

SEQ ID NO: 1144291 - RNA, 21 nt, Human
cagcaaaauagaagcaccucc

SEQ ID NO: 1144292 - RNA, 23 nt, Human
cagcaaaauagaagcaccucccu

SEQ ID NO: 1144293 - RNA, 21 nt, Human
cagcaagcuggcaguggccag

SEQ ID NO: 1144294 - RNA, 20 nt, Human
cagcagaggggggcugcggc

SEQ ID NO: 1144295 - RNA, 27 nt, Human
cagcagaggggggcugcggcuaggggg

SEQ ID NO: 1144296 - RNA, 19 nt, Human
cagcagcaagauuuauaau

SEQ ID NO: 1144297 - RNA, 22 nt, Human
cagcagcguggggucuugaagc

SEQ ID NO: 1144298 - RNA, 21 nt, Human
cagccagcugugccuucccag

SEQ ID NO: 1144299 - RNA, 21 nt, Human
cagcugugccuucccagaugc

SEQ ID NO: 1144300 - RNA, 22 nt, Human
cagucugucacuuaguuaucuc

SEQ ID NO: 1144301 - RNA, 21 nt, Human
caugcagaauuucagccccca

SEQ ID NO: 1144302 - RNA, 23 nt, Human
caugcguuuaaaacgaagacugg

SEQ ID NO: 1144303 - RNA, 21 nt, Human
cauggcccggaaaguggcaga

SEQ ID NO: 1144304 - RNA, 23 nt, Human
cauguuggccaggcugguuucaa

SEQ ID NO: 1144305 - RNA, 19 nt, Human
ccaaagcgcugggauuaca

SEQ ID NO: 1144306 - RNA, 23 nt, Human
ccaaagcgcugggauuacaggca

SEQ ID NO: 1144307 - RNA, 24 nt, Human
ccaaagcgcugggauuacaggcau

SEQ ID NO: 1144308 - RNA, 20 nt, Human
ccacccagucccgagguggg

SEQ ID NO: 1144309 - RNA, 24 nt, Human
ccagccccugcucugguuuacgcc

SEQ ID NO: 1144310 - RNA, 20 nt, Human
ccaggcauagcaggugggcu

SEQ ID NO: 1144311 - RNA, 25 nt, Human
ccagguacuagaacccuggguugcu

SEQ ID NO: 1144312 - RNA, 23 nt, Human
ccagucccgaggugggacagaaa

SEQ ID NO: 1144313 - RNA, 24 nt, Human
ccaguggcggucagguguccuggg

SEQ ID NO: 1144314 - RNA, 21 nt, Human
ccauuuucccaggcauagcag

SEQ ID NO: 1144315 - RNA, 24 nt, Human
cccaaagcgcugggauuacaggca

SEQ ID NO: 1144316 - RNA, 21 nt, Human
cccaccucggccucccaaagc

SEQ ID NO: 1144317 - RNA, 20 nt, Human
cccagcagguuucugcagca

SEQ ID NO: 1144318 - RNA, 26 nt, Human
ccccagccccugcucugguuuacgcc

SEQ ID NO: 1144319 - RNA, 26 nt, Human
cccugcuguccccagcgccucgccca

SEQ ID NO: 1144320 - RNA, 20 nt, Human
cccuucccucugacgcuguc

SEQ ID NO: 1144321 - RNA, 21 nt, Human
ccgcagcaagcuggcaguggc

SEQ ID NO: 1144322 - RNA, 24 nt, Human
ccuccagauaacuucaaaguucau

SEQ ID NO: 1144323 - RNA, 24 nt, Human
ccugaccucaggugauccgcccac

SEQ ID NO: 1144324 - RNA, 18 nt, Human
ccugcggcggagcacuga

SEQ ID NO: 1144325 - RNA, 24 nt, Human
ccuggguugcugggcccacgggcu

SEQ ID NO: 1144326 - RNA, 19 nt, Human
ccuuccccucuacauccca

SEQ ID NO: 1144327 - RNA, 23 nt, Human
cggaccgaaagagcaagcagcag

SEQ ID NO: 1144328 - RNA, 18 nt, Human
cggagcccaaaggccagu

SEQ ID NO: 1144329 - RNA, 24 nt, Human
cgggguuucaccauguuggccagg

SEQ ID NO: 1144330 - RNA, 20 nt, Human
cggucucucccuggccgcuc

SEQ ID NO: 1144331 - RNA, 23 nt, Human
cucccccuucacgcuucuucuca

SEQ ID NO: 1144332 - RNA, 22 nt, Human
cucuacaucccacgacgguguc

SEQ ID NO: 1144333 - RNA, 22 nt, Human
cucuuccagggcggccguuccc

SEQ ID NO: 1144334 - RNA, 19 nt, Human
cugcagcagcguggggucu

SEQ ID NO: 1144335 - RNA, 20 nt, Human
cuggcugacugaggaccuuc

SEQ ID NO: 1144336 - RNA, 19 nt, Human
cugggcuucugcuggucua

SEQ ID NO: 1144337 - RNA, 20 nt, Human
cugguccugcugacuucaag

SEQ ID NO: 1144338 - RNA, 18 nt, Human
cugugccuucccagaugc

SEQ ID NO: 1144339 - RNA, 24 nt, Human
cuuggccugaccuuugcugauaac

SEQ ID NO: 1144340 - RNA, 22 nt, Human
gaacagaccugagcauguuccc

SEQ ID NO: 1144341 - RNA, 20 nt, Human
gaacgcaaccacagacccuc

SEQ ID NO: 1144342 - RNA, 24 nt, Human
gaccucaggugauccgcccaccuc

SEQ ID NO: 1144343 - RNA, 20 nt, Human
gagagagaggugccaguggg

SEQ ID NO: 1144344 - RNA, 21 nt, Human
gagccccagccccugcucugg

SEQ ID NO: 1144345 - RNA, 24 nt, Human
gagcuguucaauggauccauuuuc

SEQ ID NO: 1144346 - RNA, 18 nt, Human
gauuacaggcaugagcca

SEQ ID NO: 1144347 - RNA, 22 nt, Human
gauuacaggcaugagccaccgc

SEQ ID NO: 1144348 - RNA, 23 nt, Human
gauuacaggcaugagccaccgca

SEQ ID NO: 1144349 - RNA, 18 nt, Human
gcacgugguggguguccg

SEQ ID NO: 1144350 - RNA, 20 nt, Human
gcacgugguggguguccggg

SEQ ID NO: 1144351 - RNA, 19 nt, Human
gcggucagguguccugggc

SEQ ID NO: 1144352 - RNA, 24 nt, Human
gcugcagcucaccugcggagccca

SEQ ID NO: 1144353 - RNA, 24 nt, Human
gcugcggcuagggggucucaguuc

SEQ ID NO: 1144354 - RNA, 23 nt, Human
gcugguuucaaacuccugaccuc

SEQ ID NO: 1144355 - RNA, 20 nt, Human
gcuugcuucagcuccgaggc

SEQ ID NO: 1144356 - RNA, 19 nt, Human
ggacagaggcaggagaagg

SEQ ID NO: 1144357 - RNA, 18 nt, Human
ggagguggugacgggugg

SEQ ID NO: 1144358 - RNA, 24 nt, Human
ggauagagaaaauuacagaagcaa

SEQ ID NO: 1144359 - RNA, 22 nt, Human
ggauuacaggcaugagccaccg

SEQ ID NO: 1144360 - RNA, 22 nt, Human
ggccguucccugcagccagcug

SEQ ID NO: 1144361 - RNA, 24 nt, Human
ggcugguuucaaacuccugaccuc

SEQ ID NO: 1144362 - RNA, 18 nt, Human
gggagguggugacgggug

SEQ ID NO: 1144363 - RNA, 23 nt, Human
gggguuucaccauguuggccagg

SEQ ID NO: 1144364 - RNA, 22 nt, Human
guacuaaaacauaguaaaacca

SEQ ID NO: 1144365 - RNA, 21 nt, Human
guccauuuuacagagugcuga

SEQ ID NO: 1144366 - RNA, 21 nt, Human
guccggccacagcugagcccc

SEQ ID NO: 1144367 - RNA, 24 nt, Human
gugauccgcccaccucggccuccc

SEQ ID NO: 1144368 - RNA, 23 nt, Human
guggguuucugguccugcugacu

SEQ ID NO: 1144369 - RNA, 21 nt, Human
uaaaacgaagacuggaaccug

SEQ ID NO: 1144370 - RNA, 24 nt, Human
uaaaacgaagacuggaaccugagc

SEQ ID NO: 1144371 - RNA, 18 nt, Human
uaaauacuuuccugggcu

SEQ ID NO: 1144372 - RNA, 20 nt, Human
uaacuucaaaguucaucacu

SEQ ID NO: 1144373 - RNA, 23 nt, Human
uacaggcaugagccaccgcaccc

SEQ ID NO: 1144374 - RNA, 21 nt, Human
uacaucccacgacggugucug

SEQ ID NO: 1144375 - RNA, 24 nt, Human
uagcaggugggcucccuggcuccu

SEQ ID NO: 1144376 - RNA, 24 nt, Human
uagcuagaaagaaaaguucuccaa

SEQ ID NO: 1144377 - RNA, 24 nt, Human
uagcugcucgcuauuaugauacuc

SEQ ID NO: 1144378 - RNA, 21 nt, Human
uagugacgggguuucaccaug

SEQ ID NO: 1144379 - RNA, 22 nt, Human
uagugacgggguuucaccaugu

SEQ ID NO: 1144380 - RNA, 20 nt, Human
uauaaucaagacaaaagaac

SEQ ID NO: 1144381 - RNA, 24 nt, Human
uauuagugacgggguuucaccaug

SEQ ID NO: 1144382 - RNA, 24 nt, Human
ucaagacaaaagaacagaccugag

SEQ ID NO: 1144383 - RNA, 20 nt, Human
ucaccaggauagagaaaauu

SEQ ID NO: 1144384 - RNA, 25 nt, Human
uccaaguccccaccugacccagaag

SEQ ID NO: 1144385 - RNA, 20 nt, Human
uccaccaaaaggaccacccc

SEQ ID NO: 1144386 - RNA, 18 nt, Human
uccagcaaaauagaagca

SEQ ID NO: 1144387 - RNA, 25 nt, Human
uccaguggcggucagguguccuggg

SEQ ID NO: 1144388 - RNA, 24 nt, Human
ucccaaagcgcugggauuacaggc

SEQ ID NO: 1144389 - RNA, 22 nt, Human
uccccagcgccucgcccagccu

SEQ ID NO: 1144390 - RNA, 21 nt, Human
uccccgggccuuggccugacc

SEQ ID NO: 1144391 - RNA, 23 nt, Human
uccccgggccuuggccugaccuu

SEQ ID NO: 1144392 - RNA, 21 nt, Human
ucccugcagccagcugugccu

SEQ ID NO: 1144393 - RNA, 18 nt, Human
uccuggcucccaaggcuc

SEQ ID NO: 1144394 - RNA, 21 nt, Human
ucuccaaguccccaccugacc

SEQ ID NO: 1144395 - RNA, 22 nt, Human
ucuccaaguccccaccugaccc

SEQ ID NO: 1144396 - RNA, 18 nt, Human
ucugagcuuagcucacuu

SEQ ID NO: 1144397 - RNA, 24 nt, Human
ucuuaccagaaagggucagucacc

SEQ ID NO: 1144398 - RNA, 18 nt, Human
ugaccucaggugauccgc

SEQ ID NO: 1144399 - RNA, 21 nt, Human
ugaccucaggugauccgccca

SEQ ID NO: 1144400 - RNA, 24 nt, Human
ugaccucaggugauccgcccaccu

SEQ ID NO: 1144401 - RNA, 30 nt, Human
ugacgggguuucaccauguuggccaggcuu

SEQ ID NO: 1144402 - RNA, 19 nt, Human
ugaggaccuucgcugcagc

SEQ ID NO: 1144403 - RNA, 24 nt, Human
ugauccgcccaccucggccuccca

SEQ ID NO: 1144404 - RNA, 23 nt, Human
ugcagccagcugugccuucccag

SEQ ID NO: 1144405 - RNA, 20 nt, Human
ugcgcgccacgcccaaucgu

SEQ ID NO: 1144406 - RNA, 25 nt, Human
uggaagcaucccaugggcacguggu

SEQ ID NO: 1144407 - RNA, 19 nt, Human
uggaauaaaugauuugggg

SEQ ID NO: 1144408 - RNA, 24 nt, Human
uggcagagcgaggguccagcaaaa

SEQ ID NO: 1144409 - RNA, 24 nt, Human
uggccaggcugguuucaaacuccu

SEQ ID NO: 1144410 - RNA, 18 nt, Human
uggcccggaaaguggcag

SEQ ID NO: 1144411 - RNA, 19 nt, Human
ugggacagaaaaugguucc

SEQ ID NO: 1144412 - RNA, 19 nt, Human
ugggauuacaggcaugagc

SEQ ID NO: 1144413 - RNA, 21 nt, Human
ugggauuacaggcaugagcca

SEQ ID NO: 1144414 - RNA, 22 nt, Human
ugggauuacaggcaugagccac

SEQ ID NO: 1144415 - RNA, 23 nt, Human
ugggauuacaggcaugagccacc

SEQ ID NO: 1144416 - RNA, 24 nt, Human
ugggauuacaggcaugagccaccg

SEQ ID NO: 1144417 - RNA, 24 nt, Human
ugggauuacaggcaugagccaccg

SEQ ID NO: 1144418 - RNA, 20 nt, Human
uggugacgggugguuggcag

SEQ ID NO: 1144419 - RNA, 21 nt, Human
ugguggguguccggccacagc

SEQ ID NO: 1144420 - RNA, 22 nt, Human
ugguggguguccggccacagcu

SEQ ID NO: 1144421 - RNA, 18 nt, Human
ugguuggcagagcgaggg

SEQ ID NO: 1144422 - RNA, 20 nt, Human
uguccggccacagcugagcc

SEQ ID NO: 1144423 - RNA, 18 nt, Human
ugugcagguuguagaaug

SEQ ID NO: 1144424 - RNA, 20 nt, Human
uguguacacaacauuucacg

SEQ ID NO: 1144425 - RNA, 26 nt, Human
uguucccuucccucugacgcugucuu

SEQ ID NO: 1144426 - RNA, 21 nt, Human
uuagugacgggguuucaccau

SEQ ID NO: 1144427 - RNA, 24 nt, Human
uuauuagugacgggguuucaccau

SEQ ID NO: 1144428 - RNA, 21 nt, Human
uucaauggauccauuuucuaa

SEQ ID NO: 1144429 - RNA, 23 nt, Human
uucaguggggagguggugacggg

SEQ ID NO: 1144430 - RNA, 23 nt, Human
uucauuuuguucuuuguccuucc

SEQ ID NO: 1144431 - RNA, 20 nt, Human
uuccugagucuuguugagaa

SEQ ID NO: 1144432 - RNA, 20 nt, Human
uuccuucccguggguuucug

SEQ ID NO: 1144433 - RNA, 22 nt, Human
uugcuucagcuccgaggcuucu

SEQ ID NO: 1144434 - RNA, 20 nt, Human
uugguccauuuuacagaaug

SEQ ID NO: 1144435 - RNA, 19 nt, Human
uugguccauuuuacagagc

SEQ ID NO: 1144436 - RNA, 19 nt, Human
uugguccauuuuacagagu

SEQ ID NO: 1144437 - RNA, 24 nt, Human
uuucaccauguuggccaggcuggu

SEQ ID NO: 1144438 - RNA, 20 nt, Human
uuuguccccgcccauguccu

SEQ ID NO: 1144439 - RNA, 21 nt, Human
uuuuguucuuuguccuucccc

SEQ ID NO: 1144440 - RNA, 24 nt, Human
uuuuuauuagugacgggguuucac

SEQ ID NO: 1144441 - RNA, 19 nt, Human
acaucagccuugucugcau

SEQ ID NO: 1144442 - RNA, 20 nt, Human
gcgugggucacacaugcgca

SEQ ID NO: 1144443 - RNA, 19 nt, Human
ucaggccagcgugggucac

SEQ ID NO: 1144444 - RNA, 20 nt, Human
ugacaucagccuugucugca

SEQ ID NO: 1144445 - RNA, 20 nt, Human
ugugacaauguucaggccag

SEQ ID NO: 1144446 - RNA, 19 nt, Human
uucaggccagcguggguca

SEQ ID NO: 1144447 - RNA, 21 nt, Human
acaugcaucuccccuggaucc

SEQ ID NO: 1144448 - RNA, 19 nt, Human
accacauuuccacaugcau

SEQ ID NO: 1144449 - RNA, 18 nt, Human
agacaggucagcaggggg

SEQ ID NO: 1144450 - RNA, 21 nt, Human
agcccgaugaaacgcagacug

SEQ ID NO: 1144451 - RNA, 20 nt, Human
auuccagcugugcagcucca

SEQ ID NO: 1144452 - RNA, 19 nt, Human
caggaggcccuuccaggcg

SEQ ID NO: 1144453 - RNA, 18 nt, Human
caucucggacuccaaagc

SEQ ID NO: 1144454 - RNA, 23 nt, Human
ccaaagccuguggcuccaucccg

SEQ ID NO: 1144455 - RNA, 19 nt, Human
ccacccaguggcugcugag

SEQ ID NO: 1144456 - RNA, 23 nt, Human
ccauaccagcauuccagcugugc

SEQ ID NO: 1144457 - RNA, 19 nt, Human
ccccauaccagcauuccag

SEQ ID NO: 1144458 - RNA, 20 nt, Human
ccucagucucgacauagauc

SEQ ID NO: 1144459 - RNA, 26 nt, Human
ccucugagagcccgaugaaacgcaga

SEQ ID NO: 1144460 - RNA, 25 nt, Human
cuggggcccccauaccagcauucca

SEQ ID NO: 1144461 - RNA, 22 nt, Human
cuguaccuggggcccccauacc

SEQ ID NO: 1144462 - RNA, 19 nt, Human
cuuggugagguggaaguca

SEQ ID NO: 1144463 - RNA, 18 nt, Human
gaggaggcaucucggacu

SEQ ID NO: 1144464 - RNA, 22 nt, Human
uaccuggggcccccauaccagc

SEQ ID NO: 1144465 - RNA, 23 nt, Human
uccaaagccuguggcuccauccc

SEQ ID NO: 1144466 - RNA, 20 nt, Human
uccccuggauccacccagug

SEQ ID NO: 1144467 - RNA, 21 nt, Human
uccucugagagcccgaugaaa

SEQ ID NO: 1144468 - RNA, 22 nt, Human
ucgggcaaagaagcucaccaca

SEQ ID NO: 1144469 - RNA, 20 nt, Human
ucugccaggauguccucacu

SEQ ID NO: 1144470 - RNA, 22 nt, Human
ugagguggaagucaucugccag

SEQ ID NO: 1144471 - RNA, 26 nt, Human
ugccaggaggaggcaucucggacucc

SEQ ID NO: 1144472 - RNA, 21 nt, Human
ugugcagcuccagcugggcag

SEQ ID NO: 1144473 - RNA, 21 nt, Human
ugugcagcuccagcugggcag

SEQ ID NO: 1144474 - RNA, 25 nt, Human
uuccacaugcaucuccccuggaucc

SEQ ID NO: 1144475 - RNA, 19 nt, Human
aaaaugggcaaaccagguu

SEQ ID NO: 1144476 - RNA, 24 nt, Human
aaauaaaaauauuuuaccccaaaa

SEQ ID NO: 1144477 - RNA, 23 nt, Human
aaguggcagugggaaugucacag

SEQ ID NO: 1144478 - RNA, 23 nt, Human
acuagcccuaacccuuaaguggc

SEQ ID NO: 1144479 - RNA, 21 nt, Human
agaggagcggggccccccaga

SEQ ID NO: 1144480 - RNA, 22 nt, Human
agccucucuguggggcuaaaga

SEQ ID NO: 1144481 - RNA, 18 nt, Human
aggcagggaggguggggu

SEQ ID NO: 1144482 - RNA, 21 nt, Human
aggcagggaggguggggugaa

SEQ ID NO: 1144483 - RNA, 19 nt, Human
agguggucaggaaagcuug

SEQ ID NO: 1144484 - RNA, 24 nt, Human
agguggucaggaaagcuugguaac

SEQ ID NO: 1144485 - RNA, 21 nt, Human
agugugaggccuggccaggga

SEQ ID NO: 1144486 - RNA, 19 nt, Human
aguuggccuaaggccagga

SEQ ID NO: 1144487 - RNA, 21 nt, Human
aucuucuuugaaaucuugcug

SEQ ID NO: 1144488 - RNA, 22 nt, Human
caaaaugggcaaaccagguucc

SEQ ID NO: 1144489 - RNA, 24 nt, Human
cacucccgcagggaccccuccacu

SEQ ID NO: 1144490 - RNA, 19 nt, Human
cagaggaugcuuggugagg

SEQ ID NO: 1144491 - RNA, 18 nt, Human
cagcaggaccagcuccuc

SEQ ID NO: 1144492 - RNA, 18 nt, Human
cagugggaaugucacagc

SEQ ID NO: 1144493 - RNA, 19 nt, Human
ccacucccugcucucuccc

SEQ ID NO: 1144494 - RNA, 20 nt, Human
ccauuccaucacauuagcaa

SEQ ID NO: 1144495 - RNA, 21 nt, Human
cccaaaacauguuucuuugcc

SEQ ID NO: 1144496 - RNA, 21 nt, Human
ccccagagaccuuccaauccu

SEQ ID NO: 1144497 - RNA, 21 nt, Human
cccccagagaccuuccaaucc

SEQ ID NO: 1144498 - RNA, 26 nt, Human
ccgcagggaccccuccacuccuuccc

SEQ ID NO: 1144499 - RNA, 18 nt, Human
ccuaccaucaggugguca

SEQ ID NO: 1144500 - RNA, 26 nt, Human
ccucccaauccuaaagagaugaacua

SEQ ID NO: 1144501 - RNA, 19 nt, Human
ccuuaaguggcagugggaa

SEQ ID NO: 1144502 - RNA, 19 nt, Human
cggcuucuugagcuguccu

SEQ ID NO: 1144503 - RNA, 26 nt, Human
cuccuucccuguguggcccugggcca

SEQ ID NO: 1144504 - RNA, 23 nt, Human
cucuaagcagcaggaccagcucu

SEQ ID NO: 1144505 - RNA, 19 nt, Human
cuuuccagccugacucugg

SEQ ID NO: 1144506 - RNA, 24 nt, Human
gaggugacuuaggcagggagggug

SEQ ID NO: 1144507 - RNA, 18 nt, Human
gaucuuuuucuuccugac

SEQ ID NO: 1144508 - RNA, 18 nt, Human
gcccuaacccuuaagugg

SEQ ID NO: 1144509 - RNA, 22 nt, Human
ggaaaauuugcaucuguaaaga

SEQ ID NO: 1144510 - RNA, 19 nt, Human
ggaggguggggugaaggcu

SEQ ID NO: 1144511 - RNA, 21 nt, Human
ggugacagaggaggccuggaa

SEQ ID NO: 1144512 - RNA, 20 nt, Human
uaaacucugauuuuuuuuau

SEQ ID NO: 1144513 - RNA, 21 nt, Human
uaaggugaaaaaauaguagau

SEQ ID NO: 1144514 - RNA, 21 nt, Human
uaauaugacucuaagcagcag

SEQ ID NO: 1144515 - RNA, 21 nt, Human
ucccauuaagccaacugacuc

SEQ ID NO: 1144516 - RNA, 21 nt, Human
ucccugagccacucccugcuc

SEQ ID NO: 1144517 - RNA, 25 nt, Human
ucgucaguaccagaggaugcuuggu

SEQ ID NO: 1144518 - RNA, 19 nt, Human
ucuaugauucucugacuag

SEQ ID NO: 1144519 - RNA, 20 nt, Human
ucucugacuagcccuaaccc

SEQ ID NO: 1144520 - RNA, 20 nt, Human
ucugcugauaccccccuaca

SEQ ID NO: 1144521 - RNA, 18 nt, Human
ucuuuuucuuccugaccc

SEQ ID NO: 1144522 - RNA, 19 nt, Human
ugacagaggaggccuggaa

SEQ ID NO: 1144523 - RNA, 22 nt, Human
ugacagguggggcaggugaucc

SEQ ID NO: 1144524 - RNA, 22 nt, Human
ugagcuguccugaugguuccuu

SEQ ID NO: 1144525 - RNA, 18 nt, Human
ugggcaaaccagguuccc

SEQ ID NO: 1144526 - RNA, 24 nt, Human
uggggcaggugauccuuccccccg

SEQ ID NO: 1144527 - RNA, 22 nt, Human
ugguaaccaggccaaaagcauc

SEQ ID NO: 1144528 - RNA, 22 nt, Human
uuagugugaggccuggccaggg

SEQ ID NO: 1144529 - RNA, 18 nt, Human
uucaauuucugcugauac

SEQ ID NO: 1144530 - RNA, 25 nt, Human
uucccuguguggcccugggccaucu

SEQ ID NO: 1144531 - RNA, 23 nt, Human
uucuaugauucucugacuagccg

SEQ ID NO: 1144532 - RNA, 21 nt, Human
uucucaucagauagguuucau

SEQ ID NO: 1144533 - RNA, 22 nt, Human
aaaaaaaaaaaaaaaaucaaag

SEQ ID NO: 1144534 - RNA, 25 nt, Human
aaaaacaaaaacaaaacaaaacaaa

SEQ ID NO: 1144535 - RNA, 23 nt, Human
aaaaacaaaacaaaacaaaaaga

SEQ ID NO: 1144536 - RNA, 27 nt, Human
aaaacaaaacaaaacaaaaagacuuaa

SEQ ID NO: 1144537 - RNA, 27 nt, Human
aaaagaccaagacacaugggcugggug

SEQ ID NO: 1144538 - RNA, 19 nt, Human
aaacaaaacaaaacaaaaa

SEQ ID NO: 1144539 - RNA, 19 nt, Human
aaacaaugcuagacucuca

SEQ ID NO: 1144540 - RNA, 24 nt, Human
aaagugcugggauuagaggcauga

SEQ ID NO: 1144541 - RNA, 23 nt, Human
aacaaaaagacuuaagacaugga

SEQ ID NO: 1144542 - RNA, 20 nt, Human
aacaaaacaaaaagacuuaa

SEQ ID NO: 1144543 - RNA, 19 nt, Human
aacagggugagaccccauc

SEQ ID NO: 1144544 - RNA, 20 nt, Human
aacagggugagaccccaucu

SEQ ID NO: 1144545 - RNA, 21 nt, Human
aacagggugagaccccaucuc

SEQ ID NO: 1144546 - RNA, 23 nt, Human
aagaucacgccacugcacuccag

SEQ ID NO: 1144547 - RNA, 19 nt, Human
aaguagcugggacuacagg

SEQ ID NO: 1144548 - RNA, 20 nt, Human
aaguagcugggacuacaggu

SEQ ID NO: 1144549 - RNA, 19 nt, Human
aagugcugggauuagaggc

SEQ ID NO: 1144550 - RNA, 24 nt, Human
aaucucuugaaccugggaggcgga

SEQ ID NO: 1144551 - RNA, 22 nt, Human
aauuuuuguauuuuaguagaga

SEQ ID NO: 1144552 - RNA, 24 nt, Human
aauuuuuguauuuuaguagagacg

SEQ ID NO: 1144553 - RNA, 21 nt, Human
acaaaacaaaacaaaaagacu

SEQ ID NO: 1144554 - RNA, 23 nt, Human
acaaaacaaaacaaaaagacuua

SEQ ID NO: 1144555 - RNA, 26 nt, Human
acaaaacaaaacaaaaagacuuaaga

SEQ ID NO: 1144556 - RNA, 22 nt, Human
acagacugagacucugucaaaa

SEQ ID NO: 1144557 - RNA, 19 nt, Human
acagaugcauauuuucccc

SEQ ID NO: 1144558 - RNA, 20 nt, Human
accagccuggccaacagggu

SEQ ID NO: 1144559 - RNA, 24 nt, Human
accauguugcccaggcuggucucg

SEQ ID NO: 1144560 - RNA, 25 nt, Human
accauguugcccaggcuggucucga

SEQ ID NO: 1144561 - RNA, 18 nt, Human
acccgcuuuucuuuuuuu

SEQ ID NO: 1144562 - RNA, 18 nt, Human
acgccacugcacuccagc

SEQ ID NO: 1144563 - RNA, 22 nt, Human
acgccacugcacuccagccugg

SEQ ID NO: 1144564 - RNA, 18 nt, Human
acgggguuucaccauguu

SEQ ID NO: 1144565 - RNA, 19 nt, Human
acgggguuucaccauguug

SEQ ID NO: 1144566 - RNA, 24 nt, Human
acgggguuucaccauguugcccag

SEQ ID NO: 1144567 - RNA, 19 nt, Human
acuacaggugcaugccacu

SEQ ID NO: 1144568 - RNA, 21 nt, Human
acugcaaccucugcccgccgg

SEQ ID NO: 1144569 - RNA, 22 nt, Human
acugcaaccucugcccgccggg

SEQ ID NO: 1144570 - RNA, 18 nt, Human
acugcacuccagccuggg

SEQ ID NO: 1144571 - RNA, 24 nt, Human
acugcacuccagccugggugacag

SEQ ID NO: 1144572 - RNA, 25 nt, Human
acuuuguugcccaagcuggagugca

SEQ ID NO: 1144573 - RNA, 22 nt, Human
agacaggagaaucucuugaacc

SEQ ID NO: 1144574 - RNA, 24 nt, Human
agacaggagaaucucuugaaccug

SEQ ID NO: 1144575 - RNA, 27 nt, Human
agacucugucaaaaacaaaaacaaagc

SEQ ID NO: 1144576 - RNA, 22 nt, Human
agacugagacucugucaaaaac

SEQ ID NO: 1144577 - RNA, 24 nt, Human
agcacuuugggaggccgagguggg

SEQ ID NO: 1144578 - RNA, 18 nt, Human
agcagggcaugguggugc

SEQ ID NO: 1144579 - RNA, 24 nt, Human
agccuggccaacagggugagaccc

SEQ ID NO: 1144580 - RNA, 24 nt, Human
agccugggugacagacugagacuc

SEQ ID NO: 1144581 - RNA, 20 nt, Human
aggaauuugagaccagccug

SEQ ID NO: 1144582 - RNA, 25 nt, Human
aggagugagauaguugugcaggggu

SEQ ID NO: 1144583 - RNA, 23 nt, Human
aggcaaucugcccgccuuggucu

SEQ ID NO: 1144584 - RNA, 21 nt, Human
aggccgagguggguggaucac

SEQ ID NO: 1144585 - RNA, 19 nt, Human
aggcggagguugcagcgag

SEQ ID NO: 1144586 - RNA, 24 nt, Human
aggcggagguugcagcgagccaag

SEQ ID NO: 1144587 - RNA, 24 nt, Human
aggcugagacaggagaaucucuug

SEQ ID NO: 1144588 - RNA, 18 nt, Human
agguauggacauguugac

SEQ ID NO: 1144589 - RNA, 22 nt, Human
agguggguggaucaccugaggu

SEQ ID NO: 1144590 - RNA, 25 nt, Human
aguagcugggacuacaggugcaugc

SEQ ID NO: 1144591 - RNA, 21 nt, Human
agugcaguggcacgaucucug

SEQ ID NO: 1144592 - RNA, 21 nt, Human
auaaaacucaucugaugagaa

SEQ ID NO: 1144593 - RNA, 24 nt, Human
aucacgccacugcacuccagccug

SEQ ID NO: 1144594 - RNA, 22 nt, Human
augguuuguugggcaugacucc

SEQ ID NO: 1144595 - RNA, 26 nt, Human
auuugguucagccauuguuccccagg

SEQ ID NO: 1144596 - RNA, 23 nt, Human
caaaacaaaacaaaaagacuuaa

SEQ ID NO: 1144597 - RNA, 24 nt, Human
caaagugcugggauuagaggcaug

SEQ ID NO: 1144598 - RNA, 25 nt, Human
caaagugcugggauuagaggcauga

SEQ ID NO: 1144599 - RNA, 24 nt, Human
cacaccuguugucccagcuacuug

SEQ ID NO: 1144600 - RNA, 24 nt, Human
caccauguugcccaggcuggucuc

SEQ ID NO: 1144601 - RNA, 27 nt, Human
caccauguugcccaggcuggucucgaa

SEQ ID NO: 1144602 - RNA, 18 nt, Human
caccugaggucaggaauu

SEQ ID NO: 1144603 - RNA, 23 nt, Human
caccuguugucccagcuacuugg

SEQ ID NO: 1144604 - RNA, 24 nt, Human
caccuguugucccagcuacuuggg

SEQ ID NO: 1144605 - RNA, 18 nt, Human
cacuccagccugggugac

SEQ ID NO: 1144606 - RNA, 21 nt, Human
cacuccagccugggugacaga

SEQ ID NO: 1144607 - RNA, 24 nt, Human
cacuccagccugggugacagacug

SEQ ID NO: 1144608 - RNA, 19 nt, Human
cacugcacuccagccuggg

SEQ ID NO: 1144609 - RNA, 21 nt, Human
cacugcacuccagccugggug

SEQ ID NO: 1144610 - RNA, 22 nt, Human
cacugcacuccagccuggguga

SEQ ID NO: 1144611 - RNA, 23 nt, Human
cacugcacuccagccugggugac

SEQ ID NO: 1144612 - RNA, 24 nt, Human
cacugcacuccagccugggugaca

SEQ ID NO: 1144613 - RNA, 24 nt, Human
cacugcacuccagccugggugaca

SEQ ID NO: 1144614 - RNA, 22 nt, Human
cacuuuguugcccaagcuggag

SEQ ID NO: 1144615 - RNA, 24 nt, Human
cacuuuguugcccaagcuggagug

SEQ ID NO: 1144616 - RNA, 24 nt, Human
cagcacuuugggaggccgaggugg

SEQ ID NO: 1144617 - RNA, 19 nt, Human
cauguugcccaggcugguc

SEQ ID NO: 1144618 - RNA, 21 nt, Human
cauguugcccaggcuggucuc

SEQ ID NO: 1144619 - RNA, 23 nt, Human
cauguugcccaggcuggucucga

SEQ ID NO: 1144620 - RNA, 24 nt, Human
cauguugcccaggcuggucucgaa

SEQ ID NO: 1144621 - RNA, 20 nt, Human
cauuuaagcaaaccuggcug

SEQ ID NO: 1144622 - RNA, 22 nt, Human
ccaaagugcugggauuagaggc

SEQ ID NO: 1144623 - RNA, 24 nt, Human
ccaaagugcugggauuagaggcau

SEQ ID NO: 1144624 - RNA, 24 nt, Human
ccaagacacaugggcugggugcgg

SEQ ID NO: 1144625 - RNA, 20 nt, Human
ccacugcacuccagccuggg

SEQ ID NO: 1144626 - RNA, 20 nt, Human
ccacugcacuccagccuggg

SEQ ID NO: 1144627 - RNA, 21 nt, Human
ccacugcacuccagccugggu

SEQ ID NO: 1144628 - RNA, 21 nt, Human
ccacugcacuccagccugggu

SEQ ID NO: 1144629 - RNA, 23 nt, Human
ccacugcacuccagccuggguga

SEQ ID NO: 1144630 - RNA, 23 nt, Human
ccacugcacuccagccuggguga

SEQ ID NO: 1144631 - RNA, 24 nt, Human
ccacugcacuccagccugggugac

SEQ ID NO: 1144632 - RNA, 24 nt, Human
ccagauuaaaaaaaaaaaaaaaaa

SEQ ID NO: 1144633 - RNA, 28 nt, Human
ccagauuaaaaaaaaaaaaaaaaaucaa

SEQ ID NO: 1144634 - RNA, 24 nt, Human
ccagccaauuuaaacauuuucuaa

SEQ ID NO: 1144635 - RNA, 22 nt, Human
ccagccuggccaacagggugag

SEQ ID NO: 1144636 - RNA, 23 nt, Human
cccaagcuggagugcaguggcac

SEQ ID NO: 1144637 - RNA, 22 nt, Human
cccaaguagcugggacuacagg

SEQ ID NO: 1144638 - RNA, 24 nt, Human
cccaaguagcugggacuacaggug

SEQ ID NO: 1144639 - RNA, 24 nt, Human
ccccuuagauaggaauuugggcca

SEQ ID NO: 1144640 - RNA, 22 nt, Human
cccgccuuggucuuccaaagug

SEQ ID NO: 1144641 - RNA, 19 nt, Human
ccgcagcauccuuuucucc

SEQ ID NO: 1144642 - RNA, 18 nt, Human
ccggcgccuuucucucca

SEQ ID NO: 1144643 - RNA, 18 nt, Human
ccucuucauagcagggau

SEQ ID NO: 1144644 - RNA, 22 nt, Human
ccugaggucaggaauuugagac

SEQ ID NO: 1144645 - RNA, 24 nt, Human
ccuggccaacagggugagacccca

SEQ ID NO: 1144646 - RNA, 19 nt, Human
ccuggcugguccauuuucu

SEQ ID NO: 1144647 - RNA, 19 nt, Human
ccugggaggcggagguugc

SEQ ID NO: 1144648 - RNA, 22 nt, Human
ccugggugacagacugagacuc

SEQ ID NO: 1144649 - RNA, 20 nt, Human
ccuguaauuacagcacuuug

SEQ ID NO: 1144650 - RNA, 24 nt, Human
ccuguaauuacagcacuuugggag

SEQ ID NO: 1144651 - RNA, 21 nt, Human
ccuguugucccagcuacuugg

SEQ ID NO: 1144652 - RNA, 23 nt, Human
cgagccaagaucacgccacugca

SEQ ID NO: 1144653 - RNA, 24 nt, Human
cgagguggguggaucaccugaggu

SEQ ID NO: 1144654 - RNA, 24 nt, Human
cggcuccaagcaggagugagauag

SEQ ID NO: 1144655 - RNA, 24 nt, Human
cgggguuucaccauguugcccagg

SEQ ID NO: 1144656 - RNA, 24 nt, Human
cucacuuuguugcccaagcuggag

SEQ ID NO: 1144657 - RNA, 24 nt, Human
cucagcuucccaaguagcugggac

SEQ ID NO: 1144658 - RNA, 24 nt, Human
cucaugccuguaauuacagcacuu

SEQ ID NO: 1144659 - RNA, 19 nt, Human
cuccuuccucagcuuccca

SEQ ID NO: 1144660 - RNA, 22 nt, Human
cucucagucucuucaggauugg

SEQ ID NO: 1144661 - RNA, 19 nt, Human
cucugucaaaaacaaaaac

SEQ ID NO: 1144662 - RNA, 24 nt, Human
cugcaaccucugcccgccggguuc

SEQ ID NO: 1144663 - RNA, 21 nt, Human
cuguugucccagcuacuuggg

SEQ ID NO: 1144664 - RNA, 18 nt, Human
gacagcagggaucguugg

SEQ ID NO: 1144665 - RNA, 20 nt, Human
gacauggaguacauuaguuu

SEQ ID NO: 1144666 - RNA, 22 nt, Human
gacgggguuucaccauguugcc

SEQ ID NO: 1144667 - RNA, 19 nt, Human
gacuggaaagcaagucacc

SEQ ID NO: 1144668 - RNA, 19 nt, Human
gagaccagccuggccaaca

SEQ ID NO: 1144669 - RNA, 23 nt, Human
gagacgggguuucaccauguugc

SEQ ID NO: 1144670 - RNA, 23 nt, Human
gagguggguggaucaccugaggu

SEQ ID NO: 1144671 - RNA, 25 nt, Human
gagguggguggaucaccugagguca

SEQ ID NO: 1144672 - RNA, 19 nt, Human
gagguugcagcgagccaag

SEQ ID NO: 1144673 - RNA, 24 nt, Human
gaucaccugaggucaggaauuuga

SEQ ID NO: 1144674 - RNA, 21 nt, Human
gauuagaggcaugagacacug

SEQ ID NO: 1144675 - RNA, 24 nt, Human
gauuagaggcaugagacacugugc

SEQ ID NO: 1144676 - RNA, 23 nt, Human
gcagggcaugguggugcacaccu

SEQ ID NO: 1144677 - RNA, 24 nt, Human
gccaacagggugagaccccaucuc

SEQ ID NO: 1144678 - RNA, 19 nt, Human
gccacugcacuccagccug

SEQ ID NO: 1144679 - RNA, 24 nt, Human
gccacugcacuccagccuggguga

SEQ ID NO: 1144680 - RNA, 27 nt, Human
gccagauuaaaaaaaaaaaaaaaaauc

SEQ ID NO: 1144681 - RNA, 22 nt, Human
gcccucaggagguccugagaac

SEQ ID NO: 1144682 - RNA, 22 nt, Human
gccuuggucuuccaaagugcug

SEQ ID NO: 1144683 - RNA, 20 nt, Human
gcgguggcucaugccuguaa

SEQ ID NO: 1144684 - RNA, 25 nt, Human
gcuggagugcaguggcacgaucucu

SEQ ID NO: 1144685 - RNA, 19 nt, Human
gcugggugcgguggcucau

SEQ ID NO: 1144686 - RNA, 20 nt, Human
ggagguugcagcgagccaag

SEQ ID NO: 1144687 - RNA, 24 nt, Human
ggagguugcagcgagccaagauca

SEQ ID NO: 1144688 - RNA, 19 nt, Human
ggcugggugcgguggcuca

SEQ ID NO: 1144689 - RNA, 23 nt, Human
ggcugggugcgguggcucaugcc

SEQ ID NO: 1144690 - RNA, 23 nt, Human
gggguuucaccauguugcccagg

SEQ ID NO: 1144691 - RNA, 21 nt, Human
gguggaucaccugaggucagg

SEQ ID NO: 1144692 - RNA, 19 nt, Human
gguggcucaugccuguaau

SEQ ID NO: 1144693 - RNA, 24 nt, Human
gguggcucaugccuguaauuacag

SEQ ID NO: 1144694 - RNA, 23 nt, Human
guagagacgggguuucaccaugu

SEQ ID NO: 1144695 - RNA, 26 nt, Human
uaaaaaagaccaagacacaugggcug

SEQ ID NO: 1144696 - RNA, 21 nt, Human
uaaaacaaugcuagacucuca

SEQ ID NO: 1144697 - RNA, 22 nt, Human
uaaaacacaaaaauuagcaggg

SEQ ID NO: 1144698 - RNA, 23 nt, Human
uaaauuuuuguauuuuaguagag

SEQ ID NO: 1144699 - RNA, 24 nt, Human
uaaauuuuuguauuuuaguagaga

SEQ ID NO: 1144700 - RNA, 27 nt, Human
uacagcacuuugggaggccgagguggg

SEQ ID NO: 1144701 - RNA, 23 nt, Human
uacugcaaccucugcccgccggg

SEQ ID NO: 1144702 - RNA, 22 nt, Human
uagagacgggguuucaccaugu

SEQ ID NO: 1144703 - RNA, 21 nt, Human
uagccggcuccaagcaggagu

SEQ ID NO: 1144704 - RNA, 24 nt, Human
uaguagagacgggguuucaccaug

SEQ ID NO: 1144705 - RNA, 26 nt, Human
uaguagagacgggguuucaccauguu

SEQ ID NO: 1144706 - RNA, 19 nt, Human
ucaaaaacaaaaacaaaac

SEQ ID NO: 1144707 - RNA, 23 nt, Human
ucacgccacugcacuccagccug

SEQ ID NO: 1144708 - RNA, 22 nt, Human
ucaucaaccaaaucgggaaagc

SEQ ID NO: 1144709 - RNA, 24 nt, Human
uccagccugggugacagacugaga

SEQ ID NO: 1144710 - RNA, 23 nt, Human
uccaggcuauagguaaagguaaa

SEQ ID NO: 1144711 - RNA, 22 nt, Human
uccauuuucugaacuagccagu

SEQ ID NO: 1144712 - RNA, 24 nt, Human
ucccaaguagcugggacuacaggu

SEQ ID NO: 1144713 - RNA, 21 nt, Human
uccugaggucaggcaaucugc

SEQ ID NO: 1144714 - RNA, 23 nt, Human
ucucacuuuguugcccaagcugg

SEQ ID NO: 1144715 - RNA, 24 nt, Human
ucucacuuuguugcccaagcugga

SEQ ID NO: 1144716 - RNA, 19 nt, Human
ucucgaacuccugagguca

SEQ ID NO: 1144717 - RNA, 22 nt, Human
ucucuugaaccugggaggcgga

SEQ ID NO: 1144718 - RNA, 24 nt, Human
ucucuugaaccugggaggcggagg

SEQ ID NO: 1144719 - RNA, 21 nt, Human
ucugucccggcgccuuucucu

SEQ ID NO: 1144720 - RNA, 24 nt, Human
ugaaccugggaggcggagguugca

SEQ ID NO: 1144721 - RNA, 20 nt, Human
ugacccgugacacggcccuc

SEQ ID NO: 1144722 - RNA, 21 nt, Human
ugagaacaugugcccaaggug

SEQ ID NO: 1144723 - RNA, 20 nt, Human
ugagacaggagaaucucuug

SEQ ID NO: 1144724 - RNA, 24 nt, Human
ugagacaggagaaucucuugaacc

SEQ ID NO: 1144725 - RNA, 23 nt, Human
ugagaccagccuggccaacaggg

SEQ ID NO: 1144726 - RNA, 21 nt, Human
ugaggcagcuucugaaauggu

SEQ ID NO: 1144727 - RNA, 22 nt, Human
ugagggccacaggaagaccccu

SEQ ID NO: 1144728 - RNA, 18 nt, Human
ugaggucaggcaaucugc

SEQ ID NO: 1144729 - RNA, 23 nt, Human
ugcaggggugcauuuaagcaaac

SEQ ID NO: 1144730 - RNA, 24 nt, Human
ugcccaagcuggagugcaguggca

SEQ ID NO: 1144731 - RNA, 24 nt, Human
ugcccaggcuggucucgaacuccu

SEQ ID NO: 1144732 - RNA, 24 nt, Human
ugccuguaauuacagcacuuuggg

SEQ ID NO: 1144733 - RNA, 19 nt, Human
uggaagaaaaagaucuagc

SEQ ID NO: 1144734 - RNA, 22 nt, Human
uggagugcaguggcacgaucuc

SEQ ID NO: 1144735 - RNA, 24 nt, Human
uggagugcaguggcacgaucucug

SEQ ID NO: 1144736 - RNA, 23 nt, Human
uggaucaccugaggucaggaauu

SEQ ID NO: 1144737 - RNA, 24 nt, Human
uggaucaccugaggucaggaauuu

SEQ ID NO: 1144738 - RNA, 27 nt, Human
uggaucaccugaggucaggaauuugag

SEQ ID NO: 1144739 - RNA, 19 nt, Human
uggcaaagaaacauguuuu

SEQ ID NO: 1144740 - RNA, 24 nt, Human
uggcucaugccuguaauuacagca

SEQ ID NO: 1144741 - RNA, 21 nt, Human
ugggacuacaggugcaugcca

SEQ ID NO: 1144742 - RNA, 22 nt, Human
ugggacuacaggugcaugccac

SEQ ID NO: 1144743 - RNA, 22 nt, Human
ugggacuacaggugcaugccac

SEQ ID NO: 1144744 - RNA, 24 nt, Human
ugggacuacaggugcaugccacua

SEQ ID NO: 1144745 - RNA, 23 nt, Human
ugggaggccgagguggguggauc

SEQ ID NO: 1144746 - RNA, 24 nt, Human
ugggaggccgagguggguggauca

SEQ ID NO: 1144747 - RNA, 20 nt, Human
ugggaggcggagguugcagc

SEQ ID NO: 1144748 - RNA, 22 nt, Human
ugggaggcggagguugcagcgg

SEQ ID NO: 1144749 - RNA, 23 nt, Human
ugggagggccuggaagaaaaaga

SEQ ID NO: 1144750 - RNA, 28 nt, Human
ugggaucaauaggaagcacauguucagg

SEQ ID NO: 1144751 - RNA, 21 nt, Human
ugggauuagaggcaugagaca

SEQ ID NO: 1144752 - RNA, 24 nt, Human
ugggauuagaggcaugagacacug

SEQ ID NO: 1144753 - RNA, 18 nt, Human
ugggccagauuaaaaaaa

SEQ ID NO: 1144754 - RNA, 24 nt, Human
ugggccagauuaaaaaaaaaaaaa

SEQ ID NO: 1144755 - RNA, 24 nt, Human
uggguggaucaccugaggucagga

SEQ ID NO: 1144756 - RNA, 22 nt, Human
uggugcacaccuguugucccag

SEQ ID NO: 1144757 - RNA, 21 nt, Human
uggugggaaaaaaugugaguu

SEQ ID NO: 1144758 - RNA, 20 nt, Human
ugucaaaaacaaaaacaaaa

SEQ ID NO: 1144759 - RNA, 21 nt, Human
ugucaaaaacaaaaacaaaac

SEQ ID NO: 1144760 - RNA, 22 nt, Human
ugucaaaaacaaaaacaaaaca

SEQ ID NO: 1144761 - RNA, 25 nt, Human
uguuugaagagauuuauucugagcc

SEQ ID NO: 1144762 - RNA, 20 nt, Human
uuacagaugcauauuuuccc

SEQ ID NO: 1144763 - RNA, 24 nt, Human
uuacugcaaccucugcccgccggg

SEQ ID NO: 1144764 - RNA, 20 nt, Human
uuagcagggcaugguggugc

SEQ ID NO: 1144765 - RNA, 18 nt, Human
uuaguagagacgggguuu

SEQ ID NO: 1144766 - RNA, 22 nt, Human
uuaguagagacgggguuucacc

SEQ ID NO: 1144767 - RNA, 24 nt, Human
uuaguagagacgggguuucaccau

SEQ ID NO: 1144768 - RNA, 20 nt, Human
uucaaccuacuauaaagagg

SEQ ID NO: 1144769 - RNA, 24 nt, Human
uucaagcaauucuccuuccucagc

SEQ ID NO: 1144770 - RNA, 24 nt, Human
uucagaaagauggagcaacucaaa

SEQ ID NO: 1144771 - RNA, 24 nt, Human
uuccucagcuucccaaguagcugg

SEQ ID NO: 1144772 - RNA, 23 nt, Human
uucuucuuugucacaugucaugc

SEQ ID NO: 1144773 - RNA, 24 nt, Human
uugaaccugggaggcggagguugc

SEQ ID NO: 1144774 - RNA, 23 nt, Human
uugaugaagcaucucaucaggua

SEQ ID NO: 1144775 - RNA, 18 nt, Human
uugcccaagcuggagugc

SEQ ID NO: 1144776 - RNA, 25 nt, Human
uugggaggccgagguggguggauca

SEQ ID NO: 1144777 - RNA, 24 nt, Human
uugguaggacccgcuuuucuuuuu

SEQ ID NO: 1144778 - RNA, 22 nt, Human
uuucaccauguugcccaggcug

SEQ ID NO: 1144779 - RNA, 23 nt, Human
uuucaccauguugcccaggcugg

SEQ ID NO: 1144780 - RNA, 24 nt, Human
uuucaccauguugcccaggcuggu

SEQ ID NO: 1144781 - RNA, 24 nt, Human
uuuguugcccaagcuggagugcag

SEQ ID NO: 1144782 - RNA, 23 nt, Human
uuuuaguagagacgggguuucac

SEQ ID NO: 1144783 - RNA, 18 nt, Human
aaaaagcagggcaggaca

SEQ ID NO: 1144784 - RNA, 22 nt, Human
aaaggcaucuaacccugacacu

SEQ ID NO: 1144785 - RNA, 20 nt, Human
aagaggcaguuugauuccag

SEQ ID NO: 1144786 - RNA, 21 nt, Human
aagcacucaccuaaauucugg

SEQ ID NO: 1144787 - RNA, 19 nt, Human
aagcaggcuucugggagau

SEQ ID NO: 1144788 - RNA, 24 nt, Human
aaguauuuacuguacacuuacuau

SEQ ID NO: 1144789 - RNA, 18 nt, Human
aaguggcccauaaaaggc

SEQ ID NO: 1144790 - RNA, 21 nt, Human
acaaagacauacaauaucuaa

SEQ ID NO: 1144791 - RNA, 21 nt, Human
acagagcaaguuauggacaaa

SEQ ID NO: 1144792 - RNA, 22 nt, Human
acagcauuuucacuuaaccccu

SEQ ID NO: 1144793 - RNA, 24 nt, Human
accuccuaacacagcaagaacauc

SEQ ID NO: 1144794 - RNA, 18 nt, Human
acuccucccucccgcucc

SEQ ID NO: 1144795 - RNA, 19 nt, Human
agaaagaaggggacuaaaa

SEQ ID NO: 1144796 - RNA, 22 nt, Human
agcacacauauccacacacaca

SEQ ID NO: 1144797 - RNA, 18 nt, Human
agccuggguuucauggga

SEQ ID NO: 1144798 - RNA, 22 nt, Human
aggaagaaaaauagaauugcag

SEQ ID NO: 1144799 - RNA, 23 nt, Human
aggcagcugucuguuuuguagga

SEQ ID NO: 1144800 - RNA, 23 nt, Human
aggcaucugacagauauaaaaca

SEQ ID NO: 1144801 - RNA, 24 nt, Human
agggaguuggaaagagggaaggaa

SEQ ID NO: 1144802 - RNA, 21 nt, Human
aggggcucagaugucuauuau

SEQ ID NO: 1144803 - RNA, 21 nt, Human
agguuuugaaagaggcaguuu

SEQ ID NO: 1144804 - RNA, 21 nt, Human
auaaaaggacacaaagacaua

SEQ ID NO: 1144805 - RNA, 18 nt, Human
auggcccggugguggcag

SEQ ID NO: 1144806 - RNA, 24 nt, Human
augguccugugguguugggcugga

SEQ ID NO: 1144807 - RNA, 20 nt, Human
cacaaacauacaugugcacg

SEQ ID NO: 1144808 - RNA, 20 nt, Human
cacacacacacacuuauaga

SEQ ID NO: 1144809 - RNA, 24 nt, Human
cacacauauccacacacacacacu

SEQ ID NO: 1144810 - RNA, 19 nt, Human
cacauauccacacacacac

SEQ ID NO: 1144811 - RNA, 21 nt, Human
caccuaaauucugguguaggg

SEQ ID NO: 1144812 - RNA, 19 nt, Human
cacucauaaaaagcagggc

SEQ ID NO: 1144813 - RNA, 18 nt, Human
caggaaaaccacaacugc

SEQ ID NO: 1144814 - RNA, 19 nt, Human
caggggcuguguagagaag

SEQ ID NO: 1144815 - RNA, 22 nt, Human
caggugcagaaacugagacuga

SEQ ID NO: 1144816 - RNA, 22 nt, Human
cauaaaaagcagggcaggacau

SEQ ID NO: 1144817 - RNA, 24 nt, Human
cauauccacacacacacacuuaua

SEQ ID NO: 1144818 - RNA, 21 nt, Human
cauggacaaauguuuaucacc

SEQ ID NO: 1144819 - RNA, 26 nt, Human
ccacacacacacacuuauagaaagaa

SEQ ID NO: 1144820 - RNA, 21 nt, Human
ccagagguggcgggcuggaua

SEQ ID NO: 1144821 - RNA, 24 nt, Human
ccaggauauaguggcagguuuuga

SEQ ID NO: 1144822 - RNA, 18 nt, Human
ccaucuagaacccaacug

SEQ ID NO: 1144823 - RNA, 23 nt, Human
ccaugucuguacuccucccuccc

SEQ ID NO: 1144824 - RNA, 20 nt, Human
cccaaaacuuaaggccucaa

SEQ ID NO: 1144825 - RNA, 21 nt, Human
ccccucccuccccuuuuaccc

SEQ ID NO: 1144826 - RNA, 18 nt, Human
cccuacaccggguaagac

SEQ ID NO: 1144827 - RNA, 23 nt, Human
cccuccccuuuuacccuugccuu

SEQ ID NO: 1144828 - RNA, 19 nt, Human
cccuuugccagugggcaga

SEQ ID NO: 1144829 - RNA, 23 nt, Human
ccgcuccagcuccacaguuggcg

SEQ ID NO: 1144830 - RNA, 19 nt, Human
ccuccucccaucuagaacc

SEQ ID NO: 1144831 - RNA, 21 nt, Human
ccuuguaccacauguaucuuc

SEQ ID NO: 1144832 - RNA, 24 nt, Human
cggauuuucuagcucgaaacacac

SEQ ID NO: 1144833 - RNA, 19 nt, Human
cgugggccagcccaaggcu

SEQ ID NO: 1144834 - RNA, 20 nt, Human
cuaacccugacacuguugga

SEQ ID NO: 1144835 - RNA, 23 nt, Human
cucccaucuagaacccaacuguu

SEQ ID NO: 1144836 - RNA, 23 nt, Human
cucgaaacacacauucaggagca

SEQ ID NO: 1144837 - RNA, 19 nt, Human
cugaagcccuggauuacag

SEQ ID NO: 1144838 - RNA, 18 nt, Human
cugccugcaaacaucaug

SEQ ID NO: 1144839 - RNA, 25 nt, Human
cuucuguucucuuagcgggcuuccc

SEQ ID NO: 1144840 - RNA, 19 nt, Human
gaagaaaaauagaauugca

SEQ ID NO: 1144841 - RNA, 19 nt, Human
gaaggaagaaaaauagaau

SEQ ID NO: 1144842 - RNA, 22 nt, Human
gacagauauaaaacacacuccc

SEQ ID NO: 1144843 - RNA, 18 nt, Human
gaggucacaaagccagga

SEQ ID NO: 1144844 - RNA, 20 nt, Human
gcccggugguggcaggcugg

SEQ ID NO: 1144845 - RNA, 23 nt, Human
gcccggugguggcaggcugggca

SEQ ID NO: 1144846 - RNA, 23 nt, Human
gcuucccauuccuccuaugcccc

SEQ ID NO: 1144847 - RNA, 18 nt, Human
ggauuuucuagcucgaaa

SEQ ID NO: 1144848 - RNA, 20 nt, Human
ggcgugggccagcccaaggc

SEQ ID NO: 1144849 - RNA, 19 nt, Human
ggggagggaguccagaggu

SEQ ID NO: 1144850 - RNA, 19 nt, Human
gugcagaaacugagacuga

SEQ ID NO: 1144851 - RNA, 25 nt, Human
uaaaaggacacaaagacauacaaua

SEQ ID NO: 1144852 - RNA, 20 nt, Human
uaaaaucucugacaaugaca

SEQ ID NO: 1144853 - RNA, 24 nt, Human
uaaaauuccaugucuguacuccuc

SEQ ID NO: 1144854 - RNA, 22 nt, Human
uaacauggacaaauguuuauca

SEQ ID NO: 1144855 - RNA, 28 nt, Human
uaacauggacaaauguuuaucaccuccu

SEQ ID NO: 1144856 - RNA, 20 nt, Human
uaaccccuuucccuaaugag

SEQ ID NO: 1144857 - RNA, 22 nt, Human
uacaauaucuaauaacagugaa

SEQ ID NO: 1144858 - RNA, 23 nt, Human
uacacuuacuauacaccaaacau

SEQ ID NO: 1144859 - RNA, 26 nt, Human
uacuccucccucccgcuccagcucca

SEQ ID NO: 1144860 - RNA, 21 nt, Human
uagcucgaaacacacauucag

SEQ ID NO: 1144861 - RNA, 21 nt, Human
uauagauaagaaacgaaucuc

SEQ ID NO: 1144862 - RNA, 24 nt, Human
uaucaggugcauuuacccuacacc

SEQ ID NO: 1144863 - RNA, 18 nt, Human
uaucuaauaacagugaac

SEQ ID NO: 1144864 - RNA, 24 nt, Human
ucaaagcacucaccuaaauucugg

SEQ ID NO: 1144865 - RNA, 23 nt, Human
uccacacacacacacuuauagaa

SEQ ID NO: 1144866 - RNA, 19 nt, Human
uccacauagggcugggggu

SEQ ID NO: 1144867 - RNA, 21 nt, Human
uccacucauaaaaagcagggc

SEQ ID NO: 1144868 - RNA, 23 nt, Human
ucccauuccuccuaugcccccaa

SEQ ID NO: 1144869 - RNA, 23 nt, Human
ucccauuccuccuaugcccccaa

SEQ ID NO: 1144870 - RNA, 20 nt, Human
uccccugccucccuuugcca

SEQ ID NO: 1144871 - RNA, 18 nt, Human
ucccgcuccagcuccaca

SEQ ID NO: 1144872 - RNA, 20 nt, Human
ucgaaacacacauucaggag

SEQ ID NO: 1144873 - RNA, 18 nt, Human
ucucugacaaugacagga

SEQ ID NO: 1144874 - RNA, 18 nt, Human
ucucugagugucauuacu

SEQ ID NO: 1144875 - RNA, 24 nt, Human
ucucugagugucauuacuuaacuu

SEQ ID NO: 1144876 - RNA, 21 nt, Human
ucucuggagauauaauaaucu

SEQ ID NO: 1144877 - RNA, 24 nt, Human
ucugugugugucuaguucaauccc

SEQ ID NO: 1144878 - RNA, 25 nt, Human
ugaaacacaaacauacaugugcaag

SEQ ID NO: 1144879 - RNA, 25 nt, Human
ugaaacacaaacauacaugugcacg

SEQ ID NO: 1144880 - RNA, 25 nt, Human
ugaaagaggcaguuugauuccaggc

SEQ ID NO: 1144881 - RNA, 27 nt, Human
ugaauaaaaggacacaaagacauacaa

SEQ ID NO: 1144882 - RNA, 23 nt, Human
ugacagauauaaaacacacuccc

SEQ ID NO: 1144883 - RNA, 18 nt, Human
ugacaggaugugaggaau

SEQ ID NO: 1144884 - RNA, 18 nt, Human
ugacaggaugugaggaau

SEQ ID NO: 1144885 - RNA, 19 nt, Human
ugagaggcagcugucuguu

SEQ ID NO: 1144886 - RNA, 20 nt, Human
ugagauuccaagaccugaaa

SEQ ID NO: 1144887 - RNA, 25 nt, Human
ugcugagauuccaagaccugaaaca

SEQ ID NO: 1144888 - RNA, 19 nt, Human
uggaaucaucaaauggcau

SEQ ID NO: 1144889 - RNA, 23 nt, Human
uggacaaauguuuaucaccuccu

SEQ ID NO: 1144890 - RNA, 22 nt, Human
uggcgugggccagcccaaggcc

SEQ ID NO: 1144891 - RNA, 23 nt, Human
ugggcaggaaaaccacaacugcc

SEQ ID NO: 1144892 - RNA, 28 nt, Human
ugggccaggggcucagaugucggauccg

SEQ ID NO: 1144893 - RNA, 18 nt, Human
uggguuagaaagaucugg

SEQ ID NO: 1144894 - RNA, 19 nt, Human
ugguggugggaggaauagc

SEQ ID NO: 1144895 - RNA, 21 nt, Human
uguacuccucccucccgcucc

SEQ ID NO: 1144896 - RNA, 21 nt, Human
ugucuguacuccucccucccg

SEQ ID NO: 1144897 - RNA, 21 nt, Human
ugugcacgcacaccuccuccc

SEQ ID NO: 1144898 - RNA, 24 nt, Human
uguggaagagacccagcaugccuu

SEQ ID NO: 1144899 - RNA, 28 nt, Human
uguggaagagacccagcaugccuuucca

SEQ ID NO: 1144900 - RNA, 20 nt, Human
uguguugaagucccaacccu

SEQ ID NO: 1144901 - RNA, 24 nt, Human
uucaauccccucccuccccuuuua

SEQ ID NO: 1144902 - RNA, 25 nt, Human
uucaauccccucccuccccuuuuac

SEQ ID NO: 1144903 - RNA, 25 nt, Human
uuccccugccucccuuugccagugg

SEQ ID NO: 1144904 - RNA, 24 nt, Human
uucucuggagauauaauaaucuca

SEQ ID NO: 1144905 - RNA, 25 nt, Human
uuggaggauccaggacccagggagu

SEQ ID NO: 1144906 - RNA, 20 nt, Human
uuucacuuaaccccuuuccc

SEQ ID NO: 1144907 - RNA, 24 nt, Human
uuucccuaaugagcgacaccuucc

SEQ ID NO: 1144908 - RNA, 21 nt, Human
ccagauccaucuccacaaccu

SEQ ID NO: 1144909 - RNA, 18 nt, Human
uaacuucuguggucucaa

SEQ ID NO: 1144910 - RNA, 21 nt, Human
uaacuucuguggucucaaucu

SEQ ID NO: 1144911 - RNA, 19 nt, Human
uccucucuuuuuuuccacu

SEQ ID NO: 1144912 - RNA, 23 nt, Human
ugaacaacaauuuuaucaacugu

SEQ ID NO: 1144913 - RNA, 21 nt, Human
ugauccagcagacugcaucuc

SEQ ID NO: 1144914 - RNA, 19 nt, Human
aguucagcuuuuuauugaa

SEQ ID NO: 1144915 - RNA, 18 nt, Human
gcacgggcgaguguaggg

SEQ ID NO: 1144916 - RNA, 21 nt, Human
uugaacacguuauaaaagagg

SEQ ID NO: 1144917 - RNA, 20 nt, Human
aacuagaaaccagcuaacaa

SEQ ID NO: 1144918 - RNA, 23 nt, Human
aagccugcugcuggucacaaugg

SEQ ID NO: 1144919 - RNA, 23 nt, Human
ccaccgcuccgcuagcugcugaa

SEQ ID NO: 1144920 - RNA, 22 nt, Human
ccgccgccaccgcuccgcuagc

SEQ ID NO: 1144921 - RNA, 20 nt, Human
ccgcuccgcuagcugcugaa

SEQ ID NO: 1144922 - RNA, 21 nt, Human
cgcggucgggcugcagcugca

SEQ ID NO: 1144923 - RNA, 19 nt, Human
ucccaaagguuucuuucag

SEQ ID NO: 1144924 - RNA, 21 nt, Human
ucuugggggaaaaaagccugc

SEQ ID NO: 1144925 - RNA, 21 nt, Human
ucuuguugagaucauccuuug

SEQ ID NO: 1144926 - RNA, 18 nt, Human
ugagaucauccuuuguuu

SEQ ID NO: 1144927 - RNA, 19 nt, Human
aaaguacugggauuacagg

SEQ ID NO: 1144928 - RNA, 20 nt, Human
aaaguacugggauuacaggg

SEQ ID NO: 1144929 - RNA, 24 nt, Human
aaaguacugggauuacagggguga

SEQ ID NO: 1144930 - RNA, 18 nt, Human
aaguacugggauuacagg

SEQ ID NO: 1144931 - RNA, 26 nt, Human
aaguacugggauuacaggggugagcc

SEQ ID NO: 1144932 - RNA, 25 nt, Human
aagugauccucccuucucggccucc

SEQ ID NO: 1144933 - RNA, 20 nt, Human
acacagcuugucccccaucc

SEQ ID NO: 1144934 - RNA, 21 nt, Human
acacagcuugucccccauccc

SEQ ID NO: 1144935 - RNA, 21 nt, Human
acauuggaaauuccaggagcc

SEQ ID NO: 1144936 - RNA, 20 nt, Human
accuuagccuccuguguagc

SEQ ID NO: 1144937 - RNA, 27 nt, Human
acucaaaguccacacagcuuguccccc

SEQ ID NO: 1144938 - RNA, 21 nt, Human
acuggaacccaagucuaucug

SEQ ID NO: 1144939 - RNA, 26 nt, Human
agaagccaggguugaaauagaggccu

SEQ ID NO: 1144940 - RNA, 19 nt, Human
agagacacccuaaacuuga

SEQ ID NO: 1144941 - RNA, 21 nt, Human
agagacagggucuugcucugu

SEQ ID NO: 1144942 - RNA, 22 nt, Human
agagacagggucuugcucuguc

SEQ ID NO: 1144943 - RNA, 22 nt, Human
agauaaggaacugaggcucaga

SEQ ID NO: 1144944 - RNA, 23 nt, Human
aggcaaaaagcugagaagccagg

SEQ ID NO: 1144945 - RNA, 24 nt, Human
aggcaaaaagcugagaagccaggg

SEQ ID NO: 1144946 - RNA, 21 nt, Human
aggguugaaauagaggccucu

SEQ ID NO: 1144947 - RNA, 26 nt, Human
agucuaucugacucaaaguccacaca

SEQ ID NO: 1144948 - RNA, 18 nt, Human
auggcacagcaagagcug

SEQ ID NO: 1144949 - RNA, 25 nt, Human
caaacuccugggcucaagugauccu

SEQ ID NO: 1144950 - RNA, 24 nt, Human
caaaguacugggauuacaggggug

SEQ ID NO: 1144951 - RNA, 21 nt, Human
caaauggugcuauuaaacuaa

SEQ ID NO: 1144952 - RNA, 20 nt, Human
caagaagagacacccuaaac

SEQ ID NO: 1144953 - RNA, 27 nt, Human
caagugauccucccuucucggccuccc

SEQ ID NO: 1144954 - RNA, 23 nt, Human
cacagcaagagcugggcuaugua

SEQ ID NO: 1144955 - RNA, 18 nt, Human
cacaucucuccacccacc

SEQ ID NO: 1144956 - RNA, 18 nt, Human
cacccaggcugcagccug

SEQ ID NO: 1144957 - RNA, 21 nt, Human
cacccaggcugcagccuggac

SEQ ID NO: 1144958 - RNA, 24 nt, Human
cacccaggcugcagccuggaccuc

SEQ ID NO: 1144959 - RNA, 24 nt, Human
caccuuagccuccuguguagcugg

SEQ ID NO: 1144960 - RNA, 19 nt, Human
cagcgaguucuuuauuucc

SEQ ID NO: 1144961 - RNA, 23 nt, Human
caggcaaaaagcugagaagccag

SEQ ID NO: 1144962 - RNA, 24 nt, Human
cagggucuugcucugucacccagg

SEQ ID NO: 1144963 - RNA, 23 nt, Human
cauugcuguuuuacagauaagga

SEQ ID NO: 1144964 - RNA, 24 nt, Human
ccaaaguacugggauuacaggggu

SEQ ID NO: 1144965 - RNA, 18 nt, Human
ccaagucuaucugacuca

SEQ ID NO: 1144966 - RNA, 19 nt, Human
ccaucaggcaaaaagcuga

SEQ ID NO: 1144967 - RNA, 19 nt, Human
ccccacgaaacccccucag

SEQ ID NO: 1144968 - RNA, 18 nt, Human
cccgcagggaccucucca

SEQ ID NO: 1144969 - RNA, 24 nt, Human
cccgcagggaccucuccacgcuag

SEQ ID NO: 1144970 - RNA, 19 nt, Human
cccuaaacuugaacuccug

SEQ ID NO: 1144971 - RNA, 26 nt, Human
ccucccaccuuagccuccuguguagc

SEQ ID NO: 1144972 - RNA, 19 nt, Human
ccuggaccucuugggcuca

SEQ ID NO: 1144973 - RNA, 21 nt, Human
ccuggaccucuugggcucaag

SEQ ID NO: 1144974 - RNA, 22 nt, Human
ccugggcucaagugauccuccc

SEQ ID NO: 1144975 - RNA, 22 nt, Human
cuaaauaaggccacggcccguu

SEQ ID NO: 1144976 - RNA, 19 nt, Human
cucaagggauccucccacc

SEQ ID NO: 1144977 - RNA, 24 nt, Human
cucaagggauccucccaccuuagc

SEQ ID NO: 1144978 - RNA, 23 nt, Human
cuccuguguagcugggaccacag

SEQ ID NO: 1144979 - RNA, 24 nt, Human
cuccuguguagcugggaccacagg

SEQ ID NO: 1144980 - RNA, 25 nt, Human
cucuugggcucaagggauccuccca

SEQ ID NO: 1144981 - RNA, 20 nt, Human
cugacucaaaguccacacag

SEQ ID NO: 1144982 - RNA, 24 nt, Human
cuuagccuccuguguagcugggac

SEQ ID NO: 1144983 - RNA, 23 nt, Human
gaaugggccugggcaggucaaac

SEQ ID NO: 1144984 - RNA, 19 nt, Human
gaccucuccacgcuaguga

SEQ ID NO: 1144985 - RNA, 24 nt, Human
gagaagccaggguugaaauagagg

SEQ ID NO: 1144986 - RNA, 22 nt, Human
gagccccacgaaacccccucag

SEQ ID NO: 1144987 - RNA, 21 nt, Human
gagccgaagcccauuuggaaa

SEQ ID NO: 1144988 - RNA, 18 nt, Human
gauuacaggggugagcca

SEQ ID NO: 1144989 - RNA, 18 nt, Human
gccuccagccggccaggc

SEQ ID NO: 1144990 - RNA, 21 nt, Human
gcucugucacccaggcugcag

SEQ ID NO: 1144991 - RNA, 19 nt, Human
gcugcagccuggaccucuu

SEQ ID NO: 1144992 - RNA, 19 nt, Human
gcuggccucaaacuccugg

SEQ ID NO: 1144993 - RNA, 22 nt, Human
ggauccucccaccuuagccucc

SEQ ID NO: 1144994 - RNA, 19 nt, Human
ggcaaaaagcugagaagcc

SEQ ID NO: 1144995 - RNA, 20 nt, Human
ggcaagaagagacacccuaa

SEQ ID NO: 1144996 - RNA, 19 nt, Human
gggcucaagugauccuccc

SEQ ID NO: 1144997 - RNA, 19 nt, Human
uaaacuaauggcuucggga

SEQ ID NO: 1144998 - RNA, 19 nt, Human
uaaggaacugaggcucaga

SEQ ID NO: 1144999 - RNA, 25 nt, Human
uaauuuuuuuuauuuuuuugcagag

SEQ ID NO: 1145000 - RNA, 22 nt, Human
uacaccaucauggcacagcaag

SEQ ID NO: 1145001 - RNA, 20 nt, Human
uacaggggugagccaccuca

SEQ ID NO: 1145002 - RNA, 26 nt, Human
uaccuucaagcccagucagcgaguuc

SEQ ID NO: 1145003 - RNA, 19 nt, Human
uagaggccucuuucuguuu

SEQ ID NO: 1145004 - RNA, 25 nt, Human
uagcagaccccaucaggcaaaaagc

SEQ ID NO: 1145005 - RNA, 18 nt, Human
uagugagccccacgaaac

SEQ ID NO: 1145006 - RNA, 22 nt, Human
uauguugcccaggcuggccuca

SEQ ID NO: 1145007 - RNA, 23 nt, Human
uauguugcccaggcuggccucaa

SEQ ID NO: 1145008 - RNA, 24 nt, Human
uauguugcccaggcuggccucaaa

SEQ ID NO: 1145009 - RNA, 24 nt, Human
ucaagggauccucccaccuuagcc

SEQ ID NO: 1145010 - RNA, 22 nt, Human
uccacacagcuugucccccauc

SEQ ID NO: 1145011 - RNA, 23 nt, Human
ucccaaaguacugggauuacagg

SEQ ID NO: 1145012 - RNA, 21 nt, Human
uccugggcucaagugauccuc

SEQ ID NO: 1145013 - RNA, 22 nt, Human
uccugggcucaagugauccucc

SEQ ID NO: 1145014 - RNA, 18 nt, Human
ucuauguugcccaggcug

SEQ ID NO: 1145015 - RNA, 18 nt, Human
ucuauguugcccaggcug

SEQ ID NO: 1145016 - RNA, 24 nt, Human
ucuccacgcuagugagccccacga

SEQ ID NO: 1145017 - RNA, 20 nt, Human
ucucuauguugcccaggcug

SEQ ID NO: 1145018 - RNA, 23 nt, Human
ucucucuauguugcccaggcugg

SEQ ID NO: 1145019 - RNA, 19 nt, Human
ucugucacccaggcugcag

SEQ ID NO: 1145020 - RNA, 19 nt, Human
ucuugcucugucacccagg

SEQ ID NO: 1145021 - RNA, 22 nt, Human
ucuugcucugucacccaggcug

SEQ ID NO: 1145022 - RNA, 24 nt, Human
ucuugcucugucacccaggcugca

SEQ ID NO: 1145023 - RNA, 22 nt, Human
ucuugggcucaagggauccucc

SEQ ID NO: 1145024 - RNA, 18 nt, Human
ugaaauagaggccucuuu

SEQ ID NO: 1145025 - RNA, 23 nt, Human
ugaaauagaggccucuuucuguu

SEQ ID NO: 1145026 - RNA, 22 nt, Human
ugaacuccugucugugcagccu

SEQ ID NO: 1145027 - RNA, 21 nt, Human
ugagaagccaggguugaaaua

SEQ ID NO: 1145028 - RNA, 22 nt, Human
ugagaagccaggguugaaauag

SEQ ID NO: 1145029 - RNA, 20 nt, Human
ugaggcucagagagguucag

SEQ ID NO: 1145030 - RNA, 24 nt, Human
ugcagagauggggucucucuaugu

SEQ ID NO: 1145031 - RNA, 28 nt, Human
ugcccaggcuggccucaaacuccugggc

SEQ ID NO: 1145032 - RNA, 21 nt, Human
ugccuuuaggugauagagcua

SEQ ID NO: 1145033 - RNA, 19 nt, Human
ugcucugucacccaggcug

SEQ ID NO: 1145034 - RNA, 19 nt, Human
uggcacagcaagagcuggg

SEQ ID NO: 1145035 - RNA, 21 nt, Human
uggcacagcaagagcugggcu

SEQ ID NO: 1145036 - RNA, 21 nt, Human
uggcuuccaaauaaauacauu

SEQ ID NO: 1145037 - RNA, 20 nt, Human
ugggaccacaggcgugcacc

SEQ ID NO: 1145038 - RNA, 21 nt, Human
ugggaccacaggcgugcaccg

SEQ ID NO: 1145039 - RNA, 24 nt, Human
ugggaccacaggcgugcaccgcca

SEQ ID NO: 1145040 - RNA, 18 nt, Human
ugggauuacaggggugag

SEQ ID NO: 1145041 - RNA, 19 nt, Human
ugggauuacaggggugagc

SEQ ID NO: 1145042 - RNA, 21 nt, Human
ugggauuacaggggugagcca

SEQ ID NO: 1145043 - RNA, 22 nt, Human
ugggauuacaggggugagccac

SEQ ID NO: 1145044 - RNA, 23 nt, Human
ugggauuacaggggugagccacc

SEQ ID NO: 1145045 - RNA, 18 nt, Human
ugggcaggucaaacaggg

SEQ ID NO: 1145046 - RNA, 22 nt, Human
ugggcaggucaaacaggggcca

SEQ ID NO: 1145047 - RNA, 20 nt, Human
ugggcucaagugauccuccc

SEQ ID NO: 1145048 - RNA, 24 nt, Human
uggggucucucuauguugcccagg

SEQ ID NO: 1145049 - RNA, 19 nt, Human
uguagcugggaccacaggc

SEQ ID NO: 1145050 - RNA, 25 nt, Human
uguagcugggaccacaggcgugcac

SEQ ID NO: 1145051 - RNA, 21 nt, Human
ugucacagcuagcauuucacu

SEQ ID NO: 1145052 - RNA, 24 nt, Human
uugcagagauggggucucucuaug

SEQ ID NO: 1145053 - RNA, 22 nt, Human
uuggagaaugggccugggcagg

SEQ ID NO: 1145054 - RNA, 28 nt, Human
uuuuauuuuuuugcagagauggggucuu

SEQ ID NO: 1145055 - RNA, 24 nt, Human
uuuuuuuuauuuuuuugcagagau

SEQ ID NO: 1145056 - RNA, 23 nt, Human
aagccaauucagauuggcuauuu

SEQ ID NO: 1145057 - RNA, 22 nt, Human
aagcuuuuggacacuccaaccu

SEQ ID NO: 1145058 - RNA, 21 nt, Human
acuaagaaugacuaaagacaa

SEQ ID NO: 1145059 - RNA, 24 nt, Human
acucauuguacuuaaucuuccccc

SEQ ID NO: 1145060 - RNA, 20 nt, Human
agaaccuuuaggcagcugag

SEQ ID NO: 1145061 - RNA, 23 nt, Human
agcuuuuggacacuccaaccucu

SEQ ID NO: 1145062 - RNA, 23 nt, Human
aggacagagcagguuacuaagaa

SEQ ID NO: 1145063 - RNA, 25 nt, Human
agguguuagaggcuagaagggggcu

SEQ ID NO: 1145064 - RNA, 25 nt, Human
auggagcaauggcaagaucacaccg

SEQ ID NO: 1145065 - RNA, 18 nt, Human
caaagaacagagaagcug

SEQ ID NO: 1145066 - RNA, 19 nt, Human
caaagcagguguuagaggc

SEQ ID NO: 1145067 - RNA, 22 nt, Human
caagaucacaccggacaaggga

SEQ ID NO: 1145068 - RNA, 18 nt, Human
caauggcaagaucacacc

SEQ ID NO: 1145069 - RNA, 21 nt, Human
cagagaagcugaacauacuga

SEQ ID NO: 1145070 - RNA, 24 nt, Human
cagcugagcagaaccguuaggcac

SEQ ID NO: 1145071 - RNA, 22 nt, Human
caguccccgccgcucgcccucg

SEQ ID NO: 1145072 - RNA, 22 nt, Human
cauauuuguucuuugaugagga

SEQ ID NO: 1145073 - RNA, 19 nt, Human
cccgccgcucgcccucgcc

SEQ ID NO: 1145074 - RNA, 19 nt, Human
cccgcugcucgcccuuccc

SEQ ID NO: 1145075 - RNA, 18 nt, Human
ccgcccugacaagacuag

SEQ ID NO: 1145076 - RNA, 20 nt, Human
ccgccgcucgcccucgcccu

SEQ ID NO: 1145077 - RNA, 25 nt, Human
ccgccgcucgcccucgcccuucuuc

SEQ ID NO: 1145078 - RNA, 20 nt, Human
ccucccgcugcucgcccuuc

SEQ ID NO: 1145079 - RNA, 21 nt, Human
cgcccugacaagacuagaaau

SEQ ID NO: 1145080 - RNA, 24 nt, Human
cgcugcucgcccuuccccaguccc

SEQ ID NO: 1145081 - RNA, 21 nt, Human
cuucagucccugcauccgccc

SEQ ID NO: 1145082 - RNA, 21 nt, Human
gauggagcaauggcaagauca

SEQ ID NO: 1145083 - RNA, 20 nt, Human
gccaagcuuuuggacacucc

SEQ ID NO: 1145084 - RNA, 18 nt, Human
ggagcaauggcaagauca

SEQ ID NO: 1145085 - RNA, 22 nt, Human
ggcagggguaugagcuggagug

SEQ ID NO: 1145086 - RNA, 20 nt, Human
uaaaacggagaacaaagaac

SEQ ID NO: 1145087 - RNA, 20 nt, Human
uagaagggggcuguuuaaug

SEQ ID NO: 1145088 - RNA, 18 nt, Human
uccccaguccccgccgcu

SEQ ID NO: 1145089 - RNA, 19 nt, Human
uccgcccugacaagacuag

SEQ ID NO: 1145090 - RNA, 21 nt, Human
ucuaaggaugacuaaggacag

SEQ ID NO: 1145091 - RNA, 18 nt, Human
ugacuaaagacaaagcag

SEQ ID NO: 1145092 - RNA, 21 nt, Human
ugagcagaaccguuaggcacc

SEQ ID NO: 1145093 - RNA, 23 nt, Human
uguuagaggcuagaagggggcug

SEQ ID NO: 1145094 - RNA, 20 nt, Human
uuggacugcacacucuaagc

SEQ ID NO: 1145095 - RNA, 23 nt, Human
aaccuaaugaguuauuuuuaacc

SEQ ID NO: 1145096 - RNA, 20 nt, Human
aaguucuucagauuguggaa

SEQ ID NO: 1145097 - RNA, 23 nt, Human
acacaggccaucaguuuagcagc

SEQ ID NO: 1145098 - RNA, 20 nt, Human
accccagccaugccaacauc

SEQ ID NO: 1145099 - RNA, 21 nt, Human
acucucucugucuucucugcu

SEQ ID NO: 1145100 - RNA, 18 nt, Human
agaaguucuucagauugu

SEQ ID NO: 1145101 - RNA, 21 nt, Human
aggccaucaguuuagcagccu

SEQ ID NO: 1145102 - RNA, 18 nt, Human
caaggaacacaggccauc

SEQ ID NO: 1145103 - RNA, 21 nt, Human
ccagaggcaaggaacacaggc

SEQ ID NO: 1145104 - RNA, 24 nt, Human
ccagugccaaguuguccaucccua

SEQ ID NO: 1145105 - RNA, 18 nt, Human
cccucauugccuccucca

SEQ ID NO: 1145106 - RNA, 23 nt, Human
cuagcggacucucucugucuucu

SEQ ID NO: 1145107 - RNA, 21 nt, Human
cucuuuauuccugggaacaag

SEQ ID NO: 1145108 - RNA, 20 nt, Human
cuuuauuccugggaacaagg

SEQ ID NO: 1145109 - RNA, 19 nt, Human
gaguuauuuuuaaccagua

SEQ ID NO: 1145110 - RNA, 24 nt, Human
gcccagaaagugugucccaguccc

SEQ ID NO: 1145111 - RNA, 21 nt, Human
ggaacacauaaccagugccaa

SEQ ID NO: 1145112 - RNA, 19 nt, Human
guagauucuucuccagucc

SEQ ID NO: 1145113 - RNA, 21 nt, Human
guagauucuucuccaguccag

SEQ ID NO: 1145114 - RNA, 25 nt, Human
uaaauucuuccaacuaccacauaag

SEQ ID NO: 1145115 - RNA, 18 nt, Human
uacaccauucauugcagg

SEQ ID NO: 1145116 - RNA, 24 nt, Human
uaccucacuuggaacacauaacca

SEQ ID NO: 1145117 - RNA, 21 nt, Human
uagaauacagcaaaaaugaua

SEQ ID NO: 1145118 - RNA, 19 nt, Human
uauagucaucugguucucu

SEQ ID NO: 1145119 - RNA, 22 nt, Human
uauucagcuuacaccauucauu

SEQ ID NO: 1145120 - RNA, 22 nt, Human
ucccagaggcaaggaacacagg

SEQ ID NO: 1145121 - RNA, 19 nt, Human
ucccagucccaggauguug

SEQ ID NO: 1145122 - RNA, 26 nt, Human
ucccuaagcaauaucgcuuccuucua

SEQ ID NO: 1145123 - RNA, 18 nt, Human
ugaacauacaacagugca

SEQ ID NO: 1145124 - RNA, 25 nt, Human
ugagaacacagcaaaauuggagacc

SEQ ID NO: 1145125 - RNA, 22 nt, Human
ugagaacacagcaaaauuuuua

SEQ ID NO: 1145126 - RNA, 24 nt, Human
ugagagccaguaggcuaaccuaau

SEQ ID NO: 1145127 - RNA, 21 nt, Human
uggaacacauaaccagugcca

SEQ ID NO: 1145128 - RNA, 25 nt, Human
uggaaguagauucuucuccagucca

SEQ ID NO: 1145129 - RNA, 22 nt, Human
ugggaacaagguuaccucacuu

SEQ ID NO: 1145130 - RNA, 26 nt, Human
uucuuugcccucauugccuccuccag

SEQ ID NO: 1145131 - RNA, 18 nt, Human
uugcuagcggacucucuc

SEQ ID NO: 1145132 - RNA, 18 nt, Human
uuggaaguagauucuucu

SEQ ID NO: 1145133 - RNA, 23 nt, Human
uuuauagucaucugguucucuuu

SEQ ID NO: 1145134 - RNA, 25 nt, Human
aaacagauaaagaaauugagaccca

SEQ ID NO: 1145135 - RNA, 18 nt, Human
aaaguugauggugguucu

SEQ ID NO: 1145136 - RNA, 18 nt, Human
aaggagccaguuccagac

SEQ ID NO: 1145137 - RNA, 23 nt, Human
acagagugaagccccgcagguac

SEQ ID NO: 1145138 - RNA, 19 nt, Human
accagaacucaccgacaca

SEQ ID NO: 1145139 - RNA, 21 nt, Human
acccaguguugugugacuuca

SEQ ID NO: 1145140 - RNA, 20 nt, Human
accgccugcgccaccugcug

SEQ ID NO: 1145141 - RNA, 21 nt, Human
acucauggcugcgucggugcu

SEQ ID NO: 1145142 - RNA, 18 nt, Human
acugacgaugagaccgau

SEQ ID NO: 1145143 - RNA, 21 nt, Human
acuggccucucugacuacaac

SEQ ID NO: 1145144 - RNA, 21 nt, Human
agaagaaaacggaggagaaga

SEQ ID NO: 1145145 - RNA, 22 nt, Human
agaagaaaacggaggagaagag

SEQ ID NO: 1145146 - RNA, 20 nt, Human
agacccaguguugugugacu

SEQ ID NO: 1145147 - RNA, 19 nt, Human
agacuauagcaaucuagca

SEQ ID NO: 1145148 - RNA, 23 nt, Human
agagaagaaaacggaggagaaga

SEQ ID NO: 1145149 - RNA, 22 nt, Human
agagugaagccccgcagguacu

SEQ ID NO: 1145150 - RNA, 18 nt, Human
agaugauguucucuauaa

SEQ ID NO: 1145151 - RNA, 18 nt, Human
agcaaguguggccacaca

SEQ ID NO: 1145152 - RNA, 22 nt, Human
agcaccucugcacccgcgcccc

SEQ ID NO: 1145153 - RNA, 20 nt, Human
agcaugaacauaaaugaacc

SEQ ID NO: 1145154 - RNA, 30 nt, Human
agccaagcaccuccuuccuucccagacugg

SEQ ID NO: 1145155 - RNA, 18 nt, Human
agcccccacaucacccaa

SEQ ID NO: 1145156 - RNA, 23 nt, Human
aggaagagaagaaaacggaggag

SEQ ID NO: 1145157 - RNA, 18 nt, Human
agggagaagugcacggug

SEQ ID NO: 1145158 - RNA, 27 nt, Human
auagggcaggaagagaagaaaacggag

SEQ ID NO: 1145159 - RNA, 19 nt, Human
augcgugcggccacuguug

SEQ ID NO: 1145160 - RNA, 23 nt, Human
caagacaagcugcugcucggccc

SEQ ID NO: 1145161 - RNA, 20 nt, Human
cacacaauggucaaguugga

SEQ ID NO: 1145162 - RNA, 21 nt, Human
cacacagcccccacaucaccc

SEQ ID NO: 1145163 - RNA, 21 nt, Human
cacagcccccacaucacccaa

SEQ ID NO: 1145164 - RNA, 18 nt, Human
caccaagcacauguucau

SEQ ID NO: 1145165 - RNA, 25 nt, Human
cacccaaccacccagcagagauccu

SEQ ID NO: 1145166 - RNA, 18 nt, Human
caccccuuucccuccucc

SEQ ID NO: 1145167 - RNA, 22 nt, Human
caccgacacagcaggagagcag

SEQ ID NO: 1145168 - RNA, 28 nt, Human
caccgccugcgccaccugcuggcugcgc

SEQ ID NO: 1145169 - RNA, 18 nt, Human
caccugagcagcugcguc

SEQ ID NO: 1145170 - RNA, 22 nt, Human
cacucaggggccucugugggca

SEQ ID NO: 1145171 - RNA, 23 nt, Human
cagcaugaacauaaaugaaccuu

SEQ ID NO: 1145172 - RNA, 18 nt, Human
cagcugggucugcacaug

SEQ ID NO: 1145173 - RNA, 22 nt, Human
caggagagcagcuuggaaccuu

SEQ ID NO: 1145174 - RNA, 22 nt, Human
caggagguugcagguugaccag

SEQ ID NO: 1145175 - RNA, 19 nt, Human
caggaucauucaccuucca

SEQ ID NO: 1145176 - RNA, 23 nt, Human
cagggaggcuaagaguccuggca

SEQ ID NO: 1145177 - RNA, 20 nt, Human
caggggccucugugggcauc

SEQ ID NO: 1145178 - RNA, 23 nt, Human
cauaagacccaguguugugugac

SEQ ID NO: 1145179 - RNA, 19 nt, Human
caucaaaugagccaguuua

SEQ ID NO: 1145180 - RNA, 23 nt, Human
cauccgucuccucugcagcaucu

SEQ ID NO: 1145181 - RNA, 18 nt, Human
cauucaccuuccaaggua

SEQ ID NO: 1145182 - RNA, 20 nt, Human
ccacaucacccaaccaccca

SEQ ID NO: 1145183 - RNA, 24 nt, Human
ccagagccaccccuuucccuccuc

SEQ ID NO: 1145184 - RNA, 20 nt, Human
ccaugaaacagauaaagaaa

SEQ ID NO: 1145185 - RNA, 21 nt, Human
cccacaucacccaaccaccca

SEQ ID NO: 1145186 - RNA, 23 nt, Human
ccccacaucacccaaccacccag

SEQ ID NO: 1145187 - RNA, 21 nt, Human
cccccgacaccugccaaagcc

SEQ ID NO: 1145188 - RNA, 25 nt, Human
ccccucacuguccgcggccccugac

SEQ ID NO: 1145189 - RNA, 22 nt, Human
ccccugcccaccccugugcccc

SEQ ID NO: 1145190 - RNA, 19 nt, Human
ccccugugcccccgccacu

SEQ ID NO: 1145191 - RNA, 20 nt, Human
ccccugugcccccgccacuc

SEQ ID NO: 1145192 - RNA, 19 nt, Human
ccccuuucccuccuccuaa

SEQ ID NO: 1145193 - RNA, 20 nt, Human
cccgcgagcaccucugcacc

SEQ ID NO: 1145194 - RNA, 18 nt, Human
ccgauggcgaggacggcg

SEQ ID NO: 1145195 - RNA, 19 nt, Human
ccgcgccccugcccacccc

SEQ ID NO: 1145196 - RNA, 18 nt, Human
ccggcuuccucacugcug

SEQ ID NO: 1145197 - RNA, 20 nt, Human
ccguguaagcaaggcaaagu

SEQ ID NO: 1145198 - RNA, 22 nt, Human
ccugccagagccaccccuuucc

SEQ ID NO: 1145199 - RNA, 23 nt, Human
ccuucaacccagccaagacccag

SEQ ID NO: 1145200 - RNA, 26 nt, Human
cgaaugcacgcagauuaucgcacgcg

SEQ ID NO: 1145201 - RNA, 24 nt, Human
cgagcaccucugcacccgcgcccc

SEQ ID NO: 1145202 - RNA, 18 nt, Human
cgaugacgaggaaacuga

SEQ ID NO: 1145203 - RNA, 20 nt, Human
cgcccuccuuccaagacaag

SEQ ID NO: 1145204 - RNA, 24 nt, Human
cgucaccgccugcgccaccugcug

SEQ ID NO: 1145205 - RNA, 19 nt, Human
cucaaggaaaaacgacacc

SEQ ID NO: 1145206 - RNA, 25 nt, Human
cucccguguaagcaaggcaaaguac

SEQ ID NO: 1145207 - RNA, 19 nt, Human
cucgcccuccuuccaagac

SEQ ID NO: 1145208 - RNA, 25 nt, Human
cugcacccgcgagcaccucugcacc

SEQ ID NO: 1145209 - RNA, 25 nt, Human
cugcacccgcgccccugcccacccc

SEQ ID NO: 1145210 - RNA, 20 nt, Human
cugcgccaccugcuggcugc

SEQ ID NO: 1145211 - RNA, 23 nt, Human
cugcgcccccgacaccugccaaa

SEQ ID NO: 1145212 - RNA, 20 nt, Human
cugcgcgcacgccuuccagu

SEQ ID NO: 1145213 - RNA, 19 nt, Human
cugcgucaccgccugcgcc

SEQ ID NO: 1145214 - RNA, 18 nt, Human
cuggcuuuuccugccaga

SEQ ID NO: 1145215 - RNA, 24 nt, Human
cugugcagacggugcgacagcuag

SEQ ID NO: 1145216 - RNA, 21 nt, Human
cuugcaaacuuugauagaagc

SEQ ID NO: 1145217 - RNA, 20 nt, Human
cuuuaaggaaagggagaagu

SEQ ID NO: 1145218 - RNA, 21 nt, Human
gaaaacaugcagccauuccuc

SEQ ID NO: 1145219 - RNA, 21 nt, Human
gaagagaagaaaacggaggag

SEQ ID NO: 1145220 - RNA, 27 nt, Human
gagaagaaaacggaggagaagagggga

SEQ ID NO: 1145221 - RNA, 23 nt, Human
gagcagcugcgucaccgccugcg

SEQ ID NO: 1145222 - RNA, 19 nt, Human
gagccaguuccagaccugg

SEQ ID NO: 1145223 - RNA, 21 nt, Human
gaggacggcgaagguggcggc

SEQ ID NO: 1145224 - RNA, 18 nt, Human
gaggcuaagaguccuggc

SEQ ID NO: 1145225 - RNA, 26 nt, Human
gaguuugcagcugccugcgcccccga

SEQ ID NO: 1145226 - RNA, 19 nt, Human
gcaggaagagaagaaaacg

SEQ ID NO: 1145227 - RNA, 23 nt, Human
gcccccgacaccugccaaagccg

SEQ ID NO: 1145228 - RNA, 18 nt, Human
gccccugcccaccccugu

SEQ ID NO: 1145229 - RNA, 18 nt, Human
gcgccaccugcuggcugc

SEQ ID NO: 1145230 - RNA, 20 nt, Human
ggaaccuucaacccagccaa

SEQ ID NO: 1145231 - RNA, 21 nt, Human
ggagagagccaagcaccuccu

SEQ ID NO: 1145232 - RNA, 22 nt, Human
ggauucuggcuuuuccugccag

SEQ ID NO: 1145233 - RNA, 21 nt, Human
ggcuagaggggauucuggcuu

SEQ ID NO: 1145234 - RNA, 24 nt, Human
gggagagagccaagcaccuccuuc

SEQ ID NO: 1145235 - RNA, 22 nt, Human
gggcaggaagagaagaaaacgg

SEQ ID NO: 1145236 - RNA, 19 nt, Human
ggggauucuggcuuuuccu

SEQ ID NO: 1145237 - RNA, 18 nt, Human
gguaagcagcgccggccc

SEQ ID NO: 1145238 - RNA, 18 nt, Human
ggugacaacgaugacgag

SEQ ID NO: 1145239 - RNA, 18 nt, Human
gguggcggcccgggagag

SEQ ID NO: 1145240 - RNA, 21 nt, Human
guccuggcaggaucauucacc

SEQ ID NO: 1145241 - RNA, 19 nt, Human
uaaauccauucuccucucc

SEQ ID NO: 1145242 - RNA, 22 nt, Human
uaagcaggcagaagaaacggca

SEQ ID NO: 1145243 - RNA, 24 nt, Human
uacaguggugugggagagauuuuc

SEQ ID NO: 1145244 - RNA, 23 nt, Human
uacugccguuucaagcacauggu

SEQ ID NO: 1145245 - RNA, 23 nt, Human
uagaugauguucucuauaaaucc

SEQ ID NO: 1145246 - RNA, 22 nt, Human
uagauuuagacuauagcaaucu

SEQ ID NO: 1145247 - RNA, 21 nt, Human
uagcaaguguggccacacaau

SEQ ID NO: 1145248 - RNA, 20 nt, Human
uauaaauccauucuccucuc

SEQ ID NO: 1145249 - RNA, 18 nt, Human
ucaaaaagcuccuuauag

SEQ ID NO: 1145250 - RNA, 19 nt, Human
ucacccaaccacccagcag

SEQ ID NO: 1145251 - RNA, 18 nt, Human
ucaccgccugcgccaccu

SEQ ID NO: 1145252 - RNA, 19 nt, Human
ucacugcugcugcugacag

SEQ ID NO: 1145253 - RNA, 20 nt, Human
ucacugcugcugcugacagc

SEQ ID NO: 1145254 - RNA, 21 nt, Human
ucaggggccucugugggcauc

SEQ ID NO: 1145255 - RNA, 18 nt, Human
uccauagucaaaaagcuc

SEQ ID NO: 1145256 - RNA, 20 nt, Human
uccaugcacccacuggccuc

SEQ ID NO: 1145257 - RNA, 18 nt, Human
ucccccgucuuucuacaa

SEQ ID NO: 1145258 - RNA, 22 nt, Human
ucccguguaagcaaggcaaagu

SEQ ID NO: 1145259 - RNA, 18 nt, Human
uccucauucccaugaaac

SEQ ID NO: 1145260 - RNA, 18 nt, Human
uccuuggguuaggccucu

SEQ ID NO: 1145261 - RNA, 25 nt, Human
ucgcacgcgcuccucugcacccgcg

SEQ ID NO: 1145262 - RNA, 21 nt, Human
ucuacaaugcuagauuuagac

SEQ ID NO: 1145263 - RNA, 22 nt, Human
ucuagaauaggcaaauccauag

SEQ ID NO: 1145264 - RNA, 18 nt, Human
ucuccucugcagcaucuu

SEQ ID NO: 1145265 - RNA, 21 nt, Human
ucugacuacagugguguggga

SEQ ID NO: 1145266 - RNA, 20 nt, Human
ugacaacgaugacgaggaaa

SEQ ID NO: 1145267 - RNA, 24 nt, Human
ugacaacgaugacgaggaaacuga

SEQ ID NO: 1145268 - RNA, 21 nt, Human
ugaccuugguaugguggugau

SEQ ID NO: 1145269 - RNA, 18 nt, Human
ugagacccagggaggcua

SEQ ID NO: 1145270 - RNA, 24 nt, Human
ugauagggcaggaagagaagaaaa

SEQ ID NO: 1145271 - RNA, 20 nt, Human
ugaucagugaugaccuuggu

SEQ ID NO: 1145272 - RNA, 22 nt, Human
ugcagcaucuuuccuccccaca

SEQ ID NO: 1145273 - RNA, 20 nt, Human
ugccaaagccgaggggcuug

SEQ ID NO: 1145274 - RNA, 18 nt, Human
ugcgaggaguuccaugca

SEQ ID NO: 1145275 - RNA, 24 nt, Human
ugcgcgcacgccuuccagugcgcg

SEQ ID NO: 1145276 - RNA, 25 nt, Human
ugcgugcgcaccgcugcgggcuggc

SEQ ID NO: 1145277 - RNA, 19 nt, Human
uggcaaucggcucgcccuc

SEQ ID NO: 1145278 - RNA, 20 nt, Human
uggcaggaucauucaccuuc

SEQ ID NO: 1145279 - RNA, 21 nt, Human
uggcaggaucauucaccuucc

SEQ ID NO: 1145280 - RNA, 19 nt, Human
uggcugcgucggugcuucg

SEQ ID NO: 1145281 - RNA, 20 nt, Human
ugugcagacggugcgacagc

SEQ ID NO: 1145282 - RNA, 22 nt, Human
ugugcugccggcuuccucacug

SEQ ID NO: 1145283 - RNA, 18 nt, Human
uuagacuauagcaaucua

SEQ ID NO: 1145284 - RNA, 25 nt, Human
uuaucgcacgcgcuccucugcaccc

SEQ ID NO: 1145285 - RNA, 21 nt, Human
uucacacagcccccacaucac

SEQ ID NO: 1145286 - RNA, 20 nt, Human
uucccuccuccuaaaguuga

SEQ ID NO: 1145287 - RNA, 23 nt, Human
uuucacacagcccccacaucacc

SEQ ID NO: 1145288 - RNA, 24 nt, Human
uuucccauaagcaggcagaagaaa

SEQ ID NO: 1145289 - RNA, 23 nt, Human
uuuucuuccgggaucuggggcag

SEQ ID NO: 1145290 - RNA, 18 nt, Human
ccuuuuguuuauuuuauu

SEQ ID NO: 1145291 - RNA, 25 nt, Human
gccccuuuuguuuauuuuauuuugg

SEQ ID NO: 1145292 - RNA, 21 nt, Human
ggaaaaaaauuuuauugugaa

SEQ ID NO: 1145293 - RNA, 23 nt, Human
accccaacuccggggagacucuu

SEQ ID NO: 1145294 - RNA, 18 nt, Human
agacuggcccaccccaga

SEQ ID NO: 1145295 - RNA, 22 nt, Human
agacuuccaccagaugccccgg

SEQ ID NO: 1145296 - RNA, 18 nt, Human
agccugcccaagacccca

SEQ ID NO: 1145297 - RNA, 18 nt, Human
aucacaucccagaaaagg

SEQ ID NO: 1145298 - RNA, 19 nt, Human
auggugacuuccacccaca

SEQ ID NO: 1145299 - RNA, 22 nt, Human
caagaccccaacuccggggaga

SEQ ID NO: 1145300 - RNA, 24 nt, Human
caagaccccaacuccggggagacu

SEQ ID NO: 1145301 - RNA, 22 nt, Human
caccagaugccccgggugggcc

SEQ ID NO: 1145302 - RNA, 23 nt, Human
caucacgucccgcuacccuccca

SEQ ID NO: 1145303 - RNA, 20 nt, Human
ccaaccuccacuuguggcug

SEQ ID NO: 1145304 - RNA, 20 nt, Human
ccaggcaacggcaggggaac

SEQ ID NO: 1145305 - RNA, 19 nt, Human
cccaagaccccaacuccgg

SEQ ID NO: 1145306 - RNA, 20 nt, Human
cccacggcuaccugccaccu

SEQ ID NO: 1145307 - RNA, 25 nt, Human
ccccaucacgucccgcuacccuccc

SEQ ID NO: 1145308 - RNA, 22 nt, Human
cccccaucacgucccgcuaccc

SEQ ID NO: 1145309 - RNA, 20 nt, Human
cccugugucccagauuggcc

SEQ ID NO: 1145310 - RNA, 21 nt, Human
ccgaugccaaugcucaucaca

SEQ ID NO: 1145311 - RNA, 23 nt, Human
cgcuaaggaguguaacaacucag

SEQ ID NO: 1145312 - RNA, 20 nt, Human
cggaaccuccagggucaacc

SEQ ID NO: 1145313 - RNA, 20 nt, Human
cggcggcucccuguguccca

SEQ ID NO: 1145314 - RNA, 25 nt, Human
cucccacagcuggccuuugccaggc

SEQ ID NO: 1145315 - RNA, 18 nt, Human
cuccugggucaggccucu

SEQ ID NO: 1145316 - RNA, 21 nt, Human
cuugggagcccagccuuccuc

SEQ ID NO: 1145317 - RNA, 20 nt, Human
gcuggacgguggccauggaa

SEQ ID NO: 1145318 - RNA, 20 nt, Human
ggaugcccccaucacguccc

SEQ ID NO: 1145319 - RNA, 24 nt, Human
ggccucuggggucgaccagcugac

SEQ ID NO: 1145320 - RNA, 20 nt, Human
gggguggguugacguacagg

SEQ ID NO: 1145321 - RNA, 23 nt, Human
ggugaaaucacuguuaccaucac

SEQ ID NO: 1145322 - RNA, 25 nt, Human
ucacaucccagaaaagguguugguu

SEQ ID NO: 1145323 - RNA, 24 nt, Human
uccaaagggauggugacuuccacc

SEQ ID NO: 1145324 - RNA, 19 nt, Human
ucccacagcuggccuuugc

SEQ ID NO: 1145325 - RNA, 19 nt, Human
ucccacggcuaccugccac

SEQ ID NO: 1145326 - RNA, 20 nt, Human
ucccagaaaagguguugguu

SEQ ID NO: 1145327 - RNA, 23 nt, Human
ucggaaccuccagggucaaccag

SEQ ID NO: 1145328 - RNA, 23 nt, Human
ucucggucggaaccuccaggguc

SEQ ID NO: 1145329 - RNA, 24 nt, Human
ugaaaucacuguuaccaucaccgu

SEQ ID NO: 1145330 - RNA, 22 nt, Human
ugacuuccacccacaagguccc

SEQ ID NO: 1145331 - RNA, 21 nt, Human
ugagccugcccaagaccccaa

SEQ ID NO: 1145332 - RNA, 19 nt, Human
ugaggcggaugcccccauc

SEQ ID NO: 1145333 - RNA, 21 nt, Human
ugccaaugcucaucacauccc

SEQ ID NO: 1145334 - RNA, 21 nt, Human
ugggaugaaccgaaugccaug

SEQ ID NO: 1145335 - RNA, 21 nt, Human
uggggucgaccagcugacgcc

SEQ ID NO: 1145336 - RNA, 18 nt, Human
uggguugacguacagggu

SEQ ID NO: 1145337 - RNA, 25 nt, Human
uuggggguggguugacguacagggu

SEQ ID NO: 1145338 - RNA, 19 nt, Human
aagccaccacaacucacuu

SEQ ID NO: 1145339 - RNA, 24 nt, Human
acacaggaacuacaacucucucca

SEQ ID NO: 1145340 - RNA, 20 nt, Human
acaguccuggagacagacac

SEQ ID NO: 1145341 - RNA, 20 nt, Human
agaaucccccgucuguuucc

SEQ ID NO: 1145342 - RNA, 20 nt, Human
agagagaugcaccucaggaa

SEQ ID NO: 1145343 - RNA, 19 nt, Human
aucguuguuggacauuugg

SEQ ID NO: 1145344 - RNA, 21 nt, Human
augguauuucuaguucuagau

SEQ ID NO: 1145345 - RNA, 21 nt, Human
auuagcucaucaaacacaaca

SEQ ID NO: 1145346 - RNA, 24 nt, Human
caaagccaccacaacucacuugaa

SEQ ID NO: 1145347 - RNA, 22 nt, Human
cacaacaguccccggaguguga

SEQ ID NO: 1145348 - RNA, 25 nt, Human
cacauaucacaguccuggagacaga

SEQ ID NO: 1145349 - RNA, 21 nt, Human
caccccacaacaguccccgga

SEQ ID NO: 1145350 - RNA, 21 nt, Human
caggaacuacaacucucucca

SEQ ID NO: 1145351 - RNA, 22 nt, Human
caucaggaaagaaaagacaacc

SEQ ID NO: 1145352 - RNA, 19 nt, Human
caugucccuacaaaggaca

SEQ ID NO: 1145353 - RNA, 18 nt, Human
ccacauuuucuuaaucca

SEQ ID NO: 1145354 - RNA, 22 nt, Human
ccagcuaaaaauuuccucccgc

SEQ ID NO: 1145355 - RNA, 30 nt, Human
ccaucaggaaagaaaagacaaccaguuucc

SEQ ID NO: 1145356 - RNA, 19 nt, Human
cccaauguuaucccucccc

SEQ ID NO: 1145357 - RNA, 24 nt, Human
ccccaccccacaacaguccccgga

SEQ ID NO: 1145358 - RNA, 19 nt, Human
cccccaccccacaacaguc

SEQ ID NO: 1145359 - RNA, 19 nt, Human
ccccccaccccacaacagu

SEQ ID NO: 1145360 - RNA, 20 nt, Human
ccccccaccccacaacaguc

SEQ ID NO: 1145361 - RNA, 20 nt, Human
ccuaguaaugggauggcugg

SEQ ID NO: 1145362 - RNA, 23 nt, Human
ccuccccgcuccccccaccccac

SEQ ID NO: 1145363 - RNA, 18 nt, Human
cgcuccccccaccccaca

SEQ ID NO: 1145364 - RNA, 22 nt, Human
cuacuccuuaguguuuccucua

SEQ ID NO: 1145365 - RNA, 24 nt, Human
cuaugagugagaacaugugguauu

SEQ ID NO: 1145366 - RNA, 24 nt, Human
cugcacccauuaacucgucauuua

SEQ ID NO: 1145367 - RNA, 19 nt, Human
cuggccuuuuaaaggacaa

SEQ ID NO: 1145368 - RNA, 19 nt, Human
cuugcucccugggcugcgg

SEQ ID NO: 1145369 - RNA, 18 nt, Human
gcuccccccaccccacaa

SEQ ID NO: 1145370 - RNA, 21 nt, Human
ggacaugaacucuucauuuuu

SEQ ID NO: 1145371 - RNA, 18 nt, Human
gugugcaugugucuuuau

SEQ ID NO: 1145372 - RNA, 20 nt, Human
gugugcaugugucuuuauag

SEQ ID NO: 1145373 - RNA, 18 nt, Human
uacaccuaguaaugggau

SEQ ID NO: 1145374 - RNA, 19 nt, Human
uagcagcaugauuuauaau

SEQ ID NO: 1145375 - RNA, 20 nt, Human
uauaugugccacauuuucuu

SEQ ID NO: 1145376 - RNA, 24 nt, Human
uauugugaauagugccucaauaaa

SEQ ID NO: 1145377 - RNA, 22 nt, Human
ucagucagaacagaaggucuaa

SEQ ID NO: 1145378 - RNA, 18 nt, Human
uccccccaccccacaaca

SEQ ID NO: 1145379 - RNA, 18 nt, Human
uccccgcuccccccaccc

SEQ ID NO: 1145380 - RNA, 19 nt, Human
uccccgcuccccccacccc

SEQ ID NO: 1145381 - RNA, 22 nt, Human
uccccgcuccccccaccccaca

SEQ ID NO: 1145382 - RNA, 20 nt, Human
ucccuacaaaggacaugaac

SEQ ID NO: 1145383 - RNA, 21 nt, Human
ucccuccccgcuccccccacc

SEQ ID NO: 1145384 - RNA, 18 nt, Human
ucccugaggaauuuuggc

SEQ ID NO: 1145385 - RNA, 24 nt, Human
ucugaaugccauaggaugcuucag

SEQ ID NO: 1145386 - RNA, 23 nt, Human
ucuuugcuauugugaauagugcc

SEQ ID NO: 1145387 - RNA, 19 nt, Human
ugacuuauaagaauccccc

SEQ ID NO: 1145388 - RNA, 20 nt, Human
ugacuuauaagaaucccccg

SEQ ID NO: 1145389 - RNA, 23 nt, Human
ugacuuauaagaaucccccgucu

SEQ ID NO: 1145390 - RNA, 20 nt, Human
ugaggaauuuuggcuggccu

SEQ ID NO: 1145391 - RNA, 19 nt, Human
ugagugagaacauguggua

SEQ ID NO: 1145392 - RNA, 24 nt, Human
ugagugagaacaugugguauuugg

SEQ ID NO: 1145393 - RNA, 19 nt, Human
ugccaugcuggugugcugc

SEQ ID NO: 1145394 - RNA, 25 nt, Human
ugccucaauaaacauacgugugcau

SEQ ID NO: 1145395 - RNA, 23 nt, Human
ugcuggugugcugcacccauuaa

SEQ ID NO: 1145396 - RNA, 21 nt, Human
uggcuggccuuuuuuuuuuuu

SEQ ID NO: 1145397 - RNA, 23 nt, Human
uggugcagagagagaugcaccuc

SEQ ID NO: 1145398 - RNA, 23 nt, Human
ugugcagguuuguuacauaugua

SEQ ID NO: 1145399 - RNA, 18 nt, Human
uguuacauauguauacau

SEQ ID NO: 1145400 - RNA, 19 nt, Human
uguuacauauguauacaug

SEQ ID NO: 1145401 - RNA, 21 nt, Human
uuauggcugcauaguauucaa

SEQ ID NO: 1145402 - RNA, 18 nt, Human
uucaaaggccacgcuaac

SEQ ID NO: 1145403 - RNA, 18 nt, Human
uuccugaacauccacagc

SEQ ID NO: 1145404 - RNA, 19 nt, Human
uuuccaguuucauccaugu

SEQ ID NO: 1145405 - RNA, 19 nt, Human
uuuccaguuucauccaugu

SEQ ID NO: 1145406 - RNA, 18 nt, Human
uuucuaguucuagauccc

SEQ ID NO: 1145407 - RNA, 19 nt, Human
uuucuaguucuagaucccu

SEQ ID NO: 1145408 - RNA, 22 nt, Human
uuuuauggcugcauaguauuca

SEQ ID NO: 1145409 - RNA, 24 nt, Human
uuuuggcuggccuuuuuuuuuuuu

SEQ ID NO: 1145410 - RNA, 20 nt, Human
aacauggugaaacucugucu

SEQ ID NO: 1145411 - RNA, 21 nt, Human
aacauggugaaacucugucuc

SEQ ID NO: 1145412 - RNA, 19 nt, Human
acauggugaaacucugucu

SEQ ID NO: 1145413 - RNA, 24 nt, Human
agcauggccaacauggugaaacuc

SEQ ID NO: 1145414 - RNA, 20 nt, Human
agccgggcaugguggugggc

SEQ ID NO: 1145415 - RNA, 19 nt, Human
auggccaacauggugaaac

SEQ ID NO: 1145416 - RNA, 24 nt, Human
caacauggugaaacucugucucua

SEQ ID NO: 1145417 - RNA, 18 nt, Human
caacuguaaucccagcua

SEQ ID NO: 1145418 - RNA, 19 nt, Human
caacuguaaucccagcuac

SEQ ID NO: 1145419 - RNA, 21 nt, Human
caggaguucgagaucagcaug

SEQ ID NO: 1145420 - RNA, 24 nt, Human
cauggccaacauggugaaacucug

SEQ ID NO: 1145421 - RNA, 24 nt, Human
cgagaucagcauggccaacauggu

SEQ ID NO: 1145422 - RNA, 18 nt, Human
cugagaucaggaguucga

SEQ ID NO: 1145423 - RNA, 21 nt, Human
cugagaucaggaguucgagau

SEQ ID NO: 1145424 - RNA, 19 nt, Human
gaaacucugucucuacuaa

SEQ ID NO: 1145425 - RNA, 24 nt, Human
gccaacauggugaaacucugucuc

SEQ ID NO: 1145426 - RNA, 21 nt, Human
uagauaaguauuggaaaccug

SEQ ID NO: 1145427 - RNA, 21 nt, Human
ucucuacuaaaaauauaaaaa

SEQ ID NO: 1145428 - RNA, 23 nt, Human
ugagaucaggaguucgagaucag

SEQ ID NO: 1145429 - RNA, 18 nt, Human
uggaaaccugagaucagg

SEQ ID NO: 1145430 - RNA, 23 nt, Human
uggaaaccugagaucaggaguuc

SEQ ID NO: 1145431 - RNA, 18 nt, Human
uggccaacauggugaaac

SEQ ID NO: 1145432 - RNA, 23 nt, Human
uggccaacauggugaaacucugu

SEQ ID NO: 1145433 - RNA, 24 nt, Human
uggccaacauggugaaacucuguc

SEQ ID NO: 1145434 - RNA, 21 nt, Human
uggugggcaacuguaauccca

SEQ ID NO: 1145435 - RNA, 18 nt, Human
uuagccgggcaugguggu

SEQ ID NO: 1145436 - RNA, 21 nt, Human
aaacaauucaguucacuccca

SEQ ID NO: 1145437 - RNA, 18 nt, Human
aaagaagaaacagaugug

SEQ ID NO: 1145438 - RNA, 24 nt, Human
aaaucaaauaacuggcaugcucuu

SEQ ID NO: 1145439 - RNA, 22 nt, Human
aacagagaagcccuucagggaa

SEQ ID NO: 1145440 - RNA, 18 nt, Human
aagaagaaacagauguga

SEQ ID NO: 1145441 - RNA, 24 nt, Human
aagaauagaaacuugcaggaaaaa

SEQ ID NO: 1145442 - RNA, 21 nt, Human
aaggcagaggacaggcaugca

SEQ ID NO: 1145443 - RNA, 19 nt, Human
aagggugggguggggggag

SEQ ID NO: 1145444 - RNA, 26 nt, Human
aagucacaggaaucuaucuuuucuga

SEQ ID NO: 1145445 - RNA, 23 nt, Human
aaguguagccugauguuacaacc

SEQ ID NO: 1145446 - RNA, 18 nt, Human
accccauggcgcacagcc

SEQ ID NO: 1145447 - RNA, 25 nt, Human
agaaaaaccccauggcgcacagcca

SEQ ID NO: 1145448 - RNA, 18 nt, Human
agaggacugggaucugga

SEQ ID NO: 1145449 - RNA, 19 nt, Human
agaggacugggaucuggag

SEQ ID NO: 1145450 - RNA, 20 nt, Human
agcacauacuugcugggaau

SEQ ID NO: 1145451 - RNA, 18 nt, Human
aggagaauuuugagucag

SEQ ID NO: 1145452 - RNA, 20 nt, Human
aggagcugcgggaagaauag

SEQ ID NO: 1145453 - RNA, 24 nt, Human
agggugggguggggggaggggcgg

SEQ ID NO: 1145454 - RNA, 25 nt, Human
auaguaaaauagccccauuucuugg

SEQ ID NO: 1145455 - RNA, 20 nt, Human
caaauaacuggcaugcucuu

SEQ ID NO: 1145456 - RNA, 22 nt, Human
caaccucauugcuuuugguaac

SEQ ID NO: 1145457 - RNA, 26 nt, Human
cacagccaguguauguauguaauacc

SEQ ID NO: 1145458 - RNA, 19 nt, Human
cacccucccuccccaagcc

SEQ ID NO: 1145459 - RNA, 22 nt, Human
cacccucccuccccaagcccua

SEQ ID NO: 1145460 - RNA, 23 nt, Human
cacccucccuccccaagcccuaa

SEQ ID NO: 1145461 - RNA, 22 nt, Human
cagacaggauuucuuuguuuug

SEQ ID NO: 1145462 - RNA, 22 nt, Human
cagaucucuccuaagucucaca

SEQ ID NO: 1145463 - RNA, 24 nt, Human
cauggcgcacagccaguguaugua

SEQ ID NO: 1145464 - RNA, 21 nt, Human
cauucuguaagguauucucaa

SEQ ID NO: 1145465 - RNA, 19 nt, Human
cauuucuuggaaguuagga

SEQ ID NO: 1145466 - RNA, 20 nt, Human
ccaacacccucccuccccaa

SEQ ID NO: 1145467 - RNA, 19 nt, Human
ccagacaggauuucuuugu

SEQ ID NO: 1145468 - RNA, 18 nt, Human
ccagugccaacagagaag

SEQ ID NO: 1145469 - RNA, 21 nt, Human
cccuccccaagcccuaaugag

SEQ ID NO: 1145470 - RNA, 18 nt, Human
cccucccuccccaagccc

SEQ ID NO: 1145471 - RNA, 22 nt, Human
ccucauccuuuccaucaugucc

SEQ ID NO: 1145472 - RNA, 19 nt, Human
ccucauuuuuccugguccc

SEQ ID NO: 1145473 - RNA, 23 nt, Human
ccugccacagccugguuuaagaa

SEQ ID NO: 1145474 - RNA, 22 nt, Human
cuaacccauaucuggcucaucc

SEQ ID NO: 1145475 - RNA, 19 nt, Human
cuccucauccuuuccauca

SEQ ID NO: 1145476 - RNA, 21 nt, Human
cuccugccacagccugguuua

SEQ ID NO: 1145477 - RNA, 22 nt, Human
cuucuuagcacauacuugcugg

SEQ ID NO: 1145478 - RNA, 18 nt, Human
gauuccaacacccucccu

SEQ ID NO: 1145479 - RNA, 20 nt, Human
gcaggaaaaaaaaagggugg

SEQ ID NO: 1145480 - RNA, 24 nt, Human
gcaguguggauuccaacacccucc

SEQ ID NO: 1145481 - RNA, 19 nt, Human
gcucaugguguggcugugg

SEQ ID NO: 1145482 - RNA, 21 nt, Human
ggaauuuggugacugguuugu

SEQ ID NO: 1145483 - RNA, 20 nt, Human
ggacaggcaugcagacccuu

SEQ ID NO: 1145484 - RNA, 20 nt, Human
ggagcagagcuucauccaca

SEQ ID NO: 1145485 - RNA, 20 nt, Human
ggauuccaacacccucccuc

SEQ ID NO: 1145486 - RNA, 24 nt, Human
ggcgcacagccaguguauguaugu

SEQ ID NO: 1145487 - RNA, 21 nt, Human
ggggcaagauaaggcagagga

SEQ ID NO: 1145488 - RNA, 18 nt, Human
gggguggggggaggggcg

SEQ ID NO: 1145489 - RNA, 19 nt, Human
gggugggguggggggaggg

SEQ ID NO: 1145490 - RNA, 21 nt, Human
gguagaggggcaagauaaggc

SEQ ID NO: 1145491 - RNA, 18 nt, Human
ggugaaccagcugggacc

SEQ ID NO: 1145492 - RNA, 21 nt, Human
gugggguggggggaggggcgg

SEQ ID NO: 1145493 - RNA, 18 nt, Human
uaaagcauaauccaaagg

SEQ ID NO: 1145494 - RNA, 20 nt, Human
uaaucgcuaucaacuccuca

SEQ ID NO: 1145495 - RNA, 26 nt, Human
uacagaaaaaccccauggcgcacagc

SEQ ID NO: 1145496 - RNA, 23 nt, Human
uacucuggcaguguggauuccaa

SEQ ID NO: 1145497 - RNA, 22 nt, Human
uagacuggacauuuuccuacag

SEQ ID NO: 1145498 - RNA, 26 nt, Human
uagauccucagcucggccuccugcca

SEQ ID NO: 1145499 - RNA, 20 nt, Human
uaucuggcucauccauccuc

SEQ ID NO: 1145500 - RNA, 20 nt, Human
uccaaaggaaaaagagcgcc

SEQ ID NO: 1145501 - RNA, 19 nt, Human
uccaacacccucccuccca

SEQ ID NO: 1145502 - RNA, 21 nt, Human
uccacaacuaaggaguccugc

SEQ ID NO: 1145503 - RNA, 23 nt, Human
uccaccagccuccuggccuggac

SEQ ID NO: 1145504 - RNA, 18 nt, Human
uccaucuuuucagagcuc

SEQ ID NO: 1145505 - RNA, 21 nt, Human
uccaugcagaugcaaagaaga

SEQ ID NO: 1145506 - RNA, 28 nt, Human
uccccaagcccuaaugaggggagccugu

SEQ ID NO: 1145507 - RNA, 24 nt, Human
uccucauccuuuccaucauguccu

SEQ ID NO: 1145508 - RNA, 23 nt, Human
uccucugcauauccguuugagaa

SEQ ID NO: 1145509 - RNA, 21 nt, Human
ucggccuccugccacagccug

SEQ ID NO: 1145510 - RNA, 21 nt, Human
ucuccaucuuuucagagcuca

SEQ ID NO: 1145511 - RNA, 25 nt, Human
ucugggauaguaaaauagccccauu

SEQ ID NO: 1145512 - RNA, 21 nt, Human
ucuuggauugacagagccagg

SEQ ID NO: 1145513 - RNA, 20 nt, Human
ugacuuccuauguuaccuuu

SEQ ID NO: 1145514 - RNA, 19 nt, Human
ugcagaugcaaagaagaaa

SEQ ID NO: 1145515 - RNA, 19 nt, Human
ugcaggaaaaaaaaagggu

SEQ ID NO: 1145516 - RNA, 20 nt, Human
uggaaguuaggagcagagcu

SEQ ID NO: 1145517 - RNA, 18 nt, Human
uggauugacagagccagg

SEQ ID NO: 1145518 - RNA, 25 nt, Human
uggccuggacagguagauccucagc

SEQ ID NO: 1145519 - RNA, 20 nt, Human
uggcuucuuagcacauacuu

SEQ ID NO: 1145520 - RNA, 22 nt, Human
uggggcauucuguaagguauuc

SEQ ID NO: 1145521 - RNA, 21 nt, Human
uggggggaggggcggugaagc

SEQ ID NO: 1145522 - RNA, 22 nt, Human
uggggggaggggcggugaagcg

SEQ ID NO: 1145523 - RNA, 20 nt, Human
ugggguggggggaggggcgg

SEQ ID NO: 1145524 - RNA, 21 nt, Human
ugggguggggggaggggcggu

SEQ ID NO: 1145525 - RNA, 19 nt, Human
uguaaggguuaccuuuguc

SEQ ID NO: 1145526 - RNA, 23 nt, Human
uuaauuuuuggcuucuuagcaca

SEQ ID NO: 1145527 - RNA, 18 nt, Human
uuaggacugguuucuuuc

SEQ ID NO: 1145528 - RNA, 21 nt, Human
uucaccaugcucaucucucca

SEQ ID NO: 1145529 - RNA, 23 nt, Human
uucccagucucgacaaccucauu

SEQ ID NO: 1145530 - RNA, 22 nt, Human
uucccggaggauguucgccagg

SEQ ID NO: 1145531 - RNA, 25 nt, Human
uuccucagguauuugguggcuuugc

SEQ ID NO: 1145532 - RNA, 20 nt, Human
uuuccugguccccauauuca

SEQ ID NO: 1145533 - RNA, 22 nt, Human
uuugccaaguguuccuugguga

SEQ ID NO: 1145534 - RNA, 23 nt, Human
aaaaaagaaagaaagaaagaaga

SEQ ID NO: 1145535 - RNA, 19 nt, Human
aacagcauccaccauacag

SEQ ID NO: 1145536 - RNA, 19 nt, Human
aacauggugaaaccccguc

SEQ ID NO: 1145537 - RNA, 20 nt, Human
aacauggugaaaccccgucu

SEQ ID NO: 1145538 - RNA, 21 nt, Human
aacauggugaaaccccgucuc

SEQ ID NO: 1145539 - RNA, 22 nt, Human
aacuugcuguucuccacugcuc

SEQ ID NO: 1145540 - RNA, 22 nt, Human
aagaaaaagaguaguugcucac

SEQ ID NO: 1145541 - RNA, 22 nt, Human
aagaaagaaagaaagaagaaaa

SEQ ID NO: 1145542 - RNA, 21 nt, Human
aagaaagaaagaagaaaaaga

SEQ ID NO: 1145543 - RNA, 24 nt, Human
aaucacuugaacccaggaggcaga

SEQ ID NO: 1145544 - RNA, 27 nt, Human
aauuguguucugacuuguuuuaaaguu

SEQ ID NO: 1145545 - RNA, 24 nt, Human
acagagaaagacucugucucagaa

SEQ ID NO: 1145546 - RNA, 19 nt, Human
accacugcacuccagccug

SEQ ID NO: 1145547 - RNA, 24 nt, Human
acccaggaggcagagguugcagug

SEQ ID NO: 1145548 - RNA, 24 nt, Human
accccgucucuacuaagaauacaa

SEQ ID NO: 1145549 - RNA, 18 nt, Human
acccuggcagcauccugg

SEQ ID NO: 1145550 - RNA, 24 nt, Human
acugcacuccagccugggugacag

SEQ ID NO: 1145551 - RNA, 26 nt, Human
acugcacuccagccugggugacagag

SEQ ID NO: 1145552 - RNA, 22 nt, Human
agaaucacuugaacccaggagg

SEQ ID NO: 1145553 - RNA, 22 nt, Human
agagguugcagugagccgagau

SEQ ID NO: 1145554 - RNA, 24 nt, Human
agagguugcagugagccgagauug

SEQ ID NO: 1145555 - RNA, 24 nt, Human
agcacuuuaggaggccgagguggg

SEQ ID NO: 1145556 - RNA, 20 nt, Human
agccagucuugggucauugc

SEQ ID NO: 1145557 - RNA, 22 nt, Human
agccuggccaacauggugaaac

SEQ ID NO: 1145558 - RNA, 24 nt, Human
agccuggccaacauggugaaaccc

SEQ ID NO: 1145559 - RNA, 24 nt, Human
agccugggugacagagaaagacuc

SEQ ID NO: 1145560 - RNA, 21 nt, Human
aggcagagguugcagugagcc

SEQ ID NO: 1145561 - RNA, 24 nt, Human
aggcagagguugcagugagccgag

SEQ ID NO: 1145562 - RNA, 18 nt, Human
aggcaggagaaucacuug

SEQ ID NO: 1145563 - RNA, 23 nt, Human
aggcaggagaaucacuugaaccc

SEQ ID NO: 1145564 - RNA, 24 nt, Human
aggcaggagaaucacuugaaccca

SEQ ID NO: 1145565 - RNA, 21 nt, Human
aggccgaggugggcagaucac

SEQ ID NO: 1145566 - RNA, 24 nt, Human
aggcugaggcaggagaaucacuug

SEQ ID NO: 1145567 - RNA, 24 nt, Human
aggugggcagaucacaaggucagg

SEQ ID NO: 1145568 - RNA, 21 nt, Human
aucacaaggucaggaguucga

SEQ ID NO: 1145569 - RNA, 19 nt, Human
auggggaauaucuucagau

SEQ ID NO: 1145570 - RNA, 24 nt, Human
auugcaccacugcacuccagccug

SEQ ID NO: 1145571 - RNA, 22 nt, Human
auuucauccuauauucuucagu

SEQ ID NO: 1145572 - RNA, 20 nt, Human
caaacaaugucaucaggaac

SEQ ID NO: 1145573 - RNA, 24 nt, Human
caacauggugaaaccccgucucua

SEQ ID NO: 1145574 - RNA, 21 nt, Human
caauauggacauuaucuuaca

SEQ ID NO: 1145575 - RNA, 23 nt, Human
cacaccuguaaucccagcacuuu

SEQ ID NO: 1145576 - RNA, 26 nt, Human
caccacugcacuccagccugggugac

SEQ ID NO: 1145577 - RNA, 18 nt, Human
caccauacagacacagcc

SEQ ID NO: 1145578 - RNA, 18 nt, Human
caccuguaaucccagcac

SEQ ID NO: 1145579 - RNA, 22 nt, Human
caccuguaaucccagcacuuua

SEQ ID NO: 1145580 - RNA, 18 nt, Human
cacuccagccugggugac

SEQ ID NO: 1145581 - RNA, 22 nt, Human
cacuccagccugggugacagag

SEQ ID NO: 1145582 - RNA, 19 nt, Human
cacugcacuccagccuggg

SEQ ID NO: 1145583 - RNA, 19 nt, Human
cacugcacuccagccuggg

SEQ ID NO: 1145584 - RNA, 21 nt, Human
cacugcacuccagccugggug

SEQ ID NO: 1145585 - RNA, 22 nt, Human
cacugcacuccagccuggguga

SEQ ID NO: 1145586 - RNA, 24 nt, Human
cacugcacuccagccugggugaca

SEQ ID NO: 1145587 - RNA, 24 nt, Human
cacugcacuccagccugggugaca

SEQ ID NO: 1145588 - RNA, 19 nt, Human
cagaagaagacuuguucau

SEQ ID NO: 1145589 - RNA, 22 nt, Human
cagagaaagacucugucucaga

SEQ ID NO: 1145590 - RNA, 24 nt, Human
cagcacuuuaggaggccgaggugg

SEQ ID NO: 1145591 - RNA, 18 nt, Human
cagcauccugggcccccc

SEQ ID NO: 1145592 - RNA, 19 nt, Human
cagccggacugguuugcac

SEQ ID NO: 1145593 - RNA, 22 nt, Human
cagccugggugacagagaaaga

SEQ ID NO: 1145594 - RNA, 24 nt, Human
cagcuacucgggaggcugaggcag

SEQ ID NO: 1145595 - RNA, 23 nt, Human
cagguagcaccaucuuccuuagu

SEQ ID NO: 1145596 - RNA, 21 nt, Human
caucucuaaacaauauggaca

SEQ ID NO: 1145597 - RNA, 24 nt, Human
cauuaacacuauuuguaccaagac

SEQ ID NO: 1145598 - RNA, 19 nt, Human
ccacagucucaaaugugac

SEQ ID NO: 1145599 - RNA, 20 nt, Human
ccacugcacuccagccuggg

SEQ ID NO: 1145600 - RNA, 20 nt, Human
ccacugcacuccagccuggg

SEQ ID NO: 1145601 - RNA, 21 nt, Human
ccacugcacuccagccugggu

SEQ ID NO: 1145602 - RNA, 21 nt, Human
ccacugcacuccagccugggu

SEQ ID NO: 1145603 - RNA, 23 nt, Human
ccacugcacuccagccuggguga

SEQ ID NO: 1145604 - RNA, 24 nt, Human
ccacugcacuccagccugggugac

SEQ ID NO: 1145605 - RNA, 25 nt, Human
ccacugcacuccagccugggugaca

SEQ ID NO: 1145606 - RNA, 24 nt, Human
ccacuguuccugccuucuuuccug

SEQ ID NO: 1145607 - RNA, 20 nt, Human
ccagaagaagacuuguucau

SEQ ID NO: 1145608 - RNA, 24 nt, Human
ccccaccacuguuccugccuucuu

SEQ ID NO: 1145609 - RNA, 23 nt, Human
ccccaccccgccccagccucaga

SEQ ID NO: 1145610 - RNA, 19 nt, Human
ccccgccccagccucagac

SEQ ID NO: 1145611 - RNA, 19 nt, Human
cccugaaccugggcccuuc

SEQ ID NO: 1145612 - RNA, 19 nt, Human
cccuguagcuucccugccu

SEQ ID NO: 1145613 - RNA, 27 nt, Human
cccuuggagcuucauuuccuccgcggg

SEQ ID NO: 1145614 - RNA, 25 nt, Human
ccucagacuguacguuuuagaccuu

SEQ ID NO: 1145615 - RNA, 19 nt, Human
ccugcagugaaaucucagc

SEQ ID NO: 1145616 - RNA, 23 nt, Human
ccuggccaacauggugaaacccc

SEQ ID NO: 1145617 - RNA, 24 nt, Human
ccuggccaacauggugaaaccccg

SEQ ID NO: 1145618 - RNA, 22 nt, Human
ccugggugacagagaaagacuc

SEQ ID NO: 1145619 - RNA, 20 nt, Human
ccuuuccccaccccgcccca

SEQ ID NO: 1145620 - RNA, 24 nt, Human
cgagaccagccuggccaacauggu

SEQ ID NO: 1145621 - RNA, 24 nt, Human
cgagauugcaccacugcacuccag

SEQ ID NO: 1145622 - RNA, 18 nt, Human
cggcagagggaagagggg

SEQ ID NO: 1145623 - RNA, 22 nt, Human
cggcagagggaagagggggucg

SEQ ID NO: 1145624 - RNA, 18 nt, Human
cuaagaguuugagccaca

SEQ ID NO: 1145625 - RNA, 21 nt, Human
cuacaauccugaaccuaucac

SEQ ID NO: 1145626 - RNA, 21 nt, Human
cuaggcuuccagcuucucuua

SEQ ID NO: 1145627 - RNA, 18 nt, Human
cuauaaucccagcuacuc

SEQ ID NO: 1145628 - RNA, 18 nt, Human
cucaaggguagggucacc

SEQ ID NO: 1145629 - RNA, 22 nt, Human
cucacaccuguaaucccagcac

SEQ ID NO: 1145630 - RNA, 24 nt, Human
cucacaccuguaaucccagcacuu

SEQ ID NO: 1145631 - RNA, 25 nt, Human
cucagaaccauccuuuccccacccc

SEQ ID NO: 1145632 - RNA, 22 nt, Human
cugaaccugggcccuuccucau

SEQ ID NO: 1145633 - RNA, 22 nt, Human
cugcaguagucccaagucuggc

SEQ ID NO: 1145634 - RNA, 21 nt, Human
cuggaucguguguccaugugu

SEQ ID NO: 1145635 - RNA, 19 nt, Human
cuggucccaggcaauccca

SEQ ID NO: 1145636 - RNA, 22 nt, Human
cugugauccccaccacuguucc

SEQ ID NO: 1145637 - RNA, 18 nt, Human
cuuggcuggauuggaagu

SEQ ID NO: 1145638 - RNA, 23 nt, Human
cuuuccccaccccgccccagccu

SEQ ID NO: 1145639 - RNA, 18 nt, Human
gaaaaacgagugcuucuc

SEQ ID NO: 1145640 - RNA, 18 nt, Human
gaaagaagaaaaagagua

SEQ ID NO: 1145641 - RNA, 18 nt, Human
gaaccugggcccuuccuc

SEQ ID NO: 1145642 - RNA, 18 nt, Human
gacaggcugauaguggcu

SEQ ID NO: 1145643 - RNA, 20 nt, Human
gaccauggcugugagacccu

SEQ ID NO: 1145644 - RNA, 21 nt, Human
gaccggcagagggaagagggg

SEQ ID NO: 1145645 - RNA, 18 nt, Human
gacucugucucagaaaaa

SEQ ID NO: 1145646 - RNA, 24 nt, Human
gaggugggcagaucacaaggucag

SEQ ID NO: 1145647 - RNA, 21 nt, Human
gaucacaaggucaggaguucg

SEQ ID NO: 1145648 - RNA, 22 nt, Human
gaucacaaggucaggaguucga

SEQ ID NO: 1145649 - RNA, 24 nt, Human
gaucacaaggucaggaguucgaga

SEQ ID NO: 1145650 - RNA, 21 nt, Human
gcagaaaacaacuuguuucua

SEQ ID NO: 1145651 - RNA, 22 nt, Human
gcaggagaaucacuugaaccca

SEQ ID NO: 1145652 - RNA, 24 nt, Human
gccaacauggugaaaccccgucuc

SEQ ID NO: 1145653 - RNA, 19 nt, Human
gccuugugcugucaauugu

SEQ ID NO: 1145654 - RNA, 22 nt, Human
ggaggcagagguugcagugagc

SEQ ID NO: 1145655 - RNA, 19 nt, Human
ggcagagggaagagggggu

SEQ ID NO: 1145656 - RNA, 23 nt, Human
ggcagaucacaaggucaggaguu

SEQ ID NO: 1145657 - RNA, 25 nt, Human
ggcugugagacccuggcagcauccu

SEQ ID NO: 1145658 - RNA, 18 nt, Human
gggaagagggggucgggu

SEQ ID NO: 1145659 - RNA, 23 nt, Human
gggaggcugaggcaggagaauca

SEQ ID NO: 1145660 - RNA, 24 nt, Human
gggcgcgguggcucacaccuguaa

SEQ ID NO: 1145661 - RNA, 22 nt, Human
ggugcucgggccgggcgcggug

SEQ ID NO: 1145662 - RNA, 24 nt, Human
gguggcacgugucuauaaucccag

SEQ ID NO: 1145663 - RNA, 23 nt, Human
gguggcucacaccuguaauccca

SEQ ID NO: 1145664 - RNA, 24 nt, Human
gguggcucacaccuguaaucccag

SEQ ID NO: 1145665 - RNA, 21 nt, Human
guucuuugaagacugauccuu

SEQ ID NO: 1145666 - RNA, 19 nt, Human
guugcagugagccgagauu

SEQ ID NO: 1145667 - RNA, 21 nt, Human
uaaagcagccggacugguuug

SEQ ID NO: 1145668 - RNA, 20 nt, Human
uaacaggaaaguccagggag

SEQ ID NO: 1145669 - RNA, 21 nt, Human
uaacuguagccagggaaguga

SEQ ID NO: 1145670 - RNA, 18 nt, Human
uacaauccugaaccuauc

SEQ ID NO: 1145671 - RNA, 21 nt, Human
uaccagaagaagacuuguuca

SEQ ID NO: 1145672 - RNA, 22 nt, Human
uaccugcauuuguuuuucugga

SEQ ID NO: 1145673 - RNA, 22 nt, Human
uagccgggcgugguggcacgug

SEQ ID NO: 1145674 - RNA, 20 nt, Human
uaggaggccgaggugggcag

SEQ ID NO: 1145675 - RNA, 24 nt, Human
uaggaggccgaggugggcagauca

SEQ ID NO: 1145676 - RNA, 24 nt, Human
ucacaaggucaggaguucgagacc

SEQ ID NO: 1145677 - RNA, 19 nt, Human
ucaccagcuuccaaguucu

SEQ ID NO: 1145678 - RNA, 20 nt, Human
ucacgcaggcuccugggugg

SEQ ID NO: 1145679 - RNA, 25 nt, Human
ucagauauuuggagauacuucagau

SEQ ID NO: 1145680 - RNA, 21 nt, Human
ucagcucuggaaacuugggca

SEQ ID NO: 1145681 - RNA, 19 nt, Human
ucaggaacuugcuguucuc

SEQ ID NO: 1145682 - RNA, 19 nt, Human
uccaccauacagacacagc

SEQ ID NO: 1145683 - RNA, 20 nt, Human
uccagccugggugacagaga

SEQ ID NO: 1145684 - RNA, 24 nt, Human
ucccaggcaaucccaucaauuuac

SEQ ID NO: 1145685 - RNA, 21 nt, Human
uccccaccacuguuccugccu

SEQ ID NO: 1145686 - RNA, 24 nt, Human
uccucaagucaguguccaucagca

SEQ ID NO: 1145687 - RNA, 18 nt, Human
uccugggugguucuggaa

SEQ ID NO: 1145688 - RNA, 25 nt, Human
ucgggaggcugaggcaggagaauca

SEQ ID NO: 1145689 - RNA, 24 nt, Human
ucgggccgggcgcgguggcucaca

SEQ ID NO: 1145690 - RNA, 18 nt, Human
ucgggugggggaagagac

SEQ ID NO: 1145691 - RNA, 21 nt, Human
ucuauaaucccagcuacucgg

SEQ ID NO: 1145692 - RNA, 23 nt, Human
ucucacccuuugcauuaaccaga

SEQ ID NO: 1145693 - RNA, 20 nt, Human
ucucccagggucuucugcag

SEQ ID NO: 1145694 - RNA, 21 nt, Human
ucucuacuaagaauacaaaaa

SEQ ID NO: 1145695 - RNA, 20 nt, Human
ucuuccuuagucagggguca

SEQ ID NO: 1145696 - RNA, 19 nt, Human
ugaaaucucagcucuguug

SEQ ID NO: 1145697 - RNA, 22 nt, Human
ugagccgagauugcaccacugc

SEQ ID NO: 1145698 - RNA, 21 nt, Human
ugaggacaggcugauaguggc

SEQ ID NO: 1145699 - RNA, 20 nt, Human
ugaggcaggagaaucacuug

SEQ ID NO: 1145700 - RNA, 24 nt, Human
ugaggcaggagaaucacuugaacc

SEQ ID NO: 1145701 - RNA, 25 nt, Human
ugaggcaggagaaucacuugaaccc

SEQ ID NO: 1145702 - RNA, 21 nt, Human
ugcaccacugcacuccagccu

SEQ ID NO: 1145703 - RNA, 21 nt, Human
ugcagugaaaucucagcucug

SEQ ID NO: 1145704 - RNA, 25 nt, Human
ugcaucucuaaacaauauggacauu

SEQ ID NO: 1145705 - RNA, 20 nt, Human
ugccaacauccuaucagacu

SEQ ID NO: 1145706 - RNA, 20 nt, Human
ugcccauacuucccugaacc

SEQ ID NO: 1145707 - RNA, 18 nt, Human
ugcccuguagcuucccug

SEQ ID NO: 1145708 - RNA, 22 nt, Human
ugcccuguagcuucccugccuu

SEQ ID NO: 1145709 - RNA, 22 nt, Human
ugccucaugcccccaauauuuu

SEQ ID NO: 1145710 - RNA, 28 nt, Human
ugcuaccaccuucgugagaacuuuucug

SEQ ID NO: 1145711 - RNA, 24 nt, Human
uggaagccaaacccugugccgccu

SEQ ID NO: 1145712 - RNA, 22 nt, Human
uggcacgugucuauaaucccag

SEQ ID NO: 1145713 - RNA, 24 nt, Human
uggccaacauggugaaaccccguc

SEQ ID NO: 1145714 - RNA, 21 nt, Human
uggcucacaccuguaauccca

SEQ ID NO: 1145715 - RNA, 22 nt, Human
uggcucacaccuguaaucccag

SEQ ID NO: 1145716 - RNA, 24 nt, Human
uggcucacaccuguaaucccagca

SEQ ID NO: 1145717 - RNA, 21 nt, Human
uggcuccucaagucagugucc

SEQ ID NO: 1145718 - RNA, 19 nt, Human
uggcugugagacccuggca

SEQ ID NO: 1145719 - RNA, 22 nt, Human
ugggcagaucacaaggucagga

SEQ ID NO: 1145720 - RNA, 24 nt, Human
ugguggcacgugucuauaauccca

SEQ ID NO: 1145721 - RNA, 18 nt, Human
uguaaucccucaccagcu

SEQ ID NO: 1145722 - RNA, 24 nt, Human
ugucuauaaucccagcuacucggg

SEQ ID NO: 1145723 - RNA, 18 nt, Human
ugucugcccuguagcuuc

SEQ ID NO: 1145724 - RNA, 26 nt, Human
ugugacucucagaagccagucuuggg

SEQ ID NO: 1145725 - RNA, 21 nt, Human
uguugcuuuucagcucuggaa

SEQ ID NO: 1145726 - RNA, 20 nt, Human
uuagccgggcgugguggcac

SEQ ID NO: 1145727 - RNA, 20 nt, Human
uuagccgggcgugguggcac

SEQ ID NO: 1145728 - RNA, 23 nt, Human
uuagccgggcgugguggcacgug

SEQ ID NO: 1145729 - RNA, 22 nt, Human
uuauucuucuuggcuggauugg

SEQ ID NO: 1145730 - RNA, 18 nt, Human
uucacuagcacauuugga

SEQ ID NO: 1145731 - RNA, 24 nt, Human
uucagauauuuggagauacuucag

SEQ ID NO: 1145732 - RNA, 22 nt, Human
uucauuaacacuauuuguacca

SEQ ID NO: 1145733 - RNA, 18 nt, Human
uuccauggggaauaucuu

SEQ ID NO: 1145734 - RNA, 22 nt, Human
uuccauggggaauaucuucaga

SEQ ID NO: 1145735 - RNA, 23 nt, Human
uugcaccacugcacuccagccug

SEQ ID NO: 1145736 - RNA, 19 nt, Human
uugcagugagccgagauug

SEQ ID NO: 1145737 - RNA, 20 nt, Human
uugcagugagccgagauugc

SEQ ID NO: 1145738 - RNA, 22 nt, Human
uugcagugagccgagauugcac

SEQ ID NO: 1145739 - RNA, 23 nt, Human
uuggagcuucauuucccaacugg

SEQ ID NO: 1145740 - RNA, 21 nt, Human
uuggggugcucuuaccagaag

SEQ ID NO: 1145741 - RNA, 20 nt, Human
uuuccuggcuccucaaguca

SEQ ID NO: 1145742 - RNA, 26 nt, Human
uuugcagcccucuagguuggcuuucu

SEQ ID NO: 1145743 - RNA, 23 nt, Human
uuuguaaucccucaccagcuucc

SEQ ID NO: 1145744 - RNA, 21 nt, Human
uuuuccauggggaauaucuuc

SEQ ID NO: 1145745 - RNA, 19 nt, Human
aaagugcugacauuacagg

SEQ ID NO: 1145746 - RNA, 20 nt, Human
aaagugcugacauuacaggc

SEQ ID NO: 1145747 - RNA, 20 nt, Human
acccagcuaaguuuuguauu

SEQ ID NO: 1145748 - RNA, 25 nt, Human
aggcaauccucccaucucagccucc

SEQ ID NO: 1145749 - RNA, 20 nt, Human
agugcagugacgcaaucuug

SEQ ID NO: 1145750 - RNA, 24 nt, Human
agugcagugacgcaaucuuggcuc

SEQ ID NO: 1145751 - RNA, 24 nt, Human
agugcugacauuacaggcuugagc

SEQ ID NO: 1145752 - RNA, 22 nt, Human
auuacaggcuugagccacugca

SEQ ID NO: 1145753 - RNA, 22 nt, Human
caagugaacugccugccucagc

SEQ ID NO: 1145754 - RNA, 19 nt, Human
cagaucacaccaccacacc

SEQ ID NO: 1145755 - RNA, 24 nt, Human
caucucagccuccugaguugcugg

SEQ ID NO: 1145756 - RNA, 23 nt, Human
cauguuguccaggcuggucuuga

SEQ ID NO: 1145757 - RNA, 24 nt, Human
cauguuguccaggcuggucuugag

SEQ ID NO: 1145758 - RNA, 24 nt, Human
cauucugucacccaggcugcagug

SEQ ID NO: 1145759 - RNA, 19 nt, Human
ccauguuguccaggcuggu

SEQ ID NO: 1145760 - RNA, 21 nt, Human
ccauguuguccaggcuggucu

SEQ ID NO: 1145761 - RNA, 20 nt, Human
cccaggcugcagugcaguga

SEQ ID NO: 1145762 - RNA, 24 nt, Human
cccugggcucaggcaauccuccca

SEQ ID NO: 1145763 - RNA, 18 nt, Human
ccugggcucaagugaacu

SEQ ID NO: 1145764 - RNA, 22 nt, Human
ccugggcucaagugaacugccu

SEQ ID NO: 1145765 - RNA, 23 nt, Human
ccugggcucaagugaacugccug

SEQ ID NO: 1145766 - RNA, 18 nt, Human
cuccugaguugcuggaac

SEQ ID NO: 1145767 - RNA, 23 nt, Human
cugccucagccuuuuaaagugcu

SEQ ID NO: 1145768 - RNA, 19 nt, Human
cuggaacuacagaucacac

SEQ ID NO: 1145769 - RNA, 19 nt, Human
cuggucuugagcuccuggg

SEQ ID NO: 1145770 - RNA, 22 nt, Human
cuuggcucacgguagccucagc

SEQ ID NO: 1145771 - RNA, 22 nt, Human
cuuuaagaauacauuccucaaa

SEQ ID NO: 1145772 - RNA, 20 nt, Human
gaucacaccaccacacccag

SEQ ID NO: 1145773 - RNA, 22 nt, Human
gggucuugccauguuguccagg

SEQ ID NO: 1145774 - RNA, 24 nt, Human
ggucuugccauguuguccaggcug

SEQ ID NO: 1145775 - RNA, 19 nt, Human
guagaaaugggucuugcca

SEQ ID NO: 1145776 - RNA, 18 nt, Human
guccuucugggagucucc

SEQ ID NO: 1145777 - RNA, 24 nt, Human
gugaacugccugccucagccuuuu

SEQ ID NO: 1145778 - RNA, 21 nt, Human
uaaguuuuguauuuuuguaga

SEQ ID NO: 1145779 - RNA, 21 nt, Human
uacagaucacaccaccacacc

SEQ ID NO: 1145780 - RNA, 23 nt, Human
uacagaucacaccaccacaccca

SEQ ID NO: 1145781 - RNA, 22 nt, Human
uccagccagccagaugcccaaa

SEQ ID NO: 1145782 - RNA, 20 nt, Human
ucccugggcucaggcaaucc

SEQ ID NO: 1145783 - RNA, 26 nt, Human
uccucccaucucagccuccugaguug

SEQ ID NO: 1145784 - RNA, 24 nt, Human
ucuccagguccaagcacuuaguuu

SEQ ID NO: 1145785 - RNA, 24 nt, Human
ucugucacccaggcugcagugcag

SEQ ID NO: 1145786 - RNA, 18 nt, Human
ucugugcuuucuuuaaaa

SEQ ID NO: 1145787 - RNA, 22 nt, Human
ucuugagcuccugggcucaagu

SEQ ID NO: 1145788 - RNA, 22 nt, Human
ucuugccauguuguccaggcug

SEQ ID NO: 1145789 - RNA, 23 nt, Human
ucuugccauguuguccaggcugg

SEQ ID NO: 1145790 - RNA, 24 nt, Human
ucuugccauguuguccaggcuggu

SEQ ID NO: 1145791 - RNA, 21 nt, Human
ugacauuacaggcuugagcca

SEQ ID NO: 1145792 - RNA, 24 nt, Human
ugacauuacaggcuugagccacug

SEQ ID NO: 1145793 - RNA, 19 nt, Human
ugcagugacgcaaucuugg

SEQ ID NO: 1145794 - RNA, 22 nt, Human
ugcagugacgcaaucuuggcuc

SEQ ID NO: 1145795 - RNA, 23 nt, Human
ugcagugacgcaaucuuggcuca

SEQ ID NO: 1145796 - RNA, 24 nt, Human
ugcagugcagugacgcaaucuugg

SEQ ID NO: 1145797 - RNA, 22 nt, Human
ugccauguuguccaggcugguc

SEQ ID NO: 1145798 - RNA, 24 nt, Human
ugccauguuguccaggcuggucuu

SEQ ID NO: 1145799 - RNA, 23 nt, Human
uggaacuacagaucacaccacca

SEQ ID NO: 1145800 - RNA, 21 nt, Human
uggcucacgguagccucagca

SEQ ID NO: 1145801 - RNA, 20 nt, Human
ugggcucaagugaacugccu

SEQ ID NO: 1145802 - RNA, 23 nt, Human
ugggucuugccauguuguccagg

SEQ ID NO: 1145803 - RNA, 23 nt, Human
uguagaaaugggucuugccaugu

SEQ ID NO: 1145804 - RNA, 21 nt, Human
ugucacccaggcugcagugca

SEQ ID NO: 1145805 - RNA, 24 nt, Human
uguccaggcuggucuugagcuccu

SEQ ID NO: 1145806 - RNA, 22 nt, Human
uugagccacugcaaacggcccu

SEQ ID NO: 1145807 - RNA, 20 nt, Human
uuuaaaaucugucuucccuu

SEQ ID NO: 1145808 - RNA, 22 nt, Human
uuuauguuuaccuccauuuguu

SEQ ID NO: 1145809 - RNA, 20 nt, Human
uuucuuggauucacuguuuc

SEQ ID NO: 1145810 - RNA, 24 nt, Human
uuuguauuuuuguagaaauggguc

SEQ ID NO: 1145811 - RNA, 21 nt, Human
aauagaagacuucagucugga

SEQ ID NO: 1145812 - RNA, 26 nt, Human
agaaaggaaagggcaagguucacuga

SEQ ID NO: 1145813 - RNA, 21 nt, Human
augcacaaguaauagaaagga

SEQ ID NO: 1145814 - RNA, 18 nt, Human
cacugaaucacagcagcc

SEQ ID NO: 1145815 - RNA, 20 nt, Human
cacugaaucacagcagccgg

SEQ ID NO: 1145816 - RNA, 23 nt, Human
cagcagugcccaggacuguucaa

SEQ ID NO: 1145817 - RNA, 24 nt, Human
caguauggacuauauuugucucuc

SEQ ID NO: 1145818 - RNA, 19 nt, Human
cagugcccaggacuguuca

SEQ ID NO: 1145819 - RNA, 23 nt, Human
cuuaaaacauugucagaggugag

SEQ ID NO: 1145820 - RNA, 19 nt, Human
gauacaaaggcgacuuaaa

SEQ ID NO: 1145821 - RNA, 21 nt, Human
uccuuucuccccaucuuuggg

SEQ ID NO: 1145822 - RNA, 19 nt, Human
uggcaaaucagaaaagggg

SEQ ID NO: 1145823 - RNA, 24 nt, Human
uugucucuccuuuuccuuucuccc

SEQ ID NO: 1145824 - RNA, 24 nt, Human
aaaaacagcuccuggauucguuga

SEQ ID NO: 1145825 - RNA, 20 nt, Human
aaaaauguacauucuguugu

SEQ ID NO: 1145826 - RNA, 18 nt, Human
aaagcuuuuccaagucca

SEQ ID NO: 1145827 - RNA, 22 nt, Human
aacagucagugagaauccuguc

SEQ ID NO: 1145828 - RNA, 21 nt, Human
aaguuuaaagauuuccaagcu

SEQ ID NO: 1145829 - RNA, 22 nt, Human
accaucucaucuucuugagccu

SEQ ID NO: 1145830 - RNA, 19 nt, Human
agagucauucuggaaaagg

SEQ ID NO: 1145831 - RNA, 19 nt, Human
agggguaacagucagugag

SEQ ID NO: 1145832 - RNA, 19 nt, Human
auucuggaaaagguuguuc

SEQ ID NO: 1145833 - RNA, 18 nt, Human
caaaaaacagcuccugga

SEQ ID NO: 1145834 - RNA, 22 nt, Human
caaaaaacagcuccuggauucg

SEQ ID NO: 1145835 - RNA, 21 nt, Human
cacuacuuuagcugcguccca

SEQ ID NO: 1145836 - RNA, 20 nt, Human
cagagauucugguacauucu

SEQ ID NO: 1145837 - RNA, 18 nt, Human
cagcagucaaaacagcgc

SEQ ID NO: 1145838 - RNA, 22 nt, Human
caggacugucugacuccugccu

SEQ ID NO: 1145839 - RNA, 23 nt, Human
cagggugaauauuauuauccccu

SEQ ID NO: 1145840 - RNA, 20 nt, Human
ccguccaggcagcccagagg

SEQ ID NO: 1145841 - RNA, 22 nt, Human
cuccacacugcuccucuggacu

SEQ ID NO: 1145842 - RNA, 23 nt, Human
cuccacacugcuccucuggacuc

SEQ ID NO: 1145843 - RNA, 24 nt, Human
cugggcaaaagcauugccauucau

SEQ ID NO: 1145844 - RNA, 19 nt, Human
gaauaaagaaaagcuggca

SEQ ID NO: 1145845 - RNA, 19 nt, Human
gcaaagcuuuuccaagucc

SEQ ID NO: 1145846 - RNA, 21 nt, Human
gcaaagcuuuuccaaguccaa

SEQ ID NO: 1145847 - RNA, 22 nt, Human
gccuguuuauuuuucuaauccu

SEQ ID NO: 1145848 - RNA, 20 nt, Human
gugggcaaagcuuuuccaag

SEQ ID NO: 1145849 - RNA, 19 nt, Human
uaaauaacacucagcuaaa

SEQ ID NO: 1145850 - RNA, 25 nt, Human
uaaguaggaaaaaagauacaacauc

SEQ ID NO: 1145851 - RNA, 18 nt, Human
uacauucucucuuuuucu

SEQ ID NO: 1145852 - RNA, 22 nt, Human
uagccuaauagucuauuaagua

SEQ ID NO: 1145853 - RNA, 23 nt, Human
uagugcuauaaauuucccucuua

SEQ ID NO: 1145854 - RNA, 20 nt, Human
ucaaaaaacagcuccuggau

SEQ ID NO: 1145855 - RNA, 18 nt, Human
ucacaagaggcuuucaca

SEQ ID NO: 1145856 - RNA, 18 nt, Human
ucauuccagcaacaggau

SEQ ID NO: 1145857 - RNA, 19 nt, Human
ucccagagauucugguaca

SEQ ID NO: 1145858 - RNA, 21 nt, Human
ucccuggagucguagcucccg

SEQ ID NO: 1145859 - RNA, 21 nt, Human
uccuccacacugcuccucugg

SEQ ID NO: 1145860 - RNA, 18 nt, Human
ugaaacagacuuuuaaaa

SEQ ID NO: 1145861 - RNA, 26 nt, Human
ugaaagacaaaacuuuuauacuaaga

SEQ ID NO: 1145862 - RNA, 22 nt, Human
ugacugaauuuccuaaucuuga

SEQ ID NO: 1145863 - RNA, 21 nt, Human
ugcccauaugacaugcuuuau

SEQ ID NO: 1145864 - RNA, 25 nt, Human
ugcuauaaauuucccucuuaacacu

SEQ ID NO: 1145865 - RNA, 18 nt, Human
ugggcaaaagcauugcca

SEQ ID NO: 1145866 - RNA, 22 nt, Human
ugggguuuauuugcucuugguu

SEQ ID NO: 1145867 - RNA, 19 nt, Human
uguacuggugacuguagaa

SEQ ID NO: 1145868 - RNA, 20 nt, Human
uuacugaggaguguuuuacu

SEQ ID NO: 1145869 - RNA, 23 nt, Human
uuacugaggaguguuuuacuucc

SEQ ID NO: 1145870 - RNA, 23 nt, Human
uuacugguucuugugaaucucuu

SEQ ID NO: 1145871 - RNA, 22 nt, Human
uucaauuacuguuuauaagacc

SEQ ID NO: 1145872 - RNA, 22 nt, Human
uucaguugaguuucacaagagg

SEQ ID NO: 1145873 - RNA, 25 nt, Human
uuguucaauuuccauguaguugugu

SEQ ID NO: 1145874 - RNA, 23 nt, Human
uuguuccaacgguuaagcucgga

SEQ ID NO: 1145875 - RNA, 23 nt, Human
aggguugaaugguggaauccaag

SEQ ID NO: 1145876 - RNA, 19 nt, Human
aucuguggcgcauuuccuu

SEQ ID NO: 1145877 - RNA, 19 nt, Human
cagaucccaggcccuggga

SEQ ID NO: 1145878 - RNA, 24 nt, Human
caggugagauccaggaaaauguau

SEQ ID NO: 1145879 - RNA, 21 nt, Human
ccuggccagaucccaggcccu

SEQ ID NO: 1145880 - RNA, 19 nt, Human
cucccuggccagaucccag

SEQ ID NO: 1145881 - RNA, 22 nt, Human
cuugccgaagcuacuuccucca

SEQ ID NO: 1145882 - RNA, 21 nt, Human
gaaugguggaauccaaggccc

SEQ ID NO: 1145883 - RNA, 19 nt, Human
gcccuggagcagaugggcc

SEQ ID NO: 1145884 - RNA, 21 nt, Human
gcccuggagcagaugggccag

SEQ ID NO: 1145885 - RNA, 23 nt, Human
ucaggguugaaugguggaaucca

SEQ ID NO: 1145886 - RNA, 20 nt, Human
ucccaggcccugggagcggg

SEQ ID NO: 1145887 - RNA, 21 nt, Human
ucccuggccagaucccaggcc

SEQ ID NO: 1145888 - RNA, 23 nt, Human
ucccuggccagaucccaggcccu

SEQ ID NO: 1145889 - RNA, 18 nt, Human
ucgggcaggggaaauuca

SEQ ID NO: 1145890 - RNA, 20 nt, Human
ucgggcaggggaaauucaca

SEQ ID NO: 1145891 - RNA, 19 nt, Human
ugaaaccucggcaagaguc

SEQ ID NO: 1145892 - RNA, 25 nt, Human
uggccagaucccaggcccugggagc

SEQ ID NO: 1145893 - RNA, 18 nt, Human
ugggagcggggacacacu

SEQ ID NO: 1145894 - RNA, 21 nt, Human
ugucagcaaaguuugccuuug

SEQ ID NO: 1145895 - RNA, 18 nt, Human
uuccagcccucccuggcc

SEQ ID NO: 1145896 - RNA, 23 nt, Human
uuggccagcagcaagagucuucu

SEQ ID NO: 1145897 - RNA, 18 nt, Human
aaaaagugguaaaaaucu

SEQ ID NO: 1145898 - RNA, 22 nt, Human
aaaagaacauacacuccacauu

SEQ ID NO: 1145899 - RNA, 24 nt, Human
aaaaggcauauauuacugugaaaa

SEQ ID NO: 1145900 - RNA, 20 nt, Human
aaacaaggcauauucaugua

SEQ ID NO: 1145901 - RNA, 23 nt, Human
acaagauaauaaauaaguuaaau

SEQ ID NO: 1145902 - RNA, 22 nt, Human
acauaauaaaagaauauauauc

SEQ ID NO: 1145903 - RNA, 20 nt, Human
accaagugaaguuacaaaag

SEQ ID NO: 1145904 - RNA, 20 nt, Human
acugugaaaagaacauacac

SEQ ID NO: 1145905 - RNA, 18 nt, Human
agaacauacacuccacau

SEQ ID NO: 1145906 - RNA, 19 nt, Human
agacuccccccccacuccc

SEQ ID NO: 1145907 - RNA, 23 nt, Human
agcugcuggugcuggguugauuu

SEQ ID NO: 1145908 - RNA, 22 nt, Human
aggaaagaaauuaaugaaauaa

SEQ ID NO: 1145909 - RNA, 23 nt, Human
aggaaagaaauuaaugaaauaaa

SEQ ID NO: 1145910 - RNA, 21 nt, Human
aggcacugugagacucccccc

SEQ ID NO: 1145911 - RNA, 20 nt, Human
auaaccaagugaaguuacaa

SEQ ID NO: 1145912 - RNA, 23 nt, Human
caguugaacccauccuacauuca

SEQ ID NO: 1145913 - RNA, 21 nt, Human
cguacaaacuaaagcuaccgc

SEQ ID NO: 1145914 - RNA, 20 nt, Human
cucaaacuacuuccacagca

SEQ ID NO: 1145915 - RNA, 19 nt, Human
cuccccccccacuccccgu

SEQ ID NO: 1145916 - RNA, 23 nt, Human
cuggugcuggguugauuuuuccu

SEQ ID NO: 1145917 - RNA, 21 nt, Human
cugugagacuccccccccacu

SEQ ID NO: 1145918 - RNA, 18 nt, Human
cuguucaagugaagagau

SEQ ID NO: 1145919 - RNA, 20 nt, Human
gaaauaaauauuacauacaa

SEQ ID NO: 1145920 - RNA, 18 nt, Human
gggcccuuccaaaggcac

SEQ ID NO: 1145921 - RNA, 23 nt, Human
gugaaaagaacauacacuccaca

SEQ ID NO: 1145922 - RNA, 21 nt, Human
gugguugguagcugcuggugc

SEQ ID NO: 1145923 - RNA, 25 nt, Human
uaaaguuggaauuagaaaagcaugc

SEQ ID NO: 1145924 - RNA, 26 nt, Human
uacagucacaauuuguagugagcuga

SEQ ID NO: 1145925 - RNA, 23 nt, Human
ucauuuacaauaaaauaaccaag

SEQ ID NO: 1145926 - RNA, 20 nt, Human
ucgggcccuuccaaaggcac

SEQ ID NO: 1145927 - RNA, 24 nt, Human
ucuguaauuaaacaaggccggggc

SEQ ID NO: 1145928 - RNA, 23 nt, Human
ugaaaagaacauacacuccacau

SEQ ID NO: 1145929 - RNA, 26 nt, Human
ugaaauaaauauuacauacaaucucu

SEQ ID NO: 1145930 - RNA, 18 nt, Human
ugaaguuggaugggcuac

SEQ ID NO: 1145931 - RNA, 18 nt, Human
ugcuccaacuguaccuac

SEQ ID NO: 1145932 - RNA, 24 nt, Human
uggugguugguagcugcuggugcu

SEQ ID NO: 1145933 - RNA, 21 nt, Human
uguuuacagucacaauuugua

SEQ ID NO: 1145934 - RNA, 19 nt, Human
uuaaggcaaguucgggccc

SEQ ID NO: 1145935 - RNA, 24 nt, Human
uuagaaaagcaugccacauuucag

SEQ ID NO: 1145936 - RNA, 21 nt, Human
uucaaaaaccuacuucugucc

SEQ ID NO: 1145937 - RNA, 21 nt, Human
uucacaagauaauaaauaagu

SEQ ID NO: 1145938 - RNA, 19 nt, Human
cgaccgcccggagcccagc

SEQ ID NO: 1145939 - RNA, 23 nt, Human
cgaggcgggcggcgccagggcca

SEQ ID NO: 1145940 - RNA, 21 nt, Human
gcgggcggaggcggccccucu

SEQ ID NO: 1145941 - RNA, 22 nt, Human
ggaggcggccccucugcucggc

SEQ ID NO: 1145942 - RNA, 18 nt, Human
gggcggaggcggccccuc

SEQ ID NO: 1145943 - RNA, 18 nt, Human
uaaguaggcaaauuccaa

SEQ ID NO: 1145944 - RNA, 19 nt, Human
uagguaaguaggcaaauuc

SEQ ID NO: 1145945 - RNA, 22 nt, Human
acccaggucacaauacccaaaa

SEQ ID NO: 1145946 - RNA, 24 nt, Human
accuauggguggcaggaauaugcu

SEQ ID NO: 1145947 - RNA, 20 nt, Human
acuugauucccuguuguauu

SEQ ID NO: 1145948 - RNA, 27 nt, Human
agacaaaagaggagucccaucaccuag

SEQ ID NO: 1145949 - RNA, 22 nt, Human
agagaacaggaccaggagugag

SEQ ID NO: 1145950 - RNA, 22 nt, Human
agagauaugucaugaggccccc

SEQ ID NO: 1145951 - RNA, 22 nt, Human
agagccaagcaguagaaaagag

SEQ ID NO: 1145952 - RNA, 21 nt, Human
aggcaaaagaggagaguccca

SEQ ID NO: 1145953 - RNA, 20 nt, Human
aggcaaauguguaacuucga

SEQ ID NO: 1145954 - RNA, 19 nt, Human
agguaagucacauaaccua

SEQ ID NO: 1145955 - RNA, 21 nt, Human
aucacaauuucuccuugggca

SEQ ID NO: 1145956 - RNA, 20 nt, Human
aucaccuaggugaggggucc

SEQ ID NO: 1145957 - RNA, 18 nt, Human
aucugucacaaggcucuc

SEQ ID NO: 1145958 - RNA, 18 nt, Human
augucacaauacccacag

SEQ ID NO: 1145959 - RNA, 22 nt, Human
augucacaauccccccuuuugg

SEQ ID NO: 1145960 - RNA, 23 nt, Human
augucacaauuaccccagugggc

SEQ ID NO: 1145961 - RNA, 22 nt, Human
augucacgauccccccuuuugg

SEQ ID NO: 1145962 - RNA, 24 nt, Human
augugcagagaacaggaccaggag

SEQ ID NO: 1145963 - RNA, 20 nt, Human
caaaagaggagucccaucac

SEQ ID NO: 1145964 - RNA, 22 nt, Human
cacaauacccacaguauguggg

SEQ ID NO: 1145965 - RNA, 22 nt, Human
cagcacagggacugaaggucag

SEQ ID NO: 1145966 - RNA, 22 nt, Human
cagcagccucuuagucuucccc

SEQ ID NO: 1145967 - RNA, 23 nt, Human
cagcaggggugggugcuccaacc

SEQ ID NO: 1145968 - RNA, 22 nt, Human
caggagaaagaggagaguccca

SEQ ID NO: 1145969 - RNA, 18 nt, Human
caguagaaaagagucaca

SEQ ID NO: 1145970 - RNA, 23 nt, Human
cagugcugacuuacagaaggaag

SEQ ID NO: 1145971 - RNA, 23 nt, Human
caucacaauuucuccuugggcag

SEQ ID NO: 1145972 - RNA, 20 nt, Human
caucacaguggugcugggcc

SEQ ID NO: 1145973 - RNA, 23 nt, Human
cauuaugucacaauacccacagu

SEQ ID NO: 1145974 - RNA, 22 nt, Human
ccaagacaaaagaggaguccca

SEQ ID NO: 1145975 - RNA, 25 nt, Human
ccacaguaugugggaccaagacaaa

SEQ ID NO: 1145976 - RNA, 18 nt, Human
ccagcaggggugggugcu

SEQ ID NO: 1145977 - RNA, 23 nt, Human
cccacaugugcagagaacaggac

SEQ ID NO: 1145978 - RNA, 23 nt, Human
cccaucacccaggucacaauacc

SEQ ID NO: 1145979 - RNA, 22 nt, Human
ccccaggaagggucuuguccag

SEQ ID NO: 1145980 - RNA, 22 nt, Human
ccccccaggaagggucuugucc

SEQ ID NO: 1145981 - RNA, 18 nt, Human
ccccuugugggcagggcu

SEQ ID NO: 1145982 - RNA, 18 nt, Human
ccuaggugaugaauccag

SEQ ID NO: 1145983 - RNA, 22 nt, Human
ccuuggugcugggcccagcaau

SEQ ID NO: 1145984 - RNA, 20 nt, Human
cgacuugguguuggggccag

SEQ ID NO: 1145985 - RNA, 18 nt, Human
cucacucuucaagucucu

SEQ ID NO: 1145986 - RNA, 23 nt, Human
cuccccugugggcagaaccuugu

SEQ ID NO: 1145987 - RNA, 21 nt, Human
cugucacaaggcucucuguga

SEQ ID NO: 1145988 - RNA, 18 nt, Human
cuguucacuugauucccu

SEQ ID NO: 1145989 - RNA, 18 nt, Human
cuuggugcugggcccagc

SEQ ID NO: 1145990 - RNA, 21 nt, Human
cuuggugcugggcccagcaau

SEQ ID NO: 1145991 - RNA, 21 nt, Human
cuuuuggcuggggccaggcac

SEQ ID NO: 1145992 - RNA, 20 nt, Human
gaacaggaccaggagugagu

SEQ ID NO: 1145993 - RNA, 23 nt, Human
gagaaaggaaccagcaugugcua

SEQ ID NO: 1145994 - RNA, 19 nt, Human
gagcagggcccaggcagga

SEQ ID NO: 1145995 - RNA, 19 nt, Human
gcagaacaggagagucaca

SEQ ID NO: 1145996 - RNA, 21 nt, Human
gcagcagccucuuagucuucc

SEQ ID NO: 1145997 - RNA, 20 nt, Human
gcagggcccaggcaggagcc

SEQ ID NO: 1145998 - RNA, 22 nt, Human
gcagugaggcagggguagggau

SEQ ID NO: 1145999 - RNA, 21 nt, Human
gccaguguuucuacacagugc

SEQ ID NO: 1146000 - RNA, 18 nt, Human
ggaccaagacaaaagagg

SEQ ID NO: 1146001 - RNA, 19 nt, Human
ggccagcaauaggucacaa

SEQ ID NO: 1146002 - RNA, 21 nt, Human
ggccagcaauaggucacaauc

SEQ ID NO: 1146003 - RNA, 23 nt, Human
gggcagagccaagcaguagaaaa

SEQ ID NO: 1146004 - RNA, 24 nt, Human
gggcagggcucaggaaggagaggu

SEQ ID NO: 1146005 - RNA, 22 nt, Human
uaaggcaccacugaguaggaaa

SEQ ID NO: 1146006 - RNA, 20 nt, Human
uacacagugcuuucauugga

SEQ ID NO: 1146007 - RNA, 18 nt, Human
uacccacaguauguggga

SEQ ID NO: 1146008 - RNA, 21 nt, Human
ucacccagguguugggcccag

SEQ ID NO: 1146009 - RNA, 24 nt, Human
uccaaguucauuagguuuuuggca

SEQ ID NO: 1146010 - RNA, 26 nt, Human
uccccugugggcagaaccuuguaggu

SEQ ID NO: 1146011 - RNA, 19 nt, Human
ucccuguuguauuguacac

SEQ ID NO: 1146012 - RNA, 21 nt, Human
ucuccuugggcagagccaagc

SEQ ID NO: 1146013 - RNA, 28 nt, Human
ucucugugagcagggcccaggcaggagc

SEQ ID NO: 1146014 - RNA, 22 nt, Human
ucugcugggauccccaucaaca

SEQ ID NO: 1146015 - RNA, 23 nt, Human
ucugucacaaggcucucugugag

SEQ ID NO: 1146016 - RNA, 22 nt, Human
ucuugaauuagaugcuuaguuc

SEQ ID NO: 1146017 - RNA, 19 nt, Human
ucuuguggguugcaguuuc

SEQ ID NO: 1146018 - RNA, 21 nt, Human
ucuuguggguugcaguuucuu

SEQ ID NO: 1146019 - RNA, 21 nt, Human
ugacaugucacgauccccccu

SEQ ID NO: 1146020 - RNA, 23 nt, Human
ugagcagggcccaggcaggagcc

SEQ ID NO: 1146021 - RNA, 18 nt, Human
ugcaguuucuucaguggu

SEQ ID NO: 1146022 - RNA, 23 nt, Human
uggcccccccaggaagggucuug

SEQ ID NO: 1146023 - RNA, 23 nt, Human
ugggaccaagacaaaagaggagu

SEQ ID NO: 1146024 - RNA, 18 nt, Human
ugggauccccaucaacac

SEQ ID NO: 1146025 - RNA, 26 nt, Human
uggguucuguuauuauaaagagaagu

SEQ ID NO: 1146026 - RNA, 19 nt, Human
uggugcucauuauaauucc

SEQ ID NO: 1146027 - RNA, 20 nt, Human
ugguucuuggucuggauuua

SEQ ID NO: 1146028 - RNA, 20 nt, Human
uguacacuucaucuucaaau

SEQ ID NO: 1146029 - RNA, 25 nt, Human
uguagaagugagguucccuuuuguu

SEQ ID NO: 1146030 - RNA, 23 nt, Human
ugucacaaagcucccucugggua

SEQ ID NO: 1146031 - RNA, 26 nt, Human
ugucacaaggcucucugugagcaggg

SEQ ID NO: 1146032 - RNA, 19 nt, Human
ugucacagcaccuucucag

SEQ ID NO: 1146033 - RNA, 21 nt, Human
ugucacagcaccuucucaggg

SEQ ID NO: 1146034 - RNA, 18 nt, Human
ugucacuauacacccuga

SEQ ID NO: 1146035 - RNA, 22 nt, Human
ugucaugaggcccccuuguggg

SEQ ID NO: 1146036 - RNA, 21 nt, Human
uguccagcaggggugggugcu

SEQ ID NO: 1146037 - RNA, 19 nt, Human
ugugagcagggcccaggcc

SEQ ID NO: 1146038 - RNA, 19 nt, Human
uguguugcuuuguuucuug

SEQ ID NO: 1146039 - RNA, 20 nt, Human
uucacuuuuucuauaaguua

SEQ ID NO: 1146040 - RNA, 20 nt, Human
uucuaauaucccucuuccug

SEQ ID NO: 1146041 - RNA, 23 nt, Human
uucuauaaguuagauguguugcu

SEQ ID NO: 1146042 - RNA, 25 nt, Human
uucuuggucuggauuuauuuucauu

SEQ ID NO: 1146043 - RNA, 23 nt, Human
uugccuaaagagaggcuaagauc

SEQ ID NO: 1146044 - RNA, 24 nt, Human
uugugggcagggcucaggaaggag

SEQ ID NO: 1146045 - RNA, 22 nt, Human
uuuuuggcagaaugcaguuccu

SEQ ID NO: 1146046 - RNA, 22 nt, Human
aaaaagauucaaacaaugccca

SEQ ID NO: 1146047 - RNA, 19 nt, Human
aaacaaugcccagugcaca

SEQ ID NO: 1146048 - RNA, 23 nt, Human
aaacaaugcccagugcacaguac

SEQ ID NO: 1146049 - RNA, 18 nt, Human
aaaugugaacgcuguacc

SEQ ID NO: 1146050 - RNA, 19 nt, Human
aacucaggauugcuggguc

SEQ ID NO: 1146051 - RNA, 19 nt, Human
aagaauggguacugggugg

SEQ ID NO: 1146052 - RNA, 19 nt, Human
acaaggaaaaaucccacuu

SEQ ID NO: 1146053 - RNA, 22 nt, Human
acaggagacagagcauccuugc

SEQ ID NO: 1146054 - RNA, 20 nt, Human
acauauucccagaaugcgcc

SEQ ID NO: 1146055 - RNA, 21 nt, Human
accccaaaaugucaagggagc

SEQ ID NO: 1146056 - RNA, 20 nt, Human
acugggguucucucaggcaa

SEQ ID NO: 1146057 - RNA, 18 nt, Human
agacacauauucccagaa

SEQ ID NO: 1146058 - RNA, 22 nt, Human
agacacauauucccagaaugcg

SEQ ID NO: 1146059 - RNA, 26 nt, Human
agagguaggcacugaucucccaaggg

SEQ ID NO: 1146060 - RNA, 22 nt, Human
agcaagggguagaggaaaagga

SEQ ID NO: 1146061 - RNA, 24 nt, Human
aggcaggcagagcacuuggcauuu

SEQ ID NO: 1146062 - RNA, 20 nt, Human
aggcaggccagagcaagggg

SEQ ID NO: 1146063 - RNA, 23 nt, Human
aggccagagcaagggguagagga

SEQ ID NO: 1146064 - RNA, 19 nt, Human
aucccacuuggcuuccugu

SEQ ID NO: 1146065 - RNA, 22 nt, Human
aucucgggguccaagugaaccc

SEQ ID NO: 1146066 - RNA, 19 nt, Human
caacauccaguccaucauc

SEQ ID NO: 1146067 - RNA, 26 nt, Human
caaccaggccuuugccuuuggaaauc

SEQ ID NO: 1146068 - RNA, 22 nt, Human
caaggccacaucaaccaggccu

SEQ ID NO: 1146069 - RNA, 22 nt, Human
caagugaaccccaaaaugucaa

SEQ ID NO: 1146070 - RNA, 24 nt, Human
cacagcuggcuuugggucugcggc

SEQ ID NO: 1146071 - RNA, 18 nt, Human
cacagggccacagggggg

SEQ ID NO: 1146072 - RNA, 22 nt, Human
caccacaacccccgcccucccu

SEQ ID NO: 1146073 - RNA, 19 nt, Human
cacugucagcuuuggccac

SEQ ID NO: 1146074 - RNA, 21 nt, Human
cagacaccccaggaacaaggg

SEQ ID NO: 1146075 - RNA, 18 nt, Human
cagcgcagccugggaacc

SEQ ID NO: 1146076 - RNA, 18 nt, Human
caucaaccaggccuuugc

SEQ ID NO: 1146077 - RNA, 24 nt, Human
ccaacauccaguccaucaucagcu

SEQ ID NO: 1146078 - RNA, 27 nt, Human
ccaaucaggcuacaaauaagguuggca

SEQ ID NO: 1146079 - RNA, 19 nt, Human
ccacaacccccgcccuccc

SEQ ID NO: 1146080 - RNA, 21 nt, Human
ccacaacccccgcccucccua

SEQ ID NO: 1146081 - RNA, 20 nt, Human
ccacugcagguggauuucug

SEQ ID NO: 1146082 - RNA, 21 nt, Human
ccccagcauggccugugaagc

SEQ ID NO: 1146083 - RNA, 22 nt, Human
cccccacccaaucaggcuacaa

SEQ ID NO: 1146084 - RNA, 24 nt, Human
cccuugcugcagacaccccaggaa

SEQ ID NO: 1146085 - RNA, 18 nt, Human
ccuauaaucaacaugaga

SEQ ID NO: 1146086 - RNA, 21 nt, Human
ccucaugauugcuuuuuugcu

SEQ ID NO: 1146087 - RNA, 22 nt, Human
ccugggcuaggaggcacagggc

SEQ ID NO: 1146088 - RNA, 18 nt, Human
ccuugcugcagacacccc

SEQ ID NO: 1146089 - RNA, 25 nt, Human
cucaccacaacccccgcccucccua

SEQ ID NO: 1146090 - RNA, 22 nt, Human
cucacggccaccggguuuuguu

SEQ ID NO: 1146091 - RNA, 21 nt, Human
cucauccuccuuucacccuca

SEQ ID NO: 1146092 - RNA, 20 nt, Human
cucccuugcugcagacaccc

SEQ ID NO: 1146093 - RNA, 24 nt, Human
cucucaccacaacccccgcccucc

SEQ ID NO: 1146094 - RNA, 19 nt, Human
cucucagaaacaccauccg

SEQ ID NO: 1146095 - RNA, 19 nt, Human
cugggcuaggaggcacagg

SEQ ID NO: 1146096 - RNA, 20 nt, Human
cugggguucuggccccagca

SEQ ID NO: 1146097 - RNA, 18 nt, Human
cugggucuucagugcuuu

SEQ ID NO: 1146098 - RNA, 18 nt, Human
cuuccuccucuucacguc

SEQ ID NO: 1146099 - RNA, 26 nt, Human
cuuccuguuccaacauccaguccauc

SEQ ID NO: 1146100 - RNA, 21 nt, Human
gaaacugggguucucucaggc

SEQ ID NO: 1146101 - RNA, 24 nt, Human
gaaugcgcccgaggcucuuaccac

SEQ ID NO: 1146102 - RNA, 25 nt, Human
gagcacuuggcauuugcugggagac

SEQ ID NO: 1146103 - RNA, 19 nt, Human
gccacgccuuacagagaca

SEQ ID NO: 1146104 - RNA, 20 nt, Human
gcuaggaggcacagggcugg

SEQ ID NO: 1146105 - RNA, 23 nt, Human
ggaagaacagagauggccuauaa

SEQ ID NO: 1146106 - RNA, 20 nt, Human
ggaaggaacugugcuaggca

SEQ ID NO: 1146107 - RNA, 22 nt, Human
gggagcuggcaccacugcaggu

SEQ ID NO: 1146108 - RNA, 24 nt, Human
gugggagcuggcaccacugcaggu

SEQ ID NO: 1146109 - RNA, 20 nt, Human
guucucuucagugaggacag

SEQ ID NO: 1146110 - RNA, 24 nt, Human
uaaaugauagaugauacuccuccc

SEQ ID NO: 1146111 - RNA, 18 nt, Human
uaccacagcuccacagcu

SEQ ID NO: 1146112 - RNA, 24 nt, Human
uagcugcacccccacccaaucagg

SEQ ID NO: 1146113 - RNA, 25 nt, Human
uagcugcacccccacccaaucaggc

SEQ ID NO: 1146114 - RNA, 18 nt, Human
uaggaggcacagggcugg

SEQ ID NO: 1146115 - RNA, 21 nt, Human
uaggaggcacagggcuggggu

SEQ ID NO: 1146116 - RNA, 25 nt, Human
uauaaucaacaugagacacagugcc

SEQ ID NO: 1146117 - RNA, 21 nt, Human
ucaaacaaugcccagugcaca

SEQ ID NO: 1146118 - RNA, 19 nt, Human
ucaccacaacccccgcccu

SEQ ID NO: 1146119 - RNA, 26 nt, Human
ucaccacaacccccgcccucccuagg

SEQ ID NO: 1146120 - RNA, 18 nt, Human
ucagacacauauucccag

SEQ ID NO: 1146121 - RNA, 21 nt, Human
ucagcucauucuugugugccu

SEQ ID NO: 1146122 - RNA, 21 nt, Human
ucaguuccuugccuguuaaau

SEQ ID NO: 1146123 - RNA, 18 nt, Human
ucccagaaugcgcccgag

SEQ ID NO: 1146124 - RNA, 23 nt, Human
ucucuagaccagagguaggcacu

SEQ ID NO: 1146125 - RNA, 24 nt, Human
ucucugucucugucucucccuggu

SEQ ID NO: 1146126 - RNA, 18 nt, Human
ucugucucugucucuccc

SEQ ID NO: 1146127 - RNA, 18 nt, Human
ucuuaccacagcuccaca

SEQ ID NO: 1146128 - RNA, 23 nt, Human
ucuucacgucucucauccuccuu

SEQ ID NO: 1146129 - RNA, 23 nt, Human
ucuuccuccucuucacgucucuc

SEQ ID NO: 1146130 - RNA, 24 nt, Human
ugaaaaagauucaaacaaugccca

SEQ ID NO: 1146131 - RNA, 19 nt, Human
ugaacucaggauugcuggg

SEQ ID NO: 1146132 - RNA, 22 nt, Human
ugaacucaggauugcugggucu

SEQ ID NO: 1146133 - RNA, 19 nt, Human
ugaacuuccugagccguuc

SEQ ID NO: 1146134 - RNA, 19 nt, Human
ugacuuccugccgaacccc

SEQ ID NO: 1146135 - RNA, 19 nt, Human
ugagaggguugggcuuggu

SEQ ID NO: 1146136 - RNA, 20 nt, Human
ugauagaugauacuccuccc

SEQ ID NO: 1146137 - RNA, 21 nt, Human
ugccgaaccccauucagcacu

SEQ ID NO: 1146138 - RNA, 21 nt, Human
ugccuggaaccgacaggagac

SEQ ID NO: 1146139 - RNA, 21 nt, Human
ugccuuuggaaaucucuagac

SEQ ID NO: 1146140 - RNA, 19 nt, Human
ugcuaggcaggccagagca

SEQ ID NO: 1146141 - RNA, 20 nt, Human
uggccugguucuggccagug

SEQ ID NO: 1146142 - RNA, 21 nt, Human
uggccugguucuggccaguga

SEQ ID NO: 1146143 - RNA, 21 nt, Human
uggcuuugggucugcggcucg

SEQ ID NO: 1146144 - RNA, 23 nt, Human
ugggcuaggaggcacagggcucc

SEQ ID NO: 1146145 - RNA, 19 nt, Human
uggggaagaacagagaugg

SEQ ID NO: 1146146 - RNA, 21 nt, Human
ugggguucuggccccagcaug

SEQ ID NO: 1146147 - RNA, 18 nt, Human
ugugcagaugaaaugaau

SEQ ID NO: 1146148 - RNA, 19 nt, Human
ugugcagaugaaaugaauu

SEQ ID NO: 1146149 - RNA, 19 nt, Human
ugugcuaggcaggccagag

SEQ ID NO: 1146150 - RNA, 21 nt, Human
ugugcuaggcaggccagagca

SEQ ID NO: 1146151 - RNA, 22 nt, Human
uucacugucagcuuuggccacu

SEQ ID NO: 1146152 - RNA, 20 nt, Human
uugaacuuccugagccguuc

SEQ ID NO: 1146153 - RNA, 18 nt, Human
uuggaaaucucuagacca

SEQ ID NO: 1146154 - RNA, 26 nt, Human
uuggcaaacuuuuuuggaggagaagc

SEQ ID NO: 1146155 - RNA, 21 nt, Human
uuuuauagcugcacccccacc

SEQ ID NO: 1146156 - RNA, 20 nt, Human
aaaaaaauacacagacauuu

SEQ ID NO: 1146157 - RNA, 24 nt, Human
aaauaauuccaucaucucaaccug

SEQ ID NO: 1146158 - RNA, 22 nt, Human
aacaacaguacaccaaaaagag

SEQ ID NO: 1146159 - RNA, 22 nt, Human
aacagguuaaaaaugaagaaga

SEQ ID NO: 1146160 - RNA, 27 nt, Human
aacaguacacaaucccugucaacaacu

SEQ ID NO: 1146161 - RNA, 19 nt, Human
aauacauuauuuuaucuuu

SEQ ID NO: 1146162 - RNA, 23 nt, Human
acucuugccccugauaucacaaa

SEQ ID NO: 1146163 - RNA, 24 nt, Human
agaauacacccaguuggauaccag

SEQ ID NO: 1146164 - RNA, 19 nt, Human
agacaagagauacagaucu

SEQ ID NO: 1146165 - RNA, 21 nt, Human
agacaagagauacagaucuag

SEQ ID NO: 1146166 - RNA, 24 nt, Human
agagcaggaaggguaguaguggua

SEQ ID NO: 1146167 - RNA, 25 nt, Human
agccggcaggcagugcuucugaaca

SEQ ID NO: 1146168 - RNA, 24 nt, Human
auaucacaaacauuccagucuugu

SEQ ID NO: 1146169 - RNA, 21 nt, Human
auccuuguggcuuucuuucuc

SEQ ID NO: 1146170 - RNA, 18 nt, Human
caacaacaguacaccaaa

SEQ ID NO: 1146171 - RNA, 20 nt, Human
caacaguacaccaaaaagaa

SEQ ID NO: 1146172 - RNA, 22 nt, Human
caacaguacaccaaaaagagaa

SEQ ID NO: 1146173 - RNA, 20 nt, Human
caagaaaucaaauaucugag

SEQ ID NO: 1146174 - RNA, 19 nt, Human
caagagcaggaaggguagu

SEQ ID NO: 1146175 - RNA, 22 nt, Human
caagaggugcaaaaaugugcaa

SEQ ID NO: 1146176 - RNA, 23 nt, Human
caccaaaaagagaacuuugugau

SEQ ID NO: 1146177 - RNA, 21 nt, Human
caggaaggguaguaguguggc

SEQ ID NO: 1146178 - RNA, 21 nt, Human
caucugaggaagauccuaguu

SEQ ID NO: 1146179 - RNA, 21 nt, Human
ccugauaucacaaacauucca

SEQ ID NO: 1146180 - RNA, 23 nt, Human
cggcuuagaaaggggggcauggg

SEQ ID NO: 1146181 - RNA, 22 nt, Human
cguccuguaauugccgcuuagc

SEQ ID NO: 1146182 - RNA, 19 nt, Human
cuaacauuuacacagcaac

SEQ ID NO: 1146183 - RNA, 22 nt, Human
cucaacuuccuacuggccucaa

SEQ ID NO: 1146184 - RNA, 22 nt, Human
cuugccccugauaucacaaaca

SEQ ID NO: 1146185 - RNA, 20 nt, Human
gaaaggggggcaugggagca

SEQ ID NO: 1146186 - RNA, 22 nt, Human
gauaguauccacaaguaagcac

SEQ ID NO: 1146187 - RNA, 20 nt, Human
ggcaugggagcaugaccugc

SEQ ID NO: 1146188 - RNA, 18 nt, Human
gggcaugggagcaugacc

SEQ ID NO: 1146189 - RNA, 22 nt, Human
ggggcaugggagcaugaccugc

SEQ ID NO: 1146190 - RNA, 19 nt, Human
ggugaaugggggguacugc

SEQ ID NO: 1146191 - RNA, 18 nt, Human
gugaaugggggguacugc

SEQ ID NO: 1146192 - RNA, 20 nt, Human
uaacucuugccccugauauc

SEQ ID NO: 1146193 - RNA, 21 nt, Human
uacagagaaaauucaaagcua

SEQ ID NO: 1146194 - RNA, 22 nt, Human
uacagcaguacuugggucgaaa

SEQ ID NO: 1146195 - RNA, 25 nt, Human
uacagguugcagauauagaugcucu

SEQ ID NO: 1146196 - RNA, 24 nt, Human
uagaauacacccaguuggauacca

SEQ ID NO: 1146197 - RNA, 21 nt, Human
uaggaagcucuuuuucuguuu

SEQ ID NO: 1146198 - RNA, 26 nt, Human
uccacacuagaauacacccaguugga

SEQ ID NO: 1146199 - RNA, 20 nt, Human
uccauauuguuuuaagccag

SEQ ID NO: 1146200 - RNA, 24 nt, Human
ucucuuacagagaaaauucaaagc

SEQ ID NO: 1146201 - RNA, 23 nt, Human
ugagauacacaaauugaacgcgg

SEQ ID NO: 1146202 - RNA, 19 nt, Human
ugauaucacaaacauucca

SEQ ID NO: 1146203 - RNA, 21 nt, Human
ugcauuuugugggugaauggg

SEQ ID NO: 1146204 - RNA, 24 nt, Human
uggaaaaauagagaaugguuuucu

SEQ ID NO: 1146205 - RNA, 20 nt, Human
ugggagcaugaccugcaaua

SEQ ID NO: 1146206 - RNA, 24 nt, Human
uggugcuaggaaacagccggcagg

SEQ ID NO: 1146207 - RNA, 22 nt, Human
uguagcaucauuacaaaugaaa

SEQ ID NO: 1146208 - RNA, 18 nt, Human
ugugaaauaaagaaaaua

SEQ ID NO: 1146209 - RNA, 21 nt, Human
uuaagccagaucauacccaug

SEQ ID NO: 1146210 - RNA, 23 nt, Human
uugcugaauccuuguggcuuucu

SEQ ID NO: 1146211 - RNA, 21 nt, Human
agcucggcccggcgcggcccc

SEQ ID NO: 1146212 - RNA, 18 nt, Human
aggcgguggcgguggcgg

SEQ ID NO: 1146213 - RNA, 24 nt, Human
agguggcgcgggcgacagcucggc

SEQ ID NO: 1146214 - RNA, 20 nt, Human
auauguguguaugugugugu

SEQ ID NO: 1146215 - RNA, 21 nt, Human
auauguguguaugugugugug

SEQ ID NO: 1146216 - RNA, 20 nt, Human
augugugugugccagugugu

SEQ ID NO: 1146217 - RNA, 22 nt, Human
cacauuguggggauacaggaag

SEQ ID NO: 1146218 - RNA, 22 nt, Human
cagguuagcccauaaacaucaa

SEQ ID NO: 1146219 - RNA, 19 nt, Human
cauauguguguaugugugu

SEQ ID NO: 1146220 - RNA, 19 nt, Human
cauuguggggauacaggaa

SEQ ID NO: 1146221 - RNA, 21 nt, Human
ccagguuagcccauaaacauc

SEQ ID NO: 1146222 - RNA, 26 nt, Human
ccauauacaaauugugcauaugugug

SEQ ID NO: 1146223 - RNA, 20 nt, Human
cccaggcgguggcgguggcg

SEQ ID NO: 1146224 - RNA, 23 nt, Human
cgcgcgggccgcgggcgcguggg

SEQ ID NO: 1146225 - RNA, 19 nt, Human
cuccggugguugcugcggu

SEQ ID NO: 1146226 - RNA, 19 nt, Human
cuucgcgcagacguucucc

SEQ ID NO: 1146227 - RNA, 21 nt, Human
gacagcucggcccggcgcggc

SEQ ID NO: 1146228 - RNA, 19 nt, Human
gcagcggcggcgguggagg

SEQ ID NO: 1146229 - RNA, 21 nt, Human
gcagcggcggcgguggaggug

SEQ ID NO: 1146230 - RNA, 20 nt, Human
gccgcgggcgcguggggcag

SEQ ID NO: 1146231 - RNA, 20 nt, Human
gcggcggcgguggagguggc

SEQ ID NO: 1146232 - RNA, 21 nt, Human
gcggcggcgguggagguggcg

SEQ ID NO: 1146233 - RNA, 20 nt, Human
gcgguggcgguggcgguagc

SEQ ID NO: 1146234 - RNA, 22 nt, Human
gcuccuccagccgggaagcugu

SEQ ID NO: 1146235 - RNA, 21 nt, Human
ggaagcuguugcucacgcucc

SEQ ID NO: 1146236 - RNA, 21 nt, Human
ggaagcuguugcucacgcucc

SEQ ID NO: 1146237 - RNA, 20 nt, Human
ggcgcgggcgacagcucggc

SEQ ID NO: 1146238 - RNA, 20 nt, Human
guggcgguagcagcggcggc

SEQ ID NO: 1146239 - RNA, 20 nt, Human
guggcgguggcgguagcagc

SEQ ID NO: 1146240 - RNA, 19 nt, Human
uagcagcggcggcggugga

SEQ ID NO: 1146241 - RNA, 21 nt, Human
uaugugugugugccagugugu

SEQ ID NO: 1146242 - RNA, 18 nt, Human
ucucccgcgaucugcugc

SEQ ID NO: 1146243 - RNA, 18 nt, Human
uggcgguagcagcggcgg

SEQ ID NO: 1146244 - RNA, 26 nt, Human
uggcgguagcagcggcggcgguggag

SEQ ID NO: 1146245 - RNA, 24 nt, Human
uguaugugugugugccagugugua

SEQ ID NO: 1146246 - RNA, 19 nt, Human
ugugcauauguguguaugu

SEQ ID NO: 1146247 - RNA, 25 nt, Human
ugugcauauguguguaugugugugu

SEQ ID NO: 1146248 - RNA, 18 nt, Human
uguguguaugugugugug

SEQ ID NO: 1146249 - RNA, 19 nt, Human
ugugugugugccagugugu

SEQ ID NO: 1146250 - RNA, 18 nt, Human
uugugcauauguguguau

SEQ ID NO: 1146251 - RNA, 21 nt, Human
uugugcauauguguguaugug

SEQ ID NO: 1146252 - RNA, 19 nt, Human
aacagagagagccaugacc

SEQ ID NO: 1146253 - RNA, 22 nt, Human
aaccugccucccaguuccucca

SEQ ID NO: 1146254 - RNA, 24 nt, Human
acaagcuccuggccugaaacugua

SEQ ID NO: 1146255 - RNA, 20 nt, Human
accaaaccagagggagagac

SEQ ID NO: 1146256 - RNA, 21 nt, Human
acugcagccuccaaaccugcc

SEQ ID NO: 1146257 - RNA, 18 nt, Human
agagggagagacaccugc

SEQ ID NO: 1146258 - RNA, 18 nt, Human
agaguccugcccccuccu

SEQ ID NO: 1146259 - RNA, 22 nt, Human
agccaugaccaaaccagaggga

SEQ ID NO: 1146260 - RNA, 19 nt, Human
agcuugggggaagaggaag

SEQ ID NO: 1146261 - RNA, 18 nt, Human
aggaaguuaagaugggcu

SEQ ID NO: 1146262 - RNA, 22 nt, Human
aggcacugggcuccugaaaaca

SEQ ID NO: 1146263 - RNA, 28 nt, Human
aggugccaacaagcuccuggccugaaac

SEQ ID NO: 1146264 - RNA, 24 nt, Human
agguuugggaguuugcaccaggug

SEQ ID NO: 1146265 - RNA, 20 nt, Human
cacaggagaaauaguuacag

SEQ ID NO: 1146266 - RNA, 19 nt, Human
cacugaagugcucgcagcc

SEQ ID NO: 1146267 - RNA, 25 nt, Human
cacugggcucuuucccuuugugggu

SEQ ID NO: 1146268 - RNA, 23 nt, Human
cacuucucaccguacaggacacu

SEQ ID NO: 1146269 - RNA, 19 nt, Human
cacuuugcaugggcagggc

SEQ ID NO: 1146270 - RNA, 22 nt, Human
cacuuugcaugggcagggcugu

SEQ ID NO: 1146271 - RNA, 19 nt, Human
cagcaaaagcugacugaua

SEQ ID NO: 1146272 - RNA, 20 nt, Human
cagcacugccugcccaugcc

SEQ ID NO: 1146273 - RNA, 21 nt, Human
cagccucacagaucgaacgac

SEQ ID NO: 1146274 - RNA, 22 nt, Human
cagcuguagcucccucaggcau

SEQ ID NO: 1146275 - RNA, 19 nt, Human
ccacugcagccuccaaacc

SEQ ID NO: 1146276 - RNA, 23 nt, Human
ccaguggucccacugcagccucc

SEQ ID NO: 1146277 - RNA, 19 nt, Human
ccccacugccuggcaccau

SEQ ID NO: 1146278 - RNA, 21 nt, Human
cccccuccuccucgagacaaa

SEQ ID NO: 1146279 - RNA, 23 nt, Human
ccccuaaaucuuacugaaaugaa

SEQ ID NO: 1146280 - RNA, 23 nt, Human
cccuccuccucgagacaaaggag

SEQ ID NO: 1146281 - RNA, 21 nt, Human
cccugcauuuugcaaaagcug

SEQ ID NO: 1146282 - RNA, 23 nt, Human
ccuccagcacugccugcccaugc

SEQ ID NO: 1146283 - RNA, 20 nt, Human
ccuggcaccaugcuuggcuc

SEQ ID NO: 1146284 - RNA, 22 nt, Human
cgacuuccuacaaccugucacu

SEQ ID NO: 1146285 - RNA, 21 nt, Human
cuagagcuggcuuuuguugac

SEQ ID NO: 1146286 - RNA, 25 nt, Human
cuccagcacugccugcccaugcacc

SEQ ID NO: 1146287 - RNA, 27 nt, Human
cuccagcacugccugcccaugcacccc

SEQ ID NO: 1146288 - RNA, 20 nt, Human
cuccugaaaacaaagaugag

SEQ ID NO: 1146289 - RNA, 21 nt, Human
cucuccacugcauccccacug

SEQ ID NO: 1146290 - RNA, 25 nt, Human
cugaaacuguagccaggaggggcca

SEQ ID NO: 1146291 - RNA, 24 nt, Human
cugcagccuccaaaccugccuccc

SEQ ID NO: 1146292 - RNA, 22 nt, Human
cugcccaugcaccccuaaaucu

SEQ ID NO: 1146293 - RNA, 21 nt, Human
cugccuggcaccaugcuuggc

SEQ ID NO: 1146294 - RNA, 20 nt, Human
gacuuccuacaaccugucac

SEQ ID NO: 1146295 - RNA, 23 nt, Human
gagccaugaccaaaccagaggga

SEQ ID NO: 1146296 - RNA, 22 nt, Human
gagcucaaucccagccaacuaa

SEQ ID NO: 1146297 - RNA, 22 nt, Human
gcagccuccaaaccugccuccc

SEQ ID NO: 1146298 - RNA, 18 nt, Human
gcggauggccuaccuggu

SEQ ID NO: 1146299 - RNA, 18 nt, Human
gcuccugaaaacaaagau

SEQ ID NO: 1146300 - RNA, 25 nt, Human
ggaagaugggggugcaucagauagc

SEQ ID NO: 1146301 - RNA, 21 nt, Human
ggaguuugcaccaggugccaa

SEQ ID NO: 1146302 - RNA, 19 nt, Human
ggcagggcuguuugcucuc

SEQ ID NO: 1146303 - RNA, 22 nt, Human
ggccaguggucccacugcagcc

SEQ ID NO: 1146304 - RNA, 18 nt, Human
gggcuccugaaaacaaag

SEQ ID NO: 1146305 - RNA, 22 nt, Human
ggguggaggggaggcacugggc

SEQ ID NO: 1146306 - RNA, 23 nt, Human
gguggaggggaggcacugggcuc

SEQ ID NO: 1146307 - RNA, 21 nt, Human
uaaaucccaggcacugaaggg

SEQ ID NO: 1146308 - RNA, 22 nt, Human
uacagaaucugacacaugcuga

SEQ ID NO: 1146309 - RNA, 19 nt, Human
uagaacagagagagccaug

SEQ ID NO: 1146310 - RNA, 19 nt, Human
uagggguggaggggaggca

SEQ ID NO: 1146311 - RNA, 24 nt, Human
uauccuggguugcgggcuggaaga

SEQ ID NO: 1146312 - RNA, 24 nt, Human
ucccucagacagcgagcucaaucc

SEQ ID NO: 1146313 - RNA, 22 nt, Human
uccugcccccuccuccucgaga

SEQ ID NO: 1146314 - RNA, 23 nt, Human
ucuccacugcauccccacugccu

SEQ ID NO: 1146315 - RNA, 23 nt, Human
ucuggcagaguccugcccccucc

SEQ ID NO: 1146316 - RNA, 21 nt, Human
ugaggcuagcagcauccuucc

SEQ ID NO: 1146317 - RNA, 18 nt, Human
ugaggugcgcgcauggga

SEQ ID NO: 1146318 - RNA, 26 nt, Human
ugcaucagauagccaaggaaaguggu

SEQ ID NO: 1146319 - RNA, 24 nt, Human
uggcuuuccaacaccagauagcuu

SEQ ID NO: 1146320 - RNA, 27 nt, Human
ugggaagaugggggugcaucagauagc

SEQ ID NO: 1146321 - RNA, 21 nt, Human
uuagguaaaucccaggcacug

SEQ ID NO: 1146322 - RNA, 23 nt, Human
uugcagcaaaagcugacugauac

SEQ ID NO: 1146323 - RNA, 22 nt, Human
uugcucuccacugcauccccac

SEQ ID NO: 1146324 - RNA, 21 nt, Human
uugggggaagaggaaguuaag

SEQ ID NO: 1146325 - RNA, 26 nt, Human
uuguggggaccccucagguuugggag

SEQ ID NO: 1146326 - RNA, 26 nt, Human
aaagauauauacauccucuacauuuc

SEQ ID NO: 1146327 - RNA, 18 nt, Human
aagggacugaccuacugg

SEQ ID NO: 1146328 - RNA, 19 nt, Human
auccagaaacuuuaauugc

SEQ ID NO: 1146329 - RNA, 22 nt, Human
caaggggccacaguggcccacg

SEQ ID NO: 1146330 - RNA, 18 nt, Human
gcaaggggccacaguggc

SEQ ID NO: 1146331 - RNA, 27 nt, Human
ggaaagcaaauggaagggacugaccua

SEQ ID NO: 1146332 - RNA, 23 nt, Human
ucuacauuucauuuuuuuaucca

SEQ ID NO: 1146333 - RNA, 23 nt, Human
uggaagggacugaccuacuggug

SEQ ID NO: 1146334 - RNA, 20 nt, Human
uggacgcaaggggccacagu

SEQ ID NO: 1146335 - RNA, 19 nt, Human
agcgggagggaggccgccu

SEQ ID NO: 1146336 - RNA, 27 nt, Human
agcugugagccuccgccugcugagagg

SEQ ID NO: 1146337 - RNA, 24 nt, Human
aggccagagcucaaucugcaggga

SEQ ID NO: 1146338 - RNA, 23 nt, Human
ccacaaugcggucagcccucccu

SEQ ID NO: 1146339 - RNA, 24 nt, Human
ccacaaugcggucagcccucccua

SEQ ID NO: 1146340 - RNA, 18 nt, Human
gaccugaaguuaagaggc

SEQ ID NO: 1146341 - RNA, 25 nt, Human
gagaaaagagacuuuuaauuuaaag

SEQ ID NO: 1146342 - RNA, 25 nt, Human
gagacuuuuaauuuaaaguaaugau

SEQ ID NO: 1146343 - RNA, 23 nt, Human
ggugaaggccagagcucaaucug

SEQ ID NO: 1146344 - RNA, 21 nt, Human
gucacuuugcaccacaaugcg

SEQ ID NO: 1146345 - RNA, 21 nt, Human
uagagggucucuggggaaagg

SEQ ID NO: 1146346 - RNA, 21 nt, Human
uccccaagucaacacucgacu

SEQ ID NO: 1146347 - RNA, 22 nt, Human
uccccaagucaacacucgacuu

SEQ ID NO: 1146348 - RNA, 26 nt, Human
ucccgacagagcugugagccuccgcc

SEQ ID NO: 1146349 - RNA, 21 nt, Human
uccgccugcugagaggagggc

SEQ ID NO: 1146350 - RNA, 23 nt, Human
ucgacuugucacuuugcaccaca

SEQ ID NO: 1146351 - RNA, 20 nt, Human
aaaagcaucuccauuuauac

SEQ ID NO: 1146352 - RNA, 30 nt, Human
aaaaggcacaucaaggaaacaaauaucacc

SEQ ID NO: 1146353 - RNA, 22 nt, Human
aaacaaaaaugaaaagcaucuc

SEQ ID NO: 1146354 - RNA, 21 nt, Human
aaacacacaaaaaagcaaacu

SEQ ID NO: 1146355 - RNA, 19 nt, Human
aaagaaaaacgaaaaggca

SEQ ID NO: 1146356 - RNA, 22 nt, Human
aacaagaaucacaggaacucac

SEQ ID NO: 1146357 - RNA, 24 nt, Human
aagcaaacuguaaugagcagugac

SEQ ID NO: 1146358 - RNA, 23 nt, Human
aagccaauauggaaauuaaaaua

SEQ ID NO: 1146359 - RNA, 19 nt, Human
aagcgaacaagaaucacag

SEQ ID NO: 1146360 - RNA, 21 nt, Human
aagcgaacaagaaucacagga

SEQ ID NO: 1146361 - RNA, 28 nt, Human
aauccucucccccaaaacaaaaagcaaa

SEQ ID NO: 1146362 - RNA, 21 nt, Human
acaaacccaguccaaacaaaa

SEQ ID NO: 1146363 - RNA, 23 nt, Human
acacaccuaccuacagacauaca

SEQ ID NO: 1146364 - RNA, 18 nt, Human
acagagccugucguuaac

SEQ ID NO: 1146365 - RNA, 22 nt, Human
acagcaaacacacaaaaaagca

SEQ ID NO: 1146366 - RNA, 24 nt, Human
acaugcauacacgcuauggccugg

SEQ ID NO: 1146367 - RNA, 19 nt, Human
acccuaagugcuaagaaag

SEQ ID NO: 1146368 - RNA, 22 nt, Human
acgaaacucccagcuuccuaaa

SEQ ID NO: 1146369 - RNA, 22 nt, Human
acuaugugccaagcacugugcu

SEQ ID NO: 1146370 - RNA, 19 nt, Human
acucacccucagcuucacg

SEQ ID NO: 1146371 - RNA, 23 nt, Human
aggaaacaaauaucacuaaagaa

SEQ ID NO: 1146372 - RNA, 21 nt, Human
aggcuaaauccucucccccaa

SEQ ID NO: 1146373 - RNA, 21 nt, Human
auaaaacuuugaauccaucag

SEQ ID NO: 1146374 - RNA, 23 nt, Human
aucaagaauuuuuggccagaggu

SEQ ID NO: 1146375 - RNA, 21 nt, Human
auccucucccccaaaacaaaa

SEQ ID NO: 1146376 - RNA, 24 nt, Human
augaaaagcaucuccauuuauaca

SEQ ID NO: 1146377 - RNA, 23 nt, Human
auguccauccgucuacucacaug

SEQ ID NO: 1146378 - RNA, 23 nt, Human
caaaaaccccaaagaaaaacgaa

SEQ ID NO: 1146379 - RNA, 25 nt, Human
caaacaaaaaugaaaagcaucucca

SEQ ID NO: 1146380 - RNA, 20 nt, Human
caaacacacaaaaaagcaaa

SEQ ID NO: 1146381 - RNA, 18 nt, Human
caaacccaguccaaacaa

SEQ ID NO: 1146382 - RNA, 26 nt, Human
caaagaaaaacgaaaaggcacaucaa

SEQ ID NO: 1146383 - RNA, 21 nt, Human
caacagcauccggauuccaaa

SEQ ID NO: 1146384 - RNA, 27 nt, Human
caaccagcagucccaagguagacccaa

SEQ ID NO: 1146385 - RNA, 21 nt, Human
caagacucuacagcuaauuug

SEQ ID NO: 1146386 - RNA, 23 nt, Human
caagcuagguaaaccaccuugga

SEQ ID NO: 1146387 - RNA, 21 nt, Human
caaggcuucacacccuccucu

SEQ ID NO: 1146388 - RNA, 23 nt, Human
caauauggaaauuaaaauacuuu

SEQ ID NO: 1146389 - RNA, 19 nt, Human
cacaaaaucugggcuacag

SEQ ID NO: 1146390 - RNA, 22 nt, Human
cacaaacccaguccaaacaaaa

SEQ ID NO: 1146391 - RNA, 18 nt, Human
cacacccuccucuguggg

SEQ ID NO: 1146392 - RNA, 21 nt, Human
cacagcaaacacacaaaaaag

SEQ ID NO: 1146393 - RNA, 23 nt, Human
cacagcaaacacacaaaaaagca

SEQ ID NO: 1146394 - RNA, 21 nt, Human
cacugaauccucacaaaaccc

SEQ ID NO: 1146395 - RNA, 19 nt, Human
cacugggcuccacucccaa

SEQ ID NO: 1146396 - RNA, 25 nt, Human
cagaauccugcauuacuuaaccccc

SEQ ID NO: 1146397 - RNA, 24 nt, Human
cagcagucccaagguagacccaaa

SEQ ID NO: 1146398 - RNA, 22 nt, Human
cagcauccggauuccaaaaacc

SEQ ID NO: 1146399 - RNA, 24 nt, Human
cagcauccggauuccaaaaacccc

SEQ ID NO: 1146400 - RNA, 18 nt, Human
cagccacaccucagcaag

SEQ ID NO: 1146401 - RNA, 21 nt, Human
cagccucuaggagcuguucug

SEQ ID NO: 1146402 - RNA, 21 nt, Human
cagcuggcagggugggguugg

SEQ ID NO: 1146403 - RNA, 22 nt, Human
cagcuucacgaaacucccagcu

SEQ ID NO: 1146404 - RNA, 19 nt, Human
cagggcaggagauaaggag

SEQ ID NO: 1146405 - RNA, 22 nt, Human
caguauguggcuagccaaaggu

SEQ ID NO: 1146406 - RNA, 23 nt, Human
cagucccaagguagacccaaagg

SEQ ID NO: 1146407 - RNA, 24 nt, Human
ccaaaaaccccaaagaaaaacgaa

SEQ ID NO: 1146408 - RNA, 21 nt, Human
ccaaaacaaaaagcaaaccga

SEQ ID NO: 1146409 - RNA, 25 nt, Human
ccacaccucagcaaguggugggaac

SEQ ID NO: 1146410 - RNA, 20 nt, Human
ccaccuuggagaaauggggu

SEQ ID NO: 1146411 - RNA, 21 nt, Human
ccagccguggggucagggugg

SEQ ID NO: 1146412 - RNA, 19 nt, Human
cccaagguagacccaaagg

SEQ ID NO: 1146413 - RNA, 28 nt, Human
ccccaaagaaaaacgaaaaggcacagug

SEQ ID NO: 1146414 - RNA, 21 nt, Human
ccccauugcccccagcuggca

SEQ ID NO: 1146415 - RNA, 20 nt, Human
cccccaaaacaaaaagcaaa

SEQ ID NO: 1146416 - RNA, 22 nt, Human
cccccaaaacaaaaagcaaacc

SEQ ID NO: 1146417 - RNA, 20 nt, Human
cccuaagugcuaagaaagcu

SEQ ID NO: 1146418 - RNA, 24 nt, Human
cccuaagugcuaagaaagcuaggg

SEQ ID NO: 1146419 - RNA, 24 nt, Human
ccuacagacauacaguuucagucc

SEQ ID NO: 1146420 - RNA, 24 nt, Human
ccucacaaaacccuaagugcuaag

SEQ ID NO: 1146421 - RNA, 20 nt, Human
ccuuggagaaaugggguggc

SEQ ID NO: 1146422 - RNA, 23 nt, Human
ccuuguuuccuugggggcugaag

SEQ ID NO: 1146423 - RNA, 22 nt, Human
cgaaaaggcacaucaaggaaac

SEQ ID NO: 1146424 - RNA, 23 nt, Human
cggauuccaaaaaccccaaagaa

SEQ ID NO: 1146425 - RNA, 23 nt, Human
cggcgacaccuuguuugcagaau

SEQ ID NO: 1146426 - RNA, 19 nt, Human
cuaaaaggcacacaccuac

SEQ ID NO: 1146427 - RNA, 23 nt, Human
cuaggagcuguucugagaggcca

SEQ ID NO: 1146428 - RNA, 23 nt, Human
cuccagccguggggucagggugg

SEQ ID NO: 1146429 - RNA, 18 nt, Human
gagaggccaaaaucccug

SEQ ID NO: 1146430 - RNA, 25 nt, Human
gcacagcaaacacacaaaaaagcaa

SEQ ID NO: 1146431 - RNA, 23 nt, Human
gccacaccucagcaagugcgugg

SEQ ID NO: 1146432 - RNA, 23 nt, Human
gcccccagcuggcaggguggggu

SEQ ID NO: 1146433 - RNA, 24 nt, Human
gcggaacagaauccaaaggaauuu

SEQ ID NO: 1146434 - RNA, 23 nt, Human
gcuaaauccucucccccaaaaca

SEQ ID NO: 1146435 - RNA, 23 nt, Human
gcuccacaaaaucugggcuacag

SEQ ID NO: 1146436 - RNA, 21 nt, Human
gcugcacugggcuccacuccc

SEQ ID NO: 1146437 - RNA, 20 nt, Human
ggagcgucugguguccagcu

SEQ ID NO: 1146438 - RNA, 22 nt, Human
ggccgagaacugggcuacucua

SEQ ID NO: 1146439 - RNA, 19 nt, Human
gggaauguguaaguucaau

SEQ ID NO: 1146440 - RNA, 23 nt, Human
ggguggcagggaacacaggcugg

SEQ ID NO: 1146441 - RNA, 21 nt, Human
gugccaagacagggcaggaga

SEQ ID NO: 1146442 - RNA, 23 nt, Human
uaaaaggcacacaccuaccuaca

SEQ ID NO: 1146443 - RNA, 18 nt, Human
uaaaguauuucuucucca

SEQ ID NO: 1146444 - RNA, 27 nt, Human
uaaauccucucccccaaaacaaaaagc

SEQ ID NO: 1146445 - RNA, 24 nt, Human
uaacccccgaagugaaucacacaa

SEQ ID NO: 1146446 - RNA, 18 nt, Human
uacagagaugcuuugcag

SEQ ID NO: 1146447 - RNA, 19 nt, Human
uacaguuucaguccaacac

SEQ ID NO: 1146448 - RNA, 19 nt, Human
uacauuuggacggcgacac

SEQ ID NO: 1146449 - RNA, 24 nt, Human
uacuaugugccaagcacugugcua

SEQ ID NO: 1146450 - RNA, 22 nt, Human
uagacccaaagguauggcagaa

SEQ ID NO: 1146451 - RNA, 22 nt, Human
uauaaaaacuuggucucccacu

SEQ ID NO: 1146452 - RNA, 23 nt, Human
uauggaaauuaaaauacuuuuaa

SEQ ID NO: 1146453 - RNA, 19 nt, Human
uauugcccuucaacagcau

SEQ ID NO: 1146454 - RNA, 22 nt, Human
ucacaggaacucacccucagcu

SEQ ID NO: 1146455 - RNA, 23 nt, Human
ucacuaaagaaacugacuaauau

SEQ ID NO: 1146456 - RNA, 24 nt, Human
ucagcucuauuucucaaguuuuac

SEQ ID NO: 1146457 - RNA, 22 nt, Human
ucagggaaguaagaggcuaaau

SEQ ID NO: 1146458 - RNA, 22 nt, Human
ucauacugaugucaacccuguc

SEQ ID NO: 1146459 - RNA, 20 nt, Human
uccaaaaaccccaaagaaaa

SEQ ID NO: 1146460 - RNA, 23 nt, Human
uccaaaaaccccaaagaaaaacg

SEQ ID NO: 1146461 - RNA, 27 nt, Human
uccaaaaaccccaaagaaaaacgaaaa

SEQ ID NO: 1146462 - RNA, 25 nt, Human
uccaaaggaauuugacgaagucacc

SEQ ID NO: 1146463 - RNA, 20 nt, Human
uccacaaaaucugggcuaca

SEQ ID NO: 1146464 - RNA, 24 nt, Human
uccacaaaaucugggcuacagaga

SEQ ID NO: 1146465 - RNA, 18 nt, Human
uccacaccugcaaucuau

SEQ ID NO: 1146466 - RNA, 19 nt, Human
uccacagggauggauggga

SEQ ID NO: 1146467 - RNA, 25 nt, Human
ucccccaaaacaaaaagcaaaccga

SEQ ID NO: 1146468 - RNA, 20 nt, Human
ucccugaggacaggaggggc

SEQ ID NO: 1146469 - RNA, 22 nt, Human
uccuuggaugcacccauucaca

SEQ ID NO: 1146470 - RNA, 23 nt, Human
ucucaaggcuucacacccuccuc

SEQ ID NO: 1146471 - RNA, 19 nt, Human
ucuccaaacgcacagcaaa

SEQ ID NO: 1146472 - RNA, 19 nt, Human
ucuccaagcagggcccuga

SEQ ID NO: 1146473 - RNA, 18 nt, Human
ucugaaagacgucagugg

SEQ ID NO: 1146474 - RNA, 22 nt, Human
ucugcuauugcccuucaacagc

SEQ ID NO: 1146475 - RNA, 23 nt, Human
ucuguggguggaagugcacaugc

SEQ ID NO: 1146476 - RNA, 25 nt, Human
ugaagcgaacaagaaucacaggaac

SEQ ID NO: 1146477 - RNA, 23 nt, Human
ugaaucacacaaaauggcuguaa

SEQ ID NO: 1146478 - RNA, 18 nt, Human
ugaauccucacaaaaccc

SEQ ID NO: 1146479 - RNA, 19 nt, Human
ugacacguuggcaaccagc

SEQ ID NO: 1146480 - RNA, 22 nt, Human
ugacuaauaucuccaaacgcac

SEQ ID NO: 1146481 - RNA, 19 nt, Human
ugaggacaggaggggccac

SEQ ID NO: 1146482 - RNA, 25 nt, Human
ugagggagugucuuaaggcuccaca

SEQ ID NO: 1146483 - RNA, 21 nt, Human
ugaugucaacccugucaguga

SEQ ID NO: 1146484 - RNA, 20 nt, Human
ugauucugccucagccacac

SEQ ID NO: 1146485 - RNA, 19 nt, Human
ugcacguucuuucccuuuc

SEQ ID NO: 1146486 - RNA, 19 nt, Human
ugcccccagcuggcagggu

SEQ ID NO: 1146487 - RNA, 19 nt, Human
ugccucagccacaccucag

SEQ ID NO: 1146488 - RNA, 21 nt, Human
ugcuaaaguauuucuucucca

SEQ ID NO: 1146489 - RNA, 20 nt, Human
ugcuauugcccuucaacagc

SEQ ID NO: 1146490 - RNA, 20 nt, Human
uggaaaacaaagcagugcuc

SEQ ID NO: 1146491 - RNA, 19 nt, Human
uggaaacaugcagaacuaa

SEQ ID NO: 1146492 - RNA, 27 nt, Human
uggcagggugggguugguuuucucccc

SEQ ID NO: 1146493 - RNA, 19 nt, Human
uggcauugagggagugucu

SEQ ID NO: 1146494 - RNA, 27 nt, Human
uggccagaggugaggguggucgacacg

SEQ ID NO: 1146495 - RNA, 24 nt, Human
ugggguugguuuucuccaggaggc

SEQ ID NO: 1146496 - RNA, 24 nt, Human
uguaaugagcagugacacaaaccc

SEQ ID NO: 1146497 - RNA, 20 nt, Human
uucacuuuuauuaaaucuug

SEQ ID NO: 1146498 - RNA, 23 nt, Human
uuccaaaaaccccaaagaaaaac

SEQ ID NO: 1146499 - RNA, 20 nt, Human
uuccuugaggaaaacccuug

SEQ ID NO: 1146500 - RNA, 22 nt, Human
uuccuugggggcugaagucugg

SEQ ID NO: 1146501 - RNA, 24 nt, Human
uucuugcagccuuguuuccuuggg

SEQ ID NO: 1146502 - RNA, 21 nt, Human
uuggagaaaugggguggccac

SEQ ID NO: 1146503 - RNA, 21 nt, Human
uuuggccagaggugagggugg

SEQ ID NO: 1146504 - RNA, 20 nt, Human
aaaagggucuucugaugaug

SEQ ID NO: 1146505 - RNA, 22 nt, Human
aacugggcagcccccgaucccu

SEQ ID NO: 1146506 - RNA, 22 nt, Human
acagcaccggggagggccacac

SEQ ID NO: 1146507 - RNA, 23 nt, Human
acugggcagcagaggggacagag

SEQ ID NO: 1146508 - RNA, 22 nt, Human
agauagccuagucccagacccc

SEQ ID NO: 1146509 - RNA, 23 nt, Human
agcagcaguggugagggcaggcc

SEQ ID NO: 1146510 - RNA, 19 nt, Human
agcagcuucggugucuggu

SEQ ID NO: 1146511 - RNA, 24 nt, Human
agcaguggugagggcaggccuggg

SEQ ID NO: 1146512 - RNA, 22 nt, Human
aggagcugggaggcgugggggg

SEQ ID NO: 1146513 - RNA, 19 nt, Human
aggcacucgacuccacugg

SEQ ID NO: 1146514 - RNA, 18 nt, Human
agggaggagggagucugg

SEQ ID NO: 1146515 - RNA, 18 nt, Human
aggggacagagcuucuag

SEQ ID NO: 1146516 - RNA, 22 nt, Human
agucccagaccccagaccagaa

SEQ ID NO: 1146517 - RNA, 21 nt, Human
aucccuggcacuucugggcau

SEQ ID NO: 1146518 - RNA, 21 nt, Human
auggacaaaagggucuucuga

SEQ ID NO: 1146519 - RNA, 21 nt, Human
caaaauaccguacacggcgug

SEQ ID NO: 1146520 - RNA, 24 nt, Human
caccuuuagcuccuaucuuggucc

SEQ ID NO: 1146521 - RNA, 26 nt, Human
cacugggcagcagaggggacagagcu

SEQ ID NO: 1146522 - RNA, 21 nt, Human
cagaggggacagagcuucuag

SEQ ID NO: 1146523 - RNA, 24 nt, Human
cagcaccucucgggggaggacugg

SEQ ID NO: 1146524 - RNA, 24 nt, Human
cagcagaggggacagagcuucuag

SEQ ID NO: 1146525 - RNA, 18 nt, Human
cagcagcaguggugaggg

SEQ ID NO: 1146526 - RNA, 19 nt, Human
cagcagcaguggugagggc

SEQ ID NO: 1146527 - RNA, 21 nt, Human
cagcagcaguggugagggcag

SEQ ID NO: 1146528 - RNA, 24 nt, Human
cagcagcaguggugagggcaggcc

SEQ ID NO: 1146529 - RNA, 18 nt, Human
cauggaggucggugaagc

SEQ ID NO: 1146530 - RNA, 20 nt, Human
cauggaggucggugaagcug

SEQ ID NO: 1146531 - RNA, 18 nt, Human
ccacugggcagcagaggg

SEQ ID NO: 1146532 - RNA, 22 nt, Human
ccagaccccagaccagaaaucc

SEQ ID NO: 1146533 - RNA, 23 nt, Human
ccagcagcuucggugucuggugc

SEQ ID NO: 1146534 - RNA, 20 nt, Human
cccccuuccucaaggcuggg

SEQ ID NO: 1146535 - RNA, 18 nt, Human
ccccugcuacucagcccu

SEQ ID NO: 1146536 - RNA, 21 nt, Human
ccccugugagaggugcugccc

SEQ ID NO: 1146537 - RNA, 24 nt, Human
cccuaauuucuccucuuucuuucc

SEQ ID NO: 1146538 - RNA, 23 nt, Human
ccucaaccagguugguggccacc

SEQ ID NO: 1146539 - RNA, 21 nt, Human
ccucaaggcugggcaagcggc

SEQ ID NO: 1146540 - RNA, 21 nt, Human
ccucaucaccuccuaauguga

SEQ ID NO: 1146541 - RNA, 20 nt, Human
ccucugugaccucaucaccu

SEQ ID NO: 1146542 - RNA, 21 nt, Human
cgaaggcccagcagcuucggu

SEQ ID NO: 1146543 - RNA, 20 nt, Human
cgagcaagaccccaggcagc

SEQ ID NO: 1146544 - RNA, 23 nt, Human
cgcccucacuuggggaugaggau

SEQ ID NO: 1146545 - RNA, 22 nt, Human
cgcuuccgucaggagcugggag

SEQ ID NO: 1146546 - RNA, 21 nt, Human
cggcauggaggucggugaagc

SEQ ID NO: 1146547 - RNA, 22 nt, Human
cggggcagaggagcccucaacg

SEQ ID NO: 1146548 - RNA, 20 nt, Human
cugccccugcuacucagccc

SEQ ID NO: 1146549 - RNA, 20 nt, Human
cugccccugcuacucagccc

SEQ ID NO: 1146550 - RNA, 18 nt, Human
cugcuacucagcccugcc

SEQ ID NO: 1146551 - RNA, 19 nt, Human
gagcgaggcaggcuugggg

SEQ ID NO: 1146552 - RNA, 25 nt, Human
gagggcaggccuggguguccaggag

SEQ ID NO: 1146553 - RNA, 21 nt, Human
gaggucggugaagcuggacag

SEQ ID NO: 1146554 - RNA, 18 nt, Human
gcagugggaagaguuuga

SEQ ID NO: 1146555 - RNA, 19 nt, Human
gcauggcccuguggggcag

SEQ ID NO: 1146556 - RNA, 25 nt, Human
gcggggcagaggagcccucaacgag

SEQ ID NO: 1146557 - RNA, 18 nt, Human
ggaggucggugaagcugg

SEQ ID NO: 1146558 - RNA, 22 nt, Human
ggcgcuggcucaggagcccugc

SEQ ID NO: 1146559 - RNA, 24 nt, Human
ggcuuggggggggcgcuggcucag

SEQ ID NO: 1146560 - RNA, 18 nt, Human
gggaccccauggacaaaa

SEQ ID NO: 1146561 - RNA, 18 nt, Human
ggggguuucuuggcaaau

SEQ ID NO: 1146562 - RNA, 19 nt, Human
ggugcagugcucacaccuc

SEQ ID NO: 1146563 - RNA, 18 nt, Human
gugaaguggcugcgccug

SEQ ID NO: 1146564 - RNA, 20 nt, Human
gugaaguggcugcgccugca

SEQ ID NO: 1146565 - RNA, 31 nt, Human
guuggccucagcuacucuuccggccguaaca

SEQ ID NO: 1146566 - RNA, 19 nt, Human
uagaauggcggccccgaga

SEQ ID NO: 1146567 - RNA, 19 nt, Human
ucaggaauguguggcucac

SEQ ID NO: 1146568 - RNA, 21 nt, Human
ucugccucugugaccucauca

SEQ ID NO: 1146569 - RNA, 23 nt, Human
ucuggcauaccgugaaggacaaa

SEQ ID NO: 1146570 - RNA, 23 nt, Human
ucugugaucaucuuggggacagu

SEQ ID NO: 1146571 - RNA, 19 nt, Human
ucuugcagggaggagggag

SEQ ID NO: 1146572 - RNA, 18 nt, Human
ugaaggacaaacagugaa

SEQ ID NO: 1146573 - RNA, 20 nt, Human
ugaaggacaaacagugaagu

SEQ ID NO: 1146574 - RNA, 22 nt, Human
ugaaggacaaacagugaagugg

SEQ ID NO: 1146575 - RNA, 19 nt, Human
ugaaguggcugcgccugca

SEQ ID NO: 1146576 - RNA, 22 nt, Human
ugacagcaccggggagggccac

SEQ ID NO: 1146577 - RNA, 23 nt, Human
ugagaaaggcaaugucugggucc

SEQ ID NO: 1146578 - RNA, 20 nt, Human
ugagaaugggaccccaugga

SEQ ID NO: 1146579 - RNA, 19 nt, Human
ugaggccccgcccucacuu

SEQ ID NO: 1146580 - RNA, 18 nt, Human
ugcccugcggacgcaguc

SEQ ID NO: 1146581 - RNA, 21 nt, Human
uggcaggcggggggccccucu

SEQ ID NO: 1146582 - RNA, 21 nt, Human
uggcauaccgugaaggacaaa

SEQ ID NO: 1146583 - RNA, 23 nt, Human
uggcucaggagcccugccugaug

SEQ ID NO: 1146584 - RNA, 18 nt, Human
ugggaagaguuugacugu

SEQ ID NO: 1146585 - RNA, 19 nt, Human
ugggagcgaggcaggcuug

SEQ ID NO: 1146586 - RNA, 22 nt, Human
ugggaggcgugggggggcccuc

SEQ ID NO: 1146587 - RNA, 22 nt, Human
uggggacaguccccucaaccag

SEQ ID NO: 1146588 - RNA, 19 nt, Human
ugggguuggcuggcagaug

SEQ ID NO: 1146589 - RNA, 24 nt, Human
ugggguuggcuggcagaugguucc

SEQ ID NO: 1146590 - RNA, 22 nt, Human
uguccaggagcaggagaugcgg

SEQ ID NO: 1146591 - RNA, 19 nt, Human
ugugauggcccugucugga

SEQ ID NO: 1146592 - RNA, 22 nt, Human
uuuaggggcucaguauugagaa

SEQ ID NO: 1146593 - RNA, 18 nt, Human
aaacagaacacagcagaa

SEQ ID NO: 1146594 - RNA, 21 nt, Human
aaccuacacaaacagaacaca

SEQ ID NO: 1146595 - RNA, 20 nt, Human
aaggaaagguccgugcagca

SEQ ID NO: 1146596 - RNA, 24 nt, Human
agaaggaggggcgucgcagaggcc

SEQ ID NO: 1146597 - RNA, 26 nt, Human
agagaaggaggggcgucgcagaggcc

SEQ ID NO: 1146598 - RNA, 21 nt, Human
agagacggcagcccagccucc

SEQ ID NO: 1146599 - RNA, 24 nt, Human
agccaaacagcagaaaagaucgag

SEQ ID NO: 1146600 - RNA, 21 nt, Human
agcuguggggugagccgggcc

SEQ ID NO: 1146601 - RNA, 20 nt, Human
agggcugggcccccaggggc

SEQ ID NO: 1146602 - RNA, 22 nt, Human
caacgcccccaacuccuggucu

SEQ ID NO: 1146603 - RNA, 28 nt, Human
caagaacacagacacagguuggagaccc

SEQ ID NO: 1146604 - RNA, 24 nt, Human
caaucgacaacuuucuguucccua

SEQ ID NO: 1146605 - RNA, 20 nt, Human
cacaaacagaacacagcaga

SEQ ID NO: 1146606 - RNA, 20 nt, Human
caccagaguaaggacagagu

SEQ ID NO: 1146607 - RNA, 18 nt, Human
cacuccugccagcccugc

SEQ ID NO: 1146608 - RNA, 18 nt, Human
cacuccuggaggguaggg

SEQ ID NO: 1146609 - RNA, 20 nt, Human
cagcagaaacaggggagaag

SEQ ID NO: 1146610 - RNA, 20 nt, Human
cagcagagaagccgagccuc

SEQ ID NO: 1146611 - RNA, 22 nt, Human
cagcagagaagccgagccuccc

SEQ ID NO: 1146612 - RNA, 19 nt, Human
cagcucugucaagggguaa

SEQ ID NO: 1146613 - RNA, 24 nt, Human
ccccaggggcuggacgaccucucu

SEQ ID NO: 1146614 - RNA, 28 nt, Human
cccucaacgcccccaacuccuggucugu

SEQ ID NO: 1146615 - RNA, 19 nt, Human
cccugacugaggccucggg

SEQ ID NO: 1146616 - RNA, 23 nt, Human
ccgcacggagcgugcaaucuacu

SEQ ID NO: 1146617 - RNA, 18 nt, Human
ccggggcucugucugcau

SEQ ID NO: 1146618 - RNA, 21 nt, Human
ccucaugggcugagcuguggg

SEQ ID NO: 1146619 - RNA, 19 nt, Human
ccucccugcccuggcccug

SEQ ID NO: 1146620 - RNA, 23 nt, Human
ccucccugcccuggcccuguccc

SEQ ID NO: 1146621 - RNA, 19 nt, Human
ccuguggaaccuccucccc

SEQ ID NO: 1146622 - RNA, 20 nt, Human
ccuguggaaccuccuccccg

SEQ ID NO: 1146623 - RNA, 22 nt, Human
ccuugaggcagaggcuccuucc

SEQ ID NO: 1146624 - RNA, 20 nt, Human
cgacaacuuucuguucccua

SEQ ID NO: 1146625 - RNA, 19 nt, Human
cgggagggaccuugaggca

SEQ ID NO: 1146626 - RNA, 22 nt, Human
cgggccccgcagcccgcgcccc

SEQ ID NO: 1146627 - RNA, 21 nt, Human
cucccugcccuggcccugucc

SEQ ID NO: 1146628 - RNA, 23 nt, Human
cuccugccagcccugcucugcgc

SEQ ID NO: 1146629 - RNA, 22 nt, Human
cucugauaagccuuccaguucc

SEQ ID NO: 1146630 - RNA, 19 nt, Human
cuuccucccugcccuggcc

SEQ ID NO: 1146631 - RNA, 22 nt, Human
cuuccucccugcccuggcccug

SEQ ID NO: 1146632 - RNA, 19 nt, Human
cuuucucagcauggugaac

SEQ ID NO: 1146633 - RNA, 19 nt, Human
gagaaggaggggcgucgca

SEQ ID NO: 1146634 - RNA, 18 nt, Human
gagaguggggagggcggu

SEQ ID NO: 1146635 - RNA, 21 nt, Human
gcccacuccugccagcccugc

SEQ ID NO: 1146636 - RNA, 23 nt, Human
gcccauuccccggcuguccuccu

SEQ ID NO: 1146637 - RNA, 24 nt, Human
gcccccaggggcuggacgaccucu

SEQ ID NO: 1146638 - RNA, 23 nt, Human
gcgggcaauuuguuacacagcaa

SEQ ID NO: 1146639 - RNA, 23 nt, Human
gcucucuagggcugggcccccag

SEQ ID NO: 1146640 - RNA, 22 nt, Human
gcugcugcccagggagccguga

SEQ ID NO: 1146641 - RNA, 23 nt, Human
ggaaaggcuuaagagaaggaggg

SEQ ID NO: 1146642 - RNA, 24 nt, Human
ggccuccagccaaacagcagaaaa

SEQ ID NO: 1146643 - RNA, 18 nt, Human
ggcugcguggacucugau

SEQ ID NO: 1146644 - RNA, 20 nt, Human
gggagggcgguggggcugcg

SEQ ID NO: 1146645 - RNA, 22 nt, Human
gggcagcgcgagucccucgggc

SEQ ID NO: 1146646 - RNA, 20 nt, Human
gggcaugcacgagcucugcc

SEQ ID NO: 1146647 - RNA, 25 nt, Human
gugaaacaccagaguaaggacagag

SEQ ID NO: 1146648 - RNA, 21 nt, Human
uaaaaucacagugaaacacca

SEQ ID NO: 1146649 - RNA, 19 nt, Human
uaagaaaagaugcucugug

SEQ ID NO: 1146650 - RNA, 19 nt, Human
ucagacagcuuggaaaggc

SEQ ID NO: 1146651 - RNA, 21 nt, Human
ucagacccucaaucguugauu

SEQ ID NO: 1146652 - RNA, 18 nt, Human
ucccccgcaggucuuucu

SEQ ID NO: 1146653 - RNA, 19 nt, Human
ucccuucggcugcaggagc

SEQ ID NO: 1146654 - RNA, 26 nt, Human
ucuagggcugggcccccaggggcugg

SEQ ID NO: 1146655 - RNA, 23 nt, Human
ucucagcauggugaacaugggag

SEQ ID NO: 1146656 - RNA, 20 nt, Human
ucucuagggcugggccccca

SEQ ID NO: 1146657 - RNA, 19 nt, Human
ucucucgccuucgcuuucu

SEQ ID NO: 1146658 - RNA, 22 nt, Human
ucuguccuguggaaccuccucc

SEQ ID NO: 1146659 - RNA, 21 nt, Human
ucuguucccuauuucuguucu

SEQ ID NO: 1146660 - RNA, 18 nt, Human
ugaaacaccagaguaagg

SEQ ID NO: 1146661 - RNA, 23 nt, Human
ugaaccuacacaaacagaacaca

SEQ ID NO: 1146662 - RNA, 19 nt, Human
ugaaggcacuaaacugcgg

SEQ ID NO: 1146663 - RNA, 22 nt, Human
ugagggaggugcucagacccuc

SEQ ID NO: 1146664 - RNA, 22 nt, Human
ugcccagggagccgugaggagc

SEQ ID NO: 1146665 - RNA, 24 nt, Human
ugcugcccagggagccgugaggag

SEQ ID NO: 1146666 - RNA, 18 nt, Human
uggaaccuccuccccggg

SEQ ID NO: 1146667 - RNA, 23 nt, Human
uggcccucaacgcccccaacucc

SEQ ID NO: 1146668 - RNA, 21 nt, Human
uggcugcgugggggcuguggu

SEQ ID NO: 1146669 - RNA, 18 nt, Human
ugggggagcuuucaacgc

SEQ ID NO: 1146670 - RNA, 21 nt, Human
uggggugagccgggcccuguc

SEQ ID NO: 1146671 - RNA, 21 nt, Human
ugucccccgaugcccaccccc

SEQ ID NO: 1146672 - RNA, 22 nt, Human
uguccuguggaaccuccucccc

SEQ ID NO: 1146673 - RNA, 26 nt, Human
ugugagauggcccucaacgcccccaa

SEQ ID NO: 1146674 - RNA, 21 nt, Human
uguggaguggcccacuccugc

SEQ ID NO: 1146675 - RNA, 19 nt, Human
uguggggugagccgggccc

SEQ ID NO: 1146676 - RNA, 20 nt, Human
uguggugggcagccugugag

SEQ ID NO: 1146677 - RNA, 19 nt, Human
uguuacacagcaaucgaca

SEQ ID NO: 1146678 - RNA, 25 nt, Human
uugcucagcuaugcgggagcugugc

SEQ ID NO: 1146679 - RNA, 21 nt, Human
uuguuugaaggcacuaaacug

SEQ ID NO: 1146680 - RNA, 25 nt, Human
uuucucagcauggugaacaaccuug

SEQ ID NO: 1146681 - RNA, 25 nt, Human
uuucuguucccuauuucuguucuuu

SEQ ID NO: 1146682 - RNA, 18 nt, Human
aaaugugggaggcuacau

SEQ ID NO: 1146683 - RNA, 24 nt, Human
accagcuuggcucccaggaggucc

SEQ ID NO: 1146684 - RNA, 24 nt, Human
accccugguggaagacucugcuuc

SEQ ID NO: 1146685 - RNA, 19 nt, Human
accuacucugggacagucc

SEQ ID NO: 1146686 - RNA, 18 nt, Human
agaaggugaaggugacug

SEQ ID NO: 1146687 - RNA, 23 nt, Human
agaccagcuuggcucccaggagg

SEQ ID NO: 1146688 - RNA, 23 nt, Human
agagauggugaagagcucacugg

SEQ ID NO: 1146689 - RNA, 21 nt, Human
agaggggaggggaaaagggau

SEQ ID NO: 1146690 - RNA, 18 nt, Human
agauguggauauguggcu

SEQ ID NO: 1146691 - RNA, 24 nt, Human
agauuugcagaggaggggaagagu

SEQ ID NO: 1146692 - RNA, 18 nt, Human
agccaggcccuggcaccc

SEQ ID NO: 1146693 - RNA, 18 nt, Human
aggcccgggccgcggcgg

SEQ ID NO: 1146694 - RNA, 20 nt, Human
aggcccuggaggucgcugcc

SEQ ID NO: 1146695 - RNA, 22 nt, Human
aggcugcgggcucacagccugu

SEQ ID NO: 1146696 - RNA, 18 nt, Human
agggagcagccgcuggcg

SEQ ID NO: 1146697 - RNA, 19 nt, Human
agggcguggccacaucacc

SEQ ID NO: 1146698 - RNA, 19 nt, Human
aggggcagggaagaccaag

SEQ ID NO: 1146699 - RNA, 26 nt, Human
aucaaaacacacggaugcaguaccca

SEQ ID NO: 1146700 - RNA, 23 nt, Human
augugggaggcuacauuugagga

SEQ ID NO: 1146701 - RNA, 25 nt, Human
caaaggcccuuguccagugccccuc

SEQ ID NO: 1146702 - RNA, 21 nt, Human
caagaacacggagguccacug

SEQ ID NO: 1146703 - RNA, 22 nt, Human
cacacugagaaaaaugaaagag

SEQ ID NO: 1146704 - RNA, 18 nt, Human
cacccuuucucgggacca

SEQ ID NO: 1146705 - RNA, 20 nt, Human
cacggagguccacugcccca

SEQ ID NO: 1146706 - RNA, 21 nt, Human
cacugaagugggagccacugc

SEQ ID NO: 1146707 - RNA, 20 nt, Human
cacugcugcucuccaggccc

SEQ ID NO: 1146708 - RNA, 20 nt, Human
cagcacugaagugggagcca

SEQ ID NO: 1146709 - RNA, 21 nt, Human
caucacccccuuaucaaaaca

SEQ ID NO: 1146710 - RNA, 20 nt, Human
cauucgggccugguggcagc

SEQ ID NO: 1146711 - RNA, 21 nt, Human
cauuuggaaaggccuucugag

SEQ ID NO: 1146712 - RNA, 21 nt, Human
ccacugcgcacugugagggag

SEQ ID NO: 1146713 - RNA, 22 nt, Human
ccagggaggcguugcgcuggca

SEQ ID NO: 1146714 - RNA, 22 nt, Human
cccaagaccacccuuucucggg

SEQ ID NO: 1146715 - RNA, 19 nt, Human
ccccauccccaggccccau

SEQ ID NO: 1146716 - RNA, 23 nt, Human
ccccugagaggaagggccugugg

SEQ ID NO: 1146717 - RNA, 25 nt, Human
cccuggcaccccugguggaagacuc

SEQ ID NO: 1146718 - RNA, 19 nt, Human
cccuguacuggccgcuggu

SEQ ID NO: 1146719 - RNA, 21 nt, Human
ccgcuggacccagccaggccc

SEQ ID NO: 1146720 - RNA, 23 nt, Human
ccgggggcgcggcggcccccucc

SEQ ID NO: 1146721 - RNA, 20 nt, Human
ccucccaagaccacccuuuc

SEQ ID NO: 1146722 - RNA, 18 nt, Human
ccuguacuuuggggaaaa

SEQ ID NO: 1146723 - RNA, 18 nt, Human
ccugugguggccgcucac

SEQ ID NO: 1146724 - RNA, 18 nt, Human
ccuuguccagugccccuc

SEQ ID NO: 1146725 - RNA, 20 nt, Human
cgccgcauggccacccaagu

SEQ ID NO: 1146726 - RNA, 18 nt, Human
cguggccacaucaccccc

SEQ ID NO: 1146727 - RNA, 20 nt, Human
cucacugcugcucuccaggc

SEQ ID NO: 1146728 - RNA, 24 nt, Human
cuccagggaggcguugcgcuggca

SEQ ID NO: 1146729 - RNA, 25 nt, Human
cuccucggcggcuccccgagcgcca

SEQ ID NO: 1146730 - RNA, 25 nt, Human
cucguccaccaccuguccaauguca

SEQ ID NO: 1146731 - RNA, 21 nt, Human
cucuucacuaccuacucuggg

SEQ ID NO: 1146732 - RNA, 23 nt, Human
cugcucuccaggcccaugauggc

SEQ ID NO: 1146733 - RNA, 19 nt, Human
cugcugcucuccaggccca

SEQ ID NO: 1146734 - RNA, 21 nt, Human
cugcugcucuccaggcccaug

SEQ ID NO: 1146735 - RNA, 22 nt, Human
gacuuacugucccccaaaggcc

SEQ ID NO: 1146736 - RNA, 21 nt, Human
gagauguuugauucgauguug

SEQ ID NO: 1146737 - RNA, 18 nt, Human
gaugcagaugagcaggcg

SEQ ID NO: 1146738 - RNA, 22 nt, Human
gcaccaggccuuucccagggca

SEQ ID NO: 1146739 - RNA, 22 nt, Human
gcaggcccggcugucuccaauc

SEQ ID NO: 1146740 - RNA, 18 nt, Human
gcaguacccaggccagcc

SEQ ID NO: 1146741 - RNA, 24 nt, Human
gccacaucacccccuuaucaaaac

SEQ ID NO: 1146742 - RNA, 19 nt, Human
gccgcucacacgcccagga

SEQ ID NO: 1146743 - RNA, 18 nt, Human
gcgucgggcugcgagggg

SEQ ID NO: 1146744 - RNA, 19 nt, Human
gcucccaggagguccugag

SEQ ID NO: 1146745 - RNA, 24 nt, Human
gcugccgagggccuuguccucuuc

SEQ ID NO: 1146746 - RNA, 23 nt, Human
ggagcacagcaggcuugggacca

SEQ ID NO: 1146747 - RNA, 20 nt, Human
ggagcccagauggagaccag

SEQ ID NO: 1146748 - RNA, 20 nt, Human
ggccugagcgcccuugccag

SEQ ID NO: 1146749 - RNA, 21 nt, Human
ggcgcggcggcccccuccucg

SEQ ID NO: 1146750 - RNA, 22 nt, Human
gggcacggauggucaccccggc

SEQ ID NO: 1146751 - RNA, 22 nt, Human
guuaaucuugcacacauuagaa

SEQ ID NO: 1146752 - RNA, 18 nt, Human
uacaaagugaaaucuaga

SEQ ID NO: 1146753 - RNA, 19 nt, Human
uacaaagugaaaucuagau

SEQ ID NO: 1146754 - RNA, 21 nt, Human
uacauuugaggaggcugcggg

SEQ ID NO: 1146755 - RNA, 20 nt, Human
uaccuacucugggacagucc

SEQ ID NO: 1146756 - RNA, 20 nt, Human
uaggaggcccuggaggucgc

SEQ ID NO: 1146757 - RNA, 18 nt, Human
uccaagaacacggagguc

SEQ ID NO: 1146758 - RNA, 19 nt, Human
uccaagaacacggaggucc

SEQ ID NO: 1146759 - RNA, 18 nt, Human
uccacugccccaucugca

SEQ ID NO: 1146760 - RNA, 26 nt, Human
uccacuuggcaguauuuauuagacaa

SEQ ID NO: 1146761 - RNA, 19 nt, Human
uccccgagcgccacguggu

SEQ ID NO: 1146762 - RNA, 18 nt, Human
ucucgggaccaucucucg

SEQ ID NO: 1146763 - RNA, 22 nt, Human
ucugcagguacaggacgccauu

SEQ ID NO: 1146764 - RNA, 22 nt, Human
ucugugcccaguggauacaaag

SEQ ID NO: 1146765 - RNA, 19 nt, Human
ugaagauuugcagaggagg

SEQ ID NO: 1146766 - RNA, 19 nt, Human
ugaagugggagccacugcg

SEQ ID NO: 1146767 - RNA, 21 nt, Human
ugagaaaaaugaaagagaugu

SEQ ID NO: 1146768 - RNA, 21 nt, Human
ugagggagcagccgcuggcgu

SEQ ID NO: 1146769 - RNA, 18 nt, Human
ugccacaggagcacagca

SEQ ID NO: 1146770 - RNA, 24 nt, Human
ugccccaucugcagguacaggacu

SEQ ID NO: 1146771 - RNA, 20 nt, Human
uggaaaggccuucugaggug

SEQ ID NO: 1146772 - RNA, 20 nt, Human
uggaggucgcugccgagggc

SEQ ID NO: 1146773 - RNA, 26 nt, Human
uggcagguagaacacgguuaggggag

SEQ ID NO: 1146774 - RNA, 18 nt, Human
uggcaguauuuauuagac

SEQ ID NO: 1146775 - RNA, 18 nt, Human
uggcugugaagauuugca

SEQ ID NO: 1146776 - RNA, 20 nt, Human
uggcuuuuacaagagugaaa

SEQ ID NO: 1146777 - RNA, 21 nt, Human
ugggaaagaugcuugggaggc

SEQ ID NO: 1146778 - RNA, 23 nt, Human
ugggaggcucaucccagagccgc

SEQ ID NO: 1146779 - RNA, 22 nt, Human
ugggguuuggaagcugggcucc

SEQ ID NO: 1146780 - RNA, 22 nt, Human
uguggcuuuuacaagagugaaa

SEQ ID NO: 1146781 - RNA, 20 nt, Human
ugugguggccgcucacacgc

SEQ ID NO: 1146782 - RNA, 23 nt, Human
ugugguggccgcucacacgccca

SEQ ID NO: 1146783 - RNA, 21 nt, Human
uuaaucuugcacacauuagaa

SEQ ID NO: 1146784 - RNA, 20 nt, Human
uuccucugguggguggcucc

SEQ ID NO: 1146785 - RNA, 24 nt, Human
uucguagccuguuguguggggagg

SEQ ID NO: 1146786 - RNA, 24 nt, Human
uuggcucccaggagguccugaggc

SEQ ID NO: 1146787 - RNA, 18 nt, Human
uuggcugugaagauuugc

SEQ ID NO: 1146788 - RNA, 22 nt, Human
uugguuuuuguguguuacugca

SEQ ID NO: 1146789 - RNA, 22 nt, Human
uuuggaagcugggcuccugggg

SEQ ID NO: 1146790 - RNA, 23 nt, Human
aacccuccuccccacuuucccug

SEQ ID NO: 1146791 - RNA, 18 nt, Human
aacuuccuggcuacaguc

SEQ ID NO: 1146792 - RNA, 20 nt, Human
acaguggcagggaaagcugu

SEQ ID NO: 1146793 - RNA, 18 nt, Human
accccaucuuccucaucu

SEQ ID NO: 1146794 - RNA, 21 nt, Human
acccuggagcccauucugccc

SEQ ID NO: 1146795 - RNA, 19 nt, Human
acugaacuccgggagcaga

SEQ ID NO: 1146796 - RNA, 23 nt, Human
agagcccuuccagggcuucacac

SEQ ID NO: 1146797 - RNA, 20 nt, Human
agagggcccuuccacccaca

SEQ ID NO: 1146798 - RNA, 19 nt, Human
agaggggagaggagagggc

SEQ ID NO: 1146799 - RNA, 19 nt, Human
agcucagcccccuucugcc

SEQ ID NO: 1146800 - RNA, 20 nt, Human
aggaaauagguguugacuga

SEQ ID NO: 1146801 - RNA, 18 nt, Human
aggcagcuuggugggucu

SEQ ID NO: 1146802 - RNA, 21 nt, Human
aggcagcuuggugggucuucu

SEQ ID NO: 1146803 - RNA, 19 nt, Human
aggccaggagggcaggcgc

SEQ ID NO: 1146804 - RNA, 20 nt, Human
aggugggaagaggaagaggg

SEQ ID NO: 1146805 - RNA, 18 nt, Human
agugcagugguugaacuu

SEQ ID NO: 1146806 - RNA, 24 nt, Human
aucuuccucaucuuuaagccuuca

SEQ ID NO: 1146807 - RNA, 23 nt, Human
caaaggccccugcuuggagccca

SEQ ID NO: 1146808 - RNA, 21 nt, Human
caacccuccuccccacuuucc

SEQ ID NO: 1146809 - RNA, 21 nt, Human
caacuuccuggcuacaguccu

SEQ ID NO: 1146810 - RNA, 26 nt, Human
cacacacaggcaaucgaucaaucauc

SEQ ID NO: 1146811 - RNA, 21 nt, Human
caccuaaauccuccauccuga

SEQ ID NO: 1146812 - RNA, 24 nt, Human
cagagguaucaggcagcuuggugg

SEQ ID NO: 1146813 - RNA, 21 nt, Human
cagcagaaucagugucugguu

SEQ ID NO: 1146814 - RNA, 22 nt, Human
cagcucagcccccuucugccca

SEQ ID NO: 1146815 - RNA, 19 nt, Human
cagcuuccugccccucccc

SEQ ID NO: 1146816 - RNA, 24 nt, Human
caggaccuggucaccugcaggccc

SEQ ID NO: 1146817 - RNA, 24 nt, Human
caggcccagacuggccucuacuag

SEQ ID NO: 1146818 - RNA, 18 nt, Human
cagggcuucacacacagg

SEQ ID NO: 1146819 - RNA, 24 nt, Human
caggguggaaugccaggucaggcc

SEQ ID NO: 1146820 - RNA, 20 nt, Human
cagugucugguugaggccca

SEQ ID NO: 1146821 - RNA, 24 nt, Human
caguuccugucugggcagagggga

SEQ ID NO: 1146822 - RNA, 22 nt, Human
cauaacaacuuccuggcuacag

SEQ ID NO: 1146823 - RNA, 23 nt, Human
ccaucaucuguccacuuccagaa

SEQ ID NO: 1146824 - RNA, 25 nt, Human
cccauucugcccgcagggcugggag

SEQ ID NO: 1146825 - RNA, 20 nt, Human
ccccaggcaaaggccccugc

SEQ ID NO: 1146826 - RNA, 22 nt, Human
ccccaucaucuguccacuucca

SEQ ID NO: 1146827 - RNA, 21 nt, Human
cccuccuccccacuuucccug

SEQ ID NO: 1146828 - RNA, 18 nt, Human
cccuggagcccauucugc

SEQ ID NO: 1146829 - RNA, 24 nt, Human
ccucuaccuugucaggguagggac

SEQ ID NO: 1146830 - RNA, 19 nt, Human
ccuggagcccauucugccc

SEQ ID NO: 1146831 - RNA, 23 nt, Human
ccuucugcccagcugcagcuuca

SEQ ID NO: 1146832 - RNA, 19 nt, Human
cucccuuugcucccugucc

SEQ ID NO: 1146833 - RNA, 23 nt, Human
cuccgugcuuggggugccuccuc

SEQ ID NO: 1146834 - RNA, 21 nt, Human
cucgcuaucugcaggguggaa

SEQ ID NO: 1146835 - RNA, 18 nt, Human
cucugggugccugagcug

SEQ ID NO: 1146836 - RNA, 19 nt, Human
cugcagcuucagcugcaag

SEQ ID NO: 1146837 - RNA, 24 nt, Human
cuucauuggaacuuugagccacuu

SEQ ID NO: 1146838 - RNA, 22 nt, Human
gacauugcucugggugccugag

SEQ ID NO: 1146839 - RNA, 19 nt, Human
gaccauggccucuaccuug

SEQ ID NO: 1146840 - RNA, 19 nt, Human
gccuggaagcuguaugaag

SEQ ID NO: 1146841 - RNA, 24 nt, Human
gcucagcccccuucugcccagcug

SEQ ID NO: 1146842 - RNA, 18 nt, Human
gcucugggugccugagcu

SEQ ID NO: 1146843 - RNA, 19 nt, Human
gcuuccugccccuccccca

SEQ ID NO: 1146844 - RNA, 19 nt, Human
gcuuggugggucuucuccg

SEQ ID NO: 1146845 - RNA, 28 nt, Human
ggagggcaggcgcugaccccccaagggg

SEQ ID NO: 1146846 - RNA, 19 nt, Human
ggagguuucauugcaggga

SEQ ID NO: 1146847 - RNA, 23 nt, Human
ggugugaccagauugcuuuggau

SEQ ID NO: 1146848 - RNA, 22 nt, Human
uaaauggaaauacgggugccca

SEQ ID NO: 1146849 - RNA, 22 nt, Human
uaacaccuaaauccuccauccu

SEQ ID NO: 1146850 - RNA, 20 nt, Human
uagacagagguaucaggcag

SEQ ID NO: 1146851 - RNA, 22 nt, Human
ucagcucagcccccuucugccc

SEQ ID NO: 1146852 - RNA, 19 nt, Human
ucagcuuccugccccuccc

SEQ ID NO: 1146853 - RNA, 20 nt, Human
uccacuuccagaaaagagcc

SEQ ID NO: 1146854 - RNA, 23 nt, Human
uccacuuccagaaaagagccgcc

SEQ ID NO: 1146855 - RNA, 21 nt, Human
ucccaacccuccuccccacuu

SEQ ID NO: 1146856 - RNA, 24 nt, Human
ucccaacccuccuccccacuuucc

SEQ ID NO: 1146857 - RNA, 19 nt, Human
uccccacuuucccuguugg

SEQ ID NO: 1146858 - RNA, 20 nt, Human
uccccaggcaaaggccccug

SEQ ID NO: 1146859 - RNA, 26 nt, Human
ucccuccaggcuuuuguguaagggca

SEQ ID NO: 1146860 - RNA, 24 nt, Human
ucccuguuggauuguuguccagag

SEQ ID NO: 1146861 - RNA, 18 nt, Human
ucugcaggguggaaugcc

SEQ ID NO: 1146862 - RNA, 19 nt, Human
ucuuaguuccuuugugcug

SEQ ID NO: 1146863 - RNA, 21 nt, Human
ucuuccucaucuuuaagccuu

SEQ ID NO: 1146864 - RNA, 18 nt, Human
ugacugaacuccgggagc

SEQ ID NO: 1146865 - RNA, 19 nt, Human
ugacugaacuccgggagca

SEQ ID NO: 1146866 - RNA, 21 nt, Human
ugacugaaucuuccaggccau

SEQ ID NO: 1146867 - RNA, 22 nt, Human
ugagccacuuuuugcuaacacc

SEQ ID NO: 1146868 - RNA, 19 nt, Human
ugaggccaggagggcaggc

SEQ ID NO: 1146869 - RNA, 24 nt, Human
ugccguggggacuggccagaggug

SEQ ID NO: 1146870 - RNA, 18 nt, Human
ugccugagcugacgcagg

SEQ ID NO: 1146871 - RNA, 20 nt, Human
ugccugagcugacgcaggug

SEQ ID NO: 1146872 - RNA, 18 nt, Human
uggaaugaauggugaaca

SEQ ID NO: 1146873 - RNA, 18 nt, Human
uggagugcagugguugaa

SEQ ID NO: 1146874 - RNA, 21 nt, Human
uggagugcagugguugaacuu

SEQ ID NO: 1146875 - RNA, 21 nt, Human
uggagugcagugguugaacuu

SEQ ID NO: 1146876 - RNA, 26 nt, Human
uggagugcagugguugaaggcucuag

SEQ ID NO: 1146877 - RNA, 18 nt, Human
uggcagggaaagcuguug

SEQ ID NO: 1146878 - RNA, 23 nt, Human
ugggagaccagguggugguuggg

SEQ ID NO: 1146879 - RNA, 25 nt, Human
ugggcagaggggagcuagacagagg

SEQ ID NO: 1146880 - RNA, 24 nt, Human
ugggggggccaccgccauccagac

SEQ ID NO: 1146881 - RNA, 24 nt, Human
uguggaacagaguucaguucccaa

SEQ ID NO: 1146882 - RNA, 23 nt, Human
uuccaggccauauuuacauuacu

SEQ ID NO: 1146883 - RNA, 21 nt, Human
uucccaacccuccuccccacu

SEQ ID NO: 1146884 - RNA, 21 nt, Human
uucugcccgcagggcugggag

SEQ ID NO: 1146885 - RNA, 21 nt, Human
uuggaacuuugagccacuuuu

SEQ ID NO: 1146886 - RNA, 21 nt, Human
uuguucaugacugaacuccgg

SEQ ID NO: 1146887 - RNA, 23 nt, Human
uuugcuaacaccuaaauccucca

SEQ ID NO: 1146888 - RNA, 21 nt, Human
aaaaacacauaaggaacuaug

SEQ ID NO: 1146889 - RNA, 18 nt, Human
aaaaauuaguaaaaaugg

SEQ ID NO: 1146890 - RNA, 19 nt, Human
aacaaugcuuuaaaagguc

SEQ ID NO: 1146891 - RNA, 21 nt, Human
aacaaugcuuuaaaaggucuu

SEQ ID NO: 1146892 - RNA, 19 nt, Human
aacccgcggagaacgagcc

SEQ ID NO: 1146893 - RNA, 19 nt, Human
aacuucccucccgcuacuc

SEQ ID NO: 1146894 - RNA, 21 nt, Human
aagcgcgcagggagaagcgag

SEQ ID NO: 1146895 - RNA, 22 nt, Human
aaguaguccaucuuucuaaaac

SEQ ID NO: 1146896 - RNA, 20 nt, Human
aauaccuuuucuacuuuggu

SEQ ID NO: 1146897 - RNA, 24 nt, Human
acacaaaaguaaaaagaugaggua

SEQ ID NO: 1146898 - RNA, 19 nt, Human
accaagauaaauauuugga

SEQ ID NO: 1146899 - RNA, 25 nt, Human
accuauuugucuucucccuucuucc

SEQ ID NO: 1146900 - RNA, 22 nt, Human
acgaaacccgcggagaacgagc

SEQ ID NO: 1146901 - RNA, 23 nt, Human
acgaaacccgcggagaacgagcc

SEQ ID NO: 1146902 - RNA, 18 nt, Human
acucccugcggggcuucg

SEQ ID NO: 1146903 - RNA, 20 nt, Human
agaaauaguaaaaauuucaa

SEQ ID NO: 1146904 - RNA, 19 nt, Human
agagcaagggugggcggcg

SEQ ID NO: 1146905 - RNA, 21 nt, Human
aggcauuuuuuguuaaaaaua

SEQ ID NO: 1146906 - RNA, 22 nt, Human
agguucccccauuaagggcacc

SEQ ID NO: 1146907 - RNA, 21 nt, Human
aguaacaauauauacaccaag

SEQ ID NO: 1146908 - RNA, 18 nt, Human
aucacaauuacaggagca

SEQ ID NO: 1146909 - RNA, 23 nt, Human
auucucacauacaaaaauuucau

SEQ ID NO: 1146910 - RNA, 19 nt, Human
caacuaaacagaaauauca

SEQ ID NO: 1146911 - RNA, 25 nt, Human
caacuugaaagaacuacacacacaa

SEQ ID NO: 1146912 - RNA, 23 nt, Human
cacccccgcgucaccaacgggag

SEQ ID NO: 1146913 - RNA, 21 nt, Human
cacccguacuacaacuucccu

SEQ ID NO: 1146914 - RNA, 22 nt, Human
cagagcucgaccccagggcugu

SEQ ID NO: 1146915 - RNA, 21 nt, Human
cauacaaauucaguauguagu

SEQ ID NO: 1146916 - RNA, 26 nt, Human
cauuaaaagucuuuaguaacauaggg

SEQ ID NO: 1146917 - RNA, 24 nt, Human
ccagggcuguagccggaaagggga

SEQ ID NO: 1146918 - RNA, 22 nt, Human
ccauaaaaaauauaaaugcaac

SEQ ID NO: 1146919 - RNA, 25 nt, Human
ccccacuacgcucacacucuucucc

SEQ ID NO: 1146920 - RNA, 22 nt, Human
cccccgcgucaccaacgggagc

SEQ ID NO: 1146921 - RNA, 20 nt, Human
cccuccuuucgccuuccccg

SEQ ID NO: 1146922 - RNA, 21 nt, Human
ccgacagccccaaagccucau

SEQ ID NO: 1146923 - RNA, 22 nt, Human
ccguacuacaacuucccucccg

SEQ ID NO: 1146924 - RNA, 21 nt, Human
ccuacaacuugaaagaacuac

SEQ ID NO: 1146925 - RNA, 24 nt, Human
ccuauggccagggaaaaccggggc

SEQ ID NO: 1146926 - RNA, 20 nt, Human
ccucagagcccagggguaaa

SEQ ID NO: 1146927 - RNA, 21 nt, Human
ccuccccuccgccucgagcac

SEQ ID NO: 1146928 - RNA, 22 nt, Human
ccuccgaaccccuccuuucgcc

SEQ ID NO: 1146929 - RNA, 23 nt, Human
ccuccgccacccccgcgucacca

SEQ ID NO: 1146930 - RNA, 24 nt, Human
ccuccgccacccccgcgucaccaa

SEQ ID NO: 1146931 - RNA, 20 nt, Human
ccuuccccgccuccuccccu

SEQ ID NO: 1146932 - RNA, 21 nt, Human
ccuuuagugugguucucccca

SEQ ID NO: 1146933 - RNA, 24 nt, Human
cgaaacacaacgaaacccgcggag

SEQ ID NO: 1146934 - RNA, 26 nt, Human
cgaaacccgcggagaacgagccucuc

SEQ ID NO: 1146935 - RNA, 22 nt, Human
cgcuaccaccaggccucagagc

SEQ ID NO: 1146936 - RNA, 18 nt, Human
cggggcuucgucccggcc

SEQ ID NO: 1146937 - RNA, 25 nt, Human
cuacacacacaaaaguaaaaagaug

SEQ ID NO: 1146938 - RNA, 24 nt, Human
cugaagaaaguacuuaauacucag

SEQ ID NO: 1146939 - RNA, 20 nt, Human
cuguagccggaaaggggagc

SEQ ID NO: 1146940 - RNA, 19 nt, Human
gagaccuccgccacccccg

SEQ ID NO: 1146941 - RNA, 22 nt, Human
gagcaagggugggcggcggguu

SEQ ID NO: 1146942 - RNA, 18 nt, Human
gcagggagaagcgagcgg

SEQ ID NO: 1146943 - RNA, 19 nt, Human
gccccggguccgcaacagc

SEQ ID NO: 1146944 - RNA, 19 nt, Human
gccggguccuagcgcccgc

SEQ ID NO: 1146945 - RNA, 19 nt, Human
gcgaaacacaacgaaaccc

SEQ ID NO: 1146946 - RNA, 21 nt, Human
gcgaaacacaacgaaacccgc

SEQ ID NO: 1146947 - RNA, 18 nt, Human
gcggaaugcgcuucgacc

SEQ ID NO: 1146948 - RNA, 21 nt, Human
gcggagaacgagccucuccca

SEQ ID NO: 1146949 - RNA, 21 nt, Human
gcuaccaccaggccucagagc

SEQ ID NO: 1146950 - RNA, 21 nt, Human
ggagaagcgagcggaggccga

SEQ ID NO: 1146951 - RNA, 19 nt, Human
guacuacaacuucccuccc

SEQ ID NO: 1146952 - RNA, 21 nt, Human
uaaauaucugaacuacauaau

SEQ ID NO: 1146953 - RNA, 24 nt, Human
uaacaauauauacaccaagauaaa

SEQ ID NO: 1146954 - RNA, 22 nt, Human
uaacaauuuuaaaaacauacaa

SEQ ID NO: 1146955 - RNA, 21 nt, Human
uaaugcaaguucuguuaaagu

SEQ ID NO: 1146956 - RNA, 22 nt, Human
uacacacacaaaaguaaaaaga

SEQ ID NO: 1146957 - RNA, 22 nt, Human
uacacacacaaaaguaaaaaga

SEQ ID NO: 1146958 - RNA, 22 nt, Human
uaccuggcgcucucgcgguucc

SEQ ID NO: 1146959 - RNA, 19 nt, Human
uagccggaaaggggagcag

SEQ ID NO: 1146960 - RNA, 20 nt, Human
uagugugguucuccccaccc

SEQ ID NO: 1146961 - RNA, 21 nt, Human
uagugugguucuccccacccu

SEQ ID NO: 1146962 - RNA, 22 nt, Human
uaucaguauuucuuagcaaaaa

SEQ ID NO: 1146963 - RNA, 23 nt, Human
ucauucucacauacaaaaauuuc

SEQ ID NO: 1146964 - RNA, 21 nt, Human
uccaucuuucuaaaacugagg

SEQ ID NO: 1146965 - RNA, 21 nt, Human
uccccaggcgcgcgcucucca

SEQ ID NO: 1146966 - RNA, 19 nt, Human
uccccgccuccuccccucc

SEQ ID NO: 1146967 - RNA, 23 nt, Human
ucugaacuacauaaugaacagca

SEQ ID NO: 1146968 - RNA, 22 nt, Human
ucuucuccagguucccccauua

SEQ ID NO: 1146969 - RNA, 18 nt, Human
ucuucucccuucuucccc

SEQ ID NO: 1146970 - RNA, 25 nt, Human
ugaaagaacuacacacacaaaagua

SEQ ID NO: 1146971 - RNA, 23 nt, Human
ugacuuaaauaauuuagcuuuuu

SEQ ID NO: 1146972 - RNA, 23 nt, Human
ugauuaaguuuugccaacaauau

SEQ ID NO: 1146973 - RNA, 18 nt, Human
ugcuuuuuuuaaagacaa

SEQ ID NO: 1146974 - RNA, 24 nt, Human
uuaauacucagauauucccaauug

SEQ ID NO: 1146975 - RNA, 27 nt, Human
uuaaugguuucuuauuguaaguuuucc

SEQ ID NO: 1146976 - RNA, 18 nt, Human
uucauuucccacuuagcc

SEQ ID NO: 1146977 - RNA, 22 nt, Human
uucuaaaacaaugcuuuaaaag

SEQ ID NO: 1146978 - RNA, 19 nt, Human
uuuagugugguucucccca

SEQ ID NO: 1146979 - RNA, 21 nt, Human
uuuccuacaacuugaaagaac

SEQ ID NO: 1146980 - RNA, 21 nt, Human
uuugacuacuuaaugguuucu

SEQ ID NO: 1146981 - RNA, 20 nt, Human
aagcaggucauggcccacgc

SEQ ID NO: 1146982 - RNA, 18 nt, Human
aagguguugauggcugga

SEQ ID NO: 1146983 - RNA, 19 nt, Human
acagguaagcaccccccuc

SEQ ID NO: 1146984 - RNA, 22 nt, Human
accccccucccacacacacaca

SEQ ID NO: 1146985 - RNA, 19 nt, Human
acuacacacagguaagcac

SEQ ID NO: 1146986 - RNA, 22 nt, Human
aggucauggcccacgccuguaa

SEQ ID NO: 1146987 - RNA, 18 nt, Human
auccugaaaggaugugcc

SEQ ID NO: 1146988 - RNA, 25 nt, Human
cacagguaagcaccccccucccaca

SEQ ID NO: 1146989 - RNA, 21 nt, Human
caccccccucccacacacaca

SEQ ID NO: 1146990 - RNA, 23 nt, Human
caccccccucccacacacacaca

SEQ ID NO: 1146991 - RNA, 18 nt, Human
cagaagacagcuuucugu

SEQ ID NO: 1146992 - RNA, 25 nt, Human
cauacauccugaaaggaugugccac

SEQ ID NO: 1146993 - RNA, 21 nt, Human
cccacacacacacauacaucc

SEQ ID NO: 1146994 - RNA, 26 nt, Human
cucccacacacacacauacauccuga

SEQ ID NO: 1146995 - RNA, 19 nt, Human
gguuacagaauuccuuggg

SEQ ID NO: 1146996 - RNA, 21 nt, Human
uaaaaagcaggucauggccca

SEQ ID NO: 1146997 - RNA, 23 nt, Human
uacuacacacagguaagcacccc

SEQ ID NO: 1146998 - RNA, 24 nt, Human
uagcucauuuuauuuucuucuuug

SEQ ID NO: 1146999 - RNA, 24 nt, Human
uauagauugauaauaaaaagcagg

SEQ ID NO: 1147000 - RNA, 22 nt, Human
ucccacacacacacauacaucc

SEQ ID NO: 1147001 - RNA, 18 nt, Human
uggcccacgccuguaauc

SEQ ID NO: 1147002 - RNA, 20 nt, Human
aaaaaacaaaacagagaaau

SEQ ID NO: 1147003 - RNA, 21 nt, Human
aaacagagaaaugagucagag

SEQ ID NO: 1147004 - RNA, 20 nt, Human
aacaaaacagagaaaugagu

SEQ ID NO: 1147005 - RNA, 22 nt, Human
aacagagaaaugagucagagag

SEQ ID NO: 1147006 - RNA, 23 nt, Human
aacccacugcuagugcuccccca

SEQ ID NO: 1147007 - RNA, 24 nt, Human
aagaaagcaaaaaaguaaacaaaa

SEQ ID NO: 1147008 - RNA, 21 nt, Human
aagagaagugagucaugggcg

SEQ ID NO: 1147009 - RNA, 18 nt, Human
acaaaacagagaaaugag

SEQ ID NO: 1147010 - RNA, 24 nt, Human
acaaaacagagaaaugagucagag

SEQ ID NO: 1147011 - RNA, 25 nt, Human
acaaaacagagaaaugagucagaga

SEQ ID NO: 1147012 - RNA, 26 nt, Human
acaagaaagcaaaaaaguaaacaaaa

SEQ ID NO: 1147013 - RNA, 24 nt, Human
agaaaaaacaaaacagagaaagaa

SEQ ID NO: 1147014 - RNA, 21 nt, Human
agaagugagucaugggcggag

SEQ ID NO: 1147015 - RNA, 26 nt, Human
agacagaugguaaacaagagggaccc

SEQ ID NO: 1147016 - RNA, 23 nt, Human
agagaagugagucaugggcggag

SEQ ID NO: 1147017 - RNA, 25 nt, Human
aggcagaaggaucuccuaguuccuu

SEQ ID NO: 1147018 - RNA, 25 nt, Human
aucgaacccucucugcuuccuaaag

SEQ ID NO: 1147019 - RNA, 21 nt, Human
augauaaaaucuggggagaga

SEQ ID NO: 1147020 - RNA, 24 nt, Human
caagaaagcaaaaaaguaaacaaa

SEQ ID NO: 1147021 - RNA, 22 nt, Human
caagaaggagauggucaugaua

SEQ ID NO: 1147022 - RNA, 24 nt, Human
cacauggaacuuauauucauggag

SEQ ID NO: 1147023 - RNA, 21 nt, Human
cagaaucgaacccucucugcu

SEQ ID NO: 1147024 - RNA, 22 nt, Human
cauaagacuagcaaugucccag

SEQ ID NO: 1147025 - RNA, 25 nt, Human
caugggcggaguccagaaucgaacc

SEQ ID NO: 1147026 - RNA, 22 nt, Human
ccaucgcugucuucucccucug

SEQ ID NO: 1147027 - RNA, 31 nt, Human
cccccaguauccauccuaacauugcaucucc

SEQ ID NO: 1147028 - RNA, 18 nt, Human
cccgccuucgccuucccu

SEQ ID NO: 1147029 - RNA, 20 nt, Human
cccggcgccgggcucagccc

SEQ ID NO: 1147030 - RNA, 23 nt, Human
ccucccggcgccgggcucagccc

SEQ ID NO: 1147031 - RNA, 18 nt, Human
ccuggaguaccaggaagg

SEQ ID NO: 1147032 - RNA, 23 nt, Human
ccuuagcggcaagaaggagaugg

SEQ ID NO: 1147033 - RNA, 22 nt, Human
cgaacccucucugcuuccuaaa

SEQ ID NO: 1147034 - RNA, 19 nt, Human
cuccauuauccugcauccc

SEQ ID NO: 1147035 - RNA, 18 nt, Human
cuccucccggcgccgggc

SEQ ID NO: 1147036 - RNA, 25 nt, Human
gaacccacugcuagugcucccccag

SEQ ID NO: 1147037 - RNA, 22 nt, Human
gaacccucucugcuuccuaaag

SEQ ID NO: 1147038 - RNA, 21 nt, Human
gagaaaaaacaaaacagagaa

SEQ ID NO: 1147039 - RNA, 22 nt, Human
gagaaaaaacaaaacagagaaa

SEQ ID NO: 1147040 - RNA, 20 nt, Human
gagauggucaugauaaaauc

SEQ ID NO: 1147041 - RNA, 18 nt, Human
gccgggcucagcccgccu

SEQ ID NO: 1147042 - RNA, 18 nt, Human
ggagacagaugguaaaca

SEQ ID NO: 1147043 - RNA, 23 nt, Human
ggcaagaaggagauggucaugag

SEQ ID NO: 1147044 - RNA, 21 nt, Human
ggcaauaaggucugagaaaaa

SEQ ID NO: 1147045 - RNA, 18 nt, Human
uaagacuagcaauguccc

SEQ ID NO: 1147046 - RNA, 25 nt, Human
uaauuaaacaaaauccucucuccua

SEQ ID NO: 1147047 - RNA, 22 nt, Human
uaccaggaaggacaacucuuuc

SEQ ID NO: 1147048 - RNA, 21 nt, Human
uaggaaaacauaaacuaaaga

SEQ ID NO: 1147049 - RNA, 20 nt, Human
ucuccuaguagcauggaguu

SEQ ID NO: 1147050 - RNA, 21 nt, Human
ucuucucccucugucauaaga

SEQ ID NO: 1147051 - RNA, 23 nt, Human
ugagaaaaaacaaaacagagaaa

SEQ ID NO: 1147052 - RNA, 19 nt, Human
uggaacuuauauucaugga

SEQ ID NO: 1147053 - RNA, 23 nt, Human
uucagggcaauaaggucugagaa

SEQ ID NO: 1147054 - RNA, 22 nt, Human
uugcugaacccacugcuagugc

SEQ ID NO: 1147055 - RNA, 22 nt, Human
aaagugcuguccaggugucucc

SEQ ID NO: 1147056 - RNA, 20 nt, Human
accaggcgaggggggucaca

SEQ ID NO: 1147057 - RNA, 21 nt, Human
aggcgaggggggucacagggc

SEQ ID NO: 1147058 - RNA, 22 nt, Human
aggcgaggggggucacagggcc

SEQ ID NO: 1147059 - RNA, 21 nt, Human
agucuccuucagucugugaaa

SEQ ID NO: 1147060 - RNA, 19 nt, Human
cacccagggcucgcccagg

SEQ ID NO: 1147061 - RNA, 20 nt, Human
cagaguuccggauacccuuc

SEQ ID NO: 1147062 - RNA, 19 nt, Human
cagggcucgcccaggccgg

SEQ ID NO: 1147063 - RNA, 19 nt, Human
cagucugugaaaguuuguu

SEQ ID NO: 1147064 - RNA, 20 nt, Human
cauacggggcgccgugagcu

SEQ ID NO: 1147065 - RNA, 18 nt, Human
ccaggccauacggggcgc

SEQ ID NO: 1147066 - RNA, 19 nt, Human
ccaggcgaggggggucaca

SEQ ID NO: 1147067 - RNA, 18 nt, Human
ccccgcccucugcucaga

SEQ ID NO: 1147068 - RNA, 28 nt, Human
ccccgcccucugcucagaccccucuccc

SEQ ID NO: 1147069 - RNA, 23 nt, Human
ccccggagcugcggcaacccucc

SEQ ID NO: 1147070 - RNA, 24 nt, Human
cccgggaggcggucccgcguggag

SEQ ID NO: 1147071 - RNA, 20 nt, Human
cccgggcuggcugcgaaaac

SEQ ID NO: 1147072 - RNA, 19 nt, Human
cccucugcucagaccccuc

SEQ ID NO: 1147073 - RNA, 23 nt, Human
ccgcuuuccccgccccgggcugg

SEQ ID NO: 1147074 - RNA, 19 nt, Human
ccgggggccccggagcugc

SEQ ID NO: 1147075 - RNA, 24 nt, Human
cgauauuaacuuugaucacuuggu

SEQ ID NO: 1147076 - RNA, 19 nt, Human
cgcccaggccgggcugagg

SEQ ID NO: 1147077 - RNA, 24 nt, Human
cggacaaaagcagguuaccaaaga

SEQ ID NO: 1147078 - RNA, 23 nt, Human
cggagcugcggcaacccuccagg

SEQ ID NO: 1147079 - RNA, 18 nt, Human
cuaccauuuuucucuuug

SEQ ID NO: 1147080 - RNA, 26 nt, Human
cucagaccccucucccgggacgacca

SEQ ID NO: 1147081 - RNA, 18 nt, Human
cugcaccccgcccucugc

SEQ ID NO: 1147082 - RNA, 23 nt, Human
cugcaccccgcccucugcucaga

SEQ ID NO: 1147083 - RNA, 24 nt, Human
cuuaggauccccaggccauacggg

SEQ ID NO: 1147084 - RNA, 18 nt, Human
gagcugcggcaacccucc

SEQ ID NO: 1147085 - RNA, 22 nt, Human
gauaauagguuuuggggaggaa

SEQ ID NO: 1147086 - RNA, 22 nt, Human
gccccggagcugcggcaacccu

SEQ ID NO: 1147087 - RNA, 23 nt, Human
ggacaaaagcagguuaccaaaga

SEQ ID NO: 1147088 - RNA, 22 nt, Human
ggauacccuucauccagcuuuc

SEQ ID NO: 1147089 - RNA, 20 nt, Human
ggcugaggcgccgccacgcc

SEQ ID NO: 1147090 - RNA, 22 nt, Human
gggaagauguucucggacaaaa

SEQ ID NO: 1147091 - RNA, 20 nt, Human
uaacuuugaucacuugguua

SEQ ID NO: 1147092 - RNA, 20 nt, Human
uaagaguaaauaaaggugua

SEQ ID NO: 1147093 - RNA, 21 nt, Human
ucaguuugcauuuguccagug

SEQ ID NO: 1147094 - RNA, 21 nt, Human
uccagcuuucucuaaucuuag

SEQ ID NO: 1147095 - RNA, 18 nt, Human
uccaggggugagagggag

SEQ ID NO: 1147096 - RNA, 25 nt, Human
ucucccgggacgaccagugcgcccu

SEQ ID NO: 1147097 - RNA, 21 nt, Human
ucugugaaaguuuguuuccuu

SEQ ID NO: 1147098 - RNA, 23 nt, Human
ugaggcgccgccacgccgguacu

SEQ ID NO: 1147099 - RNA, 27 nt, Human
ugcauuuguccaguguuuucuauggau

SEQ ID NO: 1147100 - RNA, 18 nt, Human
uggcgauauuaacuuuga

SEQ ID NO: 1147101 - RNA, 21 nt, Human
ugggaagauguucucggacaa

SEQ ID NO: 1147102 - RNA, 21 nt, Human
uggggaggaauuccacagagg

SEQ ID NO: 1147103 - RNA, 21 nt, Human
uugcauuuguccaguguuuuc

SEQ ID NO: 1147104 - RNA, 23 nt, Human
uuuguccagcccauauucaaggg

SEQ ID NO: 1147105 - RNA, 24 nt, Human
uuuguccagcccauauucaagggg

SEQ ID NO: 1147106 - RNA, 19 nt, Human
uuuuuuuuuuuuuuuuuaa

SEQ ID NO: 1147107 - RNA, 23 nt, Human
aaaaacaaacaaaacaaaacaaa

SEQ ID NO: 1147108 - RNA, 18 nt, Human
aaaacaaacaaaacaaaa

SEQ ID NO: 1147109 - RNA, 24 nt, Human
aaaacaaacaaaacaaaacaaaaa

SEQ ID NO: 1147110 - RNA, 21 nt, Human
aaaagccuuucuaaguaaacc

SEQ ID NO: 1147111 - RNA, 19 nt, Human
aaacaaaacaaaacaaaaa

SEQ ID NO: 1147112 - RNA, 24 nt, Human
aaagccuuucuaaguaaaccaaag

SEQ ID NO: 1147113 - RNA, 19 nt, Human
aaugcggggggagggagag

SEQ ID NO: 1147114 - RNA, 24 nt, Human
acaaaacaaaacaaaaaacuuuca

SEQ ID NO: 1147115 - RNA, 25 nt, Human
acaaaacaaaacaaaaaacuuucaa

SEQ ID NO: 1147116 - RNA, 18 nt, Human
acaagaaaugcaacaugg

SEQ ID NO: 1147117 - RNA, 23 nt, Human
acccccaucucuuuaaaaacaaa

SEQ ID NO: 1147118 - RNA, 23 nt, Human
accucaagcaauccuccagccuc

SEQ ID NO: 1147119 - RNA, 19 nt, Human
accuuggaggcaagaagaa

SEQ ID NO: 1147120 - RNA, 18 nt, Human
acuaauuuugcugguuuu

SEQ ID NO: 1147121 - RNA, 21 nt, Human
acugaaccaccauguugguug

SEQ ID NO: 1147122 - RNA, 21 nt, Human
acugcacuccagccuggacaa

SEQ ID NO: 1147123 - RNA, 22 nt, Human
acugcacuccagccuggacaac

SEQ ID NO: 1147124 - RNA, 25 nt, Human
acugcacuccagccuggacaacgca

SEQ ID NO: 1147125 - RNA, 21 nt, Human
agaagcaccauuuauaguuca

SEQ ID NO: 1147126 - RNA, 21 nt, Human
agcaauccuccagccucagcc

SEQ ID NO: 1147127 - RNA, 23 nt, Human
agcacuaaaaagaguacgaacaa

SEQ ID NO: 1147128 - RNA, 23 nt, Human
agccucagccucccaaguagcug

SEQ ID NO: 1147129 - RNA, 18 nt, Human
aggaagaacccuucagua

SEQ ID NO: 1147130 - RNA, 19 nt, Human
aggauggcuugagaccagg

SEQ ID NO: 1147131 - RNA, 24 nt, Human
aggcaagaagaauggcucccagaa

SEQ ID NO: 1147132 - RNA, 20 nt, Human
aguaccuaacaacgcugcug

SEQ ID NO: 1147133 - RNA, 24 nt, Human
aucucuuuaaaaacaaacaaaaca

SEQ ID NO: 1147134 - RNA, 23 nt, Human
caaaacaaaacaaaaaacuuuca

SEQ ID NO: 1147135 - RNA, 25 nt, Human
caacgcaguaagacccccaucucuu

SEQ ID NO: 1147136 - RNA, 19 nt, Human
caagaaaugcaacauggac

SEQ ID NO: 1147137 - RNA, 19 nt, Human
caagaagaauggcucccag

SEQ ID NO: 1147138 - RNA, 22 nt, Human
caagaagaauggcucccagaac

SEQ ID NO: 1147139 - RNA, 18 nt, Human
cacugcacuccagccugg

SEQ ID NO: 1147140 - RNA, 19 nt, Human
cacugcacuccagccugga

SEQ ID NO: 1147141 - RNA, 21 nt, Human
cacugcacuccagccuggaca

SEQ ID NO: 1147142 - RNA, 25 nt, Human
cacugcacuccagccuggacaacgc

SEQ ID NO: 1147143 - RNA, 21 nt, Human
cagcacuaaaaagaguacgaa

SEQ ID NO: 1147144 - RNA, 20 nt, Human
cagcauaaguuaaaagccuu

SEQ ID NO: 1147145 - RNA, 25 nt, Human
cagccucagccucccaaguagcuga

SEQ ID NO: 1147146 - RNA, 22 nt, Human
cagcuuuuugguuuaaaaugau

SEQ ID NO: 1147147 - RNA, 24 nt, Human
caguaagacccccaucucuuuaaa

SEQ ID NO: 1147148 - RNA, 21 nt, Human
caguaccuaacaacgcugcug

SEQ ID NO: 1147149 - RNA, 21 nt, Human
caucuagaaauauuguugagc

SEQ ID NO: 1147150 - RNA, 19 nt, Human
ccacugcacuccagccugg

SEQ ID NO: 1147151 - RNA, 19 nt, Human
ccacugcacuccagccugg

SEQ ID NO: 1147152 - RNA, 21 nt, Human
ccacugcacuccagccuggac

SEQ ID NO: 1147153 - RNA, 22 nt, Human
ccacugcacuccagccuggaca

SEQ ID NO: 1147154 - RNA, 26 nt, Human
ccaugagucucuugaauuugagaucu

SEQ ID NO: 1147155 - RNA, 21 nt, Human
ccccaaacaugcuaaaaugcu

SEQ ID NO: 1147156 - RNA, 26 nt, Human
ccuccagccucagccucccaaguagc

SEQ ID NO: 1147157 - RNA, 19 nt, Human
cuagaaauauuguugagca

SEQ ID NO: 1147158 - RNA, 24 nt, Human
cucaacuguaauguccuugaggau

SEQ ID NO: 1147159 - RNA, 22 nt, Human
cucaugcugcagugccuuggag

SEQ ID NO: 1147160 - RNA, 24 nt, Human
cuccagccucagccucccaaguag

SEQ ID NO: 1147161 - RNA, 25 nt, Human
cuccagccucagccucccaaguagc

SEQ ID NO: 1147162 - RNA, 27 nt, Human
cuucacuuuuucucaucgucacugaac

SEQ ID NO: 1147163 - RNA, 31 nt, Human
cuugaccucaagcaauccuccagccucagcc

SEQ ID NO: 1147164 - RNA, 22 nt, Human
cuuuaugugguaauauauugcu

SEQ ID NO: 1147165 - RNA, 22 nt, Human
gagcaggaaaggugguauuucu

SEQ ID NO: 1147166 - RNA, 18 nt, Human
gagggcccaaacuauauu

SEQ ID NO: 1147167 - RNA, 24 nt, Human
gaugggagccuucacuuuggagug

SEQ ID NO: 1147168 - RNA, 22 nt, Human
gcagcaaaaugcggggggaggg

SEQ ID NO: 1147169 - RNA, 19 nt, Human
gccacugcacuccagccug

SEQ ID NO: 1147170 - RNA, 23 nt, Human
gcccacacaguaagcaaauaucu

SEQ ID NO: 1147171 - RNA, 20 nt, Human
gccuggacaacgcaguaaga

SEQ ID NO: 1147172 - RNA, 21 nt, Human
ggcuugagaccaggaaguucu

SEQ ID NO: 1147173 - RNA, 18 nt, Human
gggggagggagagaaacu

SEQ ID NO: 1147174 - RNA, 21 nt, Human
ggucacacauuuuacuguggu

SEQ ID NO: 1147175 - RNA, 20 nt, Human
ggugguauuucuccagucuu

SEQ ID NO: 1147176 - RNA, 21 nt, Human
guaacaguagggaggaagaac

SEQ ID NO: 1147177 - RNA, 18 nt, Human
guauaauccuuguugucc

SEQ ID NO: 1147178 - RNA, 20 nt, Human
uaaaaagaguacgaacaaau

SEQ ID NO: 1147179 - RNA, 19 nt, Human
uaaaaaggacagaagagug

SEQ ID NO: 1147180 - RNA, 21 nt, Human
uaaaaugauugccaaugacua

SEQ ID NO: 1147181 - RNA, 21 nt, Human
uaaaguaaugcuugcaaagaa

SEQ ID NO: 1147182 - RNA, 18 nt, Human
uaagacccccaucucuuu

SEQ ID NO: 1147183 - RNA, 23 nt, Human
uaagcaaauaucuguguguagga

SEQ ID NO: 1147184 - RNA, 19 nt, Human
uaucagaaaaugagaagca

SEQ ID NO: 1147185 - RNA, 22 nt, Human
ucagaaaaugagaagcaccauu

SEQ ID NO: 1147186 - RNA, 19 nt, Human
ucagcauaaguuaaaagcc

SEQ ID NO: 1147187 - RNA, 26 nt, Human
ucagccucccaaguagcugaggcuag

SEQ ID NO: 1147188 - RNA, 24 nt, Human
ucaucuagaaauauuguugagcau

SEQ ID NO: 1147189 - RNA, 24 nt, Human
ucccaaaccuuggaggcaagaaga

SEQ ID NO: 1147190 - RNA, 21 nt, Human
ucccagaacaauccuuuucca

SEQ ID NO: 1147191 - RNA, 19 nt, Human
uccuccagccucagccucc

SEQ ID NO: 1147192 - RNA, 18 nt, Human
uccuuguuguccaugagu

SEQ ID NO: 1147193 - RNA, 22 nt, Human
uccuuguuguccaugagucucu

SEQ ID NO: 1147194 - RNA, 24 nt, Human
ucggcccacacaguaagcaaauau

SEQ ID NO: 1147195 - RNA, 24 nt, Human
ucuccagucuuuguagaugaaggu

SEQ ID NO: 1147196 - RNA, 26 nt, Human
ugaaggucccaugacguuauaacccc

SEQ ID NO: 1147197 - RNA, 23 nt, Human
ugaaugacaaauguuauccagca

SEQ ID NO: 1147198 - RNA, 22 nt, Human
ugaauuugagaucuuuccuuuu

SEQ ID NO: 1147199 - RNA, 20 nt, Human
ugaccucaagcaauccucca

SEQ ID NO: 1147200 - RNA, 25 nt, Human
ugaccucaagcaauccuccagccuc

SEQ ID NO: 1147201 - RNA, 19 nt, Human
ugacuagcagcuucaaugg

SEQ ID NO: 1147202 - RNA, 24 nt, Human
ugcacauucagcuguuagcugugc

SEQ ID NO: 1147203 - RNA, 24 nt, Human
ugcagcacuaaaaagaguacgaac

SEQ ID NO: 1147204 - RNA, 19 nt, Human
uggagugguuuuuguaacu

SEQ ID NO: 1147205 - RNA, 19 nt, Human
uggcucccagaacaauccu

SEQ ID NO: 1147206 - RNA, 20 nt, Human
uuagcugugcagcacuaaaa

SEQ ID NO: 1147207 - RNA, 22 nt, Human
uuagcugugcagcacuaaaaag

SEQ ID NO: 1147208 - RNA, 21 nt, Human
uugaccucaagcaauccucca

SEQ ID NO: 1147209 - RNA, 21 nt, Human
uugcacauucagcuguuagcu

SEQ ID NO: 1147210 - RNA, 21 nt, Human
uuguccaugagucucuugaau

SEQ ID NO: 1147211 - RNA, 25 nt, Human
uuuaauacauuuauuuagcaagaga

SEQ ID NO: 1147212 - RNA, 23 nt, Human
uuuggagugguuuuuguaacucu

SEQ ID NO: 1147213 - RNA, 24 nt, Human
uuuuuaguaagcugcccuggagau

SEQ ID NO: 1147214 - RNA, 24 nt, Human
aaagugcugggauuacaggcguga

SEQ ID NO: 1147215 - RNA, 24 nt, Human
aaccaaagggggaaacauguucuc

SEQ ID NO: 1147216 - RNA, 21 nt, Human
aaccccugaccucagugaucc

SEQ ID NO: 1147217 - RNA, 22 nt, Human
aagauauucuguaccugcuugu

SEQ ID NO: 1147218 - RNA, 19 nt, Human
aagaugcuuccuccccagu

SEQ ID NO: 1147219 - RNA, 19 nt, Human
aagugcugggauuacaggc

SEQ ID NO: 1147220 - RNA, 19 nt, Human
aagugcugggauuacaggc

SEQ ID NO: 1147221 - RNA, 26 nt, Human
aagugcugggauuacaggcgugagcc

SEQ ID NO: 1147222 - RNA, 18 nt, Human
aaugaccuugcccaagaa

SEQ ID NO: 1147223 - RNA, 20 nt, Human
acagauuucacagaugaacc

SEQ ID NO: 1147224 - RNA, 19 nt, Human
accaguguccucuaguuuu

SEQ ID NO: 1147225 - RNA, 23 nt, Human
accaugcccggcuaauuuuugua

SEQ ID NO: 1147226 - RNA, 24 nt, Human
accauguuggccaggcuggucuug

SEQ ID NO: 1147227 - RNA, 18 nt, Human
accgcacccagccuggug

SEQ ID NO: 1147228 - RNA, 22 nt, Human
accucagugauccaccugccuc

SEQ ID NO: 1147229 - RNA, 24 nt, Human
accucagugauccaccugccucgg

SEQ ID NO: 1147230 - RNA, 20 nt, Human
accugcucaggaaacuggag

SEQ ID NO: 1147231 - RNA, 18 nt, Human
acgggguuucaccauguu

SEQ ID NO: 1147232 - RNA, 23 nt, Human
acgggguuucaccauguuggcca

SEQ ID NO: 1147233 - RNA, 24 nt, Human
acgggguuucaccauguuggccag

SEQ ID NO: 1147234 - RNA, 22 nt, Human
acuauagccuccaccgccuggg

SEQ ID NO: 1147235 - RNA, 18 nt, Human
agacagagucuugcugug

SEQ ID NO: 1147236 - RNA, 19 nt, Human
agacugcaguuucccauug

SEQ ID NO: 1147237 - RNA, 18 nt, Human
agccaccgcacccagccu

SEQ ID NO: 1147238 - RNA, 19 nt, Human
aggaaacuggaggcugaac

SEQ ID NO: 1147239 - RNA, 25 nt, Human
aggcuggagugcaguggcguaaucu

SEQ ID NO: 1147240 - RNA, 18 nt, Human
agggggaaacauguucuc

SEQ ID NO: 1147241 - RNA, 21 nt, Human
aguagcugggguuacaggugc

SEQ ID NO: 1147242 - RNA, 23 nt, Human
agugauccaccugccucggccuc

SEQ ID NO: 1147243 - RNA, 19 nt, Human
agugcaguggcguaaucuc

SEQ ID NO: 1147244 - RNA, 21 nt, Human
agugcaguggcguaaucucag

SEQ ID NO: 1147245 - RNA, 23 nt, Human
agugcaguggcguaaucucagcu

SEQ ID NO: 1147246 - RNA, 24 nt, Human
agugcaguggcguaaucucagcuu

SEQ ID NO: 1147247 - RNA, 18 nt, Human
auggagccagcuuucccu

SEQ ID NO: 1147248 - RNA, 24 nt, Human
auuuuuguaucuuuaguagagacg

SEQ ID NO: 1147249 - RNA, 24 nt, Human
caaagugcugggauuacaggcgug

SEQ ID NO: 1147250 - RNA, 21 nt, Human
caaccuccugaguagcugggg

SEQ ID NO: 1147251 - RNA, 22 nt, Human
caagugauucuccugccucaac

SEQ ID NO: 1147252 - RNA, 22 nt, Human
cacacaggaaaggaaaggaauu

SEQ ID NO: 1147253 - RNA, 21 nt, Human
caccauguuggccaggcuggu

SEQ ID NO: 1147254 - RNA, 24 nt, Human
caccauguuggccaggcuggucuu

SEQ ID NO: 1147255 - RNA, 27 nt, Human
caccauguuggccaggcuggucuugaa

SEQ ID NO: 1147256 - RNA, 20 nt, Human
caccgcacccagccuggugu

SEQ ID NO: 1147257 - RNA, 23 nt, Human
caccgcacccagccugguguaca

SEQ ID NO: 1147258 - RNA, 23 nt, Human
caccugccucggccucccaaagu

SEQ ID NO: 1147259 - RNA, 24 nt, Human
cagagucuugcuguguugcccagg

SEQ ID NO: 1147260 - RNA, 24 nt, Human
cauguuggccaggcuggucuugaa

SEQ ID NO: 1147261 - RNA, 20 nt, Human
ccaaagugcugggauuacag

SEQ ID NO: 1147262 - RNA, 22 nt, Human
ccaaagugcugggauuacaggc

SEQ ID NO: 1147263 - RNA, 22 nt, Human
ccaaagugcugggauuacaggc

SEQ ID NO: 1147264 - RNA, 24 nt, Human
ccaaagugcugggauuacaggcgu

SEQ ID NO: 1147265 - RNA, 22 nt, Human
cccaggcuggagugcaguggcg

SEQ ID NO: 1147266 - RNA, 21 nt, Human
ccccuucuggcuacaaagacu

SEQ ID NO: 1147267 - RNA, 24 nt, Human
ccgccuggguucaagugauucucc

SEQ ID NO: 1147268 - RNA, 18 nt, Human
ccuccaccgccuggguuc

SEQ ID NO: 1147269 - RNA, 22 nt, Human
ccucugagacugcaauuuccca

SEQ ID NO: 1147270 - RNA, 24 nt, Human
ccucugagacugcaguuucccauu

SEQ ID NO: 1147271 - RNA, 20 nt, Human
ccugaccucagugauccacc

SEQ ID NO: 1147272 - RNA, 22 nt, Human
ccugaccucagugauccaccug

SEQ ID NO: 1147273 - RNA, 22 nt, Human
ccugaguagcugggguuacagg

SEQ ID NO: 1147274 - RNA, 23 nt, Human
ccugaguagcugggguuacaggu

SEQ ID NO: 1147275 - RNA, 23 nt, Human
ccugccucaaccuccugaguagc

SEQ ID NO: 1147276 - RNA, 20 nt, Human
ccuggguucaagugauucuc

SEQ ID NO: 1147277 - RNA, 23 nt, Human
ccuggguucaagugauucuccuc

SEQ ID NO: 1147278 - RNA, 23 nt, Human
ccuggguucaagugauucuccug

SEQ ID NO: 1147279 - RNA, 20 nt, Human
ccuuccucugagacugcagu

SEQ ID NO: 1147280 - RNA, 19 nt, Human
cgccuggguucaagugauu

SEQ ID NO: 1147281 - RNA, 25 nt, Human
cucagcuuacuauagccuccaccgc

SEQ ID NO: 1147282 - RNA, 18 nt, Human
cuccaagaacaaggaaaa

SEQ ID NO: 1147283 - RNA, 23 nt, Human
cugaguagcugggguuacaggug

SEQ ID NO: 1147284 - RNA, 23 nt, Human
cugccucaaccuccugaguagcu

SEQ ID NO: 1147285 - RNA, 23 nt, Human
cugccucggccucccaaagugcu

SEQ ID NO: 1147286 - RNA, 20 nt, Human
cuguguugcccaggcuggag

SEQ ID NO: 1147287 - RNA, 21 nt, Human
cuguguugcccaggcuggagu

SEQ ID NO: 1147288 - RNA, 22 nt, Human
cuugcuguguugcccaggcugg

SEQ ID NO: 1147289 - RNA, 23 nt, Human
gaccucagugauccaccugccuc

SEQ ID NO: 1147290 - RNA, 24 nt, Human
gagacgggguuucaccauguuggc

SEQ ID NO: 1147291 - RNA, 18 nt, Human
gauuacaggcgugagcca

SEQ ID NO: 1147292 - RNA, 22 nt, Human
gauuacaggcgugagccaccgc

SEQ ID NO: 1147293 - RNA, 23 nt, Human
gauuacaggcgugagccaccgca

SEQ ID NO: 1147294 - RNA, 25 nt, Human
gcaauguuucuuugcagcucuguua

SEQ ID NO: 1147295 - RNA, 24 nt, Human
gcccaggcuggagugcaguggcgu

SEQ ID NO: 1147296 - RNA, 18 nt, Human
gccuuccucugagacugc

SEQ ID NO: 1147297 - RNA, 18 nt, Human
gccuuccucugagacugc

SEQ ID NO: 1147298 - RNA, 19 nt, Human
gcuggagugcaguggcgua

SEQ ID NO: 1147299 - RNA, 23 nt, Human
gcuggucuugaaccccugaccuc

SEQ ID NO: 1147300 - RNA, 19 nt, Human
ggccaggcagcagcugcuc

SEQ ID NO: 1147301 - RNA, 24 nt, Human
ggcuggucuugaaccccugaccuc

SEQ ID NO: 1147302 - RNA, 22 nt, Human
gggaaacauguucuccaagaac

SEQ ID NO: 1147303 - RNA, 23 nt, Human
gggguuucaccauguuggccagg

SEQ ID NO: 1147304 - RNA, 22 nt, Human
ggguuucaccauguuggccagg

SEQ ID NO: 1147305 - RNA, 19 nt, Human
ggucuugaaccccugaccu

SEQ ID NO: 1147306 - RNA, 18 nt, Human
guacacacaggaaaggaa

SEQ ID NO: 1147307 - RNA, 23 nt, Human
guagagacgggguuucaccaugu

SEQ ID NO: 1147308 - RNA, 24 nt, Human
gucuugcuguguugcccaggcugg

SEQ ID NO: 1147309 - RNA, 24 nt, Human
gugauccaccugccucggccuccc

SEQ ID NO: 1147310 - RNA, 24 nt, Human
gugauucuccugccucaaccuccu

SEQ ID NO: 1147311 - RNA, 21 nt, Human
gugugugugugugugugugug

SEQ ID NO: 1147312 - RNA, 21 nt, Human
gugugugugugugugugugug

SEQ ID NO: 1147313 - RNA, 21 nt, Human
gugugugugugugugugugug

SEQ ID NO: 1147314 - RNA, 21 nt, Human
gugugugugugugugugugug

SEQ ID NO: 1147315 - RNA, 21 nt, Human
guuacaggugccugcuaccau

SEQ ID NO: 1147316 - RNA, 20 nt, Human
uaagauauucuguaccugcu

SEQ ID NO: 1147317 - RNA, 24 nt, Human
uaauuuuuguaucuuuaguagaga

SEQ ID NO: 1147318 - RNA, 24 nt, Human
uacaggcgugagccaccgcaccca

SEQ ID NO: 1147319 - RNA, 22 nt, Human
uagagacgggguuucaccaugu

SEQ ID NO: 1147320 - RNA, 20 nt, Human
uaggagaggcuaaaagggcu

SEQ ID NO: 1147321 - RNA, 24 nt, Human
uaguagagacgggguuucaccaug

SEQ ID NO: 1147322 - RNA, 26 nt, Human
uaguagagacgggguuucaccauguu

SEQ ID NO: 1147323 - RNA, 20 nt, Human
ucaaccuccugaguagcugg

SEQ ID NO: 1147324 - RNA, 19 nt, Human
ucaagugauucuccugccu

SEQ ID NO: 1147325 - RNA, 23 nt, Human
ucagugauccaccugccucggcc

SEQ ID NO: 1147326 - RNA, 22 nt, Human
uccaagaacaaggaaaaccuga

SEQ ID NO: 1147327 - RNA, 20 nt, Human
uccaggguaagagacagaga

SEQ ID NO: 1147328 - RNA, 24 nt, Human
ucccaaagugcugggauuacaggc

SEQ ID NO: 1147329 - RNA, 24 nt, Human
uccugaguagcugggguuacaggu

SEQ ID NO: 1147330 - RNA, 18 nt, Human
ucggccucccaaagugcu

SEQ ID NO: 1147331 - RNA, 19 nt, Human
ucucauucuggauaaaggu

SEQ ID NO: 1147332 - RNA, 24 nt, Human
ucuccugccucaaccuccugagua

SEQ ID NO: 1147333 - RNA, 24 nt, Human
ucugugugugugugugugugugug

SEQ ID NO: 1147334 - RNA, 23 nt, Human
ucuugcuguguugcccaggcugg

SEQ ID NO: 1147335 - RNA, 24 nt, Human
ucuugcuguguugcccaggcugga

SEQ ID NO: 1147336 - RNA, 24 nt, Human
ucuuuaguagagacgggguuucac

SEQ ID NO: 1147337 - RNA, 23 nt, Human
ugaccucagugauccaccugccu

SEQ ID NO: 1147338 - RNA, 18 nt, Human
ugcccaggcuggagugca

SEQ ID NO: 1147339 - RNA, 21 nt, Human
ugcccaggcuggagugcagug

SEQ ID NO: 1147340 - RNA, 22 nt, Human
ugcccaggcuggagugcagugg

SEQ ID NO: 1147341 - RNA, 24 nt, Human
ugcccggcuaauuuuuguaucuuu

SEQ ID NO: 1147342 - RNA, 24 nt, Human
ugccucaaccuccugaguagcugg

SEQ ID NO: 1147343 - RNA, 21 nt, Human
ugccucggccucccaaagugc

SEQ ID NO: 1147344 - RNA, 24 nt, Human
ugccucggccucccaaagugcugg

SEQ ID NO: 1147345 - RNA, 21 nt, Human
ugccucugugugugugugugu

SEQ ID NO: 1147346 - RNA, 24 nt, Human
ugcugggauuacaggcgugagcca

SEQ ID NO: 1147347 - RNA, 26 nt, Human
uggagugcaguggcguaaggcucuag

SEQ ID NO: 1147348 - RNA, 23 nt, Human
uggagugcaguggcguaaucuca

SEQ ID NO: 1147349 - RNA, 24 nt, Human
uggagugcaguggcguaaucucag

SEQ ID NO: 1147350 - RNA, 18 nt, Human
uggccaggcagcagcugc

SEQ ID NO: 1147351 - RNA, 19 nt, Human
uggccaggcagcagcugcu

SEQ ID NO: 1147352 - RNA, 24 nt, Human
uggccaggcuggucuugaaccccu

SEQ ID NO: 1147353 - RNA, 24 nt, Human
uggcguaaucucagcuuacuauag

SEQ ID NO: 1147354 - RNA, 18 nt, Human
ugggauuacaggcgugag

SEQ ID NO: 1147355 - RNA, 19 nt, Human
ugggauuacaggcgugagc

SEQ ID NO: 1147356 - RNA, 21 nt, Human
ugggauuacaggcgugagcca

SEQ ID NO: 1147357 - RNA, 22 nt, Human
ugggauuacaggcgugagccac

SEQ ID NO: 1147358 - RNA, 23 nt, Human
ugggauuacaggcgugagccacc

SEQ ID NO: 1147359 - RNA, 24 nt, Human
ugggauuacaggcgugagccaccg

SEQ ID NO: 1147360 - RNA, 22 nt, Human
ugggguuacaggugccugcuac

SEQ ID NO: 1147361 - RNA, 23 nt, Human
uggguucaagugauucuccugcc

SEQ ID NO: 1147362 - RNA, 23 nt, Human
uguguguguaucugcaugucuau

SEQ ID NO: 1147363 - RNA, 21 nt, Human
uguguguguguaucugcaugu

SEQ ID NO: 1147364 - RNA, 22 nt, Human
uguguguguguguguguaucug

SEQ ID NO: 1147365 - RNA, 18 nt, Human
ugugugugugugugugug

SEQ ID NO: 1147366 - RNA, 18 nt, Human
ugugugugugugugugug

SEQ ID NO: 1147367 - RNA, 18 nt, Human
ugugugugugugugugug

SEQ ID NO: 1147368 - RNA, 18 nt, Human
ugugugugugugugugug

SEQ ID NO: 1147369 - RNA, 18 nt, Human
ugugugugugugugugug

SEQ ID NO: 1147370 - RNA, 18 nt, Human
ugugugugugugugugug

SEQ ID NO: 1147371 - RNA, 18 nt, Human
ugugugugugugugugug

SEQ ID NO: 1147372 - RNA, 18 nt, Human
ugugugugugugugugug

SEQ ID NO: 1147373 - RNA, 18 nt, Human
ugugugugugugugugug

SEQ ID NO: 1147374 - RNA, 18 nt, Human
ugugugugugugugugug

SEQ ID NO: 1147375 - RNA, 18 nt, Human
ugugugugugugugugug

SEQ ID NO: 1147376 - RNA, 18 nt, Human
ugugugugugugugugug

SEQ ID NO: 1147377 - RNA, 18 nt, Human
ugugugugugugugugug

SEQ ID NO: 1147378 - RNA, 18 nt, Human
ugugugugugugugugug

SEQ ID NO: 1147379 - RNA, 18 nt, Human
ugugugugugugugugug

SEQ ID NO: 1147380 - RNA, 18 nt, Human
ugugugugugugugugug

SEQ ID NO: 1147381 - RNA, 18 nt, Human
ugugugugugugugugug

SEQ ID NO: 1147382 - RNA, 18 nt, Human
ugugugugugugugugug

SEQ ID NO: 1147383 - RNA, 18 nt, Human
ugugugugugugugugug

SEQ ID NO: 1147384 - RNA, 20 nt, Human
ugugugugugugugugugug

SEQ ID NO: 1147385 - RNA, 21 nt, Human
ugugugugugugugugugugu

SEQ ID NO: 1147386 - RNA, 21 nt, Human
ugugugugugugugugugugu

SEQ ID NO: 1147387 - RNA, 21 nt, Human
ugugugugugugugugugugu

SEQ ID NO: 1147388 - RNA, 21 nt, Human
ugugugugugugugugugugu

SEQ ID NO: 1147389 - RNA, 21 nt, Human
ugugugugugugugugugugu

SEQ ID NO: 1147390 - RNA, 21 nt, Human
ugugugugugugugugugugu

SEQ ID NO: 1147391 - RNA, 21 nt, Human
ugugugugugugugugugugu

SEQ ID NO: 1147392 - RNA, 21 nt, Human
ugugugugugugugugugugu

SEQ ID NO: 1147393 - RNA, 21 nt, Human
ugugugugugugugugugugu

SEQ ID NO: 1147394 - RNA, 21 nt, Human
ugugugugugugugugugugu

SEQ ID NO: 1147395 - RNA, 21 nt, Human
ugugugugugugugugugugu

SEQ ID NO: 1147396 - RNA, 21 nt, Human
ugugugugugugugugugugu

SEQ ID NO: 1147397 - RNA, 21 nt, Human
ugugugugugugugugugugu

SEQ ID NO: 1147398 - RNA, 21 nt, Human
ugugugugugugugugugugu

SEQ ID NO: 1147399 - RNA, 21 nt, Human
ugugugugugugugugugugu

SEQ ID NO: 1147400 - RNA, 21 nt, Human
ugugugugugugugugugugu

SEQ ID NO: 1147401 - RNA, 21 nt, Human
ugugugugugugugugugugu

SEQ ID NO: 1147402 - RNA, 21 nt, Human
ugugugugugugugugugugu

SEQ ID NO: 1147403 - RNA, 21 nt, Human
ugugugugugugugugugugu

SEQ ID NO: 1147404 - RNA, 21 nt, Human
ugugugugugugugugugugu

SEQ ID NO: 1147405 - RNA, 21 nt, Human
ugugugugugugugugugugu

SEQ ID NO: 1147406 - RNA, 21 nt, Human
ugugugugugugugugugugu

SEQ ID NO: 1147407 - RNA, 21 nt, Human
ugugugugugugugugugugu

SEQ ID NO: 1147408 - RNA, 21 nt, Human
ugugugugugugugugugugu

SEQ ID NO: 1147409 - RNA, 21 nt, Human
ugugugugugugugugugugu

SEQ ID NO: 1147410 - RNA, 21 nt, Human
ugugugugugugugugugugu

SEQ ID NO: 1147411 - RNA, 21 nt, Human
ugugugugugugugugugugu

SEQ ID NO: 1147412 - RNA, 21 nt, Human
ugugugugugugugugugugu

SEQ ID NO: 1147413 - RNA, 21 nt, Human
ugugugugugugugugugugu

SEQ ID NO: 1147414 - RNA, 21 nt, Human
ugugugugugugugugugugu

SEQ ID NO: 1147415 - RNA, 21 nt, Human
ugugugugugugugugugugu

SEQ ID NO: 1147416 - RNA, 21 nt, Human
ugugugugugugugugugugu

SEQ ID NO: 1147417 - RNA, 21 nt, Human
ugugugugugugugugugugu

SEQ ID NO: 1147418 - RNA, 21 nt, Human
ugugugugugugugugugugu

SEQ ID NO: 1147419 - RNA, 22 nt, Human
ugugugugugugugugugugua

SEQ ID NO: 1147420 - RNA, 22 nt, Human
ugugugugugugugugugugug

SEQ ID NO: 1147421 - RNA, 22 nt, Human
ugugugugugugugugugugug

SEQ ID NO: 1147422 - RNA, 22 nt, Human
ugugugugugugugugugugug

SEQ ID NO: 1147423 - RNA, 22 nt, Human
ugugugugugugugugugugug

SEQ ID NO: 1147424 - RNA, 22 nt, Human
ugugugugugugugugugugug

SEQ ID NO: 1147425 - RNA, 22 nt, Human
ugugugugugugugugugugug

SEQ ID NO: 1147426 - RNA, 22 nt, Human
ugugugugugugugugugugug

SEQ ID NO: 1147427 - RNA, 22 nt, Human
ugugugugugugugugugugug

SEQ ID NO: 1147428 - RNA, 22 nt, Human
ugugugugugugugugugugug

SEQ ID NO: 1147429 - RNA, 22 nt, Human
ugugugugugugugugugugug

SEQ ID NO: 1147430 - RNA, 22 nt, Human
ugugugugugugugugugugug

SEQ ID NO: 1147431 - RNA, 22 nt, Human
ugugugugugugugugugugug

SEQ ID NO: 1147432 - RNA, 18 nt, Human
uguguugcccaggcugga

SEQ ID NO: 1147433 - RNA, 22 nt, Human
uguguugcccaggcuggagugc

SEQ ID NO: 1147434 - RNA, 24 nt, Human
uguguugcccaggcuggagugcag

SEQ ID NO: 1147435 - RNA, 24 nt, Human
uuacuauagccuccaccgccuggg

SEQ ID NO: 1147436 - RNA, 18 nt, Human
uuaguagagacgggguuu

SEQ ID NO: 1147437 - RNA, 22 nt, Human
uuaguagagacgggguuucacc

SEQ ID NO: 1147438 - RNA, 24 nt, Human
uuaguagagacgggguuucaccau

SEQ ID NO: 1147439 - RNA, 21 nt, Human
uucaagugauucuccugccuc

SEQ ID NO: 1147440 - RNA, 24 nt, Human
uucaagugauucuccugccucaac

SEQ ID NO: 1147441 - RNA, 24 nt, Human
uugcccaggcuggagugcaguggc

SEQ ID NO: 1147442 - RNA, 25 nt, Human
uuguuacagauuucacagaugaacc

SEQ ID NO: 1147443 - RNA, 24 nt, Human
uuuaugugucuguuuuucugugug

SEQ ID NO: 1147444 - RNA, 24 nt, Human
uuucaccauguuggccaggcuggu

SEQ ID NO: 1147445 - RNA, 20 nt, Human
uuuuuguaucuuuaguagag

SEQ ID NO: 1147446 - RNA, 23 nt, Human
aaaagaagaaagcucaacaucaa

SEQ ID NO: 1147447 - RNA, 20 nt, Human
aagaaagcucaacaucaaaa

SEQ ID NO: 1147448 - RNA, 19 nt, Human
acacaugcuuuuuccuggu

SEQ ID NO: 1147449 - RNA, 27 nt, Human
acuucagugcaguuguaccaaaaacag

SEQ ID NO: 1147450 - RNA, 23 nt, Human
aggcaaccggagaccgguuccag

SEQ ID NO: 1147451 - RNA, 21 nt, Human
caacaucaaaaauaacacuuc

SEQ ID NO: 1147452 - RNA, 21 nt, Human
caggaacacaugcuuuuuccu

SEQ ID NO: 1147453 - RNA, 18 nt, Human
cccacuccaucacugugc

SEQ ID NO: 1147454 - RNA, 23 nt, Human
cuuuuguucuuucucugcuucug

SEQ ID NO: 1147455 - RNA, 19 nt, Human
gaauucuccagcagucuuc

SEQ ID NO: 1147456 - RNA, 22 nt, Human
gacagauuaauuuuauuuugga

SEQ ID NO: 1147457 - RNA, 25 nt, Human
gagaacacaguaaaggcaaucaaug

SEQ ID NO: 1147458 - RNA, 20 nt, Human
guaaaaugugcuacaaagcc

SEQ ID NO: 1147459 - RNA, 19 nt, Human
uaaaagaagaaagcucaac

SEQ ID NO: 1147460 - RNA, 19 nt, Human
uaaaaugugcuacaaagcc

SEQ ID NO: 1147461 - RNA, 24 nt, Human
uaacucuuuggaaaucugccuccc

SEQ ID NO: 1147462 - RNA, 23 nt, Human
ucaaaaauaacacuucagugcag

SEQ ID NO: 1147463 - RNA, 19 nt, Human
ucgucugcucccagagaau

SEQ ID NO: 1147464 - RNA, 22 nt, Human
ugagaacacaguaaaggcaauc

SEQ ID NO: 1147465 - RNA, 22 nt, Human
ugagcagguaucugcagcuaac

SEQ ID NO: 1147466 - RNA, 21 nt, Human
uggaaaucugccucccacucc

SEQ ID NO: 1147467 - RNA, 22 nt, Human
uuggaaaucugccucccacucc

SEQ ID NO: 1147468 - RNA, 22 nt, Human
uuuggaaaucugccucccacuc

SEQ ID NO: 1147469 - RNA, 18 nt, Human
aagagagagagaaagagg

SEQ ID NO: 1147470 - RNA, 21 nt, Human
aaucauaguuccagcgauuua

SEQ ID NO: 1147471 - RNA, 20 nt, Human
agaaagaggaaacaucuguu

SEQ ID NO: 1147472 - RNA, 23 nt, Human
augcggugcucuacaucaauauu

SEQ ID NO: 1147473 - RNA, 19 nt, Human
caccugagcucagaagaaa

SEQ ID NO: 1147474 - RNA, 24 nt, Human
cagacaccugagcucagaagaaac

SEQ ID NO: 1147475 - RNA, 22 nt, Human
uaaaauagccagacaccugagc

SEQ ID NO: 1147476 - RNA, 21 nt, Human
ucauaguuccagcgauuuaua

SEQ ID NO: 1147477 - RNA, 22 nt, Human
uccuacaaauacaugcggugcu

SEQ ID NO: 1147478 - RNA, 24 nt, Human
ugaaaaauaauucuaaugagaagc

SEQ ID NO: 1147479 - RNA, 21 nt, Human
ugcggugcucuacaucaauau

SEQ ID NO: 1147480 - RNA, 26 nt, Human
uguggaauaaaaucauuacaaacuga

SEQ ID NO: 1147481 - RNA, 23 nt, Human
aaaaagcaaucaugaaaaauaau

SEQ ID NO: 1147482 - RNA, 20 nt, Human
aaacaaacaaacaaaaagca

SEQ ID NO: 1147483 - RNA, 24 nt, Human
aaacaaacaaacaaacaaaaagca

SEQ ID NO: 1147484 - RNA, 21 nt, Human
aaacaaaucuacacuaacuaa

SEQ ID NO: 1147485 - RNA, 19 nt, Human
aaagacccaaccuacuauu

SEQ ID NO: 1147486 - RNA, 20 nt, Human
aaagaguauacucuucugcc

SEQ ID NO: 1147487 - RNA, 20 nt, Human
aaaggcaaagaacuuuccuu

SEQ ID NO: 1147488 - RNA, 22 nt, Human
aaagucccuucuacauuuaccu

SEQ ID NO: 1147489 - RNA, 22 nt, Human
aacaaaaaugacauuaaaaaau

SEQ ID NO: 1147490 - RNA, 19 nt, Human
aacauggugaaaccccguc

SEQ ID NO: 1147491 - RNA, 20 nt, Human
aacauggugaaaccccgucu

SEQ ID NO: 1147492 - RNA, 21 nt, Human
aacauggugaaaccccgucuc

SEQ ID NO: 1147493 - RNA, 21 nt, Human
aaccaacaacaaacacuaugc

SEQ ID NO: 1147494 - RNA, 21 nt, Human
aacucaauguuaaccaggcac

SEQ ID NO: 1147495 - RNA, 27 nt, Human
aagacaaccaacaacaaaaggucaucc

SEQ ID NO: 1147496 - RNA, 20 nt, Human
aaggcaaagaacuuuccuuu

SEQ ID NO: 1147497 - RNA, 20 nt, Human
aaguguucaaaguuacaaug

SEQ ID NO: 1147498 - RNA, 20 nt, Human
aauccuaauaugcuaagaaa

SEQ ID NO: 1147499 - RNA, 22 nt, Human
acaaaacaaauaauccaccuca

SEQ ID NO: 1147500 - RNA, 22 nt, Human
acaaacaaacaaacaaaaagca

SEQ ID NO: 1147501 - RNA, 25 nt, Human
acaaccaacaacaaacacuaugccu

SEQ ID NO: 1147502 - RNA, 18 nt, Human
acaagacaaccaacaaca

SEQ ID NO: 1147503 - RNA, 22 nt, Human
acaccaacagauacaguuuuuc

SEQ ID NO: 1147504 - RNA, 25 nt, Human
acagaaugagacucuguuucuaaag

SEQ ID NO: 1147505 - RNA, 19 nt, Human
acagacuauauuugaucug

SEQ ID NO: 1147506 - RNA, 24 nt, Human
acagcgugagacuccaucucaaaa

SEQ ID NO: 1147507 - RNA, 24 nt, Human
acaugagccaaagaguucaaggcu

SEQ ID NO: 1147508 - RNA, 24 nt, Human
accaccuuuuauuucccuuggcca

SEQ ID NO: 1147509 - RNA, 24 nt, Human
accccgucucuacuaaaaauacaa

SEQ ID NO: 1147510 - RNA, 20 nt, Human
acuacuuugggaggccgagg

SEQ ID NO: 1147511 - RNA, 24 nt, Human
acuacuuugggaggccgagguggg

SEQ ID NO: 1147512 - RNA, 21 nt, Human
acuccagccugggugacagaa

SEQ ID NO: 1147513 - RNA, 28 nt, Human
acuccaucucaaaaacaaacaaacaaac

SEQ ID NO: 1147514 - RNA, 23 nt, Human
acugcacuccagccuggugacag

SEQ ID NO: 1147515 - RNA, 19 nt, Human
acuugcaccugggaggugg

SEQ ID NO: 1147516 - RNA, 21 nt, Human
acuugcaccugggagguggag

SEQ ID NO: 1147517 - RNA, 19 nt, Human
agaaaaaaaagaguuagca

SEQ ID NO: 1147518 - RNA, 25 nt, Human
agacaaccaacaacaaaccggaccc

SEQ ID NO: 1147519 - RNA, 20 nt, Human
agagcuuucaagaacuaaac

SEQ ID NO: 1147520 - RNA, 19 nt, Human
agaugaaacauacugaaaa

SEQ ID NO: 1147521 - RNA, 21 nt, Human
agccaggugugguggcgggug

SEQ ID NO: 1147522 - RNA, 24 nt, Human
agccuagccaacauggugaaaccc

SEQ ID NO: 1147523 - RNA, 24 nt, Human
agccugggugacagaaugagacuc

SEQ ID NO: 1147524 - RNA, 21 nt, Human
agccuggugacagcgugagac

SEQ ID NO: 1147525 - RNA, 23 nt, Human
agccuggugacagcgugagacuc

SEQ ID NO: 1147526 - RNA, 20 nt, Human
agcuuuaugcuaaagagaau

SEQ ID NO: 1147527 - RNA, 24 nt, Human
aggaucgcuugaaaccaggaguuc

SEQ ID NO: 1147528 - RNA, 24 nt, Human
aggcacaguggcauguaccuguag

SEQ ID NO: 1147529 - RNA, 18 nt, Human
aggcaggggcaucacuug

SEQ ID NO: 1147530 - RNA, 20 nt, Human
aggccgaggugggaggaucg

SEQ ID NO: 1147531 - RNA, 24 nt, Human
aggccgaggugggaggaucgcuug

SEQ ID NO: 1147532 - RNA, 19 nt, Human
aggcgggcaaaucacgagg

SEQ ID NO: 1147533 - RNA, 24 nt, Human
aggcgggcaaaucacgaggucaag

SEQ ID NO: 1147534 - RNA, 24 nt, Human
aggcugagaugggaggaucacaug

SEQ ID NO: 1147535 - RNA, 24 nt, Human
aggcugaggcaggggcaucacuug

SEQ ID NO: 1147536 - RNA, 22 nt, Human
agguggagguugcagugagcug

SEQ ID NO: 1147537 - RNA, 18 nt, Human
aggugggaggaucgcuug

SEQ ID NO: 1147538 - RNA, 23 nt, Human
aggugggaggaucgcuugaaacc

SEQ ID NO: 1147539 - RNA, 18 nt, Human
agguggucaugccugaaa

SEQ ID NO: 1147540 - RNA, 21 nt, Human
aguuugugugaauuuuggaaa

SEQ ID NO: 1147541 - RNA, 23 nt, Human
auaaaauguuacucuuauuuguc

SEQ ID NO: 1147542 - RNA, 21 nt, Human
auaauacaaacauauuacugc

SEQ ID NO: 1147543 - RNA, 25 nt, Human
auaaugaacaaaacaaauaauccac

SEQ ID NO: 1147544 - RNA, 19 nt, Human
auaggaacuaggccaggug

SEQ ID NO: 1147545 - RNA, 24 nt, Human
aucgcgccacugcacuccagccug

SEQ ID NO: 1147546 - RNA, 24 nt, Human
augaacaguacuaacuaaacaaag

SEQ ID NO: 1147547 - RNA, 19 nt, Human
auggauuuuccccaguaaa

SEQ ID NO: 1147548 - RNA, 19 nt, Human
auuggacuccagccugggu

SEQ ID NO: 1147549 - RNA, 24 nt, Human
auuggacuccagccugggugacag

SEQ ID NO: 1147550 - RNA, 20 nt, Human
caaaaagcaaauguacuacu

SEQ ID NO: 1147551 - RNA, 25 nt, Human
caaaaagcaaauguacuacucacaa

SEQ ID NO: 1147552 - RNA, 22 nt, Human
caaacaaacaaaaagcaaaugu

SEQ ID NO: 1147553 - RNA, 22 nt, Human
caaacaaacaaacaaacaaaaa

SEQ ID NO: 1147554 - RNA, 19 nt, Human
caaaucacgaggucaagag

SEQ ID NO: 1147555 - RNA, 24 nt, Human
caacaaacugaaaccucgucucua

SEQ ID NO: 1147556 - RNA, 24 nt, Human
caacauggugaaaccccgucucua

SEQ ID NO: 1147557 - RNA, 24 nt, Human
caaccaacaacaaacacuaugccu

SEQ ID NO: 1147558 - RNA, 19 nt, Human
caaccuacuauugauuaua

SEQ ID NO: 1147559 - RNA, 21 nt, Human
caacugaacugcuccaauacc

SEQ ID NO: 1147560 - RNA, 21 nt, Human
caauaauauagauugugggca

SEQ ID NO: 1147561 - RNA, 25 nt, Human
cacagcagaaaaaaugguacaaacc

SEQ ID NO: 1147562 - RNA, 24 nt, Human
cacgccuguaaucccagcacuuug

SEQ ID NO: 1147563 - RNA, 24 nt, Human
cacuacuuugggaggccgaggugg

SEQ ID NO: 1147564 - RNA, 20 nt, Human
cacuccagccuggugacagc

SEQ ID NO: 1147565 - RNA, 18 nt, Human
cacugcacuccagccugg

SEQ ID NO: 1147566 - RNA, 18 nt, Human
cacugcacuccagccugg

SEQ ID NO: 1147567 - RNA, 22 nt, Human
cacugcacuccagccuggugac

SEQ ID NO: 1147568 - RNA, 23 nt, Human
cacugcacuccagccuggugaca

SEQ ID NO: 1147569 - RNA, 23 nt, Human
cacugcacuccagccuggugaca

SEQ ID NO: 1147570 - RNA, 25 nt, Human
cagaggcgggcaaaucacgagguca

SEQ ID NO: 1147571 - RNA, 25 nt, Human
cagcacuuuggggaggcagaggcgg

SEQ ID NO: 1147572 - RNA, 23 nt, Human
cagcagaaaaaaugguacaaacc

SEQ ID NO: 1147573 - RNA, 24 nt, Human
cagcuacucgggaggcugaggcag

SEQ ID NO: 1147574 - RNA, 20 nt, Human
cagcuggguuuaaagugcau

SEQ ID NO: 1147575 - RNA, 18 nt, Human
caguacuaacuaaacaaa

SEQ ID NO: 1147576 - RNA, 24 nt, Human
caucucaaaaacaaacaaacaaac

SEQ ID NO: 1147577 - RNA, 25 nt, Human
caugccaaacacuuucagaaagucc

SEQ ID NO: 1147578 - RNA, 19 nt, Human
cauuggacuccagccuggg

SEQ ID NO: 1147579 - RNA, 23 nt, Human
cauuggacuccagccugggugac

SEQ ID NO: 1147580 - RNA, 24 nt, Human
cauuggacuccagccugggugaca

SEQ ID NO: 1147581 - RNA, 25 nt, Human
cauuggacuccagccugggugacag

SEQ ID NO: 1147582 - RNA, 28 nt, Human
cauuuugcuaaucuucaaagagcccacc

SEQ ID NO: 1147583 - RNA, 18 nt, Human
ccaacaacaaacacuaug

SEQ ID NO: 1147584 - RNA, 19 nt, Human
ccacugcacuccagccugg

SEQ ID NO: 1147585 - RNA, 19 nt, Human
ccacugcacuccagccugg

SEQ ID NO: 1147586 - RNA, 20 nt, Human
ccacugcacuccagccuggu

SEQ ID NO: 1147587 - RNA, 22 nt, Human
ccacugcacuccagccugguga

SEQ ID NO: 1147588 - RNA, 23 nt, Human
ccacugcacuccagccuggugac

SEQ ID NO: 1147589 - RNA, 18 nt, Human
ccagccuggugacagcgu

SEQ ID NO: 1147590 - RNA, 20 nt, Human
ccauuggacuccagccuggg

SEQ ID NO: 1147591 - RNA, 21 nt, Human
ccauuggacuccagccugggu

SEQ ID NO: 1147592 - RNA, 24 nt, Human
ccauuggacuccagccugggugac

SEQ ID NO: 1147593 - RNA, 22 nt, Human
cccagcacuuuggggaggcaga

SEQ ID NO: 1147594 - RNA, 24 nt, Human
cccauuggacuccagccuggguga

SEQ ID NO: 1147595 - RNA, 26 nt, Human
ccccauuggacuccagccugggugac

SEQ ID NO: 1147596 - RNA, 23 nt, Human
ccuagccaacauggugaaacccc

SEQ ID NO: 1147597 - RNA, 24 nt, Human
ccuagccaacauggugaaaccccg

SEQ ID NO: 1147598 - RNA, 21 nt, Human
ccugggagguggagguugcag

SEQ ID NO: 1147599 - RNA, 22 nt, Human
ccugggugacagaaugagacuc

SEQ ID NO: 1147600 - RNA, 22 nt, Human
ccuguaaucccagcacuuuggg

SEQ ID NO: 1147601 - RNA, 24 nt, Human
ccuguacuuuauuuaaaaguuauc

SEQ ID NO: 1147602 - RNA, 18 nt, Human
ccuuggccacaaagggug

SEQ ID NO: 1147603 - RNA, 18 nt, Human
cgaggugggaggaucgcu

SEQ ID NO: 1147604 - RNA, 23 nt, Human
cgccuguaaucccagcacuuugg

SEQ ID NO: 1147605 - RNA, 24 nt, Human
cgggaggcugaggcaggggcauca

SEQ ID NO: 1147606 - RNA, 22 nt, Human
cgggcaaaucacgaggucaaga

SEQ ID NO: 1147607 - RNA, 21 nt, Human
cuagaguuuccaaccacugga

SEQ ID NO: 1147608 - RNA, 23 nt, Human
cucaaacucaauguuaaccaggc

SEQ ID NO: 1147609 - RNA, 20 nt, Human
cucaagugacagaaacgucc

SEQ ID NO: 1147610 - RNA, 22 nt, Human
cucacgccuguaaucccagcac

SEQ ID NO: 1147611 - RNA, 24 nt, Human
cucacgccuguaaucccagcacuu

SEQ ID NO: 1147612 - RNA, 24 nt, Human
cuggaauaaaauuuuggcuccuaa

SEQ ID NO: 1147613 - RNA, 20 nt, Human
cuguagucccagcuacucgg

SEQ ID NO: 1147614 - RNA, 21 nt, Human
cuguagucccagcuacucggg

SEQ ID NO: 1147615 - RNA, 21 nt, Human
cuugcaccugggagguggagg

SEQ ID NO: 1147616 - RNA, 21 nt, Human
gaaaaaacauauaggaacuaa

SEQ ID NO: 1147617 - RNA, 23 nt, Human
gaaaucgcgccacugcacuccag

SEQ ID NO: 1147618 - RNA, 23 nt, Human
gaaauugaagcuuguuacauuca

SEQ ID NO: 1147619 - RNA, 18 nt, Human
gaacaguacuaacuaaac

SEQ ID NO: 1147620 - RNA, 19 nt, Human
gaacuaaacugaaaacuga

SEQ ID NO: 1147621 - RNA, 19 nt, Human
gaaucacuggaaauuuaca

SEQ ID NO: 1147622 - RNA, 19 nt, Human
gacaaccaacaacaaacac

SEQ ID NO: 1147623 - RNA, 24 nt, Human
gacagaaugagacucuguuucuaa

SEQ ID NO: 1147624 - RNA, 24 nt, Human
gacuccagccugggugacagaaug

SEQ ID NO: 1147625 - RNA, 24 nt, Human
gaucgcuugaaaccaggaguucaa

SEQ ID NO: 1147626 - RNA, 22 nt, Human
gcagcacuguaaaguuucacac

SEQ ID NO: 1147627 - RNA, 18 nt, Human
gcagugaacuaugaccgc

SEQ ID NO: 1147628 - RNA, 18 nt, Human
gcauguaccuguagucuc

SEQ ID NO: 1147629 - RNA, 22 nt, Human
gccaaagaguucaaggcugcag

SEQ ID NO: 1147630 - RNA, 24 nt, Human
gccaacauggugaaaccccgucuc

SEQ ID NO: 1147631 - RNA, 20 nt, Human
gcugaaaucgcgccacugca

SEQ ID NO: 1147632 - RNA, 22 nt, Human
gcuugaaaccaggaguucaaga

SEQ ID NO: 1147633 - RNA, 18 nt, Human
ggagguugcagugagcug

SEQ ID NO: 1147634 - RNA, 24 nt, Human
ggagguugcagugagcugaaaucg

SEQ ID NO: 1147635 - RNA, 23 nt, Human
ggaucgcuugaaaccaggaguuc

SEQ ID NO: 1147636 - RNA, 23 nt, Human
ggcaaaucacgaggucaagaguu

SEQ ID NO: 1147637 - RNA, 21 nt, Human
ggcucacgccuguaaucccag

SEQ ID NO: 1147638 - RNA, 21 nt, Human
ggcugggcgugguggcucacg

SEQ ID NO: 1147639 - RNA, 24 nt, Human
gggcgugguggcucacgccuguaa

SEQ ID NO: 1147640 - RNA, 19 nt, Human
gguggagguugcagugagc

SEQ ID NO: 1147641 - RNA, 24 nt, Human
gguggcucacgccuguaaucccag

SEQ ID NO: 1147642 - RNA, 23 nt, Human
guauaaauauuaaaaacaaaaau

SEQ ID NO: 1147643 - RNA, 23 nt, Human
guggcucacgccuguaaucccag

SEQ ID NO: 1147644 - RNA, 24 nt, Human
guuuccuccauuucccagagcuuu

SEQ ID NO: 1147645 - RNA, 21 nt, Human
uaaaaauacaaaaauuagcca

SEQ ID NO: 1147646 - RNA, 20 nt, Human
uaaagauuaaucaauacaug

SEQ ID NO: 1147647 - RNA, 20 nt, Human
uaaagugcaucaagacucaa

SEQ ID NO: 1147648 - RNA, 27 nt, Human
uaacuccaaaggaggcuuuagaaauac

SEQ ID NO: 1147649 - RNA, 19 nt, Human
uaaguguauacauaugugu

SEQ ID NO: 1147650 - RNA, 24 nt, Human
uaauuuggaccuaacaccuaaaau

SEQ ID NO: 1147651 - RNA, 26 nt, Human
uacauaugugucuguauauauacaca

SEQ ID NO: 1147652 - RNA, 19 nt, Human
uacuuuaggacuuggugau

SEQ ID NO: 1147653 - RNA, 19 nt, Human
uaguucacucaagaagggg

SEQ ID NO: 1147654 - RNA, 19 nt, Human
uauaauggcuaaagaccca

SEQ ID NO: 1147655 - RNA, 22 nt, Human
uaucauguaggcuuuugaacag

SEQ ID NO: 1147656 - RNA, 21 nt, Human
uaugaaacagaacgagugcaa

SEQ ID NO: 1147657 - RNA, 23 nt, Human
uaugaacuuuacaaaaauggcua

SEQ ID NO: 1147658 - RNA, 20 nt, Human
uaugugucuguauauauaca

SEQ ID NO: 1147659 - RNA, 25 nt, Human
uauuuggauuuggauuacugaccug

SEQ ID NO: 1147660 - RNA, 22 nt, Human
ucaaaacacaccaacagauaca

SEQ ID NO: 1147661 - RNA, 19 nt, Human
ucaaacaguaaucccagaa

SEQ ID NO: 1147662 - RNA, 25 nt, Human
ucaaauacgcaaacaaaucuacacu

SEQ ID NO: 1147663 - RNA, 24 nt, Human
ucaagauuccacuguuaaaccuuu

SEQ ID NO: 1147664 - RNA, 24 nt, Human
ucacaugaaugacaagacaaccaa

SEQ ID NO: 1147665 - RNA, 24 nt, Human
ucacgaggucaagaguuugagacc

SEQ ID NO: 1147666 - RNA, 22 nt, Human
ucacuugcaccugggaggugga

SEQ ID NO: 1147667 - RNA, 21 nt, Human
ucaggcacaguggcauguacc

SEQ ID NO: 1147668 - RNA, 22 nt, Human
ucauaguuuuguguuuccucca

SEQ ID NO: 1147669 - RNA, 19 nt, Human
uccaaauuacaaucaguag

SEQ ID NO: 1147670 - RNA, 24 nt, Human
uccagccugggugacagaaugaga

SEQ ID NO: 1147671 - RNA, 22 nt, Human
uccagccuggugacagcgugag

SEQ ID NO: 1147672 - RNA, 23 nt, Human
ucgcgccacugcacuccagccug

SEQ ID NO: 1147673 - RNA, 23 nt, Human
ucgcuugaaaccaggaguucaag

SEQ ID NO: 1147674 - RNA, 20 nt, Human
ucuccaauuuauucaggugu

SEQ ID NO: 1147675 - RNA, 23 nt, Human
ucuccugauguucaccgagaaua

SEQ ID NO: 1147676 - RNA, 21 nt, Human
ucucuacuaaaaauacaaaaa

SEQ ID NO: 1147677 - RNA, 22 nt, Human
ucucugguagccagcuggguuu

SEQ ID NO: 1147678 - RNA, 27 nt, Human
ucuguacucaauacaauuuaucaaaaa

SEQ ID NO: 1147679 - RNA, 22 nt, Human
ugaaaaaauaaagauuaaucaa

SEQ ID NO: 1147680 - RNA, 22 nt, Human
ugaaaaauaaucaacaaaugcc

SEQ ID NO: 1147681 - RNA, 24 nt, Human
ugaaaugaaugcacuauacuaaau

SEQ ID NO: 1147682 - RNA, 21 nt, Human
ugaauuagauaaucuauaacc

SEQ ID NO: 1147683 - RNA, 21 nt, Human
ugaauugaauccaaugguaua

SEQ ID NO: 1147684 - RNA, 20 nt, Human
ugacagaauaaaagacgcaa

SEQ ID NO: 1147685 - RNA, 18 nt, Human
ugagaaaacaaaaagcaa

SEQ ID NO: 1147686 - RNA, 23 nt, Human
ugagaccagccuagccaacaugg

SEQ ID NO: 1147687 - RNA, 24 nt, Human
ugagaccagccuagccaacauggu

SEQ ID NO: 1147688 - RNA, 24 nt, Human
ugagaugggaggaucacaugagcc

SEQ ID NO: 1147689 - RNA, 25 nt, Human
ugagaugggaggaucacaugagcca

SEQ ID NO: 1147690 - RNA, 22 nt, Human
ugagcugaaaucgcgccacugc

SEQ ID NO: 1147691 - RNA, 20 nt, Human
ugaggcaggggcaucacuug

SEQ ID NO: 1147692 - RNA, 20 nt, Human
ugcaaugguggaaucacugg

SEQ ID NO: 1147693 - RNA, 19 nt, Human
ugccaaacacuuucagaaa

SEQ ID NO: 1147694 - RNA, 24 nt, Human
ugccaaacacuuucagaaaguccu

SEQ ID NO: 1147695 - RNA, 22 nt, Human
uggacuccagccugggugacag

SEQ ID NO: 1147696 - RNA, 18 nt, Human
uggagguugcagugagcu

SEQ ID NO: 1147697 - RNA, 19 nt, Human
uggcaaaugucaugcacuc

SEQ ID NO: 1147698 - RNA, 24 nt, Human
uggcgggugucuguagucccagcu

SEQ ID NO: 1147699 - RNA, 19 nt, Human
uggcuaaagacccaaccua

SEQ ID NO: 1147700 - RNA, 24 nt, Human
uggcucacgccuguaaucccagca

SEQ ID NO: 1147701 - RNA, 20 nt, Human
ugggaggaucacaugagcca

SEQ ID NO: 1147702 - RNA, 18 nt, Human
ugggaggaucgcuugaaa

SEQ ID NO: 1147703 - RNA, 19 nt, Human
ugggaggccgaggugggag

SEQ ID NO: 1147704 - RNA, 23 nt, Human
ugggaggccgaggugggaggauc

SEQ ID NO: 1147705 - RNA, 24 nt, Human
ugggaggccgaggugggaggaucg

SEQ ID NO: 1147706 - RNA, 19 nt, Human
ugggaggcugagaugggag

SEQ ID NO: 1147707 - RNA, 24 nt, Human
ugggaggcugagaugggaggauca

SEQ ID NO: 1147708 - RNA, 29 nt, Human
ugggagguggagguugcagugacaacggu

SEQ ID NO: 1147709 - RNA, 24 nt, Human
ugggagguggagguugcagugagc

SEQ ID NO: 1147710 - RNA, 23 nt, Human
ugguggcgggugucuguaguccc

SEQ ID NO: 1147711 - RNA, 24 nt, Human
ugguggcgggugucuguaguccca

SEQ ID NO: 1147712 - RNA, 24 nt, Human
ugguggcucacgccuguaauccca

SEQ ID NO: 1147713 - RNA, 21 nt, Human
uguaaaaaguccaauaugaaa

SEQ ID NO: 1147714 - RNA, 21 nt, Human
uguaaguguauacauaugugu

SEQ ID NO: 1147715 - RNA, 24 nt, Human
uguacggcugggcgugguggcuca

SEQ ID NO: 1147716 - RNA, 22 nt, Human
uguauacauaugugucuguaua

SEQ ID NO: 1147717 - RNA, 24 nt, Human
uguauacauaugugucuguauaua

SEQ ID NO: 1147718 - RNA, 18 nt, Human
uguauauauacacauaua

SEQ ID NO: 1147719 - RNA, 23 nt, Human
ugucuguagucccagcuacucgg

SEQ ID NO: 1147720 - RNA, 24 nt, Human
ugucuguagucccagcuacucggg

SEQ ID NO: 1147721 - RNA, 22 nt, Human
ugucuguauauauacacauaua

SEQ ID NO: 1147722 - RNA, 21 nt, Human
ugugagaagucugaagaauua

SEQ ID NO: 1147723 - RNA, 20 nt, Human
ugugucuguauauauacaca

SEQ ID NO: 1147724 - RNA, 22 nt, Human
ugugucuguauauauacacaua

SEQ ID NO: 1147725 - RNA, 20 nt, Human
uguuguuguuguuuuuuccc

SEQ ID NO: 1147726 - RNA, 20 nt, Human
uguuuuccucuguacagacu

SEQ ID NO: 1147727 - RNA, 26 nt, Human
uuaaaaaauagcauaugaacuuuaca

SEQ ID NO: 1147728 - RNA, 25 nt, Human
uuaaaacauucuuaguucaaaaaaa

SEQ ID NO: 1147729 - RNA, 25 nt, Human
uuaauagucuccugauguucaccga

SEQ ID NO: 1147730 - RNA, 21 nt, Human
uuaccuugaucauguuguugu

SEQ ID NO: 1147731 - RNA, 20 nt, Human
uuacuaggaaagaaaguuuu

SEQ ID NO: 1147732 - RNA, 25 nt, Human
uucaugaacaguacuaacuaaacaa

SEQ ID NO: 1147733 - RNA, 24 nt, Human
uugcaccugggagguggagguugc

SEQ ID NO: 1147734 - RNA, 19 nt, Human
uugcagugagcugaaaucg

SEQ ID NO: 1147735 - RNA, 20 nt, Human
uugcagugagcugaaaucgc

SEQ ID NO: 1147736 - RNA, 22 nt, Human
uugcagugagcugaaaucgcgc

SEQ ID NO: 1147737 - RNA, 24 nt, Human
uugggaggccgaggugggaggauc

SEQ ID NO: 1147738 - RNA, 22 nt, Human
uuguuuccuguaauauacaagu

SEQ ID NO: 1147739 - RNA, 18 nt, Human
uuuaaaacauucuuaguu

SEQ ID NO: 1147740 - RNA, 21 nt, Human
uuucuggcaggguguaauuuu

SEQ ID NO: 1147741 - RNA, 21 nt, Human
uuuggaccuaacaccuaaaau

SEQ ID NO: 1147742 - RNA, 21 nt, Human
uuuggggaggcagaggcgggc

SEQ ID NO: 1147743 - RNA, 28 nt, Human
aaaaggggaaaagccccuuagaaaacca

SEQ ID NO: 1147744 - RNA, 23 nt, Human
aaagguaggaaucugaggaaguu

SEQ ID NO: 1147745 - RNA, 22 nt, Human
aaccauaucaacaggagcaacc

SEQ ID NO: 1147746 - RNA, 18 nt, Human
aaccuauagcaucagccu

SEQ ID NO: 1147747 - RNA, 22 nt, Human
aaccugacuuacucgggaccug

SEQ ID NO: 1147748 - RNA, 23 nt, Human
aacucacuugucuccuccaccuu

SEQ ID NO: 1147749 - RNA, 23 nt, Human
aaggacauaccugagaccggggc

SEQ ID NO: 1147750 - RNA, 24 nt, Human
aaguuagcucagagguggagccaa

SEQ ID NO: 1147751 - RNA, 19 nt, Human
aauucaagaugagauuugg

SEQ ID NO: 1147752 - RNA, 19 nt, Human
acagcauggaggcaaccac

SEQ ID NO: 1147753 - RNA, 20 nt, Human
acagcauggaggcaaccacc

SEQ ID NO: 1147754 - RNA, 21 nt, Human
acucacuugucuccuccaccu

SEQ ID NO: 1147755 - RNA, 21 nt, Human
agaaguuagcucagaggugga

SEQ ID NO: 1147756 - RNA, 24 nt, Human
agcaaaaggaagugcugagaaaaa

SEQ ID NO: 1147757 - RNA, 23 nt, Human
agcauggaggcaaccacccauga

SEQ ID NO: 1147758 - RNA, 19 nt, Human
agcugccauaccauacccc

SEQ ID NO: 1147759 - RNA, 23 nt, Human
aggaagugcugagaaaaagggga

SEQ ID NO: 1147760 - RNA, 19 nt, Human
aggaaguuagguaggugau

SEQ ID NO: 1147761 - RNA, 20 nt, Human
auagcaucagccuauccaca

SEQ ID NO: 1147762 - RNA, 21 nt, Human
auaucauuuuggcauugacag

SEQ ID NO: 1147763 - RNA, 18 nt, Human
aucaacaggagcaaccaa

SEQ ID NO: 1147764 - RNA, 20 nt, Human
auuccauucacuugggaaaa

SEQ ID NO: 1147765 - RNA, 24 nt, Human
auucuaacucacuugucuccucca

SEQ ID NO: 1147766 - RNA, 19 nt, Human
auuuggguggggacacagu

SEQ ID NO: 1147767 - RNA, 22 nt, Human
caaccacccaugauuccauuac

SEQ ID NO: 1147768 - RNA, 22 nt, Human
caugauggcagcaaaaggaagu

SEQ ID NO: 1147769 - RNA, 22 nt, Human
ccagagggacacagggaggggu

SEQ ID NO: 1147770 - RNA, 18 nt, Human
ccccuuagaaaaccauca

SEQ ID NO: 1147771 - RNA, 19 nt, Human
ccuccaucccucugccaca

SEQ ID NO: 1147772 - RNA, 21 nt, Human
ccucuccuccaucccucugcc

SEQ ID NO: 1147773 - RNA, 19 nt, Human
ccucuggugucuccucucc

SEQ ID NO: 1147774 - RNA, 26 nt, Human
ccucuggugucuccucuccuccaucc

SEQ ID NO: 1147775 - RNA, 22 nt, Human
ccugacuuacucgggaccuguu

SEQ ID NO: 1147776 - RNA, 23 nt, Human
cuccuccaccuuauccuuuagcc

SEQ ID NO: 1147777 - RNA, 23 nt, Human
cuccucuccuccaucccucugcc

SEQ ID NO: 1147778 - RNA, 24 nt, Human
cugaguuaaaguuuacaauuauau

SEQ ID NO: 1147779 - RNA, 20 nt, Human
cuucgcccaaaccccucuuc

SEQ ID NO: 1147780 - RNA, 24 nt, Human
gaacagcauggaggcaaccaccca

SEQ ID NO: 1147781 - RNA, 20 nt, Human
gaaguuagguaggugaugac

SEQ ID NO: 1147782 - RNA, 23 nt, Human
gagaacagcauggaggcaaccac

SEQ ID NO: 1147783 - RNA, 19 nt, Human
gaugaccucaggaaagugg

SEQ ID NO: 1147784 - RNA, 22 nt, Human
gauuugcguuuuuuuuuucccu

SEQ ID NO: 1147785 - RNA, 21 nt, Human
gcaaaaggaagugcugagaaa

SEQ ID NO: 1147786 - RNA, 18 nt, Human
gcagcaaaaggaagugcu

SEQ ID NO: 1147787 - RNA, 22 nt, Human
gcuacacccuccuggugcuuuc

SEQ ID NO: 1147788 - RNA, 24 nt, Human
ggaaagggaagcaaacauauccuu

SEQ ID NO: 1147789 - RNA, 18 nt, Human
ggauaagacagccccacc

SEQ ID NO: 1147790 - RNA, 23 nt, Human
ggauuugcguuuuuuuuuucccu

SEQ ID NO: 1147791 - RNA, 22 nt, Human
gggaccuguuggugccaaccug

SEQ ID NO: 1147792 - RNA, 24 nt, Human
gggaggggugaagaaaaccugacu

SEQ ID NO: 1147793 - RNA, 18 nt, Human
gucccacaacaugugggg

SEQ ID NO: 1147794 - RNA, 22 nt, Human
guggucuugggcaccagcaggg

SEQ ID NO: 1147795 - RNA, 24 nt, Human
gugguugggcaggcuggcuuugcu

SEQ ID NO: 1147796 - RNA, 23 nt, Human
uaagacagccccaccuuccaggu

SEQ ID NO: 1147797 - RNA, 18 nt, Human
uaaggacauaccugagac

SEQ ID NO: 1147798 - RNA, 26 nt, Human
uagaaaaccaucagaucccaugagaa

SEQ ID NO: 1147799 - RNA, 24 nt, Human
uagcaagaacaaauuuuacugccu

SEQ ID NO: 1147800 - RNA, 20 nt, Human
uagcaucagccuauccacac

SEQ ID NO: 1147801 - RNA, 20 nt, Human
uaugaugagaacagcaugga

SEQ ID NO: 1147802 - RNA, 25 nt, Human
ucagcaaauuuacaaucauggugga

SEQ ID NO: 1147803 - RNA, 18 nt, Human
ucauuuuauugacuuacc

SEQ ID NO: 1147804 - RNA, 20 nt, Human
ucccuggacgugcucggucc

SEQ ID NO: 1147805 - RNA, 23 nt, Human
ucccuggacgugcucggucccca

SEQ ID NO: 1147806 - RNA, 22 nt, Human
ucgggaccuguuggugccaacc

SEQ ID NO: 1147807 - RNA, 21 nt, Human
ucucugacguggcaguaacuc

SEQ ID NO: 1147808 - RNA, 21 nt, Human
ucucuuggcagauuccucccc

SEQ ID NO: 1147809 - RNA, 19 nt, Human
ugagaaaaaggggaaaagc

SEQ ID NO: 1147810 - RNA, 26 nt, Human
ugagaacagcauggaggcaaccaccc

SEQ ID NO: 1147811 - RNA, 21 nt, Human
ugagaacagcuuauaaugucc

SEQ ID NO: 1147812 - RNA, 22 nt, Human
ugcacauccaacuucgcccaaa

SEQ ID NO: 1147813 - RNA, 24 nt, Human
ugcuacacccuccuggugcuuucu

SEQ ID NO: 1147814 - RNA, 21 nt, Human
uggauacucugagaacagcuu

SEQ ID NO: 1147815 - RNA, 21 nt, Human
uggugcuuucuccucuguauu

SEQ ID NO: 1147816 - RNA, 22 nt, Human
ugguugggcaggcuggcuuugc

SEQ ID NO: 1147817 - RNA, 19 nt, Human
uguuccaggcccugugcuc

SEQ ID NO: 1147818 - RNA, 22 nt, Human
uuaaaguuuacaauuauauaaa

SEQ ID NO: 1147819 - RNA, 24 nt, Human
uucaagaugagauuugggugggga

SEQ ID NO: 1147820 - RNA, 22 nt, Human
uuccauuguugaccuccugggu

SEQ ID NO: 1147821 - RNA, 24 nt, Human
uucuccucuguauuccuuccauug

SEQ ID NO: 1147822 - RNA, 19 nt, Human
uuugaagaaugauuccauu

SEQ ID NO: 1147823 - RNA, 23 nt, Human
uuugcaaagaauuugggcauccc

SEQ ID NO: 1147824 - RNA, 21 nt, Human
uuugcacauccaacuucgccc

SEQ ID NO: 1147825 - RNA, 23 nt, Human
uuuuuuuucccucuggugucucc

SEQ ID NO: 1147826 - RNA, 23 nt, Human
acccacacacacacacacacaca

SEQ ID NO: 1147827 - RNA, 19 nt, Human
acccuaagugguguccggg

SEQ ID NO: 1147828 - RNA, 19 nt, Human
aguucuaaaguucagucaa

SEQ ID NO: 1147829 - RNA, 27 nt, Human
cacacacacacacacacucaugucuaa

SEQ ID NO: 1147830 - RNA, 31 nt, Human
cacacacacacacacucaugucuaaaugugg

SEQ ID NO: 1147831 - RNA, 23 nt, Human
caguaggacaucaaggauuaagc

SEQ ID NO: 1147832 - RNA, 27 nt, Human
ccacacacacacacacacacacucaug

SEQ ID NO: 1147833 - RNA, 20 nt, Human
cccacacacacacacacaca

SEQ ID NO: 1147834 - RNA, 22 nt, Human
cccacacacacacacacacaca

SEQ ID NO: 1147835 - RNA, 19 nt, Human
gaagccuucuugcugcaga

SEQ ID NO: 1147836 - RNA, 21 nt, Human
gaugugaagagcucagaaaga

SEQ ID NO: 1147837 - RNA, 23 nt, Human
ggaagucaagcaguggaauucca

SEQ ID NO: 1147838 - RNA, 18 nt, Human
uaaaaagaagaaucacug

SEQ ID NO: 1147839 - RNA, 27 nt, Human
uaaacccacacacacacacacacacac

SEQ ID NO: 1147840 - RNA, 19 nt, Human
uaagcuaaacccacacaca

SEQ ID NO: 1147841 - RNA, 22 nt, Human
uacauaguuaaaaagaagaauc

SEQ ID NO: 1147842 - RNA, 19 nt, Human
ucacuguaaaauaaaugcu

SEQ ID NO: 1147843 - RNA, 25 nt, Human
ucagaaagacuaacccuaaguggug

SEQ ID NO: 1147844 - RNA, 19 nt, Human
uccaagaagccuucuugcu

SEQ ID NO: 1147845 - RNA, 20 nt, Human
uccaugguauacucagaaaa

SEQ ID NO: 1147846 - RNA, 23 nt, Human
ucuaaaguucagucaaggagacu

SEQ ID NO: 1147847 - RNA, 24 nt, Human
uggaagucaagcaguggaauucca

SEQ ID NO: 1147848 - RNA, 19 nt, Human
ugucuaaauguguuuacua

SEQ ID NO: 1147849 - RNA, 24 nt, Human
uguuagaaugcaaaccuuaucagu

SEQ ID NO: 1147850 - RNA, 24 nt, Human
uuaguucuaaaguucagucaagga

SEQ ID NO: 1147851 - RNA, 24 nt, Human
aaacaggaagguaaguuauaugag

SEQ ID NO: 1147852 - RNA, 21 nt, Human
aaccagaauccauaaauucac

SEQ ID NO: 1147853 - RNA, 24 nt, Human
aagauaaccaaugcaaaaggucac

SEQ ID NO: 1147854 - RNA, 24 nt, Human
aaggccaaagaaacaaaaaaaaaa

SEQ ID NO: 1147855 - RNA, 23 nt, Human
agaaacaaaaaaaaaaccuuuuc

SEQ ID NO: 1147856 - RNA, 18 nt, Human
agagcugggauuugaagc

SEQ ID NO: 1147857 - RNA, 22 nt, Human
aggccaaagaaacaaaaaaaaa

SEQ ID NO: 1147858 - RNA, 26 nt, Human
caacacuccaugaaaggccaaagaaa

SEQ ID NO: 1147859 - RNA, 22 nt, Human
caagauaaccaaugcaaaggua

SEQ ID NO: 1147860 - RNA, 22 nt, Human
caggaagguaaguuauaugaug

SEQ ID NO: 1147861 - RNA, 20 nt, Human
ccaaagaaacaaaaaaaaaa

SEQ ID NO: 1147862 - RNA, 19 nt, Human
ccaugaaaggccaaagaaa

SEQ ID NO: 1147863 - RNA, 24 nt, Human
ccuauagucacauugauuuucauu

SEQ ID NO: 1147864 - RNA, 21 nt, Human
gaaaauucagaaaaaccagaa

SEQ ID NO: 1147865 - RNA, 18 nt, Human
gccaaagaaacaaaaaaa

SEQ ID NO: 1147866 - RNA, 19 nt, Human
ggcuacuagguaaaaagaa

SEQ ID NO: 1147867 - RNA, 25 nt, Human
uaagaauggacaaaucaacacucca

SEQ ID NO: 1147868 - RNA, 21 nt, Human
uaagaauggacaaaucaacag

SEQ ID NO: 1147869 - RNA, 23 nt, Human
uacaagauaaccaaugcaaaggu

SEQ ID NO: 1147870 - RNA, 18 nt, Human
uauaugaugaccaaaaug

SEQ ID NO: 1147871 - RNA, 22 nt, Human
ugaaaggccaaagaaacaaaaa

SEQ ID NO: 1147872 - RNA, 20 nt, Human
ugcuuuugcaaacccaacac

SEQ ID NO: 1147873 - RNA, 18 nt, Human
uuaaauaaacaggaaggu

SEQ ID NO: 1147874 - RNA, 22 nt, Human
aaaaaaccucaaauacagccau

SEQ ID NO: 1147875 - RNA, 22 nt, Human
aaagauacucaacagucucugg

SEQ ID NO: 1147876 - RNA, 24 nt, Human
aaagugcugggauuacaggcguga

SEQ ID NO: 1147877 - RNA, 24 nt, Human
aaagugcugggauuaugggcuuga

SEQ ID NO: 1147878 - RNA, 21 nt, Human
aaauccugaaggcuaugcuuc

SEQ ID NO: 1147879 - RNA, 24 nt, Human
aagguauuuuuaaauguacucaau

SEQ ID NO: 1147880 - RNA, 19 nt, Human
aagugcugggauuacaggc

SEQ ID NO: 1147881 - RNA, 19 nt, Human
aagugcugggauuacaggc

SEQ ID NO: 1147882 - RNA, 26 nt, Human
aagugcugggauuacaggcgugagcc

SEQ ID NO: 1147883 - RNA, 19 nt, Human
aagugcugggauuaugggc

SEQ ID NO: 1147884 - RNA, 19 nt, Human
aagugcugggauuaugggc

SEQ ID NO: 1147885 - RNA, 26 nt, Human
aagugcugggauuaugggcuugagcc

SEQ ID NO: 1147886 - RNA, 22 nt, Human
aaguggaaucuggaugauguga

SEQ ID NO: 1147887 - RNA, 25 nt, Human
acccgccucagccucccaaagugcu

SEQ ID NO: 1147888 - RNA, 24 nt, Human
accugggcuggagugcaauggcau

SEQ ID NO: 1147889 - RNA, 24 nt, Human
accuugugauccacccgccucagc

SEQ ID NO: 1147890 - RNA, 20 nt, Human
acgagguuucaccggauuag

SEQ ID NO: 1147891 - RNA, 20 nt, Human
agaauggagaaaacuggaua

SEQ ID NO: 1147892 - RNA, 21 nt, Human
aggagcaauggcgcccaggac

SEQ ID NO: 1147893 - RNA, 25 nt, Human
aggcgggagugcaguggcacaaucu

SEQ ID NO: 1147894 - RNA, 25 nt, Human
aggcuggagugcaguggcgcgaucu

SEQ ID NO: 1147895 - RNA, 18 nt, Human
aguagcugggacuacagg

SEQ ID NO: 1147896 - RNA, 19 nt, Human
aguagcugggacuacaggc

SEQ ID NO: 1147897 - RNA, 18 nt, Human
aguagcugggauuacagg

SEQ ID NO: 1147898 - RNA, 20 nt, Human
agugcaguggcacaaucucg

SEQ ID NO: 1147899 - RNA, 24 nt, Human
agugcaguggcacaaucucggcuc

SEQ ID NO: 1147900 - RNA, 23 nt, Human
agugcaguggcgcgaucuuggcu

SEQ ID NO: 1147901 - RNA, 24 nt, Human
agugcaguggcgcgaucuuggcuc

SEQ ID NO: 1147902 - RNA, 18 nt, Human
agugcugggauuacaggc

SEQ ID NO: 1147903 - RNA, 24 nt, Human
agugcugggauuaugggcuugagc

SEQ ID NO: 1147904 - RNA, 19 nt, Human
aguuguuaaaggcuuaacu

SEQ ID NO: 1147905 - RNA, 21 nt, Human
augccaaaguuuuaguguaca

SEQ ID NO: 1147906 - RNA, 19 nt, Human
auuuagcucuuggcacucu

SEQ ID NO: 1147907 - RNA, 24 nt, Human
caaagugcugggauuacaggcgug

SEQ ID NO: 1147908 - RNA, 18 nt, Human
caacuacuauagugcucu

SEQ ID NO: 1147909 - RNA, 22 nt, Human
caagcgauucucuugcuucagc

SEQ ID NO: 1147910 - RNA, 22 nt, Human
cacaccauucuccugucucagc

SEQ ID NO: 1147911 - RNA, 24 nt, Human
caccaccccuggcuaauuuuugua

SEQ ID NO: 1147912 - RNA, 24 nt, Human
caccacguugaucaggcuggucuc

SEQ ID NO: 1147913 - RNA, 23 nt, Human
caccaggcuggagugcaguggcg

SEQ ID NO: 1147914 - RNA, 23 nt, Human
cacccgccucagccucccaaagu

SEQ ID NO: 1147915 - RNA, 22 nt, Human
cacgccauucuccugccucagc

SEQ ID NO: 1147916 - RNA, 24 nt, Human
cacucuguuaccugggcuggagug

SEQ ID NO: 1147917 - RNA, 23 nt, Human
cacugcaaucucugccuccuggg

SEQ ID NO: 1147918 - RNA, 20 nt, Human
cagccuccugaguagcuggg

SEQ ID NO: 1147919 - RNA, 27 nt, Human
cagcuagacuuuuuucuaauagagucc

SEQ ID NO: 1147920 - RNA, 22 nt, Human
caggcgcccaccaaccaagccc

SEQ ID NO: 1147921 - RNA, 19 nt, Human
caguggcgcgaucuuggcu

SEQ ID NO: 1147922 - RNA, 20 nt, Human
ccaaagugcugggauuacag

SEQ ID NO: 1147923 - RNA, 22 nt, Human
ccaaagugcugggauuacaggc

SEQ ID NO: 1147924 - RNA, 22 nt, Human
ccaaagugcugggauuacaggc

SEQ ID NO: 1147925 - RNA, 24 nt, Human
ccaaagugcugggauuacaggcgu

SEQ ID NO: 1147926 - RNA, 18 nt, Human
ccaaagugcugggauuau

SEQ ID NO: 1147927 - RNA, 22 nt, Human
ccaaagugcugggauuaugggc

SEQ ID NO: 1147928 - RNA, 23 nt, Human
ccaaagugcugggauuaugggcu

SEQ ID NO: 1147929 - RNA, 21 nt, Human
ccaccaaccaagcccggcuaa

SEQ ID NO: 1147930 - RNA, 26 nt, Human
ccacccgccucagccucccaaagugc

SEQ ID NO: 1147931 - RNA, 24 nt, Human
cccaaagugcugggauuaugggcu

SEQ ID NO: 1147932 - RNA, 19 nt, Human
cccaccaaccaagcccggc

SEQ ID NO: 1147933 - RNA, 20 nt, Human
ccccauaaauuuuauuacca

SEQ ID NO: 1147934 - RNA, 23 nt, Human
cccgaguagcugggacuacaggc

SEQ ID NO: 1147935 - RNA, 24 nt, Human
cccgaguagcugggacuacaggcg

SEQ ID NO: 1147936 - RNA, 23 nt, Human
ccgccucagccucccaaagugcu

SEQ ID NO: 1147937 - RNA, 19 nt, Human
ccuacagguuaaaauaccg

SEQ ID NO: 1147938 - RNA, 24 nt, Human
ccucccggguucacgccauucucc

SEQ ID NO: 1147939 - RNA, 22 nt, Human
ccuccuagcugggauuacaggc

SEQ ID NO: 1147940 - RNA, 24 nt, Human
ccuccuggguucaagcgauucucu

SEQ ID NO: 1147941 - RNA, 21 nt, Human
ccugaccucguggucugccug

SEQ ID NO: 1147942 - RNA, 20 nt, Human
ccugaccuugugauccaccc

SEQ ID NO: 1147943 - RNA, 23 nt, Human
ccugaguagcugggauuacaggc

SEQ ID NO: 1147944 - RNA, 23 nt, Human
ccugaguagcugggauuacaggc

SEQ ID NO: 1147945 - RNA, 24 nt, Human
ccugccucagccucccgaguagcu

SEQ ID NO: 1147946 - RNA, 22 nt, Human
ccugccuuggccucccaaagug

SEQ ID NO: 1147947 - RNA, 21 nt, Human
ccuggguucaagcgauucucu

SEQ ID NO: 1147948 - RNA, 27 nt, Human
ccuugcuuugucaucuuaaggucgguc

SEQ ID NO: 1147949 - RNA, 24 nt, Human
cgccucagccucccaaagugcugg

SEQ ID NO: 1147950 - RNA, 19 nt, Human
cgccucccggguucacgcc

SEQ ID NO: 1147951 - RNA, 24 nt, Human
cgcucugucgcccaggcgggagug

SEQ ID NO: 1147952 - RNA, 22 nt, Human
cggccaccaccaccccuggcua

SEQ ID NO: 1147953 - RNA, 24 nt, Human
cucacucuguuaccugggcuggag

SEQ ID NO: 1147954 - RNA, 24 nt, Human
cucacugcaaucucugccuccugg

SEQ ID NO: 1147955 - RNA, 24 nt, Human
cucagccucccgaguagcugggac

SEQ ID NO: 1147956 - RNA, 21 nt, Human
cucccggguucacgccauucu

SEQ ID NO: 1147957 - RNA, 24 nt, Human
cuccugaccucguggucugccugc

SEQ ID NO: 1147958 - RNA, 24 nt, Human
cuccugaccuugugauccacccgc

SEQ ID NO: 1147959 - RNA, 21 nt, Human
cuccuggguucaagcgauucu

SEQ ID NO: 1147960 - RNA, 23 nt, Human
cucgcucugucaccaggcuggag

SEQ ID NO: 1147961 - RNA, 21 nt, Human
cucucauacugaaguaggcug

SEQ ID NO: 1147962 - RNA, 19 nt, Human
cucugucaccaggcuggag

SEQ ID NO: 1147963 - RNA, 22 nt, Human
cugaguagcugggauuacaggc

SEQ ID NO: 1147964 - RNA, 24 nt, Human
cugcaaucucugccuccuggguuc

SEQ ID NO: 1147965 - RNA, 20 nt, Human
cugccugccuuggccuccca

SEQ ID NO: 1147966 - RNA, 23 nt, Human
cugccuuggccucccaaagugcu

SEQ ID NO: 1147967 - RNA, 24 nt, Human
cuggagugcaauggcaugaucuca

SEQ ID NO: 1147968 - RNA, 19 nt, Human
cuggcauuugaagaacaaa

SEQ ID NO: 1147969 - RNA, 18 nt, Human
cugucgcccaggcgggag

SEQ ID NO: 1147970 - RNA, 21 nt, Human
gaccucguggucugccugccu

SEQ ID NO: 1147971 - RNA, 24 nt, Human
gaccucguggucugccugccuugg

SEQ ID NO: 1147972 - RNA, 22 nt, Human
gaccuugugauccacccgccuc

SEQ ID NO: 1147973 - RNA, 24 nt, Human
gaccuugugauccacccgccucag

SEQ ID NO: 1147974 - RNA, 24 nt, Human
gacggagucucgcucugucaccag

SEQ ID NO: 1147975 - RNA, 19 nt, Human
gacggcacacagaauggag

SEQ ID NO: 1147976 - RNA, 22 nt, Human
gacuacaggcgcccgccaccau

SEQ ID NO: 1147977 - RNA, 22 nt, Human
gagacagucucacucuguuacc

SEQ ID NO: 1147978 - RNA, 21 nt, Human
gagauaaaccuguuggaaaua

SEQ ID NO: 1147979 - RNA, 25 nt, Human
gaguagcugggacuacaggcgcccg

SEQ ID NO: 1147980 - RNA, 25 nt, Human
gaguagcugggauuacaggcggcca

SEQ ID NO: 1147981 - RNA, 18 nt, Human
gauuacaggcgugagcca

SEQ ID NO: 1147982 - RNA, 21 nt, Human
gauuacaggcgugagccacca

SEQ ID NO: 1147983 - RNA, 22 nt, Human
gauuacaggcgugagccaccau

SEQ ID NO: 1147984 - RNA, 22 nt, Human
gauuaugggcuugagccaccgc

SEQ ID NO: 1147985 - RNA, 21 nt, Human
gauucucuugcuucagccucc

SEQ ID NO: 1147986 - RNA, 18 nt, Human
gcccaggacggcacacag

SEQ ID NO: 1147987 - RNA, 24 nt, Human
gcccgacuaauuuuuuuguauuuu

SEQ ID NO: 1147988 - RNA, 20 nt, Human
gccucagccucccgaguagc

SEQ ID NO: 1147989 - RNA, 22 nt, Human
gccuuggccucccaaagugcug

SEQ ID NO: 1147990 - RNA, 24 nt, Human
gcgauucucuugcuucagccuccu

SEQ ID NO: 1147991 - RNA, 19 nt, Human
gcuggagugcaauggcaug

SEQ ID NO: 1147992 - RNA, 19 nt, Human
gcuggagugcaguggcgcg

SEQ ID NO: 1147993 - RNA, 23 nt, Human
gcuggucucaaacuccugaccuc

SEQ ID NO: 1147994 - RNA, 18 nt, Human
ggagugcaguggcacaau

SEQ ID NO: 1147995 - RNA, 23 nt, Human
ggagugcaguggcacaaucucgg

SEQ ID NO: 1147996 - RNA, 24 nt, Human
ggauggucucaaucuccugaccuu

SEQ ID NO: 1147997 - RNA, 24 nt, Human
ggauuacaggcgugagccaccaug

SEQ ID NO: 1147998 - RNA, 20 nt, Human
ggcacucuaaaaaaccucaa

SEQ ID NO: 1147999 - RNA, 24 nt, Human
ggcuggucucaaacuccugaccuc

SEQ ID NO: 1148000 - RNA, 20 nt, Human
ggcuugagccaccgcgccca

SEQ ID NO: 1148001 - RNA, 20 nt, Human
ggucugccugccuuggccuc

SEQ ID NO: 1148002 - RNA, 21 nt, Human
guaaauacaccucauuuccau

SEQ ID NO: 1148003 - RNA, 24 nt, Human
gucucgcucugucaccaggcugga

SEQ ID NO: 1148004 - RNA, 24 nt, Human
gugauccacccgccucagccuccc

SEQ ID NO: 1148005 - RNA, 23 nt, Human
gugguuguguagugcauuugggg

SEQ ID NO: 1148006 - RNA, 24 nt, Human
gugguuguguagugcauuuggggu

SEQ ID NO: 1148007 - RNA, 18 nt, Human
uaauagagucccccauaa

SEQ ID NO: 1148008 - RNA, 23 nt, Human
uaauuuuuguauuuuuaguagag

SEQ ID NO: 1148009 - RNA, 24 nt, Human
uaauuuuuguauuuuuaguagagg

SEQ ID NO: 1148010 - RNA, 24 nt, Human
uacaggcgugagccaccaugccca

SEQ ID NO: 1148011 - RNA, 28 nt, Human
uaccaaauuaccuuuguacaaauauucc

SEQ ID NO: 1148012 - RNA, 20 nt, Human
uaccaggaauaaaaagguuu

SEQ ID NO: 1148013 - RNA, 21 nt, Human
uaccaggaauaaaaagguuuu

SEQ ID NO: 1148014 - RNA, 21 nt, Human
uaccugggcuggagugcaaug

SEQ ID NO: 1148015 - RNA, 24 nt, Human
uaccugggcuggagugcaauggca

SEQ ID NO: 1148016 - RNA, 27 nt, Human
uaccuuugucuuuggaguaaugaguuu

SEQ ID NO: 1148017 - RNA, 21 nt, Human
uacuauagugcucuagugggg

SEQ ID NO: 1148018 - RNA, 26 nt, Human
uagacauaauuauaugaaacuggauc

SEQ ID NO: 1148019 - RNA, 19 nt, Human
uagagucccccauaaauuu

SEQ ID NO: 1148020 - RNA, 22 nt, Human
uagauagauagauagauagaua

SEQ ID NO: 1148021 - RNA, 22 nt, Human
uagauagauagauagauagaua

SEQ ID NO: 1148022 - RNA, 22 nt, Human
uagauagauagauagauagaua

SEQ ID NO: 1148023 - RNA, 22 nt, Human
uagauagauagauagauagaua

SEQ ID NO: 1148024 - RNA, 21 nt, Human
uaguagagacgagguuucacc

SEQ ID NO: 1148025 - RNA, 26 nt, Human
uaguagagacgagguuucaccggauu

SEQ ID NO: 1148026 - RNA, 18 nt, Human
uaucugaacaaucuuaga

SEQ ID NO: 1148027 - RNA, 19 nt, Human
ucaaucuccugaccuugug

SEQ ID NO: 1148028 - RNA, 20 nt, Human
ucaaucuccugaccuuguga

SEQ ID NO: 1148029 - RNA, 24 nt, Human
ucacucuguuaccugggcuggagu

SEQ ID NO: 1148030 - RNA, 18 nt, Human
ucacugcaagcuccgccu

SEQ ID NO: 1148031 - RNA, 18 nt, Human
ucacugcaagcuccgccu

SEQ ID NO: 1148032 - RNA, 21 nt, Human
ucacugcaagcuccgccuugg

SEQ ID NO: 1148033 - RNA, 22 nt, Human
ucacugcaagcuccgccuuggg

SEQ ID NO: 1148034 - RNA, 18 nt, Human
ucacugcaaguuccgccu

SEQ ID NO: 1148035 - RNA, 19 nt, Human
ucacugcaaguuccgccuc

SEQ ID NO: 1148036 - RNA, 24 nt, Human
ucacugcaaguuccgccucccggg

SEQ ID NO: 1148037 - RNA, 24 nt, Human
ucacugcaaucucugccuccuggg

SEQ ID NO: 1148038 - RNA, 25 nt, Human
ucacugcaaucucugccuccugggu

SEQ ID NO: 1148039 - RNA, 22 nt, Human
ucagaaccucaguuguuaaagg

SEQ ID NO: 1148040 - RNA, 23 nt, Human
ucagccucccgaguagcugggac

SEQ ID NO: 1148041 - RNA, 20 nt, Human
ucagccuccugaguagcugg

SEQ ID NO: 1148042 - RNA, 21 nt, Human
uccacccgccucagccuccca

SEQ ID NO: 1148043 - RNA, 24 nt, Human
ucccaaagugcugggauuacaggc

SEQ ID NO: 1148044 - RNA, 24 nt, Human
ucccaaagugcugggauuaugggc

SEQ ID NO: 1148045 - RNA, 21 nt, Human
uccccagccuacuaaggccua

SEQ ID NO: 1148046 - RNA, 24 nt, Human
ucccgaguagcugggacuacaggc

SEQ ID NO: 1148047 - RNA, 21 nt, Human
ucccggguucacgccauucuc

SEQ ID NO: 1148048 - RNA, 24 nt, Human
ucccggguucacgccauucuccug

SEQ ID NO: 1148049 - RNA, 20 nt, Human
uccuagcugggauuacaggc

SEQ ID NO: 1148050 - RNA, 20 nt, Human
uccuagcugggauuacaggc

SEQ ID NO: 1148051 - RNA, 24 nt, Human
uccugaguagcugggauuacaggc

SEQ ID NO: 1148052 - RNA, 21 nt, Human
uccuggguucaagcgauucuc

SEQ ID NO: 1148053 - RNA, 24 nt, Human
uccuggguucaagcgauucucuug

SEQ ID NO: 1148054 - RNA, 24 nt, Human
ucgcccaggcgggagugcaguggc

SEQ ID NO: 1148055 - RNA, 22 nt, Human
ucucaaacuccugaccucgugg

SEQ ID NO: 1148056 - RNA, 22 nt, Human
ucucacucuguuaccugggcug

SEQ ID NO: 1148057 - RNA, 23 nt, Human
ucucacucuguuaccugggcugg

SEQ ID NO: 1148058 - RNA, 24 nt, Human
ucucacucuguuaccugggcugga

SEQ ID NO: 1148059 - RNA, 24 nt, Human
ucuccugccucagccucccgagua

SEQ ID NO: 1148060 - RNA, 22 nt, Human
ucuccugucucagccuccuagc

SEQ ID NO: 1148061 - RNA, 21 nt, Human
ucucgcucugucaccaggcug

SEQ ID NO: 1148062 - RNA, 22 nt, Human
ucucgcucugucaccaggcugg

SEQ ID NO: 1148063 - RNA, 23 nt, Human
ucucgcucugucaccaggcugga

SEQ ID NO: 1148064 - RNA, 18 nt, Human
ucucgcucugucgcccag

SEQ ID NO: 1148065 - RNA, 18 nt, Human
ucucgcucugucgcccag

SEQ ID NO: 1148066 - RNA, 19 nt, Human
ucucgcucugucgcccagg

SEQ ID NO: 1148067 - RNA, 20 nt, Human
ucucgcucugucgcccaggc

SEQ ID NO: 1148068 - RNA, 24 nt, Human
ucucgcucugucgcccaggcggga

SEQ ID NO: 1148069 - RNA, 24 nt, Human
ucugucgcccaggcgggagugcag

SEQ ID NO: 1148070 - RNA, 24 nt, Human
ucuguuaccugggcuggagugcaa

SEQ ID NO: 1148071 - RNA, 20 nt, Human
ucuuaaggacaaaaauaguu

SEQ ID NO: 1148072 - RNA, 23 nt, Human
ugaccuugugauccacccgccuc

SEQ ID NO: 1148073 - RNA, 18 nt, Human
ugagacagagucucgcuc

SEQ ID NO: 1148074 - RNA, 22 nt, Human
ugagacagagucucgcucuguc

SEQ ID NO: 1148075 - RNA, 22 nt, Human
ugagacggagucucgcucuguc

SEQ ID NO: 1148076 - RNA, 24 nt, Human
ugaucaggcuggucucaaacuccu

SEQ ID NO: 1148077 - RNA, 22 nt, Human
ugauccacccgccucagccucc

SEQ ID NO: 1148078 - RNA, 20 nt, Human
ugauuagaauguuggugguu

SEQ ID NO: 1148079 - RNA, 22 nt, Human
ugcaaauucugguaaauugccu

SEQ ID NO: 1148080 - RNA, 22 nt, Human
ugcaguggcacaaucucggcuc

SEQ ID NO: 1148081 - RNA, 22 nt, Human
ugcaguggcgcgaucuuggcuc

SEQ ID NO: 1148082 - RNA, 24 nt, Human
ugccucagccucccgaguagcugg

SEQ ID NO: 1148083 - RNA, 24 nt, Human
ugcugggauuacaggcgugagcca

SEQ ID NO: 1148084 - RNA, 22 nt, Human
ugcuucagccuccugaguagcu

SEQ ID NO: 1148085 - RNA, 24 nt, Human
ugcuucagccuccugaguagcugg

SEQ ID NO: 1148086 - RNA, 18 nt, Human
ugcuuugucaucuuaucc

SEQ ID NO: 1148087 - RNA, 19 nt, Human
uggagugcaauggcaugau

SEQ ID NO: 1148088 - RNA, 24 nt, Human
uggagugcaauggcaugaucucag

SEQ ID NO: 1148089 - RNA, 23 nt, Human
uggagugcaguggcgcgaucuug

SEQ ID NO: 1148090 - RNA, 24 nt, Human
uggagugcaguggcgcgaucuugg

SEQ ID NO: 1148091 - RNA, 23 nt, Human
uggcaaaacaagcuaggagcuag

SEQ ID NO: 1148092 - RNA, 24 nt, Human
uggcacaaucucggcucacugcaa

SEQ ID NO: 1148093 - RNA, 24 nt, Human
uggcaugaucucagcucacugcaa

SEQ ID NO: 1148094 - RNA, 19 nt, Human
uggcucacugcaaguuccg

SEQ ID NO: 1148095 - RNA, 21 nt, Human
ugggacuacaggcgcccgcca

SEQ ID NO: 1148096 - RNA, 22 nt, Human
ugggacuacaggcgcccgccac

SEQ ID NO: 1148097 - RNA, 24 nt, Human
ugggacuacaggcgcccgccacca

SEQ ID NO: 1148098 - RNA, 25 nt, Human
ugggacuacaggcgcccgccaccau

SEQ ID NO: 1148099 - RNA, 21 nt, Human
ugggaugaagauauagauaga

SEQ ID NO: 1148100 - RNA, 21 nt, Human
ugggauuacaggcgcccacca

SEQ ID NO: 1148101 - RNA, 25 nt, Human
ugggauuacaggcgcccaccaacca

SEQ ID NO: 1148102 - RNA, 21 nt, Human
ugggauuacaggcggccacca

SEQ ID NO: 1148103 - RNA, 18 nt, Human
ugggauuacaggcgugag

SEQ ID NO: 1148104 - RNA, 22 nt, Human
ugggauuacaggcgugagccac

SEQ ID NO: 1148105 - RNA, 23 nt, Human
ugggauuacaggcgugagccacc

SEQ ID NO: 1148106 - RNA, 24 nt, Human
ugggauuacaggcgugagccacca

SEQ ID NO: 1148107 - RNA, 25 nt, Human
ugggauuacaggcgugagccaccau

SEQ ID NO: 1148108 - RNA, 18 nt, Human
ugggauuaugggcuugag

SEQ ID NO: 1148109 - RNA, 19 nt, Human
ugggauuaugggcuugagc

SEQ ID NO: 1148110 - RNA, 22 nt, Human
ugggauuaugggcuugagccac

SEQ ID NO: 1148111 - RNA, 23 nt, Human
ugggauuaugggcuugagccacc

SEQ ID NO: 1148112 - RNA, 24 nt, Human
ugggauuaugggcuugagccaccg

SEQ ID NO: 1148113 - RNA, 20 nt, Human
uggguucaagcgauucucuu

SEQ ID NO: 1148114 - RNA, 23 nt, Human
uggguucaagcgauucucuugcu

SEQ ID NO: 1148115 - RNA, 23 nt, Human
uggugguuguguagugcauuugg

SEQ ID NO: 1148116 - RNA, 20 nt, Human
ugucaccaggcuggagugca

SEQ ID NO: 1148117 - RNA, 18 nt, Human
ugucaucuuauccagaag

SEQ ID NO: 1148118 - RNA, 19 nt, Human
uguccaaaaacucuuaagu

SEQ ID NO: 1148119 - RNA, 25 nt, Human
ugucucagccuccuagcugggauua

SEQ ID NO: 1148120 - RNA, 21 nt, Human
ugugaaacuugcuucuugucu

SEQ ID NO: 1148121 - RNA, 20 nt, Human
uguuaccugggcuggagugc

SEQ ID NO: 1148122 - RNA, 18 nt, Human
uuacaggcgcccaccaag

SEQ ID NO: 1148123 - RNA, 22 nt, Human
uuaguagagacgagguuucacc

SEQ ID NO: 1148124 - RNA, 24 nt, Human
uucaaaaagauacucaacagucuc

SEQ ID NO: 1148125 - RNA, 23 nt, Human
uucaagcgauucucuugcuucag

SEQ ID NO: 1148126 - RNA, 24 nt, Human
uucagccuccugaguagcugggau

SEQ ID NO: 1148127 - RNA, 23 nt, Human
uuccccagccuacuaaggccuac

SEQ ID NO: 1148128 - RNA, 18 nt, Human
uucuguguuuaacuguga

SEQ ID NO: 1148129 - RNA, 18 nt, Human
uuggccucccaaagugcu

SEQ ID NO: 1148130 - RNA, 24 nt, Human
uuggcuuuuguccaaaaacucuua

SEQ ID NO: 1148131 - RNA, 22 nt, Human
uuucucuucacuuuuuucuccc

SEQ ID NO: 1148132 - RNA, 22 nt, Human
uuugcaaauucugguaaauugc

SEQ ID NO: 1148133 - RNA, 24 nt, Human
uuuuccaguguacuuaucauccuu

SEQ ID NO: 1148134 - RNA, 21 nt, Human
uuuuguauuuuuaguagagac

SEQ ID NO: 1148135 - RNA, 24 nt, Human
uuuuuaguagagacgagguuucac

SEQ ID NO: 1148136 - RNA, 20 nt, Human
uuuuuguauuuuuaguagag

SEQ ID NO: 1148137 - RNA, 21 nt, Human
uuuuuguauuuuuaguagaga

SEQ ID NO: 1148138 - RNA, 21 nt, Human
uuuuuuguauuuuuaguagag

SEQ ID NO: 1148139 - RNA, 25 nt, Human
uuuuuuuuuuuugagacagagucuc

SEQ ID NO: 1148140 - RNA, 25 nt, Human
uuuuuuuuuuuugagacggagucuc

SEQ ID NO: 1148141 - RNA, 22 nt, Human
uuuuuuuuuuuuuugagacgga

SEQ ID NO: 1148142 - RNA, 18 nt, Human
uuuuuuuuuuuuuuuuug

SEQ ID NO: 1148143 - RNA, 20 nt, Human
uuuuuuuuuuuuuuuuuugg

SEQ ID NO: 1148144 - RNA, 21 nt, Human
aacccuuuguuggaaugcuuu

SEQ ID NO: 1148145 - RNA, 22 nt, Human
aacccuuuguuggaaugcuuuc

SEQ ID NO: 1148146 - RNA, 19 nt, Human
aagagagacuuuaacgaug

SEQ ID NO: 1148147 - RNA, 25 nt, Human
agcuucauucccaucuauaauuuua

SEQ ID NO: 1148148 - RNA, 23 nt, Human
auagaaccuggcaucacccugaa

SEQ ID NO: 1148149 - RNA, 26 nt, Human
auuuugcuuggguaaucccuuuuaau

SEQ ID NO: 1148150 - RNA, 18 nt, Human
caacagcaugggugcaaa

SEQ ID NO: 1148151 - RNA, 23 nt, Human
caacuacaccaagguuuccgaag

SEQ ID NO: 1148152 - RNA, 28 nt, Human
caacuacaccaagguuuccgaagacaau

SEQ ID NO: 1148153 - RNA, 21 nt, Human
caauagcuucuccacccaagc

SEQ ID NO: 1148154 - RNA, 20 nt, Human
cagcacauuaaaaaaaaaga

SEQ ID NO: 1148155 - RNA, 23 nt, Human
cagcaugggugcaaaaaaaaaaa

SEQ ID NO: 1148156 - RNA, 21 nt, Human
cagggugaagagagacuuuaa

SEQ ID NO: 1148157 - RNA, 20 nt, Human
ccugcuaagcuuuguuuccu

SEQ ID NO: 1148158 - RNA, 18 nt, Human
cugcuaagcuuuguuucc

SEQ ID NO: 1148159 - RNA, 21 nt, Human
cuuuccacagaacagaaacua

SEQ ID NO: 1148160 - RNA, 24 nt, Human
guuuuuugcccauacacaugaguc

SEQ ID NO: 1148161 - RNA, 26 nt, Human
uaaaaaaaaagacauuuauucagcgu

SEQ ID NO: 1148162 - RNA, 19 nt, Human
uacacaagcuucauuccca

SEQ ID NO: 1148163 - RNA, 21 nt, Human
uacaccaagguuuccgaagac

SEQ ID NO: 1148164 - RNA, 25 nt, Human
uccgaagacaauagcuucuccaccc

SEQ ID NO: 1148165 - RNA, 20 nt, Human
ucucuggcucuccucuccug

SEQ ID NO: 1148166 - RNA, 19 nt, Human
uguuguaaccuguagcuuc

SEQ ID NO: 1148167 - RNA, 20 nt, Human
uucagaguagacuaacuuua

SEQ ID NO: 1148168 - RNA, 18 nt, Human
aagaagagaucuccaaac

SEQ ID NO: 1148169 - RNA, 18 nt, Human
aagaagagaucuccaaac

SEQ ID NO: 1148170 - RNA, 21 nt, Human
acaaaagaagagaucuccaaa

SEQ ID NO: 1148171 - RNA, 22 nt, Human
acaaaagaagagaucuccaaac

SEQ ID NO: 1148172 - RNA, 22 nt, Human
caaaagaagagaucuccaaacc

SEQ ID NO: 1148173 - RNA, 18 nt, Human
cugucugcgcccaaccga

SEQ ID NO: 1148174 - RNA, 22 nt, Human
uauaauaucacaaaugagcgaa

SEQ ID NO: 1148175 - RNA, 18 nt, Human
ugcgcccaaccgacggcc

SEQ ID NO: 1148176 - RNA, 18 nt, Human
gggggagaagcgaccacu

SEQ ID NO: 1148177 - RNA, 21 nt, Human
gggggagaagcgaccacuguu

SEQ ID NO: 1148178 - RNA, 21 nt, Human
aaacaugcuguagagguuuau

SEQ ID NO: 1148179 - RNA, 19 nt, Human
aaauauuagauauuacagu

SEQ ID NO: 1148180 - RNA, 24 nt, Human
aacauaaauacagacuaaagcaag

SEQ ID NO: 1148181 - RNA, 19 nt, Human
acagaaacaugcuguagag

SEQ ID NO: 1148182 - RNA, 21 nt, Human
accaggucaucauuucugcag

SEQ ID NO: 1148183 - RNA, 18 nt, Human
aggagcaauaagcuauag

SEQ ID NO: 1148184 - RNA, 18 nt, Human
agguuuauagccuaggag

SEQ ID NO: 1148185 - RNA, 23 nt, Human
agugacaccauaacaaaaucuuc

SEQ ID NO: 1148186 - RNA, 26 nt, Human
auaacaaaaucuuccaaauguuacca

SEQ ID NO: 1148187 - RNA, 18 nt, Human
caucaccuaauggcccac

SEQ ID NO: 1148188 - RNA, 22 nt, Human
ccuacagaauucaguacagaaa

SEQ ID NO: 1148189 - RNA, 19 nt, Human
cuaaauguuugagauaacu

SEQ ID NO: 1148190 - RNA, 23 nt, Human
gcaguaauuuucaaauaaguccc

SEQ ID NO: 1148191 - RNA, 27 nt, Human
uacucugugauguuugccagguucccc

SEQ ID NO: 1148192 - RNA, 23 nt, Human
ucaaaaugacagugacaccauaa

SEQ ID NO: 1148193 - RNA, 20 nt, Human
ucuuccaaauguuaccaggu

SEQ ID NO: 1148194 - RNA, 23 nt, Human
ugacaccauaacaaaaucuucca

SEQ ID NO: 1148195 - RNA, 19 nt, Human
ugacagugacaccauaaca

SEQ ID NO: 1148196 - RNA, 23 nt, Human
ugcaucaccuaauggcccacaua

SEQ ID NO: 1148197 - RNA, 20 nt, Human
uguguacguauacucuguga

SEQ ID NO: 1148198 - RNA, 21 nt, Human
uucugcuacaguugccuacag

SEQ ID NO: 1148199 - RNA, 22 nt, Human
uuuauagccuaggagcaauaag

SEQ ID NO: 1148200 - RNA, 18 nt, Human
aauuuccuccuucaccuc

SEQ ID NO: 1148201 - RNA, 22 nt, Human
caggguggagcuggguuuccag

SEQ ID NO: 1148202 - RNA, 19 nt, Human
ccuccugauguaguggaag

SEQ ID NO: 1148203 - RNA, 23 nt, Human
cuuucaauuuccuccuucaccuc

SEQ ID NO: 1148204 - RNA, 22 nt, Human
guggaagcaggguggagcuggg

SEQ ID NO: 1148205 - RNA, 23 nt, Human
uaguggaagcaggguggagcugg

SEQ ID NO: 1148206 - RNA, 20 nt, Human
uggaagcaggguggagcugg

SEQ ID NO: 1148207 - RNA, 20 nt, Human
uggagcuggguuuccagggc

SEQ ID NO: 1148208 - RNA, 26 nt, Human
uguuucacacuuucaauuuccuccuu

SEQ ID NO: 1148209 - RNA, 28 nt, Human
uguuucacacuuucaauuuccuccuuca

SEQ ID NO: 1148210 - RNA, 18 nt, Human
uuucaggauccuuuguag

SEQ ID NO: 1148211 - RNA, 23 nt, Human
aagaggcaguuuucugucagcau

SEQ ID NO: 1148212 - RNA, 22 nt, Human
acccaucccaaccccucccacu

SEQ ID NO: 1148213 - RNA, 23 nt, Human
acccaucccaaccccucccacug

SEQ ID NO: 1148214 - RNA, 21 nt, Human
agauaccuguauugccacaca

SEQ ID NO: 1148215 - RNA, 23 nt, Human
auucuucaauucacauucuaaaa

SEQ ID NO: 1148216 - RNA, 24 nt, Human
auugcacuagaucauuuuuugcua

SEQ ID NO: 1148217 - RNA, 25 nt, Human
caacagauaccuguauugccacaca

SEQ ID NO: 1148218 - RNA, 22 nt, Human
caaccccucccacugaaaacua

SEQ ID NO: 1148219 - RNA, 21 nt, Human
caguacugccacuaacagccu

SEQ ID NO: 1148220 - RNA, 18 nt, Human
cagugguaguaggagacc

SEQ ID NO: 1148221 - RNA, 23 nt, Human
caucccaaccccucccacugaaa

SEQ ID NO: 1148222 - RNA, 20 nt, Human
ccacugaaacaugggauagg

SEQ ID NO: 1148223 - RNA, 24 nt, Human
cccaaccccucccacugaaaacua

SEQ ID NO: 1148224 - RNA, 19 nt, Human
cuuggagcugcuguugcug

SEQ ID NO: 1148225 - RNA, 20 nt, Human
gaugcagugguaguaggaga

SEQ ID NO: 1148226 - RNA, 23 nt, Human
gccacaguugaaauuuucuaacc

SEQ ID NO: 1148227 - RNA, 19 nt, Human
uaacccaaugaugucauua

SEQ ID NO: 1148228 - RNA, 19 nt, Human
uaacuugauaucguaguga

SEQ ID NO: 1148229 - RNA, 22 nt, Human
uacaacagauaccuguauugcc

SEQ ID NO: 1148230 - RNA, 21 nt, Human
uacccaucccaaccccuccca

SEQ ID NO: 1148231 - RNA, 22 nt, Human
uacuguaagaggcaguuuucug

SEQ ID NO: 1148232 - RNA, 24 nt, Human
uagaucauuuuuugcuauccucuu

SEQ ID NO: 1148233 - RNA, 18 nt, Human
uauauaugcauauauaua

SEQ ID NO: 1148234 - RNA, 19 nt, Human
uauauguguauauaugcau

SEQ ID NO: 1148235 - RNA, 19 nt, Human
uauguaacaaugagauuac

SEQ ID NO: 1148236 - RNA, 22 nt, Human
uauguguauauaugcauauaua

SEQ ID NO: 1148237 - RNA, 24 nt, Human
uauguguauauaugcauauauaua

SEQ ID NO: 1148238 - RNA, 20 nt, Human
ucuaaaauaccuauauuagc

SEQ ID NO: 1148239 - RNA, 23 nt, Human
ucugaaguuuuugggauccauuc

SEQ ID NO: 1148240 - RNA, 21 nt, Human
ucuucaauucacauucuaaaa

SEQ ID NO: 1148241 - RNA, 21 nt, Human
ugacugaacugccacaguuga

SEQ ID NO: 1148242 - RNA, 25 nt, Human
ugacugaacugccacaguugaaauu

SEQ ID NO: 1148243 - RNA, 28 nt, Human
ugcacuagaucauuuuuugcuauccucu

SEQ ID NO: 1148244 - RNA, 19 nt, Human
ugccacuaacagccugaag

SEQ ID NO: 1148245 - RNA, 22 nt, Human
uguauauaugcauauauauaua

SEQ ID NO: 1148246 - RNA, 19 nt, Human
ugucaguacugccacuaac

SEQ ID NO: 1148247 - RNA, 20 nt, Human
ugucaguacugccacuaaca

SEQ ID NO: 1148248 - RNA, 19 nt, Human
ugugcaaacacaguaauaa

SEQ ID NO: 1148249 - RNA, 18 nt, Human
uguguauauaugcauaua

SEQ ID NO: 1148250 - RNA, 20 nt, Human
uguguauauaugcauauaua

SEQ ID NO: 1148251 - RNA, 25 nt, Human
uguguauauaugcauauauauauau

SEQ ID NO: 1148252 - RNA, 22 nt, Human
uugaaauuuucuaacccaauga

SEQ ID NO: 1148253 - RNA, 25 nt, Human
uuucugaaguuuuugggauccauuc

SEQ ID NO: 1148254 - RNA, 24 nt, Human
uuugcuauccucuuucugaaguuu

SEQ ID NO: 1148255 - RNA, 18 nt, Human
uuuucacauagcaccagu

SEQ ID NO: 1148256 - RNA, 21 nt, Human
aaaaagaaauaacacccaaag

SEQ ID NO: 1148257 - RNA, 23 nt, Human
aaacugccauaaaaaaacauuug

SEQ ID NO: 1148258 - RNA, 21 nt, Human
aaccacaucuaacuucugguu

SEQ ID NO: 1148259 - RNA, 22 nt, Human
aaguauuccugcugaaacauuu

SEQ ID NO: 1148260 - RNA, 22 nt, Human
acugccauaaaaaaacauuugg

SEQ ID NO: 1148261 - RNA, 23 nt, Human
agaugaccagauaguacuaaaac

SEQ ID NO: 1148262 - RNA, 19 nt, Human
agaugcuaacuugaggaau

SEQ ID NO: 1148263 - RNA, 21 nt, Human
agcaugacuuuggaauaauau

SEQ ID NO: 1148264 - RNA, 21 nt, Human
aguacuaaaacccaggagaga

SEQ ID NO: 1148265 - RNA, 24 nt, Human
auaaaaaaacauuuggacaacuga

SEQ ID NO: 1148266 - RNA, 24 nt, Human
auucugaacaucagggaggaacau

SEQ ID NO: 1148267 - RNA, 20 nt, Human
cacaguguagagaagaaaau

SEQ ID NO: 1148268 - RNA, 20 nt, Human
cacccaaagccaauguauga

SEQ ID NO: 1148269 - RNA, 23 nt, Human
cacccaaagccaauguaugaacc

SEQ ID NO: 1148270 - RNA, 19 nt, Human
cccccaaaacuggguugaa

SEQ ID NO: 1148271 - RNA, 22 nt, Human
cccccaaaacuggguugaacaa

SEQ ID NO: 1148272 - RNA, 21 nt, Human
cccuuaauccacauuuaccca

SEQ ID NO: 1148273 - RNA, 18 nt, Human
ccuacaagcccugauggc

SEQ ID NO: 1148274 - RNA, 21 nt, Human
ccuacaagcccugauggcuaa

SEQ ID NO: 1148275 - RNA, 22 nt, Human
ccuacaagcccugauggcuaaa

SEQ ID NO: 1148276 - RNA, 22 nt, Human
cuagaagcacacagaucaucua

SEQ ID NO: 1148277 - RNA, 30 nt, Human
gcacacccccaaaacuggguugaacaaagg

SEQ ID NO: 1148278 - RNA, 18 nt, Human
ggaaaauaaaaacugcca

SEQ ID NO: 1148279 - RNA, 18 nt, Human
gggcauaggucauucuga

SEQ ID NO: 1148280 - RNA, 21 nt, Human
guauuccugcugaaacauuua

SEQ ID NO: 1148281 - RNA, 27 nt, Human
uaaaaacugccauaaaaaaacauuugg

SEQ ID NO: 1148282 - RNA, 19 nt, Human
uaaacacaguguagagaag

SEQ ID NO: 1148283 - RNA, 25 nt, Human
uaggagaucauccuuauucuuaaau

SEQ ID NO: 1148284 - RNA, 23 nt, Human
uaggcacacccccaaaacugggu

SEQ ID NO: 1148285 - RNA, 20 nt, Human
uauauaaacacaguguagag

SEQ ID NO: 1148286 - RNA, 21 nt, Human
uaugcaggaaaauaaaaacuu

SEQ ID NO: 1148287 - RNA, 23 nt, Human
ucaaaaguaaaccuccuuuuaac

SEQ ID NO: 1148288 - RNA, 18 nt, Human
ucgaugugauaauggcau

SEQ ID NO: 1148289 - RNA, 19 nt, Human
ucgaugugauaauggcauu

SEQ ID NO: 1148290 - RNA, 19 nt, Human
ucuauagauaccucaucug

SEQ ID NO: 1148291 - RNA, 24 nt, Human
ugacuauguugauguuuguuuccc

SEQ ID NO: 1148292 - RNA, 22 nt, Human
ugagccuucugaugugcuagaa

SEQ ID NO: 1148293 - RNA, 21 nt, Human
ugagcuauagggauggggaga

SEQ ID NO: 1148294 - RNA, 20 nt, Human
ugauugugucaaauaaaaaa

SEQ ID NO: 1148295 - RNA, 22 nt, Human
ugccauaaaaaaacauuuggac

SEQ ID NO: 1148296 - RNA, 27 nt, Human
ugcccuacaagcccugauggcuaaaag

SEQ ID NO: 1148297 - RNA, 22 nt, Human
uucaaaaagucaaugucauaga

SEQ ID NO: 1148298 - RNA, 24 nt, Human
uugauguuuguuucccuuaaucca

SEQ ID NO: 1148299 - RNA, 20 nt, Human
aaaaagaagacgaagaagaa

SEQ ID NO: 1148300 - RNA, 21 nt, Human
aaaaagaagacgaagaagaac

SEQ ID NO: 1148301 - RNA, 22 nt, Human
aacaggaagaaaggcucucuga

SEQ ID NO: 1148302 - RNA, 21 nt, Human
aagaagaacaggaagaaagga

SEQ ID NO: 1148303 - RNA, 22 nt, Human
aagaagacgaagaagaacagga

SEQ ID NO: 1148304 - RNA, 22 nt, Human
aagacgaagaagaacaggaaga

SEQ ID NO: 1148305 - RNA, 25 nt, Human
aagaggaaauggguguuuucuuggg

SEQ ID NO: 1148306 - RNA, 24 nt, Human
acgcugagaaucaauuagccaugc

SEQ ID NO: 1148307 - RNA, 24 nt, Human
agaaaaaaaagaagacgaagaaga

SEQ ID NO: 1148308 - RNA, 25 nt, Human
agaaaaaaaagaagacgaagaagaa

SEQ ID NO: 1148309 - RNA, 22 nt, Human
agacgaagaagaacaggaagaa

SEQ ID NO: 1148310 - RNA, 27 nt, Human
agccggugauaauauauuuuugcagcc

SEQ ID NO: 1148311 - RNA, 22 nt, Human
aggaaauggguguuuucuugga

SEQ ID NO: 1148312 - RNA, 19 nt, Human
aggaacuuaaugcaaguca

SEQ ID NO: 1148313 - RNA, 21 nt, Human
auucaggaagcuuaggccucc

SEQ ID NO: 1148314 - RNA, 18 nt, Human
caauuuguccauucgaaa

SEQ ID NO: 1148315 - RNA, 21 nt, Human
caccugcuucuccaaucucca

SEQ ID NO: 1148316 - RNA, 18 nt, Human
cacugcgcugguucagga

SEQ ID NO: 1148317 - RNA, 22 nt, Human
caggaagcuuaggccuccugcu

SEQ ID NO: 1148318 - RNA, 20 nt, Human
caggagcuggggccgcgugg

SEQ ID NO: 1148319 - RNA, 22 nt, Human
cccgcguuuuaccuccauucuu

SEQ ID NO: 1148320 - RNA, 21 nt, Human
ccgcugaaauccaucucgagg

SEQ ID NO: 1148321 - RNA, 20 nt, Human
ccucgcgucacuggccccuc

SEQ ID NO: 1148322 - RNA, 20 nt, Human
cgcagggccaccguggggag

SEQ ID NO: 1148323 - RNA, 22 nt, Human
cucucugcaaauccuggcggag

SEQ ID NO: 1148324 - RNA, 20 nt, Human
cucuuuccugccgcugaaau

SEQ ID NO: 1148325 - RNA, 18 nt, Human
cugccgcaugcucccucc

SEQ ID NO: 1148326 - RNA, 18 nt, Human
cugccgcugaaauccauc

SEQ ID NO: 1148327 - RNA, 23 nt, Human
cuucugccgcaugcucccuccag

SEQ ID NO: 1148328 - RNA, 21 nt, Human
cuuggagguuggcggguuagc

SEQ ID NO: 1148329 - RNA, 24 nt, Human
gaagacgaagaagaacaggaagaa

SEQ ID NO: 1148330 - RNA, 22 nt, Human
gcgcugcucucugcaaauccug

SEQ ID NO: 1148331 - RNA, 21 nt, Human
ggagaaggaggugaaccggcu

SEQ ID NO: 1148332 - RNA, 22 nt, Human
ggagaaggaggugaaccggcuu

SEQ ID NO: 1148333 - RNA, 22 nt, Human
ggggugccccucauagaguuuu

SEQ ID NO: 1148334 - RNA, 19 nt, Human
ggugcgcgcgcagggccac

SEQ ID NO: 1148335 - RNA, 23 nt, Human
uagaaaaaaaagaagacgaagaa

SEQ ID NO: 1148336 - RNA, 25 nt, Human
uagaaaaaaaagaagacgaagaaga

SEQ ID NO: 1148337 - RNA, 19 nt, Human
ucaguuuucaucuuuuuag

SEQ ID NO: 1148338 - RNA, 20 nt, Human
uccugccgcugaaauccauc

SEQ ID NO: 1148339 - RNA, 19 nt, Human
uccuggcggagcugggcgg

SEQ ID NO: 1148340 - RNA, 18 nt, Human
ucuccagaaaaagaaacu

SEQ ID NO: 1148341 - RNA, 22 nt, Human
ucuccugucccucgcucccaaa

SEQ ID NO: 1148342 - RNA, 23 nt, Human
ucuccugucccucgcucccaaac

SEQ ID NO: 1148343 - RNA, 23 nt, Human
ucugcaaauccuggcggagcugg

SEQ ID NO: 1148344 - RNA, 21 nt, Human
ucugccgcaugcucccuccag

SEQ ID NO: 1148345 - RNA, 20 nt, Human
ugaggcuccuuccucuuggg

SEQ ID NO: 1148346 - RNA, 18 nt, Human
ugccgcaugcucccucca

SEQ ID NO: 1148347 - RNA, 18 nt, Human
ugguuguggugaggagag

SEQ ID NO: 1148348 - RNA, 20 nt, Human
ugucccggcugcgcccacac

SEQ ID NO: 1148349 - RNA, 21 nt, Human
uucugccgcaugcucccucca

SEQ ID NO: 1148350 - RNA, 26 nt, Human
uuucugagacccaguuugagaagcgg

SEQ ID NO: 1148351 - RNA, 19 nt, Human
uuucuugggugacgggaga

SEQ ID NO: 1148352 - RNA, 20 nt, Human
aaaagaccauaaauaaauga

SEQ ID NO: 1148353 - RNA, 18 nt, Human
aaaugguucagaaucuau

SEQ ID NO: 1148354 - RNA, 23 nt, Human
aacauacuuagagugauacaaaa

SEQ ID NO: 1148355 - RNA, 23 nt, Human
aacugcucagaagagucaaccuc

SEQ ID NO: 1148356 - RNA, 23 nt, Human
aagaaaaaaauauauuuauauca

SEQ ID NO: 1148357 - RNA, 21 nt, Human
aaggaacugaugauucagaug

SEQ ID NO: 1148358 - RNA, 18 nt, Human
aaugcuugauguuguuug

SEQ ID NO: 1148359 - RNA, 23 nt, Human
aauguuaaauaagugaaaauauu

SEQ ID NO: 1148360 - RNA, 23 nt, Human
acaccaucucaaagcugacacac

SEQ ID NO: 1148361 - RNA, 20 nt, Human
accagacacauuccaucucc

SEQ ID NO: 1148362 - RNA, 19 nt, Human
acuugauuuggugcagcgg

SEQ ID NO: 1148363 - RNA, 19 nt, Human
agaccauaaauaaaugaca

SEQ ID NO: 1148364 - RNA, 23 nt, Human
agcaguguagcgagcacaaccuu

SEQ ID NO: 1148365 - RNA, 21 nt, Human
auaaauggccacgguuucugc

SEQ ID NO: 1148366 - RNA, 20 nt, Human
auacugaaucuucacacucc

SEQ ID NO: 1148367 - RNA, 23 nt, Human
auagaacacaaugccacacaccc

SEQ ID NO: 1148368 - RNA, 22 nt, Human
auccuucacagauugaauacaa

SEQ ID NO: 1148369 - RNA, 21 nt, Human
auuccaucuccuucucucucu

SEQ ID NO: 1148370 - RNA, 25 nt, Human
auuccaucuccuucucucucuccau

SEQ ID NO: 1148371 - RNA, 23 nt, Human
auuuuuuuuccucauuuuucccu

SEQ ID NO: 1148372 - RNA, 23 nt, Human
caaaugcaaacucuuugcauuua

SEQ ID NO: 1148373 - RNA, 20 nt, Human
caacccaccagaacauuuca

SEQ ID NO: 1148374 - RNA, 21 nt, Human
caaccuuucuuuaaaauaaga

SEQ ID NO: 1148375 - RNA, 22 nt, Human
cacacauaucuacguucaucuc

SEQ ID NO: 1148376 - RNA, 26 nt, Human
cagaauguaauaaauauuuauugaug

SEQ ID NO: 1148377 - RNA, 21 nt, Human
caguaugaacuaaauuauaau

SEQ ID NO: 1148378 - RNA, 23 nt, Human
cauaucuacguucaucuccaaaa

SEQ ID NO: 1148379 - RNA, 23 nt, Human
caucuccuucucucucuccauca

SEQ ID NO: 1148380 - RNA, 18 nt, Human
ccaacuaccuuaaccuca

SEQ ID NO: 1148381 - RNA, 19 nt, Human
ccagaacauuucacucgua

SEQ ID NO: 1148382 - RNA, 19 nt, Human
ccuacccuuaccucuggaa

SEQ ID NO: 1148383 - RNA, 23 nt, Human
ccucuggaaaagaugaacugcuc

SEQ ID NO: 1148384 - RNA, 22 nt, Human
cugauuugauguuauagcuuau

SEQ ID NO: 1148385 - RNA, 21 nt, Human
gaacacaaugccacacacccu

SEQ ID NO: 1148386 - RNA, 22 nt, Human
gauugcuaaaaaauaacuuggg

SEQ ID NO: 1148387 - RNA, 19 nt, Human
gccugaggccauuucaucc

SEQ ID NO: 1148388 - RNA, 19 nt, Human
ggagacaaaguauuaaucc

SEQ ID NO: 1148389 - RNA, 19 nt, Human
ggagcucacucggccaggg

SEQ ID NO: 1148390 - RNA, 23 nt, Human
uaaauaaaugacauaaguuaugu

SEQ ID NO: 1148391 - RNA, 19 nt, Human
uaaaugacauaaguuaugu

SEQ ID NO: 1148392 - RNA, 22 nt, Human
uaaccucaagagucacuggcau

SEQ ID NO: 1148393 - RNA, 24 nt, Human
uaacuccagaaaucacucaaaguu

SEQ ID NO: 1148394 - RNA, 27 nt, Human
uaagguccccaaaaaggggugaaucaa

SEQ ID NO: 1148395 - RNA, 24 nt, Human
uaauuacuguagaacuuuccaggu

SEQ ID NO: 1148396 - RNA, 22 nt, Human
uaccagacacauuccaucuccu

SEQ ID NO: 1148397 - RNA, 22 nt, Human
uacccuuaccucuggaaaagau

SEQ ID NO: 1148398 - RNA, 24 nt, Human
uagaacacaaugccacacacccug

SEQ ID NO: 1148399 - RNA, 25 nt, Human
uagaaggcugaugcucuugugaggg

SEQ ID NO: 1148400 - RNA, 23 nt, Human
uaugcaggaaaacaaaggcuacu

SEQ ID NO: 1148401 - RNA, 24 nt, Human
uauugggagacaaaguauuaaucc

SEQ ID NO: 1148402 - RNA, 19 nt, Human
ucaaccucauuucuuuaua

SEQ ID NO: 1148403 - RNA, 19 nt, Human
ucagaagagucaaccucau

SEQ ID NO: 1148404 - RNA, 22 nt, Human
ucuaagaaaaaaauauauuuau

SEQ ID NO: 1148405 - RNA, 24 nt, Human
ucuacuuauucaacaauaaauggu

SEQ ID NO: 1148406 - RNA, 18 nt, Human
ucuccuucucucucucca

SEQ ID NO: 1148407 - RNA, 24 nt, Human
ucuggaaaagaugaacugcucaga

SEQ ID NO: 1148408 - RNA, 25 nt, Human
ucuucaguguguaucaaugcuugau

SEQ ID NO: 1148409 - RNA, 18 nt, Human
ugaaauugccugaggcca

SEQ ID NO: 1148410 - RNA, 24 nt, Human
ugaacuaaauuauaauaugccuua

SEQ ID NO: 1148411 - RNA, 24 nt, Human
ugauacaaaaaauaaacgcacucu

SEQ ID NO: 1148412 - RNA, 18 nt, Human
ugauuugauguuauagcu

SEQ ID NO: 1148413 - RNA, 18 nt, Human
ugcacacaccagcagugu

SEQ ID NO: 1148414 - RNA, 22 nt, Human
ugcccacgggcucagacccaga

SEQ ID NO: 1148415 - RNA, 25 nt, Human
uggaacgugugaaccgaacaauguu

SEQ ID NO: 1148416 - RNA, 23 nt, Human
uggaguuugguauacauaucaua

SEQ ID NO: 1148417 - RNA, 23 nt, Human
uggggccugcauacacaagguga

SEQ ID NO: 1148418 - RNA, 20 nt, Human
ugguauacauaucauaucaa

SEQ ID NO: 1148419 - RNA, 19 nt, Human
uucguucgcauucaacaag

SEQ ID NO: 1148420 - RNA, 23 nt, Human
uuuaugcaggaaaacaaaggcua

SEQ ID NO: 1148421 - RNA, 22 nt, Human
uuugcauuuaguuugcuauuuu

SEQ ID NO: 1148422 - RNA, 24 nt, Human
gggcaguccuuccuguuugccucu

SEQ ID NO: 1148423 - RNA, 19 nt, Human
agauggaauuagaagcccu

SEQ ID NO: 1148424 - RNA, 20 nt, Human
agcagacccuucugugagaa

SEQ ID NO: 1148425 - RNA, 23 nt, Human
cacacucagcuuccugaugaucc

SEQ ID NO: 1148426 - RNA, 23 nt, Human
cacagucacagugcaaugaugcc

SEQ ID NO: 1148427 - RNA, 23 nt, Human
cacucagcuuccugaugauccag

SEQ ID NO: 1148428 - RNA, 23 nt, Human
cagacccuucugugagaagcaga

SEQ ID NO: 1148429 - RNA, 18 nt, Human
ccaccauugcuuuccucu

SEQ ID NO: 1148430 - RNA, 26 nt, Human
ccugugacuaagggcaguauugggac

SEQ ID NO: 1148431 - RNA, 24 nt, Human
ccuugguccuuggcucuccaaggu

SEQ ID NO: 1148432 - RNA, 21 nt, Human
cucugugcaacuaagcuccac

SEQ ID NO: 1148433 - RNA, 19 nt, Human
cuuggaauccacacucagc

SEQ ID NO: 1148434 - RNA, 22 nt, Human
cuugguccuuggcucuccaagg

SEQ ID NO: 1148435 - RNA, 18 nt, Human
cuuuaucaccucauucaa

SEQ ID NO: 1148436 - RNA, 19 nt, Human
gacccuuaaccccuugguc

SEQ ID NO: 1148437 - RNA, 24 nt, Human
gaccuggaugccugugacuaaggg

SEQ ID NO: 1148438 - RNA, 18 nt, Human
guaaaacagaugucaccu

SEQ ID NO: 1148439 - RNA, 20 nt, Human
gugagaagcagagaggggag

SEQ ID NO: 1148440 - RNA, 18 nt, Human
uaaaacagaugucaccuu

SEQ ID NO: 1148441 - RNA, 21 nt, Human
ucccaccauugcuuuccucug

SEQ ID NO: 1148442 - RNA, 23 nt, Human
ucuccaagguaucgaucccacca

SEQ ID NO: 1148443 - RNA, 22 nt, Human
ucuuggaauccacacucagcuu

SEQ ID NO: 1148444 - RNA, 18 nt, Human
ugagaagcagagagggga

SEQ ID NO: 1148445 - RNA, 24 nt, Human
ugagacucuuggaauccacacuca

SEQ ID NO: 1148446 - RNA, 19 nt, Human
uggaauuagaagcccugcu

SEQ ID NO: 1148447 - RNA, 22 nt, Human
uggaauuagaagcccugcuaac

SEQ ID NO: 1148448 - RNA, 26 nt, Human
uggacccuuaaccccuugguccuugg

SEQ ID NO: 1148449 - RNA, 22 nt, Human
uggaugccugugacuaagggca

SEQ ID NO: 1148450 - RNA, 20 nt, Human
ugggacacgugguuggaagc

SEQ ID NO: 1148451 - RNA, 20 nt, Human
uguccauacuguuugggacc

SEQ ID NO: 1148452 - RNA, 20 nt, Human
uguucagcagacccuucugu

SEQ ID NO: 1148453 - RNA, 21 nt, Human
uuucugaaguucugagccuuu

SEQ ID NO: 1148454 - RNA, 20 nt, Human
uuuucugaaguucugagccu

SEQ ID NO: 1148455 - RNA, 24 nt, Human
aauggucagcucucccugaggcuc

SEQ ID NO: 1148456 - RNA, 21 nt, Human
acagcaucuguagcuccuccu

SEQ ID NO: 1148457 - RNA, 19 nt, Human
auuucccucucugcaccuc

SEQ ID NO: 1148458 - RNA, 18 nt, Human
caauccaauccucugacc

SEQ ID NO: 1148459 - RNA, 22 nt, Human
cagcaucuguagcuccuccuug

SEQ ID NO: 1148460 - RNA, 21 nt, Human
cagcgucucagagaagaacag

SEQ ID NO: 1148461 - RNA, 25 nt, Human
ccaccaguguccccacaguccccac

SEQ ID NO: 1148462 - RNA, 18 nt, Human
ccccacaguccccaccug

SEQ ID NO: 1148463 - RNA, 22 nt, Human
ccucaauggucagcucucccug

SEQ ID NO: 1148464 - RNA, 23 nt, Human
ccucugaccccaugaccaccagg

SEQ ID NO: 1148465 - RNA, 21 nt, Human
ccuugucuggggugaggggcc

SEQ ID NO: 1148466 - RNA, 21 nt, Human
cgagggcuggugguccuuagc

SEQ ID NO: 1148467 - RNA, 18 nt, Human
cuccggacccgagggcug

SEQ ID NO: 1148468 - RNA, 24 nt, Human
cuccuugucuggggugaggggccc

SEQ ID NO: 1148469 - RNA, 23 nt, Human
cugagaccauggccagcgucuca

SEQ ID NO: 1148470 - RNA, 24 nt, Human
cugcuccugggccccaauccaauc

SEQ ID NO: 1148471 - RNA, 23 nt, Human
gaacagauaaagccccugcuccu

SEQ ID NO: 1148472 - RNA, 23 nt, Human
gaccccaugaccaccaguguccc

SEQ ID NO: 1148473 - RNA, 22 nt, Human
gccccaauccaauccucugacc

SEQ ID NO: 1148474 - RNA, 21 nt, Human
gcuggugguccuuagcucugg

SEQ ID NO: 1148475 - RNA, 22 nt, Human
gcuggugguccuuagcucugga

SEQ ID NO: 1148476 - RNA, 24 nt, Human
ucaauggucagcucucccugaggc

SEQ ID NO: 1148477 - RNA, 18 nt, Human
uccugguauuucccucuc

SEQ ID NO: 1148478 - RNA, 22 nt, Human
uguccccacaguccccaccugc

SEQ ID NO: 1148479 - RNA, 19 nt, Human
ugucugagaccauggccag

SEQ ID NO: 1148480 - RNA, 18 nt, Human
ugucuggggugaggggcc

SEQ ID NO: 1148481 - RNA, 19 nt, Human
aggagcuuuauucagucag

SEQ ID NO: 1148482 - RNA, 24 nt, Human
agaagaggcggcuugcagggcugg

SEQ ID NO: 1148483 - RNA, 24 nt, Human
agagagcucuguccuucucccuuc

SEQ ID NO: 1148484 - RNA, 18 nt, Human
caccugcccacaccugcc

SEQ ID NO: 1148485 - RNA, 20 nt, Human
ccugccacugggccuuuccc

SEQ ID NO: 1148486 - RNA, 23 nt, Human
cgagaagaggcggcuugcagggc

SEQ ID NO: 1148487 - RNA, 22 nt, Human
gcagggcuggcaccugcccaca

SEQ ID NO: 1148488 - RNA, 21 nt, Human
uccuucucccuucuaccgaga

SEQ ID NO: 1148489 - RNA, 21 nt, Human
ugagugggagcagaugcccuc

SEQ ID NO: 1148490 - RNA, 19 nt, Human
aacaugcaaauacugaaaa

SEQ ID NO: 1148491 - RNA, 21 nt, Human
aauacugaaaaaucaaaauaa

SEQ ID NO: 1148492 - RNA, 22 nt, Human
aauacugaaaaaucaaaauaaa

SEQ ID NO: 1148493 - RNA, 22 nt, Human
agaccgagaaacaugcaaauac

SEQ ID NO: 1148494 - RNA, 21 nt, Human
caacgagcaaagcagucuguc

SEQ ID NO: 1148495 - RNA, 19 nt, Human
cacaagccuccugccucag

SEQ ID NO: 1148496 - RNA, 22 nt, Human
cagccugucaguauuagaccga

SEQ ID NO: 1148497 - RNA, 23 nt, Human
caguauuagaccgagaaacaugc

SEQ ID NO: 1148498 - RNA, 20 nt, Human
ccugcagccguauuucagcu

SEQ ID NO: 1148499 - RNA, 25 nt, Human
cgagaaacaugcaaauacugaaaaa

SEQ ID NO: 1148500 - RNA, 23 nt, Human
gagaaacaugcaaauacugaaaa

SEQ ID NO: 1148501 - RNA, 26 nt, Human
uagaccgagaaacaugcaaauacuga

SEQ ID NO: 1148502 - RNA, 23 nt, Human
aagcaacugcuugaccaucaaac

SEQ ID NO: 1148503 - RNA, 19 nt, Human
aauuauaaaaauggaacuc

SEQ ID NO: 1148504 - RNA, 18 nt, Human
acaaggcauccaugaggg

SEQ ID NO: 1148505 - RNA, 20 nt, Human
acagccucugggggaguggg

SEQ ID NO: 1148506 - RNA, 22 nt, Human
acccucccauccucccgggccc

SEQ ID NO: 1148507 - RNA, 20 nt, Human
acucaggguguuuguggagc

SEQ ID NO: 1148508 - RNA, 19 nt, Human
acugcaagcugagcuccug

SEQ ID NO: 1148509 - RNA, 22 nt, Human
agaucuucauucugaacagccu

SEQ ID NO: 1148510 - RNA, 18 nt, Human
agcaaacucuaggcaaua

SEQ ID NO: 1148511 - RNA, 21 nt, Human
agcaaguuguucccgccaagc

SEQ ID NO: 1148512 - RNA, 22 nt, Human
agcacaucauacaaggauagcu

SEQ ID NO: 1148513 - RNA, 18 nt, Human
agcagaaaaugaaaaugg

SEQ ID NO: 1148514 - RNA, 23 nt, Human
auggaacucuccuccagucaaag

SEQ ID NO: 1148515 - RNA, 31 nt, Human
caaagcagcaaccucuuucaaaaaccuguuu

SEQ ID NO: 1148516 - RNA, 19 nt, Human
caagaugcucauuucuuug

SEQ ID NO: 1148517 - RNA, 20 nt, Human
cacuccucagccagcaagau

SEQ ID NO: 1148518 - RNA, 19 nt, Human
cagccacccucccauccuc

SEQ ID NO: 1148519 - RNA, 20 nt, Human
cagccacccucccauccucc

SEQ ID NO: 1148520 - RNA, 22 nt, Human
cauagaacagauuuccuuuuga

SEQ ID NO: 1148521 - RNA, 23 nt, Human
caucaaagaccuuagacacgacu

SEQ ID NO: 1148522 - RNA, 28 nt, Human
ccaaaauuauaaaaauggaacucuccuc

SEQ ID NO: 1148523 - RNA, 21 nt, Human
ccaagccauaggucuucagcc

SEQ ID NO: 1148524 - RNA, 24 nt, Human
ccagucaaagcagcaaccucuuuc

SEQ ID NO: 1148525 - RNA, 21 nt, Human
cccauggucccuucaacauau

SEQ ID NO: 1148526 - RNA, 18 nt, Human
cccuucaacauauucaga

SEQ ID NO: 1148527 - RNA, 20 nt, Human
ccucccgggcccgccugacc

SEQ ID NO: 1148528 - RNA, 21 nt, Human
ccuucaccaaguccaguuugc

SEQ ID NO: 1148529 - RNA, 21 nt, Human
cggcugcuggcauuggagagg

SEQ ID NO: 1148530 - RNA, 19 nt, Human
cucccgggcccgccugacc

SEQ ID NO: 1148531 - RNA, 20 nt, Human
cugaacagccucugggggag

SEQ ID NO: 1148532 - RNA, 23 nt, Human
cuguaugaacugaaugaucuugu

SEQ ID NO: 1148533 - RNA, 22 nt, Human
cugugacccuguuccauuuccu

SEQ ID NO: 1148534 - RNA, 21 nt, Human
gaaagagcagucggcaagcac

SEQ ID NO: 1148535 - RNA, 20 nt, Human
gaacucuccuccagucaaag

SEQ ID NO: 1148536 - RNA, 22 nt, Human
gagccuguuccaaauuaucuuc

SEQ ID NO: 1148537 - RNA, 18 nt, Human
gagggaggacaucuggcu

SEQ ID NO: 1148538 - RNA, 18 nt, Human
gccacccucccauccucc

SEQ ID NO: 1148539 - RNA, 25 nt, Human
ggcacucaggguguuuguggagcuu

SEQ ID NO: 1148540 - RNA, 18 nt, Human
ggcgaaggcugcgcgccg

SEQ ID NO: 1148541 - RNA, 20 nt, Human
ggcgggcgagguaagcaucc

SEQ ID NO: 1148542 - RNA, 20 nt, Human
uaaaaauggaacucuccucc

SEQ ID NO: 1148543 - RNA, 22 nt, Human
uacuuuuauauuucagcuguuc

SEQ ID NO: 1148544 - RNA, 21 nt, Human
uauuucagcuguuccuguaug

SEQ ID NO: 1148545 - RNA, 24 nt, Human
ucaaagcagcaaccucuuucaaaa

SEQ ID NO: 1148546 - RNA, 23 nt, Human
ucacagcaaacucuaggcaauau

SEQ ID NO: 1148547 - RNA, 24 nt, Human
ucagcagccacccucccauccucc

SEQ ID NO: 1148548 - RNA, 24 nt, Human
ucaucaaagaccuuagacacgaca

SEQ ID NO: 1148549 - RNA, 21 nt, Human
uccaaucuuuaugucucuaau

SEQ ID NO: 1148550 - RNA, 21 nt, Human
uccaggacgggaacauaggug

SEQ ID NO: 1148551 - RNA, 21 nt, Human
uccaggacugagccuguucca

SEQ ID NO: 1148552 - RNA, 23 nt, Human
ucccgccaagcaacugcuugacc

SEQ ID NO: 1148553 - RNA, 21 nt, Human
ucccgcucagcagccacccuc

SEQ ID NO: 1148554 - RNA, 23 nt, Human
ucccgcucagcagccacccuccc

SEQ ID NO: 1148555 - RNA, 19 nt, Human
ucccgggcccgccugaccc

SEQ ID NO: 1148556 - RNA, 19 nt, Human
uccucagccagcaagaugc

SEQ ID NO: 1148557 - RNA, 21 nt, Human
ucugaaaggccccaugguccc

SEQ ID NO: 1148558 - RNA, 22 nt, Human
ucugggguugaaaucauagaac

SEQ ID NO: 1148559 - RNA, 20 nt, Human
ugaaaauggccucaaguagg

SEQ ID NO: 1148560 - RNA, 21 nt, Human
ugaaaggccccauggucccuu

SEQ ID NO: 1148561 - RNA, 21 nt, Human
ugaacagccucugggggagug

SEQ ID NO: 1148562 - RNA, 19 nt, Human
ugacaaggcauccaugagg

SEQ ID NO: 1148563 - RNA, 18 nt, Human
ugagggugaguuucuugg

SEQ ID NO: 1148564 - RNA, 20 nt, Human
uggcuucugagcaggcuggu

SEQ ID NO: 1148565 - RNA, 20 nt, Human
ugguuuugguugauucugcg

SEQ ID NO: 1148566 - RNA, 23 nt, Human
ugucggguggaagacguggcggc

SEQ ID NO: 1148567 - RNA, 24 nt, Human
uuauaaaaauggaacucuccucca

SEQ ID NO: 1148568 - RNA, 19 nt, Human
uuccuucucgcgucaccuu

SEQ ID NO: 1148569 - RNA, 21 nt, Human
uucugacgauuugucauccag

SEQ ID NO: 1148570 - RNA, 21 nt, Human
uucugcgugaaggacuuucuu

SEQ ID NO: 1148571 - RNA, 23 nt, Human
uuucacugcaagcugagcuccug

SEQ ID NO: 1148572 - RNA, 22 nt, Human
aaaguccugccaugcacaaccc

SEQ ID NO: 1148573 - RNA, 28 nt, Human
aaaguuccucucccuggauccucuuuuu

SEQ ID NO: 1148574 - RNA, 19 nt, Human
aacacuuccaccuggaauc

SEQ ID NO: 1148575 - RNA, 21 nt, Human
aagaguucaagaccagccugg

SEQ ID NO: 1148576 - RNA, 19 nt, Human
aaggcucuccuacccucca

SEQ ID NO: 1148577 - RNA, 22 nt, Human
aaggcucuccuacccuccauca

SEQ ID NO: 1148578 - RNA, 20 nt, Human
aaguuccucucccuggaucc

SEQ ID NO: 1148579 - RNA, 26 nt, Human
aaguuccucucccuggauccucuuuu

SEQ ID NO: 1148580 - RNA, 20 nt, Human
aauuuccauuugugcauccc

SEQ ID NO: 1148581 - RNA, 18 nt, Human
acacagaaaaaauaagau

SEQ ID NO: 1148582 - RNA, 22 nt, Human
acacagccaaaaaucaucacau

SEQ ID NO: 1148583 - RNA, 21 nt, Human
accauacugaaggcaaguugc

SEQ ID NO: 1148584 - RNA, 21 nt, Human
accucacugucccuaccccuc

SEQ ID NO: 1148585 - RNA, 22 nt, Human
acucauuuuguccuaccucucu

SEQ ID NO: 1148586 - RNA, 24 nt, Human
agaaaguccugccaugcacaaccc

SEQ ID NO: 1148587 - RNA, 24 nt, Human
agaaaucagagaagacagaaacaa

SEQ ID NO: 1148588 - RNA, 23 nt, Human
agccaaaaaucaucacauagucc

SEQ ID NO: 1148589 - RNA, 21 nt, Human
agcccuaccccaguccucaga

SEQ ID NO: 1148590 - RNA, 19 nt, Human
agccuggucaacauaguga

SEQ ID NO: 1148591 - RNA, 24 nt, Human
agccuggucaacauagugagauuc

SEQ ID NO: 1148592 - RNA, 21 nt, Human
aggcaagagaaauucuggaaa

SEQ ID NO: 1148593 - RNA, 24 nt, Human
agugcccgguugcccaagucaaaa

SEQ ID NO: 1148594 - RNA, 22 nt, Human
aguuguuccuucucugucuucu

SEQ ID NO: 1148595 - RNA, 20 nt, Human
auaaaaaguaauuacaauga

SEQ ID NO: 1148596 - RNA, 24 nt, Human
auaaauuuuguauuuaaaacagag

SEQ ID NO: 1148597 - RNA, 23 nt, Human
aucuugaaauguccucucccuca

SEQ ID NO: 1148598 - RNA, 19 nt, Human
auucuugaacaccacucau

SEQ ID NO: 1148599 - RNA, 22 nt, Human
auuuuguccuaccucucuguga

SEQ ID NO: 1148600 - RNA, 23 nt, Human
caaagaaaucagagaagacagaa

SEQ ID NO: 1148601 - RNA, 22 nt, Human
caacauagugagauucuaucuc

SEQ ID NO: 1148602 - RNA, 24 nt, Human
caagaccagccuggucaacauagu

SEQ ID NO: 1148603 - RNA, 20 nt, Human
cacacagaaaaaauaagaua

SEQ ID NO: 1148604 - RNA, 20 nt, Human
cacaguuacucagcagcacu

SEQ ID NO: 1148605 - RNA, 24 nt, Human
caccuggaauccccaaagaggccc

SEQ ID NO: 1148606 - RNA, 22 nt, Human
cacugcucaaagaaaucagaga

SEQ ID NO: 1148607 - RNA, 19 nt, Human
cacuguguggccguucagc

SEQ ID NO: 1148608 - RNA, 24 nt, Human
cagaaaaaauaagauaccuaggaa

SEQ ID NO: 1148609 - RNA, 24 nt, Human
caucccaugcccagcccacccucc

SEQ ID NO: 1148610 - RNA, 22 nt, Human
ccagcccacccuccaccagccu

SEQ ID NO: 1148611 - RNA, 23 nt, Human
ccagcuagucuauccuucagcca

SEQ ID NO: 1148612 - RNA, 21 nt, Human
cccaugcccagcccacccucc

SEQ ID NO: 1148613 - RNA, 19 nt, Human
ccccaaagaggcccgcuuu

SEQ ID NO: 1148614 - RNA, 24 nt, Human
ccccacacagccagcaugugucca

SEQ ID NO: 1148615 - RNA, 18 nt, Human
ccuccaucauuccucccu

SEQ ID NO: 1148616 - RNA, 24 nt, Human
ccucccucuaccccacacagccag

SEQ ID NO: 1148617 - RNA, 24 nt, Human
ccucugcaguucacucugcugcuu

SEQ ID NO: 1148618 - RNA, 24 nt, Human
ccuggucaacauagugagauucua

SEQ ID NO: 1148619 - RNA, 19 nt, Human
ccuguugugacuuccuaug

SEQ ID NO: 1148620 - RNA, 18 nt, Human
cucccucuaccccacaca

SEQ ID NO: 1148621 - RNA, 23 nt, Human
cucuuccacaacuuuaacuucag

SEQ ID NO: 1148622 - RNA, 23 nt, Human
cugaaaucagacaaugauuagaa

SEQ ID NO: 1148623 - RNA, 21 nt, Human
cugacucacuucuuagcucca

SEQ ID NO: 1148624 - RNA, 24 nt, Human
cugcuaaauauaucucaauuguau

SEQ ID NO: 1148625 - RNA, 19 nt, Human
cuggguucugguuucuuuc

SEQ ID NO: 1148626 - RNA, 21 nt, Human
cuucaugagugcccgguugcc

SEQ ID NO: 1148627 - RNA, 18 nt, Human
cuucucuauucuaagaga

SEQ ID NO: 1148628 - RNA, 29 nt, Human
cuuggcuucucccucuaguuguuccuucu

SEQ ID NO: 1148629 - RNA, 21 nt, Human
cuuuuagccuccacacugguu

SEQ ID NO: 1148630 - RNA, 19 nt, Human
gaaucacaguuacucagca

SEQ ID NO: 1148631 - RNA, 24 nt, Human
gagauucuaucucaauggaucacu

SEQ ID NO: 1148632 - RNA, 18 nt, Human
gcccacccuccaccagcc

SEQ ID NO: 1148633 - RNA, 22 nt, Human
ggggaaucacaguuacucagca

SEQ ID NO: 1148634 - RNA, 21 nt, Human
ggucaugccuaugugugagcu

SEQ ID NO: 1148635 - RNA, 18 nt, Human
guauuuaaaacagagcuc

SEQ ID NO: 1148636 - RNA, 24 nt, Human
guccaacacuuccaccuggaaucc

SEQ ID NO: 1148637 - RNA, 21 nt, Human
gugagauucuaucucaaugga

SEQ ID NO: 1148638 - RNA, 21 nt, Human
uaacugauguguuucaccaua

SEQ ID NO: 1148639 - RNA, 18 nt, Human
uacaucuucuucuucacu

SEQ ID NO: 1148640 - RNA, 23 nt, Human
uacaucuucuucuucacugcauu

SEQ ID NO: 1148641 - RNA, 21 nt, Human
uaccccucuacucucugacuc

SEQ ID NO: 1148642 - RNA, 21 nt, Human
uagaaagaggacuuaccucac

SEQ ID NO: 1148643 - RNA, 22 nt, Human
uagugucuguggagaaacuuuu

SEQ ID NO: 1148644 - RNA, 23 nt, Human
uagugucuguggagaaacuuuuu

SEQ ID NO: 1148645 - RNA, 23 nt, Human
uaguuguuccuucucugucuucu

SEQ ID NO: 1148646 - RNA, 18 nt, Human
ucacucugcugcuucaga

SEQ ID NO: 1148647 - RNA, 19 nt, Human
ucacugcauuuuugugggc

SEQ ID NO: 1148648 - RNA, 24 nt, Human
ucaguguccucucaugggcuuccu

SEQ ID NO: 1148649 - RNA, 20 nt, Human
uccaacacuuccaccuggaa

SEQ ID NO: 1148650 - RNA, 23 nt, Human
ucccucaguuccuauguguuacc

SEQ ID NO: 1148651 - RNA, 22 nt, Human
ucccuggauccucuuuuuccuu

SEQ ID NO: 1148652 - RNA, 21 nt, Human
uccucuuuuuccuucaugagu

SEQ ID NO: 1148653 - RNA, 20 nt, Human
uccuucaugagugcccgguu

SEQ ID NO: 1148654 - RNA, 20 nt, Human
ucgcuugggugccaagaguu

SEQ ID NO: 1148655 - RNA, 24 nt, Human
ucgcuugggugccaagaguucaag

SEQ ID NO: 1148656 - RNA, 24 nt, Human
ucugugaccgugaaagaccggggc

SEQ ID NO: 1148657 - RNA, 18 nt, Human
ugaaaauuuucaggucug

SEQ ID NO: 1148658 - RNA, 18 nt, Human
ugaaauguccucucccuc

SEQ ID NO: 1148659 - RNA, 21 nt, Human
ugaugccaucaccuggggaau

SEQ ID NO: 1148660 - RNA, 21 nt, Human
ugcccagcccacccuccacca

SEQ ID NO: 1148661 - RNA, 23 nt, Human
ugcccagcccacccuccaccagc

SEQ ID NO: 1148662 - RNA, 22 nt, Human
ugccuuggcuucucccucuagu

SEQ ID NO: 1148663 - RNA, 19 nt, Human
uggacacagccaaaaauca

SEQ ID NO: 1148664 - RNA, 20 nt, Human
uggcaaaggucaucucucug

SEQ ID NO: 1148665 - RNA, 23 nt, Human
uggguguccuuguagaaaguccu

SEQ ID NO: 1148666 - RNA, 23 nt, Human
ugucccuaccccucuacucucug

SEQ ID NO: 1148667 - RNA, 22 nt, Human
ugugaauaacaaaaugaagaau

SEQ ID NO: 1148668 - RNA, 21 nt, Human
ugugaccgugaaagacggcug

SEQ ID NO: 1148669 - RNA, 21 nt, Human
ugugacuuccuauggacacag

SEQ ID NO: 1148670 - RNA, 18 nt, Human
uuaaaacagagcucuuga

SEQ ID NO: 1148671 - RNA, 19 nt, Human
uucacucugcugcuucaga

SEQ ID NO: 1148672 - RNA, 23 nt, Human
uuccauuugugcaucccaugccc

SEQ ID NO: 1148673 - RNA, 24 nt, Human
uuccucccucuaccccacacagcc

SEQ ID NO: 1148674 - RNA, 23 nt, Human
uugugcaucccaugcccagccca

SEQ ID NO: 1148675 - RNA, 18 nt, Human
uugugggcugcacuuacc

SEQ ID NO: 1148676 - RNA, 18 nt, Human
uuguuccugccuagucca

SEQ ID NO: 1148677 - RNA, 24 nt, Human
uuuccauuugugcaucccaugccc

SEQ ID NO: 1148678 - RNA, 20 nt, Human
aaugaucaaguaucugcauc

SEQ ID NO: 1148679 - RNA, 22 nt, Human
acccaccgcaaaugaaccugug

SEQ ID NO: 1148680 - RNA, 18 nt, Human
acccagagcaccuagccu

SEQ ID NO: 1148681 - RNA, 21 nt, Human
acccagagcaccuagccucag

SEQ ID NO: 1148682 - RNA, 18 nt, Human
acuucaggaacacagagg

SEQ ID NO: 1148683 - RNA, 24 nt, Human
agauaacccagagcaccuagccuc

SEQ ID NO: 1148684 - RNA, 20 nt, Human
aggcuugauuccuuccuuuu

SEQ ID NO: 1148685 - RNA, 18 nt, Human
cacauucugucucccagg

SEQ ID NO: 1148686 - RNA, 24 nt, Human
cacuagauaacccagagcaccuag

SEQ ID NO: 1148687 - RNA, 24 nt, Human
ccagaaacacauucugucucccag

SEQ ID NO: 1148688 - RNA, 20 nt, Human
ccuagccucagacccaccgc

SEQ ID NO: 1148689 - RNA, 24 nt, Human
ccucagacccaccgcaaaugaacc

SEQ ID NO: 1148690 - RNA, 20 nt, Human
ccuggucagucuagcuucug

SEQ ID NO: 1148691 - RNA, 21 nt, Human
cucagacccaccgcaaaugaa

SEQ ID NO: 1148692 - RNA, 23 nt, Human
cuucaggaagcacuagauaaccc

SEQ ID NO: 1148693 - RNA, 22 nt, Human
uaggcaaagaaugaucaaguau

SEQ ID NO: 1148694 - RNA, 18 nt, Human
ucacaguaucgccugguc

SEQ ID NO: 1148695 - RNA, 20 nt, Human
ucacaguaucgccuggucag

SEQ ID NO: 1148696 - RNA, 26 nt, Human
ucucuguuccucuccgggauuuacug

SEQ ID NO: 1148697 - RNA, 20 nt, Human
uuuugggagugaaaaggacc

SEQ ID NO: 1148698 - RNA, 21 nt, Human
aaaaacaacaacaacaacaac

SEQ ID NO: 1148699 - RNA, 22 nt, Human
aaaacaacaacaacaacaaaac

SEQ ID NO: 1148700 - RNA, 19 nt, Human
aaaagaaaaagaaaaacaa

SEQ ID NO: 1148701 - RNA, 22 nt, Human
aaacaaaaaagaggagagaaca

SEQ ID NO: 1148702 - RNA, 23 nt, Human
aaacaaaaaagaggagagaacag

SEQ ID NO: 1148703 - RNA, 23 nt, Human
aaacaacaacaacaacaacgaaa

SEQ ID NO: 1148704 - RNA, 27 nt, Human
aaacaacaacaacaacaacgaaaacaa

SEQ ID NO: 1148705 - RNA, 24 nt, Human
aagaaaaagaaaaacaacaacaac

SEQ ID NO: 1148706 - RNA, 25 nt, Human
aagaaaaagaaaaacaacaacaaca

SEQ ID NO: 1148707 - RNA, 21 nt, Human
acaacaacaacaacaacgaaa

SEQ ID NO: 1148708 - RNA, 24 nt, Human
acaacaacaacaacaacgaaaaca

SEQ ID NO: 1148709 - RNA, 21 nt, Human
acagggaagcugggguccccu

SEQ ID NO: 1148710 - RNA, 24 nt, Human
acccuccccaccuucccuuucccc

SEQ ID NO: 1148711 - RNA, 20 nt, Human
accggggacugguggagugg

SEQ ID NO: 1148712 - RNA, 22 nt, Human
acuccauuagaaaaccaagaaa

SEQ ID NO: 1148713 - RNA, 20 nt, Human
agaaaaacaacaacaacaac

SEQ ID NO: 1148714 - RNA, 19 nt, Human
agaaaaagaaaaacaacaa

SEQ ID NO: 1148715 - RNA, 18 nt, Human
aggagacuccggcuggcg

SEQ ID NO: 1148716 - RNA, 20 nt, Human
caacaacaacaacaacgaaa

SEQ ID NO: 1148717 - RNA, 25 nt, Human
caacaacaacaacgaaaacaaccgg

SEQ ID NO: 1148718 - RNA, 28 nt, Human
caacaacaacaacgaaaacaaccgguag

SEQ ID NO: 1148719 - RNA, 20 nt, Human
caacaacaacgaaaacaacc

SEQ ID NO: 1148720 - RNA, 26 nt, Human
caacaacgaaaacaaccgguaggcaa

SEQ ID NO: 1148721 - RNA, 19 nt, Human
cagggaagcuggggucccc

SEQ ID NO: 1148722 - RNA, 21 nt, Human
caguggcgguagagaggagac

SEQ ID NO: 1148723 - RNA, 24 nt, Human
cccuccccaccuucccuuucccca

SEQ ID NO: 1148724 - RNA, 18 nt, Human
cccucggacccuccccac

SEQ ID NO: 1148725 - RNA, 19 nt, Human
cggacccuccccaccuucc

SEQ ID NO: 1148726 - RNA, 20 nt, Human
cggacccuccccaccuuccc

SEQ ID NO: 1148727 - RNA, 21 nt, Human
cggcuuuuuuuuuuuuuucuc

SEQ ID NO: 1148728 - RNA, 21 nt, Human
cuuccccucggacccucccca

SEQ ID NO: 1148729 - RNA, 21 nt, Human
gagcgggcacagggaagcugg

SEQ ID NO: 1148730 - RNA, 22 nt, Human
gaguggggugagcgggcacagg

SEQ ID NO: 1148731 - RNA, 19 nt, Human
ggaaucugaaggaaucuug

SEQ ID NO: 1148732 - RNA, 20 nt, Human
ggcuuuuuuuuuuuuuucuc

SEQ ID NO: 1148733 - RNA, 18 nt, Human
ggguccccuuccccucgg

SEQ ID NO: 1148734 - RNA, 20 nt, Human
gguagagaggagacuccggc

SEQ ID NO: 1148735 - RNA, 20 nt, Human
guugcauuuguugauuuauu

SEQ ID NO: 1148736 - RNA, 24 nt, Human
uauuuuuguuuuuaaaguugaaaa

SEQ ID NO: 1148737 - RNA, 24 nt, Human
ucaaaaaaaaaaagaaaaagaaaa

SEQ ID NO: 1148738 - RNA, 25 nt, Human
ucaaaaaaaaaaagaaaaagaaaaa

SEQ ID NO: 1148739 - RNA, 26 nt, Human
ugaaaacaaaaaagaggagagaacag

SEQ ID NO: 1148740 - RNA, 18 nt, Human
ugaaauagaaacaaaagc

SEQ ID NO: 1148741 - RNA, 24 nt, Human
ugagcgggcacagggaagcugggg

SEQ ID NO: 1148742 - RNA, 23 nt, Human
uggaguggggugagcgggcacag

SEQ ID NO: 1148743 - RNA, 19 nt, Human
uggcgguagagaggagacu

SEQ ID NO: 1148744 - RNA, 20 nt, Human
ugggcuacggugugacagug

SEQ ID NO: 1148745 - RNA, 23 nt, Human
ugggguccccuuccccucggacc

SEQ ID NO: 1148746 - RNA, 19 nt, Human
uggggugagcgggcacagg

SEQ ID NO: 1148747 - RNA, 18 nt, Human
uugaaauagaaacaaaag

SEQ ID NO: 1148748 - RNA, 22 nt, Human
uugcauuuguugauuuauuuuu

SEQ ID NO: 1148749 - RNA, 24 nt, Human
uuucaggagaggaggccagagucu

SEQ ID NO: 1148750 - RNA, 20 nt, Human
uuuuuuuucucacaaacugg

SEQ ID NO: 1148751 - RNA, 30 nt, Human
uuuuuuuuuuuuucggcuuuuuuuuuuuuu

SEQ ID NO: 1148752 - RNA, 22 nt, Human
uuuuuuuuuuuuuucggcuuuu

SEQ ID NO: 1148753 - RNA, 21 nt, Human
aaaaacaacaacaacaacaac

SEQ ID NO: 1148754 - RNA, 22 nt, Human
aaaagaaaaagaaaaacaacaa

SEQ ID NO: 1148755 - RNA, 22 nt, Human
aaacaaaaaagaggagagaaca

SEQ ID NO: 1148756 - RNA, 23 nt, Human
aaacaaaaaagaggagagaacag

SEQ ID NO: 1148757 - RNA, 23 nt, Human
aaacaacaacaacaacaacgaaa

SEQ ID NO: 1148758 - RNA, 27 nt, Human
aaacaacaacaacaacaacgaaaacaa

SEQ ID NO: 1148759 - RNA, 19 nt, Human
aaaccggaagagucuggcg

SEQ ID NO: 1148760 - RNA, 23 nt, Human
aaagaaaaaaacaaagaaaaaga

SEQ ID NO: 1148761 - RNA, 22 nt, Human
aaaggcuggggugggacuggug

SEQ ID NO: 1148762 - RNA, 22 nt, Human
aacccauucccccauuuuccuc

SEQ ID NO: 1148763 - RNA, 19 nt, Human
aaccccugucccucguccc

SEQ ID NO: 1148764 - RNA, 21 nt, Human
aaccggugcguggcgggagca

SEQ ID NO: 1148765 - RNA, 21 nt, Human
aaccugccucccucacacccu

SEQ ID NO: 1148766 - RNA, 22 nt, Human
aaccugccucccucacacccug

SEQ ID NO: 1148767 - RNA, 20 nt, Human
aacgcaaggggcagaagccu

SEQ ID NO: 1148768 - RNA, 22 nt, Human
aagaaaaaaacaaagaaaaaga

SEQ ID NO: 1148769 - RNA, 24 nt, Human
aagaaaaagaaaaacaacaacaac

SEQ ID NO: 1148770 - RNA, 25 nt, Human
aagaaaaagaaaaacaacaacaaca

SEQ ID NO: 1148771 - RNA, 22 nt, Human
aaggccagccuggagucaaaga

SEQ ID NO: 1148772 - RNA, 23 nt, Human
aaggcccagcuucucuggggagu

SEQ ID NO: 1148773 - RNA, 20 nt, Human
aaggggcaugaucagaaaag

SEQ ID NO: 1148774 - RNA, 25 nt, Human
aauagaaacaaaagccuaagagaaa

SEQ ID NO: 1148775 - RNA, 21 nt, Human
acaacaacaacaacaacgaaa

SEQ ID NO: 1148776 - RNA, 25 nt, Human
acaacaacaacaacaacgaaaacaa

SEQ ID NO: 1148777 - RNA, 27 nt, Human
acaccaggcucuaaucccccaccugau

SEQ ID NO: 1148778 - RNA, 21 nt, Human
acagggaagcugggguccccu

SEQ ID NO: 1148779 - RNA, 21 nt, Human
acaguccgugaagagagagcc

SEQ ID NO: 1148780 - RNA, 26 nt, Human
acagugcaauguaauucuugcacuuu

SEQ ID NO: 1148781 - RNA, 24 nt, Human
acccuccccaccuucccuuucccc

SEQ ID NO: 1148782 - RNA, 20 nt, Human
accggggacugguggagugg

SEQ ID NO: 1148783 - RNA, 22 nt, Human
accugauggcuggcagcaaaga

SEQ ID NO: 1148784 - RNA, 18 nt, Human
accuugaggggggcuugg

SEQ ID NO: 1148785 - RNA, 22 nt, Human
acuccauuagaaaaccaagaaa

SEQ ID NO: 1148786 - RNA, 22 nt, Human
acucuggccggaaccauccauc

SEQ ID NO: 1148787 - RNA, 19 nt, Human
acugcucaagaugcaaagg

SEQ ID NO: 1148788 - RNA, 18 nt, Human
acugucccaccuugaggg

SEQ ID NO: 1148789 - RNA, 21 nt, Human
acugucccaccuugagggggg

SEQ ID NO: 1148790 - RNA, 23 nt, Human
acuuacaccaggcucuaaucccc

SEQ ID NO: 1148791 - RNA, 20 nt, Human
agaaaaacaacaacaacaac

SEQ ID NO: 1148792 - RNA, 19 nt, Human
agaaaaagaaaaacaacaa

SEQ ID NO: 1148793 - RNA, 21 nt, Human
agaaagaaaaaaacaaagaaa

SEQ ID NO: 1148794 - RNA, 21 nt, Human
agaaaggaagaaagaaaaaaa

SEQ ID NO: 1148795 - RNA, 26 nt, Human
aggaagaaagaaaaaaacaaagaaaa

SEQ ID NO: 1148796 - RNA, 20 nt, Human
aggaagcuccucaaugcccc

SEQ ID NO: 1148797 - RNA, 18 nt, Human
aggaaggagggucagucc

SEQ ID NO: 1148798 - RNA, 18 nt, Human
aggagacuccggcuggcg

SEQ ID NO: 1148799 - RNA, 18 nt, Human
aggcucuaaucccccacc

SEQ ID NO: 1148800 - RNA, 19 nt, Human
aggcuggggugggacuggu

SEQ ID NO: 1148801 - RNA, 18 nt, Human
aggggacagcugugcaga

SEQ ID NO: 1148802 - RNA, 18 nt, Human
agguggugguggggagau

SEQ ID NO: 1148803 - RNA, 25 nt, Human
agguuccagucucuuccuccccaug

SEQ ID NO: 1148804 - RNA, 23 nt, Human
agugaccagcugcccaggagaaa

SEQ ID NO: 1148805 - RNA, 23 nt, Human
agugcaauguaauucuugcacuu

SEQ ID NO: 1148806 - RNA, 22 nt, Human
aguuggguuuaggggacagcug

SEQ ID NO: 1148807 - RNA, 20 nt, Human
caacaacaacaacaacgaaa

SEQ ID NO: 1148808 - RNA, 25 nt, Human
caacaacaacaacgaaaacaaccgg

SEQ ID NO: 1148809 - RNA, 28 nt, Human
caacaacaacaacgaaaacaaccgguag

SEQ ID NO: 1148810 - RNA, 20 nt, Human
caacaacaacgaaaacaacc

SEQ ID NO: 1148811 - RNA, 26 nt, Human
caacaacgaaaacaaccgguaggcaa

SEQ ID NO: 1148812 - RNA, 19 nt, Human
caaggcccagguugcuggc

SEQ ID NO: 1148813 - RNA, 19 nt, Human
caccauuccaaaccugccu

SEQ ID NO: 1148814 - RNA, 24 nt, Human
cacccuccuaaaguuacucaccuu

SEQ ID NO: 1148815 - RNA, 24 nt, Human
cacccugggcucagccagaacucc

SEQ ID NO: 1148816 - RNA, 19 nt, Human
caccuugaggggggcuugg

SEQ ID NO: 1148817 - RNA, 18 nt, Human
cagcauggagagugaggg

SEQ ID NO: 1148818 - RNA, 22 nt, Human
cagcccccucucccuucagccc

SEQ ID NO: 1148819 - RNA, 21 nt, Human
cagccuauccucccccacaga

SEQ ID NO: 1148820 - RNA, 19 nt, Human
cagggaagcuggggucccc

SEQ ID NO: 1148821 - RNA, 20 nt, Human
caggugguugaggcccaccc

SEQ ID NO: 1148822 - RNA, 21 nt, Human
caguacaaggcccagguugcu

SEQ ID NO: 1148823 - RNA, 26 nt, Human
cagucagcccccucucccuucagccc

SEQ ID NO: 1148824 - RNA, 18 nt, Human
cagucggccaaaggccag

SEQ ID NO: 1148825 - RNA, 21 nt, Human
caguggcgguagagaggagac

SEQ ID NO: 1148826 - RNA, 21 nt, Human
caguguccccaggccugucug

SEQ ID NO: 1148827 - RNA, 19 nt, Human
cauccaucuuacuguucuc

SEQ ID NO: 1148828 - RNA, 21 nt, Human
ccaaaccugccucccucacac

SEQ ID NO: 1148829 - RNA, 24 nt, Human
ccaaaccugccucccucacacccu

SEQ ID NO: 1148830 - RNA, 22 nt, Human
ccacagaggcugcugcgcuacu

SEQ ID NO: 1148831 - RNA, 24 nt, Human
ccaccugauggcuggcagcaaaga

SEQ ID NO: 1148832 - RNA, 22 nt, Human
ccacggagggcuggccucugcc

SEQ ID NO: 1148833 - RNA, 24 nt, Human
ccagccuggagucaaagagaccag

SEQ ID NO: 1148834 - RNA, 24 nt, Human
ccaucucuuacuucagucucccuc

SEQ ID NO: 1148835 - RNA, 21 nt, Human
cccacccucuaggggaggcca

SEQ ID NO: 1148836 - RNA, 20 nt, Human
cccacuuuuuuuuuucagcc

SEQ ID NO: 1148837 - RNA, 22 nt, Human
cccagaaugaggaagcuccuca

SEQ ID NO: 1148838 - RNA, 23 nt, Human
ccccaugugcccugcuuugccag

SEQ ID NO: 1148839 - RNA, 24 nt, Human
cccuccccaccuucccuuucccca

SEQ ID NO: 1148840 - RNA, 20 nt, Human
cccuccuaaaguuacucacc

SEQ ID NO: 1148841 - RNA, 18 nt, Human
cccucggacccuccccac

SEQ ID NO: 1148842 - RNA, 20 nt, Human
cccucucccuucagcccucu

SEQ ID NO: 1148843 - RNA, 21 nt, Human
cccugggcucagccagaacuc

SEQ ID NO: 1148844 - RNA, 23 nt, Human
cccugucccucgucccuccucca

SEQ ID NO: 1148845 - RNA, 20 nt, Human
ccuccccacaucgacucugg

SEQ ID NO: 1148846 - RNA, 20 nt, Human
ccucuaggggaggccagccc

SEQ ID NO: 1148847 - RNA, 19 nt, Human
ccucucaaauccuagaaaa

SEQ ID NO: 1148848 - RNA, 21 nt, Human
ccucucuuuccucucaaaucc

SEQ ID NO: 1148849 - RNA, 21 nt, Human
ccugccucccucacacccugc

SEQ ID NO: 1148850 - RNA, 20 nt, Human
ccuggcucagucuuuucuca

SEQ ID NO: 1148851 - RNA, 23 nt, Human
ccugggcucagccagaacuccca

SEQ ID NO: 1148852 - RNA, 19 nt, Human
ccugucugucuaggccugg

SEQ ID NO: 1148853 - RNA, 20 nt, Human
cgaggcaggcaaaaaugcua

SEQ ID NO: 1148854 - RNA, 18 nt, Human
cgcacuuacaccaggcuc

SEQ ID NO: 1148855 - RNA, 19 nt, Human
cggacccuccccaccuucc

SEQ ID NO: 1148856 - RNA, 20 nt, Human
cggacccuccccaccuuccc

SEQ ID NO: 1148857 - RNA, 21 nt, Human
cgugggaaagacagaggcauc

SEQ ID NO: 1148858 - RNA, 20 nt, Human
cuaggggaggccagcccugu

SEQ ID NO: 1148859 - RNA, 22 nt, Human
cucccuucagcccucuguuccc

SEQ ID NO: 1148860 - RNA, 22 nt, Human
cuccuguccccagccaacuguc

SEQ ID NO: 1148861 - RNA, 21 nt, Human
cuggagucaaagagaccagac

SEQ ID NO: 1148862 - RNA, 22 nt, Human
cuggcugucaaagaaagguucc

SEQ ID NO: 1148863 - RNA, 22 nt, Human
cuuugaaagaaaggaagaaaga

SEQ ID NO: 1148864 - RNA, 19 nt, Human
gaagcuccucaaugccccu

SEQ ID NO: 1148865 - RNA, 20 nt, Human
gacucuggccggaaccaucc

SEQ ID NO: 1148866 - RNA, 26 nt, Human
gagcaggugguugaggcccacccucu

SEQ ID NO: 1148867 - RNA, 21 nt, Human
gagcgggcacagggaagcugg

SEQ ID NO: 1148868 - RNA, 23 nt, Human
gagggucaguccuggcugggcuu

SEQ ID NO: 1148869 - RNA, 18 nt, Human
gagugaccagcugcccag

SEQ ID NO: 1148870 - RNA, 22 nt, Human
gaguggggugagcgggcacagg

SEQ ID NO: 1148871 - RNA, 23 nt, Human
gcaacccauucccccauuuuccu

SEQ ID NO: 1148872 - RNA, 23 nt, Human
gcaccauuccaaaccugccuccc

SEQ ID NO: 1148873 - RNA, 20 nt, Human
gccacagagguggugguggg

SEQ ID NO: 1148874 - RNA, 19 nt, Human
gcccuguggggguaccaug

SEQ ID NO: 1148875 - RNA, 19 nt, Human
gccguggcagcccugucuc

SEQ ID NO: 1148876 - RNA, 20 nt, Human
gccuccuuucucuuggaagc

SEQ ID NO: 1148877 - RNA, 19 nt, Human
ggaaucugaaggaaucuug

SEQ ID NO: 1148878 - RNA, 18 nt, Human
ggagauggggugggagag

SEQ ID NO: 1148879 - RNA, 19 nt, Human
ggaggccagcccugugggg

SEQ ID NO: 1148880 - RNA, 22 nt, Human
ggaugggaagaccuucuguggg

SEQ ID NO: 1148881 - RNA, 20 nt, Human
ggcgguugccguggcagccc

SEQ ID NO: 1148882 - RNA, 19 nt, Human
gggaggaauguggggggag

SEQ ID NO: 1148883 - RNA, 23 nt, Human
ggggaggccagcccugugggggu

SEQ ID NO: 1148884 - RNA, 18 nt, Human
ggguccccuuccccucgg

SEQ ID NO: 1148885 - RNA, 22 nt, Human
ggguuucuucuccuuagagcuc

SEQ ID NO: 1148886 - RNA, 20 nt, Human
gguagagaggagacuccggc

SEQ ID NO: 1148887 - RNA, 21 nt, Human
ggugguggggagauggggugg

SEQ ID NO: 1148888 - RNA, 21 nt, Human
gguuucuucuccuuagagcuc

SEQ ID NO: 1148889 - RNA, 20 nt, Human
guagauaaauacgagcccac

SEQ ID NO: 1148890 - RNA, 21 nt, Human
guccagacacaguccgugaag

SEQ ID NO: 1148891 - RNA, 18 nt, Human
guggggagaugggguggg

SEQ ID NO: 1148892 - RNA, 24 nt, Human
guggugguggggagaugggguggg

SEQ ID NO: 1148893 - RNA, 26 nt, Human
guugaggcccacccucuaggggaggc

SEQ ID NO: 1148894 - RNA, 20 nt, Human
guugcauuuguugauuuauu

SEQ ID NO: 1148895 - RNA, 23 nt, Human
uaaaaacacagacaguacaaggc

SEQ ID NO: 1148896 - RNA, 25 nt, Human
uaaaaacacagacaguacaaggccc

SEQ ID NO: 1148897 - RNA, 18 nt, Human
uaaagucuagcacccucc

SEQ ID NO: 1148898 - RNA, 24 nt, Human
uaccauggaggccacagagguggu

SEQ ID NO: 1148899 - RNA, 20 nt, Human
uacuucagucucccuccugc

SEQ ID NO: 1148900 - RNA, 18 nt, Human
uagaaaauacauauggug

SEQ ID NO: 1148901 - RNA, 23 nt, Human
uagaauggaacagucagcccccu

SEQ ID NO: 1148902 - RNA, 23 nt, Human
uaguuccuggcucagucuuuucu

SEQ ID NO: 1148903 - RNA, 19 nt, Human
uaugguggggaagcuaagg

SEQ ID NO: 1148904 - RNA, 25 nt, Human
uauuggcuuuucccccuuucugguc

SEQ ID NO: 1148905 - RNA, 25 nt, Human
ucaaaaaaaaaaagaaaaagaaaaa

SEQ ID NO: 1148906 - RNA, 20 nt, Human
ucaguccuggcugggcuucc

SEQ ID NO: 1148907 - RNA, 30 nt, Human
ucauuucuauuuugcaacccauucccccaa

SEQ ID NO: 1148908 - RNA, 23 nt, Human
uccaaaccugccucccucacacc

SEQ ID NO: 1148909 - RNA, 20 nt, Human
uccacuuugcaaaacggagc

SEQ ID NO: 1148910 - RNA, 22 nt, Human
ucccaggaucuccccacccugg

SEQ ID NO: 1148911 - RNA, 22 nt, Human
uccccagccaacuguccugucc

SEQ ID NO: 1148912 - RNA, 19 nt, Human
uccccucggacccucccca

SEQ ID NO: 1148913 - RNA, 27 nt, Human
ucccucgucccuccuccacuuugcaaa

SEQ ID NO: 1148914 - RNA, 24 nt, Human
uccgggguacugucccaccuugag

SEQ ID NO: 1148915 - RNA, 22 nt, Human
uccuccacuuugcaaaacggag

SEQ ID NO: 1148916 - RNA, 23 nt, Human
uccucucuuuccucucaaauccu

SEQ ID NO: 1148917 - RNA, 18 nt, Human
ucgugcgccugccuuccu

SEQ ID NO: 1148918 - RNA, 21 nt, Human
ucuaaaccuuuuugccaccau

SEQ ID NO: 1148919 - RNA, 23 nt, Human
ucuccccacccugggcucagcca

SEQ ID NO: 1148920 - RNA, 18 nt, Human
ucucccucugccaucucu

SEQ ID NO: 1148921 - RNA, 21 nt, Human
ucugagguucccauucugggc

SEQ ID NO: 1148922 - RNA, 22 nt, Human
ucugggccggagcccucucagg

SEQ ID NO: 1148923 - RNA, 26 nt, Human
ugaaaacaaaaaagaggagagaacag

SEQ ID NO: 1148924 - RNA, 18 nt, Human
ugaaauagaaacaaaagc

SEQ ID NO: 1148925 - RNA, 18 nt, Human
ugaaauagaaacaaaagc

SEQ ID NO: 1148926 - RNA, 19 nt, Human
ugaaauagaaacaaaagcc

SEQ ID NO: 1148927 - RNA, 21 nt, Human
ugaaauagaaacaaaagccua

SEQ ID NO: 1148928 - RNA, 24 nt, Human
ugagcgggcacagggaagcugggg

SEQ ID NO: 1148929 - RNA, 20 nt, Human
ugcaaaccuuugaaagaaag

SEQ ID NO: 1148930 - RNA, 23 nt, Human
ugcaaaccuuugaaagaaaggaa

SEQ ID NO: 1148931 - RNA, 23 nt, Human
ugcaacccauucccccauuuucc

SEQ ID NO: 1148932 - RNA, 19 nt, Human
ugcagaagagacucacagg

SEQ ID NO: 1148933 - RNA, 18 nt, Human
ugccaaagcuagaaugga

SEQ ID NO: 1148934 - RNA, 23 nt, Human
uggaaagaacagugacguggaag

SEQ ID NO: 1148935 - RNA, 26 nt, Human
uggaacagucagcccccucucccuuc

SEQ ID NO: 1148936 - RNA, 20 nt, Human
uggaagccagacauauccuc

SEQ ID NO: 1148937 - RNA, 20 nt, Human
uggaccuguugggcucaugu

SEQ ID NO: 1148938 - RNA, 23 nt, Human
uggaguggggugagcgggcacag

SEQ ID NO: 1148939 - RNA, 23 nt, Human
uggauuaagcucauuucuauuuu

SEQ ID NO: 1148940 - RNA, 18 nt, Human
uggcagauccuaguugga

SEQ ID NO: 1148941 - RNA, 19 nt, Human
uggccuaagacauacagaa

SEQ ID NO: 1148942 - RNA, 19 nt, Human
uggcgguagagaggagacu

SEQ ID NO: 1148943 - RNA, 23 nt, Human
uggcuucuaaagucuagcacccu

SEQ ID NO: 1148944 - RNA, 20 nt, Human
ugggcuacggugugacagug

SEQ ID NO: 1148945 - RNA, 18 nt, Human
uggggagaugggguggga

SEQ ID NO: 1148946 - RNA, 19 nt, Human
uggggagauggggugggag

SEQ ID NO: 1148947 - RNA, 18 nt, Human
uggggagugaccagcugc

SEQ ID NO: 1148948 - RNA, 23 nt, Human
ugggguccccuuccccucggacc

SEQ ID NO: 1148949 - RNA, 19 nt, Human
uggggugagcgggcacagg

SEQ ID NO: 1148950 - RNA, 21 nt, Human
uggggugggagagaaggggca

SEQ ID NO: 1148951 - RNA, 23 nt, Human
uggggugggagagaaggggcaac

SEQ ID NO: 1148952 - RNA, 22 nt, Human
ugggugagcagacagucggcca

SEQ ID NO: 1148953 - RNA, 21 nt, Human
uggugguggggagauggggug

SEQ ID NO: 1148954 - RNA, 23 nt, Human
ugucaaagaaagguuccagucuc

SEQ ID NO: 1148955 - RNA, 18 nt, Human
ugugcagagagauggggc

SEQ ID NO: 1148956 - RNA, 19 nt, Human
ugugcagagagauggggca

SEQ ID NO: 1148957 - RNA, 18 nt, Human
uguggugugguguccgga

SEQ ID NO: 1148958 - RNA, 23 nt, Human
uuaaugcaaaccuuugaaagaaa

SEQ ID NO: 1148959 - RNA, 22 nt, Human
uuagugguuuuaaaaacacaga

SEQ ID NO: 1148960 - RNA, 22 nt, Human
uuccagucucuuccuccccaug

SEQ ID NO: 1148961 - RNA, 22 nt, Human
uuccuggcucagucuuuucuca

SEQ ID NO: 1148962 - RNA, 21 nt, Human
uucuauuggcuuuucccccuu

SEQ ID NO: 1148963 - RNA, 20 nt, Human
uucuccugcaucuaaaccuu

SEQ ID NO: 1148964 - RNA, 23 nt, Human
uucucugagguucccauucuggg

SEQ ID NO: 1148965 - RNA, 22 nt, Human
uugcauuuguugauuuauuuuu

SEQ ID NO: 1148966 - RNA, 22 nt, Human
uugcuggcuggugaaaccccug

SEQ ID NO: 1148967 - RNA, 24 nt, Human
uuucaggagaggaggccagagucu

SEQ ID NO: 1148968 - RNA, 22 nt, Human
uuucucaggggaguggcacccc

SEQ ID NO: 1148969 - RNA, 19 nt, Human
gccugcuccuacuguuguc

SEQ ID NO: 1148970 - RNA, 21 nt, Human
aaaagaagcaguaggagacaa

SEQ ID NO: 1148971 - RNA, 22 nt, Human
aaacagaaagcccaggcauagu

SEQ ID NO: 1148972 - RNA, 21 nt, Human
aaacauaagcgacagagacaa

SEQ ID NO: 1148973 - RNA, 20 nt, Human
aaacuccuagcaugagagaa

SEQ ID NO: 1148974 - RNA, 23 nt, Human
aaacuccuagcaugagagaaaug

SEQ ID NO: 1148975 - RNA, 25 nt, Human
aagaacaagaaaagaagccgguacc

SEQ ID NO: 1148976 - RNA, 21 nt, Human
aagaagaaacaaauucacuaa

SEQ ID NO: 1148977 - RNA, 26 nt, Human
acaaauacaaccuuucacugucacac

SEQ ID NO: 1148978 - RNA, 23 nt, Human
accccaaguagaguaaaggugga

SEQ ID NO: 1148979 - RNA, 21 nt, Human
accugggaaucuagagggcuc

SEQ ID NO: 1148980 - RNA, 27 nt, Human
agaaacuggcuguguguccucagacaa

SEQ ID NO: 1148981 - RNA, 19 nt, Human
agaagcuugcauucccuag

SEQ ID NO: 1148982 - RNA, 19 nt, Human
agaggcaaagacagagaag

SEQ ID NO: 1148983 - RNA, 26 nt, Human
agauguugaaaaucuucggaaaagcc

SEQ ID NO: 1148984 - RNA, 26 nt, Human
agcgacagagacaagaacaucagaaa

SEQ ID NO: 1148985 - RNA, 19 nt, Human
aggaagaguagaggcaaag

SEQ ID NO: 1148986 - RNA, 23 nt, Human
aggaauagaggaagaguagaggc

SEQ ID NO: 1148987 - RNA, 20 nt, Human
aggagagguuguuugcugag

SEQ ID NO: 1148988 - RNA, 19 nt, Human
aggcaagauuacagguucu

SEQ ID NO: 1148989 - RNA, 25 nt, Human
aggggauggaugagaauaaagaaca

SEQ ID NO: 1148990 - RNA, 23 nt, Human
agguggacugcaaaaaacagcuu

SEQ ID NO: 1148991 - RNA, 19 nt, Human
aguaggagacaaaugagaa

SEQ ID NO: 1148992 - RNA, 18 nt, Human
auucuggucccaaacucc

SEQ ID NO: 1148993 - RNA, 19 nt, Human
caaccuuucacugucacac

SEQ ID NO: 1148994 - RNA, 18 nt, Human
caagggaguccccaaacc

SEQ ID NO: 1148995 - RNA, 21 nt, Human
cagcacugagaagugaaggaa

SEQ ID NO: 1148996 - RNA, 24 nt, Human
cagcacugagaagugaaggaauau

SEQ ID NO: 1148997 - RNA, 25 nt, Human
cagcagaauuguacaauaugacauu

SEQ ID NO: 1148998 - RNA, 22 nt, Human
caucagaaagggccgcugugac

SEQ ID NO: 1148999 - RNA, 23 nt, Human
ccagccuuuacaaauacaaccuu

SEQ ID NO: 1149000 - RNA, 19 nt, Human
ccaggcauagucugaugcc

SEQ ID NO: 1149001 - RNA, 20 nt, Human
cccuggguuucuguuuucuc

SEQ ID NO: 1149002 - RNA, 18 nt, Human
cuagcaaugaguucaucu

SEQ ID NO: 1149003 - RNA, 20 nt, Human
cuagcaugagagaaaugugg

SEQ ID NO: 1149004 - RNA, 18 nt, Human
cuauauuuuacccaugag

SEQ ID NO: 1149005 - RNA, 20 nt, Human
cucagauccucaacgucuuc

SEQ ID NO: 1149006 - RNA, 22 nt, Human
cucgggucguggcugccgaugg

SEQ ID NO: 1149007 - RNA, 19 nt, Human
gaaacccauggauuuggga

SEQ ID NO: 1149008 - RNA, 21 nt, Human
gacagagacaagaacaucaga

SEQ ID NO: 1149009 - RNA, 19 nt, Human
gagaaacauaagcgacaga

SEQ ID NO: 1149010 - RNA, 19 nt, Human
gaggaaacuaaggaccugg

SEQ ID NO: 1149011 - RNA, 23 nt, Human
gauggaugagaauaaagaacaag

SEQ ID NO: 1149012 - RNA, 21 nt, Human
gcaaaaaacagcuuagucuga

SEQ ID NO: 1149013 - RNA, 18 nt, Human
gcaugcuuugaucuuucu

SEQ ID NO: 1149014 - RNA, 23 nt, Human
gccaucaacaggaacuugaugac

SEQ ID NO: 1149015 - RNA, 24 nt, Human
gcuaacccaaagguacuaggccca

SEQ ID NO: 1149016 - RNA, 20 nt, Human
ggagacaaaugagaagguua

SEQ ID NO: 1149017 - RNA, 24 nt, Human
ggggauuucugcucuuccagccuu

SEQ ID NO: 1149018 - RNA, 22 nt, Human
guccccaaacccuggguuucug

SEQ ID NO: 1149019 - RNA, 19 nt, Human
uaaaacagaaagcccaggc

SEQ ID NO: 1149020 - RNA, 21 nt, Human
uaagcgacagagacaagaaca

SEQ ID NO: 1149021 - RNA, 21 nt, Human
uagaggcaaagacagagaagg

SEQ ID NO: 1149022 - RNA, 25 nt, Human
uagcaaaaggcggaaauauuuugaa

SEQ ID NO: 1149023 - RNA, 20 nt, Human
uagcaugagagaaaugugga

SEQ ID NO: 1149024 - RNA, 24 nt, Human
uagcaugagagaaauguggaccuu

SEQ ID NO: 1149025 - RNA, 23 nt, Human
uaggagacaaaugagaagguuaa

SEQ ID NO: 1149026 - RNA, 19 nt, Human
uagucuccaugaugguuua

SEQ ID NO: 1149027 - RNA, 21 nt, Human
uaucaagaagaaacaaauuca

SEQ ID NO: 1149028 - RNA, 25 nt, Human
uaucaagaagaaacaaauucacuaa

SEQ ID NO: 1149029 - RNA, 21 nt, Human
uaugcaugcuuugaucuuucu

SEQ ID NO: 1149030 - RNA, 23 nt, Human
ucagugcacagcugaguuuuuau

SEQ ID NO: 1149031 - RNA, 20 nt, Human
uccaagggaagaacauuuga

SEQ ID NO: 1149032 - RNA, 24 nt, Human
uccaggaguuuagcauguaggagg

SEQ ID NO: 1149033 - RNA, 19 nt, Human
uccucaacgucuucaacug

SEQ ID NO: 1149034 - RNA, 24 nt, Human
uccuuggcucugcaucuaagaaac

SEQ ID NO: 1149035 - RNA, 23 nt, Human
ucuggcaaaauugcuaacccaaa

SEQ ID NO: 1149036 - RNA, 24 nt, Human
ugaaggaauagaggaagaguagag

SEQ ID NO: 1149037 - RNA, 19 nt, Human
ugacuucaagggagucccc

SEQ ID NO: 1149038 - RNA, 23 nt, Human
ugagaagugaaggaauauuuggg

SEQ ID NO: 1149039 - RNA, 19 nt, Human
ugaguucaucugaauucug

SEQ ID NO: 1149040 - RNA, 21 nt, Human
uggcaaaauugcuaacccaaa

SEQ ID NO: 1149041 - RNA, 22 nt, Human
uggcugccgauggagcucguaa

SEQ ID NO: 1149042 - RNA, 18 nt, Human
uuaaaaagaaaugaaccc

SEQ ID NO: 1149043 - RNA, 21 nt, Human
uugaaccaguacuagcaauga

SEQ ID NO: 1149044 - RNA, 19 nt, Human
uuggaaauuguauguggua

SEQ ID NO: 1149045 - RNA, 20 nt, Human
uuuauaauuguaugcaugcu

SEQ ID NO: 1149046 - RNA, 21 nt, Human
aaaacaaaauacagcaaagag

SEQ ID NO: 1149047 - RNA, 22 nt, Human
aaaauaaacguacaccuagucc

SEQ ID NO: 1149048 - RNA, 19 nt, Human
aaacaaaauacagcaaaga

SEQ ID NO: 1149049 - RNA, 22 nt, Human
aaaccuagcaauggauuuggug

SEQ ID NO: 1149050 - RNA, 19 nt, Human
aaagagccauugccaauga

SEQ ID NO: 1149051 - RNA, 19 nt, Human
aacuacauaaccuaauacc

SEQ ID NO: 1149052 - RNA, 25 nt, Human
aagcaaugcagcaacaggaaaagau

SEQ ID NO: 1149053 - RNA, 21 nt, Human
aagcccgccuaccugcguagc

SEQ ID NO: 1149054 - RNA, 19 nt, Human
aagcuuccuccgagcugaa

SEQ ID NO: 1149055 - RNA, 21 nt, Human
acuuccccaguuaaagacacc

SEQ ID NO: 1149056 - RNA, 19 nt, Human
agaugagcaaugaaguuag

SEQ ID NO: 1149057 - RNA, 20 nt, Human
agcaaaugaauggcaggugc

SEQ ID NO: 1149058 - RNA, 24 nt, Human
agcaccuauuacucagaaagcaac

SEQ ID NO: 1149059 - RNA, 22 nt, Human
aggacccagcaacaaggaaaca

SEQ ID NO: 1149060 - RNA, 21 nt, Human
auauucauacacacauagcuu

SEQ ID NO: 1149061 - RNA, 21 nt, Human
caaaacaaaauacagcaaaga

SEQ ID NO: 1149062 - RNA, 21 nt, Human
caaggaaacacuaagcaaugc

SEQ ID NO: 1149063 - RNA, 21 nt, Human
cacgccacaaaaauuagcaaa

SEQ ID NO: 1149064 - RNA, 23 nt, Human
cacuaacucuuguuggguaacau

SEQ ID NO: 1149065 - RNA, 20 nt, Human
cacuuaacacuaacucuugu

SEQ ID NO: 1149066 - RNA, 21 nt, Human
ccacgccacaaaaauuagcaa

SEQ ID NO: 1149067 - RNA, 19 nt, Human
cccagaugagcaaugaagu

SEQ ID NO: 1149068 - RNA, 18 nt, Human
cccagcaacaaggaaaca

SEQ ID NO: 1149069 - RNA, 20 nt, Human
ccuaugaagccaggaguaag

SEQ ID NO: 1149070 - RNA, 20 nt, Human
ccuccaagcuuccuccgagc

SEQ ID NO: 1149071 - RNA, 21 nt, Human
ccugcguagcaccuauuacuc

SEQ ID NO: 1149072 - RNA, 22 nt, Human
cuaguaggagcagcucuaauuc

SEQ ID NO: 1149073 - RNA, 22 nt, Human
cucaaauuaauaaaaaagaauc

SEQ ID NO: 1149074 - RNA, 21 nt, Human
cuuccccaguuaaagacaccu

SEQ ID NO: 1149075 - RNA, 20 nt, Human
gaccacuguggucugauuua

SEQ ID NO: 1149076 - RNA, 21 nt, Human
gagaggccuuguagauagccc

SEQ ID NO: 1149077 - RNA, 19 nt, Human
gagcugaaagagccauugc

SEQ ID NO: 1149078 - RNA, 22 nt, Human
gcagcaacaggaaaagauacca

SEQ ID NO: 1149079 - RNA, 18 nt, Human
guuggguaacauuaaaca

SEQ ID NO: 1149080 - RNA, 26 nt, Human
uaaaaaagaaucuccacgccacaaaa

SEQ ID NO: 1149081 - RNA, 19 nt, Human
uaaaacguaacaucgcaca

SEQ ID NO: 1149082 - RNA, 23 nt, Human
uaacaaaaaguuacacugacauu

SEQ ID NO: 1149083 - RNA, 18 nt, Human
uaacaugaaucuugcuga

SEQ ID NO: 1149084 - RNA, 20 nt, Human
uaaccuaauaccaucaaaaa

SEQ ID NO: 1149085 - RNA, 23 nt, Human
uaagacggauaacaugaaucuug

SEQ ID NO: 1149086 - RNA, 26 nt, Human
uaauaaaaaagaaucuccacgccaca

SEQ ID NO: 1149087 - RNA, 21 nt, Human
uacaauguuguuugugaaaug

SEQ ID NO: 1149088 - RNA, 19 nt, Human
uacacacauagcuuaaagc

SEQ ID NO: 1149089 - RNA, 27 nt, Human
uacacacauagcuuaaagcuuguguag

SEQ ID NO: 1149090 - RNA, 21 nt, Human
uaccaaguaaucugaguuucc

SEQ ID NO: 1149091 - RNA, 19 nt, Human
uacuagagaguaggaccca

SEQ ID NO: 1149092 - RNA, 21 nt, Human
uagcaaaugaauggcaggugc

SEQ ID NO: 1149093 - RNA, 19 nt, Human
uaggagcagcucuaauuca

SEQ ID NO: 1149094 - RNA, 24 nt, Human
ucaaauuaauaaaaaagaaucucc

SEQ ID NO: 1149095 - RNA, 18 nt, Human
uccauuuuuacaauugau

SEQ ID NO: 1149096 - RNA, 21 nt, Human
ucuauuguagaauauagaaau

SEQ ID NO: 1149097 - RNA, 24 nt, Human
ugaaucuugcugaaaagggaccag

SEQ ID NO: 1149098 - RNA, 19 nt, Human
ugcaaaacaaaauacagca

SEQ ID NO: 1149099 - RNA, 21 nt, Human
ugcagcaacaggaaaagauac

SEQ ID NO: 1149100 - RNA, 24 nt, Human
ugccaguguaacaaaaaguuacac

SEQ ID NO: 1149101 - RNA, 22 nt, Human
ugcuaccuguguccuaugaagc

SEQ ID NO: 1149102 - RNA, 22 nt, Human
ugggaacuugaucaucacuuaa

SEQ ID NO: 1149103 - RNA, 18 nt, Human
uggggaccacuguggucu

SEQ ID NO: 1149104 - RNA, 18 nt, Human
ugguguacuucacagcag

SEQ ID NO: 1149105 - RNA, 20 nt, Human
uguacugcucaguuaucuag

SEQ ID NO: 1149106 - RNA, 21 nt, Human
ugucaugaagaagugaugagu

SEQ ID NO: 1149107 - RNA, 21 nt, Human
uguccuaugaagccaggaguu

SEQ ID NO: 1149108 - RNA, 18 nt, Human
uguuugugguacuucccc

SEQ ID NO: 1149109 - RNA, 19 nt, Human
uuggggaccacuguggucu

SEQ ID NO: 1149110 - RNA, 24 nt, Human
uuguguauuuuacauauacacaaa

SEQ ID NO: 1149111 - RNA, 24 nt, Human
uuuguuuuguaaccaacaugauuu

SEQ ID NO: 1149112 - RNA, 18 nt, Human
aaacaaguuacacguccc

SEQ ID NO: 1149113 - RNA, 21 nt, Human
aaacuauagcuacagugaagc

SEQ ID NO: 1149114 - RNA, 20 nt, Human
aaagaaggaaugugaaaagg

SEQ ID NO: 1149115 - RNA, 19 nt, Human
aaagggagaaaaauagggc

SEQ ID NO: 1149116 - RNA, 19 nt, Human
aagagcugcugguuuuuaa

SEQ ID NO: 1149117 - RNA, 24 nt, Human
aagaucacuuuagcucaagaauuu

SEQ ID NO: 1149118 - RNA, 19 nt, Human
aagcagcccuacagaugga

SEQ ID NO: 1149119 - RNA, 24 nt, Human
aaggagcccagucaggagacaggu

SEQ ID NO: 1149120 - RNA, 20 nt, Human
aaguuggcaggaacugggag

SEQ ID NO: 1149121 - RNA, 23 nt, Human
aaucucagccaaaauagaccuaa

SEQ ID NO: 1149122 - RNA, 22 nt, Human
aauguucuggcuuggcuauguu

SEQ ID NO: 1149123 - RNA, 22 nt, Human
acaaaagcacaggaaacaccag

SEQ ID NO: 1149124 - RNA, 23 nt, Human
acacacauacacacacacacaca

SEQ ID NO: 1149125 - RNA, 19 nt, Human
acagguuagaagagucuuu

SEQ ID NO: 1149126 - RNA, 21 nt, Human
acauacacacacacacacaua

SEQ ID NO: 1149127 - RNA, 23 nt, Human
acauacacacacacacacauacu

SEQ ID NO: 1149128 - RNA, 20 nt, Human
accagugcucagguuuugcu

SEQ ID NO: 1149129 - RNA, 18 nt, Human
acuuggugccauccugug

SEQ ID NO: 1149130 - RNA, 22 nt, Human
agacucagaaagcaguagggug

SEQ ID NO: 1149131 - RNA, 23 nt, Human
agcagggaaaccgguagcucccc

SEQ ID NO: 1149132 - RNA, 21 nt, Human
agcaguaggguguucucccaa

SEQ ID NO: 1149133 - RNA, 19 nt, Human
agggaggaaggugagggcc

SEQ ID NO: 1149134 - RNA, 21 nt, Human
aggggacaaugagucauguuu

SEQ ID NO: 1149135 - RNA, 22 nt, Human
agugguuacagguuuggggaaa

SEQ ID NO: 1149136 - RNA, 19 nt, Human
auacucucucucucucucu

SEQ ID NO: 1149137 - RNA, 24 nt, Human
aucuagugacuugagggcaaacau

SEQ ID NO: 1149138 - RNA, 19 nt, Human
caaauugcaaacacucuaa

SEQ ID NO: 1149139 - RNA, 25 nt, Human
caaccacuucgaacaaauugcaaac

SEQ ID NO: 1149140 - RNA, 23 nt, Human
cacaaaguccaguaaauaacacu

SEQ ID NO: 1149141 - RNA, 20 nt, Human
cacacacauacacacacaca

SEQ ID NO: 1149142 - RNA, 22 nt, Human
cacacacauacacacacacaca

SEQ ID NO: 1149143 - RNA, 19 nt, Human
cacacauucagaccaaacu

SEQ ID NO: 1149144 - RNA, 19 nt, Human
caccagaaaaagugauggu

SEQ ID NO: 1149145 - RNA, 19 nt, Human
caccucacgugagcagggc

SEQ ID NO: 1149146 - RNA, 25 nt, Human
cagcagggaaaccgguagcuccccu

SEQ ID NO: 1149147 - RNA, 21 nt, Human
cagccaaaauagaccuaaauu

SEQ ID NO: 1149148 - RNA, 21 nt, Human
cagcuccucgcuguccccgag

SEQ ID NO: 1149149 - RNA, 21 nt, Human
caggagaacacuuucugaagg

SEQ ID NO: 1149150 - RNA, 25 nt, Human
caguaggcccucuuucccaacuaca

SEQ ID NO: 1149151 - RNA, 18 nt, Human
caguugcauccuucuugg

SEQ ID NO: 1149152 - RNA, 22 nt, Human
cauacacacacacacacauacu

SEQ ID NO: 1149153 - RNA, 22 nt, Human
ccaauuggaggccuuggcccug

SEQ ID NO: 1149154 - RNA, 23 nt, Human
ccaguaggcccucuuucccaacu

SEQ ID NO: 1149155 - RNA, 22 nt, Human
cccaggcacauuacugauuaua

SEQ ID NO: 1149156 - RNA, 22 nt, Human
ccccaguaggcccucuuuccca

SEQ ID NO: 1149157 - RNA, 22 nt, Human
ccuacagauggaacaggagaac

SEQ ID NO: 1149158 - RNA, 24 nt, Human
ccucaaguggccuaggcuuaaucc

SEQ ID NO: 1149159 - RNA, 21 nt, Human
ccuccacccccauaugccaaa

SEQ ID NO: 1149160 - RNA, 18 nt, Human
cuagugacuugagggcaa

SEQ ID NO: 1149161 - RNA, 22 nt, Human
cuccugcaaaaagggagaaaaa

SEQ ID NO: 1149162 - RNA, 19 nt, Human
cucuaaaagccuguucccc

SEQ ID NO: 1149163 - RNA, 18 nt, Human
cucucucucucucauuca

SEQ ID NO: 1149164 - RNA, 22 nt, Human
cucucucucucucucucauuca

SEQ ID NO: 1149165 - RNA, 22 nt, Human
cucucucucucucucucucuca

SEQ ID NO: 1149166 - RNA, 18 nt, Human
cugaaaccagauaucucc

SEQ ID NO: 1149167 - RNA, 21 nt, Human
cugaaaccagauaucuccaug

SEQ ID NO: 1149168 - RNA, 19 nt, Human
cuggacuuggcauuuccca

SEQ ID NO: 1149169 - RNA, 20 nt, Human
cuggcaaucauauguguucg

SEQ ID NO: 1149170 - RNA, 19 nt, Human
cuuaaaauaucuagugacu

SEQ ID NO: 1149171 - RNA, 24 nt, Human
cuuggcccugcccugaccugacuu

SEQ ID NO: 1149172 - RNA, 19 nt, Human
cuuguauuucauccacuga

SEQ ID NO: 1149173 - RNA, 22 nt, Human
gaaugugggagggaggaaggug

SEQ ID NO: 1149174 - RNA, 24 nt, Human
gacccagcagucagaucugcagcc

SEQ ID NO: 1149175 - RNA, 19 nt, Human
gagggaggaaggugagggc

SEQ ID NO: 1149176 - RNA, 19 nt, Human
gaucacuuuagcucaagaa

SEQ ID NO: 1149177 - RNA, 18 nt, Human
gcacugagucuggacuug

SEQ ID NO: 1149178 - RNA, 23 nt, Human
gccauugauuguagguuucagag

SEQ ID NO: 1149179 - RNA, 19 nt, Human
gcuacaauguuccuccaaa

SEQ ID NO: 1149180 - RNA, 20 nt, Human
ggaggcuguguuucucuccc

SEQ ID NO: 1149181 - RNA, 24 nt, Human
gggcacugccuccugugagaccuc

SEQ ID NO: 1149182 - RNA, 23 nt, Human
gguagcuccccugcacuccaccu

SEQ ID NO: 1149183 - RNA, 21 nt, Human
guagcuccccugcacuccacc

SEQ ID NO: 1149184 - RNA, 21 nt, Human
gucagaucugcagccaagugg

SEQ ID NO: 1149185 - RNA, 19 nt, Human
guggaaaacuauagcuaca

SEQ ID NO: 1149186 - RNA, 23 nt, Human
uaaagaauucauccuccaccccc

SEQ ID NO: 1149187 - RNA, 18 nt, Human
uaaauccugugagucaga

SEQ ID NO: 1149188 - RNA, 19 nt, Human
uaaauccugugagucagag

SEQ ID NO: 1149189 - RNA, 23 nt, Human
uaauugcacuaagaccagucuuu

SEQ ID NO: 1149190 - RNA, 24 nt, Human
uacagacacacauucagaccaaac

SEQ ID NO: 1149191 - RNA, 24 nt, Human
uacucucucucucucucucucuca

SEQ ID NO: 1149192 - RNA, 25 nt, Human
uacugcuuggcacugagucuggacu

SEQ ID NO: 1149193 - RNA, 19 nt, Human
uagaaaauuacugcaaagc

SEQ ID NO: 1149194 - RNA, 24 nt, Human
uagaagagucuuugggguugguuc

SEQ ID NO: 1149195 - RNA, 21 nt, Human
uagagguugggguuucagcuu

SEQ ID NO: 1149196 - RNA, 22 nt, Human
uagcaguugcauccuucuuggu

SEQ ID NO: 1149197 - RNA, 24 nt, Human
uagccaagcuugucuuuaaaaguc

SEQ ID NO: 1149198 - RNA, 25 nt, Human
uauauaacaacuuccaaaauguuuu

SEQ ID NO: 1149199 - RNA, 22 nt, Human
uaucacaaaguccaguaaauaa

SEQ ID NO: 1149200 - RNA, 20 nt, Human
ucaacagggccauaguaaag

SEQ ID NO: 1149201 - RNA, 22 nt, Human
ucaagcaaggaaagaaaacugu

SEQ ID NO: 1149202 - RNA, 21 nt, Human
ucacuuccaucuaauaccugc

SEQ ID NO: 1149203 - RNA, 25 nt, Human
ucagaaaacauugugaucuacuuag

SEQ ID NO: 1149204 - RNA, 24 nt, Human
ucagaaccccuacuaugcucuuaa

SEQ ID NO: 1149205 - RNA, 23 nt, Human
ucaggauuagcaacuauuuuauu

SEQ ID NO: 1149206 - RNA, 19 nt, Human
ucagguuuugcugucuucc

SEQ ID NO: 1149207 - RNA, 21 nt, Human
uccacgggugacagucggucu

SEQ ID NO: 1149208 - RNA, 22 nt, Human
ucuucuaaauacucuaaaagcc

SEQ ID NO: 1149209 - RNA, 23 nt, Human
ucuuuagaucucucgacccuccu

SEQ ID NO: 1149210 - RNA, 25 nt, Human
ucuuucaucucucuacuccugcaaa

SEQ ID NO: 1149211 - RNA, 24 nt, Human
ucuuucccaacuacauuuuagccc

SEQ ID NO: 1149212 - RNA, 25 nt, Human
ugaaaaggcuuaaagcauuucaaau

SEQ ID NO: 1149213 - RNA, 20 nt, Human
ugaaaugcuacaauguuccu

SEQ ID NO: 1149214 - RNA, 21 nt, Human
ugaaaugcuacaauguuccuc

SEQ ID NO: 1149215 - RNA, 19 nt, Human
ugacccagcagucagaucu

SEQ ID NO: 1149216 - RNA, 21 nt, Human
ugaccugacuuuagcuaauga

SEQ ID NO: 1149217 - RNA, 26 nt, Human
ugagauccucaaccacuuuccacagg

SEQ ID NO: 1149218 - RNA, 21 nt, Human
ugcucagguuuugcugucuuc

SEQ ID NO: 1149219 - RNA, 19 nt, Human
uggaucaucuuaaaaaguc

SEQ ID NO: 1149220 - RNA, 23 nt, Human
uggauucuggggaggcuguguuu

SEQ ID NO: 1149221 - RNA, 23 nt, Human
uggcaggaacugggagugcugag

SEQ ID NO: 1149222 - RNA, 24 nt, Human
uggcaggaacugggagugcugaga

SEQ ID NO: 1149223 - RNA, 23 nt, Human
ugggagcuauuuccugcucccag

SEQ ID NO: 1149224 - RNA, 18 nt, Human
ugggagggaggaagguga

SEQ ID NO: 1149225 - RNA, 23 nt, Human
ugggcacucuuccuguaaaggcc

SEQ ID NO: 1149226 - RNA, 18 nt, Human
ugguaacaauugaagggu

SEQ ID NO: 1149227 - RNA, 20 nt, Human
ugguuaaaauauggaacaua

SEQ ID NO: 1149228 - RNA, 21 nt, Human
ugugaaaaggcuuaaagcauu

SEQ ID NO: 1149229 - RNA, 22 nt, Human
uguggaagucucaauucuccug

SEQ ID NO: 1149230 - RNA, 24 nt, Human
ugugguacaaauggaucaucuuaa

SEQ ID NO: 1149231 - RNA, 19 nt, Human
uucccaaggccauaaauaa

SEQ ID NO: 1149232 - RNA, 31 nt, Human
uucgaacacacacauacacacacacacacag

SEQ ID NO: 1149233 - RNA, 21 nt, Human
uugcucguagacucagaaagc

SEQ ID NO: 1149234 - RNA, 23 nt, Human
uuggaaucacaaaagcacaggaa

SEQ ID NO: 1149235 - RNA, 21 nt, Human
uuuccauagaaaauuacugca

SEQ ID NO: 1149236 - RNA, 21 nt, Human
uuuuguuuuagguuccaguag

SEQ ID NO: 1149237 - RNA, 23 nt, Human
aaacuccccccaucccugcagcc

SEQ ID NO: 1149238 - RNA, 18 nt, Human
aaaggcauccuacccaga

SEQ ID NO: 1149239 - RNA, 24 nt, Human
aaagggcugggauuacaggcauga

SEQ ID NO: 1149240 - RNA, 24 nt, Human
aaagugcugggauuacagguguga

SEQ ID NO: 1149241 - RNA, 20 nt, Human
aacaaaacguacccccaccc

SEQ ID NO: 1149242 - RNA, 22 nt, Human
aaccucaucgcuccagccucuc

SEQ ID NO: 1149243 - RNA, 23 nt, Human
aagaaaugcaauugucuuaagac

SEQ ID NO: 1149244 - RNA, 18 nt, Human
aagaacauacaagaugaa

SEQ ID NO: 1149245 - RNA, 24 nt, Human
aagacacacuucaugcuccaauug

SEQ ID NO: 1149246 - RNA, 22 nt, Human
aagaggaagguuuagaacaaaa

SEQ ID NO: 1149247 - RNA, 20 nt, Human
aaggcucuacagccuaaggg

SEQ ID NO: 1149248 - RNA, 19 nt, Human
aaguagcugggacuacagg

SEQ ID NO: 1149249 - RNA, 20 nt, Human
aaguagcugggacuacaggc

SEQ ID NO: 1149250 - RNA, 27 nt, Human
aaguagcugggacuacaggcgccagcc

SEQ ID NO: 1149251 - RNA, 18 nt, Human
aagugcugggauuacagg

SEQ ID NO: 1149252 - RNA, 19 nt, Human
aagugcugggauuacaggu

SEQ ID NO: 1149253 - RNA, 23 nt, Human
aaucaugccagccgggcaucuga

SEQ ID NO: 1149254 - RNA, 22 nt, Human
aaugcauaccauucacaaauaa

SEQ ID NO: 1149255 - RNA, 21 nt, Human
acaauuuuuggagcauccaga

SEQ ID NO: 1149256 - RNA, 22 nt, Human
acacaggaggggccccccaggg

SEQ ID NO: 1149257 - RNA, 27 nt, Human
acaccaagaacauacaagaugaagagc

SEQ ID NO: 1149258 - RNA, 23 nt, Human
acaccaagccacacuaaaaaggc

SEQ ID NO: 1149259 - RNA, 18 nt, Human
acagaaggcaaaucccug

SEQ ID NO: 1149260 - RNA, 22 nt, Human
acagccacuuccagccuguguc

SEQ ID NO: 1149261 - RNA, 18 nt, Human
acaggguuucaccguguu

SEQ ID NO: 1149262 - RNA, 19 nt, Human
acaggguuucaccguguua

SEQ ID NO: 1149263 - RNA, 20 nt, Human
acaggguuucaccguguuag

SEQ ID NO: 1149264 - RNA, 24 nt, Human
acaggguuucaccguguuagccag

SEQ ID NO: 1149265 - RNA, 21 nt, Human
accacagccacuuccagccug

SEQ ID NO: 1149266 - RNA, 24 nt, Human
accauguuggcaaggcuggucuug

SEQ ID NO: 1149267 - RNA, 19 nt, Human
acccaggcuggagugcagu

SEQ ID NO: 1149268 - RNA, 21 nt, Human
acgcagccacaguccacaggc

SEQ ID NO: 1149269 - RNA, 18 nt, Human
acugcaagcuccgccucc

SEQ ID NO: 1149270 - RNA, 21 nt, Human
acugcacccagccuacacugg

SEQ ID NO: 1149271 - RNA, 26 nt, Human
agaaaggauacacagcgauguaagga

SEQ ID NO: 1149272 - RNA, 22 nt, Human
agaagacuccggcugugaggau

SEQ ID NO: 1149273 - RNA, 19 nt, Human
agaaggcaaaucccugagc

SEQ ID NO: 1149274 - RNA, 23 nt, Human
agacagccuggcuucuuuuccuu

SEQ ID NO: 1149275 - RNA, 18 nt, Human
agacaggguuucaccgug

SEQ ID NO: 1149276 - RNA, 19 nt, Human
agagacaggguuucaccgu

SEQ ID NO: 1149277 - RNA, 19 nt, Human
agagggcagugggggaaag

SEQ ID NO: 1149278 - RNA, 19 nt, Human
agcagggaggcagagccca

SEQ ID NO: 1149279 - RNA, 22 nt, Human
agcccagcagagcccuggaggc

SEQ ID NO: 1149280 - RNA, 21 nt, Human
agccuggggaggugggguggg

SEQ ID NO: 1149281 - RNA, 21 nt, Human
agccuggugguggcaccaacc

SEQ ID NO: 1149282 - RNA, 22 nt, Human
agccuguguccuuugccacaac

SEQ ID NO: 1149283 - RNA, 23 nt, Human
agcgguucuccugcucagccucc

SEQ ID NO: 1149284 - RNA, 18 nt, Human
agcucagggaccuagcaa

SEQ ID NO: 1149285 - RNA, 21 nt, Human
agcugggggcggagucagagg

SEQ ID NO: 1149286 - RNA, 18 nt, Human
aggaagaaaggggagccg

SEQ ID NO: 1149287 - RNA, 22 nt, Human
aggcagagcccagcagagcccu

SEQ ID NO: 1149288 - RNA, 19 nt, Human
aggcagagcuuccugccuc

SEQ ID NO: 1149289 - RNA, 19 nt, Human
aggcaggagaagcagcaag

SEQ ID NO: 1149290 - RNA, 21 nt, Human
aggcaggagaagcagcaaggu

SEQ ID NO: 1149291 - RNA, 25 nt, Human
aggcuggagugcaguggcacgaucu

SEQ ID NO: 1149292 - RNA, 25 nt, Human
aggcuggagugcaguggcgcgaucu

SEQ ID NO: 1149293 - RNA, 24 nt, Human
agggcugggauuacaggcaugagc

SEQ ID NO: 1149294 - RNA, 19 nt, Human
aggggcuggcggcaggagg

SEQ ID NO: 1149295 - RNA, 23 nt, Human
aguagcugagacuacaugugugc

SEQ ID NO: 1149296 - RNA, 20 nt, Human
agugcaguggcacgaucucg

SEQ ID NO: 1149297 - RNA, 23 nt, Human
agugcaguggcacgaucucggcu

SEQ ID NO: 1149298 - RNA, 24 nt, Human
agugcaguggcacgaucucggcuc

SEQ ID NO: 1149299 - RNA, 19 nt, Human
agugcaguggcgcgaucuc

SEQ ID NO: 1149300 - RNA, 21 nt, Human
agugcaguggcgcgaucucag

SEQ ID NO: 1149301 - RNA, 21 nt, Human
agugggaccccucacccuccc

SEQ ID NO: 1149302 - RNA, 22 nt, Human
augggguuucaccauguuggca

SEQ ID NO: 1149303 - RNA, 23 nt, Human
augggguuucaccauguuggcaa

SEQ ID NO: 1149304 - RNA, 24 nt, Human
augggguuucaccauguuggcaag

SEQ ID NO: 1149305 - RNA, 20 nt, Human
caaaacgcagcugucggggc

SEQ ID NO: 1149306 - RNA, 22 nt, Human
caaacuccccccaucccugcag

SEQ ID NO: 1149307 - RNA, 24 nt, Human
caaagggcugggauuacaggcaug

SEQ ID NO: 1149308 - RNA, 24 nt, Human
caaagugcugggauuacaggugug

SEQ ID NO: 1149309 - RNA, 22 nt, Human
caacacacaggaggggcccccc

SEQ ID NO: 1149310 - RNA, 23 nt, Human
caaccuccaccucccggguucca

SEQ ID NO: 1149311 - RNA, 20 nt, Human
cacacccagccaucucccuu

SEQ ID NO: 1149312 - RNA, 21 nt, Human
cacacccagccaucucccuuc

SEQ ID NO: 1149313 - RNA, 21 nt, Human
cacaguccacaggccaggccu

SEQ ID NO: 1149314 - RNA, 22 nt, Human
cacaguccacaggccaggccug

SEQ ID NO: 1149315 - RNA, 18 nt, Human
cacagugcaauacccacg

SEQ ID NO: 1149316 - RNA, 21 nt, Human
cacaucugcccuccacucuga

SEQ ID NO: 1149317 - RNA, 28 nt, Human
cacauguccacacggcugccccaaaacg

SEQ ID NO: 1149318 - RNA, 22 nt, Human
caccacagccacuuccagccug

SEQ ID NO: 1149319 - RNA, 23 nt, Human
caccauguuggcaaggcuggucu

SEQ ID NO: 1149320 - RNA, 24 nt, Human
caccauguuggcaaggcuggucuu

SEQ ID NO: 1149321 - RNA, 28 nt, Human
cacccagccuacacugguuaauuuuugu

SEQ ID NO: 1149322 - RNA, 20 nt, Human
caccccccaccccgcccacc

SEQ ID NO: 1149323 - RNA, 22 nt, Human
caccgugcccagcagggucccc

SEQ ID NO: 1149324 - RNA, 18 nt, Human
caccguguuagccaggau

SEQ ID NO: 1149325 - RNA, 23 nt, Human
caccguguuagccaggauggucu

SEQ ID NO: 1149326 - RNA, 24 nt, Human
caccguguuagccaggauggucuu

SEQ ID NO: 1149327 - RNA, 22 nt, Human
caccugaacagucaccacagcc

SEQ ID NO: 1149328 - RNA, 23 nt, Human
caccugaggucuccucuuucucc

SEQ ID NO: 1149329 - RNA, 23 nt, Human
cacgagggccucccacaggccug

SEQ ID NO: 1149330 - RNA, 21 nt, Human
cacugcaaccuccaccucccg

SEQ ID NO: 1149331 - RNA, 23 nt, Human
cacugcaaccuccaccucccggg

SEQ ID NO: 1149332 - RNA, 18 nt, Human
cacugcacccagccuaca

SEQ ID NO: 1149333 - RNA, 21 nt, Human
cacugguaccgcagaaacacc

SEQ ID NO: 1149334 - RNA, 21 nt, Human
cagaccacucaggucaggaag

SEQ ID NO: 1149335 - RNA, 21 nt, Human
cagaccccacugggugauggc

SEQ ID NO: 1149336 - RNA, 20 nt, Human
cagagagcagggaggcagag

SEQ ID NO: 1149337 - RNA, 20 nt, Human
cagagcuuccugccuccccc

SEQ ID NO: 1149338 - RNA, 23 nt, Human
cagccacaguccacaggccaggc

SEQ ID NO: 1149339 - RNA, 20 nt, Human
cagccccauuuguuuccauu

SEQ ID NO: 1149340 - RNA, 20 nt, Human
cagcccccucuguuccccug

SEQ ID NO: 1149341 - RNA, 20 nt, Human
cagccuccugagcagccccc

SEQ ID NO: 1149342 - RNA, 24 nt, Human
cagcgguucuccugcucagccucc

SEQ ID NO: 1149343 - RNA, 24 nt, Human
cagcugccugcaggcccuccgggu

SEQ ID NO: 1149344 - RNA, 21 nt, Human
cagcuucagcuuccccagcuc

SEQ ID NO: 1149345 - RNA, 24 nt, Human
caggguuucaccguguuagccagg

SEQ ID NO: 1149346 - RNA, 22 nt, Human
cauagacaccaagaacauacaa

SEQ ID NO: 1149347 - RNA, 21 nt, Human
cauccagaacuuacugggcac

SEQ ID NO: 1149348 - RNA, 19 nt, Human
caugagccaccaugccugu

SEQ ID NO: 1149349 - RNA, 24 nt, Human
caugagccaccaugccugucccuu

SEQ ID NO: 1149350 - RNA, 19 nt, Human
caugccagccgggcaucug

SEQ ID NO: 1149351 - RNA, 25 nt, Human
caugcccuuguccccucucccaccu

SEQ ID NO: 1149352 - RNA, 24 nt, Human
cauguccacacggcugccccaaaa

SEQ ID NO: 1149353 - RNA, 24 nt, Human
cauguuggcaaggcuggucuugaa

SEQ ID NO: 1149354 - RNA, 21 nt, Human
ccaaagccugagugggacccc

SEQ ID NO: 1149355 - RNA, 23 nt, Human
ccaaaggcauccuacccagaggc

SEQ ID NO: 1149356 - RNA, 19 nt, Human
ccaaagggcugggauuaca

SEQ ID NO: 1149357 - RNA, 23 nt, Human
ccaaagggcugggauuacaggca

SEQ ID NO: 1149358 - RNA, 24 nt, Human
ccaaagggcugggauuacaggcau
